(19) United States
(12) Patent Application Publication
(10) Pub. No.: US 2020/0002709 A1
(43) Pub. Date: Jan. 2, 2020

(54) METHODS FOR ALTERING AMINO ACID CONTENT IN PLANTS

(71) Applicant: CELLECTIS, Paris (FR)

(72) Inventors: Song Luo, Chicago, IL (US); Benjamin Clasen, South St. Paul, MN (US); Feng Zhang, Maple Gove, MN (US); Nicholas J. Baltes, Maple Grove, MN (US); Javier Gil Humanes, Circle Pines, MN (US)

(21) Appl. No.: 16/328,323

(22) PCT Filed: Aug. 30, 2017
(86) PCT No.: PCT/IB2017/055216

§ 371 Date: Feb. 26, 2019

Related U.S. Application Data
(60) Provisional application No. 62/382,352, filed on Sep. 1, 2016.
(60) Provisional application No. 62/486,794, filed on Apr. 18, 2017.

(51) Int. Cl. C12N 15/82

(52) U.S. Cl. CPC C12N 15/8213; C12N 15/8254; C12N 15/8253

(57) ABSTRACT

Materials and methods are provided for making plants (e.g., soybean varieties, wheat varieties, or corn varieties) with altered amino acid content. For example, materials and methods are provided for making TALE nuclease-induced mutations in genes encoding seed storage proteins, or by making TALE nuclease-induced deletions of within seed storage protein genes.

### CROSS-REFERENCE TO RELATED APPLICATIONS

[0001] This application claims benefit of priority from U.S. Provisional Application Ser. No. 62/382,352, filed on Sep. 1, 2016, and U.S. Provisional Application Ser. No. 62/486,794, filed on Apr. 18, 2017, which are incorporated herein by reference in their entirety.

### TECHNICAL FIELD

[0002] This document provides materials and methods for generating plants, plant parts, and plant cells with altered levels of particular amino acids, including by through reducing the levels of certain seed storage proteins.

### BACKGROUND

[0003] Humans and some other animals (e.g., farm animals) are unable to synthesize several amino acids that are required for survival, including histidine, isoleucine, leucine, methionine, phenylalanine, threonine, tryptophan, valine, and lysine. As a result, the diet of humans and farm animals must contain sufficient levels of these essential amino acids. In developed countries, optimal levels of essential amino acids are generally achieved through diets consisting of meat, eggs, milk, cereals, and legumes. In developing countries, however, diets are frequently restricted to major crop plants, which can result in a deficiency of particular amino acids. For example, soybean (Glycine max L. Merr.) is an important source of protein for livestock, and is of growing importance as a protein source for human consumption. Although soybean has the highest protein content among seed crops, the protein quality tends to be poor due to a deficiency in the sulfur-containing amino acids, methionine and cysteine. Suboptimal levels of essential amino acids can lead to protein-energy malnutrition (PEM), which is characterized by increased susceptibility to disease, decreased levels of blood proteins, and impaired mental and physical development in children. It is estimated by the World Health Organization that 30% of the population in developing countries suffer from PEM (Onis et al., Bull World Health Organ., 71: 703-712, 1993). Among the essential amino acids, methionine, lysine, and tryptophan are of particular interest, as lysine and tryptophan are the most limiting amino acids in cereals, while methionine is most limiting in legumes.

### SUMMARY

[0004] Increasing the amount of limiting amino acids (e.g., methionine, lysine, and tryptophan, and/or cysteine) in plants such as legumes and cereal grains may result in enhanced value for producers and consumers. The materials and methods described herein can be used to generate plants having amino acid profiles with increased amounts of limiting amino acids, particularly through decreasing the levels of proteins with undesired amino acid content.

[0005] This document is based, at least in part, on the discovery plant soybean varieties having altered content of one or more particular amino acids can be obtained by using sequence-specific nucleases to cleave DNA sequences within or near loci encoding particular polypeptides. For example, this document is based, at least in part, on the discovery that soybean varieties having increased sulfur-containing amino acid content can be obtained by using sequence-specific nucleases to cleave DNA sequences within or near loci containing coding sequences for glycinin and/or conglycinin, which are the major seed storage proteins in soybean. Thus, this document provides methods for using sequence-specific nucleases to generate soybean varieties with reduced copy numbers of functional low level sulfur-containing globulin genes, reduced expression of low level sulfur-containing globulin genes, and/or reduced levels of low level sulfur-containing globulin proteins, including Gy4 and Gy5 glycinin, and β-subunit conglycinin. For example, delivery of sequence-specific nucleases can result in targeted knockout or targeted deletion of low sulfur-containing glycinin or conglycinin sequences, and subsequently can result in decreased levels of (a) mRNA encoding low sulfur-containing glycinin/conglycinin, and (b) low sulfur-containing glycinin/conglycinin protein within soybean seeds. The seeds from the modified soybean varieties provided herein, as compared to seeds from non-modified soybean, can have reduced content of low-level sulfur-containing globulin proteins and, as a result of rebalancing, may have increased levels of high sulfur-containing proteins. Such seeds may be useful as a healthier protein source for human and animal consumption.

[0006] This document is also based, at least in part, on the development of soybean varieties with mutations within or near glycinin and conglycinin genes that are created using sequence-specific nucleases. The resulting improved sulfur-containing globulin levels in these soybean varieties can be achieved without insertion of a transgene. There are several challenges for commercializing transgenic plants, including strict regulation in certain jurisdictions, which can result in high costs to obtain regulatory approval. The methods described herein can accelerate the production of new soybean varieties with improved sulfur-containing globulin content, and can be more cost-effective than transgenic or traditional breeding approaches.

[0007] In a first aspect, this document features a plant, plant part, or plant cell having a mutation in at least one seed storage protein gene that is endogenous to the plant, plant part, or plant cell, wherein the plant, plant part, or plant cell has altered amino acid content as compared to a control plant, plant part or plant cell that lacks the mutation. The mutation can have been introduced using a rare-cutting endonuclease [e.g., a transcription activator-like effector (TALE) nuclease, meganuclease, zinc finger nuclease (ZFN), or clustered regularly interspaced short palindromic repeat (CRISPR)/Cas reagent]. The at least one seed storage protein gene can be selected from the group consisting of a glycinin gene, a beta-conglycinin gene, a glutenin gene, a gliadin gene, a zein gene, a hordein gene, a secalin gene, and a prolamine gene. The mutation can be a deletion of one or more base pairs. The deletion can be at a target sequence as set forth in SEQ ID NO:1 or SEQ ID NO:2, or at a target sequence with at least 90% identity to the sequence set forth in SEQ ID NO:1 or SEQ ID NO:2. The deletion can be at a target sequence as set forth in SEQ ID NO:17 or SEQ ID NO:18, or at a target sequence with at least 90% identity to SEQ ID NO:17 or SEQ ID NO:18. The deletion can be at a target sequence as set forth in SEQ ID NO:9, SEQ ID NO:10, or SEQ ID NO:11, or at a target sequence with at least 90% identity to SEQ ID NO:9, SEQ ID NO:10, or SEQ ID NO:11. In some cases, the at least one seed storage protein gene can include a Gy4 gene, a Gy5 gene, or a beta-conglycinin gene. The mutation can be a deletion of one or more base pairs within a Gy4 gene that results in a sequence as set forth in any of SEQ ID NOS:6390-6396 and 6408-6422, or the mutation can be a deletion within a Gy5 gene that results in a sequence as set forth in any of SEQ ID NOS:6353-6366, 6379-6388, 6397-6400, and 6404-6406. The altered amino acid content can include an increase in methionine or cysteine content as compared to a corresponding control plant, plant part, or plant cell that lacks the mutation. In some cases, the at least one seed storage protein gene can include an alpha-gliadin gene, an omega-gliadin gene, or a gamma-gliadin gene. The mutation can be a deletion of one or more base pairs. The deletion can be at a target sequence as set forth in any of SEQ ID NOS:6367-6370, or at a target sequence with at least 90% identity to any of SEQ ID NOS:6367-6370. The altered amino acid content can include an increase in lysine content as compared to a corresponding control plant, plant part, or plant cell that lacks the mutation.

[0008] In another aspect, this document features a method for making a plant having altered amino acid content. The method can include (a) contacting plant cells or plant parts having functional seed storage protein genes with a rare-cutting endonuclease targeted to a sequence within one or more of the functional seed storage protein genes, or to a sequence flanking the functional seed storage protein genes; (b) growing the contacted plant cells or plant parts into plants; and (c) selecting, from the plants, a plant with a mutation in at least one seed storage protein gene. The rare-cutting endonuclease can be a TALE nuclease, meganuclease, ZFN, or CRISPR/Cas reagent. The at least one seed storage protein gene can be selected from the group consisting of a glycinin gene, a beta-conglycinin gene, a glutenin gene, a gliadin gene, a zein gene, a hordein gene, a secalin gene, and a prolamine gene. The mutation can be a deletion of one or more base pairs. The deletion can be at a target sequence as set forth in SEQ ID NO:1 or SEQ ID NO:2, or at a target sequence with at least 90% identity to the sequence set forth in SEQ ID NO:1 or SEQ ID NO:2. The deletion can be at a target sequence as set forth in SEQ ID NO:17 or SEQ ID NO:18, or at a target sequence with at least 90% identity to SEQ ID NO:17 or SEQ ID NO:18. The deletion can be at a target sequence as set forth in SEQ ID NO:9, SEQ ID NO:10, or SEQ ID NO:11, or at a target sequence with at least 90% identity to SEQ ID NO:9, SEQ ID NO:10, or SEQ ID NO:11. In some cases, the at least one seed storage protein gene can include a Gy4 gene, a Gy5 gene, or a beta-conglycinin gene. The mutation can be a deletion of one or more base pairs within a Gy4 gene that results in a sequence as set forth in any of SEQ ID NOS:6390-6396 and 6408-6422, or the mutation can be a deletion within a Gy5 gene that results in a sequence as set forth in any of SEQ ID NOS:6353-6366, 6379-6388, 6397-6400, and 6404-6406. The altered amino acid content can include an increase in methionine or cysteine content as compared to a corresponding control plant that lacks the mutation. In some cases, the at least one seed storage protein gene can include an alpha-gliadin gene, an omega-gliadin gene, or a gamma-gliadin gene. The mutation can be a deletion of one or more base pairs. The deletion can be at a target sequence as set forth in any of SEQ ID NOS:6367-6370, or at a target sequence with at least 90% identity to any of SEQ ID NOS:6367-6370. The altered amino acid content can include an increase in lysine content as compared to a corresponding control plant, plant part, or plant cell that lacks the mutation.

[0009] In another aspect, this document features a method for mutagenizing a cell. The method can include (a) treating the cell with an agent (e.g., a chemical) that reduces DNA methylation or interferes with histone deacetylase activity; and (b) contacting the cell with a rare-cutting endonuclease. The cell can be a plant cell. The agent can be 5-azacytidine or trichostatin A. The rare-cutting endonuclease can be a TALE nuclease, meganuclease, ZFN, or CRISPR/Cas reagent.

[0010] In another one aspect, this document features a plant, plant part, or plant cell having a mutation in at least one seed storage protein gene that is endogenous to the plant, plant part, or plant cell, where the plant, plant part, or plant cell has reduced content of the seed storage protein as compared to a control plant, plant part or plant cell that lacks the mutation. In some cases, the plant, plant part, or plant cell can be a soybean plant, plant part or plant cell. The seed storage protein gene can be selected from the group consisting of a Gy4 gene, a Gy5 gene, and a beta-conglycinin gene. The mutation can be at a target sequence as set forth in SEQ ID NO:1, SEQ ID NO:2, SEQ ID NO:3, or SEQ ID NO:4, or at a target sequence that, when translated, has at least 90 percent amino acid identity to the sequence set forth in SEQ ID NO:6, SEQ ID NO:7, SEQ ID NO:8, or SEQ ID NO:9. The mutation can have been introduced using a rare-cutting endonuclease (e.g., a transcription activator-like effector (TALE) nuclease, meganuclease, zinc finger nuclease (ZFN), or clustered regularly interspaced short palindromic repeat (CRISPR)/Cas reagent). The plant, plant part, or plant cell can have a sulfur-containing amino acid content that is at least 0.01% greater than a corresponding plant, plant part, or plant cell that lacks the mutation. The plant, plant part, or plant cell can be a Glycine max L. Merr. plant, plant part, or plant cell. In some cases, the plant, plant part, or plant cell can be a wheat plant, plant part or plant cell. The seed storage protein gene can be selected from the group consisting of an alpha-gliadin gene, and omega-gliadin gene, and a gamma-gliadin gene. The mutation can have been introduced using a rare-cutting endonuclease (e.g., a TALE nuclease, meganuclease, ZFN, or CRISPR/Cas reagent).

[0011] In another aspect, this document features a method for making a plant having a targeted mutation in at least one seed storage protein gene. The method can include (a) contacting plant cells or plant parts containing functional seed storage protein genes with a rare-cutting endonuclease targeted to a sequence within one or more of the functional seed storage protein genes, or to a sequence flanking the functional seed storage protein genes, (b) selecting from the plant cells or plant parts of step (a) a plant cell or plant part in which at least one functional seed storage protein gene has been inactivated, and (c) growing the selected plant cell or plant part into a plant, where the plant has reduced levels of the seed storage protein as compared to a control plant in which the seed storage protein gene was not inactivated. The plant cells or plant parts contacted in step (a) can be selected from the group consisting of immature embryos, leaf base explants, hypocotyl explants, embryogenic calli, embryos, scutella, embryonic cell suspension, callus, meristems, microspores, pollen, leaf tissue, seeds, protoplasts, and internode explants. In some cases, the plant, plant part, or plant cell can be a soybean plant, plant part or plant cell. The seed storage protein gene can be selected from the group consisting of a Gy4 gene, a Gy5 gene, and a beta-conglycinin gene. The mutation can be at a target sequence as set forth in SEQ ID NO:1, SEQ ID NO:2, SEQ ID NO:3, or SEQ ID NO:4, or at a target sequence that, when translated, has at least 90 percent amino acid identity to the sequence set forth in SEQ ID NO:6, SEQ ID NO:7, SEQ ID NO:8, or SEQ ID NO:9. The mutation can have been introduced using a rare-cutting endonuclease (e.g., a TALE nuclease, meganuclease, ZFN, or CRISPR/Cas reagent). The selected soybean plant, plant part, or plant cell can have a sulfur-containing amino acid content that is at least 0.01% greater than the sulfur-containing amino acid content of a corresponding soybean plant, plant part, or plant cell that lacks the mutation. The soybean plant, plant part, or plant cell can be a Glycine max L. Merr. plant, plant part, or plant cell. In some cases, the plant, plant part, or plant cell can be a wheat plant, plant part or plant cell. The seed storage protein gene can be selected from the group consisting of an alpha-gliadin gene, an omega-gliadin gene, and a gamma-gliadin gene. The mutation can have been introduced using a rare-cutting endonuclease (e.g., a TALE nuclease, meganuclease, ZFN, or CRISPR/Cas reagent).

[0012] In another aspect, this document features a soybean plant, plant part, or plant cell having a targeted mutation in at least one low sulfur-containing globulin gene that is endogenous to the plant, plant part, or plant cell, wherein the plant, plant part, or plant cell has reduced low sulfur-containing globulin content as compared to a control soybean plant, plant part, or plant cell that lacks the mutation. The mutation can be a deletion of one or more nucleotide base pairs, a substitution of one or more nucleotide base pairs, or an insertion of one or more nucleotide base pairs. The mutation can be a deletion of one or more low sulfur-containing globulin genes. The mutation can include a combination of two or more of: deletion of one or more genes, inversion of one or more genes, insertion of one or more nucleotides within a gene, deletion of one or more nucleotides from a gene, and substitution of one or more nucleotides within a gene. The mutation can be at a target sequence as set forth in SEQ ID NO:1, SEQ ID NO:2, SEQ ID NO:3, or SEQ ID NO:4, or at a target sequence that, when translated, has at least 90 percent amino acid identity to an amino acid sequence encoded by SEQ ID NO:1, SEQ ID NO:2, SEQ ID NO:3, or SEQ ID NO:4. The low sulfur-containing globulin content can include globulin DNA, globulin mRNA, and/or globulin protein. The plant, plant part, or plant cell can have been made using a rare-cutting endonuclease (e.g., a transcription activator-like effector (TALE) endonuclease, also referred to herein as a TALE nuclease). The TALE nuclease can bind to a sequence as set forth in any of SEQ ID NO:1, SEQ ID NO:2, SEQ ID NO:3, or SEQ ID NO:4, or binds to a sequence that, when translated, has at least 90 percent amino acid identity to an amino acid sequence encoded by SEQ ID NO:1, SEQ ID NO:2, SEQ ID NO:3, or SEQ ID NO:4. The TALE nuclease can bind to a sequence that flanks a sequence as set forth in SEQ ID NO:1, SEQ ID NO:2, SEQ ID NO:3, or SEQ ID NO:4, or that flanks a sequence that, when translated, has at least 90 percent amino acid identity to an amino acid sequence encoded by SEQ ID NO:1, SEQ ID NO:2, SEQ ID NO:3, or SEQ ID NO:4. Each of the one or more low sulfur-containing globulin genes having a mutation can exhibit deletion, substitution, or insertion of an endogenous nucleic acid, without including any exogenous nucleic acid. In some embodiments, two or more endogenous low sulfur-containing globulin genes can contain a mutation. The plant, plant part, or plant cell can have a sulfur-containing amino acid content that is at least 0.01% greater than a corresponding soybean plant, plant part, or plant cell that lacks the mutation. The plant, plant part, or plant cell is a Glycine max L. Men. plant, plant part, or plant cell.

[0013] In another aspect, this document features a method for making a soybean plant having reduced low sulfur-containing globulin content. The method can include (a) contacting soybean plant cells or plant parts having functional globulin genes with a rare-cutting endonuclease targeted to sequence within one or more of the functional globulin genes, or to sequence flanking the globulin genes, (b) selecting from the plant cells or plant parts a plant cell or plant part in which at least one globulin gene has been inactivated, and (c) growing the selected plant cell or plant part into a soybean plant, wherein the soybean plant has reduced low sulfur-containing globulin content as compared to a control soybean plant in which the globulin gene has not been inactivated. The soybean plant cells contacted in step (a) can be protoplasts. The method can include transforming the protoplasts with a nucleic acid encoding the rare-cutting endonuclease. The nucleic acid can be an mRNA. The nucleic acid can be contained within a vector. The soybean plant parts contacted in step (a) can be immature embryos or embryogenic calli. The method can include transformation of the embryos or embryogenic calli with a nucleic acid encoding the rare-cutting endonuclease. The transformation can be Agrobacterium-mediated transformation or transformation by biolistics. The rare-cutting endonuclease can be a TALE nuclease, meganuclease, ZFN, or CRISPR/Cas reagent. The method can further include culturing the protoplasts, immature embryos, or embryogenic calli to generate plant lines. Each mutation can be at a target sequence as set forth in SEQ ID NO:1, SEQ ID NO:2, SEQ ID NO:3, or SEQ ID NO:4, or at a target sequence that, when translated, has at least 90 percent amino acid identity to an amino acid sequence encoded by SEQ ID NO:1, SEQ ID NO:2, SEQ ID NO:3, or SEQ ID NO:4. The rare-cutting endonuclease can be a TALE nuclease (e.g., a TALE nuclease that binds to sequence that flanks sequence as set forth in SEQ ID NO:1, SEQ ID NO:2, SEQ ID NO:3, or SEQ ID NO:4, or that flanks a sequence that, when translated, has at least 90 percent amino acid identity to an amino acid sequence encoded by SEQ ID NO:1, SEQ ID NO:2, SEQ ID NO:3, or SEQ ID NO:4). In some embodiments, two or more functional endogenous globulin genes can be mutated. The soybean plant can have a sulfur-containing amino acid level of at least 3%. The soybean plant, plant part, or plant cell can be a Glycine max L. Men. plant, plant part, or plant cell. The method can include isolating genomic DNA containing at least a portion of the globulin gene from the protoplasts, immature embryos, or embryogenic calli.

[0014] Unless otherwise defined, all technical and scientific terms used herein have the same meaning as commonly understood by one of ordinary skill in the art to which this invention pertains. Although methods and materials similar or equivalent to those described herein can be used to practice the invention, suitable methods and materials are described below. All publications, patent applications, patents, and other references mentioned herein are incorporated by reference in their entirety. In case of conflict, the present specification, including definitions, will control. In addition, the materials, methods, and examples are illustrative only and not intended to be limiting.

[0015] The details of one or more embodiments of the invention are set forth in the accompanying drawings and the description below. Other features, objects, and advantages of the invention will be apparent from the description and drawings, and from the claims.

### DESCRIPTION OF DRAWINGS

[0016] FIGS. 1A-1C show representative Gy4 glycinin Glyma10g04280 sequences. FIG. 1A is an example of a Gy4 glycinin Glyma10g04280 coding sequence (SEQ ID NO:1) that can be a target for TALE nuclease-mediated gene inactivation. FIG. 1B is an example of a Gy4 glycinin Glyma10g04280 genomic sequence (SEQ ID NO:16) that can be a target for TALE nuclease-mediated gene inactivation. Underlined nucleotides indicate 5′ and 3′ UTR sequences. Lower case nucleotides indicate intronic sequences. FIG. 1C is a fragment of the Gy4 glycinin Glyma10g04280 genomic sequence (SEQ ID NO:17) that can be a target for TALE nuclease-mediated gene inactivation.

[0017] FIGS. 2A-2C show representative Gy5 glycinin Gyma13g18450 sequences. FIG. 2A is an example of a Gy5 glycinin Glyma13g18450 coding sequence (SEQ ID NO:2) that can be a target for TALE nuclease-mediated gene inactivation. FIG. 2B is an example of a Gy5 glycinin Glyma13g18450 genomic sequence (SEQ ID NO:18) that can be a target for TALE nuclease-mediated gene inactivation. Lower case nucleotides indicate intronic sequences. FIG. 2C is a fragment of the Gy5 glycinin Glyma13g18450 genomic sequence (SEQ ID NO:19) that can be a target for TALE nuclease-mediated gene inactivation.

[0018] FIG. 3 is an example of a beta-conglycinin Glyma20g28460 coding sequence (SEQ ID NO:3) that can be a target for TALE nuclease-mediated gene inactivation.

[0019] FIG. 4 is an example of a beta-conglycinin Glyma20g28640 coding sequence (SEQ ID NO:4) that can be a target for TALE nuclease-mediated gene inactivation.

[0020] FIG. 5 is an example of a Gy4 glycinin Glyma10g04280 amino acid sequence (SEQ ID NO:5) that can be targeted by TALE nuclease-mediated gene inactivation. Capital letters indicate sulfur-containing amino acids.

[0021] FIG. 6 is an example of a Gy5 glycinin Glyma13g18450 amino acid sequence (SEQ ID NO:6) that can be targeted by TALE nuclease-mediated gene inactivation. Capital letters indicate sulfur-containing amino acids.

[0022] FIG. 7 is an example of a beta-conglycinin Glyma20g28460 amino acid sequence (SEQ ID NO:7) that can be targeted by TALE nuclease-mediated gene inactivation. Capital letters indicate sulfur-containing amino acids.

[0023] FIG. 8 is an example of a beta-conglycinin Glyma20g28640 amino acid sequence (SEQ ID NO:8) that can be targeted by TALE nuclease-mediated gene inactivation. Capital letters indicate sulfur-containing amino acids.

[0024] FIG. 9 lists examples of TALE nuclease targeting sequences (SEQ ID NOS:9-14) that can be used for inactivating low sulfur-containing globulin genes. Bold font indicates half TALE nuclease targeting sequences; underlining indicates spacer sequences.

[0025] FIGS. 10A and 10B are exemplary illustrations of the methods described herein for altering amino acid composition in plants. FIG. 10A shows a hypothetical “normal” condition within a plant cell, where Expressed Gene 1 produces Protein 1 at large quantities and Compensation Gene 2 produces Protein 2 at low levels. The amino acid composition of both proteins is shown. The low frequency of the amino acids M (methionine) and C (cysteine) within Protein 1 contributes to the low frequency of M and C in the plant part (right graph). The high frequency of H (histidine) in Protein 1 contributes to the high frequency of H in the plant part. FIG. 10B demonstrates a hypothetical situation in which Expressed Gene 1 is knocked out or has reduced expression, and Compensation Gene 2 compensates for Expressed Gene 1 and Protein 1. The high frequency of M and C in Protein 2 contributes to a higher frequency of M and C in the plant part.

[0026] FIG. 11 is an example of an amino acid sequence for an alpha-gliadin protein from wheat (T. aestivum; SEQ ID NO:20).

[0027] FIG. 12 is an example of an amino acid sequence for a gamma-gliadin protein from wheat (T. aestivum; SEQ ID NO:21).

[0028] FIG. 13 is an example of an amino acid sequence for an omega-gliadin protein from wheat (T. aestivum; SEQ ID NO:22).

[0029] FIG. 14 shows the nucleotide target sequence of TaGliadin TALE nuclease pairs (SEQ ID NOS: 6367-6370). Bold font indicates half TALE nuclease target sequences; underlining indicates spacer sequences.

[0030] FIG. 15 shows nuclease-induced deletions in the alpha-gliadin genes (SEQ ID NOS:6367 and 6371-6378).

[0031] FIGS. 16A and 16B show nuclease-induced deletions in the soybean Gy5 gene (FIG. 16A; SEQ ID NOS:6379-6388) and Gy4 gene (FIG. 16B; SEQ ID NOS:6389-6396).

[0032] FIG. 17 shows nuclease induced mutations in the Gy4 and Gy5 genes in a T2 plant that is progeny of the T1 parent plant Gm318-1-4.

[0033] FIG. 18 shows nuclease induced mutations in the Gy4 and Gy5 genes in a T2 plant (plant 1) that is progeny of the T1 parent plant Gm318-1-2.

[0034] FIG. 19 shows nuclease induced mutations in the Gy4 and Gy5 genes in a T2 plant (plant 2) that is progeny of the T1 parent plant Gm318-1-2.

[0035] FIG. 20 shows nuclease induced mutations in the Gy4 and Gy5 genes in a T2 plant (plant 3) that is progeny of the T1 parent plant Gm318-1-2.

### DETAILED DESCRIPTION

[0036] This document is based, at least in part, on the discovery that content of individual amino acids within plants, plant cells, or plant parts can be altered (e.g., increased or decreased) through the use of one or more sequence-specific nucleases to cleave DNA sequences within or near loci encoding particular proteins that are expressed in the plants, plant cells, or plant parts. The cleavage may result in downregulation or complete loss of certain protein expression in the plants, plant cells, or plant parts. The cleavage may result in inactivation or knockout of the protein. The downregulation, complete loss of expression, or inactivation of a certain protein can trigger a compensation mechanism that may result in increased expression of one or more other proteins (referred to herein as “compensation proteins”) that were not targeted by the sequence-specific nuclease(s). Compensation proteins can have a different amino acid content than the protein with reduced or lost expression. The downregulation, complete loss of expression, or inactivation of a certain protein, together with increased expression of one or more compensation proteins, can result in altered amino acid content in the plants, plant cells, or plant parts. Target proteins for downregulation or inactivation typically harbor one or more amino-acids-of-interest at a percent-total of the amino acids within the protein that is less than the overall percent-total of the amino-acids-of-interest within all proteins combined in the plant, plant part, or plant cell.

[0037] Thus, this document is based, at least in part, on the discovery that downregulation, complete loss of expression, or inactivation of certain proteins can result in increased content of particular amino acids, relative to the total amino acid content, in plants, plant cells, or plant parts, and also can result in decreased content of particular amino acids, relative to the total amino acid content, in the plants, plant cells, or plant parts. Downregulation, complete loss of expression, or inactivation of a certain protein can be achieved using one or more (e.g., one, two three, four, five, six, or more than six) sequence-specific nucleases. For example, inactivation of a protein can be achieved by introducing one or more mutations (e.g., nucleotide substitutions, deletions, or insertions) within the nucleic acid sequence of the gene encoding the protein (e.g., within the coding sequence). The one or more mutations can, in some cases, be a deletion that results in a frameshift that may lead to an early stop codon and potentially nonsense mediated decay (if the early stop codon occurs before an intron). If a frameshift mutation occurs near the end of the coding sequence and after the last intron, then majority of the protein may still be produced. If a frameshift mutation occurs near the beginning of the coding sequence, then the majority of the protein will not likely be produced. Thus, in some cases, frameshift mutations occurring at or near the beginning of a coding sequence can be particularly useful.

[0038] In some embodiments, an insertion or deletion of nucleotides (nt) within a gene can have a length of about 1 nt to about 10,000 nt (e.g., 1 to 10 nt, 5 to 15 nt, 10 to 25 nt, 20 to 50 nt, 50 to 100 nt, 100 to 200 nt, 200 to 500 nt, 500 to 1000 nt, 1000 to 2000 nt, 2000 to 3000 nt, 3000 to 4000 nt, 4000 to 5000 nt, or 5000 to 10,000 nt). In some cases, when the mutation is a deletion, at least about 0.05% (e.g., at least about 0.1%, at least about 0.15%, at least about 0.2%, at least about 0.25%, at least about 0.3%, at least about 0.5%, at least about 1%, at least about 2%, about 0.05 to 0.1%, about 0.1 to 0.15%, about 0.15 to 0.2%, about 0.2 to 0.25%, about 0.25 to 0.3%, about 0.3 to 0.4%, about 0.4 to 0.5%, about 0.5 to 0.75%, about 0.75 to 1%, about 1 to 2%, or about 2 to 3%) of the nucleotides within a gene can be deleted.

[0039] As used herein, the term “amino acid content” with respect to a particular amino acid refers to the percentage of that particular amino acid among the total amount of amino acids within a population (e.g., in a protein, a plant, a plant part, or a plant cell). When referring to a plant, plant part, or plant cell, “amino acid content” refers to the percentage of a certain amino acid among the total amount of amino acids within the plant, plant part, or plant cell. When referring to a protein, “amino acid content” refers to the percentage of a certain amino acid among the total amino acids within the protein.

[0040] The plant, plant part, can plant cells provided herein can have a mutation that results in an altered amino acid content, such that the amount of one or more amino acids is at least about 0.01% (e.g., at least about 0.02%, at least about 0.05%, at least about 0.1%, at least about 0.5%, at least about 1%, at least about 3%, at least about 5%, about 0.01 to 0.1%, about 0.05 to 0.5%, about 0.1 to 1%, about 0.2 to 1.5%, about 0.5 to 2%, about 1 to 3%, or about 2 to 5%) greater or less than the amount of that amino acid in a corresponding plant, plant part, or plant cell that lacks the mutation. For example, if a plant, plant part, or plant cell that lacks the mutation has a content of a particular amino acid that is about 5.00% of the total amino acids, and the mutation results in an increase in content of the particular amino acid, then the plant, plant part, or plant cell that contains the mutation can have a content of the particular amino acid of at least 5.01% (e.g., at least about 5.02%, at least about 5.05%, at least about 5.10%, at least about 5.50%, at least about 6.00%, at least about 8.00%, at least about 10.00%, about 5.01 to 5.10%, about 5.05 to 5.50%, about 5.50 to 6.00%, about 5.20 to 6.50%, about 5.50 to 8.00%, about 6.00 to 8.00%, or about 7.00 to 10.00%). Methods for generating such plant varieties also are provided herein.

[0041] Thus, in some embodiments, this document provides methods for making plants having altered amino acid content. The methods can include, for example, contacting plant cells or plant parts having functional seed storage protein genes with a sequence-specific, rare-cutting endonuclease targeted to a sequence within one or more of the functional seed storage protein genes, growing the contacted plant cells or plant parts into plants, and selecting a plant with a mutation in at least one seed storage protein gene. In some cases, the heterochromatic state of particular genes may hinder or prevent an endonuclease from binding and cleaving DNA. In such cases, an agent that reduces DNA methylation or reduces histone deacetylase activity can be used to relax the chromatin and allow access to the target sequences. Thus, the methods provided herein may include the step of treating a cell (e.g., a plant cell or a mammalian cell) or a plant part with an agent (e.g., 5-azacytidine or trichostatin A) that reduces DNA methylation or interferes with histone deacetylase activity, and then contacting the cell or plant part with the sequence-specific, rare-cutting endonuclease.

[0042] In some embodiments, one or more sequence-specific nucleases can be used to achieve downregulation, complete loss of expression, or inactivation of one or more proteins within a cereal plant. The one or more proteins can be, without limitation, seed storage proteins, which include prolamines, albumins, and globulins. In some cases, the cereal that can be modified with the methods described herein can be within the family Poaceae. In some cases, the cereal can be, without limitation, rice, bread wheat (Triticum aestivum), durum wheat (Triticum durum), corn, barley, millet, sorghum, rye, triticale, teff, wild rice, spelt, buckwheat, or quinoa.

[0043] In some embodiments, one or more sequence-specific nucleases can be used to achieve downregulation, complete loss of expression, or inactivation of one or more proteins within a legume. The one or more proteins can be, for example, seed storage proteins. In some cases, the legume that can be modified with the methods described herein can be within the family Fabaceae. In some cases, the legume can be, without limitation, soybean, asparagus, green bean, kidney bean, navy bean, pinto bean, garbanzo bean, adzuki bean, Anasazi bean, wax bean, mung bean, dwarf pea, southern pea, English pea, snow pea, sugar snap pea, alfalfa, clover, lentils, or peanut.

[0044] Although soybean has the highest protein content among seed crops, the protein quality is poor due to a deficiency in the sulfur-containing amino acids, methionine and cysteine. This document therefore provides soybean plant varieties, particularly those of the species Glycine max L. Merr., which contain reduced (or even no) detectable levels of low sulfur-containing globulin proteins, and have increased levels of sulfur-containing amino acids. In some embodiments, for example, a soybean plant, plant part, or plant cell as provided herein can have a mutation that results in a sulfur-containing amino acid content that is at least about 0.01% (e.g., at least about 0.02%, at least about 0.05%, at least about 0.1%, at least about 0.5%, at least about 1%, at least about 3%, at least about 5%, about 0.01 to 0.1%, about 0.05 to 0.5%, about 0.1 to 1%, about 0.2 to 1.5%, about 0.5 to 2%, about 1 to 3%, or about 2 to 5%) greater than the sulfur-containing amino acid content of a corresponding soybean plant, plant part, or plant cell that lacks the mutation. For example, if a soybean plant, plant part, or plant cell that lacks the mutation has a sulfur-containing amino acid content of 1.61%, then the soybean plant, plant part, or plant cell that contains the mutation can have a sulfur-containing amino acid content of at least about 1.62% (e.g., at least about 1.63%, at least about 1.66%, at least about 1.71%, at least about 2.11%, at least about 2.61%, at least about 4.61%, at least about 6.61%, about 1.62 to 1.71%, about 1.66 to 2.11%, about 1.71 to 2.61%, about 1.81 to 3.11%, about 2.11 to 4.61%, about 2.61 to 4.61%, or about 3.61 to 6.61%). Methods for generating such soybean plant varieties also are provided herein.

[0045] Soybean 7S globulin (β-conglycinin) and 11S globulin (glycinin) are the two major protein components of the seed, accounting for about 70% of the total seed protein at maturity, and about 30%-40% of the mature seed weight. Other major proteins in soybean seeds include urease, lectin, and trypsin inhibitors. The 11S and 7S soybean seed storage proteins usually are identified by their sedimentation rates in sucrose gradients (Hill and Breidenbach, Plant Physiol, 53:747-751, 1974). The content of sulfur-containing amino acids in the two globulins is very different; 11S globulin contains three to four times more methionine and cysteine per unit protein than 7S globulin.

[0046] The 11S protein (glycinin, legumin) contains at least four acidic subunits and four basic subunits (Staswick et al., J Biol Chem, 256:8752-8755, 1981), which form combined subunits designated A1B1, A1B2, A2B1, A3B4, and A4A5B3. The acidic and basic subunits are produced by cleavage of precursor polypeptides, which originally were identified through in vitro translation and pulse-labeling experiments (Barton et al., J Biol Chem, 257:6089-6095, 1982). The 7S storage protein (conglycinin, vicilin) is a glycoprotein composed of three major subunits, designated the α, α′ and β-subunits (Beachy et al., J Mol Appl Genet, 1:19-27, 1981).

[0047] Each subunit of 115 and 7S varies in the content of sulfur-containing amino acids. 11S glycinin is encoded by the Gy1 through Gy8 genes. Gy1-Gy5 are highly expressed in developing soybean seeds, while Gy7 expressed at low levels, and Gy6 and Gy8 are pseudogenes. Of the 7S β-conglycinin genes, Glyma10g39150 encodes the α′-subunit, Glyma20g28650 and Glyma20g28660 encodes the α-subunit, and Glyma20g28460 and Glyma20g28640 encodes the β-subunit.

[0048] In some embodiments, the plant can be a soybean plant and the one or more target genes for downregulation or inactivation can be the beta-conglycinin (7S) and/or glycinin (11S) seed storage protein genes. Since beta-conglycinin and glycinin are naturally low in methionine and cysteine, knockout or knockdown of one or more beta-conglycinin or glycinin genes can result in compensation of other proteins with higher levels of methionine and cysteine. Thus, knockout or knockdown of one or more beta-conglycinin or glycinin genes can result in an overall increase in the levels of methionine and cysteine in the soybean seed. Additional details about soybean seed storage proteins, including their structure and function, can be found elsewhere (see, e.g., Li et al., Heredity, 106:633-641, 2011; and Shewry et al., The Plant Cell, 7:945-956, 1995).

[0049] Examples of glycinin genes that can be downregulated or inactivated include Gy1 (A1B2; Glyma03g32030), Gy2 (A2B1; Glyma03g32020), Gy3 (A1B1; Glyma19g34780), Gy4 (A5A4B3; Glyma10g04280, with representative sequences set forth as SEQ ID NOS:1, 16, and 17 in FIGS. 1A, 1B, and 1C, respectively), and Gy5 (A3B4; Glyma13g18450, with representative sequences set forth as SEQ ID NOS: 2, 18, and 19 in FIGS. 2A, 2B, and 2C, respectively). Examples of beta-conglycinin genes that can be downregulated or inactivated include Glyma20g28460 (SEQ ID NO:3, FIG. 3) and Glyma20g28640 (SEQ ID NO:4, FIG. 4). An example of a Gy4 glycinin Glyma10g04280 amino acid sequence that can be targeted for gene inactivation is shown in FIG. 5 (SEQ ID NO:5). An example of a Gy5 glycinin Glyma13g18450 amino acid sequence that can be targeted for inactivation is shown in FIG. 6 (SEQ ID NO:6). An example of a beta-conglycinin Glyma20g28460 amino acid sequence that can be targeted for gene inactivation is shown in FIG. 7 (SEQ ID NO:7). An example of a beta-conglycinin Glyma20g28640 amino acid sequence that can be a target for gene inactivation is shown in FIG. 8 (SEQ ID NO:8). Capital letters in FIGS. 5-8 indicate sulfur-containing amino acids.

[0050] In some embodiments, the plant that can be modified can be a wheat plant, and the one or more target proteins for downregulation or inactivation can be alpha-gliadin, gamma-gliadin, omega-gliadin, and/or glutenin seed storage proteins. Among other amino acids, gliadin proteins are naturally low in lysine. Knocking out or downregulating the expression of gliadin seed storage proteins can result in an overall increase in lysine content in the wheat grain. Examples of alpha-gliadin, gamma-gliadin, and omega-gliadin amino acid sequences for downregulation or inactivation are shown in SEQ ID NOS:20-22 (FIGS. 11-13, respectively). Additional details about the gliadin protein family, including their copy number, structure, and function, can be found elsewhere (see, e.g., Shewry et al., J Exp Bot 53:947-958, 2002; Gil-Humanes et al., Proc Natl Acad Sci USA 107:17023-17028, 2010; and Shewry et al. 1995, supra.

[0051] In some embodiments, the plant can be a corn plant, and the one or more target proteins for downregulation or inactivation can be prolamine seed storage proteins (e.g., the alpha-, beta-, gamma-, or delta-zeins; see, Argos et al., J Biol Chem 257:9984-9990, 1982: and Shewry et al. 1995, supra). The zein seed storage proteins are naturally deficient in lysine and tryptophan content. Knocking out or downregulating the expression of zein seed storage protein genes can result in an overall increase in lysine and tryptophan content in the corn seed.

[0052] In some embodiments, the plant can be a barley plant and the one or more target proteins for downregulation or inactivation can be hordein seed storage proteins. The hordein seed storage proteins can, for example, be B and gamma-hordeins.

[0053] In some embodiments, the plant can be a rye plant and the one or more target proteins for downregulation or inactivation can be secalin seed storage proteins. The secalin seed storage proteins, for example, can be gamma- and omega-secalins.

[0054] Plants containing an engineered mutation in a targeted gene also may contain a transgene, which can be integrated into the plant genome using standard transformation protocols (see, for example, Rech et al., Nat Protoc 3:410-418, 2008; Haun et al., Plant Biotech J 12:934-940, 2014; and Curtin et al., Plant Physiol 156:466-473, 2011). The presence and/or expression of the transgene can confer various effects upon the plant. For example, the transgene can result in the expression of a protein that confers tolerance or resistance to an herbicide (e.g., glufonsinate, mesotrione, imidazolinone, isoxaflutole, glyphosate, 2,4-D, hydroxyphenylpyruvate dioxygenase-inhibiting herbicides, or dicamba). The transgene may encode a plant 5-enolpyruvylshikimate-3-phosphate synthase (EPSPS) protein, a bacterial EPSPS protein, an agrobacterium CP4 EPSPS protein, an aryloxyalkanoate dioxygenase (AAD) protein, a phosphinothricin N-acetyltransferase (PAT) protein, a modified acetohydroxyacid synthase large subunit protein, a modified p-hydroxyphenylpyruvate dioxygenase (hppd) protein, or a dicamba monooxygenase (DMO) protein.

[0055] In some cases, the transgene can enhance resistance to insects (e.g., lepidopteran insects). For example, the transgene can encode a protein from Bacillus thuringiensis (e.g., a Cry protein, a Cry1Ac delta-endotoxin, a Cry1F delta-endotoxin protein, a Cry2Ab delta-endotoxin protein, or Cry1Ac delta-endotoxin).

[0056] The transgene may delay fruit ripening. For example, the transgene can contain an antisense sequence to the polygalacturonase gene.

[0057] The transgene can provide enhanced virus resistance. The transgene can contain sequence from a virus genome (e.g., an antisense sequence from a virus genome).

[0058] In some cases, the transgene can cause male sterility. For example, the transgene can include a pollen killer gene (e.g., an alpha amylase gene, S24 gene, or S35 gene). The transgene can further contain a screenable marker, such as a fluorescent protein (e.g., GFP, YFP, RFP, or BFP), or a gene involved in regulating seed size. In some cases, the transgene can further contain a restoring factor, such as a functional MS gene (e.g., an MS45 gene).

[0059] The transgene may delay browning. For example, the transgene can contain sequence from a polyphenol oxidase gene (e.g., antisense sequence from a polyphenol oxidase gene).

[0060] As used herein, the terms “plant” and “plant part” refer to cells, tissues, organs, grains, and severed parts (e.g., roots, leaves, and flowers) that retain the distinguishing characteristics of the parent plant. “Seed” refers to any plant structure that is formed by continued differentiation of the ovule of the plant, following its normal maturation point, irrespective of whether it is formed in the presence or absence of fertilization and irrespective of whether or not the grain structure is fertile or infertile.

[0061] The term “allele(s)” means any of one or more alternative forms of a gene at a particular locus. In a diploid (or amphidiploid) cell of an organism, alleles of a given gene are located at a specific location or locus on a chromosome, with one allele being present on each chromosome of the pair of homologous chromosomes. Similarly, in a hexaploid cell of an organism, one allele is present on each chromosome of the group of six homologous chromosomes. “Heterozygous” alleles are different alleles residing at a specific locus, positioned individually on corresponding homologous chromosomes. “Homozygous” alleles are identical alleles residing at a specific locus, positioned individually on corresponding homologous chromosomes in the cell.

[0062] The term “globulin gene” as used herein refers to a sequence of DNA that encodes a globulin protein. A “globulin gene” also refers to alleles of globulin genes that are present at the same chromosomal position on the homologous chromosome. The term “globulin genes” refers to more than one globulin gene present within the same soybean genome. Whereas globulin genes may be different in terms of nucleotide composition, they all encode globulin proteins. A “wild type globulin gene” is a naturally occurring globulin gene (e.g., as found within naturally occurring soybean plants) that encodes a globulin protein, while a “mutant globulin gene” is a globulin gene that has incurred one or more sequence changes, where the sequence changes result in the loss, addition, or modification of amino acids within the translated protein, as compared to the wild type globulin gene. A “mutant globulin gene” can include one or more mutations in a globulin gene's nucleic acid sequence, where the mutation(s) result in the absence or reduced levels of low sulfur-containing globulin proteins in the plant or plant cell in vivo. Additionally, a “mutant globulin gene” can include a globulin gene where the full length coding sequence was deleted from the soybean genome, and are no longer capable of producing low sulfur-containing globulin protein.

[0063] The soybean genome usually contains multiple globulin genes, named Gy1-Gy8 for 11S glycinin, and Glyma10g39150, Glyma20g28650, Glyma20g28660, Glyma20g28460, and Glyma20g28640 for conglycinin genes. The methods provided herein can be used to mutate at least one (e.g., at least two, at least three, at least four, at least five, at least six, one to three, two to five, more than five, or all) globulin genes, thereby removing at least some full-length RNA transcripts and low sulfur-containing globulin protein from soybean cells, and in some cases completely removing all full-length RNA transcripts and globulin protein.

[0064] As used herein, the term “content” refers to the percentage of a certain feature among the total amount of that feature. For example, “content of a seed storage protein” refers to the percentage of that particular seed storage protein among total amount of seed storage proteins.

[0065] The term “low sulfur-containing globulin” as used herein with regard to soybean refers to seed storage proteins that are within soybean plants, cells, plant parts, and seeds that are produced from endogenous globulin genes.

[0066] Representative examples of naturally occurring soybean globulin nucleotide sequences (encoding low sulfur-containing globulin proteins) are shown in FIGS. 1A-1C (SEQ ID NOS:1, 16, and 17), FIGS. 2A-2C (SEQ ID NOS:2, 18, and 19), FIG. 3 (SEQ ID NO:3), and FIG. 4 (SEQ ID NO:4). The soybean plants, cells, plant parts, seeds, and progeny thereof that are provided herein have a mutation in one or more endogenous globulin genes, such that expression of the one or more genes is reduced or completely abolished, or the low sulfur-containing globulin protein is reduced or absent. Thus, in some cases, the plants, cells, plant parts, seeds, and progeny exhibit reduced levels of low sulfur-containing globulin.

[0067] The term “rare-cutting endonucleases” herein refer to natural or engineered proteins having endonuclease activity directed to nucleic acid sequences having a recognition sequence (target sequence) about 12-40 bp in length (e.g., 14-40, 15-36, or 16-32 bp in length). Several rare-cutting endonucleases cause cleavage inside their recognition site, leaving 4 nt staggered cuts with 3′0H or 5′0H overhangs. These rare-cutting endonucleases may be meganucleases, such as wild type or variant proteins of homing endonucleases, more particularly belonging to the dodecapeptide family (LAGLIDADG (SEQ ID NO:15); see, WO 2004/067736), or may be fusion proteins that contain a DNA binding domain and a catalytic domain with cleavage activity. TALE nucleases and zinc-finger-nucleases (ZFN) are examples of fusions of DNA binding domains with the catalytic domain of the endonuclease FokI. For a review of rare-cutting endonucleases, see Baker, Nature Methods, 9:23-26, 2012).

[0068] “Mutagenesis” as used herein refers to processes in which mutations are introduced into a selected DNA sequence. Mutations induced by endonucleases generally are obtained by a double strand break, which results in insertion/deletion mutations (“indels”) that can be detected by deep-sequencing analysis. Such mutations typically are deletions of several base pairs, and have the effect of inactivating the mutated allele. Mutations can also be introduced by generating two double-strand breaks on the same chromosome, resulting in either two indels or the deletion/inversion of intervening sequence. In the methods described herein, for example, mutagenesis occurs via double stranded DNA breaks made by TALE nucleases targeted to selected DNA sequences in a plant cell. Such mutagenesis results in “TALE nuclease-induced mutations” (e.g., TALE nuclease-induced knockouts) and reduced expression of the targeted gene, or reduced immunogenicity of the encoded protein. Following mutagenesis, plants can be regenerated from the treated cells using known techniques (e.g., planting seeds in accordance with conventional growing procedures, followed by self-pollination).

[0069] As used herein, the terms “knocking down,” “knockdown,” and “downregulation” refer to a reduction in gene expression. Downregulation of a gene can result from lower transcriptional activity or lower translational activity. Downregulation of a gene can be achieved using different technologies, including sequence-specific nucleases. Using sequence-specific nucleases, downregulation can be achieved by mutating sequences within, for example, the promoter of a gene. Without limitation, targeted mutations can be directed to the TATA box, CAAT box, GC box, proximal promoter elements, distal enhancer sequences, downstream enhancers, or other transcription factor binding sites.

[0070] As used herein, the term “complete loss of expression” refers to a complete abolition of the expression of a gene. This can include no transcriptional activity. In some cases, a complete loss of expression can be achieved using one or more sequence-specific nucleases to mutate a target sequence within the promoter of a gene.

[0071] As used herein, the terms “inactivation,” “knockout,” and “completely delete” refer to the loss of protein activity. Inactivation or knockout can occur from a frameshift mutation within a gene's coding sequence, for example. A frameshift can lead to an early stop codon and a truncated protein. A complete deletion can be obtained using one or more sequence-specific nucleases to remove all or part of a gene's coding sequence.

[0072] As used herein, “null” refers to a mutation within the coding sequence of a gene that results in the complete or near complete loss of production of the wild type protein. A “null” mutation can be a frameshift within the coding sequence of a gene, or a “null” mutation can be an in-frame deletion within the coding sequence of a gene. An in-frame deletion may result in the removal of targeted portions of a protein's amino acid sequence (e.g., an active domain or certain stretches of amino acids).

[0073] As used herein, “compensation proteins” are proteins that are encoded by compensation genes, where the compensation genes have increased expression after a different (e.g., targeted) gene is downregulated or knocked out. Compensation proteins can have a different amino acid content than the protein that is downregulated or knocked out. See, FIGS. 10A and 10B for an illustration of how compensation proteins can contribute to altering amino acid content in cells. In some embodiments, the plants, plant cells, plant parts, seeds, and progeny provided herein can be generated using a TALE nuclease system to make targeted mutations in globulin genes. Thus, this document provides materials and methods for using rare-cutting endonucleases (e.g., TALE nucleases) to generate plants (e.g., soybean plants) and related products (e.g., seeds and plant parts) that can be used as sources of protein having reduced levels of targeted proteins (e.g., soybean low sulfur-containing globulins), due to mutations in the corresponding targeted genes. Other sequence-specific nucleases also may be used to generate the desired plant material, including engineered homing endonucleases, zinc finger nucleases, and RNA-guided endonucleases.

[0074] A mutation can be, for example, a deletion (ranging from small deletions between 1 and about 100 bp, to large deletions between about 100 bp and about 100,000 bp), a substitution, or an insertion of nucleotide base pairs. In some embodiments, a mutation can be a combination of a deletion and a substitution, a deletion and an insertion, a substitution and an insertion, or a deletion, a substitution, and an insertion. In soybean, a mutation can result in inactivation of low sulfur-containing glycinin/conglycinin gene function, removal of one or more entire low sulfur-containing glycinin/conglycinin genes, and/or removal of DNA sequences that code for low sulfur-containing glycinin/conglycinin proteins. The target sequence for mutations can be within the coding sequence of Gy4 (e.g., within SEQ ID NO:1, shown in FIG. 1A), Gy5 (e.g., within SEQ ID NO:2, shown in FIG. 2A), Glyma20g28460 (e.g., within SEQ ID NO:3, shown in FIG. 3), or Glyma20g28640 (e.g., within SEQ ID NO:4, shown in FIG. 4). In some embodiments, the target sequence for a mutation can be within a coding sequence that, when translated, has at least 90% (e.g., at least 91%, at least 92%, at least 93%, at least 94%, at least 95%, at least 96%, at least 97%, at least 98%, or at least 99%) amino acid sequence identity to the sequences encoded by SEQ ID NOS:1-4 and set forth in SEQ ID NOS:5-9.

[0075] The term “expression” as used herein refers to the transcription of a particular nucleic acid sequence to produce sense or antisense RNA or mRNA, and/or the translation of an mRNA molecule to produce a polypeptide (e.g., a seeds storage protein), with or without subsequent post-translational events.

[0076] “Reducing the expression” of a gene or polypeptide in a plant or a plant cell includes inhibiting, interrupting, knocking-out, or knocking-down the gene or polypeptide, such that transcription of the gene and/or translation of the encoded polypeptide is reduced as compared to a corresponding control plant or plant cell in which expression of the gene or polypeptide is not inhibited, interrupted, knocked-out, or knocked-down. Expression levels can be measured using methods such as, for example, reverse transcription-polymerase chain reaction (RT-PCR), Northern blotting, dot-blot hybridization, in situ hybridization, nuclear run-on and/or nuclear run-off, RNase protection, or immunological and enzymatic methods such as ELISA, radioimmunoassay, and western blotting.

[0077] In general, when the plant is soybean, the soybean plant, plant part, or plant cell as provided herein can have expression of one or more globulin genes reduced by at least about 50 percent (e.g., at least about 60 percent, at least about 70 percent, at least about 80 percent, at least about 90 percent, 50 to 75 percent, or 70 to 90 percent) as compared to a corresponding control soybean plant that lacks the mutation(s). The control soybean plant can be, for example, a corresponding wild-type soybean plant in which the globulin gene(s) have not been mutated.

[0078] In some cases, a targeted nucleic acid in soybean can have a nucleotide sequence with at least about 90 percent sequence identity to a representative globulin nucleotide sequence. For example, a nucleotide sequence can have at least 90 percent, at least 91 percent, at least 92 percent, at least 93 percent, at least 94 percent, at least 95 percent, at least 96 percent, at least 97 percent, at least 98 percent, or at least 99 percent sequence identity to a representative, naturally occurring globulin nucleotide sequence.

[0079] In some cases, a mutation in soybean can be at a target sequence within a globulin coding sequence as set forth herein (e.g., SEQ ID NOS:1-4), or at a target sequence that is at least 90 percent (e.g., at least 90 percent, at least 91 percent, at least 92 percent, at least 93 percent, at least 94 percent, at least 95 percent, at least 96 percent, at least 97 percent, at least 98 percent, or at least 99 percent) identical to a globulin coding sequence as set forth herein (e.g., SEQ ID NOS:1-4), or at a target sequence that, when translated, is at least 90 percent (e.g., at least 90 percent, at least 91 percent, at least 92 percent, at least 93 percent, at least 94 percent, at least 95 percent, at least 96 percent, at least 97 percent, at least 98 percent, or at least 99 percent) identical to a globulin amino acid sequence as set forth herein (e.g., SEQ ID NOS:5-8), or at a target sequence that flanks a globulin gene and is within 100,000 bp (e.g., within 80,000 bp, within 50,000 bp, within 20,000 bp, within 20,000 to 50,000 bp, or within 50,000 to 80,000 bp) of the nearest globulin gene.

[0080] The percent sequence identity between a particular nucleic acid or amino acid sequence and a sequence referenced by a particular sequence identification number is determined as follows. First, a nucleic acid or amino acid sequence is compared to the sequence set forth in a particular sequence identification number using the BLAST 2 Sequences (Bl2seq) program from the stand-alone version of BLASTZ containing BLASTN version 2.0.14 and BLASTP version 2.0.14. This stand-alone version of BLASTZ can be obtained online at fr.com/blast or at ncbi.nlm.nih.gov. Instructions explaining how to use the Bl2seq program can be found in the readme file accompanying BLASTZ. Bl2seq performs a comparison between two sequences using either the BLASTN or BLASTP algorithm. BLASTN is used to compare nucleic acid sequences, while BLASTP is used to compare amino acid sequences. To compare two nucleic acid sequences, the options are set as follows: -i is set to a file containing the first nucleic acid sequence to be compared (e.g., C:\seq1.txt); -j is set to a file containing the second nucleic acid sequence to be compared (e.g., C:\seq2.txt); -p is set to blastn; -o is set to any desired file name (e.g., C:\output.txt); -q is set to -1; -r is set to 2; and all other options are left at their default setting. For example, the following command can be used to generate an output file containing a comparison between two sequences: C:\Bl2seq c:\seq1.txt -j c:\seq2.txt -p blastn -o c:\output.txt -q -1 -r 2. To compare two amino acid sequences, the options of Bl2seq are set as follows: -i is set to a file containing the first amino acid sequence to be compared (e.g., C:\seq1.txt); -j is set to a file containing the second amino acid sequence to be compared (e.g., C:\seq2.txt); -p is set to blastp; -o is set to any desired file name (e.g., C:\output.txt); and all other options are left at their default setting. For example, the following command can be used to generate an output file containing a comparison between two amino acid sequences: C: \Bl2seq c:\seq1.txt -j c:\seg2.txt -p blastp -o c:\output.txt. If the two compared sequences share homology, then the designated output file will present those regions of homology as aligned sequences. If the two compared sequences do not share homology, then the designated output file will not present aligned sequences.

[0081] Once aligned, the number of matches is determined by counting the number of positions where an identical nucleotide or amino acid residue is presented in both sequences. The percent sequence identity is determined by dividing the number of matches either by the length of the sequence set forth in the identified sequence (e.g., SEQ ID NO:1), or by an articulated length (e.g., 100 consecutive nucleotides or amino acid residues from a sequence set forth in an identified sequence), followed by multiplying the resulting value by 100. For example, a nucleic acid sequence that has 1600 matches when aligned with the sequence set forth in SEQ ID NO:1 is 94.6 percent identical to the sequence set forth in SEQ ID NO:1 (i.e., 1600±1692×100=94.6). It is noted that the percent sequence identity value is rounded to the nearest tenth. For example, 75.11, 75.12, 75.13, and 75.14 is rounded down to 75.1, while 75.15, 75.16, 75.17, 75.18, and 75.19 is rounded up to 75.2. It also is noted that the length value will always be an integer.

[0082] Methods for selecting endogenous target sequences and generating TALE nucleases targeted to such sequences can be performed as described elsewhere. See, for example, PCT Publication No. WO 2011/072246, which is incorporated herein by reference in its entirety. In some embodiments, software that specifically identifies TALE nuclease recognition sites, such as TALE-NT 2.0 (Doyle et al., Nucleic Acids Res 40:W117-122, 2012) can be used.

[0083] Transcription activator-like effectors (TALEs) are found in plant pathogenic bacteria in the genus Xanthomonas. These proteins play important roles in disease, or trigger defense, by binding host DNA and activating effector-specific host genes (see, e.g., Gu et al., Nature 435:1122-1125, 2005; Yang et al., Proc Natl Acad Sci USA 103:10503-10508, 2006; Kay et al., Science 318:648-651, 2007; Sugio et al., Proc Natl Acad Sci USA 104:10720-10725, 2007; and Römer et al., Science 318:645-648, 2007). Specificity depends on an effector-variable number of imperfect, typically 34 amino acid repeats (Schornack et al., J Plant Physiol 163:256-272, 2006; and WO 2011/072246). Polymorphisms are present primarily at repeat positions 12 and 13, which are referred to herein as the repeat variable-diresidue (RVD).

[0084] The RVDs of TAL effectors correspond to the nucleotides in their target sites in a direct, linear fashion, one RVD to one nucleotide, with some degeneracy and no apparent context dependence. This mechanism for protein-DNA recognition enables target site prediction for new target specific TAL effectors, as well as target site selection and engineering of new TAL effectors with binding specificity for the selected sites.

[0085] TAL effector DNA binding domains can be fused to other sequences, such as endonuclease sequences, resulting in chimeric endonucleases targeted to specific, selected DNA sequences, and leading to subsequent cutting of the DNA at or near the targeted sequences. Such cuts (i.e., double-stranded breaks) in DNA can induce mutations into the wild type DNA sequence via NHEJ or homologous recombination, for example. In some cases, TALE nucleases can be used to facilitate site directed mutagenesis in complex genomes, knocking out or otherwise altering gene function with great precision and high efficiency. As described in the Examples below, TALE nucleases targeted to the soybean globulin gene can be used to mutagenize the endogenous gene, resulting in plants without detectable expression (or reduced expression) of globulin. The fact that some endonucleases (e.g., FokI) function as dimers can be used to enhance the target specificity of the TALE nuclease. For example, in some cases a pair of TALE nuclease monomers targeted to different DNA sequences can be used. When the two TALE nuclease recognition sites are in close proximity, as depicted in FIG. 9, the inactive monomers can come together to create a functional enzyme that cleaves the DNA. By requiring DNA binding to activate the nuclease, a highly site-specific restriction enzyme can be created.

[0086] Methods for using TALE nucleases to generate plants, plant cells, or plant parts having mutations in endogenous genes include, for example, those described in the Examples herein. For example, one or more nucleic acids encoding TALE nucleases targeted to conserved nucleotide sequences present on one or more globulin genes can be transformed into plant cells or plant parts (e.g., protoplasts), where they can be expressed. In some cases, one or more TALE nuclease proteins can be introduced into plant cells or plant parts (e.g., protoplasts). The cells or plant parts, or a plant cell line or plant part generated from the cells, can subsequently be analyzed to determine whether mutations have been introduced at the target site(s), through next-generation sequencing techniques (e.g., 454 pyrosequencing or illumine sequencing). The template for sequencing can be, for example, glycinin or conglycinin genes that were amplified by PCR using primers that are homologous to conserved nucleotide sequences. Analysis of mutations can also be carried out using methods to analyze copy number (e.g., quantitative PCR [TaqMan Copy Number Assays; tools.lifetechnologies.com/content/sfs/brochures/cms 073956.pdf]). The copy number of globulin genes is analyzed because the generation of multiple double-strand breaks may lead to loss of intervening sequences, and consequently loss of multiple globulin genes.

[0087] The clustered regularly interspaced short palindromic repeats/CRISPR-associated (CRISPR/Cas) systems also can be used to direct DNA cleavage (see, e.g., Belahj et al., Plant Methods 9:39, 2013). This system consists of a Cas9 endonuclease and a guide RNA (either a complex between a CRISPR RNA [crRNA] and trans-activating crRNA [tracrRNA], or a synthetic fusion between the 3′ end of the crRNA and 5′ end of the tracrRNA). The guide RNA directs Cas9 binding and DNA cleavage to sequences that are adjacent to a proto-spacer adjacent motif (PAM; e.g., NGG for Cas9 from Streptococcus pyogenes). Once at the target DNA sequence, Cas9 generates a DNA double-strand break at a position three nucleotides from the 3′ end of the crRNA sequence that is complementary to the target sequence. As there are several PAM motifs present in the nucleotide sequence of the globulin genes, the CRISPR/Cas system may be employed to introduce mutations within the globulin alleles within soybean plant cells in which the Cas9 endonuclease and the guide RNA are transfected and expressed. This approach can be used as an alternative to TALE nucleases in some instances, to obtain plants, plant parts, and plant cells as described herein.

[0088] In some embodiments, the Cas protein can be a “functional derivative” of a naturally occurring Cas protein. A functional derivative of a native (naturally occurring) polypeptide is a compound having a qualitative biological property in common with the native polypeptide. Functional derivatives include, but are not limited to, fragments of a native polypeptide, derivatives of a native polypeptide, and derivatives of fragments of a native polypeptide, provided that the fragments and derivatives have a biological activity in common with the corresponding native polypeptide. A biological activity contemplated herein is, for example, the ability of the functional derivative to hydrolyze a DNA substrate into fragments. The term “derivative” encompasses amino acid sequence variants of a polypeptide, covalent modifications of a polypeptide, and polypeptide fusions. Suitable derivatives of a Cas polypeptide or a fragment thereof include, without limitation, mutants, fusions, covalently modified Cas polypeptides, and fragments thereof.

[0089] In some embodiments, the Cas protein can be a NmCas9, StCas9, or SaCas9 polypeptide (see, for example, Esvelt et al., Nat Methods 10:1116-1121, 2013; Steinert et al., Plant J 84:1295-1305; Kaya et al., Sci Rep 6:26871, 2016; Zhang et al., Sci Rep 7:41993, 2017; and Kaya et al., Plant Cell Physiol 58:643-649, 2017). In addition to Cas9, CRISPR systems from Prevotella and Francisella 1 (Cpf1) can be used in the methods provided herein (see, for example, Zetsche et al., Cell 163:759-771, 2015).

[0090] The invention will be further described in the following examples, which do not limit the scope of the invention described in the claims.

### EXAMPLES

### Example 1—Engineering Sequence-Specific Nucleases to Mutagenize Low Sulfur Containing Globulin Genes

[0091] To mutagenize, knock-out or completely delete low sulfur-containing globulin genes in soybean, sequence-specific nucleases were designed to target conserved nucleotides within the glycinin Gy4 (Glyma10g04280), Gy5 (Glyma13g18450), and beta-conglycinin Glyma20g28460 and Glyma20g28640 coding sequences. Target seed storage proteins were chosen based on their level of cysteine and methionine, as they contained the lowest levels of cysteine and methionine out of all the storage proteins. TABLE 1 shows the percent of methionine and cysteine in soybean seed storage proteins.

TABLE 1
Percent methionine and cysteine in soybean seed storage proteins

| | % Met and Cys |
|---|---|
| Glycinin | |
| Gy1 | 2.81% |
| Gy2 | 3.09% |
| Gy3 | 2.70% |
| Gy4 | 1.42% |
| Gy5 | 1.94% |
| Conglycinin | |
| α | 0.99% |
| α′ | 1.41% |
| β | 0.00% |

[0092] TALE nuclease target sequences were chosen within the first 200 bp of the coding sequence to increase the likelihood that a frameshift mutation will abolish the production of the targeted low sulfur-containing globulin proteins. Target sequences for TALE nuclease pairs are shown in FIG. 9. Due to sequence similarities, it is noted that the TALE nucleases targeting A3B4 may also bind to sequences within A5A4B3. TALE nucleases were synthesized using methods similar to those described elsewhere (Cermak et al., Nucleic Acids Res. 39: e82, 2011; Reyon et al., Nat Biotechnol, 30:460-465, 2012; and Zhang et al., Nat Biotechnol, 29:149-153, 2011). Individual TALE nuclease monomers were cloned into protoplast expression vectors harboring a nopaline synthase (NOS) promoter and terminator. TALE nuclease backbone architecture contained N-terminal truncations (N152: TAAAKFERQHMDSIDIADLRTLGYSQQQQEKIKPKV RSTVAQHHEALVGHGFTHAHIVALSQHPAALGTVAVKYQDMIAALPEATHEAIV GVGKQWSGARALEALLTVAGELRGPPLQLDTGQLLKIAKRGGVTAVEAVHAW RNALTGAPLN; SEQ ID NO:6401) and C-terminal truncations (C40: SIVAQLSRPDPALAALT ND HLVALACLGGRPALDAVKKGL; SEQ ID NO:6402). Repeat variable diresidues within the TALE repeats included NI (for targeting adenine), HD (for targeting cytosine), NN (for targeting guanine), and NG (for targeting thymine). To facilitate trafficking to plant cell nuclei, an SV40 NLS (PKKKRKV; SEQ ID NO:6403) was added to the N-terminus of the TALE nuclease protein.

### Example 2—Activity of TALE Nuclease Pairs at their Endogenous Target Sites in Soybean Globulin Genes

[0093] To assess TALE nuclease activity at endogenous target sequences (e.g., within Glyma10g04280, Glyma13g18450, Glyma20g28460, and/or Glyma20g28640), TALE nuclease pairs were transiently transformed into soybean protoplasts, and target sites were surveyed for mutations introduced by non-homologous end-joining (NHEJ). Transient transformation of DNA into soybean protoplasts was performed as described elsewhere (Dhir et al., Plant Cell Rep, 10: 39-43, 1991). Briefly, 15 days after pollination, immature soybean seedpods were sterilized by washing them successively in 100% ethanol, 50% bleach, and sterile distilled water. Seedpod and seed coat were removed to isolate immature seeds. Protoplasts were then isolated from immature cotyledons by enzyme digestion for 16 hours using the protocol described by Dhir et al., supra. Protoplasts were passed through a 100 μm cell filter and collected in a 50 mL Falcon tube, and were then were then pelleted by centrifugation at 100 rpm for 5 minutes. The supernatant was removed and cells were resuspended in WB-N solution (0.45 M D-mannitol, 10 mM calcium chloride, pH 5.8). Protoplasts were transformed using polyethylene glycol 4000 (20% diluted concentration) for 30 minutes. For each TALE nuclease pair, ˜500 000 protoplasts were transformed with 30 μg of plasmid (15 μg for each TALE nuclease pair). Protoplasts were washed three times in WB-N, transferred to low retention 15×10 mm petri plates, and incubated at 25° C. for 48 hours before genomic DNA was isolated using a CTAB-based method (Murray and Thompson, Nucl Acids Res, 8:4321-4325, 1980).

[0094] Using the genomic DNA prepared from the protoplasts as a template, a ˜600-bp fragment encompassing the TALE nuclease recognition site was amplified by PCR. The PCR product was then subjected to 454 pyro-sequencing. Sequencing reads with insertion/deletion (indel) mutations in the spacer region were considered to have been derived from imprecise repair of a cleaved TALE nuclease recognition site by NHEJ. Mutagenesis frequency was calculated as the number of sequencing reads with NHEJ mutations out of the total sequencing reads. The values were then normalized by the transformation efficiency (82%, as determined by a YFP-expression control plasmid). A summary of the TALE nuclease mutagenesis frequencies is shown in TABLE 2. Mutations introduced into soybean cells by the GmBCG2_T01 TALE nuclease pairs are listed in SEQ ID NOS:23-149. Mutations introduced by the GmBCG2_T02 TALE nuclease pairs are listed in SEQ ID NOS:150-475. Mutations introduced with the GmBCG2 T03 TALE nuclease pairs are listed in SEQ ID NOS:476-506. Mutations introduced by the GmGlyA3B4_T01 TALE nuclease pairs are listed in SEQ ID NOS:507-1688. Mutations introduced by the GmGlyA3B4_T02 TALE nuclease pairs are listed in SEQ ID NOS:1689-4768. Mutations introduced into soybean cells with the GmGlyA3B4_T03 TALE nuclease pairs are listed in SEQ ID NOS:4769-6347. SEQ ID NOS:23-6347 are shown in the attached Sequence Listing.

TABLE 2
Summary of GmBCG2 and GmGlyA3B4 TALE endonuclease activity in soybean protoplasts

| | | | Raw | Normalized |
|---|---|---|---|---|
| | | | mutation | mutation |
| | | | frequency | frequency |
| Target | Name | Target sequence | (%) | (%) |
| Glycinin | GmGlyA3B4_T01 | TCTCTTTCTTCCCTTTGCTTGCTACTCTTGTCG | 9.62 | 11.73 |
| | | AGTGCATGCTTTGCTA (SEQ ID NO: 9) | | |
| | GmGlyA3B4_T02 | TTGCTACTCTTGTCGAGTGCATGCTTTGCTATT | 25.22 | 30.76 |
| | | ACCTCCAGCAAGTTCA (SEQ ID NO: 10) | | |
| | GmGlyA3B4_T03 | TTGCTATTACCTCCAGCAAGTTCAACGAGTGCC | 13.05 | 15.91 |
| | | AACTCAACAACCTCAA (SEQ ID NO: 11) | | |
| Conglycinin | GmBCG2_T01 | TTGGTGTTGCTGGGAACTGTTTTCCTGGCATCA | 1.7 | 2.1 |
| beta-subunit | | GTTTGTGTCTCATTAA (SEQ ID NO: 12) | | |
| | GmBCG2_T02 | TGGGAACTGTTTTCCTGGCATCAGTTTGTGTCT | 4.58 | 5.59 |
| | | CATTAAAGGTGAGAGA (SEQ ID NO: 13) | | |
| | GmBCG2_T03 | TTAAAGGTGAGAGAGGATGAGAATAACCCTTTC | 3.44 | 4.2 |
| | | TACTTGAGAAGCTCTA (SEQ ID NO: 14) | | |

### Example 3—Regeneration of Soybean Lines with TALE Nuclease-Induced Mutations in Low Sulfur-Containing Globulin Genes

[0095] TALE nucleases showing activity were then used to create soybean lines with mutations in glycinin genes. Toward that end, the GmGlyA3B4_T02 TAL effector endonuclease pair was cloned into a bacterial vector, with TALE nuclease expression driven by the cauliflower mosaic virus 35S promoter. Following transformation of soybean half cotyledons (variety Bert) with sequences encoding the GmGlyA3B4_T02 TAL effector endonuclease, candidate transgenic plants (into which the GmGlyA3B4_T02 TAL effector endonuclease sequences were genomically integrated) were regenerated. The plants were transferred to soil, and after about 4 weeks of growth, a small leaf was harvested from each plant for DNA extraction and genotyping. Transgenic T0 individuals were assayed by PCR of the target locus (GlyA3B4) and subsequent direct Sanger sequencing of the PCR product. Sequencing traces that contained disruptions at or near the center of the target site were considered to be mutant. The original PCR product was then cloned into a pJet vector for individual genotype characterization.

[0096] One shoot (Gm318-1) was observed with mutations at the GlyA3B4 locus. A summary of the transformation experiments are shown in TABLE 3. Seed from the Gm318-1 plant was collected and grown into T1 plants. Genomic DNA from T1 plants was isolated and the GlyA3B4 and GlyA5A4B3 and TALE nuclease target site were sequenced. Deletions within both of the GlyA3B4 and GlyA5A4B3 target sites were observed within T1 plants. Examples of the mutations are shown in FIGS. 16A and 16B.

[0097] Tissue from T2 seeds was collected for analysis of mutations at the glycinin loci. Toward that end, 715 T1 seeds were collected from the T1 plants Gm318-1-1, Gm318-1-2, Gm318-1-3, and Gm318-1-4. The seeds were germinated in a greenhouse in a soil mixture in under 30° C./27° C. (16 hour day/8 hour night) with 65% humidity. The germination frequency was 80.2%. Two weeks after germination, leaf samples were collected from individual T2 plants and DNA was extracted. The DNA was tested for the presence of the TALE nuclease DNA and for mutations at the Gy4 and Gy5 glycinin loci. Primers used for amplifying the GmGlyA3B4_T02 binding site in the GlyA3B4 and GlyA5A4B3 genes are shown in TABLE 4.

TABLE 3
Summary of transformation experiments using the GmGlyA3B4_T02
nuclease pair

| | | | Number of shoots |
|---|---|---|---|
| Experiment | Number of explants | Number of | mutant at the |
| name | transformed | transgenic shoots | GlyA3B4 locus |
| Gm318 | 120 | 1 | 1 |
| Gm319 | 147 | 1 | 0 |
| Gm326 | 159 | 0 | 0 |
| Gm327 | 136 | 0 | 0 |
| Gm449 | 114 | 0 | 0 |
| Gm450 | 100 | 0 | 0 |
| Gm452 | 100 | 0 | 0 |
| Gm486 | 92 | 0 | 0 |
| Gm516 | 87 | 0 | 0 |
| Gm518 | 60 | 0 | 0 |
| Gm536 | 48 | 0 | 0 |
| Gm537 | 84 | 0 | 0 |
| Gm541 | 72 | 0 | 0 |
| Gm560 | 96 | 0 | 0 |
| Gm578 | 90 | 0 | 0 |
| Gm579 | 86 | 0 | 0 |
| Gm582 | 78 | 0 | 0 |
| Gm584 | 91 | 0 | 0 |
| Gm606 | 96 | 0 | 0 |
| Gm608 | 93 | 0 | 0 |
| Gm611 | 144 | 0 | 0 |
| Gm619 | 90 | 0 | 0 |
| Gm621 | 96 | 0 | 0 |
| Gm624 | 96 | 5 | 0 |

TABLE 4
Primers for amplifying the GmGlyA3B4_T02 binding
site in the GlyA3B4 and GlyA5A4B3 genes

| | Target | | SEQ |
|---|---|---|---|
| Primer Name | Gene | Sequence | ID: |
| CLXGmGLY3i1F | GlyA3B4 | TTCACTATAAATCGCCACTCT | 6348 |
| | (Gy5) | TCG | |
| CLXGmGLY3i2R | GlyA3B4 | CTAATATTACGCACCTTGAAC | 6349 |
| | (Gy5) | GACA | |
| CLXGmGLY504H | GlyA5A4B3 | ACCACTCCTCATGTTCTTTCC | 6350 |
| | (Gy4) | AA | |
| CLXGmGLY505H | GlyA5A4B3 | GTTGAGAGTTCCATGTTTGAA | 6351 |
| | (Gy4) | TCAA | |

[0098] Mutations identified in the Gy4 and Gy5 genes in a T2 plant from the parent Gm318-1-4 are shown in FIG. 17. Mutations identified in the Gy4 and Gy5 genes in T2 plant 1, plant 2, and plant 3 from the parent Gm318-1-2 are shown in FIGS. 18, 19, and 20, respectively.

### Example 4—Assessing the Phenotype of Modified Soybean Plants

[0099] Soybean plants containing mutations within low sulfur-containing globulin genes were assessed for low sulfur-containing globulin content. Initial screening to identify seeds with altered globulin content is performed by one-dimensional SDS-PAGE in which total soluble protein is stained with 0.1% Coomassie Brilliant Blue, and a replicate immunoblot is probed using a mixture of polyclonal antibodies, one specific to glycinin and another to beta-conglycinin as described elsewhere (Schmidt et al. 2011, supra). Non-transformed soybean seed is used as a positive control. Seeds whose corresponding protein profiles are shown to have the desired phenotype, namely a reduction in low sulfur-containing globulin proteins and an increase in high sulfur-containing globulins, are grown into the next generation. Two generations may be grown and screened in this manner, until homozygosity is obtained.

[0100] Secondary screening to identify seeds with a change in protein composition is performed by two-dimensional protein analysis and mass spectroscopy. Total soluble protein is isolated from mature seeds as described elsewhere (Schmidt and Herman, Plant Biotech J, 6:832-842, 2008). Soluble protein extracts (150 mg) from both a non-transformed soybean seed and a homozygous globulin knock-out seed are separated in the first dimension on 11-cm immobilized pH gradient gel strips (pH 3-10 nonlinear; Bio-Rad) and then in the second dimension by SDS-PAGE gels (8%-16% linear gradient). The resulting gels are subsequently stained with 0.1% (w/v) Coomassie Brilliant Blue R250 in 40% (v/v) methanol, 10% (v/v) acetic acid overnight, and then destained for about 3 hours in 40% methanol, 10% acetic acid. Individual spots of interest are excised and digested with trypsin, and the fragments are analyzed and identified by tandem mass spectroscopy as described elsewhere (Schmidt and Herman, Mol Plant, 1:910-924, 2008). Mass spectroscopy is used to establish the identity of the proteins that are changing in abundance in the mutant seed, making it possible to definitively identify mutant soybean lines with lower levels of low sulfur-containing proteins. Overall levels of methionine and cysteine in the mutant seed are determined by quantitation of hydrolyzed amino acids and free amino acids using a Waters Acquity ultraperformance liquid chromatography system (Schmidt et al. 2011, supra).

[0101] Seeds from four T2 plants with complete knockout of the Gy4 and Gy5 genes were collected and analyzed for amino acid content, which was determined using AOAC official methods 988.15 (tryptophan), 994.12 (cystine and methionine), and 982.30 (amino acids). Controls 1-3 were seed from Glycine max plants not containing mutations in the Gy4 and Gy5 genes. Cystine content in the Gy4 and Gy5 knockout lines was 1.48%, and methionine content was 1.42% (TABLE 5). Cystine content in the three control lines was 1.29%, 1.30%, and 1.28%, and methionine content was 1.29%, 1.28%, and 1.31%.

TABLE 5
Percentage of amino acids in soybean seeds with Gy4 and Gy5 knockout
mutations

| | Control 1 | Control 2 | Control 3 | Gy4 Gy5 KO |
|---|---|---|---|---|
| Tryptophan | 1.37 | 1.33 | 1.34 | 1.48 |
| Cystine | 1.29 | 1.30 | 1.28 | 1.48 |
| Methionine | 1.29 | 1.28 | 1.31 | 1.42 |
| Alanine | 3.75 | 3.76 | 3.82 | 3.79 |
| Arginine | 6.35 | 6.84 | 6.38 | 6.16 |
| Aspartic Acid | 10.37 | 10.85 | 10.39 | 10.31 |
| Glutamic Acid | 15.97 | 16.97 | 16.11 | 15.40 |
| Glycine | 3.91 | 3.96 | 3.95 | 4.03 |
| Histidine | 2.38 | 2.43 | 2.40 | 2.55 |
| Isoleucine | 4.13 | 4.24 | 4.17 | 4.32 |
| Leucine | 6.84 | 7.04 | 6.86 | 6.93 |
| Phenylalanine | 4.54 | 4.69 | 4.54 | 4.50 |
| Proline | 4.46 | 4.66 | 4.57 | 4.38 |
| Serine | 4.65 | 4.86 | 4.67 | 4.68 |
| Threonine | 3.64 | 3.68 | 3.66 | 3.55 |
| Total Lysine | 6.32 | 6.04 | 6.01 | 5.63 |
| Tyrosine | 3.17 | 3.18 | 3.18 | 3.26 |
| Valine | 4.38 | 4.41 | 4.35 | 4.50 |

### Example 5—Designing TALE Nucleases Targeted to Low-Lysine Alpha-Gliadin Genes in Wheat

[0102] To identify the genomic sequences of alpha-gliadin genes, alpha-gliadin DNA and mRNA sequences were downloaded from NCBI and aligned. In total, 315 sequences were aligned and used to identify semi-conserved regions for primer design. Two primers were designed to amplify a ˜365 bp sequence from the 5′ end of the alpha gliadin genes.

[0103] The alpha-gliadin genes were resequenced within Bobwhite 208, CPAN1796 and Chinese81. Using these sequences, TALE nucleases were designed to target sites within the 5′ end of alpha-gliadin genes, near the start codon. TALE nuclease design was performed manually. Target sequences were chosen either within semi-conserved regions (such that the TALE nucleases would bind to the majority of alpha-gliadin genes) or within divergent sequences (such that the TALE nucleases would bind to a subset of alpha-gliadin genes). With respect to designing TALE nucleases targeted to semi-conserved sequences, it is noted that there were no regions of about 50 nt that were conserved between the different alpha gliadin genes, but there were many instances in which a degenerate RVD could be used to maximize the number of TALE nuclease target sites. For example, two genes having several G or A SNPs could be targeted by designing a TALE nuclease with an NN RVD, since NN binds to both G and A. This strategy was used to design TALE nucleases TaGliadin_T01.1, TaGliadin_T02.1, and TaGliadin_T03.1. Notably, TALE nuclease TaGliadin_T02.1 contained an N* RVD to facilitate binding to all four nucleotides. To design TALE nuclease pairs that target only a subset of alpha-gliadin genes, the binding preference of TALE nucleases to T at the -1 position was exploited. Using this strategy, a fourth TALE nuclease pair (TaGliadin_T04.1) was designed. This pair was predicted to bind to a minority of alpha-gliadin genes. The TaGliadin TALE nuclease target sequences are shown in FIG. 14.

### Example 6—Transformation of Wheat Protoplasts and Use of Chemicals to Increase Mutation Frequencies

[0104] To assess the activity of alpha-gliadin TALE nuclease pairs, wheat protoplasts were isolated and transformed with 15 ug of each TALE nuclease plasmid. As a control for transformation efficiency, protoplasts were transformed with 20 ug of a YFP-expression plasmid (pNOS:YFP). For each experimental sample, about 200,000 protoplasts were transformed using polyethylene glycol.

[0105] To carry out these studies, wheat seeds were sown on MS medium and placed in a growth incubator at 25° C. with a 16 hour light/8 hour dark cycle. Protoplasts were collected from forty 14 day-old seedlings, as follows. Seedlings were removed from the medium (without roots) and cut horizontally into ˜1-2 mm sections. Tissue was placed in digestion solution (1.5% cellulase R10, 0.75% macerozyme R10, 0.6 M mannitol, 10 mM MES pH 5.7, 10 mM CaCl₂, and 0.1% BSA) and moved to a 25° C. incubator. The digestion mixture was kept in the dark for 6-7 hours with shaking at 25 rpm. Following digestion, protoplasts were isolated using methods described elsewhere (Shan et al., Nature Biotechnol 31:686-688, 2013).

[0106] Protoplasts (˜200,000) were transformed with 15 ug each of plasmids encoding TALE nuclease pairs TaGliadin_T01.1, TaGliadin_T02.1, TaGliadin_T03.1, and TaGliadin_T04.1. Protoplasts also were transformed with a 35S:YFP control to measure transformation efficiency. Following transformation, protoplasts were incubated at 25° C. in the dark for 48 hours. Protoplasts were then pelleted by centrifugation, and DNA was isolated. PCR was conducted to amplify sequences encompassing the TALE nuclease binding sites, and the resulting amplicons were deep sequenced.

[0107] To determine the activity of each TALE nuclease pair at its target sequence, genomic DNA was isolated from protoplasts ˜48 hours post transformation, and amplicons encompassing the T1, T2, T3, and T4 target sites were generated by PCR and then deep sequenced using 454 pyrosequencing. Results from the deep sequencing analysis are shown in TABLE 6. Mutations were observed in samples for the TaGliadin_T01.1 and T02.1 TALE endonuclease pairs. Specifically, TALE nuclease pair TaGliadin_T01.1 had 0.325% activity, and TaGliadin_T02.1 had 0.746% activity. TALE nuclease pairs TaGliadin_T03.1 and TaGliadin_T04.1 had 0% activity. FIG. 15 shows examples of mutations identified in wheat protoplasts after delivery of the TaGliadin_T01.1 TALE nuclease pair.

TABLE 6
TALE nuclease mutation frequencies within alpha gliadin genes
in wheat protoplasts

| TALE nuclease | Transformation | | Mutation |
|---|---|---|---|
| constructs | Frequency | Experiment number | Frequency (%) |
| TaGliadin_T01.1 | 76.90% | Ta066 | 0.325 |
| TaGliadin_T02.1 | 76.90% | Ta067 | 0.746 |
| TaGliadin_T03.1 | 76.90% | Ta068 | 0 |
| TaGliadin_T04.1 | 76.90% | Ta069 | 0 |

[0108] In an effort to increase the frequency of mutations at the alpha-gliadin genes, the protoplast transformation was repeated three additional times using different treatments in the three transformations. In the first study, wheat protoplasts were transformed with or without a plasmid encoding TREX, which may facilitate imprecise DNA repair at the alpha-gliadin target sequences. In the second study, wheat seedlings were germinated and grown on medium containing 20 uM of 5-azacytidine. After 9 days of growth, the resulting seedlings were used for protoplast isolation and transformation, to determine whether the passive demethylation of alpha-gliadin genes using 5-azacytidine would allow TALE endonucleases to better recognize and cleave their target sequences. In the third study, wheat seedlings were germinated and grown on medium containing 4 uM of trichostatin A, which selectively inhibits histone deacetylase families of enzymes. If the heterochromatic state of alpha-gliadin genes prevents TALE endonuclease binding and cleavage, the addition of trichostatin A may relax the chromatin and allow access to the alpha-gliadin target sequences.

[0109] Results from 454 deep sequencing are shown in TABLE 7. TaGliadin_T01.1 had mutation frequencies of 1.57%, 2.40%, and 1.29% with delivery of TALE nuclease only, co-delivery of TREX, and treatment with 5-azacytidine, respectively. Further, it was observed that TaGliadin_T02.1 had the highest mutation frequency, reaching over 5% when delivered to protoplasts derived from plants treated with 5-azacytidine. See, TABLE 7 for a summary of the mutation frequencies.

### Example 7—Regeneration and Phenotyping of Wheat Lines with TALE Nuclease-Induced Mutations in Low-Lysine Containing Gliadin Wheat Genes

[0110] Functional TALE nuclease pairs are stably integrated into the wheat genome using standard transformation methods (Sparks et al., Methods Mol Biol. 478:71-92, 2009 and Jones et al., Plant Methods 1, 2005). Transgenic wheat plants are screened for mutations at the alpha-gliadin target sequences. Plants harboring mutations within the alpha-gliadin genes are advanced to phenotyping.

[0111] Initial screening to identify seeds with altered gliadin content is performed by one-dimensional SDS-PAGE in which total soluble protein is stained with 0.1% Coomassie Brilliant Blue, and a replicate immunoblot is probed using antibodies against gliadin protein. A decrease in the amount of low-lysine gliadin proteins indicates the successful reduction of protein with undesired amino acids.

[0112] Secondary screening to identify seeds with a change in protein composition is performed by two-dimensional protein analysis and mass spectroscopy. Total soluble protein is isolated from mature seeds as described elsewhere (Schmidt and Herman, Plant Biotech J, 6:832-842, 2008). Soluble protein extracts (150 mg) from both a non-transformed wheat seed and a homozygous gliadin knock-out seed are separated in the first dimension on 11-cm immobilized pH gradient gel strips (pH 3-10 nonlinear; Bio-Rad) and then in the second dimension by SDS-PAGE gels (8%-16% linear gradient). The resulting gels are subsequently stained with 0.1% (w/v) Coomassie Brilliant Blue R250 in 40% (v/v) methanol, 10% (v/v) acetic acid overnight, and then destained for about 3 hours in 40% methanol, 10% acetic acid. Individual spots of interest are excised and digested with trypsin, and the fragments are analyzed and identified by tandem mass spectroscopy as described elsewhere (Schmidt and Herman, Mol Plant, 1:910-924, 2008). Mass spectroscopy is used to establish the identity of the proteins that are changed in abundance in the mutant seed, making it possible to definitively identify mutant wheat lines with lower levels of low lysine-containing proteins. Overall levels of lysine in the mutant seed are determined by quantitation of hydrolyzed amino acids and free amino acids using a Waters Acquity ultraperformance liquid chromatography system (Schmidt et al. 2011, supra).

TABLE 7
TALE nuclease mutation frequencies within alpha gliadin genes in wheat protoplasts

| | | | | | | Mutation |
|---|---|---|---|---|---|---|
| TALE nuclease | | Transformation | Experiment | Total Reads | Total Reads | frequency |
| constructs | Treatment | Frequency | number | Analyzed | with Deletions | (%) |
| TaGliadin_T01.1 | Conventional (TALE | 72.10% | Ta081 | 3060 | 34 | 1.57 |
| | nucleases only) | | | | | |
| | TREX | 72.10% | Ta077 | 7734 | 133 | 2.40 |
| | 5-Azacytidine | 59.89% | Ta106 | 6060 | 46 | 1.29 |
| | Trichostatin A | 88.09% | Ta113 | 6527 | 51 | 0.90 |
| TaGliadin_T02.1 | Conventional (TALE | 72.10% | Ta082 | 2451 | 0 | 0.00 |
| | nucleases only) | | | | | |
| | TREX | 72.10% | Ta078 | 10591 | 178 | 2.43 |
| | 5-Azacytidine | 59.89% | Ta107 | 17697 | 552 | 5.33 |
| | Trichostatin A | 88.09% | Ta114 | 6215 | 0 | 0.00 |
| TaGliadin_T03.1 | Conventional (TALE | 72.10% | Ta083 | 5298 | 0 | 0.00 |
| | nucleases only) | | | | | |
| | TREX | 72.10% | Ta079 | 7785 | 0 | 0.00 |
| | 5-Azacytidine | 59.89% | Ta108 | 3640 | 0 | 0.00 |
| | Trichostatin A | 88.09% | Ta115 | 8522 | 0 | 0.00 |
| TaGliadin_T04.1 | Conventional (TALE | 72.10% | Ta084 | 1211 | 0 | 0.00 |
| | nucleases only) | | | | | |
| | TREX | 72.10% | Ta080 | 4206 | 0 | 0.00 |
| | 5-Azacytidine | 59.89% | Ta109 | 3370 | 0 | 0.00 |
| | Trichostatin A | 88.09% | Ta116 | 12455 | 91 | 0.86 |

### OTHER EMBODIMENTS

[0113] It is to be understood that while the invention has been described in conjunction with the detailed description thereof, the foregoing description is intended to illustrate and not limit the scope of the invention, which is defined by the scope of the appended claims. Other aspects, advantages, and modifications are within the scope of the following claims.

The application's sequence listing, which the Patent Office published only in electronic form, follows.

SEQUENCE LISTING (6422 sequences)

SEQ ID NO: 1 - DNA, 1692 bp, Glycine max
  Soybean Gy4 glycinin gene Glyma10g04280, complete CDS
atggggaagcccttcactctctctctttcttccctttgcttgctactcttgtcgagtgcatgctttgctattagctccagcaagctcaacgagtgccaactcaacaacctcaacgcgttggaacccgaccaccgcgttgagtccgaaggtggtttgattcaaacatggaactctcaacaccctgagctgaaatgcgccggtgtcactgtttccaaactcaccctcaaccgcaatggcctccacttgccatcttactcaccttatccccggatgatcatcatcgcccaagggaaaggagcacttggagttgcaattccaggatgtcctgagacgtttgaggagccacaagaacaatcaaacagaagaggctcaaggtcgcagaagcagcagctacaggacagtcaccagaagattcgtcacttcaatgaaggagacgtactcgtgattcctcctggtgttccttactggacctataacactggcgatgaaccagttgttgccatcagtcttcttgacacctctaacttcaataaccagcttgatcaaacccctagggtattttaccttgctgggaacccagatatagagtacccagagaccatgcaacaacaacaacagcagaaaagtcatggtggacgcaagcaggggcaacaccagcaggaggaagaggaagaaggtggcagcgtgctcagtggcttcagcaaacacttcttggcacaatccttcaacaccaacgaggacatagctgagaaacttcagtctccagacgacgaaaggaagcagatcgtgacagtggaaggaggtctcagcgttatcagccccaagtggcaagaacaacaagatgaagatgaagatgaagacgaagatgatgaagatgaacaaattccctctcaccctcctcgccgaccaagccatggaaagcgtgaacaagacgaggacgaggacgaagatgaagataaacctcgtcctagtcgaccaagccaaggaaagcgtgaacaagaccaggaccaggacgaggacgaagatgaagatgaagatcaacctcgcaagagccgcgaatggagatcgaaaaagacacaacccagaagacctagacaagaagaaccacgtgaaagaggatgcgagacaagaaacggggttgaggaaaatatctgcaccttgaagcttcacgagaacattgctcgcccttcacgcgctgacttctacaaccctaaagctggtcgcattagtaccctcaacagcctcaccctcccagccctccgccaattccaactcagtgcccaatatgttgtcctctacaagaatggaatttactctccacattggaatctgaatgcaaacagtgtgatctatgtgactcgaggacaaggaaaggttagagttgtgaactgccaagggaatgcagtgttcgacggtgagcttaggaggggacaattgctggtggtaccacagaacttcgtggtggcggagcaagccggagaacaaggattcgaatacatagtattcaagacacaccacaacgcagtcactagctacttgaaggatgtgtttagggcaattccctcagaggttcttgcccattcttacaaccttcgacagagtcaagtgtctgagcttaagtatgaaggaaattggggtcctttggtcaaccctgagtctcaacaaggctcaccccgtgttaaagtcgcataa

SEQ ID NO: 2 - DNA, 1467 bp, Glycine max
  Soybean Gy5 glycinin gene Glyma13g18450, complete CDS
atggggaagcccttcttcactctctctctttcttccctttgcttgctactcttgtcgagtgcatgctttgctattacctccagcaagttcaacgagtgccaactcaacaacctcaacgcgttggaacccgaccaccgcgttgagtccgaaggtggtcttattgaaacatggaactctcaacaccctgagctgcaatgcgccggtgtcactgtttccaaacgcaccctcaaccgcaacggcctccacttgccatcttactcaccttatccccaaatgatcattgtcgttcaagggaagggagcaattggatttgcatttccgggatgtcctgagacgtttgagaagccacaacagcaatcaagcagaagaggctcaaggtcgcagcagcaactacaagacagtcaccagaagattcgtcacttcaatgaaggagacgtactagtgattcctcctggtgttccttactggacctataacactggcgatgaaccagttgttgccatcagtcttcttgacacctccaacttcaacaatcagcttgatcaaaaccccagagtattttaccttgctgggaacccagatatagagcacccagagaccatgcaacaacagcagcagcagaagagtcatggtggacgcaagcaggggcaacaccagcagcaggaggaagaaggtggcagtgtgctcagtggcttcagcaaacatttcttagcacaatccttcaacaccaacgaggacacagctgagaaacttcggtctccagatgacgaaaggaagcagatcgtgacagtggagggaggcctcagcgttatcagccccaagtggcaagaacaagaagacgaagacgaagatgaagacgaagaatatgaacaaactccctcttatcctccacgacgaccaagccatggaaagcatgaagatgacgaggacgaggacgaagaagaagatcaacctcgtcctgatcaccctccacagcgaccaagcaggcccgaacaacaagaaccacgtggaagaggatgtcagactagaaatggggttgaggaaaatatttgcaccatgaagcttcacgagaacattgctcgcccttcacgtgctgacttctacaacccaaaagctggtcgcattagcaccctcaacagtctcaccctcccagccctccgccaattcggactcagtgcccaatatgttgtcctctacaggaatggaatttactctccacattggaacttgaacgcgaacagtgtgatctatgtgactcgagggaaaggaagagttagagtggtgaactgccaagggaatgcagtgttcgacggtgagctaaggaggggacaattgctagtggtgccgcagaactttgtggtggctgagcaagggggagaacaaggattggaatacgtagtgttcaagacacaccacaacgccgtgagcagctacattaaggatgtgtttagggcaatcccttcggag

SEQ ID NO: 3 - DNA, 1320 bp, Glycine max
  Soybean beta Conglycinin gene Glyma20g28460, complete CDS
atgatgagagtgcggtttcctttgttggtgttgctgggaactgttttcctggcatcagtttgtgtctcattaaaggtgagagaggatgagaataaccctttctacttgagaagctctaacagcttccaaactctctttgagaaccaaaacggtcgcattcgtctcctccagagattcaacaaacgctccccacaacttgagaaccttcgagactaccggattgtccagtttcagtcaaaacccaacacaatccttctcccccaccatgctgacgccgatttcctcctctttgtccttagcgggagagccatacttaccttggtgaacaacgacgacagagactcctacaaccttcaccctggcgatgcccagagaatcccagctggaaccacttactatttggttaaccctcacgaccaccagaatctcaaaataatcaaacttgccatacccgtcaacaaacctggcagatatgatgatttcttcttatctagcactcaagcccaacagtcctacttgcaaggcttcagccataatattctagagacctccttccatagcgaattcgaggagataaacagggttttgtttggagaggaagaggagcagaggcagcaagagggagtgatcgtggaactctcaaaggaacaaattcggcaactgagcagacgtgccaaatctagttcaaggaaaaccatttcctccgaagatgaaccattcaacttgagaagccgcaaccccatctattccaacaactttggaaagttctttgagatcacccctgagaaaaacccacagcttcgggacttggatatcttcctcagttctgtggatatcaacgaaggagctcttcttctaccacacttcaattcaaaggccatagtgatactagtgattaatgaaggagatgcaaacattgaacttgttggcattaaagaacaacaacagaagcagaaacaggaagaggaacctttggaagtgcaaaggtacagagctgaattgtctgaagacgatgtatttgtaattccagcagcttatccatttgtcgtcaacgctacctcaaacctcaatttccttgcttttggtatcaatgctgagaacaaccagaggaacttccttgcaggcgagaaagacaatgtggtaaggcagatagaaagacaagtgcaggagcttgcgttccctgggtctgcacaagatgttgagaggctattaaagaagcagagggaatcctactttgttgatgctcagcctcagcagaaggaggaggggagtaagggaagaaagggtccttttccttcaatcttaggtgctctctactga

SEQ ID NO: 4 - DNA, 1320 bp, Glycine max
  Soybean beta Conglycinin gene Glyma20g28640, complete CDS
atgatgagagtgcggtttcctttgttggtgttgctgggaactgttttcctggcatcagtttgtgtctcattaaaggtgagagaggatgagaataaccctttctacttgagaagctctaacagcttccaaactctctttgagaaccaaaacggtcgcattcgtctcctccagagattcaacaaacgctccccacaacttgagaaccttcgagactaccggattgtccagtttcagtcaaaacccaacacaatccttctcccccaccatgctgacgccgatttcctcctctttgtccttagcgggagagccatacttaccttggtgaacaacgacgacagagactcctacaaccttcaccctggcgatgcccagagaatcccagctggaaccacttactatttggttaaccctcacgaccaccagaatctcaaaataatcaaacttgccatacccgtcaacaaacctggcagatatgatgatttcttcttatctagcactcaagcccaacagtcctacttgcaaggcttcagccataatattctagagacctccttccatagcgaattcgaggagataaacagggttttgttgggagaggaagaggagcagaggcagcaagagggagtgatcgtggaactctcaaaggaacaaattcggcaactgagcagacgtgccaaatctagttcaaggaaaaccatttcctccgaagatgaaccattcaacttgagaagccgcaaccccatctattccaacaactttggaaagttctttgagatcacccctgagaaaaacccacagcttcgggacttggatatcttcctcagttctgtggatatcaacgaaggagctcttcttctaccacacttcaattcaaaggccatagtgatactagtgattaatgaaggagatgcaaacattgaacttgttggcattaaagaacaacaacagaagcagaaacaggaagaggaacctttggaagtgcaaaggtacagagctgaattgtctgaagacgatgtatttgtaattccagcagcttatccatttgtcgtcaacgctacctcaaacctcaatttccttgcttttggtatcaatgctgagaacaaccagaggaacttccttgcaggcgagaaagacaatgtggtaaggcagatagaaagacaagtgcaggagcttgcgttccctgggtctgcacaagatgttgagaggctattaaagaagcagagggaatcctactttgttgatgctcagcctcagcagaaggaggaggggagtaagggaagaaagggtccttttccttcaatcttaggtgctctctactga

SEQ ID NO: 5 - protein, 562 aa, Glycine max
  Soybean Gy4 glycinin gene Glyma10g04280, translated CDS
MGKPFTLSLSSLCLLLLSSACFAISSSKLNECQLNNLNALEPDHRVESEGGLIQTWNSQHPELKCAGVTVSKLTLNRNGLHSPSYSPYPRMIIIAQGKGALGVAIPGCPETFEEPQEQSNRRGSRSQKQQLQDSHQKIRHFNEGDVLVIPPSVPYWTYNTGDEPVVAISLLDTSNFNNQLDQTPRVFYLAGNPDIEYPETMQQQQQQKSHGGRKQGQHQQEEEEEGGSVLSGFSKHFLAQSFNTNEDIAEKLESPDDERKQIVTVEGGLSVISPKWQEQQDEDEDEDEDDEDEQIPSHPPRRPSHGKREQDEDEDEDEDKPRPSRPSQGKRNKTGQDEDEDEDEDQPRKSREWRSKKTQPRRPRQEEPRERGCETRNGVEENICTLKLHENIARPSRADFYNPKAGRISTLNSLTLPALRQFQLSAQYVVLYKNGIYSPHWNLNANSVIYVTRGQGKVRVVNCQGNAVFDGELRRGQLLVVPQNFVVAEQAGEQGFEYIVFKTHHNAVTSYLKDVFRAIPSEVLAHSYNLRQSQVSELKYEGNWGPLVNPESQQGSPRVKVA

SEQ ID NO: 6 - protein, 516 aa, Glycine max
  Soybean Gy5 glycinin gene Glyma13g18450, translated CDS
MGKPFFTLSLSSLCLLLLSSACFAITSSKFNECQLNNLNALEPDHRVESEGGLIETWNSQHPELQCAGVTVSKRTLNRNGSHLPSYLPYPQMIIVVQGKGAIGFAFPGCPETFEKPQQQSSRRGSRSQQQLQDSHQKIRHFNEGDVLVIPLGVPYWTYNTGDEPVVAISPLDTSNFNNQLDQNPRVFYLAGNPDIEHPETMQQQQQQKSHGGRKQGQHRQQEEEGGSVLSGFSKHFLAQSFNTNEDTAEKLRSPDDERKQIVTVEGGLSVISPKWQEQEDEDEDEDEEYGRTPSYPPRRPSHGKHEDDEDEDEEEDQPRPDHPPQRPSRPEQQEPRGRGCQTRNGVEENICTMKLHENIARPSRADFYNPKAGRISTLNSLTLPALRQFGLSAQYVVLYRNGIYSPDWNLNANSVTMTRGKGRVRVVNCQGNAVFDGELRRGQLLVVPQNPAVAEQGGEQGLEYVVFKTHHNAVSSYIKDVFRVIPSEVLSNSYNLGQSQVRQLKYQGNSGPLVNP

SEQ ID NO: 7 - protein, 439 aa, Glycine max
  Soybean beta&#8208;conglycinin gene Glyma20g28460, translated CDS
MMRVRFPLLVLLGTVFLASVCVSLKVREDENNPFYLRSSNSFQTLFENQNGRIRLLQRFNKRSPQLENLRDYRIVQFQSKPNTILLPHHADADFLLFVLSGRAILTLVNNDDRDSYNLHPGDAQRIPAGTTYYLVNPHDHQNLKIIKLAIPVNKPGRYDDFFLSSTQAQQSYLQGFSHNILETSFHSEFEEINRVLFGEEEEQRQQEGVIVELSKEQIRQLSRRAKSSSRKTISSEDEPFNLRSRNPIYSNNFGKFFEITPEKNPQLRDLDIFLSSVDINEGALLLPHFNSKAIVILVINEGDANIELVGIKEQQQKQKQEEEPLEVQRYRAELSEDDVFVIPAAYPFVVNATSNLNFLAFGINAENNQRNFLAGEKDNVVRQIERQVQELAFPGSAQDVERLLKKQRESYFVDAQPQQKEEGSKGRKGPFPSILGALY

SEQ ID NO: 8 - protein, 439 aa, Glycine max
  Soybean beta&#8208;conglycinin gene Glyma20g28640, translated CDS
MMRVRFPLLVLLGTVFLASVCVSLKVREDENNPFYLRSSNSFQTLFENQNGRIRLLQRFNKRSPQLENLRDYRIVQFQSKPNTILLPHHADADFLLFVLSGRAILTLVNNDDRDSYNLHPGDAQRIPAGTTYYLVNPHDHQNLKIIKLAIPVNKPGRYDDFFLSSTQAQQSYLQGFSHNILETSFHSEFEEINRVLLGEEEEQRQQEGVIVELSKEQIRQLSRRAKSSSRKTISSEDEPFNLRSRNPIYSNNFGKFFEITPEKNPQLRDLDIFLSSVDINEGALLLPHFNSKAIVILVINEGDANIELVGIKEQQQKQKQEEEPLEVQRYRAELSEDDVFVIPAAYPFVVNATSNLNFLAFGINAENNQRNFLAGEKDNVVRQIERQVQELAFPGSAQDVERLLKKQRESYFVDAQPQQKEEGSKGRKGPFPSILGALY

SEQ ID NO: 9 - DNA, 49 bp, Glycine max
  Glycinin Gy4 and Gy5 TALEN target sequence
tctctttcttccctttgcttgctactcttgtcgagtgcatgctttgcta

SEQ ID NO: 10 - DNA, 49 bp, Glycine max
  Glycinin Gy4 and Gy5 TALEN target sequence
ttgctactcttgtcgagtgcatgctttgctattacctccagcaagttca

SEQ ID NO: 11 - DNA, 49 bp, Glycine max
  Glycinin Gy4 and Gy5 TALEN target sequence
ttgctattacctccagcaagttcaacgagtgccaactcaacaacctcaa

SEQ ID NO: 12 - DNA, 49 bp, Glycine max
  Conglycinin beta subunit TALEN target sequence
ttggtgttgctgggaactgttttcctggcatcagtttgtgtctcattaa

SEQ ID NO: 13 - DNA, 49 bp, Glycine max
  Conglycinin beta subunit TALEN target sequence
tgggaactgttttcctggcatcagtttgtgtctcattaaaggtgagaga

SEQ ID NO: 14 - DNA, 49 bp, Glycine max
  Conglycinin beta subunit TALEN target sequence
ttaaaggtgagagaggatgagaataaccctttctacttgagaagctcta

SEQ ID NO: 15 - protein, 9 aa, Artificial
  Homing endonuclease belonging to dodecapeptide family
LAGLIDADG

SEQ ID NO: 16 - DNA, 2945 bp, Glycine max
  Soybean Gy4 glycinin gene Glyma10g04280, genomic sequence
aacaatagccatgcaaggtgaagaatgtcacaaactcagcaacccttattcattgacgtgtccctcagtcactctcctctcatacctataaatcaccactcctcatgttctttccaattcaccaactccttcaaacttaattattaacacttccttagttcaatatggggaagcccttcactctctctctttcttccctttgcttgctactcttgtcgagtgcatgctttgctattagctccagcaagctcaacgagtgccaactcaacaacctcaacgcgttggaacccgaccaccgcgttgagtccgaaggtggtttgattcaaacatggaactctcaacaccctgagctgaaatgcgccggtgtcactgtttccaaactcaccctcaaccgcaatggcctccacttgccatcttactcaccttatccccggatgatcatcatcgcccaaggtaatcatatataaggagtgcttctaacacacatatcagaaagagtatcaccagcatttctcagtgtatattaatccatttgtcaccacttgttcaaatttcaacatcacattaccatagatcatttactaaagataataatgatttaagtaaatagtatctctatagtaaattttacatgattatttaactacaaattattattattatatatagaatgactttgttgacatatcaatcaccttaaaagttttattaagttatatatatcaactaagatatctgattaaataaaaatgtgattgttttgtttggtgatgattgatgtacagggaaaggagcacttggagttgcaattccaggatgtcctgagacgtttgaggagccacaagaacaatcaaacagaagaggctcaaggtcgcagaagcagcagctacaggacagtcaccagaagattcgtcacttcaatgaaggagacgtactcgtgattcctcctggtgttccttactggacctataacactggcgatgaaccagttgttgccatcagtcttcttgacacctctaacttcaataaccagcttgatcaaacccctagggtaattatcaattcaatttcatttactattaacaaaaaccatgttctcctcacttgttaattttttcactttcaggtattttaccttgctgggaacccagatatagagtacccagagaccatgcaacaacaacaacagcagaaaagtcatggtggacgcaagcaggggcaacaccagcaggaggaagaggaagaaggtggcagcgtgctcagtggcttcagcaaacacttcttggcacaatccttcaacaccaacgaggacatagctgagaaacttcagtctccagacgacgaaaggaagcagatcgtgacagtggaaggaggtctcagcgttatcagccccaagtggcaagaacaacaagatgaagatgaagatgaagacgaagatgatgaagatgaacaaattccctctcaccctcctcgccgaccaagccatggaaagcgtgaacaagacgaggacgaggacgaagatgaagataaacctcgtcctagtcgaccaagccaaggaaagcgtgaacaagaccaggaccaggacgaggacgaagatgaagatgaagatcaacctcgcaagagccgcgaatggagatcgaaaaagacacaacccagaagacctagacaagaagaaccacgtgaaagaggatgcgagacaagaaacggggttgaggaaaatatctgcaccttgaagcttcacgagaacattgctcgcccttcacgcgctgacttctacaaccctaaagctggtcgcattagtaccctcaacagcctcaccctcccagccctccgccaattccaactcagtgcccaatatgttgtcctctacaaggtatgtaattcacctcattcatattactaagtaatcaacatgaaactaatatacgtacatacttacacatctaccagtaatttttccgtggatattcaattgtcaattagtctatcttgagaaaattaagaaataaaaagaaagcacaaaagggaaaaatctttatgtcataaatcatatgatataataatttagaagacatataaaaatgtcagtaagtatgttgtagggttggattcctttaaatgtcattaaaatatcatttgatatgggtaattctttagtgattctctaggggtagttgaactgtaatgtattataattgtgcattgatttttatgagttactttaacatgtcaatgaagacttatttgataataattatagttacttgttggttctactacttttaataaaaaaataataaaaatattggtgtaaatatataatatataataataatgatgatgatacgtaacacatgttattatatccatgcagaatggaatttactctccacattggaatctgaatgcaaacagtgtgatctatgtgactcgaggacaaggaaaggttagagttgtgaactgccaagggaatgcagtgttcgacggtgagcttaggaggggacaattgctggtggtaccacagaacttcgtggtggcggagcaagccggagaacaaggattcgaatacatagtattcaagacacaccacaacgcagtcactagctacttgaaggatgtgtttagggcaattccctcagaggttcttgcccattcttacaaccttcgacagagtcaagtgtctgagcttaagtatgaaggaaattggggtcctttggtcaaccctgagtctcaacaaggctcaccccgtgttaaagtcgcataaatgacaagcatgatggtgtgaggatgaggccatcttatgaaataataacaaataaataaattttgtatgataataaaaagtatggcccatgtaccatcccagcgagcctatgtttatatctgagtggcgttgtacctttcaatcgccttaataaaatgtcagtcttcacgttttgtcttta

SEQ ID NO: 17 - DNA, 248 bp, Glycine max
  Soybean (Bert) Gy4 glycinin gene Glyma10g04280, genomic fragment
accactcctcatgttctttccaattcaccaactccttcaaacttaattattaacacttccttagttcaatatggggaagcccttcactctctctctttcttccctttgcttgctactcttgtcgagtgcatgctttgctattagctccagcaagctcaacgagtgccaactcaacaacctcaacgcgttggaacccgaccaccgcgttgagtccgaaggtggtttgattcaaacatggaactctcaac

SEQ ID NO: 18 - DNA, 2740 bp, Glycine max
  Soybean Gy5 glycinin gene Glyma13g18450, genomic sequence
atggggaagcccttcttcactctctctctttcttccctttgcttgctactcttgtcgagtgcatgctttgctattacctccagcaagttcaacgagtgccaactcaacaacctcaacgcgttggaacccgaccaccgcgttgagtccgaaggtggtcttattgaaacatggaactctcaacaccctgagctgcaatgcgccggtgtcactgtttccaaacgcaccctcaaccgcaacggcctccacttgccatcttactcaccttatccccaaatgatcattgtcgttcaaggtgcgtaatattagtaagaagtatttatcagcttaacgtgataacaataatagtaatatgaaatatttattaaattttttataattaatctctgctagaaaatttgattaatcatttttagtagaatttgtttttctcaactaggttttaaacaccacattatggcatagtatcatctaataaaactaataataataataataataataatactatatatctatatgtctaatcacaatttgatgactaactatcttacaagttatatgaatgaactcttaacaattatgatgactaaagagtgttaattagttgataattaatgtgattgttttgcttgatgatgattgatgcacagggaagggagcaattggatttgcatttccgggatgtcctgagacgtttgagaagccacaacagcaatcaagcagaagaggctcaaggtcgcagcagcaactacaagacagtcaccagaagattcgtcacttcaatgaaggagacgtactagtgattcctcctggtgttccttactggacctataacactggcgatgaaccagttgttgccatcagtcttcttgacacctccaacttcaacaatcagcttgatcaaaaccccagagtacgtaattataatgagcagtgatacacatgtcactgcatagtatcatacacacttaaaaagacacctaacaaaatattttttattattattttcttttattaaatatactaagtaataaaataattaatatactttatatcacatcatttggatgttatgttttattatttatgaaaaatgtttgaagaacactatcttatatctagagggagaaatgaaaaagaaaaaaatacatataaataggatagaatttataatgtgataagaaaagagaaataagttatattaatggagtgtttaaaatagttggatatatacttgtatcatgattggatatcaattgaacttcatttactattaactattattttattattaaaaaaaacatgttctcctcacatgttaatttttttaattactttcaaggtattttaccttgctgggaacccagatatagagcacccagagaccatgcaacaacagcagcagcagaagagtcatggtggacgcaagcaggggcaacaccagcagcaggaggaagaaggtggcagtgtgctcagtggcttcagcaaacatttcttagcacaatccttcaacaccaacgaggacacagctgagaaacttcggtctccagatgacgaaaggaagcagatcgtgacagtggagggaggcctcagcgttatcagccccaagtggcaagaacaagaagacgaagacgaagatgaagacgaagaatatgaacaaactccctcttatcctccacgacgaccaagccatggaaagcatgaagatgacgaggacgaggacgaagaagaagatcaacctcgtcctgatcaccctccacagcgaccaagcaggcccgaacaacaagaaccacgtggaagaggatgtcagactagaaatggggttgaggaaaatatttgcaccatgaagcttcacgagaacattgctcgcccttcacgtgctgacttctacaacccaaaagctggtcgcattagcaccctcaacagtctcaccctcccagccctccgccaattcggactcagtgcccaatatgttgtcctctacagggtatgtaattcacttcattcatattacaagtaatcaacatgaaactaatatacgtgcatacttgcacatctaccatagtagtgtttttgtggattttcagtgttaattagtgtatcttcagagaaagaaataaaagaaagcactaaaagagggggaaaatcataattcataggtcatatacgatacaataagaagacataaaaatgttaacaagtatgttgtagggttgggttccttttaatgtcatttaaattaaatctcactttgatagataactgatttttagaggttatgtagaggtaattttatagttataatggagtaaaattgtttgtattctaaatttgtgcattgattttttaaagtgagtttcgacatataatttaaaatatatcattacctcttatttgataataattaaacatttatcatttatataataataataataatatgtaacatgtattattatatccatgcatgcagaatggaatttactctccacattggaacttgaacgcgaacagtgtgatctatgtgactcgagggaaaggaagagttagagtggtgaactgccaagggaatgcagtgttcgacggtgagctaaggaggggacaattgctagtggtgccgcagaactttgtggtggctgagcaagggggagaacaaggattggaatacgtagtgttcaagacacaccacaacgccgtgagcagctacattaaggatgtgtttagggcaatcccttcggag

SEQ ID NO: 19 - DNA, 384 bp, Glycine max
  Soybean (Bert) Gy5 glycinin gene Glyma13g18450, genomic fragment
ttcactataaatcgccactcttcgtgttctccacttcaccaactccttcaaacttattaacactttccttagttcaatatggggaagcccttcttcactctctctctttcttccctttgcttgctactcttgtcgagtgcatgctttgctattacctccagcaagttcaacgagtgccaactcaacaacctcaacgcgttggaacccgaccaccgcgttgagtccgaaggtggtcttattgaaacatggaactctcaacaccctgagctgcaatgcgccggtgtcactgtttccaaacgcaccctcaaccgcaacggcctccacttgccatcttactcaccttatccccaaatgatcattgtcgttcaaggtgcgtaatattag

SEQ ID NO: 20 - protein, 299 aa, Triticum aestivum
  Triticum aestivum (cv Jinan177), alpha gliadin protein sequence
MKTFLILALRAIVATTATIAVRVPVPQLQPQNPSQQQPQKQVPLVQQQQFPGQQQPFPPQQPYPQLQPFPSQQPYMQLQPFPQPQLPYPQPQLPYPQPQPFRPQQSYPQPQPQYSQPQQPISQQQQQQQQQQQQQQQILQQILQQQLIPCRDVVLQQHSIAHGSSQVLQQSTYQLVQQLCCQQLWQIPEQSRCQAIHNVVHAIILHQQQQQQQQQQQQQQQQQPLSQVCFQQSQQQYPSGQGSFQPSQQNPQAQGSVQPQQLPQFEEIRNLALETLPAMCNVYIPPYCTIAPVGIFGTN

SEQ ID NO: 21 - protein, 257 aa, Triticum aestivum
  Triticum aestivum (cv TD175), gamma gliadin protein sequence
MNIQVDPSSQVQWPQQQPVPQPHQPFSQQPQQQFLQPQQPFPQQPQQPYPQQPQQPFPQTQQPQQLFPQSQQPQQQFSQPQQQFPQPQQPQQSFPQQQPPFIQPSLQQQVNPCKNFLLQQCKPVSLVSSLWSMIWPQSDCQVMRQQCCQQLAQIPQQLQCAAIHTIIHSIIMQQEQQEQQQGMHILLPLYQQQQVGQGTLVQGQGIIQPQQPAQLEAIRSLVLQTLPTMCNVYVPPECSIIKAPFSSVVAGIGGQYR

SEQ ID NO: 22 - protein, 354 aa, Triticum aestivum
  Triticum aestivum (cv Jinan177), omega gliadin protein sequence
MKPHHDGYKYTCSIIVTFHYPNFKHQDQKHQFQESIKHKSKMKTFIIFVLLSMPMSIVIAARHLNPSDQELQSPQQQFLEKTIISAATISTSTIFTTTTISHTPTIFPPSTTTTISPTPTTNPPTTTMTIPLATPTTTTTFSPAPTTISLATTTTISLAPTTNSPITTTTIPAATPETTTTIPPATRTNNYASTATTISLLTATTTPPATPTTILSATTTTISPAPTIISPATRTNNSLATPTTIPPATATTIPPATRTNNSPATATTIPPAPQQRFPHTRQKFPRNPNNHSLCSTHHFPAQQPFPQQPGQIIPQQPQQPLPLQPQQPFPWQPEQRSSQQPQQPFSLQPQQPFS

SEQ ID NO: 23 - DNA, 402 bp, Artificial
  Mutations within conglycinin beta subunit introduced by GmBCG2_T01 TALE nuclease
acgcgcaaaccaaagaacagagaccgatgtaaagacaaaacatagagtatcctttccaaaacaacgtccaagttcaaaaattgagacgaaatgcaagcacagcacacataagtggatgatcaagatgggctcgtccatgccacgcacaccaacacacgtcaagcagcaagccctcccgtggccaaatgtgcatgcatacatgttaacaagagctagcttctcttgcataactataaatagccctaatctcactccatgtttcatcgtccaataatatatatactatgatgagagtgcggtttcctttgttggtgttgctcagttgtgtctcattaaaggtgagagaaggatgagaataaccctttctactttagaagctctaacagcttccaaactctcttt

SEQ ID NO: 24 - DNA, 498 bp, Artificial
  Mutations within conglycinin beta subunit introduced by GmBCG2_T01 TALE nuclease
  misc_feature (416): n is a or c or t or g
acgcgcaaaccaaagaacagagaccgatgtaaagacaaaaacatagagtatcctttccaaaacaacgtccaagttcataaaatagagacgaaatgcaagcacagcacacataagtggatgatcaagatgggctcgtccatgccacgcacaccaacacacgtcaagcagcaagccctcccgtggccaaatgtgcatgcatacatgttaacaagagctagcttctcttgcataaactataaatagccctaatctcactccatgtttcatcgtccaataatatatatactatgatgagagtgcgtttcctttgtggtgttgctgggaactgtgcatcagtttgtgtctcattaaaggtgagagaggatgagaataacccttctactttagaagctctaacagctccaaactctctttgngaaccaaaacggtcgcattcgtctcctccagagattcaacaaacgctcccacaacttgagaaccttcgagactaccggattg

SEQ ID NO: 25 - DNA, 494 bp, Artificial
  Mutations within conglycinin beta subunit introduced by GmBCG2_T01 TALE nuclease
acgcgcaaaccaaagaacagagaccgatgtaaagacaaaaacatagagtatcctttccaaaacaacgtccaagttcataaaatagagacgaaatgcaagcacagcacacataagtggatgatcaagatgggctcgtccatgccacgcacaccaacacacgtcaagcagcaagccctcccgtggccaaatgtgcatgcatacatgttaacaagagcttgcataactataaatagccctaatctcactccatgtttcatcgtccaataatatatatactatgatgagagtgcggtttcctttgttggtgttgctgggaactgtttatcagtttgtgctcattaaaggtgagaggaggatgagaataacccctttctactttagaagctctaacagcttccaaactctctttgagaaccaaaacggtcgcattcgtctcctccagagattcaacaaacgctccccacaacttgagaaccttcgagactaccggattg

SEQ ID NO: 26 - DNA, 495 bp, Artificial
  Mutations within conglycinin beta subunit introduced by GmBCG2_T01 TALE nuclease
acgcgcaaaccaaagaacagagaccgatgtaaagacaaaaacatagagtatcctttccaaaacaacgtccaagttcataaaatagagacgaaatgcaagcacagcacacataagtggatgatcaagatgggctcgtccatgccacgcacaccaacacacgtcaagcagcaagccctcccgtggccaaatgtgcaatgcatacatgtaaccaagagcttgcataactataaatagccctaatctcactccatgttcatcgtccaataatatatatactatgatgagagtgcggtttcctttgttggtgttgctggaactgtttggcatcagtttgtgtctcattaaaggtgagagaggatgagaataaccctttctactttagaagctctaacagcttccaaactctctttgagaaccaaaacggtcgcattcgtctcctccagagattcaacaaacgctccccacaacttgagaaccttcgagactaccggattg

SEQ ID NO: 27 - DNA, 491 bp, Artificial
  Mutations within conglycinin beta subunit introduced by GmBCG2_T01 TALE nuclease
acgcgcaaaccaaagaacagagaccgatgtaaagacaaaaacatagagtatcctttccaaaacaacgtccaagttcataaaatagagacgaaatgcaagcacagcacacataagtggatgatcaagatgggctcgtccatgccacgcacaccaacacacgtcaagcagcaagccctcccgtggccaaatgtgcatgcatacatgttaacaagagcttgcataactataaatagccctaatctcactccatgatttcatcgtccaataatatatatactatgatcgagagtgcggtttcctttgttggtgttgctgggaacgcatcagtttgtgtctcattaaaggtgagagaggatgagaataaccctttctactttagaagctctaacagcttccaaactctctttgagaaccaaaacggtcgcattcgtctcctccagagattcaacaaacgctccccacaacttgagaacttcgagactaccggattg

SEQ ID NO: 28 - DNA, 505 bp, Artificial
  Mutations within conglycinin beta subunit introduced by GmBCG2_T01 TALE nuclease
  misc_feature (343): n is a or c or t or g
acgcgcaaaccaaagaacagagaccgatgtaaagacaaaaacatagagtatcctttccaaaacaacgtccaagttcaaaaaattgagacgaaatgcaagcacagcacacataagtggatgatcaagatgggctcgtccatgccacgcacaccaacacacgtcaagcagcaagccctcccgtggccaaatgtgcatgcatacatgttaacaagagctagcttctcttgcataactataaatagccctaatctcactccatgtttcatcgtccaataatatactatacatatgatgagagtgcggtttccttgttggtgttgctgggaactgtttcatgcagttntgtctccattaaaggtgagagaggatgagaataaccctttctacttgagaagctctaacagcttccaaactctctttgagaaccaaaacggtcgcattcgtctcctccagagattcaacaaacgctccccacaacttgagaaccttcgagactaccggattg

SEQ ID NO: 29 - DNA, 372 bp, Artificial
  Mutations within conglycinin beta subunit introduced by GmBCG2_T01 TALE nuclease
acgcgcaaaccaaagaacagagaccgatgtaaagacaaaaacatagagtatcctttccaaaacaacgtccaagttcataaaatagagacgaaatgcaagcacagcacacataagtggatgatcaagatgggctcgtccatgccacgcacaccaacacacgtcaagcagcaagccctcccgtggccaaatgtgcatgcatacatgttaaccaagatgcttgcataactataaatagccctaatctcacttcatgtttcatcgtccaataatatatatactatgatgagagtgcggtttcctttgttggtgttgctgggaactgttggcatcagttgtgctcattaaaggtgagaggaggatgagaataacccc

SEQ ID NO: 30 - DNA, 446 bp, Artificial
  Mutations within conglycinin beta subunit introduced by GmBCG2_T01 TALE nuclease
  misc_feature (368): n is a or c or t or g
acgcgcaaaccaaagaacagagaccgatgtaaagacaaaaacatagagtatcctttccaaaacaacgtccaagttcaaaaaattgagacgaaatgcaagcacagcacacataagtggatgatcaagatgggctcgtccatgccacgcacaccaacacacgtcaagcagcaagccctcccgtggccaaatgtgcatgcatacatgttaacaagagctagcattctcttgcataactataaatagccctaatctccactccatgtttccatcgtccaataatatatatactatgatgagagtgcggttcctttgttgtgtctcattaaaggtgagagaggatgagaataaccctttctactttagaagcnctaaacagcttccaaaactctctttgagaaccaaaacggtcgcttcgtctcctccagagattcaacaaacgctcccca

SEQ ID NO: 31 - DNA, 493 bp, Artificial
  Mutations within conglycinin beta subunit introduced by GmBCG2_T01 TALE nuclease
acgcgcaaaccaaagaacagagaccgatgtaaagacaaaaacatagagtatcctttccaaaacaacgtccaagttcataaaatagagacgaaatgcaagcacagcacacataagtggatgatcaagatgggctcgtccatgccacgcacaccaacacacgtcaagcagcaagccctcccgtggccaaatgtgcatgcatacatgttaacaagagcttgcataactataaatagccctaatctcactccatgtttcatcgtccaataatatatatactatgatgagagtgcggtttcctttgttggtgttgctgggaactgtcatcagtttgtgtctcattaaaaggtgagagaggatgagaataaccctttctactttagaagctctaacagcttccaaactctctttgagaaccaaaacggtcgcattcgtctcctccagagattcaacaaacgctccccacaacttgagaaccttcgagacgaccggattg

SEQ ID NO: 32 - DNA, 469 bp, Artificial
  Mutations within conglycinin beta subunit introduced by GmBCG2_T01 TALE nuclease
acgcgcaaaccaaagaacagagaccgatgtaaagacaaaaacatagagtatcctttccaaaacaacgtccaagttcaaaaaattgagacgaaatgcaagcacagcacacataagtggatgatcaagatgggctcgtccatgccacgcacaccaacacacgtcaagcagcaagccctcccgtggccaaatgtgcatgcatacatgttaacaagagctagcttctcttgcataactataaatagccctaatctcactccatgtttcatcgtccaataatatatatactatgatgagagtgcggttcctttgttggtgttgctgtgagagaggatgagaataaccctttctacttgagaagctctaacagcttccaaactctcttttgagaaccaaaaacggtcgcattcgtctcctccagagattcaaacaaacgctcccccaacaacttgagaaccttcgagactaccgg

SEQ ID NO: 33 - DNA, 494 bp, Artificial
  Mutations within conglycinin beta subunit introduced by GmBCG2_T01 TALE nuclease
  misc_feature (376); (385): n is a or c or t or g
acgcgcaaaccaaagaacagagaccgatgtaaagacaaaaacatagagtatcctttccaaaacaacgtccaagttcataaaatagagacgaaatgcaagcacagcacacataagtggatgatcaagatgggctcgtccatgccacgcacaccaacacacgtcaagcagcaagccctcccgtggccaaatgtgcatgcatacatgttaacaagagcttgcataactataaatagccctaatctcactccatgatttcatcgtccaataatatatatactatgatgagagtgcggtttcctttgttggtgttgctgggaacctggctatcagtttgtgtctcattaaaggtgagagaggatgagaataacccctttcnactttgagntctaacagctccaaactctctttgagaaccaaaacggatcgcattcgtctcctccagagattcaacaaacgctccccacaacttgagaaccttcgagactaccggattg

SEQ ID NO: 34 - DNA, 439 bp, Artificial
  Mutations within conglycinin beta subunit introduced by GmBCG2_T01 TALE nuclease
acgcgcaaaccaaagaacagagaccgatgtaaagacaaaaacatagagtatcctttccaaaacaacgtccaagttcaaaaaattgagacgaaaatgcaagcacagcacacataagtggatgatcaagatgggctcgtccatgccacgcacaccaacacacgtcaagcagcaagccctcccgtggccaaatgtgcatgcatacatgttaacaagagctagcattctacttgcataactataaatagccctaatctcactccatgtttccatcagtttgtgtctcattaaaggtgagagaggatgagaataacccttcgtacttgagaagctctaacagcttccaaactctctttgagaaccaaaacggtcgcattcgtctcctccagagattcaaacaaacgctccccacaacttgagaaccttcgagactaccggattg

SEQ ID NO: 35 - DNA, 493 bp, Artificial
  Mutations within conglycinin beta subunit introduced by GmBCG2_T01 TALE nuclease
acgcgcaaaccaaagaacagagaccgatgtaaagacaaaaacatagagtatcctttccaaaacaacgtccaagttcataaaatagagacgaaatgcaagcacagcacacataagtggatgatcaagatgggctcgtccatgccacgcacaccaacacacgtcaagcagcaagccctcccgtggccaaatgtgcatgcatacatgttaacaagagcttgcataactataaatagccctaatctcactccatgtttcatcgtccaataatatatatactatgatgagagtgcggtttcctttgttggtgttgctgggaactgttatcagtttgtgtctcattaaaggtgagagaggatgagaataacccctttctactttagaagctctaacagcttccaaactctctttgagaaccaaaacggtcgcattcgtctcctccagagattcaacaaacgctccccacaacttgagaaccttcgagactaccggattg

SEQ ID NO: 36 - DNA, 491 bp, Artificial
  Mutations within conglycinin beta subunit introduced by GmBCG2_T01 TALE nuclease
acgcgcaaaccaaagaacagagaccgatgtaaagacaaaaacatagagtatcctttccaaaacaacgtccaagttcataaaatagagacgaaatgcaagcacagcacacataagtggatgatcaagatgggctcgtccatgccacgcacaccaacacacgtcaagcagcaagccctcccgtggccaaatgtgcatgcatacatgttaacaagagcttgcataactataaatagccctaatctcactccatgtttcatcgtccaataatatatatactatgatgagagtgcggtttcctttgttggtgttgctgggaactgcatcagtttgtgtctcattaaaggtgagagaggatgagaataaccctttctactttagaagctctaacagcttccaaactctctttgagaaccaaaacggtcgcattcgtctcctccagagattcaacaaacgctccccacaacttgagaaccttcgagactaccggattg

SEQ ID NO: 37 - DNA, 487 bp, Artificial
  Mutations within conglycinin beta subunit introduced by GmBCG2_T01 TALE nuclease
acgcgcaaaccaaagaacagagaccgatgtaaagacaaaaacatagagtatcctttccaaaacaacgtccaagttcataaaatagagacgaaatgcaagcacagcacacataagtggatgatcaagatgggctcgtccatgccacgcacaccaacacacgtcaagcagcaagccctcccgtggccaaatgtgcatgcatacatgttaacaagagcttgcataactataaatagccctaatctcactccatgtttcatcgtccaataatatatatactatgatgagagtgcggtttcctttgttggtgttgctggggcatcagttgtgtctcattaaaggtgagagaggatgagaataaccctttctacttgagaagctctaacagcttccaaaactctctttgagaaccaaaacggtcgcattcgtctcctccagagattcaacaaacgctccccacaacttgagaaccttcgagactaccggattg

SEQ ID NO: 38 - DNA, 504 bp, Artificial
  Mutations within conglycinin beta subunit introduced by GmBCG2_T01 TALE nuclease
  misc_feature (385): n is a or c or t or g
acgcgcaaaccaaagaacagagaccgatgtaaagacaaaaacatagagtatcctttccaaaacaacgtccaagttcaaaaaattgagacgaaatgcaagcacagcacacataagtggatgatcaagatgggctcgtccatgccacgcacaccaacacacgtcaagcagcaagccctcccgtggccaaatgtgcatgcatagcatgttaacaagagctagcttctcttgcataactataaatagccctaatctcactccatgtttcatcgtccaaataatatatatactatgatgagagtgcggtttcctttgttggtgttgctgggaactgtttcagtttgtgtctcattaaaggtgagagaggatgagaataacccctttctanttgagaagctctaacagcttccaaactctctttgagaaccaaaacggtcgcattcgtctcctccaagagattcaacaaacgctccccacaacttgagaaccttcgagactaccggattg

SEQ ID NO: 39 - DNA, 471 bp, Artificial
  Mutations within conglycinin beta subunit introduced by GmBCG2_T01 TALE nuclease
acgcgcaaaccaaagaacagagaccgatgtaaagacaaaaacatagagtatcctttccaaaacaacgtccaagttcaaaaaattgagacgaaatgcaagcacagcacacataagtggatgatcaagatgggctcgtccatgccacgcacaccaacacacgtcaagcagcaagccctcccgtggccaaatgtgcatgcatacatgttaacaagagctagcattctcttgcataactataaatatgccctaatctcactccatagtttcatcgtccaataatatatatactatgatgagagtgcggtttcctttgttggtgttgctggtgagagaggatgagaaataaccctttctacttgagaagctctaacagcttccaaactctcttttgagaaccaaaaacggtcgcattcgtctccttccagagattcaacaaacgctcccccaacaacttgagaaccttcgagacta

SEQ ID NO: 40 - DNA, 500 bp, Artificial
  Mutations within conglycinin beta subunit introduced by GmBCG2_T01 TALE nuclease
acgcgcaaaccaaagaacagagaccgatgtaaagacaaaaacatagagtatcctttccaaaacaacgtccaagttcaaaaaattgagacgaaatgcaagcacagcacacataagtggatgatcaagatgggctcgtccatgccacgcacaccaacacacgtcaagcagcaagccctcccgtggccaaatgtgcatgcatacatgttaacaagagctagcttctcttgcataactataaatagccctaatctcactccatgtttcatcgtccaataatatatatactatgatgagagtgcggttccttgttggtgttgctgggaactgttgcatcagtttgtgtctcattaaaggtgagagaggatgagaataacctttctacttgagaagctctaacagcttccaaactctctttgagaaccaaaacggtcgcattcgtctcctccagagattcaacaaacgctccccacaacttgagaaccttcgagactaccggattg

SEQ ID NO: 41 - DNA, 504 bp, Artificial
  Mutations within conglycinin beta subunit introduced by GmBCG2_T01 TALE nuclease
acgcgcaaaccaaagaacagagaccgatgtaaagacaaaaacatagagtatcctttccaaaacaacgtccaagttcaaaaaattgagacgaaatgcaagcacagcacacataagtggatgatcaagatgggctcgtccatgccacgcacaccaacacacgtcaagcagcaagccctcccgtggccaaatgtgcatgcatacatgttaacaagagctagcttctcttgcataactataaatagccctaatctcactccatgtttcatcgtccaataatatatatactatgatgagagtgcggtttcctttgttggtgttgctgggaactgttttaatcagtttgtgtctcattaaaggtgagagaggatgagaataaccctttctacttgagaagctctaacagcttccaaactctctttgagaaccaaaacggtcgcattcgtctcctccagagattcaacaaacgctccccacaacttgagaaccttcgagactaccggattg

SEQ ID NO: 42 - DNA, 520 bp, Artificial
  Mutations within conglycinin beta subunit introduced by GmBCG2_T01 TALE nuclease
  misc_feature (405): n is a or c or t or g
acgcgcaaaccaaagaacagagaccgatgtaaagacaaaaacatagagtatcctttccaaaacaacgtccaagttcaaaaattgagacgaaatgcaagcacagcacatcataagtggatgatcaagatgggctcgtccatggccatccgtcatgcaccaacgaacatcgtcaagtcagcaagccctcccgtggccaaatgatgcatgcatagcatgttaaccaagatgctttgcaataactataaaatagccctaaatctcacttcaatcgtttcgatcgtccaataatatatatactatgatcgagagtgcggtttcctttgttggtgttgctgggaactgtttactcagtttgtgctccagttaaaggagagaggagggattgagaataacccccttttctantttagaagctctaacagcttccaaactctctttgagaaccaaaacggtcgcattcgtctcctccagagattcaacaaacgctccccacaacttgagaaccttcgagactaccgga

SEQ ID NO: 43 - DNA, 494 bp, Artificial
  Mutations within conglycinin beta subunit introduced by GmBCG2_T01 TALE nuclease
acgcgcaaaccaaagaacagagaccgatgtaaagacaaaaacatagagtatcctttccaaaacaacgtccaagttcataaaatagagacgaaatgcaagcacagcacacataagtggatgatcaagatgggctcgtccatgccacgcacaccaacacacgtcaagcagcaagccctcccgtggccaaatgtgcatgcatacatgttaacaagagcttgcataactataaatagccctaatctcactccatgtttcatcgtccaataatatatatactatgatgagagtgcggtttcctttgttggtgttgctgggaactgttggcatcagtttgtgtctcattaaaggtgagagaggatgagaataaccctttctactttagaagctctaacagcttccaaactctctttgagaaccaaaacggtcgcattcgtctcctccagagattcaacaaacgctcccacaacttgagaaccttcgagactaccggattg

SEQ ID NO: 44 - DNA, 491 bp, Artificial
  Mutations within conglycinin beta subunit introduced by GmBCG2_T01 TALE nuclease
acgcgcaaaccaaagaacagagaccgatgtaaagacaaaaacatagagtatcctttccaaaacaacgtccaagttcataaaatagagacgaaatgcaagcacagcacacataagtggatgatcaagatgggctcgtccatgccacgcacaccaacacacgtcaagcagcaagccctcccgtggccaaatgtgcatgcatacatgttaacaagagcttgcataactataaatagccctaatctcactccatgtttcatcgtccaataatatatatactatgatgagagtgcggtttcctttgttggtgttgctgggaactgtttatcagtttgtgctcattaaaggtgagagaggatgagaataaccctttctactttagaagctctaacagcttccaaactctctttgagaaccaaaacggtcgcattcgtctcctccagagattcaacaaacgctcccacaacttgagaaccttcgagactaccggattg

SEQ ID NO: 45 - DNA, 505 bp, Artificial
  Mutations within conglycinin beta subunit introduced by GmBCG2_T01 TALE nuclease
acgcgcaaaccaaagaacagagaccgatgtaaagacaaaaacatagagtatcctttccaaaacaacgtccaagttcaaaaaattgagacgaaatgcaagcacagcacacataagtggatgatcaagatgggctcgtccatgccacgcacaccaacacacgtcaagcagcaagccctcccgtggccaaatgtgcatgcatacatgttaacaagagctagcttctcttgcataactataaatagccctaatctcactccatgtttcatcgtccaataatatatatacatatgatgagagtgcggtttcctttgttggtgttgctgggaactgtggcatccagtttgtgtctcattaaaggtgagagaggatgagaataaccctttctacttgagaagctctaacagcttccaaactctctttgagaaccaaaacggtcgcattcgtctcctccagagattcaacaaacgctccccacaacttgagaaccttcgagactaccggattg

SEQ ID NO: 46 - DNA, 371 bp, Artificial
  Mutations within conglycinin beta subunit introduced by GmBCG2_T01 TALE nuclease
acgcgcaaaccaaagaacagagaccgatgtaaagacaaaaacatagagtatcctttccaaaacaacgtccaagttcataaaatagagacgaaatgcaagcacagcacacataagtggatgatcaagatgggctcgtccatgccacgcacaccaacacacgtcaagcagcaagccctcccgtggccaaatgtgcatgcatacatgttaacaagagctagcttctcttgcataactataaatagccctaatctcactccatgtttcatcgtccaataatatatatactatgatgagagtgcggttcctttgttggtgttgctgggaactgtttcagtttgtgtctcattaaaggtgagagaggatgagaataa

SEQ ID NO: 47 - DNA, 496 bp, Artificial
  Mutations within conglycinin beta subunit introduced by GmBCG2_T01 TALE nuclease
acgcgcaaaccaaagaacagagaccgatgtaaagacaaaaacatagagtatcctttccaaaacaacgtccaagttcataaaatagagacgaaatgcaagcacagcacacataagtggatgatcaagatgggctcgtccatgccacgcacaccaacacacgtcaagcagcaagccctcccgtggccaaatgtgcatgcatacatgttaacaagagcttgcataactataaatagccctaatctcactccatgtttcatcgtccaataatatatatactatgatgagagtgcggtttcctttgttggtgttgctgggaactgttttgcatcagtttgtgctcattaaaggtgagagaggatgagaataacccctttctacttgagaagctctaacagcttccaaactctctttgagaaccaaaacggtcgcattcgtctcctccagagattcaacaaacgctccccacaacttgagaaccttcgagactaccggattg

SEQ ID NO: 48 - DNA, 493 bp, Artificial
  Mutations within conglycinin beta subunit introduced by GmBCG2_T01 TALE nuclease
  misc_feature (375): n is a or c or t or g
acgcgcaaaccaaagaacagagaccgatgtaaagacaaaaacatagagtatcctttccaaaacaacgtccaagttcataaaatagagacgaaatgcaagcacagcacacataagtggatgatcaagatgggctcgtccatgccacgcacaccaacacacgtcaagcagcaagccctcccgtggccaaatgtgcatgcatacatgttaacaagagctagcttctcttgcataactataaatagccctaatctcactccatgtttcatcgtccaaataatatatatactatgatgagagtgcggtttcctttgttggtgttgcatcagtttgtgtctcattaaaggtgagaggaggatgagaataacccctttctantttagaagctctaacagcttccaaactctctttgagaaccaaaacggtcgcattcgtctcctccagagattcaacaaacgctccccacaacttgagaaccttcgagactaccggattg

SEQ ID NO: 49 - DNA, 492 bp, Artificial
  Mutations within conglycinin beta subunit introduced by GmBCG2_T01 TALE nuclease
acgcgcaaaccaaagaacagagaccgatgtaaagacaaaaacatagagtatcctttccaaaacaacgtccaagttcataaaatagagacgaaatgcaagcacagcacacataagtggatgatcaagatgggctcgtccatgccacgcacaccaacacacgtcaagcagcaagccctcccgtggccaaatgtgcatgcatacatgttaacaagagcttgcataactataaatagccctaatctcactccatgtttcatcgtccaataatatatatactatgatgagagtgcggtttcctttgttggtgttgctgggaactgtcatcagtttgtgtctcattaaaggtgagagaggatgagaataaccctttctactttagaagctctaacagcttccaaactctctttgagaaccaaaacggtcgcattcgtctcctccagagattcaacaaacgctccccacaacttgagaaccttcgagacgaccggattg

SEQ ID NO: 50 - DNA, 498 bp, Artificial
  Mutations within conglycinin beta subunit introduced by GmBCG2_T01 TALE nuclease
acgcgcaaaccaaagaacagagaccgatgtaaagacaaaaacatagagtatcctttccaaaacaacgtccaagttcataaaatagagacgaaatgcaagcacagcacacataagtggatgatcaagatgggctcgtccatgccacgcacaccaacacacgtcaagcagcaagccctcccgtggccaaatgtgcatgcatacatgttaacaagagcttgcataactataaatagccctaatctcactccatgtttcatcgtccaataatatatatactatgatgagagtgcggtttcctttgttggtgttgctgggaactgtttatcaagtttgtgctcattaaaaggtgagaggaggatgagaaataacccctttctactttagaagctctaacagcttccaaactctctttgagaaccaaaaacggtcgcattcgtctcctccagagattcaacaaacgctccccacaacttgagaaccttcgagactaccggattg

SEQ ID NO: 51 - DNA, 392 bp, Artificial
  Mutations within conglycinin beta subunit introduced by GmBCG2_T01 TALE nuclease
acgcgcaaaccaaagaacagagaccgatgtaaagacaaaaacatagagtatcctttccaaaacaacgtccaagttcataaaatagagacgaaatgcaagcacagcacacataagtggatgatcaagatgggctcgtccatgccacgcacaccaacacacgtcaagcagcaagccctcccgtggccaaatgtgcatgcatacatgttaacaagagcttgcataactataaatcagccctaatctcactccatgttcatcgtccaacagtttgtgtctcattaaaggtgagagaggatgagaataaccctttctactttagaagctctaacagcttccaaactctctttgagaaccaaaacggtcgcattcgtctcctccagagattcaacaaa

SEQ ID NO: 52 - DNA, 492 bp, Artificial
  Mutations within conglycinin beta subunit introduced by GmBCG2_T01 TALE nuclease
  misc_feature (375): n is a or c or t or g
acgcgcaaaccaaagaacagagaccgatgtaaagacaaaaacatagagtatcctttccaaaacaacgtccaagttcataaaatagagacgaaatgcaagcacagcacacataagtggatgatcaagatgggctcgtccatgccacgcacaccaacacacgtcaagcagcaagccctcccgtggccaaatgtgcatgcatacatgttaacaagagcttgcataactataaatagccctaatctcacttccatgttcatcgtccaataatatatatactatgatcgagagtgcggtttcctttgttggtgttgctggctggcaatcagtttgtgtctcattaaaggtgagaggaggatgagaataacccctttctantgagaagctctaacagcttccaaactctctttgagaaccaaaacggtcgcattcgtctcctccagagattcaacaaacgctccccacaacttgagaaccttcgagactaccggattg

SEQ ID NO: 53 - DNA, 489 bp, Artificial
  Mutations within conglycinin beta subunit introduced by GmBCG2_T01 TALE nuclease
  misc_feature (406): n is a or c or t or g
acgcgcaaaccaaagaacagagaccgatgtaaagacaaaaacatagagtatcctttccaaaacaacgtccaagttcataaaatagagacgaaatgcaagcacagcacacataagtggatgatcaagatgggctcgtccatgccacgcacaccaacacacgtcaagcagcaagccctcccgtggccaaatgtgcatgcatacatgttaacaagagcttgcataactataaatagccctaatctcactccatgttcatcgtccaataatatatatactatgatcgagagtgcggtttcctttgttggtgttgctcctggcatcagtttgtgctcattaaaggtgagaggaggatgagaataacccctttctacttgagaagctctaacagcttccaaactctctttgngaaccaaaacggtcgcattcgtctcctccagagattcaacaaacgctccccacaacttgagaaccttcgagactaccggattg

SEQ ID NO: 54 - DNA, 508 bp, Artificial
  Mutations within conglycinin beta subunit introduced by GmBCG2_T01 TALE nuclease
  misc_feature (341): n is a or c or t or g
acgcgcaaaccaaagaacagagaccgatgtaaagacaaaaacatagagtatcctttccaaaacaacgtccaagttcaaaaaattgagacgaaatgcaagcacagcacacataagtggatgatcaagatgggctcgtccatgccacgcacaccaacacacgtcaagcagcaagccctcccgtggccaaatgtgcatgcatacatgttaacaagagctagcttctcttgcataactataaatagccctaatctcactccatgtttcatcgtccaataatatatatactatgatgagagtgcggtttcctttgttggtgttgctgggaagttctgttccagcantttgtgtcctcattaaaggtgagagaggatgagaataaccctttctacttgagaagctctaacagcttccaaactctctttgagaaccaaaacggtcgcattcgtctcctccagagattcaacaaaacgctccccacaacttgagaaccttcgagactaccggattg

SEQ ID NO: 55 - DNA, 372 bp, Artificial
  Mutations within conglycinin beta subunit introduced by GmBCG2_T01 TALE nuclease
acgcgcaaaccaaagaacagagaccgatgtaaagacaaaaacatagagtatcctttccaaaacaacgtccaagttcataaaatagagacgaaatgcaagcacagcacacataagtggatgatcaagatgggctcgtccatgccacgcacaccaacacacgtcaagcagcaagccctcccgtggccaaatgtgcatgcatacatgttaacaagagcttgcataactataaatagccctaatctcactccatgtttcatcgtccaataatatatatactatgatgagagtgcggtttcctttgttggtgttgctgggaactgttcagcggctgttgccggtgctgtgccaggcccacggcttgacccccctcgc

SEQ ID NO: 56 - DNA, 506 bp, Artificial
  Mutations within conglycinin beta subunit introduced by GmBCG2_T01 TALE nuclease
acgcgcaaaccaaagaacagagaccgatgtaaagacaaaaacatagagtatcctttccaaaacaacgtccaagttcaaaaaattgagacgaaatgcaagcacagcacacataagtggatgatcaagatgggctcgtccatgccacgcacaccaacacacgtcaagcagcaagccctcccgtggccaaatgtgcatgcatacatgttaacaagagctagcttctcttgcataactataaatagccctaatctcactccatgtttcatcgtccaataatatatatactatgatgagagtgcggtttcctttgttggtgttgctgggatgagtgccggtttcagtttgtgtctcattaaaggtgagagaggatgagaataaccctttctacttgagaagctctaacagcttccaaactctctttgagaaccaaaacggtcgcattcgtctcctccagagattcaacaaacgctccccacaacttgagaaccttcgagactaccggattg

SEQ ID NO: 57 - DNA, 507 bp, Artificial
  Mutations within conglycinin beta subunit introduced by GmBCG2_T01 TALE nuclease
acgcgcaaaccaaagaacagagaccgatgtaaagacaaaaacatagagtatcctttccaaaacaacgtccaagttcaaaaaattgagacgaaatgcaagcacagcacacataagtggatgatcaagatgggctcgtccatgccacgcacaccaacacacgtcaagcagcaagccctcccgtggccaaatgtgcatgcatacatgttaacaagagctagcttctcttgcataactataaatagccctaatctcactccatgtttcatcgtccaataatatatatactatgatgagagtgcggtttcctttgttggtgttcagactggttcatgttccatgcactttgtgtctcattaaaggtgagagaggatgagaataaccctttctacttgagaagctctaacagcttccaaactctctttgagaaccaaaacggtcgcattcgtctcctccagagattcaacaaacgctccccacaacttgagaaccttcgagactaccggattg

SEQ ID NO: 58 - DNA, 489 bp, Artificial
  Mutations within conglycinin beta subunit introduced by GmBCG2_T01 TALE nuclease
acgcgcaaaccaaagaacagagaccgatgtaaagacaaaaacatagagtatcctttccaaaacaacgtccaagttcataaaatagagacgaaatgcaagcacagcacacataagtggatgatcaagatgggctcgtccatgccacgcacaccaacacacgtcaagcagcaagccctcccgtggccaaatgtgcatgcatacatgttaacaagagcttgcataactataaatagccctaatctcactccatgtttcatcgtccaataatatatatactatgatgagagtgcggtttcctttgttggtgttgctgggtggcatcagtttgtgtctcattaaaggtgagagaggatgaggaataaccctttctactttagaagctctaacagcttccaaactctctttgagaaccaaaacggtcgcattcgtctcctccagagattcaacaaacgctccccacaacttgagaacttcgagactaccggattg

SEQ ID NO: 59 - DNA, 378 bp, Artificial
  Mutations within conglycinin beta subunit introduced by GmBCG2_T01 TALE nuclease
acgcgcaaaccaaagaacagagaccgatgtaaagacaaaaacatagagtatcctttccaaaacaacgtccaagttcataaaatagagacgaaatgcaagcacagcacacataagtggatgatcaagatgggctcgtccatgccacgcacaccaacacacgtcaagcagcaagccctcccgtggccaaatgtgcatgcatacatgttaacaagagcttgcataactataaatagccctaatctcactccatgtttcatcgtccaataatatatatactatgatgagagtgcggtttcctttgttggtgttgctgggaatggacgtagcccatcgttgatcagtttgtgtctcattaaaggtgagagaggatgagaataa

SEQ ID NO: 60 - DNA, 434 bp, Artificial
  Mutations within conglycinin beta subunit introduced by GmBCG2_T01 TALE nuclease
acgcgcaaaccaaagaacagagaccgatgtaaagacaaaaacatagagtatcctttccaaaacaacgtccaagttcaaaaaattgagacgaaatgcaagcacagcacacataagtggatgatcaagatgggctcgtccatgccacgcacaccaacacacgtcaagcagcaagccctcccgtggccaaatgtgcatgcatacatgttaaccaagagctagcattctcttgcataaactataaatatgccctaatctcactccatgtttcatcgtccaataatatatatactatgatgagagtgcggtttcctttgttggtgagagaggatgagaataaccctttctacttgagaagctctaacagcttccaaactctctttgagaaccaaaacggtcgcattcgtctcctccagagattcaacaaacgctccccc

SEQ ID NO: 61 - DNA, 493 bp, Artificial
  Mutations within conglycinin beta subunit introduced by GmBCG2_T01 TALE nuclease
acgcgcaaaccaaagaacagagaccgatgtaaagacaaaaacatagagtatcctttccaaaacaacgtccaagttcataaaatagagacgaaatgcaagcacagcacacataagtggatgatcaagatgggctcgtccatgccacgcacaccaacacacgtcaagcagcaagccctcccgtggccaaatgtgcatgcatacatgttaacaagagcttgcataactataaatagccctaatctcactccatgtttcatcgtccaataatatatatactatgatgagagtgcggtttcctttgttggtgttgctgggaactgtatcagtttgtgtctcattaaaggtgagaggaggatgagaataacccctttctactttagaagctctaacagcttccaaactctctttgagaaccaaaacggtcgcattcgtctcctccagagattcaacaaacgctccccacaacttgagaaccttcgagactaccggattg

SEQ ID NO: 62 - DNA, 496 bp, Artificial
  Mutations within conglycinin beta subunit introduced by GmBCG2_T01 TALE nuclease
acgcgcaaaccaaagaacagagaccgatgtaaagacaaaaacatagagtatcctttccaaaacaacgtccaagttcataaaatagagacgaaatgcaagcacagcacacataagtggatgatcaagatgggctcgtccatgccacgcacaccaacacacgtcaagcagcaagccctcccgtggccaaatgtgcatgcatacatgttaacaagagcttgcataactataaatagccctaatctcactccatgtttcatcgtccaataatatatatactatgatgagagtgcggtttcctttgttggtgttgctgggaactgttggcatcagtttgtgtctcattaaaggtgagagaggatgagaataacccctttctactttagaagctctaacagcttccaaactctctttgagaaccaaaacggtcgcattcgtctcctccagagattcaacaaacgctccccacaacttgagaaccttcgagactaccggattg

SEQ ID NO: 63 - DNA, 505 bp, Artificial
  Mutations within conglycinin beta subunit introduced by GmBCG2_T01 TALE nuclease
acgcgcaaaccaaagaacagagaccgatgtaaagacaaaaacatagagtatcctttccaaaacaacgtccaagttcataaaatagagacgaaatgcaagcacagcacacataagtggatgatcaagatgggctcgtccatgccacgcacaccaacacacgtcaagtcagcaagccctcccgtggccaaatgtgcatgcatacatgttaaccaagatgcttgcataactataaatagccctaatctcacttccatgtttcatcgtccaataatatatatactatgatcgagagtgcggtttcctttgttggtgttgctgggaactgttgccatcaagtttgtgctcattaaaaggtgagaggaggatgagaaataaccccttttctactttagaagctctaacagcttccaaactctctttgagaaccaaaacggtcgcattcgtctcctccagagattcaacaaacgctccccacaacttgagaaccttcgagactaccggattg

SEQ ID NO: 64 - DNA, 498 bp, Artificial
  Mutations within conglycinin beta subunit introduced by GmBCG2_T01 TALE nuclease
acgcgcaaaccaaagaacagagaccgatgtaaagacaaaaacatagagtatcctttccaaaacaacgtccaagttcaaaaatagagacgaaatgcaagcacagcacacataagtggatgatcaagatgggctcgtccatgccacgcacaccaacacacgtcaagcagcaagccctcccgtggccaaatgtgcatgcatacatgttaacaagagcttgcataactataaatagccctaatctcactccatgtttcatcgtccaataatatatatactatgatgagagtgcggtttcctttgttggtgttgctgggaactgtttagccatcagtttgtgtctcattaaaaggtgagagaggatgagaataacccctttctacttgagaagctctaacagcttccaaactctctttgagaaccaaaacggtcgcattcgtctcctccagagattcaacaaacgctccccacaacttgagaaccttcgagactaccggattg

SEQ ID NO: 65 - DNA, 498 bp, Artificial
  Mutations within conglycinin beta subunit introduced by GmBCG2_T01 TALE nuclease
acgcgcaaaccaaagaacagagaccgatgtaaagacaaaaacatagagtatcctttccaaaacaacgtccaagttcataaaatagagacgaaatgcaagcacagcacacataagtggatgatcaagatgggctcgtccatgccacgcacaccaacacacgtcaagcagcaagccctcccgtggccaaatgtgcatgcatacatgttaaccaagagcttgcataactataaatagccctaatctcactccaatgtttcatcgtccaataatatatatactatgaatgagagtgcggtttcctttgttggtgttgctgggaactgtttgcatcagtttgtgctcattaaaggtgagagaggatgagaataacccctttctactttagaagctctaacagcttccaaactctctttgagaaccaaaacgatcgcattcgtctcctccagagattcaacaaacgctccccacaacttgagaaccttcgagactaccggattg

SEQ ID NO: 66 - DNA, 499 bp, Artificial
  Mutations within conglycinin beta subunit introduced by GmBCG2_T01 TALE nuclease
acgcgcaaaccaaagaacagagaccgatgtaaagacaaaaacatagagtatcctttccaaaacaacgtccaagttcataaaatagagacgaaatgcaagcacagcacacataagtggatgatcaagatgggctcgtccatgccacgcacaccaacacacgtcaagcagcaagccctcccgtggccaaatgtgcatgcatacatgttaacaagagcttgcataactataaatagccctaatctcactccatgtttcatcgtccaataatatatatactatgatgagagtgcggtttcctttgttggtgttgctgggaactgtttggcatcagtttgtgctcattaaaaggtgagaggaggatgagaaataacccctttctacttgagaagctctaacagcttccaaactctctttgagaaccaaaacggtcgcattcgtctcctccagagattcaacaaacgctccccacaacttgagaaccttcgagactaccggattg

SEQ ID NO: 67 - DNA, 503 bp, Artificial
  Mutations within conglycinin beta subunit introduced by GmBCG2_T01 TALE nuclease
acgcgcaaaccaaagaacagagaccgatgtaaagacaaaaacatagagtatcctttccaaaacaacgtccaagttcaaaaaattgagacgaaaatgcaagcacagcacacataaagtggatgatcaagatgggctcgtccatgccacgcacaccaacacacgtcaagcagcaagccctcccgtggccaaatgtgcatgcatacatgttaacaagagctagcttctcttgcataactataaatagccctaatctcactccatgtttcatcgtccaataatatatatactatgatgagagtgcggtttcctttgttggtgttgctgggaactgttgcatcagtttgtgtctcattaaaggtgagagaggatgagaataaccttctacttgagaagctctaacagcttccaaactctctttgagaaccaaaacggtcgcattcgtctcctccagagattcaacaaacgctccccacaacttgagaaccttcgagactaccggattg

SEQ ID NO: 68 - DNA, 504 bp, Artificial
  Mutations within conglycinin beta subunit introduced by GmBCG2_T01 TALE nuclease
acgcgcaaaccaaagaacagagaccgatgtaaagacaaaaacatagagtatcctttccaaaacaacgtccaagttcaaaaaattgagacgaaatgcaagcacagcacacataagtggatgatcaagatgggctcgtccatgccacgcacaccaacacacgtcaagcagcaagccctcccgtggccaaatgtgcatgcatagcatgttaacaagagctagcttctcttgcataactataaatagccctaatctcactccatgtttcatcgtccaataatatatatactatgatgagagtgcggtttcctttgttggtgttgctgggaactgttgcatcagtttgtgtctcattaaaggtgagagaggatgagaataaccctttctacttgagaagctctaacagcttccaaactctctttgagaaccaaaacggtcgcattcgtctcctccagagattcaacaaacgctccccacaacttgagaaccttcgagactaccggattg

SEQ ID NO: 69 - DNA, 504 bp, Artificial
  Mutations within conglycinin beta subunit introduced by GmBCG2_T01 TALE nuclease
acgcgcaaaccaaagaacagagaccgatgtaaagacaaaaacatagagtatcctttccaaaacaacgtccaagttcaaaaaattgagacgaaatgcaagcacagcacacataagtggatgatcaagatgggctcgtccatgccacgcacaccaacacacgtcaagcagcaagccctcccgtggccaaatgtgcatgcatacatgttaacaagagctagcttctcttgcataactataaatagccctaatctcactccatgtttcatcgtccaataatatatatactatgatgagagtgcggtttcctttgttggtgttgctgggaactgttttcaaagtttgtgtctcattaaaggtgagagaggatgagaataaccctttctactttagaagctctaacagcttccaaactctctttgagaaccaaaaacggtcgcattcgtctcctccagagattcaacaaacgctccccacaacttgagaaccttcgagactaccggattg

SEQ ID NO: 70 - DNA, 504 bp, Artificial
  Mutations within conglycinin beta subunit introduced by GmBCG2_T01 TALE nuclease
acgcgcaaaccaaagaacagagaccgatgtaaagacaaaaacatagagtatcctttccaaaacaacgtccaagttcaaaaaattgagacgaaatgcaagcacagcacacataagtggatgatcaagatgggctcgtccatgccacgcacaccaacacacgtcaagcagcaagccctcccgtggccaaatgtgcatgcatacatgttaacaagagctagcttctcttgcataactataaatagccctaatctcactccatgtttcatcgtccaataatatatatacatatgatgagagtgcggtttcctttgttggtgttgctgggaactgttgcatcagtttgtgtctcattaaaggtgagagaggatgagaataaccctttctacttgagaagctctaacagcttccaaactctctttgagaaccaaaacggtcgcattcgtctcctccagagattcaacaaacgctccccacaacttgagaaccttcgagactaccggattg

SEQ ID NO: 71 - DNA, 484 bp, Artificial
  Mutations within conglycinin beta subunit introduced by GmBCG2_T01 TALE nuclease
  misc_feature (342): n is a or c or t or g
acgcgcaaaccaaagaacagagaccgatgtaaagacaaaaacatagagtatcctttccaaaacaacgtccaagttcaaaaaattgagacgaaatgcaagcacagcacacataagtggatgatcaagatgggctcgtccatgccacgcacaccaacacacgtcaagcagcaagccctcccgtggccaaatgtgcatgcatacatgttaacaagagctagcttctcttgcataactataaatagccctaatctcactccatgtttcatcgtccaataatatatatactatgatgagagtgcggtttcctttgttggtgttgctgggaactgtttctgcctgcantttgtgtctcattaaaggtgagagaggatgagaataaccctttctacttgagaagctctaacagcttccaaactctctttgagaaccaaaacggtcgcattcgtctcctccgagattcaacaaacgctccccacaacttgag

SEQ ID NO: 72 - DNA, 376 bp, Artificial
  Mutations within conglycinin beta subunit introduced by GmBCG2_T01 TALE nuclease
acgcgcaaaccaaagaacagagaccgatgtaaagacaaaaacatagagtatcctttccaaaacaacgtccaagttcataaaattgagacgaaatgcaagcacagcacacataagtggatgatcaagatgggctcgtccatgccacgcacaccaacacacgtcaagcagcaagccctcccgtggccaaatgtgcatgcatacatgtttaacaagagctagcttctcttgcataactataaaatagccctaatctcactccatgtttcatctgtccaataatatatatactatgatgagagtgcggtttcctttgttggtgttgctgggaactgtttttcctactgtgtaatcgattacacagactggtaatcgatta

SEQ ID NO: 73 - DNA, 391 bp, Artificial
  Mutations within conglycinin beta subunit introduced by GmBCG2_T01 TALE nuclease
acgcgcaaaccaaagaacagagaccgatgtaaagacaaaaacatagagtatcctttccaaaacaacgtccaagttcataaaatagagacgaaatgcaagcacagcacacataagtggatgatcaagatgggctcgtccatgccacgcacaccaacacacgtcaagcagcaagccctcccgtggccaaatgtgcatgcatacatgttaacaagagctagcattctcttgcataaactataaatagccctaatcttaagattgaatcctgttgccggtctggcaatcagtttgtgtctcattaaaggtgagagaggatgagaataaccctttctacttgagaagctctaacagcttccaaactctctttgagaaccaaaacggtcgcattcgt

SEQ ID NO: 74 - DNA, 431 bp, Artificial
  Mutations within conglycinin beta subunit introduced by GmBCG2_T01 TALE nuclease
acgcgcaaaccaaagaacagagaccgatgtaaagacaaaaacatagagtatcctttccaaaacaacgtccaagttcataaaatagagacgaaatgcaagcacagcacacataagtggatgatcaagatgggctcgtccatgccacgcacaccaacacacgtcaagcagcaagccctcccgtggccaaatgtgcatgcatacatgttaacaagagctacgcattctcttgcataaactataaatagccctaatcttaagattgaatcctgttgccggtctggcatcagtttgtgtctcattaaaggtgagagaggatgagaataaccctttcgtacttgagaagctctaacagcttccaaactctctttgagaaccaaaacggtcgcattcgtctcctccagagattcaacaaacgctccccacaacttgag

SEQ ID NO: 75 - DNA, 375 bp, Artificial
  Mutations within conglycinin beta subunit introduced by GmBCG2_T01 TALE nuclease
  misc_feature (77); (347): n is a or c or t or g
acgcgcaaaccaaagaacagagaccgatgtaaagacaaaaacatagagtatcctttccaaaacaacgtccaagttcntaaaattgagacgaaatgcaagcacagcacacataagtggatgatcaagatgggctcgtccatgccacgcacaccaacacacgtcaagcagcaagccctcccgtggccaaatgtgcatgcatacatgtttaacaagagctagcttctcttgcataactataaatagccctaatctcactccatgtttcatcgtccaataatatatatactatgatgagaagtgcggtttcctttgttggtgttgctgggaactgttttttcctactgtgnaatcgattacacagactggtaatcgatt

SEQ ID NO: 76 - DNA, 499 bp, Artificial
  Mutations within conglycinin beta subunit introduced by GmBCG2_T01 TALE nuclease
acgcgcaaaccaaagaacagagaccgatgtaaagacaaaaacatagagtatcctttccaaaacaacgtccaagttcataaaatagagacgaaatgcaagcacagcacacataagtggatgatcaagatgggctcgtccatgccacgcacaccaacacacgtcaagcagcaagccctcccgtggccaaatgtgcatgcatacatgttaacaagagcttgcataactataaatagccctaatctcactccatgtttcatcgtccaataatatatatactatgatgagagtgcggtttcctttgttggtgttgctgggaactgttttcatcagtttgtgtctcattaaaaggtgagaggaggatgagaataacccctttctacttgagaagctctaacagcttccaaaactctctttgagaaccaaaacggtcgcattcgtctcctccagagattcaacaaacgctccccacaacttgagaaccttcgagactaccggattg

SEQ ID NO: 77 - DNA, 503 bp, Artificial
  Mutations within conglycinin beta subunit introduced by GmBCG2_T01 TALE nuclease
acgcgcaaaccaaagaacagagaccgatgtaaagacaaaaacatagagtatcctttccaaaacaacgtccaagttcataaaatagagacgaaatgcaagcacagcacacataagtggatgatcaagatgggctcgtccatgccacgcacaccaacacacgtcaagcagcaagccctcccgtggccaaatgtgcatgcatacatgttaacaagagcttgcataactataaatagccctaatctcactccatgtttcatcgtccaataatatatatactatgatgagagtgcggtttcctttgttggtgttgctgggatggacgagcccatcttgatcagtttgtgtctcattaaaggtgagagaggatgagaataacccctttctacttgagaagctctaacagcttccaaactctctttgagaaccaaaacggtcgcattcgtctcctccagagattcaacaaacgctccccacaacttgagaaccttcgagactaccggatg

SEQ ID NO: 78 - DNA, 511 bp, Artificial
  Mutations within conglycinin beta subunit introduced by GmBCG2_T01 TALE nuclease
acgcgcaaaccaaagaacagagaccgatgtaaagacaaaaacatagagtatcctttccaaaacaacgtccaagttcaaaaaattgagacgaaatgcaagcacagcacacataagtggatgatcaagatgggctcgtccatgccacgcacaccaacacacgtcaagcagcaagccctcccgtggccaaatgtgcatgcatacatgttaacaagagctagcttctcttgcataactataaatagccctaatctcactccatgtttcatcgtccaataatatatatactatgatgagagtgcggtttcctttgttggtgttcatgactggtcactgttccatgcacatttgtgtcctcattaaaggtgagagaggatgagaataaccctttctacttgagaagctctaacagcttccaaactctctttgagaaccaaaaacggtcgcattcgtctcctccagagattcaacaaacgctccccacaacttgagaaccttcgagactaccggattg

SEQ ID NO: 79 - DNA, 494 bp, Artificial
  Mutations within conglycinin beta subunit introduced by GmBCG2_T01 TALE nuclease
acgcgcaaaccaaagaacagagaccgatgtaaagacaaaaacatagagtatcctttccaaaacaacgtccaagttcataaaatagagacgaaatgcaagcacagcacacataagtggatgatcaagatgggctcgtccatgccacgcacaccaacacacgtcaagcagcaagccctcccgtggccaaatgtgcatgcatacatgttaacaagagcttgcataactataaatagccctaatctcactccatgtttcatcgtccaataatatatatactatgatgagagtgcggtttcctttgttggtgttgctggaactgttttcatcagtttgtgctcattaaaggtgagagaggatgagaataacccctttctactttagaagctctaacagcttccaaactctctttgagaaccaaaacggtcgcattcgtctcctccagagattcaacaaacgctccccacaacttgagaaccttcgagactaccggattg

SEQ ID NO: 80 - DNA, 505 bp, Artificial
  Mutations within conglycinin beta subunit introduced by GmBCG2_T01 TALE nuclease
acgcgcaaaccaaagaacagagaccgatgtaaagacaaaaacatagagtatcctttccaaaacaacgtccaagttcaaaaaattgagacgaaaatgcaagcacagcacacataagtggatgatcaagatgggctcgtccatgccacgcacaccaacacacgtcaagcagcaagccctcccgtggccaaatgtgcatgcatacatgttaacaagagctagcttctcttgcataactataaatagccctaatctcactccatgtttcatcgtccaataatatatatacatatgatgagagtgcggtttcctttgttggtgttgctgggaactgtttggcatcagtttgtgtctcattaaaggtgagagaggatgagaataaccttctactttagaagctctaacagcttccaaactctctttgagaaccaaaacggtcgcattcgtctcctccagagattcaacaaacgctccccacaacttgagaaccttcgagactaccggattg

SEQ ID NO: 81 - DNA, 456 bp, Artificial
  Mutations within conglycinin beta subunit introduced by GmBCG2_T01 TALE nuclease
acgcgcaaaccaaagaacagagaccgatgtaaagacaaaaacatagagtatcctttccaaaacaacgtccaagttcataaaatagagacgaaatgcaagcacagcacacataagtggatgatcaagatgggctcgtccatgccacgcacaccaacacacgtcaagcagcaagccctcccgtggccaaatgtgcatgcatacatgttaacaagagcttgcataactataaatagccctaatctcactccatgtttcatcgtccaataatatatatactatgatgagagtgcggtttcctttgttggtgttgctgggaacggcatcagtttgtgtctcattaaaggtgagagaggatgagaataaccctttctacttgagaagctctaacagcttccaaaactctctttgagaaccaaaacggtcgcattcgtctcctccagagattcaacaaacgct

SEQ ID NO: 82 - DNA, 493 bp, Artificial
  Mutations within conglycinin beta subunit introduced by GmBCG2_T01 TALE nuclease
acgcgcaaaccaaagaacagagaccgatgtaaagacaaaaacatagagtatcctttccaaaacaacgtccaagttcaaaaaattgagacgaaatgcaagcacagcacacataagtggatgatcaagatgggctcgtccatgccacgcacaccaacacacgtcaagcagcaagccctcccgtggccaaatgtgcatgcatacatgttaacaagagcttgcataactataaatagccctaatctcactccatgtttcatcgtccaataatatatatactatgatgagagtgcggtttcctttgttggtgttgctgggaactgtttcagtttgtgtctcattaaaggtgaggagaggatgagaataaccctttctacttgagaagctctaacagcttccaaactctctttgagaaccaaaaacggtcgcattcgtctcctccagagattcaacaaacgctccccacaacttgagaaccttcgagactaccggattg

SEQ ID NO: 83 - DNA, 500 bp, Artificial
  Mutations within conglycinin beta subunit introduced by GmBCG2_T01 TALE nuclease
acgcgcaaaccaaagaacagagaccgatgtaaagacaaaaacatagagtatcctttccaaaacaacgtccaagttcaaaaaattgagacgaaatgcaagcacagcacacataagtggatgatcaagatgggctcgtccatgccacgcacaccaacacacgtcaagcagcaagccctcccgtggccaaatgtgcatgcatacatgttaacaagagctagcttctcttgcataactataaatagccctaatctcactccatgtttcatcgtccaataatatatatactatgatgagagtgcggtttcctttgttggtgttgctgggaaactgtttggcatccagtttgtgtctcattaaaggtgagagaggatgagaataaccctttctacttgagaagctctaacagcttccaaactctctttgagaaccaaaacggtcgcattcgtctcctccagagattcaacaaacgctcccccacaacttgagaaccttcgagacta

SEQ ID NO: 84 - DNA, 548 bp, Artificial
  Mutations within conglycinin beta subunit introduced by GmBCG2_T01 TALE nuclease
  misc_feature (433): n is a or c or t or g
acgcgcaaaccaaagaacagagaccgatgtaaagacaaaaacatagagtatcctttccaaaacaacgtccaagttcataaaatagagacgaaatgcaagcacagcacacataagtggatgatcaagatgggctcgtccatgccacgcacaccaacacacgtcaagcagcaagccctcccgtggccaaatgtgcatgcatacatgttaacaagagcttgcataactataaatagccctaatctcactccatgtttcatcgtccaataatatatatactatgatgagagtgcggtttcctttgttggtgttgctgggaactgttttccgtgggcctggcacagcaccggcaacagcgcctgcaccgtctccagcgcctgcttgccaccaatattgctggcgatggccaccacctgctcctggcatcagtttgtgnctcattaaaggtgagagaggatgagaataaccctttctacttgagaagctctaacagcttccaaactctctttgagaaccaaaacggtcgcattcgtctcctccagagattcaac

SEQ ID NO: 85 - DNA, 467 bp, Artificial
  Mutations within conglycinin beta subunit introduced by GmBCG2_T01 TALE nuclease
  misc_feature (386): n is a or c or t or g
acgcgcaaaccaaagaacagagaccgatgtaaagacaaaaacatagagtatcctttccaaaacaacgtccaagttcataaaatagagacgaaatgcaagcacagcacacataagtggatgatcaagatgggctcgtccatgccacgcacaccaacacacgtcaagcagcaagccctcccgtggccaaatgtgcatgcatacatgttaacaagagcttgcataactataaatagccctaatctcactccatgatttcatcgtccaataatatatatactatgatgagagtgcggtttcctttgttggtgttgctgggaactgtttcagtttgtgtctcattaaaggtgagagaggatgagaataaccccttttctactttagaagcnctaacagctttcccaaaactctctttgagaaccaaaaacggtcgcttcgcctcctccagagattcaacaaacgctccccac

SEQ ID NO: 86 - DNA, 361 bp, Artificial
  Mutations within conglycinin beta subunit introduced by GmBCG2_T01 TALE nuclease
  misc_feature (86): n is a or c or t or g
acgcgcaaaccaaagaacagagaccgatgtaaagacaaaaacatagagtatcctttccaaaacaacgtccaagttcaaaaaattgngacgaaatgcaagcacagcacacataagtggatgatcaagatgggctcgtccatgccacgcacaccaacacacgtcaagcagcaagccctcccgtggccaaatgtgcatgcatacatgttaacaagagctagcttctcttgcataactataaatagccctaatctcactccatgtttcatcgtccaaataatatatatactatgatgagagtgcggtttcctttgtggtgttgctgggaactgttcagtttgtgtctcataaaggtgagagagga

SEQ ID NO: 87 - DNA, 461 bp, Artificial
  Mutations within conglycinin beta subunit introduced by GmBCG2_T01 TALE nuclease
acgcgcaaaccaaagaacagagaccgatgtaaagacaaaaacataagagtatccttttccaaaacaacgtccaagtttcaaaaaatttgagaacgaaatgcaagcaccagcacacataagtggattgatcaaagatgggctcgtccatgccacgcacaccgaatccatcactgtccaaggcagcaagcccttcccgtggccaaatgttgcatgcatagcatgttaacaagaacgctagtcttctcttgcatcaactataaatatgcctaaatctcactccatgtttcatcgtccaatcaatatactatacatactgattgagcagtgcggtttccgtttgttggctgttgctgggaaactgtttcgcatgccaagtttgcagttctcgaatttaaaagggttgagagaaggatgatgaaataaaccccttttctacttttaaggaagcatccttaatcagc

SEQ ID NO: 88 - DNA, 509 bp, Artificial
  Mutations within conglycinin beta subunit introduced by GmBCG2_T01 TALE nuclease
acgcgcaaaccaaagaacagagaccgatgtaaagacaaaaacatagagtatcctttccaaaacaacgtccaagttcataaaatagagacgaaatgcaagcacagcacacataagtggatgatcaagatgggctcgtccatgccacgcacaccaacacacgtcaagcagcaagccctcccgtggccaaatgtgcatgcatacatgttaacaagagctagcttctcttgcataactataaatagccctaatctcactccatgtttcatcgtccaataatatatatactatgatgagagtgcggtttcctttgttggtgttgctgggaactgtttggcatccagttttgtgtctcattaaaggtgagagaggatgagaataaccctttctacttgagaagctctaacagcttccaaaactctctttgagaaccaaaaacggtcgcattcgtctcctccagagattcaacaaacgctccccacaacttgagaaccttcgagactaccggattg

SEQ ID NO: 89 - DNA, 497 bp, Artificial
  Mutations within conglycinin beta subunit introduced by GmBCG2_T01 TALE nuclease
acgcgcaaaccaaagaacagagaccgatgtaaagacaaaaacatagagtatcctttccaaaacaacgtccaagttcataaaatagagacgaaatgcaagcacagcacacataagtggatgatcaagatgggctcgtccatgccacgcacaccaacacacgtcaagcagcaagccctcccgtggccaaatgtgcatgcatacatgttaacaagagcttgcataactataaatagccctaatctcactccatgtttcatcgtccaataatatatatactatgatgagagtgcggtttcctttgttggtgttgctgggaactgttgcatcagtttgtgtctcattaaaggtgagaggaggatgagaataacccctttctactttagaagctctaacagcttccaaactctctttgagaaccaaaacggtcgcattcgtctcctccagagattcaacaaacgctccccacaacttgagaaccttcgagactaccggatttg

SEQ ID NO: 90 - DNA, 531 bp, Artificial
  Mutations within conglycinin beta subunit introduced by GmBCG2_T01 TALE nuclease
  misc_feature (461): n is a or c or t or g
acgcgcaaaccaaagaacagagaccgatgtaaagacaaaaacatagagtatcctttccaaaacaacgtccaagttcataaaatagagacgaaatgcaagcacagcacacataagtggatgatcaagatgggctcgtccatgccacgcacaccaacacacgtcaagcagcaagccctcccgtggccaaatgtgcatgcatacatgttaacaagagctagcttctcttgcataactataaagtagccctaatctcactccatgtttcatcgtccaataatatatatactatgatgagagtgcggtttcctttgttggtgttgctgggaactgtttctccagcgcctgcttgccgccatcgtggctggcgatggccaccacctgctccggggtcaaagccgtgggcctggcacagcaccggcaacagccgctggaagcatcagtttgtgtctcattaaaggtgngagaggatgagaataaccctttctacttgagagctctaacagcttccaaactctctttgagaaccaaaac

SEQ ID NO: 91 - DNA, 508 bp, Artificial
  Mutations within conglycinin beta subunit introduced by GmBCG2_T01 TALE nuclease
acgcgcaaaccaaagaacagagaccgatgtaaagacaaaaacatagagtatcctttccaaaacaacgtccaagttcaaaaaattgagacgaaatgcaagcacagcacacataagtggatgatcaagatgggctcgtccatgccacgcacaccaacacacgtcaagcagcaagccctcccgtggccaaatgtgcatgcatacatgttaacaagagctagcttctcttgcataactataaatagccctaatctcactccatgtttcatcgtccaataatatatatactatgatgagagtgcggtttcctttgttggtgttgctgggaactgttttgggcatccagtttgtgtctcattaaaggtgagagaggatgagaataaccctttctacttgagaagctctaacagcttccaaactctctttgagaaccaaaacggtcgcattcgtctcctccagagattcaacaaacgctccccacaacttgagaaccttcgagactaccggattg

SEQ ID NO: 92 - DNA, 499 bp, Artificial
  Mutations within conglycinin beta subunit introduced by GmBCG2_T01 TALE nuclease
acgcgcaaaccaaagaacagagaccgatgtaaagacaaaaacatagagtatcctttccaaaacaacgtccaagttcataaaatagagacgaaatgcaagcacagcacacataagtggatgatcaagatgggctcgtccatgccacgcacaccaacacacgtcaagcagcaagccctcccgtggccaaatgtgcatgcatacatgttaacaagagctagcttctcttgcataactataaatagccctaatctcactccatgtttcatcgtccaataatatatatactatgatgagagtgcggtttcctttgttggtgttgctgggaactgtttagtttgtgtctcataaaggtgagagaggatgagaataacccctttctacttgagaagctctaacagcttccaaactctctttgagaaccaaaacggtcgcattcgtctcctccagagattcaacaaacgctccccacaacttgagaaccttcgagactaccggattg

SEQ ID NO: 93 - DNA, 509 bp, Artificial
  Mutations within conglycinin beta subunit introduced by GmBCG2_T01 TALE nuclease
acgcgcaaaccaaagaacagagaccgatgtaaagacaaaaacatagagtatcctttccaaaacaacgtccaagttcaaaaaattgagacgaaatgcaagcacagcacacataagtggatgatcaagatgggctcgtccatgccacgcacaccaacacacgtcaagcagcaagccctcccgtggccaaatgtgcatgcatacatgttaacaagagctagcttctcttgcataactataaatagccctaatctcactccatgtttcatcgtccaataatatactatacatatgatgagagtgcggtttcctttgttggtgttgctgggaactgtttggcatcaagtttgtgtctcattaaaggtgagagaggatgagaataaccctttctacttgagaagctctaacagcttccaaactctctttgagaaccaaaacggtcgcattcgtctcctccagagattcaacaaacgctcccccacaacttgagaaccttcgagactaccggattg

SEQ ID NO: 94 - DNA, 471 bp, Artificial
  Mutations within conglycinin beta subunit introduced by GmBCG2_T01 TALE nuclease
acgcgcaaaccaaagaacagagaccgatgtaaagacaaaaacatagagtatcctttccaaaacaacgtccaagttcataaaatagagacgaaatgcaagcacagcacacataagtggatgatcaagatgggctcgtccatgccacgcacaccaacacacgtcaagcagcaagccctcccgtggccaaatgtgcatgcatacatgttaacaagagcttgcataactataaatagccctaatctcactccatgtttcatcgtccaataatatatatactatgatgagagtgcggtttcctttggcatcagtttgtgtctcattaaaggtgagagaggatgagaataaccctttctactttagaagctctaacagcttccaaaactctcttttgagaaccaaaaacggtcgcattcgtctcctccagagattcaacaaacgctcccccacaacttgagaaccttcgagactacc

SEQ ID NO: 95 - DNA, 492 bp, Artificial
  Mutations within conglycinin beta subunit introduced by GmBCG2_T01 TALE nuclease
acgcgcaaaccaaagaacagagaccgatgtaaagacaaaaacatagagtatcctttccaaaacaacgtccaagttcataaaatagagacgaaatgcaagcacagcacacataagtggatgatcaagatgggctcgtccatgccacgcacaccaacacacgtcaagcagcaagccctcccgtggccaaatgtgcatgcatacatgttaacaagagcttgcataactataaatagccctaatctcactccatgtttcatcgtccaataatatatatactatgatgagagtgcggtttcctttgttggtgttgctgggaactgcatcagtttgtgtctcattaaaggtgagagaggatgagaataacccctttctacttgagaagctctaacagcttccaaactctctttgagaaccaaaacggtcgcattcgtctcctccagagattcaacaaacgctccccacaacttgagaaccttcgagactaccggattg

SEQ ID NO: 96 - DNA, 500 bp, Artificial
  Mutations within conglycinin beta subunit introduced by GmBCG2_T01 TALE nuclease
acgcgcaaaccaaagaacagagaccgatgtaaagacaaaaacatagagtatcctttccaaaacaacgtccaagttcataaaatagagacgaaatgcaagcacagcacacataagtggatgatcaagatgggctcgtccatgccacgcacaccaacacatcgtcaagcagcaagccctcccgtggccaaatgtgcatgatacatgttaacaagagcttgcataactataaatagccctaatctcactcatgtttcatcgtccaataatatatatactatgatgagagtgcggtttcctttgttggtgttgctgggaactgttttccatcaagtttgtgcttcattaaaaggtgagaggaggatgagaaataacccctttctacttgagaagctctaacagcttccaaactctctttgagaaccaaaacggtcgcattcgtctcctccagagattcaacaaacgctccccacaacttgagaaccttcgagactaccggattg

SEQ ID NO: 97 - DNA, 503 bp, Artificial
  Mutations within conglycinin beta subunit introduced by GmBCG2_T01 TALE nuclease
acgcgcaaaccaaagaacagagaccgatgtaaagacaaaaacatagagtatcctttccaaaacaacgtccaagttcataaaatagagacgaaatgcaagcacagcacacataagtggatgatcaagatgggctcgtccatgccacgcacaccaacacacgtcaagcagcaagccctcccgtggccaaatgtgcatgcatacatgttaacaagagctagcttctcttgcataaactataaatagccctaatctcactccatgtttcatcgtccaataatatatatactatgatgagagtgcggtttcctttgttggtgttgctgggaactgtttatcagtttgtgtctcattaaaggtgagagaggatgagaataaccctttctacttgagaagctctaacagcttccaaactctctttgagaaccaaaacggtcgcattcgtctcctccagagattcaacaaacgctccccacaacttgagaaccttcgagactaccggattg

SEQ ID NO: 98 - DNA, 504 bp, Artificial
  Mutations within conglycinin beta subunit introduced by GmBCG2_T01 TALE nuclease
  misc_feature (342): n is a or c or t or g
acgcgcaaaccaaagaacagagaccgatgtaaagacaaaaacatagagtatcctttccaaaacaacgtccaagttcaaaaaattgagacgaaatgcaagcacagcacacataagtggatgatcaagatgggctcgtccatgccacgcacaccaacacacgtcaagcagcaagccctcccgtggccaaatgtgcatgcatacatgttaacaagagctagcttctcttgcataactataaatagccctaatctcactccatgtttcatcgtccaataatatatatacatatgatgagagtgcggtttcctttgttggtgttgctgggaactgttcatgcagttngttctgcattaaaggtgagagaggatgagaataaccctttctacttgagaagctctaacagcttccaaactctctttgagaaccaaaacggtcgcattcgtctcctccagagattcaacaaacgctccccacaacttgagaaccttcgagactaccggattg

SEQ ID NO: 99 - DNA, 505 bp, Artificial
  Mutations within conglycinin beta subunit introduced by GmBCG2_T01 TALE nuclease
  misc_feature (86): n is a or c or t or g
acgcgcaaaccaaagaacagagaccgatgtaaagacaaaaacatagagtatcctttccaaaacaacgtccaagttcaaaaaattgngacgaaatgcaagcacagcacacataagtggatgatcaagatgggctcgtccatgccacgcacaccaacacacgtcaagcagcaagccctcccgtggccaaatgtgcatgcatacatgttaacaagagctagcttctcttgcataactataaatagccctaatctcactccatgtttcatcgtccaataatatatatacatatgatgagagtgcggtttcctttgttggtgttgctgggaactgtttgcatcagtttgtgtctcattaaaggtgagagaggatgagaataaccctttctacttgagaagctctaacagcttccaaactctctttgagaaccaaaacggtcgcattcgtctcctccagagattcaacaaacgctccccacaacttgagaaccttcgagactaccggattg

SEQ ID NO: 100 - DNA, 499 bp, Artificial
  Mutations within conglycinin beta subunit introduced by GmBCG2_T01 TALE nuclease
  misc_feature (381): n is a or c or t or g
acgcgcaaaccaaagaacagagaccgatgtaaagacaaaaacatagagtatcctttccaaaacaacgtccaagttcataaaatagagacgaaatgcaagcacagcacacataagtggatgatcaagatgggctcgtccatgccacgcacaccaacacacgtcaagcagcaagccctcccgtggccaaatgtgcatgcatacatgttaaccaagatgcttgcataactataaatagccctaaatctcactccaatgtttcatcgtccaataatatatatactatgatcgagagtgcggtttcctttgttggtgttgctgggaactgtatcaagtttgtgctcattaaaaggtgagaggaggatgagaataacccctttctantttagaagctctaacagcttccaaactctctttgagaaccaaaacggtcgcattcgtctcctccagagattcaacaaacgctccccacaacttgagaaccttcgagactaccggattg

SEQ ID NO: 101 - DNA, 503 bp, Artificial
  Mutations within conglycinin beta subunit introduced by GmBCG2_T01 TALE nuclease
acgcgcaaaccaaagaacagagaccgatgtaaagacaaaaacatagagtatcctttccaaaacaacgtccaagttcataaaatagagacgaaatgcaagcacagcacacataagtggatgatcaagatgggctcgtccatgccacgcacaccaacacacgtcaagcagcaagccctcccgtggccaaatgtgcatgcatacatgttaacaagagctagcttctcttgcataactataaatagccctaatctcactccatgtttcatcgtccaataatatatatactatgatgagagtgcggtttcctttgttggtgttgctgggaacctggcatcagtttgtgtctcattaaaggtgagagaggatgagaataaccctttctacttgagaagctctaacagcttccaaactctctttgagaaccaaaacggtcgcattcgtctcctccagagattcaacaaaacgctccccacaacttgagaaccttcgagactaccggattg

SEQ ID NO: 102 - DNA, 503 bp, Artificial
  Mutations within conglycinin beta subunit introduced by GmBCG2_T01 TALE nuclease
acgcgcaaaccaaagaacagagaccgatgtaaagacaaaaacatagagtatcctttccaaaacaacgtccaagttcaaaaaattgagacgaaaatgcaagcacagcacacataaagtggatgatcaagatgggctcgtccatgccacgcacaccaacacacgtcaagcagcaagccctcccgtggccaaatgtgcatgcatacatgttaacaagagctagcttctcttgcataactataaatagccctaatctcactccatgtttcatcgtccaataatatatatactatgatgagagtgcggtttcctttgttggtgttgctgggaactgttatcagtttgtgtctcattaaaggtgagagaggatgagaataaccctttctacttgagaagctctaacagcttccaaactctctttgagaaccaaaacggtcgcattcgtctcctccagagattcaacaaacgctccccacaacttgagaaccttcgagactaccggattg

SEQ ID NO: 103 - DNA, 506 bp, Artificial
  Mutations within conglycinin beta subunit introduced by GmBCG2_T01 TALE nuclease
acgcgcaaaccaaagaacagagaccgatgtaaagacaaaaacatagagtatcctttccaaaacaacgtccaagttcaaaaaattgagacgaaatgcaagcacagcacacataagtggatgatcaagatgggctcgtccatgccacgcacaccaacacacgtcaagcagcaagccctcccgtggccaaatgtgcatgcatacatgttaacaagagctagcttctcttgcataactataaatagccctaatctcactccatgtttcatcgtccaataatatatatacatatgatgagagtgcggttcctttgttggtgttgctgggaactgttggcatccagtttgtgtctcattaaaggtgagagaggatgagaataaccctttctacttgagaagctctaacagcttccaaactctctttgagaaccaaaacggtcgcattcgtctcctccagagattcaacaaacgctcccccacaacttgagaaccttcgagactaccggattg

SEQ ID NO: 104 - DNA, 506 bp, Artificial
  Mutations within conglycinin beta subunit introduced by GmBCG2_T01 TALE nuclease
acgcgcaaaccaaagaacagagaccgatgtaaagacaaaaacatagagtatcctttccaaaacaacgtccaagttcaaaaaattgagacgaaatgcaagcacagcacacataagtggatgatcaagatgggctcgtccatgccacgcacaccaacacacgtcaagcagcaagccctcccgtggccaaatgtgcatgcatacatgttaacaagagctagcttctcttgcataactataaatagccctaatctcactccatgtttcatcgtccaataatatatatactatgatgagagtgcggtttcctttgttggtgttgctgggaactgttttggcatcagtttgtgtctcattaaaggtgagagaggatgagaataaccctttctacttgagaagctctaacagcttccaaactctctttgagaaccaaaacggtcgcattcgtctcctccagagattcaacaaacgctccccacaacttgagaaccttcgagactaccggattg

SEQ ID NO: 105 - DNA, 495 bp, Artificial
  Mutations within conglycinin beta subunit introduced by GmBCG2_T01 TALE nuclease
acgcgcaaaccaaagaacagagaccgatgtaaagacaaaaacatagagtatcctttccaaaacaacgtccaagttcataaaatagagacgaaatgcaagcacagcacacataagtggatgatcaagatgggctcgtccatgccacgcacaccaacacacgtcaagcagcaagccctcccgtggccaaatgtgcatgcatacatgttaacaagagcttgcataactataaatagccctaatctcactccatgatttcatcgtccaataatatatatactatgatgagagatgcggtttcctttgttggtgttgctgggaactgtttcagtttgtgtctcataaaggtgaagagaggatgagaataaccctttctactttagaagctctaaacagcttccaaaactctctttgagaaccaaaaacggtcgcattcgtctcctccagagattcaacaaaacgctccccacacttgagaacttcgagactaccggattg

SEQ ID NO: 106 - DNA, 506 bp, Artificial
  Mutations within conglycinin beta subunit introduced by GmBCG2_T01 TALE nuclease
  misc_feature (355); (383); (431); (438): n is a or c or t or g
acgcgcaaaccaaagaacagagaccgatgtaaagacaaaaacatagagtatcctttccaaaacaacgtccaagttcataaaatagagacgaaatgcaagcacagcacacataagtggatgatcaagatgggctcgtccatgccacgcacaccaacacacgtcaagcagcaagccctcccgtggccaaatgtgcatgcatacatgttaaccaagatgcttgcataactataaatagccctaatctcactccatgatttcatcgtccaataatatatatactatgatcgagagtgcggtttcctttgttggtgttgctgggaactgtttggcatcagtttgtgctcattaaaggtgngaggaggatgagaaataaccccttttcnactttagaagctctaacagcttccaaactctctttgagaaccaaaaangggatcncattcgtctcctccagagattcaacaaacgctccccacaacttgagaaccttcgagactaccggattg

SEQ ID NO: 107 - DNA, 502 bp, Artificial
  Mutations within conglycinin beta subunit introduced by GmBCG2_T01 TALE nuclease
acgcgcaaaccaaagaacagagaccgatgtaaagacaaaaacatagagtatcctttccaaaacaacgtccaagttcataaaatagagacgaaatgcaagcacagcacacataagtggatgatcaagatgggctcgtccatgccacgcacaccaacacacgtcaagcagcaagccctcccgtggccaaattgtgcatgcatacatgttaaccaagatgcttgcataactataaatagccctaatctcacttcatgatttcatcgtccaataatatatatactatgatcgagagtgcggtttcctttgttggtgttgctgggaactgttggccatcaagtttgtgctcataaaggtgagaggaggatgagaataacccctttctactttagaagctctaacagcttccaaactctctttgagaaccaaaacggtcgcattcgtctcctccagagattcaacaaacgctccccacaacttgagaaccttcgagactaccggattg

SEQ ID NO: 108 - DNA, 493 bp, Artificial
  Mutations within conglycinin beta subunit introduced by GmBCG2_T01 TALE nuclease
acgcgcaaaccaaagaacagagaccgatgtaaagacaaaaacatagagtatcctttccaaaacaacgtccaagttcataaaatagagacgaaatgcaagcacagcacacataagtggatgatcaagatgggctcgtccatgccacgcacaccaacacacgtcaagcagcaagccctcccgtggccaaatgtgcatgcatacatgttaacaagagcttgcataactataaatagccctaatctcactccatgttcatcgtccaataatatatatactatgatgagagtgcggtttcctttgttggtgttgctgggaactgttgcatcagtttgtgctcattaaaggtgagagaggatgagaataacccctttctactttagaagctctaacagcttccaaactctctttgagaaccaaaacggtcgcattcgtctcctccagagattcaacaaacgctccccacaacttgagaaccttcgagactaccggattg

SEQ ID NO: 109 - DNA, 497 bp, Artificial
  Mutations within conglycinin beta subunit introduced by GmBCG2_T01 TALE nuclease
acgcgcaaaccaaagaacagagaccgatgtaaagacaaaaacatagagtatcctttccaaaacaacgtccaagttcataaaatagagacgaaatgcaagcacagcacacataagtggatgatcaagatgggctcgtccatgccacgcacaccaacacacgtcaagcagcaagccctcccgtggccaaatgtgcatgcatacatgttaacaagagcttgcataactataaatagccctaatctcactccatgtttcatcgtccaataatatatatactatgatgagagtgcggtttcctttgttggtgttgctgggaactgttgcatcaagtttgtgtctcattaaaaggtgagagaggatgagaataacccctttctactttagaagctctaacagcttccaaactctctttgagaaccaaaacggtcgcattcgtctcctccagagattcaacaaacgctccccacaacttgagaaccttcgagactaccggattg

SEQ ID NO: 110 - DNA, 504 bp, Artificial
  Mutations within conglycinin beta subunit introduced by GmBCG2_T01 TALE nuclease
acgcgcaaaccaaagaacagagaccgatgtaaagacaaaaacatagagtatcctttccaaaacaacgtccaagttcaaaaaattgagacgaaatgcaagcacagcacacataagtggatgatcaagatgggctcgtccatgccacgcacaccaacacacgtcaagcagcaagccctcccgtggccaaatgtgcatgcatacatgttaacaagagctagcttctcttgcataactataaatagccctaatctcactccatgtttcatcgtccaataatatatatactatgatgagagtgcggtttcctttgttggtgttgctgggaactgttgcatcagtttgtgtctcattaaaggtgagagaggatgagaataaccctttctacttgagaagctctaacagcttccaaactctctttgagaaccaaaacggtcgcattcgtctcctccagagattcaacaaacgctcccccacaacttgagaaccttcgagactaccggattg

SEQ ID NO: 111 - DNA, 525 bp, Artificial
  Mutations within conglycinin beta subunit introduced by GmBCG2_T01 TALE nuclease
  misc_feature (422): n is a or c or t or g
acgcgcaaaccaaagaacagagaccgatgtaaagacaaaaacatagagtatcctttccaaaacaacgtccaagttcaaaaaattgagacgaaaatgcaagcacagcacacataagtggatgatcaagatgggctcgtccatgccacgcacaccaaccacacgtcaaggcagcaagccctcccgtggccaaatgtgcatgcatacatgttaacaagagctagtcttctcttgcataactataaatagccctaaatctcactccatgtttccatcgtccaataatatactatacatatgatgagagtgcggtttcctttgttggtgttgctgggaactgttttcctgccaagttcgttctgtcgattaaaagggttggagagaggaatgagaataacccctttctacttagaaggatccttaanaagcttccaaaactctcttttgagaaccaaaaacggtcgcattcgtctcctccaagagattcaacaaacgctcccccacaacttgagaaccttcgagactacc

SEQ ID NO: 112 - DNA, 494 bp, Artificial
  Mutations within conglycinin beta subunit introduced by GmBCG2_T01 TALE nuclease
acgcgcaaaccaaagaacagagaccgatgtaaagacaaaaacatagagtatcctttccaaaacaacgtccaagttcataaaatagagacgaaatgcaagcacagcacacataagtggatgatcaagatgggctcgtccatgccacgcacaccaacacacgtcaagcagcaagccctcccgtggccaaatgtgcatgcatacatgttaacaagagcttgcataactataaatagccctaatctcactccatgtttcatcgtccaataatatatatactatgatgagagtgcggtttcctttgttggtgttgctgggaactgttgcatcagttgtgtctcattaaaggtgagagaggatgagaataacccctttctactttagaagctctaacagcttccaaactctctttgagaaccaaaacggtcgcattcgtctcctccagagattcaacaaacgctccccacaacttgagaaccttcgagactaccggattg

SEQ ID NO: 113 - DNA, 579 bp, Artificial
  Mutations within conglycinin beta subunit introduced by GmBCG2_T01 TALE nuclease
acgcgcaaaccaaagaacagagaccgatgtaaagacaaaaacatagagtatcctttccaaaacaacgtccaagttcaaaaaattgagacgaaaatgcaagcacagcacacataaagtggatgatcaagatgggctcgtccatgccacgcacaccaacacacgtcaagcagcaagccctcccgtggccaaatgtgcatgcatacatgttaacaagagctagcttctcttgcagtaactgataaatagccctaatctcactccatgtttcatcgtccaataatatatatactatgatgagagtgcggtttcctttgttggtgttgctgggaactgttttcctcttgaccccggagcaggtggtggccatcgccagccacgatggcggcaagcaggcgctgcgacggtccaggcatcagtttgtgtctcattaaaggtgagagaggatggagaataaccctttctacttgagaagctctaacagcttccaaactctctttgagaaccaaaacggtcgcattcgtctcctccagagattcaacaaacgctccccacaacttgagaaccttcgagactaccgga

SEQ ID NO: 114 - DNA, 376 bp, Artificial
  Mutations within conglycinin beta subunit introduced by GmBCG2_T01 TALE nuclease
acgcgcaaaccaaagaacagagaccgatgtaaagacaaaaacatagagtatcctttccaaaacaacgtccaagttcataaaatagagacgaaatgcaagcacagcacacataagtggatgatcaagatgggctcgtccatgccacgcacaccaacacacgtcaagcagcaagccctcccgtggccaaatgtgcatgcatacatgttaacaagagcttgcataactataaatagccctaatctcactccatgatttcatcgtccaataatatatatactatgatgagagtgcggtttcctttgttggtgttgctgggaactgtttcagtttgtgtctcataaaggtgagagaggatgagaataaccctttctacttt

SEQ ID NO: 115 - DNA, 508 bp, Artificial
  Mutations within conglycinin beta subunit introduced by GmBCG2_T01 TALE nuclease
acgcgcaaaccaaagaacagagaccgatgtaaagacaaaaacatagagtatcctttccaaaacaacgtccaagttcaaaaaattgagacgaaatgcaagcacagcacacataagtggatgatcaagatgggctcgtccatgccacgcacaccaacacacgtcaagcagcaagccctcccgtggccaaatgtgcatgcatacatgttaacaagagctagcttctcttgcataactataaatagccctaatctcactccatgtttcatcgtccaataatatatatactatgatgagagtgcggtttcctttgttggtgttgctgggaactgttttggcatccagttttgtgtctcattaaaggtgagagaggatgagaataaccctttctacttgagaagctctaacagcttccaaactctctttgagaaccaaaacggtcgcattcgtctcctccagagattcaacaaacgctccccacaacttgagaaccttcgagactaccggattg

SEQ ID NO: 116 - DNA, 491 bp, Artificial
  Mutations within conglycinin beta subunit introduced by GmBCG2_T01 TALE nuclease
acgcgcaaaccaaagaacagagaccgatgtaaagacaaaaaacatagagtatcctttccaaaacaacgtccaagttcataaaatagagacgaaatgcaagcacagcacacataagtggatgatcaagatgggctcgtccatgccacgcacaccaacacacgtcaagcagcaagccctcccgtggccaaatgtgcatgcatacatgttaacaagagcttgcataactataaatagccctaatctcactccatgtttcatcgtccaataatatataatactatgatgagagtgcggtttcctttgttggtgttgctgggaatcagtttgtgtctcattaaaggtgagagaggatgagaataaccccttttctacttgagaagctctaacagcttccaaaactctctttgagaaccaaaaacggtcgcattcgtctcctccagagattcaacaaacgctccccacaacttgagaaccttcgagactaccggatt

SEQ ID NO: 117 - DNA, 497 bp, Artificial
  Mutations within conglycinin beta subunit introduced by GmBCG2_T01 TALE nuclease
acgcgcaaaccaaagaacagagaccgatgtaaagacaaaaacatagagtatcctttccaaaacaacgtccaagttcataaaatagagacgaaatgcaagcacagcacacataagtggatgatcaagatgggctcgtccatgccacgcacaccaacacacgtcaagtcagcaagccctcccgtggccaaatgtgcatgcatacatgttaacaagagcttgcataactataaatagccctaatctcactccatgtttcatcgtccaataatatatatactatgatgagagtgcggtttcctttgttggtgttgctgggaactgtatcaagtttgtgtctcattaaaaggtgagaggaggatgagaataacccctttctactttagaagctctaacagcttccaaactctctttgagaaccaaaaacggtcgcattcgtctcctccagagattcaacaaacgctccccacaacttgagaaccttcgagactaccggattg

SEQ ID NO: 118 - DNA, 485 bp, Artificial
  Mutations within conglycinin beta subunit introduced by GmBCG2_T01 TALE nuclease
  misc_feature (88): n is a or c or t or g
acgcgcaaaccaaagaacagagaccgatgtaaagacaaaaacataagagtatcctttccaaaacaacgtccaagttcaaaaaaattgngacgaaaatgcaagcacagcacacataagtggatgatcaagatgggctcgtccatgccacgcacaccaacacacgtcaagcagcaagccctcccgtggccaaatgtgcatgcatacatgttaacaagagctagcttctcttgcataaactataaatagccctaatctcactccatgtttccatcgtccaataatatatatactatgatgagagtgcggtttctctttccagtttgtgtctcattaaaggtgagagaggatgagaataaccctttctacttgagaagctctaacagcttccaaaactctctttgagaaccaaaaacggtcgcattcgtctcctccagagattcaacaaacgctccccacaacttgagaaccttcgagactaccggatt

SEQ ID NO: 119 - DNA, 432 bp, Artificial
  Mutations within conglycinin beta subunit introduced by GmBCG2_T01 TALE nuclease
acgcgcaaaccaaagaacagagaccgatgtaaagacaaaaacatagagtatcctttccaaaacaacgtccaagttcaaaaaattgagacgaaatgcaagcacagcacacataagtggatgatcaagatgggctcgtccatgccacgcacaccaacacacgtcaagcagcaagccctcccgtggccaaatgtgcatgcatacatgttaacaagagctagcattctcttgcataactataaatagccctaatctcactccatgtttccatcgtccaataatatatatactatgatgagagtgcggtttcctttgttggtgttgctgggaaactgttttgttgtccaaacttctcaagattgcaaaacgtggcggcgtgaccgcagtggaggcaagtgcatgccatggcgcaatgcactgacgggtgccccctgg

SEQ ID NO: 120 - DNA, 497 bp, Artificial
  Mutations within conglycinin beta subunit introduced by GmBCG2_T01 TALE nuclease
acgcgcaaaccaaagaacagagaccgatgtaaagacaaaaacatagagtatcctttccaaaacaacgtccaagttcataaaatagagacgaaatgcaagcacagcacacataagtggatgatcaagatgggctcgtccatgccacgcacaccaacacacgtcaagcagcaagccctcccgtggccaaatgtgcatgcatacatgttaacaagagcttgcataactataaatagccctaatctcactcaatgtttcatcgtccaataatatatatactatgatgagagtgcggtttcctttgttggtgttgctgggaactgttggcatcagtttgtgtctcattaaaggtgagaggaggatgagaataacccctttctactttagaagctctaacagcttccaaactctctttgagaaccaaaacggtcgcattcgtctcctccagagattcaacaaacgctccccacaacttgagaaccttcgagactaccggattg

SEQ ID NO: 121 - DNA, 484 bp, Artificial
  Mutations within conglycinin beta subunit introduced by GmBCG2_T01 TALE nuclease
acgcgcaaaccaaagaacagagaccgatgtaaagacaaaaacatagagtatcctttccaaaacaacgtccaagttcataaaatagagacgaaatgcaagcacagcacacataagtggatgatcaagatgggctcgtccatgccacgcacaccaacacacgtcaagcagcaagccctcccgtggccaaatgtgcatgcatacatgttaacaagagcttgcataactataaatagccctaatctcactccatgtttcatcgtccaataatatatatactatgatgagagtgcggtttcctttgttggtgttgctgggaactgttgtgtctcattaaaggtgagagaggatgagaataaccctttctacttgagaagctctaacagcttccaaactctctttgagaaccaaaacggtcgcattcgtctcctccagagattcaacaaacgctccccacaacttgagaaccttcgagactaccggattg

SEQ ID NO: 122 - DNA, 476 bp, Artificial
  Mutations within conglycinin beta subunit introduced by GmBCG2_T01 TALE nuclease
acgcgcaaaccaaagaacagagaccgatgtaaagacaaaaacatagagtatcctttccaaaacaacgtccaagttcaaaaaattgagacgaaatgcaagcacagcacacataagtggatgatcaagatgggctcgtccatgccacgcacaccaacacacgtcaagcagcaagccctcccgtggccaaatgtgcatgcatacatgttaacaagagctagcttctcttgcataactataaatagccctaatctcactccatgtttccatcgtccaataatatatatactatgatgagagtgcggtttctctttccagtttgtgtctcattaaaggtgagagaggatgagaataaccccttttctacttgagaagctctaacagcttccaaactctctttgagaaccaaaacggtcgcattcgtctcctccagagattcaacaaacgctccccacaacttgagaaccttcgagactacc

SEQ ID NO: 123 - DNA, 500 bp, Artificial
  Mutations within conglycinin beta subunit introduced by GmBCG2_T01 TALE nuclease
acgcgcaaaccaaagaacagagaccgatgtaaagacaaaaacatagagtatcctttccaaaacaacgtccaagttcataaaatagagacgaaatgcaagcacagcacacataagtggatgatcaagatgggctcgtccatgccacgcacaccaacacacgtcaagcagcaagccctcccgtggccaaatgtgcatgcatacatgttaacaagagcttgcataactataaatagccctaatctcactcatgttcatcgtccaataatatatatactatgatgagagtgcggtttcctttgttggtgttgctgggaactgttcatccaagtttgtgtctcattaaaaggtgagaggaggatgagaaataacccctttctacttgagaaagctctaacagcttccaaaactctctttgagaaccaaaaacggtcgcattcgtctcctccagagattcaacaaacgctccccacaacttgagaaccttcgagactaccggattg

SEQ ID NO: 124 - DNA, 499 bp, Artificial
  Mutations within conglycinin beta subunit introduced by GmBCG2_T01 TALE nuclease
acgcgcaaaccaaagaacagagaccgatgtaaagacaaaaacatagagtatcctttccaaaacaacgtccaagttcataaaatagagacgaaatgcaagcacagcacacataagtggatgatcaagatgggctcgtccatgccacgcacaccaacacatcgtcaagcagcaagccctcccgtggccaaatgtgcatgcatacatgttaaccaagagcttgcataactataaatagccctaatctcactccatgtttcatcgtccaataatatatatactatgatgagagtgccggtttcctttgttggtgttgctgggaactgttttccatcagtttgtgctcattaaaggtgagagaggatgagaataacccctttctacttgagaagctctaacagcttccaaactctctttgagaaccaaaacggtcgcattcgtctcctccagagattcaacaaacgctccccacaacttgagaaccttcgagactaccggattg

SEQ ID NO: 125 - DNA, 496 bp, Artificial
  Mutations within conglycinin beta subunit introduced by GmBCG2_T01 TALE nuclease
acgcgcaaaccaaagaacagagaccgatgtaaagacaaaaacatagagtatcctttccaaaacaacgtccaagttcataaaatagagacgaaatgcaagcacagcacacataagtggatgatcaagatgggctcgtccatgccacgcacaccaacacacgtcaagcagcaagccctcccgtggccaaatgtgcatgcatacatgttaacaagagcttgcataactataaatagccctaatctcactccatgtttcatcgtccaataatatatatactatgatgagagtgcggtttcctttgttggtgttgctgggaactgtttggcatcagtttgtgtctcattaaaggtgagagaggatgagaataaccctttctactttagaagctctaacagcttccaaactctctttgagaaccaaaacggtcgcattcgtctcctccagagattcaacaaacgctccccacaacttgagaaccttcgagactaccggattg

SEQ ID NO: 126 - DNA, 507 bp, Artificial
  Mutations within conglycinin beta subunit introduced by GmBCG2_T01 TALE nuclease
  misc_feature (349): n is a or c or t or g
acgcgcaaaccaaagaacagagaccgatgtaaagacaaaaacatagagtatcctttccaaaacaacgtccaagttcaaaaaattgagacgaaatgcaagcacagcacacataagtggatgatcaagatgggctcgtccatgccacgcacaccaacacacgtcaagcagcaagccctcccgtggccaaatgtgcatgcatacatgttaacaagagctagcttctcttgcataactataaatagccctaatctcactccatgtttcatcgtccaataatatatatactatgatgagagtgcggtttcctttgttggtgttgctgggaactgtttttggcatcagtttgtgnctcattaaaggtgagagaggatgagaataaccctttctacttgagaagctctaacagcttccaaactctctttgagaaccaaaacggtcgcattcgtctcctccagagattcaacaaacgctccccacaacttgagaaccttcgagactaccggattg

SEQ ID NO: 127 - DNA, 530 bp, Artificial
  Mutations within conglycinin beta subunit introduced by GmBCG2_T01 TALE nuclease
  misc_feature (397): n is a or c or t or g
acgcgcaaaccaaagaacagagaccgatgtaaagacaaaaacatagagtatccttttccaaaacaacgtccaagtttcaaaaaattgagaacgaaaatgcaagcaccagcacacataagtggatgatccaaagatgggcttcgtccatgccacgcacaccaatccacacgtcaagcagcaagccctcccgtggccaaatgtgcatgcatagcatgttaacaagaacgctagtcttctcttgcataactataaatatgccctaaatctcactccatgtttccatcgtccaatcaatatactatacatatgatgagagtgcggtttcttgttggctgttgctgggaactgtttgcatcaagtttgtgtctcgaattaaaggttgagagaggtgatgaanaaaccctttctactgagaagctccttaacagcttccaaactctcttttgagaaccaaaaacggtcgcattcgtctcctcgagaattcaacaaacgctccccacaacttgagaaccttcgagactaccggattg

SEQ ID NO: 128 - DNA, 416 bp, Artificial
  Mutations within conglycinin beta subunit introduced by GmBCG2_T01 TALE nuclease
acgcgcaaaccaaagaacagagaccgatgtaaagacaaaaacatagagtatcctttccaaaacaacgtccaagtttcaaattaaatagagacagaaatgcaagcacagcacaatacagtaagtggatgatcaagatggggctcgtccatgccacgcacaccaacacacgtcaagcagcaagccctcccgtggccaaatgtgcatgcatacatgttaacaagagctagcttctcttgcataactataaatagccctaatctcactccatgtttcatcgtccaataatatatatactatgatgagagtgcggtttcctttgttggtgttgctgggaaactgtttttccatgccagtttgatgttgctgcctattaaagggtgagagaggatgatgaataccctttctacttgagaagc

SEQ ID NO: 129 - DNA, 496 bp, Artificial
  Mutations within conglycinin beta subunit introduced by GmBCG2_T01 TALE nuclease
acgcgcaaaccaaagaacagagaccgatgtaaagacaaaaacatagagtatcctttccaaaacaacgtccaagttcataaaatagagacgaaatgcaagcacagcacacataagtggatgatcaagatgggctcgtccatgccacgcacaccaacacacgtcaagcagcaagccctcccgtggccaaatgtgcatgcatacatgttaacaagagcttgcataactataaatagccctaatctcactccatgttcatcgtccaataatatatatactatgatgagagtgcggtttcctttgttggtgttgctgggaactgttttggcatcaagtttgtgctcataaaggtgagagaggatgagaataacccctttctacttgagaagctctaacagcttccaaactctctttgagaaccaaaacggtcgcattcgtctcctccagagattcaacaaacgctccccacaacttgagaaccttcgagactaccggattg

SEQ ID NO: 130 - DNA, 513 bp, Artificial
  Mutations within conglycinin beta subunit introduced by GmBCG2_T01 TALE nuclease
  misc_feature (400); (432): n is a or c or t or g
acgcgcaaaccaaagaacagagaccgatgtaaagacaaaaacatagagtatcctttccaaaacaacgtccaagttcataaaatagagacgaaaatgcaagccacagcacacataagtggatgatcaagatgggctcgtccatgccacgcacaccaatcatcacgtcaaggcagcaagccctcccgttggccaaatgtgcatgcatacatgttaacaagaacgctagcttctcttgcataactataaatagccctaatctcactccatgtttcatcgtccaataatatatatactatgatgagagtgcggtttcctttgttggtgttgcctgggaaactgtttagttttgtggtctcattaaaggtggagagaggttgaagaataacccctttctacttgngaagctctaacagcttccaaactctcttttgngaaccaaaacggtcgcatcgtctcctccgagattcaacaaacgctccccacaacttgagaaccttcgagactaccggattg

SEQ ID NO: 131 - DNA, 662 bp, Artificial
  Mutations within conglycinin beta subunit introduced by GmBCG2_T01 TALE nuclease
  misc_feature (631): n is a or c or t or g
acgcgcaaaccaaagaacagagaccgatgtaaagacaaaaacatagagtatcctttccaaaacaacgtccaagttcaaaaaattgagacgaaatgcaagcacagcacacataagtggatgatcaagatgggctcgtccatgccacgcacaccaacacacgtcaagcagcaagccctcccgtggccaaatgtgcatgcatacatgttaacaagagctagcttcctcttgcataactataaatagccctaatctcactccatgtttcatcgtccaataatatatatactatgatgagagtgcggtttccctttgttggtgttgctgggaactgtggtccagcggctgttgccggtgctgtgccaggcccacggcttgaccccccagcaggtggtggccatcgccagcaataatggtggcaagcaggcgctggagacggtccagcggctgttgccggtgctgtcgccaggcccacggcttgaccccctggcatcagtttgtgtcctcaattaaaggtgaaggagaggatgagaataaccctttctactttagaagctctaacagcttccaaactctctttgagaaccaaaacggtcgcattcgtctcctccagagattcaacaaaacgctcccncaacttgagaaccttcgagactaccggattg

SEQ ID NO: 132 - DNA, 496 bp, Artificial
  Mutations within conglycinin beta subunit introduced by GmBCG2_T01 TALE nuclease
acgcgcaaaccaaagaacagagaccgatgtaaagacaaaaacatagagtatcctttccaaaacaacgtccaagttcataaaatagagacgaaatgcaagcacagcacacataagtggatgatcaagatgggctcgtccatgccacgcacaccaacacacgtcaagcagcaagccctcccgtggccaaatgtgcatgcatacatgttaacaagagcttgcataactataaatagccctaatctcactccatgtttcatcgtccaataatatatatactatgatgagagtgcggtttcctttgttggtgttgctgggaactgttttcctcagtttgtgtctcattaaaggtgagagaggatgagaataacccctttctactttagaagctctaacagcttccaaactctctttgagaaccaaaacggtcgcattcgtctcctccagagattcaacaaacgctccccacaacttgagaaccttcgagactaccggattg

SEQ ID NO: 133 - DNA, 464 bp, Artificial
  Mutations within conglycinin beta subunit introduced by GmBCG2_T01 TALE nuclease
acgcgcaaaccaaagaacagagaccgatgtaaagacaaaaacatagagtatcctttccaaaacaacgtccaagttcaaaaaattgagacgaaatgcaagcacagcacacataagtggatgatcaagatgggctcgtccatgccacgcacaccaacacacgtcaagcagcaagccctcccgtggccaaatgtgcatgcatacatgttaacaagagctagcttctcttgcataaactataaatagccctaatctcactccatgtttccatcgtccaataatatactatactatgatgagagtgcggtttcctttgttggtgagagaggatgagaataaccctttctacttgagaagctctaacagcttccaaactctcttttgagaaccaaaaacggtcgcattcgtctcctccagagattcaaacaaaacgctcccccacaacttgagaaccttcgagactaccc

SEQ ID NO: 134 - DNA, 500 bp, Artificial
  Mutations within conglycinin beta subunit introduced by GmBCG2_T01 TALE nuclease
acgcgcaaaccaaagaacagagaccgatgtaaagacaaaaaacatagagtatcctttccaaaacaacgtccaagttcaaaaaattgagacgaaatgcaagcacagcacacataagtggatgatcaagatgggctcgtccatgccacgcacaccaacacacgtcaagcagcaagccctcccgtggccaaatgtgcatgcatacatgttaacaagagctagcttctcttgcataactataaatagccctaatctcactccatgtttcatcgtccaaataatatactatactatgatgagagtgcggtttcctttgttggtgttgcatcagtttgtgtctcattaaaggtgagaggaggatgagaaataaccccttttctacttgagaagctctaacagcttccaaaactctctttgagaaccaaaaacggtcgcattcgtctcctccagagattcaacaaacgctcccccacaacttgagaaccttcgagactaccggattg

SEQ ID NO: 135 - DNA, 504 bp, Artificial
  Mutations within conglycinin beta subunit introduced by GmBCG2_T01 TALE nuclease
  misc_feature (319): n is a or c or t or g
acgcgcaaaccaaagaacagagaccgatgtaaagacaaaaacatagagtatcctttccaaaacaacgtccaagttcataaaatagagacgaaatgcaagcacagcacacataagtggatgatcaagatgggctcgtccatgccacgcacaccaacacacgtcaagcagcaagccctcccgtggccaaatgtgcatgcatacatgttaacaagagcttgcataactataaatagccctaatctcactccatgtttcatcgtccaataatatatatactatgatgagagtgcggtttcctttgttggtgttgctgggaagngttttcctggcatcagtttgtggtctcattaaaggtgagaggaggatgagaataaccccttttctacttgagaagctctaacagcttccaaactctctttgagaaccaaaacggtcgcattcgtctcctccagagattcaacaaacgctccccacaacttgagaaccttcgagactaccggattg

SEQ ID NO: 136 - DNA, 511 bp, Artificial
  Mutations within conglycinin beta subunit introduced by GmBCG2_T01 TALE nuclease
acgcgcaaaccaaagaacagagaccgatgtaaagacaaaaacatagagtatcctttccaaaacaacgtccaagttcaaaaaattgagacgaaatgcaagcacagcacacataagtggatgatcaagatgggctcgtccatgccacgcacaccaacacacgtcaagcagcaagccctcccgtggccaaatgtgcatgcatacatgttaacaagagctagcttctcttgcataactataaatagccctaatctcactccatgtttcatcgtccaataatatatatacatatgatgagagtgcggtttcctttgttggtgttgctgggagttctgttccatgcactttgtgtcctcattaaagggtgagagaggatgagaataaccctttctacttgagaagctctaacagcttccaaactctctttgagaaccaaaaacggtcgcattcgtctcctccagagattcaacaaacgctcccccacaacttgagaaccttcgagactaccggattg

SEQ ID NO: 137 - DNA, 545 bp, Artificial
  Mutations within conglycinin beta subunit introduced by GmBCG2_T01 TALE nuclease
acgcgcaaaccaaagaacagagaccgatgtaaagacaaaaacatagagtatcctttccaaaacaacgtccaagttcataaaatagagacgaaatgcaagcacagcacacataagtggatgatcaagatgggctcgtccatgccacgcacaccaacacacgtcaagcagcaagccctcccgtggccaaatgtgcatgcatacatgttaacaagagcttgcataactataaatagccctaatctcactccatgtttcatcgtccaataatatatatactatgatgagagtgcggtttccttgttggtgttgctggaactgttttctgcaccgtctccagcgcctgcttgccgccaatattgctggcgatggccaccacctgctccggggtcaagccgtggtcctggcatcagtttgtgtctcattaaaggtgagagaggatgagaataacccttctacttagaagctctaacagcttccaactctctttgagaaccaaaacggtcgcattcgtctcctccagagattcaacaaacgctccccacaac

SEQ ID NO: 138 - DNA, 556 bp, Artificial
  Mutations within conglycinin beta subunit introduced by GmBCG2_T01 TALE nuclease
  misc_feature (433); (471): n is a or c or t or g
acgcgcaaaccaaagaacagagaccgatgtaaagacaaaaacatagagtatcctttccaaaacaacgtccaagttcataaaatagagacgaaatgcaagcacagcacacataagtggatgatcaagatgggctcgtccatgccacgcacaccaacacacgtcaagcagcaagccctcccgtggccaaatgtgcatgcatacatgttaacaagagcttgcataactataaatagccctaatctcactccatgtttcatcgtccaataatatatatactatgatgagagtgcggtttcctttgttggtgttgctgggaactgttttccgtgggcctggcacagcaccggcaacagcgcctgcaccgtctccagcgcctgcttgccaccaatattgctggcgatggccaccacctgctcctggcatcagtttgtgnctcattaaaggtgagagaggatgagaataacccctttntacttgagaagctctaacagcttccaaactctctttgagaaccaaaacggtcgcattcgtctcctccagagattcaacaaacgct

SEQ ID NO: 139 - DNA, 497 bp, Artificial
  Mutations within conglycinin beta subunit introduced by GmBCG2_T01 TALE nuclease
acgcgcaaaccaaagaacagagaccgatgtaaagacaaaaacatagagtatcctttccaaaacaacgtccaagttcataaaatagagacgaaatgcaagcacagcacacataagtggatgatcaagatgggctcgtccatgccacgcacaccaacacacgtcaagcagcaagccctcccgtggccaaatgtgcatgcatacatgttaaccaagagcttgcataactataaatagccctaatctcactccatgtttcatcgtccaataatatatatactatgatgagagtgcggtttcctttgttggtgttgctgggaactgttttccctcagtttgtgctcattaaaggtgagagaggatgagaataacccctttctactttagaagctctaacagcttccaaactctctttgagaaccaaaacggtcgcattcgtctcctccagagattcaacaaacgctccccacaacttgagaaccttcgagactaccggattg

SEQ ID NO: 140 - DNA, 509 bp, Artificial
  Mutations within conglycinin beta subunit introduced by GmBCG2_T01 TALE nuclease
acgcgcaaaccaaagaacagagaccgatgtaaagacaaaaacatagagtatcctttccaaaacaacgtccaagttcataaaatagagacgaaatgcaagcacagcacacataagtggatgatcaagatgggctcgtccatgccacgcacaccaacacacgtcaagcagcaagccctcccgtggccaaatgtgcatgcatacatgttaacaagagctagcttctcttgcataactataaatagcctaatctcactccatgtttcatcgtccaataatatatatactatgatgagagtgcggtttcctttgttggtgttgctgggaactgtttggcatcagtttgtgtctcattaaaggtgagagaggatgagaataaccctttctacttgagaagctctaacagcttccaaaactctctttgagaaccaaaaacggtcgcattcgtctcctccagagatttcaacaaaacgctcccccacaacttgagaaccttcgagactaccggattg

SEQ ID NO: 141 - DNA, 495 bp, Artificial
  Mutations within conglycinin beta subunit introduced by GmBCG2_T01 TALE nuclease
acgcgcaaaccaaagaacagagaccgatgtaaagacaaaaacatagagtatcctttccaaaacaacgtccaagttcataaaatagagacgaaatgcaagcacagcacacataagtggatgatcaagatgggctcgtccatgccacgcacaccaacacacgtcaagcagcaagccctcccgtggccaaatgtgcatgcatacatgttaacaagagcttgcataactataaatagccctaatctcactccatgtttcatcgtccaataatatatatactatgatgagagtgcggtttcctttgttggtgttgctgggaactgttggctcagtttgtgtctcattaaaaggtgagagaggatgagaataaccctttctactttagaagctctaacagcttccaaactctctttgagaaccaaaacggtcgcattcgtctcctccagagattcaacaaacgctccccacaacttgagaaccttcgagactaccggattg

SEQ ID NO: 142 - DNA, 457 bp, Artificial
  Mutations within conglycinin beta subunit introduced by GmBCG2_T01 TALE nuclease
acgcgcaaaccaaagaacagagaccgatgtaaagacaaaaacatagagtatcctttccaaaacaacgtccaagttcataaaatagagacgaaatgcaagcacagcacacataagtggatgatcaagatggggctcgtccatgccacgcacaccaacacacgtcaagcagcaagccctcccgtggccaaatgtgcatgcatacatgttaacaagagcttgcataactataaatagccctaatctcactccatgtttcatcgtccaataatatatatactatgatgagagtgcggtttcctttgttggtgttgctgggaactgtttggcatcagttgtgtctcattaaaggtgagagaggatgagaataacccctttctacttgagaagctctaacagcttccaaactctctttgagaaccaaaacggtcgcattcgtctcctccagagattcaacaaa

SEQ ID NO: 143 - DNA, 500 bp, Artificial
  Mutations within conglycinin beta subunit introduced by GmBCG2_T01 TALE nuclease
acgcgcaaaccaaagaacagagaccgatgtaaagacaaaaacatagagtatcctttccaaaacaacgtccaagttcaaaaaattgagacgaaatgcaagcacagcacacataagtggatgatcaagatgggctcgtccatgccacgcacaccaacacacgtcaagcagcaagccctcccgtggccaaatgtgcatgcatacatgttaacaagagctagcttctcttgcataactataaatagccctaatctcactccatgtttcatcgtccaataatatatatactatgatgagagtgcggtttcctttgttggtgttgctgggaactgtggcatccagttttgtgtctcattaaaggtgagagaggatgagaataaccctttctacttgagaagctctaacagcttccaaactctctttgagaaccaaaacggtcgcattcgtctcctccagagattcaacaaacgctcccccacaacttgagaaccttcgagactacc

SEQ ID NO: 144 - DNA, 412 bp, Artificial
  Mutations within conglycinin beta subunit introduced by GmBCG2_T01 TALE nuclease
acgcgcaaaccaaagaacagagaccgatgtaaagacaaaaaacatagagtatcctttccaaaacaacgtccaagttcaaaaaattgagacgaaatgcaagcacagcacacataaagtggatgatcaagatgggctcgtccatgccacgcacaccaacacacgtcaagcagcaagccctcccgtggccaaatgtgcatgcatacatgttaacaagagctagcttctcttgcataactataaatagccctaatctcactccatgtttcatcgtccaataatatatatacatatgatgagagtgcggtttcctttgttggtgttgctgggaactgttttgggcatccagttttgtgtctcattaaaggtgagagaggatgagaataaccctttctacttgagaagctctaacagc

SEQ ID NO: 145 - DNA, 487 bp, Artificial
  Mutations within conglycinin beta subunit introduced by GmBCG2_T01 TALE nuclease
acgcgcaaaccaaagaacagagaccgatgtaaagacaaaaacatagagtatcctttccaaaacaacgtccaagttcaaaaaattgagacgaaatgcaagcacagcacacataagtggatgatcaagatgggctcgtccatgccacgcacaccaacacacgtcaagcagcaagccctcccgtggccaaatgtgcatgcatacatgttaacaagagcttgcataactataaatagccctaatctcactccatgtttcatcgtccaataatatatatactatgatgagagtgcggtttcctttgttggtgttgctgggaactgttttgtgtctcattaaaggtgagagaggatgagaataaccctttctactttagaagctctaaacagcttccaaactctctttgagaaccaaaacggtcgcattcgtctcctccagagattcaacaaacgctccccacaacttgagaaccttcgagactaccggattg

SEQ ID NO: 146 - DNA, 592 bp, Artificial
  Mutations within conglycinin beta subunit introduced by GmBCG2_T01 TALE nuclease
  misc_feature (434); (474): n is a or c or t or g
acgcgcaaaccaaagaacagagaccgatgtaaagacaaaaacatagagtatcctttccaaaacaacgtccaagttcataaaatagagacgaaatgcaagcacagcacacataagtggatgatcaagatgggctcgtccatgccacgcacaccaacacacgtcaagcagcaagccctcccgtggccaaatgtgcatgcatacatgttaacaagagcttgcataactataaatagccctaatctcactccatgtttcatcgtccaataatatatatactatgatgagagtgcggtttcctttgttggtgttgctgggaactgttttccgtgggcctggcacagcaccggcaacagcgcctgcacccgtctccagcgcctgcttgccaccaatattgctggcgatggccaccacctgctcctggcatcagtttgtgnctcattaaaggtgagagagggatgagaattaacccctttntacttgagaagctctaacagcttccaaactctctttgagaaccaaaacggtcgcattcgtctcctccagagattcaacaaacgctccccacaacttgagaaccttcgagactaccgga

SEQ ID NO: 147 - DNA, 494 bp, Artificial
  Mutations within conglycinin beta subunit introduced by GmBCG2_T01 TALE nuclease
acgcgcaaaccaaagaacagagaccgatgtaaagacaaaaaacatagagtatcctttccaaaacaacgtccaagttcataaaatagagacgaaatgcaagcacagcacacataagtggatgatcaagatgggctcgtccatgccacgcacaccaacacacgtcaagcagcaagccctcccgtggccaaatgtgcatgcatacatgttaacaagagcttgcataactataaatagccctaatctcactccatgatttcacgtccaataatatatatactatgatgagagtgcggtttcctttgttggtgttgctgggaactgtttatcagttgtgtctcattaaaggtgagagaggatgagaataacccctttctactttagaagctctaacagcttccaaactctctttgagaaccaaaacggtcgcattcgtctcctccagagattcaacaaacgctccccacaacttgagaaccttcgagactaccggattg

SEQ ID NO: 148 - DNA, 575 bp, Artificial
  Mutations within conglycinin beta subunit introduced by GmBCG2_T01 TALE nuclease
acgcgcaaaccaaagaacagagaccgatgtaaagacaaaaaacatagagtatcctttccaaaacaacgtccaagttcaataaaatagagacgaaatgcaagcacagcacacataagtggatgatcaagatgggctcgtccatgccacgcacaccaacacacgtcaagcagcaagccctcccgtggccaaatgtgcatgcatacatgttaacaagagcttgcataactataaatagccctaatctcactccatgtttcatcgtccaataatatatatactatgatgagagtgcggtttcctttgttggtgttgctgggaactgttttccgttgggcctggcacagcaccggcaacagcgccttgcaccgtctccagcgcctgcttgccaccaatattgctggcgatggccaccacctgctcctggcatcagtttgtgtctcattaaaggtgagagaggatgagaataaccctttctacttgagaagctctaacagcttccaaactctctttgagaaccaaaacggtcgcattcgtctcctccagagattcaacaaacgctccccacaacttgagaa

SEQ ID NO: 149 - DNA, 418 bp, Artificial
  Mutations within conglycinin beta subunit introduced by GmBCG2_T01 TALE nuclease
  misc_feature (79); (357); (386): n is a or c or t or g
acgcgcaaaccaaagaacagagaccgatgtaaagacaaaaaacatagagtatccttttccaaaacaacgtccaagttcntaaaaatagagacgaaatgcaagcacagacacaataagtggatgatcaagatgggctcgtccatgccacgcacaccaacacacgtcaagcagcaagccctcccgtggccaaatgtgcatgcatacatgttaacaagagcttgcagtaactataaatagccctaatctcactccaatgtttcacgtccaataatatatatactatgatgagagtgcggtttcctttgttggtgttgctgggaactgttgcatccagtttgtgtctccagtttaaaaggngagaggaggatgagaaataacccctttcnactttagaagctctaacagcttccaaactctc

SEQ ID NO: 150 - DNA, 501 bp, Artificial
  Mutations within conglycinin beta subunit introduced by GmBCG2_T02TALE nuclease
acgcgcaaaccaaagaacagagaccgatgtaaagacaaaaacatagagtatcctttccaaaacaacgtccaagttcaaaaattgagacgaaatgcaagcacagcacacataagtggatgatcaagatgggctcgtccatgccacgcacaccaacacacgtcaagcagcaagccctcccgtggccaaatgtgcatgcatacatgttaacaagagctagcttctcttgcataactataaatagccctaatctcactccatgtttcatcgtccaataatatatatacatatgatgagagtgcggttccttgttggtgttgctggaactgttttcctggcatcagtgtctcattaaaggtgagagaggatgagaataaccctttctactttagaagctctaacagcttccaaactctctttgagaaccaaaacggtcgcattcgtctcctccagagattcaacaaacgctcccacaacttgagaaccttcgagactaccggattg

SEQ ID NO: 151 - DNA, 500 bp, Artificial
  Mutations within conglycinin beta subunit introduced by GmBCG2_T02TALE nuclease
acgcgcaaaccaaagaacagagaccgatgtaaagacaaaaacatagagtatcctttccaaaacaacgtccaagttcaaaaaattgagacgaaatgcaagcacagcacacataagtggatgatcaagatgggctcgtccatgccacgcacaccaacacacgtcaagcagcaagccctcccgtggccaaatgtgcatgcatacatgttaacaagagctagcttctcttgcataactataaatagccctaatctcactccatgtttcatcgtccaataatatatatactatgatgagagtgcggtttcctttgttggtgttgctgggaactgttttcctgtgtgtctcattaaaggtgagagaggatgagaataaccctttctacttgagaagctctaacagcttccaaactctctttgagaaccaaaacggtcgcattcgtctcctccagagattcaacaaacgctccccacaacttgagaaccttcgagactaccggattg

SEQ ID NO: 152 - DNA, 474 bp, Artificial
  Mutations within conglycinin beta subunit introduced by GmBCG2_T02TALE nuclease
acgcgcaaaccaaagaacagagaccgatgtaaagacaaaaacatagagtatcctttccaaaacaacgtccaagttcaaaaattgagacgaaatgcaagcacagcacacataagtggatgatcaagatgggctcgtccatgccacgcacaccaacacacgtcaagcagcaagccctcccgtggccaaatgtgcatgcatacatgttaacaagagctagcttctcttgcataactataaatagccctaatctcactccatgtttcatcgtccaataatatactatacatatgatgagagtgcggtttccttgttggtgttgctgggaactgtttcctggcatgtctcattaaaggtgagagaggatgagaataaccttctacttgagaagctctaacagcttccaaactctctttgagaaccaaaacggtcgcattcgtctcctccaagagttcaacaaacgctccccacaacttg

SEQ ID NO: 153 - DNA, 435 bp, Artificial
  Mutations within conglycinin beta subunit introduced by GmBCG2_T02TALE nuclease
  misc_feature (346): n is a or c or t or g
acgcgcaaaccaaagaacagagaccgatgtaaagacaaaaacatagagtatcctttccaaaacaacgtccaagttcaaaaaattgagacgaaatgcaagcacagcacacataagtggatgatcaagatgggctcgtccatgccacgcacaccaacacacgtcaagcagcaagccctcccgtggccaaatgtgcatgcatacatgttaacaagagctagcttctcttgcataactataaatagccctaatctcactccatgtttcatcgtccaataatatatatactatgatgagagtgcggtttcctttgttggtgttgctggaactgttttcctggcatcagttntgcattaaaggtgagagaggatgagaataaccctttctactgagaagctctaacagcttccaaactctctttgagaaccaaaacggtcg

SEQ ID NO: 154 - DNA, 494 bp, Artificial
  Mutations within conglycinin beta subunit introduced by GmBCG2_T02TALE nuclease
  misc_feature (390): n is a or c or t or g
acgcgcaaaccaaagaacagagaccgatgtaaagacaaaaacatagagtatcctttccaaaacaacgtccaagttcataaaatagagacgaaatgcaagcacagcacacataagtggatgatcaagatgggctcgtccatgccacgcacaccaacacacgtcaagcagcaagccctcccgtggccaaatgtgcatgcatacatgttaacaagagcttgcataactataaatagccctaatctcactccatgtttcatcgtccaataatatatatactatgatgagagtgcggtttcctttgttggtgttgctgggaactgttttcctggcatgtctcattaaaggtgaggagaggatgagaataaccctttctacttgagaagctctaanagcttccaaaactctcttttgagaaccaaaaacggtcgcattcgtctcctccagagattcaacaaacgctccccacacttgagaacttcgagactaccggattg

SEQ ID NO: 155 - DNA, 383 bp, Artificial
  Mutations within conglycinin beta subunit introduced by GmBCG2_T02TALE nuclease
  misc_feature (341); (358): n is a or c or t or g
acgcgcaaaccaaagaacagagaccgatgtaaagacaaaaacatagagtatcctttccaaaacaacgtccaagttcaaaaattgagacgaaatgcaagcacagcacacataagtggatgatcaagatgggctcgtccatgccacgcacaccaacacacgtcaagcagcaagccctcccgtggccaaatgtgcatgcatacatgttaacaagagctagcttctcttgcataactataaatagccctaatctcactccatgtttcatcgtccaataatatatatacatatgatgagagtgcggtttccttgttgtgttgctggaactgtttcctggcatcgtntcattaaaggtgagagnggatgagaataaccctttctacttg

SEQ ID NO: 156 - DNA, 495 bp, Artificial
  Mutations within conglycinin beta subunit introduced by GmBCG2_T02TALE nuclease
acgcgcaaaccaaagaacagagaccgatgtaaagacaaaaacatagagtatcctttccaaaacaacgtccaagttcataaaatagagacgaaatgcaagcacagcacacataagtggatgatcaagatgggctcgtccatgccacgcacaccaacacacgtcaagcagcaagccctcccgtggccaaatgtgcatgcatacatgttaacaagagcttgcataactataaatagccctaatctcactccatgatttcatcgtccaataatatatatactatgatgagagtgcggtttcctttgttggtgttgctgggaactgttttcctggcattgtgctcattaaaggtgagagaggatgagaataaccctttctactttagaagctctaacagcttccaaactctctttgagaaccaaaacggtcgcattcgtctcctccagagattcaacaaacgctccccacaacttgagaaccttcgagactaccggattg

SEQ ID NO: 157 - DNA, 493 bp, Artificial
  Mutations within conglycinin beta subunit introduced by GmBCG2_T02TALE nuclease
acgcgcaaaccaaagaacagagaccgatgtaaagacaaaaacatagagtatcctttccaaaacaacgtccaagttcataaaatagagacgaaatgcaagcacagcacacataagtggatgatcaagatgggctcgtccatgccacgcacaccaacacacgtcaagcagcaagccctcccgtggccaaatgtgcatgcatacatgttaacaagagcttgcataactataaatagccctaatctcactccatgtttcatcgtccaataatatatatactatgatgagagtgcggtttcctttcgttggtgttgctgggaactgttttcctggcagtgctcattaaaggtgagagaggatgagaataaccctttctactttagaagctctaacagcttccaaactctctttgagaaccaaaacggtcgcattcgtctcctccagagattcaacaaacgctccccacaacttgagaaccttcgagactaccggattg

SEQ ID NO: 158 - DNA, 503 bp, Artificial
  Mutations within conglycinin beta subunit introduced by GmBCG2_T02TALE nuclease
acgcgcaaaccaaagaacagagaccgatgtaaagacaaaaacatagagtatcctttccaaaacaacgtccaagttcataaaatagagacgaaatgcaagcacagcacacataagtggatgatcaagatgggctcgtccatgccacgcacaccaacacacgtcaagcagcaagccctcccgtggccaaatgtgcatgcatacatgttaacaagagctagcttctcttgcataactataaatagccctaatctcactccatgtttcatcgtccaataatatatatactatgatgagagtgcggtttcctttgttggtgttgctgggaactgttttcctggcatcgtctcattaaaggtgagagaggatgagaataaccctttctacttgagaagctctaacagcttccaaactctctttgagaaccaaaacggtcgcattcgtctcctccagagattcaacaaaacgctccccacaacttgagaaccttcgagactaccggattg

SEQ ID NO: 159 - DNA, 497 bp, Artificial
  Mutations within conglycinin beta subunit introduced by GmBCG2_T02TALE nuclease
acgcgcaaaccaaagaacagagaccgatgtaaagacaaaaacatagagtatcctttccaaaacaacgtccaagttcataaaatagagacgaaatgcaagcacagcacacataagtggatgatcaagatgggctcgtccatgccacgcacaccaacacacgtcaagcagcaagccctcccgtggccaaatgtgcatgcatacatgttaacaagagcttgcataactataaatagccctaatctcactccatgatttcacgtccaataatatatatactatgatgagagtgcggtttcctttgttggtgttgctgggaactgttttcctggcatcagtgtctcattaaaggtgagagaggatgagaataaccctttctactttgagaagctctaacagcttccaaactctctttgagaaccaaaacggtcgcattcgtctcctccagagattcaacaaacgctccccacaacttgagaaccttcgagactaccggattg

SEQ ID NO: 160 - DNA, 491 bp, Artificial
  Mutations within conglycinin beta subunit introduced by GmBCG2_T02TALE nuclease
acgcgcaaaccaaagaacagagaccgatgtaaagacaaaaacatagagtatcctttccaaaacaacgtccaagttcataaaatagagacgaaatgcaagcacagcacacataagtggatgatcaagatgggctcgtccatgccacgcacaccaacacacgtcaagcagcaagccctcccgtggccaaatgtgcatgcatacatgttaacaagagcttgcataactataaatagccctaatctcactccatgtttcatcgtccaataatatatatactatgatgagagtgcggtttcctttgttggtgttgctgggaactgttttcctggcatctgtctcattaaaggtgagagaggatgagaataacccctttctactttagaagctctaacagcttccaaactctctttgagaaccaaaacggtcgcattcgtctcctccagagattcaacaaacgctccccacaacttgagaaccttcgagactaccgg

SEQ ID NO: 161 - DNA, 497 bp, Artificial
  Mutations within conglycinin beta subunit introduced by GmBCG2_T02TALE nuclease
acgcgcaaaccaaagaacagagaccgatgtaaagacaaaaacatagagtatcctttccaaaacaacgtccaagttcataaaatagagacgaaatgcaagcacagcacacataagtggatgatcaagatgggctcgtccatgccacgcacaccaacacacgtcaagcagcaagccctcccgtggccaaatgtgcatgcatacatgttaacaagagcttgcataactataaatagccctaatctcactccatgatttcatcgtccaataatatatatactatgatgagagtgcggtttcctttgttggtgttgctgggaactgttttcctggcatcgtgtctcattaaaggtgagagaggatgagaataaccctttctactttagaagctctaacagcttccaaactctctttgagaaccaaaacggtcgcattcgtctcctccagagattcaacaaacgctcccccacaacttgagaaccttcgagactaccggattg

SEQ ID NO: 162 - DNA, 366 bp, Artificial
  Mutations within conglycinin beta subunit introduced by GmBCG2_T02TALE nuclease
  misc_feature (86): n is a or c or t or g
acgcgcaaaccaaagaacagagaccgatgtaaagacaaaaacatagagtatcctttccaaaacaacgtccaagttcaaaaaattgngacgaaaatgcaagcacagcacacataaagtggatgatcaagatgggctcgtccatgccacgcacaccaacacacgtcaagcagcaagccctcccgtggccaaatgtgcatgcatacatgttaacaagagctagcttctcttgcataaactataaatagccctaatctcactccatgtttcatcgtccaataatatatatactatgatgagagtgcggtttcctttgtggtgttgctgggaaactgttttcctggcatcctcattaaaggtgagagagga

SEQ ID NO: 163 - DNA, 495 bp, Artificial
  Mutations within conglycinin beta subunit introduced by GmBCG2_T02TALE nuclease
  misc_feature (349); (372); (373): n is a or c or t or g
acgcgcaaaccaaagaacagagaccgatgtaaagacaaaaacatagagtatcctttccaaaacaacgtccaagttcataaaatagagacgaaatgcaagcacagcacacataagtggatgatcaagatgggctcgtccatgccacgcacaccaacacacgtcaagcagcaagccctcccgtggccaaatgtgcatgcatacatgttaacaagagcttgcataactataaatagccctaatctcactccatgttcacgtccaataatatatatactatgatgagagtgcggtttcctttgttggtgttgctgggaactgttttcctggcatcagtctcattaaaaggtgnagaggatgagaataacccctttnnaacttgagaagctctaacagcttccaaactctctttgagaaccaaaacggtcgcattcgtctcctccagagattcaacaaacgctcccccacaacttgagaaccttcgagactaccggattg

SEQ ID NO: 164 - DNA, 439 bp, Artificial
  Mutations within conglycinin beta subunit introduced by GmBCG2_T02TALE nuclease
acgcgcaaaccaaagaacagagaccgatgtaaagacaaaaacatagagtatcctttccaaaacaacgtccaagttcaaaaaattgagacgaaatgcaagcacagcacacataagtggatgatcaagatgggctcgtccatgccacgcacaccaacacacgtcaagcagcaagccctcccgtggccaaatgtgcatgcatacatgttaacaagagctagcttctcttgcataactataaatagccctaatctcactccatgtttcatcgtccaataatatatatacatatgatgagagtgcggtttcctttgttggtgttgctggaactgttttcctggcatcagttgtctcattaaaggtgagagaggatgagaataacctttctacttgagaagctctaacagcttccaaactctctttgagaaccaaaaacggtcgc

SEQ ID NO: 165 - DNA, 476 bp, Artificial
  Mutations within conglycinin beta subunit introduced by GmBCG2_T02TALE nuclease
acgcgcaaaccaaagaacagagaccgatgtaaagacaaaaacatagagtatcctttccaaaacaacgtccaagttcaaaaaattgagacgaaaatgcaagcacagcacacataagtggatgatcaagatgggctcgtccatgccacgcacaccaacacacgtcaagcagcaagccctcccgtggccaaatgtgcatgcatacatgttaacaagagctagcttctcttgcataactataaatagccctaatctcactccatgtttcatcgtccaatcaatatataatactatgatgagagtgcggtttcctttgttggtgttgctgggaactggtgagagaggatgagaataaccctttctacttgagaagctctaacagcttccaaactctcttttgagaaccaaaacggtcgcattcgtctcctccaagagattcaaacaaacgctcccccacaacttgagaaccttcgagacta

SEQ ID NO: 166 - DNA, 495 bp, Artificial
  Mutations within conglycinin beta subunit introduced by GmBCG2_T02TALE nuclease
acgcgcaaaccaaagaacagagaccgatgtaaagacaaaaacatagagtatcctttccaaaacaacgtccaagttcataaaatagagacgaaatgcaagcacagcacacataagtggatgatcaagatgggctcgtccatgccacgcacaccaacacacgtcaagcagcaagccctcccgtggccaaatgtgcatgatacatgttaacaagagcttgcataactataaatagccctaatctcactccatgtttcatcgtccaataatatatatactatgatgagagtgcggtttcctttgttggtgttgctgggaactgttttcctggcatgtgtctcattaaaggtgagagaggatgagaataaccccttttctacttgagaagctctaacagcttccaaactctctttgagaaccaaaacggtcgcattcgtctcctccagagattcaacaaacgctccccacaacttgagaaccttcgagactaccggattg

SEQ ID NO: 167 - DNA, 442 bp, Artificial
  Mutations within conglycinin beta subunit introduced by GmBCG2_T02TALE nuclease
acgcgcaaaccaaagaacagagaccgatgtaaagacaaaaacatagagtatcctttccaaaacaacgtccaagttcaaaaaattgagacgaaatgcaagcacagcacacataagtggatgatcaagatgggctcgtccatgccacgcacaccaacacacgtcaagcagcaagccctcccgtggccaaatgtgcatgcatacatgttaacaagagctagcttctcttgcataactataaatagccctaatctcactccatgtttcatcgtccaataatatatatactatgatgagagtgcggttcctttgttggtgttgctggaactgttttcctggcattgtgtctcattaaaggtgagagaggatgagaataaccctttctacttgagaagctctaacagcttccaaactctctttgagaaccaaaacggtcgcattcgtc

SEQ ID NO: 168 - DNA, 504 bp, Artificial
  Mutations within conglycinin beta subunit introduced by GmBCG2_T02TALE nuclease
acgcgcaaaccaaagaacagagaccgatgtaaagacaaaaacatagagtatcctttccaaaacaacgtccaagttcaaaaaattgagacgaaatgcaagcacagcacacataagtggatgatcaagatgggctcgtccatgccacgcacaccaacacacgtcaagcagcaagccctcccgtggccaaatgtgcatgcatacatgttaacaagagctagcttctcttgcataactataaatagccctaatctcactccatgtttcatcgtccaataatatactatactatgatgagagtgcggtttcctttgttggtgttgctgggaactgttttcctggcatctgtctcattaaaggtgagagaggatgagaataaccctttctactttagaagctctaacagcttccaaactctctttgagaaccaaaacggtcgcattcgtctcctccagagattcaacaaacgctccccacaacttgagaaccttcgagactaccggattg

SEQ ID NO: 169 - DNA, 498 bp, Artificial
  Mutations within conglycinin beta subunit introduced by GmBCG2_T02TALE nuclease
acgcgcaaaccaaagaacagagaccgatgtaaagacaaaaacatagagtatcctttccaaaacaacgtccaagttcataaaatagagacgaaatgcaagcacagcacacataagtggatgatcaagatgggctcgtccatgccacgcacaccaacacacgtcaagcagcaagccctcccgtggccaaatgtgcatgcatacatgttaacaagagcttgcataactataaatagccctaatctcactccatgtttcatcgtccaataatatatatactatgatgagagtgcggtttcctttgttggtgttgctgggaactgttttcctggcatctgttgtctcattaaaggtgagagaggatgagaataacccctttctactttagaagctctaacagcttccaaactctctttgagaaccaaaacggtcgcattcgtctcctccagagattcaacaaacgctccccacaacttgagaaccttcgagactaccggattg

SEQ ID NO: 170 - DNA, 502 bp, Artificial
  Mutations within conglycinin beta subunit introduced by GmBCG2_T02TALE nuclease
acgcgcaaaccaaagaacagagaccgatgtaaagacaaaaacatagagtatcctttccaaaacaacgtccaagttcaaaaaattgagacgaaatgcaagcacagcacacataagtggatgatcaagatgggctcgtccatgccacgcacaccaacacacgtcaagcagcaagccctcccgtggccaaatgtgcatgcatacatgttaacaagagctagcttctcttgcataactataaatagccctaatctcactccatgtttcatcgtccaataatatatatactatgatgagagtgcggttcctttgttggtgttgctgggaactgttttcctggcatcagtctcattaaaggtgagagaggatgagaataaccctttctacttgagaagctctaacagcttccaaactctctttgagaaccaaaacggtcgcattcgtctcctccagagattcaacaaacgctccccacaacttgagaaccttcgagactaccggattg

SEQ ID NO: 171 - DNA, 503 bp, Artificial
  Mutations within conglycinin beta subunit introduced by GmBCG2_T02TALE nuclease
  misc_feature (342); (345): n is a or c or t or g
acgcgcaaaccaaagaacagagaccgatgtaaagacaaaaacatagagtatcctttccaaaacaacgtccaagttcaaaaaattgagacgaaatgcaagcacagcacacataagtggatgatcaagatgggctcgtccatgccacgcacaccaacacacgtcaagcagcaagccctcccgtggccaaatgtgcatgcatacatgttaacaagagctagcttctcttgcataactataaatagccctaatctcactccatgtttcatcgtccaataatatatatactatgatgagagtgcggtttcctttgttggtgttgctgggaactgttttcctggcatngtntgcattaaaggtgagagaggatgagaataaccctttctacttgagaagctctaacagcttccaaactctctttgagaaccaaaacggtcgcattcgtctcctccagagattcaacaaacgctccccacaacttgagaaccttcgagactaccggattg

SEQ ID NO: 172 - DNA, 474 bp, Artificial
  Mutations within conglycinin beta subunit introduced by GmBCG2_T02TALE nuclease
acgcgcaaaccaaagaacagagaccgatgtaaagacaaaaacatagagtatcctttccaaaacaacgtccaagttcaaaaaattgagacgaaatgcaagcacagcacacataagtggatgatcaagatgggctcgtccatgccacgcacaccaacacacgtcaagcagcaagccctcccgtggccaaatgtgcatgcatacatgttaacaagagcttgcataactataaatagccctaatctcactccatgtttcatcgtccaataatatatatactatgatgagagtgcggtttcctttgttggtgttgctgggaactgttttcctggcatcgtctcaattaaaaggtgagagaggatgagaataaccctttctactttagaagctctaacagcttccaaactctctttgagaaccaaaaacggtcgcattcgtctcctccagagattcaacaaacgctccccacaacttgag

SEQ ID NO: 173 - DNA, 496 bp, Artificial
  Mutations within conglycinin beta subunit introduced by GmBCG2_T02TALE nuclease
acgcgcaaaccaaagaacagagaccgatgtaaagacaaaaacatagagtatcctttccaaaacaacgtccaagttcataaaatagagacgaaatgcaagcacagcacacataagtggatgatcaagatgggctcgtccatgccacgcacaccaacacacgtcaagcagcaagccctcccgtggccaaatgtgcatgcatacatgttaacaagagcttgcataactataaatagccctaatctcactccatgtttcatcgtccaataatatatatactatgatgagagtgcggtttcctttgttggtgttgctgggaactgttttcctggcatttgtgtctcattaaaggtgagagaggatgagaataaccctttctactttagaagctctaacagcttccaaactctctttgagaaccaaaacggtcgcattcgtctcctccagagattcaacaaacgctccccacaacttgagaaccttcgagactaccggattg

SEQ ID NO: 174 - DNA, 501 bp, Artificial
  Mutations within conglycinin beta subunit introduced by GmBCG2_T02TALE nuclease
acgcgcaaaccaaagaacagagaccgatgtaaagacaaaaacatagagtatcctttccaaaacaacgtccaagttcaaaaaattgagacgaaatgcaagcacagcacacataagtggatgatcaagatgggctcgtccatgccacgcacaccaacacacgtcaagcagcaagccctcccgtggccaaatgtgcatgcatacatgttaacaagagctagcttctcttgcataactataaatagccctaatctcactccatgtttcatcgtccaaataatatatatactatgatgagagtgcggtttccttgttggtgttgctgggaactgtttcctggtgtctcattaaaggtgagagaggatgagaataaacccctttctacttgagaagctctaacagcttccaaactctctttgagaaccaaaacggtcgcattcgtctcctccaagagattcaacaaacgctccccacaacttgagaaccttcgagactaccggattg

SEQ ID NO: 175 - DNA, 504 bp, Artificial
  Mutations within conglycinin beta subunit introduced by GmBCG2_T02TALE nuclease
acgcgcaaaccaaagaacagagaccgatgtaaagacaaaaacatagagtatcctttccaaaacaacgtccaagttcaaaaaattgagacgaaatgcaagcacagcacacataagtggatgatcaagatgggctcgtccatgccacgcacaccaacacacgtcaagcagcaagccctcccgtggccaaatgtgcatgcatacatgttaacaagagctagcttctcttgcataactataaatagccctaatctcactccatgtttcatcgtccaataatatatatactatgatgagagtgcggttcctttgttggtgttgctggaactgttttcctggcatcatgtgtctcattaaaggtgagagaggatgagaataaccctttctactttagaagctctaacagcttccaaactctctttgagaaccaaaacggtcgcattcgtctcctccagagattcaacaaacgctccccacaacttgagaaccttcgagactaccggattg

SEQ ID NO: 176 - DNA, 496 bp, Artificial
  Mutations within conglycinin beta subunit introduced by GmBCG2_T02TALE nuclease
acgcgcaaaccaaagaacagagaccgatgtaaagacaaaaacatagagtatcctttccaaaacaacgtccaagttcaaaaaattgagacgaaatgcaagcacagcacacataagtggatgatcaagatgggctcgtccatgccacgcacaccaacacacgtcaagcagcaagccctcccgtggccaaatgtgcatgcatacatgttaacaagagcttgcataactataaatagccctaatctcactccatgtttcatcgtccaataatatatatactatgatgagagtgcggtttcctttgttggtgttgctgggaactgttttccctggcattgtgtctcattaaaggtgagagaggatgagaataaccctttctactttagaagctctaacagcttccaaactctctttgagaaccaaaacggtcgcattcgtctcctccagagattcaacaaacgctccccacaacttgagaaccttcgagactaccggattg

SEQ ID NO: 177 - DNA, 497 bp, Artificial
  Mutations within conglycinin beta subunit introduced by GmBCG2_T02TALE nuclease
  misc_feature (379): n is a or c or t or g
acgcgcaaaccaaagaacagagaccgatgtaaagacaaaaacatagagtatcctttccaaaacaacgtccaagttcaaaaaattgagacgaaatgcaagcacagcacacataagtggatgatcaagatgggctcgtccatgccacgcacaccaacacacgtcaagcagcaagccctcccgtggccaaatgtgcatgcatacatgttaacaagagctagcttctcttgcataactataaatagccctaatctcactccatgtttcatcgtccaataatatatatactatgatgagagtgcggtttcctttgttggtgttgctgggaactgttttctgtgtctcattaaaggtgagagaggatgagaataaccctttctanttgagaagctctaacagcttccaaactctctttgagaaccaaaacggtcgcattcgtctcctccagagattcaacaaacgctccccacaacttgagaaccttcgagactaccggattg

SEQ ID NO: 178 - DNA, 473 bp, Artificial
  Mutations within conglycinin beta subunit introduced by GmBCG2_T02TALE nuclease
acgcgcaaaccaaagaacagagaccgatgtaaagacaaaaacatagagtatcctttccaaaacaacgtccaagttcaaaaaattgagacgaaatgcaagcacagcacacataagtggatgatcaagatgggctcgtccatgccacgcacaccaacacacgtcaagcagcaagccctcccgtggccaaatgtgcatgcatacatgttaacaagagcttgcataactataaatagccctaatctcactccatgtttcatcgtccaataatatatatactatgatgagagtgcggtttcctttgttggtgttgctgggaactgttttcctggcatgtctcattaaaggtgagagaggatgagaataaccctttctacttgagaagctctaacagcttccaaactctctttgagaaccaaaaacggtcgcattcgtctcctccagagattcaacaaacgctccccacaacttgagaa

SEQ ID NO: 179 - DNA, 451 bp, Artificial
  Mutations within conglycinin beta subunit introduced by GmBCG2_T02TALE nuclease
acgcgcaaaccaaagaacagagaccgatgtaaagacaaaaacatagagtatcctttccaaaacaacgtccaagttcataaaatagagacgaaatgcaagcacagcacacataagtggatgatcaagatgggctcgtccatgccacgcacaccaacacatcgtcaagcagcaagccctcccgtggccaaatgtgcatgcatacaatgttaacaagagcttgcataactataaatagccctaatctcactccatgtttcatcgtccaataatatataatactcatgatgagagtgcggttcctttgttggtgttgctgggaactgttttcctggcaatattaaaggtgaggagaggatgagaataaccctttctacttgagaagctctaacagcttccaaactctcttttgagaaccaaaacggtcgcattcgtctcctccagagattcaaac

SEQ ID NO: 180 - DNA, 505 bp, Artificial
  Mutations within conglycinin beta subunit introduced by GmBCG2_T02TALE nuclease
acgcgcaaaccaaagaacagagaccgatgtaaagacaaaaacatagagtatcctttccaaaacaacgtccaagttcaaaaaattgagacgaaatgcaagcacagcacacataagtggatgatcaagatgggctcgtccatgccacgcacaccaacacacgtcaagcagcaagccctcccgtggccaaatgtgcatgcatacatgttaacaagagctagcttctcttgcataactataaatagccctaatctcactccatgtttcatcgtccaataatatactatacatatgatgagagtgcggtttccttgttggtgttgctgggaactgttttcctggcattgtgtctcattaaaggtgagagaggatgagaataaccctttctacttgagaagctctaacagcttccaaactctctttgagaaccaaaacggtcgcattcgtctcctccagagattcaacaaacgctccccacaacttgagaaccttcgagactaccggattg

SEQ ID NO: 181 - DNA, 446 bp, Artificial
  Mutations within conglycinin beta subunit introduced by GmBCG2_T02TALE nuclease
  misc_feature (349): n is a or c or t or g
acgcgcaaaccaaagaacagagaccgatgtaaagacaaaaacatagagtatcctttccaaaacaacgtccaagttcaaaaaattgagacgaaatgcaagcacagcacacataagtggatgatcaagatgggctcgtccatgccacgcacaccaacacacgtcaagcagcaagccctcccgtggccaaatgtgcatgcatacatgttaacaagagctagcttctcttgcataactataaatagccctaatctcactccatgtttcatcgtccaataatatactatacatatgatgagagtgcggtttcctttgttggtgttgctgggaactgtttcctggcatcttgtgnctcattaaaggtgagagaggatgagaataaccctttctacttgagaagctctaacgcttccaaactctctttgagaaccaaaacggtcgcattcgtc

SEQ ID NO: 182 - DNA, 500 bp, Artificial
  Mutations within conglycinin beta subunit introduced by GmBCG2_T02TALE nuclease
acgcgcaaaccaaagaacagagaccgatgtaaagacaaaaacatagagtatcctttccaaaacaacgtccaagttcataaaatagagacgaaatgcaagcacagcacacataagtggatgatcaagatgggctcgtccatgccacgcacaccaacacacgtcaagcagcaagccctcccgtggccaaatgtgcatgcatacatgttaacaagagcttgcataactataaatagccctaatctcactccatgtttcatcgtccaataatatatatactatgatgagagtgcggtttcctttgttggtgttgctgggaactgttttccctggcatctagttgtcattaatgaagtgagagaggatgagaataacccctttctactttagaagctctaacagcttccaaactctctttgagaaccaaaacggtcgcattcgtctcctccagagattcaacaaacgctccccacaacttgagaaccttcgagactaccggattg

SEQ ID NO: 183 - DNA, 489 bp, Artificial
  Mutations within conglycinin beta subunit introduced by GmBCG2_T02TALE nuclease
  misc_feature (386): n is a or c or t or g
acgcgcaaaccaaagaacagagaccgatgtaaagacaaaaacatagagtatcctttccaaaacaacgtccaagttcataaaatagagacgaaatgcaagcacagcacacataagtggatgatcaagatgggctcgtccatgccacgcacaccaacacacgtcaagcagcaagccctcccgtggccaaatgtgcatgcatacatgttaacaagagcttgcataactataaatagccctaatctcactccatgtttcatcgtccaataatatatatactatgatgagagtgcggtttcctttgttggtgttgctgggaactgttttcctggcatcttctcattaaaggtgagagaggatgagaataaccctttctactttagaagctntaacagcttccaaactctctttgagaaccaaaacggtcgcttcgtctcctccagagattcaacaaacgctccccacacttgagaacttcgagactaccggatt

SEQ ID NO: 184 - DNA, 470 bp, Artificial
  Mutations within conglycinin beta subunit introduced by GmBCG2_T02TALE nuclease
acgcgcaaaccaaagaacagagaccgatgtaaagacaaaaacatagagtatcctttccaaaacaacgtccaagttcataaaatagagacgaaatgcaagcacagcacacataagtggatgatcaagatgggctcgtccatgccacgcacaccaacacacgtcaagcagcaagccctcccgtggccaaatgtgcatgcatacatgttaacaagagcttgcataactataaatagccctaatctcactccatgtttcatcgtccaataatatatatactatgatgagagtgcggtttcctttgttggtgttgctgtctcattaaaggtgagagaggatgagaataaccctttctactttagaagctctaacagcttccaaaactctcttttgagaaccaaaaacggtcgcattcgtctcctccagagattcaacaaaacgctccccacaacttgagaaccttcgagactacc

SEQ ID NO: 185 - DNA, 517 bp, Artificial
  Mutations within conglycinin beta subunit introduced by GmBCG2_T02TALE nuclease
acgcgcaaaccaaagaacagagaccgatgtaaagacaaaaacatagagtatcctttccaaaacaacgtccaagttcaaaaaattgagacgaaaatgcaagcacagcacacataagtggatgatcaaagatgggctcgtccatgccacgcacaccaacacacgtcaaggcagcaagccctcccgtggccaaatgtgcatgcatagcatgttaacaagagctagtcttctcttgcataaactataaatagccctaaatctcactccatgtttcatcgtccaatcaatatactatacatatgatgagagtgcggtttcctttgttggtgttgctgggaaactgttttcctggcaattgtctcattaaaggtgagagaggatgagaataacctttctacttgagaagctctaaacagcttccaaaactctctttgagaaaccaaaaacggtcgcatttcgtctcctccaagagattcaacaaaacgctccccacaacttgagaaccttcgagactaccgga

SEQ ID NO: 186 - DNA, 413 bp, Artificial
  Mutations within conglycinin beta subunit introduced by GmBCG2_T02TALE nuclease
acgcgcaaaccaaagaacagagaccgatgtaaagacaaaaacatagagtatcctttccaaaacaacgtccaagttcaaaaaattgagacgaaatgcaagcacagcacacataagtggatgatcaagatgggctcgtccatgccacgcacaccaacacacgtcaagcagcaagccctcccgtggccaaatgtgcatgcatacatgttaacaagagctagcttctcttgcataactataaatagccctaatctcactccatgtttcatcgtccaataatatatatactatgatgagagtgcggtttcctttgttggtgttgctgggaactgtttcctggcatagcaggcgctggagacggtccagcggctgttgccggtgctgtgccaggcccacggcttgacccccgcccaggc

SEQ ID NO: 187 - DNA, 616 bp, Artificial
  Mutations within conglycinin beta subunit introduced by GmBCG2_T02TALE nuclease
acgcgcaaaccaaagaacagagaccgatgtaaagacaaaaacatagagtatcctttccaaaacaacgtccaagttcataaaatagagacgaaatgcaagcacagcacacataagtggatgatcaagatgggctcgtccatgccacgcacaccaacacacgtcaagcagcaagccctcccgtggccaaatgtgcatgcatacatgttaacaagagcttgcataactataaatagccctaatctcactccatgtttcatcgtccaataatatatatactatgatgagagtgcggtttcctttgttggtgttgctgggaactgttttcctggcatctccagcggctgttgccggtgctgtggctggcgatggcggtggcaagcaggcgctggagacggtccagcggctgttgccggtgctgtgccaggcccacggcttgacccctcagcaggtggtttgtgtctcattcaaaggtgagagaggatgagaataaccctttgctacttgagaagctctaacagcttccaactctctttgagaaccaaacggtcgcattcgtctcctccagagattcaacaaacgctcccacaacttgagaaccttcgagactaccggattg

SEQ ID NO: 188 - DNA, 448 bp, Artificial
  Mutations within conglycinin beta subunit introduced by GmBCG2_T02TALE nuclease
acgcgcaaaccaaagaacagagaccgatgtaaagacaaaaacatagagtatcctttccaaaacaacgtccaagttcataaaatagagacgaaatgcaagcacagcacacataagtggatgatcaagatgggctcgtccatgccacgcacaccaacacatcgtcaagcagcaagccctcccgtggccaaatgtgcatgcatacaatgttaacaagagcttgcataactataaatagccctaatctcactccaatgtttcatcgtccaataatatataatactatgatgagagatgcggtttcctttcgttggtgttgctgggaaactgttttcctttgtgtctcattaaaggtgagagaggatgagaataaccctttctacttgagaagctctaacagcttccaaaactctctttgagaaccaaaaacggtcgcattcgtctcctccag

SEQ ID NO: 189 - DNA, 469 bp, Artificial
  Mutations within conglycinin beta subunit introduced by GmBCG2_T02TALE nuclease
  misc_feature (352): n is a or c or t or g
acgcgcaaaccaaagaacagagaccgatgtaaagacaaaaacatagagtatcctttccaaaacaacgtccaagttcataaaatagagacgaaatgcaagcacagcacacataagtggatgatcaagatgggctcgtccatgccacgcacaccaacacacgtcaagcagcaagccctcccgtggccaaatgtgcatgcatacatgttaacaagagcttgcataactataaatagccctaatctcactccatgtttcatcgtccaataatatatatactatgatgagagtgcggtttcctttgttggtgttgccgggaactgttttccggcatctgctcattaaaggtgagagnggatgagaataacccctttctacttgagaagctctaacagcttccaaactctctttgagaaccaaaacggtcgcattcgtctcctccagagattcaacaaacgctccccacaacttg

SEQ ID NO: 190 - DNA, 396 bp, Artificial
  Mutations within conglycinin beta subunit introduced by GmBCG2_T02TALE nuclease
acgcgcaaaccaaagaacagagaccgatgtaaagacaaaaacatagagtatcctttccaaaacaacgtccaagttcaaaaaattgagacgaaatgcaagcacagcacacataagtggatgatcaagatgggctcgtccatgccacgcacaccaacacacgtcaagcagcaagccctcccgtggccaaatgtgcatgcatacatgttaacaagacgctagcttctcttgcataactataaatagccctaatctcactccatgtttcatcgtccaataatatatatactatgatgagagtgcggtttcctttgttggtgttgctgggaaactgttttcctggcatccgtctcctccagagattcaacaaacgctccccacaacttgagaaccttcgag

SEQ ID NO: 191 - DNA, 380 bp, Artificial
  Mutations within conglycinin beta subunit introduced by GmBCG2_T02TALE nuclease
  misc_feature (337): n is a or c or t or g
acgcgcaaaccaaagaacagagaccgatgtaaagacaaaaacatagagtatcctttccaaaacaacgtccaagttcataaaatagagacgaaatgcaagcacagcacacataagtggatgatcaagatgggctcgtccatgccacgcacaccaacacacgtcaagcagcaagccctcccgtggccaaatgtgcatgcatacatgttaacaagagcttgcataactataaatagccctaatctcactccatgtttcatcgtccaataatatatatactatgatgagagtgcggtttcctttgttggtgttgctgggaactgttttcctggcaacgttntgctaatgagtgagagaggatgagaataacccctttctacttg

SEQ ID NO: 192 - DNA, 456 bp, Artificial
  Mutations within conglycinin beta subunit introduced by GmBCG2_T02TALE nuclease
acgcgcaaaccaaagaacagagaccgatgtaaagacaaaaacatagagtatcctttccaaaacaacgtccaagttcataaaatagagacgaaatgcaagcacagcacacataagtggatgatcaagatgggctcgtccatgccacgcacaccaacacacgtcaagcagcaagccctcccgtggccaaatgtgcatgcatacatgttaacaagagcttgcataactataaatagccctaatctcactccatgatttcatcgtccaataatatatatactatgatgagagtgcggtttcctttgttggtgttgctgggaactgttttcctggcatctcattaaaggtgagagaggatgagaataaccctttctactttagaagctctaacagcttccaaaactctctttgagaaccaaaacggtcgcattcgtctcctccagagattcaacaaacgct

SEQ ID NO: 193 - DNA, 505 bp, Artificial
  Mutations within conglycinin beta subunit introduced by GmBCG2_T02TALE nuclease
acgcgcaaaccaaagaacagagaccgatgtaaagacaaaaacatagagtatcctttccaaaacaacgtccaagttcaaaaaattgagacgaaatgcaagcacagcacacataagtggatgatcaagatgggctcgtccatgccacgcacaccaacacacgtcaagcagcaagccctcccgtggccaaatgtgcatgcatagcatgttaacaagagctagcttctcttgcataactataaatagccctaatctcactccatgtttcatcgtccaataatatatatacatatgatgagagtgcggtttcctttgttggtgttgctgggaactgttttcctggccatcagtcaattaaaggtgagagaggatgagaataaccctttctacttgagaagctctaacagcttccaaactctctttgagaaccaaaacggtcgcattcgtctcctccagagattcaacaaacgctccccacaacttgagaaccttcgagactaccggattg

SEQ ID NO: 194 - DNA, 368 bp, Artificial
  Mutations within conglycinin beta subunit introduced by GmBCG2_T02TALE nuclease
acgcgcaaaccaaagaacagagaccgatgtaaagacaaaaacatagagtatcctttccaaaacaacgtccaagttcaaaaattgagacgaaatgcaagcacagcacacataagtggatgatcaagatgggctcgtccatgccacgcacaccaacacacgtcaagcagcaagccctcccgtggccaaatgtgcatgcatacatgttaacaagagctagcttctcttgcataactataaatagccctaatctcactccatgtttcatcgtccaataatatatatactatgatgagagtgcggttccttgttggtgttgctggaactgtttcctggcatctctcattaaaggtgagagaggatgagaataa

SEQ ID NO: 195 - DNA, 500 bp, Artificial
  Mutations within conglycinin beta subunit introduced by GmBCG2_T02TALE nuclease
acgcgcaaaccaaagaacagagaccgatgtaaagacaaaaacatagagtatcctttccaaaacaacgtccaagttcataaaatagagacgaaatgcaagcacagcacacataagtggatgatcaagatgggctcgtccatgccacgcacaccaacacatcgtcaagcagcaagccctcccgtggccaaatgtgcatgcatacatgttaacaagagcttgcataactataaatagccctaatctcactccatgatttcatcgtccaataatatatatactatgatcgagagtgcggtttcctttgttggtgttgctgggaactgttttccctggcatcagtgtctcattaaaggtgagagaggatgagaataaccctttctactttagaagctctaacagcttccaaactctctttgagaaccaaaacggtcgcattcgtctcctccagagattcaacaaacgctccccacaacttgagaaccttcgagactaccggattg

SEQ ID NO: 196 - DNA, 496 bp, Artificial
  Mutations within conglycinin beta subunit introduced by GmBCG2_T02TALE nuclease
acgcgcaaaccaaagaacagagaccgatgtaaagacaaaaacatagagtatcctttccaaaacaacgtccaagttcataaaatagagacgaaatgcaagcacagcacacataagtggatgatcaagatgggctcgtccatgccacgcacaccaacacacgtcaagcagcaagccctcccgtggccaaatgtgcatgcatacatgttaacaagagcttgcataactataaatagccctaatctcactccatgtttcatcgtccaataatatatatactatgatgagagtgcggtttcctttgttggtgttgctgggaactgttttcctggcatcagttgtctaatgaagtgagagaggatgagaataacccctttctacttgagaagctctaacagcttccaaactctctttgagaaccaaaacggtcgcattcgtctcctccagagattcaacaaacgctccccacaacttgagaaccttcgagactaccggattg

SEQ ID NO: 197 - DNA, 497 bp, Artificial
  Mutations within conglycinin beta subunit introduced by GmBCG2_T02TALE nuclease
  misc_feature (378): n is a or c or t or g
acgcgcaaaccaaagaacagagaccgatgtaaagacaaaaacatagagtatcctttccaaaacaacgtccaagttcataaaatagagacgaaatgcaagcacagcacacataagtggatgatcaagatgggctcgtccatgccacgcacaccaacacacgtcaagcagcaagccctcccgtggccaaatgtgcatgcatacatgttaacaagagcttgcataactataaatagccctaatctcactccatgtttcatcgtccaataatatatatactatgatgagagtgcggtttcctttgttggtgttgctgggaactgttttcctggcatcagttgtctcattaaaggtgagagaggatgagaataacccctttcnactttagaagctctaacagcttccaaactctctttgagaaccaaaacggtcgcattcgtctcctccagagattcaacaaacgctcccacaacttgagaaccttcgagactaccggattg

SEQ ID NO: 198 - DNA, 504 bp, Artificial
  Mutations within conglycinin beta subunit introduced by GmBCG2_T02TALE nuclease
acgcgcaaaccaaagaacagagaccgatgtaaagacaaaaacatagagtatcctttccaaaacaacgtccaagttcaaaaattgagacgaaatgcaagcacagcacacataagtggatgatcaagatgggctcgtccatgccacgcacaccaacacacgtcaagcagcaagccctcccgtggccaaatgtgcatgcatacatgttaacaagagctagcttctcttgcataactataaatagccctaatctcactccatgtttcatcgtccaataatatactatacatatgatgagagtgcggtttccttgttggctgttgctggaactgttttcctggcatcagtgtctcattaaaggtgagagaggatgagaataacctttctacttgagaagctctaacagcttccaaactctctttgagaaccaaaacggtcgcattcgtctcctccagagattcaacaaacgctccccacaacttgagaaccttcgagactaccggattg

SEQ ID NO: 199 - DNA, 478 bp, Artificial
  Mutations within conglycinin beta subunit introduced by GmBCG2_T02TALE nuclease
acgcgcaaaccaaagaacagagaccgatgtaaagacaaaaacatagagtatcctttccaaaacaacgtccaagttcaaaaaattgagacgaaatgcaagcacagcacacataaagtggatgatcaagatgggctcgtccatgccacgcacaccaacacacgtcaagcagcaagccctcccgtggccaaatgtgcatgcatacatgttaacaagagctagcttctcttgcataaactataaatagccctaatctcactccatgtttcatcgtccaataatatatatactatgatgagagtgcggtttcctttgttggtgtctcattaaaggtgagagaggatgagaataaccctttctactttagaagctctaaacagcttccaaactctctttgagaaccaaaacggtcgcattcgtctcctccagagattcaacaaacgctccccacaacttgagaaccttcgagactaccggattg

SEQ ID NO: 200 - DNA, 503 bp, Artificial
  Mutations within conglycinin beta subunit introduced by GmBCG2_T02TALE nuclease
acgcgcaaaccaaagaacagagaccgatgtaaagacaaaaacatagagtatcctttccaaaacaacgtccaagttcaaaaaattgagacgaaatgcaagcacagcacacataagtggatgatcaagatgggctcgtccatgccacgcacaccaacacacgtcaagcagcaagccctcccgtggccaaatgtgcatgcatacatgttaacaagagctagcttctcttgcataactataaatagccctaatctcactccatgtttcatcgtccaaataatatatatactatgatgagagtgcggtttcctttgttggtgttgctgggaactgttttcctggcatctctcatttaaaggtgagagaggatgagaataaccctttctacttgagaagctctaacagcttccaaactctctttgagaaccaaaacggtcgcattcgtctcctccagagattcaacaaacgctccccacaacttgagaaccttcgagactaccggattg

SEQ ID NO: 201 - DNA, 486 bp, Artificial
  Mutations within conglycinin beta subunit introduced by GmBCG2_T02TALE nuclease
acgcgcaaaccaaagaacagagaccgatgtaaagacaaaaacatagagtatcctttccaaaacaacgtccaagttcaaaaaattgagacgaaatgcaagcacagcacacataaagtggatgatcaagatgggctcgtccatgccacgcacaccaacacacgtcaagcagcaagccctcccgtggccaaatgtgcatgcatacatgttaacaagagctagcttctcttgcataactataaatagccctaatctcactccatgtttcatcgtccaataatatatatactatgatgagagtgcggtttcctttgttggtgttgctgagtgtctcattaaaggtgagagaggatgagaataaccctttctacttgagaagctctaacagcttccaaactctctttgagaaccaaaacggtcgcattcgtctcctccagagattcaacaaacgctccccacaacttgagaaccttcgagactaccggattg

SEQ ID NO: 202 - DNA, 378 bp, Artificial
  Mutations within conglycinin beta subunit introduced by GmBCG2_T02TALE nuclease
  misc_feature (350): n is a or c or t or g
acgcgcaaaccaaagaacagagaccgatgtaaagacaaaaacatagagtatcctttccaaaacaacgtccaagttcaaaaaattgagacgaaatgcaagcacagcacacataagtggatgatcaagatgggctcgtccatgccacgcacaccaacacacgtcaagcagcaagccctcccgtggccaaatgtgcatgcatacatgtttaacaagagctagcttctcttgcataactataaatagccctaatctcactccatgtttcatcgtccaataatatactatacatatgatgagagtgcggtttcctttgttggtgttgctgggaactgtttcctggcaatcagtcncattaaaggtgagagaggatgagaataa

SEQ ID NO: 203 - DNA, 498 bp, Artificial
  Mutations within conglycinin beta subunit introduced by GmBCG2_T02TALE nuclease
acgcgcaaaccaaagaacagagaccgatgtaaagacaaaaacatagagtatcctttccaaaacaacgtccaagttcataaaatagagacgaaatgcaagcacagcacacataagtggatgatcaagatgggctcgtccatgccacgcacaccaacacacgtcaagcagcaagccctcccgtggccaaatgtgcatgcatacatgttaacaagagcttgcataactataaatagccctaatctcactccatgtttcatcgtccaataatatatatactatgatgagagtgcggtttcctttgttggtgttgctgggaactgttttcctggcatcgttctgcttaaatgagtgagagaggatgagaataaccccttttctactttagaagctctaacagcttccaaactctctttgagaaccaaaacggtcgcattcgtctcctccagagattcaacaaacgctccccacaacttgagaaccttcgagactaccggattg

SEQ ID NO: 204 - DNA, 496 bp, Artificial
  Mutations within conglycinin beta subunit introduced by GmBCG2_T02TALE nuclease
acgcgcaaaccaaagaacagagaccgatgtaaagacaaaaacatagagtatcctttccaaaacaacgtccaagttcataaaatagagacgaaatgcaagcacagcacacataagtggatgatcaagatgggctcgtccatgccacgcacaccaacacacgtcaagcagcaagccctcccgtggccaaatgtgcatgcatacatgttaacaagagcttgcataactataaatagccctaatctcactccatgatttcatcgtccaataatatatatactatgatgagagtgcggtttcctttgttggtgttgctgggaactgttttcctggcatgtgtctcattaaaggtgagagaggatgagaataaccctttctactttagaagctctaacagcttccaaactctctttgagaaccaaaaacggtcgcattcgtctcctccagagattcaacaaacgctccccacaacttgagaaccttcgagactaccggattg

SEQ ID NO: 205 - DNA, 495 bp, Artificial
  Mutations within conglycinin beta subunit introduced by GmBCG2_T02TALE nuclease
acgcgcaaaccaaagaacagagaccgatgtaaagacaaaaacatagagtatcctttccaaaacaacgtccaagttcataaaatagagacgaaatgcaagcacagcacacataagtggatgatcaagatgggctcgtccatgccacgcacaccaacacacgtcaagcagcaagccctcccgtggccaaatgtgcatgcatacatgttaacaagagcttgcataactataaatagccctaatctcactccatgttcatcgtccaataatatatatactatgatgagagtgcggtttcctttgttggtgttgctgggaactgttttcctggcatttgtgctcattaaaggtgagagaggatgagaataacccctttctactttagaagctctaacagcttccaaactctctttgagaaccaaaacggtcgcattcgtctcctccagagattcaacaaacgctccccacaacttgagaaccttcgagactaccggattg

SEQ ID NO: 206 - DNA, 384 bp, Artificial
  Mutations within conglycinin beta subunit introduced by GmBCG2_T02TALE nuclease
  misc_feature (289): n is a or c or t or g
acgcgcaaaccaaagaacagagaccgatgtaaagacaaaaacatagagtatcctttccaaaacaacgtccaagttcataaaatagagacgaaatgcaagcacagcacacataagtggatgatcaagatgggctcgtccatgccacgcacaccaacacacgtcaagcagcaagccctcccgtggccaaatgtgcatgcatacatgttaacaagagcttgcataactataaatagccctaatctcactccatgatttcatcgtccaataatatatatactatgatgagagngcgtttcctttgttggtgttgctgggaactgttttcctggcatctgttcttcattcaaatgaagtgagagagggatgagaataaccccttttcta

SEQ ID NO: 207 - DNA, 401 bp, Artificial
  Mutations within conglycinin beta subunit introduced by GmBCG2_T02TALE nuclease
  misc_feature (77): n is a or c or t or g
acgcgcaaaccaaagaacagagaccgatgtaaagacaaaaacatagagtatcctttccaaaacaacgtccaagttcntaaaatagagacgaaatgcaagcacagcacacataagtggatgatcaagatgggctcgtccatgccacgcacaccaacacatcgtcaagcagcaagccctcccgtggccaaatgtgcatgcatacatgttaacaagagcttgcataactataaatagccctaatctcactccatgtttcatcgtccaataatatatatactatgatgagagtgcggtttcctttgttggtgttgctgggaactgttttccctggtttgtgtctcattaaaggtgagagaggatgagaataaccctttctacttttagaagctctaacagcttcc

SEQ ID NO: 208 - DNA, 610 bp, Artificial
  Mutations within conglycinin beta subunit introduced by GmBCG2_T02TALE nuclease
  misc_feature (401): n is a or c or t or g
acgcgcaaaccaaagaacagagaccgatgtaaagacaaaaacatagagtatcctttccaaaacaacgtccaagttcaaaaaattgagacgaaatgcaagcacagcacacataagtggatgatcaagatgggctcgtccatgccacgcacaccaacacacgtcaagcagcaagccctcccgtggccaaatgtgcatgcatacatgttaacaagagctagcttctcttgcataactataaatagccctaatctcactccatgtttcatcgtccaataatatatatactatgatgagagtgcggtttcctttgttggtgttgctgggaactgttttcctggcatcagcggcattttgccttcctgtttttgctcaccccagaaacgctggtgaaagtaaaaagntgctgaagatcagttggtgcacgagtgggttacatcgaactggatctcaacagcggtaagatccttgagagttttcgctgtctcattaaggtgagagaggatgagaataaccctttctacttgagaagctctaacagcttccaaactctcttgagaaccaaaacggtcgcattcgtctcctccagagattcaacaaaacgctcccacaa

SEQ ID NO: 209 - DNA, 496 bp, Artificial
  Mutations within conglycinin beta subunit introduced by GmBCG2_T02TALE nuclease
acgcgcaaaccaaagaacagagaccgatgtaaagacaaaaacatagagtatcctttccaaaacaacgtccaagttcataaaatagagacgaaatgcaagcacagcacacataagtggatgatcaagatgggctcgtccatgccacgcacaccaacacacgtcaagcagcaagccctcccgtggccaaatgtgcatgcatacatgttaacaagagcttgcataactataaatagccctaatctcactccatgtttcatcgtccaataatatatatactatgatgagagtgcggtttcctttgttggtgttgctgggaactgttttcctggcatcgtgtctcattaaaggtgagagaggatgagaataacccctttctactttagaagctctaacagcttccaaactctctttgagaaccaaaacggtcgcattcgtctcctccagagattcaacaaacgctccccacaacttgagaaccttcgagactaccggattg

SEQ ID NO: 210 - DNA, 498 bp, Artificial
  Mutations within conglycinin beta subunit introduced by GmBCG2_T02TALE nuclease
acgcgcaaaccaaagaacagagaccgatgtaaagacaaaaacatagagtatcctttccaaaacaacgtccaagttcataaaatagagacgaaatgcaagcacagcacacataagtggatgatcaagatgggctcgtccatgccacgcacaccaacacacgtcaagcagcaagccctcccgtggccaaatgtgcatgcatacatgttaacaagagcttgcataactataaatagccctaatctcactccatgtttcatcgtccaataatatatatactatgatgagagtgcggtttcctttgttggtgttgctgggaactgttttcctggcatcaggttgtctcattaaaggtgagagaggatgagaataaccctttctactttagaagctctaacagcttccaaactctctttgagaaccaaaacggtcgcattcgtctcctccagagattcaacaaacgctccccacaacttgagaaccttcgagactaccggattg

SEQ ID NO: 211 - DNA, 495 bp, Artificial
  Mutations within conglycinin beta subunit introduced by GmBCG2_T02TALE nuclease
acgcgcaaaccaaagaacagagaccgatgtaaagacaaaaacatagagtatcctttccaaaacaacgtccaagttcataaaatagagacgaaatgcaagcacagcacacataagtggatgatcaagatgggctcgtccatgccacgcacaccaacacacgtcaagcagcaagccctcccgtggccaaatgtgcatgcatacatgttaacaagagcttgcataactataaatagccctaatctcactccatgtttcatcgtccaataatatatatactatgatgagagtgcggtttcctttgttggtgttgctgggaactgttttcctggcatctgtctcattaaaggtgagagaggatgagaataacccctttctacttgagaagctctaacagcttccaaactctctttgagaaccaaaacggtcgcattcgtctcctccagagattcaacaaacgctccccacaacttgagaaccttcgagactaccggattg

SEQ ID NO: 212 - DNA, 495 bp, Artificial
  Mutations within conglycinin beta subunit introduced by GmBCG2_T02TALE nuclease
acgcgcaaaccaaagaacagagaccgatgtaaagacaaaaacatagagtatcctttccaaaacaacgtccaagttcaaaaaattgagacgaaatgcaagcacagcacacataagtggatgatcaagatgggctcgtccatgccacgcacaccaacacacgtcaagcagcaagccctcccgtggccaaatgtgcatgcatacatgttaacaagagcttgcataactataaatagccctaatctcactccatgtttcatcgtccaataatatatatactatgatgagagtgcggtttcctttgttggtgttgctgggaactgtttttcctggcatgtgtctcattaaaggtgagagaggatgagaataaccctttctactttagaagctctaacagcttccaaactctctttgagaaccaaaacggtcgcattcgtctcctccagagattcaacaaacgctccccacaacttgagaaccttcgagactaccggattg

SEQ ID NO: 213 - DNA, 497 bp, Artificial
  Mutations within conglycinin beta subunit introduced by GmBCG2_T02TALE nuclease
acgcgcaaaccaaagaacagagaccgatgtaaagacaaaaacatagagtatcctttccaaaacaacgtccaagttcataaaatagagacgaaatgcaagcacagcacacataagtggatgatcaagatgggctcgtccatgccacgcacaccaacacacgtcaagcagcaagccctcccgtggccaaatgtgcatgcatacatgttaacaagagcttgcataactataaatagccctaatctcactccatgtttcatcgtccaataatatatatactatgatgagagtgcggtttcctttgttggtgttgctgggaactgtttttcctggccatcagtctcattaaaggtgagagaggatgagaataacccctttctacttgagaagctctaacagcttccaaactctctttgagaaccaaaacggtcgcattcgtctcctccagagattcaacaaacgctccccacaacttgagaaccttcgagactaccggattg

SEQ ID NO: 214 - DNA, 508 bp, Artificial
  Mutations within conglycinin beta subunit introduced by GmBCG2_T02TALE nuclease
acgcgcaaaccaaagaacagagaccgatgtaaagacaaaaacatagagtatcctttccaaaacaacgtccaagttcaaaaaattgagacgaaatgcaagcacagcacacataagtggatgatcaagatgggctcgtccatgccacgcacaccaacacacgtcaagcagcaagccctcccgtggccaaatgtgcatgcatacatgttaacaagagctagcttctcttgcataactataaatagccctaatctcactccatgtttcatcgtccaataatatactatacatatgatgagagtgcggtttcctttgttggtgttgctgggaactgttttcctggcaatttgtgtctcattaaaggtgagagaggatgagaataaccctttctacttgagaagctctaacagcttccaaactctctttgagaaccaaaacggtcgcattcgtctcctccagagattcaacaaacgctccccacaacttgagaaccttcgagactaccggattg

SEQ ID NO: 215 - DNA, 424 bp, Artificial
  Mutations within conglycinin beta subunit introduced by GmBCG2_T02TALE nuclease
acgcgcaaaccaaagaacagagaccgatgtaaagacaaaaacatagagtatcctttccaaaacaacgtccaagttcataaaatagagacgaaatgcaagcacagcacacataagtggatgatcaagatgggctcgtccatgccacgcacaccaacacacgtcaagcagcaagccctcccgtggccaaatgtgcatgcatacatgttaacaagagcttgcataactataaatagccctaatctcactccatgttcatcgtccaataatatatatactatgatgagagaggatgagaataaccctttctactttagaagctctaacagcttccaaactctctttgagaaccaaaacggtcgcattcgtctcctccagagattcaacaaacgctccccacaacttgagaaccttcgagactaccgga

SEQ ID NO: 216 - DNA, 369 bp, Artificial
  Mutations within conglycinin beta subunit introduced by GmBCG2_T02TALE nuclease
acgcgcaaaccaaagaacagagaccgatgtaaagacaaaaacatagagtatcctttccaaaacaacgtccaagttcataaaatagagacgaaatgcaagcacagcacacataagtggatgatcaagatgggctcgtccatgccacgcacaccaacacacgtcaagcagcaagccctcccgtggccaaatgtgcatgcatacatgttaacaagagcttgcataactataaatagccctaatctcactccatgtttcatcgtccaataatatatatactatgatgagagtgcggtttcctttgttggtgttgctgggaactgttttcctggcatcagttgtctcattaaaggtgagagaggatgagaataa

SEQ ID NO: 217 - DNA, 505 bp, Artificial
  Mutations within conglycinin beta subunit introduced by GmBCG2_T02TALE nuclease
acgcgcaaaccaaagaacagagaccgatgtaaagacaaaaacatagagtatcctttccaaaacaacgtccaagttcaaaaaattgagacgaaatgcaagcacagcacacataagtggatgatcaagatgggctcgtccatgccacgcacaccaacacacgtcaagcagcaagccctcccgtggccaaatgtgcatgcatacatgttaacaagagctagcttctcttgcataactataaatagccctaatctcactccatgtttcatcgtccaataatatatatacatatgatgagagtgcggtttcctttgttggtgttgctgggaaactgttttcctggcatctgtctcattaaaggtgagagaggatgagaataaccctttctacttgagaagctctaacagcttccaaactctctttgagaaccaaaacggtcgcattcgtctcctccagagattcaacaaacgctccccacaacttgagaaccttcgagactaccggattg

SEQ ID NO: 218 - DNA, 513 bp, Artificial
  Mutations within conglycinin beta subunit introduced by GmBCG2_T02TALE nuclease
acgcgcaaaccaaagaacagagaccgatgtaaagacaaaaacatagagtatcctttccaaaacaacgtccaagttcaaaaaattgagacgaaaatgcaagcacagcacacataaagtggatgatcaagatgggctcgtccatgccacgcacaccaacacacgtcaagcagcaagccctcccgtggccaaatgtgcatgcatacatgttaacaagagctagcttctcttgcataactataaatagccctaatctcactccatgttcatcgtccaataatatatatactatgatgagagtgcggtttcctttgttggtgttgctgggaaactgttttcctggcatcagagtttgtgtctcattaaaggtgagagaggatgagaataaccctttctacttgagaagctctaacagcttccaaactctctttgagaaccaaaacggtcgcattcgtctcctccagagattcaacaaacgctccccacaacttgagaaccttcgagactaccggattg

SEQ ID NO: 219 - DNA, 496 bp, Artificial
  Mutations within conglycinin beta subunit introduced by GmBCG2_T02TALE nuclease
acgcgcaaaccaaagaacagagaccgatgtaaagacaaaaacatagagtatcctttccaaaacaacgtccaagttcataaaatagagacgaaatgcaagcacagcacacataagtggatgatcaagatgggctcgtccatgccacgcacaccaacacacgtcaagcagcaagccctcccgtggccaaatgtgcatgcatacatgttaacaagagcttgcataactataaatagccctaatctcactccatgtttcatcgtccaataatatatatactatgatgagagtgcggtttcctttgttggtgttgctgggaactgttttcctggcatgtggtctcattaaaggtgagagaggatgagaataacccctttctacttgagaagctctaacagcttccaaactctctttgagaaccaaaacggtcgcattcgtctcctccagagattcaacaaacgctccccacaacttgagaaccttcgagactaccggattg

SEQ ID NO: 220 - DNA, 503 bp, Artificial
  Mutations within conglycinin beta subunit introduced by GmBCG2_T02TALE nuclease
acgcgcaaaccaaagaacagagaccgatgtaaagacaaaaacatagagtatcctttccaaaacaacgtccaagttcaaaaaattgagacgaaatgcaagcacagcacacataagtggatgatcaagatgggctcgtccatgccacgcacaccaacacacgtcaagcagcaagccctcccgtggccaaatgtgcatgcatacatgttaacaagagctagcttctcttgcataactataaatagccctaatctcactccatgtttcatcgtccaataatatatatactatgatgagagtgcggtttcctttgttggtgttgctgggaaactgttttcctggcatcgtctcattaaaggtgagagaggatgagaataaccctttctacttgagaagctctaacagcttccaaactctctttgagaaccaaaacggtcgcattcgtctcctccagagattcaacaaacgctccccacaacttgagaaccttcgagactaccggattg

SEQ ID NO: 221 - DNA, 498 bp, Artificial
  Mutations within conglycinin beta subunit introduced by GmBCG2_T02TALE nuclease
acgcgcaaaccaaagaacagagaccgatgtaaagacaaaaacatagagtatcctttccaaaacaacgtccaagttcataaaatagagacgaaatgcaagcacagcacacataagtggatgatcaagatgggctcgtccatgccacgcacaccaacacatcgtcaagcagcaagccctcccgtggccaaatgtgcatgcatacatgttaacaagagcttgcataactataaatagccctaatctcactcatgtttcatcgtccaataatatatatactatgatgagagtgcggtttcctttgttggtgttgctgggaactgttttcctggcatcagttgtctcattaaaggtgagagaggatgagaataacccctttctactttagaagctctaacagcttccaaactctctttgagaaccaaaacggtcgcattcgtctcctccagagattcaacaaacgctccccacaacttgagaaccttcgagactaccggattg

SEQ ID NO: 222 - DNA, 487 bp, Artificial
  Mutations within conglycinin beta subunit introduced by GmBCG2_T02TALE nuclease
acgcgcaaaccaaagaacagagaccgatgtaaagacaaaaacatagagtatcctttccaaaacaacgtccaagttcaaaaaattgagacgaaatgcaagcacagcacacataagtggatgatcaagatgggctcgtccatgccacgcacaccaacacacgtcaagcagcaagccctcccgtggccaaatgtgcatgcatacatgttaacaagagctagcattctcttgcataactataaatagccctaatctcactccatgtttccatcgtccaataatatatatactatgatgagagtgcggtttcctttgttggtgttgctgggaactgttttcctggcatcagttatgagaataaccctttctactttagaagctctaacagcttccaaaactctctttgagaaccaaaaacggtcgcattcgtctcctccagagattcaacaaacgctccccacaacttgagaaccttcgagactaccggatt

SEQ ID NO: 223 - DNA, 506 bp, Artificial
  Mutations within conglycinin beta subunit introduced by GmBCG2_T02TALE nuclease
acgcgcaaaccaaagaacagagaccgatgtaaagacaaaaacatagagtatcctttccaaaacaacgtccaagttcaaaaaattgagacgaaatgcaagcacagcacacataagtggatgatcaagatgggctcgtccatgccacgcacaccaacacacgtcaagcagcaagccctcccgtggccaaatgtgcatgcatacatgttaacaagagctagcttctcttgcataactataaatagccctaatctcactccatgtttcatcgtccaataatatatatactatgatgagagtgcggtttcctttgttggtgttgctgggaactgttttcctggccatcagtgtctcattaaaggtgagagaggatgagaataaccctttctactttagaagctctaacagcttccaaactctctttgagaaccaaaacggtcgcattcgtctcctccagagattcaacaaacgctccccacaacttgagaaccttcgagactaccggattg

SEQ ID NO: 224 - DNA, 499 bp, Artificial
  Mutations within conglycinin beta subunit introduced by GmBCG2_T02TALE nuclease
acgcgcaaaccaaagaacagagaccgatgtaaagacaaaaacatagagtatcctttccaaaacaacgtccaagttcaaaaaattgagacgaaatgcaagcacagcacacataagtggatgatcaagatgggctcgtccatgccacgcacaccaacacacgtcaagcagcaagccctcccgtggccaaatgtgcatgcatacatgttaacaagagctagcttctcttgcataactataaatagccctaatctcactccatgtttcatcgtccaataatatactatactatgatgagagtgcggtttccttgttggtgttgctgggaactgtttcctggctgtctcattaaaggtgagagaggatgagaataaccctttctacttgagaagctctaacagcttccaaactctctttgagaaccaaaacggtcgcattcgtctcctccagagattcaacaaacgctccccacaacttgagaaccttcgagactaccggattg

SEQ ID NO: 225 - DNA, 503 bp, Artificial
  Mutations within conglycinin beta subunit introduced by GmBCG2_T02TALE nuclease
acgcgcaaaccaaagaacagagaccgatgtaaagacaaaaacatagagtatcctttccaaaacaacgtccaagttcaaaaaattgagacgaaatgcaagcacagcacacataagtggatgatcaagatgggctcgtccatgccacgcacaccaacacacgtcaagcagcaagccctcccgtggccaaatgtgcatgcatagcatgttaacaagagctagcttctcttgcataactataaatagccctaatctcactccatgtttcatcgtccaataatatactatacatatgatgagagtgcggtttccttgttgtgttgctggaactgttttcctggcatgtgtctcattaaaggtgagagaggatgagaataaccctttctacttgagaagctctaacagcttccaaactctctttgagaaccaaaacggtcgcattcgtctcctccagagattcaacaaacgctccccacaacttgagaaccttcgagactaccggattg

SEQ ID NO: 226 - DNA, 365 bp, Artificial
  Mutations within conglycinin beta subunit introduced by GmBCG2_T02TALE nuclease
acgcgcaaaccaaagaacagagaccgatgtaaagacaaaaacatagagtatcctttccaaaacaacgtccaagttcataaaatagagacgaaatgcaagcacagcacacataagtggatgatcaagatgggctcgtccatgccacgcacaccaacacacgtcaagcagcaagccctcccgtggccaaatgtgcatgcatacatgttaacaagagcttgcataactataaatagccctaatctcactcatgttcatcgtccaataatatatatactatgatgagagtgcggtttcctttgttggtgttgctgggaactgttttccctggcattgtgctcattaaaggtgagagaggatgagaataa

SEQ ID NO: 227 - DNA, 493 bp, Artificial
  Mutations within conglycinin beta subunit introduced by GmBCG2_T02TALE nuclease
  misc_feature (391): n is a or c or t or g
acgcgcaaaccaaagaacagagaccgatgtaaagacaaaaacatagagtatcctttccaaaacaacgtccaagttcataaaatagagacgaaatgcaagcacagcacacataagtggatgatcaagatgggctcgtccatgccacgcacaccaacacatcgtcaagcagcaagccctcccgtggccaaatgtgcatgcatacatgttaacaagagcttgcataactataaatagccctaatctcactccatgtttcatcgtccaataatatatatactatgatgagagtgcggtttcctttgttggtgttgctgggaactgttttcctggcattgtctcattaaaggtgagagaggatgagaataaccctttctactttagaagctctaanagcttccaaaactctctttgagaaccaaaaacggtcgcattcgtctcctccagagattcaacaaacgctcccacacttgagaacttcgagactaccggattg

SEQ ID NO: 228 - DNA, 497 bp, Artificial
  Mutations within conglycinin beta subunit introduced by GmBCG2_T02TALE nuclease
acgcgcaaaccaaagaacagagaccgatgtaaagacaaaaacatagagtatcctttccaaaacaacgtccaagttcataaaatagagacgaaatgcaagcacagcacacataagtggatgatcaagatgggctcgtccatgccacgcacaccaacacacgtcaagcagcaagccctcccgtggccaaatgtgcatgcatacatgttaacaagagcttgcataactataaatagccctaatctcactccatgatttcatcgtccaataatatatatactatgatgagagtgcggtttcctttgttggtgttgctgggaactgttttcctggcatgtgtctcattaaaaggtgagagaggatgagaataaccctttctactttagaagctctaacagcttccaaactctctttgagaaccaaaaacggtcgcattcgtctcctccagagattcaacaaacgctccccacaacttgagaaccttcgagactaccggattg

SEQ ID NO: 229 - DNA, 502 bp, Artificial
  Mutations within conglycinin beta subunit introduced by GmBCG2_T02TALE nuclease
  misc_feature (77): n is a or c or t or g
acgcgcaaaccaaagaacagagaccgatgtaaagacaaaaacatagagtatcctttccaaaacaacgtccaagttcntaaaatagagacgaaatgcaagcacagcacacataagtggatgatcaagatgggctcgtccatgccacgcacaccaacacacgtcaagcagcaagccctcccgtggccaaatgtgcatgcatacatgttaacaagagctagcttctcttgcataactataaatagccctaatctcactccatgtttcatcgtccaataatatatatactatgatgagagtgcggtttcctttgttggtgttgctgggaactgttttcctggcatgtctcatttaaaggtgagagaggatgagaataaccctttctacttgagaagctctaacagcttccaaactctctttgagaaccaaaacggtcgcattcgtctcctccagagattcaacaaacgctccccacaacttgagaaccttcgagactaccggattg

SEQ ID NO: 230 - DNA, 484 bp, Artificial
  Mutations within conglycinin beta subunit introduced by GmBCG2_T02TALE nuclease
acgcgcaaaccaaagaacagagaccgatgtaaagacaaaaacatagagtatcctttccaaaacaacgtccaagttcataaaatagagacgaaatgcaagcacagcacacataagtggatgatcaagatgggctcgtccatgccacgcacaccaacacacgtcaagcagcaagccctcccgtggccaaatgtgcatgcatacatgttaacaagagcttgcataactataaatagccctaatctcactccatgatttcatcgtccaataatatatatactatgatgagagtgcggtttcctttgttggtgttgctgggaactgttttcctttgtgtctcattaaaggtgagagaggatgagaataaccctttctactttagaagctctaacagcttccaaaactctctttgagaaccaaaaacggtcgcttcgtctcctccagagattcaacaaacgctccccacaacttgagaacttcgagacta

SEQ ID NO: 231 - DNA, 507 bp, Artificial
  Mutations within conglycinin beta subunit introduced by GmBCG2_T02TALE nuclease
acgcgcaaaccaaagaacagagaccgatgtaaagacaaaaacatagagtatcctttccaaaacaacgtccaagttcaaaaaattgagacgaaatgcaagcacagcacacataagtggatgatcaagatgggctcgtccatgccacgcacaccaacacacgtcaagcagcaagccctcccgtggccaaatgtgcatgcatacatgttaacaagagctagcttctcttgcataactataaatagccctaatctcactccatgtttcatcgtccaataatatatatactatgatgagagtgcggtttcctttgttggtgttgctgggaactgttttcctggcatcagttgtgtcattaaaggtgagagaggatgagaataaccctttctacttgagaagctctaacagcttccaaactctctttgagaaccaaaaacggtcgcattcgtctcctccagagattcaacaaacgctccccacaacttgagaaccttcgagactaccggattg

SEQ ID NO: 232 - DNA, 381 bp, Artificial
  Mutations within conglycinin beta subunit introduced by GmBCG2_T02TALE nuclease
acgcgcaaaccaaagaacagagaccgatgtaaagacaaaaacatagagtatcctttccaaaacaacgtccaagttcataaaatagagacgaaatgcaagcacagcacacataagtggatgatcaagatgggctcgtccatgccacgcacaccaacacacgtcaagcagcaagccctcccgtggccaaatgtgcatgcatacatgttaacaagagcttgcataactataaatagccctaatctcactccatgtttcatcgtccaataatatatatactatgatgagagtgcggtttcctttgttggtgttgctgggaactgttttcctggcatcgttgtctcattaaaggtgagagaggatgagaataaccctttctacttt

SEQ ID NO: 233 - DNA, 495 bp, Artificial
  Mutations within conglycinin beta subunit introduced by GmBCG2_T02TALE nuclease
  misc_feature (77); (377): n is a or c or t or g
acgcgcaaaccaaagaacagagaccgatgtaaagacaaaaacatagagtatcctttccaaaacaacgtccaagttcntaaaatagagacgaaatgcaagcacagcacacataagtggatgatcaagatgggctcgtccatgccacgcacaccaacacacgtcaagcagcaagccctcccgtggccaaatgtgcatgcatacatgttaacaagagcttgcataactataaatagccctaatctcactccatgtttcatcgtccaataatatatatactatgatgagagtgcggtttcctttgttggtgttgctgggaactgttttcctggcattgtgctcattaaaggtgagagaggatgagaataacccctttctantttagaagctctaacagcttccaaactctctttgagaaccaaaacggtcgcattcgtctcctccagagattcaacaaacgctccccacaacttgagaaccttcgagactaccggattg

SEQ ID NO: 234 - DNA, 498 bp, Artificial
  Mutations within conglycinin beta subunit introduced by GmBCG2_T02TALE nuclease
acgcgcaaaccaaagaacagagaccgatgtaaagacaaaaacatagagtatcctttccaaaacaacgtccaagttcataaaatagagacgaaatgcaagcacagcaccaacataagtggatgatcaagatgggctcgtccatgccacgcacaccaacacacgtcaagcagcaagccctcccgtggccaaatgtgcatgcatacatgttaacaagagcttgcataactataaatagccctaatctcactccatgtttcatcgtccaataatatatatactatgatgagagtgcggtttcctttgttggtgttgctgggaactgttttcctggccatcagtctcattaaaggtgagagaggatgagaataacccctttctacttgagaagctctaacagcttccaaactctctttgagaaccaaaacggtcgcattcgtctcctccagagattcaacaaacgctccccacaacttgagaaccttcgagactaccggattg

SEQ ID NO: 235 - DNA, 503 bp, Artificial
  Mutations within conglycinin beta subunit introduced by GmBCG2_T02TALE nuclease
acgcgcaaaccaaagaacagagaccgatgtaaagacaaaaacatagagtatcctttccaaaacaacgtccaagttcaaaaaattgagacgaaatgcaagcacagcacacataagtggatgatcaagatgggctcgtccatgccacgcacaccaacacacgtcaagcagcaagccctcccgtggccaaatgtgcatgcatagcatgttaacaagagctagcttctcttgcataactataaatagccctaatctcactccatgtttcatcgtccaataatatactatacatatgatgagagtgcggtttccttgttgtgttgctggaactgtttcctggcagtgtctcaatttaaaggtgagagaggatgagaataaccctttctacttgagaagctctaacagcttccaaactctctttgagaaccaaaacggtcgcattcgtctcctccagagattcaacaaacgctccccacaacttgagaaccttcgagactaccggattg

SEQ ID NO: 236 - DNA, 502 bp, Artificial
  Mutations within conglycinin beta subunit introduced by GmBCG2_T02TALE nuclease
acgcgcaaaccaaagaacagagaccgatgtaaagacaaaaacatagagtatcctttccaaaacaacgtccaagttcaaaaaattgagacgaaatgcaagcacagcacacataagtggatgatcaagatgggctcgtccatgccacgcacaccaacacacgtcaagcagcaagccctcccgtggccaaatgtgcatgcatacatgttaacaagagctagcttctcttgcataactataaatagccctaatctcactccatgtttcatcgtccaataatatatatacatatgatgagagtgcggtttccttgttgtgttgctgggaactgttttcctggcatcagtctcattaaaggtgagagaggatgagaataacctttctacttgagaagctctaacagcttccaaactctctttgagaaccaaaaacggtcgcattcgtctcctccagagattcaacaaacgctccccacaacttgagaaccttcgagactaccggattg

SEQ ID NO: 237 - DNA, 468 bp, Artificial
  Mutations within conglycinin beta subunit introduced by GmBCG2_T02TALE nuclease
acgcgcaaaccaaagaacagagaccgatgtaaagacaaaaacatagagtatcctttccaaaacaacgtccaagttcataaaatagagacgaaatgcaagcacagcacacataagtggatgatcaagatgggctcgtccatgccacgcacaccaacacacgtcaagcagcaagccctcccgtggccaaatgtgcatgcatacatgttaacaagagcttgcataactataaatagccctaatctcactccatgtttcatcgtccaataatatatatactatgatgagagtgcggtttcctttgttggtgttgctgggaactgttttcctggcaatctcattaaaggtgagagaggatgagaataaccctttctacttgagaagctctaaacagcttccaaactctctttgagaaccaaaacggtcgcttcgtctcctccagagattcaacaaacgctccccacaacttga

SEQ ID NO: 238 - DNA, 496 bp, Artificial
  Mutations within conglycinin beta subunit introduced by GmBCG2_T02TALE nuclease
acgcgcaaaccaaagaacagagaccgatgtaaagacaaaaacatagagtatcctttccaaaacaacgtccaagttcataaaatagagacgaaatgcaagcacagcacacataagtggatgatcaagatgggctcgtccatgccacgcacaccaacacacgtcaagcagcaagccctcccgtggccaaatgtgcatgcatacatgttaacaagagcttgcataactataaatagccctaatctcactccatgtttcatcgtccaataatatatatactatgatgagagtgcggtttcctttgttggtgttgctgggaactgtttttcctggcatcatgtctcattaaaggtgagagaggatgagaataaccctttctactttagaagctctaacagcttccaaactctctttgagaaccaaaacggtcgcattcgtctcctccagagattcaacaaacgctccccacaacttgagaaccttcgagactaccggattg

SEQ ID NO: 239 - DNA, 497 bp, Artificial
  Mutations within conglycinin beta subunit introduced by GmBCG2_T02TALE nuclease
  misc_feature (379): n is a or c or t or g
acgcgcaaaccaaagaacagagaccgatgtaaagacaaaaacatagagtatcctttccaaaacaacgtccaagttcataaaatagagacgaaatgcaagcacagcacacataagtggatgatcaagatgggctcgtccatgccacgcacaccaacacacgtcaagcagcaagccctcccgtggccaaatgtgcatgcatacatgttaacaagagcttgcataactataaatagccctaatctcactccatgatttcatcgtccaataatatatatactatgatgagagtgcggtttcctttcgttggtgttgctgggaactgttttccctggcagtgtctcattaaaggtgagagaggatgagaataacccctttctantttagaagctctaacagcttccaaactctctttgagaaccaaaacggtcgcattcgtctcctccagagattcaacaaacgctccccacaacttgagaaccttcgagactaccggattg

SEQ ID NO: 240 - DNA, 541 bp, Artificial
  Mutations within conglycinin beta subunit introduced by GmBCG2_T02TALE nuclease
acgcgcaaaccaaagaacagagaccgatgtaaagacaaaaacatagagtatcctttccaaaacaacgtccaagttcaaaaaattgagacgaaatgcaagcacagcacacataagtggatgatcaagatgggctcgtccatgccacgcacaccaacacacgtcaagcagcaagccctcccgtggccaaatgtgcatgcatacactgttaacaagagctagcttcctcttgcataactataaatagccctaatctcactccatgtttcatcgtccaataatatatatactatgatgagagtgcggtttcctttgttggtgttgctgggaactgttttcctggcattgcccacggcttgaccccccagcaggttggtggccatcgcccagccaatggcggtggcaagcaggcgcttgtgtctcattaaaaggtgagagaggatgagaataaccctttcgtacttgagaagctctaacagcttccaaactctctttgagaaccaaaaacggtcgcattcgtctctccagagattcaacaaacgct

SEQ ID NO: 241 - DNA, 496 bp, Artificial
  Mutations within conglycinin beta subunit introduced by GmBCG2_T02TALE nuclease
acgcgcaaaccaaagaacagagaccgatgtaaagacaaaaacatagagtatcctttccaaaacaacgtccaagttcataaaatagagacgaaatgcaagcacagcacacataagtggatgatcaagatgggctcgtccatgccacgcacaccaacacacgtcaagcagcaagccctcccgtggccaaatgtgcatgatacatgttaacaagagcttgcataactataaatagcccttaaatctcactccatgtttcatcgtccaataatatatatactatgatgagagtgcggtttcctttgttggtgttgctgggaactgttttccctggcatcgctcattaaaggtgagagaggatgagaaataacccctttctactttagaagctctaacagcttccaaactctctttgagaaccaaaacggtcgcattcgtctcctccagagattcaacaaacgctccccacaacttgagaaccttcgagactaccggattg

SEQ ID NO: 242 - DNA, 523 bp, Artificial
  Mutations within conglycinin beta subunit introduced by GmBCG2_T02TALE nuclease
  misc_feature (412): n is a or c or t or g
acgcgcaaaccaaagaacagagaccgatgtaaagacaaaaacatagagtatccttttccaaaacaacgtccaagtttcaaaaaatttgagaacgaaaatgcaaagcacagcacacataagtggatgatcaaagatgggctcgtccatgccacgcacaccaatcatcacgtcaaggcagcaagcccttcccgtggccaaatgtgcatgcataagcatgttaacaagagctagcttctcttgcataaactataaatagccctaatctcactcatgtttcatcgtccaataatatactatacatatgatgagagtgcggtttccgtttgttggtgttgctgggaactgttttcctggcaatcgtctcgattaaaggtgagagaggatgagataaccctttctacttgagaagctntaaacagcttccaaactctctttgagaaaccaaaaacggtcgcattcgtctcctccagagttcaacaaaacgctccccaacaacttgagaaccttcgagactaccggattg

SEQ ID NO: 243 - DNA, 500 bp, Artificial
  Mutations within conglycinin beta subunit introduced by GmBCG2_T02TALE nuclease
  misc_feature (381): n is a or c or t or g
acgcgcaaaccaaagaacagagaccgatgtaaagacaaaaacatagagtatcctttccaaaacaacgtccaagttcaaaaattgagacgaaatgcaagcacagcacacataagtggatgatcaagatgggctcgtccatgccacgcacaccaacacacgtcaagcagcaagccctcccgtggccaaatgtgcatgcatacatgttaacaagagctagcttctcttgcataactataaatagccctaatctcactccatgtttcatcgtccaataatatatatactatgatgagagtgcggtttcctttgttggtgttgctgggaactgttttcctggtctcattaaaggtgagagaggatgagaaataaccccttttctanttgagaaagctctaacagcttccaaactctctttgagaaccaaaacggtcgcattcgtctcctccagagattcaacaaacgctccccacaacttgagaaccttcgagactaccggattg

SEQ ID NO: 244 - DNA, 497 bp, Artificial
  Mutations within conglycinin beta subunit introduced by GmBCG2_T02TALE nuclease
acgcgcaaaccaaagaacagagaccgatgtaaagacaaaaacatagagtatcctttccaaaacaacgtccaagttcataaaatagagacgaaatgcaagcacagcacacataagtggatgatcaagatgggctcgtccatgccacgcacaccaacacacgtcaagcagcaagccctcccgtggccaaatgtgcatgcatacatgttaacaagagcttgcataactataaatagccctaatctcactccatgatttcatcgtccaataatatatatactatgatgagagtgcggtttcctttgttggtgttgctgggaactgttttccctggcattgtgtctcattaaaggtgagagaggatgagaataaccctttctactttagaagctctaacagcttccaaactctctttgagaaccaaaacggtcgcattcgtctcctccagagattcaacaaacgctccccacaacttgagaaccttcgagactaccggattg

SEQ ID NO: 245 - DNA, 496 bp, Artificial
  Mutations within conglycinin beta subunit introduced by GmBCG2_T02TALE nuclease
acgcgcaaaccaaagaacagagaccgatgtaaagacaaaaacatagagtatcctttccaaaacaacgtccaagttcataaaatagagacgaaatgcaagcacagcacacataagtggatgatcaagatgggctcgtccatgccacgcacaccaacacacgtcaagcagcaagccctcccgtggccaaatgtgcatgcatacatgttaacaagagcttgcataactataaatagccctaatctcactccatgatttcatcgtccaataatatatatactatgatgagagatgcggtttcctttgttggtgttgctgggaactgttttcctggcatgtgtctcattaaaggtgagagaggatgagaataaccctttctactttagaagctctaacagcttccaaactctctttgagaaccaaaacggtcgcattcgtctcctccagagattcaacaaacgctccccacaacttgagaaccttcgagactaccggattg

SEQ ID NO: 246 - DNA, 497 bp, Artificial
  Mutations within conglycinin beta subunit introduced by GmBCG2_T02TALE nuclease
acgcgcaaaccaaagaacagagaccgatgtaaagacaaaaacatagagtatcctttccaaaacaacgtccaagttcaaaaaattgagacgaaatgcaagcacagcacacataagtggatgatcaagatgggctcgtccatgccacgcacaccaacacacgtcaagcagcaagccctcccgtggccaaatgtgcatgcatacatgttaacaagagctagcttctcttgcataactataaatagccctaatctcactccatgtttcatcgtccaataatatatatactatgatgagagtgcggtttcctttgttggtgttgctgggaactgttttcctggcattaaaaggtgagaggaggatgagaataacccctttctacttgagaagctctaacagcttccaaactctctttgagaaccaaaacggtcgcattcgtctcctccagagattcaacaaacgctccccacaacttgagaaccttcgagactaccggattg

SEQ ID NO: 247 - DNA, 472 bp, Artificial
  Mutations within conglycinin beta subunit introduced by GmBCG2_T02TALE nuclease
  misc_feature (387): n is a or c or t or g
acgcgcaaaccaaagaacagagaccgatgtaaagacaaaaacatagagtatcctttccaaaacaacgtccaagttcataaaatagagacgaaatgcaagcacagcacacataagtggatgatcaagatgggctcgtccatgccacgcacaccaacacacgtcaagcagcaagccctcccgtggccaaatgtgcatgcatacatgttaacaagagcttgcataactataaatagccctaatcatcactccatgtttcatcgtccaataatatcatatactatgatgagagtgcggtttcctttgttggtgttgctgggaactgttttgcctgtctcattaaaggtgagagaaggatgagaataaccctttctacttgaaagctctaanagcttccaaaactctctttgagaaccaaaaacggtcgcattcgtctcctccagagattcaacaaacgctccccacaacttgagaa

SEQ ID NO: 248 - DNA, 493 bp, Artificial
  Mutations within conglycinin beta subunit introduced by GmBCG2_T02TALE nuclease
acgcgcaaaccaaagaacagagaccgatgtaaagacaaaaacatagagtatcctttccaaaacaacgtccaagttcataaaatagagacgaaatgcaagcacagcacacataagtggatgatcaagatgggctcgtccatgccacgcacaccaacacacgtcaagcagcaagccctcccgtggccaaatgtgcatgcatacatgttaacaagagcttgcataactataaatagccctaatctcactccatgtttcatcgtccaataatatatatactatgatgagagtgcggtttcctttgttggtgttgctgggaactgttttcctggcatcagctcattaaaggtgagagaggatgagaataaccctttctactttagaagctctaacagcttccaaactctctttgagaaccaaaacggtcgcattcgtctcctccagagattcaacaaacgctccccacaacttgagaaccttcgagactaccggattg

SEQ ID NO: 249 - DNA, 495 bp, Artificial
  Mutations within conglycinin beta subunit introduced by GmBCG2_T02TALE nuclease
acgcgcaaaccaaagaacagagaccgatgtaaagacaaaaacatagagtatcctttccaaaacaacgtccaagttcataaaatagagacgaaatgcaagcacagcacacataagtggatgatcaagatgggctcgtccatgccacgcacaccaacacacgtcaagcagcaagccctcccgtggccaaatgtgcatgcatacatgttaacaagagcttgcataactataaatagccctaatctcactccatgtttcatcgtccaataatatatatactatgatgagagtgcggtttcctttgttggtgttgctgggaactgttttcctggcatgtgtctcattaaaggtgagagaggatgagaataacccctttctacttgagaagctctaacagcttccaaactctctttgagaaccaaaacggtcgcattcgtctcctccagagattcaacaaacgctccccacaacttgagaaccttcgagactaccggattg

SEQ ID NO: 250 - DNA, 505 bp, Artificial
  Mutations within conglycinin beta subunit introduced by GmBCG2_T02TALE nuclease
  misc_feature (347): n is a or c or t or g
acgcgcaaaccaaagaacagagaccgatgtaaagacaaaaacatagagtatcctttccaaaacaacgtccaagttcaaaaaattgagacgaaatgcaagcacagcacacataagtggatgatcaagatgggctcgtccatgccacgcacaccaacacacgtcaagcagcaagccctcccgtggccaaatgtgcatgcatagcatgtttaacaagagctagcttctcttgcataactataaatagccctaatctcactccatgtttcatcgtccaataatatatatactatgatgagagtgcggtttcctttgttggtgttgctgggaactgttttcctggttggtgnctcattaaaggtgagagaggatgagaataaccctttctactttagaagctctaacagcttccaaactctctttgagaaccaaaacggtcgcattcgtctcctccagagattcaacaaacgctccccacaacttgagaaccttcgagactaccggattg

SEQ ID NO: 251 - DNA, 382 bp, Artificial
  Mutations within conglycinin beta subunit introduced by GmBCG2_T02TALE nuclease
acgcgcaaaccaaagaacagagaccgatgtaaagacaaaaacatagagtatccttttccaaaacaacgtccaagttcataaaatagagacgaaatgcaagcacagcacacataagtggatgatcaagatgggctcgtccatgccacgcacaccaacacacgtcaagcagcaagccctcccgtggccaaatgtgcatgcatacatgttaacaagagcttgcataactataaatagccctaagtctcactccatgatttcatcgtccaataatatatatactatgatgagagtgcggtttcctttgttggtgttgctgggaactgttttccctggcatcagttgtctcattaaaggtgagagaggatgagaataaccctttcta

SEQ ID NO: 252 - DNA, 495 bp, Artificial
  Mutations within conglycinin beta subunit introduced by GmBCG2_T02TALE nuclease
acgcgcaaaccaaagaacagagaccgatgtaaagacaaaaacatagagtatcctttccaaaacaacgtccaagttcataaaatagagacgaaatgcaagcacagcacacataagtggatgatcaagatgggctcgtccatgccacgcacaccaacacacgtcaagcagcaagccctcccgtggccaaatgtgcatgcatacatgttaacaagagcttgcataactataaatagccctaatctcactccatgtttcatcgtccaataatatatatactatgatgagagtgcggtttcctttgttggtgttgctgggaactgttttcctggcatcgtgtctcattaaaggtgagagaggatgagaataaccctttctactttagaagctctaacagcttccaaactctctttgagaaccaaaacggtcgcattcgtctcctccagagattcaacaaacgctccccacaacttgagaaccttcgagactaccggattg

SEQ ID NO: 253 - DNA, 505 bp, Artificial
  Mutations within conglycinin beta subunit introduced by GmBCG2_T02TALE nuclease
acgcgcaaaccaaagaacagagaccgatgtaaagacaaaaacatagagtatcctttccaaaacaacgtccaagttcaaaaaattgagacgaaatgcaagcacagcacacataagtggatgatcaagatgggctcgtccatgccacgcacaccaacacacgtcaagcagcaagccctcccgtggccaaatgtgcatgcatacatgttaacaagagctagcttctcttgcataactataaatagccctaatctcactccatgtttcatcgtccaataatatactatacatatgatgagagtgcggtttccttgttggtgttgctgggaactgttttcctggcatgtgtctcattaaaggtgagagaggatgagaataaccctttctacttggagaagctctaacagcttccaaactctctttgagaaccaaaacggtcgcattcgtctcctccagagattcaacaaacgctccccacaacttgagaaccttcgagactaccggattg

SEQ ID NO: 254 - DNA, 498 bp, Artificial
  Mutations within conglycinin beta subunit introduced by GmBCG2_T02TALE nuclease
acgcgcaaaccaaagaacagagaccgatgtaaagacaaaaacatagagtatcctttccaaaacaacgtccaagttcaaaaaattgagacgaaatgcaagcacagcacacataagtggatgatcaagatgggctcgtccatgccacgcacaccaacacacgtcaagcagcaagccctcccgtggccaaatgtgcatgcatacatgttaacaagagcttgcataactataaatagccctaatctcactccatgtttcatcgtccaataatatatatactatgatgagagtgcggtttcctttgttggtgttgctgggaactgtttttccctggcattgtgtctcattaaaggtgagagaggatgagaataacccctttctactttagaagctctaacagcttccaaactctctttgagaaccaaaacggtcgcattcgtctcctccagagattcaacaaacgctccccacaacttgagaaccttcgagactaccggattg

SEQ ID NO: 255 - DNA, 499 bp, Artificial
  Mutations within conglycinin beta subunit introduced by GmBCG2_T02TALE nuclease
acgcgcaaaccaaagaacagagaccgatgtaaagacaaaaacatagagtatcctttccaaaacaacgtccaagttcataaaatagagacgaaatgcaagcacagcacacataagtggatgatcaagatgggctcgtccatgccacgcacaccaacacacgtcaagcagcaagccctcccgtggccaaatgtgcatgcatacatgttaacaagagcttgcataactataaatagccctaatctcactccatgatttcatcgtccaataatatataatactatgatgagagatgcggtttcctttgttggtgttgctgggaactgttttcctggcatcagtctcattaaaggtgagagaggatgagaataacccctttctactttagaagctctaacagcttccaaactctctttgagaaccaaaaacggtcgcattcgtctcctccagagattcaacaaacgctccccacaacttgagaaccttcgagactaccggattg

SEQ ID NO: 256 - DNA, 496 bp, Artificial
  Mutations within conglycinin beta subunit introduced by GmBCG2_T02TALE nuclease
  misc_feature (34); (335): n is a or c or t or g
acgcgcaaaccaaagaacagagaccgatgtaaangacaaaacatagagtatcctttccaaaacaacgtccaagttcataaaatagagacgaaatgcaaagcacagcacacataagtggatgatcaagatgggctcgtccatgccacgcacaccaacacacgtgcaagcagcaagccctcccgtggccaaatgtgcatgcatacatgttaacaagagcttgcataactataaatagccctaatctcactccatgtttcatcgtccaataatatatatactatgatcgagagtgcggtttcctttgttggtgtgcgggaactgttttcctggcatgngtctcattaaaggtgagaggaggatgagaataaccctttctactttagaagctctaacagcttccaaactctctttgagaaccaaaacggtcgcattcgtctcctccagagattcaacaaacgctccccacaacttgagaaccttcgagactaccggattg

SEQ ID NO: 257 - DNA, 499 bp, Artificial
  Mutations within conglycinin beta subunit introduced by GmBCG2_T02TALE nuclease
acgcgcaaaccaaagaacagagaccgatgtaaagacaaaaacatagagtatcctttccaaaacaacgtccaagttcaaaaaattgagacgaaatgcaagcacagcacacataagtggatgatcaagatgggctcgtccatgccacgcacaccaacacatcgtcaagcagcaagccctcccgtggccaaatgtgcatgcatacatgttaacaagagcttgcataactataaatagccctaatctcactccatgtttcatcgtccaataatatatatactatgatgagagtgcggtttccttgttggtgttgctgggaactgttttccctggcatttgtgtctcattaaaaggtgagagaggatgagaataacccctttctactttagaagctctaacagcttccaaactctctttgagaaccaaaacggtcgcattcgtctcctccagagattcaacaaacgctccccacaacttgagaaccttcgagactaccggattg

SEQ ID NO: 258 - DNA, 496 bp, Artificial
  Mutations within conglycinin beta subunit introduced by GmBCG2_T02TALE nuclease
acgcgcaaaccaaagaacagagaccgatgtaaagacaaaaacatagagtatcctttccaaaacaacgtccaagttcataaaatagagacgaaatgcaagcacagcacacataagtggatgatcaagatgggctcgtccatgccacgcacaccaacacacgtcaagcagcaagccctcccgtggccaaatgtgcatgcatacatgttaacaagagcttgcataactataaatagccctaatctcactccatgtttcatcgtccaataatatatatactatgatgagagtgcggtttcctttgttggtgttgctgggaactgttttccctggcatgtgtctcattaaaggtgagagaggatgagaataacccctttctactttagaagctctaacagcttccaaactctctttgagaaccaaaacggtcgcattcgtctcctccagagattcaacaaacgctccccacaacttgagaaccttcgagactaccggattg

SEQ ID NO: 259 - DNA, 502 bp, Artificial
  Mutations within conglycinin beta subunit introduced by GmBCG2_T02TALE nuclease
acgcgcaaaccaaagaacagagaccgatgtaaagacaaaaacatagagtatcctttccaaaacaacgtccaagttcaaaaaattgagacgaaatgcaagcacagcacacataagtggatgatcaagatgggctcgtccatgccacgcacaccaacacacgtcaagcagcaagccctcccgtggccaaatgtgcatgcatacatgttaacaagagctagcttctcttgcataactataaatagccctaatctcactccatgtttcatcgtccaataatatactatactatgatgagagtgcggtttccttgttggtgttgctggaactgttttcctggcatctgtctcattaaaggtgagagaggatgagaataaccctttctacttgagaagctctaacagcttccaaactctctttgagaaccaaaacggtcgcattcgtctcctccagagattcaacaaacgctccccacaacttgagaaccttcgagactaccggattg

SEQ ID NO: 260 - DNA, 492 bp, Artificial
  Mutations within conglycinin beta subunit introduced by GmBCG2_T02TALE nuclease
  misc_feature (351): n is a or c or t or g
acgcgcaaaccaaagaacagagaccgatgtaaagacaaaaacatagagtatcctttccaaaacaacgtccaagttcataaaatagagacgaaatgcaagcacagcacacataagtggatgatcaagatgggctcgtccatgccacgcacaccaacacacgtcaagcagcaagccctcccgtggccaaatgtgcatgcatacatgttaacaagagcttgcataactataaatagccctaatctcactcatgttcatcgtccaataatatatatactatgatgagagtgcggtttcctttgttggtgttgctgggaactgttttcctggcatgtgctcattaaaggtgagagnggatgagaataacccctttctacttgagaagctctaacagcttccaaactctctttgagaaccaaaacggtcgcattcgtctcctccagagattcaacaaacgctccccacaacttgagaaccttcgagactaccggattg

SEQ ID NO: 261 - DNA, 496 bp, Artificial
  Mutations within conglycinin beta subunit introduced by GmBCG2_T02TALE nuclease
acgcgcaaaccaaagaacagagaccgatgtaaagacaaaaacatagagtatcctttccaaaacaacgtccaagttcataaaatagagacgaaatgcaagcacagcacacataagtggatgatcaagatgggctcgtccatgccacgcacaccaacacacgtcaagcagcaagccctcccgtggccaaatgtgcatgcatacatgttaacaagagcttgcataactataaatagccctaatctcactccatgtttcatcgtccaataatatatatactatgatgagagtgcggtttcctttgttggtgttgctgggaactgttttcctggcatttgtgtctcattaaaggtgagagaggatgagaataacccctttctacttgagaagctctaacagcttccaaactctctttgagaaccaaaacggtcgcattcgtctcctccagagattcaacaaacgctccccacaacttgagaaccttcgagactaccggatt

SEQ ID NO: 262 - DNA, 509 bp, Artificial
  Mutations within conglycinin beta subunit introduced by GmBCG2_T02TALE nuclease
  misc_feature (346); (390); (391): n is a or c or t or g
acgcgcaaaccaaagaacagagaccgatgtaaagacaaaaacatagagtatcctttccaaaacaacgtccaagttcataaaatagagacgaaatgcaagcacagcacacataagtggatgatcaagatgggctcgtccatgccacgcacaccaacacatcgtcaagcagcaagccctcccgtggccaaatgatgcatgatacatgttaaccaagagcttgcataactataaatagccctaaatctcactccatcgatttcatcgtccaataatatatatactatgatcgagagatgccggtttcctttgttggtgcttgctgggaactgttttccctggcatcagngtctcattaaaaggtgagaggaggatgagaataacccctttctnnttagaagctctaacagcttccaaactctctttgagaaccaaaaacggtcgcattcgtctcctccagagattcaacaaacgctccccacaacttgagaaccttcgagactaccggattg

SEQ ID NO: 263 - DNA, 497 bp, Artificial
  Mutations within conglycinin beta subunit introduced by GmBCG2_T02TALE nuclease
acgcgcaaaccaaagaacagagaccgatgtaaagacaaaaaacatagagtatcctttccaaaacaacgtccaagttcataaaatagagacgaaatgcaagcacagcacacataagtggatgatcaagatgggctcgtccatgccacgcacaccaacacacgtcaagcagcaagccctcccgtggccaaatgtgcatgcatacatgttaacaagagcttgcataactataaatagccctaatctcactccatgtttcatcgtccaataatatatatactatgatgagagtgcggtttcctttgttggtgttgctgggaactgtttttcctggcatcgtctcattaaaaggtgagagaggatgagaataacccctttctacttgagaagctctaacagcttccaaactctctttgagaaccaaaacggtcgcattcgtctcctccagagattcaacaaacgctccccacaacttgagaaccttcgagactaccggattg

SEQ ID NO: 264 - DNA, 421 bp, Artificial
  Mutations within conglycinin beta subunit introduced by GmBCG2_T02TALE nuclease
acgcgcaaaccaaagaacagagaccgatgtaaagacaaaaacatagagtatcctttccaaaacaacgtccaagttcaaaaaattgagacgaaatgcaagcacagcacacataagtggatgatcaagatgggctcgtccatgccacgcacaccaacacacgtccaagcagcaagccctcccgtggccaaatgtgcatgcatacatgttaacaagagctagcttctacttgcataactataaatagccctaatctcactccatgtttcatcgtctcattaaaggtgagagaggatgagaataaccctttctactttagaagctctaacagcttccaaactctctttgagaaccaaaacggtcgcattcgtctcctccagagattcaacaaacgctccccacaacttgagaaccttcgagacta

SEQ ID NO: 265 - DNA, 496 bp, Artificial
  Mutations within conglycinin beta subunit introduced by GmBCG2_T02TALE nuclease
acgcgcaaaccaaagaacagagaccgatgtaaagacaaaaacatagagtatcctttccaaaacaacgtccaagttcataaaatagagacgaaatgcaagcacagcacacataagtggatgatcaagatgggctcgtccatgccacgcacaccaacacacgtcaagcagcaagccctcccgtggccaaatgtgcatgcatacatgttaacaagagcttgcataactataaatagccctaatctcactccatgtttcatcgtccaataatatatatactatgatgagagtgcggtttcctttgttggtgttgctgggaactgttttccctggcatcagtctcattaaaggtgagagaggatgagaataaccctttctactttagaagctctaacagcttccaaactctctttgagaaccaaaaacggtcgcattcgtctcctccagagattcaacaaacgctccccacaacttgagaaccttcgagactaccggattg

SEQ ID NO: 266 - DNA, 498 bp, Artificial
  Mutations within conglycinin beta subunit introduced by GmBCG2_T02TALE nuclease
  misc_feature (352): n is a or c or t or g
acgcgcaaaccaaagaacagagaccgatgtaaagacaaaaacatagagtatcctttccaaaacaacgtccaagttcataaaatagagacgaaatgcaagcacagcacacataagtggatgatcaagatgggctcgtccatgccacgcacaccaacacatcgtcaagcagcaagccctcccgtggccaaatgtgcatgatacatgttaacaagagcttgcataactataaatagcccttaaatctcactccatcgatttcatcgtccaataatatcatatactatgatgagagtgcggtttcctttgttggtgttgctgggaactgttttccggcatcagtctcattaaaggngagagaggatgagataaccctttctacttttagaagctctaacagcttccaaactctctttgagaaccaaaacggtcgcattcgtctcctccagagattcaacaaacgctccccacaacttgagaaccttcgagactaccggattg

SEQ ID NO: 267 - DNA, 379 bp, Artificial
  Mutations within conglycinin beta subunit introduced by GmBCG2_T02TALE nuclease
acgcgcaaaccaaagaacagagaccgatgtaaagacaaaaacatagagtatcctttccaaaacaacgtccaagttcataaaatagagacgaaatgcaagcacagcacacataagtggatgatcaagatgggctcgtccatgccacgcacaccaacacacgtcaagcagcaagccctcccgtggccaaatgtgcatgcatacatgttaacaagagcttgcataactataaatagccctaatctcactccatgtttcatcgtccaataatatatatactatgatgagagtgcggtttcctttgttggtgttgctggaactgttttcctggcttgtgtctcattaaaggtgagagaggatgagaataaccctttctacttga

SEQ ID NO: 268 - DNA, 503 bp, Artificial
  Mutations within conglycinin beta subunit introduced by GmBCG2_T02TALE nuclease
acgcgcaaaccaaagaacagagaccgatgtaaagacaaaaacatagagtatcctttccaaaacaacgtccaagttcaaaaaattgagacgaaatgcaagcacagcacacataagtggatgatcaagatgggctcgtccatgccacgcacaccaacacacgtcaagcagcaagccctcccgtggccaaatgtgcatgcatacatgttaacaagagctagcttctcttgcataactataaatagccctaatctcactccatgtttcatcgtccaataatatatatactatgatgagagtgcggtttcctttgttggtgttgctgggaaactgttttcctggcatctctcatttaaaggtgagagaggatgagaataaccctttctacttgagaagctctaacagcttccaaactctctttgagaaccaaaacggtcgcattcgtctcctccagagattcaacaaacgctccccacaacttgagaaccttcgagactaccggattg

SEQ ID NO: 269 - DNA, 494 bp, Artificial
  Mutations within conglycinin beta subunit introduced by GmBCG2_T02TALE nuclease
acgcgcaaaccaaagaacagagaccgatgtaaagacaaaaacatagagtatcctttccaaaacaacgtccaagttcataaaatagagacgaaatgcaagcacagcacacataagtggatgatcaagatgggctcgtccatgccacgcacaccaacacacgtcaagcagcaagccctcccgtggccaaatgtgcatgcatacatgttaacaagagcttgcataactataaatagccctaatctcactccatgtttcatcgtccaataatatatatactatgatgagagtgcggtttcctttgttggtgttgctgggaactgttttcctggcatcgtgtctcattaaaggtgagagaggatgagaataaccctttctactttagaagctctaacagcttccaaactctctttgagaaccaaaacggtcgcattcgtctcctccagagattcaacaaacgctcccacaacttgagaaccttcgagactaccggattg

SEQ ID NO: 270 - DNA, 493 bp, Artificial
  Mutations within conglycinin beta subunit introduced by GmBCG2_T02TALE nuclease
acgcgcaaaccaaagaacagagaccgatgtaaagacaaaaacatagagtatcctttccaaaacaacgtccaagttcataaaatagagacgaaatgcaagcacagcacacataagtggatgatcaagatgggctcgtccatgccacgcacaccaacacacgtcaagcagcaagccctcccgtggccaaatgtgcatgcatacatgttaacaagagcttgcataactataaatagccctaatctcactccatgtttcatcgtccaataatatatatactatgatgagagtgcggtttcctttgttggtgttgctgggaactgttttcctggcatgtgctcattaaaggtgagagaggatgagaataacccctttctactttagaagctctaacagcttccaaactctctttgagaaccaaaacggtcgcattcgtctcctccagagattcaacaaacgctcccacaacttgagaaccttcgagactaccggattg

SEQ ID NO: 271 - DNA, 506 bp, Artificial
  Mutations within conglycinin beta subunit introduced by GmBCG2_T02TALE nuclease
acgcgcaaaccaaagaacagagaccgatgtaaagacaaaaacatagagtatcctttccaaaacaacgtccaagttcaaaaaattgagacgaaatgcaagcacagcacacataagtggatgatcaagatgggctcgtccatgccacgcacaccaacacacgtcaagcagcaagccctcccgtggccaaatgtgcatgcatacatgttaacaagagctagcttctcttgcataactataaatagccctaatctcactccatgtttcatcgtccaataatatatatactatgatgagagtgcggtttcctttgtggtgttgctgggaaactgttttcctggcatgtgtctcattaaaggtgagagaggatgagaataaaccctttctacttgagaagctctaacagcttccaaactctctttgagaaccaaaaacggtcgcaattcgtctcctccagagattcaacaaacgctccccacaacttgagaaccttcgagactaccggattg

SEQ ID NO: 272 - DNA, 404 bp, Artificial
  Mutations within conglycinin beta subunit introduced by GmBCG2_T02TALE nuclease
  misc_feature (77): n is a or c or t or g
acgcgcaaaccaaagaacagagaccgatgtaaagacaaaaacatagagtatcctttccaaaacaacgtccaagttcntaaaatagagacgaaatgcaagcacagcacacataagtggatgatcaagatgggctcgtccatgccacgcacaccaacacacgtcaagcagcaagccctcccgtggccaaatgtgcatgcatacatgttaacaagagcttgcataactataaatagccctaatctcactccatgtttcatcgtccaataatatatatactatgatgagagtgcggtttcctttgttggtgttgctgggaactgttttcctggcatttggcaagcaggcgctggagacggtccagcggctgtttgccggtgctgtgccaggcccacggcttgaccccc

SEQ ID NO: 273 - DNA, 450 bp, Artificial
  Mutations within conglycinin beta subunit introduced by GmBCG2_T02TALE nuclease
acgcgcaaaccaaagaacagagaccgatgtaaagacaaaaacatagagtatcctttccaaaacaacgtccaagtttcaaaaaattgagacgaaaatgcaagcacagcacacataaagtggatgatcaagatgggctcgtccatgccacgcacaccaacacacgtcaagcagcaagccctcccgtgaccaaatgtgcatgcatacatgttaacaagagctagcttctcttgcataactataaatagccctaatctcactccatgtttcatcgtccaataatatatatactatgatgagagtgcggtttcctttgttggtgttgctgggaaactgttttcctggcatctgtctcattaaaggtgagagaggatgagaataacctttctacttgagaagctctaacagcttccaaactctctttgagaaccaaaacggtcgcattcgtctcct

SEQ ID NO: 274 - DNA, 495 bp, Artificial; identical to SEQ ID NO: 249
  Mutations within conglycinin beta subunit introduced by GmBCG2_T02TALE nuclease

SEQ ID NO: 275 - DNA, 496 bp, Artificial; identical to SEQ ID NO: 209
  Mutations within conglycinin beta subunit introduced by GmBCG2_T02TALE nuclease

SEQ ID NO: 276 - DNA, 497 bp, Artificial
  Mutations within conglycinin beta subunit introduced by GmBCG2_T02TALE nuclease
acgcgcaaaccaaagaacagagaccgatgtaaagacaaaaacatagagtatcctttccaaaacaacgtccaagttcaaaaaattgagacgaaatgcaagcacagcacacataagtggatgatcaagatgggctcgtccatgccacgcacaccaacacacgtcaagcagcaagccctcccgtggccaaatgtgcatgcatacatgttaacaagagctagcttctcttgcataactataaatagccctaatctcactccatgtttcatcgtccaataatatatatactatgatgagagtgcggtttcctttgttggtgttgctgggaactgttttcctggcatgtgtctcattaaaggtgagagaggatgagaataaccctttctacttgagaagctctaacagcttccaaactctctttgagaaccaaaacggtcgcattcgtctcctccagagattcaacaaacgctccccacaacttgagaaccttcgagactacc

SEQ ID NO: 277 - DNA, 511 bp, Artificial
  Mutations within conglycinin beta subunit introduced by GmBCG2_T02TALE nuclease
acgcgcaaaccaaagaacagagaccgatgtaaagacaaaaacatagagtatccttttccaaaacaacgtccaagtttcaaaaaattgagacgaaatgcaagcaccagcacacataagtggatgatcaagatgggctcgtccatgccacgcacaccaatcacacgtcaagcagcaagcccttcccgtggccaaatgtgcatgcatacatgttaacaagagctagcttctcttgcataactataaatagccctaatctcactccatgtttcatcgtccaataatatactatacatatgatgagagtgcggtttccttgttgtgttgcgggaactgtttcctggcatcatgttgtcgtcattaaaggtgagagaggatgagaataaccctttctacttgagaagctctaacagcttccaaactctctttgagaaccaaaacggtcgcattcgtctcctccagagattcaacaaacgctccccacaacttgagaaccttcgagactaccggattg

SEQ ID NO: 278 - DNA, 495 bp, Artificial
  Mutations within conglycinin beta subunit introduced by GmBCG2_T02TALE nuclease
acgcgcaaaccaaagaacagagaccgatgtaaagacaaaaacatagagtatcctttccaaaacaacgtccaagttcaaaaaattgagacgaaatgcaagcacagcacacataagtggatgatcaagatgggctcgtccatgccacgcacaccaacacacgtcaagcagcaagccctcccgtggccaaatgtgcatgcatacatgttaacaagagcttgcataactataaatagccctaatctcactccatgtttcatcgtccaataatatatatactatgatgagagtgcggtttcctttgttggtgttgctgggaactgttttcctggcattgtgtctcattaaaggtgagagaggatgagaataaccctttctactttagaagctctaacagcttccaaactctctttgagaaccaaaacggtcgcattcgtctcctccagagattcaacaaacgctccccacaacttgagaaccttcgagactaccggattg

SEQ ID NO: 279 - DNA, 504 bp, Artificial
  Mutations within conglycinin beta subunit introduced by GmBCG2_T02TALE nuclease
acgcgcaaaccaaagaacagagaccgatgtaaagacaaaaacatagagtatcctttccaaaacaacgtccaagttcaaaaaattgagacgaaatgcaagcacagcacacataagtggatgatcaagatgggctcgtccatgccacgcacaccaacacacgtcaagcagcaagccctcccgtggccaaatgtgcatgcatacatgttaacaagagctagcttctcttgcataactataaatagccctaatctcactccatgtttcatcgtccaataatatactaatactatgatgagagtgcggtttcctttgttggtgttgctgggaactgtttcctggcatcatgtctcattaaaggtgagagaggatgagaataacctttctactttagaagctctaacagcttccaaactctctttgagaaccaaaacggtcgcattcgtctcctccagagattcaacaaacgctccccacaacttgagaaccttcgagactaccggattg

SEQ ID NO: 280 - DNA, 489 bp, Artificial
  Mutations within conglycinin beta subunit introduced by GmBCG2_T02TALE nuclease
acgcgcaaaccaaagaacagagaccgatgtaaagacaaaaacatagagtatcctttccaaaacaacgtccaagttcaaaaaattgagacgaaatgcaagcacagcacacataagtggatgatcaagatgggctcgtccatgccacgcacaccaacacacgtcaagcagcaagccctcccgtggccaaatgtgcatgcatacatgttaacaagagcttgcataactataaatagccctaatctcactccatgtttcatcgtccaataatatatatactatgatgagagtgcggtttcctttgttggtgttgctgggaactgttttcctggcatctcattaaaggtgagagaggatgagaataaccctttctactttagaagctctaacagcttccaaactctcttgagaaccaaaacggtcgcattcgtctcctccagagattcaacaaacgctccccacaacttgagaaccttcgagactaccggattg

SEQ ID NO: 281 - DNA, 499 bp, Artificial
  Mutations within conglycinin beta subunit introduced by GmBCG2_T02TALE nuclease
  misc_feature (338): n is a or c or t or g
acgcgcaaaccaaagaacagagaccgatgtaaagacaaaaacatagagtatcctttccaaaacaacgtccaagttcataaaatagagacgaaatgcaagcacagcacacataagtggatgatcaagatgggctcgtccatgccacgcacaccaacacacgtcaagcagcaagccctcccgtggccaaatgtgcatgcatacatgttaacaagagcttgcataactataaatagccctaatctcactccatgattcacgtccaataatatataatactatgatcgagagtgcggtttcctttgttggtgttgctgggaactgtttttccctggcatcangtctcattaaaggtgagagaggatgagaataacccctttctactttagaagctctaacagcttccaaactctctttgagaaccaaaacggtcgcattcgtctcctccagagattcaacaaacgctccccacaacttgagaaccttcgagactaccggattg

SEQ ID NO: 282 - DNA, 498 bp, Artificial
  Mutations within conglycinin beta subunit introduced by GmBCG2_T02TALE nuclease
acgcgcaaaccaaagaacagagaccgatgtaaagacaaaaacatagagtatcctttccaaaacaacgtccaagttcataaaatagagacgaaatgcaagcacagcacacataagtggatgatcaagatgggctcgtccatgccacgcacaccaacacacgtcaagcagcaagccctcccgtggccaaatgtgcatgcatacatgttaacaagagcttgcataactataaatagccctaatctcactccatgtttcatcgtccaataatatataatactatgatgagagtgcggtttcctttgttggtgttgctgggaactgttttccctggcattgtgctcattaaaggtgagagaggatgagaataacccctttctactttagaagctctaacagcttccaaaactctctttgagaaccaaaaacggtcgcattcgtctcctccagagattcaacaaacgctcccacaacttgagaaccttcgagactaccggattg

SEQ ID NO: 283 - DNA, 486 bp, Artificial
  Mutations within conglycinin beta subunit introduced by GmBCG2_T02TALE nuclease
acgcgcaaaccaaagaacagagaccgatgtaaagacaaaaacatagagtatcctttccaaaacaacgtccaggttcataaaatagagacgaaatgcaagcacagcacacataagtggatgatcaagatgggctcgtccatgccacgcacaccaacacacgtcaagcagcaagccctcccgtggccaaatgtgcatgcatacatgttaacaagagcttgcataactataaatagccctaatctcactccatgtttcatcgtccaataatatatatactatgatgagagtgcggtttcctttgttggtgttgctgggaactgttttcctggcatcagtaaaggtgagagaggatgagaataaccctttctactttagaagctctaacagcttccaaactctctttgagaaccaaaacggtcgcattcgtctcctccagagattcaacaaacgctcccacaacttgagaaccttcgagactaccggatt

SEQ ID NO: 284 - DNA, 495 bp, Artificial; identical to SEQ ID NO: 249
  Mutations within conglycinin beta subunit introduced by GmBCG2_T02TALE nuclease

SEQ ID NO: 285 - DNA, 399 bp, Artificial
  Mutations within conglycinin beta subunit introduced by GmBCG2_T02TALE nuclease
  misc_feature (391): n is a or c or t or g
acgcgcaaaccaaagaacagagaccgatgtaaagacaaaaacatagagtatcctttccaaaacaacgtccaagttcataaaatagagacgaaatgcaagcacagcacacataagtggatgatcaagatgggctcgtccatgccacgcacaccaacacatcgtcaagcagcaagccctcccgtggccaaatgtgcatgcatacatgttaaccaagagcttgcataactataaatagccctaatctcactccatgtttcatcgtccaataatatatatactatgatgagagtgcggtttcctttgttggtgttgctgggaactgttttcctggcttgtgtctcattaaaggtgagagaggatgagaataacccctttctacttgaggaagctntaaacagc

SEQ ID NO: 286 - DNA, 500 bp, Artificial
  Mutations within conglycinin beta subunit introduced by GmBCG2_T02TALE nuclease
acgcgcaaaccaaagaacagagaccgatgtaaagacaaaaacatagagtatcctttccaaaacaacgtccaagttcaaaaattgagacgaaatgcaagcacagcacacataagtggatgatcaagatgggctcgtccatgccacgcacaccaacacacgtcaagcagcaagccctcccgtggccaaatgtgcatgcatacatgttaacaagagctagcttctcttgcataactataaatagccctaatctcactccatgtttcatcgtccaataatatactatacatatgatgagagtgcggtttccttgttgtgttgctggaactgtttcctggcatgtctcaatttaaaggtgagagaggatgagaataaccctttctacttgagaagctctaacagcttccaaactctctttgagaaccaaaacggtcgcattcgtctcctccagagattcaacaaacgctccccacaacttgagaaccttcgagactaccggattg

SEQ ID NO: 287 - DNA, 512 bp, Artificial
  Mutations within conglycinin beta subunit introduced by GmBCG2_T02TALE nuclease
  misc_feature (87); (358); (438): n is a or c or t or g
acgcgcaaaccaaagaacagagacccgatgtaaagacaaaaacatagagtatcctttccaaaacaacgtccaagttcaaaaaattgngacgaaaatgcaagcacagcacacataaagtggatgatcaaagatgggcttcgtccatgccacgccacacccaatccacacgtcaaggcagcaagccctcccgtggccaaattgtgcatgcatacatgttaacaagagctagcttctcttgcataactataaatagccctaatctcactccatgtttcatcgtccaataatatatatactatgatgagagtgcggttttcctttgttggtgttgctgggaaactgttttcctggcatttgngtctcattaaaggtgagagaggaatgagaaataaccctttctacttttagaagctctaacagcttccaaactctctttgngaaccaaaacggtcgcattcgtctcctccagagattcaacaaacgctcccccacaacttgagaaccttcgagac

SEQ ID NO: 288 - DNA, 623 bp, Artificial
  Mutations within conglycinin beta subunit introduced by GmBCG2_T02TALE nuclease
acgcgcaaaccaaagaacagagaccgatgtaaagacaaaaacatagagtatcctttccaaaacaacgtccaagttcaaaaaattgagacgaaatgcaagcacagcacacataagtggatgatcaagatgggctcgtccatgccacgcacaccaacacacgtcaagcagcaagccctcccgtggccaaatgtgcatgcatacatgttaacaagagctagcttctcttgcataactataaatagccctaatctcactccatgtttcatcgtccaataatatatatactatgatgagagtgcggtttcctttgttggtgttgctgggaactgttttcctggcatcgacccgtctccagcgcctgcttgccgccatcgtggctggcgatggccaccacctgctgggggtcaagccgtggcctggcacagcaccggcaacagccgctggaccgtctccagcgcctgcttgtgtctcattaaaggtgagagaggatgagaataaaccctttctacttgagaagctctaacagcttccaaactctctttgagaacaaacggtcgcattcgtctcctccagagattcaacaaaacgcctcccacaactggaaccttcgagactaccggatt

SEQ ID NO: 289 - DNA, 515 bp, Artificial
  Mutations within conglycinin beta subunit introduced by GmBCG2_T02TALE nuclease
  misc_feature (348); (353): n is a or c or t or g
acgcgcaaaccaaagaacagagaccgatgtaaagacaaaaacatagagtatcctttccaaaacaacgtccaagttcaaaaaattgagacgaaaatgcaagcacagcacacataagtggatgatcaagatgggctcgtccatgccacgcacaccaacacacgtcaagcagcaagccctcccgtggccaaatgtgcatgcatagcatgttaacaagagctagcttctcttgcataactataaatagccctaatctcactccatgtttcatcgtccaataatatactatacatatgatgagagtgcggtttcctttgttggtgttgctgggaaactgttttcctggcaatntgtcncattaaaggtgagagaggatgagaataaccctttctacttgagaagctctaacagcttccaaaactctctttgagaaccaaaaacggtcgcattcgtctcctccaagagattcaacaaaacgctcccccacaacttgagaaaccttcgagactaccggattg

SEQ ID NO: 290 - DNA, 460 bp, Artificial
  Mutations within conglycinin beta subunit introduced by GmBCG2_T02TALE nuclease
acgcgcaaaccaaagaacagagaccgatgtaaagacaaaaacatagagtatcctttccaaaacaacgtccaagttcaaaaaattgagacgaaatgcaagcacagcacacataagtggatgatcaagatgggctcgtccatgccacgcacaccaacacacgtcaagcagcaagccctcccgtggccaaatgtgcatgcatacatgttaacaagagctagcttctcttgcataactataaatatgccctaatctcactccatgtttccatcgtccaataatatatatactatgatgagagtgcggtttcctctctcattaaaggtgagagaggatgagaataaccctttctacttgagaagctctaacagcttccaaactctctttgagaaccaaaacggtcgcattcgtctcctccagagattcaacaaacgctcccccacaacttgagaaccttcgagac

SEQ ID NO: 291 - DNA, 496 bp, Artificial
  Mutations within conglycinin beta subunit introduced by GmBCG2_T02TALE nuclease
  misc_feature (377); (387): n is a or c or t or g
acgcgcaaaccaaagaacagagaccgatgtaaagacaaaaacatagagtatcctttccaaaacaacgtccaagttcataaaatagagacgaaatgcaagcacagcacacataagtggatgatcaagatgggctcgtccatgccacgcacaccaacacacgtcaagcagcaagccctcccgtggccaaatgtgcatgcatacatgttaacaagagcttgcataactataaatagccctaatctcactccatgtttcatcgtccaataatatatatactatgatgagagtgcggtttcctttgttggtgttgctgggaactgttttcctggcatcgttctcataatgagtgagagagggatgagaataaccccttttcnacttttgagntctaacagcttccaaactctctttgagaaccaaaacggtcgcattcgtctcctccagagattcaacaaacgctccccacaacttgagaaccttcgagactaccggattg

SEQ ID NO: 292 - DNA, 515 bp, Artificial
  Mutations within conglycinin beta subunit introduced by GmBCG2_T02TALE nuclease
acgcgcaaaccaaagaacagagaccgatgtaaagacaaaaacatagagtatcctttccaaaacaacgtccaagttcaaaaaattgagacgaaatgcaagcacagcacacataagtggatgatcaagatgggctcgtccatgccacgcacaccaatcacacgtcaaggcagcaagcccttcccgtggccaaatgtgcatgcatacatgttaacaagagctagcttctcttgcataactataaatatgccctaatctcactccatgtttcatcgtccaataatatactatacatatgatgagagtgcggtttcctttgttggctgttgctgggaactgttttcctggcatcatgtgtcgtcattaaaggtgagagaggatgagaataaccctttctacttgagaagctctaacagcttccaaactctctttgagaaccaaaacggtcgcattcgtctcctccagagattcaacaaacgctcccccacaacttgagaaccttcgagactaccggattg

SEQ ID NO: 293 - DNA, 499 bp, Artificial
  Mutations within conglycinin beta subunit introduced by GmBCG2_T02TALE nuclease
acgcgcaaaccaaagaacagagaccgatgtaaagacaaaaacatagagtatcctttccaaaacaacgtccaagttcataaaatagagacgaaatgcaagcacagcacacataagtggatgatcaagatgggctcgtccatgccacgcacaccaacacatcgtcaagcagcaagccctcccgtggccaaatgtgcatgatacatgttaacaagagcttgcataactataaatagcccttaaatctcactccatgatttcatcgtccaataatatatatactatgatgagagatgcggtttcctttcgttggtgttgctgggaactgttttcctggcatgtgtctcattaaaggtgagagaggatgagaataaccctttctactttagaagctctaacagcttccaaactctctttgagaaccaaaacggtcgcattcgtctcctccagagattcaacaaacgctccccacaacttgagaaccttcgagactaccggattg

SEQ ID NO: 294 - DNA, 501 bp, Artificial
  Mutations within conglycinin beta subunit introduced by GmBCG2_T02TALE nuclease
acgcgcaaaccaaagaacagagaccgatgtaaagacaaaaacatagagtatcctttccaaaacaacgtccaagttcaaaaaattgagacgaaatgcaagcacagcacacataagtggatgatcaagatgggctcgtccatgccacgcacaccaacacacgtcaagcagcaagccctcccgtggccaaatgtgcatgcatacatgttaacaagagctagcttctcttgcataactataaatagccctaatctcactccatgtttcatcgtccaataatatatatactatgatgagagtgcggtttcctttgttggtgttgctgggaaactgttttcctggcatctcattaaaggtgagagaggatgagaataacccctttctacttgagaagctctaacagcttccaaactctctttgagaaccaaaacggtcgcattcgtctcctccagagattcaacaaacgctccccacaacttgagaaccttcgagactaccggattg

SEQ ID NO: 295 - DNA, 504 bp, Artificial
  Mutations within conglycinin beta subunit introduced by GmBCG2_T02TALE nuclease
  misc_feature (364): n is a or c or t or g
acgcgcaaaccaaagaacagagaccgatgtaaagacaaaaacatagagtatcctttccaaaacaacgtccaagttcaaaaaattgagacgaaatgcaagcacagcacacataaagtggatgatcaagatgggctcgtccatgccacgcacaccaacacacgtcaagcagcaagccctcccgtggccaaatgtgcatgcatacatgttaacaagagctagcttctcttgcataactataaatagccctaatctcactccatgtttcatcgtccaataatatataatactatgatgagagtgcggtttcctttgttggtgttgctgggaactgttttcctggcatcgtctcattaaaggtgagagnggatgagaataaccctttctactttagaagctctaacagcttccaaactctctttgagaaccaaaacggtcgcattcgtctcctccagagattcaacaaacgctccccacaacttgagaaccttcgagactaccggattg

SEQ ID NO: 296 - DNA, 563 bp, Artificial
  Mutations within conglycinin beta subunit introduced by GmBCG2_T02TALE nuclease
acgcgcaaaccaaagaacagagaccgatgtaaagacaaaaacatagagtatcctttccaaaacaacgtccaagttcataaaatagagacgaaatgcaagcacagcacacataagtggatgatcaagatgggctcgtccatgccacgcacaccaacacacgtcaagcagcaagccctcccgtggccaaatgtgcatgcatacatgttaacaagagcttgcataactataaatagccctaatctcactccatgtttcatcgtccaataatatatatactatgatgagagtgcggtttcctttgttggtgttgctgggaactgttttcctggcaatggccaccacctgctgggggtcaagccgtgggcctggcacagcaccggcaacagccgctggaccgtctccagcgcctgcttgccgccatcgtggctggcgatggccaccacctgctccggtgtctcattaaaggtgagagaggatgagaataaccctttctacttagaagctctaacagcttccaaactctctttgagaaccaaaacggtcgcattcgtctcctccagaga

SEQ ID NO: 297 - DNA, 424 bp, Artificial
  Mutations within conglycinin beta subunit introduced by GmBCG2_T02TALE nuclease
  misc_feature (319): n is a or c or t or g
acgcgcaaaccaaagaacagagaccgatgtaaagacaaaaacatagagtatcctttccaaaacaacgtccaagttcaaaaaattgagacgaaatgcaagcacagcacacataagtggatgatcaagatgggctcgtccatgccacgcacaccaacacacgtcaagcagcaagccctcccgtggccaaatgtgcatgcatacatgttaaccaagagcttgcataactataaatagccctaatctcactccatgttcatcgtccaataatatatatactatgatgagagtgcggtttcctttgttggtgttgctgggaacngttttccttcaaactctcttttgagaaccaaaaacggtcgcattcgtctcctcccagagattcaacaaacgctccccacaacttgagaaccttcgagactaccgg

SEQ ID NO: 298 - DNA, 497 bp, Artificial
  Mutations within conglycinin beta subunit introduced by GmBCG2_T02TALE nuclease
acgcgcaaaccaaagaacagagaccgatgtaaagacaaaaacatagagtatcctttccaaaacaacgtccaagttcataaaatagagacgaaatgcaagcacagcacacataagtggatgatcaagatgggctcgtccatgccacgcacaccaacacacgtcaagcagcaagccctcccgtggccaaatgtgcatgatacatgttaacaagagcttgcataactataaatagccctaatctcactccatgtttcatcgtccaataatatatatactatgatgagagtgcggtttcctttgttggtgttgctgggaactgtttttccctggcattcgttgtctaatgaagtgagagaggatgagaataacccctttctactttagaagctctaacagcttccaaactctctttgagaaccaaaacggtcgcattcgtctcctccagagattcaacaaacgctccccacaacttgagaaccttcgagactaccggattg

SEQ ID NO: 299 - DNA, 506 bp, Artificial
  Mutations within conglycinin beta subunit introduced by GmBCG2_T02TALE nuclease
  misc_feature (348): n is a or c or t or g
acgcgcaaaccaaagaacagagaccgatgtaaagacaaaaacatagagtatcctttccaaaacaacgtccaagttcaaaaaattgagacgaaatgcaagcacagcacacataagtggatgatcaagatgggctcgtccatgccacgcacaccaacacacgtcaagcagcaagccctcccgtggccaaatgtgcatgcatagcatgttaacaagagctagcttctcttgcataactataaatagccctaatctcactccatgtttcatcgtccaataatatactatacatatgatgagagtgcggtttcctttgttggtgttgctgggaactgttttcctggcatttgnctcattaaaggtgagagaggatgagaataaccctttctacttgagaagctctaacagcttccaaactctctttgagaaccaaaacggtcgcattcgtctcctccagagattcaacaaacgctccccacaacttgagaaccttcgagactaccggattg

SEQ ID NO: 300 - DNA, 505 bp, Artificial
  Mutations within conglycinin beta subunit introduced by GmBCG2_T02TALE nuclease
acgcgcaaaccaaagaacagagaccgatgtaaagacaaaaacatagagtatcctttccaaaacaacgtccaagttcaaaaaattgagacgaaatgcaagcacagcacacataaagtggatgatcaagatgggctcgtccatgccacgcacaccaacacacgtcaagcagcaagccctcccgtggccaaatgtgcatgcatacatgtttaacaagagctagcttctcttgcataaactataaatagccctaatctcactccatgtttcatcgtccaataatatactatacatatgatgagagtcggtttccttgttggtgttgctggaactgttttcctggcatctgtctcattaaaggtgagagaggatgagaataaccctttctacttgagaagctctaacagcttccaaactctctttgagaaccaaaacggtcgcattcgtctcctccagagattcaacaaacgctccccacaacttgagaaccttcgagactaccggattg

SEQ ID NO: 301 - DNA, 502 bp, Artificial
  Mutations within conglycinin beta subunit introduced by GmBCG2_T02TALE nuclease
acgcgcaaaccaaagaacagagaccgatgtaaagacaaaaacatagagtatcctttccaaaacaacgtccaagttcaaaaaattgagacgaaatgcaagcacagcacacataagtggatgatcaagatgggctcgtccatgccacgcacaccaacacacgtcaagcagcaagccctcccgtggccaaatgtgcatgcatacatgttaacaagagctagcttctcttgcataactataaatagccctaatctcactccatgtttcatcgtccaataatatatatactatgatgagagtgcggtttcctttgttggtgttgctgggaactgttttcctggcatgtctcatttaaaggtgagagaggatgagaataaccctttctacttgagaagctctaacagcttccaaactctctttgagaaccaaaacggtcgcattcgtctcctccagagattcaacaaacgctccccacaacttgagaaccttcgagactaccggattg

SEQ ID NO: 302 - DNA, 497 bp, Artificial
  Mutations within conglycinin beta subunit introduced by GmBCG2_T02TALE nuclease
  misc_feature (380): n is a or c or t or g
acgcgcaaaccaaagaacagagaccgatgtaaagacaaaaacatagagtatcctttccaaaacaacgtccaagttcataaaatagagacgaaatgcaagcacagcacacataagtggatgatcaagatgggctcgtccatgccacgcacaccaacacatcgtcaagcagcaagccctcccgtggccaaatgtgcatgcatacatgttaacaagagcttgcataactataaatagccctaatctcactccatgtttcatcgtccaataatatataatactcatgatgagagtgcggtttcctttgttggtgttgctgggaactgttttcctggcaatgtgctcattaaaggtgagagaggatgagaataacccctttctantttagaagctctaacagcttccaaactttctttgagaaccaaaaacggtcgcattcgtctcctccagagattcaacaaacgctccccacacttgagaacttcgagactaccggattg

SEQ ID NO: 303 - DNA, 504 bp, Artificial
  Mutations within conglycinin beta subunit introduced by GmBCG2_T02TALE nuclease
acgcgcaaaccaaagaacagagaccgatgtaaagacaaaaacatagagtatcctttccaaaacaacgtccaagttcaaaaaattgagacgaaaatgcaagcacagcacacataaagtggatgatcaagatgggctcgtccatgccacgcataccaacacacgtcaagcagcaagccctcccgtggccaaatgtgcatgcatacatgttaacaagagctagcttctcttgcataactataaatagccctaatctcactccatgtttcatcgtccaataatatatatactatgatgagagtgcggtttcctttgttggtgttgctgggaactgttttcctggcatgtctcatttaaaggtgagagaggatgagaataaccctttctacttgagaagctctaacagcttccaaactctctttgagaaccaaaacggtcgcattcgtctcctccagagattcaacaaacgctccccacaacttgagaaccttcgagactaccggattg

SEQ ID NO: 304 - DNA, 497 bp, Artificial
  Mutations within conglycinin beta subunit introduced by GmBCG2_T02TALE nuclease
acgcgcaaaccaaagaacagagaccgatgtaaagacaaaaacatagagtatcctttccaaaacaacgtccaagttcataaaatagagacgaaatgcaagcacagcacacataagtggatgatcaagatgggctcgtccatgccacgcacaccaacacacgtcaagcagcaagccctcccgtggccaaatgtgcatgcatacatgttaacaagagcttgcataactataaatagccctaatctcactccatgtttcatcgtccaataatatatatactatgatgagagtgcggtttcctttgttggtgttgctgggaactgttttcctggcatcattgtctcattaaaggtgagagaggatgagaataacccctttctactttagaagctctaacagcttccaaactctctttgagaaccaaaacggtcgcattcgtctcctccagagattcaacaaacgctccccacaacttgagaaccttcgagactaccggattg

SEQ ID NO: 305 - DNA, 491 bp, Artificial
  Mutations within conglycinin beta subunit introduced by GmBCG2_T02TALE nuclease
acgcgcaaaccaaagaacagagaccgatgtaaagacaaaaacatagagtatcctttccaaaacaacgtccaagttcataaaatagagacgaaatgcaagcacagcacacataagtggatgatcaagatgggctcgtccatgccacgcacaccaacacatcgtcaagcagcaagccctcccgtggccaaatgtgcatgcatacaatgttaacaagagcttgcataactataaatagccctaatctcactccatgtttcatcgtccaataatatataatactcatgatgagagtgcggtttcctttgttggtgttgcttgggaactgttttcctggcaatataaaaggtgaggagaggatgagaataacccctttctacttgagaagctctaacagcttccaaactctcttttgagaaccaaaaacggtcgcatttcgtctccctccagagatttcaaacaaaacgctcccccacaacttgagaaccttcgag

SEQ ID NO: 306 - DNA, 497 bp, Artificial
  Mutations within conglycinin beta subunit introduced by GmBCG2_T02TALE nuclease
acgcgcaaaccaaagaacagagaccgatgtaaagacaaaaacatagagtatcctttccaaaacaacgtccaagttcaaaaaattgagacgaaatgcaagcacagcacacataagtggatgatcaagatgggctcgtccatgccacgcacaccaacacacgtcaagcagcaagccctcccgtggccaaatgtgcatgcatacatgttaacaagagctagcttcctcttgcataactataaatagccctaatctcactccatgtttcatcgtccaataatatatatactatgatgagagtgcggtttccaggcgctgttgccggtgctgtgccaggcccacggcttgacccccacgacaggtggtggccatcgccagcaatggcggtggcaagttgtgtctcattaaaggtgagagaggatgagaataaccctttcgtacttgagaagctctaacagcttccaaactctctttgagaaccaaaacggtcgcattcgtct

SEQ ID NO: 307 - DNA, 497 bp, Artificial
  Mutations within conglycinin beta subunit introduced by GmBCG2_T02TALE nuclease
acgcgcaaaccaaagaacagagaccgatgtaaagacaaaaacatagagtatcctttccaaaacaacgtccaagttcataaaatagagacgaaatgcaagcacagcacacataagtggatgatcaagatgggctcgtccatgccacgcacaccaacacacgtcaagcagcaagccctcccgtggccaaatgtgcatgcatacatgttaacaagagcttgcataactataaatagccctaatctcactccatgtttcatcgtccaataatatatatactatgatgagagtgcggtttcctttgttggtgttgctgggaactgttttcctggcatcgttgtctcattaaaggtgagagaggatgagaataacccctttctactttagaagctctaacagcttccaaactctctttgagaaccaaaacggtcgcattcgtctcctccagagattcaacaaacgctccccacaacttgagaaccttcgagactaccggattg

SEQ ID NO: 308 - DNA, 501 bp, Artificial
  Mutations within conglycinin beta subunit introduced by GmBCG2_T02TALE nuclease
  misc_feature (362): n is a or c or t or g
acgcgcaaaccaaagaacagagaccgatgtaaagacaaaaacatagagtatcctttccaaaacaacgtccaagttcaaaaaattgagacgaaatgcaagcacagcacacataagtggatgatcaagatgggctcgtccatgccacgcacaccaacacacgtcaagcagcaagccctcccgtggccaaatgtgcatgcatacatgttaacaagagctagcttctcttgcataactataaatagccctaatctcactccatgtttcatcgtccaataatatatatactatgatgagagtgcggtttcctttgttggtgttgctgggaactgttttcctggcatcgtctcattaaaggtgagagnggatgagaataacctttctacttgagaagctctaacagcttccaaactctctttgagaaccaaaacggtcgcattcgtctcctccagagattcaacaaacgctccccacaacttgagaaccttcgagactaccggattg

SEQ ID NO: 309 - DNA, 473 bp, Artificial
  Mutations within conglycinin beta subunit introduced by GmBCG2_T02TALE nuclease
  misc_feature (440): n is a or c or t or g
acgcgcaaaccaaagaacagagaccgatgtaaagacaaaaacatagagtatccttttccaaaacaacgtccaagtttcaaaaattgaaagacgaaatgcaaagcaccagcacacataacgtggatgatcaaagatggggctcgtccatgccacgcacaccaacacacgtcaagcagcaagccctcccgtggccaaatgtgcatgcatacatgttaacaagagcttagcttactcttaagccaatcaactcataaatatgccctaattctcactccatagtttcatcgtccaaataatatactaatacatcgttcgattggtaggagttgccgggatttcctttggttttggccttggttgctggaactgttttcctggccaattccaagatttcgatcgcaattaaagggtgagagaaggatcgataataacccttttcnactttgagcagctccttaacagcttccaaactc

SEQ ID NO: 310 - DNA, 494 bp, Artificial
  Mutations within conglycinin beta subunit introduced by GmBCG2_T02TALE nuclease
acgcgcaaaccaaagaacagagaccgatgtaaagacaaaaacatagagtatcctttccaaaacaacgtccaagttcataaaatagagacgaaatgcaagcacagcacacataagtggatgatcaagatgggctcgtccatgccacgcacaccaacacacgtcaagcagcaagccctcccgtggccaaatgtgcatgcatacatgttaacaagagcttgcataactataaatagccctaatctcactccatgtttcatcgtccaataatatatatactatgatgagagtgcggtttcctttgttggtgttgctgggaactgttttcctggcatcagtctcattaaaggtgagagaggatgagaataaccctttctactttagaagctctaacagcttccaaactctctttgagaaccaaaacggtcgcattcgtctcctccagagattcaacaaacgctccccacaacttgagaaccttcgagactaccggattg

SEQ ID NO: 311 - DNA, 498 bp, Artificial
  Mutations within conglycinin beta subunit introduced by GmBCG2_T02TALE nuclease
acgcgcaaaccaaagaacagagaccgatgtaaagacaaaaacatagagtatcctttccaaaacaacgtccaagttcataaaatagagacgaaatgcaagcacagcacacataagtggatgatcaagatgggctcgtccatgccacgcacaccaacacacgtcaagcagcaagccctcccgtggccaaatgtgcatgcatacatgttaacaagagcttgcataactataaatagccctaatctcactccatgtttcatcgtccaataatatatatactatgatgagagtgcggtttcctttgttggtgttgctgggaactgttttcctggcatcgtgtctcattaaaggtgagagaggatgagaataacccctttctacttgagaagctctaacagcttccaaactctctttgagaaccaaaaacggtcgcattcgtctcctccagagattcaacaaacgctcccccacaacttgagaaccttcgagactaccggattg

SEQ ID NO: 312 - DNA, 504 bp, Artificial
  Mutations within conglycinin beta subunit introduced by GmBCG2_T02TALE nuclease
  misc_feature (86); (419): n is a or c or t or g
acgcgcaaaccaaagaacagagaccgatgtaaagacaaaaacatagagtatcctttccaaaacaacgtccaagttcaaaaaattgngacgaaatgcaagcacagcacacataaagtggatgatcaagatgggctcgtccatgccacgcacaccaacacacgtcaagcagcaagccctcccgtggccaaatgtgcatgcatacatgttaacaagagctagcttctcttgcataaactataaatagccctaatctcactccatgtttcatcgtccaataatatatatactatgatgagagtgcggtttcctttgttggtgttgctgggaactgttttcctggcagtctcattaaaggtgagagaggatgagaataaaccctttctactgagaagctctaacagcttccaaactctctttgngaaaccaaaaacggtcgcattcgtctcctccagagattcaacaaacgctccccacaacttgagaaccttcgagactaccggattg

SEQ ID NO: 313 - DNA, 502 bp, Artificial
  Mutations within conglycinin beta subunit introduced by GmBCG2_T02TALE nuclease
acgcgcaaaccaaagaacagagaccgatgtaaagacaaaaacatagagtatcctttccaaaacaacgtccaagttcataaaatagagacgaaatgcaagcacagcacacataagtggatgatcaagatgggctcgtccatgccacgcacaccaacacacgtcaagcagcaagccctcccgtggccaaatgtgcatgcatacatgttaacaagagctagcttctcttgcataactataaatagccctaatctcactccatgtttcatcgtccaataatatatatactatgatgagagtgcggtttcctttgttggtgttgctgggaactgttttcctggcatgtctcatttaaaaggtgagagaggatgagaataaccctttctacttagaagctctaacagcttccaaactctctttgagaaccaaaacggtcgcattcgtctcctccagagattcaacaaacgctccccacaacttgagaaccttcgagactaccggattg

SEQ ID NO: 314 - DNA, 507 bp, Artificial
  Mutations within conglycinin beta subunit introduced by GmBCG2_T02TALE nuclease
acgcgcaaaccaaagaacagagaccgatgtaaagacaaaaacatagagtatcctttccaaaacaacgtccaagttcaaaaaattgagacgaaatgcaagcacagcacacataagtggatgatcaagatgggctcgtccatgccacgcacaccaacacacgtcaagcagcaagccctcccgtggccaaatgtgcatgcatagcatgttaacaagagctagcttctcttgcataactataaatagccctaatctcactccatgtttcatcgtccaataatatatatactatgatgagagtgcggtttcctttgttggtgttgctgggaaactgttttcctggcatcagtctcattaaaggtgagagaggatgagaataaccctttctacttgagaagctctaacagcttccaaactctctttgagaaccaaaaacggtcgcattcgtctcctccaagagattcaacaaacgctccccacaacttgagaaccttcgagactaccggattg

SEQ ID NO: 315 - DNA, 461 bp, Artificial
  Mutations within conglycinin beta subunit introduced by GmBCG2_T02TALE nuclease
  misc_feature (345): n is a or c or t or g
acgcgcaaaccaaagaacagagaccgatgtaaagacaaaaacatagagtatcctttccaaaacaacgtccaagttcaaaaaattgagacgaaatgcaagcacagcacacataagtggatgatcaagatgggctcgtccatgccacgcacaccaacacacgtcaagcagcaagccctcccgtggccaaatgtgcatgcatacatgttaacaagagctagcttctcttgcataactataaatagccctaatctcactccatgtttcatcgtccaataatatatatactatgatgagagtgcggtttcctttgttggtgttgctgggaactgttttcctggcatcgtntgcattaaaggtgagagaggatgagaataaccctttctacttgagatctaacagcttccaaactctctttgagaaccaaaacggtcgcattcgtctcctccagagattcaacaaac

SEQ ID NO: 316 - DNA, 506 bp, Artificial
  Mutations within conglycinin beta subunit introduced by GmBCG2_T02TALE nuclease
acgcgcaaaccaaagaacagagaccgatgtaaagacaaaaacatagagtatcctttccaaaacaacgtccaagttcaaaaaattgagacgaaatgcaagcacagcacacataagtggatgatcaagatgggctcgtccatgccacgcacaccaacacacgtcaagcagcaagccctcccgtggccaaatgtgcatgcatagcatgttaacaagagctagcttctcttgcataactataaatagccctaatctcactccatgtttcatcgtccaataatatatatacatatgatgagagtgcggtttccttgttggtgttgctgggaactgttttcctggcatcagtgtctcattaaaggtgagagaggatgagaataaccctttctactttagaagctctaacagcttccaaactctctttgagaaccaaaacggtcgcattcgtctcctccagagattcaacaaacgctccccacaacttgagaaccttcgagactaccggattg

SEQ ID NO: 317 - DNA, 400 bp, Artificial
  Mutations within conglycinin beta subunit introduced by GmBCG2_T02TALE nuclease
  misc_feature (355): n is a or c or t or g
acgcgcaaaccaaagaacagagaccgatgtaaagacaaaaacatagagtatcctttccaaaacaacgtccaagtttcaaaaaattgagacgaaatgcaagcacagcacacataagtggatgatcaagatgggctcgtccatgccacgcacaccaatcacacgtcaagcagcaagccctcccgtggccaaatgtgcatcgcatagcatgttaacaagagctagcttctcttgcataaactataaatagccctaatctcactccatgtttcatcgtccaataatatactatacatatgatgaagagtgcggtttcctttgttggtgttgctgggaactgttttcctggcaatcgtgncgtcattaaaggtgagagaggatgagaataaccctttctacttga

SEQ ID NO: 318 - DNA, 467 bp, Artificial
  Mutations within conglycinin beta subunit introduced by GmBCG2_T02TALE nuclease
acgcgcaaaccaaagaacagagaccgatgtaaagacaaaaacatagagtatcctttccaaaacaacgtccaagttcataaaatagagacgaaatgcaagcacagcacacataagtggatgatcaagatgggctcgtccatgccacgcacaccaacacacgtcaagcagcaagccctcccgtggccaaatgtgcatgcatacatgttaacaagagctagcttctcttgcataactataaatagccctaatctcactccatgtttcatcgtccaataatatatatactatgatgagagtgcggtttcctttgttggtgttgctgggaaactgttttcctggccatcttgtgtctcattaaaggtgagagaggatgagaataaccctttctacttgagaagctctaacagcttccaaaactctctttgagaaccaaaaacggtcgcattcgtctcctccagagattcaac

SEQ ID NO: 319 - DNA, 502 bp, Artificial
  Mutations within conglycinin beta subunit introduced by GmBCG2_T02TALE nuclease
  misc_feature (340): n is a or c or t or g
acgcgcaaaccaaagaacagagaccgatgtaaagacaaaaacatagagtatcctttccaaaacaacgtccaagttcataaaatagagacgaaatgcaagcacagcacacataagtggatgatcaagatgggctcgtccatgccacgcacaccaacacacgtcaagcagcaagccctcccgtggccaaatgtgcatgcatacatgttaacaagagcttgcataactataaatagccctaatctcactccatgatttcatcgtccaataatatatatactatgatgagagatgcggtttcctttgttggtgttgctgggaactgtttttccctggcatcagngtctcattaaaggtgagagaggatgagaataacccctttctactttagaagctctaacagcttccaaactctctttgagaaccaaaaacggtcgcattcgtctcctccagagattcaacaaacgctccccacaacttgagaaccttcgagactaccggattg

SEQ ID NO: 320 - DNA, 388 bp, Artificial
  Mutations within conglycinin beta subunit introduced by GmBCG2_T02TALE nuclease
acgcgcaaaccaaagaacagagaccgatgtaaagacaaaaacatagagtatcctttccaaaacaacgtccaagttcaaaaaattgagacgaaatgcaagcacagcacacataagtggatgatcaagatgggctcgtccatgccacgcacaccaatcacacgtcaagcagcaagccctcccgtggccaaatgtgcatgcatagcatgttaacaagagctagcttctcttgcataactataaatagccctaatctcactccatgtttcatcgtccaataatatactatactatgatgagagtgcggttccttgttgtgttgctggaactgtttcctggcatcgttgtctattaaaggtgagagaggatgagaataaccctttctacttag

SEQ ID NO: 321 - DNA, 496 bp, Artificial
  Mutations within conglycinin beta subunit introduced by GmBCG2_T02TALE nuclease
acgcgcaaaccaaagaacagagaccgatgtaaagacaaaaacatagagtatcctttccaaaacaacgtccaagttcataaaatagagacgaaatgcaagcacagcacacataagtggatgatcaagatgggctcgtccatgccacgcacaccaacacatcgtcaagcagcaagccctcccgtggccaaatgtgcatgcatacatgttaacaagagcttgcataactataaatagccctaatctcactccatgtttcatcgtccaataatatatatactatgatgagagatgcggtttcctttgttggtgttgctgggaactgttttcctggcatgtgctcattaaaggtgagagaggatgagaataacccctttctactttagaagctctaacagcttccaaactctctttgagaaccaaaacggtcgcattcgtctcctccagagattcaacaaacgctccccacaacttgagaaccttcgagactaccggattg

SEQ ID NO: 322 - DNA, 496 bp, Artificial
  Mutations within conglycinin beta subunit introduced by GmBCG2_T02TALE nuclease
acgcgcaaaccaaagaacagagaccgatgtaaagacaaaaacatagagtatcctttccaaaacaacgtccaagttcataaaatagagacgaaatgcaagcacagcacacataagtggatgatcaagatgggctcgtccatgccacgcacaccaacacacgtcaagcagcaagccctcccgtggccaaatgtgcatgcatacatgttaacaagagcttgcataactataaatagccctaatctcactccatgtttcatcgtccaataatatatatactatgatgagagtgcggtttcctttgttggtgttgctgggaactgttttcctggcattgtgtctcattaaaggtgagagaggatgagaataaccctttctactttagaagctctaacagcttccaaactctctttgagaaccaaaaacggtcgcattcgtctcctccagagattcaacaaacgctccccacaacttgagaaccttcgagactaccggattg

SEQ ID NO: 323 - DNA, 626 bp, Artificial
  Mutations within conglycinin beta subunit introduced by GmBCG2_T02TALE nuclease
acgcgcaaaccaaagaacagagaccgatgtaaagacaaaaacatagagtatcctttccaaaacaacgtccaagttctaaaatagagacgaaatgcaagcacagcacacataagtggatgatcaagatgggctcgtccatgccacgcacaccaacacacgtcaagcagcaagccctcccgtggccaaatgtgcatgcatacatgttaacaagagctaggcttctcttgcataactataaatagccctaatcgtcactccatgtttcatcgtcccaataatatatatactatgatgagagtgcggtttcctttgttggtgttgctgggaactgttttcctggcattgcttgccaccattattgctggcgatggccaccacctgctggggggtcaagccgtgggcctggcacagcaccggcaacgccgctggacaattccacaccaacatacgagccggaagcataaagtgtaaagcctggggtgccctaatgatgtctcattaaaggtgagagaggatgagaataaccctttctacttgagaagctctaacagcttccaaactctctttgagaaccaaaacggtcgcattcgtctcctccagagattcaacaaaacgctccccacaac

SEQ ID NO: 324 - DNA, 508 bp, Artificial
  Mutations within conglycinin beta subunit introduced by GmBCG2_T02TALE nuclease
acgcgcaaaccaaagaacagagaccgatgtaaagacaaaaacatagagtatcctttccaaaacaacgtccaagttcaaaaaattgagacgaaatgcaagcacagcacacataagtggatgatcaagatgggctcgtccatgccacgcacaccaacacacgtcaagcagcaagccctcccgtggccaaatgtgcatgcatacatgttaacaagagctagcttctcttgcataactataaatagccctaatctcactccatgtttcatcgtccaataatatatatactatgatgagagtgcggtttcctttgttggtgttgctgggaaactgttttcctggccattatcttcgattaaatagggtgagagaggatgagaataaccctttctactgagaagctctaacagcttccaaactctctttgagaaccaaaacggtcgcattcgtctcctccagagattcaacaaacgctccccacaacttgagaaccttcgagactaccggattg

SEQ ID NO: 325 - DNA, 490 bp, Artificial
  Mutations within conglycinin beta subunit introduced by GmBCG2_T02TALE nuclease
acgcgcaaaccaaagaacagagaccgatgtaaagacaaaaacatagagtatcctttccaaaacaacgtccaagttcataaaatagagacgaaatgcaagcacagcacacataagtggatgatcaagatgggctcgtccatgccacgcacaccaacacacgtcaagcagcaagccctcccgtggccaaatgtgcatgcatacatgttaacaagagcttgcataactataaatagccctaatctcactccatgtttcatcgtccaataatatatatactatgatgagagtgcggtttcctttgttggtgttgctgggaactgttttcctggcatcagttaaaggtgagagaggatgagaataaccctttctactttagaagctctaacagcttccaaaactctctttgagaaccaaaacggtcgcattcgtctcctccagagattcaacaaacgctccccacaacttgagaaccttcgagactaccggattg

SEQ ID NO: 326 - DNA, 495 bp, Artificial; identical to SEQ ID NO: 252
  Mutations within conglycinin beta subunit introduced by GmBCG2_T02TALE nuclease

SEQ ID NO: 327 - DNA, 520 bp, Artificial
  Mutations within conglycinin beta subunit introduced by GmBCG2_T02TALE nuclease
acgcgcaaaccaaagaacagagaccgatgtaaagacaaaaacatagagtatcctttccaaaacaacgtccaagttcaaaaaattgagacgaaatgcaagcacagcacacataagtggatgatcaagatgggctcgtccatgccacgcacaccaacacacgtcaagcagcaagccctcccgtggccaaatgtgcatgcatacatgttaacaagagctagcttctcttgcataactataaatagccctaatctcactccatgtttcatcgtccaataatatatatactatgatgagagtgcggtttcctttgttggtgttgccgccagctggcgtaatagcgaagaggcccgcaccgatcgccctttgtgtctcattaaaggtgagagaggatgagaataacccctttctacttgagaagctctaacagcttccaaactctctttgagaaccaaaacggtcgcattcgtctcctccagagattcaacaaacgctccccacaacttgagaaccttcgagacta

SEQ ID NO: 328 - DNA, 489 bp, Artificial
  Mutations within conglycinin beta subunit introduced by GmBCG2_T02TALE nuclease
acgcgcaaaccaaagaacagagaccgatgtaaagacaaaaacatagagtatcctttccaaaacaacgtccaagttcataaaatagagacgaaatgcaagcacagcacacataagtggatgatcaagatgggctcgtccatgccacgcacaccaacacacgtcaagcagcaagccctcccgtggccaaatgtgcatgcatacatgttaacaagagcttgcataactataaatagccctaatctcactccatgtttcatcgtccaataatatatatactatgatgagagtgcggtttcctttgttggtgttgctgggaactgttttcctggcgtgtctcattaaaggtgagagaggatgagaataaccctttctactttagaagctctaacagcttccaaactctctttgagaaccaaaacggtcgcattcgtctcctccagagattcaacaaacgctccccacaacttgagaaccttcgagactaccgga

SEQ ID NO: 329 - DNA, 597 bp, Artificial
  Mutations within conglycinin beta subunit introduced by GmBCG2_T02TALE nuclease
acgcgcaaaccaaagaacagagaccgatgtaaagacaaaaacatagagtatcctttccaaaacaacgtccaagttcaaaaaattgagacgaaatgcaagcacagcacacataagtggatgatcaagatgggctcgtccatgccacgcacaccaacacacgtcaagcagcaagccctcccgtggccaaatgtgcatgcatacatgttaacaagagctagcttctcttgcataactataaatagccctaatctcactccatgtttcatcgtccaataatatatatactatgatgagagtgcggtttcctttgttggtgttgctgggaaactgttttcctggcaatggccaccacctgctggggggttcaaagccgtggggccctggcacagcaccggcaaacagccgctggaccgtctccagcgcctgcttgccgccatcgtggctggcgatggccaccacctgctccggtgtctcattaaaggtgagagaggatgagaataaccctttctacttagaagctctaacagcttccaaactctctttgagaaccaaacggtcgcattcgtctcctccagagattcaacaaacgctccccac

SEQ ID NO: 330 - DNA, 561 bp, Artificial
  Mutations within conglycinin beta subunit introduced by GmBCG2_T02TALE nuclease
acgcgcaaaccaaagaacagagaccgatgtaaagacaaaaacatagagtatcctttccaaaacaacgtccaagttcaaaaaattgagacgaaaatgcaagcacagcacacataaagtggatgatcaagatgggctcgtccatgccacgcacaccaacacacgtcaagcagcaagccctcccgtggccaaatgtgcatgcatacatgttaacaagagctagcttctcttgcataactataaatagccctaatctcactccatgtttcatcgtccaataatatatatactatgatgagagtgcggtttcctttgttggtgttgctgggaaactgttttccctggcatcagacaaatcttgttgttgtagtaactaaggtactcaaaatctaaatacttcccttaatggtgatttcttggatgcccctctagagcataatccaagttttgtgtctcattaaaggtgagagaggatgagaataaccctttctacttgagaagctctaacagcttccaaactctctttgagaaccaaaacggtcgcattcgtctcctccagagatt

SEQ ID NO: 331 - DNA, 515 bp, Artificial
  Mutations within conglycinin beta subunit introduced by GmBCG2_T02TALE nuclease
acgcgcaaaccaaagaacagagaccgatgtaaagacaaaaacatagagtatcctttccaaaacaacgtccaagttcaaaaaattgagacgaaatgcaagcacagcacacataagtggatgatcaagatgggctcgtccatgccacgcacaccaacacacgtcaagcagcaagccctcccgtggccaaatgtgcatgcatacatgttaacaagagctagcttctcttgcataactataaatagccctaatctcactccatgtttcatcgtccaataatatatatactatgatgagagtgcggtttcctttgttggtgttgctgggaactgttttcctggcaatattggtgtaaccctttctcaagtttatgcgttttgatgagaataaccctttctactttagaagctctaacagcttccaaactctctttgagaaccaaaacggtcgcattcgtctcctccagagattcaacaaacgctccccacaacttgagaaccttcgagactaccggattg

SEQ ID NO: 332 - DNA, 424 bp, Artificial; identical to SEQ ID NO: 215
  Mutations within conglycinin beta subunit introduced by GmBCG2_T02TALE nuclease

SEQ ID NO: 333 - DNA, 502 bp, Artificial
  Mutations within conglycinin beta subunit introduced by GmBCG2_T02TALE nuclease
  misc_feature (344); (419): n is a or c or t or g
acgcgcaaaccaaagaacagagaccgatgtaaagacaaaaacatagagtatcctttccaaaacaacgtccaagttcaaaaaattgagacgaaatgcaagcacagcacacataagtggatgatcaagatgggctcgtccatgccacgcacaccaacacacgtcaagcagcaagccctcccgtggccaaatgtgcatgcatacatgttaacaagagctagcttctcttgcataactataaatagccctaatctcactccatgtttcatcgtccaataatatatatactatgatgagagtgcggtttcctttgttggtgttgctgggaactgttttcctggttgtgnctcattaaaggtgagagaggatgagaataaccctttctacttgagaagctctaacagcttccaaactctctttgngaaccaaaacggtcgcattcgtctcctccagagattcaacaaacgctccccacaacttgagaaccttcgagactaccggattg

SEQ ID NO: 334 - DNA, 434 bp, Artificial
  Mutations within conglycinin beta subunit introduced by GmBCG2_T02TALE nuclease
acgcgcaaaccaaagaacagagaccgatgtaaagacaaaaacatagagtatcctttccaaaacaacgtccaagttcaaaaaattgagacgaaatgcaagcacagcacacataagtggatgatcaagatgggctcgtccatgccacgcacaccaacacacgtcaagcagcaagccctcccgtggccaaatgtgcatgcatacatgttaacaagagcttgcataactataaatagccctaatctcactccatgatttcatcgtccaataatatatatactatgatgaagagatgcggtttcctttgttggtgttgctgggaactgttttccctggcatttgtctcattaaaggtgagagaggatgagaataacccctttctactttagaagctctaacagcttccaaaactctctttgagaaccaaaaacggtcgc

SEQ ID NO: 335 - DNA, 496 bp, Artificial
  Mutations within conglycinin beta subunit introduced by GmBCG2_T02TALE nuclease
acgcgcaaaccaaagaacagagaccgatgtaaagacaaaaacatagagtatcctttccaaaacaacgtccaagttcataaaatagagacgaaatgcaagcacagcacacataagtggatgatcaagatgggctcgtccatgccacgcacaccaacacacgtcaagcagcaagccctcccgtggccaaatgtgcatgcatacatgttaacaagagcttgcataactataaatagccctaatctcactccatgatttcatcgtccaataatatatatactatgatgagagtgcggtttcctttgttggtgttgctgggaactgttttcctggcattgtgtctcattaaaggtgagagaggatgagaataaccctttctactttagaagctctaacagcttccaaactctctttgagaaccaaaacggtcgcattcgtctcctccagagattcaacaaacgctccccacaacttgagaaccttcgagactaccggattg

SEQ ID NO: 336 - DNA, 510 bp, Artificial
  Mutations within conglycinin beta subunit introduced by GmBCG2_T02TALE nuclease
acgcgcaaaccaaagaacagagaccgatgtaaagacaaaaacataagagtatccttttccaaaacaacgtccaagttcataaaatagagacgaaatgcaagcacagcacacataagtggatgatcaagatgggctcgtccatgccacgcacaccaacacacgccaagcagcaagccctcccgtggccaaatgtgcatgcatacatgttaacaagagctagcttctcttgcagtaaacctataaaatatgccctaaatctcactccatgtttcatcgtccaaataatatatatactatgatgagagtgcggtttcctttgttggctgttgctgggaactgttttcctttgtgtctcattaaaggtgagagaggatgagaataaccctttctactttagaagctctaacagcttccaaactctctttgagaaccaaaacggtcgcattcgtctcctccagagattcaacaaacgctccccacaacttgagaaccttcgagactaccggattg

SEQ ID NO: 337 - DNA, 498 bp, Artificial
  Mutations within conglycinin beta subunit introduced by GmBCG2_T02TALE nuclease
  misc_feature (338): n is a or c or t or g
acgcgcaaaccaaagaacagagaccgatgtaaagacaaaaacatagagtatcctttccaaaacaacgtccaagttcataaaatagagacgaaatgcaagcacagcacacataagtggatgatcaagatgggctcgtccatgccacgcacaccaacacatcgtcaagcagcaagccctcccgtggccaaatgtgcatgatacatgttaacaagagcttgcataactataaatagccctaatctcactccatgatttcatcgtccaataatatatatactcatgatgagagatgcggtttcctttgttggtgttgctgggaactgttttcctggcatcangtctcattaaaggtgagagaggatgagaataaccctttctactttagaagctctaacagcttccaaactctctttgagaaccaaaacggtcgcattcgtctcctccagagattcaacaaacgctccccacaacttgagaaccttcgagactaccggattg

SEQ ID NO: 338 - DNA, 497 bp, Artificial
  Mutations within conglycinin beta subunit introduced by GmBCG2_T02TALE nuclease
acgcgcaaaccaaagaacagagaccgatgtaaagacaaaaacatagagtatcctttccaaaacaacgtccaagttcataaaatagagacgaaatgcaagcacagcacacataagtggatgatcaagatgggctcgtccatgccacgcacaccaacacacgtcaagcagcaagccctcccgtggccaaatgtgcatgcatacatgttaacaagagcttgcataactataaatagccctaatctcactccatgtttcatcgtccaataatatatatactatgatgagagtgcggtttcctttgttggtgttgctgggaactgttttcctggcatttgtgtctcattaaaggtgagagaggatgagaataacccctttctactttagaagctctaacagcttccaaactctctttgagaaccaaaacggtcgcattcgtctcctccagagattcaacaaacgctccccacaacttgagaaccttcgagactaccggattg

SEQ ID NO: 339 - DNA, 497 bp, Artificial
  Mutations within conglycinin beta subunit introduced by GmBCG2_T02TALE nuclease
acgcgcaaaccaaagaacagagaccgatgtaaagacaaaaaacatagagtatcctttccaaaacaacgtccaagttcataaaatagagacgaaatgcaagcacagcacacataagtggatgatcaagatgggctcgtccatgccacgcacaccaacacacgtcaagcagcaagccctcccgtggccaaatgtgcatgcatacatgttaacaagagcttgcataactataaatagccctaatctcactccatgtttcatcgtccaataatatatatactatgatgagagtgcggtttcctttgttggtgttgctgggaactgttttcctggcatctgctcattaaaaggtgagagaggatgagaataacccctttctactttagaagctctaacagcttccaaactctctttgagaaccaaaaacggtcgcattcgtctcctccagagattcaacaaacgctccccacaacttgagaaccttcgagactaccggattg

SEQ ID NO: 340 - DNA, 395 bp, Artificial
  Mutations within conglycinin beta subunit introduced by GmBCG2_T02TALE nuclease
acgcgcaaaccaaagaacagagaccgatgtaaagacaaaaacatagagtatcctttccaaaacaacgtccaagttcataaaatagagacgaaatgcaagcacagcacacataagtggatgatcaagatgggctcgtccatgccacgcacaccaacacacgtcaagcagcaagccctcccgtggccaaatgtgcatgcatacatgttaacaagagcttgcataactataaatagccctaatctcactccatgtttcatcgtccaataatatatatactcatgatgagagtgcggttcctttgttggtgttgctgggaactgttttcctggcaatattaaaaggtgaggagaggatgagaataacccctttctactttagaagctctaacagcttcc

SEQ ID NO: 341 - DNA, 497 bp, Artificial; identical to SEQ ID NO: 338
  Mutations within conglycinin beta subunit introduced by GmBCG2_T02TALE nuclease

SEQ ID NO: 342 - DNA, 505 bp, Artificial
  Mutations within conglycinin beta subunit introduced by GmBCG2_T02TALE nuclease
acgcgcaaaccaaagaacagagaccgatgtaaagacaaaaacatagagtatcctttccaaaacaacgtccaagttcaaaaaattgagacgaaatgcaagcacagcacacataagtggatgatcaagatgggctcgtccatgccacgcacaccaacacacgtcaagcagcaagccctcccgtggccaaatgtgcatgcatacatgttaacaagagctagcttctcttgcataactataaatagccctaatctcactccatgtttcatcgtccaataatatatatactatgatgagagtgcggtttcctttgttggtgttgctgggaaactgttttcctggcattgtgtctcattaaaggtgagagaggatgagaataaccctttctactttagaagctctaacagcttccaaactctctttgagaaccaaaacggtcgcattcgtctcctccagagattcaacaaacgctccccacaacttgagaaccttcgagactaccggattg

SEQ ID NO: 343 - DNA, 481 bp, Artificial
  Mutations within conglycinin beta subunit introduced by GmBCG2_T02TALE nuclease
acgcgcaaaccaaagaacagagaccgatgtaaagacaaaaacatagagtatcctttccaaaacaacgtccaagttcaaaaaattgagacgaaatgcaagcacagcacacataagtggatgatcaagatgggctcgtccatgccacgcacaccaacacacgtcaagcagcaagccctcccgtggccaaatgtgcatgcatacatgttaacaagagctagtcattctcttgcataaactataaatatgccctaatctcactccatgtttccatcgtccaataatatactatactatgatgagagtgcggtttccttgttggtgtctcattaaaggtgagagaggatgagaataaccctttctactttagaagctctaaacagcttccaaactctctttgagaaccaaaacggtcgcattcgtctcctccagagattcaacaaacgctccccacaacttgagaaccttcgagactaccggattg

SEQ ID NO: 344 - DNA, 556 bp, Artificial
  Mutations within conglycinin beta subunit introduced by GmBCG2_T02TALE nuclease
acgcgcaaaccaaagaacagagaccgatgtaaagacaaaaacatagagtatcctttccaaaacaacgtccaagttcataaaatagagacgaaatgcaagcacagcacacataagtggatgatcaagatgggctcgtccatgccacgcacaccaacacacgtcaagcagcaagccctcccgtggccaaatgtgcatgcatacatgttaacaagagcttgcataactataaatagccctaatctcactccatgtttcatcgtccaataatatatatactatgatgagagtgcggtttcctttgttggtgttgctgggaactgttttcctggcaatcgccggtgctgtgccaggcccacggcttgaccccggagcaggtggtggccatcgccagctgtgtctcattaaaggtgagagaggatgagaataacccctttctactttagaagctctaaacagcttccaaactctctttgagaaccaaaacggtcgcattcgtctcctccagagattcaacaaacgctccccacaacttgagaaccttcgagactaccggatt

SEQ ID NO: 345 - DNA, 505 bp, Artificial
  Mutations within conglycinin beta subunit introduced by GmBCG2_T02TALE nuclease
acgcgcaaaccaaagaacagagaccgatgtaaagacaaaaacatagagtatcctttccaaaacaacgtccaagttcaaaaaattgagacgaaatgcaagcacagcacacataagtggatgatcaagatgggctcgtccatgccacgcacaccaacacacgtcaagcagcaagccctcccgtggccaaatgtgcatgcatacatgttaacaagagctagcttctcttgcataactataaatagccctaatctcactccatgtttcatcgtccaataatatatatactatgatgagagtgcggtttcctttgttggtgttgctgggaaactgttttcctggcatcagttctcattaaaggtgagagaggatgagaataaccctttctactttagaagctctaacagcttccaaactctctttgagaaccaaaacggtcgcattcgtctcctccagagattcaacaaacgctccccacaacttgagaaccttcgagactaccggattg

SEQ ID NO: 346 - DNA, 504 bp, Artificial
  Mutations within conglycinin beta subunit introduced by GmBCG2_T02TALE nuclease
acgcgcaaaccaaagaacagagaccgatgtaaagacaaaaacatagagtatcctttccaaaacaacgtccaagttcaaaaaattgagacgaaatgcaagcacagcacacataagtggatgatcaagatgggctcgtccatgccacgcacaccaacacacgtcaagcagcaagccctcccgtggccaaatgtgcatgcatacatgttaacaagagctagcttctcttgcataactataaatagccctaatctcactccatgtttcatcgtccaataatatatatactatgatgagagtgcggtttcctttgttggtgttgctgggaactgttttcctggcattgtgtctcattaaaggtgagagaggatgagaataaccctttctacttgagaagctctaacagcttccaaactctctttgagaaccaaaacggtcgcattcgtctcctccagagattcaacaaacgctccccacaacttgagaaccttcgagactaccggattg

SEQ ID NO: 347 - DNA, 498 bp, Artificial
  Mutations within conglycinin beta subunit introduced by GmBCG2_T02TALE nuclease
acgcgcaaaccaaagaacagagaccgatgtaaagacaaaaacatagagtatcctttccaaaacaacgtccaagttcataaaatagagacgaaatgcaagcacagcacacataagtggatgatcaagatgggctcgtccatgccacgcacaccaacacatcgtcaagcagcaagccctcccgtggccaaatgtgcatgcatacatgttaacaagagcttgcataactataaatagccctaatctcactccatgttcatcgtccaataatatatatactatgatgagagtgcggtttcctttgttggtgttgctgggaactgttttccctggcatcagtgtctcattaaaggtgagagaggatgagaataacccctttctactttagaagctctaacagcttccaaactctctttgagaaccaaaacggtcgcattcgtctcctccagagattcaacaaacgctccccacaacttgagaaccttcgagactaccggattg

SEQ ID NO: 348 - DNA, 523 bp, Artificial
  Mutations within conglycinin beta subunit introduced by GmBCG2_T02TALE nuclease
  misc_feature (411): n is a or c or t or g
acgcgcaaaccaaagaacagagaccgatgtaaagacaaaaacatagagtatcctttccaaaacaacgtccaagttcataaaatagagacgaaatgcaagcacagcacacataagtggatgatcaagatgggctcgtccatgccatcgcacaccaacacatcgtcaagcagcaagccctcccgtggccaatgtgcatgcatacatgttaacaagatgcttgcataactataaatagccctaatctcacttccaatgatttcatcgtccaataatatcatatacatatgatcgagagtgcggtttcctttgttggtgttgctgggaactgttttccggcatctgttgtccgtcattaaaggtgagaggagggatgagaaataaccctttctactttgagacgacgcttccaanaatcgctttccaaactgcatctttgaaagaaccgaaaacggtcgcattcgtctcctccagagattcaacaaacgctccccacaacttgagaaccttcgagactaccggattg

SEQ ID NO: 349 - DNA, 499 bp, Artificial
  Mutations within conglycinin beta subunit introduced by GmBCG2_T02TALE nuclease
  misc_feature (382): n is a or c or t or g
acgcgcaaaccaaagaacagagaccgatgtaaagacaaaaacatagagtatcctttccaaaacaacgtccaagttcaaaaaattgagacgaaatgcaagcacagcacacataagtggatgatcaagatgggctcgtccatgccacgcacaccaacacacgtcaagcagcaagccctcccgtggccaaatgtgcatgcatacatgttaacaagagctagcttctcttgcataactataaatagccctaatctcactccatgtttcatcgtccaataatatatatactatgatgagagtgcggtttcctttgttggtgttgctgggaactgttttcctttgtgtctcattaaaggtgagagaggatgagaataaccctttctantgagaagctctaacagcttccaaactctctttgagaaccaaaacggtcgcattcgtctcctccagagattcaacaaacgctccccacaacttgagaaccttcgagactaccggattg

SEQ ID NO: 350 - DNA, 492 bp, Artificial
  Mutations within conglycinin beta subunit introduced by GmBCG2_T02TALE nuclease
acgcgcaaaccaaagaacagagaccgatgtaaagacaaaaacatagagtatcctttccaaaacaacgtccaagttcataaaatagagacgaaatgcaagcacagcacacataagtggatgatcaagatgggctcgtccatgccacgcacaccaacacacgtcaagcagcaagccctcccgtggccaaatgtgcatgcatacatgttaacaagagcttgcataactataaatagccctaatctcactccatgtttcatcgtccaataatatatatactatgatgagagtgcggtttcctttgttggtgttgctgggaactgttttcctggcatgtctcattaaaggtgagagaggatgagaataaccctttctactttagaagctctaacagcttccaaactctctttgagaaccaaaacggtcgcattcgtctcctccagagattcaacaaacgctccccacaacttgagaaccttcgagactaccggattg

SEQ ID NO: 351 - DNA, 387 bp, Artificial
  Mutations within conglycinin beta subunit introduced by GmBCG2_T02TALE nuclease
acgcgcaaaccaaagaacagagaccgatgtaaagacaaaaacatagagtatcctttccaaaacaacgtccaagttcataaaatagagacgaaatgcaagcacagcacacataagtggatgatcaagatgggctcgtccatgccacgcacaccaacacacgtcaagcagcaagccctcccgtggccaaatgtgcaatgcatacatgttaacaagagcttgcataactataaatcagccctaatctcactccatgttcatcgtccaataatatatatactatgatgagagaggatgagaataaccctttctactttagaagctctaaacagcttccaaactctctttgagaaccaaaacggtcgcattcgtctcctccagagattcaac

SEQ ID NO: 352 - DNA, 499 bp, Artificial
  Mutations within conglycinin beta subunit introduced by GmBCG2_T02TALE nuclease
  misc_feature (381): n is a or c or t or g
acgcgcaaaccaaagaacagagaccgatgtaaagacaaaaacatagagtatcctttccaaaacaacgtccaagttcaaaaaattgagacgaaatgcaagcacagcacacataagtggatgatcaagatgggctcgtccatgccacgcacaccaacacacgtcaagcagcaagccctcccgtggccaaatgtgcatgcatacatgttaacaagagctagcttctcttgcataactataaatagccctaatctcactccatgtttcatcgtccaataatatatatactatgatgagagtgcggtttcctttgttggtgttgctgggaactgttttcctggcgtctcattaaaggtgagagaggatgagaataaccctttctantgagaagctctaacagcttccaaaactctctttgagaaccaaaacggtcgcattcgtctcctccagagattcaacaaacgctccccacaacttgagaaccttcgagactaccggattg

SEQ ID NO: 353 - DNA, 464 bp, Artificial
  Mutations within conglycinin beta subunit introduced by GmBCG2_T02TALE nuclease
acgcgcaaaccaaagaacagagaccgatgtaaagacaaaaacatagagtatcctttccaaaacaacgtccaagttcaaaaaattgagacgaaatgcaagcacagcacacataagtggatgatcaagatgggctcgtccatgccacgcacaccaacacacgtcaagcagcaagccctcccgtggccaaatgtgcatgcatacatgttaacaagagctagcttctcttgcataaactataaatatgccctaatctcactccatgtttccatcgtccaataatatatatactatgatgagagtgcggtgtctcattaaaggtgagagaggatgagaataaccctttctacttgagaagctctaacagcttccaaactctcttttgagaaccaaaaacggtcgcatttcgtctcctccagagattcaaacaaaacgctcccccacaacttgagaaaccttcgagacta

SEQ ID NO: 354 - DNA, 460 bp, Artificial
  Mutations within conglycinin beta subunit introduced by GmBCG2_T02TALE nuclease
acgcgcaaaccaaagaacagagaccgatgtaaagacaaaaacatagagtatcctttccaaaacaacgtccaagttcataaaatagagacgaaatgcaagcacagcacacataagtggatgatcaagatgggctcgtccatgccacgcacaccaacacacgtcaagcagcaagccctcccgtggccaaatgtgcatgcatacatgttaacaagagcttcgcataactataaaatagccctaatctcactccatgtttcatcgtccaataatatatatactatgatgagagtgcggtttcctttgttggtgttgctgggaactgttttcctggcaatcagtatggcttcattcagctccggttcccaacgatcaaggcgagttacatgatccccatgttgtgcaaaaaagcggttagcctccttcgtgtcatcattaaaggtgagagaggtgagaataaccc

SEQ ID NO: 355 - DNA, 500 bp, Artificial
  Mutations within conglycinin beta subunit introduced by GmBCG2_T02TALE nuclease
acgcgcaaaccaaagaacagagaccgatgtaaagacaaaaacatagagtatcctttccaaaacaacgtccaagttcaaaaaattgagacgaaatgcaagcacagcacacataagtggatgatcaagatgggctcgtccatgccacgcacaccaacacacgtcaagcagcaagccctcccgtggccaaatgtgcatgcatacatgttaacaagagctagcttctcttgcataactataaatagccctaatctcactccatgtttcatcgtccaataatatatatactatgatgagagtgcggtttcctttgttggtgttgctgggaactgttttcctggcatcacattaaaggtgagagaggatgagaataaaccctttctacttgagaagctctaacagcttccaaactctctttgagaaccaaaacggtcgcattcgtctcctccagagattcaacaaacgctccccacaacttgagaaccttcgagactaccggattg

SEQ ID NO: 356 - DNA, 508 bp, Artificial
  Mutations within conglycinin beta subunit introduced by GmBCG2_T02TALE nuclease
acgcgcaaaccaaagaacagagaccgatgtaaagaccaaaaacatagagtatcctttccaaaacaacgtccaagttcaaaaaattgagacgaaatgcaagcacagcacacataagtggatgatcaagatgggctcgtccatgccacgcacaccaacacacgtcaagcagcaagccctcccgtggccaaatgtgcatgcatacatgttaacaagagctagcttctcttgcataactataaatagccctaatctcactccatgtttcatcgtccaataatatatatacatatgatgagagtgcggtttcctttgttggtgttgctgggaaactgttttcctggccatcagtctcattaaaggtgagagaggatgagaataaccctttctacttgagaagctctaacagcttccaaactctctttgagaaaccaaaacggtcgcattcgtctcctccagagattcaacaaacgctccccacaacttgagaaccttcgagactaccggattg

SEQ ID NO: 357 - DNA, 499 bp, Artificial
  Mutations within conglycinin beta subunit introduced by GmBCG2_T02TALE nuclease
acgcgcaaaccaaagaacagagaccgatgtaaagacaaaaacatagagtatcctttccaaaacaacgtccaagttcataaaatagagacgaaatgcaagcacagcacacataagtggatgatcaagatgggctcgtccatgccacgcacaccaacacacgtcaagcagcaagccctcccgtggccaaatgtgcatgcatacatgttaacaagagcttgcataactataaatagccctaatctcactccatgtttcatcgtccaataatatatatactatgatgagagtgcggtttcctttgttggtgttgctgggaactgttttcctggcatctgttgtctcattaaaggtgagaggaggatgagaataacccctttctactttagaagctctaacagcttccaaactctctttgagaaccaaaacggtcgcattcgtctcctccagagattcaacaaacgctccccacaacttgagaaccttcgagactaccggattg

SEQ ID NO: 358 - DNA, 503 bp, Artificial
  Mutations within conglycinin beta subunit introduced by GmBCG2_T02TALE nuclease
acgcgcaaaccaaagaacagagaccgatgtaaagacaaaaacatagagtatcctttccaaaacaacgtccaagttcaaaaaattgagacgaaatgcaagcacagcacacataagtggatgatcaagatgggctcgtccatgccacgcacaccaacacacgtcaagcagcaagccctcccgtggccaaatgtgcatgcatacatgttaacaagagctagcttctcttgcataactataaatagccctaatctcactccatgtttcatcgtccaataatatatatactatgatgagagtgcggtttcctttgttggtgttgctgggaactgttttcctggcatgtctcatttaaaggtgagagaggatgagaataaccctttctacttggagaagctctaacagcttccaaactctctttgagaaccaaaacggtcgcattcgtctcctccagagattcaacaaacgctccccacaacttgagaaccttcgagactaccggattg

SEQ ID NO: 359 - DNA, 503 bp, Artificial
  Mutations within conglycinin beta subunit introduced by GmBCG2_T02TALE nuclease
acgcgcaaaccaaagaacagagaccgatgtaaagacaaaaacatagagtatcctttccaaaacaacgtccaagttcaaaaaattgagacgaaatgcaagcacagcacacataagtggatgatcaagatgggctcgtccatgccacgcacaccaacacacgtcaagcagcaagccctcccgtggccaaatgtgcatgcatacatgttaacaagagctagcttctcttgcataactataaatagccctaatctcactccatgtttcatcgtccaataatatatatactatgatgagagtgcggtttcctttgttggtgttgctgggaactgttttcctggcatcatcattaaaggtggagagaggattgagaataacccctttctacttgagaagctctaacagcttccaaactctctttgagaaccaaaacggtcgcattcgtctcctccagagattcaacaaacgctccccacaacttgagaaccttcgagactaccggattg

SEQ ID NO: 360 - DNA, 499 bp, Artificial
  Mutations within conglycinin beta subunit introduced by GmBCG2_T02TALE nuclease
  misc_feature (382): n is a or c or t or g
acgcgcaaaccaaagaacagagaccgatgtaaagacaaaaacatagagtatcctttccaaaacaacgtccaagttcaaaaaattgagacgaaatgcaagcacagcacacataagtggatgatcaagatgggctcgtccatgccacgcacaccaacacacgtcaagcagcaagccctcccgtggccaaatgtgcatgcatacatgttaacaagagctagcttctcttgcataactataaatagccctaatctcactccatgtttcatcgtccaataatatatatactatgatgagagtgcggtttcctttgttggtgttgctgggaactgttttcctggcgtctcattaaaggtgagagaggattgagaataaccctttctantgagaagctctaacagcttccaaactctctttgagaaccaaaacggtcgcattcgtctcctccagagattcaacaaacgctccccacaacttgagaaccttcgagactaccggattg

SEQ ID NO: 361 - DNA, 495 bp, Artificial; identical to SEQ ID NO: 252
  Mutations within conglycinin beta subunit introduced by GmBCG2_T02TALE nuclease

SEQ ID NO: 362 - DNA, 504 bp, Artificial
  Mutations within conglycinin beta subunit introduced by GmBCG2_T02TALE nuclease
acgcgcaaaccaaagaacagagaccgatgtaaagacaaaaacatagagtatcctttccaaaacaacgtccaagttcaaaaaattgagacgaaatgcaagcacagcacacataagtggatgatcaagatgggctcgtccatgccacgcacaccaacacacgtcaagcagcaagccctcccgtggccaaatgtgcatgcatacatgttaacaagagctagcttctcttgcataactataaatagccctaatctcactccatgttcatcgtccaataatatatatactatgatgagagtgcggtttcctttgttggtgttgctggaaactgttttcctggcatcaggtgtctcattaaaggtgagagaggatgagaataaccctttctacttgagaagctctaacagcttccaaactctctttgagaaccaaaacggtcgcattcgtctcctccagagttcaacaaacgctccccacaacttgagaaccttcgagactaccggattg

SEQ ID NO: 363 - DNA, 497 bp, Artificial
  Mutations within conglycinin beta subunit introduced by GmBCG2_T02TALE nuclease
acgcgcaaaccaaagaacagagaccgatgtaaagacaaaaacatagagtatcctttccaaaacaacgtccaagttcataaaatagagacgaaatgcaagcacagcacacataagtggatgatcaagatgggctcgtccatgccacgcacaccaacacacgtcaagcagcaagccctcccgtggccaaatgtgcatgatacatgttaacaagagcttgcataactataaatagccctaaatctcactccatgatttcatcgtccaataatatatatactatgatgagagatgcggtttcctttgttggtgttgctgggaactgttttcctggcattgtgtctcattaaaggtgagagaggatgagaataaccctttctactttagaagctctaacagcttccaaactctctttgagaaccaaaacggtcgcattcgtctcctccagagattcaacaaacgctccccacaacttgagaaccttcgagactaccggattg

SEQ ID NO: 364 - DNA, 498 bp, Artificial
  Mutations within conglycinin beta subunit introduced by GmBCG2_T02TALE nuclease
acgcgcaaaccaaagaacagagaccgatgtaaagacaaaaacatagagtatcctttccaaaacaacgtccaagttcataaaatagagacgaaatgcaagcacagcacacataagtggatgatcaagatgggctcgtccatgccacgcacaccaacacacgtcaagcagcaagccctcccgtggccaaatgtgcatgcatacatgttaacaagagcttgcataactataaatagccctaatctcactccatcgatttctatcgtccaataatatatatactatgatgagagtgcggtttcctttgttggtgttgctgggaactgttttccctggcatgtgctcattaaaggtgagagaggatgagaataacccctttctactttggaagctctaacagcttccaaactctctttgagaaccaaaacggtcgcattcgtctcctccagagattcaacaaacgctccccacaacttgagaaccttcgagactaccggattg

SEQ ID NO: 365 - DNA, 469 bp, Artificial
  Mutations within conglycinin beta subunit introduced by GmBCG2_T02TALE nuclease
acgcgcaaaccaaagaacagagaccgatgtaaagacaaaaaacatagagtatcctttccaaaacaacgtccaagttcaaaaaattgagacgaaatgcaagcacagcacacataagtggatgatcaagatgggctcgtccatgccacgcacaccaacacacgtcaagcagcaagccctcccgtggccaaatgtgcatgcatagcatgtttaacaagagctagcttctcttgcataactataaatagccctaatctcactccatgtttcatcgtccaataatatatatacatatgatgagagtgcggtttcctttgttggtgttgctgggaactgttttcctggccatcaagtgtctcattaaagggtgagagaggatgagaataaccctttctacttgagaagctctaacagcttccaaactctctttgagaaccaaaacggtcgcattcgtctcctccagagattcaac

SEQ ID NO: 366 - DNA, 514 bp, Artificial
  Mutations within conglycinin beta subunit introduced by GmBCG2_T02TALE nuclease
  misc_feature (351): n is a or c or t or g
acgcgcaaaccaaagaacagagaccgatgtaaagacaaaaacatagagtatcctttccaaaacaacgtccaagttcaaaaaattgagacgaaatgcaagcacagcacacataagtggatgatcaagatgggctcgtccatgccacgcacaccaatcacacgtcaagcagcaagccctcccgtggccaaatgtgcatgcatacatgttaacaagagctagcttctcttgcataactataaatagccctaatctcactccatgtttcatcgtccaataatatactatacatatgatgagagtgcggtttcctttgttggtgttgctgggaactgttttcctggccaatcgttnttcgattaaaagggtgagagaggatgagaataaccctttctacttgagaagctctaacagcttccaaactctcttttgagaaccaaaaacggtcgcattcgtctcctccagagattcaacaaacgctccccacaacttgagaaccttcgagactaccggattg

SEQ ID NO: 367 - DNA, 497 bp, Artificial
  Mutations within conglycinin beta subunit introduced by GmBCG2_T02TALE nuclease
acgcgcaaaccaaagaacagagaccgatgtaaagacaaaaacatagagtatcctttccaaaacaacgtccaagttcataaaatagagacgaaatgcaagcacagcacacataagtggatgatcaagatgggctcgtccatgccacgcacaccaacacacgtcaagcagcaagccctcccgtggccaaatgtgcatgcatacatgttaacaagagcttgcataactataaatagccctaatctcactccatgtttcatcgtccaataatatatatactatgatgagagtgcggtttcctttgttggtgttgctgggaactgttttcctggcatcagtgtctcattaaaggtgagagaggatgagaataacccctttctactttagaagctctaacagcttccaaactctctttgagaaccaaaacggtcgcattcgtctcctccagagattcaacaaacgctccccacaacttgagaaccttcgagactaccggattg

SEQ ID NO: 368 - DNA, 486 bp, Artificial
  Mutations within conglycinin beta subunit introduced by GmBCG2_T02TALE nuclease
acgcgcaaaccaaagaacagagaccgatgtaaagacaaaaacatagagtatcctttccaaaacaacgtccaagttcaaaaaattgagacgaaaatgcaagcacagcacacataagtggatgatcaagatgggctcgtccatgccacgcacaccaacacacgtcaagcagcaagccctcccgtggccaaatgtgcatgcatacatgttaacaagagcttgcataactataaatagccctaatcatcactccatgttcatcgtccaataatatatatactatgatgagagtgcggtttcctttgttggtgttgctgggaactgttttcctggcattgtctcattaaaggtgagagaggatgagaataaccctttctacttgagaagctctaacagcttccaaactctctttgagaaccaaaacggtcgcttcgtctcctccagagattcaacaaacgctccccacacttgagaaccttcgagactacc

SEQ ID NO: 369 - DNA, 619 bp, Artificial
  Mutations within conglycinin beta subunit introduced by GmBCG2_T02TALE nuclease
acgcgcaaaccaaagaacagagaccgatgtaaagacaaaaacatagagtatcctttccaaaacaacgtccaagttcataaaatagagacgaaatgcaagcacagcacacataagtggatgatcaagatgggctcgtccatgccacgcacaccaacacacgtcaagcagcaagccctcccgtggccaaatgtgcatgcatacatgttaacaagagctagcttctcttgcataactataaatagccctaatctcactccatgtttcatgcgtccaataatatatatactatgatgaggagtgcggttttcctttgttggtgttgctgggaactgttttcctggcatcagtgggcctggcacagcaccggcaacagccgcatggaccgtctccaggcagccctgcttgccaccgccattgctggcgatggccaccacctgctggggggtcaagccgtgggcctggcacagcacccggcaacaggcgctggagtgtctcattgaaaggtgagagaggatgagaataaccctttctactttagaagctctaacagcttccaaactctctttgagaaccaaaacggtcgcattcgtctcctccagagattcaacaaaacgctccc

SEQ ID NO: 370 - DNA, 469 bp, Artificial
  Mutations within conglycinin beta subunit introduced by GmBCG2_T02TALE nuclease
  misc_feature (357): n is a or c or t or g
acgcgcaaaccaaagaacagagaccgatgtaaagacaaaaacatagagtatcctttccaaaacaacgtccaagttcaaaaaaattgagacgaaaatgcaagcacagcacacataaagtggatgatcaagatgggctcgtccatgccacgcacaccaacacacgtcaagcagcaagccctcccgtggccaaatgtgcatgcatacatgttaacaagagctagcttctcttgcataactataaatagccctaatctcactccatgtttcatcgtccaataatatactaatacatatgatgagagtgcggtttcctttgttggtgttgctgggaaactgttttccctggcaatcatgtcncattaaaggtgagagaggatgagaataaccctttctacttgagaagctctaacagctccaaactctctttgagaaccaaaacggtcgcattcgtctcctccagagattcaac

SEQ ID NO: 371 - DNA, 637 bp, Artificial
  Mutations within conglycinin beta subunit introduced by GmBCG2_T02TALE nuclease
acgcgcaaaccaaagaacagagaccgatgtaaagacaaaaaacatagagtatcctttccaaaacaacgtccaagttcataaaatagagacgaaatgcaagcacagcacacataagtggatgatcaagatgggctcgtccatgccacgcacaccaacacacgtcaagcagcaagccctcccgtggccaaatgtgcatgcatacatgttaacaagagcttgcataactataaatagccctaatctcactccatgtttcatcgtccaataatatatatgactatgatgagagtgcggtttccgtttgttggtgttgctgggaactgttttcctggcatcggggtcaagccgtgggcctggcacagcacccggcaacagccgctggaccgtctccatgcgcctgcttgccaccattattgctggcgatggcccatggccaccaccatgctggggggtccaaagcccgtgggcctggcacagcaccggcaacagccgctggtgtctcattaaaggtgagagaggatgcagaataaccctttgctaacttgagaagcctctaacagcttccaaactctctttgagaaccaaaacggtcgcattcgtctcctccagagattcaacaaaacgctcccacaacttg

SEQ ID NO: 372 - DNA, 496 bp, Artificial
  Mutations within conglycinin beta subunit introduced by GmBCG2_T02TALE nuclease
acgcgcaaaccaaagaacagagaccgatgtaaagacaaaaacatagagtatcctttccaaaacaacgtccaagttcataaaatagagacgaaatgcaagcacagcacacataagtggatgatcaagatgggctcgtccatgccacgcacaccaacacacgtcaagcagcaagccctcccgtggccaaatgtgcatgcatacatgttaacaagagcttgcataactataaatagccctaatctcactccatgtttcatcgtccaataatatatatactatgatgagagtgcggtttcctttgttggtgttgctgggaactgttttcctggcatcagtgtctcattaaaggtgagagaggatgagaataaccctttctactttagaagctctaacagcttccaaactctctttgagaaccaaaacggtcgcattcgtctcctccagagattcaacaaacgctccccacaacttgagaaccttcgagactaccggattg

SEQ ID NO: 373 - DNA, 505 bp, Artificial
  Mutations within conglycinin beta subunit introduced by GmBCG2_T02TALE nuclease
acgcgcaaaccaaagaacagagaccgatgtaaagacaaaaacatagagtatcctttccaaaacaacgtccaagttcaaaaaattgagacgaaatgcaagcacagcacacataagtggatgatcaagatgggctcgtccatgccacgcacaccaacacacgtcaagcagcaagccctcccgtggccaaatgtgcatgcatacatgttaacaagagctagcttctcttgcataactataaatagccctaatctcactccatgtttcatcgtccaataatatatatactatgatgagagtgcggtttcctttgttggtgttgctgggaactgttttcctggcatctgtgtctcattaaaggtgagagaggatgagaataaccctttctacttgagaagctctaacagcttccaaactctctttgagaaccaaaacggtcgcattcgtctcctccagagattcaacaaacgctccccacaacttgagaaccttcgagactaccggattg

SEQ ID NO: 374 - DNA, 478 bp, Artificial
  Mutations within conglycinin beta subunit introduced by GmBCG2_T02TALE nuclease
acgcgcaaaccaaagaacagagaccgatgtaaagacaaaaacatagagtatcctttccaaaacaacgtccaagttcaaaaaattgagacgaaatgcaagcacagcacacataagtggatgatcaagatgggctcgtccatgccacgcacaccaacacacgtcaagcagcaagccctcccgtggccaaatgtgcatgcatacatggttaacaagagctagcttctcttgcataactataaatagccctaatctcactccatgtttcatcgtccaataatatatatactatgatgagagtgcggtttcctttgttggtgttgctgggaacttgttttcctggcatcagtggcgatgccaccacctgctgggggtcaagccgtgggcctggcacagcaccggcaacagccgctggaaccgtctccagcgcctgcttgtgtctcgattaaaggtgagagaggatgagaataaccctttctac

SEQ ID NO: 375 - DNA, 490 bp, Artificial
  Mutations within conglycinin beta subunit introduced by GmBCG2_T02TALE nuclease
acgcgcaaaccaaagaacagagaccgatgtaaagacaaaaacatagagtatcctttccaaaacaacgtccaagttcataaaatagagacgaaatgcaagcacagcacacataagtggatgatcaagatgggctcgtccatgccacgcacaccaacacacgtcaagcagcaagccctcccgtggccaaatgtgcatgcatacatgttaacaagagcttgcataactataaatagccctaatctcactccatgtttcatcgtccaataatatatatactatgatgagagtgcggtttcctttgttggtgttgctgggaactgttttcctggcattgtctcattaaaggtgagagaggatgagaataaccctttctactttagaagctctaacagcttccaaactctctttgagaaccaaaacggtcgcattcgtctcctccagagattcaacaaacgctccccacacttgagaacttcgagactaccggatt

SEQ ID NO: 376 - DNA, 426 bp, Artificial
  Mutations within conglycinin beta subunit introduced by GmBCG2_T02TALE nuclease
acgcgcaaaccaaagaacagagaccgatgtaaagacaaaaacatagagtatcctttccaaaacaacgtccaagttcataaaatagagacgaaatgcaagcacagcacacataagtggatgatcaagatgggctcgtccatgccacgcacaccaacacatcgtcaagcagcaagccctcccgtggccaaatgtgcatgcatacatgttaaccaagagcttgcataactataaatagccctaatctcactccatgatttcatcgtccaataatatatatactatgatgagagtgcggtttcctttgttggtgttgctgggaactgttttcctggcatttgtctcattaaaggtgagagaggatgagaataagcccttctactttagaagctctaaccagcttccaaaactctctttgagaaccaaaac

SEQ ID NO: 377 - DNA, 499 bp, Artificial
  Mutations within conglycinin beta subunit introduced by GmBCG2_T02TALE nuclease
acgcgcaaaccaaagaacagagaccgatgtaaagacaaaaacatagagtatcctttccaaaacaacgtccaagttcataaaatagagacgaaatgcaagcacagcacacataagtggatgatcaagatgggctcgtccatgccacgcacaccaacacacgtcaagcagcaagccctcccgtggccaaatgtgcatgatacatgttaacaagagcttgcataactataaatagccctaatctcactccatgatttcatcgtccaataatatataatactatgatgagagatgcggtttcctttgttggtgttgctgggaactgtttttcctggcatcatgtctcattaaaggtgagagaggatgagaataaccctttctactttagaagctctaacagcttccaaactctctttgagaaccaaaaacggtcgcattcgtctcctccagagattcaacaaacgctccccacaacttgagaaccttcgagactaccggattg

SEQ ID NO: 378 - DNA, 425 bp, Artificial
  Mutations within conglycinin beta subunit introduced by GmBCG2_T02TALE nuclease
acgcgcaaaccaaagaacagagaccgatgtaaagacaaaaacatagagtatcctttccaaaacaacgtccaagttcataaaatagagacgaaatgcaagcacagcacacataagtggatgatcaagatgggctcgtccatgccacgcacaccaacacacgtcaagcagcaagccctcccgtggccaaatgtgcatgcatacatgttaacaagagcttgcataactataaatagccctaatctcactccatgttcatcgtccaataatatatgatactatgatgagagtgcggtttcctttgttggtgttgctgggaactgttttcctgggaacagcaccggcaacagccgctggacctgtctccagcgcctgcttgccaccgccattgctggcgatggccaccacctgctggggggtcaagccgt

SEQ ID NO: 379 - DNA, 493 bp, Artificial
  Mutations within conglycinin beta subunit introduced by GmBCG2_T02TALE nuclease
  misc_feature (352): n is a or c or t or g
acgcgcaaaccaaagaacagagaccgatgtaaagacaaaaacatagagtatcctttccaaaacaacgtccaagttcataaaatagagacgaaatgcaagcacagcacacataagtggatgatcaagatgggctcgtccatgccacgcacaccaacacacgtcaagcagcaagccctcccgtggccaaatgtgcatgatacatgttaacaagagcttgcataactataaatagccctaatctcactccatgtttcatcgtccaataatatatatactatgatgagagtgcggtttcctttgttggtgttgctgggaactgttttcctggcatctgctcattaaaggtgagagnggatgagaataacccctttctacttgagaagctctaacagcttccaaactctctttgagaaccaaaacggtcgcattcgtctcctccagagattcaacaaacgctccccacaacttgagaaccttcgagactaccggattg

SEQ ID NO: 380 - DNA, 375 bp, Artificial
  Mutations within conglycinin beta subunit introduced by GmBCG2_T02TALE nuclease
acgcgcaaaccaaagaacagagaccgatgtaaagacaaaaacatagagtatcctttccaaaacaacgtccaagttcaaaaaattgagacgaaatgcaagcacagcacacataagtggatgatcaagatgggctcgtccatgccacgcacaccaacacacgtcaagcagcaagccctcccgtggccaaatgtgcatgcatacatgttaacaagagctagcttctcttgcataactataaatagccctaatctcactccatgtttcatcgtccaataatatatatactatgatgagagtgcggtttcctttgttggctgttgctggaactgttttcctggcatcagttctgcattaaaggtgagagaggatgagaat

SEQ ID NO: 381 - DNA, 583 bp, Artificial
  Mutations within conglycinin beta subunit introduced by GmBCG2_T02TALE nuclease
  misc_feature (484): n is a or c or t or g
acgcgcaaaccaaagaacagagaccgatgtaaagacaaaaacatagagtatcctttccaaaacaacgtccaagttcataaaatagagacgaaatgcaagcacagcacacataagtggatgatcaagatgggctcgtccatgccacgcacaccaacacacgtcaagcagcaagccctcccgtggccaaatgtgcatgcatacatgttaacaagagctagcttctcttgcataactataaatagccctaatctcactccatgtttcatcgtccaataatatatatactatgatgagagtgcggtttcctttgttggtgttgctgggaactgttttcctggcattcgtggctggcgatggccaccacctgctccggggtcaagccgtgggcctggcacagcaccggcaacagccgctggaccgtctccagcgcctgctctccaattaaaggtgagagggatgagaataaccctttctacttagaagnctaacagcttccaaactctcttgagaaccaaaacggtcgcattcgtctcctccagagattcaacaaacgctccccacaacttgagaaaccttcgagact

SEQ ID NO: 382 - DNA, 507 bp, Artificial
  Mutations within conglycinin beta subunit introduced by GmBCG2_T02TALE nuclease
acgcgcaaaccaaagaacagagaccgatgtaaagacaaaaacatagagtatcctttccaaaacaacgtccaagttcaaaaaattgagacgaaatgcaagcacagcacacataagtggatgatcaagatgggctcgtccatgccacgcacaccaacacacgtcaagcagcaagccctcccgtggccaaatgtgcatgcatacatgttaacaagagctagcttctcttgcataactataaatagccctaatctcactccatgtttcatcgtccaaataatatatatactatgatgagagtgcggtttcctttgttggtgttgctgggaaactgttttcctggttgtgtctcatttaaaaggtgagagaggatgagaataaaccctttctacttgagaagctctaacagcttccaaactctctttgagaaccaaaacggtcgcattcgtctcctccagagattcaacaaacgctccccacaacttgagaaccttcgagactaccggattg

SEQ ID NO: 383 - DNA, 599 bp, Artificial
  Mutations within conglycinin beta subunit introduced by GmBCG2_T02TALE nuclease
acgcgcaaaccaaagaacagagaccgatgtaaagacaaaaaacatagagtatcctttccaaaacaacgtccaagttcataaaatagagacgaaatgcaagcacagcacacataagtggatgatcaagatgggctcgtccatgccacgcacaccaacacacgtcaagcagcaagccctcccgtggccaaatgtgcatgcatacatggttaacaagagcttgcataactataaatagccctaatctcactccatgtttcatcgtccaataatatatatactatgatgagagtgcggtttcctttgttggtgttgctgggaactgttttcctggcatcccgccattgctggcgatggccaccacctgctgggggtcaagccgtggcctgcacagcaccggcaacgccgctggaccgtctccagcgcctgcttgccaccgccattgctgtctcattaaaggtgagagaggatgagaataaccctttctacttgagaagctctaacagcttccaaactctctttgagaaccaaaacggtcgcatttcgtctcctccagagattcaacaaacgctccccacaacttgagaaccttcgagactacc

SEQ ID NO: 384 - DNA, 495 bp, Artificial
  Mutations within conglycinin beta subunit introduced by GmBCG2_T02TALE nuclease
acgcgcaaaccaaagaacagagaccgatgtaaagacaaaaacatagagtatcctttccaaaacaacgtccaagttcaaaaaattgagacgaaatgcaagcacagcacacataagtggatgatcaagatgggctcgtccatgccacgcacaccaacacacgtcaagcagcaagccctcccgtggccaaatgtgcatgcatacatgttaacaagagcttgcataactataaatagccctaatctcactccatgtttcatcgtccaataatatatatactatgatgagagtgcggtttcctttgttggtgttgctgggaactgttttcctggcatgtgtctcattaaaggtgagagaggatgagaataacccctttctactttagaagctctaacagcttccaaactctctttgagaaccaaaacggtcgcattcgtctcctccagagattcaacaaacgctccccacaacttgagaaccttcgagactaccggattg

SEQ ID NO: 385 - DNA, 505 bp, Artificial
  Mutations within conglycinin beta subunit introduced by GmBCG2_T02TALE nuclease
acgcgcaaaccaaagaacagagaccgatgtaaagacaaaaacatagagtatcctttccaaaacaacgtccaagttcaaaaaattgagacgaaatgcaagcacagcacacataagtggatgatcaagatgggctcgtccatgccacgcacaccaacacacgtcaagcagcaagccctcccgtggccaaatgtgcatgcatacatgttaacaagagctagcttctcttgcataactataaatagccctaatctcactccatgtttcatcgtccaataatatataatactatgatgagagtgcggtttcctttgttggtgttgctgggaactgttttcctggcatcagtctcattaaaggtgagagaggatgagaataaccctttctacttttagaagctctaacagcttccaaactctctttgagaaccaaaacggtcgcattcgtctcctccagagattcaacaaacgctccccacaacttgagaaccttcgagactaccggattg

SEQ ID NO: 386 - DNA, 487 bp, Artificial
  Mutations within conglycinin beta subunit introduced by GmBCG2_T02TALE nuclease
  misc_feature (346); (372): n is a or c or t or g
acgcgcaaaccaaagaacagagaccgatgtaaagacaaaaacatagagtatcctttccaaaacaacgtccaagttcaaaaaattgagacgaaatgcaagcacagcacacataagtggatgatcaagatgggctcgtccatgccacgcacaccaacacacgtcaagcagcaagccctcccgtggccaaatgtgcatgcatacatgttaacaagagctagcttctcttgcactaactataaatagccctaatctcactccatgtttccatcgtccaataatatatatactatgatgagagtgcggtttcctttgttggtgttgctgggaactgttttcctggcatcgncagaggtggcgaaacccgacaggctntaaagataccaggcgttttccccccgtggaagcctcccctcgtgcgctctcctgttccgaccctgccgcttaccggtggtggccatcgcagccacgatggcggcaagcaggcgct

SEQ ID NO: 387 - DNA, 509 bp, Artificial
  Mutations within conglycinin beta subunit introduced by GmBCG2_T02TALE nuclease
acgcgcaaaccaaagaacagagaccgatgtaaagacaaaaacatagagtatcctttccaaaacaacgtccaagttcaaaaaaattgagacgaaaatgcaagcacagcacacataagtggatgatcaagatgggctcgtccatgccacgcacaccaacacacgtcaagcagcaagccctcccgtgaccaaatgtgcatgcatacatgttaacaagagctagcttctcttgcataactataaatagccctaatctcactccatgtttcatcgtccaataatatatatactatgatgagagtgcggtttcctttgttggtgttgctgggaaactgtttttcctggccatctgtctccattaaaggtgagagaggatgagaataaccctttctacttgagaagctctaacagcttccaaactctctttgagaaccaaaacggtcgcattcgtctcctccagagattcaacaaacgctccccacaacttgagaaccttcgagactaccggattg

SEQ ID NO: 388 - DNA, 510 bp, Artificial
  Mutations within conglycinin beta subunit introduced by GmBCG2_T02TALE nuclease
  misc_feature (86): n is a or c or t or g
acgcgcaaaccaaagaacagagaccgatgtaaagacaaaaacatagagtatcctttccaaaacaacgtccaagttcaaaaaattgngacgaaatgcaagcacagcacacataaagtggatgatcaagatgggctcgtccatgccacgcacaccaacacacgtcaagcagcaagccctcccgtggccaaatgtgcatgcatagcatgttaacaagagctagcttctcttgcataactataaatagccctaatctcactccatgtttcatcgtccaataatatatatacatatgatgagagtgcggtttcctttgttggtgttgctgggaaactgttttcctggccatgtgtctcattaaaggtgagagaggatgagaataaccctttctacttgagaagctgctaacagcttccaaactctctttgagaaccaaaacggtcgcattcgtctcctccagagattcaacaaatcgctccccacaacttgagaaccttcgagactaccggattg

SEQ ID NO: 389 - DNA, 495 bp, Artificial; identical to SEQ ID NO: 249
  Mutations within conglycinin beta subunit introduced by GmBCG2_T02TALE nuclease

SEQ ID NO: 390 - DNA, 669 bp, Artificial
  Mutations within conglycinin beta subunit introduced by GmBCG2_T02TALE nuclease
acgcgcaaaccaaagaacagagaccgatgtaaagacaaaaacatagagtatcctttccaaaacaacgtccaagttcataaaatagagacgaaatgcaagcacagcacacataagtggatgatcaagatgggctcgtccatgccacgcacaccaacacacgtcaagcagcaagccctcccgtggccaaatgtgcatgcatacatgttaacaagagcttgcataactataaatagccctaatctcactccatgtttcatcgtccaataatatatatactatgatgagagtgcggtttcctttgttggtgttgctgggaactgttttcctggcatcagtggccaccacctgctgagggtcaagccgtgggcctggcacagcaccggcaacagccgctggaccgtctccagcgcctgcttgccaccattattgctggcgatggcccaccacctgctgggggtcaagccgtgggcctggcacagctaccggacaacagcgctgcaccgtctccagcttgtgtctcattaaaggtgagagaggaatgagaataaccctttctactttagaagctctaacagcttccaaaactctctttgaggaaaccaaaacggtcgcattcgtctcctccagagattcaaacaaacgctcccacaacttgagaaccttcgagac

SEQ ID NO: 391 - DNA, 501 bp, Artificial
  Mutations within conglycinin beta subunit introduced by GmBCG2_T02TALE nuclease
acgcgcaaaccaaagaacagagaccgatgtaaagacaaaaacatagagtatcctttccaaaacaacgtccaagttcataaaatagagacgaaatgcaagcacagcacacataagtggatgatcaagatgggctcgtccatgccacgcacaccaacacatcgtcaagcagcaagccctcccgtggccaaatgtgcatgcatacatgttaacaagagcttgcataactataaatagccctaatctcactccatgatttcatcgtccaataatatatatactatgatgagagatgcggtttcctttgttggtgttgctgggaactgttttccctggcaatgtgtctcattaaaggtgagagaggatgagaataacccctttctactttagaagctctaacagcttccaaactctctttgagaaccaaaaacggtcgcattcgtctcctccagagattcaacaaacgctccccacaacttgagaaccttcgagactaccggattg

SEQ ID NO: 392 - DNA, 495 bp, Artificial
  Mutations within conglycinin beta subunit introduced by GmBCG2_T02TALE nuclease
acgcgcaaaccaaagaacagagaccgatgtaaagacaaaaacatagagtatcctttccaaaacaacgtccaagttcataaaatagagacgaaatgcaagcacagcacacataagtggatgatcaagatgggctcgtccatgccacgcacaccaacacacgtcaagcagcaagccctcccgtggccaaatgtgcatgcatacatgttaacaagagcttgcataactataaatagccctaatctcactccatgatttcatcgtccaataatatatatactatgatgagagtgcggtttcctttgttggtgttgctgggaactgttttcctggcagtgtctcattaaaggtgagagaggatgagaataaccctttctactttagaagctctaacagcttccaaactctctttgagaaccaaaaacggtcgcattcgtctcctccagagattcaacaaacgctccccacaacttgagaaccttcgagactaccggattg

SEQ ID NO: 393 - DNA, 498 bp, Artificial
  Mutations within conglycinin beta subunit introduced by GmBCG2_T02TALE nuclease
acgcgcaaaccaaagaacagagaccgatgtaaagacaaaaacatagagtatcctttccaaaacaacgtccaagttcataaaatagagacgaaatgcaagcacagcacacataagtggatgatcaagatgggctcgtccatgccacgcacaccaacacacgtcaagcagcaagccctcccgtggccaaatgtgcatgcatacatgttaacaagagcttgcataactataaatagccctaatctcactccatgtttcatcgtccaataatatatatactatgatgagagtgcggtttcctttgttggtgttgctgggaactgttttcctggcatctgtctcattaaaaggtgagagaggatgagaataacccctttctacttgagaagctctaacagcttccaaaactctctttgagaaccaaaaacggtcgcattcgtctcctccagagattcaacaaacgctccccacaacttgagaaccttcgagactaccggattg

SEQ ID NO: 394 - DNA, 497 bp, Artificial
  Mutations within conglycinin beta subunit introduced by GmBCG2_T02TALE nuclease
acgcgcaaaccaaagaacagagaccgatgtaaagacaaaaacatagagtatcctttccaaaacaacgtccaagttcataaaatagagacgaaatgcaagcacagcacacataagtggatgatcaagatgggctcgtccatgccacgcacaccaacacacgtcaagcagcaagccctcccgtggccaaatgtgcatgcatacatgttaacaagagcttgcataactataaatagccctaatctcactccatgatttcatcgtccaataatatatatactatgatgagagtgcggtttcctttgttggtgttgctgggaactgttttcctggcatcgtgtctcattaaaggtgagagaggatgagaataacccctttctactttagaagctctaacagcttccaaactctctttgagaaccaaaacggtcgcattcgtctcctccagagattcaacaaacgctccccacaacttgagaaccttcgagactaccggattg

SEQ ID NO: 395 - DNA, 482 bp, Artificial
  Mutations within conglycinin beta subunit introduced by GmBCG2_T02TALE nuclease
acgcgcaaaccaaagaacagagaccgatgtaaagacaaaaacatagagtatcctttccaaaacaacgtccaagttcaaaaaattgagacgaaatgcaagcacagcacacataagtggatgatcaagatgggctcgtccatgccacgcacaccaacacacgtcaagcagcaagccctcccgtggccaaatgtgcatgcatacatgttaacaagagcttgcataactataaatagccctaatctcactccatgtttcatcgtccaataatatatatactatgatgagagtgcggtttcctttgttggtgttgctgggaactgtttttgtctcattaaaggtgagagaggatgagaataaccctttctactttagaagctctaacagcttccaaactctctttgagaaccaaaaacggtcgcattcgtctcctccagagattcaacaaacgctccccacaacttgagaaccttcgagactaccgg

SEQ ID NO: 396 - DNA, 509 bp, Artificial
  Mutations within conglycinin beta subunit introduced by GmBCG2_T02TALE nuclease
acgcgcaaaccaaagaacagagaccgatgtaaagacaaaaacatagagtatcctttccaaaacaacgtccaagttcaaaaaattgagacgaaatgcaagcacagcacacataagtggatgatcaagatgggctcgtccatgccacgcacaccaacacacgtcaagcagcaagccctcccgtggccaaatgtgcatgcatacatgttaacaagagctagcttctcttgcataactataaatagccctaatctcactccatgtttcatcgtccaataatatatatactatgatgagagtgcggtttcctttgttggtgttgctgggaaactgttttcctggccatatgtgtctcattaaagggtgagagaggatgagaataaccctttctactttagaagctctaacagcttccaaactctctttgagaaccaaaaacggtcgcattcgtctcctccagagattcaacaaacgctccccacaacttgagaaccttcgagactaccggattg

SEQ ID NO: 397 - DNA, 498 bp, Artificial; identical to SEQ ID NO: 254
  Mutations within conglycinin beta subunit introduced by GmBCG2_T02TALE nuclease

SEQ ID NO: 398 - DNA, 497 bp, Artificial; identical to SEQ ID NO: 394
  Mutations within conglycinin beta subunit introduced by GmBCG2_T02TALE nuclease

SEQ ID NO: 399 - DNA, 492 bp, Artificial
  Mutations within conglycinin beta subunit introduced by GmBCG2_T02TALE nuclease
acgcgcaaaccaaagaacagagaccgatgtaaagacaaaaacatagagtatccttttccaaaacaacgtccaagtttcaaaattgaaagaacgaatgaaagtcaagccagcacacataacagtaattgatgtcaaagatgggcttcgtccatgccacgcacaccaatccatcacgtcaaggcagccaagcccctttccccgtgggcccaaatgtgcatgcataacatgttaacaagacgctagcttctcttgcataactataaatagccctaatctcacttccatgtttcatcgtccaataatatacttatacatatgatgaagagttgcggttttcctttgtttggctgttgctgggaactgtttttcctggcaacgtttctcgatttaaaagggtgagagaggattgagaataaacccttttctacttgagaagctcttaacagcttccaaactctcttttgagaaccaaaaacggtcgcattcgtctcc

SEQ ID NO: 400 - DNA, 586 bp, Artificial
  Mutations within conglycinin beta subunit introduced by GmBCG2_T02TALE nuclease
acgcgcaaaccaaagaacagagaccgatgtaaagacaaaaacatagagtatcctttccaaaacaacgtccaagttcaaaaaattgagacgaaatgcaagcacagcacacataagtggatgatcaagatgggctcgtccatgccacgcacaccaacacacgtcaagcagcaagccctcccgtggccaaatgtgcatgcatacatgttaacaagagctagcttctcttgcataactataaatagccctaatctcactccatgtttcatcgtccaataatatatatactatgatgagaagtgcggtttcctttgttggtgttgctgggaaactgttttcctggcatcagtcctagcgcctgctgccggtgctgtgccaggccccacggccttagacccccggagcaggtggctgggcccatcgcccacgccacgatggcggcaaagcaggcgctggaattgtgtctcattaaaggtgagagaggatgagaataaccctttctacttagaagcctaacagcttccaaactctctttgagaaccaaaaacggtcgcattcgtctcctccagagattcaacaaacgctcccc

SEQ ID NO: 401 - DNA, 508 bp, Artificial
  Mutations within conglycinin beta subunit introduced by GmBCG2_T02TALE nuclease
  misc_feature (348): n is a or c or t or g
acgcgcaaaccaaagaacagagaccgatgtaaagacaaaaacatagagtatcctttccaaaacaacgtccaagttcaaaaaattgagacgaaatgcaagcacagcacacataagtggatgatcaagatgggctcgtccatgccacgcacaccaacacacgtcaagcagcaagccctcccgtggccaaatgtgcatgcatacatgttaacaagagctagcttctcttgcataactataaatagccctaatctcactccatgtttcatcgtccaataatatatatactatgatgagagtgcggtttcctttgttggtgttgctgggaactgttttcctggcattacttgngattcaataaggtgagagaggatgagaataaccctttctacttgagaagctctaacagcttccaaactctctttgagaaaccaaaacggtcgcattcgtctcctccagagattcaacaaacgctccccacaacttgagaaccttcgagactaccggattg

SEQ ID NO: 402 - DNA, 504 bp, Artificial
  Mutations within conglycinin beta subunit introduced by GmBCG2_T02TALE nuclease
acgcgcaaaccaaagaacagagaccgatgtaaagacaaaaacatagagtatcctttccaaaacaacgtccaagttcaaaaaattgagacgaaatgcaagcacagcacacataagtggatgatcaagatgggctcgtccatgccacgcacaccaacacatcgtcaagcagcaagccctcccgtggccaaatgtgcatgcatacatgttaacaagagcttgcataactataaatagccctaatctcactccatgatttcatcgtccaataatatatatactatgatgagagtgcggtttcctttgttggtgttgctgggaaactgtttttccctggccatctgtctcattaaaaggtgagaggaggatgagaataaccccttttctacttgagaagctctaacagcttccaaactctctttgagaaccaaaacggtcgcattcgtctcctccagagattcaacaaacgctccccacaacttgagaaccttcgagactaccggattg

SEQ ID NO: 403 - DNA, 381 bp, Artificial
  Mutations within conglycinin beta subunit introduced by GmBCG2_T02TALE nuclease
acgcgcaaaccaaagaacagagaccgatgtaaagacaaaaacatagagtatcctttccaaaacaacgtccaagttcataaaatagagacgaaatgcaagcacagcacacataagtggatgatcaagatgggctcgtccatgccacgcacaccaacacacgtcaagcagcaagccctcccgtggccaaatgtgcatgcatacatgtttaacaagagctagcttctcttgcagtaactataaatagccctaatctcactccatgtttcatcgtccaataatatatatactatgatgagagtgcggttcctttgttggtgttgctgggaactgtttcctggcatgtctcattaaaggtgagagaggatcgtgaataaccctttc

SEQ ID NO: 404 - DNA, 503 bp, Artificial
  Mutations within conglycinin beta subunit introduced by GmBCG2_T02TALE nuclease
acgcgcaaaccaaagaacagagaccgatgtaaagacaaaaacatagagtatcctttccaaaacaacgtccaagttcataaatagagacgaaatgcaagcacagcacacataagtggatgatcaagatgggctcgtccatgccacgcacaccaacacacgtcaagcagcaagccctcccgtggccaaatgtgcatgcatacatgttaacaagagctagcttctcttgcataactataaatagccctaatctcactccatgtttcatcgtccaataatatatatactatgatgagagtgcggtttcctttgttggtgttgctgggaaactgttttcctggccatcgtctcattaaaggtgagagaggatgagaataaccctttctacttgagaagctctaacagcttccaaactctctttgagaaccaaaacggtcgcattcgtctcctccagagattcaacaaacgctccccacaacttgagaaccttcgagactaccggattg

SEQ ID NO: 405 - DNA, 495 bp, Artificial
  Mutations within conglycinin beta subunit introduced by GmBCG2_T02TALE nuclease
acgcgcaaaccaaagaacagagaccgatgtaaagacaaaaacatagagtatcctttccaaaacaacgtccaagttcataaaatagagacgaaatgcaagcacagcacacataagtggatgatcaagatgggctcgtccatgccacgcacaccaacacacgtcaagcagcaagccctcccgtggccaaatgtgcatgcatacatgttaacaagagcttgcataactataaatagccctaatctcactccatgtttcatcgtccaataatatatatactatgatgagagtgcggtttcctttgttggtgttgctgggaactgttttccctggcagtgtctcattaaaggtgagagaggatgagaataacccctttctactttagaagctctaacagcttccaaactctctttgagaaccaaaacggtcgcattcgtctcctccagagattcaacaaacgctccccacaacttgagaaccttcgagactaccggattg

SEQ ID NO: 406 - DNA, 625 bp, Artificial
  Mutations within conglycinin beta subunit introduced by GmBCG2_T02TALE nuclease
acgcgcaaaccaaagaacagagaccgatgtaaagacaaaaacatagagtatcctttccaaaacaacgtccaagttcataaaatagagacgaaatgcaagcacagcacacataagtggatgatcaagatgggctcgtccatgccacgtttcacaccaacacacgtcaagcagcaagccctcccgtggccaaatgtgcatgcatacatgttaacaagagcttgcataactataaatagccctaatctcactccatgtttcatcgtccaataatatatatactatgatgagagtgcggtttcctttgttggtgttgctgggaactgttttcctggcatcagtcagcaggtggtggccatcgccagcaatggcggcggcaggccggcgctggagagcattgttgcccagttatctcgccctgatccggcgttggccgcgttgaccaacgaccacctcgtcgccgcccagatggcagcggaactgcatcaggcgctggtagccgcagggattgagcattacgcagtggtcggccatgcgctcgcctgtgtctcattaaaggtgagagaggatgagaataaccctttctactttagaagctcaacagcttccaaaactctctttgagaacc

SEQ ID NO: 407 - DNA, 532 bp, Artificial
  Mutations within conglycinin beta subunit introduced by GmBCG2_T02TALE nuclease
acgcgcaaaccaaagaacagagaccgatgtaaagacaaaaacatagagtatccttttccaaaacaacgtccaagttcaaaaaattgagacgaaatgcaagcacagcacacataagtggatgatcaaagatgggctcgtccatgccacgcacaccaatcatcacgtcaaggcagcaagcccttcccgtggccaaatgtgcatgcatagcatgttaacaagaacgctagcttctcttgcataactataaatatgccctaaatctcactccatgtttcatcgtccaataatatactatacatatgatgaagagtgcggtttcctttgtttggctggttgctgggaaactgttttcctggccagtcaagttctcgatttaaaagggtgagagaagggatgagataaccctttctacttgagaagctctaacagcttccaaactctctttgagaaccaaaacggtcgcattcgtctcctccagagttcaacaaaacgctcccccaacaacttgagaaccttcgagactaccggattg

SEQ ID NO: 408 - DNA, 501 bp, Artificial
  Mutations within conglycinin beta subunit introduced by GmBCG2_T02TALE nuclease
  misc_feature (323); (354): n is a or c or t or g
acgcgcaaaccaaagaacagagaccgatgtaaagacaaaaacatagagtatcctttccaaaacaacgtccaagttcataaaatagagacgaaatgcaagcacagcacacataagtggatgatcaagatgggctcgtccatgccacgcacaccaacacacgtcaagcagcaagccctcccgtggccaaatgtgcatgcatacatgttaacaagagcttgcataactataaatagccctaatctcaactccatgatttcatctgtccaataatatatatactatgatgagagtgcggtttcctttgttggtgttgctgggaactnttttcctggcatcgtgtctcattaaaggtgngagaggatgagaattaaaccccttttcactttagaagctctaacagcttccaaactctctttgagaaccaaaacggtcgcattcgtctcctccagagattcaacaaacgctccccacaacttgagaaccttcgagactaccggattg

SEQ ID NO: 409 - DNA, 371 bp, Artificial
  Mutations within conglycinin beta subunit introduced by GmBCG2_T02TALE nuclease
acgcgcaaaccaaagaacagagaccgatgtaaagacaaaaacatagagtatcctttccaaaacaacgtccaagttcaaaaaattgagacgaaatgcaagcacagcacacataagtggatgatcaagatgggctcgtccatgccacgcacaccaacacacgtcaagcagcaagccctcccgtggccaaatgtgcatgcatacatgttaacaagagctagcttctcttgcataactataaatagccctaatctcactccatgtttcatcgtccaataatatatatactatgatgagagtgcggtttcctttgttggtgttgctgggaactgttttcctggcatcagttgccggtgctgtgccaggcccacggc

SEQ ID NO: 410 - DNA, 504 bp, Artificial
  Mutations within conglycinin beta subunit introduced by GmBCG2_T02TALE nuclease
acgcgcaaaccaaagaacagagaccgatgtaaagacaaaaacatagagtatcctttccaaaacaacgtccaagttcaaaaaattgagacgaaatgcaagcacagcacacataagtggatgatcaagatgggctcgtccatgccacgcacaccaacacacgtcaagcagcaagccctcccgtggccaaatgtgcatgcatacatgttaacaagagctagtcttctcttgcataactataaatagccctaatctcactccatgtttcatcgtccaataatatactatactatgatgagagtgcggtttcctttgttggtgttgctgggaactgttttcctggcatcgtctcattaaaggtgagagaggatgagaataaccctttctactttagaagctctaacagcttccaaactctctttgagaaccaaaacggtcgcattcgtctcctccagagattcaacaaacgctccccacaacttgagaaccttcgagactaccggattg

SEQ ID NO: 411 - DNA, 462 bp, Artificial
  Mutations within conglycinin beta subunit introduced by GmBCG2_T02TALE nuclease
acgcgcaaaccaaagaacagagaccgatgtaaagacaaaaacatagagtatcctttccaaaacaacgtccaagttcaaaaaattgagacgaaatgcaagcacagcacacataagtggatgatcaagatgatgctcgtcatgccacgcacaccaacacacgtcaagcagcaagccctcccgtggccaaatgtgcatgcatacatgttaacaagagctagcttctcttgcataactataaatagccctaatctcactccatgtttcatcgtccaataatatatatactatgatgagagtgcggtttcctttgttggtgttgctgggaaactgttttcctggcatcagtctcattaaaggtgagagaggatgagaataaccctttctacttgagaagctctaacagcttccaaactctctttgagaaccaaaaacggtcgcattcgtctcctccagagattcaac

SEQ ID NO: 412 - DNA, 496 bp, Artificial
  Mutations within conglycinin beta subunit introduced by GmBCG2_T02TALE nuclease
acgcgcaaaccaaagaacagagaccgatgtaaagacaaaaacatagagtatcctttccaaaacaacgtccaagttcaaaaaattgagacgaaatgcaagcacagcacacataagtggatgatcaagatgggctcgtccatgccacgcacaccaacacacgtcaagcagcaagccctcccgtggccaaatgtgcatgcatacatgttaacaagagcttgcataactataaatagccctaatctcactccatgtttcatcgtccaataatatatatactatgatgagagtgcggtttcctttgttggtgttgctgggaactgttttccctggcatgtgtctcaattaaaggtgagagaggatgagaataaccctttctactttagaagctctaacagcttccaaactctctttgagaaccaaaacggtcgcattcgtctcctccagagattcaacaaacgctccccacaacttgagaaccttcgagactaccggattg

SEQ ID NO: 413 - DNA, 506 bp, Artificial
  Mutations within conglycinin beta subunit introduced by GmBCG2_T02TALE nuclease
acgcgcaaaccaaagaacagagaccgatgtaaagacaaaaacatagagtatcctttccaaaacaacgtccaagttcaaaaaattgagacgaaatgcaagcacagcacacataagtggatgatcaaagatgggctcgtccatgccacgcacaccaacacacgtcaaggcagcaagcccttcccgtggccaaatgtgcatgcatacatgttaacaagagctagcttctcttgcataaactataaatagccctaatctcactccatgtttcatcgtccaataatatatatactatgatgagagtgcggtttcctttgttggtgttgctgggaactgttttcctggcatgtgtctcattaaaggtgagagaggatgagaataaccctttctacttgagaagctctaacagcttccaaactctctttgagaaccaaaacggtcgcattcgtctcctccagagttcaacaaacgctccccacaacttgagaaccttcgagactaccggattg

SEQ ID NO: 414 - DNA, 504 bp, Artificial
  Mutations within conglycinin beta subunit introduced by GmBCG2_T02TALE nuclease
acgcgcaaaccaaagaacagagaccgatgtaaagacaaaaacatagagtatcctttccaaaacaacgtccaagttcaaaaaattgagacgaaatgcaagcacagcacacataagtggatgatcaagatgggctcgtccatgccacgcacaccaacacacgtcaagcagcaagccctcccgtggccaaatgtgcatgcatacatgttaacaagagctagcttctcttgcataactataaatagccctaatctcactccatgtttcatcgtccaataatatatatactatgatgagagtgcggtttcctttgttggtgttgctgggaactgttttcctggcatagtgtctcattaaaggtgagagaggatgagaataaccctttctactttagaagctctaacagcttccaaactctctttgagaaccaaaacggtcgcattcgtctcctccagagattcaacaaacgctccccacaacttgagaaccttcgagactaccggattg

SEQ ID NO: 415 - DNA, 497 bp, Artificial
  Mutations within conglycinin beta subunit introduced by GmBCG2_T02TALE nuclease
acgcgcaaaccaaagaacagagaccgatgtaaagacaaaaacatagagtatcctttccaaaacaacgtccaagttcataaaatagagacgaaatgcaagcacagcacacataagtggatgatcaagatgggctcgtccatgccacgcacaccaacacacgtcaagcagcaagccctcccgtggccaaatgtgcatgcatacatgttaacaagagcttgcataactataaatagccctaatctcactccatgtttcatcgtccaataatatatatactatgatgagagtgcggtttcctttgttggtgttgctgggaactgttttcctggcatctgttgtctcattaaaggtgagagaggatgagaataacccctttctactttagaagctctaacagcttccaaactctctttgagaacaaaacggtcgcattcgtctcctccagagattcaacaaacgctccccacaacttgagaaccttcgagactaccggattg

SEQ ID NO: 416 - DNA, 497 bp, Artificial
  Mutations within conglycinin beta subunit introduced by GmBCG2_T02TALE nuclease
acgcgcaaaccaaagaacagagaccgatgtaaagacaaaaacatagagtatcctttccaaaacaacgtccaagttcataaaatagagacgaaatgcaagcacagcacacataagtggatgatcaagatgggctcgtccatgccacgcacaccaacacacgtcaagcagcaagccctcccgtggccaaatgtgcatgcatacatgttaacaagagcttgcataactataaatagccctaatctcactccatcgattctatcgtccaataatatatatactatgatgagagtgcggtttcctttgttggtgttgctgggaactgttttcctggcatgtgtctcattaaaggtgagagaggatgagaataacccctttctactttggaagctctaacagcttccaaactctctttgagaaccaaaacggtcgcattcgtctcctccagagattcaacaaacgctccccacaacttgagaaccttcgagactaccggattg

SEQ ID NO: 417 - DNA, 507 bp, Artificial
  Mutations within conglycinin beta subunit introduced by GmBCG2_T02TALE nuclease
acgcgcaaaccaaagaacagagaccgatgtaaagacaaaaaacatagagtatcctttccaaaacaacgtccaagttcaaaaaattgagacgaaatgcaagcacagcacacataagtggatgatcaagatgggctcgtccatgccacgcacaccaacacacgtcaagcagcaagccctcccgtggccaaatgtgcatgcatacatgttaacaagagctagcttctcttgcataactataaatagccctaatctcactccatgtttcatcgtccaataatatactaatactatgatgagagtgcggtttcctttgttggtgttgctgggaactgttttcctggcaagtgtctcatttaaaggtgagagaggatgagaataaccctttctactttagaagctctaacagcttccaaactctctttgagaaccaaaacggtcgcattcgtctcctccagagattcaacaaacgctccccacaacttgagaaccttcgagactaccggattg

SEQ ID NO: 418 - DNA, 505 bp, Artificial
  Mutations within conglycinin beta subunit introduced by GmBCG2_T02TALE nuclease
acgcgcaaaccaaagaacagagaccgatgtaaagacaaaaacatagagtatcctttccaaaacaacgtccaagttcaaaaaattgagacgaaatgcaagcacagcacacataagtggatgatcaagatgggctcgtccatgccacgcacaccaacacacgtcaagcagcaagccctcccgtggccaaatgtgcatgcatacatgttaacaagagctagcttctcttgcataactataaatagccctaatctcactccatgtttcatcgtccaataatatatatactatgatgagagtgcggtttcctttgttggtgttgctgggaactgttttcctggcatttgtgtctcattaaaggtgagagaggatgagaataaccctttctactttagaagctctaacagcttccaaactctctttgagaaccaaaacggtcgcattcgtctcctccagagattcaacaaacgctccccacaacttgagaaccttcgagactaccggattg

SEQ ID NO: 419 - DNA, 495 bp, Artificial
  Mutations within conglycinin beta subunit introduced by GmBCG2_T02TALE nuclease
acgcgcaaaccaaagaacagagaccgatgtaaagacaaaaacatagagtatcctttccaaaacaacgtccaagttcataaaatagagacgaaatgcaagcacagcacacataagtggatgatcaagatgggctcgtccatgccacgcacaccaacacacgtcaagcagcaagccctcccgtggccaaatgtgcatgcatacatgttaacaagagcttgcataactataaatagccctaatctcactccatgtttcatcgtccaataatatatatactatgatgagagtgcggtttcctttgttggtgttgctgggaactgttttcctggcatcagttgtctaatgagtgagagaggatgagaataacccctttctacttgagaagctctaacagcttccaaactctctttgagaaccaaaacggtcgcattcgtctcctccagagattcaacaaacgctccccacaacttgagaaccttcgagactaccggattg

SEQ ID NO: 420 - DNA, 504 bp, Artificial
  Mutations within conglycinin beta subunit introduced by GmBCG2_T02TALE nuclease
acgcgcaaaccaaagaacagagaccgatgtaaagacaaaaacatagagtatcctttccaaaacaacgtccaagttcaaaaaattgagacgaaatgcaagcacagcacacataagtggatgatcaagatgggctcgtccatgccacgcacaccaacacacgtcaagcagcaagccctcccgtggccaaatgtgcatgcatacatgttaacaagagctagcttctcttgcataactataaatagccctaatctcactccatgtttcatcgtccaataatatactatacatatgatgagagtgcggtttccttgttggtgttgctgggaactgtttcctggccatcagtctcattaaaggtgagagaggatgagaataaccctttctacttgagaagctctaacagcttccaaactctctttgagaaccaaaacggtcgcattcgtctcctccagagattcaacaaacgctccccacaacttgagaaccttcgagactaccggattg

SEQ ID NO: 421 - DNA, 589 bp, Artificial
  Mutations within conglycinin beta subunit introduced by GmBCG2_T02TALE nuclease
acgcgcaaaccaaagaacagagaccgatgtaaagacaaaaacatagagtatcctttccaaaacaacgtccaagttcaaaaaattgagacgaaatgcaagcacagcacacataagtggatgatcaagatgggctcgtccatgccacgcacaccaacacacgtcaagcagcaagccctcccgtggccaaatgtgcatgcatacatgttaacaagagcttgcataacctataaatagccctaatctcactccatgtttcatcgtccaataatatatatactatgatgagagtgcggtttccttgttggtgttgctgggaactgttttcctggcatcagttttgccggtgctgtgccaggccccacggcttgaccccccagcaggtggtggccatcgccagcaatggcggtggcaagcaggcgctggagacggtccagcggctgttgccggtgctgtgccaaggcccaacggcttgagtgtctcattaaaggtgagagaggatgagaataaccctttctacttgagaagctctaacagcttccaaactctctttgagaaccaaaacggtcgcattcgtctcctccagagattc

SEQ ID NO: 422 - DNA, 484 bp, Artificial
  Mutations within conglycinin beta subunit introduced by GmBCG2_T02TALE nuclease
acgcgcaaaccaaagaacagagaccgatgtaaagacaaaaacatagagtatcctttccaaaacaacgtccaagttcataaaatagagacgaaatgcaagcacagcacacataagtggatgatcaagatgggctcgtccatgccacgcacaccaacacacgtcaagcagcaagccctcccgtggccaaatgtgcatgcatacatgttaacaagagcttgcataactataaatagccctaatctcactccatgtttcatcgtccaataatatatatactatgatgagagtgcggtttcctttgttggtgttgctgggaactgttttcctggcactcattaaaggtgagagaggatgagaataaccctttctacttgagaagctctaacagcttccaaaactctctttgagaaccaaaacggtcgcattcgtctcctccagagattcaacaaacgctccccacaacttgagaaccttcgagactacc

SEQ ID NO: 423 - DNA, 500 bp, Artificial
  Mutations within conglycinin beta subunit introduced by GmBCG2_T02TALE nuclease
acgcgcaaaccaaagaacagagaccgatgtaaagacaaaaacatagagtatcctttccaaaacaacgtccaagttcataaaatagagacgaaatgcaagcacagcacacataagtggatgatcaagatgggctcgtccatgccacgcacaccaacacacgtcaagcagcaagccctcccgtggccaaatgtgcatgcatacatgttaacaagagcttgcataactataaatagccctaatctcactccatgtttcatcgtccaataatatatatactatgatgagagtgcggtttcctttgttggtgttgctgggaactgttttccctggcatcagttgtctcattaaaggtgagagaggatgagaataacccctttctactttagaagctctaacagcttccaaactctctttgagaaccaaaaacggtcgcattcgtctcctccagagattcaacaaacgctccccacaacttgagaaccttcgagactaccggattg

SEQ ID NO: 424 - DNA, 500 bp, Artificial
  Mutations within conglycinin beta subunit introduced by GmBCG2_T02TALE nuclease
  misc_feature (354); (378); (379): n is a or c or t or g
acgcgcaaaccaaagaacagagaccgatgtaaagacaaaaacatagagtatcctttccaaaacaacgtccaagttcataaaatagagacgaaatgcaagcacagcacacataagtggatgatcaagatgggctcgtccatgccacgcacaccaacacatcgtcaagcagcaagccctcccgtggccaaatgtgcatgatacatgttaacaagagcttgcataactataaatagccctaatctcactccatgtttcatcgtccaataatatatatactatgatgagagtgcggtttcctttgttggtgttgctgggaactgttttccggccatcagtctcaatttaaaagggtgnagagggatgagaataacccctttnnacttgagaagctctaacagcttccaaactctctttgagaaaccaaaacggtcgcattcgtctcctccagagattcaacaaacgctccccacaacttgagaaccttcgagactaccggattg

SEQ ID NO: 425 - DNA, 607 bp, Artificial
  Mutations within conglycinin beta subunit introduced by GmBCG2_T02TALE nuclease
  misc_feature (77): n is a or c or t or g
acgcgcaaaccaaagaacagagaccgatgtaaagacaaaaacatagagtatcctttccaaaacaacgtccaagttcntaaaatagagacgaaatgcaagcacagcacacataagtggatgatcaagatgggctcgtccatgccacgcacaccaacacacgtcaagcagcaagccctcccgtggccaaatgtgcatgcatacatgttaacaagagcttgcataactataaatagccctaatctcactccatgtttcatcgtccaataatatatatactatgatgagagtgcggtttcctttgttggtgttgctgggaactgttttcctggcatttgcggctgttgccggtgctgtgccaggccccacggcttgaccccggagcaggtggtggccatcgccagccacgatggcggcaagcaggcgctggagacggtccaggcgctgttgccggtgctgtgccaggccctctcattaaaggtgagagaggatgagaaataaccctttctactttagaagctctaacagcttccaaactctctttgagaaccaaaacggtcgcattcgtctcctccagagattcaacaaacgctccccacaacttgagaaa

SEQ ID NO: 426 - DNA, 502 bp, Artificial
  Mutations within conglycinin beta subunit introduced by GmBCG2_T02TALE nuclease
acgcgcaaaccaaagaacagagaccgatgtaaagacaaaaacatagagtatcctttccaaaacaacgtccaagttcataaaattgagacgaaaatgcaagcacagcacacataagtggatgatcaagatgggctcgtccatgccacgcacaccaacacacgtcaagcagcaagccctcccgtggccaaatgtgcatgcatacatgttaacaagagctagcttctcttgcataactataaatagccctaatctcactccatgtttcatcgtccaataatatatatactatgatgagagtgcggtttcctttgttggtgttgctgggaactgttttcctggcatctcattaaaggtgagagaggatgagaataacccctttctactttagaagctctaacagcttccaaactctctttgagaaccaaaaacggtcgcattcgtctcctccagagattcaacaaacgctccccacaacttgagaaccttcgagactaccggattg

SEQ ID NO: 427 - DNA, 502 bp, Artificial
  Mutations within conglycinin beta subunit introduced by GmBCG2_T02TALE nuclease
  misc_feature (342): n is a or c or t or g
acgcgcaaaccaaagaacagagaccgatgtaaagacaaaaacatagagtatcctttccaaaacaacgtccaagttcaaaaaattgagacgaaatgcaagcacagcacacataagtggatgatcaagatgggctcgtccatgccacgcacaccaacacacgtcaagcagcaagccctcccgtggccaaatgtgcatgcatacatgttaacaagagctagcttctcttgcataactataaatagccctaatctcactccatgtttcatcgtccaataatatatatactatgatgagagtgcggtttcctttgttggtgttgctgggaactgttttcctggctgngtctcattaaaggtgagagaggatgagaataaccctttctacttgagaagctctaacagcttccaaactctctttgagaaccaaaacggtcgcattcgtctcctccagagattcaacaaacgctccccacaacttgagaaccttcgagactaccggattg

SEQ ID NO: 428 - DNA, 490 bp, Artificial
  Mutations within conglycinin beta subunit introduced by GmBCG2_T02TALE nuclease
acgcgcaaaccaaagaacagagaccgatgtaaagacaaaaacatagagtatcctttccaaaacaacgtccaagttcataaaatagagacgaaatgcaagcacagcacacataagtggatgatcaagatgggctcgtccatgccacgcacaccaacacacgtcaagcagcaagccctcccgtggccaaatgtgcatgcatacatgttaacaagagcttgcataactataaatagccctaatctcactccatgtttcatcgtccaataatatatatactatgatgagagtgcggtttcctttgttggtgttgctgggaactgttttcctggcatctcattaaaggtgagagaggatgagaataaccctttctactttagaagctctaacagcttccaaaactctctttgagaaccaaaacggtcgcattcgtctcctccagagattcaacaaacgctccccacaacttgagaacttcgagactaccggattg

SEQ ID NO: 429 - DNA, 493 bp, Artificial
  Mutations within conglycinin beta subunit introduced by GmBCG2_T02TALE nuclease
  misc_feature (128): n is a or c or t or g
acgcgcaaaccaaagaacagagaccgatgtaaagacaaaaacatagagtatcctttccaaaacaacgtccaagttcaaaaaattgagacgaaatgcaagcacagcacacataagtggatgatcaagangggctcgtccatgccacgcacaccaacacacgtcaagcagcaagccctcccgtggccaaatgtgcatgcatacatgttaacaagagctagcttctcttgcataactataaatagccctaatctcactccatgtttcatcgtccaataatatatatactatgatgagagtgcggtttcctttgttggtgttgctgggaactgttttcctggcaaaggtgagagaggatgagaataaccctttctacttgagaagctctaacagcttccaaaactctctttgagaaccaaaaacggtcgcattcgtctcctccagagattcaacaaacgctccccacaacttgagaaccttcgagactaccggattg

SEQ ID NO: 430 - DNA, 497 bp, Artificial
  Mutations within conglycinin beta subunit introduced by GmBCG2_T02TALE nuclease
  misc_feature (338): n is a or c or t or g
acgcgcaaaccaaagaacagagaccgatgtaaagacaaaaacatagagtatcctttccaaaacaacgtccaagttcataaaatagagacgaaatgcaagcacagcacacataagtggatgatcaagatgggctcgtccatgccacgcacaccaacacacgtcaagcagcaagccctcccgtggccaaatgtgcatgcatacatgttaacaagagcttgcataactataaatagccctaatctcactccatgtttcatcgtccaataatatatatactatgatgagagtgcggtttcctttgttggtgttgctgggaactgttttcctggcatcagttntcataatgagtgagagaggatgagaataacccctttctacttgagaagctctaacagcttccaaaactctctttgagaaccaaaacggtcgcattcgtctcctccagagattcaacaaacgctccccacaacttgagaaccttcgagactaccggattg

SEQ ID NO: 431 - DNA, 463 bp, Artificial
  Mutations within conglycinin beta subunit introduced by GmBCG2_T02TALE nuclease
acgcgcaaaccaaagaacagagaccgatgtaaagacaaaaacatagagtatcctttccaaaacaacgtccaagttcaaaaaattgagacgaaatgcaagcacagcacacataagtggatgatcaagatgggctcgtccagcacgcacaccaaccaacacgtcaagcagcaagccacagcctccccgtggccaaatgtgcatgcatacatgttaacaagagctagcttctcttgcataactataaatagccctaatctcactccatgtttcatcgtccaataatatatatactatgatgagagtgcggtttcctttgttggtgttgctgggaaactgttttcctggcatcagtcgccagctggcgtaatagcgaagaggccccgcaccgatcgcccttcccaacagttgcgcagcctgaatggcgaatggcgcctgatgcgttgtgtctcattaaaggtgagag

SEQ ID NO: 432 - DNA, 541 bp, Artificial
  Mutations within conglycinin beta subunit introduced by GmBCG2_T02TALE nuclease
acgcgcaaaccaaagaacagagaccgatgtaaagacaaaaaacatagagtatcctttccaaaacaacgtccaagttcataaaatagagacgaaatgcaagcacagcacacataagtggatgatcaagatgggctcgtccatgccacgcacaccaacacatcgtcaagcagcaagccctcccgtggccaaatgtgcatgcatacatgttaacaagagcttgcataactataaatagccctaatctcactccatgtttcatcgtccaataatatatatactatgatgagagtgcggtttcctttgttggtgttgctgggaactgttttcctggcattctggatcgcgcgcccagcgctccctgcaggcttacgcctgtgcttctgttggatcgcgcactgggcgcgtagccagtttgtgtcgtcattaaaggtgagagaggatgagaataaccctttctactttagaagctctaacagcttccaaactctctttgagaaccaaaacggtcgcattcgtctcctccagagattcaacaaacgct

SEQ ID NO: 433 - DNA, 460 bp, Artificial
  Mutations within conglycinin beta subunit introduced by GmBCG2_T02TALE nuclease
acgcgcaaaccaaagaacagagaccgatgtaaagacaaaaacatagagtatcctttccaaaacaacgtccaagttcaaaaaattgagacgaaatgcaagcacagcacacataagtggatgatcaagatgggctcgtccatgccacgcacaccaacacacgtcaagcagcaagccctcccgtggccaaatgtgcatgcatacatgttaacaagagctagcttctcttgcataactataaatagccctaatctcactccatgtttcatcgtccaataatatatatactatgatgagagtgcggtttcctttgttggtgttgctgggaactgttttcctgggtgtctcattaaaggtgagagaggatgagaataacccctttctactttagaagctctaacagcttccaaaactctctttgagaaccaaaaacggtcgcattcgtctcctccagagattcaac

SEQ ID NO: 434 - DNA, 532 bp, Artificial
  Mutations within conglycinin beta subunit introduced by GmBCG2_T02TALE nuclease
  misc_feature (103): n is a or c or t or g
acgcgcaaaccaaagaacagagaccgatgtaaagacaaaaaacatagagtatcctttccaaaaacaacgtccaagttcataaaatagagacgaaatgcaagcncagcacacataagtggatgatcaagatgggctcgtccatgccacgcacaccaacacatcgtcaagcagcaagccctcccgtggccaaatgtgcatgatacatgttaacaagagcttgcataactataaatagccctaatctcactccatgtttcatcgtccaataatatatatactatgatcgagagtgccggtttccctttgttggtgttgcttggggaaactgtttttttccctgggaccaatcggtgttcctccaattttaaaaggttgagaggaggatgagaaataaccccttttctacttgagaaaggctctaacagcttcccaaaactctcttttgagaaaccaaaaacggtcgcaattcgtctcctccagagattcaacaaacgctccccacaacttgagaaccttcgagactaccggattg

SEQ ID NO: 435 - DNA, 380 bp, Artificial
  Mutations within conglycinin beta subunit introduced by GmBCG2_T02TALE nuclease
acgcgcaaaccaaagaacagagaccgatgtaaagacaaaaacatagagtatcctttccaaaacaacgtccaagttcaaaaaaattgagacgaaaatgcaagcacagcacacataagtggatgatcaagatgggctcgtccatgccacgcacaccaacacacgtcaagcagcaagccctcccgtggccaaatgtgcatgcatacatgttaacaagagcttgcaataactataaatagccctaatctcactccatgattcatcgtccaataatatatatactatgatgagagtgcggtttcctttgttggtgttgctgggaactgtttttccctggcatctcattaaaaggtgagagaggatgagaaataacccctttctac

SEQ ID NO: 436 - DNA, 604 bp, Artificial
  Mutations within conglycinin beta subunit introduced by GmBCG2_T02TALE nuclease
acgcgcaaaccaaagaacagagaccgatgtaaagacaaaaacatagagtatcctttccaaaacaacgtccaagttcataaaatagagacgaaatgcaagcacagcacacataagtggatgatcaagatgggctcgtccatgccacgcacaccaacacacgtcaagcagcaagccctcccgtggccaaatgtgcatgcatacatgttaacaagagcttgcataactataaatagccctaatctcactccatgtttcatcgtccaataatatatatactatgatgagagtgcggtttcctttgttggtgttgctgggaactgttttcctggcatttgcggctgttgccggtgctgtgccaggcccacggcttgaccccggagcaggtggtggccatcgccagccacgatggcggcaagcaggcgctggagacggtccaggcgctgttgccggtgctgtgccaggccctctcattaaggtgagagaggatgagaataaccctttgctactttagaagctctaacagcttccaaactctcttgagaaccaaaacggtcgcattcgtctcctccagagattcaactaaacgctccccacaacttgagaa

SEQ ID NO: 437 - DNA, 513 bp, Artificial
  Mutations within conglycinin beta subunit introduced by GmBCG2_T02TALE nuclease
acgcgcaaaccaaagaacagagaccgatgtaaagacaaaaacatagagtatcctttccaaaacaacgtccaagttcataaaatagagacgaaatgcaagcacagcacacataagtggatgatcaagatgggctcgtccatgccacgcacaccaacacacgtcaagcagcaagccctcccgtggccaaatgtgcatgcatacatgttaacaagagcttgcataactataaatagccctaatctcactccatgtttcatcgtccaataatatatatactatgatgagagtgcggtttcctttgttggtgttgctgggaactgttttcctggcatcccaatacgcaaaccgcctctccccgcgcgttggccgattcattaatgcagcctggcacgacaggtttcccgactggaaagcgggcagtttagtggtctcattaaggtgagagaggatgagaataaccctttctactttagaagctctaacagcttccaaactctctttgagaaccaaaac

SEQ ID NO: 438 - DNA, 461 bp, Artificial
  Mutations within conglycinin beta subunit introduced by GmBCG2_T02TALE nuclease
acgcgcaaaccaaagaacagagaccgatgtaaagacaaaaacatagagtatcctttccaaaacaacgtccaagttcaaaaaattgagacgaaatgcaagcacagcacacataagtggatgatcaagatgggctcgtccatgccacgcacaccaacacacgtcaagcagcaagccctcccgtggccaaatgtgcatgcatacatgttaacaagagctagcttctcttgcataactataaatagccctaatctcactccatgtttcatcgtccaataatatatatacatatgatgagagtgcggtttcctttgttggtgttgctgggaactgttttcctggcatcagtgtctcattaaaggtgagagaggatgagaataaccctttctacttgagaagctctaacagcttccaaactctctttgagaaccaaaaacggtcgcattcgtctcctccagagattc

SEQ ID NO: 439 - DNA, 492 bp, Artificial
  Mutations within conglycinin beta subunit introduced by GmBCG2_T02TALE nuclease
acgcgcaaaccaaagaacagagaccgatgtaaagacaaaaacatagagtatccttttccaaaacaacgtccaagttcaaaaaattgagacgaaatgcaagcacagcacacataagtggatgatcaagatggggctcgtccatggccatccgcatcaccaacacatcgtcaagcagcaagccctcccgtggccaaatgtgcatgcatacatgtaaccaagatgcttgaataactataaatagccctaaatctcaactccatgatttcatctgtcccaataattatcatataccaatatgatgaagagatgcggtttcctttgttagggatttgcctggggaaccttaggtttttccctgggctatgcctcatttaaaggttgcaaggagaggatgaggaaataagcccttctactttagaagctctaacagcttcccaaaactctctttgagaacccaaaaacggtcgcattcgtctcctccagagattcaac

SEQ ID NO: 440 - DNA, 471 bp, Artificial
  Mutations within conglycinin beta subunit introduced by GmBCG2_T02TALE nuclease
  misc_feature (77): n is a or c or t or g
acgcgcaaaccaaagaacagagaccgatgtaaagacaaaaacatagagtatcctttccaaaacaacgtccaagttcntaaaatagagacgaaatgcaagcacagcacacataagtggatgatcaagatgggctcgtccatgccacgcacaccaacacacgtcaagcagcaagccctcccgtggccaaatgtgcatgcatacatgttaacaagagcttgcataactataaatagccctaatctcactccatgtttcatgcgtccaataatatatatactatgatgagagtgcggtttcctttgttggtgttgctgggaactgttttcctggcatcagtggggccctggcacagcaccggcaacagccgctggaccgtctccagcgcctgcttgccaccattattgctggcgatggccaccacctgctggggggtcaagccgtgggcctggcacagcaccggcaacaggcgct

SEQ ID NO: 441 - DNA, 504 bp, Artificial
  Mutations within conglycinin beta subunit introduced by GmBCG2_T02TALE nuclease
  misc_feature (343): n is a or c or t or g
acgcgcaaaccaaagaacagagaccgatgtaaagacaaaaacatagagtatcctttccaaaacaacgtccaagttcaaaaaattgagacgaaatgcaagcacagcacacataagtggatgatcaagatgggctcgtccatgccacgcacaccaacacacgtcaagcagcaagccctcccgtggccaaatgtgcatgcatagcatgttaacaagagctagcttctcttgcataactataaatagccctaatctcactccatgttcatcgtccaataatatatatactatgatgagagtgcggtttcctttgttggtgttgctgggaaactgttttcctggcatngttgtgcattaaaggtgagagaggatgagaataaccctttctactgagaagctctaacagcttccaaactctctttgagaaccaaaacggtcgcattcgtctcctccagagattcaacaaacgctccccacaacttgagaaccttcgagactaccggattg

SEQ ID NO: 442 - DNA, 500 bp, Artificial
  Mutations within conglycinin beta subunit introduced by GmBCG2_T02TALE nuclease
  misc_feature (354): n is a or c or t or g
acgcgcaaaccaaagaacagagaccgatgtaaagacaaaaacatagagtatcctttccaaaacaacgtccaagttcataaaatagagacgaaatgcaagcacagcacacataagtggatgatcaagatgggctcgtccatgccacgcacaccaacacacgtcaagcagcaagccctcccgtggccaaatgtgcatgcatacatgttaacaagagcttgcataactataaatagccctaatctcactccatgtttcatcgtccaataatatatatactatgatgagagtgcggtttcctttgttggtgttgctgggaactgttttccggcatctgctcaattaaaaggtgagagnggatgagaaataacccctttctacttgagaaagctctaacagcttccaaaactctctttgagaaaccaaaaacggtcgcattcgtctcctccagagattcaacaaacgctccccacaacttgagaaccttcgagactaccggattg

SEQ ID NO: 443 - DNA, 506 bp, Artificial
  Mutations within conglycinin beta subunit introduced by GmBCG2_T02TALE nuclease
acgcgcaaaccaaagaacagagaccgatgtaaagacaaaaacatagagtatcctttccaaaacaacgtccaagttcaaaaaattgagacgaaatgcaagcacagcacacataagtggatgatcaagatgggctcgtccatgccacgcacaccaacacacgtcaagcagcaagccctcccgtggccaaatgtgcatgcatacatgtttaacaagagctagcttctcttgcataactataaatagccctaatctcactccatgtttcatcgtccaataatatatatactatgatgagagtgcggtttcctttgttggtgttgctgggaactgttttcctggcatctgtgtctcattaaaggtgagagaggatgagaataaccctttctacttgagaagctctaacagcttccaaactctctttgagaaccaaaacggtcgcattcgtctcctccagagattcaacaaacgctccccacaacttgagaaccttcgagactaccggattg

SEQ ID NO: 444 - DNA, 498 bp, Artificial
  Mutations within conglycinin beta subunit introduced by GmBCG2_T02TALE nuclease
  misc_feature (336): n is a or c or t or g
acgcgcaaaccaaagaacagagaccgatgtaaagacaaaaacatagagtatcctttccaaaacaacgtccaagttcataaaatagagacgaaatgcaagcacagcacacataagtggatgatcaagatgggctcgtccatgccacgcacaccaacacacgtcaagcagcaagccctcccgtggccaaatgtgcatgcatacatgttaacaagagcttgcataactataaatagccctaatctcactcatgtttcatcgtccaataatatatatactatgatgagagtgcggtttcctttgttggtgttgctgggaactgttttcctggccatcagngtctcattaaaggtgagagaggatgagaataacccctttctacttgagaagctctaacagcttccaaactctctttgagaaccaaaacggtcgcattcgtctcctccagagattcaacaaacgctcccccacaacttgagaaccttcgagactaccggattg

SEQ ID NO: 445 - DNA, 396 bp, Artificial
  Mutations within conglycinin beta subunit introduced by GmBCG2_T02TALE nuclease
acgcgcaaaccaaagaacagagaccgatgtaaagacaaaaacatagagtatcctttccaaaacaacgtccaagttcataaaatagagacgaaatgcaagcacagcacacataagtggatgatcaagatgggctcgtccatgccacgcacaccaacacacgtcaagcagcaagccctcccgtggccaaatgtgcatgcatacatgttaacaagagcttgcataactataaatagccctaatctcactccatgtttcatcgtccaataatatatatactatgatgagagtgcggtttcctttgttggtgttgctgggaactgttttccggcagtgtctcaattaaaggtgagagaaggatgagaataaccctttctactttagaagctctaacagctt

SEQ ID NO: 446 - DNA, 496 bp, Artificial
  Mutations within conglycinin beta subunit introduced by GmBCG2_T02TALE nuclease
acgcgcaaaccaaagaacagagaccgatgtaaagacaaaaacatagagtatcctttccaaaacaacgtccaagttcataaaatagagacgaaatgcaagcacagcacacataagtggatgatcaagatgggctcgtccatgccacgcacaccaacacacgtcaagcagcaagccctcccgtggccaaatgtgcatgcatacatgttaacaagagcttgcataactataaatagccctaatctcactccatgtttcatcgtccaataatatatatactatgatgagagtgcggtttcctttgttggtgttgctgggaactgttttcctggcatttgtgctcattaaaggtgagagaggatgagaataacccctttctacttgagaagctctaacagcttccaaactctctttgagaaccaaaacggtcgcattcgtctcctccagagattcaacaaacgctccccacaacttgagaaccttcgagactaccggattg

SEQ ID NO: 447 - DNA, 493 bp, Artificial
  Mutations within conglycinin beta subunit introduced by GmBCG2_T02TALE nuclease
acgcgcaaaccaaagaacagagaccgatgtaaagacaaaaacatagagtatcctttccaaaacaacgtccaagttcataaaatagagacgaaatgcaagcacagcacacataagtggatgatcaagatgggctcgtccatgccacgcacaccaacacacgtcaagcagcaagccctcccgtggccaaatgtgcatgcatacatgttaacaagagcttgcataactataaatagccctaatctcactccatgatttcatcgtccaataatatatatactatgatgagagatgcggtttcctttcgttggtgttgctgggaactgttttcctggcattgtgctcattaaaggtgagagaggatgagaataacccctttctactttagaagctctaacagcttccaaactctctttgagaaccaaaacggtcgcattcgtctcctccagagattcaacaaacgctcccccacaacttgagaaccttcgagactacc

SEQ ID NO: 448 - DNA, 508 bp, Artificial
  Mutations within conglycinin beta subunit introduced by GmBCG2_T02TALE nuclease
acgcgcaaaccaaagaacagagaccgatgtaaagacaaaaacatagagtatcctttccaaaacaacgtccaagttcaaaaaattgagacgaaatgcaagcacagcacacataagtggatgatcaagatgggctcgtccatgccacgcacaccaacacacgtcaagcagcaagccctcccgtggccaaatgtgcatgcatacatgttaacaagagctagcttctcttgcataactataaatagccctaatctcactccatgtttcatcgtccaataatatatatactatgatgagagtgcggtttcctttgttggtgttgctgggaaactgttttcctggcatcagtgtctcattaaaggtgagagaggatgagaataaccctttctacttgagaagctctaacagcttccaaactctctttgagaaccaaaaacggtcgcattcgtctcctccagagattcaacaaacgctcccccacaacttgagaaccttcgagactaccggattg

SEQ ID NO: 449 - DNA, 372 bp, Artificial
  Mutations within conglycinin beta subunit introduced by GmBCG2_T02TALE nuclease
acgcgcaaaccaaagaacagagaccgatgtaaagacaaaaacatagagtatcctttccaaaacaacgtccaagttcaaaaaattgagacgaaatgcaagcacagcacacataagtggatgatcaagatgggctcgtccatgccacgcacaccaacacacgtcaagcagcaagccctcccgtggccaaatgtgcatgcatacatcgttaacaagagctagcttctcttgcataactataaatagccctaatctcactccatgtttcatcgtccaataatactatatactatgatgagagtgcggtttcctttgttggtgttgctgggaactgttttcctggcatccgctcaacttgaccccccagctaggtgg

SEQ ID NO: 450 - DNA, 592 bp, Artificial
  Mutations within conglycinin beta subunit introduced by GmBCG2_T02TALE nuclease
acgcgcaaaccaaagaacagagaccgatgtaaagacaaaaacatagagtatcctttccaaaacaacgtccaagttcaaaaaattgagacgaaatgcaagcacagcacacataagtggatgatcaagatgggctcgtccatgccacgcacaccaacacacgtcaagcagcaagccctcccgtggccaaatgtgcatgcatacatgttaacaagagctagcttctcttgcataactataaatagccctaatctcactccatgtttcatcgtccaataatatatatactatgatgagagtgcggtttcctttgttggtgttgctgggaaactgccgctggaccgtcttccagcgcctgcttgccaccaatattgctggcgatggccaccacctgctccggggtcaagccgtgggcctggcacagcaccggcaacagccgctggaccgtctccagtgtctcattaaaggtgagagaggatgagaataaaccctttctacttgagaagctctaacagcttccaaactctctttgagaaccaaaacggtcgcattcgtctcctccagagattcaacaaaacgctccccacaacttgag

SEQ ID NO: 451 - DNA, 503 bp, Artificial
  Mutations within conglycinin beta subunit introduced by GmBCG2_T02TALE nuclease
acgcgcaaaccaaagaacagagaccgatgtaaagacaaaaacatagagtatcctttccaaaacaacgtccaagttcaaaaaattgagacgaaatgcaagcacagcacacataagtggatgatcaagatgggctcgtccatgccacgcacaccaacacacgtcaagcagcaagccctcccgtggccaaatgtgcatgcatacatgttaacaagagctagcttctcttgcataactataaatagccctaatctcactccatgtttcatcgtccaataatatatatactatgatgagagtgcggtttcctttgttggtgttgctgggaactgttttcctggcatctgtctcattaaaggtgagagaggatgagaataaccctttctacttgagaagctctaacagcttccaaactctctttgagaaccaaaacggtcgcattcgtctcctccagagattcaacaaacgctccccacaacttgagaaccttcgagactaccggattg

SEQ ID NO: 452 - DNA, 504 bp, Artificial
  Mutations within conglycinin beta subunit introduced by GmBCG2_T02TALE nuclease
acgcgcaaaccaaagaacagagaccgatgtaaagacaaaaacatagagtatcctttccaaaacaacgtccaagttcataaaatagagacgaaatgcaagcacagcacacataagtggatgatcaagatgggctcgtccatgccacgcacaccaacacacgtcaagcagcaagccctcccgtggccaaatgtgcatgcatacatgttaacaagagctagcttctcttgcataactataaatagccctaatctcactccatgtttcatcgtccaataatatatatactatgatgagagtgcggtttcctttgttggtgttgctgggaactgttttcctggccatctgtctcattaaaggtgagagaggatgagaataaccctttctactttagaagctctaacagcttccaaactctctttgagaaccaaaacggtcgcattcgtctcctccagagattcaacaaacgctccccacaacttgagaaccttcgagactaccggattg

SEQ ID NO: 453 - DNA, 498 bp, Artificial
  Mutations within conglycinin beta subunit introduced by GmBCG2_T02TALE nuclease
acgcgcaaaccaaagaacagagaccgatgtaaagacaaaaacatagagtatcctttccaaaacaacgtccaagttcaaaaaattgagacgaaatgcaagcacagcacacataagtggatgatcaagatgggctcgtccatgccacgcacaccaacacacgtcaagcagcaagccctcccgtggccaaatgtgcatgcatacatgttaacaagagctagcttctcttgcataactataaatagccctaatctcactccatgtttcatcgtccaataatatatatactatgatgagagtgcggtttcctttgttggtgttgctgggaaactgttttcctggcatcagtctcattaaaggtgagagaggatgagaataaccctttctacttgagaagctctaacagcttccaaactctctttgagaaccaaaacggtcgcattcgtctcctccagagattcaacaaacgctccccacaacttgagaaccttcgagactacc

SEQ ID NO: 454 - DNA, 505 bp, Artificial
  Mutations within conglycinin beta subunit introduced by GmBCG2_T02TALE nuclease
acgcgcaaaccaaagaacagagaccgatgtaaagacaaaaacatagagtatcctttccaaaacaacgtccaagttcataaaatagagacgaaatgcaagcacagcacacataagtggatgatcaagatgggctcgtccatgccacgcacaccaacacacgtcaagcagcaagccctcccgtggccaaatgtgcatgcatacatgttaacaagagctagcttctcttgcataactataaatagccctaatctcactccatgtttcatcgtccaataatatatatactatgatgagagtgcggtttcctttgttggtgttgctgggaactgttttcctggcattgtgtctcattaaaggtgagagaggatgagaataaccctttctacttgagaagctctaacagcttccaaactctctttgagaaccaaaaacggtcgcattcgtctcctccagagattcaacaaacgctccccacaacttgagaaccttcgagactaccggattg

SEQ ID NO: 455 - DNA, 504 bp, Artificial
  Mutations within conglycinin beta subunit introduced by GmBCG2_T02TALE nuclease
acgcgcaaaccaaagaacagagaccgatgtaaagacaaaaaacatagagtatcctttccaaaacaacgtccaagttcaaaaaattgagacgaaatgcaagcacagcacacataagtggatgatcaagatgggctcgtccatgccacgcacaccaacacacgtcaagcagcaagccctcccgtggccaaatgtgcatgcatacatgttaacaagagctagcttctcttgcataactataaatagccctaatctcactccatgtttcatcgtccaataatatatatactatgatgagagtgcggttcctttgttggtgttgctgggaactgttttcctggccatcgtctcattaaaggtgagagaggatgagaataaccctttctacttgagaagctctaacagcttccaaactctctttgagaaccaaaacggtcgcattcgtctcctccagagattcaacaaacgctcccccacaacttgagaaccttcgagactaccggattg

SEQ ID NO: 456 - DNA, 505 bp, Artificial
  Mutations within conglycinin beta subunit introduced by GmBCG2_T02TALE nuclease
acgcgcaaaccaaagaacagagaccgatgtaaagacaaaaacatagagtatcctttccaaaacaacgtccaagttcaaaaaaattgagacgaaatgcaagcacagcacacataagtggatgatcaagatgggctcgtccatgccacgcacaccaacacacgtcaagcagcaagccctcccgtggccaaatgtgcatgcatacatgttaacaagagctagcttctcttgcataactataaatagccctaatctcactccatgtttcatcgtccaataatatatatactatgatgagagtgcggtttcctttgttggtgttgctgggaaactgttttcctggcatgtgtctcattaaaggtgagagaggatgagaataaccctttctactttagaagctctaacagcttccaaactctctttgagaaccaaaacggtcgcattcgtttcctccagagattcaacaaacgctccccacaacttgagaaccttcgagactaccggattg

SEQ ID NO: 457 - DNA, 485 bp, Artificial
  Mutations within conglycinin beta subunit introduced by GmBCG2_T02TALE nuclease
acgcgcaaaccaaagaacagagaccgatgtaaagacaaaaacatagagtatcctttccaaaacaacgtccaagttcataaaatagagacgaaatgcaagcacagcacacataagtggatgatcaagatgggctcgtccatgccacgcacaccaacacacgtcaagcagcaagccctcccgtggccaaatgtgcatgcatacatgttaacaagagcttgcataactataaatagccctaatctcactccatgtttcatcgtccaataatatatatactatgatgagagtgcggtttcctttgttggtgttgctgggaactgttttccctggcatcatcattaaaggtgagagaggatgagaataaccctttctactttagaagctctaacagcttccaaaactctctttgagaaccaaaacggtcgcattcgtctcctccagagattcaacaaacgctccccacaacttgagaaccttcgagacta

SEQ ID NO: 458 - DNA, 561 bp, Artificial
  Mutations within conglycinin beta subunit introduced by GmBCG2_T02TALE nuclease
acgcgcaaaccaaagaacagagaccgatgtaaagacaaaaacatagagtatcctttccaaaacaacgtccaagttcataaaatagagacgaaatgcaagcacagcacacataagtggatgatcaagatgggctcgtccatgccacgcacaccaacacacgtcaagcagcaagccctcccgtggccaaatgtgcatgcatacatgttaatcaagagcttgcataacttataaatagccctaatctcactccatgtttcatcgtccaataatatatatactatgatgagagtgcggtttcctttgttggtgttgctgggaactgttttcctggcatcaggggggcggagcctatggaaaaacgccagcaacgcggccttttttacggttcctggccttttgctggccttttgctcacatgttctttcctgcgttatcccctgattctgtctcattaaaagggtgagagaggatgagaataaccctttctactttagaagctctaacagcttccaaactctctttgagaaccaaaacggtcgcattcgtctcctccagagattc

SEQ ID NO: 459 - DNA, 492 bp, Artificial
  Mutations within conglycinin beta subunit introduced by GmBCG2_T02TALE nuclease
acgcgcaaaccaaagaacagagaccgatgtaaagacaaaaacatagagtatcctttccaaaacaacgtccaagttcataaaatagagacgaaatgcaagcacagcacacataagtggatgatcaagatgggctcgtccatgccacgcacaccaacacatcgtcaagcagcaagccctcccgtggccaaatgtgcatgcataccatgttaacaagagcttgcataactataaattagccctaatctcactccatgtttcatcgtccaataatatatatactatgatgagagtgcggtttcctttgttggtgttgctgggaactgttttccctgtctcattaaagggtgaggagaggatgagaataaccctttctactttagaagctctaacagcttccaaactctctttgagaaccaaaacggtcgcattcgtctcctccagagattcaacaaacgctccccacaacttgagaaccttcgagactaccggatt

SEQ ID NO: 460 - DNA, 498 bp, Artificial
  Mutations within conglycinin beta subunit introduced by GmBCG2_T02TALE nuclease
acgcgcaaaccaaagaacagagaccgatgtaaagacaaaaacatagagtatcctttccaaaacaacgtccaagttcataaaatagagacgaaatgcaagcacagcacacataagtggatgatcaagatgggctcgtccatgccacgcacaccaacacacgtcaagcagcaagccctcccgtggccaaatgtgcatgcatacatgttaacaagagcttgcataactataaatagccctaatctcactccatgtttcatcgccaataatatatatactatgatgagagtgcggtttcctttgttggtgttgctgggaactgtttttcctggcatcgtgtctcattaaaggtgagagaggatgagaataacccctttctactttagaagctctaacagcttccaaactctcttttgagaaccaaaaacggtcgcattcgtctcctccagagattcaacaaacgctcccccacaacttgagaaccttcgagataccggattg

SEQ ID NO: 461 - DNA, 491 bp, Artificial
  Mutations within conglycinin beta subunit introduced by GmBCG2_T02TALE nuclease
acgcgcaaaccaaagaacagagaccgatgtaaagacaaaaacatagagtatcctttccaaaacaacgtccaagttcataaaatagagacgaaatgcaagcacagcacacataagtggatgatcaagatgggctcgtccatgccacgcacaccaacacacgtcaagcagcaagccctcccgtggccaaatgtgcatgcatacatgttaacaagagcttgcataactataaatagccctaatctcactccatgtttcatcgtccaataatatatatactatgatgagagtgcggtttcctttgttggtgttgctgggaactgttttcctggcattgtctcattaaaggtgagagaggatgagaataaccctttctactttagaagctctaacagcttccaaactctctttgagaaccaaaacggtcgcattcgtctcctccagagattcaacaaacgctccccacacttgagaacttcgagactaccggattg

SEQ ID NO: 462 - DNA, 566 bp, Artificial
  Mutations within conglycinin beta subunit introduced by GmBCG2_T02TALE nuclease
acgcgcaaaccaaagaacagagaccgatgtaaagacaaaaacatagagtatcctttccaaaacaacgtccaagttcataaaatagagacgaaatgcaagcacagcacacataagtggatgatcaagatgggctcgtccatgccacgcacaccaacacacgtcaagcagcaagccctcccgtggccaaatgtgcatgcatacatgttaacaagagcttgcataactataaatagccctaatctcactccatgtttcatcgtccaataatatatatactatgatgagagtgcggtttcctttgttggtgttgctgggaactgttttcctggcatcagtcagcaggtggtggccatcgccagcaatggcggcggcaggccggcgctggagagcattgttgcccagttatctcgccctgatccggcgttggccgcgttgaccaacgaccacctcgtcgccgcccagatggcagcggaaactgcatcaggcgctggtagccgcagggattgagcattacgcagtcggtcggccatgcgctcggccttgtgctcattaaaggtgagagagga

SEQ ID NO: 463 - DNA, 507 bp, Artificial
  Mutations within conglycinin beta subunit introduced by GmBCG2_T02TALE nuclease
acgcgcaaaccaaagaacagagaccgatgtaaagacaaaaacatagagtatcctttccaaaacaacgtccaagttcaaaaaattgagacgaaatgcaagcacagcacacataagtggatgatcaagatgggctcgtccatgccacgcacaccaacacacgtcaagcagcaagccctcccgtggccaaatgtgcatgcatacatgttaacaagagctagcttctcttgcataactataaatagccctaatctcactccatgtttcatcgtccaataatatactaatactatgatgagagtgcggtttcctttgttgtgttgctgggaactgttttcctggccatcagtctcattaaaggtgagagaggatgagaataaaccctttctactttaggaagctctaacagcttccaaactctctttgagaaccaaaacggtcgcattcgtctcctccagagattcaacaaacgctccccacaacttgagaaccttcgagactaccggattg

SEQ ID NO: 464 - DNA, 496 bp, Artificial; identical to SEQ ID NO: 322
  Mutations within conglycinin beta subunit introduced by GmBCG2_T02TALE nuclease

SEQ ID NO: 465 - DNA, 496 bp, Artificial
  Mutations within conglycinin beta subunit introduced by GmBCG2_T02TALE nuclease
acgcgcaaaccaaagaacagagaccgatgtaaagacaaaaacatagagtatcctttccaaaacaacgtccaagttcataaaatagagacgaaatgcaagcacagcacacataagtggatgatcaagatgggctcgtccatgccacgcacaccaacacacgtcaagcagcaagccctcccgtggccaaatgtgcatgcatacatgttaacaagagcttgcataactataaatagccctaatctcactccatgtttcatcgtccaataatatatatactatgatgagagtgcggtttcctttgttggtgttgctgggaactgttttcctggcattgtgtctcattaaaggtgagagaggatgagaataacccctttctactttagaagctctaacagcttccaaactctctttgagaaccaaaacggtcgcattcgtctcctccagagattcaacaaacgctccccacaacttgagaaccttcgagactaccggattg

SEQ ID NO: 466 - DNA, 561 bp, Artificial
  Mutations within conglycinin beta subunit introduced by GmBCG2_T02TALE nuclease
acgcgcaaaccaaagaacagagaccgatgtaaagacaaaaacatagagtatcctttccaaaacaacgtccaagttcataaaatagagacgaaatgcaagcacagcacacataagtggatgatcaagatgggctcgtccatgccacgcacaccaacacacgtcaagcagcaagccctcccgtggccaaatgtgcatgcatacatgttaacaagagcttgcataactataaatagccctaatctcactccatgtttcatcgtccaataatatatatactatgatgagagtgcggtttcctttgttggtgttgctgggaactgttttcctggcatcagtcagcaggtggtggccatcgccagcaatggcggcggcaggccggcgctggagagcattgttgcccagttatctcgcccctgatccggcgttggccgcgttgaccaacgaccacctcgtcgccgcccagatggcagcggaactgcatcaggcgctggtagccgcagggattgagcaattacgcagtcggtcggccatgcgctcggccttgtgtctcattaaaggtga

SEQ ID NO: 467 - DNA, 494 bp, Artificial
  Mutations within conglycinin beta subunit introduced by GmBCG2_T02TALE nuclease
acgcgcaaaccaaagaacagagaccgatgtaaagacaaaaacatagagtatcctttccaaaacaacgtccaagttcataaaatagagacgaaatgcaagcacagcacacataagtggatgatcaagatgggctcgtccatgccacgcacaccaacacacgtcaagcagcaagccctcccgtggccaaatgtgcatgcatacatgttaacaagagcttgcataactataaatagccctaatctcactccatgtttcatcgtccaataatatatatactatgatgagagtgcggtttcctttgttggtgttgctgggaactgttttcctggcatcgtcccattaaaggtgagagaggatgagaataaccctttctacttgagaagctctaacagcttccaaaactctctttgagaaccaaaaacggtcgcattcgtctcctccagagattcaacaaacgctccccacacttgagaaccttcgagactaccggattg

SEQ ID NO: 468 - DNA, 506 bp, Artificial
  Mutations within conglycinin beta subunit introduced by GmBCG2_T02TALE nuclease
acgcgcaaaccaaagaacagagaccgatgtaaagacaaaaacatagagtatccttttccaaaacaacgtccaagttcaaaaaattgagacgaaatgcaagcacagcacacataagtggatgatcaagatgggctcgtccatgccacgcacaccaacacacgtcaagcagcaagccctcccgtggccaaatgtgcatgcatacatgttaacaagagctagcttctcttgcataactataaatagccctaatctcactccatgtttcatcgtccaataatatatatactatgatgagagtgcggtttcctttgttggtgttgctgggaactgttttcctggcatcagtgtctcattaaaggtgagagaggatgagaataaccctttctacttgagaagctctaacagcttccaaactctctttgagaaccaaaacggtcgcattcgtctcctccagagattcaacaaacgctccccacaacttgagaaccttcgagactaccggattg

SEQ ID NO: 469 - DNA, 488 bp, Artificial
  Mutations within conglycinin beta subunit introduced by GmBCG2_T02TALE nuclease
  misc_feature (393): n is a or c or t or g
acgcgcaaaccaaagaacagagaccgatgtaaagacaaaaacatagagtatcctttccaaaacaacgtccaagttcataaaatagagacgaaatgcaagcacagcacacataagtggatgatcaagatgggcccgtccatgccacgcacaccaacacacgtcaagcagcaagccctcccgtggccaaatgtgcatgcatacatgttaacaagagcttgcataactataaatagccctaatctcactccatgtttcatcgtccaataatatatatactatgatgagagtgcggtttcctttgttggtgttgctgggaactgtttttccctggcattgtctcattaaaggtgagagaggatgagaataacccctttctactttagaagctctaanagcttccaaaactctctttgagaaccaaaaacggtcgcattcgtctcctccagagattcaacaaacgctccccacacttgagaacttcgagacta

SEQ ID NO: 470 - DNA, 514 bp, Artificial
  Mutations within conglycinin beta subunit introduced by GmBCG2_T02TALE nuclease
acgcgcaaaccaaagaacagagaccgatgtaaagacaaaaacatagagtatcctttccaaaacaacgtccaagttcaaaaaattgagacgaaatgcaagcacagcacacataagtggatgatcaagatgggctcgtccatgccacgcacaccaacacacgtcaagcagcaagccctcccgtggccaaatgtgcatgcatacatgttaacaagagctagcttctcttgcataactataaatagccctaatctcactccatgtttcatcgtccaataatatatatactatgatgagagtgcggtttcctttgttggtgttgccgccagctggcgtaatagcgaagaggcccgcaccgattcgcccctttgtgtctcattaaaggtgagagaggatgagaataacccctttctacttgagaagctctaacagcttccaaactctctttgagaaccaaaacgggtcgcattcgtctcctccagagattcaacaaaacgctccccacaacttgagaacc

SEQ ID NO: 471 - DNA, 513 bp, Artificial
  Mutations within conglycinin beta subunit introduced by GmBCG2_T02TALE nuclease
acgcgcaaaccaaagaacagagaccgatgtaaagacaaaaacatagagtatcctttccaaaacaacgtccaagttcaaaaaattgagacgaaatgcaagcacagcacacataagtggatgatcaagatgggctcgtccatgccacgcacaccaacacacgtcaagcagcaagccctcccgtggccaaatgtgcatgcatacatgttaacaagagctagcttctcttgcataactataaatagccctaatctcactccatgtttcatcgtccaataatatatatactatgatgagagtgcggtttcctttgttggtgttgctgggaaactgttttcctggcatcagtagtttgtgtctcattaaaaggtgagagaggatgagaataaccctttctacttgagaagctctaacagcttccaaactctctttgagaaccaaaacggtcgcattcgtctcctccagagattcaacaaacgctccccacaacttgagaaccttcgagactaccggatt

SEQ ID NO: 472 - DNA, 503 bp, Artificial
  Mutations within conglycinin beta subunit introduced by GmBCG2_T02TALE nuclease
acgcgcaaaccaaagaacagagaccgatgtaaagacaaaaacatagagtatcctttccaaaacaacgtccaagttcaaaaaattgagacgaaatgcaagcacagcacacataagtggatgatcaagatgggctcgtccatgccacgcacaccaacacacgtcaagcagcaagccctcccgtggccaaatgtgcatgcatacatgttaacaagagctagcttctcttgcataactataaatagccctaatctcactccatgtttcatcgtccaataatatatatactatgatgagagtgcggtttcctttgttggtgttgctgggaactgttttcctggcatcgtctcattaaaggtgagagaggatgagaataaccctttctacttgagaagctctaacagcttccaaactctctttgagaaccaaaacggtcgcattcgtctcctccagagattcaacaaacgctcccccacaacttgagaaccttcgagactaccggattg

SEQ ID NO: 473 - DNA, 496 bp, Artificial
  Mutations within conglycinin beta subunit introduced by GmBCG2_T02TALE nuclease
acgcgcaaaccaaagaacagagaccgatgtaaagacaaaaacatagagtatccttttccaaaacaacgtccaagttcaaaaaattgagacgaaatgcaaagcacagcacacataagtggatgatcaagatgggctcgtccatgccacgcacaccaacacacgtcaagcagcaagccctcccgtggccaaatgtgcatgcatacatgttaacaagagctagcttctcttgcataactataaatagccctaatctcactccatgtttcatcgtccaataatatatatactatgatgagagtgcggtttcctttgttggtgttgctgggaactgttttcctggcataaaaggtgagagaggatgagaataacccctttctacttgagaagctctaacagcttccaaactctctttgagaaccaaaacggtcgcatcgtctcctccagagattcaacaaacgctccccacaacttgagaaccttcgagactaccggattg

SEQ ID NO: 474 - DNA, 526 bp, Artificial
  Mutations within conglycinin beta subunit introduced by GmBCG2_T02TALE nuclease
acgcgcaaaccaaagaacagagaccgatgtaaagacaaaaacatagagtatcctttccaaaacaacgtccaagttcaaaaaattgagacgaaatgcaagcacagcacacataagtggatgatcaagatgggctcgtccatgccacgcacaccaacacacgtcaagcagcaagccctcccgtggccaaatgtgcatgcatacatgttaacaagagctagcttcctcttgcataactataaatcagccctaatctcactccatgtttcatcgtccaataatatatatactatgatgagagtgcggtttcctttgtggtgttgctgggaactgttttcctgggacagcaccggcaacagccgctggaccgtctccagcgcctgcttgccaccgccattgctgcgatggccaccacctgctggggggtcaagccgtgggcctgcacagcaccggcaaacagcgcctgtgtctcattaaaggtgagagaggatggagaataaaccctttctacttgagaagctctaacagc

SEQ ID NO: 475 - DNA, 506 bp, Artificial
  Mutations within conglycinin beta subunit introduced by GmBCG2_T02TALE nuclease
acgcgcaaaccaaagaacagagaccgatgtaaagacaaaaacatagagtatcctttccaaaacaacgtccaagttcataaaatagagacgaaatgcaagcacagcacacataagtggatgatcaagatgggctcgtccatgccacgcacaccaacacacgtcaagcagcaagccctcccgtggccaaatgtgcatgcatacatgttaacaagagctagcttctcttgcataactataaatagccctaatctcactccatgtttcatcgtccaataatatatatactatgatgagagtgcggtttcctttgttggtgttgctgggaaactgttttcctggccatctgtctcattaaagggtgagagaggatgagaataaccctttctactttagaagctctaacagcttccaaactctctttgagaaccaaaacggtcgcattcgtctcctccagagattcaacaaacgctccccacaacttgagaaccttcgagactaccggattg

SEQ ID NO: 476 - DNA, 510 bp, Artificial
  Mutations within conglycinin beta subunit introduced by GmBCG2_T03TALE nuclease
  misc_feature (386): n is a or c or t or g
acgcgcaaaccaaagaacagagacccgatgtaaagacaaaaacatcagagtatcctttccaaaacaacgtccaagttcataaaatagagacgaaatgcaagcacagcaccacaataagtggatgatcaagatgggctcgtccatgccatccgcatcaccaacgactatcgtcaagcagcaagccctgcccgtggccaaatgttgcgatcgatacaatggttaacaaagatagctttggcataacctataaaatagccccttaaatcttcacttccaatgatttcatcgtcccaataatatatataccatatgatcgagagtgcggtttcctttgttggtgttgcctgggaactaagtttttccctcggcaatcagtttgttgtccncaattaaaggtgagaagggatggatgagaaaataaaccccccttttccctacgtttttagaaaaggctccttaaaccaggcctttccaaaaactcttctttgagaaacccaaaaacgggtcaac

SEQ ID NO: 477 - DNA, 454 bp, Artificial
  Mutations within conglycinin beta subunit introduced by GmBCG2_T03TALE nuclease
  misc_feature (340); (424): n is a or c or t or g
acgcgcaaaccaaagaacagagacccgatgtaaagacaaaaacatagagtatcctttccaaaacaacgtccaagttcataaaatagagacgaaatgcaagcacagcacacaataagtggatgatcaagatgggctcgtccatgccatccgcacaccaacgacatcgtcaagcagcaagccctgcccgtggccaaatgtgcgtgatacatggttaacaagatgcttgcataactataaatagccctaatcactcactccaatgattcatcgtccaataatatatataccaatatgatcgaagagtgcggtttcctttgtaggtgtttgctgggaaacctanttttcctggcaacagttttggttgtccgtcaattaaaaggtggagagggatgggatggagaaaaattaaagcccccctttcctntcgttttgaaggaaaaggcctctaaacagg

SEQ ID NO: 478 - DNA, 432 bp, Artificial
  Mutations within conglycinin beta subunit introduced by GmBCG2_T03TALE nuclease
acgcgcaaaccaaagaacagagacccgatgtaaagacaaaaacatagagtatcctttccaaaacaacgtccaagttcataaaatagagacgaaatgcaagcacagcacacaataagtggatgatcaagatgggctcgtccatgccatccgcatcaccaacgacatcgtcaagcagcaagccctcccgtggccaaatgtgcatcgcatagcaatggttaacaagatgcttgcataactataaatagccctaaatctcacttccaatgatttctatcgtccaataatatatcatacatatgatcgagagtgcggtttcctttgttggtgtttgctgggaactgttttccctggctacagtttgttgtccatcattaaaggtgagaggagggatgagaaataaaccccctttttcctaccttttttagaaaggct

SEQ ID NO: 479 - DNA, 505 bp, Artificial
  Mutations within conglycinin beta subunit introduced by GmBCG2_T03TALE nuclease
  misc_feature (421): n is a or c or t or g
acgcgcaaaccaaagaacagagaccgatgtaaagacaaaaacatagagtatcctttccaaaacaacgtccaagttcaaaaaattgagacgaaatgcaagcacagcacacataagtggatgatcaagatgggctcgtccatgccacgcacaccaacacacgtcaagcagcaagccctcccgtggccaaatgtgcatgcatagcatgttaacaagagctagcttctcttgcataactataaatagccctaatctcactccatgtttcatcgtccaataatatatatacatatgatgagagtgcggtttcctttgttggtgttgctgggaactgttttcctggccatcaagtttgtgtctcattaaaggtgagagagcctttctacttgagaagctgctaaacagcttccaaaactctctttgngaaccaaaaacggtcgcattcgtctcctccagagattcaacaaacgctccccacaacttgagaaccttcgagactaccggattg

SEQ ID NO: 480 - DNA, 528 bp, Artificial
  Mutations within conglycinin beta subunit introduced by GmBCG2_T03TALE nuclease
  misc_feature (439); (478): n is a or c or t or g
acgcgcaaaccaaagaacagagacccgatgtaaagacaaaaactagagtatccttttccaaaacaacgtccaagtttcaaaaaattgagacgaaaattgcaagcaccagcacacataaagtggatgatcaaagatgggcttcgtcctgccacgcacaccgaatccatcacgtcaaggagccaagcccttcccgtggccaaatgtgcatcgcatagcatgtttaagcaagagctagcttctcttgcataaactataaatatgccctaaatctcactccatgtttccatcgtccaataatatactatacatatgatgagcagtgcggtttccttgttggtgttgtgggaactgtttcctggccaacagttttgtgtcgtcattaaaggtgagagaggatgagaacctttctactgagaagctctaacagctccaaactctnttttgagaaccaaaacggtcgcattcgtctcctccaagngttcaacaaacgctccccacaacttgagaaccttcgagactaccggattg

SEQ ID NO: 481 - DNA, 461 bp, Artificial
  Mutations within conglycinin beta subunit introduced by GmBCG2_T03TALE nuclease
  misc_feature (147): n is a or c or t or g
acgcgcaaaccaaagaacagagacccgatgtaaagaccaaaaacatcagagatatcctttccaaaacaacgtccaagttcataaaatagagacgaaatgcaagcacaagcaccacaataagtggatgatcaagatgggctcgtccangccatcgcacaccaacgacatcggtcaagtcagcaagcccctgcccgtggccaaatgttgccgatcgcatactatggttaacaaagatagctttgcaataactataaatagccctaaatcttcacttccaatgtttcatcgtccaataatatatatagcaatatggatcgagagtgcggtttcctttgttggtgttgccttgggaactagtttttccctcggaccaatcaggttttggttgtcctcattaaaaggtgagaagggatgggatgagaaaataaacccccctttttcctacgttttaagaaaggctt

SEQ ID NO: 482 - DNA, 506 bp, Artificial
  Mutations within conglycinin beta subunit introduced by GmBCG2_T03TALE nuclease
  misc_feature (423): n is a or c or t or g
acgcgcaaaccaaagaacagagaccgatgtaaagacaaaaacatagagtatcctttccaaaacaacgtccaagttcaaaaaattgagacgaaaatgcaagcacagcacacataaagtggatgatcaagatgggctcgtccatgccacgcacaccaacacacgtcaagcagcaagccctcccgtggccaaatgtgcatgcatacatgttaacaagagctagcttctcttgcataactataaatagccctaatctcactccatgtttcatcgtccaataatatatatactatgatgagagtgcggtttcctttgttggtgttgctgggaactgttttcctggcatcagtttgtgtctcattaaaggtgagagaggatgagaattttctacttgagaagctctaacagcttccaaactctctttgngaaccaaaacggtcgcattcgtctcctccagagattcaacaaacgctccccacaacttgagaaccttcgagactaccggattg

SEQ ID NO: 483 - DNA, 411 bp, Artificial
  Mutations within conglycinin beta subunit introduced by GmBCG2_T03TALE nuclease
acgcgcaaaccaaagaacagagaccgatgtaaagacaaaaacatagagtatcctttccaaaacaacgtccaagttcaaaaaattgagacgaaaatgcaagcacagcacacataagtggatgatcaagatgggctcgtccatgccacgcacaccaacacacgtcaagcagcaagccctcccgtggccaaatgtgcatgcatacatgttaacaagagctagcttctcttgcataactataaatagccctaatctcactccatgtttcatcgtccaataatataccctttctacttgagaaaggctctaacagcttccaaaactctcttttgagaaaccaaaaacggtcgcattcgtctcctccagagattcaacaaacgctccccacaacttgagaaccttcgagactaccgg

SEQ ID NO: 484 - DNA, 433 bp, Artificial
  Mutations within conglycinin beta subunit introduced by GmBCG2_T03TALE nuclease
acgcgcaaaccaaagaacagagaccgatgtaaagacaaaaacatagagtatcctttccaaaacaacgtccaagttcaaaaaattgagacgaaaatgcaagcacagcacacataagtggatgatcaagatgggctcgtccatgccacgcacaccaacacacgtcaagcagcaagccctcccgtggccaaatgtgcatgcatacatgttaacaagagctagcttctcttgcataactataaatagccctaatctcactccatgtttcatcgtccaataatatatatactatgatgagagtgcggtttccttgttggtggttgctgggaactgttttcctggcatcagtttgtgtctcattaaaggtgagagaggatgtcgccgtgggcctggcacagcaccggcaaccagccgctggaccgtctccagcgcctgc

SEQ ID NO: 485 - DNA, 488 bp, Artificial
  Mutations within conglycinin beta subunit introduced by GmBCG2_T03TALE nuclease
acgcgcaaaccaaagaacagagaccgatgtaaagacaaaaacatagagtatcctttccaaaacaacgtccaagttcaaaaaattgagacgaaatgcaagcacagcacacataagtggatgatcaagattggctcgtccatgccacgcacaccaacacacgtcaagcagcaagccctcccgtggccaaatgtgcatgcatacatgttaacaagagctagcttctcttgcataactataaatagccctaatctcactccatgtttcatcgtccaataatatatatactatgatgagagtgcggtttcctttgttggtgttgctgggaactgttttcctggcatcagtttgtgtctcattaaaggtgagagaggatttgagaagctctaacagcttccaaactctctttgagaaccaaaacggtcgcattcgtctcctccagagattcaacaaacgctcccacacttgagaaccttcgagactaccggatt

SEQ ID NO: 486 - DNA, 493 bp, Artificial
  Mutations within conglycinin beta subunit introduced by GmBCG2_T03TALE nuclease
acgcgcaaaccaaagaacagagaccgatgtaaagacaaaaacatagagtatcctttccaaaacaacgtccaagttcataaaatagagacgaaatgcaagcacagcacacataagtggatgatcaagatgggctcgtccatgccacgcacaccaacacacgtcaagcagcaagccctcccgtggccaaatgtgcatgcatacatgttaacaagagcttgcataactataaatagccctaatctcactccatgtttcatcgtccaataatatatatactatgatgagagtgcggtttcctttgttggtgttgctgggaactgttttcctggcaatcagtttgtgtctcattaaaggtgagagaggatctttctactttagaagctcgtaacagcttccaaaactctctttgagaaccaaaaacggtcgcattcgtctcctccagagattcaacaaacgctccccacaacttgagaaccttcgagactaccggatt

SEQ ID NO: 487 - DNA, 490 bp, Artificial
  Mutations within conglycinin beta subunit introduced by GmBCG2_T03TALE nuclease
acgcgcaaaccaaagaacagagaccgatgtaaagacaaaaacatagagtatcctttccaaaacaacgtccaagttcataaaatagagacgaaatgcaagcacagcacacataagtggatgatcaagatgggctcgtccatgccacgcacaccaacacacgtcaagcagcaagccctcccgtggccaaatgtgcatgcatacatgttaacaagagcttgcataactataaatagccctaatctcactccatgtttcatcgtccaataatatatatactatgatgagagtgcggtttcctttgttggtgttgctgggaactgttttcctggcatcagtttgtgtctcattaaaggtgagagaggatcctttctactttagaagctctaacagcttccaaactctctttgagaaccaaaacggtcgcattcgtctcctccagagattcaacaaacgctccccacaacttgagaaccttcgagactaccggatt

SEQ ID NO: 488 - DNA, 507 bp, Artificial
  Mutations within conglycinin beta subunit introduced by GmBCG2_T03TALE nuclease
  misc_feature (461): n is a or c or t or g
acgcgcaaaccaaagaacagagaccgatgtaaagacaaaaacatagagtatcctttccaaaacaacgtccaagttcaaaaaattgagacgaaaatgcaagcacagcacacataaagtggatgatcaagatgggctcgtccatgccacgcacaccaacacacgtcaagcagcaagccctcccgtggccaaatgtgcatgcatagcatgttaacaagagctagcttctcttgcataactataaatagccctaatctcactccatgtttcatcgtccaataatatataatactatgatgagagtgcggtttcctttgttggtgttgcatgggaactgttttcctggcatcagtttgtgtctcattaaaggtgagagaggattttctacttgagaagctctaacagcttgccaaactctctttgagaacccaaaaacggtcgcatttcgtctcctccagagattnaacaaacgctccccacaacttgagaaccttcgagactaccggattg

SEQ ID NO: 489 - DNA, 507 bp, Artificial
  Mutations within conglycinin beta subunit introduced by GmBCG2_T03TALE nuclease
acgcgcaaaccaaagaacagagaccgatgtaaagacaaaaacatagagtatcctttccaaaacaacgtccaagttcaaaaaattgagacgaaatgcaagcacagcacacataagtggatgatcaagatgggctcgtccatgccacgcacaccaacacacgtcaagcagcaagccctcccgtggccaaatgtgcatgcatacatgttaacaagagctagcttctcttgcataactataaatagccctaatctcactccatgtttcatcgtccaataatatatatactatgatgagagtgcggtttcctttgttggtgttgctgggaactgttttcctggcatcagtttgtgtctcattaaaggtgagagaggatgagaacccctttctacttgagaagctctaacagcttccaaactctctttgagaaccaaaacggtcgcattcgtctcctccagagattcaacaaacgctccccacaacttgagaaccttcgagactaccggattg

SEQ ID NO: 490 - DNA, 524 bp, Artificial
  Mutations within conglycinin beta subunit introduced by GmBCG2_T03TALE nuclease
  misc_feature (381); (403): n is a or c or t or g
acgcgcaaaccaaagaacagagaccgatgtaaagacaaaaacactcagagatatcctttccaaaacaacgtccaagttcataaaatagagacgaaatgcaagcacagcaccacaataagtggatgatctaagatgggactcgtccatgccacgcacaccaacacgtatctgtcaagtcagcaagccctgcccagtggccaaatgttgccatcgcatacatgttaacaagatagcttgcataactataaatagccctaaatcacttcaacttccaatgtttctatcgtccaataatatatataccatatgatcgatgagtgcggtttcctttgttggtgattgctgggaactaagttttccctcggcaatcagtttgtgtcncaataaaggtgagaaggatggntgagaaataacccctttctacgtttagaaggcttctaacagcttccaaactctctttgagaaccaaaaacggtcgcattcgtctcccttcccagagaattcaacaaacgctcccccacaaa

SEQ ID NO: 491 - DNA, 497 bp, Artificial
  Mutations within conglycinin beta subunit introduced by GmBCG2_T03TALE nuclease
  misc_feature (406); (494): n is a or c or t or g
acgcgcaaaccaaagaacagagacccgatgtaaagacaaaaacatcagagtatcctttccaaaacaacgtccaagttcataaaatagcagacgaaatgcaagcacagcaccacaataagtggatgatcaagatgggctcgtccatgccatccgcacaccaacgactatcgtcaagtcagcaagcccttgcccgtggccaaatgttgcgatcgcatacaatggttaacaagatagcttgcataactataaatagccctaaatctcacttccaatgatttcacgtccaataatatatcataccaatatgatgagagtgcggtttcctttgttggggttgcctgggaacctgttttccctcggccaatgcagttttgtgtccgcaattaaaaggtgagaagggatggangaagaaaataaacccccttttcctacgttttagaaaggcttcctaaaccagcttccaaaacttctctttgagaaacccaaaaacgggncgc

SEQ ID NO: 492 - DNA, 518 bp, Artificial
  Mutations within conglycinin beta subunit introduced by GmBCG2_T03TALE nuclease
  misc_feature (362); (467): n is a or c or t or g
acgcgcaaaccaaagaacagagacccgatgtaaagacaaaaactagagtatcctttccaaaacaacgtccaagttcaaaaaattgagacgaaaatgcaagcaccagcacacataaagtgggatgatcaaagatgggcttcgtccatgccacgcacacccaatcacacgtcaaggcagcaagcccttcccgtggccaaatgtgcatgcatagcatgtttaagcaagagctagcttctcttgcataaactataaatagccctaatctcactccatgtttccatcgtccaataatatactatacatatgatgagagtgcgtttccttgttggtgttgcgggaactgtttcctggcaacagtttgngtctcattaaaggtgagagaggatgagaacttctactgagaagctctaacagctccaaactctcttttgagaaccaaaaacggtcgcatttcgtctcctccaagngttcaacaaacgctcccccacaacttgagaaccttcgagactaccggattg

SEQ ID NO: 493 - DNA, 481 bp, Artificial
  Mutations within conglycinin beta subunit introduced by GmBCG2_T03TALE nuclease
acgcgcaaaccaaagaacagagacccgatgtaaagacaaaaactagagtatcctttccaaaacaacgtccaagttcaaaaaattgagacgaaatgcaagcacagcacacataagtggatgatcaagatgggctcgtccatgccatcgcatcaccaacgacatcgtcaagcagcaagccctcccgtggccaaatgtgcgtgcatacatgttaacaagatgcttgcataactataaatagccctaaatctcacttccatgattcatcgtccaataatatcatcatacatatgatcgagagtgcggtttcctttgttgggttgctgggaactgttttccctggcatcagtttgtgtccgtcaattaaaaggtgagagggatgggatggagaaaataagccccctttcctacgttttagaaaggctcttaaacaggcctttccaaaaactctcttttgagaaacccaaaaacgggtcgcatttcg

SEQ ID NO: 494 - DNA, 506 bp, Artificial
  Mutations within conglycinin beta subunit introduced by GmBCG2_T03TALE nuclease
acgcgcaaaccaaagaacagagaccgatgtaaagacaaaaacatagagtatcctttccaaaacaacgtccaagttcaaaaaattgagacgaaaatgcaagcacagcacacataagtggatgatcaagatgggctcgtccatgccacgcacaccaacacacgtcaagcagcaagccctcccgtggccaaatgtgcatgcatacatgttaacaagagctagcttctcttgcataactataaaatagccctaatctcactccatgtttcatcgtccaataatatataatactatgatgagagtgcggtttcctttgttggtgttgctgggaactgttttcctggcaatcagtttgtgtctcattaaaggtgagagaggatgagccctttctacttagaagctctaacagcttccaaactctcttgagaaccaaaacggtcgcattcgtctcctccagagattcaacaaacgctccccacaacttgagaaccttcgagactaccggattg

SEQ ID NO: 495 - DNA, 471 bp, Artificial
  Mutations within conglycinin beta subunit introduced by GmBCG2_T03TALE nuclease
acgcgcaaaccaaagaacagagaccgatgtaaagacaaaaacatagagtatcctttccaaaacaacgtccaagttcataaaatagagacgaaatgcaagcacagcacacataagtggatgatcaagatgggctcgtccatgccacgcacaccaacacacgtcaagcagcaagccctcccgtggccaaatgtgcatgcatacatgttaacaagagcttgcataactataaatagccctaatctcactccatgtttcatcgtccaataatatatatactatgatgagagtgcggtttcctttgttggtgttgctgggaactgttttcctggcatcagtttgtgttctcattaaagggtgagagaggatgagaatggcaagcaggcgctggagacggtgcaggcgctgttgccggtgctgtgccaggcccacggcttgaccccggagcaggtggtggccatcgccagcaatctt

SEQ ID NO: 496 - DNA, 491 bp, Artificial
  Mutations within conglycinin beta subunit introduced by GmBCG2_T03TALE nuclease
acgcgcaaaccaaagaacagagaccgatgtaaagacaaaaacatagagtatcctttccaaaacaacgtccaagttcaaaaaattgagacgaaatgcaagcacagcacacataagtggatgatcaagatgggctcgtccatgccacgcacaccaacacatcgtcaagcagcaagccctcccgtggccaaatgtgcatgcatacatgttaacaagagcttgcataactataaatagccctaatctcactccatgtttcatcgtccaataatatatatactatgatgagagtcggtttccttgttggtgttgctgggaactgttttccctggcaacagtttgtgtctcattaaaaggtgagagaggactttctacttgagaagctctaacagcttccaaaactctctttgagaaccaaaaacggtcgcattcgtctcctccagagattcaacaaacgctccccacaacttgagaaccttcgagactaccggatt

SEQ ID NO: 497 - DNA, 503 bp, Artificial
  Mutations within conglycinin beta subunit introduced by GmBCG2_T03TALE nuclease
  misc_feature (420): n is a or c or t or g
acgcgcaaaccaaagaacagagaccgatgtaaagacaaaaacatagagtatcctttccaaaacaacgtccaagttcaaaaaattgagacgaaatgcaagcacagcacacataagtggatgatcaagatgggctcgtccatgccacgcacaccaacacacgtcaagcagcaagccctcccgtggccaaatgtgcatgcatacatgttaacaagagctagcttctcttgcataactataaatagccctaatctcactccatgtttcatcgtccaataatatatatactatgatgagagtgcggtttcctttgttggtgttgctgggaactgttttcctggcatcagtttgtgtctcattaaaggtgagagaggatgagaattttctacttgagaagctctaacagctccaaactctctttgngaaccaaaacggtcgcattcgtctcctccagagattcaacaaacgctccccacaacttgagaaccttcgagactaccggattg

SEQ ID NO: 498 - DNA, 540 bp, Artificial
  Mutations within conglycinin beta subunit introduced by GmBCG2_T03TALE nuclease
  misc_feature (305); (334); (363); (385); (388); (445); (485): n is a or c or t or g
acgcgcaaaccaaagaacagagacccgatgtaaagacaaaaacatagagtatcctttccaaaacaacgtccaagttcataaaatagagacgaaatgcaagcacagcacacaataagtggatgatcaagatgggctcgtccatgccatcgtcatcaccaacgacatcgtcaagcagcaagccctgcccgtggccaaatgttgcatgcatacatgttaacaagatgcttgcataactataaatagccctaatctcacttccaatgatttctatcgtccaataatatatcatacatatgatcgagagngcggtttcctttgtggtgttgctgggaantgttttccctggcaatcagtttgtgtccncattaaaggtgagaaggagggntgngaaataacccctttctacgtttgaaggacctcaattccaatcaccagctttcaactnactttgaagaccgaaacggtccattcgtctccctccaagngattcaacaaacgctcccccacaactttgagaacctttcgagactaccgggattg

SEQ ID NO: 499 - DNA, 521 bp, Artificial
  Mutations within conglycinin beta subunit introduced by GmBCG2_T03TALE nuclease
  misc_feature (332): n is a or c or t or g
acgcgcaaaccaaagaacagagacccgatgtaaagacaaaaacatagagtatcctttccaaaacaacgtccaagttcataaaatagagacgaaatgcaagcacagcacacaataagtggatgaatcaagatgggctcgtccatgccacgcacaccaacgacatcgtcaagcagcaagccctcccgtggccaaatgtgcatgatacatgttaacaagatgcttgcataactataaatagccctaatctcacttccaatgtttcatcgtccaataatatatatacatatgatcgagagtgcggtttcctttgttaggtgtttgcttgggaaacngtttttcccctgggcaatcagtttgttgtccgtcattaaaaggtgagaagggaggatgagaaattaaaccccccttttttctacgttggaggaaagctctaaacggcttcccaaaactctcttttgagaaaccaaaaacggtcgcattcgtctcctccagagattcaacaaacgctcccccacaacttg

SEQ ID NO: 500 - DNA, 501 bp, Artificial
  Mutations within conglycinin beta subunit introduced by GmBCG2_T03TALE nuclease
  misc_feature (395): n is a or c or t or g
acgcgcaaaccaaagaacagagaccgatgtaaagacaaaaacatagagtatcctttccaaaacaacgtccaagttcaaaaaattgagacgaaatgcaagcacagcacacataagtggatgatcaagatgggctcgtccatgccacgcacaccaacacacgtcaagcagcaagccctcccgtggccaaatgtgcatgcatacatgttaacaagagctagcttctcttgcataactataaatagccctaatctcactccatgtttcatcgtccaataatatatatactatgatgagagtgcggtttcctttgttggtgttgctgggaactgttttcctggcatcagtttgtgtctcattaaaggtgagagaggatgagatttctacttgagaagctntaacagctccaaactctctttgagaaccaaaacggtcgcattcgtctcctccagagattcaacaaacgctccccacaacttgagaaccttcgagactaccggattg

SEQ ID NO: 501 - DNA, 481 bp, Artificial
  Mutations within conglycinin beta subunit introduced by GmBCG2_T03TALE nuclease
acgcgcaaaccaaagaacagagaccgatgtaaagacaaaaacatagagtatcctttccaaaacaacgtccaagttcaaaaaattgagacgaaatgcaagcacagcacacataagtggatgatcaagatgggctcgtccatgccacgcacaccaacacacgtcaagcagcaagccctcccgtggccaaatgtgcatgcatacatgtttaacaagagctagcttctcttgcataactataaatagccctaatctcactccatgtttcatcgtccaaataatatatatactatgatgagagtgcggtttcctttgttggtgttgctgggaactgttttcctggcatcagtttgtgtctcatctacttgagaagctctaacgagcttccaaactctctttgagaaccaaaacggtcgcattcgtctcctccagagattcaacaaacgctccccacaacttgagaaccttcgagactaccggattg

SEQ ID NO: 502 - DNA, 491 bp, Artificial
  Mutations within conglycinin beta subunit introduced by GmBCG2_T03TALE nuclease
  misc_feature (370); (382): n is a or c or t or g
acgcgcaaaccaaagaacagagacccgatgtaaagacaaaaacatagagatatcctttccaaaacaacgtccaagttacataaaatagagacgaaatgcaagcacagcacacaataagtggatgatcaagatgggctcgtccatgccatccgcatcaccaacgactatcggtcaagcagcaagcccttgcccagtggccaaatgttgcatgatacaatgttaacaaagatagcttgcataactataaatagccctaaatctcacttccaatgtttcacgtccaataatatatcatacatatgatgagagtgcggtttcctttgttggtgttgcctgggaacttattttcctcggcaacagttttgtgtcncattaaaagtgngaaggaggagatgagaaaaaaccccctttctacttttagaagctcctaacaggcttcccaaaactcttttgaggaaaccccaaaaacgggtcggcatttcgttctcctt

SEQ ID NO: 503 - DNA, 449 bp, Artificial
  Mutations within conglycinin beta subunit introduced by GmBCG2_T03TALE nuclease
acgcgcaaaccaaagaacagagaccgatgtaaagacaaaaacatagagtatcctttccaaaacaacgtccaagttcataaaatagagacgaaatgcaagcacagcacacataagtggatgatcaagatgggctcgtccatgccacgcacaccaacacacgtcaagcagcaagccctcccgtggccaaatgtgcatgcatacatgttaacaagagcttgcataactataaatagccctaatctcactccatgtttcatcgtccaataatatatatactatgatgagagtgcggtttcctttgttggtgttgctgggaactgttttcctggcatcagtttgtgtctcattaaaggtgagagaggatccttttctacttgagaagctctaacagcttccaaactctctttgagaaccaaaaacggtcgcttcgtctcctccagagattcaac

SEQ ID NO: 504 - DNA, 503 bp, Artificial
  Mutations within conglycinin beta subunit introduced by GmBCG2_T03TALE nuclease
  misc_feature (444): n is a or c or t or g
acgcgcaaaccaaagaacagagacccgatgtaaagacaaaaacatcagagtatcctttccaaaacaacgtccaagttcataaaatagagacgaaatgcaaagcacagcaccacaataagtggatgattcaagatgggctcgtccatgccatccgcatcaccaacgactatcggtcaagcagcaagcccttgcccgtggccaaatgttgcgatcgcaatagcaatgttaacaaagatagctttgcataactataaaatagccctaaatcttcacttccaatgtttcatcgtccaataatatatatacatatgatcgagagtgcggtttcctttgttggtgttgctggggaaactagttttttccctcgggaccaacaagttttgtgtccgtcaattaaaaggtggagaagggatgggatgagaaaaataaaagccccctttttcnaaccgtttttagaaagcttctaaacgcttccaaaactctctttgagaaaccaaaaacgg

SEQ ID NO: 505 - DNA, 556 bp, Artificial
  Mutations within conglycinin beta subunit introduced by GmBCG2_T03TALE nuclease
acgcgcaaaccaaagaacagagaccgatgtaaagacaaaaactagagtatcctttccaaaacaacgtccaagttcataaaatagagacgaaatgcaagcacagcacacataagtggatgatcaagatgggctcgtccatgccacgcacaccaacacacgtcaagcagcaagccctcccgtggccaaatgtgcatgcatacatgttaacaagagcttgcataactataaatagccctaatctcactccatgtttcatcgtccaataatatatatactatgatgagagtgcggtttcctttgttggtgttgctgggaactgtttttccctggcatccagtttgtgtctcttaaaggtgagagaggatgagaatacagcacctgcaacagcgcctgcaccgtctccagcgcctgcttgccaccaatattgctggcgatggccaccacctgctccggggtcaagcccgtgggcctggcatagccaccacctgctgggggtcaagccgtgggcctggcacagcaccggcaacatccgcctggcctttctacttgagaagct

SEQ ID NO: 506 - DNA, 507 bp, Artificial; identical to SEQ ID NO: 489
  Mutations within conglycinin beta subunit introduced by GmBCG2_T03TALE nuclease

SEQ ID NO: 507 - DNA, 461 bp, Artificial
  Mutations within GlyA3B4 introduced by GmGlyA3B4_T01TALE nuclease
gttcatgtacggttgcagatataaacgaagcatagcttatgtatgaggtgtaacaaaattggaaacaatagccatgctttgctattacctccagcaagttcaacgagtgccaactcaacaacctcaacgcgttggaacccgaccaccgcgttgagtccgaaggtggtcttattgaaacatggaactctcaacaccctgagctgcaatgcgccggtgtcactgtttccaaacgcaccctcaaccgcaacggcctccacttgccatcttactcaccttatccccaaatgatcattgtcgttcaaggtgcgtaatattagtaagaagtatttatcagcttaacgtgataacaataatagtaatatgaatatttattaaatttttataattaattctctgctagaaatttgattaatcatttttagtagaatttgtttttctcaactaggtttttaaacaccaca

SEQ ID NO: 508 - DNA, 540 bp, Artificial
  Mutations within GlyA3B4 introduced by GmGlyA3B4_T01TALE nuclease
gttcatgtacggttgcagatataaacgaagcatagcttatgtatgaggtgtaacaaaattggaaacaatagccatgcaaggtgaagaatgtcaccaactcagaaacccttcttcattgacgtgtccctcactcactctcctctcttcactataaatcgccactcttcgtgttctccacttcacctccagcaagttcaatgagtgccaactcaacaacctcaacgcgttggaacccgaccaccgcgttgagtccgaaggtggtcttattgaaacatggaactctcaacaccctgagctgcaatgcgccggtgtcactgtttccaaacgcaccctcaaccgcaacggcctccacttgccatcttactcaccttatccccaaatgatcattgtcgttcaaggtgcgtaatattagtaagaagtatttatcagcttaacgtgataacaataatagtaatatgaaatatttattaaattttttataattaatctctgctagaaaatttgattaatcatttttagtagaatttgtttttctcaact

SEQ ID NO: 509 - DNA, 446 bp, Artificial
  Mutations within GlyA3B4 introduced by GmGlyA3B4_T01TALE nuclease
gttcatgtacggttgcagatataaacgaagcatagcttatgtatgaggtgtaacaaaattggaaacaatagccatgctttgctattacctccagcaagttcaacgagtgccaactcaacaacctcaacgcgttggaacccgaccaccgcgttgagtccgaaggtggtcttattgaaacatggaactctcaacaccctgagctgcaatgcgccggtgtcactgtttccaaacgcaccctcaaccgcaacggcctccacttgccatcttactcaccttatccccaaatgatcattgtcgttcaaggtgcgtaatattagtaagaagtatttatcatgcttaacgtgataacaataatagtaatatgaatatttattaaattttttataattaattctctgctagaaaatttgattaattcatttttagtagaatttgtttttctcaac

SEQ ID NO: 510 - DNA, 398 bp, Artificial
  Mutations within GlyA3B4 introduced by GmGlyA3B4_T01TALE nuclease
gttcatgtacggttgcagatataaacgaagcatagcttatgtatgaggtgtaacaaaattggaaacaatagccatgcaaggtgaagaatgtcaccaactcagaaacccttcttcattgacgtgtccctcactcactctcctctcttcactataaatcgccactcttcgtgttctccacttcaccaactccttcaaacttattaacactttccttagttcaatatggggaagcccttcttcactctctctctttcttccctttgcttgctactattgtcgttcaaggtgcgtaatattagtaagaagtatttatcagcttaacgtgataacaataatagtaatatgaaatatttattaaatttttataattaatctctgctagaaaatttgattaatca

SEQ ID NO: 511 - DNA, 516 bp, Artificial
  Mutations within GlyA3B4 introduced by GmGlyA3B4_T01TALE nuclease
gttcatgtacggttgcagatataaacgaagcatagcttatgtatgaggtgtaacaaaattggaaacaatagccatgcaaggtgaagaatgtcaccaactcagaaacccttcttcattgacgtgtccctcactcactctcctctcttcactataaatcgccactcttcgagtgcatgctttgctattacctccagcaagttcaacgagtgccaactcaacaacctcaacgcgttggaacccgaccaccgcgttgagtccgaaggtggtcttattgaaacatggaactctcaacaccctgagctgcaatgcgccggtgtcactgtttccaaacgcaccctcaaccgcaacggcctccacttgccatcttactcaccttatccccaaatgatcattgtcgttcaaggtgcgtaatattagtaagaagtatttatcagcttaacgtgataacaataatagtaatatgaaatatttattaaattttttataattaatctctgctagaaaattgattaatca

SEQ ID NO: 512 - DNA, 644 bp, Artificial
  Mutations within GlyA3B4 introduced by GmGlyA3B4_T01TALE nuclease
gttcatgtacggttgcagatataaacgaagcatagcttatgtatgaggtgtaacaaaattggaaacaatagccatgcaaggtgaagaatgtcaccaactcagaaacccttcttcattgacgtgtccctcactcactctcctctcttcactataaatcgccactcttcgtgttctccacttcaccaactccttcaaacttattaacactttccttagttcaatatggggaagcccttattcactctctcgagtgcatgctttgctattacctccagcaagttcaacgagtgccaactcaacaacctcaacgcgttggaacccgaccaccgcgttgagtccgaaggtggtcttattgaaacatggaactctcaacaccctgagctgcaatgcgccggtgtcactgtttccaaacgcaccctcaaccgcaacggcctccacttgccatcttactcaccttatccccaaatgatcattgtcgttcaaggtgcgtaatattagtaagaagtatttatcagcttaacgtgataacaataatagtaatatgaaatatttattaaattttttataattaatctctgctagaaaatttgattaatcatttttagtagaatttgttttttctcaactaggttttaaacaccaca

SEQ ID NO: 513 - DNA, 442 bp, Artificial
  Mutations within GlyA3B4 introduced by GmGlyA3B4_T01TALE nuclease
gttcatgtacggttgcagatataaacgaagcatagcttatgtatgaggtgtaacaaaattggaaacaatagccatgcaaggtgaagaatgtcaccaactcagaaacccttcttcattgacgtgtccctcactcactctcctctcttcactataaatcgccactcttcgtgttctccacttcaccaactccttcaaacttattaacactttccttagttcaatatggggaagcccttcttcactctctctctttcttccctttgcttgctactattgtcgttcaaggtgcgtaatattagtaagaagtatttatcagcttaacgtgataacaataatagtaatatgaaatatttattaaattttttataattaatctctgctagaaaatttgattaatcatttttagtagaatttgtttttctcaactaggttttaaacacca

SEQ ID NO: 514 - DNA, 558 bp, Artificial
  Mutations within GlyA3B4 introduced by GmGlyA3B4_T01TALE nuclease
gttcatgtacggttgcagatataaacgaagcatagcttatgtatgaggtgtaacaaaattggaaacaatagccatgcaaggtgaagaatgtcaccaactcagaaacccttcttcattgacgtgtccctcactcactctcctctcttcactataaatcgccactcttcgtgttctccacttcaccaactccttcaaacttattaacactttccttagttcaatatgtcgagtgcatgctttgctattacctccagcaagttcaacgagtgccaactcaacaacctcaacgcgttggaaccgaccaccgcgttgagtccgaaggtggtcttattgaaacatggaactctcaacaccctgagctgcaatgcgccggtgtcactgtttccaaacgcaccctcaaccgcaacggcctccacttgccatcttactcaccttatccccaaatgatcattgtcgttcaaggtgcgtaatattagtaagaagtatttatcagcttaacgtgataacaataatagtaatatgaaatatttattaatttttataattaatctctgctag

SEQ ID NO: 515 - DNA, 477 bp, Artificial
  Mutations within GlyA3B4 introduced by GmGlyA3B4_T01TALE nuclease
gttcatgtacggttgcagatataaacgaagcatagcttatgtatgaggtgtaacaaaattggaaacaatagccatgcaaggtgaagaatgtcaccaactcagaaacccttcttcattgacgtgtccctcactcactctcctctcttcactataaatcgccactcttcgtgttctccacttcaccaactccttcaaacttattaacactttccttagttcaatatggggaagcccttcttcactctctctctttcttccctttgcttgctactacttgccatcttactcaccttatccccaaatgatcattgtcgttcaaggtgcgtaatattagtaagaagtatttatcagcttaacgtgataacaataatagtaatatgaaatatttattaaattttttataattaatctctgctagaaaatttgattaatcatttttagtagaatttgtttttctcaactaggttttaaacacca

SEQ ID NO: 516 - DNA, 477 bp, Artificial; identical to SEQ ID NO: 515
  Mutations within GlyA3B4 introduced by GmGlyA3B4_T01TALE nuclease

SEQ ID NO: 517 - DNA, 464 bp, Artificial
  Mutations within GlyA3B4 introduced by GmGlyA3B4_T01TALE nuclease
gttcatgtacggttgcagatataaacgaagcatagcttatgtatgaggtgtaacaaaattggaaacaatagccatgctttgctattacctccagcaagttcaacgagtgccaactcaacaacctcaacgcgttggaacccgaccaccgcgttgagtccgaaggtggtcttattgaaacatggaactctcaacaccctgagctgcaatgcgccggtgtcactgtttccaaacgcaccctcaaccgcaacggcctccacttgccatcttactcaccttatccccaaatgatcattgtcgttcaaggtgcgtaatattagtaagaagtatttatcagcttaacgtgataacaataatagtaatatgaaatatttattaaattttttataattaattctctgctagaaaatttgattaatcatttttagtagaatttgtttttctcaactaggtttttaaacaccaca

SEQ ID NO: 518 - DNA, 576 bp, Artificial
  Mutations within GlyA3B4 introduced by GmGlyA3B4_T01TALE nuclease
gttcatgtacggttgcagatataaacgaagcatagcttatgtatgaggtgtaacaaaattggaaacaatagccatgcaaggtgaagaatgtcaccaactcagaaacccttcttcattgacgtgtccctcactcactctcctctcttcactataaatcgccactcttcgtgttctccacttcaccaactccttcaaacttattaacactttccttagtttccagcaagttcaacgagtgccactcaacaacctcaacgcgttggaacccgaccaccgcgttgagtccgaaggtggtcttattgaaacatggaactctcaacaccctgagctgcaatgcgccggtgtcactgtttccaaacgcaccctcaaccgcaacggcctccacttgccatcttactcaccttatccccaaatgatcattgtcgttcaaggtgcgtaatattagtaagaagtatttatcagcttaacgtgataacaataatagtaatatgaaatatttattaaatttttttataattaatctctgctagaaaattttgattaatcatttttagtagaatttgtttttctcaacta

SEQ ID NO: 519 - DNA, 650 bp, Artificial
  Mutations within GlyA3B4 introduced by GmGlyA3B4_T01TALE nuclease
gttcatgtacggttgcagatataaacgaagcatagcttatgtatgaggtgtaacaaaattggaaacaatagccatgcaaggtgaagaatgtcaccaactcagaaacccttcttcattgacgtgtccctcactcactctcctctcttcactataaatcgccactcttcgtgttctccacttcaccaactccttcaaacttattaacactttccttagttcaatatggggaagcccttcttcactctctctctttcttccctttgcttgtcgagtgcatgctttgctattacctccagcaagttcaacgagtgccaactcaacaacctcaacgcgttggaacccgaccaccgcgttgagtccgaaggtggtcttattgaaacatggaactctcaacaccctgagctgcaatgcgccggtgtcactgtttccaaacgcaccctcaaccgcaacggcctccacttgccatcttactcaccttatccccaaatgatcattgtcgttcaaggtgcgtaatattagtaagaagtatttatcagcttaacgtgataacaataatagtaatatgaaatatttattaaattttttataattaatctctgctagaaaatttgattaatctttttagtagaatttgttttttctcaactagg

SEQ ID NO: 520 - DNA, 536 bp, Artificial
  Mutations within GlyA3B4 introduced by GmGlyA3B4_T01TALE nuclease
gttcatgtacggttgcagatataaacgaagcatagcttatgtatgaggtgtaacaaaattggaaacaatagccatgcaaggtgaagaatgtcaccaactcagaaacccttcttcattgacgtgtccctcactcactctcctctcttcactataaatcgccactcttcgtgttctccacttcaccaactccttcaaacttattaacactttccttagttcaatatggggaagcccttcttcactctctctctttcttccctttgcttgccccgaccaccgcgttgagtccgaaggtggtcttattgaaacatggaactctcaacaccctgagctgcaatgcgccggtgtcactgtttccaaacgcaccctcaaccgcaacggcctccacttgccatcttactcaccttatccccaaaatgatcattgtcgttcaaggtgcgtaatattagtaagaagtatttatcagcttaacgtgataacaataatagtaatatgaaatatttattaaatttttataattaatctctgctagaaaa

SEQ ID NO: 521 - DNA, 606 bp, Artificial
  Mutations within GlyA3B4 introduced by GmGlyA3B4_T01TALE nuclease
gttcatgtacggttgcagatataaacgaagcatagcttatgtatgaggtgtaacaaaattggaaacaatagccatgcaaggtgaagaatgtcaccaactcagaaacccttcttcattgacgtgtccctcactcactctcctctcttcactataaatcgccactcttcgtgttctccacttcaccaactccttcaaacttattaacactttccttagttcaatatggggaagcccttcttcactctctctctttcttccctttgctttcttgtcgagtgcatgctttgctattacctccagcaagttcaacgagtgccaactcaacaacctcaacgcgttggaacccgaccaccgcgttgagtccgaaggtggtcttattgaaacatggaactctcaacaccctgagctgcaatgcgccggtgtcactgtttccaacgcaccctcaaccgcaacggcctccacttgccatcttactcaccttatccccaaatgatcattgtcgttcaaggtgcgtaatattagtaagaagtatttatcagcttaacgtgataacaataatagtaatatgaaatatttattaaattttttataattaatctctgctag

SEQ ID NO: 522 - DNA, 479 bp, Artificial
  Mutations within GlyA3B4 introduced by GmGlyA3B4_T01TALE nuclease
gttcatgtacggttgcagatataaacgaagcatagcttatgtatgaggtgtaacaaaattggaaacaatagccatgcaaggtgaagaatgtcaccaactcagaaacccttcttcattgacgtgtccctcactcactctcctctcttcactataaatcgccactcttcgtgttctccacttcaccaactccttcaaacttattaacactttctttagttcaatatggggaagcccttcttcactctctctctttcttccctttgcttgctactacttgccatcttactcaccttatccccaaatgatcattgtcgttcaaggtgcgtaatattagtaagaagtatttatcagcttaacgtgataacaataatagtaatatgaaatatttattaaattttttataattaatctctggctagaaaatttgattaatcatttttagtagaatttgttttttctcaactaggttttaaacacca

SEQ ID NO: 523 - DNA, 411 bp, Artificial
  Mutations within GlyA3B4 introduced by GmGlyA3B4_T01TALE nuclease
gttcatgtacggttgcagatataaacgaagcatagcttatgtatgaggtgtaacaaaattggaaacaatagccatgcaaggtgaagaatgtcaccaactcagaaacccttcttcattgacgtgtccctcactcactctcctctcttcactataaatcgccactcttcgtgttctccacttcaccaactccttcaaacttattaacactttccttagttcaatatggggaagcccttcttcactctctctctttcttccctttgcttgctactattgtcgttcaaggtgcgtaatattagtaagaagtatttatcagcttaacgtgataacaataatagtaatatgaaatatttattaaattttttataattaatctctgctagaaaatttgattaatcatttttagtagaa

SEQ ID NO: 524 - DNA, 477 bp, Artificial; identical to SEQ ID NO: 515
  Mutations within GlyA3B4 introduced by GmGlyA3B4_T01TALE nuclease

SEQ ID NO: 525 - DNA, 412 bp, Artificial
  Mutations within GlyA3B4 introduced by GmGlyA3B4_T01TALE nuclease
gttcatgtacggttgcagatataaacgaagcatagcttatgtatgaggtgtaacaaaattggaaacaatagccatgcaaggtgaagaatgtcaccaactcagaaacccttcttcattgacgtgtccctcactcactctcctctcttcactataaatcgccactcttcgtgttctccacttcaccaactccttcaaacttattaacactttccttagttcaatatggggaagcccttcttcactctctctctttcttccctttgcttgctactattgtcgttcaaggtgcgtaatattagtaagaagtatttatcagcttaacgtgataacaataatagtaatatgaaatattttattaaattttttataattaatctctgctagaaaatttgattaatcatttttagtagaa

SEQ ID NO: 526 - DNA, 477 bp, Artificial
  Mutations within GlyA3B4 introduced by GmGlyA3B4_T01TALE nuclease
gttcatgtacggttgcagatataaacgaagcatagcttatgtatgaggtgtaacaaaattggaaacaatagccatgcaaggtgaagaatgtcaccaactcagaaacccttcttcattgacgtgtccctcactcactctcctctcttcactataaatcgccactcttcgtgttctccacttcaccaactccttcaaacttattaacactttccttagttcaatatggggaagcccttcttcactctctctctttcttccctttgcttgctactacttgccatcttactcaccttatccccaaatgatcattgtcgttcaaggtgcgtaatattagtaagaagtattatctagcttaacgtgataacaataatagtaatatgaaatatttattaaattttttataattaatctctgctagaaaatttgattaatcatttttagtagaatttgtttttctcaactaggttttaaacacca

SEQ ID NO: 527 - DNA, 570 bp, Artificial
  Mutations within GlyA3B4 introduced by GmGlyA3B4_T01TALE nuclease
gttcatgtacggttgcagatataaacgaagcatagcttatgtatgaggtgtaacaaaattggaaacaatagccatgcaaggtgaagaatgtcaccaactcagaaacccttcttcattgacgtgtccctcactcactctcctctcttcactataaatcgccactcttcgtgttctccacttcaccaactccttcaaacttattaacactttccttagttcaatatggggaagccaggccgaccgcatgctttgctattacctccagcaagttcaacgagtgccaactcaacaacctcaacgcgttggaacccgaccaccgcgttgagtccgaaggtggtcttattgaaacatggaactctcaacaccctgagctgcaatgcgccggtgtcactgtttccaaacgcaccctcaaccgcaacggcctccacttgccatcttactcaccttatccccaaatgatcattgtcgttcaaggtgcgtaatattagtaagaagtatttatcagcttaacgtgataacaataatagtaatatgaaatatttattaatttttataattaatctctgctag

SEQ ID NO: 528 - DNA, 671 bp, Artificial
  Mutations within GlyA3B4 introduced by GmGlyA3B4_T01TALE nuclease
gttcatgtacggttgcagatataaacgaagcatagcttatgtatgaggtgtaacaaaattggaaacaatagccatgcaaggtgaagaatgtcaccaactcagaaacccttcttcattgacgtgtccctcactcactctcctctcttcactataaatcgccactcttcgtgttctccacttcaccaactccttcaaacttattaacactttccttagttcaatatggggaagcccttcttcactctctctctttcttccctttgcttcttgtcgagtgcatgctttgctattacctccagcaagttcaacgagtgccaactcaacaacctcaacgcgttggaacccgaccaccgcgttgagtccgaaggtggtcttattgaaacatggaactctcaacaccctgagctgcaatgcgccggtgtcactgtttccaaacgcaccctcaaccgcaacggcctccacttgccatcttactcaccttatcccccaaatgatcattgtcgttcaaggtgcgtaaatattagtaagaagtatttatcagcttaacgtgataacaataatagtaatatgaaatatttattaaattttttataattaatctctgctagaaaatttgattaatcatttttagtagaatttgttttttctcaactaggttttaaaacaccaca

SEQ ID NO: 529 - DNA, 457 bp, Artificial
  Mutations within GlyA3B4 introduced by GmGlyA3B4_T01TALE nuclease
gttcatgtacggttgcagatataaacgaagcatagcttatgtatgaggtgtaacaaaattggaaacaatagccatgctttgctattacctccagcaagttcaacgagtgccaactcaacaacctcaacgcgttggaacccgaccaccgcgttgagtccgaaggtggtcttattgaaacatggaactctcaacaccctgagctgcaatgcgccggtgtcactgtttccaaacgcaccctcaaccgcaacggcctccacttgccatcttactcaccttatccccaaatgatcattgtcgttcaaggtgcgtaatattagtaagaagtatttatcagcttaacgtgataacaataatagtaatatgaaatatttattaaattttttataattaatctctgctagaaaatttgattaatcatttttagtagaatttgtttttctcaactaggttttaaaca

SEQ ID NO: 530 - DNA, 619 bp, Artificial
  Mutations within GlyA3B4 introduced by GmGlyA3B4_T01TALE nuclease
gttcatgtacggttgcagatataaacgaagcatagcttatgtatgaggtgtaacaaaattggaaacaatagccatgcaaggtgaagaatgtcaccaactcagaaacccttcttcattgacgtgtccctcactcactctcctctcttcactataaatcgccactcttcgtgttctccacttcaccaactccttcaaacttattaacactttccttagttcaatatggggaagcccttcttcactctctctctttcttccctttgcttgtcgagtgcatgctttgctattacctccagcaagttcaacgagtgccaactcaacaacctcaacgcgttggaacccgaccaccgcgttgagtccgaaggtggtcttattgaaacatggaactctcaacaccctgagctgcaatgcgccggtgtcactgtttccaaacgcaccctcaaccgcaacggcctccacttgccatcttactcaccttatccccaaatgatcattgtcgttcaaggtgcgtaaatattagtaagaagtatttatcagcttaacgtgataacaataatagtaatatgaaatatttattaaattttttataattaatctctgctagaaaatttgattaatc

SEQ ID NO: 531 - DNA, 521 bp, Artificial
  Mutations within GlyA3B4 introduced by GmGlyA3B4_T01TALE nuclease
gttcatgtacggttgcagatagtaaacgaagcatagcttatgtatgatggatgtaacaaaattggaaacaaatagcccaatgcaaggtgaaggaatggtcaccaactcagaaacccttcttcattgacgtgtccctcactcactctcctctcttcactataaatcgccactcttcgtgttctccacttcaccaactccttcaaacttattaacactttccttagttcaatatggggaagcccttcttcactctctctctttcttccctttgcttgtcttgtcgagtgcatgctttgctattacctccagcaagttcaacgagtgccaactcaacaacctcaacgcgttggaacccgaccaccgcgttgagtccgaaggtggtcttattgaaacatggaactctcaacaccctgagctgcaatgcgccggtgtcactgtttccaaacgcaccctcaaccgcaacggcctccacttgccatcttactcaccttactccccaaatgatcattgtcgttcaaggt

SEQ ID NO: 532 - DNA, 551 bp, Artificial
  Mutations within GlyA3B4 introduced by GmGlyA3B4_T01TALE nuclease
gttcatgtacggttgcagatataaacgaagcatagcttatgtatgaggtgtaacaaaattggaaacaatagccatgcaaggtgaagaatgtcaccaactcagaaacccttcttcattgacgtgtccctcactcactctcctctcttcactataaatcgccactcttcgtgttctccacttcaccaactccttcaaacttattaacactttccttagttcaatatggggaagcccttcttcactctctctctttcttccctttgctattacctccagcaagttcaacgagtgccaactcaacaacctcaacgcgttggaacccgaccaccgcgttgagtccgaaggtggtcttattgaaacatggaactctcaacaccctgagctgcaatgcgccggtgtcactgtttccaaacgcaccctcaaccgcaacggcctccacttgccatcttactcaccttactccccaaatgatcattgtcgttcaaggtgcgtaatattagtaagaagtatttatcagcttaacgtgataacaataatagtaatatgaaata

SEQ ID NO: 533 - DNA, 575 bp, Artificial
  Mutations within GlyA3B4 introduced by GmGlyA3B4_T01TALE nuclease
gttcatgtacggttgcagatataaacgaagcatagcttatgtatgaggtgtaacaaaattggaaacaatagccatgcaaggtgaagaatgtcaccaactcagaaacccttcttcattgacgtgtccctcactcactctcctctcttcactataaatcgccactcttcgtgttctccacttcaccaactccttcaaacttattaacactttccttagtttccagcaagttcaacgagtgccactcaacacctcaacgcgttggaacccgaccaccgcgttgagtccgaaggtggtcttattgaaacatggaactctcaacaccctgagctgcaatgcgccggtgtcactgtttccaaacgcaccctcaaccgcaacggcctccacttgccatcttactcaccttatccccaaatgatcattgtcgttcaaggtgcgtaatattagtaagaagtatttatcagcttaacgtgataacaataatagtaatatgaaatatttattaaattttttataattaatctctgctagaaaatttgattaatcatttttagtagaatttgtttttctcaactagg

SEQ ID NO: 534 - DNA, 558 bp, Artificial
  Mutations within GlyA3B4 introduced by GmGlyA3B4_T01TALE nuclease
gttcatgtacggttgcagatataaacgaagcatagcttatgtatgaggtgtaacaaaattggaaacaatagccatgcaaggtgaagaatgtcaccaactcagaaacccttcttcattgacgtgtccctcactcactctcctctcttcactataaatcgccactcttcgtgttctccacttcaccaactccttcaaacttattaacactttccttatcaacaacctcaacgcgttggaacccgaccaccgcgttgagtccgaaggtggtcttattgaaacatggaactctcaacaccctgagctgcaatgcgccggtgtcactgtttccaaacgcaccctcaaccgcaacggcctccacttgccatcttactcaccttatccccaaatgatcattgtcgttcaaggtgcgtaatattagtaagaagtatttatcagcttaacgtgataacaataatagtaatatgaaatatttattaaattttttataattaatctctgctagaaaatttgattaatcatttttagtagaatttgtttttctcaactaggttttaaaca

SEQ ID NO: 535 - DNA, 444 bp, Artificial
  Mutations within GlyA3B4 introduced by GmGlyA3B4_T01TALE nuclease
gttcatgtacggttgcagatataaacgaagcatagcttatgtatgaggtgtaacaaaattggaaacaatagccatgcaaggtgaagaatgtcaccaactcagaaacccttcttcattgacgtgtccctcactcactctcctctcttcactataaatcgccactcttcgtgttctccacttcaccaactccttcaaacttattaacactttccttagttcaatatggggaagcccttcttcactctctctctttcttccctttgcttgctactattgtcgttcaaggtgcgtaatattagtaagaagtatttatcagcttaacgtgataacaataatagtaatatgaaatatttattaaattttttataattaatcatctgctagaaaatttgattaatcatttttagtagaattttgtttttctcaactaggttttaaacacca

SEQ ID NO: 536 - DNA, 398 bp, Artificial; identical to SEQ ID NO: 510
  Mutations within GlyA3B4 introduced by GmGlyA3B4_T01TALE nuclease

SEQ ID NO: 537 - DNA, 443 bp, Artificial
  Mutations within GlyA3B4 introduced by GmGlyA3B4_T01TALE nuclease
gttcatgtacggttgcagatataaacgaagcatagcttatgtatgaggtgtaacaaaattggaaacaatagccatgcaaggtgaagaatgtcaccaactcagaaacccttcttcattgacgtgtccctcactcactctcctctcttcactataaatcgccactcttcgtgttctccacttcaccaactccttcaaacttattaacactttccttagttcaatatggggaagcccttcttcactctctctctttcttccctttgcttgctactattgtcgttcaaggtgcgtaatattagtaagaagtatttatcagcttaacgtgataacaataatagtaatatgaaatatttattaaattttttataattaatctctgctagaaaatttgattaatcatttttagtagaattttgtttttctcaactaggttttaaacacca

SEQ ID NO: 538 - DNA, 411 bp, Artificial; identical to SEQ ID NO: 523
  Mutations within GlyA3B4 introduced by GmGlyA3B4_T01TALE nuclease

SEQ ID NO: 539 - DNA, 627 bp, Artificial
  Mutations within GlyA3B4 introduced by GmGlyA3B4_T01TALE nuclease
gttcatgtacggttgcagatataaacgaagcatagcttatgtatgaggtgtaacaaaattggaaacaatagccatgcaaggtgaagaatgtcaccaactcagaaacccttcttcattgacgtgtccctcactcactctcctctcttcactataaatcgccactcttcgtgttctccacttcaccaactccttcaaacttattaacactttccttagttcaatatggggaagcccttcttcactctctctctttcttccctttgcttgctgcaagttcaacgagtgccaactcaacaacctcaacgcgttggaacccgaccaccgcgttgagtccgaaggtggtcttattgaaacatggaactctcaacaccctgagctgcaatgtgccggtgtcactgtttccaaacgcaccctcaaccgcaacggcctccacttgccatcttactcaccttatccccaaatgatcattgtcgttcaaggtgcgtaatattagtaagaagtatttatcagcttaacgtgataacaataatagtaatatgaaatatttattaatttttataattaatctctgctagaaaatttgattaatcatttttagtagaatttgtttttctcaactaggttttt

SEQ ID NO: 540 - DNA, 411 bp, Artificial; identical to SEQ ID NO: 523
  Mutations within GlyA3B4 introduced by GmGlyA3B4_T01TALE nuclease

SEQ ID NO: 541 - DNA, 477 bp, Artificial; identical to SEQ ID NO: 515
  Mutations within GlyA3B4 introduced by GmGlyA3B4_T01TALE nuclease

SEQ ID NO: 542 - DNA, 668 bp, Artificial
  Mutations within GlyA3B4 introduced by GmGlyA3B4_T01TALE nuclease
gttcatgtacggttgcagatataaacgaagcatagcttatgtatgaggtgtaacaaaattggaaacaatagccatgcaaggtgaagaatgtcaccaactcagaaacccttcttcattgacgtgtccctcactcactctcctctcttcactataaatcgccactcttcgtgttctccacttcaccaactccttcaaacttattaacactttccttagttcaatatggggaagcccttcttcactctctctctttcttccctttgcttgctcttgtcgagtgcatgctttgctattacctccagcaagttcaacgagtgccaactcaacaacctcaacgcgttggaacccgaccaccgcgttgagtccgaaggtggtcttattgaaacatggaactctcaacaccctgagctgcaatgcgccggtgtcactgtttccaaacgcaccctcaaccgcaacggcctccacttgccatcttactcaccttatccccaaatgatcattgtcgttcaaggtgcgtaatattagtaagagtatttatcagcttaacgtgataacaataatagtaatatgaaatatttattaaatttttataattaatctctgctagaaaatttgattaatcattttagtagaatttgttttctcaactaggtttttaaaacaccaca

SEQ ID NO: 543 - DNA, 464 bp, Artificial; identical to SEQ ID NO: 517
  Mutations within GlyA3B4 introduced by GmGlyA3B4_T01TALE nuclease

SEQ ID NO: 544 - DNA, 501 bp, Artificial
  Mutations within GlyA3B4 introduced by GmGlyA3B4_T01TALE nuclease
gttcatgtacggttgcagatataaacgaagcatagcttatgtatgaggtgtaacaaaattggaaacaatagccatgcaaggtgaagaatgtcaccaactcagaaacccttcttcattgtcgagtgcatgctttgctattacctccagcaagttcaacgagtgccaactcaacaacctcaacgcgttggaacccgaccaccgcgttgagtccgaaggtggtcttattgaaacatggaactctcaacaccctgagctgcaatgcgccggtgtcactgtttccaaacgcaccctcaaccgcaacggcctccacttgccatcttactcaccttatccccaaatgatcattgtcgttcaaggtgcgtaatattagtaagaagtatttatcagcttaacgtgataacaataatagtaatatgaaatatttattaaattttttataattaatctctgctagaaaatttgattaatcatttttagtagaatttgtttttctcaactagg

SEQ ID NO: 545 - DNA, 387 bp, Artificial
  Mutations within GlyA3B4 introduced by GmGlyA3B4_T01TALE nuclease
gttcatgtacggttgcagatataaacgaagcatagcttatgtatgaggtgtaacaaaattggaaacaatagccatgcaaggtgaagaatgtcaccaactcagaaacccttcttcattgacgtgtccctcactcactctcctctcttcactataaatcgccactcttcgtgttctccacttcaccaactccttcaaacttattaacactttccttagttcaatatggggaagcccttcttcactctctctctttcttccctttgcttgctactattgtcgttcaaggtgcgtaatattagtaagaagtatttatcagcttaacgtgataacaataatagtaatatgaaatatttattaaattttttataattaatctctgctagaaaa

SEQ ID NO: 546 - DNA, 608 bp, Artificial
  Mutations within GlyA3B4 introduced by GmGlyA3B4_T01TALE nuclease
gttcatgtacggttgcagatataaacgaagcatagcttatgtatgaggtgtaacaaaattggaaacaatagccatgcaaggtgaagaatgtcaccaactcagaaacccttcttcattgacgtgtccctcactcactctcctctcttcactataaatcgccactcttcgtgttctccacttcaccaactccttcaaacttattaacactttccttagttcaatatggggaagcccttcttcactctctctctttcttccctttgcttgcttgtcgagtgcatgctttgctattacctccagcaagttcaacgagtgccaactcaacaacctcaacgcgttggaacccgaccaccgcgttgagtccgaaggtggtcttattgaaacatggaactctcaacaccctgagctgcaatgcgccggtgtcactgtttccaaacgcaccctcaaccgcaacggcctccacttgccatcttactcaccttatcccccaaatgatcattgtcgttcaaggtgcgtaatattagtaagaagtatttatcagcttaacgtgataacaataatagtaatatgaaatatttattaaattttttataattaatctctgctag

SEQ ID NO: 547 - DNA, 665 bp, Artificial
  Mutations within GlyA3B4 introduced by GmGlyA3B4_T01TALE nuclease
gttcatgtacggttgcagatataaacgaagcatagcttatgtatgaggtgtaacaaaattggaaacaatagccatgcaaggtgaagaatgtcaccaactcagaaacccttcttcattgacgtgtccctcactcactctcctctcttcactataaatcgccactcttcgtgttctccacttcaccaactccttcaaacttattaacactttccttagttcaatatggggaagcccttcttcactctctctctttcttccctttgcttgtgtcgagtgcatgctttgctattacctccagcaagttcaacgagtgccaactcaacaacctcaacgcgttggaacccgaccaccgcgttgagtccgaaggtggtcttattgaaacatggaactctcaacaccctgagctgcaatgcgccggtgtcactgtttccaaacgcaccctcaaccgcaacggcctccacttgccatcttactcaccttatccccaaatgatcattgtcgttcaaggtgcgtaatattagtaagaagtatttatcagcttaacgtgataacaataatagtaatatgaaatatttattaaattttttataattaatctctgctagaaaatttgattaatcatttttagtagaattgttttttctcaactaggttttaacaccaca

SEQ ID NO: 548 - DNA, 536 bp, Artificial
  Mutations within GlyA3B4 introduced by GmGlyA3B4_T01TALE nuclease
gttcatgtacggttgcagatataaacgaagcatagcttatgtatgaggtgtaacaaaattggaaacaatagccatgcaaggtgaagaatgtcaccaactcagaaacccttcttcattgacgtgtccctcactcactctcctctcttcgagtgcatgctttgctattacctccagcaagttcaacgagtgccaactcaacaacctcaacgcgttggaacccgaccaccgcgttgagtccgaaggtggtcttattgaaacatggaactctcaacaccctgagctgcaatgcgccggtgtcactgtttccaaacgcaccctcaaccgcaacggcctccacttgccatcttactcaccttatccccaaatgatcattgtcgttcaaggtgcgtaatattagtaagaagtatttatcagcttaacgtgataacaataatagtaatatgaaatatttattaaattttttataattaatctctgctagaaaatttgattaatcatttttagtagaatttgtttttctcaactaggtttaaaca

SEQ ID NO: 549 - DNA, 603 bp, Artificial
  Mutations within GlyA3B4 introduced by GmGlyA3B4_T01TALE nuclease
gttcatgtacggttgcagatataaacgaagcatagcttatgtatgaggtgtaacaaaattggaaacaatagccatgcaaggtgaagaatgtcaccaactcagaaacccttcttcattgacgtgtccctcactcactctcctctcttcactataaatcgccactcttcgtgttctccacttcaccaactccttcaaacttattaacactttccttagttcaatatggggaagcccttcttcactctctctctttcttccctttgcttgtcgagtgcatgctttgctattacctccagcaagttcaacgagtgccaactcaacaacctcaacgcgttggaacccgaccaccgcgttgagtccgaaggtggtcttattgaaacatggaactctcaacaccctgagctgcaatgcgccggtgtcactgtttccaaacgcaccctcaaccgcaacggcctccacttgccatcttactcaccttatccccaaatgatcattgtcgttcaaggtgcgtaatattagtaagaagtatttatcagcttaacgtgataacaataatagtaatatgaaatatttattaaattttttataattaatctctgctag

SEQ ID NO: 550 - DNA, 477 bp, Artificial
  Mutations within GlyA3B4 introduced by GmGlyA3B4_T01TALE nuclease
gttcatgtacggttgcagatataaacgaagcatagcttatgtatgaggtgtaacaaaattggaaacaatagccatgcaaggtgaagaatgtcaccaactcagaaacccttcttcattgacgtgtccctcactcactctcctctcttcactataaatcgccactcttcgtgttctccacttcaccaactccttcaaacttattaacactttctttagttcaatatggggaagcccttcttcactctctctctttcttccctttgcttgctactacttgccatcttactcaccttatccccaaatgatcattgtcgttcaaggtgcgtaatattagtaagaagtatttatcagcttaacgtgataacaataatagtaatatgaaatatttattaaattttttataattaatctctgctagaaaatttgattaatcatttttagtagaatttgtttttctcaactaggttttaaacacca

SEQ ID NO: 551 - DNA, 631 bp, Artificial
  Mutations within GlyA3B4 introduced by GmGlyA3B4_T01TALE nuclease
gttcatgtacggttgcagatataaacgaagcatagcttatgtatgaggtgtaacaaaattggaaacaatagccatgcaaggtgaagaatgtcaccaactcagaaacccttcttcattgacgtgtccctcactcactctcctctcttcactataaatcgccactcttcgtgttctccacttcaccaactccttcaaacttattaacactttccttagttcaatatggggaagcccttcttcactctctctctttcttccctttgctttcttgtcgagtgcatgctttgctattacctccagcaagttcaacgagtgccaactcaacaacctcaacgcgttggaacccgaccaccgcgttgagtccgaaggtggtcttattgaaacatggaactctcaacaccctgagctgcaatgcgccggtgtcactgtttccaaacgcaccctcaaccgcaacggcctccacttgccatcttactcaccttatcccccaaatgatcattgtcgttcaaggtgcgtaaatattagtaagaagtatttatcagcttaacgtgataacaataatagtaatatgaaatatttattaaattttttataattaatctctgctagaaaatttgattaatctttttag

SEQ ID NO: 552 - DNA, 579 bp, Artificial
  Mutations within GlyA3B4 introduced by GmGlyA3B4_T01TALE nuclease
gttcatgtacggttgcagatataaacgaagcatagcttatgtatgaggtgtaacaaaattggaaacaatagccatgcaaggtgaagaatgtcaccaactcagaaacccttcttcattgacgtgtccctcactcactctcctctcttcactataaatcgccactcttcgtgttctccacttcaccaactccttcaaacttattaacactttccttagttcaatatggggaagcccttcttcactctctctctttcttccctttgcttgccccgaccaccgcgctgagtccgaaggtggtcttattgaaacatggaactctcaacaccctgagctgcaatgcgccggtgtcactgtttccaaacgcaccctcaaccgcaacggcctccacttgccatcttactcaccttatccccaaatgatcattgtcgttcaaggtgcgtaatattagtaagaagtatttatcagcttaacgtgataacaataatagtaatatgaaatattttattaaattttttataattaatctctgctagaaaatttgattaatcattttagtagaatttgtttttctcaactagg

SEQ ID NO: 553 - DNA, 607 bp, Artificial
  Mutations within GlyA3B4 introduced by GmGlyA3B4_T01TALE nuclease
gttcatgtacggttgcagatataaacgaagcatagcttatgtatgaggtgtaacaaaattggaaacaatagccatgcaaggtgaagaatgtcaccaactcagaaacccttcttcattgacgtgtccctcactcactctcctctcttcactataaatcgccactcttcgtgttctccacttcaccaactccttcaaacttattaacactttccttagttcaatatggggaagcccttcttcactctctctctttcttccctttgcttgctgtcgagtgcatgctttgctattacctccagcaagttcaacgagtgccaactcaacaacctcaacgcgttggaacccgaccaccgcgttgagtccgaaggtggtcttattgaaacatggaactctcaacaccctgagctgcaatgcgccggtgtcactgtttccaaacgcaccctcaaccgcaacggcctccacttgccatcttactcaccttatccccaaatgatcattgtcgttcaaggtgcgtaaatattagtaagaagtatttatcagcttaacgtgataacaataatagtaatatgaaatatttattaaattttttataattaatctctgctag

SEQ ID NO: 554 - DNA, 387 bp, Artificial; identical to SEQ ID NO: 545
  Mutations within GlyA3B4 introduced by GmGlyA3B4_T01TALE nuclease

SEQ ID NO: 555 - DNA, 501 bp, Artificial
  Mutations within GlyA3B4 introduced by GmGlyA3B4_T01TALE nuclease
gttcatgtacggttgcagatataaacgaagcatagcttatgtatgaggtgtaacaaaattggaaacaatagccatgcaaggtgaagaatgtcaccaactcagaaacccttcttcattgacgtgtccctcactcactctcctctcttcactataaatcgccactcttcgagtgcatgctttgctattacctccagcaagttcaacgagtgccaactcaacaacctcaacgcgttggaacccgaccaccgcgttgagtccgaaggtggtcttattgaaacatggaactctcaacaccctgagctgcaatgcgccggtgtcactgtttccaaacgcaccctcaaccgcaacggcctccacttgccatcttactcaccttatccccaaatgatcattgtcgttcaaggtgcgtaatattagtaagaagtatttatcagcttaacgtgataacaataatagtaatatgaaatatttattaaattttttataattaatctctgctag

SEQ ID NO: 556 - DNA, 411 bp, Artificial; identical to SEQ ID NO: 523
  Mutations within GlyA3B4 introduced by GmGlyA3B4_T01TALE nuclease

SEQ ID NO: 557 - DNA, 513 bp, Artificial
  Mutations within GlyA3B4 introduced by GmGlyA3B4_T01TALE nuclease
gttcatgtacggttgcagatataaacgaagcatagcttatgtatgaggtgtaacaaaattggaaacaatagccatgcaaggtgaagaatgtcaccaactcagaaaccccttcttcattgtcgagtgcatgctttgctattacctccagcaagttcaacgagtgccaactcaacaacctcaacgcgttggaacccgaccaccgcgttgagtccgaaggtggtcttattgaaacatggaactctcaacaccctgagctgcaatgcgccggtgtcactgtttccaaacgcaccctcaaccgcaacggcctccacttgccatcttactcaccttatccccaaatgatcattgtcgttcaaggtgcgtaatattagtagaagtatttatcagcttaacgtgataacaataatagtaatatgaaatatttattaaattttttataattaatctctgctagaaaatttgattaatcatttttagtagaatttgtttttctcaactaggttttaaacacca

SEQ ID NO: 558 - DNA, 477 bp, Artificial; identical to SEQ ID NO: 515
  Mutations within GlyA3B4 introduced by GmGlyA3B4_T01TALE nuclease

SEQ ID NO: 559 - DNA, 664 bp, Artificial
  Mutations within GlyA3B4 introduced by GmGlyA3B4_T01TALE nuclease
  misc_feature (279); (529): n is a or c or t or g
gttcatgtacggttgcagatataaacgaagcatagcttatgtatgaggtgtaacaaaattggaaacaatagccatgcaaggtgaagaatgtcaccaactcagaaacccttcttcattgacgtgtccctcactcactctcctctcttcactataaatcgccactcttcgtgttctccacttcaccaactccttcaaacttattaacactttccttagttcaatatggggaagcccttcttcactctctctctttcttccctttgcttgctacttctacgntgctttgctattacctccagcaagttcaacgagtgccaactcaacaacctcaacgcgttggaacccgaccaccgcgttgagtccgaaggtggtcttattgaaacatggaactctcaacaccctgagctgcaatgcgccggtgtcactgtttccaaacgcaccctcaaccgcaacggcctccacttgccatcttactcaccttatccccaaatgatcattgtcgttcaaggtgcgtaatattagtaagagnatttatcagcttaacgtgataacaataatagtaatatgaaatatttattaaatttttataattaatctctgctagaaaatttgattaatcattttagtagaatttgttttctcaactaggttttaaaacaccaca

SEQ ID NO: 560 - DNA, 657 bp, Artificial
  Mutations within GlyA3B4 introduced by GmGlyA3B4_T01TALE nuclease
gttcatgtacggttgcagatataaacgaagcatagcttatgtatgaggtgtaacaaaattggaaacaatagccatgcaaggtgaagaatgtcaccaactcagaaacccttcttcattgacgtgtccctcactcactctcctctcttcactataaatcgccactcttcgtgttctccacttcaccaactccttcaaacttattaacactttccttagttcaatatggggaagcccttcttcactctctctctttcttccctttgcttgctttgctattacctccagcaagttcaacgagtgccaactcaacaacctcaacgcgttggaacccgaccaccgcgttgagtccgaaggtggtcttattgaaacatggaactctcaacaccctgagctgcaatgcgccggtgtcactgtttccaaacgcaccctcaaccgcaacggcctccacttgccatcttactcaccttatccccaaatgatcattgtcgttcaaggtgcgtaatattagtaagaagtatttatcagctttaacgtgataacaataatagtaatatgaaatatttattaaattttttataattaaatctctgctagaaaatttgattaatcatttttagtagaatttgttttttctcaactaggttttaaaacaccaca

SEQ ID NO: 561 - DNA, 398 bp, Artificial; identical to SEQ ID NO: 510
  Mutations within GlyA3B4 introduced by GmGlyA3B4_T01TALE nuclease

SEQ ID NO: 562 - DNA, 655 bp, Artificial
  Mutations within GlyA3B4 introduced by GmGlyA3B4_T01TALE nuclease
gttcatgtacggttgcagatataaacgaagcatagcttatgtatgaggtgtaacaaaattggaaacaatagccatgcaaggtgaagaatgtcaccaactcagaaacccttcttcattgacgtgtccctcactcactctcctctcttcactataaatcgccactcttcgtgttctccacttcaccaactccttcaaacttattaacactttccttagttcaatatggggaagcccttcttcactctctctctttcttccctttgcttgctttgctattacctccagcaagttcaacgagtgccaactcaacaacctcaacgcgttggaacccgaccaccgcgttgagtccgaaggtggtcttattgaaacatggaactctcaacacccctgagctgcaatgcgccggtgtcactgtttccaaacgcaccctcaaccgacgaccgctccacttgccatcttactcaccttatccccaaatgatcattgtcgttcaaggtgcgtaatattagtaagaagtatttatcagcttaacgtgataacaataatagtaatatgaaatatttattaaattttttataattaatctctgctagaaaatttgattaatcatttttagtagaatttgttttttctcaactaggttttaaaacaccac

SEQ ID NO: 563 - DNA, 664 bp, Artificial
  Mutations within GlyA3B4 introduced by GmGlyA3B4_T01TALE nuclease
gttcatgtacggttgcagatataaacgaagcatagcttatgtatgaggtgtaacaaaattggaaacaatagccatgcaaggtgaagaatgtcaccaactcagaaacccttcttcattgacgtgtccctcactcactctcctctcttcactataaatcgccactcttcgtgttctccacttcaccaactccttcaaacttattaacactttccttagttcaatatggggaagcccttcttcactctctctctttcttccctttgcttcgagtgcatgctttgctattacctccagcaagttcaacgagtgccaactcaacaacctcaacgcgttggaacccgaccaccgcgttgagtccgaaggtggtcttattgaaacatggaactctcaacaccctgagctgcaatgcgccggtgtcactgtttccaaacgcaccctcaaccgcaacggcctccacttgccatcttactcaccttatccccaaatgatcattgtcgttcaaggtgcgtaatattagtaagaagtatttatcagcttaacgtgataacaataatagtaatatgaaatatttattaaattttttataattaatctctgctagaaaatttgattaatcatttttagtagaatttgttttttctcaactaagttttaaaacaccaca

SEQ ID NO: 564 - DNA, 646 bp, Artificial
  Mutations within GlyA3B4 introduced by GmGlyA3B4_T01TALE nuclease
gttcatgtacggttgcagatataaacgaagcatagcttatgtatgaggtgtaacaaaattggaaacaatagccatgcaaggtgaagaatgtcaccaactcagaaacccttcttcattgacgtgtccctcactcactctcctctcttcactataaatcgccactcttcgtgttctccacttcaccaactccttcaaacttattaacactttccttagttcaatatggggaagcccttcttcactctctctctttcttccctttgctattacctccagcaagttcaacgagtgccaactcaacaacctcaacgcgttggaacccgaccaccgcgttgagtccgaaggtggtcttattgaaacatggaactctcaacacccctgagctgcaatgcgccggtgtcactgtttccaaacgcaccctcaaccgcaacggcctccacttgccatcttactcaccttatccccaaatgatcattgtcgttcaaggtgcgtaatattagtaagaagtatttatcagcttaacgtgataacaataatagtaatatgaaatatttattaaattttttataattaatctctgctagaaaatttgattaatcatttttagtagaatttgttttttctcaactaggttttaaacaccaca

SEQ ID NO: 565 - DNA, 623 bp, Artificial
  Mutations within GlyA3B4 introduced by GmGlyA3B4_T01TALE nuclease
gttcatgtacggttgcagatataaacgaagcatagcttatgtatgaggtgtaacaaaattggaaacaatagccatgcaaggtgaagaatgtcaccaactcagaaacccttcttcattgacgtgtccctcactcactctcctctcttcactataaatcgccactcttcgtgttctccacttcaccaactccttcaaacttattaacactttccttagttcaatatggggaagcccttcttcactctctctctttcttccctttgcttgcttgtcgagtgcatgctttgctattacctccagcaagttcaacgagtgccaactcaacaacctcaacgcgttggaacccgaccaccgcgttgagtccgaaggtggtcttattgaaacatggaactctcaacaccctgagctgcaatgcgccggtgtcactgtttccaaacgcaccctcaaccgcaacggcctccacttgccatcttactcaccttatcccccaaatgatcattgtcgttcaaggtgcgtaatattagtaagaagtatttatcagcttaacgtgataacaataatagtaatatgaaatatttattaaattttttataattaatctctgctagaaaatttgattaatc

SEQ ID NO: 566 - DNA, 528 bp, Artificial
  Mutations within GlyA3B4 introduced by GmGlyA3B4_T01TALE nuclease
gttcatgtacggttgcagatataaacgaagcatagcttatgtatgaggtgtaacaaaattggaaacaatagccatgcaaggtgaagaatgtcaccaactcagaaacccttcttcattgacgtgtccctcactcactctcctctcttcgagtgcatgctttgctattacctccagcaagttcaacgagtgccaactcaacaacctcaacgcgttggaacccgaccaccgcgttgagtccgaaggtggtcttattgaaacatggaactctcaacaccctgagctgcaatgcgccggtgtcactgtttccaaacgcaccctcaaccgcaacggcctccacttgccatcttactcaccttatccccaaatgatcattgtcgttcaaggtgcgtaatattagtaagaagtatttatcagcttaacgtgataacaataatagtaatatgaaatatttattaaattttttataattaatctctgctagaaaatttgattaatcatttttagtagaatttgtttttctcaactagg

SEQ ID NO: 567 - DNA, 649 bp, Artificial
  Mutations within GlyA3B4 introduced by GmGlyA3B4_T01TALE nuclease
gttcatgtacggttgcagatataaacgaagcatagcttatgtatgaggtgtaacaaaattggaaacaatagccatgcaaggtgaagaatgtcaccaactcagaaacccttcttcattgacgtgtccctcactcactctcctctcttcactataaatcgccactcttcgtgttctccacttcaccaactccttcaaacttattaacactttccttagttcaatatggggaagcccttcttcactctctcttcgagtgcatgctttgctattacctccagcaagttcaacgagtgccaactcaacaacctcaacgcgttggaacccgaccaccgcgttgagtccgaaggtggtcttattgaaacatggaactctcaacacccctgagctgcaatgcgccggtgtcactgtttccaaacgcaccctcaaccgcaacggcctccacttgccatcttactcaccttatccccaaatgatcattgtcgttcaaggtgcgtaatattagtaagaagtatttatcagcttaacgtgataacaataatagtaatatgaaatatttattaaattttttataattaatctctgctagaaaatttgattaatcatttttagtagaatttgttttttctcaactaggttttaaaacaccaca

SEQ ID NO: 568 - DNA, 543 bp, Artificial
  Mutations within GlyA3B4 introduced by GmGlyA3B4_T01TALE nuclease
gttcatgtacggttgcagatataaacgaagcatagcttatgtatgaggtgtaacaaaattggaaacaatagccatgcaaggtgaagaatgtcaccaactcagaaacccttcttcattgacgtgtccctcactcactctcctctcttcactataaatcgccactcttcgagtgcatgcttttgctattacctccagcaagttcaacgagtgccaactcaacaacctcaacgcgttggaacccgaccaccgcgttgagtccgaaggtggtcttattgaaacatggaactctcaacaccctgagctgcaatgcgccggtgtcactgtttccaaacgcaccctcaaccgcaacggcctccacttgccatcttactcaccttatccccaaatgatcattgtcgttcaaggtgcgtaatattagtaagaagtatttatcagcttaacgtgataacaataatagtaatatgaaatatttattaaattttttataattaatctctgctagaaatttgattaatcatttttagtagaatttgtttttctcaa

SEQ ID NO: 569 - DNA, 620 bp, Artificial
  Mutations within GlyA3B4 introduced by GmGlyA3B4_T01TALE nuclease
gttcatgtacggttgcagatataaacgaagcatagcttatgtatgaggtgtaacaaaattggaaacaatagccatgcaaggtgaagaatgtcaccaactcagaaacccttcttcattgacgtgtccctcactcactctcctctcttcactataaatcgccactcttcgtgttctccacttcaccaactccttcaaacttattaacactttccttagttcaatatggggaagccaggccgaccgcatgctttgctattacctccagcaagttcaacgagtgccaactcaacaacctcaacgcgttggaacccgaccaccgcgttgagtccgaaggtggtcttattgaaacatggaactctcaacaccctgagctgcaatgcgccggtgtcactgtttccaaacgcaccctcaaccgcaacggcctccacttgccatcttactcaccttatccccaaatgatcattgtcgttcaaggtgcgtaatattagtaagaagtatttatcagcttaacgtgataacaataatagtaatatgaatatttattaatttttataattaatctctgctagaaatttgattaatcatttttagtagaatttgtttttctcaactaggttttt

SEQ ID NO: 570 - DNA, 455 bp, Artificial
  Mutations within GlyA3B4 introduced by GmGlyA3B4_T01TALE nuclease
gttcatgtacggttgcagatataaacgaagcatagcttatgtatgaggtgtaacaaaattggaaacaatagccatgctttgcttattacctccagcaagttcaacgagtgccaactcaacaacctcaacgcgttggaacccgaccaccgcgttgagtccgaaggtggtcttattgaaacatggaactctcaacaccctgagctgcaatgcgccggtgtcactgtttccaaacgcaccctcaaccgcaacggcctccacttgccatcttactcaccttatccccaaatgatcattgtcgttcaaggtgcgtaatattagtaagaagtatttatcagcttaacgtgataacaataatagtaatatgaaatatttattaaattttttataattaatctctgctagaaaatttgattaatcattttttagtagaatttgtttttctcaactaggttttt

SEQ ID NO: 571 - DNA, 528 bp, Artificial; identical to SEQ ID NO: 566
  Mutations within GlyA3B4 introduced by GmGlyA3B4_T01TALE nuclease

SEQ ID NO: 572 - DNA, 477 bp, Artificial; identical to SEQ ID NO: 515
  Mutations within GlyA3B4 introduced by GmGlyA3B4_T01TALE nuclease

SEQ ID NO: 573 - DNA, 604 bp, Artificial
  Mutations within GlyA3B4 introduced by GmGlyA3B4_T01TALE nuclease
gttcatgtacggttgcagatataaacgaagcatagcttatgtatgaggtgtaacaaaattggaaacaatagccatgcaaggtgaagaatgtcaccaactcagaaacccttcttcattgacgtgtccctcactcactctcctctcttcactataaatcgccactcttcgtgttctccacttcaccaactccttcaaacttattaacactttccttagttcaatatggggaagcccttcttcactctctctctttcttccctttgcttgctcgagtgcatgctttgctattacctccagcaagttcaacgagtgccaactcaacaacctcaacgcgttggaacccgaccaccgcgttgagtccgaaggtggtcttattgaaacatggaactctcaacaccctgagctgcaatgcgccggtgtcactgtttccaaacgcaccctcaaccgcaacggcctccacttgccatcttactcaccttatccccaaatgatcattgtcgttcaaggtgcgtaatattagtaagaagtatttatcagcttaacgtgataacaataatagtaatatgaaatatttattaaattttttataattaatctctgctag

SEQ ID NO: 574 - DNA, 653 bp, Artificial
  Mutations within GlyA3B4 introduced by GmGlyA3B4_T01TALE nuclease
  misc_feature (276); (279): n is a or c or t or g
gttcatgtacggttgcagatataaacgaagcatagcttatgtatgaggtgtaacaaaattggaaacaatagccatgcaaggtgaagaatgtcaccaactcagaaacccttcttcattgacgtgtccctcactcactctcctctcttcactataaatcgccactcttcgtgttctccacttcaccaactccttcaaacttattaacactttccttagttcaatatggggaagcccttcttcactctctctctttcttccctttgcttgctctctctncgntgctttgctattacctccagcaagttcaacgagtgccaactcaacaacctcaacgcgttggaacccgaccaccgcgttgagtccgaaggtggtcttattgaaacatggaactctcaacaccctgagctgcaatgcgccggtgtcactgtttccaaacgcaccctcaaccgcaacggcctccacttgccatcttactcaccttatccccaaatgatcattgtcgttcaaggtgcgtaatattagtaagagtatttatcagcttaacgtgataacaatatagtaatatgaaatatttattaaatttttataattaatctctgctagaaaatttgattaatcattttagtagaatttgttttctcaactaggttttt

SEQ ID NO: 575 - DNA, 614 bp, Artificial
  Mutations within GlyA3B4 introduced by GmGlyA3B4_T01TALE nuclease
gttcatgtacggttgcagatataaacgaagcatagcttatgtatgaggtgtaacaaaattggaaacaatagccatgcaaggtgaagaatgtcaccaactcagaaacccttcttcattgacgtgtccctcactcactctcctctcttcactataaatcgccactcttcgtgttctccacttcaccaactccttcaaacttattaacactttccttagttcaatatggggaagcccttcttcactctctctctttcttccctttgctgagtgcatgctttgctattacctccagcaagttcaacgagtgccaactcaacaacctcaacgcgttggaacccgaccaccgcgttgagtccgaaggtggtcttattgaaacatggaactctcaacaccctgagctgcaatgcgccggtgtcactgtttccaaacgcaccctcaaccgcaacggcctccacttgccatcttactcaccttatccccaaatgatcattgtcgttcaaggtgcgtaatattagtaagaagtatttatcagcttaacgtgataacaataatagtaatatgaaatatttattaaattttttataattaatctctgctagaaaatttgattaatc

SEQ ID NO: 576 - DNA, 634 bp, Artificial
  Mutations within GlyA3B4 introduced by GmGlyA3B4_T01TALE nuclease
gttcatgtacggttgcagatataaacgaagcatagcttatgtatgaggtgtaacaaaattggaaacaatagccatgcaaggtgaagaatgtcaccaactcagaaacccttcttcattgacgtgtccctcactcactctcctctcttcactataaatcgccactcttcgtgttctccacttcaccaactccttcaaacttattaacactttccttagttcaatatggggaagcccttcttcacttgtcgagtgcatgctttgctattacctccagcaagttcaacgagtgccaactcacaacctcaacgcgttggaacccgaccaccgcgttgagtccgaaggtggtcttattgaaacatggaactctcaacaccctgagctgcaatgcgccggtgtcactgtttccaaacgcaccctcaaccgcaacggcctccacttgccatcttactcaccttatccccaaatgatcattgtcgttcaaggtgcgtaatattagtaagaagtatttatcagctttaacgtgataacaataatagtaatatgaaatatttattaaattttttataatttaattctctgctagaaaatttgattaatcatttttagtagaatttgtttttctcaactaggtttt

SEQ ID NO: 577 - DNA, 401 bp, Artificial
  Mutations within GlyA3B4 introduced by GmGlyA3B4_T01TALE nuclease
gttcatgtacggttgcagatataaacgaagcatagcttatgtatgaggtgtaacaaaattggaaacaatagccatgctttgctattacctccagcaagttcaacgagtgccaactcaacaacctcaacgcgttggaacccgaccaccgcgttgagtccgaaggtggtcttattgaaacatggaactctcaacaccctgagctgcaatgcgccggtgtcactgtttccaaacgcaccctcaaccgcaacggcctccacttgccatcttactcaccttatccccaatgatcattgtcgttcaaggtgcgtaatattagtaagaagtatttatcagcttaacgtgataacaataatagtaatatgaatatttattaaattttttataattaaattctctgctag

SEQ ID NO: 578 - DNA, 649 bp, Artificial
  Mutations within GlyA3B4 introduced by GmGlyA3B4_T01TALE nuclease
gttcatgtacggttgcagatataaacgaagcatagcttatgtatgaggtgtaacaaaattggaaacaatagccatgcaaggtgaagaatgtcaccaactcagaaacccttcttcattgacgtgtccctcactcactctcctctcttcactataaatcgccactcttcgtgttctccacttcaccaactccttcaaacttattaacactttccttagttcaatatggggaagcccttcttcactctctctctttcttccctttgctattacctccagcaagttcaacgagtgccaactcaacaacctcaacgcgttggaacccgaccaccgcgttgagtcccgaaggtggtcttattgaaacatggaactctcaacaccctgagctgcaatgcgccggtgtcactgtttccaaacgcaccctcaaccgcaacggcctccacttgccatcttactcaccttatccccaaatgatcattgtcgttcaaggtgcgtaatattagtaagaagtatttatcagctttaacgtgataacaataatagtaatatgaaatatttattaaattttttataattaattctctgctagaaaatttgatttaatcatttttagtagaatttgttttttctcaactaggttttaaacaccaca

SEQ ID NO: 579 - DNA, 622 bp, Artificial
  Mutations within GlyA3B4 introduced by GmGlyA3B4_T01TALE nuclease
gttcatgtacggttgcagatataaacgaagcatagcttatgtatgaggtgtaacaaaattggaaacaatagccatgcaaggtgaagaatgtcaccaactcagaaacccttcttcattgacgtgtccctcactcactctcctctcttcactataaatcgccactcttcgtgttctccacttcaccaactccttcaaacttattaacactttccttagttcaatatggggaagcccttcttcactctctctctttcttccctttgcttgcttgtcgagtgcatgctttgctattacctccagcaagttcaacgagtgccaactcaacaacctcaacgcgttggaacccgaccaccgcgttgagtccgaaggtggtcttattgaaacatggaactctcaacaccctgagctgcaatgcgccggtgtcactgtttccaaacgcaccctcaaccgcaacggcctccacttgccatcttactcaccttatccccaaatgatcattgtcgttcaaggtgcgtaatattagtaagaagtatttatcagcttaacgtgataacaataatagtaatatgaaatatttattaaattttttataattaatctctgctagaaaatttgattaatc

SEQ ID NO: 580 - DNA, 401 bp, Artificial
  Mutations within GlyA3B4 introduced by GmGlyA3B4_T01TALE nuclease
gttcatgtacggttgcagatataaacgaagcatagcttatgtatgaggtgtaacaaaattggaaacaatagccatgcaaggtgaagaatgtcaccaactcagaaacctcttcattgacgtgtccctcactcactctcctctcttcactataaatcgccactcttcgtgttctccacttcaccaactccttcaaacttattaacactttccttagttcaatatggggaagcccttcttcactctctctctttcttccctttgcttgctactacttgccatcttactcaccttatccccaaatgatcattgtccgttcaaggtgcgtaatattagtaagaagtatttatcagcttaacgtgataacaataatagtaatatgaaatatttattaaattttttat

SEQ ID NO: 581 - DNA, 530 bp, Artificial
  Mutations within GlyA3B4 introduced by GmGlyA3B4_T01TALE nuclease
gttcatgtacggttgcagatataaacgaagcatagcttatgtatgaggtgtaacaaaattggaaacaatagccatgcaaggtgaagaatgtcaccaactcagaaacccttcttcattgacgtgtccctcactcactctcctctcttcgagtgcatgctttgctattacctccagcaagttcaacgagtgccaactcaacaacctcaacgcgttggaacccgaccaccgcgttgagtccgaaggtggtcttattgaaacatggaactctcaacaccctgagctgcaatgcgccggtgtcactgtttccaaacgcaccctcaaccgcaacggcctccacttgccatcttactcaccttatccccaaatgatcattgtcgttcaaggtgcgtaatattagtaagaagtattttatcagcttaacgtgataacaataatagtaatatgaaatattttattaaattttttataattaatctctgctagaaaatttgattaatcatttttagtagaatttgtttttctcaactagg

SEQ ID NO: 582 - DNA, 536 bp, Artificial; identical to SEQ ID NO: 548
  Mutations within GlyA3B4 introduced by GmGlyA3B4_T01TALE nuclease

SEQ ID NO: 583 - DNA, 635 bp, Artificial
  Mutations within GlyA3B4 introduced by GmGlyA3B4_T01TALE nuclease
gttcatgtacggttgcagatataaacgaagcatagcttatgtatgaggtgtaacaaaattggaaacaatagccatgcaaggtgaagaatgtcaccaactcagaaacccttcttcattgacgtgtccctcactcactctcctctcttcactataaatcgccactcttcgtgttctccacttcaccaactccttcaaacttattaacactttccttagttcaatatggggaagcccttcttcactctctctctttcttccctttgctattacctccagcaagttcaacgagtgccaactcaacaacctcaacgcgttggaacccgaccaccgcgttgagtccgaaggtggtcttattgaaacatggaactctcaacaccctgagctgcaatgcgccggtgtcactgtttccaaacgcaccctcaaccgcaacggcctccacttgccatcttactcaccttatccccaaatgatcattgtcgttcaaggtgcgtaatattagtaagaagtatttatcagcttaacgtgataacaataatagtaatatgaaatatttattaaattttttataattaatctctgctagaaaatttgattaatcatttttagtagaatttgttttttctcaactaggtttt

SEQ ID NO: 584 - DNA, 547 bp, Artificial
  Mutations within GlyA3B4 introduced by GmGlyA3B4_T01TALE nuclease
gttcatgtacggttgcagatataaacgaagcatagcttatgtatgaggtgtaacaaaattggaaacaatagccatgcaaggtgaagaatgtcaccaactcagaaacccttcttcattgacgtgtccctcactcactctcctctcttcactataaatcgccactcttcgtgttctccacttcaccaactccttcaaacttattaacactttccttatcaacaacctcaacgcgttggaacccgaccaccgcgttgagtccgaaggtggtcttattgaaacatggaactctcaacaccctgagctgcaatgcgccggtgtcactgtttccaaacgcaccctcaaccgcaacggcctccacttgccatcttactcaccttatccccaaatgatcattgtcgttcaaggtgcgtaatattagtaagaagtatttatcagcttaacgtgataacaataatagtaatatgaaatatttattaaattttttataattaatctctgctagaaaattgattaatcattttagtagaatttgtttttctcaactagg

SEQ ID NO: 585 - DNA, 653 bp, Artificial
  Mutations within GlyA3B4 introduced by GmGlyA3B4_T01TALE nuclease
gttcatgtacggttgcagatataaacgaagcatagcttatgtatgaggtgtaacaaaattggaaacaatagccatgcaaggtgaagaatgtcaccaactcagaaacccttcttcattgacgtgtccctcactcactctcctctcttcactataaatcgccactcttcgtgttctccacttcaccaactccttcaaacttattaacactttccttagttcaatatggggaagcccttcttcactctctctctttcttccctttgcttgctattgtcgagtgcatgctttgctattacctccagcaagttcaacgagtgccaactcaacaacctcaacgcgttggaacccgaccaccgcgttgagtccgaaggtggtcttattgaaacatggaactctcaacaccctgagctgcaatgcgccggtgtcactgtttccaaacgcaccctcaaccgcaacggcctccacttgccatcttactcaccttatccccaaatgatcattgtcgttcaaggtgcgtaatattagtaagagtatttatcagcttaacgtgataacaataatagtaatatgaaatatttattaaatttttataattaatctctgctagaaaatttgattaatcattttagtagaatttgtttttctcaactagg

SEQ ID NO: 586 - DNA, 642 bp, Artificial
  Mutations within GlyA3B4 introduced by GmGlyA3B4_T01TALE nuclease
gttcatgtacggttgcagatataaacgaagcatagcttatgtatgaggtgtaacaaaattggaaacaatagccatgcaaggtgaagaatgtcaccaactcagaaacccttcttcattgacgtgtccctcactcactctcctctcttcactataaatcgccactcttcgtgttctccacttcaccaactccttcaaacttattaacactttccttagttcaatatggggaagcccttcttcacttgtcgagtgcatgctttgctattacctccagcaagttcaacgagtgccaactcaacaacctcaacgcgttggaacccgaccaccgcgttgagtccgaaggtggtcttattgaaacatggaactctcaacaccctgagctgcaatgcgccggtgtcactgtttccaaacgcaccctcaaccgcaacggcctccacttgccatcttactcaccttatccccaaatgatcattgtcgttcaaggtgcgtaatattagtaagaagtatttatcagcttaacgtgataacaataatagtaatatgaaatatttattaaattttttataattaatctctgctagaaaatttgattaatcatttttagtagaatttgtttttctcaactaggttttaaacaccaca

SEQ ID NO: 587 - DNA, 653 bp, Artificial
  Mutations within GlyA3B4 introduced by GmGlyA3B4_T01TALE nuclease
gttcatgtacggttgcagatataaacgaagcatagcttatgtatgaggtgtaacaaaattggaaacaatagccatgcaaggtgaagaatgtcaccaactcagaaacccttcttcattgacgtgtccctcactcactctcctctcttcactataaatcgccactcttcgtgttctccacttcaccaactccttcaaacttattaacactttccttagttcaatatggggaagcccttcttcactctctctctttcttccctttgcttgctactactcttgtcgagtgcatgctttgctattacctccagcaagttcaacgagtgccaactcaacaacctcaacgcgttggaacccgaccaccgcgttgagtccgaaggtggtcttattgaacatggaactctcaacaccctgagctgcaatgcgccggtgtcactgtttccaaacgcaccctcaaccgcaacggcctccacttgccatcttactcaccttatccccaaatgatcattgtcgttcaaggtgcgtatattagtaagaagtatttatcagcttaacgtgatacaataatagtaatatgaaatatttattaaattttttataattaatctctgctagaaaatttgattaatcatttttagtagaatttgtttttcttc

SEQ ID NO: 588 - DNA, 656 bp, Artificial
  Mutations within GlyA3B4 introduced by GmGlyA3B4_T01TALE nuclease
gttcatgtacggttgcagatataaacgaagcatagcttatgtatgaggtgtaacaaaattggaaacaatagccatgcaaggtgaagaatgtcaccaactcagaaacccttcttcattgacgtgtccctcactcactctcctctcttcactataaatcgccactcttcgtgttctccacttcaccaactccttcaaacttattaacactttccttagttcaatatggggaagcccttcttcactctctctctttcttccctttgcttgctttgctattacctccagcaagttcaacgagtgccaactcaacaacctcaacgcgttggaacccgaccaccgcgttgagtccgaaggtggtcttattgaaacatggaactctcaacacccctgagctgcaatgcgccggtgtcactgtttccaaacgcaccctcaaccgcaacggcctccacttgccatcttactcaccttatccccaaatgatcattgtcgttcaaggtgcgtaatattagtaagaagtatttatcagcttaacgtgataacaataatagtaatatgaaatatttattaaattttttataattaatctctgctagaaaatttgattaatcatttttagtagaatttgttttttctcaactaggttttaaaacaccaca

SEQ ID NO: 589 - DNA, 601 bp, Artificial
  Mutations within GlyA3B4 introduced by GmGlyA3B4_T01TALE nuclease
gttcatgtacggttgcagatataaacgaagcatagcttatgtatgaggtgtaacaaaattggaaacaatagccatgcaaggtgaagaatgtcaccaactcagaaacccttcttcattgacgtgtccctcactcactctcctctcttcactataaatcgccactcttcgtgttctccacttcaccaactccttcaaacttattaacactttccttagttcaatatggggaagcccttcttcactctctctctttcttccctttgcttgtcgagtgcatgctttgctattacctccagcaagttcaacgagtgccaactcaacaacctcaacgcgttggaacccgaccaccgcgttgagtccgaaggtggtcttattgaaacatggaactctcaacaccctgagctgcaatgcgccggtgtcactgtttccaacgcaccctcaaccgcaacggcctccacttgccatcttactcaccttatccccaaatgatcattgtcgttcaaggtgcgtaatattagtaagaagtatttatcagcttaacgtgataacaataatagtaatatgaaatatttattaaatttttataattaatctctgctag

SEQ ID NO: 590 - DNA, 389 bp, Artificial
  Mutations within GlyA3B4 introduced by GmGlyA3B4_T01TALE nuclease
gttcatgtacggttgcagatataaacgaagcatagcttatgtatgaggtgtaacaaaattggaaacaatagccatgcaaggtgaagaatgtcaccaactcagaaacctcttctattgacgtgtccctcactcactctcctctcttcactataaatcgccactcattcgtcgttctcctacttcaccaactccttcaaacttattaacactttccttgtcgagtgcatgctttgctattacctccagcaagttcaacgagtgccaactcaacaacctcaacgcgttggaaccgaccaccgcgttgagtccgaaggtggtcttattgaacatggaactctcaacaccctgagctgcaatgcgccggtgtcactgtttccaaacgcaccctc

SEQ ID NO: 591 - DNA, 577 bp, Artificial
  Mutations within GlyA3B4 introduced by GmGlyA3B4_T01TALE nuclease
gttcatgtacggttgcagatataaacgaagcatagcttatgtatgaggtgtaacaaaattggaaacaatagccatgcaaggtgaagaatgtcaccaactcagaaacccttcttcattgacgtgtccctcactcactctcctctcttcactataaatcgccactcttcgtgttctccacttcaccaactccttcaaacttattaacactttccttagttcaatatggggaagcccttcttcactctctctctttcttccctttgctattacctccagcaagttcaacgagtgccaactcaacaacctcaacgcgttggaacccgaccaccgcgttgagtccgaaggtggtcttattgaaacatggaactctcaacaccctgagctgcaatgcgccggtgtcactgtttccaaacgcaccctcaaccgcaacggcctccacttgccatcttactcaccttactccccaaatgatcattgtcgttcaaggtgcgtaatattagtaagaagtatttatcagcttaacgtgataacaataatagtaatatgaaatatttattaaatttttataattaatctc

SEQ ID NO: 592 - DNA, 620 bp, Artificial
  Mutations within GlyA3B4 introduced by GmGlyA3B4_T01TALE nuclease
gttcatgtacggttgcagatataaacgaagcatagcttatgtatgaggtgtaacaaaattggaaacaatagccatgcaaggtgaagaatgtcaccaactcagaaacccttcttcattgacgtgtccctcactcactctcctctcttcactataaatcgccactcttcgtgttctccacttcaccaactccttcaaacttattaacactttccttagttcaatatggggaagcccttcttcactctctctctttcttccctttgcttgctgcaagttcaacgagtgccaactcaacaacctcaacgcgttggaacccgaccaccgcgttgagtccgaaggtggtcttattgaaacatggaactctcaacaccctgagctgcaatgcgccggtgtcactgtttccaaacgcaccctcaaccgcaacggcctccacttgccatcttactcaccttatccccaaatgatcattgtcgttcaaggtgcgtaatattagtaagaagtatttatcagcttaacgtgataacaataatagtaatatgaaatatttattaattttttataattaatctctgctagaaaatttgattaatcatttttagtagaatttgtttttctcaact

SEQ ID NO: 593 - DNA, 528 bp, Artificial; identical to SEQ ID NO: 566
  Mutations within GlyA3B4 introduced by GmGlyA3B4_T01TALE nuclease

SEQ ID NO: 594 - DNA, 606 bp, Artificial
  Mutations within GlyA3B4 introduced by GmGlyA3B4_T01TALE nuclease
gttcatgtacggttgcagatataaacgaagcatagcttatgtatgaggtgtaacaaaattggaaacaatagccatgcaaggtgaagaatgtcaccaactcagaaacccttcttcattgacgtgtccctcactcactctcctctcttcactataaatcgccactcttcgtgttctccacttcaccaactccttcaaacttattaacactttccttagttcaatatggggaagcccttcttcactctctctctttcttccctttgcttgctcgagtgcatgctttgctattacctccagcaagttcaacgagtgccaactcaacaacctcaacgcgttggaacccgaccaccgcgttgagtccgaaggtggtcttattgaaacatggaactctcaacaccctgagctgcaatgcgccggtgtcactgtttccaaacgcaccctcaaccgcaacggcctccacttgccatcttactcaccttatcccccaaatgatcattgtcgttcaaggtgcgtaaatattagtaagaagtatttatcagcttaacgtgataacaataatagtaatatgaaatatttattaaattttttataattaatctctgctag

SEQ ID NO: 595 - DNA, 666 bp, Artificial
  Mutations within GlyA3B4 introduced by GmGlyA3B4_T01TALE nuclease
gttcatgtacggttgcagatataaacgaagcatagcttatgtatgaggtgtaacaaaattggaaacaatagccatgcaaggtgaagaatgtcaccaactcagaaacccttcttcattgacgtgtccctcactcactctcctctcttcactataaatcgccactcttcgtgttctccacttcaccaactccttcaaacttattaacactttccttagttcaatatggggaagcccttcttcactctctctctttcttccctttgcttgcttgtcgagtgcatgctttgctattacctccagcaagttcaacgagtgccaactcaacaacctcaacgcgttggaacccgaccaccgcgttgagtccgaaggtggtcttattgaaacatggaactctcaacaccctgagctgcaatgcgccggtgtcactgtttccaaacgcaccctcaaccgcaacggcctccacttgccatcttactcaccttatccccaaatgatcattgtcgttcaaggtgcgtaatattagtaagaagtatttatcagcttaacgtgataacaataatagtaatatgaaatatttattaaattttttataattaatctctgctagaaaatttgattaatctttttagtagaattgttttttctcaactaggtttaaacaccaca

SEQ ID NO: 596 - DNA, 653 bp, Artificial
  Mutations within GlyA3B4 introduced by GmGlyA3B4_T01TALE nuclease
gttcatgtacggttgcagatataaacgaagcatagcttatgtatgaggtgtaacaaaattggaaacaatagccatgcaaggtgaagaatgtcaccaactcagaaacccttcttcattgacgtgtccctcactcactctcctctcttcactataaatcgccactcttcgtgttctccacttcaccaactccttcaaacttattaacactttccttagttcaatatggggaagcccttcttcactctctctcttgtcgagtgcatgctttgctattacctccagcaagttcaacgagtgccaactcaacaacctcaacgcgttggaacccgaccaccgcgttgagtccgaaggtggtcttattgaaacatggaactctcaacaccctgagctgcaatgcgccggtgtcactgtttccaaacgcaccctcaaccgcaacggcctccacttgccatcttactcaccttatccccaaatgatcattgtcgttcaaggtgcgtaatattagtaagaagtatttatcagcttaacgtgataacaataatagtaatatgaaatatttattaaattttttataattaatctctgctagaaaattttgattaatcatttttagtagaatttgttttttctcaactaggttttaaaacaccaca

SEQ ID NO: 597 - DNA, 637 bp, Artificial
  Mutations within GlyA3B4 introduced by GmGlyA3B4_T01TALE nuclease
gttcatgtacggttgcagatataaacgaagcatagcttatgtatgaggtgtaacaaaattggaaacaatagccatgcaaggtgaagaatgtcaccaactcagaaacccttcttcattgacgtgtccctcactcactctcctctcttcactataaatcgccactcttcgtgttctccacttcaccaactccttcaaacttattaacactttccttagttcaatatggggaagcccttcttcactctctctcttgtcgagtgcatgctttgctattacctccagcaagttcaacgagtgccaactcaacaacctcaacgcgttggaacccgaccaccgcgttgagtccgaaggtggtcttattgaaacatggaactctcaacaccctgagctgcaatgcgccggtgtcactgtttccaaacgcaccctcaaccgcaacggcctccacttgccatcttactcaccttatccccaaatgatcattgtcgttcaaggtgcgtaatattagtaagaagtatttatcagcttaacgtgataacaataatagtaatatgaaatatttattaaattttttataattaatctctgctagaaaatttgattaatcatttttagtagaatttgttttttctcaactagg

SEQ ID NO: 598 - DNA, 649 bp, Artificial
  Mutations within GlyA3B4 introduced by GmGlyA3B4_T01TALE nuclease
gttcatgtacggttgcagatataaacgaagcatagcttatgtatgaggtgtaacaaaattggaaacaatagccatgcaaggtgaagaatgtcaccaactcagaaacccttcttcattgacgtgtccctcactcactctcctctcttcactataaatcgccactcttcgtgttctccacttcaccaactccttcaaacttattaacactttccttagttcaatatggggaagcccttcttcactctctctctttcttccctttgcttgtcgagtgcatgctttgctattacctccagcaagttcaacgagtgccaactcaacaacctcaacgcgttggaacccgaccaccgcgttgagtccgaaggtggtcttattgaaacatggaactctcaacaccctgagctgcaatgcgccggtgtcactgtttccaaacgcaccctcaaccgcaacggcctccacttgccatcttactcaccttatccccaaatgatcattgtcgttcaaggtgcgtaatattagtaagaagtatttatcagcttaacgtgataacaataatagtaatatgaaatatttattaaattttttataattaatctctgctagaaaatttgattaatcatttttagtagaatttgttttttctcaacta

SEQ ID NO: 599 - DNA, 585 bp, Artificial
  Mutations within GlyA3B4 introduced by GmGlyA3B4_T01TALE nuclease
gttcatgtacggttgcagatataaacgaagcatagcttatgtatgaggtgtaacaaaattggaaacaatagccatgcaaggtgaagaatgtcaccaactcagaaacccttcttcattgacgtgtccctcactcactctcctctcttcactataaatcgccactcttcgtgttctccacttcaccaactccttcaaacttattaacactttccttagttcaatatggggaagcccttcttcactctctctctttcttccctttgcttgccccgaccaccgcgttgagtccgaaggtggtcttattgaaacatggaactctcaacaccctgagctgcaatgcgccggtgtcactgtttccaaacgcaccctcaaccgcaacggcctccacttgccatcttactcaccttatccccaaatgatcattgtcgttcaaggtgcgtaatattagtaagaagtatttatcagcttaacgtgataacaataatagtaatatgaaatatttattaaattttttatattaatctctgctagaaaatttgattaatcatttttagtagaatttgtttttctcaactaggttttaaa

SEQ ID NO: 600 - DNA, 655 bp, Artificial
  Mutations within GlyA3B4 introduced by GmGlyA3B4_T01TALE nuclease
gttcatgtacggttgcagatataaacgaagcatagcttatgtatgaggtgtaacaaaattggaaacaatagccatgcaaggtgaagaatgtcaccaactcagaaacccttcttcattgacgtgtccctcactcactctcctctcttcactataaatcgccactcttcgtgttctccacttcaccaactccttcaaacttattaacactttccttagttcaatatggggaagcccttcttcactctctctctttcttccctttgcttgcttgtcgagtgcatgctttgctattacctccagcaagttcaacgagtgccaactcaacaacctcaacgcgttggaacccgaccaccgcgttgagtccgaaggtggtcttattgaaacatggaactctcaacaccctgagctgcaatgcgccggtgtcactgtttccaaacgcaccctcaaccgcaacggcctccacttgccatcttactcaccttatccccaaatgatcattgtcgttcaaggtgcgtaatattagtaagaagtatttatcagcttaacgtgataacaataatagtaatatgaaatatttattaaattttttataattaatctctgctagaaaatttgattaatcatttttagtagaatttgttttttctcaactagg

SEQ ID NO: 601 - DNA, 529 bp, Artificial
  Mutations within GlyA3B4 introduced by GmGlyA3B4_T01TALE nuclease
gttcatgtacggttgcagatataaacgaagcatagcttatgtatgaggtgtaacaaaattggaaacaatagccatgcaaggtgaagaatgtcaccaactcagaaacccttcttcattgacgtgtccctcactcactctcctctcttcgagtgcatgctttgctattacctccagcaagttcaacgagtgccaactcaacaacctcaacgcgttggaacccgaccaccgcgttgagtccgaaggtggtcttattgaaacatggaactctcaacaccctgagctgcaatgcgccggtgtcactgtttccaaacgcaccctcaaccgcaacggcctccacttgccatcttactcaccttatccccaaatgatcattgtcgttcaaggtgcgtaatattagtaagaagtattttatcagcttaacgtgataacaataatagtaatatgaaatatttattaaattttttataattaatctctgctagaaaatttgattaatcatttttagtagaatttgtttttctcaactagg

SEQ ID NO: 602 - DNA, 650 bp, Artificial
  Mutations within GlyA3B4 introduced by GmGlyA3B4_T01TALE nuclease
gttcatgtacggttgcagatataaacgaagcatagcttatgtatgaggtgtaacaaaattggaaacaatagccatgcaaggtgaagaatgtcaccaactcagaaacccttcttcattgacgtgtccctcactcactctcctctcttcactataaatcgccactcttcgtgttctccacttcaccaactccttcaaacttattaacactttccttagttcaatatggggaagcccttcttcactctctcttgtcgagtgcatgctttgctattacctccagcaagttcaacgagtgccaactcaacaacctcaacgcgttggaacccgaccaccgcgttgagtccgaaggtggtcttattgaaacatggaactctcaacaccctgagctgcaatgcgccggtgtcactgtttccaaacgcaccctcaaccgcaacggcctccacttgccatcttactcaccttatccccaaatgatcattgtcgttcaaggtgcgtaatattagtaagaagtatttatcagcttaacgtgataacaataatagtaatatgaaatatttattaaattttttataattaatctctgctagaaaatttgattaatcatttttagtagaatttgttttttctcaactaggttttaaaacaccaca

SEQ ID NO: 603 - DNA, 411 bp, Artificial; identical to SEQ ID NO: 523
  Mutations within GlyA3B4 introduced by GmGlyA3B4_T01TALE nuclease

SEQ ID NO: 604 - DNA, 596 bp, Artificial
  Mutations within GlyA3B4 introduced by GmGlyA3B4_T01TALE nuclease
gttcatgtacggttgcagatataaacgaagcatagcttatgtatgaggtgtaacaaaattggaaacaatagccatgcaaggtgaagaatgtcaccaactcagaaacccttcttcattgacgtgtccctcactcactctcctctcttcactataaatcgccactcttcgtgttctccacttcaccaactccttcaaacttattaacactttccttagttcaatatggggaagcccttcttcactctctctctttcttccctttgcttgcttgtcgagtgcatgctttgctattacctccagcaagttcaacgagtgccaactcaacaacctcaacgcgttggaacccgaccaccgcgttgagtccgaaggtggtcttattgaaacatggaactctcaacaccctgagctgcaatgcgccggtgtcactgtttccaaacgcaccctcaaccgcaacggcctccacttgccatcttactcaccttatccccaaatgatcattgtcgttcaaggtgcgtaaatattagtaagaagtatttatcagcttaacgtgataacaataatagtaatatgaaatatttattaaattttttataatt

SEQ ID NO: 605 - DNA, 667 bp, Artificial
  Mutations within GlyA3B4 introduced by GmGlyA3B4_T01TALE nuclease
gttcatgtacggttgcagatataaacgaagcatagcttatgtatgaggtgtaacaaaattggaaacaatagccatgcaaggtgaagaatgtcaccaactcagaaacccttcttcattgacgtgtccctcactcactctcctctcttcactataaatcgccactcttcgtgttctccacttcaccaactccttcaaacttattaacactttccttagttcaatatggggaagcccttcttcactctctctctttcttccctttgcttgctcttgtcgagtgcatgctttgctattacctccagcaagttcaacgagtgccaactcaacaacctcaacgcgttggaacccgaccaccgcgttgagtccgaaggtggtcttattgaaacatggaactctcaacaccctgagctgcaatgcgccggtgtcactgtttccaaacgcaccctcaaccgcaacggcctccacttgccatcttactcaccttatccccaaatgatcattgtcgttcaaggtgcgtaatattagtaagaagtatttatcagcttaacgtgataacaatatagtaatatgaaatatttattaaatttttataattaatctctgctagaaaatttgattaatcattttagtagaatttgtttttctcaactaggtttttaaaacacca

SEQ ID NO: 606 - DNA, 654 bp, Artificial
  Mutations within GlyA3B4 introduced by GmGlyA3B4_T01TALE nuclease
gttcatgtacggttgcagatataaacgaagcatagcttatgtatgaggtgtaacaaaattggaaacaatagccatgcaaggtgaagaatgtcaccaactcagaaacccttcttcattgacgtgtccctcactcactctcctctcttcactataaatcgccactcttcgtgttctccacttcaccaactccttcaaacttattaacactttccttagttcaatatggggaagcccttcttcactctctctctttcttccctttgcttgctttgctattacctccagcaagttcaacgagtgccaactcaacaacctcaacgcgttggaacccgaccaccgcgttgagtccgaaggtggtcttattgaaacatggaactctcaacaccctgagctgcaatgcgccggtgtcactgtttccaaacgcaccctcaaccgcaacggcctccacttgccatcttactcaccttatccccaaatgatcattgtcgttcaaggtgcgtaatattagtaagaagtatttatcagcttaacgtgataacaataatagtaatatgaaatatttattaaattttttataattaatctctgctagaaaatttgattaatcatttttagtagaatttgttttttctcaactaggttttaaacaccaca

SEQ ID NO: 607 - DNA, 641 bp, Artificial
  Mutations within GlyA3B4 introduced by GmGlyA3B4_T01TALE nuclease
gttcatgtacggttgcagatataaacgaagcatagcttatgtatgaggtgtaacaaaattggaaacaatagccatgcaaggtgaagaatgtcaccaactcagaaacccttcttcattgacgtgtccctcactcactctcctctcttcactataaatcgccactcttcgtgttctccacttcaccaactccttcaaacttattaacactttccttagttcaatatggggaagcccttcttcactctctctcatgctttgctattacctccagcaagttcaacgagtgccaactcaacaacctcaacgcgttggaacccgaccaccgcgttgagtccgaaggtggtcttattgaaacatggaactctcaacaccctgagctgcaatgcgccggtgtcactgtttccaaacgcaccctcaaccgcaacggcctccacttgccatcttactcaccttatccccaaatgatcattgtcgttcaaggtgcgtaatattagtaagaagtatttatcagctttaacgtgataacaataatagtaatatgaaatatttattaaattttttataattaatctctgctagaaaatttgattaatcatttttagtagaatttgttttttctcaactaggttttaaacaccaca

SEQ ID NO: 608 - DNA, 607 bp, Artificial
  Mutations within GlyA3B4 introduced by GmGlyA3B4_T01TALE nuclease
gttcatgtacggttgcagatataaacgaagcatagcttatgtatgaggtgtaacaaaattggaaacaatagccatgcaaggtgaagaatgtcaccaactcagaaacccttcttcattgacgtgtccctcactcactctcctctcttcactataaatcgccactcttcgtgttctccacttcaccaactccttcaaacttattaacactttccttagttcaatatggggaagcccttcttcactctctctctttcttccctttgcttgattgtcgagtgcatgctttgctattacctccagcaagttcaacgagtgccaactcaacaacctcaacgcgttggaacccgaccaccgcgttgagtccgaaggtggtcttattgaaacatggaactctcaacaccctgagctgcaatgcgccggtgtcactgtttccaaacgcaccctcaaccgcaacggcctccacttgccatcttactcaccttatccccaaatgatcattgtcgttcaaggtgcgtaatattagtaagaagtatttatcagcttaacgtgataacaataatagtaatatgaaatatttattaaattttttataattaatctctgctag

SEQ ID NO: 609 - DNA, 666 bp, Artificial
  Mutations within GlyA3B4 introduced by GmGlyA3B4_T01TALE nuclease
gttcatgtacggttgcagatataaacgaagcatagcttatgtatgaggtgtaacaaaattggaaacaatagccatgcaaggtgaagaatgtcaccaactcagaaacccttcttcattgacgtgtccctcactcactctcctctcttcactataaatcgccactcttcgtgttctccacttcaccaactccttcaaacttattaacactttccttagttcaatatggggaagcccttcttcactctctctctttcttccctttgcttgctatgtcgagtgcatgctttgctattacctccagcaagttcaacgagtgccaactcaacaacctcaacgcgttggaacccgaccaccgcgttgagtccgaaggtggtcttattgaaacatggaactctcaacaccctgagctgcaatgcgccggtgtcactgtttccaaacgcaccctcaaccgcaacggcctccacttgccatcttactcaccttatccccaaatgatcattgtcgttcaaggtgcgtaatattagtaagagtatttatcagcttaacgtgataacaataatagtaatatgaaatatttattaaatttttataattaatctctgctagaaaatttgattaatcattttagtagaatttgtttttctcaactaggtttttaaaacacca

SEQ ID NO: 610 - DNA, 609 bp, Artificial
  Mutations within GlyA3B4 introduced by GmGlyA3B4_T01TALE nuclease
gttcatgtacggttgcagatataaacgaagcatagcttatgtatgaggtgtaacaaaattggaaacaatagccatgcaaggtgaagaatgtcaccaactcagaaacccttcttcattgacgtgtccctcactcactctcctctcttcactataaatcgccactcttcgtgttctccacttcaccaactccttcaaacttattaacactttccttagttcaatatggggaagcccttcttcactctctctctttcttccctttgcttgcttgtcgagtgcatgctttgctattacctccagcaagttcaacgagtgccaactcaacaacctcaacgcgttggaacccgaccaccgcgttgagtccgaaggtggtcttattgaaacatggaactctcaacaccctgagctgcaatgcgccggtgtcactgtttccaaacgcaccctcaaccgcaacggcctccacttgccatcttactcaccttatcccccaaatgatcattgtcgttcaaggtgcgtaaatattagtaagaagtatttatcagcttaacgtgataacaataatagtaatatgaaatatttattaaattttttataattaatctctgctag

SEQ ID NO: 611 - DNA, 543 bp, Artificial
  Mutations within GlyA3B4 introduced by GmGlyA3B4_T01TALE nuclease
gttcatgtacggttgcagatataaacgaagcatagcttatgtatgaggtgtaacaaaattggaaacaatagccatgcaaggtgaagaatgtcaccaactcagaaacccttcttcattgacgtgtccctcactcactctcctctcttcactataaatcgccactcttcgtgttctccacttcacctccagcaagttcaacgagtgccaactcaacaacctcaacgcgttggaacccgaccaccgcgttgagtccgaaggtggtcttattgaaacatggaactctcaacaccctgagctgcaatgcgccggtgtcactgtttccaaacgcaccctcaaccgcaacggcctccacttgccatcttactcaccttatcccccaaatgatcattgtcgttcaaggtgcgtaatattagtaagaagtatttatcagcttaacgtgataacaataatagtaatatgaaatatttattaaattttttataattaatctctgctagaaatttgattaatcatttttagtagaatttgtttttctcaactagg

SEQ ID NO: 612 - DNA, 463 bp, Artificial
  Mutations within GlyA3B4 introduced by GmGlyA3B4_T01TALE nuclease
gttcatgtacggttgcagatataaacgaagcatagcttatgtatgaggtgtaacaaaattggaaacaatagccatgctttgctattacctccagcaagttcaacgagtgccaactcaacaacctcaacgcgttggaacccgaccaccgcgttgagtccgaaggtggtcttattgaaacatggaactctcaacaccctgagctgcaatgcgccggtgtcactgtttccaaacgcaccctcaaccgcaacggcctccacttgccatcttactcaccttatccccaaatgatcattgtcgttcaaggtgcgtaatattagtaagaagtatttatcagcttaacgtgataacaataatagtaatatgaaatatttattaaattttttataattaatctctgctagaaaatttgattaatcatttttagtagaatttgtttttctcaactaggtttttaaacaccaca

SEQ ID NO: 613 - DNA, 442 bp, Artificial; identical to SEQ ID NO: 513
  Mutations within GlyA3B4 introduced by GmGlyA3B4_T01TALE nuclease

SEQ ID NO: 614 - DNA, 667 bp, Artificial
  Mutations within GlyA3B4 introduced by GmGlyA3B4_T01TALE nuclease
gttcatgtacggttgcagatataaacgaagcatagcttatgtatgaggtgtaacaaaattggaaacaatagccatgcaaggtgaagaatgtcaccaactcagaaacccttcttcattgacgtgtccctcactcactctcctctcttcactataaatcgccactcttcgtgttctccacttcaccaactccttcaaacttattaacactttccttagttcaatatggggaagcccttcttcactctttctctttcttccctttgcttgctgtcgagtgcatgctttgctattacctccagcaagttcaacgagtgccaactcaacaacctcaacgcgttggaacccgaccaccgcgttgagtccgaaggtggtcttattgaaacatggaactctcaacaccctgagctgcaatgcgccggtgtcactgtttccaaacgcaccctcaaccgcaacggcctccacttgccatcttactcaccttatccccaaatgatcattgtcgttcaaggtgcgtaatattagtaagaagtatttatcagcttaacgtgataacaataatagtaatatgaaatatttattaaattttttataattaatctctgctagaaaatttgattaatctttttagtagaattgttttttctcaactaggttttaaaacaccaca

SEQ ID NO: 615 - DNA, 617 bp, Artificial
  Mutations within GlyA3B4 introduced by GmGlyA3B4_T01TALE nuclease
gttcatgtacggttgcagatataaacgaagcatagcttatgtatgaggtgtaacaaaattggaaacaatagccatgcaaggtgaagaatgtcaccaactcagaaacccttcttcattgacgtgtccctcactcactctcctctcttcactataaatcgccactcttcgtgttctccacttcaccaactccttcaaacttattaacactttccttagttcaatatgtcgagtgcatgctttgctattacctccagcaagttcaacgagtgccaactcaacaacctcaacgcgttggaacccgaccaccgcgttgagtccgaaggtggtcttattgaaacatggaactctcaacaccctgagctgcaatgcgccggtgtcactgtttccaaacgcaccctcaaccgcaacggcctccacttgccatcttactcaccttatccccaaatgatcattgtcgttcaaggtgcgtaatattagtaagaagtatttatcagcttaacgtgataacaataatagtaatatgaaatatttattaatttttataattaatctctgctagaaaatttgattaatcatttttagtagaatttgtttttctcaactaggtttttaaaaca

SEQ ID NO: 616 - DNA, 433 bp, Artificial
  Mutations within GlyA3B4 introduced by GmGlyA3B4_T01TALE nuclease
gttcatgtacggttgcagatataaacgaagcatagcttatgtatgaggtgtaacaaaattggaaacaatagccatgctttgctattacctccagcaagttcaacgagtgccaactcaacaacctcaacgcgttggaacccgaccaccgcgttgagtccgaaggtggtcttattgaaacatggaactctcaacaccctgagctgcaatgcgccggtgtcactgtttccaaacgcaccctcaaccgcaacggcctccacttgccatcttactcaccttatccccaaatgatcattgtcgttcaaggtgcgtaatattagtaagaagtatttatcagcttaacgtgataacaataatagtaatatgaaatatttattaaattttttataattaatctactgctatgaaaatttgatttaattcatttttagtagaa

SEQ ID NO: 617 - DNA, 670 bp, Artificial
  Mutations within GlyA3B4 introduced by GmGlyA3B4_T01TALE nuclease
gttcatgtacggttgcagatataaacgaagcatagcttatgtatgaggtgtaacaaaattggaaacaatagccatgcaaggtgaagaatgtcaccaactcagaaacccttcttcattgacgtgtccctcactcactctcctctcttcactataaatcgccactcttcgtgttctccacttcaccaactccttcaaacttattaacactttccttagttcaatatggggaagcccttcttcactctctctctttcttccctttgcttgcttgtcgagtgcatgctttgctattacctccagcaagttcaacgagtgccaactcaacaacctcaacgcgttggaacccgaccaccgcgttgagtccgaaggtggtcttattgaaacatggaactctcaacaccctgagctgcaatgcgccggtgtcactgtttccaaacgcaccctcaaccgcaacggcctccacttgccatcttactcaccttatccccaaatgatcattgtcgttcaaggtgcgtaatattagtaagaagtatttatcagcttaacgtgataacaataatagtaatatgaaatatttattaaattttttataattaatctctgctagaaaatttgattaatcatttttagtagaatttgttttttctcaactaggttttaaaacaccaca

SEQ ID NO: 618 - DNA, 671 bp, Artificial
  Mutations within GlyA3B4 introduced by GmGlyA3B4_T01TALE nuclease
gttcatgtacggttgcagatataaacgaagcatagcttatgtatgaggtgtaacaaaattggaaacaatagccatgcaaggtgaagaatgtcaccaactcagaaacccttcttcattgacgtgtccctcactcactctcctctcttcactataaatcgccactcttcgtgttctccacttcaccaactccttcaaacttattaacactttccttagttcaatatggggaagcccttcttcactctctctctttcttccctttgcttgttgtcgagtgcatgctttgctattacctccagcaagttcaacgagtgccaactcaacaacctcaacgcgttggaacccgaccaccgcgttgagtccgaaggtggtcttattgaaacatggaactctcaacaccctgagctgcaatgcgccggtgtcactgtttccaaacgcaccctcaaccgcaacggcctccacttgccatcttactcaccttatccccaaatgatcattgtcgttcaaggtgcgtaaatattagtaagaagtatttatcagcttaacgtgataacaataatagtaatatgaaatatttattaaattttttataattaatctctgctagaaaatttgattaatcatttttagtagaatttgttttttctcaactaggttttaaaacaccacac

SEQ ID NO: 619 - DNA, 607 bp, Artificial
  Mutations within GlyA3B4 introduced by GmGlyA3B4_T01TALE nuclease
gttcatgtacggttgcagatataaacgaagcatagcttatgtatgaggtgtaacaaaattggaaacaatagccatgcaaggtgaagaatgtcaccaactcagaaacccttcttcattgacgtgtccctcactcactctcctctcttcactataaatcgccactcttcgtgttctccacttcaccaactccttcaaacttattaacactttccttagttcaatatggggaagcccttcttcactctctctctttcttccctttgctttcttgtcgagtgcatgctttgctattacctccagcaagttcaacgagtgccaactcaacaacctcaacgcgttggaacccgaccaccgcgttgagtccgaaggtggtcttattgaaacatggaactctcaacaccctgagctgcaatgcgccggtgtcactgtttccaacgcaccctcaaccgcaacggcctccacttgccatcttactcaccttatccccaaatgatcattgtcgttcaaggtgcgtaaatattagtaagaagtatttatcagcttaacgtgataacaataatagtaatatgaaatatttattaaattttttataattaatctctgctag

SEQ ID NO: 620 - DNA, 564 bp, Artificial
  Mutations within GlyA3B4 introduced by GmGlyA3B4_T01TALE nuclease
gttcatgtacggttgcagatataaacgaagcatagcttatgtatgaggtgtaacaaaattggaaacaatagccatgcaaggtgaagaatgtcaccaactcagaaacccttcttcattgacgtgtccctcactcactctcctctcttcactataaatcgccactcttcgtgttctccacttcaccaactccttcaaacttattaacactttccttagttcaatatggggaagcccttcttcactctctctctttcttccctttgcttgccccgaccaccgcgttgagtccgaaggtggtcttattgaaacatggaactctcaacaccctgagctgcaatgcgccggtgtcactgtttccaaacgcaccctcaaccgcaacggcctccacttgccatcttactcaccttatccccaaatgatcattgtcgttcaaggtgcgtaatattagtaagaagtatttatcagcttaacgtgataacaataaatagtaatatgaaatatttattaaattttttataattaatctctgctagaaaatttgattaatcattttagtagaatttg

SEQ ID NO: 621 - DNA, 399 bp, Artificial
  Mutations within GlyA3B4 introduced by GmGlyA3B4_T01TALE nuclease
gttcatgtacggttgcagatataaacgaagcatagcttatgtatgaggtgtaacaaaattggaaacaatagccatgcaaggtgaagaatgtcaccaactcagaaacccttcttcattgacgtgtccctcactcactctcctctcttcactataaatcgccactcttcgtgttctccacttcaccaactccttcaaacttattaacactttccttagttcaatatggggaagcccttcttcactctctctctttcttccctttgcttgctactattgtcgttcaaggtgcgtaatattagtaagaagtatttatcagcttaacgtgataacaataatagtaatatgaaatatttattaaattttttataattaatctctgctagaaaatttgattaatca

SEQ ID NO: 622 - DNA, 718 bp, Artificial
  Mutations within GlyA3B4 introduced by GmGlyA3B4_T01TALE nuclease
gttcatgtacggttgcagatataaacgaagcatagcttatgtatgaggtgtaacaaaattggaaacaatagccatgcaaggtgaagaatgtcaccaactcagaaacccttcttcattgacgtgtccctcactcactctcctctcttcactataaatcgccactcttcgtgttctccacttcaccaactccttcaaacttattaacactttccttagttcaatatggggaagcccttcttcactctctctctttcttccctttgcttgctattcctaatttacccttgccttttctctttctctttcttccctttgtcttactcttgtcgagtgcatgctttgctattacctccagcaagttcaacgagtgccaactcaacaacctcaacgcgttggaaccccgaccaccgcgttgagtccgaaggtggtcttattgaaacatggaactctcaacaccctgagctgcaatgcgccggtgtcactgtttccaaacgcaccctcaaccgcaacggcctccacttgccatcttactcaccttatccccaaatgatcattgtcgttcaaggtgcgtaatattagtaagaagtatttatcagcttaacgtgataacaataatagtaatatgaaatatttattaaatttttataattaatctctgctagaaaatttgattaatcatttttagtagaatttgttttttctcaactaggttttaaaa

SEQ ID NO: 623 - DNA, 763 bp, Artificial
  Mutations within GlyA3B4 introduced by GmGlyA3B4_T01TALE nuclease
gttcatgtacggttgcagatataaacgaagcatagcttatgtatgaggtgtaacaaaattggaaacaatagccatgcaaggtgaagaatgtcaccaactcagaaacccttcttcattgacgtgtccctcactcactctcctctcttcactataaatcgccactcttcgtgttctccacttcaccaactccttcaaacttattaacactttccttagttcaatatggggaagcccttcttcactctctctctttcttccctttgcttgctaccacctgctgggggtcaagccgtgggcctggcacagcaccggcaacagccgctggaccgtctccagcgcctgcttgccaccgccattgctggcgatcttgtcgagtgcatgctttgctattacctccagcaagttcaacgagtgccaactcaacaacctcacgcgttggaacccgaccaccgcgttgagtccgaaggtggtcttattgaaacatggaactctcaacaccctgagctgcaatgcgccggtgtcactgtttccaaacgcaccctcaaccgcaacggcctccacttgccatcttactcaccttatcccaaatgatcattgtcgttcaaggtgcgtaatattagtaagaagtatttatcagcttaacgtgataacaataatagtaatatgaaaatatttattaaattttttataattaatctctgctagaaaatttgattaatcatttttagtagaatttgtttttctcaactaggtttaaacacca

SEQ ID NO: 624 - DNA, 606 bp, Artificial
  Mutations within GlyA3B4 introduced by GmGlyA3B4_T01TALE nuclease
gttcatgtacggttgcagatataaacgaagcatagcttatgtatgaggtgtaacaaaattggaaacaatagccatgcaaggtgaagaatgtcaccaactcagaaacccttcttcattgacgtgtccctcactcactctcctctcttcactataaatcgccactcttcgtgttctccacttcaccaactccttcaaacttattaacacttgtcgagtgcatgctttgctattacctccagcaagttcaacgagtgccaactcaacaacctcaacgcgttggaacccgaccaccgcgttgagtccgaaggtggtcttattgaaacatggaactctcaacaccctgagctgcaatgcgccggtgtcactgtttccaaacgcaccctcaaccgcaacggcctccacttgccatcttactcaccttatccccaaaatgatcattgtcgttcaaggtgcgtaatattagtaagaagtatttatcagcttaacgtgataacaataatagtaatatgaaatatttattaaattttttataattaatctctgctagaaaatttgatttaatcatttttagtagaatttgtttttctcaactaggtttttaaaaca

SEQ ID NO: 625 - DNA, 654 bp, Artificial
  Mutations within GlyA3B4 introduced by GmGlyA3B4_T01TALE nuclease
gttcatgtacggttgcagatataaacgaagcatagcttatgtatgaggtgtaacaaaattggaaacaatagccatgcaaggtgaagaatgtcaccaactcagaaacccttcttcattgacgtgtccctcactcactctcctctcttcactataaatcgccactcttcgtgttctccacttcaccaactccttcaaacttattaacactttccttagttcaatatggggaagcccttcttcactctctctctttcttccctttgcttgctactactcttgtcgagtgcatgctttgctattacctccagcaagttcaacgagtgccaactcaacaacctcaacgcgttggaacccgaccaccgcgttgagtccgaaggtggtcttattgaaacatggaactctcaacaccctgagctgcaatgcgccggtgtcactgtttccaaacgcaccctcaaccgcaacggcctccacttgccatcttactcaccttatccccaaatgatcattgtcgttcaaggtgcgtatattagtaagaagtatttatcagcttaacgtgataacaataatagtaatatgaaatattattaaattttttataattaaatctctgctagaaaatttgattaatcatttttagtagaatttgtttttctc

SEQ ID NO: 626 - DNA, 670 bp, Artificial
  Mutations within GlyA3B4 introduced by GmGlyA3B4_T01TALE nuclease
  misc_feature (539): n is a or c or t or g
gttcatgtacggttgcagatataaacgaagcatagcttatgtatgatggtgtaacaaaaattggaaacaatagccatgcaaggtgaagaatgtcaccaactcagaaacccttcttcattgacgtgtccctcactcactctcctctcttcactataaatcgccactcttcgtgttctccacttcaccaactccttcaaacttattaacactttccttagttcaatatggggaagcccttcttcactctctctctttcttccctttgcttgctacactcttgtcgagtgcatgctttgctattacctccagcaagttcaacgagtgccaactcaacaacctcaacgcgttggaacccgaccaccgcgttgagtccgaaggtggtcttattgaaacatggaactctcaacaccctgagctgcaatgcgccggtgtcactgtttccaaacgcaccctcaaccgcaacggcctccacttgccatcttactcaccttatccccaaatgatcattgtcgttcaaggtgcgtaatattagtaagagnatttatcagcttaacgtgataacaatatagtaatatgaaatatttattaaatttttataattaatctctgctagaaaatttgattaatcattttagtagaatttgttttctcaactaggttttaaacacca

SEQ ID NO: 627 - DNA, 658 bp, Artificial
  Mutations within GlyA3B4 introduced by GmGlyA3B4_T01TALE nuclease
gttcatgtacggttgcagatataaacgaagcatagcttatgtatgaggtgtaacaaaattggaaacaatagccatgcaaggtgaagaatgtcaccaactcagaaacccttcttcattgacgtgtccctcactcactctcctctcttcactataaatcgccactcttcgtgttctccacttcaccaactccttcaaacttattaacactttccttagttcaatatggggaagcccttcttcactctctctctttctttccttgtcgagtgcatgctttgctattacctccagcaagttcaacgagtgccaactcaacaacctcaacgcgttggaacccgaccaccgcgttgagtccgaaggtggtcttattgaaacatggaactctcaacaccctgagctgcaatgcgccggtgtcactgtttccaaacgcaccctcaaccgcaacggcctccacttgccatcttactcaccttatcccccaaatgatcattgtcgttcaaggtgcgtaatattagtaagaagtatttatcagcttaacgtgataacaataatagtaatatgaaatatttattaaattttttataattaaatctctgctagaaaatttgattaatcatttttagtagaatttgttttttctcaactaggttttaaaaca

SEQ ID NO: 628 - DNA, 529 bp, Artificial; identical to SEQ ID NO: 601
  Mutations within GlyA3B4 introduced by GmGlyA3B4_T01TALE nuclease

SEQ ID NO: 629 - DNA, 652 bp, Artificial
  Mutations within GlyA3B4 introduced by GmGlyA3B4_T01TALE nuclease
gttcatgtacggttgcagatataaacgaagcatagcttatgtatgaggtgtaacaaaattggaaacaatagccatgcaaggtgaagaatgtcaccaactcagaaacccttcttcattgacgtgtccctcactcactctcctctcttcactataaatcgccactcttcgtgttctccacttcaccaactccttcaaacttattaacactttccttagttcaatatggggaagcccttcttcactctctctctttcttccctttgcttcttgtcgagtgcatgctttgctattacctccagcaagttcaacgagtgccaactcaacaacctcaacgcgttggaacccgaccaccgcgttgagtccgaaggtggtcttattgaaacatggaactctcaacaccctgagctgcaatgcgccggtgtcactgtttccaaacgcaccctcaaccgcaacggcctccacttgccatcttactcaccttatccccaaatgatcattgtcgttcaaggtgcgtaatattagtaagaagtatttatcagcttaacgtgataacaataatagtaatatgaaatatttattaaattttttataattaatctctgctagaaaatttgattaatctttttagtagaattgttttttctcaactagg

SEQ ID NO: 630 - DNA, 651 bp, Artificial
  Mutations within GlyA3B4 introduced by GmGlyA3B4_T01TALE nuclease
gttcatgtacggttgcagatataaacgaagcatagcttatgtatgaggtgtaacaaaattggaaacaatagccatgcaaggtgaagaatgtcaccaactcagaaacccttcttcattgacgtgtccctcactcactctcctctcttcactataaatcgccactcttcgtgttctccacttcaccaactccttcaaacttattaacactttccttagttcaatatggggaagcccttcttcactctctctctttcttccctttgcttttgtcgagtgcatgctttgctattacctccagcaagttcaacgagtgccaactcaacaacctcaacgcgttggaacccgaccaccgcgttgagtccgaaggtggtcttattgaaacatggaactctcaacaccctgagctgcaatgcgccggtgtcactgtttccaaacgcaccctcaaccgcaacggcctccacttgccatcttactcaccttatccccaaatgatcattgtcgttcaaggtgcgtaatattagtaagaagtatttatcagcttaacgtgataacaataatagtaatatgaaatatttattaaattttttataattaatctctgctagaaaatttgattaatcatttttagtagaatttgttttttctcaacta

SEQ ID NO: 631 - DNA, 529 bp, Artificial; identical to SEQ ID NO: 601
  Mutations within GlyA3B4 introduced by GmGlyA3B4_T01TALE nuclease

SEQ ID NO: 632 - DNA, 654 bp, Artificial
  Mutations within GlyA3B4 introduced by GmGlyA3B4_T01TALE nuclease
gttcatgtacggttgcagatataaacgaagcatagcttatgtatgaggtgtaacaaaattggaaacaatagccatgcaaggtgaagaatgtcaccaactcagaaacccttcttcattgacgtgtccctcactcactctcctctcttcactataaatcgccactcttcgtgttctccacttcaccaactccttcaaacttattaacactttccttagttcaatatggggaagcccttcttcactctctctctttcttccctttgcttgctactactcttgtcgagtgcatgctttgctattacctccagcaagttcaacgagtgccaactcaacaacctcaacgcgttggaacccgaccaccgcgttgagtccgaaggtggtcttattgaaacatggaactctcaacaccctgagctgcaatgcgccggtgtcactgtttccaaacgcaccctcaaccgcaacggcctccacttgccatcttactcaccttatccccaaatgatcattgtcgttcaaggtgcgtatattagtaagaagtatttatcagcttaacgtgatacaataatagtaatatgaaatatttattaaattttttataattaatctctgctagaaaatttgattaatcatttttagtagaatttgtttttcttc

SEQ ID NO: 633 - DNA, 665 bp, Artificial
  Mutations within GlyA3B4 introduced by GmGlyA3B4_T01TALE nuclease
gttcatgtacggttgcagatataaacgaagcatagcttatgtatgaggtgtaacaaaattggaaacaatagccatgcaaggtgaagaatgtcaccaactcagaaacccttcttcattgacgtgtccctcactcactctcctctcttcactataaatcgccactcttcgtgttctccacttcaccaactccttcaaacttattaacactttccttagttcaatatggggaagcccttcttcactctctctctttcttccctttgctattacctcgagtgcatgctttgctattacctccagcaagttcaacgagtgccaactcaacaacctcaacgcgttggaacccgaccaccgcgttgagtccgaaggtggtcttattgaaacatggaactctcaacaccctgagctgcaatgcgccggtgtcactgtttccaaacgcaccctcaaccgcaacggcctccacttgccatcttactcaccttatccccaaatgatcattgtcgttcaaggtgcgtaatattagtaagagtatttatcagcttaacgtgataacaataatagtaatatgaaatatttattaaatttttataattaatctctgctagaaaatttgattaatcattttagtagaatttgtttttctcaactaggtttttaaaacacca

SEQ ID NO: 634 - DNA, 651 bp, Artificial
  Mutations within GlyA3B4 introduced by GmGlyA3B4_T01TALE nuclease
gttcatgtacggttgcagatataaacgaagcatagcttatgtatgaggtgtaacaaaattggaaacaatagccatgcaaggtgaagaatgtcaccaactcagaaacccttcttcattgacgtgtccctcactcactctcctctcttcactataaatcgccactcttcgtgttctccacttcaccaactccttcaaacttattaacactttccttagttcaatatggggaagcccttcttcactctctcttgtcgagtgcatgctttgctattacctccagcaagttcaacgagtgccaactcaacaacctcaacgcgttggaacccgaccaccgcgttgagtccgaaggtggtcttattgaaacatggaactctcaacacccctgagctgcaatgcgccggtgtcactgtttccaaacgcaccctcaaccgcaacggcctccacttgccatcttactcaccttatccccaaatgatcattgtcgttcaaggtgcgtaatattagtaagaagtatttatcagcttaacgtgataacaataatagtaatatgaaatatttattaaattttttataattaatctctgctagaaaatttgattaatcatttttagtagaatttgttttttctcaactaggttttaaaacaccaca

SEQ ID NO: 635 - DNA, 671 bp, Artificial
  Mutations within GlyA3B4 introduced by GmGlyA3B4_T01TALE nuclease
gttcatgtacggttgcagatataaacgaagcatagcttatgtatgaggtgtaacaaaattggaaacaatagccatgcaaggtgaagaatgtcaccaactcagaaacccttcttcattgacgtgtccctcactcactctcctctcttcactataaatcgccactcttcgtgttctccacttcaccaactccttcaaacttattaacactttccttagttcaatatggggaagcccttcttcactctctctctttcttccctttgcttgcttgtcgagtgcatgctttgctattacctccagcaagttcaacgagtgccaactcaacaacctcaacgcgttggaacccgaccaccgcgttgagtccgaaggtggtcttattgaaacatggaactctcaacaccctgagctgcaatgcgccggtgtcactgtttccaaacgcaccctcaaccgcaacggcctccacttgccatcttactcaccttatccccaaatgatcattgtcgttcaaggtgcgtaaatattagtaagaagtatttatcagcttaacgtgataacaataatagtaatatgaaatatttattaaattttttataattaatctctgctagaaaatttgattaatcatttttagtagaatttgttttttctcaactaggttttaaaacaccaca

SEQ ID NO: 636 - DNA, 623 bp, Artificial
  Mutations within GlyA3B4 introduced by GmGlyA3B4_T01TALE nuclease
gttcatgtacggttgcagatataaacgaagcatagcttatgtatgaggtgtaacaaaattggaaacaatagccatgcaaggtgaagaatgtcaccaactcagaaacccttcttcattgacgtgtccctcactcactctcctctcttcactataaatcgccactcttcgtgttctccacttcaccaactccttcaaacttattaacactttccttagttcaatatggggaagcccttcttcactctctctctttcttccctttgcttgccttgtcgagtgcatgctttgctattacctccagcaagttcaacgagtgccaactcaacaacctcaacgcgttggaacccgaccaccgcgttgagtccgaaggtggtcttattgaaacatggaactctcaacaccctgagctgcaatgcgccggtgtcactgtttccaaacgcaccctcaaccgcaacggcctccacttgccatcttactcaccttatccccaaatgatcattgtcgttcaaggtgcgtaatattagtaagaagtatttatcagcttaacgtgataacaataatagtaatatgaaatatttattaaattttttataattaatctctgctagaaaatttgattaatc

SEQ ID NO: 637 - DNA, 523 bp, Artificial
  Mutations within GlyA3B4 introduced by GmGlyA3B4_T01TALE nuclease
  misc_feature (141); (449): n is a or c or t or g
gttcatgtacggttgcagatataaacgaagcatagcttatgtatgaggtgtaacaaaattggaaacaatagccatgcaaggtgaagaatgtcaccaactcagaaacccttcttcattgacgtgtccctcactcactctccnctcttcgagtgcatgctttgctattacctccagcaagttcaacgagtgccaactcaacaacctcaacgcgttggaacccgaccaccgcgttgagtccgaaggtggtcttattgaaacatggaactctcaacaccctgagctgcaatgcgccggtgtcactgtttccaaacgcaccctcaaccgcaacggcctccacttgccaatcttactcaccttatccccaaatgatcatttgtcgttcaaggtgcgtaatattagtaagaagtatttatcagcttaacgtgataacaataatagtaatatgaaanatttattaaatttttataattaatctctgctagaaaatttgattaatcatttttgagtagaatttgttttttct

SEQ ID NO: 638 - DNA, 608 bp, Artificial; identical to SEQ ID NO: 546
  Mutations within GlyA3B4 introduced by GmGlyA3B4_T01TALE nuclease

SEQ ID NO: 639 - DNA, 421 bp, Artificial
  Mutations within GlyA3B4 introduced by GmGlyA3B4_T01TALE nuclease
gttcatgtacggttgcagatataaacgaagcatagcttatgtatgaggtgtaacaaaattggaaacaatagccatgcaaggtgaagaatgtcaccaactcagaaacccttcttcattgacgtgtccctcactcactctcctctcttcactataaatcgccactcttcgtgttctccacttcaccaactccttcaaacttattaacactttccttgtcgagtgcatgctttgctattacctccagcaagttcaacgagtgccaactcaacaacctcaacgcgttggaacccgaccaccgcgttgagtccgaaggtggtcttattgaacatggaactctcaacaccctgagctgcaatgcgccggtgtcactgtttccaaacgcaccctcaaccgcaacggcctccacttgccatcttactca

SEQ ID NO: 640 - DNA, 543 bp, Artificial
  Mutations within GlyA3B4 introduced by GmGlyA3B4_T01TALE nuclease
gttcatgtacggttgcagatataaacgaagcatagcttatgtatgaggtgtaacaaaattggaaacaatagccatgcaaggtgaagaatgtcaccaactcagaaacccttcttcattgacgtgtccctcactcactctcctctcttcactataaatcgccactcttcgtgttctccacttcacctccagcaagttcaacgagtgccaactcaacaacctcaacgcgttggaacccgaccaccgcgttgagtccgaaggtggtcttattgaaacatggaactctcaacaccctgagctgcaatgcgccggtgtcactgtttccaaacgcaccctcaaccgcaacggcctccacttgccatcttactcaccttatccccaaatgatcattgtcgttcaaggtgcgtaatattagtaagaagtatttatcagcttaacgtgataacaataatagtaatatgaaatatttattaaattttttataattaatctctgctagaaaatttgattaatcatttttagtagaatttgtttttctcaactagg

SEQ ID NO: 641 - DNA, 647 bp, Artificial
  Mutations within GlyA3B4 introduced by GmGlyA3B4_T01TALE nuclease
gttcatgtacggttgcagatataaacgaagcatagcttatgtatgaggtgtaacaaaattggaaacaatagccatgcaaggtgaagaatgtcaccaactcagaaacccttcttcattgacgtgtccctcactcactctcctctcttcactataaatcgccactcttcgtgttctccacttcaccaactccttcaaacttattaacactttccttagttcaatatggggaagcccttcttcactctctctctttcttccctttgctattacctccagcaagttcaacgagtgccaactcaacaacctcaacgcgttggaacccgaccaccgcgttgagtccgaaggtggtcttattgaaacatggaactctcaacacccctgagctgcaatgcgccggtgtcactgttttccaaacgcaccctcaaccgcaacggcctccacttgccatcttactcaccttatccccaaatgatcattgtcgttcaaggtgcgtaatattagtaagaagtatttatcagcttaacgtgataacaataatagtaatatgaaatatttattaaattttttataattaatctctgctagaaaatttgattaatcatttttagtagaatttgttttttctcaactaggttttaaacaccaca

SEQ ID NO: 642 - DNA, 443 bp, Artificial; identical to SEQ ID NO: 537
  Mutations within GlyA3B4 introduced by GmGlyA3B4_T01TALE nuclease

SEQ ID NO: 643 - DNA, 661 bp, Artificial
  Mutations within GlyA3B4 introduced by GmGlyA3B4_T01TALE nuclease
gttcatgtacggttgcagatataaacgaagcatagcttatgtatgaggtgtaacaaaattggaaacaatagccatgcaaggtgaagaatgtcaccaactcagaaacccttcttcattgacgtgtccctcactcactctcctctcttcactataaatcgccactcttcgtgttctccacttcaccaactccttcaaacttattaacactttccttagttcaatatggggaagcccttcttcactctctctctttctttccttgtcgagtgcatgctttgctattacctccagcaagttcaacgagtgccaactcaacaacctcaacgcgttggaacccgaccaccgcgttgagtccgaaggtggtcttattgaaacatggaactctcaacaccctgagctgcaatgcgccggtgtcactgtttccaaacgcaccctcaaccgcaacggcctccacttgccatcttactcaccttatccccaaatgatcattgtcgttcaaggtgcgtaatattagtaagaagtatttatcagcttaacgtgataacaataatagtaatatgaaatatttattaaattttttataattaatctctgctagaaaatttgattaatcatttttagtagaatttgttttttctcaactaggttttaaaacaccaca

SEQ ID NO: 644 - DNA, 604 bp, Artificial
  Mutations within GlyA3B4 introduced by GmGlyA3B4_T01TALE nuclease
gttcatgtacggttgcagatataaacgaagcatagcttatgtatgaggtgtaacaaaattggaaacaatagccatgcaaggtgaagaatgtcaccaactcagaaacccttcttcattgacgtgtccctcactcactctcctctcttcactataaatcgccactcttcgtgttctccacttcaccaactccttcaaacttattaacacttgtcgagtgcatgctttgctattacctccagcaagttcaacgagtgccaactcaacaacctcaacgcgttggaacccgaccaccgcgttgagtccgaaggtggtcttattgaaacatggaactctcaacaccctgagctgcaatgcgccggtgtcactgtttccaaacgcaccctcaaccgcaacggcctccacttgccatcttactcaccttatccccaaatgatcattgtcgttcaaggtgcgtaatattagtaagaagtatttatcagcttaacgtgataacaataatagtaatatgaaatatttattaaattttttataattaatctctgctagaaaatttgattaatcatttttagtagaatttgtttttctcaactaggtttttaaaaca

SEQ ID NO: 645 - DNA, 513 bp, Artificial
  Mutations within GlyA3B4 introduced by GmGlyA3B4_T01TALE nuclease
gttcatgtacggttgcagatataaacgaagcatagcttatgtatgaggtgtaacaaaattggaaacaatagccatgcaaggtgaagaatgtcaccaactcagaaacccttcttcattgtcgagtgcatgctttgctattacctccagcaagttcaacgagtgccaactcaacaacctcaacgcgttggaacccgaccaccgcgttgagtccgaaggtggtcttattgaaacatggaactctcaacaccctgagctgcaatgcgccggtgtcactgtttccaaacgcaccctcaaccgcaacggcctccacttgccatcttactcaccttatccccaaatgatcattgtcgttcaaggtgcgtaatattagtaagaagtatttatcagcttaacgtgataacaataatagtaatatgaaatatttattaaattttttataattaatctctgctagaaaatttgattaatcatttttagtagaatttgtttttctcaactaggttttaaacacca

SEQ ID NO: 646 - DNA, 501 bp, Artificial; identical to SEQ ID NO: 544
  Mutations within GlyA3B4 introduced by GmGlyA3B4_T01TALE nuclease

SEQ ID NO: 647 - DNA, 637 bp, Artificial
  Mutations within GlyA3B4 introduced by GmGlyA3B4_T01TALE nuclease
gttcatgtacggttgcagatataaacgaagcatagcttatgtatgaggtgtaacaaaattggaaacaatagccatgcaaggtgaagaatgtcaccaactcagaaacccttcttcattgacgtgtccctcactcactctcctctcttcactataaatcgccactcttcgtgttctccacttcaccaactccttcaaacttattaacactttccttagttcaatatggggaagcccttcttcactctctctctttcttccctttgctattacctccagcaagttcaacgagtgccaactcaacaacctcaacgcgttggaacccgaccaccgcgttgagtccgaaggtggtcttattgaaacatggaactctcaacacccctgagctgcaatgcgccggtgtcactgtttccaaacgcaccctcaaccgcaacggcctccacttgccatcttactcaccttatccccaaatgatcattgtcgttcaaggtgcgtaatattagtaagaagtatttatcagctttaacgtgataacaataatagtaatatgaaatatttattaaattttttataattaatctctgctagaaaatttgattaatcatttttagtagaatttgttttttctcaactaggtttt

SEQ ID NO: 648 - DNA, 656 bp, Artificial
  Mutations within GlyA3B4 introduced by GmGlyA3B4_T01TALE nuclease
gttcatgtacggttgcagatataaacgaagcatagcttatgtatgaggtgtaacaaaattggaaacaatagccatgcaaggtgaagaatgtcaccaactcagaaacccttcttcattgacgtgtccctcactcactctcctctcttcacgatttatagggttcacgctcaacaaaatcgcatatcaatttcacaacaattggtatgccaaacatatataattcactgtaataattataaggataaaatgaaatcttgtcgagtgcatgctttgctattacctccagcaagttcaacgagtgccaactcaacaacctcaacgcgttggaacccgaccaccgcgttgagtccgaaggtggtcttattgaaacatggaactctcaacaccctgagctgcaatgcgccggtgtcgctgtttccaaacgcaccctcaaccgcaacggcctccacttgccatcttactcaccttatccccaaatgatcattgtcgttcaaggtgcgtaatattagtaagaagtatttatcagctttaacgtgataacaataatagtaatatgaaatatttattaaattttttataattaattctctgctagaaaatttgattaatcatttttagtagaatttgttttttctcaactaggttttaaacaccac

SEQ ID NO: 649 - DNA, 609 bp, Artificial
  Mutations within GlyA3B4 introduced by GmGlyA3B4_T01TALE nuclease
gttcatgtacggttgcagatataaacgaagcatagcttatgtatgaggtgtaacaaaattggaaacaatagccatgcaaggtgaagaatgtcaccaactcagaaacccttcttcattgacgtgtccctcactcactctcctctcttcactataaatcgccactcttcgtgttctccacttcaccaactccttcaaacttattaacactttccttagttcaatatggggaagcccttcttcactctctctctttcttccctttgctttgctgtcagagtgcatgctttgctattacctccagcaagttcaacgagtgccaactcaacaacctcaacgcgttggaacccgaccaccgcgttgagtccgaaggtggtcttattgaaacatggaactctcaacaccctgagctgcaatgcgccggtgtcactgtttccaaacgcaccctcaaccgcaacggcctccacttgccatcttactcaccttatcccccaaatgatcattgtcgttcaaggtgcgtaatattagtaagaagtatttatcagcttaacgtgataacaataatagtaatatgaaatatttattaaattttttataattaatctctgctag

SEQ ID NO: 650 - DNA, 652 bp, Artificial
  Mutations within GlyA3B4 introduced by GmGlyA3B4_T01TALE nuclease
  misc_feature (276); (279); (528): n is a or c or t or g
gttcatgtacggttgcagatataaacgaagcatagcttatgtatgaggtgtaacaaaattggaaacaatagccatgcaaggtgaagaatgtcaccaactcagaaacccttcttcattgacgtgtccctcactcactctcctctcttcactataaatcgccactcttcgtgttctccacttcaccaactccttcaaacttattaacactttccttagttcaatatggggaagcccttcttcactctctctctttcttccctttgcttgctacttctncgntgctttgctattacctccagcaagttcaacgagtgccaactcaacaacctcaacgcgttggaaccgaccaccgcgttgagtccgaaggtggtcttattgaaacatggaactctcaacaccctgagctgcaatgcgccggtgtcactgtttccaaacgcaccctcaaccgcaacggcctccacttgccatcttactcaccttatccccaaatgatcattgtcgttcaaggtgcgtaatattagtaagagnatttatcagcttaacgtgataacaatatagtaatatgaaatatttattaaatttttataattaatctctgctagaaaatttgattaatcattttagtagaatttgtttttctcaactaggtttt

SEQ ID NO: 651 - DNA, 547 bp, Artificial
  Mutations within GlyA3B4 introduced by GmGlyA3B4_T01TALE nuclease
gttcatgtacggttgcagatataaacgaagcatagcttatgtatgaggtgtaacaaaattggaaacaatagccatgcaaggtgaagaatgtcaccaactcagaaacccttcttcattgacgtgtccctcactcactctcctctcttcactataaatcgccactcttcgtgttctccacttcacctccagcaagttcaacgagtgccaactcaacaacctcaacgcgttggaacccgaccaccgcgttgagtccgaaggtggtcttattgaaacatggaactctcaacaccctgagctgcaatgcgccggtgtcactgtttccaaacgcaccctcaaccgcaacggcctccacttgccatcttactcaccttatccccaaatgatcattgtcgttcaaggtgcgtaatattagtaagaagtatttatcagcttaacgtgataacaataatagtaatatgaaatatttattaaattttttataattaatctctgctagaaaattgattaatcatttttagtagaatttgtttttctcaactaggttttt

SEQ ID NO: 652 - DNA, 477 bp, Artificial; identical to SEQ ID NO: 515
  Mutations within GlyA3B4 introduced by GmGlyA3B4_T01TALE nuclease

SEQ ID NO: 653 - DNA, 420 bp, Artificial
  Mutations within GlyA3B4 introduced by GmGlyA3B4_T01TALE nuclease
gttcatgtacggttgcagatataaacgaagcatagcttatgtatgaggtgtaacaaaattggaaacaatagccatgcaaggtgaagaatgtcaccaactcagaaacccttcttcattgacgtgtccctcactcactctcctctcttcactataaatcgccactcttcgtgttctccacttcaccaactccttcaaacttattaacactttccttagttcaatatggggaagcccttcttcactctctctctttcttccctttgcttgctactgcttgccaccgccattgctggcgatggccaccacctgctggggggtcaagccgtgggcctggcacagcaccggcaacagcgcctgcaccgtctccagcgcctgctttgctattacctccagcaagttcaacgagtgccaactcaacaa

SEQ ID NO: 654 - DNA, 646 bp, Artificial; identical to SEQ ID NO: 564
  Mutations within GlyA3B4 introduced by GmGlyA3B4_T01TALE nuclease

SEQ ID NO: 655 - DNA, 653 bp, Artificial
  Mutations within GlyA3B4 introduced by GmGlyA3B4_T01TALE nuclease
gttcatgtacggttgcagatataaacgaagcatagcttatgtatgaggtgtaacaaaattggaaacaatagccatgcaaggtgaagaatgtcaccaactcagaaacccttcttcattgacgtgtccctcactcactctcctctcttcactataaatcgccactcttcgtgttctccacttcaccaactccttcaaacttattaacactttccttagttcaatatggggaagcccttcttcactctctctctttcttccctttgcttgtcgagtgcatgctttgctattacctccagcaagttcaacgagtgccaactcaacaacctcaacgcgttggaacccgaccaccgcgttgagtccgaaggtggtcttattgaaacatggaactctcaacaccctgagctgcaatgcgccggtgtcactgtttccaaacgcaccctcaaccgcaacggcctccacttgccatcttactcaccttatccccaaatgatcattgtcgttcaaggtgcgtaaatattagtaagaagtatttatcagcttaacgtgataacaataatagtaatatgaaatatttattaaattttttataattaatctctgctagaaaatttgattaatctttttagtagaattgtttttctcaacgttaagtt

SEQ ID NO: 656 - DNA, 654 bp, Artificial
  Mutations within GlyA3B4 introduced by GmGlyA3B4_T01TALE nuclease
gttcatgtacggttgcagatataaacgaagcatagcttatgtatgaggtgtaacaaaattggaaacaatagccatgcaaggtgaagaatgtcaccaactcagaaacccttcttcattgacgtgtccctcactcactctcctctcttcactataaatcgccactcttcgtgttctccacttcaccaactccttcaaacttattaacactttccttagttcaatatggggaagcccttcttcactctctctcttgtcgagtgcatgctttgctattacctccagcaagttcaacgagtgccaactcaacaacctcaacgcgttggaacccgaccaccgcgttgagtccgaaggtggtcttattgaaacatggaactctcaacaccctgagctgcaatgcgccggtgtcactgtttccaaacgcaccctcaaccgcaacggcctccacttgccatcttactcaccttatcccccaaatgatcattgtcgttcaaggtgcgtaaatattagtaagaagtatttatcagcttaacgtgataacaataatagtaatatgaaatatttattaaattttttataattaatctctgctagaaaatttgattaatcatttttagtagaatttgttttttctcaactaggttttaaaacaccaca

SEQ ID NO: 657 - DNA, 621 bp, Artificial
  Mutations within GlyA3B4 introduced by GmGlyA3B4_T01TALE nuclease
gttcatgtacggttgcagatataaacgaagcatagcttatgtatgaggtgtaacaaaattggaaacaatagccatgcaaggtgaagaatgtcaccaactcagaaacccttcttcattgacgtgtccctcactcactctcctctcttcactataaatcgccactcttcgtgttctccacttcaccaactccttcaaacttattaacactttccttagttcaatatggggaagcccttcttcactctctctctttcttccctttgcttgctgtcgagtgcatgctttgctattacctccagcaagttcaacgagtgccaactcaacaacctcaacgcgttggaacccgaccaccgcgttgagtccgaaggtggtcttattgaaacatggaactctcaacaccctgagctgcaatgcgccggtgtcactgtttccaaacgcaccctcaaccgcaacggcctccacttgccatcttactcaccttatcccccaaatgatcattgtcgttcaaggtgcgtaatattagtaagaagtatttatcagcttaacgtgataacaataatagtaatatgaaatatttattaaattttttataattaatctctgctagaaaatttgattaat

SEQ ID NO: 658 - DNA, 656 bp, Artificial
  Mutations within GlyA3B4 introduced by GmGlyA3B4_T01TALE nuclease
gttcatgtacggttgcagatataaacgaagcatagcttatgtatgaggtgtaacaaaattggaaacaatagccatgcaaggtgaagaatgtcaccaactcagaaacccttcttcattgacgtgtccctcactcactctcctctcttcactataaatcgccactcttcgtgttctccacttcaccaactccttcaaacttattaacactttccttagttcaatatggggaagcccttcttcactctctctctttcttccctttgcttgcttgtcgagtgcatgctttgctattacctccagcaagttcaacgagtgccaactcaacaacctcaacgcgttggaacccgaccaccgcgttgagtccgaaggtggcttatctaatctagcatcgactctcaacaccctgagctgcaatgcgccggtgtcactgtttccaaacgcaccctcaaccgcaacggcctccacttgccatcttactcaccttatccccaaatgatcattgtcgttcaaggtgcgtaaatattagtaagaagtatttatcagcttaacgtgataacaataatagtaatatgaaatatttattaaattttttataattaatctctgctagaaaatttgattaatctttttagtagaattgttttttctcaactagg

SEQ ID NO: 659 - DNA, 657 bp, Artificial
  Mutations within GlyA3B4 introduced by GmGlyA3B4_T01TALE nuclease
gttcatgtacggttgcagatataaacgaagcatagcttatgtatgaggtgtaacaaaattggaaacaatagccatgcaaggtgaagaatgtcaccaactcagaaacccttcttcattgacgtgtccctcactcactctcctctcttcactataaatcgccactcttcgtgttctccacttcaccaactccttcaaacttattaacactttccttagttcaatatggggaagcccttcttcactctctctctttcttccctttgcttgctgctctgatgccgcatagttaagccagccccgacacccgccaacacccgctgacgcgccctgacgggcttgtctgctactcttgtcgagtgcatgctttgctattacctccagcaagttcaacgagtgccaactcaacaacctcaacgcgttggaacccgaccaccgcgttgagtccgaaggtggtcttattgaaacatggaactctcaacaccctgagctgcaatgcgccggtgtcactgtttccaaacgcacctcaaccgcaacggcctccacttgccatcttactcaccttatccccaaatgatcattgtcgttcaaggtgcgtaatattagtaagaagtatttatcgcttaacgtgataacaataatagtaatatgaaaatattt

SEQ ID NO: 660 - DNA, 650 bp, Artificial
  Mutations within GlyA3B4 introduced by GmGlyA3B4_T01TALE nuclease
gttcatgtacggttgcagatataaacgaagcatagcttatgtatgaggtgtaacaaaattggaaacaatagccatgcaaggtgaagaatgtcaccaactcagaaacccttcttcattgacgtgtccctcactcactctcctctcttcactataaatcgccactcttcgtgttctccacttcaccaactccttcaaacttattaacactttccttagttcaatatggggaagcccttcttcactctctctctttcttccctttgcttcgagtgcatgctttgctattacctccagcaagttcaacgagtgccaactcaacaacctcaacgcgttggaacccgaccaccgcgttgagtccgaaggtggtcttattgaaacatggaactctcaacaccctgagctgcaatgcgccggtgtcactgtttccaaacgcaccctcaaccgcaacggcctccacttgccatcttactcaccttatccccaaatgatcattgtcgttcaaggtgcgtaatattagtaagaagtatttatcagctttaacgtgataacaataatagtaatatgaaatatttattaaattttttataattaatctctgctagaaaatttgattaatcatttttagtagaatttgttttttctcaactagg

SEQ ID NO: 661 - DNA, 575 bp, Artificial
  Mutations within GlyA3B4 introduced by GmGlyA3B4_T01TALE nuclease
gttcatgtacggttgcagatataaacgaagcatagcttatgtatgaggtgtaacaaaattggaaacaatagccatgcaaggtgaagaatgtcaccaactcagaaacccttcttcattgacgtgtccctcactcactctcctctcttcactataaatcgccactcttcgtgttctccacttcaccaactccttcaaacttattaacactttccttagttcaatatggggaagcccttcttcactctctctctttcttccctttgcttgccccgaccaccgcgttgagtccgaaggtggtcttattgaaacatggaactctcaacaccctgagctgcaatgcgccggtgtcactgtttccaaacgcaccctcaacgcaacggcctccacttgccatcttactcaccttatccccaaaatgatcattgtcgttcaaggtgcgtaatattagtaagaagtatttatcagcttaacgtgataacaataatagtaatatgaaatatttattaaattttttatattaatctctgctagaaattgattaatcattttagtagaatttgtttttctcaactagg

SEQ ID NO: 662 - DNA, 603 bp, Artificial
  Mutations within GlyA3B4 introduced by GmGlyA3B4_T01TALE nuclease
gttcatgtacggttgcagatataaacgaagcatagcttatgtatgaggtgtaacaaaattggaaacaatagccatgcaaggtgaagaatgtcaccaactcagaaacccttcttcattgacgtgtccctcactcactctcctctcttcactataaatcgccactcttcgtgttctccacttcaccaactccttcaaacttattaacactttccttagttcaatatggggaagcccttcttcactctctctctttcttccctttgctttgtcgagtgcatgctttgctattacctccagcaagttcaacgagtgccaactcaacaacctcaacgcgttggaacccgaccaccgcgttgagtccgaaggtggtcttattgaaacatggaactctcaacaccctgagctgcaatgcgccggtgtcactgtttccaaacgcaccctcaaccgcaacggcctccacttgccatcttactcaccttatccccaaatgatcattgtcgttcaaggtgcgtaatattagtaagaagtatttatcagcttaacgtgataacaataatagtaatatgaaatatttattaaatttttataattaatctctgctag

SEQ ID NO: 663 - DNA, 476 bp, Artificial
  Mutations within GlyA3B4 introduced by GmGlyA3B4_T01TALE nuclease
gttcatgtacggttgcagatataaacgaagcatagcttatgtatgaggtgtaacaaaattggaaacaatagccatgcaaggtgaagaatgtcaccaactcagaaacccttcttcattgacgtgtccctcactcactctcctctcttcactataaatcgccactcttcgtgttctccacttcaccaactccttcaaacttattaacactttccttagttcaatatggggaagcccttcttcactctctctctttcttccctttgcttgctactacttgccatcttactcaccttatcccaaatgatcattgtcgttcaaggtgcgtaatattagtaagaagtatttatcagcttaacgtgataacaataatagtaatatgaaatatttattaaattttttataattaatctctgctagaaaatttgattaatcatttttagtagaatttgtttttctcaactaggttttaaacacca

SEQ ID NO: 664 - DNA, 477 bp, Artificial; identical to SEQ ID NO: 515
  Mutations within GlyA3B4 introduced by GmGlyA3B4_T01TALE nuclease

SEQ ID NO: 665 - DNA, 645 bp, Artificial
  Mutations within GlyA3B4 introduced by GmGlyA3B4_T01TALE nuclease
gttcatgtacggttgcagatataaacgaagcatagcttatgtatgaggtgtaacaaaattggaaacaatagccatgcaaggtgaagaatgtcaccaactcagaaacccttcttcattgacgtgtccctcactcactctcctctcttcacgatttatagggttcacgctcaacaaaatcgcatatcaatttcacaacaattggtatgccaaacatatataattcactgtaataattataaggataaaatgaaatcttgtcgagtgcatgctttgctattacctccagcaagttcaacgagtgccaactcaacaacctcaacgcgttggaacccgaccaccgcgttgagtccgaaggtggtcttattgaaacatggaactctcaacaccctgagctgcaatgcgccggtgtcactgtttccaaacgcaccctcaaccgcaacggcctccacttgccatcttactcaccttatccccaaatgatcattgtcgttcaaggtgcgtaatattagtaagaagtatttatcagcttaacgtgataacaataatagtaatatgaaatatttattaaattttttataattaatctctgctagaaaatttgattaatcatttttagtagaatttgttttttctcaactaggtttt

SEQ ID NO: 666 - DNA, 477 bp, Artificial; identical to SEQ ID NO: 515
  Mutations within GlyA3B4 introduced by GmGlyA3B4_T01TALE nuclease

SEQ ID NO: 667 - DNA, 654 bp, Artificial
  Mutations within GlyA3B4 introduced by GmGlyA3B4_T01TALE nuclease
gttcatgtacggttgcagatataaacgaagcatagcttatgtatgaggtgtaacaaaattggaaacaatagccatgcaaggtgaagaatgtcaccaactcagaaacccttcttcattgacgtgtccctcactcactctcctctcttcactataaatcgccactcttcgtgttctccacttcaccaactccttcaaacttattaacactttccttagttcaatatggggaagcccttcttcactctctctctttcttccctttgcttgcttgtcgagtgcatgctttgctattacctccagcaagttcaacgagtgccaactcaacaacctcaacgcgttggaacccgaccaccgcgttgagtccgaaggtggtcttattgaaacatggaactctcaacaccctgagctgcaatgcgccggtgtcactgtttccaaacgcaccctcaaccgcaacggcctccacttgccatcttactcaccttatccccaaatgatcattgtcgttcaaggtgcgtaaatattagtaagaagtatttatcagcttaacgtgataacaataatagtaatatgaaatatttattaaattttttataattaatctctgctagaaaatttgattaatcatttttagtagaatttgttttttctcaacta

SEQ ID NO: 668 - DNA, 580 bp, Artificial
  Mutations within GlyA3B4 introduced by GmGlyA3B4_T01TALE nuclease
gttcatgtacggttgcagatataaacgaagcatagcttatgtatgaggtgtaacaaaattggaaacaatagccatgcaaggtgaagaatgtcaccaactcagaaacccttcttcattgacgtgtccctcactcactctcctctcttcactataaatcgccactcttcgtgttctccacttcaccaactccttcaaacttattaacactttccttagttcaatatggggaagcccttcttcactctctctctttcttccctttgcttgctactactcttgtcgagtgcatgctttgctattacctccagcaagttcaacgagtgccaactcaacaacctcaacgcgttggaacccgaccaccgcgttgagtccgaaggtggtcttattgaaacatggaactctcaacaccctgagctgcaatgcgccggtgtcactgtttccaaacgcaccctcaaccgcaacggcctccacttgccatcttactcaccttatccccaaatgatcattgtcgttcaaggtgcgtatattagtaagaagtatttatcagcttaacgtgatacaataatagtaatatgaaata

SEQ ID NO: 669 - DNA, 606 bp, Artificial
  Mutations within GlyA3B4 introduced by GmGlyA3B4_T01TALE nuclease
gttcatgtacggttgcagatataaacgaagcatagcttatgtatgaggtgtaacaaaattggaaacaatagccatgcaaggtgaagaatgtcaccaactcagaaacccttcttcattgacgtgtccctcactcactctcctctcttcactataaatcgccactcttcgtgttctccacttcaccaactccttcaaacttattaacactttccttagttcaatatggggaagcccttcttcactctctctctttcttccctttgcttcttgtcgagtgcatgctttgctattacctccagcaagttcaacgagtgccaactcaacaacctcaacgcgttggaacccgaccaccgcgttgagtccgaaggtggtcttattgaaacatggaactctcaacaccctgagctgcaatgcgccggtgtcactgtttccaaacgcaccctcaaccgcaacggcctccacttgccatcttactcaccttatccccaaatgatcattgtcgttcaaggtgcgtaatattagtaagaagtatttatcagcttaacgtgataacaataatagtaatatgaaatatttattaaattttttataattaatctctgctag

SEQ ID NO: 670 - DNA, 647 bp, Artificial
  Mutations within GlyA3B4 introduced by GmGlyA3B4_T01TALE nuclease
gttcatgtacggttgcagatataaacgaagcatagcttatgtatgaggtgtaacaaaattggaaacaatagccatgcaaggtgaagaatgtcaccaactcagaaacccttcttcattgacgtgtccctcactcactctcctctcttcactataaatcgccactcttcgtgttctccacttcaccaactccttcaaacttattaacactttccttagttcaatatggggaagcccttcttcactctctcttcgagtgcatgctttgctattacctccagcaagttcaacgagtgccaactcaacaacctcaacgcgttggaacccgaccaccgcgttgagtccgaaggtggtcttattgaaacatggaactctcaacaccctgagctgcaatgcgccggtgtcactgtttccaaacgcaccctcaaccgcaacggcctccacttgccatcttactcaccttatccccaaatgatcattgtcgttcaaggtgcgtaatattagtaagaagtatttatcagcttaacgtgataacaataatagtaatatgaaatatttattaaattttttataattaatctctgctagaaaatttgattaatcatttttagtagaatttgttttttctcaactaggttttaaacaccaca

SEQ ID NO: 671 - DNA, 476 bp, Artificial
  Mutations within GlyA3B4 introduced by GmGlyA3B4_T01TALE nuclease
gttcatgtacggttgcagatataaacgaagcatagcttatgtatgaggtgtaacaaaattggaaacaatagccatgcaaggtgaagaatgtcaccaactcagaaacccttcttcattgacgtgtccctcactcactctcctctcttcactataaatcgccactcttcgtgttctccacttcaccaactccttcaaacttattaacactttccttagttcaatatggggaagcccttcttcactctctctctttcttccctttgcttgctactacttgccatcttactcaccttatccccaaatgatcattgtcgttcaaggtgcgtaatattagtaagaagtatttatcagcttaacgtgataacaataatagtaatatgaaatatttattaaattttttataattaatctctgctagaaaatttgattaatcatttttagtagaatttgtttttctcaactaggttttaaacacc

SEQ ID NO: 672 - DNA, 594 bp, Artificial
  Mutations within GlyA3B4 introduced by GmGlyA3B4_T01TALE nuclease
gttcatgtacggttgcagatataaacgaagcatagcttatgtatgaggtgtaacaaaattggaaacaatagccatgcaaggtgaagaatgtcaccaactcagaaacccttcttcattgacgtgtccctcactcactctcctctcttcactataaatcgccactcttcgtgttctccacttcaccaactccttcaaacttattaacacttgtcgagtgcatgctttgctattacctccagcaagttcaacgagtgccaactcaacaacctcaacgcgttggaacccgaccaccgcgttgagtccgaaggtggtcttattgaacatggaactctcaacaccctgagctgcaatgcgccggtgtcactgtttccaaacgcaccctcaaccgcaacggcctccacttgccatcttactcaccttatccccaaatgatcattgtcgttcaaggtgcgtaatattagtaagaagtatttatcagcttaacgtgataacaataatagtaatatgaatattattaaattttttataattaatctctgctagaaatttgattaatcatttttagtagaatttgtttttctcaactaggttttt

SEQ ID NO: 673 - DNA, 604 bp, Artificial
  Mutations within GlyA3B4 introduced by GmGlyA3B4_T01TALE nuclease
gttcatgtacggttgcagatataaacgaagcatagcttatgtatgaggtgtaacaaaattggaaacaatagccatgcaaggtgaagaatgtcaccaactcagaaacccttcttcattgacgtgtccctcactcactctcctctcttcactataaatcgccactcttcgtgttctccacttcaccaactccttcaaacttattaacactttccttagttcaatatggggaagcccttcttcactctctctctttcttccctttgcttgtcgagtgcatgctttgctattacctccagcaagttcaacgagtgccaactcaacaacctcaacgcgttggaacccgaccaccgcgttgagtccgaaggtggtcttattgaaacatggaactctcaacaccctgagctgcaatgcgccggtgtcactgtttccaaacgcaccctcaaccgcaacggcctccacttgccatcttactcaccttatccccaaatgatcattgtcgttcaaggtgcgtaaatattagtaagaagtatttatcagcttaacgtgataacaataatagtaatatgaaatatttattaaattttttataattaatctctgctag

SEQ ID NO: 674 - DNA, 607 bp, Artificial
  Mutations within GlyA3B4 introduced by GmGlyA3B4_T01TALE nuclease
gttcatgtacggttgcagatataaacgaagcatagcttatgtatgaggtgtaacaaaattggaaacaatagccatgcaaggtgaagaatgtcaccaactcagaaacccttcttcattgacgtgtccctcactcactctcctctcttcactataaatcgccactcttcgtgttctccacttcaccaactccttcaaacttattaacactttccttagttcaatatggggaagcccttcttcactctctctctttcttccctttgcttcttgtcgagtgcatgctttgctattacctccagcaagttcaacgagtgccaactcaacaacctcaacgcgttggaacccgaccaccgcgttgagtccgaaggtggtcttattgaaacatggaactctcaacaccctgagctgcaatgcgccggtgtcactgtttccaaacgcaccctcaaccgcaacggcctccacttgccatcttactcaccttatcccccaaatgatcattgtcgttcaaggtgcgtaatattagtaagaagtatttatcagcttaacgtgataacaataatagtaatatgaaatatttattaaattttttataattaatctctgctag

SEQ ID NO: 675 - DNA, 647 bp, Artificial; identical to SEQ ID NO: 670
  Mutations within GlyA3B4 introduced by GmGlyA3B4_T01TALE nuclease

SEQ ID NO: 676 - DNA, 670 bp, Artificial
  Mutations within GlyA3B4 introduced by GmGlyA3B4_T01TALE nuclease
gttcatgtacggttgcagatataaacgaagcatagcttatgtatgaggtgtaacaaaattggaaacaatagccatgcaaggtgaagaatgtcaccaactcagaaacccttcttcattgacgtgtccctcactcactctcctctcttcactataaatcgccactcttcgtgttctccacttcaccaactccttcaaacttattaacactttccttagttcaatatggggaagcccttcttcactctctctctttcttccctttgcttgctgtcgagtgcatgctttgctattacctccagcaagttcaacgagtgccaactcaacaacctcaacgcgttggaacccgaccaccgcgttgagtccgaaggtggtcttattgaaacatggaactctcaacaccctgagctgcaatgcgccggtgtcactgtttccaaacgcaccctcaaccgcaacggcctccacttgccatcttactcaccttatccccaaatgatcattgtcgttcaaggtgcgtaaatattagtaagaagtatttatcagcttaacgtgataacaataatagtaatatgaaatatttattaaattttttataattaatctctgctagaaaatttgattaatcatttttagtagaatttgttttttctcaactaggttttaaaacaccaca

SEQ ID NO: 677 - DNA, 558 bp, Artificial; identical to SEQ ID NO: 534
  Mutations within GlyA3B4 introduced by GmGlyA3B4_T01TALE nuclease

SEQ ID NO: 678 - DNA, 604 bp, Artificial
  Mutations within GlyA3B4 introduced by GmGlyA3B4_T01TALE nuclease
gttcatgtacggttgcagatataaacgaagcatagcttatgtatgaggtgtaacaaaattggaaacaatagccatgcaaggtgaagaatgtcaccaactcagaaacccttcttcattgacgtgtccctcactcactctcctctcttcactataaatcgccactcttcgtgttctccacttcaccaactccttcaaacttattaacactttccttagttcaatatggggaagcccttcttcactctctctctttcttccctttgctttgtcgagtgcatgctttgctattacctccagcaagttcaacgagtgccaactcaacaacctcaacgcgttggaacccgaccaccgcgttgagtccgaaggtggtcttattgaaacatggaactctcaacaccctgagctgcaatgcgccggtgtcactgtttccaaacgcacctcaaccgcaacggcctccacttgccatcttactcaccttatccccaaatgatcattgtcgttcaaggtgcgtaatattagtaagaagtatttatcagctttaacgtgataacaataatagtaatatgaaatatttattaaattttttataattaatctctgctag

SEQ ID NO: 679 - DNA, 633 bp, Artificial
  Mutations within GlyA3B4 introduced by GmGlyA3B4_T01TALE nuclease
gttcatgtacggttgcagatataaacgaagcatagcttatgtatgaggtgtaacaaaattggaaacaatagccatgcaaggtgaagaatgtcaccaactcagaaacccttcttcattgacgtgtccctcactcactctcctctcttcactataaatcgccactcttcgtgttctccacttcaccaactccttcaaacttattaacactttccttagttcaatatggggaagcccttcttcactctctctctttcttccctttgcttgctgctggaccgtctccagcgcctgcttgccaccgccattgctggcgatggccaccacctgctggggggtcaagccgtgggcctggcacagcaccggcaacaggtgtcgagtgcatgctttgctattacctccagcaagttcaacgagtgccaactcaacaacctcaacgcgttggaacccgaccaccgcgttgagtccgaaggtggtcttattgaaacatggaactctcaacaccctgagctgcaatgcgccggtgtcactgtttccaaacgcacctcaaccgcaacggcctccacttgccatcttactcaccttatccccaaaatgatcattgtcgttcaaggtgcgtaatattagtaagaagta

SEQ ID NO: 680 - DNA, 650 bp, Artificial
  Mutations within GlyA3B4 introduced by GmGlyA3B4_T01TALE nuclease
gttcatgtacggttgcagatataaacgaagcatagcttatgtatgaggtgtaacaaaattggaaacaatagccatgcaaggtgaagaatgtcaccaactcagaaacccttcttcattgacgtgtccctcactcactctcctctcttcactataaatcgccactcttcgtgttctccacttcaccaactccttcaaacttattaacactttccttagttcaatatggggaagcccttcttcacttgtcgagtgcatgctttgctattacctccagcaagttcaacgagtgccaactcaacaacctcaacgcgttggaacccgaccaccgcgttgagtccgaaggtggtcttattgaaacatggaactctcaacacccctgagctgcaatgcgccggtgtcactgttttccaaacgcaccctcaaccgcaacggcctccacttgccatcttactcaccttatccccaaatgatcattgtcgttcaaggtgcgtaatattagtaagaagtatttatcagctttaacgtgataacaataatagtaatatgaaatatttattaaattttttataattaattctctgctagaaaatttggattaatcatttttagtagaattttgttttttctcaactaggtttttaaacaccaca

SEQ ID NO: 681 - DNA, 539 bp, Artificial
  Mutations within GlyA3B4 introduced by GmGlyA3B4_T01TALE nuclease
gttcatgtacggttgcagatataaacgaagcatagcttatgtatgaggtgtaacaaaattggaaacaatagccatgcaaggtgaagaatgtcaccaactcagaaacccttcttcattgacgtgtccctcactcactctcctctcttcactataaatcgccactcttcgtgttctccacttcacctccagcaagttcaacgagtgccaactcaacaacctcaacgcgttggaacccgaccaccgcgttgagtccgaaggtggtcttattgaaacatggaactctcaacaccctgagctgcaatgcgccggtgtcactgtttccaaacgcaccctcaaccgcaacggcctccacttgccatcttactcaccttatcccccaaatgatcattgtcgttcaaggtgcgtaatattagtaagaagtatttatcagcttaacgtgataacaataatagtaatatgaaatatttattaaattttttataattaatctctgctagaaatttgattaatcatttttagtagaatttgtttttctcaac

SEQ ID NO: 682 - DNA, 666 bp, Artificial
  Mutations within GlyA3B4 introduced by GmGlyA3B4_T01TALE nuclease
  misc_feature (530): n is a or c or t or g
gttcatgtacggttgcagatataaacgaagcatagcttatgtatgaggtgtaacaaaattggaaacaatagccatgcaaggtgaagaatgtcaccaactcagaaacccttcttcattgacgtgtccctcactcactctcctctcttcactataaatcgccactcttcgtgttctccacttcaccaactccttcaaacttattaacactttccttagttcaatatggggaagcccttcttcactctctctctttcttccctttgcttgctatctctatcgctgctttgctattacctccagcaagttcaacgagtgccaactcaacaacctcaacgcgttggaacccgaccaccgcgttgagtccgaaggtggtcttattgaaacatggaactctcaacaccctgagctgcaatgcgccggtgtcactgtttccaaacgcaccctcaaccgcaacggcctccacttgccatcttactcaccttatccccaaatgatcattgtcgttcaaggtgcgtaatattagtaagagnatttatcagcttaacgtgataacaataatagtaatatgaaatatttattaaatttttataattaatctctgctagaaaatttgattaatcattttagtagaatttgttttctcaactaggtttttaaaacaccaca

SEQ ID NO: 683 - DNA, 629 bp, Artificial
  Mutations within GlyA3B4 introduced by GmGlyA3B4_T01TALE nuclease
gttcatgtacggttgcagatataaacgaagcatagcttatgtatgaggtgtaacaaaattggaaacaatagccatgcaaggtgaagaatgtcaccaactcagaaacccttcttcattgacgtgtccctcactcactctcctctcttcactataaatcgccactcttcgtgttctccacttcaccaactccttcaaacttattaacactttccttagttcaatatggggaagcccttcttcactctctctctttcttccctttgcttcgagtgcatgctttgctattacctccagcaagttcaacgagtgccaactcaacaacctcaacgcgttggaacccgaccaccgcgttgagtccgaaggtggtcttattgaaacatggaactctcaacaccctgagctgcaatgcgccggtgtcactgtttccaaacgcaccctcaaccgcaacggcctccacttgccatcttactcaccttatccccaaatgatcattgtcgttcaaggtgcgtaatattagtaagaagtatttatcagcttaacgtgataacaataatagtaatatgaaatatttattaaattttttataattaatctctgctagaaaatttgattaatcatttttagtagaa

SEQ ID NO: 684 - DNA, 514 bp, Artificial
  Mutations within GlyA3B4 introduced by GmGlyA3B4_T01TALE nuclease
gttcatgtacggttgcagatataaacgaagcatagcttatgtatgaggtgtaacaaaattggaaacaatagccatgcaaggtgaagaatgtcaccaactcagaaacccttcttcattgtcgagtgcatgctttgctattacctccagcaagttcaacgagtgccaactcaacaacctcaacgcgttggaacccgaccaccgcgttgagtccgaaggtggtcttattgaaacatggaactctcaacaccctgagctgcaatgcgccggtgtcactgtttccaaacgcaccctcaaccgcaacggcctccacttgccatcttactcaccttatccccaaatgatcattgtcgttcaaggtgcgtaatattagtaagaagtatttatcagcttaacgtgataacaataatagtaatatgaaatatttattaaattttttataattaatctctgctagaaaatttgattaatcattttttagtagaatttgtttttctcaactaggttttaaacacca

SEQ ID NO: 685 - DNA, 622 bp, Artificial
  Mutations within GlyA3B4 introduced by GmGlyA3B4_T01TALE nuclease
gttcatgtacggttgcagatataaacgaagcatagcttatgtatgaggtgtaacaaaattggaaacaatagccatgcaaggtgaagaatgtcaccaactcagaaacccttcttcattgacgtgtccctcactcactctcctctcttcactataaatcgccactcttcgtgttctccacttcaccaactccttcaaacttattaacactttccttagttcaatatggggaagcccttcttcactctctctctttcttccctttgcttcttgtcgagtgcatgctttgctattacctccagcaagttcaacgagtgccaactcaacaacctcaacgcgttggaacccgaccaccgcgttgagtccgaaggtggtcttattgaaacatggaactctcaacaccctgagctgcaatgcgccggtgtcactgtttccaaacgcaccctcaaccgcaacggcctccacttgccatcttactcaccttatcccccaaatgatcattgtcgttcaaggtgcgtaatattagtaagaagtatttatcagcttaacgtgataacaataatagtaatatgaaatatttattaaattttttataattaatctctgctagaaaatttgattaatc

SEQ ID NO: 686 - DNA, 609 bp, Artificial
  Mutations within GlyA3B4 introduced by GmGlyA3B4_T01TALE nuclease
gttcatgtacggttgcagatataaacgaagcatagcttatgtatgaggtgtaacaaaattggaaacaatagccatgcaaggtgaagaatgtcaccaactcagaaaccccttcttcattgacgtgtccctcactcactctcctctcttcactataaatcgccactcttcgtgttctccacttcaccaactccttcaaacttattaacactttccttagttcaatatggggaagcccttcttcactctctctctttcttccctttgcttgctctcgagtgcatgctttgctattacctccagcaagttcaacgagtgccaactcaacaacctcaacgcgttggaacccgaccaccgcgttgagtccgaaggtggtcttattgaaacatggaactctcaacacctgagctgcaatgcgccggtgtcactgtttccaaacgcaccctcaaccgcaacggcctccacttgccatcttactcaccttatcccccaaatgatcattgtcgttcaaggtgcgtaatattagtaagaagtatttatcagctttaacgtgataacaataatagtaatatgaaatattttattaaattttttataattaatctctgctag

SEQ ID NO: 687 - DNA, 651 bp, Artificial
  Mutations within GlyA3B4 introduced by GmGlyA3B4_T01TALE nuclease
gttcatgtacggttgcagatataaacgaagcatagcttatgtatgaggtgtaacaaaattggaaacaatagccatgcaaggtgaagaatgtcaccaactcagaaacccttcttcattgacgtgtccctcactcactctcctctcttcactataaatcgccactcttcgtgttctccacttcaccaactccttcaaacttattaacactttccttagttcaatatggggaagcccttcttcactctctctctttcttccctttgcttttgtcgagtgcatgctttgctattacctccagcaagttcaacgagtgccaactcaacaacctcaacgcgttggaacccgaccaccgcgttgagtccgaaggtggtcttattgaaacatggaactctcaacaccctgagctgcaatgcgccggtgtcactgtttccaaacgcaccctcaaccgcaacggcctccacttgccatcttactcaccttatccccaaatgatcattgtcgttcaaggtgcgtaaatattagtaagaagtatttatcagcttaacgtgataacaataatagtaatatgaaatatttattaaattttttataattaatctctgctagaaaatttgattaatctttttagtagaatttgttttttctcaacta

SEQ ID NO: 688 - DNA, 496 bp, Artificial
  Mutations within GlyA3B4 introduced by GmGlyA3B4_T01TALE nuclease
gttcatgtacggttgcagatataaacgaagcatagcttatgtatgaggtgtaacaaaattggaaacaatagccatgcaaggtgaagaatgtcaccaactcagaaaccttcttcattgacgtgtccctcactcactctcctctcttcactataaatcgccactcttcgtgttctccacttcaccaactccttcaaacttattaacacttgtcgagtgcatgctttgctattacctccagcaagttcaacgagtgccaactcaacaacctcaacgcgttggaacccgaccaccgcgttgagtccgaaggtggtcttattgaacatggaactctcaacaccctgagctgcaatgcgccggtgtcactgtttccaaacgcaccctcaaccgcaacggcctccacttgccatcttactcaccttatcccccaaaatgatcattgtcgttcaaggtgcgtaatattagtaagaagtatttatcagcttaacgtgataacaat

SEQ ID NO: 689 - DNA, 653 bp, Artificial; identical to SEQ ID NO: 585
  Mutations within GlyA3B4 introduced by GmGlyA3B4_T01TALE nuclease

SEQ ID NO: 690 - DNA, 607 bp, Artificial
  Mutations within GlyA3B4 introduced by GmGlyA3B4_T01TALE nuclease
gttcatgtacggttgcagatataaacgaagcatagcttatgtatgaggtgtaacaaaattggaaacaatagccatgcaaggtgaagaatgtcaccaactcagaaacccttcttcattgacgtgtccctcactcactctcctctcttcactataaatcgccactcttcgtgttctccacttcaccaactccttcaaacttattaacactttccttagttcaatatggggaagcccttcttcactctctctctttcttccctttgcttgtcgagtgcatgctttgctattacctccagcaagttcaacgagtgccaactcaacaacctcaacgcgttggaacccgaccaccgcgttgagtccgaaggtggtcttattgaaacatggaactctcaacaccctgagctgcaatgcgccggtgtcactgtttccaaacgcacctcaaccgcaacggcctccacttgccatcttactcaccctttatcccccaaatgatcattgtcgttcaaaggtgcgtaaatattagtaagaagtatttatcagcttaacgtgataacaataatagtaatatgaaatatttattaaattttttataattaatctctgctag

SEQ ID NO: 691 - DNA, 629 bp, Artificial
  Mutations within GlyA3B4 introduced by GmGlyA3B4_T01TALE nuclease
gttcatgtacggttgcagatataaacgaagcatagcttatgtatgaggtgtaacaaaattggaaacaatagccatgcaaggtgaagaatgtcaccaactcagaaacccttcttcattgacgtgtccctcactcactctcctctcttcactataaatcgccactcttcgtgttctccacttcaccaactccttcaaacttattaacactttccttagttcaatatggggaagcccttcttcactctctctctttcttccctttgcttgctgcaagttcaacgagtgccaactcaacaacctcaacgcgttggaacccgaccaccgcgttgagtccgaaggtggtcttattgaaacatggaactctcaacaccctgagctgcaatgcgccggtgtcactgtttccaaacgcaccctcaaccgcaacggcctccacttgccatcttactcaccttatccccaaatgatcattgtcgttcaaggtgcgtaatattagtaagaagtatttatcagcttaacgtgataacaataatagtaatatgaaatatttattaatttttataattaatctctgctagaaaatttgattaatcatttttagtagaatttgtttttctcaactaggttttaaa

SEQ ID NO: 692 - DNA, 583 bp, Artificial
  Mutations within GlyA3B4 introduced by GmGlyA3B4_T01TALE nuclease
gttcatgtacggttgcagatataaacgaagcatagcttatgtatgaggtgtaacaaaattggaaacaatagccatgcaaggtgaagaatgtcaccaactcagaaacccttcttcattgacgtgtccctcactcactctcctctcttcactataaatcgccactcttcgtgttctccacttcaccaactccttcaaacttattaacactttccttagttcaatatgtcgagtgcatgctttgctattacctccagcaagttcaacgagtgccaactcaacaacctcaacgcgttggaaccgaccaccgcgttgagtccgaaggtggtcttattgaaacatggaactctcaacaccctgagctgcaatgcgccggtgtcactgtttccaaacgcaccctcaaccgcaacggcctccacttgccatcttactcaccttatccccaaatgatcattgtcgttcaaggtgcgtaatattagtaagaagtatttatcagcttaacgtgataacaataatagtaatatgaatatttattaatttttataattaatctctgctagaaaatttgattaatcatttttagtag

SEQ ID NO: 693 - DNA, 513 bp, Artificial; identical to SEQ ID NO: 645
  Mutations within GlyA3B4 introduced by GmGlyA3B4_T01TALE nuclease

SEQ ID NO: 694 - DNA, 513 bp, Artificial; identical to SEQ ID NO: 645
  Mutations within GlyA3B4 introduced by GmGlyA3B4_T01TALE nuclease

SEQ ID NO: 695 - DNA, 477 bp, Artificial; identical to SEQ ID NO: 515
  Mutations within GlyA3B4 introduced by GmGlyA3B4_T01TALE nuclease

SEQ ID NO: 696 - DNA, 776 bp, Artificial
  Mutations within GlyA3B4 introduced by GmGlyA3B4_T01TALE nuclease
gttcatgtacggttgcagatataaacgaagcatagcttatgtatgaggtgtaacaaaattggaaacaatagccatgcaaggtgaagaatgtcaccaactcagaaacccttcttcattgacgtgtccctcactcactctcctctcttcactataaatcgccactcttcgtgttctccacttcaccaactccttcaaacttattaacactttccttagttcaatatggggaagcccttcttcactctctctctttcttccctttgcttgctactccggggtcaagttgagcggggcacccgtcagtgcattgcgccatgcatgcactgcctccactgcggtcacgccgccacgttttgcaatcttgagaagttggcctcttgtcgagtgcatgctttgctattacctccagcaagttcaacgagtgccaactcaacaacctcaacgcgttggaacccgaccaccgcgttgagtccgaaggtggtcttattgaaacatggaactctcaacaccctgagctgcaatgcgccggtgtcactgtttccaaacgcaccctcaaccgcaacggcctccacttgccatcttactcaccttatccccaaaatgatcattgtcgttcaaggtgcgtaatattagtaagaagtatttatcgcttaacgtgataacaataatagtaatatgaaaatatttattaaattttttataattaatctctgctagaaaatttgattaatcaatttttagtagaatttgtttttctcaactaggtttaaacacca

SEQ ID NO: 697 - DNA, 635 bp, Artificial
  Mutations within GlyA3B4 introduced by GmGlyA3B4_T01TALE nuclease
gttcatgtacggttgcagatataaacgaagcatagcttatgtatgaggtgtaacaaaattggaaacaatagccatgcaaggtgaagaatgtcaccaactcagaaacccttcttcattgacgtgtccctcactcactctcctctcttcactataaatcgccactcttcgtgttctccacttcaccaactccttcaaacttattaacactttccttagttcaatatggggaagcccttcttcactctctctctttcttccctttgcttgctctcgagtgcatgctttgctattacctccagcaagttcaacgagtgccaactcaacaacctcaacgcgttggaacccgaccaccgcgttgagtccgaaggtggtcttattgaaacatggaactctcaacaccctgagctgcaatgcgccggtgtcactgtttccaaacgcaccctcaaccgcaacggcctccacttgccatcttactcaccttatccccaaatgatcattgtcgttcaaggtgcgtaaatattagtaagaagtatttatcagcttaacgtgataacaataatagtaatatgaaatatttattaaattttttataattaatctctgctagaaaatttgattaatcatttttagtagaa

SEQ ID NO: 698 - DNA, 610 bp, Artificial
  Mutations within GlyA3B4 introduced by GmGlyA3B4_T01TALE nuclease
gttcatgtacggttgcagatataaacgaagcatagcttatgtatgaggtgtaacaaaattggaaacaatagccatgcaaggtgaagaatgtcaccaactcagaaacccttcttcattgacgtgtccctcactcactctcctctcttcactataaatcgccactcttcgtgttctccacttcaccaactccttcaaacttattaacactttccttgtcgagtgcatgctttgctattacctccagcaagttcaacgagtgccaactcaacaacctcaacgcgttggaacccgaccaccgcgttgagtccgaaggtggtcttattgaaacatggaactctcaacaccctgagctgcaatgcgccggtgtcactgtttccaaacgcaccctcaaccgcaacggcctccacttgccatcttactcaccttatccccaaaatgatcattgtcgttcaaggtgcgtaatattagtaagaagtatttatcagcttaacgtgataacaataatagtaatatgaaatatttattaaattttttataattaatctctgctagaaaatttgattaatcatttttagtagaatttgtttttctcaactaggtttttaaaaca

SEQ ID NO: 699 - DNA, 557 bp, Artificial
  Mutations within GlyA3B4 introduced by GmGlyA3B4_T01TALE nuclease
gttcatgtacggttgcagatataaacgaagcatagcttatgtatgaggtgtaacaaaattggaaacaatagccatgcaaggtgaagaatgtcaccaactcagaaacccttcttcattgacgtgtccctcactcactctcctctcttcactataaatcgccactcttcgtgttctccacttcaccaactccttcaaacttattaacactttccttgtcgagtgcatgctttgctattacctccagcaagttcaacgagtgccaactcaacaacctcaacgcgttggaacccgaccaccgcgttgagtccgaaggtggtcttattgaacatggaactctcaacaccctgagctgcaatgcgccggtgtcactgtttccaaacgcaccctcaaccgcaacggcctccacttgccatcttactcacttcatccccaatgatcattcgtcgttcaaggtagcgtaatatagtaagaagtattatcagcttaacgtgataacaataatagtaatattgaatatttattaaatttttatattaatctcatgctagaaattttga

SEQ ID NO: 700 - DNA, 669 bp, Artificial
  Mutations within GlyA3B4 introduced by GmGlyA3B4_T01TALE nuclease
gttcatgtacggttgcagatataaacgaagcatagcttatgtatgaggtgtaacaaaattggaaacaatagccatgcaaggtgaagaatgtcaccaactcagaaacccttcttcattgacgtgtccctcactcactctcctctcttcactataaatcgccactcttcgtgttctccacttcaccaactccttcaaacttattaacactttccttagttcaatatggggaagcccttcttcactctctctctttcttccctttgcttgcttgtcgagtgcatgctttgctattacctccagcaagttcaacgagtgccaactcaacaacctcaacgcgttggaacccgaccaccgcgttgagtccgaaggtggtcttattgaaacatggaactctcaacaccctgagctgcaatgcgccggtgtcactgtttccaaacgcaccctcaaccgcaacggcctccacttgccatcttactcaccttatcccccaaatgatcattgtcgttcaaggtgcgtaaatattagtaagaagtatttatcagcttaacgtgataacaataatagtaatatgaaatatttattaaatttttataattaatctctgctagaaaatttgattaatctttttagtagaaatttgttttttctcaactaggttttaaaacacca

SEQ ID NO: 701 - DNA, 647 bp, Artificial
  Mutations within GlyA3B4 introduced by GmGlyA3B4_T01TALE nuclease
  misc_feature (278); (528): n is a or c or t or g
gttcatgtacggttgcagatataaacgaagcatagcttatgtatgaggtgtaacaaaattggaaacaatagccatgcaaggtgaagaatgtcaccaactcagaaacccttcttcattgacgtgtccctcactcactctcctctcttcactataaatcgccactcttcgtgttctccacttcaccaactccttcaaacttattaacactttccttagttcaatatggggaagcccttcttcactctctctctttcttccctttgctgtctactctacgntgctttgctattacctccagcaagttcaacgagtgccaactcaacaacctcaacgcgttggaacccgaccaccgcgttgagtccgaaggtggtcttattgaaacatggaactctcaacaccctgagctgcaatgcgccggtgtcactgtttccaaacgcaccctcaaccgcaacggcctccacttgccatcttactcaccttatccccaaatgatcattgtcgttcaaggtgcgtaatattagtaagagnatttatcagcttaacgtgataacaatatagtaatatgaaatatttattaaatttttataattaatctctgctagaaaatttgattaatcattttagtagaatttgttttctcaactagg

SEQ ID NO: 702 - DNA, 632 bp, Artificial
  Mutations within GlyA3B4 introduced by GmGlyA3B4_T01TALE nuclease
gttcatgtacggttgcagatataaacgaagcatagcttatgtatgaggtgtaacaaaattggaaacaatagccatgcaaggtgaagaatgtcaccaactcagaaacccttcttcattgacgtgtccctcactcactctcctctcttcactataaatcgccactcttcgtgttctccacttcaccaactccttcaaacttattaacactttccttagttcaatatggggaagcccttcttcactctctctctttcttccctttgcttgctgcaagttcaacgagtgccaactcaacaacctcaacgcgttggaacccgaccaccgcgttgagtccgaaggtggtcttattgaaacatggaactctcaacaccctgagctgcaatgcgccggtgtcactgtttccaaacgcaccctcaaccgcaacggcctccacttgccatcttactcaccttatccccaaatgatcattgtcgttcaaggtgcgtaatattagtaagaagtatttatcagcttaacgtgataacaataatagtaatatgaaatatttattaattttttataattaatctctgctagaaaatttgattaatcatttttagtagaatttgtttttctcaactaggttttaaaca

SEQ ID NO: 703 - DNA, 669 bp, Artificial
  Mutations within GlyA3B4 introduced by GmGlyA3B4_T01TALE nuclease
gttcatgtacggttgcagatataaacgaagcatagcttatgtatgaggtgtaacaaaattggaaacaatagccatgcaaggtgaagaatgtcaccaactcagaaacccttcttcattgacgtgtccctcactcactctcctctcttcactataaatcgccactcttcgtgttctccacttcaccaactccttcaaacttattaacactttccttagttcaatatggggaagcccttcttcactctctctctttcttccctttgcttgctcttgtcgagtgcatgctttgctattacctccagcaagttcaacgagtgccaactcaacaacctcaacgcgttggaacccgaccaccgcgttgagtccgaaggtggtcttattgaaacatggaactctcaacaccctgagctgcaatgcgccggtgtcactgtttccaaacgcaccctcaaccgcaacggcctccacttgccatcttactcaccttatccccaaatgatcattgtcgttcaaggtgcgtaatattagtaagaagtatttatcagcttaacgtgataacaataatagtaatatgaaatatttattaaatttttataattaatctctgctagaaaatttgattaatcattttagtagaatttgttttctcaactaggtttttaaaacaccaca

SEQ ID NO: 704 - DNA, 661 bp, Artificial
  Mutations within GlyA3B4 introduced by GmGlyA3B4_T01TALE nuclease
gttcatgtacggttgcagatataaacgaagcatagcttatgtatgaggtgtaacaaaattggaaacaatagccatgcaaggtgaagaatgtcaccaactcagaaacccttcttcattgacgtgtccctcactcactctcctctcttcactataaatcgccactcttcgtgttctccacttcaccaactccttcaaacttattaacactttccttagttcaatatggggaagcccttcttcactctctctctttcttccccttgtcgagtgcatgctttgctattacctccagcaagttcaacgagtgccaactcaacaacctcaacgcgttggaacccgaccaccgcgttgagtccgaaggtggtcttattgaaacatggaactctcaacaccctgagctgcaatgcgccggtgtcactgtttccaaacgcaccctcaaccgcaacggcctccacttgccatcttactcaccttatccccaaatgatcattgtcgttcaaggtgcgtaatattagtaagaagtatttatcagcttaacgtgataacaataatagtaatatgaaatatttattaaattttttataattaatctctgctagaaaatttgattaatctttttagtagaatttgttttttctcaactaggttttaaaacaccaca

SEQ ID NO: 705 - DNA, 654 bp, Artificial
  Mutations within GlyA3B4 introduced by GmGlyA3B4_T01TALE nuclease
  misc_feature (276); (281): n is a or c or t or g
gttcatgtacggttgcagatataaacgaagcatagcttatgtatgaggtgtaacaaaattggaaacaatagccatgcaaggtgaagaatgtcaccaactcagaaacccttcttcattgacgtgtccctcactcactctcctctcttcactataaatcgccactcttcgtgttctccacttcaccaactccttcaaacttattaacactttccttagttcaatatggggaagcccttcttcactctctctctttcttccctttgcttgctacttctngctgntgctttgctattacctccagcaagttcaacgagtgccaactcaacaacctcaacgcgttggaacccgaccaccgcgttgagtccgaaggtggtcttattgaaacatggaactctcaacaccctgagctgcaatgcgccggtgtcactgtttccaaacgcaccctcaaccgcaacggcctccacttgccatcttactcaccttatccccaaatgatcattgtcgttcaaggtgcgtaatattagtaagagtatttatcagcttaacgtgataacaatatagtaatatgaaatatttattaaatttttataattaatctctgctagaaaatttgattaatcattttagtagaatttgttttctcaactaggtttt

SEQ ID NO: 706 - DNA, 646 bp, Artificial
  Mutations within GlyA3B4 introduced by GmGlyA3B4_T01TALE nuclease
gttcatgtacggttgcagatataaacgaagcatagcttatgtatgaggtgtaacaaaattggaaacaatagccatgcaaggtgaagaatgtcaccaactcagaaacccttcttcattgacgtgtccctcactcactctcctctcttcactataaatcgccactcttcgtgttctccacttcaccaactccttcaaacttattaacactttccttagttcaatatggggaagcccttcttcactctctctctttcttccctttgctattacctccagcaagttcaacgagtgccaactcaacaacctcaacgcgttggaacccgaccaccgcgttgagtccgaaggtggtcttattgaaacatggaactctcaacaccctgagctgcaatgcgccggtgtcactgtttccaaacgcaccctcaaccgcaacggcctccacttgccatcttactcaccttatccccaaatgatcattgtcgttcaaggtgcgtaatattagtaagaagtatttatcagcttaacgtgataacaataatagtaatatgaaatatttattaaattttttataattaatctctgctagaaaatttgattaatcatttttagtagaatttgttttttctcaactaggttttaaaacaccaca

SEQ ID NO: 707 - DNA, 643 bp, Artificial
  Mutations within GlyA3B4 introduced by GmGlyA3B4_T01TALE nuclease
gttcatgtacggttgcagatataaacgaagcatagcttatgtatgaggtgtaacaaaattggaaacaatagccatgcaaggtgaagaatgtcaccaactcagaaacccttcttcattgacgtgtccctcactcactctcctctcttcactataaatcgccactcttcgtgttctccacttcaccaactccttcaaacttattaacactttccttagttcaatatggggaagcccttcttcacttgtcgagtgcatgctttgctattacctccagcaagttcaacgagtgccaactcaacaacctcaacgcgttggaacccgaccaccgcgttgagtccgaaggtggtcttattgaaacatggaactctcaacaccctgagctgcaatgcgccggtgtcactgtttccaaacgcaccctcaaccgcaacggcctccacttgccatcttactcaccttatccccaaatgatcattgtcgttcaaggtgcgtaatattagtaagaagtatttatcagcttaacgtgataacaataatagtaatatgaaatatttattaaattttttataattaatctctgctagaaaatttgattaatcatttttagtagaatttgttttttctcaactaggttttaaacaccaca

SEQ ID NO: 708 - DNA, 607 bp, Artificial
  Mutations within GlyA3B4 introduced by GmGlyA3B4_T01TALE nuclease
gttcatgtacggttgcagatataaacgaagcatagcttatgtatgaggtgtaacaaaattggaaacaatagccatgcaaggtgaagaatgtcaccaactcagaaacccttcttcattgacgtgtccctcactcactctcctctcttcactataaatcgccactcttcgtgttctccacttcaccaactccttcaaacttattaacactttccttagttcaatatggggaagcccttcttcactctctctctttcttccctttgcttgcttgtcgagtgcatgctttgctattacctccagcaagttcaacgagtgccaactcaacaacctcaacgcgttggaacccgaccaccgcgttgagtccgaaggtggtcttattgaaacatggaactctcaacaccctgagctgcaatgcgccggtgtcactgtttccaaacgcaccctcaaccgcaacggcctccacttgccatcttactcaccttatccccaaatgatcattgtcgttcaaggtgcgtaatattagtaagaagtatttatcagcttaacgtgataacaataatagtaatatgaaatatttattaaattttttataattaatctctgctag

SEQ ID NO: 709 - DNA, 658 bp, Artificial
  Mutations within GlyA3B4 introduced by GmGlyA3B4_T01TALE nuclease
gttcatgtacggttgcagatataaacgaagcatagcttatgtatgaggtgtaacaaaattggaaacaatagccatgcaaggtgaagaatgtcaccaactcagaaacccttcttcattgacgtgtccctcactcactctcctctcttcactataaatcgccactcttcgtgttctccacttcaccaactccttcaaacttattaacactttccttagttcaatatggggaagcccttcttcactctctctctttcttccctttgcttgctatttgctattacctccagcaagttcaacgagtgccaactcaacaacctcaacgcgttggaacccgaccaccgcgttgagtccgaaggtggtcttattgaaacatggaactctcaacaccctgagctgcaatgcgccggtgtcactgtttccaaacgcaccctcaaccgcaacggcctccacttgccatcttactcaccttatccccaaatgatcattgtcgttcaaggtgcgtaaatattagtaagaagtatttatcagcttaacgtgataacaataatagtaatatgaaatatttattaaattttttataattaatctctgctagaaaatttgattaatcatttttagtagaatttgttttttctcaactaggttttaaaacaccaca

SEQ ID NO: 710 - DNA, 666 bp, Artificial
  Mutations within GlyA3B4 introduced by GmGlyA3B4_T01TALE nuclease
gttcatgtacggttgcagatataaacgaagcatagcttatgtatgaggtgtaacaaaattggaaacaatagccatgcaaggtgaagaatgtcaccaactcagaaacccttcttcattgacgtgtccctcactcactctcctctcttcactataaatcgccactcttcgtgttctccacttcaccaactccttcaaacttattaacactttccttagttcaatatggggaagcccttcttcactctctctctttcttccctttgcttgctctcgagtgcatgttttgctattacctccagcaagttcaacgagtgccaactcaacaacctcaacgcgttggaacccgaccaccgcgttgagtccgaaggtggtcttattgaaacatggaactctcaacaccctgagctgcaatgcgccggtgtcactgtttccaaacgcaccctcaaccgcaacggcctccacttgccatcttactcaccttatcccccaaatgatcattgtcgttcaaggtgcgtaatattagtaagaagtatttatcagcttaacgtgataacaataatagtaatatgaaatatttattaaattttttataattaatctctgctagaaaatttgattaatctttttagtagaattgttttttctcaactaggtttaaacaccaca

SEQ ID NO: 711 - DNA, 616 bp, Artificial
  Mutations within GlyA3B4 introduced by GmGlyA3B4_T01TALE nuclease
gttcatgtacggttgcagatataaacgaagcatagcttatgtatgaggtgtaacaaaattggaaacaatagccatgcaaggtgaagaatgtcaccaactcagaaacccttcttcattgacgtgtccctcactcactctcctctcttcactataaatcgccactcttcgtgttctccacttcaccaactccttcaaacttattaacactttccttagttcaatatggggaagcccttcttcactctctctctttcttcactcttgtcgagtgcatgctttgctattacctccagcaagttcaacgagtgccaactcaacaacctcaacgcgttggaacccgaccaccgcgttgagtccgaaggtggtcttattgaaacatggaactctcaacaccctgagctgcaatgcgccggtgtcactgtttccaaacgcaccctcaaccgcaacggcctccacttgccatcttactcaccttatccccaaatgatcattgtcgttcaaggtgcgtaaatattagtaagaagtatttatcagcttaacgtgataacaataatagtaatatgaaatatttattaaattttttataattaatctctgctagaaaatttgattaatc

SEQ ID NO: 712 - DNA, 666 bp, Artificial
  Mutations within GlyA3B4 introduced by GmGlyA3B4_T01TALE nuclease
  misc_feature (533): n is a or c or t or g
gttcatgtacggttgcagatataaacgaagcatagcttatgtatgaggtgtaacaaaaattggaaacaatagccatgcaaggtgaagaatgtcaccaactcagaaacccttcttcattgacgtgtccctcactcactctcctctcttcactataaatcgccactcttcgtgttctccacttcaccaactccttcaaacttattaacactttccttagttcaatatggggaagcccttcttcactctctctctttcttccctttgcttgctattgtcgagtgcatgctttgctattacctccagcaagttcaacgagtgccaactcaacaacctcaacgcgttggaacccgaccaccgcgttgagtccgaaggtggtcttattgaaacatggaactctcaacaccctgagctgcaatgcgccggtgtcactgtttccaaacgcaccctcaaccgcaacggcctccacttgccatcttactcaccttatccccaaatgatcattgtcgttcaaggtgcgtaatattagtaagagnatttatcagcttaacgtgataacaataatagtaatatgaaatatttattaaatttttataattaatctctgctagaaaatttgattaatcattttagtagaatttgttttctcaactaggtttttaaacacca

SEQ ID NO: 713 - DNA, 651 bp, Artificial
  Mutations within GlyA3B4 introduced by GmGlyA3B4_T01TALE nuclease
gttcatgtacggttgcagatataaacgaagcatagcttatgtatgaggtgtaacaaaattggaaacaatagccatgcaaggtgaagaatgtcaccaactcagaaacccttcttcattgacgtgtccctcactcactctcctctcttcactataaatcgccactcttcgtgttctccacttcaccaactccttcaaacttattaacactttccttagttcaatatggggaagcccttcttcactctctctctttcttccctttgcttcttgtcgagtgcatgctttgctattacctccagcaagttcaacgagtgccaactcaacaacctcaacgcgttggaacccgaccaccgcgttgagtccgaaggtggtcttattgaaacatggaactctcaacaccctgagctgcaatgcgccggtgtcactgtttccaaacgcaccctcaaccgcaacggcctccacttgccatcttactcaccttatccccaaatgatcattgtcgttcaaggtgcgtaatattagtaagaagtatttatcagcttaacgtgataacaataatagtaatatgaaatatttattaaattttttataattaatctctgctagaaaatttgattaatctttttagtagaatttgttttttctcaacta

SEQ ID NO: 714 - DNA, 477 bp, Artificial
  Mutations within GlyA3B4 introduced by GmGlyA3B4_T01TALE nuclease
gttcatgtacggttgcagatataaacgaagcatagcttatgtatgaggtgtaacaaaattggaaacaatagccatgcaaggtgaagaatgtcaccaactcagaaacccttcttcattgacgtgtccctcactcactctcctctcttcactataaatcgccactcttcgtgttctccacttcaccaactccttcaaacttattaacactttccttagttcaatatggggaagcccttcttcactctctctctttcttccctttgcttgctactacttgccatcttactcaccttatcctcaaatgatcattgtcgttcaaggtgcgtaatattagtaagaagtatttatcagcttaacgtgataacaataatagtaatatgaaatatttattaaattttttataattaatctctgctagaaaatttgattaatcatttttagtagaatttgtttttctcaactaggttttaaacacca

SEQ ID NO: 715 - DNA, 645 bp, Artificial
  Mutations within GlyA3B4 introduced by GmGlyA3B4_T01TALE nuclease
gttcatgtacggttgcagatataaacgaagcatagcttatgtatgaggtgtaacaaaattggaaacaatagccatgcaaggtgaagaatgtcaccaactcagaaacccttcttcattgacgtgtccctcactcactctcctctcttcactataaatcgccactcttcgtgttctccacttcaccaactccttcaaacttattaacactttccttagttcaatatggggaagcccttcttcactctctctctttcttccctttgcttgctttgctattacctccagcaagttcaacgagtgccaactcaacaacctcaacgcgttggaacccgaccaccgcgttgagtccgaaggtggtcttattgaaacatggaactctcaacaccctgagctgcaatgcgccggtgtcactgtttccaaacgcaccctcaaccgcaacggcctccacttgccatcttactcaccttatcccccaaatgatcattgtcgttcaaggtgcgtaatattagtaagaagtatttatcagcttaacgtgataacaataatagtaatatgaaatatttattaaattttttataattaatctctgctagaaaatttgattaatcatttttagtagaatttgttttttctcaactaggtttt

SEQ ID NO: 716 - DNA, 591 bp, Artificial
  Mutations within GlyA3B4 introduced by GmGlyA3B4_T01TALE nuclease
gttcatgtacggttgcagatataaacgaagcatagcttatgtatgaggtgtaacaaaattggaaacaatagccatgcaaggtgaagaatgtcaccaactcagaaacccttcttcattgacgtgtccctcactcactctcctctcttcactataaatcgccactcttcgtgttctccacttcaccaactccttcaaacttattaacactttccttagttcaatatggggaagcccttcttcactctctctctttcttccctttgcttgcttgtcgagtgcatgctttgctattacctccagcaagttcaacgagtgccaactcaacaacctcaacgcgttggaacccgaccaccgcgttgagtccgaaggtggtcttattgaaacatggaactctcaacaccctgagctgcaatgcgccggtgtcactgtttccaaacgcaccctcaaccgcaacggcctccacttgccatcttactcaccttatccccaaatgatcattgtcgttcaaggtgcgtaaatattagtaagaagtatttatcagcttaacgtgataacaataatagtaatatgaaatatttattaaatttttta

SEQ ID NO: 717 - DNA, 667 bp, Artificial
  Mutations within GlyA3B4 introduced by GmGlyA3B4_T01TALE nuclease
gttcatgtacggttgcagatataaacgaagcatagcttatgtatgaggtgtaacaaaattggaaacaatagccatgcaaggtgaagaatgtcaccaactcagaaacccttcttcattgacgtgtccctcactcactctcctctcttcactataaatcgccactcttcgtgttctccacttcaccaactccttcaaacttattaacactttccttagttcaatatggggaagcccttcttcactctctctctttcttccctttgctttgtcgagtgcatgctttgctattacctccagcaagttcaacgagtgccaactcaacaacctcaacgcgttggaacccgaccaccgcgttgagtccgaaggtggtcttattgaaacatggaactctcaacaccctgagctgcaatgcgccggtgtcactgtttccaaacgcaccctcaaccgcaacggcctccacttgccatcttactcaccttatccccaaatgatcattgtcgttcaaggtgcgtaatattagtaagaagtatttatcagcttaacgtgataacaataatagtaatatgaaatatttattaaattttttataattaatctctgctagaaaatttgattaatcatttttagtagaatttgttttttctcaactaggttttaaaacaccaca

SEQ ID NO: 718 - DNA, 649 bp, Artificial
  Mutations within GlyA3B4 introduced by GmGlyA3B4_T01TALE nuclease
gttcatgtacggttgcagatataaacgaagcatagcttatgtatgaggtgtaacaaaattggaaacaatagccatgcaaggtgaagaatgtcaccaactcagaaacccttcttcattgacgtgtccctcactcactctcctctcttcactataaatcgccactcttcgtgttctccacttcaccaactccttcaaacttattaacactttccttagttcaatatggggaagcccttcttcactctctctctttcttccctttgctgtcgagtgcatgctttgctattacctccagcaagttcaacgagtgccaactcaacaacctcaacgcgttggaacccgaccaccgcgttgagtccgaaggtggtcttattgaaacatggaactctcaacaccctgagctgcaatgcgccggtgtcactgtttccaaacgcaccctcaaccgcaacggcctccacttgccatcttactcaccttatcccccaaatgatcttgtcgttcaaggtgcgtaaatattagtaagaagtatttatcagcttaacgtgataacaataatagtaatatgaaatatttattaaattttttataattaatctctgctagaaaatttgattaatctttttagtagaattgttttttctcaactagg

SEQ ID NO: 719 - DNA, 548 bp, Artificial
  Mutations within GlyA3B4 introduced by GmGlyA3B4_T01TALE nuclease
gttcatgtacggttgcagatataaacgaagcatagcttatgtatgaggtgtaacaaaattggaaacaatagccatgcaaggtgaagaatgtcaccaactcagaaacccttcttcattgacgtgtccctcactcactctcctctcttcactataaatcgccactcttcgtgttctccacttcaccaactccttcaaacttattaacactttccttatcaacaacctcaacgcgttggaacccgaccaccgcgttgagtccgaaggtggtcttattgaaacatggaactctcaacaccctgagctgcaatgcgccggtgtcactgtttccaaacgcaccctcaaccgcaacggcctccacttgccatcttactcaccttatccccaaatgatcattgtcgttcaaggtgcgtaatattagtaagaagtatttatcagcttaacgtgataacaataatagtaatatgaaatatttattaaattttttataattaatctctgctagaaaatttgattaatcattttagtagaatttgtttttctcaactagg

SEQ ID NO: 720 - DNA, 686 bp, Artificial
  Mutations within GlyA3B4 introduced by GmGlyA3B4_T01TALE nuclease
gttcatgtacggttgcagatataaacgaagcatagcttatgtatgaggtgtaacaaaattggaaacaatagccatgcaaggtgaagaatgtcaccaactcagaaacccttcttcattgacgtgtccctcactcactctcctctcttcactataaatcgccactcttcgtgttctccacttcaccaactccttcaaacttattaacactttccttagttcaatatggggaagcccttcttcactctctctctttcttccctttgcttgctgccgtgggcctggcacagcaccggcaacagcgctggaccgtctccagcgcctcttgtcgagtgcatgctttgctattacctccagcaagttcaacgagtgccaactcaacaacctcaacgcgttggaacccgaccaccgcgttgagtccgaaggtggtcttattgaaacatggaactctcaacaccctgagctgcaatgcgccggtgtcactgtttccaaacgcaccctcaaccgcaacggcctccacttgccatcttactcaccttatccccaaatgatcattgtcgttcaaggtgcgtaatattagtaagaagtatttatcagcttaacgtgataacaataatagtaatatgaaaatatttattaaaattttttataattaatctctgctagaaaaatttgattaatcatttttt

SEQ ID NO: 721 - DNA, 645 bp, Artificial
  Mutations within GlyA3B4 introduced by GmGlyA3B4_T01TALE nuclease
gttcatgtacggttgcagatataaacgaagcatagcttatgtatgaggtgtaacaaaattggaaacaatagccatgcaaggtgaagaatgtcaccaactcagaaacccttcttcattgacgtgtccctcactcactctcctctcttcactataaatcgccactcttcgtgttctccacttcaccaactccttcaaacttattaacactttccttagttcaatatggggaagcccttcttcacttgtcgagtgcatgctttgctattacctccagcaagttcaacgagtgccaactcaacaacctcaacgcgttggaacccgaccaccgcgttgagtccgaaggtggtcttattgaaacatggaactctcaacacccctgagctgcaatgcgccggtgtcactgtttccaaacgcaccctcaaccgcaacggcctccacttgccatcttactcaccttatcccccaaatgatcattgtcgttcaaggtgcgtaatattagtaagaagtatttatcagctttaacgtgataacaataatagtaatatgaaatatttattaaattttttataattaatctctgctagaaaatttgattaatcatttttagtagaatttgttttttctcaactaggttttaaacaccac

SEQ ID NO: 722 - DNA, 621 bp, Artificial
  Mutations within GlyA3B4 introduced by GmGlyA3B4_T01TALE nuclease
gttcatgtacggttgcagatataaacgaagcatagcttatgtatgaggtgtaacaaaattggaaacaatagccatgcaaggtgaagaatgtcaccaactcagaaacccttcttcattgacgtgtccctcactcactctcctctcttcactataaatcgccactcttcgtgttctccacttcaccaactccttcaaacttattaacactttccttagttcaatatggggaagcccttcttcactctctctctttcttgtcgagtgcatgctttgctattacctccagcaagttcaacgagtgccaactcaacaacctcaacgcgttggaacccgaccaccgcgttgagtccgaaggtggtcttattgaaacatggaactctcaacaccctgagctgcaatgcgccggtgtcactgtttccaaacgcaccctcaaccgcaacggcctccacttgccatcttactcaccttatccccaaatgatcattgtcgttcaaggtgcgtaatattagtaagaagtatttatcagcttaacgtgataacaataatagtaatatgaaatatttattaaattttttataattaatctctgctagaaaatttgattaatcatttttagtagaa

SEQ ID NO: 723 - DNA, 466 bp, Artificial
  Mutations within GlyA3B4 introduced by GmGlyA3B4_T01TALE nuclease
gttcatgtacggttgcagatataaacgaagcatagcttatgtatgaggtgtaacaaaattggaaacaatagccatgcaaggtgaagaatgtcaccaactcagaaacccttcttcattgacgtgtccctcactcactctcctctcttcactataaatcgccactcttcgtgttctccacttcaccaactccttcaaacttattaacactttccttagttcaatatggggaagcccttcttcactctctctctttcttccctttgcttgctactacttgccatcttactcaccttatccccaaatgatcattgtcgttcaaggtgcgtaatattagtaagaagtatttatccagcttaacgtgataacaataatagtaatatgaaatatttattaaattttttataattaatctctgctagaaaatttgattaatcatttttagtagaatttgtttttctcaactagg

SEQ ID NO: 724 - DNA, 608 bp, Artificial
  Mutations within GlyA3B4 introduced by GmGlyA3B4_T01TALE nuclease
gttcatgtacggttgcagatataaacgaagcatagcttatgtatgaggtgtaacaaaattggaaacaatagccatgcaaggtgaagaatgtcaccaactcagaaacccttcttcattgacgtgtccctcactcactctcctctcttcactataaatcgccactcttcgtgttctccacttcaccaactccttcaaacttattaacactttccttgtcgagtgcatgctttgctattacctccagcaagttcaacgagtgccaactcaacaacctcaacgcgttggaacccgaccaccgcgttgagtccgaaggtggtcttattgaacatggaactctcaacaccctgagctgcaatgcgccggtgtcactgtttccaaacgcaccctcaaccgcaacggcctccacttgccatcttactcaccttatccccaaatgatcattgtcgttcaaggtgcgtaatattagtaagaagtatttatcagcttaacgtgataacaataatagtaatatgaaatatttattaaattttttataattaatctctgctagaaaatttgattaatcatttttagtagaatttgtttttctcaactaggtttttaaaaca

SEQ ID NO: 725 - DNA, 478 bp, Artificial
  Mutations within GlyA3B4 introduced by GmGlyA3B4_T01TALE nuclease
gttcatgtacggttgcagatataaacgaagcatagcttatgtatgaggtgtaacaaaattggaaacaatagccatgcaaggtgaagaatgtcaccaactcagaaacccttcttcattgacgtgtccctcactcactctcctctcttcactataaatcgccactcttcgtgttctccacttcaccaactccttcaaacttattaacactttctttagttcaatatggggaagcccttcttcactctctctctttcttccctttgcttgctactacttgccatcttactcaccttatccccaaatgatcattgtcgttcaaggtgcgtaatattagtaagaagtatttatcagcttaacgtgataacaataatagtaatatgaaatatttattaaattttttataattaatctctgctagaaaatttgattaatcatttttagtagaatttgttttttctcaactaggttttaaacacca

SEQ ID NO: 726 - DNA, 609 bp, Artificial
  Mutations within GlyA3B4 introduced by GmGlyA3B4_T01TALE nuclease
gttcatgtacggttgcagatataaacgaagcatagcttatgtatgaggtgtaacaaaattggaaacaatagccatgcaaggtgaagaatgtcaccaactcagaaacccttcttcattgacgtgtccctcactcactctcctctcttcactataaatcgccactcttcgtgttctccacttcaccaactccttcaaacttattaacactttccttagttcaatatggggaagcccttcttcactctctctctttcttccctttgcttgctactactcttatcgagtgcatgctttgctattacctccagcaagttcaacgagtgccaactcaacaacctcaacgcgttggaacccgaccaccgcgttgagtccgaaggtggtcttattgaaacatggaactctcaacaccctgagctgcaatgcgccggtgtcactgtttccaaacgcaccctcaaccgcaacggcctccacttgccatcttactcaccttatccccaaatgatcattgtcgttcaaggtgcgtatattagtaagaagtatttatcagcttaacgtgatacaataatagtaatatgaaatattattaaattttttataattaatctctgc

SEQ ID NO: 727 - DNA, 527 bp, Artificial
  Mutations within GlyA3B4 introduced by GmGlyA3B4_T01TALE nuclease
gttcatgtacggttgcagatataaacgaagcatagcttatgtatgaggtgtaacaaaattggaaacaatagccatgcaaggtgaagaatgtcaccaactcagaaacccttcttcattgacgtgtccctcactcactctcctctcttcactataaatcgccactcttcgtgttctccacttcaccaactccttcaaacttattaacactttccttagttcaatatggggaagcccttcttcactctctctctttcttccctttgcttgctactactcttgtcgagtgcatgctttgctattacctccagcaagttcaacgagtgccaactcaacaacctcaacgcgttggaacccgaccaccgcgttgagtccgaaggtggtcttattgaaacatggaactctcaacacccctgagctgcaatgcgccggtgtcactgtttccaaacgcaccctcaaccgcaacggcctccacttgccatcttactcaccttatccccaaatgatcattgtcgttcaaggtgcgtata

SEQ ID NO: 728 - DNA, 622 bp, Artificial
  Mutations within GlyA3B4 introduced by GmGlyA3B4_T01TALE nuclease
gttcatgtacggttgcagatataaacgaagcatagcttatgtatgaggtgtaacaaaattggaaacaatagccatgcaaggtgaagaatgtcaccaactcagaaacccttcttcattgacgtgtccctcactcactctcctctcttcactataaatcgccactcttcgtgttctccacttcaccaactccttcaaacttattaacactttccttagttcaatatggggaagcccttcttcactctctctctttcttccctttgcttcttgtcgagtgcatgctttgctattacctccagcaagttcaacgagtgccaactcaacaacctcaacgcgttggaacccgaccaccgcgttgagtccgaaggtggtcttattgaaacatggaactctcaacaccctgagctgcaatgcgccggtgtcactgtttccaaacgcaccctcaaccgcaacggcctccacttgccatcttactcaccttatccccaaatgatcattgtcgttcaaggtgcgtaaatattagtaagaagtatttatcagcttaacgtgataacaataatagtaatatgaaatatttattaaattttttataattaatctctgctagaaaatttgattaatc

SEQ ID NO: 729 - DNA, 672 bp, Artificial
  Mutations within GlyA3B4 introduced by GmGlyA3B4_T01TALE nuclease
gttcatgtacggttgcagatataaacgaagcatagcttatgtatgatggtgtaacaaaattggaaacaatagccatgcaaggtgaagaatgtcaccaactcagaaacccttcttcattgacgtgtccctcactcactctcctctcttcactataaatcgccactcttcgtgttctccacttcaccaactccttcaaacttattaacactttccttagttcaatatggggaagcccttcttcactctctctctttcttccctttgcttgtgtcgagtgcatgctttgctattacctccagcaagttcaacgagtgccaactcaacaacctcaacgcgttggaacccgaccaccgcgttgaagtccgaaggtggtcttattgaaacatggaactctcaacaccctgagctgcaatgcgccggtgtcactgtttccaaacgcacccctcaaccgcaacggcctccaccttgccatcttactcaccttatcccccaaatgatcattgtcgttcaaggtgcgtaatattagtaagaagtatttatcagcttaacgtgataacaataatagtaatatgaaatatttattaaattttttataattaatctctgctagaaaatttgattaatcatttttagtagaatttgttttttctcaactaggttttaaaacaccac

SEQ ID NO: 730 - DNA, 646 bp, Artificial; identical to SEQ ID NO: 706
  Mutations within GlyA3B4 introduced by GmGlyA3B4_T01TALE nuclease

SEQ ID NO: 731 - DNA, 654 bp, Artificial
  Mutations within GlyA3B4 introduced by GmGlyA3B4_T01TALE nuclease
gttcatgtacggttgcagatataaacgaagcatagcttatgtatgaggtgtaacaaaattggaaacaatagccatgcaaggtgaagaatgtcaccaactcagaaacccttcttcattgacgtgtccctcactcactctcctctcttcactataaatcgccactcttcgtgttctccacttcaccaactccttcaaacttattaacactttccttagttcaatatggggaagcccttcttcactctctctcttgtcgagtgcatgctttgctattacctccagcaagttcaacgagtgccaactcaacaacctcaacgcgttggaacccgaccaccgcgttgagtccgaaggtggtcttattgaaacatggaactctcaacaccctgagctgcaatgcgccggtgtcactgtttccaaacgcaccctcaaccgcaacggcctccacttgccatcttactcaccttatccccaaatgatcattgtcgttcaaggtgcgtaaatattagtaagaagtatttatcagcttaacgtgataacaataatagtaatatgaaatatttattaaattttttataattaatctctgctagaaaattttgattaatcatttttagtagaatttgttttttctcaactaggttttaaaacaccaca

SEQ ID NO: 732 - DNA, 645 bp, Artificial
  Mutations within GlyA3B4 introduced by GmGlyA3B4_T01TALE nuclease
gttcatgtacggttgcagatataaacgaagcatagcttatgtatgaggtgtaacaaaattggaaacaatagccatgcaaggtgaagaatgtcaccaactcagaaacccttcttcattgacgtgtccctcactcactctcctctcttcactataaatcgccactcttcgtgttctccacttcaccaactccttcaaacttattaacactttccttagttcaatatggggaagcccttcttcactctctctctttcttccctttgctattacctccagcaagttcaacgagtgccaactcaacaacctcaacgcgttggaacccgaccaccgcgttgagtccgaaggtggtcttattgaaacatggaactctcaacaccctgagctgcaatgcgccggtgtcactgtttccaaacgcaccctcaaccgcaacggcctccacttgccatcttactcaccttatccccaaatgatcattgtcgttcaaggtgcgtaatattagtaagaagtatttatcagcttaacgtgataacaataatagtaatatgaaatatttattaaattttttataattaatctctgctagaaaatttgattaatcatttttagtagaatttgttttttctcaactaggttttaaacaccaca

SEQ ID NO: 733 - DNA, 649 bp, Artificial
  Mutations within GlyA3B4 introduced by GmGlyA3B4_T01TALE nuclease
gttcatgtacggttgcagatataaacgaagcatagcttatgtatgaggtgtaacaaaattggaaacaatagccatgcaaggtgaagaatgtcaccaactcagaaacccttcttcattgacgtgtccctcactcactctcctctcttcactataaatcgccactcttcgtgttctccacttcaccaactccttcaaacttattaacactttccttagttcaatatggggaagcccttcttcactctctctctttcttccctttgcttgctgctctgatgccgcatagttaagccagccccgacacccgccaacacccgctgacgcgccctgacgggcttgtctgctactcttgtcgagtgcatgctttgctattacctccagcaagttcaacgagtgccaactcaacaacctcaacgcgttggaacccgaccaccgcgttgagtccgaaggtggtcttattgaaacatggaactctcaacaccctgagctgcaatgcgccggtgtcactgtttccaaacgcaccctcaaccgcaacggcctccacttgccatcttactcaccttatccccaaatgatcattgtcgttcaaggtgcgtaatattagtaagaagtatttatcgcttaacgtgataacaataatagtaatatg

SEQ ID NO: 734 - DNA, 605 bp, Artificial
  Mutations within GlyA3B4 introduced by GmGlyA3B4_T01TALE nuclease
gttcatgtacggttgcagatataaacgaagcatagcttatgtatgaggtgtaacaaaattggaaacaatagccatgcaaggtgaagaatgtcaccaactcagaaacccttcttcattgacgtgtccctcactcactctcctctcttcactataaatcgccactcttcgtgttctccacttcaccaactccttcaaacttattaacactttccttagttcaatatggggaagcccttcttcactctctctctttcttccctttgcttgcttcgagtgcatgctttgctattacctccagcaagttcaacgagtgccaactcaacaacctcaacgcgttggaacccgaccaccgcgttgagtccgaaggtggtcttattgaaacatggaactctcaacaccctgagctgcaatgcgccggtgtcactgtttccaaacgcaccctcaaccgcaacggcctccacttgccatcttactcaccttatccccaaatgatcattgtcgttcaaggtgcgtaatattagtaagaagtatttatcagcttaacgtgataacaataatagtaatatgaaatatttattaaattttttataattaatctctgctag

SEQ ID NO: 735 - DNA, 607 bp, Artificial; identical to SEQ ID NO: 708
  Mutations within GlyA3B4 introduced by GmGlyA3B4_T01TALE nuclease

SEQ ID NO: 736 - DNA, 606 bp, Artificial; identical to SEQ ID NO: 521
  Mutations within GlyA3B4 introduced by GmGlyA3B4_T01TALE nuclease

SEQ ID NO: 737 - DNA, 658 bp, Artificial
  Mutations within GlyA3B4 introduced by GmGlyA3B4_T01TALE nuclease
  misc_feature (276); (279): n is a or c or t or g
gttcatgtacggttgcagatataaacgaagcatagcttatgtatgaggtgtaacaaaattggaaacaatagccatgcaaggtgaagaatgtcaccaactcagaaacccttcttcattgacgtgtccctcactcactctcctctcttcactataaatcgccactcttcgtgttctccacttcaccaactccttcaaacttattaacactttccttagttcaatatggggaagcccttcttcactctctctctttcttccctttgcttgctacctctncgntgctttgctattacctccagcaagttcaacgagtgccaactcaacaacctcaacgcgttggaacccgaccaccgcgttgagtccgaaggtggtcttattgaaacatggaactctcaacaccctgagctgcaatgcgccggtgtcactgtttccaaacgcaccctcaaccgcaacggcctccacttgccatcttactcaccttatccccaaatgatcattgtcgttcaaggtgcgtaatattagtaagaagtatttatcagcttaacgtgataacaatatagtaatatgaaatatttattaaatttttataattaatctctgctagaaaatttgattaatcattttagtagaatttgtttttctcaactaggtttttaaa

SEQ ID NO: 738 - DNA, 612 bp, Artificial
  Mutations within GlyA3B4 introduced by GmGlyA3B4_T01TALE nuclease
  misc_feature (276); (529): n is a or c or t or g
gttcatgtacggttgcagatataaacgaagcatagcttatgtatgaggtgtaacaaaattggaaacaatagccatgcaaggtgaagaatgtcaccaactcagaaacccttcttcattgacgtgtccctcactcactctcctctcttcactataaatcgccactcttcgtgttctccacttcaccaactccttcaaacttattaacactttccttagttcaatatggggaagcccttcttcactctctctctttcttccctttgcttgctctctctncgctgctttgctattacctccagcaagttcaacgagtgccaactcaacaacctcaacgcgttggaacccgaccaccgcgttgagtccgaaggtggtcttattgaaacatggaactctcaacaccctgagctgcaatgcgccggtgtcactgtttccaaacgcaccctcaaccgcaacggcctccacttgccatcttactcaccttatccccaaatgatcattgtcgttcaaggtgcgtaatattagtaagagnatttatcagcttaacgtgataacaatatagtaatatgaaatatttattaaatttttataattaatctctgctagaaaatttga

SEQ ID NO: 739 - DNA, 606 bp, Artificial
  Mutations within GlyA3B4 introduced by GmGlyA3B4_T01TALE nuclease
gttcatgtacggttgcagatataaacgaagcatagcttatgtatgaggtgtaacaaaattggaaacaatagccatgcaaggtgaagaatgtcaccaactcagaaacccttcttcattgacgtgtccctcactcactctcctctcttcactataaatcgccactcttcgtgttctccacttcaccaactccttcaaacttattaacactttccttagttcaatatggggaagcccttcttcactctctctctttcttccctttgcttgcttgtcgagtgcatgctttgctattacctccagcaagttcaacgagtgccaactcaacaacctcaacgcgttggaacccgaccaccgcgttgagtccgaaggtggtcttattgaaacatggaactctcaacaccctgagctgcaatgcgccggtgtcactgtttccaaacgcaccctcaaccgcaacggcctccacttgccatcttactcaccttatccccaaatgatcattgtcgttcaaggtgcgtaatattagtaagaagtatttatcagcttaacgtgataacaataatagtaatatgaaatatttattaaatttttataattaatctctgctag

SEQ ID NO: 740 - DNA, 601 bp, Artificial
  Mutations within GlyA3B4 introduced by GmGlyA3B4_T01TALE nuclease
gttcatgtacggttgcagatataaacgaagcatagcttatgtatgaggtgtaacaaaattggaaacaatagccatgcaaggtgaagaatgtcaccaactcagaaacccttcttcattgacgtgtccctcactcactctcctctcttcactataaatcgccactcttcgtgttctccacttcaccaactccttcaaacttattaacactttccttgtcgagtgcatgctttgctattacctccagcaagttcaacgagtgccaactcaacaacctcaacgcgttggaacccgaccaccgcgttgagtccgaaggtggtcttattgaacatggaactctcaacaccctgagctgcaatgcgccggtgtcactgtttccaaacgcaccctcaaccgcaacggcctccacttgccatcttactcaccttatccccaaatgatcattgtcgttcaaggtgcgtaatattagtaagaagtatttatcagcttaacgtgataacaataatagtaatatgaaatatttattaaattttttataattaatctctgctagaaatttgattaatcatttttagtagaatttgtttttctcaactaggttttt

SEQ ID NO: 741 - DNA, 651 bp, Artificial
  Mutations within GlyA3B4 introduced by GmGlyA3B4_T01TALE nuclease
gttcatgtacggttgcagatataaacgaagcatagcttatgtatgaggtgtaacaaaattggaaacaatagccatgcaaggtgaagaatgtcaccaactcagaaacccttcttcattgacgtgtccctcactcactctcctctcttcactataaatcgccactcttcgtgttctccacttcaccaactccttcaaacttattaacactttccttagttcaatatggggaagcccttcttcactctctctctttcttccctttgcttgtcgagtgcatgctttgctattacctccagcaagttcaacgagtgccaactcaacaacctcaacgcgttggaacccgaccaccgcgttgagtccgaaggtggtcttattgaaacatggaactctcaacaccctgagctgcaatgcgccggtgtcactgtttccaaacgcaccctcaaccgcaacggcctccacttgccatcttactcaccttatccccaaatgatcattgtcgttcaaggtgcgtaatattagtaagaagtatttatcagcttaacgtgataacaataatagtaatatgaaatatttattaaattttttataattaatctctgctagaaaatttgattaatcatttttagtagaatttgttttttctcaactagg

SEQ ID NO: 742 - DNA, 570 bp, Artificial; identical to SEQ ID NO: 527
  Mutations within GlyA3B4 introduced by GmGlyA3B4_T01TALE nuclease

SEQ ID NO: 743 - DNA, 477 bp, Artificial; identical to SEQ ID NO: 515
  Mutations within GlyA3B4 introduced by GmGlyA3B4_T01TALE nuclease

SEQ ID NO: 744 - DNA, 445 bp, Artificial
  Mutations within GlyA3B4 introduced by GmGlyA3B4_T01TALE nuclease
gttcatgtacggttgcagatataaacgaagcatagcttatgtatgaggtgtaacaaaattggaaacaatagccatgcaaggtgaagaatgtcaccaactcagaaacccttcttcattgacgtgtccctcactcactctcctctcttcactataaatcgccactcttcgtgttctccacttcaccaactccttcaaacttattaacactttccttagttcaatatggggaagcccttcttcactctctctctttcttccctttgcttgctactattgtcgttcaaggtgcgtaatattagtaagaagtatttatcagcttaacgtgataacaataatagtaatatgaaatatttattaaattttttataattaatctctgctagaaaattttgattaatcatttttagtagaattttgttttttctcaactaggttttaaacacca

SEQ ID NO: 745 - DNA, 645 bp, Artificial
  Mutations within GlyA3B4 introduced by GmGlyA3B4_T01TALE nuclease
gttcatgtacggttgcagatataaacgaagcatagcttatgtatgaggtgtaacaaaattggaaacaatagccatgcaaggtgaagaatgtcaccaactcagaaacccttcttcattgacgtgtccctcactcactctcctctcttcactataaatcgccactcttcgtgttctccacttcaccaactccttcaaacttattaacactttccttagttcaatatggggaagcccttattcactctctcgagtgcatgctttgctattacctccagcaagttcaacgagtgccaactcaacaacctcaacgcgttggaacccgaccaccgcgttgagtccgaaggtggtcttattgaaacatggaactctcaacacccctgagctgcaatgcgccggtgtcactgtttccaaacgcaccctcaaccgcaacggcctccacttgccatcttactcaccttatccccaaatgatcattgtcgttcaaggtgcgtaatattagtaagaagtatttatcagcttaacgtgataacaataatagtaatatgaaatatttattaaattttttataattaatctctgctagaaaatttgattaatcatttttagtagaatttgttttttctcaactaggttttaaacaccaca

SEQ ID NO: 746 - DNA, 657 bp, Artificial
  Mutations within GlyA3B4 introduced by GmGlyA3B4_T01TALE nuclease
gttcatgtacggttgcagatataaacgaagcatagcttatgtatgaggtgtaacaaaattggaaacaatagccatgcaaggtgaagaatgtcaccaactcagaaacccttcttcattgacgtgtccctcactcactctcctctcttcactataaatcgccactcttcgtgttctccacttcaccaactccttcaaacttattaacactttccttagttcaatatggggaagcccttcttcactctctctctttcttccctttgcttgctcttgtcgagtgcatgctttgctattacctccagcaagttcaacgagtgccaactcaacaacctcaacgcgttggaacccgaccaccgcgttgagtccgaaggtggtcttattgaaacatggaactctcaacaccctgagctgcaatgcgccggtgtcactgtttccaaacgcaccctcaaccgcaacggcctccacttgccatcttactcaccttatccccaaatgatcattgtcgttcaaggtgcgtaatattagtaagagtatttatcagcttaacgtgataacaataatagtaatatgaaatatttattaaatttttataattaatctctgctagaaaatttgattaatcattttagtagaatttgtttttctcaactaggtttt

SEQ ID NO: 747 - DNA, 600 bp, Artificial
  Mutations within GlyA3B4 introduced by GmGlyA3B4_T01TALE nuclease
  misc_feature (507): n is a or c or t or g
gttcatgtacggttgcagatataaacgaagcatagcttatgtatgaggtgtaacaaaattggaaacaatagccatgcaaggtgaagaatgtcaccaactcagaaacccttcttcattgacgtgtccctcactcactctcctctcttcactataaatcgccactcttcgtgttctccacttcaccaactccttcaaacttattaacactttccttagttcaatatggggaagcccttcttcactctctctctttcttcactcttgtcgagtgcatgctttgctattacctccagcaagttcaacgagtgccaactcaacaacctcaacgcgttggaacccgaccaccgcgttgagtccgaaggtggtcttattgaaacatggaactctcaacaccctgagctgcaatgcgccggtgtcactgtttccaaacgcaccctcaaccgcaacggcctccacttgccatcttactcaccttatccccaaatgatcattgtcgttcaaggtgcntaatattagtaagaatgtattcatcagcttacgtgataacaataatagtaatatgaaatatttattaaattttttataattaatctctgctag

SEQ ID NO: 748 - DNA, 653 bp, Artificial
  Mutations within GlyA3B4 introduced by GmGlyA3B4_T01TALE nuclease
gttcatgtacggttgcagatataaacgaagcatagcttatgtatgaggtgtaacaaaattggaaacaatagccatgcaaggtgaagaatgtcaccaactcagaaacccttcttcattgacgtgtccctcactcactctcctctcttcactataaatcgccactcttcgtgttctccacttcaccaactccttcaaacttattaacactttccttattcaatatggggaagcccttcttcactctctctctttcttccctttgcttgctttgctattacctccagcaagttcaacgagtgccaactcaacaacctcaacgcgttggaacccgaccaccgcgttgagtccgaaggtggtcttattgaaacatggaactctcaacaccctgagctgcaatgcgccggtgtcactgtttccaaacgcaccctcaaccgcaacggcctccacttgccatcttactcaccttatccccaaatgatcattgtcgttcaaggtgcgtaatattagtaagaagtatttatcagcttaacgtgataacaataatagtaatatgaaatatttattaaattttttataattaatctctgctagaaaatttgattaatcatttttagtagaatttgttttttctcaactaggttttaaaacaccac

SEQ ID NO: 749 - DNA, 645 bp, Artificial; identical to SEQ ID NO: 732
  Mutations within GlyA3B4 introduced by GmGlyA3B4_T01TALE nuclease

SEQ ID NO: 750 - DNA, 607 bp, Artificial
  Mutations within GlyA3B4 introduced by GmGlyA3B4_T01TALE nuclease
gttcatgtacggttgcagatataaacgaagcatagcttatgtatgaggtgtaacaaaattggaaacaatagccatgcaaggtgaagaatgtcaccaactcagaaacccttcttcattgacgtgtccctcactcactctcctctctcactaataatcgccactcttcgtgttctccacttcaccaactccttcaaacttattaacactttccttagttcaatatggggaagcccttcttcactctctctctttcttccctttgcttgcttgtcgagtgcatgctttgctattacctccagcaagttcaacgagtgccaactcaacaacctcaacgcgttggaacccgaccaccgcgttgagtccgaaggtggtcttattgaaacatggaactctcaacaccctgagctgcaatgcgccggtgtcactgtttccaaacgcaccctcaaccgcaacggcctccacttgccatcttactcaccttatcccccaaatgatcattgtcgttcaaggtgcgtaatattagtaagaagtatttatcagcttaacgtgataacaataatagtaatatgaaatatttattaaattttttataattaatctctgctag

SEQ ID NO: 751 - DNA, 576 bp, Artificial
  Mutations within GlyA3B4 introduced by GmGlyA3B4_T01TALE nuclease
gttcatgtacggttgcagatataaacgaagcatagcttatgtatgaggtgtaacaaaattggaaacaatagccatgcaaggtgaagaatgtcaccaactcagaaacccttcttcattgacgtgtccctcactcactctcctctcttcactataaatcgccactcttcgtgttctccacttcaccaactccttcaaacttattaacactttccttagttcaatatggggaagcccttcttcactctctctctttcttcactcttgtcgagtgcatgctttgctattacctccagcaagttcaacgagtgccaactcaacaacctcaacgcgttggaacccgaccaccgcgttgagtccgaaggtggtcttattgaaacatggaactctcaacacctgagctgcaatgcgccggtgtcactgtttccaaacgcaccctcaaccgcaacggcctccacttgccatcttactcaccttatccccaaatgatcattgtcgttcaaggtgcgtaaatattagtaagaagtatttatcagcttaacgtgataacaataatagtaatatgaaatatttattaaa

SEQ ID NO: 752 - DNA, 649 bp, Artificial
  Mutations within GlyA3B4 introduced by GmGlyA3B4_T01TALE nuclease
gttcatgtacggttgcagatataaacgaagcatagcttatgtatgaggtgtaacaaaattggaaacaatagccatgcaaggtgaagaatgtcaccaactcagaaacccttcttcattgacgtgtccctcactcactctcctctcttcactataaatcgccactcttcgtgttctccacttcaccaactccttcaaacttattaacactttccttagttcaatatggggaagcccttcttcactctctcaagagtgcatgctttgctattacctccagcaagttcaacgagtgccaactcaacaacctcaacgcgttggaacccgaccaccgcgttgagtccgaaggtggtcttattgaaacatggaactctcaacaccctgagctgcaatgcgccggtgtcactgtttccaaacgcaccctcaaccgcaacggcctccacttgccatcttactcaccttatcccccaaatgatcattgtcgttcaaggtgcgtaaatattagtaagaagtatttatcagcttaacgtgataacaataatagtaatatgaaatatttattaaattttttataattaatctctgctagaaaatttgattaaatcatttttagtagaatttgttttttctcaactaggttttaaacaccaca

SEQ ID NO: 753 - DNA, 666 bp, Artificial
  Mutations within GlyA3B4 introduced by GmGlyA3B4_T01TALE nuclease
gttcatgtacggttgcagatataaacgaagcatagcttatgtatgaggtgtaacaaaattggaaacaatagccatgcaaggtgaagaatgtcaccaactcagaaacccttcttcattgacgtgtccctcactcactctcctctcttcactataaatcgccactcttcgtgttctccacttcaccaactccttcaaacttattaacactttccttagttcaatatggggaagcccttcttcactctctctctttcttccctttgcttgtcgagtgcatgctttgctattacctccagcaagttcaacgagtgccaactcaacaacctcaacgcgttggaacccgaccaccgcgttgagtccgaaggtggtcttattgaaacatggaactctcaacaccctgagctgcaatgcgccggtgtcactgtttccaaacgcaccctcaaccgcaacggcctccacttgccatcttactcaccttatccccaaatgatcattgtcgttcaaggtgcgtaatattagtaagaagtatttatcagcttaacgtgataacaataatagtaatatgaaatatttattaaattttttataattaatctctgctagaaaatttgattaatcatttttagtagaatttgttttttctcaactaggttttaaaacaccaca

SEQ ID NO: 754 - DNA, 636 bp, Artificial
  Mutations within GlyA3B4 introduced by GmGlyA3B4_T01TALE nuclease
gttcatgtacggttgcagatataaacgaagcatagcttatgtatgaggtgtaacaaaattggaaacaatagccatgcaaggtgaagaatgtcaccaactcagaaacccttcttcattgacgtgtccctcactcactctcctctcttcactataaatcgccactcttcgtgttctccacttcaccaactccttcaaacttattaacactttccttagttcaatatggggaagcccttcttcactctctctctttcttccctttgctattacctccagcaagttcaacgagtgccaactcaacaacctcaacgcgttggaacccgaccaccgcgttgagtccgaaggtggtcttattgaaacatggaactctcaacaccctgagctgcaatgcgccggtgtcactgtttccaaacgcaccctcaaccgcaacggcctccacttgccatcttactcaccttatccccaaatgatcattgtcgttcaaggtgcgtaatattagtaagaagtatttatcagctttaacgtgataacaataatagtaatatgaaatatttattaaattttttataattaatctctgctagaaaatttgattaatcatttttagtagaatttgttttttctcaactaggtttt

SEQ ID NO: 755 - DNA, 604 bp, Artificial; identical to SEQ ID NO: 673
  Mutations within GlyA3B4 introduced by GmGlyA3B4_T01TALE nuclease

SEQ ID NO: 756 - DNA, 628 bp, Artificial
  Mutations within GlyA3B4 introduced by GmGlyA3B4_T01TALE nuclease
gttcatgtacggttgcagatataaacgaagcatagcttatgtatgaggtgtaacaaaattggaaacaatagccatgcaaggtgaagaatgtcaccaactcagaaacccttcttcattgacgtgtccctcactcactctcctctcttcactataaatcgccactcttcgtgttctccacttcaccaactccttcaaacttattaacactttccttagttcaatatggggaagcccttcttcactctctctctttcttccctttgcttgctactactcttgtcgagtgcatgctttgctattacctccagcaagttcaacgagtgccaactcaacaacctcaacgcgttggaacccgaccaccgcgttgagtccgaaggtggtcttattgaacatggaactctcaacaccctgagctgcaatgcgccggtgtcactgtttccaaacgcaccctcaaccgcaacggcctccacttgccatcttactcaccttatccccaaatgatcattgtcgttcaaggtgcgtatattagtaagaagtatttatcagcttaacgtgatacaataatagtaatatgaaatatttattaaattttttataattaatctctgctagaaaatttgattaatca

SEQ ID NO: 757 - DNA, 626 bp, Artificial
  Mutations within GlyA3B4 introduced by GmGlyA3B4_T01TALE nuclease
gttcatgtacggttgcagatataaacgaagcatagcttatgtatgaggtgtaacaaaattggaaacaatagccatgcaaggtgaagaatgtcaccaactcagaaacccttcttcattgacgtgtccctcactcactctcctctcttcactataaatcgccactcttcgtgttctccacttcaccaactccttcaaacttattaacactttccttagttcaatatggggaagcccttcttcactctctctctttcttccctttgcttgctgcaagttcaacgagtgccaactcaacaacctcaacgcgttggaacccgaccaccgcgttgagtccgaaggtggtcttattgaaacatggaactctcaacaccctgagctgcaatgcgccggtgtcactgtttccaaacgcaccctcaaccgcaacggcctccacttgccatcttactcaccttatccccaaatgatcattgtcgttcaaggtgcgtaatattagtaagaagtatttatcagcttaacgtgataacaataatagtaatatgaaatatttattaatttttataattaatctctgctagaaatttgattaatcatttttagtagaatttgtttttctcaactaggttttt

SEQ ID NO: 758 - DNA, 662 bp, Artificial
  Mutations within GlyA3B4 introduced by GmGlyA3B4_T01TALE nuclease
gttcatgtacggttgcagatataaacgaagcatagcttatgtatgaggtgtaacaaaattggaaacaatagccatgcaaggtgaagaatgtcaccaactcagaaacccttcttcattgacgtgtccctcactcactctcctctcttcactataaatcgccactcttcgtgttctccacttcaccaactccttcaaacttattaacactttccttagttcaatatggggaagcccttcttcactctctctctttcttccctttgcttcgagtgcatgctttgctattacctccagcaagttcaacgagtgccaactcaacaacctcaacgcgttggaacccgaccaccgcgttgagtccgaaggtggtcttattgaaacatggaactctcaacaccctgagctgcaatgcgcccggtgtcactgtttccaacgcaccctcaaccgcaacggcctccacttgccatcttactcaccttatccccaaatgatcattgtcgttcaaggtgcgtaatattagtaagaagtatttatcagcttaacgtgataacaataatagtaatatgaaatatttattaaattttttataattaatctctgctagaaaatttgattaatctttttagtagaatttgttttttctcaactaggttttaaaacaccac

SEQ ID NO: 759 - DNA, 613 bp, Artificial
  Mutations within GlyA3B4 introduced by GmGlyA3B4_T01TALE nuclease
gttcatgtacggttgcagatataaacgaagcatagcttatgtatgaggtgtaacaaaattggaaacaatagccatgcaaggtgaagaatgtcaccaactcagaaacccttcttcattgacgtgtccctcactcactctcctctcttcactataaatcgccactcttcgtgttctccacttcaccaactccttcaaacttattaacactttccttagttcaatatggggaagccaggccgaccgcatgctttgctattacctccagcaagttcaacgagtgccaactcaacaacctcaacgcgttggaacccgaccaccgcgttgagtccgaaggtggtcttattgaaacatggaactctcaacaccctgagctgcaatgcgccggtgtcactgtttccaaacgcaccctcaaccgcaacggcctccacttgccatcttactcaccttatccccaaatgatcattgtcgttcaaggtgcgtaatattagtaagaagtatttatcagcttaacgtgataacaataatagtaatatgaaatatttattaattttttataattaatctctgctagaaatttgattaatcatttttagtagaatttgtttttctcaac

SEQ ID NO: 760 - DNA, 654 bp, Artificial
  Mutations within GlyA3B4 introduced by GmGlyA3B4_T01TALE nuclease
gttcatgtacggttgcagatataaacgaagcatagcttatgtatgaggtgtaacaaaattggaaacaatagccatgcaaggtgaagaatgtcaccaactcagaaacccttcttcattgacgtgtccctcactcactctcctctcttcactataaatcgccactcttcgtgttctccacttcaccaactccttcaaacttattaacactttccttagttcaatatggggaagcccttcttcactctctctctttctttccctttgcttgctgtcagtgcatgctttgctattacctccagcaagttcaacgagtgccaactcaacaacctcaacgcgttggaacccgaccaccgcgttgagtccgaaggtggtcttattgaaacatggaactctcaacaccctgagctgcaatgcgccggtgtcactgtttccaaacgcaccctcaaccgcaacggcctccacttgccatcttactcaccttatcccccaaatgatcattgtcgttcaaggtgcgtaatattagtaagaagtatttatcagcttaacgtgataacaataatagtaatatgaaatatttattaaattttttataattaatctctgctagaaaatttgattaatctttttagtagaatttgttttttctcaactagg

SEQ ID NO: 761 - DNA, 665 bp, Artificial
  Mutations within GlyA3B4 introduced by GmGlyA3B4_T01TALE nuclease
  misc_feature (532): n is a or c or t or g
gttcatgtacggttgcagatataaacgaagcatagcttatgtatgaggtgtaacaaaattggaaacaatagccatgcaaggtgaagaatgtcaccaactcagaaacccttcttcattgacgtgtccctcactcactctcctctcttcactataaatcgccactcttcgtgttctccacttcaccaactccttcaaacttattaacactttccttagttcaatatggggaagcccttcttcactctctctctttcttccctttgcttgctattgtcgagtgcatgctttgctattacctccagcaagttcaacgagtgccaactcaacaacctcaacgcgttggaacccgaccaccgcgttgagtccgaaggtggtcttattgaaacatggaactctcaacaccctgagctgcaatgcgccggtgtcactgtttccaaacgcaccctcaaccgcaacggcctccacttgccatcttactcaccttatccccaaatgatcattgtcgttcaaggtgcgtaatattagtaagagnatttatcagcttaacgtgataacaatatagtaatatgaaatatttattaaatttttataattaatctctgctagaaaatttgattaatcattttagtagaatttgtttttctcaactaggtttttaaaacacc

SEQ ID NO: 762 - DNA, 428 bp, Artificial
  Mutations within GlyA3B4 introduced by GmGlyA3B4_T01TALE nuclease
gttcatgtacggttgcagatataaacgaagcatagcttatgtatgaggtgtaacaaaattggaaacaatagccatgcaaggtgaagaatgtcaccaactcagaaacctcttctattgacgtgtccctcactcactctcctctcttcactataaatcgccactcattcgtgttctcctacttcaccaactccttcaaacttattaacactttccttagttcaatatggggaagcccttcttcactctctctctttcttccctttgcttgctactattgtcgttcaaggtgcgtaatattagtaagaagtatttatcagcttaacgtgataacaataatagtaatatgaaatatttattaaattttttataatttaatctctgctagaaaatttgattaatcatttttagtagaattttgtttttctcaa

SEQ ID NO: 763 - DNA, 637 bp, Artificial
  Mutations within GlyA3B4 introduced by GmGlyA3B4_T01TALE nuclease
gttcatgtacggttgcagatataaacgaagcatagcttatgtatgaggtgtaacaaaattggaaacaatagccatgcaaggtgaagaatgtcaccaactcagaaacccttcttcattgacgtgtccctcactcactctcctctcttcactataaatcgccactcttcgtgttctccacttcaccaactccttcaaacttattaacactttccttagttcaatatggggaagcccttcttcactctctcttcgagtgcatgctttgctattacctccagcaagttcaacgagtgccaactcaacaacctcaacgcgttggaacccgaccaccgcgttgagtccgaaggtggtcttattgaaacatggaactctcaacaccctgagctgcaatgcgccggtgtcactgtttccaaacgcaccctcaaccgcaacggcctccacttgccatcttactcaccttatccccaaatgatcattgtcgttcaaggtgcgtaatattagtaagaagtatttatcagcttaacgtgataacaataatagtaatatgaaatatttattaaattttttataattaatctctgctagaaaatttgattaatcatttttagtagaatttgttttttctcaactaggtttt

SEQ ID NO: 764 - DNA, 650 bp, Artificial
  Mutations within GlyA3B4 introduced by GmGlyA3B4_T01TALE nuclease
gttcatgtacggttgcagatataaacgaagcatagcttatgtatgaggtgtaacaaaattggaaacaatagccatgcaaggtgaagaatgtcaccaactcagaaacccttcttcattgacgtgtccctcactcactctcctctcttcactataaatcgccactcttcgtgttctccacttcaccaactccttcaaacttattaacactttccttagttcaatatggggaagcccttcttcactctctctctttcttccctttgcttgtcgagtgcatgctttgctattacctccagcaagttcaacgagtgccaactcaacaacctcaacgcgttggaacccgaccaccgcgttgagtcccgaaggtggtcttattgaaacatggaactctcaacaccctgagctgcaatgcgccggtgtcactgtttccaaacgcaccctcaaccgcaacggcctccacttgccatcttactcaccttatccccaaatgatcattgtcgttcaaggtgcgtaatattagtaagaagtatttatcagcttaacgtgataacaataatagtaatatgaaatatttattaaattttttataattaatctctgctagaaaatttgattaatctttttagtagaattgttttttctcaactagg

SEQ ID NO: 765 - DNA, 667 bp, Artificial
  Mutations within GlyA3B4 introduced by GmGlyA3B4_T01TALE nuclease
gttcatgtacggttgcagatataaacgaagcatagcttatgtatgaggtgtaacaaaattggaaacaatagccatgcaaggtgaagaatgtcaccaactcagaaacccttcttcattgacgtgtccctcactcactctcctctcttcactataaatcgccactcttcgtgttctccacttcaccaactccttcaaacttattaacactttccttagttcaatatggggaagcccttcttcactctctctctttcttccctttgcttgctatgtcgagtgcatgctttgctattacctccagcaagttcaacgagtgccaactcaacaacctcaacgcgttggaacccgaccaccgcgttgagtccgaaggtggtcttattgaaacatggaactctcaacaccctgagctgcaatgcgccggtgtcactgtttccaaacgcaccctcaaccgcaacggcctccacttgccatcttactcaccttatccccaaatgatcattgtcgttcaaggtgcgtaatattagtaagagtatttatcagcttaacgtgataacaataatagtaatatgaaaatatttattaaatttttataattaatctctgctagaaaatttgattaatcattttagtagaatttgtttttctcaactaggtttttaaaacacca

SEQ ID NO: 766 - DNA, 667 bp, Artificial
  Mutations within GlyA3B4 introduced by GmGlyA3B4_T01TALE nuclease
gttcatgtacggttgcagatataaacgaagcatagcttatgtatgaggtgtaacaaaattggaaacaatagccatgcaaggtgaagaatgtcaccaactcagaaacccttcttcattgacgtgtccctcactcactctcctctcttcactataaatcgccactcttcgtgttctccacttcaccaactccttcaaacttattaacactttccttagttcaatatggggaagcccttcttcactctctctctttcttccctttgcttgcttgtcgagtgcatgctttgctattacctccagcaagttcaacgagtgccaactcaacaacctcaacgcgttggaacccgaccaccgcgttgagtccgaaggtggtcttattgaaacatggaactctcaacaccctgagctgcaatgcgccggtgtcactgtttccaaacgcaccctcaaccgcaacggcctccacttgccatcttactcaccttactccccaaatgatcattgtcgttcaaggtgcgtaatattagtaagaagtatttatcagcttaacgtgataacaataatagtaatatgaaatatttattaaattttttataattaatctctgctagaaaatttgattaatctttttagtagaattgtttttctcaactaggtttaaaacaccaca

SEQ ID NO: 767 - DNA, 614 bp, Artificial
  Mutations within GlyA3B4 introduced by GmGlyA3B4_T01TALE nuclease
gttcatgtacggttgcagatataaacgaagcatagcttatgtatgaggtgtaacaaaattggaaacaatagccatgcaaggtgaagaatgtcaccaactcagaaacccttcttcattgacgtgtccctcactcactctcctctcttcactataaatcgccactcttcgtgttctccacttcaccaactccttcaaacttattaacactttccttagttcaatatggggaagcccttcttcactctctctctttcttccctttgcttgctactactcttgtcgagtgcatgctttgctattacctccagcaagttcaacgagtgccaactcaacaacctcaacgcgttggaacccgaccaccgcgttgagtccgaaggtggtcttattgaacatggaactctcaacacccctgagctgcaatgcgccggtgtcactgtttccaacgcacctcaaccgcaacggcctccacttgccatcttactcaccttatccccaaatgatcattgtcgttcaaggtgcgtatattagtaagaagtatttatcagcttaacgtgatacaataatagtaatatgaaatattattaaattttttataattaatctctgctagaaaa

SEQ ID NO: 768 - DNA, 622 bp, Artificial; identical to SEQ ID NO: 579
  Mutations within GlyA3B4 introduced by GmGlyA3B4_T01TALE nuclease

SEQ ID NO: 769 - DNA, 642 bp, Artificial
  Mutations within GlyA3B4 introduced by GmGlyA3B4_T01TALE nuclease
gttcatgtacggttgcagatataaacgaagcatagcttatgtatgaggtgtaacaaaattggaaacaatagccatgcaaggtgaagaatgtcaccaactcagaaacccttcttcattgacgtgtccctcactcactctcctctcttcactataaatcgccactcttcgtgttctccacttcaccaactccttcaaacttattaacactttccttagttcaatatggggaagcccttcttcactctctctctttcttgtcgagtgcatgctttgctattacctccagcaagttcaacgagtgccaactcaacaacctcaacgcgttggaacccgaccaccgcgttgagtccgaaggtggtcttattgaaacatggaactctcaacaccctgagctgcaatgcgccggtgtcactgtttccaaacgcaccctcaaccgcaacggcctccacttgccatcttactcaccttatccccaaatgatcattgtcgttcaaggtgcgtaaatattagtaagaagtatttatcagcttaacgtgataacaataatagtaatatgaaatatttattaaattttttataattaatctctgctagaaaatttgattaatcatttttagtagaatttgttttttctcaactagg

SEQ ID NO: 770 - DNA, 632 bp, Artificial
  Mutations within GlyA3B4 introduced by GmGlyA3B4_T01TALE nuclease
gttcatgtacggttgcagatataaacgaagcatagcttatgtatgaggtgtaacaaaattggaaacaatagccatgcaaggtgaagaatgtcaccaactcagaaacccttcttcattgacgtgtccctcactcactctcctctcttcactataaatcgccactcttcgtgttctccacttcaccaactccttcaaacttattaacactttccttagttcaatatggggaagcccttcttcactctctctctttcttccctttgcttgctactactcttgtcgagtgcatgctttgctattacctccagcaagttcaacgagtgccaactcaacaacctcaacgcgttggaacccgaccaccgcgttgagtccgaaggtggtcttattgaaacatggaactctcaacaccctgagctgcaatgcgccggtgtcactgtttccaaacgcaccctcaaccgcaacggcctccacttgccatcttactcaccttatccccaaatgatcattgtcgttcaaggtgcgtaatattagtaagaagtatttatcagcttaacgtgatacaataatagtaatatgaaatatttattaaaattttttataattaaatctctgctagaaaatttgattaatca

SEQ ID NO: 771 - DNA, 513 bp, Artificial; identical to SEQ ID NO: 645
  Mutations within GlyA3B4 introduced by GmGlyA3B4_T01TALE nuclease

SEQ ID NO: 772 - DNA, 535 bp, Artificial
  Mutations within GlyA3B4 introduced by GmGlyA3B4_T01TALE nuclease
gttcatgtacggttgcagatataaacgaagcatagcttatgtatgaggtgtaacaaaattggaaacaatagccatgcaaggtgaagaatgtcaccaactcagaaacccttcttcattgacgtgtccctcactcactctcctctcttcgagtgcatgctttgctattacctccagcaagttcaacgagtgccaactcaacaacctcaacgcgttggaacccgaccaccgcgttgagtccgaaggtggtcttattgaaacatggaactctcaacaccctgagctgcaatgcgccggtgtcactgtttccaaacgcaccctcaaccgcaacggcctccacttgccatcttactcaccttatccccaaatgatcattgtcgttcaaggtgcgtaatattagtaagaagtatttatcagcttaacgtgataacaataatagtaatatgaaatatttattaaattttttataattaatctctgctagaaaatttgattaatcatttttagtagaattgtttttctcaactaggtttaaaca

SEQ ID NO: 773 - DNA, 656 bp, Artificial
  Mutations within GlyA3B4 introduced by GmGlyA3B4_T01TALE nuclease
  misc_feature (532): n is a or c or t or g
gttcatgtacggttgcagatataaacgaagcatagcttatgtatgaggtgtaacaaaattggaaacaatagccatgcaaggtgaagaatgtcaccaactcagaaacccttcttcattgacgtgtccctcactcactctcctctcttcactataaatcgccactcttcgtgttctccacttcaccaactccttcaaacttattaacactttccttagttcaatatggggaagcccttcttcactctctctctttcttccctttgcttgctcttgtcgagtgcatgctttgctattacctccagcaagttcaacgagtgccaactcaacaacctcaacgcgttggaacccgaccaccgcgttgagtccgaaggtggtcttattgaaacatggaactctcaacaccctgagctgcaatgcgccggtgtcactgtttccaaacgcaccctcaaccgcaacggcctccacttgccatcttactcaccttatccccaaatgatcattgtcgttcaaggtgcgtaatattagtaagagnatttatcagcttaacgtgataacaatatagtaatatgaaatatttattaaatttttataattaatctctgctagaaaatttgattaatcattttagtagaatttgtttttctcaactaggtttt

SEQ ID NO: 774 - DNA, 631 bp, Artificial
  Mutations within GlyA3B4 introduced by GmGlyA3B4_T01TALE nuclease
gttcatgtacggttgcagatataaacgaagcatagcttatgtatgaggtgtaacaaaattggaaacaatagccatgcaaggtgaagaatgtcaccaactcagaaacccttcttcattgacgtgtccctcactcactctcctctcttcactataaatcgccactcttcgtgttctccacttcaccaactccttcaaacttattaacactttccttagttcaatatggggaagcccttcttcactctctctctttcttccctttgctttgtcgagtgcatgctttgctattacctccagcaagttcaacgagtgccaactcaacaacctcaacgcgttggaacccgaccaccgcgttgagtccgaaggtggtcttattgaaacatggaactctcaacaccctgagctgcaatgcgccggtgtcactgtttccaaacgcaccctcaaccgcaacggcctccacttgccatcttactcaccttatcccccaaatgatcttgtcgttcaaggtgcgtaatattagtaagaagtatttatcagcttaacgtgataacaataatagtaatatgaaatatttattaaattttttataattaatctctgctagaaaatttgattaatctttttagtagaa

SEQ ID NO: 775 - DNA, 610 bp, Artificial; identical to SEQ ID NO: 698
  Mutations within GlyA3B4 introduced by GmGlyA3B4_T01TALE nuclease

SEQ ID NO: 776 - DNA, 605 bp, Artificial
  Mutations within GlyA3B4 introduced by GmGlyA3B4_T01TALE nuclease
gttcatgtacggttgcagatataaacgaagcatagcttatgtatgaggtgtaacaaaattggaaacaatagccatgcaaggtgaagaatgtcaccaactcagaaacccttcttcattgacgtgtccctcactcactctcctctcttcactataaatcgccactcttcgtgttctccacttcaccaactccttcaaacttattaacactttccttagttcaatatgtcgagtgcatgctttgctattacctccagcaagttcaacgagtgccaactcaacaacctcaacgcgttggaacccgaccaccgcgttgagtccgaaggtggtcttattgaaacatggaactctcaacaccctgagctgcaatgcgccggtgtcactgtttccaaacgcaccctcaaccgcaacggcctccacttgccatcttactcaccttatccccaaatgatcattgtcgttcaaggtgcgtaatattagtaagaagtatttatcagcttaacgtgataacaataatagtaatatgaaatatttattaatttttataattaatctctgctagaaatttgattaatcatttttagtagaatttgtttttctcaactagg

SEQ ID NO: 777 - DNA, 631 bp, Artificial
  Mutations within GlyA3B4 introduced by GmGlyA3B4_T01TALE nuclease
gttcatgtacggttgcagatataaacgaagcatagcttatgtatgaggtgtaacaaaattggaaacaatagccatgcaaggtgaagaatgtcaccaactcagaaacccttcttcattgacgtgtccctcactcactctcctctcttcactataaatcgccactcttcgtgttctccacttcaccaactccttcaaacttattaacactttccttagttcaatatggggaagcccttcttcactctctctcatgctttgctattacctccagcaagttcaacgagtgccaactcaacaacctcaacgcgttggaacccgaccaccgcgttgagtccgaaggtggtcttattgaaacatggaactctcaacacccctgagctgcaatgcgccggtgtcactgtttccaaacgcaccctcaaccgcaacggcctccacttgccatcttactcaccttatccccaaatgatcattgtcgttcaaggtgcgtaatattagtaagaagtatttatcagcttaacgtgataacaataatagtaatatgaaatatttattaaattttttataattaatctctgctagaaaatttgattaatcatttttagtagaatttgttttttctcaactaggtttt

SEQ ID NO: 778 - DNA, 669 bp, Artificial
  Mutations within GlyA3B4 introduced by GmGlyA3B4_T01TALE nuclease
gttcatgtacggttgcagatataaacgaagcatagcttatgtatgaggtgtaacaaaattggaaacaatagccatgcaaggtgaagaatgtcaccaactcagaaacccttcttcattgacgtgtccctcactcactctcctctcttcactataaatcgccactcttcgtgttctccacttcaccaactccttcaaacttattaacactttccttagttcaatatggggaagcccttcttcactctctctctttcttccctttgcttgtcgagtgcatgctttgctattacctccagcaagttcaacgagtgccaactcaacaacctcaacgcgttggaacccgaccaccgcgttgagtccgaaggtggtcttattgaaacatggaactctcaacaccctgagctgcaatgcgccggtgtcactgtttccaaacgcaccctcaaccgcaacggcctccacttgccatcttactcaccttatcccccaaatgatcattgtccgttcaaggtgcgtaatattagtcaagaagtatttatcagcttaacgtgataacaataatagtaatatgaaatatttattaaattttttataattaatctctgctagaaaatttgattaatcatttttagtagaatttgttttttctcaactaggttttaaaacaccaca

SEQ ID NO: 779 - DNA, 623 bp, Artificial; identical to SEQ ID NO: 565
  Mutations within GlyA3B4 introduced by GmGlyA3B4_T01TALE nuclease

SEQ ID NO: 780 - DNA, 611 bp, Artificial
  Mutations within GlyA3B4 introduced by GmGlyA3B4_T01TALE nuclease
gttcatgtacggttgcagatataaacgaagcatagcttatgtatgaggtgtaacaaaattggaaacaatagccatgcaaggtgaagaatgtcaccaactcagaaacccttcttcattgacgtgtccctcactcactctcctctcttcactataaatcgccactcttcgtgttctccacttcaccaactccttcaaacttattaacactttccttagttcaatatggggaagccaggccgaccgcatgctttgctattacctccagcaagttcaacgagtgccaactcaacaacctcaacgcgttggaacccgaccaccgcgttgagtccgaaggtggtcttattgaaacatggaactctcaacaccctgagctgcaatgcgccggtgtcactgtttccaaacgcaccctcaaccgcaacggcctccacttgccatcttactcaccttatccccaaatgatcattgtcgttcaaggtgcgtaatattagtaagaagtatttatcagcttaacgtgataacaataatagtaatatgaatatttattaatttttataattaatctctgctagaaatttgattaatcatttttagtagaatttgtttttctcaac

SEQ ID NO: 781 - DNA, 430 bp, Artificial
  Mutations within GlyA3B4 introduced by GmGlyA3B4_T01TALE nuclease
gttcatgtacggttgcagatataaacgaagcatagcttatgtatgaggtgtaacaaaattggaaacaatagccatgcaaggtgaagaatgtcaccaactcagaaaccctcttctattgacgtgtccctcactcactctcctctcttcactataaatcgccactcttcgtgttctccacttcaccaactccttcaaacttattaacactttccttagttcaatatggggaagcccttcttcactctctctctttcttgtcgagtgcatgctttgctattacctccagcaagttcaacgagtgccaactcaacaacctcaacgcgttggaacccgaccaccgcgttgagtccgaaggtggtcttattgaaacatggaactctcaacacctgagctgcaatgcgccggtgtcactgtttccaaacgcaccctc

SEQ ID NO: 782 - DNA, 582 bp, Artificial
  Mutations within GlyA3B4 introduced by GmGlyA3B4_T01TALE nuclease
gttcatgtacggttgcagatataaacgaagcatagcttatgtatgaggtgtaacaaaattggaaacaatagccatgcaaggtgaagaatgtcaccaactcagaaacccttcttcattgacgtgtccctcactcactctcctctcttcactataaatcgccactcttcgtgttctccacttcaccaactccttcaaacttattaacactttccttagttcaatatggggaagcccttcttcactctctctctttcttccctttgcttgctactactcttgtcgagtgcatgctttgctattacctccagcaagttcaacgagtgccaactcaacaacctcaacgcgttggaacccgaccaccgcgttgagtccgaaggtggtcttattgaaacatggaactctcaacaccctgagctgcaatgcgccggtgtcactgtttccaaacgcaccctcaaccgcaacggcctccacttgccatcttactcaccttatccccaaatgatcattgtcgttcaaggtgcgtaatattagtaagaagtatttatcagcttaacgtgataacaataatagtaatatgaaata

SEQ ID NO: 783 - DNA, 669 bp, Artificial
  Mutations within GlyA3B4 introduced by GmGlyA3B4_T01TALE nuclease
gttcatgtacggttgcagatataaacgaagcatagcttatgtatgaggtgtaacaaaattggaaacaatagccatgcaaggtgaagaatgtcaccaactcagaaacccttcttcattgacgtgtccctcactcactctcctctcttcactataaatcgccactcttcgtgttctccacttcaccaactccttcaaacttattaacactttccttagttcaatatggggaagcccttcttcactctctctctttcttccctttgcttgctattgtcgagtgcatgctttgctattacctccagcaagttcaacgagtgccaactcaacaacctcaacgcgttggaacccgaccaccgcgttgagtccgaaggtggtcttattgaaacatggaactctcaacaccctgagctgcaatgcgccggtgtcactgtttccaaacgcaccctcaaccgcaacggcctccacttgccatcttactcaccttatccccaaatgatcattgtcgttcaaggtgcgtaatattagtaagagtatttatcagcttaacgtgataacaataatagtaatatgaaatatttattaaatttttataattaatctctgctagaaaatttgattaatcattttagtagaatttgtttttctcaactaggtttttaaaacaccaca

SEQ ID NO: 784 - DNA, 598 bp, Artificial
  Mutations within GlyA3B4 introduced by GmGlyA3B4_T01TALE nuclease
gttcatgtacggttgcagatataaacgaagcatagcttatgtatgaggtgtaacaaaattggaaacaatagccatgcaaggtgaagaatgtcaccaactcagaaacccttcttcattgacgtgtccctcactcactctcctctcttcactataaatcgccactcttcgtgttctccacttcaccaactccttcaaacttattaacactttccttgtcgagtgcatgctttgctattacctccagcaagttcaacgagtgccaactcaacaacctcaacgcgttggaacccgaccaccgcgttgagtccgaaggtggtcttattgaaacatggaactctcaacaccctgagctgcaatgcgccggtgtcactgtttccaaacgcaccctcaaccgcaacggcctccacttgccatcttactcaccttatccccaaatgatcattgtcgttcaaggtgcgtaatattagtaagaagtatttatcagcttaacgtgataacaataatagtaatatgaaatatttattaaattttttataattaatctctgctagaaaatttgattaatcatttttagtagaatttgtttttctcaactagg

SEQ ID NO: 785 - DNA, 656 bp, Artificial
  Mutations within GlyA3B4 introduced by GmGlyA3B4_T01TALE nuclease
gttcatgtacggttgcagatataaacgaagcatagcttatgtatgaggtgtaacaaaattggaaacaatagccatgcaaggtgaagaatgtcaccaactcagaaacccttcttcattgacgtgtccctcactcactctcctctcttcactataaatcgccactcttcgtgttctccacttcaccaactccttcaaacttattaacactttccttagttcaatatggggaagcccttcttcactctctctctttcttccctttgcttgctttgctattacctccagcaagttcaacgagtgccaactcaacaacctcaacgcgttggaacccgaccaccgcgttgagtccgaaggtggtcttattgaaacatggaactctcaacacccctgagctgcaatgcgccgggtgtcactgtttccaaacgcaccctcaaccgcaacggcctccacttgccatcttactcaccttatccccaaatgatcattgtcgttcaaggtgcgtaatattagtaagaagtatttatcagcttaacgtgataacaataatagtaatatgaaatatttattaaattttttataattaatctctgctagaaaatttgattaatcatttttagtagaatttgttttttctcaactaggttttaaacaccaca

SEQ ID NO: 786 - DNA, 655 bp, Artificial
  Mutations within GlyA3B4 introduced by GmGlyA3B4_T01TALE nuclease
gttcatgtacggttgcagatataaacgaagcatagcttatgtatgaggtgtaacaaaattgcagaacaatagccatgcaaggtgaagaatgtcaccaactcagaaacccttcttcattgacgtgtccctcactcactctcctctcttcactataaatcgccactcttcgtgttctccacttcaccaactccttcaaacttattaacactttccttagttcaatatggggaagcccttcttcactctctctctttcttccctttgcttgcttgtcgagtgcatgctttgctattacctccagcaagttcaacgagtgccaactcacaacctcaacgcgttggaacccgaccaccgcgttgagtccgaaggtggtcttattgaaacatggaactctcaacaccctgagctgcaatgcgccggtgtcactgtttccaaacgcaccctcaaccgcaacggcctccacttgccatcttactcaccttatcccccaaatgatcattgtcgttcaaggtgcgtaatattagtaagaagtattttatcagcttaacgtgataacaataatagtaatatgaaatatttattaaattttttataattaatctctgctagaaaatttgattaatctttttagtagaattgttttttctcaactagg

SEQ ID NO: 787 - DNA, 587 bp, Artificial
  Mutations within GlyA3B4 introduced by GmGlyA3B4_T01TALE nuclease
gttcatgtacggttgcagatataaacgaagcatagcttatgtatgaggtgtaacaaaattggaaacaatagccatgcaaggtgaagaatgtcaccaactcagaaacccttcttcattgacgtgtccctcactcactctcctctcttcactataaatcgccactcttcgtgttctccacttcaccaactccttcaaacttattaacacttgtcgagtgcatgctttgctattacctccagcaagttcaacgagtgccaactcaacaacctcaacgcgttggaacccgaccaccgcgttgagtccgaaggtggtcttattgaaacatggaactctcaacaccctgagctgcaatgcgccggtgtcactgtttccaaacgcaccctcaaccgcaacggcctccacttgccatcttactcaccttatccccaaatgatcattgtcgttcaaggtgcgtaatattagtaagaagtatttatcagcttaacgtgataacaataatagtaatatgaatatttattaaattttttataattaatctctgctagaaatttgattaatcatttttagtagaatttgtttttctcaac

SEQ ID NO: 788 - DNA, 589 bp, Artificial
  Mutations within GlyA3B4 introduced by GmGlyA3B4_T01TALE nuclease
gttcatgtacggttgcagatataaacgaagcatagcttatgtatgaggtgtaacaaaattggaaacaatagccatgcaaggtgaagaatgtcaccaactcagaaacccttcttcattgacgtgtccctcactcactctcctctcttcactataaatcgccactcttcgtgttctccacttcaccaactccttcaaacttattaacacttgtcgagtgcatgctttgctattacctccagcaagttcaacgagtgccaactcaacaacctcaacgcgttggaacccgaccaccgcgttgagtccgaaggtggtcttattgaaacatggaactctcaacaccctgagctgcaatgcgccggtgtcactgtttccaaacgcaccctcaaccgcaacggcctccacttgccatcttactcaccttatccccaaatgatcattgtcgttcaaggtgcgtaatattagtaagaagtatttatcagcttaacgtgataacaataatagtaatatgaaatatttattaaattttttataattaatctctgctagaaaatttgattaatcatttttagtagaatttgtttttctcaac

SEQ ID NO: 789 - DNA, 463 bp, Artificial; identical to SEQ ID NO: 612
  Mutations within GlyA3B4 introduced by GmGlyA3B4_T01TALE nuclease

SEQ ID NO: 790 - DNA, 620 bp, Artificial; identical to SEQ ID NO: 592
  Mutations within GlyA3B4 introduced by GmGlyA3B4_T01TALE nuclease

SEQ ID NO: 791 - DNA, 734 bp, Artificial
  Mutations within GlyA3B4 introduced by GmGlyA3B4_T01TALE nuclease
gttcatgtacggttgcagatataaacgaagcatagcttatgtatgaggtgtaacaaaattggaaacaatagccatgcaaggtgaagaatgtcaccaactcagaaacccttcttcattgacgtgtccctcactcactctcctctcttcactataaatcgccactcttcgtgttctccacttcaccaactccttcaaacttattaacactttccttagttcaatatggggaagcccttcttcactctctctctttcttccctttgctcatcgccagcaatggcggtggcaagcaggcgctggagacggtccagcggctgttgccggtgctgtgccaggcccacggcttgaccccctgtcgagtgcatgctttgctattacctccagcaagttcaacgagtgccaactcaacaacctcaacgcgttggaacccgaccaccgcgttgagtccgaaggtggtcttattgaaacatggaactctcaacaccctgagctgcaatgcgccggtgtcactgtttccaaacgcaccctcaaccgcaacggcctccacttgccatcttactcacctttatccccaaatgatcattgtcgttcaaggtgcgtaatattagtaagaagtatttatcagcttaaccgtgataacaataatagtaatatgaaatatttattaaattttttataattaatctctgctagaaaaatttgattaatcatttttagtagaatttgtttttctc

SEQ ID NO: 792 - DNA, 723 bp, Artificial
  Mutations within GlyA3B4 introduced by GmGlyA3B4_T01TALE nuclease
gttcatgtacggttgcagatataaacgaagcatagcttatgtatgaggtgtaacaaaattggaaacaatagccatgcaaggtgaagaatgtcaccaactcagaaacccttcttcattgacgtgtccctcactcactctcctctcttcactataaatcgccactcttcgtgttctccacttcaccaactccttcaaacttattaacactttccttagttcaatatggggaagcccttcttcactctctctctttcttccctttgcttgctattcctaatttacccttgccttttctctttctctttcttccctttgtcttactcttgtcgagtgcatgctttgctattacctccagcaagttcaacgagtgccaactcaacaacctcaacgcgttggaaccccgaccaccgcgtttgagtccgaaggtggtcttattgaaacatggaactctcaacaccctgagctgcaatgcgccggtgtcactgtttccaaacgcaccctcaaccgcaacggcctccacttgccatcttactcaccttatccccaaatgatcattgtcgttcaaggtgcgtaatattagtaagaagtatttatcagcttaacgtgataacaataatagtaatatgaaatatttattaaatttttataattaatctctgctagaaaatttgattaatcatttttagtagaatttgttttttctcaactaggttttaaaacacc

SEQ ID NO: 793 - DNA, 646 bp, Artificial
  Mutations within GlyA3B4 introduced by GmGlyA3B4_T01TALE nuclease
gttcatgtacggttgcagatataaacgaagcatagcttatgtatgaggtgtaacaaaattggaaacaatagccatgcaaggtgaagaatgtcaccaactcagaaacccttcttcattgacgtgtccctcactcactctcctctcttcactataaatcgccactcttcgtgttctccacttcaccaactccttcaaacttattaacactttccttagttcaatatggggaagcccttcttcactctctctctttcttccctttgctattacctccagcaagttcaacgagtgccaactcaacaacctcaacgcgttggaacccgaccaccgcgttgagtccgaaggtggtcttattgaaacatggaactctcaacaccctgagctgcaatgcgccggtgtcactgtttccaaacgcaccctcaaccgcaacggcctccacttgccatcttactcaccttatccccaaatgatcattgtcgttcaaggtgcgtaatattagtaagaagtatttatcagctttaacgtgataacaataatagtaatatgaaatatttattaaattttttataattaatctctgctagaaaatttgattaatcatttttagtagaatttgttttttctcaactaggttttaaacaccaca

SEQ ID NO: 794 - DNA, 606 bp, Artificial
  Mutations within GlyA3B4 introduced by GmGlyA3B4_T01TALE nuclease
gttcatgtacggttgcagatataaacgaagcatagcttatgtatgaggtgtaacaaaattggaaacaatagccatgcaaggtgaagaatgtcaccaactcagaaacccttcttcattgacgtgtccctcactcactctcctctcttcactataaatcgccactcttcgtgttctccacttcaccaactccttcaaacttattaacactttccttagttcaatatggggaagcccttcttcactctctctctttcttccctttgcttgcttcgagtgcatgctttgctattacctccagcaagttcaacgagtgccaactcaacaacctcaacgcgttggaacccgaccaccgcgttgagtccgaaggtggtcttattgaaacatggaactctcaacaccctgagctgcaatgcgccggtgtcactgtttccaaacgcaccctcaaccgcaacggcctccacttgccatcttactcaccttatccccaaatgatcattgtcgttcaaggtgcgtaaatattagtaagaagtatttatcagcttaacgtgataacaataatagtaatatgaaatatttattaaattttttataattaatctctgctag

SEQ ID NO: 795 - DNA, 606 bp, Artificial
  Mutations within GlyA3B4 introduced by GmGlyA3B4_T01TALE nuclease
gttcatgtacggttgcagatataaacgaagcatagcttatgtatgaggtgtaacaaaattggaaacaatagccatgcaaggtgaagaatgtcaccaactcagaaacccttcttcattgacgtgtccctcactcactctcctctcttcactataaatcgccactcttcgtgttctccacttcaccaactccttcaaacttattaacactttccttagttcaatatggggaagcccttcttcactctctctctttcttccctttgcttgcttgtcgagtgcatgctttgctattacctccagcaagttcaacgagtgccaactcaacaacctcaacgcgttggaacccgaccaccgcgttgagtccgaaggtggtcttattgaaacatggaactctcaacaccctgagctgcaatgcgccggtgtcactgtttccaaacgcaccctcaaccgcaacggcctccacttgccatcttactcaccttatccccaaatgatcattgtcgttcaaggtgcgtaatattagtaagaagtatttatcagcttaacgtgataacaataatagtaatatgaaatatttattaaattttttataattaatctctgcta

SEQ ID NO: 796 - DNA, 623 bp, Artificial
  Mutations within GlyA3B4 introduced by GmGlyA3B4_T01TALE nuclease
gttcatgtacggttgcagatataaacgaagcatagcttatgtatgaggtgtaacaaaattggaaacaatagccatgcaaggtgaagaatgtcaccaactcagaaacccttcttcattgacgtgtccctcactcactctcctctcttcactataaatcgccactcttcgtgttctccacttcaccaactccttcaaacttattaacactttccttagttcaatatggggaagcccttcttcactctctctctttcttccctttgcttcttgtcgagtgcatgctttgctattacctccagcaagttcaacgagtgccaactcaacaacctcaacgcgttggaacccgaccaccgcgttgagtccgaaggtggtcttattgaaacatggaactctcaacaccctgagctgcaatgcgccggtgtcactgtttccaaacgcaccctcaaccgcaacggcctccacttgccatcttactcaccttatcccccaaatgatcattgtcgttcaaggtgcgtaaatattagtaagaagtatttatcagcttaacgtgataacaataatagtaatatgaaatatttattaaattttttataattaatctctgctagaaaatttgattaatc

SEQ ID NO: 797 - DNA, 655 bp, Artificial
  Mutations within GlyA3B4 introduced by GmGlyA3B4_T01TALE nuclease
gttcatgtacggttgcagatataaacgaagcatagcttatgtatgaggtgtaacaaaattggaaacaatagccatgcaaggtgaagaatgtcaccaactcagaaacccttcttcattgacgtgtccctcactcactctcctctcttcactataaatcgccactcttcgtgttctccacttcaccaactccttcaaacttattaacactttccttagttcaatatggggaagcccttcttcactctctctctttcttccctttgcttcgagtgcatgctttgctattacctccagcaagttcaacgagtgccaactcaacaacctcaacgcgttggaacccgaccaccgcgttgagtccgaaggtggtcttattgaaacatggaactctcaacaccctgagctgcaatgcgccggtgtcactgtttccaaacgcaccctcaaccgcaacggcctccacttgccatcttactcaccttatcccccaaatgatcattgtcgttcaaggtgcgtaaatattagtaagaagtatttatcagcttaacgtgataacaataatagtaatatgaaatatttattaaattttttataattaatctctgctagaaaatttgattaatcatttttagtagaatttgttttttctcaactaggtttt

SEQ ID NO: 798 - DNA, 524 bp, Artificial
  Mutations within GlyA3B4 introduced by GmGlyA3B4_T01TALE nuclease
gttcatgtacggttgcagatataaacgaagcatagcttatgtatgaggtgtaacaaaattggaaacaatagccatgcaaggtgaagaatgtcaccaactcagaaacccttcttcattgacgtgtccctcactcactctcctctcttcactataaatcgccactcttcgtgttctccacttcaccaactccttcaaacttattaacactttccttagttcaatatggggaagcccttcttcactctctctctttcttccctttgcttgctactactcttgtcgagtgcatgctttgctattacctccagcaagttcaacgagtgccaactcaacaacctcaacgcgttggaacccgaccaccgcgttgagtccgaaggtggtcttattgaaacatggaactctcaacacccctgagctgcaatgcgccggtgtcactgtttccaaacgcaccctcaaccgcaacggcctccacttgccatcttactcaccttatccccaaatgatcattgtcgttcaaggtgcgt

SEQ ID NO: 799 - DNA, 606 bp, Artificial
  Mutations within GlyA3B4 introduced by GmGlyA3B4_T01TALE nuclease
gttcatgtacggttgcagatataaacgaagcatagcttatgtatgaggtgtaacaaaattggaaacaatagccatgcaaggtgaagaatgtcaccaactcagaaacccttcttcattgacgtgtcccctcactcactctcctctcttcactataaatcgccactcttcgtgttctccacttcaccaactccttcaaacttattaacactttccttagttcaatatggggaagcccttcttcactctctctctttcttccctttgcttgctacgagtgcatgctttgctattacctccagcaagttcaacgagtgccaactcaacaacctcaacgcgttggaacccgaccaccgcgttgagtccgaaggtggtcttattgaaacatggaactctcaacaccctgagctgcaatgcgccggtgtcactgtttccaaacgcaccctcaaccgcaacggcctccacttgccatcttactcaccttatccccaaatgatcattgtcgttcaaggtgcgtaatattagtaagaagtatttatcagcttaacgtgataacaataatagtaatatgaaatatttattaaattttttataattaatctctgctag

SEQ ID NO: 800 - DNA, 654 bp, Artificial
  Mutations within GlyA3B4 introduced by GmGlyA3B4_T01TALE nuclease
gttcatgtacggttgcagatataaacgaagcatagcttatgtatgaggtgtaacaaaattggaaacaatagccatgcaaggtgaagaatgtcaccaactcagaaacccttcttcattgacgtgtccctcactcactctcctctcttcactataaatcgccactcttcgtgttctccacttcaccaactccttcaaacttattaacactttccttagttcaatatggggaagcccttcttcactctctctctttcttccctttgcttgcttgtcgagtgcatgctttgctattacctccagcaagttcaacgagtgccaactcaacaacctcaacgcgttggaacccgaccaccgcgttgagtccgaaggtggtcttattgaaacatggaactctcaacaccctgagctgcaatgcgccggtgtcactgtttccaaacgcaccctcaaccgcaacggcctccacttgccatcttactcaccttatcccccaaatgatcattgtcgttcaaggtgcgtaaatattagtaagaagtatttatcagcttaacgtgataacaataatagtaatatgaaatatttattaaattttttataattaatctctgctagaaaatttgattaatctttttagtagaattgtttttctcaactagg

SEQ ID NO: 801 - DNA, 591 bp, Artificial
  Mutations within GlyA3B4 introduced by GmGlyA3B4_T01TALE nuclease
gttcatgtacggttgcagatataaacgaagcatagcttatgtatgaggtgtaacaaaattggaaacaatagccatgcaaggtgaagaatgtcaccaactcagaaacccttcttcattgacgtgtccctcactcactctcctctcttcactataaatcgccactcttcgtgttctccacttcaccaactccttcaaacttattaacactttccttgtcgagtgcatgctttgctattacctccagcaagttcaacgagtgccaactcaacaacctcaacgcgttggaacccgaccaccgcgttgagtccgaaggtggtcttattgaacatggaactctcaacaccctgagctgcaatgcgccggtgtcactgtttccaaacgcaccctcaaccgcaacggcctccacttgccatcttactcaccttatccccaaatgatcattgtcgttcaaggtgcgtaatattagtaagaagtatttatcagcttaacgtgataacaatatagtaatagaaatatttattaaattttttataattaatctctgctagaaaatttgattaatcatttttagtagaatttgtttttctcaac

SEQ ID NO: 802 - DNA, 669 bp, Artificial
  Mutations within GlyA3B4 introduced by GmGlyA3B4_T01TALE nuclease
gttcatgtacggttgcagatataaacgaagcatagcttatgtatgaggtgtaacaaaattggaaacaatagccatgcaaggtgaagaatgtcaccaactcagaaacccttcttcattgacgtgtccctcactcactctcctctcttcactataaatcgccactcttcgtgttctccacttcaccaactccttcaaacttattaacactttccttagttcaatatggggaagcccttcttcactctctctctttcttccctttgcttttgtcgagtgcatgctttgctattacctccagcaagttcaacgagtgccaactcaacaacctcaacgcgttggaacccgaccaccgcgttgagtccgaaggtggtcttattgaaacatggaactctcaacaccctgagctgcaatgcgccggtgtcactgtttccaaacgcaccctcaaccgcaacggcctccacttgccatcttactcaccttatccccaaatgatcattgtcgttcaaggtgcgtaaatattagtaagaagtatttatcagcttaacgtgataacaataatagtaatatgaaatatttattaaattttttataattaatctctgctagaaaatttgattaatcatttttagtagaatttgttttttctcaactaggttttaaaacaccaca

SEQ ID NO: 803 - DNA, 653 bp, Artificial
  Mutations within GlyA3B4 introduced by GmGlyA3B4_T01TALE nuclease
gttcatgtacggttgcagatataaacgaagcatagcttatgtatgaggtgtaacaaaattggaaacaatagccatgcaaggtgaagaatgtcaccaactcagaaacccttcttcattgacgtgtccctcactcactctcctctcttcactataaatcgccactcttcgtgttctccacttcaccaactccttcaaacttattaacactttccttagttcaatatggggaagcccttcttcactctctctctttcttcgagtgcatgctttgctattacctccagcaagttcaacgagtgccaactcaacaacctcaacgcgttggaacccgaccaccgcgttgagtccgaaggtggtcttattgaaacatggaactctcaacaccctgagctgcaatgcgccggtgtcactgtttccaaacgcaccctcaaccgcaacggcctccacttgccatcttactcaccttatccccaaatgatcattgtcgttcaaggtgcgtaatattagtaagaagtatttatcagcttaacgtgataacaataatagtaatatgaaatatttattaaattttttataattaatctctgctagaaaatttgattaatcatttttagtagaatttgttttttctcaactaggttttaaacaccaca

SEQ ID NO: 804 - DNA, 604 bp, Artificial
  Mutations within GlyA3B4 introduced by GmGlyA3B4_T01TALE nuclease
gttcatgtacggttgcagatataaacgaagcatagcttatgtatgaggtgtaacaaaattggaaacaatagccatgcaaggtgaagaatgtcaccaactcagaaacccttcttcattgacgtgtccctcactcactctcctctcttcactataaatcgccactcttcgtgttctccacttcaccaactccttcaaacttattaacactttccttagttcaatatggggaagcccttcttcactctctctctttcttccctttgcttgtcgagtgcatgctttgctattacctccagcaagttcaacgagtgccaactcaacaacctcaacgcgttggaacccgaccaccgcgttgagtccgaaggtggtcttattgaaacatggaactctcaacaccctgagctgcaatgcgccggtgtcactgtttccaaacgcaccctcaaccgcaacggcctccacttgccatcttactcaccttatccccaaatgatcattgtcgttcaaggtgcgtaataattagtaagaagtatttatcagctttaacgtgataacaataatagtaatatgaaatatttattaaatttttataattaatctctgctag

SEQ ID NO: 805 - DNA, 653 bp, Artificial
  Mutations within GlyA3B4 introduced by GmGlyA3B4_T01TALE nuclease
gttcatgtacggttgcagatataaacgaagcatagcttatgtatgaggtgtaacaaaattggaaacaatagccatgcaaggtgaagaatgtcaccaactcagaaacccttcttcattgacgtgtccctcactcactctcctctcttcactataaatcgccactcttcgtgttctccacttcaccaactccttcaaacttattaacactttccttagttcaatatggggaagcccttcttcactctctctctttcttccctttgcttgctctcgagtgcatgctttgctattacctccagcaagttcaacgagtgccaactcaacaacctcaacgcgttggaacccgaccaccgcgttgagtccgaaggtggtcttattgaaacatggaactctcaacaccctgagctgcaatgcgccggtgtcactgtttccaaacgcaccctcaaccgcaacggcctccacttgccatcttactcaccttatcccccaaatgatcattgtcgttcaaggtgcgtaatattagtaagaagtatttatcagcttaacgtgataacaataatagtaatatgaaatatttattaaattttttataattaatctctgctagaaaatttgattaatctttttagtagaattgttttttctcaactagg

SEQ ID NO: 806 - DNA, 664 bp, Artificial
  Mutations within GlyA3B4 introduced by GmGlyA3B4_T01TALE nuclease
gttcatgtacggttgcagatataaacgaagcatagcttatgtatgaggtgtaacaaaattggaaacaatagccatgcaaggtgaagaatgtcaccaactcagaaacccttcttcattgacgtgtccctcactcactctcctctcttcactataaatcgccactcttcgtgttctccacttcaccaactccttcaaacttattaacactttccttagttcaatatggggaagcccttcttcactctctctctttcttccctttgctattacctcgagtgcatgctttgctattacctccagcaagttcaacgagtgccaactcaacaacctcaacgcgttggaacccgaccaccgcgttgagtccgaaggtggtcttattgaaacatggaactctcaacaccctgagctgcaatgcgccggtgtcactgtttccaaacgcaccctcaaccgcaacggcctccacttgccatcttactcaccttatccccaaatgatcattgtcgttcaaggtgcgtaatattagtaagagtatttatcagcttaacgtgataacaatatagtaatatgaaatatttattaaatttttataattaatctctgctagaaaatttgattaatcattttagtagaatttgtttttctcaactaggtttttaaaacacca

SEQ ID NO: 807 - DNA, 653 bp, Artificial
  Mutations within GlyA3B4 introduced by GmGlyA3B4_T01TALE nuclease
  misc_feature (532): n is a or c or t or g
gttcatgtacggttgcagatataaacgaagcatagcttatgtatgaggtgtaacaaaattggaaacaatagccatgcaaggtgaagaatgtcaccaactcagaaacccttcttcattgacgtgtccctcactcactctcctctcttcactataaatcgccactcttcgtgttctccacttcaccaactccttcaaacttattaacactttccttagttcaatatggggaagcccttcttcactctctctctttcttccctttgcttgctattgtcgagtgcatgctttgctattacctccagcaagttcaacgagtgccaactcaacaacctcaacgcgttggaacccgaccaccgcgttgagtccgaaggtggtcttattgaaacatggaactctcaacaccctgagctgcaatgcgccggtgtcactgtttccaaacgcaccctcaaccgcaacggcctccacttgccatcttactcaccttatccccaaatgatcattgtcgttcaaggtgcgtaatattagtaagagnatttatcagcttaacgtgataacaataatagtaatatgaaatatttattaaatttttataattaatctctgctagaaaatttgattaatcattttagtagaatttgtttttctcaactagg

SEQ ID NO: 808 - DNA, 630 bp, Artificial
  Mutations within GlyA3B4 introduced by GmGlyA3B4_T01TALE nuclease
gttcatgtacggttgcagatataaacgaagcatagcttatgtatgaggtgtaacaaaattggaaacaatagccatgcaaggtgaagaatgtcaccaactcagaaacccttcttcattgacgtgtccctcactcactctcctctcttcactataaatcgccactcttcgtgttctccacttcaccaactccttcaaacttattaacactttccttagttcaatatggggaagcccttcttcactctctctctttcttccctttgcttgtcgagtgcatgctttgctattacctccagcaagttcaacgagtgccaactcaacaacctcaacgcgttggaacccgaccaccgcgttgagtccgaaggtggtcttattgaaacatggaactctcaacaccctgagctgcaatgcgccggtgtcactgtttccaaacgcaccctcaaccgcaacggcctccacttgccatcttactcaccttatccccaaatgatcattgtcgttcaaggtgcgtaatattagtaagaagtatttatcagcttaacgtgataacaataatagtaatatgaaatatttattaaattttttataattaatctctgctagaaaatttgattaatctttttagtagaa

SEQ ID NO: 809 - DNA, 671 bp, Artificial
  Mutations within GlyA3B4 introduced by GmGlyA3B4_T01TALE nuclease
gttcatgtacggttgcagatataaacgaagcatagcttatgtatgaggtgtaacaaaattggaaacaatagccatgcaaggtgaagaatgtcaccaactcagaaacccttcttcattgacgtgtccctcactcactctcctctcttcactataaatcgccactcttcgtgttctccacttcaccaactccttcaaacttattaacactttccttagttcaatatggggaagcccttcttcactctctctctttcttccctttgcttgtcttgtcgagtgcatgctttgctattacctccagcaagttcaacgagtgccaactcaacaacctcaacgcgttggaacccgaccaccgcgttgagtccgaaggtggtcttattgaaacatggaactctcaacaccctgagctgcaatgcgccggtgtcactgtttccaaacgcaccctcaaccgcaacggcctccacttgccatcttactcaccttatcccccaaatgatcattgtcgttcaaggtgcgtaatattagtaagaagtatttatcagcttaacgtgataacaataatagtaatatgaaatatttattaaattttttataattaatctctgctagaaaatttgattaatctttttagtagaatttgttttttctcaactaggttttaaaacaccaca

SEQ ID NO: 810 - DNA, 655 bp, Artificial; identical to SEQ ID NO: 600
  Mutations within GlyA3B4 introduced by GmGlyA3B4_T01TALE nuclease

SEQ ID NO: 811 - DNA, 622 bp, Artificial
  Mutations within GlyA3B4 introduced by GmGlyA3B4_T01TALE nuclease
gttcatgtacggttgcagatataaacgaagcatagcttatgtatgaggtgtaacaaaattggaaacaatagccatgcaaggtgaagaatgtcaccaactcagaaacccttcttcattgacgtgtccctcactcactctcctctcttcactataaatcgccactcttcgtgttctccacttcaccaactccttcaaacttattaacactttccttagttcaatatggggaagcccttcttcactctctctctttcttccctttgctgagtgcatgctttgctattacctccagcaagttcaacgagtgccaactcaacaacctcaacgcgttggaacccgaccaccgcgttgagtccgaaggtggtcttattgaaacatggaactctcaacaccctgagctgcaatgcgccggtgtcactgtttccaaacgcaccctcaccgcaacggcctccacttgccatcttactcaccttatcccaatcgatcattgtcgttcaaggtgcgtaatattagtaagaagtatttatcagcttaacgtgataacaataatagtaatatgaaatatttattaaattttttataattaatctctgctagaaaatttgattaatctttttagtag

SEQ ID NO: 812 - DNA, 667 bp, Artificial
  Mutations within GlyA3B4 introduced by GmGlyA3B4_T01TALE nuclease
gttcatgtacggttgcagatataaacgaagcatagcttatgtatgaggtgtaacaaaattggaaacaatagccatgcaaggtgaagaatgtcaccaactcagaaacccttcttcattgacgtgtccctcactcactctcctctcttcactataaatcgccactcttcgtgttctccacttcaccaactccttcaaacttattaacactttccttagttcaatatggggaagcccttcttcactctctctctttcttccctttgcttgctcttgtcgagtgcatgctttgctattacctccagcaagttcaacgagtgccaactcaacaacctcaacgcgttggaacccgaccaccgcgttgagtccgaaggtggtcttattgaaacatggaactctcaacaccctgagctgcaatgcgccggtgtcactgtttccaaacgcaccctcaaccgcaacggcctccacttgccatcttactcaccttatccccaaatgatcattgtcgttcaaggtgcgtaatattagtaagagtatttatcagcttaacgtgataacaataatagtaatatgaaatatttattaaatttttataattaatctctgctagaaaatttgattaatcattttagtagaatttgtttttctcaactaggtttttaaaacacca

SEQ ID NO: 813 - DNA, 650 bp, Artificial
  Mutations within GlyA3B4 introduced by GmGlyA3B4_T01TALE nuclease
gttcatgtacggttgcagatataaacgaagcatagcttatgtatgaggtgtaacaaaattggaaacaatagccatgcaaggtgaagaatgtcaccaactcagaaacccttcttcattgacgtgtccctcactcactctcctctcttcactataaatcgccactcttcgtgttctccacttcaccaactccttcaaacttattaacactttccttagttcaatatggggaagcccttcttcactctctctctttcttccctttgctcttgtcgagtgcatgctttgctattacctccagcaagttcaacgagtgccaactcaacaacctcaacgcgttggaacccgaccaccgcgttgagtccgaaggtggtcttattgaaacatggaactctcaacaccctgagctgcaatgcgccggtgtcactgtttccaaacgcaccctcaaccgcaacggcctccacttgccatcttactcaccttatcccccaaatgatcattgtcgttcaaggtgcgtaatattagtaagaagtatttatcagcttaacgtgataacaataatagtaatatgaaatatttattaaattttttataattaatctctgctagaaaatttgattaatctttttagtagaattgttttttctcaacta

SEQ ID NO: 814 - DNA, 657 bp, Artificial
  Mutations within GlyA3B4 introduced by GmGlyA3B4_T01TALE nuclease
gttcatgtacggttgcagatataaacgaagcatagcttatgtatgaggtgtaacaaaattggaaacaatagccatgcaaggtgaagaatgtcaccaactcagaaacccttcttcattgacgtgtccctcactcactctcctctcttcactataaatcgccactcttcgtgttctccacttcaccaactccttcaaacttattaacactttccttagttcaatatggggaagcccttcttcactctctctctttcttccctttgcttgctttgctattacctccagcaagttcaacgagtgccaactcaacaacctcaacgcgttggaacccgaccaccgcgttgagtccgaaggtggtcttattgaaacatggaactctcaacaccctgagctgcaatgcgccggtgtcactgttttccaaacgcaccctcaaccgcaacggcctccacttgccatcttactcaccttatccccaaatgatcattgtcgttcaaggtgcgtaatattagtaagaagtatttatcagcttaacgtgataacaataatagtaatatgaaatatttattaaattttttataattaatctctgctagaaaatttgattaatcatttttagtagaatttgttttttctcaactaggtttttaaaacaccaca

SEQ ID NO: 815 - DNA, 477 bp, Artificial; identical to SEQ ID NO: 550
  Mutations within GlyA3B4 introduced by GmGlyA3B4_T01TALE nuclease

SEQ ID NO: 816 - DNA, 649 bp, Artificial
  Mutations within GlyA3B4 introduced by GmGlyA3B4_T01TALE nuclease
gttcatgtacggttgcagatataaacgaagcatagcttatgtatgaggtgtaacaaaattggaaacaatagccatgcaaggtgaagaatgtcaccaactcagaaacccttcttcattgacgtgtccctcactcactctcctctcttcactataaatcgccactcttcgtgttctccacttcaccaactccttcaaacttattaacactttccttagttcaatatggggaagcccttcttcactctctctctttcttccctttgcttgtcgagtgcatgctttgctattacctccagcaagttcaacgagtgccaactcaacaacctcaacgcgttggaacccgaccaccgcgttgagtccgaaggtggtcttattgaaacatggaactctcaacaccctgagctgcaatgcgccggtgtcactgtttccaaacgcaccctcaaccgcaacggcctccacttgccatcttactcaccttatccccaaatgatcattgtcgttcaaggtgcgtaatattagtaagaagtatttatcagcttaacgtgataacaataatagtaatatgaaatatttattaaattttttataattaatctctgctagaaaatttgattaatctttttagtagaattgttttttctcaactagg

SEQ ID NO: 817 - DNA, 513 bp, Artificial; identical to SEQ ID NO: 645
  Mutations within GlyA3B4 introduced by GmGlyA3B4_T01TALE nuclease

SEQ ID NO: 818 - DNA, 615 bp, Artificial
  Mutations within GlyA3B4 introduced by GmGlyA3B4_T01TALE nuclease
gttcatgtacggttgcagatataaacgaagcatagcttatgtatgaggtgtaacaaaattggaaacaatagccatgcaaggtgaagaatgtcaccaactcagaaacccttcttcattgacgtgtccctcactcactctcctctcttcactataaatcgccactcttcgtgttctccacttcaccaactccttcaaacttattaacactttccttagttcaatatggggaagcccttcttcactctctctctttcttccctttgcttgctatccacggacagcacggcgccgttgcagttggtgatgtggttcagcctggtcagctgggccttgtagttgccctcttgtcgagtgcatgctttgctattacctccagcaagttcaacgagtgccaactcaacaacctcaacgcgttggaacccgaccaccgcgttgagtccgaaggtggtcttattgaaacatggaactctcaacaccctgagctgcaatgcgccggtgtcactgtttccaaacgcaccctcaaccgcaacggcctccacttgccatcttactcaccttatccccaaaatgatcattgtcgttcaaggtgcgtaatattagtaagaagtatttatc

SEQ ID NO: 819 - DNA, 582 bp, Artificial
  Mutations within GlyA3B4 introduced by GmGlyA3B4_T01TALE nuclease
gttcatgtacggttgcagatataaacgaagcatagcttatgtatgaggtgtaacaaaattggaaacaatagccatgcaaggtgaagaatgtcaccaactcagaaacccttcttcattgacgtgtccctcactcactctcctctcttcactataaatcgccactcttcgtgttctccacttcaccaactccttcaaacttattaacactttccttagttcaatatggggaagcccttcttcacttgtcgagtgcatgctttgctattacctccagcaagttcaacgagtgccaactcaacaacctcaacgcgttggaacccgaccaccgcgttgagtccgaaggtggtcttattgaaacatggaactctcaacaccctgagctgcaatgcgccggtgtcactgtttccaaacgcaccctcaaccgcaacggcctccacttgccatcttactcaccttatccccaaatgatcattgtcgttcaaggtgcgtaatattagtaagaagtatttatcagcttaacgtgataacaataatagtaatatgaaatatttattaaattttttataattaattctctgctag

SEQ ID NO: 820 - DNA, 581 bp, Artificial
  Mutations within GlyA3B4 introduced by GmGlyA3B4_T01TALE nuclease
gttcatgtacggttgcagatataaacgaagcatagcttatgtatgaggtgtaacaaaattggaaacaatagccatgcaaggtgaagaatgtcaccaactcagaaacccttcttcattgacgtgtccctcactcactctcctctcttcactataaatcgccactcttcgtgttctccacttcaccaactccttcaaacttattaacactttccttagttcaatatggggaagcccttcttcactctctctctttcttccctttgcttgctactactcttgtcgagtgcatgctttgctattacctccagcaagttcaacgagtgccaactcaacaacctcaacgcgttggaacccgaccaccgcgttgagtccgaaggtggtcttattgaaacatggaactctcaacaccctgagctgcaatgcgccggtgtcactgtttccaaacgcaccctcaaccgcaacggcctccacttgccatcttactcaccttatccccaaatgatcattgtcgttcaaggtgcgtaatattagtaagaagtatttatcagcttaacgtgatacaataatagtaatatgaaata

SEQ ID NO: 821 - DNA, 652 bp, Artificial
  Mutations within GlyA3B4 introduced by GmGlyA3B4_T01TALE nuclease
gttcatgtacggttgcagatataaacgaagcatagcttatgtatgaggtgtaacaaaattggaaacaatagccatgcaaggtgaagaatgtcaccaactcagaaacccttcttcattgacgtgtccctcactcactctcctctcttcactataaatcgccactcttcgtgttctccacttcaccaactccttcaaacttattaacactttccttagttcaatatggggaagcccttcttcactctctctctttcttccctttgctttgtcgagtgcatgctttgctattacctccagcaagttcaacgagtgccaactcaacaacctcaacgcgttggaacccgaccaccgcgttgagtccgaaggtggtcttattgaaacatggaactctcaacaccctgagctgcaatgcgccggtgtcactgtttccaaacgcaccctcaaccgcaacggcctccacttgccatcttactcaccttatccccaaatgatcattgtcgttcaaggtgcgtaatattagtaagaagtatttatcagcttaacgtgataacaataatagtaatatgaaatatttattaaattttttataattaatctctgctagaaaatttgattaatcatttttagtagaatttgttttttctcaactagg

SEQ ID NO: 822 - DNA, 652 bp, Artificial
  Mutations within GlyA3B4 introduced by GmGlyA3B4_T01TALE nuclease
gttcatgtacggttgcagatataaacgaagcatagcttatgtatgaggtgtaacaaaattggaaacaatagccatgcaaggtgaagaatgtcaccaactcagaaacccttcttcattgacgtgtccctcactcactctcctctcttcactataaatcgccactcttcgtgttctccacttcaccaactccttcaaacttattaacactttccttagttcaatatggggaagcccttcttcactctctctctttcttccctttgcttttgtcgagtgcatgctttgctattacctccagcaagttcaacgagtgccaactcaacaacctcaacgcgttggaacccgaccaccgcgttgagtccgaaggtggtcttattgaaacatggaactctcaacaccctgagctgcaatgcgccggtgtcactgtttccaaacgcaccctcaaccgcaacggcctccacttgccatcttactcaccttatcccccaaatgatcattgtcgttcaaggtgcgtaatattagtaagaagtatttatcagcttaacgtgataacaataatagtaatatgaaatatttattaaattttttataattaatctctgctagaaaatttgattaatctttttagtagaattgttttttctcaactagg

SEQ ID NO: 823 - DNA, 668 bp, Artificial
  Mutations within GlyA3B4 introduced by GmGlyA3B4_T01TALE nuclease
gttcatgtacggttgcagatataaacgaagcatagcttatgtatgaggtgtaacaaaaattggaaacaatagccatgcaaggtgaagaatgtcaccaactcagaaacccttcttcattgacgtgtccctcactcactctcctctcttcactataaatcgccactcttcgtgttctccacttcaccaactccttcaaacttattaacactttccttagttcaatatggggaagcccttcttcactctctctctttcttccctttgcttgctatgtcgagtgcatgctttgctattacctccagcaagttcaacgagtgccaactcaacaacctcaacgcgttggaacccgaccaccgcgttgagtccgaaggtggtcttattgaaacatggaactctcaacaccctgagctgcaatgcgccggtgtcactgtttccaaacgcaccctcaaccgcaacggcctccacttgccatcttactcaccttatccccaaatgatcattgtcgttcaaggtgcgtaatattagtaagagtatttatcagcttaacgtgataacaataatagtaatatgaaaatatttattaaatttttataattaatctctgctagaaaatttgattaatcattttagtagaatttgtttttctcaactaggtttttaaaacacca

SEQ ID NO: 824 - DNA, 668 bp, Artificial
  Mutations within GlyA3B4 introduced by GmGlyA3B4_T01TALE nuclease
gttcatgtacggttgcagatataaacgaagcatagcttatgtatgaggtgtaacaaaattggaaacaatagccatgcaaggtgaagaatgtcaccaactcagaaacccttcttcattgacgtgtccctcactcactctcctctcttcactataaatcgccactcttcgtgttctccacttcaccaactccttcaaacttattaacactttccttagttcaatatggggaagcccttcttcactctctctctttcttccctttgcttgctatgtcgagtgcatgctttgctattacctccagcaagttcaacgagtgccaactcaacaacctcaacgcgttggaacccgaccaccgcgttgagtccgaaggtggtcttattgaaacatggaactctcaacaccctgagctgcaatgcgccggtgtcactgtttccaaacgcaccctcaaccgcaacggcctccacttgccatcttactcaccttatccccaaatgatcattgtcgttcaaggtgcgtaatattagtaagagtatttatcagcttaacgtgataacaataatagtaatatgaaatatttattaaatttttataattaatctctgctagaaaatttgattaatcattttagtagaatttgtttttctcaactaggtttttaaaacaccaca

SEQ ID NO: 825 - DNA, 665 bp, Artificial
  Mutations within GlyA3B4 introduced by GmGlyA3B4_T01TALE nuclease
gttcatgtacggttgcagatataaacgaagcatagcttatgtatgaggtgtaacaaaattggaaacaatagccatgcaaggtgaagaatgtcaccaactcagaaacccttcttcattgacgtgtccctcactcactctcctctcttcactataaatcgccactcttcgtgttctccacttcaccaactccttcaaacttattaacactttccttagttcaatatggggaagcccttcttcactctctctctttcttccctttgcttgctatctcgtatgcgcgactgcttttgctattacctccagcaagttcaacgagtgccaactcaacaacctcaacgcgttggaacccgaccaccgcgttgagtccgaaggtggtcttattgaaacatggaactctcaacaccctgagctgcaatgcgccggtgtcactgtttccaaacgcaccctcaaccgcaacggcctccacttgccatcttactcaccttatccccaaatgatcattgtcgttcaaggtgcgtaatattagtaagagtatttatcagcttaacgtgataacaataatagtaatatgaaatatttattaaatttttataattaatctctgctagaaaatttgattaatcattttagtagaatttgtttttctcaactaggttttaaaa

SEQ ID NO: 826 - DNA, 674 bp, Artificial
  Mutations within GlyA3B4 introduced by GmGlyA3B4_T01TALE nuclease
gttcatgtacggttgcagatataaacgaagcatagcttatgtaatgaggtgtaacaaaattggaaacaatagccatgcaaggtgaagaatgtcaccaatctcagaaacccttcttcattgacgtgtccctcactcactctccatctcttcactataaatcgccactcttcgtggttctccacttcaccaactccttcaaacttattaacactttccttagttcaatatggggaagcccttcttcactctctgctctttcttccctttgcttgccttgtcgagtgcatgctttgctattacctccagcaagttcacgagtgccaactcacaacctcaacgcgttggaacccgaccaccgcgttgagtccgaaggtggtcttattgaacatggaactctcaacaccctgagctgcaatgcgccggtgtcactgtttccaaacgcaccctcaaccgcaacggcctccacttgccatcttactcaccttatcccccaaatgatcattgtcgttcaaggtgcgtaatattagtaagaagtatttatcagctttaacgtgataacaataatagtaatatgaaatatttattaaattttttataattaatctctgctagaaaatttgattaatcattttttagtagaatttgttttttctcaactaggttttaaaacacca

SEQ ID NO: 827 - DNA, 619 bp, Artificial
  Mutations within GlyA3B4 introduced by GmGlyA3B4_T01TALE nuclease
gttcatgtacggttgcagatataaacgaagcatagcttatgtatgaggtgtaacaaaattggaaacaatagccatgcaaggtgaagaatgtcaccaactcagaaacccttcttcattgacgtgtccctcactcactctcctctcttcactataaatcgccactcttcgtgttctccacttcaccaactccttcaaacttattaacactttccttagttcaatatggggaagcccttcttcactctctctctttcttccctttgcttgctgcaagttcaacgagtgccaactcaacaacctcaacgcgttggaacccgaccaccgcgttgagtccgaaggtggtcttattgaaacatggaactctcaacaccctgagctgcaatgcgccggtgtcactgtttccaaacgcaccctcaaccgcaacggcctccacttgccatcttactcaccttatccccaaatgatcattgtcgttcaaggtgcgtaatattagtaagaagtatttatcagcttaacgtgataacaataatagtaatatgaaatatttattaatttttataattaatctctgctagaaaatttgattaatcatttttagtagaatttgtttttctcaact

SEQ ID NO: 828 - DNA, 638 bp, Artificial
  Mutations within GlyA3B4 introduced by GmGlyA3B4_T01TALE nuclease
gttcatgtacggttgcagatataaacgaagcatagcttatgtatgaggtgtaacaaaattggaaacaatagccatgcaaggtgaagaatgtcaccaactcagaaacccttcttcattgacgtgtccctcactcactctcctctcttcactataaatcgccactcttcgtgttctccacttcaccaactccttcaaacttattaacactttccttagttcaatatggggaagcccttcttcactctctcttcgagtgcatgctttgctattacctccagcaagttcaacgagtgccaactcaacaacctcaacgcgttggaacccgaccaccgcgttgagtccgaaggtggtcttattgaaacatggaactctcaacaccctgagctgcaatgcgccggtgtcactgtttccaaacgcaccctcaaccgcaacggcctccacttgccatcttactcaccttatcccccaaatgatcattgtcgttcaaggtgcgtaatattagtaagaagtatttatcagcttaacgtgataacaataatagtaatatgaaatatttattaaattttttataattaatctctgctagaaaatttgattaatcatttttagtagaatttgttttttctcaactaggtttt

SEQ ID NO: 829 - DNA, 621 bp, Artificial
  Mutations within GlyA3B4 introduced by GmGlyA3B4_T01TALE nuclease
gttcatgtacggttgcagatataaacgaagcatagcttatgtatgaggtgtaacaaaattggaaacaatagccatgcaaggtgaagaatgtcaccaactcagaaacccttcttcattgacgtgtccctcactcactctcctctcttcactataaatcgccactcttcgtgttctccacttcaccaactccttcaaacttattaacactttccttagttcaatatggggaagcccttcttcactctctctctttcttccctttgcttgcttcgagtgcatgctttgctattacctccagcaagttcaacgagtgccaactcaacaacctcaacgcgttggaacccgaccaccgcgttgagtccgaaggtggtcttattgaaacatggaactctcaacaccctgagctgcaatgcgccggtgtcactgtttccaaacgcaccctcaaccgcaacggcctccacttgccatcttactcaccttatccccaaatgatcattgtcgttcaaggtgcgtaaatattagtaagaagtatttatcagcttaacgtgataacaataatagtaatatgaaatatttattaaattttttataattaatctctgctagaaaatttgattaatc

SEQ ID NO: 830 - DNA, 654 bp, Artificial
  Mutations within GlyA3B4 introduced by GmGlyA3B4_T01TALE nuclease
gttcatgtacggttgcagatataaacgaagcatagcttatgtatgaggtgtaacaaaattggaaacaatagccatgcaaggtgaagaatgtcaccaactcagaaacccttcttcattgacgtgtccctcactcactctcctctcttcactataaatcgccactcttcgtgttctccacttcaccaactccttcaaacttattaacactttccttagttcaatatggggaagcccttcttcactctctctctttcttccctttgcttgcttgtcgagtgcatgctttgctattacctccagcaagttcaacgagtgccaactcaacaacctcaacgcgttggaacccgaccaccgcgttgagtccgaaggtggtcttattgaaacatggaactctcaacaccctgagctgcaatgcgccggtgtcactgtttccaaacgcaccctcaaccgcaacggcctccacttgccatcttactcaccttatccccaaatgatcattgtcgttcaaggtgcgtaaatattagtaagaagtatttatcagcttaacgtgataacaataatagtaatatgaaatatttattaaattttttataattaatctctgctagaaaatttgattaatctttttagtagaattgttttttctcaactagg

SEQ ID NO: 831 - DNA, 646 bp, Artificial; identical to SEQ ID NO: 564
  Mutations within GlyA3B4 introduced by GmGlyA3B4_T01TALE nuclease

SEQ ID NO: 832 - DNA, 608 bp, Artificial; identical to SEQ ID NO: 546
  Mutations within GlyA3B4 introduced by GmGlyA3B4_T01TALE nuclease

SEQ ID NO: 833 - DNA, 609 bp, Artificial; identical to SEQ ID NO: 610
  Mutations within GlyA3B4 introduced by GmGlyA3B4_T01TALE nuclease

SEQ ID NO: 834 - DNA, 734 bp, Artificial
  Mutations within GlyA3B4 introduced by GmGlyA3B4_T01TALE nuclease
gttcatgtacggttgcagatataaacgaagcatagcttatgtatgaggtgtaacaaaattggaaacaatagccatgcaaggtgaagaatgtcaccaactcagaaacccttcttcattgacgtgtccctcactcactctcctctcttcactataaatcgccactcttcgtgttctccacttcaccaactccttcaaacttattaacactttccttagttcaatatggggaagcccttcttcactctctctctttcttccctttgctcatcgccagcaatggcggtggcaagcaggcgctggagacggtccagcggctgttgccggtgctgtgccaggcccacggcttgaccccctgtcgagtgcatgctttgctattacctccagcaagttcaacgagtgccaactcaacaacctcaacgcgttggaacccgaccaccgcgttgagtccgaaggtggtcttattgaaacatggaactctcaacaccctgagctgcaatgcgccggtgtcactgtttccaaacgcaccctcaaccgcaacggcctccacttgccatcttactcaccttatccccaaatgatcattgtcgttcaaggtgcgtaatattagtaagaagtatttatcagcttaacgtgataacaataatagtaatatgaaaatatttattaaaattttttataattaatctctgctagaaaaatttgattaatcatttttagtagaatttgtttttctc

SEQ ID NO: 835 - DNA, 557 bp, Artificial
  Mutations within GlyA3B4 introduced by GmGlyA3B4_T01TALE nuclease
gttcatgtacggttgcagatataaacgaagcatagcttatgtatgaggtgtaacaaaattggaaacaatagccatgcaaggtgaagaatgtcaccaactcagaaacccttcttcattgacgtgtccctcactcactctcctctcttcactataaatcgccactcttcgtgttctccacttcaccaactccttcaaacttattaacactttccttatcaacaacctcaacgcgttggaacccgaccaccgcgttgagtccgaaggtggtcttattgaaacatggaactctcaacaccctgagctgcaatgcgccggtgtcactgtttccaaacgcaccctcaaccgcaacggcctccacttgccatcttactcaccttatccccaaatgatcattgtcgttcaaggtgcgtaatattagtaagaagtatttatcagcttaacgtgataacaataatagtaatatgaaatatttattaaattttttataattaatctctgctagaaaatttgattaatcattttagtagaatttgtttttctcaactaggttttaaaca

SEQ ID NO: 836 - DNA, 667 bp, Artificial
  Mutations within GlyA3B4 introduced by GmGlyA3B4_T01TALE nuclease
gttcatgtacggttgcagatataaacgaagcatagcttatgtatgaggtgtaacaaaattggaaacaatagccatgcaaggtgaagaatgtcaccaactcagaaacccttcttcattgacgtgtccctcactcactctcctctcttcactataaatcgccactcttcgtgttctccacttcaccaactccttcaaacttattaacactttccttagttcaatatggggaagcccttcttcactctctctctttcttccctttgcttgtcgagtgcatgctttgctattacctccagcaagttcaacgagtgccaactcaacaacctcaacgcgttggaacccgaccaccgcgttgagtccgaaggtggtcttattgaaacatggaactctcaacaccctgagctgcaatgcgccggtgtcactgtttccaaacgcaccctcaaccgcaacggcctccacttgccatcttactcaccttatcccccaaatgatcattgtcgttcaaggtgcgtaatattagtaagaagtatttatcagcttaacgtgataacaataatagtaatatgaaatatttattaaattttttataattaatctctgctagaaaatttgattaatcatttttagtagaatttgttttttctcaactaggttttaaaacaccaca

SEQ ID NO: 837 - DNA, 592 bp, Artificial
  Mutations within GlyA3B4 introduced by GmGlyA3B4_T01TALE nuclease
gttcatgtacggttgcagatataaacgaagcatagcttatgtatgaggtgtaacaaaattggaaacaatagccatgcaaggtgaagaatgtcaccaactcagaaacccttcttcattgacgtgtccctcactcactctcctctcttcactataaatcgccactcttcgtgttctccacttcaccaactccttcaaacttattaacactttccttagttcaatatggggaagcccttcttcactctctctctttcttccctttgcttgctttgtcgagtgcatgctttgctattacctccagcaagttcaacgagtgccaactcaacaacctcaacgcgttggaacccgaccaccgcgttgagtccgaaggtggtcttattgaaacatggaactctcaacaccctgagctgcaatgcgccggtgtcactgtttccaaacgcaccctcaaccgcaacggcctccacttgccatcttactcaccttatcccccaaatgatcattgtcgttcaaggtgcgtaaatattagtaagaagtatttatcagcttaacgtgataacaataatagtaatatgaaatatttattaaatttttt

SEQ ID NO: 838 - DNA, 551 bp, Artificial
  Mutations within GlyA3B4 introduced by GmGlyA3B4_T01TALE nuclease
gttcatgtacggttgcagatataaacgaagcatagcttatgtatgaggtgtaacaaaattggaaacaatagccatgcaaggtgaagaatgtcaccaactcagaaacccttcttcattgacgtgtccctcactcactctcctctcttcactataaatcgccactcttcgtgttctccacttcaccaactccttcaaacttattaacactttccttagttcaatatggggaagcccttcttcactctctctctttcttccctttgctattacctccagcaagttcaacgagtgccaactcaacaacctcaacgcgttggaacccgaccaccgcgttgagtccgaaggtggtcttattgaaacatggaactctcaacaccctgagctgcaatgcgccggtgtcactgttttccaaacgcaccctcaaccgcaacggcctccacttgccatcttactcaccttatccccaaatgatcattgtcgttcaaggtgcgtaatattagtaagaagtatttatcagcttaacgtgataacaataatagtaatatgaaata

SEQ ID NO: 839 - DNA, 591 bp, Artificial
  Mutations within GlyA3B4 introduced by GmGlyA3B4_T01TALE nuclease
gttcatgtacggttgcagatataaacgaagcatagcttatgtatgaggtgtaacaaaattggaaacaatagccatgcaaggtgaagaatgtcaccaactcagaaacccttcttcattgacgtgtccctcactcactctcctctcttcactataaatcgccactcttcgtgttctccacttcaccaactccttcaaacttattaacactttccttagttcaatatggggaagcccttcttcactctctctctttcttccctttgcttgcttcgagtgcatgctttgctattacctccagcaagttcaacgagtgccaactcaacaacctcaacgcgttggaacccgaccaccgcgttgagtccgaaggtggtcttattgaaacatggaactctcaacaccctgagctgcaatgcgccggtgtcactgtttccaaacgcaccctcaaccgcaacggcctccacttgccatcttactcaccttatccccaaatgatcattgtcgttcaaggtgcgtaatattagtaagaagtatttatcagcttaacgtgataacaataatagtaatatgaaatatttattaaattttttataa

SEQ ID NO: 840 - DNA, 662 bp, Artificial
  Mutations within GlyA3B4 introduced by GmGlyA3B4_T01TALE nuclease
gttcatgtacggttgcagatataaacgaagcatagcttatgtatgaggtgtaacaaaattggaaacaatagccatgcaaaggtgaagaatgtcaccaactcagaaacccttcttcattgacgtgtccctcactcactctcctctcttcactataaatcgccactcttcgtgttctccacttcaccaactccttcaaacttattaacactttccttagttcaatatggggaagcccttcttcactctctctctttcttccctttgcttgctacactcttgtcgagtgcatgctttgctattacctccagcaagttcaacgagtgccaactcaacaacctcaacgcgttggaacccgaccaccgcgttgagtccgaaggtggtcttattgaaacatggaactctcaacaccctgagctgcaatgcgccggtgtcactgtttccaaacgcaccctcaaccgcaacggcctccacttgccatcttactcaccttatccccaaatgatcattgtcgttcaaggtgcgtaatattagtaagagtatttatcagcttaacgtgataacaatatagtaatatgaaatatttattaaatttttataattaatctctgctagaaaatttgattaatcattttagtagaatttgttttctcaactaggttttt

SEQ ID NO: 841 - DNA, 511 bp, Artificial
  Mutations within GlyA3B4 introduced by GmGlyA3B4_T01TALE nuclease
gttcatgtacggttgcagatataaacgaagcatagcttatgtatgaggtgtaacaaaattggaaacaatagccatgcaaggtgaagaatgtcaccaactcagaaacccttcttcattgtcgagtgcatgctttgctttacctccagcaattcaacgagtgccaactcaagcaacctcaacgcgttggaacccgaccaccgcgttgagtccgaaggtggtcttattgaacatggaactctcaacaccctgagctgcaatgcgccggtgtcactgtttccaaacgcaccctcaaccgcaacggcctccacttgccatcttactcaccttatccccaaatgatcattgtcgttcaaggtgcgtaatattagtaagaagtatttatcagcttaacgtgataacaataatagtaatatgaaatatttattaaattttttataattaatctctgctagaaaatttgattaatcatttttagtagaatttgtttttctcaactaggttttaaacacca

SEQ ID NO: 842 - DNA, 612 bp, Artificial
  Mutations within GlyA3B4 introduced by GmGlyA3B4_T01TALE nuclease
gttcatgtacggttgcagatataaacgaagcatagcttatgtatgaggtgtaacaaaattggaaacaatagccatgcaaggtgaagaatgtcaccaactcagaaacccttcttcattgacgtgtccctcactcactctcctctcttcactataaatcgccactcttcgtgttctccacttcaccaactccttcaaacttattaacactttccttagttcaatatggggaagcccttcttcactctctctctttcttccctttgcttgctactactcttgtcgagtgcatgctttgctattacctccagcaagttcaacgagtgccaactcaacaacctcaacgcgtttggaacccgaccaccgcgttgagtccgaaggtggtcttattgaacatggaactctcaacaccctgagctgcaatgcgccggtgtcactgtttccaaacgcaccctcaaccgcaacggcctccacttgccatcttactcaccttatccccaaatgatcattgtcgttcaaggtgcgtatattagtaagaagtatttatcagcttaacgtgatacaataatagtaatatgaaatattattaaattttttataattaatctctgctag

SEQ ID NO: 843 - DNA, 626 bp, Artificial
  Mutations within GlyA3B4 introduced by GmGlyA3B4_T01TALE nuclease
gttcatgtacggttgcagatataaacgaagcatagcttatgtatgaggtgtaacaaaattggaaacaatagccatgcaaggtgaagaatgtcaccaactcagaaacccttcttcattgacgtgtccctcactcactctcctctcttcactataaatcgccactcttcgtgttctccacttcaccaactccttcaaacttattaacactttccttagttcaatatggggaagcccttcttgtcgagtgcatgctttgctattacctccagcaagttcaacgagtgccaactcaacaacctcaacgcgttggaacccgaccaccgcgttgagtccgaaggtggtcttattgaaacatggaactctcaacaccctgagctgcaatgcgccggtgtcactgtttccaaacgcaccctcaaccgcaacggcctccacttgccatcttactcaccttatccccaaatgatcattgtcgttcaaggtgcgtaatattagtaagaagtatttatcagcttaacgtgataacaataatagtaatatgaaatatttattaattttttataattaatctctgctagaaaatttgattaatcatttttagtagaatttgtttttctcaactaggtttt

SEQ ID NO: 844 - DNA, 656 bp, Artificial
  Mutations within GlyA3B4 introduced by GmGlyA3B4_T01TALE nuclease
gttcatgtacggttgcagatataaacgaagcatagcttatgtatgaggtgtaacaaaattggaaacaatagccatgcaaggtgaagaatgtcaccaactcagaaacccttcttcattgacgtgtccctcactcactctcctctcttcactataaatcgccactcttcgtgttctccacttcaccaactccttcaaacttattaacactttccttagttcaatatggggaagcccttcttcactctctctctttcttccctttgcttgctactactcttgtcgagtgcatgctttgctattacctccagcaagttcaacgagtgccaactcaacaacctcaacgcgttggaacccgaccaccgcgttgagtccgaaggtggtcttattgaaacatggaactctcaacaccctgagctgcaatgcgccggtgtcactgtttccaaacgcaccctcaaccgcaacggcctccacttgccatcttactcaccttatccccaaatgatcattgtcgttcaaggtgcgtaatattagtaagaagtatttatcagcttaacgtgataacaataatagtaatatgaaatatttattaaattttttataattaaatctctgctagaaaatttgattaatcatttttagtagaatttgtttttctc

SEQ ID NO: 845 - DNA, 609 bp, Artificial; identical to SEQ ID NO: 610
  Mutations within GlyA3B4 introduced by GmGlyA3B4_T01TALE nuclease

SEQ ID NO: 846 - DNA, 608 bp, Artificial
  Mutations within GlyA3B4 introduced by GmGlyA3B4_T01TALE nuclease
gttcatgtacggttgcagatataaacgaagcatagcttatgtatgaggtgtaacaaaattggaaacaatagccatgcaaggtgaagaatgtcaccaactcagaaacccttcttcattgacgtgtccctcactcactctcctctcttcactataaatcgccactcttcgtgttctccacttcaccaactccttcaaacttattaacactttccttagttcaatatggggaagcccttcttcactctctctctttcttgtcgagtgcatgctttgctattacctccagcaagttcaacgagtgccaactcaacaacctcaacgcgttggaacccgaccaccgcgttgagtccgaaggtggtcttattgaaacatggaactctcaacaccctgagctgcaatgcgccggtgtcactgtttccaaacgcaccctcaaccgcaacggcctccacttgccatcttactcaccttatccccaaatgatcattgtcgttcaaggtgcgtaatattagtaagaagtatttatcagcttaacgtgataacaataatagtaatatgaaatatttattaaattttttataattaatctctgctagaaaatttgattaatc

SEQ ID NO: 847 - DNA, 663 bp, Artificial
  Mutations within GlyA3B4 introduced by GmGlyA3B4_T01TALE nuclease
gttcatgtacggttgcagatataaacgaagcatagcttatgtatgaggtgtaacaaaattggaaacaatagccatgcaaggtgaagaatgtcaccaactcagaaacccttcttcattgacgtgtccctcactcactctcctctcttcactataaatcgccactcttcgtgttctccacttcaccaactccttcaaacttattaacactttccttagttcaatatggggaagcccttcttcactctctctctttcttccctttgctattacctcgagtgcatgctttgctattacctccagcaagttcaacgagtgccaactcaacaacctcaacgcgttggaacccgaccaccgcgttgagtccgaaggtggtcttattgaaacatggaactctcaacaccctgagctgcaatgcgccggtgtcactgtttccaaacgcaccctcaaccgcaacggcctccacttgccatcttactcaccttatccccaaatgatcattgtcgttcaaggtgcgtaatattagtaagagtatttatcagcttaacgtgataacaatatagtaatatgaaatatttattaaatttttataattaatctctgctagaaaatttgattaatcattttagtagaatttgtttttctcaactaggtttttaaacacca

SEQ ID NO: 848 - DNA, 604 bp, Artificial
  Mutations within GlyA3B4 introduced by GmGlyA3B4_T01TALE nuclease
gttcatgtacggttgcagatataaacgaagcatagcttatgtatgaggtgtaacaaaattggaaacaatagccatgcaaggtgaagaatgtcaccaactcagaaacccttcttcattgacgtgtccctcactcactctcctctcttcactataaatcgccactcttcgtgttctccacttcaccaactccttcaaacttattaacactttccttagttcaatatggggaagcccttcttcactctctctctttcttccctttgcttgctactactcttgtcgagtgcatgctttgctattacctccagcaagttcaacgagtgccaactcaacaacctcaacgcgttggaacccgaccaccgcgttgagtccgaaggtggtcttattgaaacatggaactctcaacacccctgagctgcaatgcgccggtgtcactgtttccaaacgcaccctcaaccgcaacggcctccacttgccatcttactcaccttatccccaaatgatcattgtcgttcaaggtgcgtaatattagtaagaagtatttatcagcttaacgtgataacaataatagtaatatgaaatatttattaaattttttataatt

SEQ ID NO: 849 - DNA, 671 bp, Artificial
  Mutations within GlyA3B4 introduced by GmGlyA3B4_T01TALE nuclease
gttcatgtacggttgcagatataaacgaagcatagcttatgtatgaggtgtaacaaaattggaaacaatagccatgcaaggtgaagaatgtcaccaactcagaaacccttcttcattgacgtgtccctcactcactctcctctcttcactataaatcgccactcttcgtgttctccacttcaccaactccttcaaacttattaacactttccttagttcaatatggggaagcccttcttcactctctctctttcttccctttgcttgctactactcttgtcgagtgcatgctttgctattacctccagcaagttcaacgagtgccaactcaacaacctcaacgcgttggaacccgaccaccgcgttgagtccgaaggtggtcttattgaacatggaactctcaacaccctgagctgcatgcgccgctgtcactgtttccaaacgcaccctcaaccgcaacggcctccacttgccatcttactcaccttatccccaaatgatcattgtcgttcaaggtgcgtatattagtaagaagtatttatcagcttaacgtgatacaataatagtaatatgaaatattattaaattttttataattaaatctctgctagaaaatttgatttaatcatttttagtagaatttgtttttctcaactaggttttaaacacca

SEQ ID NO: 850 - DNA, 546 bp, Artificial
  Mutations within GlyA3B4 introduced by GmGlyA3B4_T01TALE nuclease
gttcatgtacggttgcagatataaacgaagcatagcttatgtatgaggtgtaacaaaattggaaacaatagccatgcaaggtgaagaatgtcaccaactcagaaacccttcttcattgacgtgtccctcactcactctcctctcttcactataaatcgccactcttcgtgttctccacttcaccaactccttcaaacttattaacacttgtcgagtgcatgctttgctattacctccagcaagttcaacgagtgccaactcaacaacctcaacgcgttggaacccgaccaccgcgttgagtccgaaggtggtcttattgaaacatggaactctcaacaccctgagctgcaatgcgccggtgtcactgtttccaaacgcaccctcaaccgcaacggcctccacttgccatcttactcaccttatccccaaaatgatcattgtcgttcaaggtgcgtaatattagtaagaagtatttatcagcttaacgtgataacaataatagtaatatgaaatattattaaattttttataattaatctctgctag

SEQ ID NO: 851 - DNA, 652 bp, Artificial
  Mutations within GlyA3B4 introduced by GmGlyA3B4_T01TALE nuclease
gttcatgtacggttgcagatataaacgaagcatagcttatgtatgaggtgtaacaaaattggaaacaatagccatgcaaggtgaagaatgtcaccaactcagaaacccttcttcattgacgtgtccctcactcactctcctctcttcactataaatcgccactcttcgtgttctccacttcaccaactccttcaaacttattaacactttccttagttcaatatggggaagcccttcttcactctctctctttcttccctttgctgagtgcatgctttgctattacctccagcaagttcaacgagtgccaactcaacaacctcaacgcgttggaacccgaccaccgcgttgagtccgaaggtggtcttattgaaacatggaactctcaacaccctgagctgcaatgcgccggtgtcactgtttccaaacgcaccctcaaccgcaacggcctccaccttgccatcttactcacctttactcccccaaatgatcattgtcgttcaaggtgcgtaaatattagtaagaagtatttatcagcttaacgtgataacaataatagtaatatgaaatatttattaaattttttataattaatctctgctagaaaatttgattaatcatttttagtagaatttgttttttctcaactagg

SEQ ID NO: 852 - DNA, 641 bp, Artificial
  Mutations within GlyA3B4 introduced by GmGlyA3B4_T01TALE nuclease
gttcatgtacggttgcagatataaacgaagcatagcttatgtatgaggtgtaacaaaattggaaacaatagccatgcaaggtgaagaatgtcaccaactcagaaacccttcttcattgacgtgtccctcactcactctcctctcttcactataaatcgccactcttcgtgttctccacttcaccaactccttcaaacttattaacactttccttagttcaatatggggaagcccttcttcactctctctctttcttccctttgcttgctttgctattacctccagcaagttcaacgagtgccaactcaacaacctcaacgcgttggaacccgaccaccgcgttgagtccgaaggtggtcttattgaaacatggaactctcaacaccctgagctgcaatgcgccggtgtcactgtttccaaacgcaccctcaaccgcaacggcctccacttgccatcttactcaccttatccccaaatgatcattgtcgttcaaggtgcgtaatattagtaagaagtatttatcagcttaacgtgataacaataatagtaatatgaaatatttattaaattttttataattaattctctgctagaaaatttgattaatcatttttagtagaatttgttttttctcaactagg

SEQ ID NO: 853 - DNA, 612 bp, Artificial
  Mutations within GlyA3B4 introduced by GmGlyA3B4_T01TALE nuclease
gttcatgtacggttgcagatataaacgaagcatagcttatgtatggaggtgtaacaaaattggaaacaatagccatgcaaggtgaagaatgtcaccaactcagaaacccttcttcattgacgtgtccctcactcactctcctctcttcactataaatcgccactcttcgtgttctccacttcaccaactccttcaaacttattaacactttccttagttcaatatggggaagccaggccgaccgcatgctttgctattacctccagcaagttcaacgagtgccaactcaacaacctcaacgcgttggaaccgaccaccgcgttgagtccgaaggtggtcttattgaaacatggaactctcaacaccctgagctgcaatgcgccggtgtcactgtttccaaacgcaccctcaaccgcaacggcctccacttgccatcttactcaccttatccccaaatgatcattgtcgttcaaggtgcgtaatattagtaagaagtatttatcagcttaacgtgataacaataatagtaatatgaaatatttattaatttttataattaatctctgctagaaaatttgattaatcatttttagtagaatttgtttttctcaa

SEQ ID NO: 854 - DNA, 639 bp, Artificial
  Mutations within GlyA3B4 introduced by GmGlyA3B4_T01TALE nuclease
gttcatgtacggttgcagatataaacgaagcatagcttatgtatgaggtgtaacaaaattggaaacaatagccatgcaaggtgaagaatgtcaccaactcagaaacccttcttcattgacgtgtccctcactcactctcctctcttcactataaatcgccactcttcgtgttctccacttcaccaactccttcaaacttattaacactttccttagttcaatatggggaagcccttcttcactctctctctttcttccctttgcttgctactactcttgtcgagtgcatgctttgctattacctccagcaagttcaacgagtgccaactcaacaacctcaacgcgttggaacccgaccaccgcgttgagtccgaaggtggtcttattgaaacatggaactctcaacaccctgagctgcaatgcgccggtgtcactgtttccaaacgcaccctcaaccgcaacggcctccacttgccatcttactcaccttatccccaaatgatcattgtcgttcaaggtgcgtaatattagtaagaagtatttatcagcttaacgtgatacaataatagtaatatgaaatattattaaattttttataattaatctctgctagaaaatttgattaatcatttttagtag

SEQ ID NO: 855 - DNA, 648 bp, Artificial
  Mutations within GlyA3B4 introduced by GmGlyA3B4_T01TALE nuclease
gttcatgtacggttgcagatataaacgaagcatagcttatgtatgaggtgtaacaaaattggaaacaatagccatgcaaggtgaagaatgtcaccaactcagaaacccttcttcattgacgtgtccctcactcactctcctctcttcactataaatcgccactcttcgtgttctccacttcaccaactccttcaaacttattaacactttccttagttcaatatggggaagcccttcttcactctctcttcgagtgcatgctttgctattacctccagcaagttcaacgagtgccaactcaacaacctcaacgcgttggaacccgaccaccgcgttgagtccgaaggtggtcttattgaaacatggaactctcaacacccctgagctgcaatgcgccggtgtcactgtttccaaacgcaccctcaaccgcaacggcctccacttgccatcttactcaccttatcccccaaatgatcattgtcgttcaaggtgcgtaatattagtaagaagtatttatcagcttaacgtgataacaataatagtaatatgaaatatttattaaattttttataattaatctcttgctagaaaatttgattaatcatttttagtagaatttgttttttctcaactaggttttaaacacca

SEQ ID NO: 856 - DNA, 600 bp, Artificial
  Mutations within GlyA3B4 introduced by GmGlyA3B4_T01TALE nuclease
gttcatgtacggttgcagatataaacgaagcatagcttatgtatgaggtgtaacaaaattggaaacaatagccatgcaaggtgaagaatgtcaccaactcagaaacccttcttcattgacgtgtccctcactcactctcctctcttcactataaatcgccactcttcgtgttctccacttcaccaactccttcaaacttattaacactttccttagttcaatatggggaagcccttcttcactctctctctttcttccctttgctgagtgcatgctttgctattacctccagcaagttcaacgagtgccaactcaacaacctcaacgcgttggaacccgaccaccgcgttgagtccgaaggtggtcttattgaaacatggaactctcaacaccctgagctgcaatgcgccggtgtcactgtttccaaacgcaccctcaaccgcaacggcctccacttgccatcttactcaccttatcccccaaatgatcattgtcgttcaaggtgcgtaatattagtaagaagtatttatcagcttaacgtgataacaataatagtaatatgaaatatttattaaattttttataattaatctctgctag

SEQ ID NO: 857 - DNA, 607 bp, Artificial; identical to SEQ ID NO: 553
  Mutations within GlyA3B4 introduced by GmGlyA3B4_T01TALE nuclease

SEQ ID NO: 858 - DNA, 649 bp, Artificial
  Mutations within GlyA3B4 introduced by GmGlyA3B4_T01TALE nuclease
gttcatgtacggttgcagatataaacgaagcatagcttatgtatgaggtgtaacaaaattggaaacaatagccatgcaaggtgaagaatgtcaccaactcagaaacccttcttcattgacgtgtccctcactcactctcctctcttcactataaatcgccactcttcgtgttctccacttcaccaactccttcaaacttattaacactttccttagttcaatatggggaagcccttcttcactctctctctttcttccctttgcttgctattacctccagcaagttcaacgagtgccaactcaacaacctcaacgcgttggaacccgaccaccgcgttgagtccgaaggtggtcttattgaaacatggaactctcaacaccctgagctgcaatgcgccggtgtcactgtttccaaacgcaccctcaaccgcaacggcctccacttgccatcttactcaccttatccccaaatgatcattgtcgttcaaggtgcgtaatattagtaagaagtatttatcagcttaacgtgataacaataatagtaatatgaaatatttattaaattttttataattaatctctgctagaaaatttgattaatcatttttagtagaatttgttttttctcaactaggttttaaacaccaca

SEQ ID NO: 859 - DNA, 642 bp, Artificial
  Mutations within GlyA3B4 introduced by GmGlyA3B4_T01TALE nuclease
gttcatgtacggttgcagatataaacgaagcatagcttatgtatgaggtgtaacaaaattggaaacaatagccatgcaaggtgaagaatgtcaccaactcagaaacccttcttcattgacgtgtccctcactcactctcctctcttcactataaatcgccactcttcgtgttctccacttcaccaactccttcaaacttattaacactttccttagttcaatatggggaagcccttcttcactctctctcatgctttgctattacctccagcaagttcaacgagtgccaactcaacaacctcaacgcgttggaacccgaccaccgcgttgagtccgaaggtggtcttattgaaacatggaactctcaacaccctgagctgcaatgcgccggtgtcactgttttccaaacgcaccctcaaccgcaacggcctccacttgccatcttactcaccttatcccccaaatgatcattgtcgttcaaggtgcgtaatattagtaagaagtatttatcagcttaacgtgataacaataatagtaatatgaaatatttattaaattttttataattaatctctgctagaaaatttgattaatcatttttagtagaatttgttttttctcaactaggttttaaacaccaca

SEQ ID NO: 860 - DNA, 571 bp, Artificial
  Mutations within GlyA3B4 introduced by GmGlyA3B4_T01TALE nuclease
gttcatgtacggttgcagatataaacgaagcatagcttatgtatgaggtgtaacaaaattggaaacaatagccatgcaaggtgaagaatgtcaccaactcagaaacccttcttcattgacgtgtccctcactcactctcctctcttcactataaatcgccactcttcgtgttctccacttcaccaactccttcaaacttattaacactttccttagttcaatatggggaagcccttcttcactctctctctttcttccctttgcttgccccgaccaccgcgttgagtccgaaggtggtcttattgaaacatggaactctcaacaccctgagctgcaatgcgccggtgtcactgtttccaaacgcaccctcaaccgcaacggcctccacttgccatcttactcaccttatccccaaaatgatcattgtcgttcaaggtgcgtaatattagtaagaagtatttatcagcttaacgtgataacaataatagtaatatgaaatatttattaaattttttataattaatctctgctagaaaattgattaatcattttagtagaatttgtttttctc

SEQ ID NO: 861 - DNA, 667 bp, Artificial
  Mutations within GlyA3B4 introduced by GmGlyA3B4_T01TALE nuclease
gttcatgtacggttgcagatataaacgaagcatagcttatgtatgaggtgtaacaaaattggaaacaatagccatgcaaggtgaagaatgtcaccaactcagaaacccttcttcattgacgtgtccctcactcactctcctctcttcactataaatcgccactcttcgtgttctccacttcaccaactccttcaaacttattaacactttccttagttcaatatggggaagcccttcttcactctctctctttcttccctttgctttgtcgagtgcatgctttgctattacctccagcaagttcaacgagtgccaactcaacaacctcaacgcgttggaacccgaccaccgcgttgagtccgaaggtggtcttattgaaacatggaactctcaacaccctgagctgcaatgcgccggtgtcactgtttccaaacgcaccctcaaccgcaacggcctccacttgccatcttactcaccttatcccccaaatgatcattgtcgttcaaggtgcgtaatattagtaagaagtatttatcagcttaacgtgataacaataatagtaatatgaaatatttattaaattttttataattaatctctgctagaaaatttgattaatctttttagtagaatttgttttttctcaactaggttttaaaacaccaca

SEQ ID NO: 862 - DNA, 734 bp, Artificial
  Mutations within GlyA3B4 introduced by GmGlyA3B4_T01TALE nuclease
gttcatgtacggttgcagatataaacgaagcatagcttatgtatgaggtgtaacaaaattggaaacaatagccatgcaaggtgaagaatgtcaccaactcagaaacccttcttcattgacgtgtccctcactcactctcctctcttcactataaatcgccactcttcgtgttctccacttcaccaactccttcaaacttattaacactttccttagttcaatatggggaagcccttcttcactctctctctttcttccctttgcttgctgctctgatgccgcatagttaagccagccccgacacccgccaacacccgctgacgcgccctgacgggcttgtctgctactcttgtcgagtgcatgctttgctattacctccagcaagttcaacgagtgccaactcaacaacctcaacgcgttggaacccgaccaccgcgttgagtccgaaggtggtcttattgaaacatggaactctcaacaccctgagctgcaatgcgccggtgtcactgtttccaaacgcaccctcaaccgcaacggcctccacttgccatcttactcaccttatcccaaatgatcattgtcgttcaaggtgcgtaatattagtaagaagtatttatcgcttaacgtgataacaataatagtaatatgaaaatatttattaaattttttataattaatctctgctagaaaatttgattaatcatttttagtagaatttgtttttctcaactagg

SEQ ID NO: 863 - DNA, 628 bp, Artificial
  Mutations within GlyA3B4 introduced by GmGlyA3B4_T01TALE nuclease
gttcatgtacggttgcagatataaacgaagcatagcttatgtatgaggtgtaacaaaattggaaacaatagccatgcaaggtgaagaatgtcaccaactcagaaacccttcttcattgacgtcgtccctcactcactctcctctcttcactataaatcgccactcttcgtgttctccacttcaccaactccttcaaacttattaacactttccttagttcaatatggggaagcccttcttcactctctctctttcttccctttgcttgtcgagtgcatgctttgctattacctccagcaagttcaacgagtgccaactcaacaacctcaacgcgttggaacccgaccaccgcgttgagtccgaaggtggtcttattgaaacatggaactctcaacaccctgagctgcaatgcgccggtgtcactgtttccaaacgcaccctcaaccgcaacggcctccacttgccatcttactcaccttatccccaaatgatcattgtcgttcaaggtgcgtaaatattagtaagaagtatttatcagcttaacgtgataacaataatagtaatatgaaatatttattaaattttttataattaatctctgctagaaaatttgattaatcatttttag

SEQ ID NO: 864 - DNA, 653 bp, Artificial
  Mutations within GlyA3B4 introduced by GmGlyA3B4_T01TALE nuclease
gttcatgtacggttgcagatataaacgaagcatagcttatgtatgaggtgtaacaaaattggaaacaatagccatgcaaggtgaagaatgtcaccaactcagaaacccttcttcattgacgtgtccctcactcactctcctctcttcactataaatcgccactcttcgtgttctccacttcaccaactccttcaaacttattaacactttccttagttcaatatggggaagcccttcttcactctctctcttgtcgagtgcatgctttgctattacctccagcaagttcaacgagtgccaactcaacaacctcaacgcgttggaacccgaccaccgcgttgagtccgaaggtggtcttattgaaacatggaactctcaacaccctgagctgcaatgcgccggtgtcactgtttccaaacgcaccctcaaccgcaacggcctccacttgccatcttactcaccttatcccccaaatgatcattgtcgttcaaggtgcgtaatattagtaagaagtatttatcagcttaacgtgataacaataatagtaatatgaaatatttattaaattttttataattaatctctgctagaaaatttgattaatcatttttagtagaatttgttttttctcaactaggttttaaaacaccaca

SEQ ID NO: 865 - DNA, 667 bp, Artificial
  Mutations within GlyA3B4 introduced by GmGlyA3B4_T01TALE nuclease
gttcatgtacggttgcagatataaacgaagcatagcttatgtatgaggtgtaacaaaaattggaaacaatagccatgcaaggtgaagaatgtcaccaactcagaaacccttcttcattgacgtgtccctcactcactctcctctcttcactataaatcgccactcttcgtgttctccacttcaccaactccttcaaacttattaacactttccttagttcaatatggggaagcccttcttcactctctctctttcttccctttgcttgctcttgtcgagtgcatgctttgctattacctccagcaagttcaacgagtgccaactcaacaacctcaacgcgttggaacccgaccaccgcgttgagtccgaaggtggtcttattgaaacatggaactctcaacaccctgagctgcaatgcgccggtgtcactgtttccaaacgcaccctcaaccgcaacggcctccacttgccatcttactcaccttatccccaaatgatcattgtcgttcaaggtgcgtaatattagtaagagtatttatcagcttaacgtgataacaatatagtaatatgaaatatttattaaatttttataattaatctctgctagaaaatttgattaatcattttagtagaatttgtttttctcaactaggtttttaaaacacca

SEQ ID NO: 866 - DNA, 622 bp, Artificial
  Mutations within GlyA3B4 introduced by GmGlyA3B4_T01TALE nuclease
gttcatgtacggttgcagatataaacgaagcatagcttatgtatgaggtgtaacaaaattggaaacaatagccatgcaaggtgaagaatgtcaccaactcagaaacccttcttcattgacgtgtccctcactcactctcctctcttcactataaatcgccactcttcgtgttctccacttcaccaactccttcaaacttattaacactttccttagttcaatatggggaagcccttcttcactctctctctttcttccctttgcttgctactactcttgtcgagtgcatgctttgctattacctccagcaagttcaacgagtgccaactcaacaacctcaacgcgttggaacccgaccaccgcgttgagtccgaaggtggtcttattgaacatggaactctcaacaccctgagctgcaatgcgccggtgtcactgtttccaaacgcaccctcaaccgcaacggcctccacttgccatcttactcaccttatccccaaatgatcattgtcgttcaaggtgcgtatattagtaagaagtatttatcagcttaacgtgatacaataatagtaatatgaaatatttattaaaattttttataattaatctctgctagaaaatttga

SEQ ID NO: 867 - DNA, 592 bp, Artificial
  Mutations within GlyA3B4 introduced by GmGlyA3B4_T01TALE nuclease
gttcatgtacggttgcagatataaacgaagcatagcttatgtatgaggtgtaacaaaattggaaacaatagccatgcaaggtgaagaatgtcaccaactcagaaacccttcttcattgacgtgtccctcactcactctcctctcttcactataaatcgccactcttcgtgttctccacttcaccaactccttcaaacttattaacactttccttagttcaatatggggaagcccttcttcactctctctctttcttccctttgcttgtcgagtgcatgctttgctattacctccagcaagttcaacgagtgccaactcaacaacctcaacgcgttggaacccgaccaccgcgttgagtccgaaggtggtcttattgaaacatggaactctcaacaccctgagctgcaatgcgccggtgtcactgtttccaaacgcaccctcaaccgcaacggcctccacttgccatcttactcaccttatccccaaatgatcattgtcgttcaaggtgcgtaaatattagtaagaagtatttatcagcttaacgtgataacaataatagtaatatgaaatatttattaaattttttataatt

SEQ ID NO: 868 - DNA, 605 bp, Artificial; identical to SEQ ID NO: 734
  Mutations within GlyA3B4 introduced by GmGlyA3B4_T01TALE nuclease

SEQ ID NO: 869 - DNA, 442 bp, Artificial; identical to SEQ ID NO: 513
  Mutations within GlyA3B4 introduced by GmGlyA3B4_T01TALE nuclease

SEQ ID NO: 870 - DNA, 560 bp, Artificial
  Mutations within GlyA3B4 introduced by GmGlyA3B4_T01TALE nuclease
gttcatgtacggttgcagatataaacgaagcatagcttatgtatgaggtgtaacaaaattggaaacaatagccatgcaaggtgaagaatgtcaccaactcagaaacccttcttcattgacgtgtccctcactcactctcctctcttcactataaatcgccactcttcgtgttctccacttcaccaactccttcaaacttattaacactttccttagttcaatatggggaagcccttcttcactctctctctttcttccctttgcttgctactactcttgtcgagtgcatgctttgctattacctccagcaagttcaacgagtgccaactcaacaacctcaacgcgttggaacccgaccaccgcgttgagtccgaaggtggtcttattgaaacatggaactctcaacacccctgagctgcaatgcgccggtgtcactgtttccaaacgcaccctcaaccgcaacggcctccacttgccatcttactcaccttatccccaaatgatcattgtcgttcaaggtgcgtaatattagtaagaagtatttatcagcttaacgtgat

SEQ ID NO: 871 - DNA, 598 bp, Artificial
  Mutations within GlyA3B4 introduced by GmGlyA3B4_T01TALE nuclease
gttcatgtacggttgcagatataaacgaagcatagcttatgtatgaggtgtaacaaaattggaaacaatagccatgcaaggtgaagaatgtcaccaactcagaaacccttcttcattgacgtgtccctcactcactctcctctcttcactataaatcgccactcttcgtgttctccacttcaccaactccttcaaacttattaacactttccttagttcaatatggggaagcccttcttcactctctctctttcttccctttgcttgctttgtcgagtgcatgctttgctattacctccagcaagttcaacgagtgccaactcaacaacctcaacgcgttggaacccgaccaccgcgttgagtccgaaggtggtcttattgaaacatggaactctcaacaccctgagctgcaatgcgccggtgtcactgtttccaaacgcaccctcaaccgcaacggcctccacttgccatcttactcaccttatcccccaaatgatcattgtcgttcaaggtgcgtaaatattagtaagaagtatttatcagcttaacgtgataacaataatagtaatatgaaatatttattaaattttttataatt

SEQ ID NO: 872 - DNA, 442 bp, Artificial; identical to SEQ ID NO: 513
  Mutations within GlyA3B4 introduced by GmGlyA3B4_T01TALE nuclease

SEQ ID NO: 873 - DNA, 653 bp, Artificial
  Mutations within GlyA3B4 introduced by GmGlyA3B4_T01TALE nuclease
gttcatgtacggttgcagatataaacgaagcatagcttatgtatgaggtgtaacaaaattggaaacaatagccatgcaaggtgaagaatgtcaccaactcagaaacccttcttcattgacgtgtccctcactcactctcctctcttcactataaatcgccactcttcgtgttctccacttcaccaactccttcaaacttattaacactttccttagttcaatatggggaagcccttcttcactctctctctttcttccctttgcttcgagtgcatgctttgctattacctccagcaagttcaacgagtgccaactcaacaacctcaacgcgttggaacccgaccaccgcgttgagtccgaaggtggtcttattgaaacatggaactctcaacaccctgagctgcaatgcgccggtgtcactgtttccaaacgcaccctcaaccgcaacggcctccacttgccatcttactcaccttatccccaaatgatcattgtcgttcaaggtgcgtaatattagtaagaagtatttatcagcttaacgtgataacaataatagtaatatgaaatatttattaaattttttataattaatctctgctagaaaatttgattaatcatttttagtagaatttgttttttctcaactaggtttt

SEQ ID NO: 874 - DNA, 614 bp, Artificial
  Mutations within GlyA3B4 introduced by GmGlyA3B4_T01TALE nuclease
gttcatgtacggttgcagatataaacgaagcatagcttatgtatgaggtgtaacaaaattggaaacaatagccatgcaaggtgaagaatgtcaccaactcagaaacccttcttcattgacgtgtccctcactcactctcctctcttcactataaatcgccactcttcgtgttctccacttcaccaactccttcaaacttattaacactttccttagttcaatatggggaagcccttcttcactctctctctttcttccctttacaacctcaacgagtgccaactcaacaacctcaacgcgttggaacccgaccaccgcgttgagtccgaaggtggtcttattgaaacatggaactctcaacaccctgagctgcaatgcgccggtgtcactgtttccaaacgcaccctcaaccgcaacggcctccacttgccatcttactcaccttatccccaaatgatcattgtcgttcaaggtgcgtaatattagtaagaagtatttatcagcttaacgtgataacaataatagtaatatgaaatatttattaatttttataattaatctctgctagaaatttgattaatcatttttagtagaatttgtttttctcaactagg

SEQ ID NO: 875 - DNA, 659 bp, Artificial
  Mutations within GlyA3B4 introduced by GmGlyA3B4_T01TALE nuclease
gttcatgtacggttgcagatataaacgaagcatagcttatgtatgaggtgtaacaaaattggaaacaatagccatgcaaggtgaagaatgtcaccaactcagaaacccttcttcattgacgtgtccctcactcactctcctctcttcactataaatcgccactcttcgtgttctccacttcaccaactccttcaaacttattaacactttccttagttcaatatggggaagcccttcttcactctctctctttcttccctttgcttttgtcgagtgcatgctttgctattacctccagcaagttcaacgagtgccaactcaacaacctcaacgcgttggaacccgaccaccgcgttgagtccgaaggtggtcttattgaaacatggaactctcaacaccctgagctgcaatgcgccggtgtcactgtttccaaacgcaccctcaaccgcaacggcctccacttgccaccttactcaccttatcccccaaatgatcattgtcgttcaaggtgcgtaaatattagtaagaagtatttatcagcttaacgtgataacaataatagtaatatgaaatatttattaaattttttataattaatctctgctagaaaatttgattaatcatttttagtagaatttgttttttctcaactaggtttt

SEQ ID NO: 876 - DNA, 604 bp, Artificial; identical to SEQ ID NO: 673
  Mutations within GlyA3B4 introduced by GmGlyA3B4_T01TALE nuclease

SEQ ID NO: 877 - DNA, 668 bp, Artificial
  Mutations within GlyA3B4 introduced by GmGlyA3B4_T01TALE nuclease
gttcatgtacggttgcagatataaacgaagcatagcttatgtatgaggtgtaacaaaattggaaacaatagccatgcaaggtgaagaatgtcaccaactcagaaacccttcttcattgacgtgtccctcactcactctcctctcttcactataaatcgccactcttcgtgttctccacttcaccaactccttcaaacttattaacactttccttagttcaatatggggaagcccttcttcactctctctctttcttccctttgctatacctcgtagctgcatgcttttgctattacctccagcaagttcaacgagtgccaactcaacaacctcaacgcgttggaacccgaccaccgcgttgagtccgaaggtggtcttattgaaacatggaactctcaacaccctgagctgcaatgcgccggtgtcactgtttccaaacgcaccctcaaccgcaacggcctccacttgccatcttactcaccttatccccaaatgatcattgtcgttcaaggtgcgtaatattagtaagaagtatttatcagcttaacgtgataacaataatagtaatatgaaatatttattaaatttttataattaatctctgctagaaaatttgattaatcattttagtagaatttgtttttctcaactaggtttttaaaacacca

SEQ ID NO: 878 - DNA, 638 bp, Artificial
  Mutations within GlyA3B4 introduced by GmGlyA3B4_T01TALE nuclease
gttcatgtacggttgcagatataaacgaagcatagcttatgtatgaggtgtaacaaaattggaaacaatagccatgcaaggtgaagaatgtcaccaactcagaaacccttcttcattgacgtgtccctcactcactctcctctcttcactataaatcgccactcttcgtgttctccacttcaccaactccttcaaacttattaacactttccttagttcaatatggggaagcccttcttcactctctctctttcttccctttgcttgctattgtcgagtgcatgctttgctattacctccagcaagttcaacgagtgccaactcaacaacctcaacgcgttggaacccgaccaccgcgttgagtccgaaggtggtcttattgaaacatggaactctcaacaccctgagctgcaatgcgccggtgtcactgtttccaaacgcaccctcaaccgcaacggcctccacttgccatcttactcaccttatccccaaatgatcattgtcgttcaaggtgcgtaatattagtaagagtatttatcagcttaacgtgataacaataatagtaatatgaaatatttattaaatttttataattaatctctgctagaaaatttgattaatcattttagtagaatttg

SEQ ID NO: 879 - DNA, 649 bp, Artificial
  Mutations within GlyA3B4 introduced by GmGlyA3B4_T01TALE nuclease
gttcatgtacggttgcagatataaacgaagcatagcttatgtatgaggtgtaacaaaattggaaacaatagccatgcaaggtgaagaatgtcaccaactcagaaacccttcttcattgacgtgtccctcactcactctcctctcttcactataaatcgccactcttcgtgttctccacttcaccaactccttcaaacttattaacactttccttagttcaatatggggaagcccttcttcactctctctctttcttccctttgcttgctacagcaccggcaacagccgctggaccgtctccagcgcctgcttgccgccatcgtggctggcgatggccaccacctgctccggggtcaagccgtgggcctggcacagcaccggcaacagccgctggactcttgtcgagtgcatgctttgctattacctccagcaagttcaacgagtgccaactcaacaacctcaacgcgttggaacccgaccaccgcgttgagtcccgaaggtggtcttattgaaacatggaactctcaacaccctgagctgcaatgcgccggtgtcactgtttccaaacgcaccctcaaccgcaacggcctccacttgccatcttactcaccttatccccaaatgatcattgtcgttcaaggtgcgtaat

SEQ ID NO: 880 - DNA, 706 bp, Artificial
  Mutations within GlyA3B4 introduced by GmGlyA3B4_T01TALE nuclease
gttcatgtacggttgcagatataaacgaagcatagcttatgtatgaggtgtaacaaaattggaaacaatagccatgcaaggtgaagaatgtcaccaactcagaaacccttcttcattgacgtgtccctcactcactctcctctcttcactataaatcgccactcttcgtgttctccacttcaccaactccttcaaacttattaacactttccttagttcaatatggggaagcccttcttcactctctctctttcttccctttgctcatcgccagcaatggcggtggcaagcaggcgctggagacggtccagcggctgttgccggtgctgtgccaggcccacggcttgaccccctgtcgagtgcatgctttgctattacctccagcaagttcaacgagtgccaactcaacaacctcaacgcgttggaacccgaccaccgcgttgagtccgaaggtggtcttattgaaacatggaactctcaacaccctgagctgcaatgcgccggtgtcactgtttccaaacgcaccctcaaccgcaacggcctccacttgccatcttactcaccttatccccaaatgatcattgtcgttcaaggtgcgtaatattagtaagaagtatttatcagcttaaccgtgataacaataatagtaatatgaaatatttattaaattttttataattaatctctgctagaaaaatttgattaa

SEQ ID NO: 881 - DNA, 512 bp, Artificial
  Mutations within GlyA3B4 introduced by GmGlyA3B4_T01TALE nuclease
gttcatgtacggttgcagatataaacgaagcatagcttatgtatgaggtgtaacaaaattggaaacaatagccatgcaaggtgaagaatgtcaccaactcagaaacccttcttcattgtcgagtgcatgctttgctattacctccagcaagttcaacgagtgccaactcaacaacctcaacgcgttggaacccgaccaccgcgttgagtccgaaggtggtcttattgaacatggaactctcaacaccctgagctgcaatgcgccggtgtcactgtttccaaacgcaccctcaaccgcaacggcctccacttgccatcttactcaccttatccccaaatgatcattgtcgttcaaggtgcgtaatattagtaagaagtatttatcagcttaacgtgataacaataatagtaatatgaaatatttattaaattttttataattaatctctgctagaaaatttgattaatcatttttagtagaatttgtttttctcaactaggttttaaacacca

SEQ ID NO: 882 - DNA, 622 bp, Artificial
  Mutations within GlyA3B4 introduced by GmGlyA3B4_T01TALE nuclease
gttcatgtacggttgcagatataaacgaagcatagcttatgtatgaggtgtaacaaaattggaaacaatagccatgcaaggtgaagaatgtcaccaactcagaaacccttcttcattgacgtgtccctcactcactctcctctcttcactataaatcgccactcttcgtgttctccacttcaccaactccttcaaacttattaacactttccttagttcaatatggggaagcccttcttcactctctctctttcttccctttgctttgtcgagtgcatgctttgctattacctccagcaagttcaacgagtgccaactcaacaacctcaacgcgttggaacccgaccaccgcgttgagtccgaaggtggtcttattgaaacatggaactctcaacaccctgagctgcaatgcgccggtgtcactgtttccaaacgcaccctcaaccgcaacggcctccacttgccatcttactcaccttatcccccaaatgatcattgtcgttcaaggtgcgtaaatattagtaagaagtatttatcagctttaacgtgataacaataatagtaatatgaaatatttattaaattttttataattaatctctgctagaaaatttgattaatc

SEQ ID NO: 883 - DNA, 652 bp, Artificial
  Mutations within GlyA3B4 introduced by GmGlyA3B4_T01TALE nuclease
  misc_feature (566): n is a or c or t or g
gttcatgtacggttgcagatataaacgaagcatagcttatgtatgaggtgtaacaaaattggaaacaatagccatgcaaggtgaagaatgtcaccaactcagaaacccttcttcattgacgtgtccctcactcactctcctctcttcactataaatcgccactcttcgtgttctccacttcaccaactccttcaaacttattaacactttccttagttcaatatggggaagcccttcttcactctctctctttcttccctttgcttgctctcgagtgcatgctttgctattacctccagcaagttcaacgagtgccaactcaacaacctcaacgcgttggaacccgaccaccgcgttgagtccgaaggtggtcttattgaaacatggaactctcaacaccctgagctgcaatgcgccggtgtcactgtttccaaacgcaccctcaaccgcaacggcctccacttgccatcttactcaccttatccccaaatgatcattgtcgttcaaggtgcgtaatattagtaagaagtatttatcagcttaacgtgataacaataatagtaatntgaaatatttattaaattttttataattaatctctgctagaaaatttgattaatctttttagtagaattgttttttctcaactagg

SEQ ID NO: 884 - DNA, 568 bp, Artificial
  Mutations within GlyA3B4 introduced by GmGlyA3B4_T01TALE nuclease
gttcatgtacggttgcagatataaacgaagcatagcttatgtatgaggtgtaacaaaattggaaacaatagccatgcaaggtgaagaatgtcaccaactcagaaacccttcttcattgacgtgtccctcactcactctcctctcttcactataaatcgccactcttcgtgttctccacttcaccaactccttcaaacttattaacactttccttagttcaatatggggaagccaggccgaccgcatgctttgctattacctccagcaagttcaacgagtgccaactcaacaacctcaacgcgttggaaccgaccaccgcgttgagtccgaaggtggtcttattgaaacatggaactctcaacaccctgagctgcaatgcgccggtgtcactgtttccaaacgcacctcaaccgcaacggcctccacttgccatcttactcaccttatcccccaaatgatcattgtcgttcaaggtgcgtaatattagtaagaagtatttatcagcttaacgtgataacaataatagtaatatgaatatttattaatttttataattaatctctgctag

SEQ ID NO: 885 - DNA, 667 bp, Artificial
  Mutations within GlyA3B4 introduced by GmGlyA3B4_T01TALE nuclease
gttcatgtacggttgcagatataaacgaagcatagcttatgtatgaggtgtaacaaaattggaaacaatagccatgcaaggtgaagaatgtcaccaactcagaaacccttcttcattgacgtgtccctcactcactctcctctcttcactataaatcgccactcttcgtgttctccacttcaccaactccttcaaacttattaacactttccttagttcaatatggggaagcccttcttcactctctctctttcttccctttgcttcttgtcgagtgcatgctttgctattacctccagcaagttcaacgagtgccaactcaacaacctcaacgcgttggaacccgaccaccgcgttgagtccgaaggtggtcttattgaaacatggaactctcaacaccctgagctgcaatgcgccggtgtcactgtttccaaacgcaccctcaaccgcaacggcctccacttgccatcttactcaccttatcccccaaatgatcattgtcgttcaaggtgcgtaatattagtaagaagtatttatcagcttaacgtgataacaataatagtaatatgaaatatttattaaattttttataattaatctctgctagaaaatttgattaatctttttagtagaattgttttttctcaactaggtttaaaacaccaca

SEQ ID NO: 886 - DNA, 717 bp, Artificial
  Mutations within GlyA3B4 introduced by GmGlyA3B4_T01TALE nuclease
gttcatgtacggttgcagatataaacgaagcatagcttatgtatgaggtgtaacaaaattggaaacaatagccatgcaaggtgaagaatgtcaccaactcagaaacccttcttcattgacgtgtccctcactcactctcctctcttcactataaatcgccactcttcgtgttctccacttcaccaactccttcaaacttattaacactttccttagttcaatatggggaagcccttcttcactctctctctttcttccctttgcttgctattcctaatttacccttgccttttctctttctctttcttccctttgtcttactcttgtcgagtgcatgctttgctattacctccagcaagttcaacgagtgccaactcaacaacctcaacgcgttggaacccgaccaccgcgttgagtccgaaggtggtcttattgaaacatggaactctcaacaccctgagctgcaatgcgccggtgtcactgtttccaaacgcaccctcaaccgcaacggcctccacttgccatcttactcaccttatccccaaatgatcattgtcgttcaaggtgcgtaatattagtaagaagtatttatcagcttaacgtgataacaataatagtaatatgaaatatttattaaatttttataattaatctctgctagaaaatttgattaatcatttttagtagaatttgttttttctcaactaggttttaaaa

SEQ ID NO: 887 - DNA, 536 bp, Artificial
  Mutations within GlyA3B4 introduced by GmGlyA3B4_T01TALE nuclease
gttcatgtacggttgcagatataaacgaagcatagcttatgtatgaggtgtaacaaaattggaaacaatagccatgcaaggtgaagaatgtcaccaactcagaaacccttcttcattgacgtgtccctcactcactctcctctcttcgagtgcatgctttgctattacctccagcaagttcaacgagtgccaactcaacaacctcaacgcgttggaacccgaccaccgcgttgagtccgaaggtggtcttattgaaacatggaactctcaacaccctgagctgcaatgcgccggtgtcactgtttccaaacgcacactcaaccgcaacggcctccacttgccatcttactcaccttatccccaaatgatcattgtcgttcaaggtgcgtaatattagtaagaagtattttatcagcttaacgtgataacaataatagtaatatgaaatatttattaaattttttataattaatctctgctagaaaatttgattaatcatttttagtagaatttgtttttctcaactaggtttaaac

SEQ ID NO: 888 - DNA, 620 bp, Artificial
  Mutations within GlyA3B4 introduced by GmGlyA3B4_T01TALE nuclease
gttcatgtacggttgcagatataaacgaagcatagcttatgtatgaggtgtaacaaaattggaaacaatagccatgcaaggtgaagaatgtcaccaactcagaaacccttcttcattgacgtgtccctcactcactctcctctcttcactataaatcgccactcttcgtgttctccacttcaccaactccttcaaacttattaacactttccttagttcaatatggggaagcccttcttcactctctctctttcttccctttgctttgtcgagtgcatgctttgctattacctccagcaagttcaacgagtgccaactcaacaacctcaacgcgttggaacccgaccaccgcgttgagtccgaaggtggtcttattgaaacatggaactctcaacaccctgagctgcaatgcgccggtgtcactgtttccaaacgcaccctcaaccgcaacggcctccacttgccatcttactcaccttatccccaaatgatcattgtcgttcaaggtgcgtaaatattagtaagaagtatttatcagcttaacgtgataacaataatagtaatatgaaatatttattaaattttttataattaatctctgctagaaaatttgattaatc

SEQ ID NO: 889 - DNA, 655 bp, Artificial
  Mutations within GlyA3B4 introduced by GmGlyA3B4_T01TALE nuclease
gttcatgtacggttgcagatataaacgaagcatagcttatgtatgaggtgtaacaaaattggaaacaatagccatgcaaggtgaagaatgtcaccaactcagaaacccttcttcattgacgtgtccctcactcactctcctctcttcactataaatcgccactcttcgtgttctccacttcaccaactccttcaaacttattaacactttccttagttcaatatggggaagcccttcttcactctctctctttcttccctttgcttgcttgtcgagtgcatgctttgctattacctccagcaagtttcaacgagtgccaactcaacaacctcaacgcgttggaacccgaccaccgcgttgagtccgaaggtggtcttattgaaacatggaactctcaacaccctgagctgcaatgcgccggtgtcactgtttccaaacgcaccctcaaccgcaacggcctccacttgccatcttactcaccttatcccccaaatgatcattgtcgttcaaggtgcgtaatattagtaagaagtatttatcagcttaacgtgataacaataatagtaatatgaaatatttattaaattttttataattaatctctgctagaaaatttgattaatctttttagtagaattgttttttctcaactagg

SEQ ID NO: 890 - DNA, 767 bp, Artificial
  Mutations within GlyA3B4 introduced by GmGlyA3B4_T01TALE nuclease
  misc_feature (701): n is a or c or t or g
gttcatgtacggttgcagatataaacgaagcatagcttatgtatgaggtgtaacaaaattggaaacaatagccatgcaaggtgaagaatgtcaccaactcagaaacccttcttcattgacgtgtccctcactcactctcctctcttcactataaatcgccactcttcgtgttctccacttcaccaactccttcaaacttattaacactttccttagttcaatatggggaagcccttcttcactctctctctttcttccctttgcttgctaccttttaaatatagatacaactactctaattctaattttttatttatagatgacgagacaataattaatttttttatacatcaaaacttagattaggagaaactcttctccaaataaagttagaagaaattacccttgtcgagtgcatgctttgctattacctccagcaagttcaacgagtgccaactcaacaacctcaacgcgttggaacccgaccaccgcgttgagtcccgaaggtggtcttattgaaacatggaactctcaacaccctgagctgcaatgcgccggtgtcactgtttccaaacgcaccctcaaccgcaacggcctccacttgccatcttactcaccttatccccaaaatgatcattgtcgttcaaggtgcgtaatattagtaagaagtatttcatcagcttaacgtgataacaataatngtaatatgaaatatttattaaattttttataataatctctgctagaaaatttgattaatcattttt

SEQ ID NO: 891 - DNA, 504 bp, Artificial
  Mutations within GlyA3B4 introduced by GmGlyA3B4_T01TALE nuclease
gttcatgtacggttgcagatataaacgaagcatagcttatgtatgaggtgtaacaaaattggaaacaatagccatgcaaggtgaagaatgtcaccaactcagaaacccttcttcattgacgtgtccctcactcactctcctctcttcactataaatcgccactcttcgagtgcatgctttgctattacctccagcaagttcaacgagtgccaactcaacaacctcaacgcgttggaacccgaccaccgcgttgagtccgaaggtggtcttattgaaacatggaactctcaacaccctgagctgcaatgcgccggtgtcactgtttccaaacgcaccctcaaccgcaacggcctccacttgccatcttactcaccttatcccccaaatgatcattgtcgttcaaggtgcgtaatattagtaagaagtatttatcagcttaacgtgataacaataatagtaatagaatatttattaaattttttataattaatctctgctagaaaa

SEQ ID NO: 892 - DNA, 657 bp, Artificial
  Mutations within GlyA3B4 introduced by GmGlyA3B4_T01TALE nuclease
gttcatgtacggttgcagatataaacgaagcatagcttatgtatgaggtgtaacaaaattggaaacaatagccatgcaaggtgaagaatgtcaccaactcagaaacccttcttcattgacgtgtccctcactcactctcctctcttcactataaatcgccactcttcgtgttctccacttcaccaactccttcaaacttattaacactttccttagttcaatatggggaagcccttcttcactctctctctttcttccctttgcttgctattgtcgagtgcatgctttgctattacctccagcaagttcaacgagtgccaactcaacaacctcaacgcgttggaacccgaccaccgcgttgagtccgaaggtggtcttattgaaacatggaactctcaacaccctgagctgcaatgcgccggtgtcactgtttccaaacgcaccctcaaccgcaacggcctccacttgccatcttactcaccttatccccaaatgatcattgtcgttcaaggtgcgtaatattagtaagagtatttatcagcttaacgtgataacaataatagtaatatgaaatatttattaaatttttataattaatctctgctagaaaatttgattaatcattttagtagaatttgtttttctcaactaggtttt

SEQ ID NO: 893 - DNA, 519 bp, Artificial
  Mutations within GlyA3B4 introduced by GmGlyA3B4_T01TALE nuclease
gttcatgtacggttgcagatataaacgaagcatagcttatgtatgaggtgtaacaaaattggaaacaatagccatgcaaggtgaagaatgtcaccaactcagaaacccttcttcattgacgtgtccctcactcactctcctctcttcactataaatcgccactcttcgtgttctccacttcaccaactccttcaaacttattaacactttccttagttcaatatggggaagcccttcttcactctctctctttcttccctttgctattacctccagcaagttcaacgagtgccaactcaacaacctcaacgcgttggaacccgaccaccgcgttgagtccgaaggtggtcttattgaaacatggaactctcaacacccctgagctgcaatgcgccggtgtcactgtttccaaacgcaccctcaaccgcaacggcctccacttgccatcttactcaccttatcccccaaatgatcattgtcgttcaaggtgcgtaatattagtaagaagtatttatcagc

SEQ ID NO: 894 - DNA, 646 bp, Artificial; identical to SEQ ID NO: 564
  Mutations within GlyA3B4 introduced by GmGlyA3B4_T01TALE nuclease

SEQ ID NO: 895 - DNA, 507 bp, Artificial
  Mutations within GlyA3B4 introduced by GmGlyA3B4_T01TALE nuclease
gttcatgtacggttgcagatataaacgaagcatagcttatgtatgaggtgtaacaaaattggaaacaatagccatgcaaggtgaagaatgtcaccaactcagaaacccttcttcattgtcgagtgcatgctttgctattacctccagcaagttcaacgagtgccaactcaacaacctcaacgcgttggaacccgaccaccgcgttgagtccgaaggtggtcttattgaaacatggaactctcaacaccctgagctgcaatgcgccggtgtcactgtttccaaacgcaccctcaaccgcaacggcctccacttgccatcttactcaccttatccccaaatgatcattgtcgttcaaggtgcgtaatattagtagaagtatttatcagcttaacgtgatacaatatagtaatatgaaatatttattaaattttttataattaaatctctgcctagaaaatttgattaatcatttttagtagaattgtttttctcaactaggtttaaaca

SEQ ID NO: 896 - DNA, 608 bp, Artificial
  Mutations within GlyA3B4 introduced by GmGlyA3B4_T01TALE nuclease
gttcatgtacggttgcagatataaacgaagcatagcttatgtatgaggtgtaacaaaattggaaacaatagccatgcaaggtgaagaatgtcaccaactcagaaacccttcttcattgacgtgtccctcactcactctcctctcttcactataaatcgccactcttcgtgttctccacttcaccaactccttcaaacttattaacactttccttagttcaatatggggaagcccttcttcactctctctctttcttccctttgcttgcttgtcgagtgcatgctttgctattacctccagcaagttcaacgagtgccaactcaacaacctcaacgcgttggaacccgaccaccgcgttgagtccgaaggtggtcttattgaaacatggaactctcaacaccctgagctgcaatgcgccggtgtcactgtttccaaacgcaccctcaaccgcaacggcctccacttgccatcttactcaccttatccccaaatgatcattgtcgttcaaggtgcgtaaatattagtaagaagtatttatcagcttaacgtgataacaataatagtaatatgaaatatttattaaattttttataattaatctctgctag

SEQ ID NO: 897 - DNA, 656 bp, Artificial
  Mutations within GlyA3B4 introduced by GmGlyA3B4_T01TALE nuclease
gttcatgtacggttgcagatataaacgaagcatagcttatgtatgaggtgtaacaaaattggaaacaatagccatgcaaggtgaagaatgtcaccaactcagaaacccttcttcattgacgtgtccctcactcactctcctctcttcactataaatcgccactcttcgtgttctccacttcaccaactccttcaaacttattaacactttccttagttcaatatggggaagcccttcttcactctctctctttcttgtcgagtgcatgctttgctattacctccagcaagttcaacgagtgccaactcaacaacctcaacgcgttggaacccgaccaccgcgttgagtccgaaggtggtcttattgaaacatggaactctcaacaccctgagctgcaatgcgccggtgtcactgtttccaaacgcaccctcaaccgcaacggcctccacttgccatcttactcaccttatccccaaatcgatcattgtcgttcaaggtgcgtaatattagtaagaagtatttatcagcttaacgtgataacaataatagtaatatgaaatatttattaaattttttataattaatctctgctagaaaatttgattaatctttttagtagaatttgttttttctcaactaggttttaaaacaccaca

SEQ ID NO: 898 - DNA, 664 bp, Artificial
  Mutations within GlyA3B4 introduced by GmGlyA3B4_T01TALE nuclease
gttcatgtacggttgcagatataaacgaagcatagcttatgtatgaggtgtaacaaaattggaaacaatagccatgcaaggtgaagaatgtcaccaactcagaaacccttcttcattgacgtgtccctcactcactctcctctcttcactataaatcgccactcttcgtgttctccacttcaccaactccttcaaacttattaacactttccttagttcaatatggggaagcccttcttcactctctctctttcttccctttgcttgtcgagtgcatgctttgctattacctccagcaagttcaacgagtgccaactcaacaacctcaacgcgttggaacccgaccaccgcgttgagtccgaaggtggtcttattgaaacatggaactctcaacaccctgagctgcaatgcgccggtgtcactgtttccaaacgcacctcaaccgcaacggcctccacttgccatcttactcaccttatccccaaatgatcattgtcgttcaaggtgcgtaatattagtaagaagtatttatcagcttaacgtgataacaataatagtaatatgaaatatttattaaattttttataattaatctctgctagaaaatttgattaatctttttagtagaatttgttttttctcaactaggttttaaaacaccaca

SEQ ID NO: 899 - DNA, 642 bp, Artificial
  Mutations within GlyA3B4 introduced by GmGlyA3B4_T01TALE nuclease
gttcatgtacggttgcagatataaacgaagcatagcttatgtatgaggtgtaacaaaattggaaacaatagccatgcaaggtgaagaatgtcaccaactcagaaacccttcttcattgacgtgtccctcactcactctcctctcttcactataaatcgccactcttcgtgttctccacttcaccaactccttcaaacttattaacactttccttagttcaatatggggaagcccttcttcactctctctctttcttccctttgctattacctccagcaagttcaacgagtgccaactcaacaacctcaacgcgttggaacccgaccaccgcgttgagtccgaaggtggtcttattgaaacatggaactctcaacaccctgagctgcaatgcgccggtgtcactgtttccaaaacgcaccctcaaccgcaacggcctcccacttgccatcttactcaccttatccccaaatcgatcattgtcgttcaaggtgcgtaaatattagtaagaagtatttatcagcttaacgtgataacaataatagtaatatgaaatatttattaaatttttataattaatctctgctagaaaatttgattaatcatttttagtagaatttgtttttctcaactaggttttaaaca

SEQ ID NO: 900 - DNA, 465 bp, Artificial
  Mutations within GlyA3B4 introduced by GmGlyA3B4_T01TALE nuclease
gttcatgtacggttgcagatataaacgaagcatagcttatgtatgaggtgtaacaaaattggaaacaatagccatgcaaggtgaagaatgtcaccaactcagaaacccttcttcattgacgtgtccctcactcactctcctctcttcactataaatcgccactcttcgtgttctccacttcaccaactccttcaaacttattaacactttccttagttcaatatggggaagcccttcttcactctctctctttcttccctttgcttgctactacttgccatcttactcaccttatccccaaatgatcattgtcgttcaaggtgcgtaatattagtaagaagtatttatcagcttaacgtgataacaataatagtaatatgaaatatttattaaattttttataattaatctctgctagaaaatttgattaatcatttttagtagaatttgtttttctcaactagg

SEQ ID NO: 901 - DNA, 653 bp, Artificial
  Mutations within GlyA3B4 introduced by GmGlyA3B4_T01TALE nuclease
gttcatgtacggttgcagatataaacgaagcatagcttatgtatgaggtgtaacaaaattggaaacaatagccatgcaaggtgaagaatgtcaccaactcagaaacccttcttcattgacgtgtccctcactcactctcctctcttcactataaatcgccactcttcgtgttctccacttcaccaactccttcaaacttattaacactttccttagttcaatatggggaagcccttcttcactctctctctttcttccctttgcttgctgtcgagtgcatgctttgctattacctccagcaagttcaacgagtgccaactcaacaacctcaacgcgttggaacccgaccaccgcgttgagtccgaaggtggtcttattgaaacatggaactctcaacaccctgagctgcaatgcgccggtgtcactgtttccaaacgcaccctcaaccgcaacggcctccacttgccatcttactcaccttatccccaaatgatcattgtcgttcaaggtgcgtaaatattagtaagaagtatttatcagcttaacgtgataacaataatagtaatatgaaatatttattaaattttttataattaatctctgctagaaaatttgattaatcatttttagtagaatttgttttttctcaacta

SEQ ID NO: 902 - DNA, 647 bp, Artificial
  Mutations within GlyA3B4 introduced by GmGlyA3B4_T01TALE nuclease
gttcatgtacggttgcagatataaacgaagcatagcttatgtatgaggtgtaacaaaattggaaacaatagccatgcaaggtgaagaatgtcaccaactcagaaacccttcttcattgacgtgtccctcactcactctcctctcttcactataaatcgccactcttcgtgttctccacttcaccaactccttcaaacttattaacactttccttagttcaatatggggaagcccttcttcactctctcttcgagtgcatgctttgctattacctccagcaagttcaacgagtgccaactcaacaacctcaacgcgttggaacccgaccaccgcgttgagtccgaaggtggtcttattgaaacatggaactctcaacacccctgagctgcaatgcgccggtgtcactgtttccaaacgcaccctcaaccgcaacggcctccacttgccatcttactcaccttatccccaaatgatcattgtcgttcaaggtgcgtaatattagtaagaagtatttatcagcttaacgtgataacaataatagtaatatgaaatatttattaaattttttataattaatctctgctagaaaatttgattaatcatttttagtagaatttgttttttctcaactaggttttaaaacacca

SEQ ID NO: 903 - DNA, 665 bp, Artificial
  Mutations within GlyA3B4 introduced by GmGlyA3B4_T01TALE nuclease
gttcatgtacggttgcagatataaacgaagcatagcttatgtatgaggtgtaacaaaattggaaacaatagccatgcaaggtgaagaatgtcaccaactcagaaacccttcttcattgacgtgtccctcactcactctcctctcttcactataaatcgccactcttcgtgttctccacttcaccaactccttcaaacttattaacactttccttagttcaatatggggaagcccttcttcactctctctctttcttccctttgcttgctacactcttgtcgagtgcatgctttgctattacctccagcaagttcaacgagtgccaactcaacaacctcaacgcgttggaacccgaccaccgcgttgagtccgaaggtggtcttattgaaacatggaactctcaacaccctgagctgcaatgcgccggtgtcactgtttccaaacgcaccctcaaccgcaacggcctccacttgccatcttactcaccttatccccaaatgatcattgtcgttcaaggtgcgtaatattagtaagagtatttatcagcttaacgtgataacaataatagtaatatgaaatatttattaaatttttataattaatctctgctagaaaatttgattaatcattttagtagaatttgttttctcaactaggttttaaaa

SEQ ID NO: 904 - DNA, 579 bp, Artificial
  Mutations within GlyA3B4 introduced by GmGlyA3B4_T01TALE nuclease
gttcatgtacggttgcagatataaacgaagcatagcttatgtatgaggtgtaacaaaattggaaacaatagccatgcaaggtgaagaatgtcaccaactcagaaacccttcttcattgacgtgtccctcactcactctcctctcttcactataaatcgccactcttcgtgttctccacttcaccaactccttcaaacttattaacactttccttagttcaatatggggaagcccttcttcactctctctctttcttccctttgcttgccccgaccaccgcgttgagtccgaaggtggtcttattgaaacatggaactctcaacaccctgagctgcaatgcgccggtgtcactgtttccaaacgcaccctcaaccgcaacggcctccacttgccatcttactcaccttatccccaaaatgatcattgtcgttcaaggtgcgtaatattagtaagaagtatttatcagcttaacgtgataacaataatagtaatatgaaatatttattaaattttttatattaatctctgctagaaaatttgattaatcatttttagtagaatttgtttttctcaactagg

SEQ ID NO: 905 - DNA, 641 bp, Artificial
  Mutations within GlyA3B4 introduced by GmGlyA3B4_T01TALE nuclease
gttcatgtacggttgcagatataaacgaagcatagcttatgtatgaggtgtaacaaaattggaaacaatagccatgcaaggtgaagaatgtcaccaactcagaaacccttcttcattgacgtgtccctcactcactctcctctcttcactataaatcgccactcttcgtgttctccacttcaccaactccttcaaacttattaacactttccttagttcaatatggggaagcccttcttcactctctctcttgtcgagtgcatgctttgctattacctccagcaagttcaacgagtgccaactcaacaacctcaacgcgttggaacccgaccaccgcgttgagtccgaaggtggtcttattgaaacatggaactctcaacaccctgagctgcaatgcgccggtgtcactgtttccaaacgcaccctcaaccgcaacggcctccacttgccatcttactcaccttatccccaaatgatcattgtcgttcaaggtgcgtaatattagtaagaagtatttatcagcttaacgtgataacaataatagtaatatgaaatatttattaaattttttataattaatctctgctagaaaatttgattaatcatttttagtagaatttgttttttctcaactaggtttt

SEQ ID NO: 906 - DNA, 634 bp, Artificial
  Mutations within GlyA3B4 introduced by GmGlyA3B4_T01TALE nuclease
gttcatgtacggttgcagatataaacgaagcatagcttatgtatgaggtgtaacaaaattggaaacaatagccatgcaaggtgaagaatgtcaccaactcagaaacccttcttcattgacgtgtccctcactcactctcctctcttcactataaatcgccactcttcgtgttctccacttcaccaactccttcaaacttattaacactttccttagttcaatatggggaagcccttcttgtcgagtgcatgctttgctattacctccagcaagttcaacgagtgccaactcaacaacctcaacgcgttggaacccgaccaccgcgttgagtccgaaggtggtcttattgaaacatggaactctcaacaccctgagctgcaatgcgccggtgtcactgtttccaaacgcaccctcaaccgcaacggcctccacttgccatcttactcaccttatccccaaatgatcattgtcgttcaaggtgcgtaatattagtaagaagtatttatcagcttaacgtgataacaataatagtaatatgaaatatttattaaattttttataattaatctctgctagaaaatttgattaatcatttttagtagaatttgtttttctcaactaggtttttaaaaca

SEQ ID NO: 907 - DNA, 656 bp, Artificial
  Mutations within GlyA3B4 introduced by GmGlyA3B4_T01TALE nuclease
gttcatgtacggttgcagatataaacgaagcatagcttatgtatgaggtgtaacaaaattggaaacaatagccatgcaaggtgaagaatgtcaccaactcagaaacccttcttcattgacgtgtccctcactcactctcctctcttcactataaatcgccactcttcgtgttctccacttcaccaactccttcaaacttattaacactttccttagttcaatatggggaagcccttcttcactctctctctttcttccctttgcttgctatgtcgagtgcatgctttgctattacctccagcaagttcaacgagtgccaactcaacaacctcaacgcgttggaacccgaccaccgcgttgagtccgaaggtggtcttattgaaacatggaactctcaacaccctgagctgcaatgcgccggtgtcactgtttccaaacgcaccctcaaccgcaacggcctccacttgccatcttactcaccttatccccaaatgatcattgtcgttcaaggtgcgtaatattagtaagagtatttatcagcttaacgtgataacaataatagtaatatgaaatatttattaaatttttataattaatctctgctagaaaatttgattaatcattttagtagaatttgtttttctcaactaggtttt

SEQ ID NO: 908 - DNA, 555 bp, Artificial
  Mutations within GlyA3B4 introduced by GmGlyA3B4_T01TALE nuclease
gttcatgtacggttgcagatataaacgaagcatagcttatgtatgaggtgtaacaaaattggaaacaatagccatgcaaggtgaagaatgtcaccaactcagaaacccttcttcattgacgtgtccctcactcactctcctctcttcactataaatcgccactcttcgtgttctccacttcaccaactccttcaaacttattaacactttccttatcaacaacctcaacgcgttggaacccgaccaccgcgttgagtccgaaggtggtcttattgaaacatggaactctcaacaccctgagctgcaatgcgccggtgtcactgtttccaaacgcaccctcaaccgcaacggcctccacttgccatcttactcaccttatccccaaatgatcattgtcgttcaaggtgcgtaatattagtaagaagtatttatcagcttaacgtgataacaataatagtaatatgaaatatttattaaattttttataattaatctctgctagaaaatttgattaatcattttagtagaatttgtttttctcaactaggttttaaa

SEQ ID NO: 909 - DNA, 651 bp, Artificial
  Mutations within GlyA3B4 introduced by GmGlyA3B4_T01TALE nuclease
  misc_feature (513): n is a or c or t or g
gttcatgtacggttgcagatataaacgaagcatagcttatgtatgaggtgtaacaaaattggaaacaatagccatgcaaggtgaagaatgtcaccaactcagaaacccttcttcattgacgtgtccctcactcactctcctctcttcactataaatcgccactcttcgtgttctccacttcaccaactccttcaaacttattaacactttccttagttcaatatggggaagcccttcttcactctctctctttcttccctttgcttttgtcgagtgcatgctttgctattacctccagcaagttcaacgagtgccaactcaacaacctcaacgcgttggaacccgaccaccgcgttgagtccgaaggtggtcttattgaaacatggaactctcaacaccctgagctgcaatgcgccggtgtcactgtttccaaacgcaccctcaaccgcaacggcctccacttgccatcttactcaccttatcccccaaatgatcattgtcgttcaaggtgcntaaatattagtaagaagtatttatcagcttaacgtgataacaataatagtaatatgaaatatttattaaattttttataattaatctctgctagaaaatttgattaatctttttagtagaattgttttttctcaacta

SEQ ID NO: 910 - DNA, 549 bp, Artificial
  Mutations within GlyA3B4 introduced by GmGlyA3B4_T01TALE nuclease
gttcatgtacggttgcagatataaacgaagcatagcttatgtatgaggtgtaacaaaattggaaacaatagccatgcaaggtgaagaatgtcaccaactcagaaacccttcttcattgacgtgtccctcactcactctcctctcttcactataaatcgccactcttcgtgttctccacttcaccaactccttcaaacttattaacactttccttatcaacaacctcaacgcgttggaacccgaccaccgcgttgagtccgaaggtggtcttattgaaacatggaactctcaacaccctgagctgcaatgcgccggtgtcactgtttccaaacgcaccctcaaccgcaacggcctccacttgccatcttactcaccttatccccaaatgatcattgtcgttcaaggtgcgtaatattagtaagaagtatttatcagcttaacgtgataacaataatagtaatatgaaatatttattaaattttttataattaatctctgctagaaaatttgattaatcatttttagtagaatttgtttttctcaactagg

SEQ ID NO: 911 - DNA, 558 bp, Artificial; identical to SEQ ID NO: 534
  Mutations within GlyA3B4 introduced by GmGlyA3B4_T01TALE nuclease

SEQ ID NO: 912 - DNA, 654 bp, Artificial
  Mutations within GlyA3B4 introduced by GmGlyA3B4_T01TALE nuclease
gttcatgtacggttgcagatataaacgaagcatagcttatgtatgaggtgtaacaaaattggaaacaatagccatgcaaggtgaagaatgtcaccaactcagaaacccttcttcattgacgtgtccctcactcactctcctctcttcactataaatcgccactcttcgtgttctccacttcaccaactccttcaaacttattaacactttccttagttcaatatggggaagcccttcttcactctctctctttcttccctttgcttgcttgtcgagtgcatgctttgctattacctccagcaagttcaacgagtgccaactcaacaacctcaacgcgttggaacccgaccaccgcgttgagtccgaaggtggtcttattgaaacatggaactctcaacacccctgagctgcaatgcgccggtgtcactgtttccaaacgcaccctcaaccgcaacggcctccacttgccatcttactcaccttatccccaaatgatcattgtcgttcaaggtgcgtaatattagtaagaagtatttatcagcttaacgtgataacaataatagtaatatgaaatatttattaaattttttataattaatctctgctagaaaatttgattaatctttttagtagaattgttttttctcaactagg

SEQ ID NO: 913 - DNA, 668 bp, Artificial
  Mutations within GlyA3B4 introduced by GmGlyA3B4_T01TALE nuclease
gttcatgtacggttgcagatataaacgaagcatagcttatgtatgaggtgtaacaaaattggaaacaatagccatgcaaggtgaagaatgtcaccaactcagaaaccccttcttcattgacgtgtccctcactcactctcctctcttcactataaatcgccactcttcgtgttctccacttcaccaactccttcaaacttattaacactttccttagttcaatatggggaagcccttcttcactctctctctttcttccctttgcttgctcttgtcgagtgcatgctttgctattacctccagcaagttcaacgagtgccaactcaacaacctcaacgcgttggaacccgaccaccgcgttgagtccgaaggtggtcttattgaaacatggaactctcaacaccctgagctgcaatgcgccggtgtcactgtttccaaacgcaccctcaaccgcaacggcctccacttgccatcttactcaccttatccccaaatgatcattgtcgttcaaggtgcgtaatattagtaagagtatttatcagcttaacgtgataacaatatagtaatatgaaatatttattaaatttttataattaatctctgctagaaaatttgattaatcattttagtagaatttgtttttctcaactaggtttttaaacaccaca

SEQ ID NO: 914 - DNA, 608 bp, Artificial; identical to SEQ ID NO: 546
  Mutations within GlyA3B4 introduced by GmGlyA3B4_T01TALE nuclease

SEQ ID NO: 915 - DNA, 637 bp, Artificial
  Mutations within GlyA3B4 introduced by GmGlyA3B4_T01TALE nuclease
gttcatgtacggttgcagatataaacgaagcatagcttatgtatgaggtgtaacaaaattggaaacaatagccatgcaaggtgaagaatgtcaccaactcagaaacccttcttcattgacgtgtccctcactcactctcctctcttcactataaatcgccactcttcgtgttctccacttcaccaactccttcaaacttattaacactttccttagttcaatatggggaagcccttcttcactctctcttcgagtgcatgctttgctattacctccagcaagttcaacgagtgccaactcaacaacctcaacgcgttggaacccgaccaccgcgttgagtccgaaggtggtcttattgaaacatggaactctcaacacccctgagctgcaatgcgccggtgtcactgttttccaaacgcaccctcaaccgcaacggcctccacttgccatcttactcaccttatcccccaaatgatcattgtcgttcaaggtgcgtaatattagtaagaagtatttatcagcttaacgtgataacaataatagtaatatgaaatatttattaaatttttttataattaatctctgctagaaaatttgattaatcatttttagtagaatttgttttttctcaactagg

SEQ ID NO: 916 - DNA, 618 bp, Artificial
  Mutations within GlyA3B4 introduced by GmGlyA3B4_T01TALE nuclease
gttcatgtacggttgcagatataaacgaagcatagcttatgtatgaggtgtaacaaaattggaaacaatagccatgcaaggtgaagaatgtcaccaactcagaaacccttcttcattgacgtgtccctcactcactctcctctcttcactataaatcgccactcttcgtgttctccacttcaccaactccttcaaacttattaacactttccttagttcaatatggggaagcccttcttcactctctctctttcttccctttgcttgcttgtcgagtgcatgctttgctattacctccagcaagttcaacgagtgccaactcaacaacctcaacgcgttggaacccgaccaccgcgttgagtccgaaggtggtcttattgaaacatggaactctcaacaccctgagctgcaatgcgccggtgtcactgtttccaaacgcaccctcaaccgcaacggcctccacttgccatcttactcaccttatccccaaatgatcattgtcgttcaaggtgcgtaatattagtaagaagtatttatcagcttaacgtgataacaataatagtaatatgaaatatttattaaattttttataattaatctctgctagaaaatttgatt

SEQ ID NO: 917 - DNA, 629 bp, Artificial
  Mutations within GlyA3B4 introduced by GmGlyA3B4_T01TALE nuclease
gttcatgtacggttgcagatataaacgaagcatagcttatgtatgaggtgtaacaaaattggaaacaatagccatgcaaggtgaagaatgtcaccaactcagaaacccttcttcattgacgtgtccctcactcactctcctctcttcactataaatcgccactcttcgtgttctccacttcaccaactccttcaaacttattaacactttccttagttcaatatggggaagccaggccgaccgcatgctttgctattacctccagcaagttcaacgagtgccaactcaacaacctcaacgcgttggaacccgaccaccgcgttgagtccgaaggtggtcttattgaaacatggaactctcaacaccctgagctgcaatgcgccggtgtcactgtttccaaacgcaccctcaaccgcaacggcctccacttgccatcttactcaccttatccccaaatgatcattgtcgttcaaggtgcgtaatattagtaagaagtatttatcagcttaacgtgatacaataatagtaatatgaaatatttattaattttttataattaatctctgctagaaaatttgattaatcattttttagtagaatttgtttttctcaactaggtttttaaaaca

SEQ ID NO: 918 - DNA, 604 bp, Artificial
  Mutations within GlyA3B4 introduced by GmGlyA3B4_T01TALE nuclease
gttcatgtacggttgcagatataaacgaagcatagcttatgtatgaggtgtaacaaaattggaaacaatagccatgcaaggtgaagaatgtcaccaactcagaaacccttcttcattgacgtgtccctcactcactctcctctcttcactataaatcgccactcttcgtgttctccacttcaccaactccttcaaacttattaacactttccttagttcaatatggggaagcccttcttcactctctctctttcttccctttgcttgcttcgagtgcatgctttgctattacctccagcaagttcaacgagtgccaactcaacaacctcaacgcgttggaacccgaccaccgcgttgagtccgaaggtggtcttattgaaacatggaactctcaacaccctgagctgcaatgcgccggtgtcactgtttccaaacgcaccctcaaccgcaacggcctccacttgccatcttactcaccttatcccccaaatgatcattgtcgttcaaggtgcgtaatattagtaagaagtatttatcagcttaacgtgataacaataatagtaatatgaaattatttattaaattttttataattaatctctgc

SEQ ID NO: 919 - DNA, 608 bp, Artificial
  Mutations within GlyA3B4 introduced by GmGlyA3B4_T01TALE nuclease
gttcatgtacggttgcagatataaacgaagcatagcttatgtatgaggtgtaacaaaattggaaacaatagccatgcaaggtgaagaatgtcaccaactcagaaacccttcttcattgacgtgtccctcactcactctcctctcttcactataaatcgccactcttcgtgttctccacttcaccaactccttcaaacttattaacactttccttagttcaatatggggaagcccttcttcactctctctctttcttccctttgctttcttgtcgagtgcatgctttgctattacctccagcaagttcaacgagtgccaactcaacaacctcaacgcgttggaacccgaccaccgcgttgagtccgaaggtggtcttattgaaacatggaactctcaacaccctgagctgcaatgcgccggtgtcactgtttccaaacgcaccctcaaccgcaacggcctccacttgccatcttactcaccttatccccaaatgatcattgtcgttcaaggtgcgtaaatattagtaagaagtatttatcagcttaacgtgataacaataatagtaatatgaaatatttattaaattttttataattaatctctgctag

SEQ ID NO: 920 - DNA, 645 bp, Artificial
  Mutations within GlyA3B4 introduced by GmGlyA3B4_T01TALE nuclease
gttcatgtacggttgcagatataaacgaagcatagcttatgtatgaggtgtaacaaaattggaaacaatagccatgcaaggtgaagaatgtcaccaactcagaaacccttcttcattgacgtgtccctcactcactctcctctcttcactataaatcgccactcttcgtgttctccacttcaccaactccttcaaacttattaacactttccttagttcaatatggggaagcccttcttcactctctctctttcttccctttgctattacctccagcaagttcaacgagtgccaactcaacaacctcaacgcgttggaacccgaccaccgcgttgagtccgaaggtggtcttattgaaacatggaactctcaacacccctgagctgcaatgcgccggtgtcactgtttccaaacgcaccctcaaccgcaacggcctccacttgccatcttactcaccttatccccaaatgatcattgtcgttcaaggtgcgtaatattagtaagaagtatttatcagcttaacgtgataacaataatagtaatatgaaatatttattaaattttttataattaatctctgctagaaaatttgattaatcatttttagtagaatttgttttttctcaactaggttttaaacaccac

SEQ ID NO: 921 - DNA, 563 bp, Artificial
  Mutations within GlyA3B4 introduced by GmGlyA3B4_T01TALE nuclease
gttcatgtacggttgcagatataaacgaagcatagcttatgtatgaggtgtaacaaaattggaaacaatagccatgcaaggtgaagaatgtcaccaactcagaaacccttcttcattgacgtgtccctcactcactctcctctcttcactataaatcgccactcttcgtgttctccacttcaccaactccttcaaacttattaacactttccttgtcgagtgcatgctttgctattacctccagcaagttcaacgagtgccaactcaacaacctcaacgcgttggaacccgaccaccgcgttgagtccgaaggtggtcttattgaaacatggaactctcaacaccctgagctgcaatgcgccggtgtcactgtttccaaacgcaccctcaaccgcaacggcctccacttgccatcttactcaccttatccccaaaatgatcattgtcgttcaaggtgcgtaatattagtaagaagtatttatcagcttaacgtgataacaataatagtaatatgaaatatttattaaattttttataattaatctctgctagaaaatttgatt

SEQ ID NO: 922 - DNA, 658 bp, Artificial
  Mutations within GlyA3B4 introduced by GmGlyA3B4_T01TALE nuclease
gttcatgtacggttgcagatataaacgaagcatagcttatgtatgaggtgtaacaaaattggaaacaatagccatgcaaggtgaagaatgtcaccaactcagaaacccttcttcattgacgtgtccctcactcactctcctctcttcactataaatcgccactcttcgtgttctccacttcaccaactccttcaaacttattaacactttccttagttcaatatggggaagcccttcttcactctctctctttcttccctttgcttgctatttgctattacctccagcaagttcaacgagtgccaactcaacaacctcaacgcgttggaacccgaccaccgcgttgagtccgaaggtggtcttattgaaacatggaactctcaacaccctgagctgcaatgcgccggtgtcactgtttccaaacgcaccctcaaccgcaacggcctccacttgccatcttactcaccttatcccccaaatgatcattgtcgttcaaggtgcgtaatattagtaagaagtatttatcagcttaacgtgataacaataatagtaatatgaaatatttattaaattttttataattaatctctgctagaaaatttgattaatcattttttagtagaatttgttttttctcaactaggttttaaacaccaca

SEQ ID NO: 923 - DNA, 598 bp, Artificial
  Mutations within GlyA3B4 introduced by GmGlyA3B4_T01TALE nuclease
gttcatgtacggttgcagatataaacgaagcatagcttatgtatgaggtgtaacaaaattggaaacaatagccatgcaaggtgaagaatgtcaccaactcagaaacccttcttcattgacgtgtccctcactcactctcctctcttcactataaatcgccactcttcgtgttctccacttcaccaactccttcaaacttattaacacttgtcgagtgcatgctttgctattacctccagcaagttcaacgagtgccaactcaacaacctcaacgcgttggaacccgaccaccgcgttgagtccgaaggtggtcttattgaaacatggaactctcaacaccctgagctgcaatgcgccggtgtcactgtttccaaacgcaccctcaaccgcaacggcctccacttgccatcttactcaccttatccccaaatgatcattgtcgttcaaggtgcgtaatattagtaagaagtatttatcagcttaacgtgataacaataatagtaatatgaaatatttattaaattttttataattaatctctgctagaaaatttgattaatcatttttagtagaatttgtttttctcaactaggttttt

SEQ ID NO: 924 - DNA, 667 bp, Artificial
  Mutations within GlyA3B4 introduced by GmGlyA3B4_T01TALE nuclease
gttcatgtacggttgcagatataaacgaagcatagcttatgtatgaggtgtaacaaaattggaaacaatagccatgcaaggtgaagaatgtcaccaactcagaaacccttcttcattgacgtgtccctcactcactctcctctcttcactataaatcgccactcttcgtgttctccacttcaccaactccttcaaacttattaacactttccttagttcaatatggggaagcccttcttcactctctctctttcttccctttgcttgctgtcgagtgcatgctttgctattacctccagcaagttcaacgagtgccaactcaacaacctcaacgcgttggaacccgaccaccgcgttgagtccgaaggtggtcttattgaaacatggaactctcaacaccctgagctgcaatgcgccggtgtcactgtttccaaacgcaccctcaaccgcaacggcctccacttgccatcttactcaccttatccccaaatgatcattgtcgttcaaggtgcgtaatattagtaagaagtatttatcagcttaacgtgataacaataatagtaatatgaaatatttattaaattttttataattaatctctgctagaaaatttgattaatcatttttagtagaatttgttttttctcaactaggttttaaaacacca

SEQ ID NO: 925 - DNA, 754 bp, Artificial
  Mutations within GlyA3B4 introduced by GmGlyA3B4_T01TALE nuclease
  misc_feature (678): n is a or c or t or g
gttcatgtacggttgcagatataaacgaagcatagcttatgtatgaggtgtaacaaaattggaaacaatagccatgcaaggtgaagaatgtcaccaactcagaaacccttcttcattgacgtgtccctcactcactctcctctcttcactataaatcgccactcttcgtgttctccacttcaccaactccttcaaacttattaacactttccttagttcaatatggggaagcccttcttcactctctctctttcttccctttgcttgctagcaggcgctggagacggtgcaggcgctgttgccggtgctgtgccaggcccacggcttgaccccccagcaggtggtggccatcgccagccacgatggctcttgtcgagtgcatgctttgctattacctccagcaagttcaacgagtgccactcaacaacctcaatgcgttggaacccgaccaccgcgttgagtccgaaggtggtcttattgaaacatggaactctcaacaccctgagctgcaatgcgccggtgtcactgtttccaaacgcaccctcaaccgcaacggcctccacttgccatcttactcaccttatccccaaatgatcattgtcgttcaaggtgcgtaatattagtaagaagtatttatcgcttaacgtgataacaataatagtaatatgaaaatatttnttaaattttttataattaatctctgctagaaaatttgattaatcatttttagtagaatttgtttttctcaactagg

SEQ ID NO: 926 - DNA, 394 bp, Artificial
  Mutations within GlyA3B4 introduced by GmGlyA3B4_T01TALE nuclease
gttcatgtacggttgcagatataaacgaagcatagcttatgtatgaggtgtaacaaaattggaaacaatagccatgcaaggtgaagaatgtcaccaactcagaaacccttcttcattgacgtgtccctcactcactctcctctcttcactataaatcgccactcttcgtgttctccacttcaccaactccttcaaacttattaacactttccttagttcaatatggggaagcccttcttcactctctctctttcttccctttgcttgctactattgtcgttcaaggtgcgtaatattagtaagaagtatttatcagcttaacgtgataacaataatagtaatatgaaatatttattaaattttttataattaatctctgctagaaaatttgatt

SEQ ID NO: 927 - DNA, 622 bp, Artificial
  Mutations within GlyA3B4 introduced by GmGlyA3B4_T01TALE nuclease
gttcatgtacggttgcagatataaacgaagcatagcttatgtatgaggtgtaacaaaattggaaacaatagccatgcaaggtgaagaatgtcaccaactcagaaacccttcttcattgacgtgtccctcactcactctcctctcttcactataaatcgccactcttcgtgttctccacttcaccaactccttcaaacttattaacactttccttagttcaatatggggaagcccttcttcactctctctctttcttccctttgcttgctgtcgagtgcatgctttgctattacctccagcaagttcaacgagtgccaactcaacaacctcaacgcgttggaacccgaccaccgcgttgagtccgaaggtggtcttattgaaacatggaactctcaacaccctgagctgcaatgcgccggtgtcactgtttccaaacgcaccctcaaccgcaacggcctccacttgccatcttactcaccttatcccccaaatgatcattgtcgttcaaggtgcgtaatattagtaagaagtatttatcagcttaacgtgataacaataatagtaatatgaaatatttattaaattttttataattaatctctgctagaaaatttgattaatc

SEQ ID NO: 928 - DNA, 645 bp, Artificial
  Mutations within GlyA3B4 introduced by GmGlyA3B4_T01TALE nuclease
gttcatgtacggttgcagatataaacgaagcatagcttatgtatgaggtgtaacaaaattggaaacaatagccatgcaaggtgaagaatgtcaccaactcagaaacccttcttcattgacgtgtccctcactcactctcctctcttcactataaatcgccactcttcgtgttctccacttcaccaactccttcaaacttattaacactttccttagttcaatatggggaagcccttcttcactctctctctttcttccctttgctattacctccagcaagttcaacgagtgccaactcaacaacctcaacgcgttggaacccgaccaccgcgttgagtccgaaggtggtcttattgaaacatggaactctcaacacccctgagctgcaatgcgccggtgtcactgtttccaaacgcaccctcaaccgcaacggcctccacttgccatcttactcaccttatcccccaaatgatcattgtcgttcaaggtgcgtaatattagtaagaagtatttatcagcttaacgtgataacaataatagtaatatgaaatatttattaaattttttataattaatctctgctagaaaatttgattaatcatttttagtagaatttgttttttctcaactaggttttaaacacca

SEQ ID NO: 929 - DNA, 413 bp, Artificial
  Mutations within GlyA3B4 introduced by GmGlyA3B4_T01TALE nuclease
gttcatgtacggttgcagatataaacgaagcatagcttatgtatgaggtgtaacaaaattggaaacaatagccatgcaaggtgaagaatgtcaccaactcagaaacccttcttcattgacgtgtccctcactcactctcctctcttcactataaatcgccactcttcgtgttctccacttcaccaactccttcaaacttattaacactttccttagttcaatatggggaagcccttcttgtcgagtgcatgctttgctattacctccagcaagttcaacgagtgccaactcaacaacctcaacgcgttggaacccgaccaccgcgttgagtccgaaggtggtcttattgaacatggaactctcaacaccctgagctgcaatgcgccggtgtcactgtttccaaacgcaccctc

SEQ ID NO: 930 - DNA, 608 bp, Artificial; identical to SEQ ID NO: 546
  Mutations within GlyA3B4 introduced by GmGlyA3B4_T01TALE nuclease

SEQ ID NO: 931 - DNA, 649 bp, Artificial; identical to SEQ ID NO: 816
  Mutations within GlyA3B4 introduced by GmGlyA3B4_T01TALE nuclease

SEQ ID NO: 932 - DNA, 743 bp, Artificial
  Mutations within GlyA3B4 introduced by GmGlyA3B4_T01TALE nuclease
  misc_feature (629); (671): n is a or c or t or g
gttcatgtacggttgcagatataaacgaagcatagcttatgtatgaggtgtaacaaaattggaaacaatagccatgcaaggtgaagaatgtcaccaactcagaaacccttcttcattgacgtgtccctcactcactctcctctcttcactataaatcgccactcttcgtgttctccacttcaccaactccttcaaacttattaacactttccttagttcaatatggggaagcccttcttcactctctctctttcttccctttgcttgctattgaccccggagcaggtggtggccatcgccagccacgatggcggcaagcaggcgctggagacggtccagcggctgttgccggtgctgtgccaggcccacggcttgactcttgtcgagtgcatgctttgctattacctccagcaagttcaacgagtgccaactcaacacctcaacgcgttggaaccgaccaccgcgttgagtcccgaaggtggtcttattgaaacatggaactctcaacaccctgagctgcaatgcgccggtgtcactgtttccaaacgcaccctcaaccgcaacggcctccacttgccatcttactcaccttatccccaaatgatcattgtcgttcaaggtgcgtaatnttagtaagaagtatttatcagcttaacgtgataacaataatngtaatatgaaatatttattaaattttttataattaatctctgctagaaaatttgattaatcatttttagtag

SEQ ID NO: 933 - DNA, 635 bp, Artificial
  Mutations within GlyA3B4 introduced by GmGlyA3B4_T01TALE nuclease
gttcatgtacggttgcagatataaacgaagcatagcttatgtatgaggtgtaacaaaattggaaacaatagccatgcaaggtgaagaatgtcaccaactcagaaacccttcttcattgacgtgtccctcactcactctcctctcttcactataaatcgccactcttcgtgttctccacttcaccaactccttcaaacttattaacactttccttagttcaatatggggaagcccttcttcactctctctctttcttccctttgcttgcttgtcgagtgcatgctttgctattacctccagcaagttcaacgagtgccaactcaacaacctcaacgcgttggaacccgaccaccgcgttgagtccgaaggtggtcttattgaaacatggaactctcaacaccctgagctgcaatgcgccggtgtcactgtttccaaacgcaccctcaaccgcaacggcctccacttgccatcttactcaccttatccccaaatgatcattgtcgttcaaggtgcgtaatattagtaagaagtatttatcagcttaacgtgataacaataatagtaatatgaaatatttattaaattttttataattaatctctgctagaaaatttgattaatcatttttagtagaa

SEQ ID NO: 934 - DNA, 580 bp, Artificial; identical to SEQ ID NO: 668
  Mutations within GlyA3B4 introduced by GmGlyA3B4_T01TALE nuclease

SEQ ID NO: 935 - DNA, 641 bp, Artificial
  Mutations within GlyA3B4 introduced by GmGlyA3B4_T01TALE nuclease
gttcatgtacggttgcagatataaacgaagcatagcttatgtatgaggtgtaacaaaattggaaacaatagccatgcaaggtgaagaatgtcaccaactcagaaacccttcttcattgacgtgtccctcactcactctcctctcttcactataaatcgccactcttcgtgttctccacttcaccaactccttcaaacttattaacactttccttagttcaatatggggaagcccttcttcactctctctcatgctttgctattacctccagcaagttcaacgagtgccaactcaacaacctcaacgcgttggaacccgaccaccgcgttgagtccgaaggtggtcttattgaaacatggaactctcaacaccctgagctgcaatgcgccggtgtcactgtttccaaacgcaccctcaaccgcaacggcctccacttgccatcttactcaccttatccccaaatgatcattgtcgttcaaggtgcgtaatattagtaagaagtatttatcagcttaacgtgataacaataatagtaatatgaaatatttattaaattttttataattaattctctgctagaaaatttgattaatcatttttagtagaatttgttttttctcaactaggttttaaacaccaca

SEQ ID NO: 936 - DNA, 446 bp, Artificial
  Mutations within GlyA3B4 introduced by GmGlyA3B4_T01TALE nuclease
gttcatgtacggttgcagatataaacgaagcatagcttatgtatgaggtgtaacaaaattggaaacaatagcccatgcaaggtgaagaatgtcaccaactcagaaacccttcttcattgacgtgtccctcactcactctcctctcttcactataaatcgccactcttcgtgttctccacttcaccaactccttcaaacttattaacactttccttagttcaatatggggaagcccttcttcactctctctctttcttccctttgcttgattgtcgagtacatgctttgctattacctccagcaagttcaacgagtgccaactcaacaacctcaacgcgttggaacccgaccaccgcgttgagtccgaaggtggtcttattgaaacatggaactctcaacaccctgagctgcaatgcgccggtgtcactgtttccaaacgcaccctc

SEQ ID NO: 937 - DNA, 623 bp, Artificial; identical to SEQ ID NO: 565
  Mutations within GlyA3B4 introduced by GmGlyA3B4_T01TALE nuclease

SEQ ID NO: 938 - DNA, 615 bp, Artificial
  Mutations within GlyA3B4 introduced by GmGlyA3B4_T01TALE nuclease
gttcatgtacggttgcagatataaacgaagcatagcttatgtatgaggtgtaacaaaattggaaacaatagccatgcaaggtgaagaatgtcaccaactcagaaacccttcttcattgacgtgtccctcactcactctcctctcttcactataaatcgccactcttcgtgttctccacttcaccaactccttcaaacttattaacactttccttagttcaatatggggaagcccttcttcactctctctctttcttccctttgcttgctactactcttgtcgagtgcatgctttgctattacctccagcaagttcaacgagtgccaactcaacaacctcaacgcgttggaacccgaccaccgcgttgagtccgaaggtggtcttattgaacatggaactctcaacaccctgagctgcaatgcgccggtgtcactgtttccaaacgcaccctcaaccgcaacggcctccacttgccatcttactcaccttatccccaaatgatcattgtcgttcaaggtgcgtatattagtaagaagtatttatcagcttaacgtgatacaataatagtaatatgaaatattattaaattttttataattaatctctgctagaaaa

SEQ ID NO: 939 - DNA, 652 bp, Artificial
  Mutations within GlyA3B4 introduced by GmGlyA3B4_T01TALE nuclease
gttcatgtacggttgcagatataaacgaagcatagcttatgtatgaggtgtaacaaaattggaaacaatagccatgcaaggtgaagaatgtcaccaactcagaaacccttcttcattgacgtgtccctcactcactctcctctcttcactataaatcgccactcttcgtgttctccacttcaccaactccttcaaacttattaacactttccttagttcaatatggggaagcccttcttcactctctctctttcttccctttgctattacctccagcaagttcaacgagtgccaactcaacaacctcaacgcgttggaacccgaccaccgcgttgagtccgaaggtggtcttattgaaacatggaactctcaacacccctgagctgcaatgcgccggtgtcactgtttccaaacgcaccctcaaccgcaacggcctccacttgccatcttactcaccttatcccccaaatgatcattgtcgttcaaggtgcgtaatattagtaagaagtatttatcagcttaacgtgataacaataatagtaatatgaaatattttattaaatttttttataattaattctctgctagaaaatttgattaatcatttttagtagaattttgttttttctcaactaggtttttaaacaccaca

SEQ ID NO: 940 - DNA, 636 bp, Artificial
  Mutations within GlyA3B4 introduced by GmGlyA3B4_T01TALE nuclease
gttcatgtacggttgcagatataaacgaagcatagcttatgtatgaggtgtaacaaaattggaaacaatagccatgcaaggtgaagaatgtcaccaactcagaaacccttcttcattgacgtgtccctcactcactctcctctcttcactataaatcgccactcttcgtgttctccacttcaccaactccttcaaacttattaacactttccttagttcaatatggggaagcccttcttcactctctctctttcttccctttgctattacctccagcaagttcaacgagtgccaactcaacaacctcaacgcgttggaacccgaccaccgcgttgagtccgaaggtggtcttattgaaacatggaactctcaacaccctgagctgcaatgcgccggtgtcactgtttccaaacgcaccctcaaccgcaacggcctccacttgccatcttactcaccttatccccaaatgatcattgtcgttcaaggtgcgtaatattagtaagaagtatttatcagcttaacgtgataacaataatagtaatatgaaatatttattaaatttttttataattaatctctgctagaaaatttgattaatcatttttagtagaatttgttttttctcaactaggtttt

SEQ ID NO: 941 - DNA, 650 bp, Artificial
  Mutations within GlyA3B4 introduced by GmGlyA3B4_T01TALE nuclease
gttcatgtacggttgcagatataaacgaagcatagcttatgtatgaggtgtaacaaaattggaaacaatagccatgcaaggtgaagaatgtcaccaactcagaaacccttcttcattgacgtgtccctcactcactctcctctcttcactataaatcgccactcttcgtgttctccacttcaccaactccttcaaacttattaacactttccttagttcaatatggggaagcccttcttcactctctctctttcttccctttgctgtcgagtgcatgctttgctattacctccagcaagttcaacgagtgccaactcaacaacctcaacgcgttggaacccaaccaccgcgttgagtccgaaggtggtcttattgaaacatggaactctcaacaccctgagctgcaatgcgccggtgtcactgtttccaaacgcaccctcaaccgcaacggcctccacttgccatcttactcaccttatccccaaatgatcattgtcgttcaaggtgcgtaaatattagtaagaagtatttatcagcttaacgtgataacaataatagtaatatgaaatatttattaaattttttataattaatctctgctagaaaatttgattaatctttttagtagaatttgttttttctcaactagg

SEQ ID NO: 942 - DNA, 642 bp, Artificial
  Mutations within GlyA3B4 introduced by GmGlyA3B4_T01TALE nuclease
gttcatgtacggttgcagatataaacgaagcatagcttatgtatgaggtgtaacaaaattggaaacaatagccatgcaaggtgaagaatgtcaccaactcagaaacccttcttcattgacgtgtccctcactcactctcctctcttcactataaatcgccactcttcgtgttctccacttcaccaactccttcaaacttattaacactttccttagttcaatatggggaagcccttcttcactctctctcatgctttgctattacctccagcaagttcaacgagtgccaactcaacaacctcaacgcgttggaacccgaccaccgcgttgagtccgaaggtggtcttattgaaacatggaactctcaacacccctgagctgcaatgcgccggtgtcactgtttccaaacgcaccctcaaccgcaacggcctccacttgccatcttactcaccttatccccaaatgatcattgtcgttcaaggtgcgtaatattagtaagaagtatttatcagcttaacgtgataacaataatagtaatatgaaatatttattaaattttttataattaatctctgctagaaaatttgattaatcatttttagtagaatttgttttttctcaactaggttttaaaacaccaca

SEQ ID NO: 943 - DNA, 613 bp, Artificial
  Mutations within GlyA3B4 introduced by GmGlyA3B4_T01TALE nuclease
gttcatgtacggttgcagatataaacgaagcatagcttatgtatgaggtgtaacaaaattggaaacaatagccatgcaaggtgaagaatgtcaccaactcagaaacccttcttcattgacgtgtccctcactcactctcctctcttcactataaatcgccactcttcgtgttctccacttcaccaactccttcaaacttattaacactttccttagttcaatatggggaagcccttcttcactctctctctttcttccctttgcttgctactactcttgtcgagtgcatgctttgctattacctccagcaagttcaacgagtgccaactcaacaacctcaacgcgttggaacccgaccaccgcgttgagtccgaaggtggtcttattgaaacatggaactctcaacaccctgagctgcaatgcgccggtgtcactgtttccaaacgcaccctcaaccgcaacggcctccacttgccatcttactcaccttatccccaaatgatcattgtcgttcaaggtgcgtatattagtaagaagtatttatcagcttaacgtgatacaataatagtaatatgaaatattattaaaattttttataattaatctctgctag

SEQ ID NO: 944 - DNA, 634 bp, Artificial
  Mutations within GlyA3B4 introduced by GmGlyA3B4_T01TALE nuclease
gttcatgtacggttgcagatataaacgaagcatagcttatgtatgaggtgtaacaaaattggaaacaatagccatgcaaggtgaagaatgtcaccaactcagaaacccttcttcattgacgtgtccctcactcactctcctctcttcactataaatcgccactcttcgtgttctccacttcaccaactccttcaaacttattaacactttccttagttcaatatggggaagcccttcttcactctctctctttcttccctttgcttgctactactcttgtcgagtgcatgctttgctattacctccagcaagttcaacgagtgccaactcaacaacctcaacgcgttggaacccgaccaccgcgttgagtccgaaggtggtcttattgaaacatggaactctcaacaccctgagctgcaatgcgccggtgtcactgtttccaaacgcaccctcaaccgcaacggcctccacttgccatcttactcaccttatccccaaatgatcattgtcgttcaaggtgcgtaatattagtaagaagtattttatcagcttaacgtgataacaataatagtaatatgaaatatttattaaaattttttataattaaatctctgctagaaaatttgattaatca

SEQ ID NO: 945 - DNA, 559 bp, Artificial
  Mutations within GlyA3B4 introduced by GmGlyA3B4_T01TALE nuclease
gttcatgtacggttgcagatataaacgaagcatagcttatgtatgaggtgtaacaaaattggaaacaatagccatgcaaggtgaagaatgtcaccaactcagaaacccttcttcattgacgtgtccctcactcactctcctctcttcactataaatcgccactcttcgtgttctccacttcaccaactccttcaaacttattaacactttccttagtttccagcaagttcaacgagtgccaactcaacaacctcaacgcgttggaacccgaccaccgcgttgagtccgaaggtggtcttattgaaacatggaactctcaacaccctgagctgcaatgcgccggtgtcactgtttccaaacgcaccctcaaccgcaacggcctccacttgccatcttactcaccttatccccaaatgatcattgtcgttcaaggtgcgtaatattagtaagaagtatttatcagcttaacgtgataacaataatagtaatatgaaatatttattaaattttttataattaatctctgctagaaaattttgattaatcatttttagtagaa

SEQ ID NO: 946 - DNA, 772 bp, Artificial
  Mutations within GlyA3B4 introduced by GmGlyA3B4_T01TALE nuclease
gttcatgtacggttgcagatataaacgaagcatagcttatgtatgaggtgtaacaaaattggaaacaatagccatgcaaggtgaagaatgtcaccaactcagaaacccttcttcattgacgtgtccctcactcactctcctctcttcactataaatcgccactcttcgtgttctccacttcaccaactccttcaaacttattaacactttccttagttcaatatggggaagcccttcttcactctctctctttcttccctttgcttgctactccgggtcaagttgagcgggcacccgtcagtgcattgcgccatgcatgcactgcctccactgcggtcacgccgccacgttttgcaatcttgagaagttggcctcttgtcgagtgcatgctttgctattacctccagcaagttcaacgagtgccaactcaacacctcaacgcgttggaacccgaccaccgcgttgagtccgaaggtggtcttattgaaacatggaactctcaacaccctgagctgcaatgcgccggtgtcactgtttccaaacgcaccctcaaccgcaacggcctccacttgccatcttactcaccttatccccaaatgatcattgtcgttcaaggtgcgtaatattagtaagaagtatttatcgcttaacgtgataacaataatagtaatatgaaaatatttattaaattttttataattaatctctgctagaaaatttgattaatcaatttttagtagaatttgtttttctcaactaggtttaaacacca

SEQ ID NO: 947 - DNA, 633 bp, Artificial
  Mutations within GlyA3B4 introduced by GmGlyA3B4_T01TALE nuclease
gttcatgtacggttgcagatataaacgaagcatagcttatgtatgaggtgtaacaaaattggaaacaatagccatgcaaggtgaagaatgtcaccaactcagaaacccttcttcattgacgtgtccctcactcactctcctctcttcactataaatcgccactcttcgtgttctccacttcaccaactccttcaaacttattaacactttccttagttcaatatggggaagcccttcttcactctctctctttcttccctttgcttgtcgagtgcatgctttgctattacctccagcaagttcaacgagtgccaactcaacaacctcaacgcgttggaacccgaccaccgcgttgagtccgaaggtggtcttattgaaacatggaactctcaacaccctgagctgcaatgcgccggtgtcactgtttccaaacgcaccctcaaccgcaacggcctccacttgccatcttactcaccttatcccccaaatgatcattgtcgttcaaggtgcgtaaatattagtaagaagtatttatcagcttaacgtgataacaataatagtaatatgaaatatttattaaattttttataattaatctctgctagaaaatttgattaatcatttttagtagaa

SEQ ID NO: 948 - DNA, 618 bp, Artificial
  Mutations within GlyA3B4 introduced by GmGlyA3B4_T01TALE nuclease
gttcatgtacggttgcagatataaacgaagcatagcttatgtatgaggtgtaacaaaattggaaacaatagccatgcaaggtgaagaatgtcaccaactcagaaacccttcttcattgacgtgtccctcactcactctcctctcttcactataaatcgccactcttcgtgttctccacttcaccaactccttcaaacttattaacactttccttagttcaatatggggaagcccttcttcactctctctctttcttccctttgcttgctactactcttgtcgagtgcatgctttgctattacctccagcaagttcaacgagtgccaactcaacaacctcaacgcgttggaacccgaccaccgcgttgagtccgaaggtggtcttattgaaacatggaactctcaacacccctgagctgcaatgcgccggtgtcactgtttccaaacgcaccctcaaccgcaacggcctccacttgccatcttactcaccttatccccaaatgatcattgtcgttcaaggtgcgtatattagtaagaagtatttatcagcttaacgtgatacaataatagtaatatgaaatatttattaaattttttataattaatctctgctagaaaa

SEQ ID NO: 949 - DNA, 620 bp, Artificial
  Mutations within GlyA3B4 introduced by GmGlyA3B4_T01TALE nuclease
gttcatgtacggttgcagatataaacgaagcatagcttatgtatgaggtgtaacaaaattggaaacaatagccatgcaaggtgaagaatgtcaccaactcagaaacccttcttcattgacgtgtccctcactcactctcctctcttcactataaatcgccactcttcgtgttctccacttcaccaactccttcaaacttattaacactttccttagttcaatatggggaagcccttcttcactctctctctttcttccctttgcttgcttgtcgagtgcatgctttgctattacctccagcaagttcaacgagtgccaactcaacaacctcaacgcgttggaacccgaccaccgcgttgagtccgaaggtggtcttattgaaacatggaactctcaacaccctgagctgcaatgcgccggtgtcactgtttccaaacgcaccctcaaccgcaacggcctccacttgccatcttactcaccttatcccccaaatgatcattgtcgttcaaggtgcgtaaatattagtaagaagtatttatcagcttaacgtgataacaataatagtaatatgaaatatttattaaattttttataattaatctctgctagaaaatttgatt

SEQ ID NO: 950 - DNA, 638 bp, Artificial
  Mutations within GlyA3B4 introduced by GmGlyA3B4_T01TALE nuclease
gttcatgtacggttgcagatataaacgaagcatagcttatgtatgaggtgtaacaaaattggaaacaatagccatgcaaggtgaagaatgtcaccaactcagaaacccttcttcattgacgtgtccctcactcactctcctctcttcactataaatcgccactcttcgtgttctccacttcaccaactccttcaaacttattaacactttccttagttcaatatggggaagcccttcttcactctctctctttcttccctttgcttgctcttgtcgagtgcatgctttgctattacctccagcaagttcaacgagtgccaactcaacaacctcaacgcgttggaacccgaccaccgcgttgagtccgaaggtggtcttattgaaacatggaactctcaacaccctgagctgcaatgcgccggtgtcactgtttccaaacgcaccctcaaccgcaacggcctccacttgccatcttactcaccttatccccaaatgatcattgtcgttcaaggtgcgtaatattagtaagagtatttatcagcttaacgtgataacaataatagtaatatgaaatatttattaaatttttataattaatctctgctagaaaatttgattaatcattttagtagaatttg

SEQ ID NO: 951 - DNA, 667 bp, Artificial
  Mutations within GlyA3B4 introduced by GmGlyA3B4_T01TALE nuclease
  misc_feature (532): n is a or c or t or g
gttcatgtacggttgcagatataaacgaagcatagcttatgtatgaggtgtaacaaaattggaaacaatagccatgcaaggtgaagaatgtcaccaactcagaaacccttcttcattgacgtgtccctcactcactctcctctcttcactataaatcgccactcttcgtgttctccacttcaccaactccttcaaacttattaacactttccttagttcaatatggggaagcccttcttcactctctctctttcttccctttgcttgctctgtctagctgcatgctttgctattacctccagcaagttcaacgagtgccaactcaacaacctcaacgcgttggaacccgaccaccgcgttgagtccgaaggtggtcttattgaaacatggaactctcaacaccctgagctgcaatgcgccggtgtcactgtttccaaacgcaccctcaaccgcaacggcctccacttgccatcttactcaccttatccccaaatgatcattgtcgttcaaggtgcgtaatattagtaagagnatttatcagcttaacgtgataacaatatagtaatatgaaatatttattaaatttttataattaatctctgctagaaaatttgattaatcattttagtagaatttgtttttctcaactaggtttttaaacaccaca

SEQ ID NO: 952 - DNA, 640 bp, Artificial
  Mutations within GlyA3B4 introduced by GmGlyA3B4_T01TALE nuclease
gttcatgtacggttgcagatataaacgaagcatagcttatgtatgaggtgtaacaaaattggaaacaatagccatgcaaggtgaagaatgtcaccaactcagaaacccttcttcattgacgtgtccctcactcactctcctctcttcactataaatcgccactcttcgtgttctccacttcaccaactccttcaaacttattaacactttccttagttcaatatggggaagcccttcttcactctctctctttcttccctttgcttgctactactcttgtcgagtgcatgctttgctattatcctccagcaagttcaacgagtgccaactcaacaacctcaacgcgttggaacccgaccaccgcgttgagtccgaaggtggtcttattgaaacatggaactctcaacacccctgagctgcaatgcgccggtgtcactgtttccaaacgcaccctcaaccgcaacggcctcccacttgccatcttactcaccttatccccaaatgatcattgtcgttcaaggtgcgtatattagtaagaagtattttatcagcttaacgtgatacaataatagtaatatgaaatattattaaattttttataattaatctctgctagaaaatttgattaatcatttttagt

SEQ ID NO: 953 - DNA, 632 bp, Artificial
  Mutations within GlyA3B4 introduced by GmGlyA3B4_T01TALE nuclease
  misc_feature (275); (278); (528): n is a or c or t or g
gttcatgtacggttgcagatataaacgaagcatagcttatgtatgaggtgtaacaaaattggaaacaatagccatgcaaggtgaagaatgtcaccaactcagaaacccttcttcattgacgtgtccctcactcactctcctctcttcactataaatcgccactcttcgtgttctccacttcaccaactccttcaaacttattaacactttccttagttcaatatggggaagcccttcttcactctctctctttcttccctttgcttgctactctncgntgctttgctattacctccagcaagttcaacgagtgccaactcaacaacctcaacgcgttggaacccgaccaccgcgttgagtccgaaggtggtcttattgaaacatggaactctcaacaccctgagctgcaatgcgccggtgtcactgtttccaaacgcaccctcaaccgcaacggcctccacttgccatcttactcaccttatccccaaatgatcattgtcgttcaaggtgcgtaatattagtaagagnatttatcagcttaacgtgatacaatatagtaatatgaaatatttattaaatttttataattaatctctgctagaaaatttgattaatcattttagtagaatttg

SEQ ID NO: 954 - DNA, 619 bp, Artificial
  Mutations within GlyA3B4 introduced by GmGlyA3B4_T01TALE nuclease
gttcatgtacggttgcagatataaacgaagcatagcttatgtatgaggtgtaacaaaattggaaacaatagccatgcaaggtgaagaatgtcaccaactcagaaacccttcttcattgacgtgtccctcactcactctcctctcttcactataaatcgccactcttcgtgttctccacttcaccaactccttcaaacttattaacactttccttagttcaatatggggaagcccttcttcactctctctctttcttccctttgcttgctactactcttgtcgagtgcatgctttgctattacctccagcaagttcaacgagtgccaactcaacaacctcaacgcgttggaacccgaccaccgcgttgagtccgaaggtggtcttattgaaacatggaactctcaacaccctgagctgcaatgcgccggtgtcactgtttccaaacgcaccctcaaccgcaacggcctccacttgccatcttactcaccttatccccaaatgatcattgtcgttcaaggtgcgtaatattagtaagaagtatttatcagcttaacgtgataacaataatagtaatatgaaatattattaaaattttttataattaatctctgctagaaaa

SEQ ID NO: 955 - DNA, 653 bp, Artificial
  Mutations within GlyA3B4 introduced by GmGlyA3B4_T01TALE nuclease
gttcatgtacggttgcagatataaacgaagcatagcttatgtatgaggtgtaacaaaattggaaacaatagccatgcaaggtgaagaatgtcaccaactcagaaacccttcttcattgacgtgtccctcactcactctcctctcttcactataaatcgccactcttcgtgttctccacttcaccaactccttcaaacttattaacactttccttagttcaatatggggaagcccttcttcactctctctctttcttccctttgcttgctcttgtcgagtgcatgctttgctattacctccagcaagttcaacgagtgccaactcaacaacctcaacgcgttggaacccgaccaccgcgttgagtccgaaggtggtcttattgaaacatggaactctcaacaccctgagctgcaatgcgccggtgtcactgtttccaaacgcaccctcaaccgcaacggcctccacttgccatcttactcaccttatccccaaatgatcattgtcgttcaaggtgcgtaatattagtaagagtatttatcagcttaacgtgataacaataatagtaatatgaaatatttattaaatttttataattaatctctgctagaaaatttgattaatcattttagtagaatttgtttttctcaactagg

SEQ ID NO: 956 - DNA, 679 bp, Artificial
  Mutations within GlyA3B4 introduced by GmGlyA3B4_T01TALE nuclease
gttcatgtacggttgcagatataaacgaagcatagcttatgtatgaggtgtaacaaaattggaaacaatagccatgcaaggtgaagaatgtcaccaactcagaaacccttcttcattgacgtgtccctcactcactctcctctcttcactataaatcgccactcttcgtgttctccacttcaccaactccttcaaacttattaacactttccttagttcaatatggggaagcccttcttcactctctctctttttcaatatggtggcctaactacggctacaccacggcttgtcgagtgcatgctttgctattacctccagcaagttcaacgagtgccaactcaacaacctcaacgcgttggaacccgaccaccgcgttgagtccgaaggtggtcttattgaaacatggaactctcaacaccctgagctgcaatgcgccggtgtcactgtttccaaacgcaccctcaaccgcaacggcctccacttgccatcttactcaccttatccccaaatgatcattgtcgttcaaggtgcgtaatattagtaagaagtatttatcagcttaacgtgataacaataatagtaatatgaaatatttattaaatttttataattaatctctgctagaaaatttgattaatcatttttatgtagaatttgtttttctcaactaggtttt

SEQ ID NO: 957 - DNA, 607 bp, Artificial
  Mutations within GlyA3B4 introduced by GmGlyA3B4_T01TALE nuclease
gttcatgtacggttgcagatataaacgaagcatagcttatgtatgaggtgtaacaaaattggaaacaatagccatgcaaggtgaagaatgtcaccaactcagaaacccttcttcattgacgtgtccctcactcactctcctctcttcactataaatcgccactcttcgtgttctccacttcaccaactccttcaaacttattaacactttccttgtcgagtgcatgctttgctattacctccagcaagttcaacgagtgccaactcaacaacctcaacgcgttggaacccgaccaccgcgttgagtccgaaggtggtcttattgaaacatggaactctcaacaccctgagctgcaatgcgccggtgtcactgtttccaaacgcaccctcaaccgcaacggcctccacttgccatcttactcaccttatccccaaatgatcattgtcgttcaaggtgcgtaatattagtaagaagtatttatcagcttaacgtgataacaatatagtaatatgaatatttattaaattttttataattaatctctgctagaaaatttgattaatcatttttagtagaatttgtttttctcaactaggtttttaaaaca

SEQ ID NO: 958 - DNA, 594 bp, Artificial
  Mutations within GlyA3B4 introduced by GmGlyA3B4_T01TALE nuclease
gttcatgtacggttgcagatataaacgaagcatagcttatgtatgaggtgtaacaaaattggaaacaatagccatgcaaggtgaagaatgtcaccaactcagaaacccttcttcattgacgtgtccctcactcactctcctctcttcactataaatcgccactcttcgtgttctccacttcaccaactccttcaaacttattaacactttccttagttcaatatggggaagcccttcttcactctctctctttcttccctttgcttgcttgtcgagtgcatgctttgctattacctccagcaagttcaacgagtgccaactcaacaacctcaacgcgttggaacccgaccaccgcgttgagtccgaaggtggtcttattgaaacatggaactctcaacaccctgagctgcaatgcgccggtgtcactgtttccaaacgcaccctcaaccgcaacggcctccacttgccatcttactcaccttatcccccaaatgatcattgtcgttcaaaggtgcgtaaatattagtaagaagtatttatcagcttaacgtgataacaataatagtaatatgaaatatttattaaattttttat

SEQ ID NO: 959 - DNA, 665 bp, Artificial
  Mutations within GlyA3B4 introduced by GmGlyA3B4_T01TALE nuclease
gttcatgtacggttgcagatataaacgaagcatagcttatgtatgaggtgtaacaaaattggaaacaatagccatgcaaggtgaagaatgtcaccaactcagaaacccttcttcattgacgtgtccctcactcactctcctctcttcactataaatcgccactcttcgtgttctccacttcaccaactccttcaaacttattaacactttccttagttcaatatggggaagcccttcttcactctctctctttcttccctttgcttgcagtgcatgctttgctattacctccagcaagttcaacgagtgccaactcaacaacctcaacgcgttggaacccgaccaccgcgttgagtccgaaggtggtcttattgaaacatggaactctcaacaccctgagctgcaatgcgccggtgtcactgtttccaaacgcaccctcaaccgcaacggcctccacttgccatcttactcaccttatcccccaaatgatcattgtcgttcaaggtgcgtaatattagtaagaagtatttatcagcttaacgtgataacaataatagtaatatgaaatatttattaaattttttataattaatctctgctagaaaatttgattaatcatttttagtagaatttgttttttctcaactaggttttaaaacaccaca

SEQ ID NO: 960 - DNA, 617 bp, Artificial
  Mutations within GlyA3B4 introduced by GmGlyA3B4_T01TALE nuclease
gttcatgtacggttgcagatataaacgaagcatagcttatgtatgaggtgtaacaaaattggaaacaatagccatgcaaggtgaagaatgtcaccaactcagaaacccttcttcattgacgtgtccctcactcactctcctctcttcactataaatcgccactcttcgtgttctccacttcaccaactccttcaaacttattaacactttccttagttcaatatggggaagcccttcttcactctctctctttcttccctttgcttcttgtcgagtgcatgctttgctattacctccagcaagttcaacgagtgccaactcaacaacctcaacgcgttggaacccgaccaccgcgttgagtccgaaggtggtcttattgaaacatggaactctcaacaccctgagctgcaatgcgccggtgtcactgtttccaaacgcaccctcaaccgcaacggcctccacttgccatcttactcaccttatccccaaatgatcattgtcgttcaaggtgcgtaatattagtaagaagtatttatcagcttaacgtgataacaataatagtaatatgaaatatttattaaattttttataattaatctctgctagaaaatttgatt

SEQ ID NO: 961 - DNA, 630 bp, Artificial
  Mutations within GlyA3B4 introduced by GmGlyA3B4_T01TALE nuclease
gttcatgtacggttgcagatataaacgaagcatagcttatgtatgaggtgtaacaaaattggaaacaatagccatgcaaggtgaagaatgtcaccaactcagaaacccttcttcattgacgtgtccctcactcactctcctctcttcactataaatcgccactcttcgtgttctccacttcaccaactccttcaaacttattaacactttccttagttcaatatggggaagcccttcttcactctctctctttcttccctttgcttgccttgtcgagtgcatgctttgctattacctccagcaagttcaacgagtgccaactcaacaacctcaacgcgttggaacccgaccaccgcgttgagtccgaaggtggtcttattgaaacatggaactctcaacaccctgagctgcaatgcgccggtgtcactgtttccaaacgcaccctcaaccgcaacggcctccacttgccatcttactcaccttatccccaaatgatcattgtcgttcaaggtgcgtaatattagtaagaagtatttatcagcttaacgtgataacaataatagtaatatgaaatatttattaaattttttataattaatctctgctagaaaatttgattaatctttttag

SEQ ID NO: 962 - DNA, 477 bp, Artificial; identical to SEQ ID NO: 515
  Mutations within GlyA3B4 introduced by GmGlyA3B4_T01TALE nuclease

SEQ ID NO: 963 - DNA, 652 bp, Artificial
  Mutations within GlyA3B4 introduced by GmGlyA3B4_T01TALE nuclease
gttcatgtacggttgcagatataaacgaagcatagcttatgtatgaggtgtaacaaaattggaaacaatagccatgcaaggtgaagaatgtcaccaactcagaaacccttcttcattgacgtgtccctcactcactctcctctcttcactataaatcgccactcttcgtgttctccacttcaccaactccttcaaacttattaacactttccttagttcaatatggggaagcccttcttcactctctctctttcttccctttgcttgctcgagtgcatgctttgctattacctccagcaagttcaacgagtgccaactcaacaacctcaacgcgttggaacccgaccaccgcgttgagtccgaaggtggtcttattgaaacatggaactctcaacaccctgagctgcaatgcgccggtgtcactgtttccaaacgcaccctcaaccgcaacggcctccacttgccatcttactcaccttatcccccaaatgatcattgtcgttcaaggtgcgtaaatattagtaagaagtatttatcagcttaacgtgataacaataatagtaatatgaaatatttattaaattttttataattaatctctgctagaaaatttgattaatctttttagtagaattgttttttctcaactagg

SEQ ID NO: 964 - DNA, 615 bp, Artificial
  Mutations within GlyA3B4 introduced by GmGlyA3B4_T01TALE nuclease
gttcatgtacggttgcagatataaacgaagcatagcttatgtatgaggtgtaacaaaattggaaacaatagccatgcaaggtgaagaatgtcaccaactcagaaacccttcttcattgacgtgtccctcactcactctcctctcttcactataaatcgccactcttcgtgttctccacttcaccaactccttcaaacttattaacactttccttagttcaatatggggaagcccttcttcactctctctctttcttccctttgcttgctactactcttgtcgagtgcatgctttgctattacctccagcaagttcaacgagtgccaactcaacaacctcaacgcgttggaacccgaccaccgcgttgagtccgaaggtggtcttattgaacatggaactctcaacaccctgagctgcaatgcgccggtgtcactgtttccaaacgcaccctcaaccgcaacggcctccacttgccatcttactcaccttatccccaaatgatcattgtcgttcaaggtgcgtatattagtaagaatgtatttatcagcttaacgtgataacaataatagtaatatgaaatatttattaaaattttttataattaatctctgctag

SEQ ID NO: 965 - DNA, 666 bp, Artificial
  Mutations within GlyA3B4 introduced by GmGlyA3B4_T01TALE nuclease
gttcatgtacggttgcagatataaacgaagcatagcttatgtatgaggtgtaacaaaattggaaacaatagccatgcaaggtgaagaatgtcaccaactcagaaacccttcttcattgacgtgtccctcactcactctcctctcttcactataaatcgccactcttcgtgttctccacttcaccaactccttcaaacttattaacactttccttagttcaatatggggaagcccttcttcactctctctctttcttccctttgcttgcttgtcgagtgcatgctttgctattacctccagcaagttcaacgagtgccaactcaacaacctcaacgcgttggaacccgaccaccgcgttgagtccgaaggtggtcttattgaaacatggaactctcaacaccctgagctgcaatgcgccggtgtcactgtttccaaacgcaccctcaaccgcaacggcctccacttgccatcttactcaccttatcccccaaatgatcattgtcgttcaaggtgcgtaatattagtaagaagtatttatcagcttaacgtgataacaataatagtaatatgaaatatttattaaattttttataattaatctctgctagaaaatttgattaatcatttttagtagaatttgttttttctcaactaggttttaaaaca

SEQ ID NO: 966 - DNA, 654 bp, Artificial
  Mutations within GlyA3B4 introduced by GmGlyA3B4_T01TALE nuclease
gttcatgtacggttgcagatataaacgaagcatagcttatgtatgaggtgtaacaaaattggaaacaatagccatgcaaggtgaagaatgtcaccaactcagaaacccttcttcattgacgtgtccctcactcactctcctctcttcactataaatcgccactcttcgtgttctccacttcaccaactccttcaaacttattaacactttccttagttcaatatggggaagcccttcttcactctctctctttcttccctttgcttgccttgtcgagtgcatgctttgctattacctccagcaagttcaacgagtgccaactcaacaacctcaacgcgttggaacccgaccaccgcgttgagtccgaaggtggtcttattgaaacatggaactctcaacaccctgagctgcaatgcgccggtgtcactgtttccaaacgcaccctcaaccgcaacggcctccacttgccatcttactcaccttatccccaaatgatcattgtcgttcaaggtgcgtaatattagtaagaagtatttatcagcttaacgtgataacaataatagtaatatgaaatatttattaaattttttataattaatctctgctagaaaatttgattaatctttttagtagaattgttttttctcaactagg

SEQ ID NO: 967 - DNA, 592 bp, Artificial; identical to SEQ ID NO: 837
  Mutations within GlyA3B4 introduced by GmGlyA3B4_T01TALE nuclease

SEQ ID NO: 968 - DNA, 644 bp, Artificial
  Mutations within GlyA3B4 introduced by GmGlyA3B4_T01TALE nuclease
gttcatgtacggttgcagatataaacgaagcatagcttatgtatgaggtgtaacaaaattggaaacaatagccatgcaaggtgaagaatgtcaccaactcagaaacccttcttcattgacgtgtccctcactcactctcctctcttcactataaatcgccactcttcgtgttctccacttcaccaactccttcaaacttattaacactttccttagttcaatatggggaagcccttcttcactctctctctttcttccctttgcttgcttgtcgagtgcatgctttgctattacctccagcaagtttcaacgagtgccaactcaacaacctcaacgcgttggaacccgaccaccgcgttgagtccgaaggtggtcttattgaaacatggaactctcaacaccctgagctgcaatgcgccggtgtcactgtttccaaacgcaccctcaaccgcaacggcctccacttgccatcttactcaccttatcccccaaatgatcattgtccgttcaaggtgcgtaatattagtcaagaagtatttatcagcttaacgtgataacaataatagtaatatgaaatatttattaaatttttataattaatctctgctagaaaatttgattacaattttttagtaagaattttg

SEQ ID NO: 969 - DNA, 731 bp, Artificial
  Mutations within GlyA3B4 introduced by GmGlyA3B4_T01TALE nuclease
  misc_feature (627); (669): n is a or c or t or g
gttcatgtacggttgcagatataaacgaagcatagcttatgtatgaggtgtaacaaaaattggaaacaatagccatgcaaggtgaagaatgtcaccaactcagaaacccttcttcattgacgtgtccctcactcactctcctctcttcactataaatcgccactcttcgtgttctccacttcaccaactccttcaaacttattaacactttccttagttcaatatggggaagcccttcttcactctctctctttcttccctttgcttgctacttgccgccatcgtggctggcgatggccaccacctgctccggggtcaagccgtgggcctggcacagcaccggcaacagccgctggaccgtctccagcgcctgctcttgtcgagtgcatgctttgctattacctccagcaagttcaacgagtgccaactcaacaacctcaacgcgttggaacccgaccaccgcgttgagtccgaaggtggtcttattgaaacatggaactctcaacaccctgagctgcaatgcgccggtgtcactgtttccaaacgcaccctcaaccgcaacggcctccacttgccatcttactcaccttatccccaaatgatcattgtcgttcaaggtgcgtaatnttagtaagaagtatttatcagcttaacgtgataacaataatngtaatatgaaatatttattaaattttttataattaatctctgctagaaaatttgattaatca

SEQ ID NO: 970 - DNA, 668 bp, Artificial
  Mutations within GlyA3B4 introduced by GmGlyA3B4_T01TALE nuclease
gttcatgtacggttgcagatataaacgaagcatagcttatgtatgaggtgtaacaaaaattggaaacaatagccatgcaaggtgaagaatgtcaccaactcagaaacccttcttcattgacgtgtccctcactcactctcctctcttcactataaatcgccactcttcgtgttctccacttcaccaactccttcaaacttattaacactttccttagttcaatatggggaagcccttcttcactctctctctttcttccctttgcttgtcgagtgcatgctttgctattacctccagcaagtttcaacgagtgccaactcaacaacctcaacgcgttggaacccgaccaccgcattgagtccgaaggtggtcttattgaaacatggaactctcaacaccctgagctgcaatgcgccggtgtcactgtttccaaacgcaccctcaaccgcaacggcctccacttgccatcttactcaccttatccccaaatgatcattgtcgttcaaggtgcgtaatattagtaagaagtatttatcagcttaacgtgataacaataatagtaatatgaaatatttattaaattttttataattaatctctgctagaaaatttgattaatcatttttagtagaatttgttttttctcaactaggttttaaaacaccaca

SEQ ID NO: 971 - DNA, 650 bp, Artificial
  Mutations within GlyA3B4 introduced by GmGlyA3B4_T01TALE nuclease
gttcatgtacggttgcagatataaacgaagcatagcttatgtatgaggtgtaacaaaattggaaacaatagccatgcaaggtgaagaatgtcaccaactcagaaacccttcttcattgacgtgtccctcactcactctcctctcttcactataaatcgccactcttcgtgttctccacttcaccaactccttcaaacttattaacactttccttagttcaatatggggaagcccttcttcactctctctctttcttccctttgcttcttgtcgagtgcatgctttgctattacctccagcaagttcaacgagtgccaactcaacaacctcaacgcgttggaacccgaccaccgcgttgagtccgaaggtggtcttattgaaacatggaactctcaacaccctgagctgcaatgcgccggtgtcactgtttccaaacgcaccctcaaccgcaacggcctccacttgccatcttactcaccttatccccaaatgatcattgtcgttcaaggtgcgtaatattagtaagaagtatttatcagcttaacgtgataacaataatagtaatatgaaatatttattaaattttttataattaatctctgctagaaaatttgattaatctttttagtagaattgttttttctcaacta

SEQ ID NO: 972 - DNA, 608 bp, Artificial; identical to SEQ ID NO: 896
  Mutations within GlyA3B4 introduced by GmGlyA3B4_T01TALE nuclease

SEQ ID NO: 973 - DNA, 623 bp, Artificial
  Mutations within GlyA3B4 introduced by GmGlyA3B4_T01TALE nuclease
gttcatgtacggttgcagatataaacgaagcatagcttatgtatgaggtgtaacaaaattggaaacaatagccatgcaaggtgaagaatgtcaccaactcagaaacccttcttcattgacgtgtccctcactcactctcctctcttcactataaatcgccactcttcgtgttctccacttcaccaactccttcaaacttattaacactttccttagttcaatatggggaagcccttcttcactctctctctttcttccctttgcttgcttgtcgagtgcatgctttgctattacctccagcaagttcaacgagtgccaactcaacaacctcaacgcgttggaacccgaccaccgcgttgagtccgaaggtggtcttattgaaacatggaactctcaacaccctgagctgcaatgcgccggtgtcactgtttccaaacgcaccctcaaccgcaacggcctccacttgccatcttactcaccttatccccaaatgatcattgtcgttcaaggtgcgtaaatattagtaagaagtatttatcagcttaacgtgataacaataatagtaatatgaaatatttattaaattttttataattaatctctgctagaaaatttgattaatc

SEQ ID NO: 974 - DNA, 655 bp, Artificial
  Mutations within GlyA3B4 introduced by GmGlyA3B4_T01TALE nuclease
gttcatgtacggttgcagatataaacgaagcatagcttatgtatgaggtgtaacaaaattggaaacaatagccatgcaaggtgaagaatgtcaccaactcagaaacccttcttcattgacgtgtccctcactcactctcctctcttcactataaatcgccactcttcgtgttctccacttcaccaactccttcaaacttattaacactttccttagttcaatatggggaagcccttcttcactctctcttcgagtgcatgctttgctattacctccagcaagttcaacgagtgccaactcaacaacctcaacgcgttggaacccgaccaccgcgttgagtccgaaggtggtcttattgaaacatggaactctcaacaccctgagctgcaaatgcgccggtgtcactgtttccaaacgcaccctcaaccgcaacggcctccacttgccatcttactcaccttatcccccaaatgatcattgtccgttcaaggtgcgtaatattagtaagaagtatttatcagctttaacgtgataacaataatagtaatatgaaatatttattaaattttttataattaattctcttgctagaaaatttgattaatcatttttagtagaatttgttttttctcaactaggtttttaaaacaccaca

SEQ ID NO: 975 - DNA, 650 bp, Artificial
  Mutations within GlyA3B4 introduced by GmGlyA3B4_T01TALE nuclease
gttcatgtacggttgcagatataaacgaagcatagcttatgtatgaggtgtaacaaaattggaaacaatagccatgcaaggtgaagaatgtcaccaactcagaaacccttcttcattgacgtgtccctcactcactctcctctcttcactataaatcgccactcttcgtgttctccacttcaccaactccttcaaacttattaacactttccttagttcaatatggggaagcccttcttcactctctctctttcttccctttgcttttgtcgagtgcatgctttgctattacctccagcaagttcaacgagtgccaactcaacaacctcaacgcgttggaacccgaccaccgcgttgagtccgaaggtggtcttattgaaacatggaactctcaacaccctgagctgcaatgcgccggtgtcactgtttccaaacgcaccctcaaccgcaacggcctccacttgccatcttactcaccttatccccaaatgatcattgtcgttcaaggtgcgtaatattagtaagaagtatttatcagcttaacgtgataacaataatagtaatatgaaatatttattaaattttttataattaatctctgctagaaaatttgattaatctttttagtagaatttgttttttctcaacta

SEQ ID NO: 976 - DNA, 665 bp, Artificial
  Mutations within GlyA3B4 introduced by GmGlyA3B4_T01TALE nuclease
gttcatgtacggttgcagatataaacgaagcatagcttatgtatgaggtgtaacaaaattggaaacaatagccatgcaaggtgaagaatgtcaccaactcagaaacccttcttcattgacgtgtccctcactcactctcctctcttcactataaatcgccactcttcgtgttctccacttcaccaactccttcaaacttattaacactttccttagttcaatatggggaagcccttcttcactctctctctttcttccctttgcttgctatgtcgagtgcatgctttgctattacctccagcaagttcaacgagtgccaactcaacaacctcaacgcgttggaacccgaccaccgcgttgagtccgaaggtggtcttattgaaacatggaactctcaacaccctgagctgcaatgcgccggtgtcactgtttccaaacgcaccctcaaccgcaacggcctccacttgccatcttactcaccttatccccaaatgatcattgtcgttcaaggtgcgtaatattagtaagagtatttatcagcttaacgtgataacaatatagtaatatgaaatatttattaaatttttataattaatctctgctagaaaatttgattaatcattttagtagaatttgtttttctcaactaggtttttaaaacacca

SEQ ID NO: 977 - DNA, 618 bp, Artificial; identical to SEQ ID NO: 916
  Mutations within GlyA3B4 introduced by GmGlyA3B4_T01TALE nuclease

SEQ ID NO: 978 - DNA, 670 bp, Artificial
  Mutations within GlyA3B4 introduced by GmGlyA3B4_T01TALE nuclease
gttcatgtacggttgcagatataaacgaagcatagcttatgtatgaggtgtaacaaaattggaaacaatagccatgcaaggtgaagaatgtcaccaactcagaaaccccttcttcattgacgtgtccctcactcactctcctctcttcactataaatcgccactcttcgtgttctccacttcaccaactccttcaaacttattaacactttccttagttcaatatggggaagcccttcttcactctctctctttcttccctttgcttgctatgtcgagtgcatgctttgctattacctccagcaagttcaacgagtgccaactcaacaacctcaacgcgttggaacccgaccaccgcgttgagtccgaaggtggtcttattgaaacatggaactctcaacaccctgagctgcaatgcgccggtgtcactgtttccaaacgcaccctcaaccgcaacggcctccacttgccatcttactcaccttatccccaaatgatcattgtcgttcaaggtgcgtaatattagtaagaagtatttatcagcttaacgtgataacaatatagtaatatgaaaatatttattaaatttttataattaatctctgctagaaaatttgattaatcattttagtagaatttgtttttctcaactaggtttttaaaacaccaca

SEQ ID NO: 979 - DNA, 627 bp, Artificial
  Mutations within GlyA3B4 introduced by GmGlyA3B4_T01TALE nuclease
gttcatgtacggttgcagatataaacgaagcatagcttatgtatgaggtgtaacaaaattggaaacaatagccatgcaaggtgaagaatgtcaccaactcagaaacccttcttcattgacgtgtccctcactcactctcctctcttcactataaatcgccactcttcgtgttctccacttcaccaactccttcaaacttattaacactttccttagttcaatatggggaagcccttcttcactctctctctttcttccctttgcttgctcgtctccagcggctgttgccggtgctgtgccaggcccacggcttgaccccccagcaggtggtggccatcgccaactcttgtcgagtgcatgctttgctattacctccagcaagttcaacgagtgccaactcacaacctcacgcgttggaacccgaccaccgcgttgagtccgaaggtggtcttattgaaacatggaactctcaacacctgagctgcaatgcgccggtgtcactgtttccaaacgcaccctcaaccgcaacggcctccacttgccatctttactcaccttatccccaaatgatcattgtcgttcaaggtgcgtaatattagtaagaagtatttatcagcttaacgtgat

SEQ ID NO: 980 - DNA, 605 bp, Artificial
  Mutations within GlyA3B4 introduced by GmGlyA3B4_T01TALE nuclease
gttcatgtacggttgcagatataaacgaagcatagcttatgtatgaggtgtaacaaaattggaaacaatagccatgcaaggtgaagaatgtcaccaactcagaaacccttcttcattgacgtgtccctcactcactctcctctcttcactataaatcgccactcttcgtgttctccacttcaccaactccttcaaacttattaacacttgtcgagtgcatgctttgctattacctccagcaagttcaacgagtgccaactcaacaacctcaacgcgttggaacccgaccaccgcgttgagtccgaaggtggtcttattgaaacatggaactctcaacaccctgagctgcaatgcgccggtgtcactgtttccaaacgcaccctcaaccgcaacggcctccacttgccatcttactcaccttatccccaaatgatcattgtcgttcaaggtgcgtaatattagtaagaagtatttatcagcttaacgtgataacaataatagtaatatgaaatatttattaaattttttataattaatctctgctagaaaatttgatttaatcatttttagtagaatttgtttttctcaactaggtttttaaaaca

SEQ ID NO: 981 - DNA, 655 bp, Artificial
  Mutations within GlyA3B4 introduced by GmGlyA3B4_T01TALE nuclease
gttcatgtacggttgcagatataaacgaagcatagcttatgtatgaggtgtaacaaaattggaaacaatagccatgcaaggtgaagaatgtcaccaactcagaaacccttcttcattgacgtgtccctcactcactctcctctcttcactataaatcgccactcttcgtgttctccacttcaccaactccttcaaacttattaacactttccttagttcaatatggggaagcccttcttcactctctctctttcttgtcgagtgcatgctttgctattacctccagcaagttcaacgagtgccaactcaacaacctcaacgcgttggaacccgaccaccgcgttgagtccgaaggtggtcttattgaaacatggaactctcaacaccctgagctgcaatgcgccggtgtcactgtttccaaacgcaccctcaaccgcaacggcctccacttgccatcttactcaccttatccccaaatgatcattgtcgttcaaggtgcgtaaatattagtaagaagtatttatcagcttaacgtgataacaataatagtaatatgaaatatttattaaattttttataattaatctctgctagaaaatttgattaatctttttagtagaattgttttttctcaactaggttttaaaacaccaca

SEQ ID NO: 982 - DNA, 442 bp, Artificial
  Mutations within GlyA3B4 introduced by GmGlyA3B4_T01TALE nuclease
gttcatgtacggttgcagatataaacgaagcatagcttatgtatgaggtgtaacaaaattggaaacaatagccatgcaaggtgaagaatgtcaccaactcagaaacccttcttcattgacgtgtccctcactcactctcctctcttcactataaatcgccactcttcgtgttctccacttcaccaactccttcaaacttattaacactttccttagttcaatatggggaagcccttcttcactctctctctttcttccctttgcttgctactattgtcgttcaaggtgcgtaatattagtaagaagtatttatcagcttaacgtgataacaataatagtaatatagaaatatttatttaatttttataattaatctctgctagaaaatttgattaatcatttttagtagaatttgtttttctcaactaggttttaaacacca

SEQ ID NO: 983 - DNA, 638 bp, Artificial
  Mutations within GlyA3B4 introduced by GmGlyA3B4_T01TALE nuclease
gttcatgtacggttgcagatataaacgaagcatagcttatgtatgaggtgtaacaaaattggaaacaatagccatgcaaggtgaagaatgtcaccaactcagaaacccttcttcattgacgtgtccctcactcactctcctctcttcactataaatcgccactcttcgtgttctccacttcaccaactccttcaaacttattaacactttccttagttcaatatggggaagcccttcttcactctctctctttcttccctttgctattacctccagcaagttcaacgagtgccaactcaacaacctcaacgcgttggaacccgaccaccgcgttgagtccgaaggtggtcttattgaaacatggaactctcaacacccctgagctgcaatgcgccggtgtcactgttttccaaacgcaccctcaaccgcaacggcctccacttgccatcttactcaccttatcccccaaatgatcattgtcgttcaaggtgcgtaatattagtaagaagtatttatcagcttaacgtgataacaataatagtaatatgaaatatttattaaattttttataattaatctctgctagaaaatttgattaatcatttttagtagaatttgttttttctcaactaggtttt

SEQ ID NO: 984 - DNA, 481 bp, Artificial
  Mutations within GlyA3B4 introduced by GmGlyA3B4_T01TALE nuclease
gttcatgtacggttgcagatataaacgaagcatagcttatgtatgaggtgtaacaaaattggaaacaatagccatgcaaggtgaagaatgtcaccaactcagaaacccttcttcattgacgtgtccctcactcactctcctctcttcactataaatcgccactcttcgtgttctccacttcaccaactccttcaaacttattaacactttccttagttcaatatggggaagcccttcttcactctctctctttcttccctttgctttgtcgagtgcatgctttgctattacctccagcaagttcaacgagtgccaactcaacaacctcaacgcgttggaacccgaccaccgcgttgagtccgaaggtggtcttattgaaacatggaactctcaacaccctgagctgcaatgcgccggtgtcactgtttccaaacgcaccctcaaccgcaacggcctccacttgccatcttactcaccttat

SEQ ID NO: 985 - DNA, 654 bp, Artificial
  Mutations within GlyA3B4 introduced by GmGlyA3B4_T01TALE nuclease
gttcatgtacggttgcagatataaacgaagcatagcttatgtatgaggtgtaacaaaattggaaacaatagccatgcaaggtgaagaatgtcaccaactcagaaacccttcttcattgacgtgtccctcactcactctcctctcttcactataaatcgccactcttcgtgttctccacttcaccaactccttcaaacttattaacactttccttagttcaatatggggaagcccttcttcactctctctctttcttccctttgcttgcttgtcgagtgcatgctttgctattacctccagcaagttcaacgagtgccaactcaacaacctcaacgcgttggaacccgaccaccgcgttgagtccgaaggtggtcttattgaaacatggaactctcaacaccctgagctgcaatgcgccggtgtcactgtttccaaacgcaccctcaaccgcaacggcctccacttgccatcttactcaccttatcccccaaatgatcattgtcgttcaaggtgcgtaatattagtaagaagtatttatcagcttaacgtgataacaataatagtaatatgaaatatttattaaattttttataattaatctctgctagaaaatttgattaatctttttagtagaattgttttttctcaactagg

SEQ ID NO: 986 - DNA, 655 bp, Artificial
  Mutations within GlyA3B4 introduced by GmGlyA3B4_T01TALE nuclease
gttcatgtacggttgcagatataaacgaagcatagcttatgtatgaggtgtaacaaaattggaaacaatagccatgcaaggtgaagaatgtcaccaactcagaaacccttcttcattgacgtgtccctcactcactctcctctcttcactataaatcgccactcttcgtgttctccacttcaccaactccttcaaacttattaacactttccttagttcaatatggggaagcccttcttcactctctctctttcttccctttgcttgctcgagtgcatgctttgctattacctccagcaagttcaacgagtgccaactcaacaacctcaacgcgttggaacccgaccaccgcgttgagtccgaaggtggtcttattgaaacatggaactctcaacaccctgagctgcaatgcgccggtgtcactgtttccaaacgcaccctcaaccgcaacggcctccacttgccatcttactcaccttatcccccaaatgatcattgtcgttcaaggtgcgtaaatattagtaagaagtatttatcagcttaacgtgataacaataatagtaatatgaaatatttattaaattttttataattaatctctgctagaaaatttgattaatctttttagtagaattgttttttctcaactaggttt

SEQ ID NO: 987 - DNA, 748 bp, Artificial
  Mutations within GlyA3B4 introduced by GmGlyA3B4_T01TALE nuclease
gttcatgtacggttgcagatataaacgaagcatagcttatgtatgaggtgtaacaaaattggaaacaatagccatgcaaggtgaagaatgtcaccaactcagaaacccttcttcattgacgtgtccctcactcactctcctctcttcactataaatcgccactcttcgtgttctccacttcaccaactccttcaaacttattaacactttccttagttcaatatggggaagcccttcttcactctctgatggccaccacctgctggggggtcaagccgtgggcctggcacagcaccggcaacagcgcctgcaccgtctccagcgcctgcttgccaccatcgtggctggcgatactcttgtcgagtgcatgctttgctattacctccagcaagttcaacgagtgccaactcaacaacctcaacgcgttggaacccgaccaccgcgttgagtccgaaggtggtcttattgaaacatggaactctcaacaccctgagctgcaatgcgccggtgtcactgtttccaaacgcaccctcaaccgcaacggcctccacttgccatcttactcaccttatccccaaatgatcattgtcgttcaaggtgcgtaatattagtaagaagtatttatcgcttaacgtgataacaataatagtaatatgaaaatatttattaaattttttataattaatctctgctagaaaatttgattaatcatttttagtagaatttgtttttctcaactaggtttaaa

SEQ ID NO: 988 - DNA, 664 bp, Artificial
  Mutations within GlyA3B4 introduced by GmGlyA3B4_T01TALE nuclease
gttcatgtacggttgcagatataaacgaagcatagcttatgtatgaggtgtaacaaaattggaaacaatagccatgcaaggtgaagaatgtcaccaactcagaaacccttcttcattgacgtgtccctcactcactctcctctcttcactataaatcgccactcttcgtgttctccacttcaccaactccttcaaacttattaacactttccttagttcaatatggggaagcccttcttcactctctctctttcttccctttgcttgctacactcttgtcgagtgcatgctttgctattacctccagcaagttcaacgagtgccaactcaacaacctcaacgcgttggaacccgaccaccgcgttgagtccgaaggtggtcttattgaaacatggaactctcaacaccctgagctgcaatgcgccggtgtcactgtttccaaacgcaccctcaaccgcaacggcctccacttgccatcttactcaccttatccccaaatgatcattgtcgttcaaggtgcgtaatattagtaagagtatttatcagcttaacgtgataacaatatagtaatatgaaatatttattaaatttttataattaatctctgctagaaaatttgattaatcattttagtagaatttgttttctcaactaggttttaaaa

SEQ ID NO: 989 - DNA, 638 bp, Artificial
  Mutations within GlyA3B4 introduced by GmGlyA3B4_T01TALE nuclease
gttcatgtacggttgcagatataaacgaagcatagcttatgtatgaggtgtaacaaaattggaaacaatagccatgcaaggtgaagaatgtcaccaactcagaaacccttcttcattgacgtgtccctcactcactctcctctcttcactataaatcgccactcttcgtgttctccacttcaccaactccttcaaacttattaacactttccttagttcaatatggggaagcccttcttcactctctcttcgagtgcatgctttgctattacctccagcaagttcaacgagtgccaactcaacaacctcaacgcgttggaacccgaccaccgcgttgagtccgaaggtggtcttattgaaacatggaactctcaacacccctgagctgcaatgcgccggtgtcactgtttccaaacgcaccctcaaccgcaacggcctccacttgccatcttactcaccttatccccaaatgatcattgtcgttcaaggtgcgtaatattagtaagaagtatttatcagcttaacgtgataacaataatagtaatatgaaatatttattaaattttttataattaatctctgctagaaaatttgattaatcatttttagtagaatttgttttttctcaactaggtttt

SEQ ID NO: 990 - DNA, 645 bp, Artificial; identical to SEQ ID NO: 665
  Mutations within GlyA3B4 introduced by GmGlyA3B4_T01TALE nuclease

SEQ ID NO: 991 - DNA, 622 bp, Artificial
  Mutations within GlyA3B4 introduced by GmGlyA3B4_T01TALE nuclease
gttcatgtacggttgcagatataaacgaagcatagcttatgtatgaggtgtaacaaaattggaaacaatagccatgcaaggtgaagaatgtcaccaactcagaaacccttcttcattgacgtgtccctcactcactctcctctcttcactataaatcgccactcttcgtgttctccacttcaccaactccttcaaacttattaacactttccttagttcaatatggggaagcccttcttcactctctctctttcttccctttgcttgctgtcgagtgcatgctttgctattacctccagcaagttcaacgagtgccaactcaacaacctcaacgcgttggaacccgaccaccgcgttgagtccgaaggtggtcttattgaaacatggaactctcaacaccctgagctgcaatgcgccggtgtcactgtttccaaacgcaccctcaaccgcaacggcctccacttgccatcttactcaccttatccccaaatgatcattgtcgttcaaggtgcgtaaatattagtaagaagtatttatcagcttaacgtgataacaataatagtaatatgaaatatttattaaattttttataattaatctctgctagaaaatttgattaatc

SEQ ID NO: 992 - DNA, 630 bp, Artificial
  Mutations within GlyA3B4 introduced by GmGlyA3B4_T01TALE nuclease
gttcatgtacggttgcagatataaacgaagcatagcttatgtatgaggtgtaacaaaattggaaacaatagccatgcaaggtgaagaatgtcaccaactcagaaacccttcttcattgacgtgtccctcactcactctcctctcttcactataaatcgccactcttcgtgttctccacttcaccaactccttcaaacttattaacactttccttagttcaatatggggaagcccttcttcactctctctctttcttccctttgcttgcttgtcgagtgcatgctttgctattacctccagcaagttcaacgagtgccaactcaacaacctcaacgcgttggaacccgaccaccgcgttgagtccgaaggtggtcttattgaaacatggaactctcaacaccctgagctgcaatgcgccggtgtcactgtttccaaacgcaccctcaaccgcaacggcctccacttgccatcttactcaccttatcccccaaatgatcattgtcgttcaaggtgcgtaatattagtaagaagtatttatcagcttaacgtgataacaataatagtaatatgaaatatttattaaattttttataattaatctctgctagaaaatttgattaatctttttag

SEQ ID NO: 993 - DNA, 612 bp, Artificial
  Mutations within GlyA3B4 introduced by GmGlyA3B4_T01TALE nuclease
gttcatgtacggttgcagatataaacgaaagcatagcttatgtatgaggtgtaacaaaattggaaacaaatagaccatgcaaggtgaagaatgtcaccaactcagaaacccttcttcattgacgtgtccctcactcactctcctctcttcactataaatcgccactcttcgtgttctccacttcaccaactccttcaaacttattaacactttccttagttcaatatggggaagcccttcttcactctctctctttcttccctttgcttgcttgtcgagtgcatgctttgctattacctccagcaagttcaacgagtgccaactcaacaacctcaacgcgttggaacccgaccaccgcgttgagtcccgaaggtggtcttattgaaacatggaactctcacaccctgagctgcaatgcgccggtgtcactgtttccaaacgcaccctcaaccgcaacggcctccacttgccatcttactcaccttatccccaaatgatcattgtcgttcaaggtgcgtaatattagtaagaagtatttatcagctttaacgtgataaacaataatagtaatatgaaatatttattaaattttttataattaatctctgctag

SEQ ID NO: 994 - DNA, 645 bp, Artificial
  Mutations within GlyA3B4 introduced by GmGlyA3B4_T01TALE nuclease
gttcatgtacggttgcagatataaacgaagcatagcttatgtatgaggtgtaacaaaattggaaacaatagccatgcaaggtgaagaatgtcaccaactcagaaacccttcttcattgacgtgtccctcactcactctcctctcttcactataaatcgccactcttcgtgttctccacttcaccaactccttcaaacttattaacactttccttagttcaatatggggaagcccttcttcactctctctctttcttccctttgcttgctttgctattacctccagcaagttcaacgagtgccaactcaacaacctcaacgcgttggaacccgaccaccgcgttgagtccgaaggtggtcttattgaaacatggaactctcaacacccctgagctgcaatgcgccggtgtcactgtttccaaacgcaccctcaaccgcaacggcctccacttgccatcttactcaccttatccccaaatgatcattgtcgttcaaggtgcgtaatattagtaagaagtatttatcagcttaacgtgataacaataatagtaatatgaaatatttattaaattttttataattaatctctgctagaaaatttgattaatcatttttagtagaatttgttttttctcaactaggtttt

SEQ ID NO: 995 - DNA, 663 bp, Artificial
  Mutations within GlyA3B4 introduced by GmGlyA3B4_T01TALE nuclease
gttcatgtacggttgcagatataaacgaagcatagcttatgtatgaggtgtaacaaaattggaaacaatagccatgcaaggtgaagaatgtcaccaactcagaaacccttcttcattgacgtgtccctcactcactctcctctcttcactataaatcgccactcttcgtgttctccacttcaccaactccttcaaacttattaacactttccttagttcaatatggggaagcccttcttcactctctctctttcttccctttgctcttgtcgagtgcatgctttgctattacctccagcaagttcaacgagtgccaactcaacaacctcaacgcgttggaacccgaccaccgcgttgagtccgaaggtggtcttattgaaacatggaactctcaacaccctgagctgcaatgcgccggtgtcactgtttccaaacgcaccctcaaccgcaacggcctccacttgccatcttactcaccttatccccaaatgatcattgtcgttcaaggtgcgtaatattagtaagaagtatttatcagcttaacgtgataacaataatagtaatatgaaatatttattaaattttttataattaatctctgctagaaaatttgattaatctttttagtagaattgtttttctcaactaggtttaaacaccaca

SEQ ID NO: 996 - DNA, 593 bp, Artificial
  Mutations within GlyA3B4 introduced by GmGlyA3B4_T01TALE nuclease
gttcatgtacggttgcagatataaacgaagcatagcttatgtatgaggtgtaacaaaattggaaacaatagccatgcaaggtgaagaatgtcaccaactcagaaacccttcttcattgacgtgtccctcactcactctcctctcttcactataaatcgccactcttcgtgttctccacttcaccaactccttcaaacttattaacactttccttagttcaatatggggaagcccttcttcactctctctctttcttccctttgcttgtcgagtgcatgctttgctattacctccagcaagttcaacgagtgccaactcaacaacctcaacgcgttggaacccgaccaccgcgttgagtccgaaggtggtcttattgaaacatggaactctcaacaccctgagctgcaatgcgccggtgtcactgtttccaaacgcaccctcaaccgcaacggcctccacttgccatcttactcaccttatcccccaaatgatcattgtcgttcaaggtgcgtaaatattagtaagaagtatttatcagcttaacgtgataacaataatagtaatatgaaatatttattaaattttttataatt

SEQ ID NO: 997 - DNA, 608 bp, Artificial; identical to SEQ ID NO: 546
  Mutations within GlyA3B4 introduced by GmGlyA3B4_T01TALE nuclease

SEQ ID NO: 998 - DNA, 516 bp, Artificial
  Mutations within GlyA3B4 introduced by GmGlyA3B4_T01TALE nuclease
gttcatgtacggttgcagatataaacgaagcatagcttatgtatgaggtgtaacaaaattggaaacaatagccatgcaaggtgaagaatgtcaccaactcagaaacccttcttcattgacgtgtccctcactcactctcctctcttcactataaatcgccactcttcgtgttctccacttcaccaactccttcaaacttattaacactttccttagttcaatatggggaagcccttcttcactctctctctttcttccctttgcttgccccgaccaccgcgttgagtccgaaggtggtcttattgaaacatggaactctcaacaccctgagctgcaatgcgccggtgtcactgtttccaaacgcaccctcaaccgcaacggcctccacttgccatcttactcaccttatccccaaatgatcattgtcgttcaaggtgcgtaatattagtaagaagtatttatcagcttaacgtgataacaataatagtaatatgaaatatttattaaattttttat

SEQ ID NO: 999 - DNA, 655 bp, Artificial
  Mutations within GlyA3B4 introduced by GmGlyA3B4_T01TALE nuclease
gttcatgtacggttgcagatataaacgaagcatagcttatgtatgaggtgtaacaaaattggaaacaatagccatgcaaggtgaagaatgtcaccaactcagaaacccttcttcattgacgtgtccctcactcactctcctctcttcactataaatcgccactcttcgtgttctccacttcaccaactccttcaaacttattaacactttccttagttcaatatggggaagcccttcttcactctctctctttcttccctttgcttgctattacctccagcaagttcaacgagtgccaactcaacaacctcaacgcgttggaacccgaccaccgcgttgagtccgaaggtggtcttattgaaacatggaactctcaacacccctgagctgcaatgcgccggtgtcactgtttccaaacgcacccctcaaccgcaacggcctccacttgccatcttactcaccttatcccccaaatgatcattgtcgttcaaggtgcgtaatattagtaagaagtatttatcagcttaacgtgataacaataatagtaatatgaaatattttattaaatttttttataattaatctctgctagaaaatttgattaatcattttttagtagaatttgttttttctcaactaggttttaaacaccaca

SEQ ID NO: 1000 - DNA, 631 bp, Artificial
  Mutations within GlyA3B4 introduced by GmGlyA3B4_T01TALE nuclease
gttcatgtacggttgcagatataaacgaagcatagcttatgtatgaggtgtaacaaaattggaaacaatagccatgcaaggtgaagaatgtcaccaactcagaaacccttcttcattgacgtgtccctcactcactctcctctcttcactataaatcgccactcttcgtgttctccacttcaccaactccttcaaacttattaacactttccttagttcaatatggggaagcccttcttcacttgtcgagtgcatgctttgctattacctccagcaagttcaacgagtgccaactcaacaacctcaacgcgttggaacccgaccaccgcgttgagtccgaaggtggtcttattgaaacatggaactctcaacacccctgagctgcaatgcgccggtgtcactgtttccaaacgcaccctcaaccgcaacggcctccacttgccatcttactcaccttatccccaaatgatcattgtcgttcaaggtgcgtaatattagtaagaagtatttatcagcttaacgtgataacaataatagtaatatgaaatattttattaaattttttataattaatctctgctagaaaatttgattaatcatttttagtagaatttgttttttctcaactagg

SEQ ID NO: 1001 - DNA, 445 bp, Artificial
  Mutations within GlyA3B4 introduced by GmGlyA3B4_T01TALE nuclease
gttcatgtacggttgcagatataaacgaagcatagcttatgtatgaggtgtaacaaaattggaaacaatagccatgcaaggtgaagaatgtcaccaactcagaaacccttcttcattgacgtgtccctcactcactctcctctcttcactataaatcgccactcttcgtgttctccacttcaccaactccttcaaacttattaacactttccttagttcaatatggggaagcccttcttcactctctctcttgtcgagtgcatgctttgctattacctccagcaagttcaacgagtgccaactcaacaacctcaacgcgttggaacccgaccaccgcgttgagtccgaaggtggtcttattgaaacatggaactctcaacaccctgagctgcaatgcgccggtgtcactgtttccaaacgcaccctcaaccgcaacggcccatcc

SEQ ID NO: 1002 - DNA, 428 bp, Artificial
  Mutations within GlyA3B4 introduced by GmGlyA3B4_T01TALE nuclease
gttcatgtacggttgcagatataaacgaagcatagcttatgtatgaggtgtaacaaaattggaaacaatagccatgcaaggtgaagaatgtcaccaactcagaaaccctcttctattgacgtgtccctcactcactctcctctcttcactataaatcgccactcattcgtcgttctcctacttcaccaactccttcaaacttattaacactttccttagttcaatatggggaagcccttcttcactctctctctttcttccctttgcttttgtctgagtgcatgctttgctattacctccagcaagttcaacgagtgccaactcaacaacctcaacgcgttggaacccgcaccaccgcgttgagtccgaaggtggtcttattgaaacatggaactcatcaacacctgagctgcaatgcgccggtgtca

SEQ ID NO: 1003 - DNA, 658 bp, Artificial
  Mutations within GlyA3B4 introduced by GmGlyA3B4_T01TALE nuclease
gttcatgtacggttgcagatataaacgaagcatagcttatgtatgaggtgtaacaaaattggaaacaatagccatgcaaggtgaagaatgtcaccaactcagaaacccttcttcattgacgtgtccctcactcactctcctctcttcactataaatcgccactcttcgtgttctccacttcaccaactccttcaaacttattaacactttccttagttcaatatggggaagcccttcttcactctctctctttcttccctttgcttcttgtcgagtgcatgctttgctattacctccagcaagttcaacgagtgccaactcaacaacctcaacgcgttggaacccgaccaccgcgttgagtccgaaggtggtcttattgaaacatggaactctcaacaccctgagctgcaatgcgccggtgtcactgtttccaaacgcaccctcaaccgcaacggcctccacttgccatcttactcaccttatccccaaatgatcattgtcgttcaaggtgcgtaatattagtaagaagtatttatcagcttaacgtgataacaataatagtaatatgaaatatttattaaattttttataattaatctctgctagaaaatttgattaatcatttttagtagaatttgttttttctcaactaggtttt

SEQ ID NO: 1004 - DNA, 656 bp, Artificial
  Mutations within GlyA3B4 introduced by GmGlyA3B4_T01TALE nuclease
gttcatgtacggttgcagatataaacgaagcatagcttatgtatgaggtgtaacaaaattggaaacaatagccatgcaaggtgaagaatgtcaccaactcagaaacccttcttcattgacgtgtccctcactcactctcctctcttcacgatttatagggttcacgctcaacaaaatcgcatatcaatttcacaacaattggtatgccaaacatatataattcactgtaataattataaggataaaatgaaatcttgtcgagtgcatgctttgctattacctccagcaagttcaacgagtgccaactcaacaacctcaacgcgttggaacccgaccaccgcgttgagtccgaaggtggtcttattgaaacatggaactctcaacaccctgagctgcaatgcgccggtgtcgctgtttccaaacgcaccctcaaccgcaacggcctccacttgccatcttactcaccttatccccaaatgatcattgtcgttcaaggtgcgtaatattagtaagaagtatttatcagctttaacgtgataacaataatagtaatatgaaatatttattaaattttttataattaatctctgctagaaaatttgattaatcatttttagtagaatttgttttttctcaactaggtttttaaaacacca

SEQ ID NO: 1005 - DNA, 581 bp, Artificial
  Mutations within GlyA3B4 introduced by GmGlyA3B4_T01TALE nuclease
gttcatgtacggttgcagatataaacgaagcatagcttatgtatgaggtgtaacaaaattggaaacaatagccatgcaaggtgaagaatgtcaccaactcagaaacccttcttcattgacgtgtccctcactcactctcctctcttcactataaatcgccactcttcgtgttctccacttcaccaactccttcaaacttattaacactttccttagttcaatatggggaagcccttcttcactctctctctttcttccctttgcttgctactactcttgtcgagtgcatgctttgctattacctccagcaagttcaacgagtgccaactcaacaacctcaacgcgttggaacccgaccaccgcgttgagtccgaaggtggtcttattgaaacatggaactctcaacaccctgagctgcaatgcgccggtgtcactgtttccaaacgcaccctcaaccgcaacggcctccacttgccatcttactcaccttatccccaaatgatcattgtcgttcaaggtgcgtatattagtaagaagtatttatcagcttaacgtgataacaataatagtaatatgaaata

SEQ ID NO: 1006 - DNA, 593 bp, Artificial
  Mutations within GlyA3B4 introduced by GmGlyA3B4_T01TALE nuclease
gttcatgtacggttgcagatataaacgaagcatagcttatgtatgaggtgtaacaaaattggaaacaatagccatgcaaggtgaagaatgtcaccaactcagaaacccttcttcattgacgtgtccctcactcactctcctctcttcactataaatcgccactcttcgtgttctccacttcaccaactccttcaaacttattaacactttccttagttcaatatggggaagcccttcttcactctctctctttcttccctttgcttgctcgtctccagcggctgttgccggtgctgtgccaggcccacggcttgaccccccagcaggtggtggccatcgccaactcttgtcgagtgcatgctttgctattacctccagcaagttcaacgagtgccaactcaacaacctcaacgcgttggaacccgaccaccgcgttgagtccgaaggtggtcttattgaaacatggaactctcaacaccctgagctgcaatgcgccggtgtcactgtttccaaacgcaccctcaaccgcaacggcctccacttgccatcttactcaccttatccccaaatgatcattgtcgttcaaggtgcgt

SEQ ID NO: 1007 - DNA, 730 bp, Artificial
  Mutations within GlyA3B4 introduced by GmGlyA3B4_T01TALE nuclease
gttcatgtacggttgcagatataaacgaagcatagcttatgtatgaggtgtaacaaaattggaaacaatagccatgcaaggtgaagaatgtcaccaactcagaaacccttcttcattgacgtgtccctcactcactctcctctcttcactataaatcgccactcttcgtgttctccacttcaccaactccttcaaacttattaacactttccttagttcaatatggggaagcccttcttcactctctctctttcttccctttgcttgctactccggggtcaagttgagcggggcacccgtcagtgcattgcgccatgcatgcactgcctccactgcggtcacgccgccacgttttgcaatcttgagaagttggcctcttgtcgagtgcatgctttgctattacctccagcaagttcaacgagtgccaactcaacacctcaacgcgttggaacccgaccaccgcgttgagtccgaaggtggtcttattgaaacatggaactctcaacaccctgagctgcaatgcgccggtgtcactgtttccaaacgcaccctcaaccgcaacggcctccacttgccatcttactcaccttatccccaaatgatcattgtcgttcaaggtgcgtaatattagtaagaagtatttatcgcttaacgtgataacaataatagtaatatgaaaatatttattaaattttttataattaatctctgctagaaaatttgattaatc

SEQ ID NO: 1008 - DNA, 679 bp, Artificial
  Mutations within GlyA3B4 introduced by GmGlyA3B4_T01TALE nuclease
gttcatgtacggttgcagatataaacgaagcatagcttatgtatgaggtgtaacaaaattggaaacaatagccatgcaaggtgaagaatgtcaccaactcagaaacccttcttcattgacgtgtccctcactcactctcctctcttcactataaatcgccactcttcgtgttctccacttcaccaactccttcaaacttattaacactttccttagttcaatatggggaagcccttcttcactctctctctttcttccctttgcttgctagcgcctgcttgccgccatcgtgcttgtcgagtgcatgctttgctattacctccagcaagttcaacgagtgccaactcaacaacctcaacgcgttggaacccgaccaccgcgttgagtccgaaggtggtcttattgaaacatggaactctcaacaccctgagctgcaatgcgccggtgtcactgtttccaaacgcaccctcaaccgcaacggcctccacttgccatcttactcaccttatccccaaatgatcattgtcgttcaaggtgcgtaatattagtaagaagtatttatcagcttaacgtgataacaataatagtaatatgaaatatttattaaatttttataattaatctctgctagaaaatttgattaatcatttttatgtagaatttgtttttctcaactagg

SEQ ID NO: 1009 - DNA, 645 bp, Artificial; identical to SEQ ID NO: 732
  Mutations within GlyA3B4 introduced by GmGlyA3B4_T01TALE nuclease

SEQ ID NO: 1010 - DNA, 580 bp, Artificial
  Mutations within GlyA3B4 introduced by GmGlyA3B4_T01TALE nuclease
gttcatgtacggttgcagatataaacgaagcatagcttatgtatgaggtgtaacaaaattggaaacaatagccatgcaaggtgaagaatgtcaccaactcagaaacccttcttcattgacgtgtccctcactcactctcctctcttcactataaatcgccactcttcgtgttctcacttcaccaactccttcaaacttattaacactttccttagttcaatatggggaagcccttcttcactctctctctttcttccctttgcttgctactactcttgtcgagtgcatgctttgctattacctccagcaagttcaacgagtgccaactcaacaacctcaacgcgttggaacccgaccaccgcgttgagtccgaaggtggtcttattgaaacatggaactctcaacaccctgagctgcaatgcgccggtgtcactgtttccaaacgcaccctcaaccgcaacggcctccacttgccatcttactcaccttatccccaaatgatcattgtcgttcaaggtgcgtatattagtaagaagtattttatcagcttaacgtgatacaataatagtaatatgaaata

SEQ ID NO: 1011 - DNA, 640 bp, Artificial
  Mutations within GlyA3B4 introduced by GmGlyA3B4_T01TALE nuclease
gttcatgtacggttgcagatataaacgaagcatagcttatgtatgaggtgtaacaaaattggaaacaatagccatgcaaggtgaagaatgtcaccaactcagaaacccttcttcattgacgtgtccctcactcactctcctctcttcacgatttatagggttcacgctcaacaaaatcgcatatcaatttcacaacaattggtatgccaaacatatataattcactgtaataattataaggataaaatgaaatcttgtcgagtgcatgctttgctattacctccagcaagttcaacgagtgccaactcaacaacctcaacgcgttggaacccgaccaccgcgttgagtccgaaggtggtcttattgaaacatggaactctcaacacccctgagctgcaatgcgccggtgtcactgtttccaaacgcaccctcaaccgcaacggcctccacttgccatcttactcaccttatcccccaaatgatcattgtcgttcaaggtgcgtaatattagtaagaagtatttatcagcttaacgtgataacaataatagtaatatgaaatatttattaaattttttataattaattctctgctagaaaatttgattaatcatttttagtagaatttgttttttctcaac

SEQ ID NO: 1012 - DNA, 739 bp, Artificial
  Mutations within GlyA3B4 introduced by GmGlyA3B4_T01TALE nuclease
  misc_feature (640); (683); (696): n is a or c or t or g
gttcatgtacggttgcagatataaacgaagcatagcttatgtatgaggtgtaacaaaattggaaacaatagccatgcaaggtgaagaatgtcaccaactcagaaacccttcttcattgacgtgtccctcactcactctcctctcttcactataaatcgccactcttcgtgttctccacttcaccaactccttcaaacttattaacactttccttagttcaatatggggaagcccttcttcactctctctctttcttccctttgcttgctttccagcgcctgcttgccaccaatattgctggcgatggccaccacctgctggggggtcaagccgtgggcctggcacagcaccggcaaccgcgctggaccgtctccagcgcctgcttgccgttgtcgagtgcatgcttttgctattacctccagcaagttcaacgagtgccaactcaacaacctcaacgcgttggaaccgaccaccgcgttgagtccgaaggtggtcttattgaaacatggaactctcaacaccctgagctgcaatgcgccggtgtcactgtttccaaacgcaccctcaaccgcaacggcctccacttgccattcttactcaccttatcccaaatgatcattgtcgttcaaggtgcgtaatnttagtaagaagtatttcatcagcttaacgtgataacaataatngtaatatgaaatntttattaaattttttataataatctctgctagaaaatttgatt

SEQ ID NO: 1013 - DNA, 538 bp, Artificial
  Mutations within GlyA3B4 introduced by GmGlyA3B4_T01TALE nuclease
gttcatgtacggttgcagatataaacgaagcatagcttatgtatgaggtgtaacaaaattggaaacaatagccatgcaaggtgaagaatgtcaccaactcagaaacccttcttcattgacgtgtccctcactcactctcctctcttcactataaatcgccactcttcgtgttctccacttcacctccagcaagttcaacgagtgccaactcaacaacctcaacgcgttggaacccgaccaccgcgttgagtccgaaggtggtcttattgaaacatggaactctcaacaccctgagctgcaatgcgccggtgtcactgtttccaaacgcaccctcaaccgcaacggcctccacttgccatcttactcaccttatccccaaatgatcattgtcgttcaaggtgcgtaatattagtaagaagtatttatcagcttaacgtgataacaataatagtaatatgaaatatttattaaattttttataattaatctctgctagaaaattgattaatcatttttagtagaatttgtttttctcaac

SEQ ID NO: 1014 - DNA, 672 bp, Artificial
  Mutations within GlyA3B4 introduced by GmGlyA3B4_T01TALE nuclease
gttcatgtacggttgcagatataaacgaagcatagcttatgtatgaggtgtaacaaaattggaaacaatagccatgcaaggtgaagaatgtcaccaactcagaaacccttcttcattgacgtgtccctcactcactctcctctcttcactataaatcgccactcttcgtgttctccacttcaccaactccttcaaacttattaacactttccttagttcaatatggggaagcccttcttcactctctctctttcttccctttgcttgctatgtcgagtgcatgctttgctattacctccagcaagttcaacgagtgccaaccatcaacctaaacctcagcgcgttggaaacccgaccaccgcgttgagtccgaaggtggtcttattgaaacatggaactctcaacaccctgagctgcaatgcgccggtgtcactgtttccaaacgcaccctcaaccgcaacggcctccacttgccatcttactcaccttatccccaaatgatcattgtcgttcaaggtgcgtaatattagtaagagtatttatcagcttaacgtgataacaataatagtaatatgaaatatttattaaatttttataattaatctctgctagaaaatttgattaatcattttagtagaatttgtttttctcaactaggtttttaaaacacca

SEQ ID NO: 1015 - DNA, 752 bp, Artificial
  Mutations within GlyA3B4 introduced by GmGlyA3B4_T01TALE nuclease
  misc_feature (642): n is a or c or t or g
gttcatgtacggttgcagatataaacgaagcatagcttatgtatgaggtgtaacaaaattggaaacaatagccatgcaaggtgaagaatgtcaccaactcagaaacccttcttcattgacgtgtccctcactcactctcctctcttcactataaatcgccactcttcgtgttctccacttcaccaactccttcaaacttattaacactttccttagttcaatatggggaagcccttcttcactctctctctttcttccctttgcttgcgccacgttttgcaatcttgagaagttggcctgtgtccaactgtaacggtggacctctcaactctcccgccaccgtgagcaaggcctccagagcgcgtgcgccggaccactgtttgccgacgctcttgtcgagtgcatgctttgctattacctccagcaagttcaacgagtgccaactcaacaacctcaacgcgttggaacccgaccaccgcgttgagtccgaaggtggtcttattgaaacatggactctcaacaccctgagctgcaatgcgccggtgtcactgtttccaaacgcaccctcaaccgcaacggcctccacttgccatcttactcaccttatccccaaatgatcattgtcgttcaaggtgcgtaatnttagtaagaagtatttatcagcttaacgtgataacaataatagtaatatgaaatatttattaaattttttataattaatctcttgctagaaaatttgattaatcattttt

SEQ ID NO: 1016 - DNA, 652 bp, Artificial
  Mutations within GlyA3B4 introduced by GmGlyA3B4_T01TALE nuclease
gttcatgtacggttgcagatataaacgaagcatagcttatgtatgaggtgtaacaaaattggaaacaatagccatgcaaggtgaagaatgtcaccaactcagaaacccttcttcattgacgtgtccctcactcactctcctctcttcactataaatcgccactcttcgtgttctccacttcaccaactccttcaaacttattaacactttccttagttcaatatggggaagcccttcttcactctctctctttcttccctttgcttgcttgtcgagtgcatgctttgctattacctccagcaagttcaacgagtgccaactcaacaacctcaacgcgttggaacccgaccaccgcgttgagtccgaaggtggtcttattgaaacatggaactctcaacaccctgagctgcaatgcgccggtgtcactgtttccaaacgcaccctcaaccgcaacggcctccacttgccatcttactcaccttatcccccaaatgatcattgtcgttcaaggtgcgtaatattagtaagaagtatttatcagcttaacgtgataacaataatagtaatatgaaatatttattaaattttttataattaatctctgctagaaaatttgattaatcatttttagtagaatttgttttttctcaac

SEQ ID NO: 1017 - DNA, 628 bp, Artificial
  Mutations within GlyA3B4 introduced by GmGlyA3B4_T01TALE nuclease
gttcatgtacggttgcagatataaacgaagcatagcttatgtatgaggtgtaacaaaattggaaacaatagccatgcaaggtgaagaatgtcaccaactcagaaacccttcttcattgacgtgtccctcactcactctcctctcttcactataaatcgccactcttcgtgttctccacttcaccaactccttcaaacttattaacactttccttagttcaatatggggaagcccttcttcactctctctctttcttccctttgcttgctactgcttgccaccgccattgctggcgatggccaccacctgctggggggtcaagccgtgggcctggcacagcaccggcaacagcgcctgcaccgtctccagcgcctgctttgctattacctccagcaagttcaacgagtgccactcaacacctcacgcgttggaacccgaccaccgcgttgagtccgaaggtggtcttattgaaacatggaactctcaacaccctgagctgcaatgcgccggtgtcactgtttccaaacgcaccctcaaccgcaacggcctccacttgccatcttactcaccttatccccaaatgatcattgtcgttcaaggtgcgtaatattagtaagaagtatttatc

SEQ ID NO: 1018 - DNA, 652 bp, Artificial
  Mutations within GlyA3B4 introduced by GmGlyA3B4_T01TALE nuclease
gttcatgtacggttgcagatataaacgaagcatagcttatgtatgaggtgtaacaaaattggaaacaatagccatgcaaggtgaagaatgtcaccaactcagaaacccttcttcattgacgtgtccctcactcactctcctctcttcactataaatcgccactcttcgtgttctccacttcaccaactccttcaaacttattaacactttccttagttcaatatggggaagcccttcttcactctctctctttcttccctttgcttgctcgagtgcatgctttgctattacctccagcaagttcaacgagtgccaactcaacaacctcaacgcgttggaacccgaccaccgcgttgagtccgaaggtggtcttattgaaacatggaacctctcaacacctgagctgcaatgcgccggtgtcactgtttccaaacgcaccctcaaccgcaacggcctccacttgccatcttactcaccttatcccccaaatgatcattgtcgttcaaggtgcgtaaatattagtaagaagtatttatcagcttaacgtgataacaataatagtaatatgaaatatttattaaattttttataattaatctctgctagaaaatttgattaatctttttagtagaattgttttttctcaactagg

SEQ ID NO: 1019 - DNA, 615 bp, Artificial
  Mutations within GlyA3B4 introduced by GmGlyA3B4_T01TALE nuclease
gttcatgtacggttgcagatataaacgaagcatagcttatgtatgaggtgtaacaaaattggaaacaatagccatgcaaggtgaagaatgtcaccaactcagaaacccttcttcattgacgtgtccctcactcactctcctctcttcactataaatcgccactcttcgtgttctccacttcaccaactccttcaaacttattaacactttccttagttcaatatggggaagcccttcttcactctctctctttcttccctttgcttgcttgtcgagtgcatgctttgctattacctccagcaagttcaacgagtgccaactcaacaacctcaacgcgttggaacccgaccaccgcgttgagtccgaaggtggtcttattgaaacatggaactctcaacaccctgagctgcaatgcgccggtgtcactgtttccaaacgcaccctcaaccgcaacggcctccacttgccatcttactcaccttactccccaaatgatcattgtcgttcaaggtgcgtaatattagtaaaaaaaaagaagttttatcagcttaacgtgataacaataatagtaatatgaaattatttattaaatttttataattaatctctgcttag

SEQ ID NO: 1020 - DNA, 658 bp, Artificial
  Mutations within GlyA3B4 introduced by GmGlyA3B4_T01TALE nuclease
  misc_feature (547): n is a or c or t or g
gttcatgtacggttgcagatataaacgaagcatagcttatgtatgaggtgtaacaaaattggaaacaatagccatgcaaggtgaagaatgtcaccaactcagaaacccttcttcattgacgtgtccctcactcactctcctctcttcactataaatcgccactcttcgtgttctccacttcaccaactccttcaaacttattaacactttccttagttcaatatggggaagcccttcttcactctctctctttcttccctttgcttgctttgctattacctccagcaagttcaacgagtgccactcacactcaacgcgttggaacccgaccaccgcgttgagtccgaaggtggtcttattgaaacatggaactctcaacaccctgagctgcaatgcgccggtgtcactgtttccaacgcaccctcaaccgcaacggcctccacttgccatcttactcaccttatcccccaaatgatcattgtcgttcaaggtgcgtaatattagtaagaagtatttatcagcttaacgtgataacaataatagtatntgaaatattttattaaatttttttataattaaatctcttgctagaaaattttgattaatcattttttagtagaattttgttttttctcaactaggtttttaaaacaccaca

SEQ ID NO: 1021 - DNA, 699 bp, Artificial
  Mutations within GlyA3B4 introduced by GmGlyA3B4_T01TALE nuclease
gttcatgtacggttgcagatataaacgaagcatagcttatgtatgaggtgtaacaaaattggaaacaatagccatgcaaggtgaagaatgtcaccaactcagaaacccttcttcattgacgtgtccctcactcactctcctctcttcactataaatcgccactcttcgtgttctccacttcaccaactccttcaaacttattaacactttccttagttcaatatggggaagcccttcttcactctctctctttcttccctttgcttgctggccatcgccagccacgatggcggcaagcaggcgctggagacggtctcttgtcgagtgcatgctttgctattacctccagcaagttcaacgagtgccaactcaacaacctcaacgcgttggaacccgaccaccgcgttgagtccgaaggtggtcttattgaaacatggaactctcaacaccctgagctgcaatgcgccggtgtcactgtttccaaacgcaccctcaaccgcaacggcctccacttgccatcttactcaccttatccccaaatgatcattgtcgttcaaggtgcgtaatattagtaagaagtatttatcagcttaacgtgataacaataatagtaatatgaaatatttattaaaattttttataaattaatctctgctagaaaatttgattaatctttttagtagaatttgtttttctcaa

SEQ ID NO: 1022 - DNA, 755 bp, Artificial
  Mutations within GlyA3B4 introduced by GmGlyA3B4_T01TALE nuclease
gttcatgtacggttgcagatataaacgaagcatagcttatgtatgaggtgtaacaaaattggaaacaatagccatgcaaggtgaagaatgtcaccaactcagaaacccttcttcattgacgtgtccctcactcactctcctctcttcactataaatcgccactcttcgtgttctccacttcaccaactccttcaaacttattaacactttccttagttcaatatggggaagcccttcttcactctctctctttcttccctttgcttgctgctggaccgtctccagcgcctgcttgccaccgccattgctggcgatggccaccacctgctggggggtcaagccgtgggcctggcacagcaccggcaacaggtgtcgagtgcatgctttgctattacctccagcaagttcaacgagtgccaactcaacacctcaacgcgttggaacccgaccaccgcgttgagtccgaaggtggtcttattgaaacatggaactctcaacaccctgagctgcaatgcgccggtgtcactgtttccaaacgcaccctcaaccgcaacggcctccacttgccatcttactcaccttatccccaaaatgatcattgtcgttcaaggtgcgtaatattagtaagaagtatttatcgcttaacgtgataacaataatagtaatatgaaaatatttattaaattttttataattaatctctgctagaaaatttgattaatcatttttagtagaatttgtttttctcaactagg

SEQ ID NO: 1023 - DNA, 652 bp, Artificial; identical to SEQ ID NO: 629
  Mutations within GlyA3B4 introduced by GmGlyA3B4_T01TALE nuclease

SEQ ID NO: 1024 - DNA, 658 bp, Artificial
  Mutations within GlyA3B4 introduced by GmGlyA3B4_T01TALE nuclease
gttcatgtacggttgcagatataaacgaagcatagcttatgtatgaggtgtaacaaaattggaaacaatagccatgcaaggtgaagaatgtcaccaactcagaaacccttcttcattgacgtgtccctcactcactctcctctcttcactataaatcgccactcttcgtgttctccacttcaccaactccttcaaacttattaacactttccttagttcaatatggggaagcccttcttcactctctctctttcttccctttgcttgctcttgtcgagtgcatgctttgctattacctccagcaagttcaacgagtgccaactcaacaacctcaacgcgttggaacccgaccaccgcgttgagtccgaaggtggtcttattgaaacatggaactctcaacaccctgagctgcaatgcgccggtgtcactgtttccaaacgcaccctcaaccgcaacggcctccacttgccatcttactcaccttatccccaaatgatcattgtcgttcaaggtgcgtaatattagtaagagtatttatcagcttaacgtgataacaataatagtaatatgaaatatttattaaatttttataattaatctctgctagaaaatttgattaatcattttagtagaatttgtttttctcaactaggttttt

SEQ ID NO: 1025 - DNA, 723 bp, Artificial
  Mutations within GlyA3B4 introduced by GmGlyA3B4_T01TALE nuclease
gttcatgtacggttgcagatataaacgaagcatagcttatgtatgaggtgtaacaaaattggaaacaatagccatgcaaggtgaagaatgtcaccaactcagaaacccttcttcattgacgtgtccctcactcactctcctctcttcactataaatcgccactcttcgtgttctccacttcaccaactccttcaaacttattaacactttccttagttcaatatggggaagcccttcttcactctctctctttcttccctttgcttgctattcctaatttacccttgccttttctctttctctttcttccctttgtcttactcttgtcgagtgcatgctttgctattacctccagcaagttcaacgagtgccaactcaacaaccctcaacgcgttggaaccccgaccaccgcgttgagtccgaaggtggtcttattgaaacatggaactctcaacaccctgagctgcaatgcgccggtgtcactgtttccaaacgcaccctcaaccgcaacggcctccacttgccatcttactcaccttatccccaaatgatcattgtcgttcaaggtgcgtaatattagtaagaagtattttatcagcttaacgtgatacaataatagtaatatgaaatatttattaaatttttataattaatctctgctagaaaatttgattaatcatttttagtagaatttgttttttctcaactaggttttaaaacacc

SEQ ID NO: 1026 - DNA, 686 bp, Artificial
  Mutations within GlyA3B4 introduced by GmGlyA3B4_T01TALE nuclease
gttcatgtacggttgcagatataaacgaagcatagcttatgtatgaggtgtaacaaaattggaaacaatagccatgcaaggtgaagaatgtcaccaactcagaaacccttcttcattgacgtgtccctcactcactctcctctcttcactataaatcgccactcttcgtgttctccacttcaccaactccttcaaacttattaacactttccttagttcaatatggggaagcccttcttcactctctctctttcttccctttgcttgctgccgtgggcctggcacagcaccggcaacagcgctggaccgtctccagcgcctcttgtcgagtgcatgctttgctattacctccagcaagttcaacgagtgccaactcaacaacctcaacgcgttggaacccgaccaccgcgttgagtccgaaggtggtcttattgaaacatggaactctcaacaccctgagctgcaatgcgccggtgtcactgtttccaaacgcaccctcaaccgcaacggcctccacttgccatcttactcacctttatccccaaatgatcattgtcgttcaaggtgcgtaatattagtaagaagtatttatcagcttaacgtgataacaataatagtaatatgaaatatttattaaaattttttataattaatctctgctagaaaaatttgattaatcatttttt

SEQ ID NO: 1027 - DNA, 610 bp, Artificial
  Mutations within GlyA3B4 introduced by GmGlyA3B4_T01TALE nuclease
gttcatgtacggttgcagatataaacgaagcatagcttatgtatgaggtgtaacaaaattggaaacaatagccatgcaaggtgaagaatgtcaccaactcagaaacccttcttcattgacgtgtccctcactcactctcctctcttcactataaatcgccactcttcgtgttctccacttcaccaactccttcaaacttattaacactttccttagttcaatatggggaagcccttcttcactctctctctttcttccctttgcttgctactactcttgtcgagtgcatgctttgctattacctccagcaagttcaacgagtgccaactcaacaacctcaacgcgttggaacccgaccaccgcgttgagtccgaaggtggtcttattgaaacatggaactctcaacaccctgagctgcaatgcgccggtgtcactgtttccaaacgcaccctcaaccgcaacggcctccacttgccatcttactcaccttatccccaaatgatcattgtcgttcaaggtgcgtaatattagtaagaagtatttatcagcttaacgtgatacaataatagtaatatgaaatattattaaattttttataattaatctctgc

SEQ ID NO: 1028 - DNA, 668 bp, Artificial
  Mutations within GlyA3B4 introduced by GmGlyA3B4_T01TALE nuclease
gttcatgtacggttgcagatataaacgaagcatagcttatgtatgaggtgtaacaaaattggaaacaatagccatgcaaggtgaagaatgtcaccaactcagaaacccttcttcattgacgtgtccctcactcactctcctctcttcactataaatcgccactcttcgtgttctccacttcaccaactccttcaaacttattaacactttccttagttcaatatggggaagcccttcttcactctctctctttcttccctttgcttgctcttgtcgagtgcatgctttgctattacctccagcaagttcaacgagtgccaactcaacaacctcaacgcgttggaacccgaccaccgcgttgagtccgaaggtggtcttattgaaacatggaactctcaacaccctgagctgcaatgcgccggtgtcactgtttccaaacgcaccctcaaccgcaacggcctccacttgccatcttactcaccttatccccaaatgatcattgtcgttcaaggtgcgtaatattagtaagaagtatttatcagcttaacgtgataacaataatagtaatatgaaatatttattaaatttttataattaatctctgctagaaaatttgattaatcattttagtagaatttgtttttctcaactaggtttttaaaacacca

SEQ ID NO: 1029 - DNA, 631 bp, Artificial
  Mutations within GlyA3B4 introduced by GmGlyA3B4_T01TALE nuclease
gttcatgtacggttgcagatataaacgaagcatagcttatgtatgaggtgtaacaaaattggaaacaatagccatgcaaggtgaagaatgtcaccaactcagaaacccttcttcattgacgtgtccctcactcactctcctctcttcactataaatcgccactcttcgtgttctccacttcaccaactccttcaaacttattaacactttccttagttcaatatggggaagcccttcttcactctctctctttcttccctttgcttgctactgcttgccaccgccattgctggcgatggccaccacctgctggggggtcaagccgtgggcctggcacagcaccggcaacagcgcctgcaccgtctccagcgcctgctttgctattacctccagcaagttcaacgagtgccaactcaacaacctcaacgcgttggaacccgaccaccgcgttgagtccgaaggtggtcttattgaaacatggaactctcaacaccctgagctgcaatgcgccggtgtcactgtttccaaacgcaccctcaaccgcaacggcctccacttgccatcttactcaccttatccccaaatgatcattgtcgttcaaggtgcgtaatattagtaagaagtatttatc

SEQ ID NO: 1030 - DNA, 635 bp, Artificial
  Mutations within GlyA3B4 introduced by GmGlyA3B4_T01TALE nuclease
gttcatgtacggttgcagatataaacgaagcatagcttatgtatgaggtgtaacaaaattggaaacaatagccatgcaaggtgaagaatgtcaccaactcagaaacccttcttcattgacgtgtccctcactcactctcctctcttcactataaatcgccactcttcgtgttctccacttcaccaactccttcaaacttattaacactttccttagttcaatatggggaagcccttcttcactctctctctttcttccctttgcttttgtcgagtgcatgctttgctattacctccagcaagtttcaacgagtgccaactcaacaacctcaacgcgttggaacccgaccaccgcgttgagtccgaaggtggtcttattgaaacatggaactctcaacaccctgagctgcaatgcgccggtgtcactgtttccaaacgcaccctcaaccgcaacggcctccacttgccatcttactcaccttatcccccaaatgatcattgtcgttcaaggtgcgtaatattagtaagaagtatttatcagcttaacgtgataacaataatagtaatatgaaatatttattaaattttttataattaatctctgctagaaaatttgattaatcatttttagtagaa

SEQ ID NO: 1031 - DNA, 513 bp, Artificial; identical to SEQ ID NO: 645
  Mutations within GlyA3B4 introduced by GmGlyA3B4_T01TALE nuclease

SEQ ID NO: 1032 - DNA, 668 bp, Artificial
  Mutations within GlyA3B4 introduced by GmGlyA3B4_T01TALE nuclease
gttcatgtacggttgcagatataaacgaagcatagcttatgtatgaggtgtaacaaaattggaaacaatagccatgcaaggtgaagaatgtcaccaactcagaaacccttcttcattgacgtgtccctcactcactctcctctcttcactataaatcgccactcttcgtgttctccacttcaccaactccttcaaacttattaacactttccttagttcaatatggggaagcccttcttcactctctctctttcttccctttgcttgctgtcgagtgcatgctttgctattacctccagcaagttcaacgagtgccaactcaacaacctcaacgcgttggaacccgaccaccgcgttgagtccgaaggtggtcttattgaaacatggaactctcaacaccctgagctgcaatgcgccggtgtcactgtttccaaacgcaccctcaaccgcaacggcctccacttgccatcttactcaccttatcccccaaatgatcattgtcgttcaaggtgcgtaaatattagtaagaagtatttatcagcttaacgtgataacaataatagtaatatgaaatatttattaaattttttataattaatctctgctagaaaatttgattaatctttttagtagaattgttttttctcaactaggtttaaaacaccaca

SEQ ID NO: 1033 - DNA, 632 bp, Artificial
  Mutations within GlyA3B4 introduced by GmGlyA3B4_T01TALE nuclease
gttcatgtacggttgcagatataaacgaagcatagcttatgtatgaggtgtaacaaaattggaaacaatagccatgcaaggtgaagaatgtcaccaactcagaaacccttcttcattgacgtgtccctcactcactctcctctcttcactataaatcgccactcttcgtgttctccacttcaccaactccttcaaacttattaacactttccttagttcaatatggggaagcccttcttcactctctctctttcttccctttgcttttgtcgagtgcatgctttgctattacctccagcaagttcaacgagtgccaactcaacaacctcaacgcgttggaacccgaccaccgcgttgagtccgaaggtggtcttattgaaacatggaactctcaacaccctgagctgcaatgcgccggtgtcactgtttccaaacgcaccctcaaccgcaacggcctccacttgccatcttactcaccttatccccaaatgatcattgtcgttcaaggtgcgtaatattagtaagaagtatttatcagcttaacgtgataacaataatagtaatatgaaatatttattaaattttttataattaatctctgctagaaaatttgattaatctttttagtagaa

SEQ ID NO: 1034 - DNA, 608 bp, Artificial
  Mutations within GlyA3B4 introduced by GmGlyA3B4_T01TALE nuclease
gttcatgtacggttgcagatataaacgaagcatagcttatgtatgaggtgtaacaaaattggaaacaatagccatgcaaggtgaagaatgtcaccaactcagaaacccttcttcattgacgtgtccctcactcactctcctctcttcactataaatcgccactcttcgtgttctccacttcaccaactccttcaaacttattaacactttccttagttcaatatggggaagcccttcttcactctctctctttcttccctttgcttgctctcgagtgcatgctttgctattacctccagcaagttcaacgagtgccaactcaacaacctcaacgcgttggaacccgaccaccgcgttgagtccgaaggtggtcttattgaaacatggaactctcaacaccctgagctgcaatgcgccggtgtcactgtttccaaacgcaccctcaaccgcaacggcctccacttgccatcttactcaccttatcccccaaatgatcattgtcgttcaaggtgcgtaaatattagtaagaagtatttatcagcttaacgtgataacaataatagtaatatgaaatatttattaaattttttataattaatctctgctag

SEQ ID NO: 1035 - DNA, 668 bp, Artificial
  Mutations within GlyA3B4 introduced by GmGlyA3B4_T01TALE nuclease
gttcatgtacggttgcagatataaacgaagcatagcttatgtatgaggtgtaacaaaattggaaacaatagccatgcaaggtgaagaatgtcaccaactcagaaacccttcttcattgacgtgtccctcactcactctcctctcttcactataaatcgccactcttcgtgttctccacttcaccaactccttcaaacttattaacactttccttagttcaatatggggaagcccttcttcactctctctctttcttccctttgcttgcttgtcgagtgcatgctttgctattacctccagcaagttcaacgagtgccaactcaacaacctcaacgcgttggaacccgaccaccgcgttgagtccgaaggtggtcttattgaaacatggaactctcaacaccctgagctgcaatgcgccggtgtcactgtttccaaacgcaccctcaaccgcaacggcctccacttgccatcttactcaccttatcccccaaatgatcattgtcgttcaaggtgcgtaatattagtaagaagtatttatcagcttaacgtgataacaataatagtaatatgaaatatttattaaattttttataattaatctctgctagaaaatttgattaatctttttagtagaattgttttttctcaactaggtttaaaacaccaca

SEQ ID NO: 1036 - DNA, 653 bp, Artificial
  Mutations within GlyA3B4 introduced by GmGlyA3B4_T01TALE nuclease
gttcatgtacggttgcagatataaacgaagcatagcttatgtatgaggtgtaacaaaattggaaacaatagccatgcaaggtgaagaatgtcaccaactcagaaacccttcttcattgacgtgtccctcactcactctcctctcttcactataaatcgccactcttcgtgttctccacttcaccaactccttcaaacttattaacactttccttagttcaatatggggaagcccttcttcactctctctctttcttccctttgcttgcttgtcgagtgcatgctttgctattacctccagcaagttcaacgagtgccaactcaacaacctcaacgcgttggaacccgaccaccgcgttgagtccgaaggtggtcttattgaaacatggaactctcaacaccctgagctgcaatgcgccggtgtcactgtttccaaacgcaccctcaaccgcaacggcctccacttgccatcttactcaccttatcccccaaatgatcattgtcgttcaaggtgcgtaatattagtaagaagtatttatcagcttaacgtgataacaataatagtaatatgaaatatttattaaattttttataattaatctctgctagaaaatttgaattaatcatttttatgtagaatttgttttttctcaa

SEQ ID NO: 1037 - DNA, 669 bp, Artificial
  Mutations within GlyA3B4 introduced by GmGlyA3B4_T01TALE nuclease
gttcatgtacggttgcagatataaacgaagcatagcttatgtatgaggtgtaacaaaattggaaacaatagccatgcaaggtgaagaatgtcaccaactcagaaacccttcttcattgacgtgtccctcactcactctcctctcttcactataaatcgccactcttcgtgttctccacttcaccaactccttcaaacttattaacactttccttagttcaatatggggaagcccttcttcactctctctctttcttccctttgcttgcttgtcgagtgcatgctttgctattacctccagcaagttcaacgagtgccaactcaacaacctcaacgcgttggaacccgaccaccgcgttgagtccgaaggtggtcttattgaaacatggaactctcaacaccctgagctgcaatgcgccggtgtcactgtttccaaacgcaccctcaaccgcaacggcctccacttgccatcttactcaccttatcccccaaatgatcattgtcgttcaaggtgcgtaatattagtaagaagtatttatcagcttaacgtgataacaataatagtaatatgaaatatttattaaattttttataattaatctctgctagaaaatttgattaatcatttttagtagaatttgttttttctcaactaggttttaaaacacca

SEQ ID NO: 1038 - DNA, 649 bp, Artificial
  Mutations within GlyA3B4 introduced by GmGlyA3B4_T01TALE nuclease
gttcatgtacggttgcagatataaacgaagcatagcttatgtatgaggtgtaacaaaattggaaacaatagccatgcaaggtgaagaatgtcaccaactcagaaacccttcttcattgacgtgtccctcactcactctcctctcttcactataaatcgccactcttcgtgttctccacttcaccaactccttcaaacttattaacactttccttagttcaatatggggaagcccttcttcactctctcttgtcgagtgcatgctttgctattacctccagcaagttcaacgagtgccaactcaacaacctcaacgcgttggaacccgaccaccgcgttgagtccgaaggtggtcttattgaaacatggaactctcaacacccctgagctgcaatgcgccggtgtcactgtttccaaacgcaccctcaaccgcaacggcctccacttgccatcttactcaccttatccccaaatgatcattgtcgttcaaggtgcgtaatattagtaagaagtatttatcagcttaacgtgataacaataatagtaatatgaaatatttattaaattttttataattaatctctgctagaaaatttgattaatcatttttagtagaatttgttttttctcaactaggttttaaaacacca

SEQ ID NO: 1039 - DNA, 667 bp, Artificial
  Mutations within GlyA3B4 introduced by GmGlyA3B4_T01TALE nuclease
gttcatgtacggttgcagatataaacgaagcatagcttatgtatgaggtgtaacaaaattggaaacaatagccatgcaaggtgaagaatgtcaccaactcagaaacccttcttcattgacgtgtccctcactcactctcctctcttcactataaatcgccactcttcgtgttctccacttcaccaactccttcaaacttattaacactttccttagttcaatatggggaagcccttcttcactctctctctttcttccctttgcttgtcgagtgcatgctttgctattacctccagcaagttcaacgagtgccaactcaacaacctcaacgcgttggaacccgaccaccgcgttgagtccgaaggtggtcttattgaaacatggaactctcaacaccctgagctgcaatgcgccggtgtcactgtttccaaacgcaccctcaaccgcaacggcctccacttgccatcttactcaccttatccccaaatgatcattgtcgttcaaggtgcgtaaatattagtaagaagtatttatcagcttaacgtgataacaataatagtaatatgaaatatttattaaattttttataattaatctctgctagaaaatttgattaatcatttttagtagaatttgttttttctcaactaggttttaaaacaccaca

SEQ ID NO: 1040 - DNA, 656 bp, Artificial
  Mutations within GlyA3B4 introduced by GmGlyA3B4_T01TALE nuclease
gttcatgtacggttgcagatataaacgaagcatagcttatgtatgaggtgtaacaaaattggaaacaatagccatgcaaggtgaagaatgtcaccaactcagaaacccttcttcattgacgtgtccctcactcactctcctctcttcactataaatcgccactcttcgtgttctccacttcaccaactccttcaaacttattaacactttccttagttcaatatggggaagcccttcttcactctctctctttcttccctttgcttgcttgtcgagtgcatgctttgctattacctccagcaagttcaacgagtgccaactcaacaacctcaacgcgttggaacccgaccaccgcgttgagtccgaaggtggtcttattgaaacatggaactctcaacaccctgagctgcaatgcgccggtgtcactgtttccaaacgcaccctcaaccgcaacggcctccacttgccatcttactcaccttatcccccaaatgatcattgtcgttcaaggtgcgtaatattagtaagaagtatttatcagcttaacgtgataacaataatagtaatatgaaatatttattaaattttttataattaatctctgctagaaaatttgattaatctttttagtagaattgtttttctcaactaggttt

SEQ ID NO: 1041 - DNA, 764 bp, Artificial
  Mutations within GlyA3B4 introduced by GmGlyA3B4_T01TALE nuclease
  misc_feature (649): n is a or c or t or g
gttcatgtacggttgcagatataaacgaagcatagcttatgtatgaggtgtaacaaaattggaaacaatagccatgcaaggtgaagaatgtcaccaactcagaaacccttcttcattgacgtgtccctcactcactctcctctcttcactataaatcgccactcttcgtgttctccacttcaccaactccttcaaacttattaacactttccttagttcaatatggggaagcccttcttcactctctctctttcttccctttgcttgctccacggcttgaccccggagcaggtggtggccatcgccagcaatattggtggcaagcaggcttcagcagagcgcagataccaaatactgttcttctagtgtagccgtagttaggccaccacttcaagaactcttgtcgagtgcatgctttgctattacctccagcaagttcaacgagtgccaactcaacaacctcaacgcgttggaacccgaccaccgcgttgagtccgaaggtggtcttattgaacatggactctcaacaccctgagctgcaatgcgccggtgtcactgtttccaaacgcaccctcaaccgcaacggcctccacttgccatcttactcaccttatccccaaatgatcattgtcgttcaaggtgcgtaatnttagtaagaagtatttatcagcttaacgtgataacaataatagtaatatgaaatatttattaaattttttataattaatctcttgctagaaaatttgattaatcatttttagtag

SEQ ID NO: 1042 - DNA, 655 bp, Artificial
  Mutations within GlyA3B4 introduced by GmGlyA3B4_T01TALE nuclease
gttcatgtacggttgcagatataaacgaagcatagcttatgtatgaggtgtaacaaaattggaaacaatagccatgcaaggtgaagaatgtcaccaactcagaaacccttcttcattgacgtgtccctcactcactctcctctcttcactataaatcgccactcttcgtgttctccacttcaccaactccttcaaacttattaacactttccttagttcaatatggggaagcccttcttcactctctctctttcttccctttgcttgctttgctattacctccagcaagttcaacgagtgccaactcaacaacctcaacgcgttggaacccgaccaccgcgttgagtccgaaggtggtcttattgaaacatggaactctcaacaccctgagctgcaatgcgccggtgtcactgtttccaaacgcaccctcaaccgcaacggcctccacttgccatcttactcaccttatcccccaaatgatcattgtcgttcaaggtgcgtaatattagtaagaagtatttatcagcttaacgtgataacaataatagtaatatgaaatatttattaaattttttataattaatctctgctagaaaatttgattaatcatttttagtagaatttgttttttctcaactaggttttaaacaccaca

SEQ ID NO: 1043 - DNA, 654 bp, Artificial
  Mutations within GlyA3B4 introduced by GmGlyA3B4_T01TALE nuclease
gttcatgtacggttgcagatataaacgaagcatagcttatgtatgaggtgtaacaaaattggaaacaatagccatgcaaggtgaagaatgtcaccaactcagaaacccttcttcattgacgtgtccctcactcactctcctctcttcactataaatcgccactcttcgtgttctccacttcaccaactccttcaaacttattaacactttccttagttcaatatggggaagcccttcttcactctctctctttcttccctttgcttgctacgagtgcatgctttgctattacctccagcaagttcaacgagtgccaactcaacaacctcaacgcgttggaacccgaccaccgcgttgagtccgaaggtggtcttattgaaacatggaactctcaacaccctgagctgcaatgcgccggtgtcactgtttccaaacgcaccctcaaccgcaacggcctccacttgccatcttactcaccttatccccaaatgatcattgtcgttcaaggtgcgtaaatattagtaagaagtatttatcagcttaacgtgataacaataatagtaatatgaaatatttattaaattttttataattaatctctgctagaaaatttgattaatctttttagtagaattgtttttctcaactaggttt

SEQ ID NO: 1044 - DNA, 644 bp, Artificial
  Mutations within GlyA3B4 introduced by GmGlyA3B4_T01TALE nuclease
gttcatgtacggttgcagatataaacgaagcatagcttatgtatgaggtgtaacaaaattggaaacaatagccatgcaaggtgaagaatgtcaccaactcagaaacccttcttcattgacgtgtccctcactcactctcctctcttcactataaatcgccactcttcgtgttctccacttcaccaactccttcaaacttattaacactttccttagttcaatatggggaagcccttcttcacttgtcgagtgcatgctttgctattacctccagcaagttcaacgagtgccaactcaacaacctcaacgcgttggaacccgaccaccgcgttgagtccgaaggtggtcttattgaaacatggaactctcaacaccctgagctgcaatgcgccggtgtcactgtttccaaacgcaccctcaaccgcaacggcctccacttgccatcttactcaccttatcccccaaatgatcattgtcgttcaaggtgcgtaatattagtaagaagtatttatcagcttaacgtgataacaataatagtaatatgaaatatttattaaattttttataattaatctctgctagaaaatttgattaatcatttttagtagaatttgttttttctcaactaggttttaaacaccaca

SEQ ID NO: 1045 - DNA, 604 bp, Artificial; identical to SEQ ID NO: 644
  Mutations within GlyA3B4 introduced by GmGlyA3B4_T01TALE nuclease

SEQ ID NO: 1046 - DNA, 622 bp, Artificial; identical to SEQ ID NO: 579
  Mutations within GlyA3B4 introduced by GmGlyA3B4_T01TALE nuclease

SEQ ID NO: 1047 - DNA, 656 bp, Artificial
  Mutations within GlyA3B4 introduced by GmGlyA3B4_T01TALE nuclease
gttcatgtacggttgcagatataaacgaagcatagcttatgtatgaggtgtaacaaaattggaaacaatagccatgcaaggtgaagaatgtcaccaactcagaaacccttcttcattgacgtgtccctcactcactctcctctcttcactataaatcgccactcttcgtgttctccacttcaccaactccttcaaacttattaacactttccttagttcaatatggggaagcccttcttcactctctctctttcttccctttgctttcttgtcgagtgcatgctttgctattacctccagcaagttcaacgagtgccaactcaacaacctcaacgcgttggaacccgaccaccgcgttgagtccgaaggtggtcttattgaaacatggaactctcaacaccctgagctgcaatgcgccggtgtcactgtttccaaacgcaccctcaaccgcaacggcctccacttgccatcttactcaccttatcccccaaatgatcattgtcgttcaaggtgcgtaatattagtaagaagtatttatcagcttaacgtgataacaataatagtaatatgaaatatttattaaattttttataattaatctctgctagaaaatttgattaatcatttttagtagaatttgttttttctcaactagg

SEQ ID NO: 1048 - DNA, 658 bp, Artificial
  Mutations within GlyA3B4 introduced by GmGlyA3B4_T01TALE nuclease
gttcatgtacggttgcagatataaacgaagcatagcttatgtatgaggtgtaacaaaattggaaacaatagccatgcaaggtgaagaatgtcaccaactcagaaacccttcttcattgacgtgtccctcactcactctcctctcttcactataaatcgccactcttcgtgttctccacttcaccaactccttcaaacttattaacactttccttagttcaatatggggaagcccttcttcactctctctctttcttccctttgcttgctttgctattacctccagcaagttcaacgagtgccaactcaacaacctcaacgcgttggaacccgaccaccgcgttgagtccgaaggtggtcttattgaaacatggaactctcaacaccctgagctgcaatgcgccggtgtcactgttttccaaacgcaccctcaaccgcaacggcctccacttgccatcttactcaccttatcccccaaatgatcattgtcgttcaaggtgcgtaaatattagtaagaagtatttatcagcttaacgtgataacaataatagtaatatgaaatatttattaaattttttataattaatctctgctagaaaatttgattaatcatttttagtagaatttgttttttctcaactaggttttaaaacaccaca

SEQ ID NO: 1049 - DNA, 655 bp, Artificial
  Mutations within GlyA3B4 introduced by GmGlyA3B4_T01TALE nuclease
gttcatgtacggttgcagatataaacgaagcatagcttatgtatgaggtgtaacaaaattggaaacaatagccatgcaaggtgaagaatgtcaccaactcagaaacccttcttcattgacgtgtccctcactcactctcctctcttcactataaatcgccactcttcgtgttctccacttcaccaactccttcaaacttattaacactttccttagttcaatatggggaagcccttcttcactctctctctttcttccctttgctttcttgtcgagtgcatgctttgctattacctccagcaagttcaacgagtgccaactcaacaacctcaacgcgttggaacccgaccaccgcgttgagtccgaaggtggtcttattgaaacatggaactctcaacaccctgagctgcaatgcgccggtgtcactgtttccaaacgcaccctcaaccgcaacggcctccacttgccatcttactcaccttatccccaaatgatcattgtcgttcaaggtgcgtaatattagtaagaagtatttatcagcttaacgtgataacaataatagtaatatgaaatatttattaaattttttataattaatctctgctagaaaatttgattaatcatttttagtagaatttgttttttctcaactagg

SEQ ID NO: 1050 - DNA, 620 bp, Artificial
  Mutations within GlyA3B4 introduced by GmGlyA3B4_T01TALE nuclease
gttcatgtacggttgcagatataaacgaagcatagcttatgtatgaggtgtaacaaaattggaaacaatagccatgcaaggtgaagaatgtcaccaactcagaaacccttcttcattgacgtgtccctcactcactctcctctcttcactataaatcgccactcttcgtgttctccacttcaccaactccttcaaacttattaacactttccttagttcaatatggggaagcccttcttcactctctctctttcttccctttgcttgctggccatcgccagccacgatggcggcaagcaggcgctggagacggtctcttgtcgagtgcatgctttgctattacctccagcaagttcaacgagtgccaactcaacaacctcaacgcgttggaacccgaccaccgcgttgagtccgaaggtggtcttattgaaaacatggaactctcaacaccctgagctgcaatgcgccggtgtcactgtttccaaacgcaccctcaaccgcaacggcctccacttgccatcttactcacctttatccccaaatgatcattgtcgttcaaggtgcgtaatattagtaagaagtatttatcagcttaacgtgataacaataatagtaatatg

SEQ ID NO: 1051 - DNA, 656 bp, Artificial
  Mutations within GlyA3B4 introduced by GmGlyA3B4_T01TALE nuclease
gttcatgtacggttgcagatataaacgaagcatagcttatgtatgaggtgtaacaaaattggaaacaatagccatgcaaggtgaagaatgtcaccaactcagaaacccttcttcattgacgtgtccctcactcactctcctctcttcactataaatcgccactcttcgtgttctccacttcaccaactccttcaaacttattaacactttccttagttcaatatggggaagcccttcttcactctctctctttcttccctttgcttgattgtcgagtgcatgctttgctattacctccagcaagttcaacgagtgccaactcaacaacctcaacgcgttggaacccgaccaccgcgttgagtccgaaggtggtcttattgaaacatggaactctcaacaccctgagctgcaatgcgccggtgtcactgtttccaaacgcaccctcaaccgcaacggcctccacttgccatcttactcaccttatccccaaatgatcattgtcgttcaaggtgcgtaaatattagtaagaagtatttatcagcttaacgtgataacaataatagtaatatgaaatatttattaaattttttataattaatctctgctagaaaatttgattaatcatttttagtagaatttgttttttctcaactagg

SEQ ID NO: 1052 - DNA, 609 bp, Artificial
  Mutations within GlyA3B4 introduced by GmGlyA3B4_T01TALE nuclease
gttcatgtacggttgcagatataaacgaagcatagcttatgtatgaggtgtaacaaaattggaaacaatagccatgcaaggtgaagaatgtcaccaactcagaaacccttcttcattgacgtgtccctcactcactctcctctcttcactataaatcgccactcttcgtgttctccacttcaccaactccttcaaacttattaacactttccttagttcaatatggggaagcccttcttcactctctctctttcttccctttgcttgattgtcgagtgcatgctttgctattacctccagcaagttcaacgagtgccaactcaacaacctcaacgcgttggaacccgaccaccgcgttgagtccgaaggtggtcttattgaaacatggaactctcaacaccctgagctgcaatgcgccggtgtcactgtttccaaacgcaccctcaaccgcaacggcctccacttgccatcttactcaccttactccccaaatgatcattgtcgttcaaggtgcgtaaatattagtcaagaagtatttatcagcttaacgtgataacaataatagtaatatgaaatatttattaaatttttataattaatctctgctag

SEQ ID NO: 1053 - DNA, 385 bp, Artificial
  Mutations within GlyA3B4 introduced by GmGlyA3B4_T01TALE nuclease
gttcatgtacggttgcagatataaacgaagcatagcttatgtatgaggtgtaacaaaattggaaacaatagccatgcaaggtgaagaatgtcaccaactcagaaacccttcttcattgacgtgtccctcactcactctcctctcttcactataaatcgccactcttcgtgttctccacttcaccaactccttcaaacttattaacactttccttagttcaatatggggaagcccttcttcactctctctctttcttccctttgcttgctcgtctccagcggctgttgccggtgctgtgccaggcccacggcttgaccccccagcaggtggtggccatcgccaactcttgtcgagtgcatgctttgctattacctccagcaagttc

SEQ ID NO: 1054 - DNA, 624 bp, Artificial
  Mutations within GlyA3B4 introduced by GmGlyA3B4_T01TALE nuclease
gttcatgtacggttgcagatataaacgaagcatagcttatgtatgaggtgtaacaaaattggaaacaatagccatgcaaggtgaagaatgtcaccaactcagaaacccttcttcattgacgtgtccctcactcactctcctctcttcactataaatcgccactcttcgtgttctccacttcaccaactccttcaaacttattaacactttccttagttcaatatggggaagcccttcttcactctctctctttcttccctttgcttgctttgtcgagtgcatgctttgctattacctccagcaagttcaacgagtgccaactcaacaacctcaacgcgttggaacccgaccaccgcgttgagtccgaaggtggtcttattgaaacatggaactctcaacaccctgagctgcaatgcgccggtgtcactgtttccaaacgcaccctcaaccgcaacggcctccacttgccatcttactcaccttatcccccaaatgatcattgtcgttcaaggtgcgtaatattagtaagaagtatttatcagcttaacgtgataacaataatagtaatatgaaatatttattaaattttttataattaatctctgctagaaaatttgattaatc

SEQ ID NO: 1055 - DNA, 603 bp, Artificial
  Mutations within GlyA3B4 introduced by GmGlyA3B4_T01TALE nuclease
gttcatgtacggttgcagatataaacgaagcatagcttatgtatgaggtgtaacaaaattggaaacaatagccatgcaaggtgaagaatgtcaccaactcagaaacccttcttcattgacgtgtccctcactcactctcctctcttcactataaatcgccactcttcgtgttctccacttcaccaactccttcaaacttattaacacttgtcgagtgcatgctttgctattacctccagcaagttcaacgagtgccaactcaacaacctcaacgcgttggaacccgaccaccgcgttgagtccgaaggtggtcttattgaacatggaactctcaacaccctgagctgcaatgcgccggtgtcactgtttccaaacgcaccctcaaccgcaacggcctccacttgccatcttactcaccttatccccaaatgatcattgtcgttcaaggtgcgtaatattagtaagaagtatttatcagcttaacgtgataacaataatagtaatatgaaatatttattaaattttttataattaatctctgctagaaaatttgattaatcatttttagtagaatttgtttttctcaactaggtttttaaaaca

SEQ ID NO: 1056 - DNA, 746 bp, Artificial
  Mutations within GlyA3B4 introduced by GmGlyA3B4_T01TALE nuclease
gttcatgtacggttgcagatataaacgaagcatagcttatgtatgaggtgtaacaaaattggaaacaatagccatgcaaggtgaagaatgtcaccaactcagaaacccttcttcattgacgtgtccctcactcactctcctctcttcactataaatcgccactcttcgtgttctccacttcaccaactccttcaaacttattaacactttccttagttcaatatggggaagcccttcttcactctctctctttcttccctttgcttgctatgaagaagaagctagaggtgggaaatactcaagtcattctcttgaaaaagttgctgcaatgatatgcaacaaaatatcactatacggagtcaaggtaattatagtgttcacatgaacatttctcccatgaaaatatatattttctgactcttgtcgagtgcatgctttgctattacctccagcaagttcaacgagtgccaactcaacaactcaacgcgttggaacccgaccaccgcgttgagtccgaaggtggtcttattgaaacatggaactctcaacaccctgagctgcaatgcgccggtgtcactgtttccaaacgcaccctcaaccgcaacggcctccacttgccatcttactcaccttatccccaaatgatcattgtcgttcaaggtgcgtaatattagtaagaagtatttatcagcttaacgtgataacaataatagtaatatgaaatatttattaaattttttataatt

SEQ ID NO: 1057 - DNA, 664 bp, Artificial
  Mutations within GlyA3B4 introduced by GmGlyA3B4_T01TALE nuclease
gttcatgtacggttgcagatataaacgaagcatagcttatgtatgaggtgtaacaaaattggaaacaatagccatgcaaggtgaagaatgtcaccaactcagaaacccttcttcattgacgtgtccctcactcactctcctctcttcactataaatcgccactcttcgtgttctccacttcaccaactccttcaaacttattaacactttccttagttcaatatggggaagcccttcttcactctctctctttcttccctttgcttgtgtcgagtgcatgctttgctattacctccagcaagttcaacgagtgccaactcaacaacctcaacgcgttggaacccgaccaccgcgttgagtccgaaggtggtcttattgaaacatggaactctcaacaccctgagctgcaatgcgccggtgtcactgtttccaaacgcaccctcaaccgcaacggcctccacttgccatcttactcaccttatccccaaatgatcattgtcgttcaaggtgcgtaatattagtaagaagtatttatcagcttaacgtgataacaataatagtaatatgaaatatttattaaattttttataattaatctctgctagaaaatttgattaatctttttagtagaattgttttttctcaactaggtttaaacaccaca

SEQ ID NO: 1058 - DNA, 596 bp, Artificial
  Mutations within GlyA3B4 introduced by GmGlyA3B4_T01TALE nuclease
gttcatgtacggttgcagatataaacgaagcatagcttatgtatgaggtgtaacaaaattggaaacaatagccatgcaaggtgaagaatgtcaccaactcagaaacccttcttcattgacgtgtccctcactcactctcctctcttcactataaatcgccactcttcgtgttctccacttcaccaactccttcaaacttattaacactttccttagttcaatatggggaagcccttcgagtgcatgctttgctattacctccagcaagttcaacgagtgccaactcaacaacctcaacgcgttggaacccgaccaccgcgttgagtccgaaggtggtcttattgaaacatggaactctcaacaccctgagctgcaatgcgccggtgtcactgtttccaaacgcaccctcaaccgcaacggcctccacttgccatcttactcaccttatccccaaatgatcattgtcgttcaaggtgcgtcaatattagtaagaagtatttatcagcttaacgtgataacaataatagtaatatgaaatatttattaatttttataattaatctctgctagaaaatttgattaatcatttttagtag

SEQ ID NO: 1059 - DNA, 620 bp, Artificial; identical to SEQ ID NO: 592
  Mutations within GlyA3B4 introduced by GmGlyA3B4_T01TALE nuclease

SEQ ID NO: 1060 - DNA, 686 bp, Artificial
  Mutations within GlyA3B4 introduced by GmGlyA3B4_T01TALE nuclease
gttcatgtacggttgcagatataaacgaagcatagcttatgtatgaggtgtaacaaaattggaaacaatagccatgcaaggtgaagaatgtcaccaactcagaaacccttcttcattgacgtgtccctcactcactctcctctcttcactataaatcgccactcttcgtgttctccacttcaccaactccttcaaacttattaacactttccttagttcaatatggggaagcccttcttcactctctctctttttcaatatggtggcctaactacggctacaccacggcttgtcgagtgcatgctttgctattacctccagcaagttcaacgagtgccaactcaacaacctcaacgcgttggaacccgaccaccgcgttgagtccgaaggtggtcttattgaaacatggaactctcaacaccctgagctgcaatgcgccggtgtcactgtttccaaacgcaccctcaaccgcaacggcctccacttgccatcttactcaccttatccccaaatgatcattgtcgttcaaggtgcgtaatattagtaagaagtatttatcagcttaacgtgataacaataatagtaatatgaaatatttattaaatttttataattaatctctgctagaaaatttgattaatcatttttagtagaatttgtttttctcaactaggttttaaaacacc

SEQ ID NO: 1061 - DNA, 578 bp, Artificial
  Mutations within GlyA3B4 introduced by GmGlyA3B4_T01TALE nuclease
gttcatgtacggttgcagatataaacgaagcatagcttatgtatgaggtgtaacaaaattggaaacaatagccatgcaaggtgaagaatgtcaccaactcagaaacccttcttcattgacgtgtccctcactcactctcctctcttcactataaatcgccactcttcgtgttctccacttcaccaactccttcaaacttattaacactttccttagttcaatatggggaagcccttcttcactctctctctttcttccctttgcttgccccgaccaccgcgttgagtccgaaggtggtcttattgaaacatggaactctcaacaccctgagctgcaatgcgccggtgtcactgtttccaaacgcaccctcaaccgcaacggcctccacttgccatcttactcaccttatccccaaatgatcattgtcgttcaaggtgcgtaatattagtaagaagtatttatcagcttaacgtgataacaataatagtaatatgaaatatttattaaattttttataattaatctctgctagaaaatttgattaatcattttagtagaatttgtttttctcaactagg

SEQ ID NO: 1062 - DNA, 667 bp, Artificial
  Mutations within GlyA3B4 introduced by GmGlyA3B4_T01TALE nuclease
gttcatgtacggttgcagatataaacgaagcatagcttatgtatgaggtgtaacaaaattggaaacaatagccatgcaaggtgaagaatgtcaccaactcagaaacccttcttcattgacgtgtccctcactcactctcctctcttcactataaatcgccactcttcgtgttctccacttcaccaactccttcaaacttattaacactttccttagttcaatatggggaagcccttcttcactctctctctttcttccctttgcttgcttgtcgagtgcatgctttgctattacctccagcaagttcaacgagtgccaactcaacaacctcaacgcgttggaacccgaccaccgcgttgagtccgaaggtggtcttattgaaacatggaactctcaacaccctgagctgcaatgcgccggtgtcactgtttccaaacgcaccctcaaccgcaacggcctccacttgccatcttactcaccttatcccccaaatgatcattgtcgttcaaggtgcgtaatattagtaagaagtatttatcagcttaacgtgataacaataatagtaatatgaaatatttattaaattttttataattaatctctgctagaaaatttgattaatctttttagtagaattgttttttctcaactaggtttaaacaccaca

SEQ ID NO: 1063 - DNA, 613 bp, Artificial
  Mutations within GlyA3B4 introduced by GmGlyA3B4_T01TALE nuclease
gttcatgtacggttgcagatataaacgaagcatagcttatgtatgaggtgtaacaaaattggaaacaatagccatgcaaggtgaagaatgtcaccaactcagaaacccttcttcattgacgtgtccctcactcactctcctctcttcactataaatcgccactcttcgtgttctccacttcaccaactccttcaaacttattaacactttccttagttcaatatggggaagcccttcttcactctctctctttcttccctttgcttgctactactcttgtcgagtgcatgctttgctattacctccagcaagttcaacgagtgccaactcaacaacctcaacgcgttggaacccgaccaccgcgttgagtccgaaggtggtcttattgaaacatggaactctcaacaccctgagctgcaatgcgccggtgtcactgtttccaaacgcaccctcaaccgcaacggcctccacttgccatcttactcaccttatccccaaatgatcattgtcgttcaaggtgcgtatattagtaagaagtatttatcagcttaacgtgatacaataatagtaatatgaaatatttattaaattttttataattaatctctgctag

SEQ ID NO: 1064 - DNA, 786 bp, Artificial
  Mutations within GlyA3B4 introduced by GmGlyA3B4_T01TALE nuclease
  misc_feature (700): n is a or c or t or g
gttcatgtacggttgcagatataaacgaagcatagcttatgtatgaggtgtaacaaaattggaaacaatagccatgcaaggtgaagaatgtcaccaactcagaaacccttcttcattgacgtgtccctcactcactctcctctcttcactataaatcgccactcttcgtgttctccacttcaccaactccttcaaacttattaacactttccttagttcaatatggggaagcccttcttcactctctctctttcttccctttgcttgctaccttttaaatatagatacaactactctaattctaatttttattttatagatgacgagacaataattaatttttttatacatcaaaacttagattaggagaaactcttctccaaataaagttagaagaaattacccttgtcgagtgcatgcttttgctattacctccagcaagttcaacgagtgccaactcaacaacctcaacgcgttggaacccgaccaccgcgttgagtccgaaggtggtcttattgaaacatggaactctcaacaccctgagctgcaatgcgccggtgtcactgtttccaaacgcaccctcaaccgcaacggcctccacttgccatcttactcaccttatccccaaatgatcattgtcgttcaaggtgcgtaatattagtaagaagtatttcatcagcttaacgtgataacaataatngtaatatgaaatattttattaaattttttataattaatctctgctagaaaatttgattaatcatttttagtagaatttgtttttct

SEQ ID NO: 1065 - DNA, 646 bp, Artificial; identical to SEQ ID NO: 564
  Mutations within GlyA3B4 introduced by GmGlyA3B4_T01TALE nuclease

SEQ ID NO: 1066 - DNA, 639 bp, Artificial
  Mutations within GlyA3B4 introduced by GmGlyA3B4_T01TALE nuclease
gttcatgtacggttgcagatataaacgaagcatagcttatgtatgaggtgtaacaaaattggaaacaatagccatgcaaggtgaagaatgtcaccaactcagaaacccttcttcattgacgtgtccctcactcactctcctctcttcactataaatcgccactcttcgtgttctccacttcaccaactccttcaaacttattaacactttccttagttcaatatggggaagcccttcttcactctctctctttcttccctttgcttgctatttgctattacctccagcaagttcaacgagtgccaactcaacaacctcacgcgttggaacccgaccaccgcgttgagtccgaaggtggtcttattgaaacatggaactctcaacaccctgagctgcaatgcgccggtgtcactgttttccaaacgcaccctcaaccgcaacggcctccacttgccatcttactcaccttatccccaaatgatcattgtcgttcaaggtgcgtaatattagtaagaagtatttatcagcttaacgtgataacaataatagtaatatgaaatatttattaaattttttataattaattctctgctagaaaatttgatttaatcatttttagtagaatttgttttttctcaa

SEQ ID NO: 1067 - DNA, 581 bp, Artificial
  Mutations within GlyA3B4 introduced by GmGlyA3B4_T01TALE nuclease
gttcatgtacggttgcagatataaacgaagcatagcttatgtatgaggtgtaacaaaattggaaacaatagccatgcaaggtgaagaatgtcaccaactcagaaacccttcttcattgacgtgtccctcactcactctcctctcttcactataaatcgccactcttcgtgttctccacttcaccaactccttcaaacttattaacactttccttagtttccagcaagttcaacgagtgccaactcaacaacctcaacgcgttggaacccgaccaccgcgttgagtccgaaggtggtcttattgaaacatggaactctcaacaccctgagctgcaatgcgccggtgtcactgtttccaaacgcaccctcaaccgcaacggcctccacttgccatcttactcaccttatccccaaatgatcattgtcgttcaaggtgcgtaatattagtaagaagtatttatcagcttaacgtgataacaataatagtaatatgaaatatttattaaattttttataattaatctctgctagaaaatttgattaatcatttttagtagaatttgtttttctcaactaggtttt

SEQ ID NO: 1068 - DNA, 716 bp, Artificial
  Mutations within GlyA3B4 introduced by GmGlyA3B4_T01TALE nuclease
gttcatgtacggttgcagatataaacgaagcatagcttatgtatgaggtgtaacaaaattggaaacaatagccatgcaaggtgaagaatgtcaccaactcagaaacccttcttcattgacgtgtccctcactcactctcctctcttcactataaatcgccactcttcgtgttctccacttcaccaactccttcaaacttattaacactttccttagttcaatatggggaagcccttcttcactctctctctttcttccctttgcttgctattcctaatttacccttgccttttctctttctctttcttccctttgtcttactcttgtcgagtgcatgctttgctattacctccagcaagtttcaacgagtgccaactcaacaacctcaacgcgttggaaccccgaccaccgcgttgagtccgaaggtggtcttattgaaacatggaactctcaacaccctgagctgcaatgcgccggtgtcactgtttccaaacgcaccctcaaccgcaacggcctccacttgccatcttactcaccttatccccaaatgatcattgtcgttcaaggtgcgtaatattagtaagaagtatttatcagcttaacgtgataacaataatagtaatatgaaatatttattaaattttttataattaatctctgctagaaaatttgattaatcatttttagtagaatttgttttttctcaactaggtttt

SEQ ID NO: 1069 - DNA, 581 bp, Artificial; identical to SEQ ID NO: 1005
  Mutations within GlyA3B4 introduced by GmGlyA3B4_T01TALE nuclease

SEQ ID NO: 1070 - DNA, 656 bp, Artificial
  Mutations within GlyA3B4 introduced by GmGlyA3B4_T01TALE nuclease
gttcatgtacggttgcagatataaacgaagcatagcttatgtatgaggtgtaacaaaattggaaacaatagccatgcaaggtgaagaatgtcaccaactcagaaacccttcttcattgacgtgtccctcactcactctcctctcttcactataaatcgccactcttcgtgttctccacttcaccaactccttcaaacttattaacactttccttagttcaatatggggaagcccttcttcactctctctctttcttccctttgcttgctatttgctattacctccagcaagttcaacgagtgccaactcaacaacctcaacgcgttggaacccgaccaccgcgttgagtccgaaggtggtcttattgaaacatggaactctcaacacccctgagctgcaatgcgccggtgtcactgtttccaaacgcaccctcaaccgcaacggcctccacttgccatcttactcaccttatccccaaatgatcattgtcgttcaaggtgcgtaatattagtaagaagtatttatcagcttaacgtgataacaataatagtaatatgaaatatttattaaattttttataattaatctctgctagaaaatttgattaatcatttttagtagaatttgttttttctcaactaggttttaaaacacca

SEQ ID NO: 1071 - DNA, 595 bp, Artificial
  Mutations within GlyA3B4 introduced by GmGlyA3B4_T01TALE nuclease
gttcatgtacggttgcagatataaacgaagcatagcttatgtatgaggtgtaacaaaattggaaacaatagccatgcaaggtgaagaatgtcaccaactcagaaacccttcttcattgacgtgtccctcactcactctcctctcttcactataaatcgccactcttcgtgttctccacttcaccaactccttcaaacttattaacactttccttagttcaatatggggaagcccttcttcactctctctctttcttgtcgagtgcatgctttgctattacctccagcaagttcaacgagtgccaactcaacaacctcaacgcgttggaacccgaccaccgcgttgagtccgaaggtggtcttattgaaacatggaactctcaacaccctgagctgcaatgcgccggtgtcactgtttccaaacgcaccctcaaccgcaacggcctccacttgccatcttactcaccttatcccccaaatgatcattgtcgttcaaggtgcgtaaatattagtaagaagtatttatcagcttaacgtgataacaataatagtaatatgaaatatttattaaattttttataattaatctctgctag

SEQ ID NO: 1072 - DNA, 664 bp, Artificial
  Mutations within GlyA3B4 introduced by GmGlyA3B4_T01TALE nuclease
gttcatgtacggttgcagatataaacgaagcatagcttatgtatgaggtgtaacaaaattggaaacaatagccatgcaaggtgaagaatgtcaccaactcagaaacccttcttcattgacgtgtccctcactcactctcctctcttcactataaatcgccactcttcgtgttctccacttcaccaactccttcaaacttattaacactttccttagttcaatatggggaagcccttcttcactctctctctttcttccctttgcttgctcttgtcgagtgcatgctttgctattacctccagcaagttcaacgagtgccaactcaacaacctcaacgcgttggaacccgaccaccgcgttgagtccgaaggtggtcttattgaaacatggaactctcaacaccctgagctgcaatgcgccggtgtcactgtttccaaacgcaccctcaaccgcaacggcctccacttgccatcttactcaccttatccccaaatgatcattgtcgttcaaggtgcgtaatattagtaagagtatttatcagcttaacgtgataacaatatagtaatatgaaatatttattaaatttttataattaatctctgctagaaaatttgattaatcattttagtagaatttgttttctcaactaggtttttaaacaaca

SEQ ID NO: 1073 - DNA, 600 bp, Artificial
  Mutations within GlyA3B4 introduced by GmGlyA3B4_T01TALE nuclease
gttcatgtacggttgcagatataaacgaagcatagcttatgtatgaggtgtaacaaaattggaaacaatagccatgcaaggtgaagaatgtcaccaactcagaaacccttcttcattgacgtgtccctcactcactctcctctcttcactataaatcgccactcttcgtgttctccacttcaccaactccttcaaacttattaacactttccttagttcaatatggggaagcccttcttcactctctctctttcttccctttgcttgctcgtctccagcggctgttgccggtgctgtgccaggcccacggcttgaccccccagcaggtggtggccatcgccaactcttgtcgagtgcatgctttgctattacctccagcaagttcaacgagtgccaactcaacaacctcaacgcgttggaacccgaccaccgcgttgagtccgaaggtggtcttattgaaacatggaactctcaacaccctgagctgcaatgcgccggtgtcactgtttccaaacgcaccctcaaccgcaacggcctccacttgccatctttactcaccttatccccaaatgatcattgtcgttcaaggtgcgtaatatt

SEQ ID NO: 1074 - DNA, 670 bp, Artificial; identical to SEQ ID NO: 617
  Mutations within GlyA3B4 introduced by GmGlyA3B4_T01TALE nuclease

SEQ ID NO: 1075 - DNA, 653 bp, Artificial
  Mutations within GlyA3B4 introduced by GmGlyA3B4_T01TALE nuclease
gttcatgtacggttgcagatataaacgaagcatagcttatgtatgaggtgtaacaaaattggaaacaatagccatgcaaggtgaagaatgtcaccaactcagaaacccttcttcattgacgtgtccctcactcactctcctctcttcactataaatcgccactcttcgtgttctccacttcaccaactccttcaaacttattaacactttccttagttcaatatggggaagcccttcttcactctctctcttgtcgagtgcatgctttgctattacctccagcaagttcaacgagtgccaactcaacaacctcaacgcgttggaacccgaccaccgcgttgagtccgaaggtggtcttattgaaacatggaactctcaacaccctgagctgcaatgcgccggtgtcactgtttccaaacgcaccctcaaccgcaacggcctccacttgccatcttactcaccttatccccaaatgatcattgtcgttcaaggtgcgtaaatattagtaagaagtatttatcagcttaacgtgataacaataatagtaatatgaaatatttattaaattttttataattaatctctgctagaaaatttgattaatcatttttagtagaatttgttttttctcaactaggttttaaaacaccaca

SEQ ID NO: 1076 - DNA, 836 bp, Artificial
  Mutations within GlyA3B4 introduced by GmGlyA3B4_T01TALE nuclease
gttcatgtacggttgcagatataaacgaagcatagcttatgtatgaggtgtaacaaaattggaaacaatagccatgcaaggtgaagaatgtcaccaactcagaaaccccttcttcattgacgtgtccctcactcactctcctctcttcactataaatcgccactcttcgtgttctccacttcaccaactccttcaaacttattaacactttccttagttcaatatggggaagcccttcttcactctctctctttcttccctttgcttgcttacgccagctggcgaaaggggatgtgctgcaaggcgattaagttgggtaacgccagggttttcccagtcacgacgttgtaaaaacgacggccagtgaattcgagctcggtacctcgcgaatgcatctagatccaatgatcatgagcggagaattaagggagtcacgttatgaccccgccgatgacgcgggacaagccgtttacgtttggaactgacagaaccgcaacgttgtcgagtgcatgctttgctatttacctccagcaagttcaacgagtgccaactcaacaacctcaacgcgtttggaacccgaccaaccgcgttgagtccgaaggtggtcttattgaacatggactctcaacacctgagctgcaatgcgccggtgtcactgtttccaaacgcaccctcaaaccgcaacggcctccacttgccatcttactcaccttatccccaaatgatcattgtcgttcaaggtgcgtaatattagtaagaagtatttatcagcttaacgtgataacaataatagtaatatgaaatatttattaaattttttataattaatctctgct

SEQ ID NO: 1077 - DNA, 603 bp, Artificial
  Mutations within GlyA3B4 introduced by GmGlyA3B4_T01TALE nuclease
gttcatgtacggttgcagatataaacgaagcatagcttatgtatgaggtgtaacaaaattggaaacaatagccatgcaaggtgaagaatgtcaccaactcagaaacccttcttcattgacgtgtccctcactcactctcctctcttcactataaatcgccactcttcgtgttctccacttcaccaactccttcaaacttattaacactttccttgtcgagtgcatgctttgctattacctccagcaagttcaacgagtgccaactcaacaacctcaacgcgttggaacccgaccaccgcgttgagtccgaaggtggtcttattgaaacatggaactctcaacaccctgagctgcaatgcgccggtgtcactgtttccaaacgcaccctcaaccgcaacggcctccacttgccatcttactcaccttatccccaaatgatcattgtcgttcaaggtgcgtaatattagtaagaagtatttatcagcttaacgtgataacaatatagtaatatgaaatatttattaaattttttataattaatctctgctagaaaatttgatttaatcatttttagtagaatttgtttttctcaactaggttttt

SEQ ID NO: 1078 - DNA, 631 bp, Artificial
  Mutations within GlyA3B4 introduced by GmGlyA3B4_T01TALE nuclease
gttcatgtacggttgcagatataaacgaagcatagcttatgtatgaggtgtaacaaaattggaaacaatagccatgcaaggtgaagaatgtcaccaactcagaaacccttcttcattgacgtgtccctcactcactctcctctcttcactataaatcgccactcttcgtgttctccacttcaccaactccttcaaacttattaacactttccttagttcaatatggggaagcccttcttcactctctctctttcttccctttgctattacctccagcaagttcaacgagtgccaactcaacaacctcaacgcgttggaacccgaccaccgcgttgagtccgaaggtggtcttattgaaacatggaactctcaacacccctgagctgcaatgcgccggtgtcactgtttccaaacgcaccctcaaccgcaacggcctccacttgccatcttactcaccttatcctcaaatgatcattgtcgttcaaggtgcgtaatattagtaagaagtatttatcagcttaacgtgataacaataatagtaatatgaaatatttattaaattttttataattaattctctgctagaaaatttgattaatcatttttagtagaatttgttttttctcaacta

SEQ ID NO: 1079 - DNA, 605 bp, Artificial
  Mutations within GlyA3B4 introduced by GmGlyA3B4_T01TALE nuclease
gttcatgtacggttgcagatataaacgaagcatagcttatgtatgaggtgtaacaaaattggaaacaatagccatgcaaggtgaagaatgtcaccaactcagaaacccttcttcattgacgtgtccctcactcactctcctctcttcactataaatcgccactcttcgtgttctccacttcaccaactccttcaaacttattaacactttccttagttcaatatggggaagcccttcttcactctctctctttcttccctttgctgtcgagtgcatgctttgctattacctccagcaagttcaacgagtgccaactcaacaacctcaacgcgttggaacccaaccaccgcgttgagtccgaaggtggtcttattgaaacatggaactctcaacaccctgagctgcaatgcgccggtgtcactgtttccaaacgcaccctcaaccgcaacggcctccacttgccatcttactcaccttatcccccaaatgatcattgtcgttcaaggtgcgtaaatattagtaagaagtatttatcagctttaacgtgataacaataatagtaatatgaaatatttattaaattttttataattaatctctgctag

SEQ ID NO: 1080 - DNA, 639 bp, Artificial
  Mutations within GlyA3B4 introduced by GmGlyA3B4_T01TALE nuclease
gttcatgtacggttgcagatataaacgaagcatagcttatgtatgaggtgtaacaaaattggaaacaatagccatgcaaggtgaagaatgtcaccaattcagaaacccttcttcattgacgtgtccctcactcactctcctctcttcactataaatcgccactcttcgtgttctccacttcaccaactccttcaaacttattaacactttccttagttcaatatggggaagcccttcttcactctctctctttcttccctttgcttgctattacctccagcaagttcaacgagtgccaactcaacaacctcaacgcgttggaacccgaccaccgcgttgagtccgaaggtggtcttattgaaacatggaactctcaacaccctgagctgcaatgcgccggtgtcactgtttccaaacgcaccctcaaccgcaacggcctccacttgccatcttactcaccttatccccaaatgatcattgtcgttcaaggtgcgtaatattagtaagaagtatttatcagcttaacgtgataacaataatagtaatatgaaatatttattaaattttttataattaatctctgctagaaaatttgattaatcatttttagtagaatttgttttttctcaactaggtttt

SEQ ID NO: 1081 - DNA, 649 bp, Artificial
  Mutations within GlyA3B4 introduced by GmGlyA3B4_T01TALE nuclease
gttcatgtacggttgcagatataaacgaagcatagcttatgtatgaggtgtaacaaaattggaaacaatagccatgcaaggtgaagaatgtcaccaactcagaaacccttcttcattgacgtgtccctcactcactctcctctcttcactataaatcgccactcttcgtgttctccacttcaccaactccttcaaacttattaacactttccttagttcaatatggggaagcccttcttcactctctctctttcttccctttgcttgtcgagtgcatgctttgctattacctccagcaagttcaacgagtgccaactcaacaacctcaacgcgttggaacccgaccaccgcgttgagtccgaaggtggtcttattgaaacatggaactctcaacaccctgagctgcaatgcgccggtgtcactgtttccaacgcaccctcaaccgcaacggcctccacttgccatcttactcaccttatccccaaatgatcattgtcgttcaaggtgcgtaaatattagtaagaagtatttatcagcttaacgtgataacaataatagtaatatgaaatatttattaaattttttataattaatctctgctagaaaatttgattaatctttttagtagaattgttttttctcaactagg

SEQ ID NO: 1082 - DNA, 637 bp, Artificial; identical to SEQ ID NO: 597
  Mutations within GlyA3B4 introduced by GmGlyA3B4_T01TALE nuclease

SEQ ID NO: 1083 - DNA, 579 bp, Artificial
  Mutations within GlyA3B4 introduced by GmGlyA3B4_T01TALE nuclease
gttcatgtacggttgcagatataaacgaagcatagcttatgtatgaggtgtaacaaaattggaaacaatagccatgcaaggtgaagaatgtcaccaactcagaaacccttcttcattgacgtgtccctcactcactctcctctcttcactataaatcgccactcttcgtgttctccacttcaccaactccttcaaacttattaacactttccttagttcaatatggggaagcccttcttcactctctctctttcttccctttgcttgccccgaccaccgcgttgagtccgaaggtggtcttattgaaacatggaactctcaacaccctgagctgcaatgcgccggtgtcactgtttccaaacgcaccctcaaccgcaacggcctccacttgccatcttactcaccttatccccaaaatgatcattgtcgttcaaggtgcgtaatattagtaagaagtatttatcagcttaacgtgataacaataatagtaatatgaaatatttattaaattttttataattaatctctgctagaaaatttgattaatcattttagtagaatttgtttttctcaactagg

SEQ ID NO: 1084 - DNA, 668 bp, Artificial
  Mutations within GlyA3B4 introduced by GmGlyA3B4_T01TALE nuclease
gttcatgtacggttgcagatataaacgaagcatagcttatgtatgaggtgtaacaaaattggaaacaatagccatgcaaggtgaagaatgtcaccaactcagaaacccttcttcattgacgtgtccctcactcactctcctctcttcactataaatcgccactcttcgtgttctccacttcaccaactccttcaaacttattaacactttccttagttcaatatggggaagcccttcttcactctctctctttcttccctttgctttgtcgagtgcatgctttgctattacctccagcaagttcaacgagtgccaactcaacaacctcaacgcgttggaacccgaccaccgcgttgagtccgaaggtggtcttattgaaacatggaactctcaacaccctgagctgcaatgcgccggtgtcactgtttccaaacgcaccctcaaccgcaacggcctccacttgccatcttactcaccttatcccccaaatgatcattgtcgttcaaggtgcgtaatattagtaagaagtatttatcagcttaacgtgataacaataatagtaatatgaaatatttattaaattttttataattaatctctgctagaaaatttgattaatcatttttagtagaatttgttttttctcaactaggttttaaaacaccaca

SEQ ID NO: 1085 - DNA, 619 bp, Artificial
  Mutations within GlyA3B4 introduced by GmGlyA3B4_T01TALE nuclease
gttcatgtacggttgcagatataaacgaagcatagcttatgtatgaggtgtaacaaaattggaaacaatagccatgcaaggtgaagaatgtcaccaactcagaaacccttcttcattgacgtgtccctcactcactctcctctcttcactataaatcgccactcttcgtgttctccacttcaccaactccttcaaacttattaacactttccttagttcaatatggggaagcccttcttcactctctctctttcttccctttgctttgtcgagtgcatgctttgctattacctccagcaagttcaacgagtgccaactcaacaacctcaacgcgttggaacccgaccaccgcgttgagtccgaaggtggtcttattgaaacatggaactctcaacaccctgagctgcaatgcgccggtgtcactgtttccaaacgcaccctcaaccgcaacggcctccacttgccatcttactcaccttatccccaaatgatcattgtcgttcaaggtgcgtaatattagtaagaagtatttatcagcttaacgtgataacaataatagtaatatgaaatatttattaaattttttataattaatctctgctagaaaatttgattaatc

SEQ ID NO: 1086 - DNA, 579 bp, Artificial
  Mutations within GlyA3B4 introduced by GmGlyA3B4_T01TALE nuclease
gttcatgtacggttgcagatataaacgaagcatagcttatgtatgaggtgtaacaaaattggaaacaatagccatgcaaggtgaagaatgtcaccaactcagaaacccttcttcattgacgtgtccctcactcactctcctctcttcactataaatcgccactcttcgtgttctccacttcaccaactccttcaaacttattaacactttccttagtttccagcaagttcaacgagtgccaactcaacaacctcaacgcgttggaacccgaccaccgcgttgagtccgaaggtggtcttattgaaacatggaactctcaacaccctgagctgcaatgcgccggtgtcactgtttccaaacgcaccctcaaccgcaacggcctccacttgccatcttactcaccttatccccaaatgatcattgtcgttcaaggtgcgtaatattagtaagaagtatttatcagcttaacgtgataacaataatagtaatatgaaatatttattaaatttttttataattaatctctgctagaaaattttgattaatcatttttagtagaatttgtttttctcaactagg

SEQ ID NO: 1087 - DNA, 563 bp, Artificial
  Mutations within GlyA3B4 introduced by GmGlyA3B4_T01TALE nuclease
gttcatgtacggttgcagatataaacgaagcatagcttatgtatgaggtgtaacaaaattggaaacaatagccatgcaaggtgaagaatgtcaccaactcagaaacccttcttcattgacgtgtccctcactcactctcctctcttcacgatttatagggttcacgctcaacaaaatcgcatatcaatttcacaacaattggtatgccaaacatatataattcactgtaataattataaggataaaatgaaatcttgtcgagtgcatgctttgctattacctccagcaagttcaacgagtgccaactcaacaacctcaacgcgttggaacccgaccaccgcgttgagtccgaaggtggtcttattgaaacatggaactctcaacaccctgagctgcaatgcgccggtgtcgctgtttccaaacgcaccctcaaccgcaacggcctccacttgccatcttactcaccttatccccaaatgatcattgtcgttcaaggtgcgtaatattagtaagaagtatttatcagcttaacgtgataacaataatagtaatatgaaatattt

SEQ ID NO: 1088 - DNA, 607 bp, Artificial
  Mutations within GlyA3B4 introduced by GmGlyA3B4_T01TALE nuclease
gttcatgtacggttgcagatataaacgaagcatagcttatgtatgaggtgtaacaaaattggaaacaatagccatgcaaggtgaagaatgtcaccaactcagaaacccttcttcattgacgtgtccctcactcactctcctctcttcactataaatcgccactcttcgtgttctccacttcaccaactccttcaaacttattaacactttccttagttcaatatggggaagcccttcttcactctctctctttcttccctttgcttgcttgtcgagtgcatgctttgctattacctccagcaagttcaacgagtgccaactcaacaacctcaacgcgttggaacccgaccaccgcgttgagtccgaaggtggtcttattgaaacatggaactctcaacaccctgagctgcaatgcgccggtgtcactgtttccaaacgcaccctcaaccgcaacggcctccacttgccatcttactcaccttatccccaaatgatcttgtcgttcaaggtgcgtaatattagtaagaagtatttatcagctttaacgtgataacaataatagtaatatgaaatatttattaaattttttataattaatctctgctag

SEQ ID NO: 1089 - DNA, 668 bp, Artificial
  Mutations within GlyA3B4 introduced by GmGlyA3B4_T01TALE nuclease
gttcatgtacggttgcagatataaacgaagcatagcttatgtatgaggtgtaacaaaattggaaacaatagccatgcaaggtgaagaatgtcaccaactcagaaacccttcttcattgacgtgtccctcactcactctcctctcttcactataaatcgccactcttcgtgttctccacttcaccaactccttcaaacttattaacactttccttagttcaatatggggaagcccttcttcactctctctctttcttccctttgcttgctattgtcgagtgcatgctttgctattacctccagcaagttcaacgagtgccaactcaacaacctcaacgcgttggaacccgaccaccgcgttgagtccgaaggtggtcttattgaaacatggaactctcaacaccctgagctgcaatgcgccggtgtcactgtttccaaacgcaccctcaaccgcaacggcctccacttgccatcttactcaccttatccccaaatgatcattgtcgttcaaggtgcgtaatattagtaagagtatttatcagcttaacgtgataacaataatagtaatatgaaatatttattaaatttttataattaatctctgctagaaaatttgattaatcattttagtagaatttgtttttctcaactaggttttaaaacaccaca

SEQ ID NO: 1090 - DNA, 651 bp, Artificial
  Mutations within GlyA3B4 introduced by GmGlyA3B4_T01TALE nuclease
gttcatgtacggttgcagatataaacgaagcatagcttatgtatgaggtgtaacaaaattggaaacaatagccatgcaaggtgaagaatgtcaccaactcagaaacccttcttcattgacgtgtccctcactcactctcctctcttcactataaatcgccactcttcgtgttctccacttcaccaactccttcaaacttattaacactttccttagttcaatatggggaagcccttcttcactctctctctttcttccctttgcttgcttgtcgagtgcatgctttgctattacctccagcaagttcaacgagtgccaactcaacaacctcaacgcgttggaacccgaccaccgcgttgagtccgaaggtggtcttattgaaacatggaactctcaacaccctgagctgcaatgcgccggtgtcactgtttccaaacgcaccctcaaccgcaacggcctccacttgccatcttactcaccttatccccaaatgatcattgtcgttcaaggtgcgtaatattagtaagaagtatttatcagcttaacgtgataacaataatagtaatatgaaatatttattaaattttttataattaatctctgctagaaaatttgattaatctttttagtagaattgttttttctcaacta

SEQ ID NO: 1091 - DNA, 896 bp, Artificial
  Mutations within GlyA3B4 introduced by GmGlyA3B4_T01TALE nuclease
gttcatgtacggttgcagatataaacgaagcatagcttatgtatgaggtgtaacaaaattggaaacaatagccatgcaaggtgaagaatgtcaccaactcagaaacccttcttcattgacgtgtccctcactcactctcctctcttcactataaatcgccactcttcgtgttctccacttcaccaactccttcaaacttattaacactttccttagttcaatatggggaagcccttcttcactctctctctttcttccctttgcttgctaccgccattgctggcgatggccaccacctgctggggggtcaagccgtgggcctgcacagcaccggcaacagccgctggaccgtctccagcgcactcaacaagatttaggtcaacacgcataatttattactagattaatagtccgtgacactgacaaattcatggttgtgtaaatactgagttttttctaacaaaacgtgcaacaatcaagttatccccctgaaaccgtgcttggttttctggatccccacttctcgtcttctccctaccatactttggaatatttgacatggagtttcaagcctccaatgacaattctcttgtcgagtgcatgctttgctattacctccagcaagttcaacgagtgccaactcaacaacctcacgcgttggacccgaccaccgcgttgagtccgaaggtggtcttattgaacatggaactctcaacaccctgagctgcaatgcgccggtgtcactgtttccaaacgcaccctcaaccgcaacggcctccacttgccatcttacctcacccttatccccaaatgatcattgtcgttcaaggtgcgtaatattagtaagaagtattatcagcttaacgtgataacataatagtaatatgaaatattta

SEQ ID NO: 1092 - DNA, 670 bp, Artificial; identical to SEQ ID NO: 617
  Mutations within GlyA3B4 introduced by GmGlyA3B4_T01TALE nuclease

SEQ ID NO: 1093 - DNA, 477 bp, Artificial; identical to SEQ ID NO: 515
  Mutations within GlyA3B4 introduced by GmGlyA3B4_T01TALE nuclease

SEQ ID NO: 1094 - DNA, 662 bp, Artificial
  Mutations within GlyA3B4 introduced by GmGlyA3B4_T01TALE nuclease
gttcatgtacggttgcagatataaacgaagcatagcttatgtatgaggtgtaacaaaattggaaacaatagccatgcaaggtgaagaatgtcaccaactcagaaacccttcttcattgacgtgtccctcactcactctcctctcttcactataaatcgccactcttcgtgttctccacttcaccaactccttcaaacttattaacactttccttagttcaatatggggaagcccttcttcactctctctctttcttccctttgcttgctactcttgtcccccgagtgcatgctttgctattacctccagcaagttcaacgagtgccaactcaacaacctcaacgcgttggaacccgaccaccgcgttgagtccgaaggtggtcttattgaaacatggaactctcaacaccctgagctgcaatgcgccggtgtcactgtttccaaacgcaccctcaaccgcaacggcctccacttgccatcttactcaccttatccccaaatgatcattgtcgttcaaggtgcgtaatattagtaagagtatttatcagcttaacgtgatacaatatagtaatatgaaatatttattaaatttttataattaatctctgctagaaaatttgattaatcattttagtagaatttgttttctcaactaggttttt

SEQ ID NO: 1095 - DNA, 608 bp, Artificial
  Mutations within GlyA3B4 introduced by GmGlyA3B4_T01TALE nuclease
gttcatgtacggttgcagatataaacgaagcatagcttatgtatgaggtgtaacaaaattggaaacaatagccatgcaaggtgaagaatgtcaccaactcagaaacccttcttcattgacgtgtccctcactcactctcctctcttcactataaatcgccactcttcgtgttctccacttcaccaactccttcaaacttattaacactttccttagttcaatatggggaagcccttcttcactctctctctttcttccctttgcttgcttgtcgagtgcatgctttgctattacctccagcaagttcaacgagtgccaactcaacaacctcaacgcgttggaacccgaccaccgcgttgagtccgaaggtggtcttattgaaacatggaactctcaacaccctgagctgcaatgcgccggtgtcactgtttccaacgcaccctcaaccgcaacggcctccacttgccatcttactcaccttatcccccaaatgatcattgtcgttcaaggtgcgtaatattagtaagaagtatttatcagctttaacgtgataacaataatagtaatatgaaatatttattaaattttttataattaatctctgctag

SEQ ID NO: 1096 - DNA, 623 bp, Artificial; identical to SEQ ID NO: 973
  Mutations within GlyA3B4 introduced by GmGlyA3B4_T01TALE nuclease

SEQ ID NO: 1097 - DNA, 653 bp, Artificial
  Mutations within GlyA3B4 introduced by GmGlyA3B4_T01TALE nuclease
gttcatgtacggttgcagatataaacgaagcatagcttatgtatgaggtgtaacaaaattggaaacaatagccatgcaaggtgaagaatgtcaccaactcagaaacccttcttcattgacgtgtccctcactcactctcctctcttcactataaatcgccactcttcgtgttctccacttcaccaactccttcaaacttattaacactttccttagttcaatatggggaagcccttcttcactctctctctttcttccctttgcttgctttgctattacctccagcaagttcaacgagtgccaactcaacaacctcaacgcgttggaacccgaccaccgcgttgagtccgaaggtggtcttattgaaacatggaactctcaacaccctgagctgcaatgcgccggtgtcactgtttccaaacgcaccctcaaccgcaacggcctccacttgccatcttactcaccttatccccaaatgatcattgtcgttcaaggtgcgtaatattagtaagaagtatttatcagcttaacgtgataacaataatagtaatatgaaatatttattaaattttttataattaatctctgctagaaaatttgattaatcatttttagtagaatttgttttttctcaactaggttttaaaacacca

SEQ ID NO: 1098 - DNA, 629 bp, Artificial
  Mutations within GlyA3B4 introduced by GmGlyA3B4_T01TALE nuclease
gttcatgtacggttgcagatataaacgaagcatagcttatgtatgaggtgtaacaaaattggaaacaatagccatgcaaggtgaagaatgtcaccaactcagaaacccttcttcattgacgtgtccctcactcactctcctctcttcactataaatcgccactcttcgtgttctccacttcaccaactccttcaaacttattaacactttccttagttcaatatggggaagcccttcttcactctctctctttcttccctttgcttgcttgtcgagtgcatgctttgctattacctccagcaagttcaacgagtgccaactcaacaacctcaacgcgttggaacccgaccaccgcgttgagtccgaaggtggtcttattgaaacatggaactctcaacaccctgagctgcaatgcgccggtgtcactgtttccaaacgcaccctcaaccgcaacggcctccacttgccatcttactcaccttatccccaaatgatcattgtcgttcaaggtgcgtaatattagtaagaagtatttatcagcttaacgtgataacaataatagtaatatgaaatatttattaaattttttataattaatctctgctagaaaatttgattaatctttttag

SEQ ID NO: 1099 - DNA, 620 bp, Artificial
  Mutations within GlyA3B4 introduced by GmGlyA3B4_T01TALE nuclease
gttcatgtacggttgcagatataaacgaagcatagcttatgtatgaggtgtaacaaaattggaaacaatagccatgcaaggtgaagaatgtcaccaactcagaaacccttcttcattgacgtgtccctcactcactctcctctcttcactataaatcgccactcttcgtgttctccacttcaccaactccttcaaacttattaacactttccttagttcaatatggggaagcccttcttcactctctctctttcttccctttgcttgtcgagtgcatgctttgctattacctccagcaagttcaacgagtgccaactcaacaacctcaacgcgttggaacccgaccaccgcgttgagtccgaaggtggtcttattgaaacatggaactctcaacaccctgagctgcaatgcgccggtgtcactgtttccaaacgcaccctcaaccgcaacggcctccacttgccatcttactcaccttatcccccaaatgatcattgtcgttcaaggtgcgtaaatattagtaagaagtatttatcagcttaacgtgataacaataatagtaatatgaaatatttattaaattttttataattaatctctgctagaaaatttgattaatc

SEQ ID NO: 1100 - DNA, 795 bp, Artificial
  Mutations within GlyA3B4 introduced by GmGlyA3B4_T01TALE nuclease
  misc_feature (692): n is a or c or t or g
gttcatgtacggttgcagatataaacgaagcatagcttatgtatgaggtgtaacaaaattggaaacaatagccatgcaaggtgaagaatgtcaccaactcagaaacccttcttcattgacgtgtccctcactcactctcctctcttcactataaatcgccactcttcgtgttctccacttcaccaactccttcaaacttattaacactttccttagttcaatatggggaagcccttcttcactctctctctttcttccctttgcttgctacagcaccggcaacagccgctggaccgtctccagcgcctgcttgccgccatcgtggctggcgatggccaccacctgctccggggtcaagccgtgggcctggcacagcaccggcaacagccgctggactcttgtcgagtgcatgctttgctattacctccagcaagttcaacgagtgccaactcaacaacctcaacgcgttggaacccgaccaccgcgttgagtccgaaggtggtcttattgaaacatggaactctcaacaccctgagctgcaatgcgccggtgtcactgtttccaaacgcaccctcaaccgcaacggcctccacttgccatcttactcaccttatccccaaatgatcattgtcgttcaaggtgcgtaatattagtaagaagtatttatcagcttaacgtgataacaaataatngtaatatgaaatattttattaaattttttataattaatctctgctagaaaatttgattaatcatttttagtagaatttgttttctcaactaggttttaaaatc

SEQ ID NO: 1101 - DNA, 625 bp, Artificial
  Mutations within GlyA3B4 introduced by GmGlyA3B4_T01TALE nuclease
gttcatgtacggttgcagatataaacgaagcatagcttatgtatgaggtgtaacaaaattggaaacaatagccatgcaaggtgaagaatgtcaccaactcagaaacccttcttcattgacgtgtccctcactcactctcctctcttcactataaatcgccactcttcgtgttctccacttcaccaactccttcaaacttattaacactttccttagttcaatatggggaagcccttcttcactctctctctttcttccctttgcttgctgcaagttcaacgagtgccaactcaacacctcaacgcgttggaacccgaccaccgcgttgagtccgaaggtggtcttattgaaacatggaactctcaacaccctgagctgcaatgcgccggtgtcactgtttccaaacgcaccctcaaccgcaacggcctccacttgccatcttactcaccttatccccaaatgatcattgtcgttcaaggtgcgtaatattagtaagaagtatttatcagcttaacgtgataacaataatagtaatatgaaatatttattaatttttataattaatctctgctagaaaatttgattaatcatttttagtagaatttgtttttctcaactaggtttt

SEQ ID NO: 1102 - DNA, 667 bp, Artificial
  Mutations within GlyA3B4 introduced by GmGlyA3B4_T01TALE nuclease
gttcatgtacggttgcagatataaacgaagcatagcttatgtatgaggtgtaacaaaattggaaacaatagccatgcaaggtgaagaatgtcaccaactcagaaacccttcttcattgacgtgtccctcactcactctcctctcttcactataaatcgccactcttcgtgttctccacttcaccaactccttcaaacttattaacactttccttagttcaatatggggaagcccttcttcactctctctctttcttccctttgcttgctcttgtcgagtgcatgctttgctattacctccagcaagttcaacgagtgccaactcaacaacctcaacgcgttggaacccgaccaccgcgttgagtccgaaggtggtcttattgaaacatggaactctcaacaccctgagctgcaatgcgccggtgtcactgtttccaaacgcaccctcaaccgcaacggcctccacttgccatcttactcaccttatccccaaatgatcattgtcgttcaaggtgcgtaatattagtaagagtatttatcagcttaacgtgatacaatatagtaatatgaaatatttattaaatttttataattaatctctgctagaaaatttgattaatcattttagtagaatttgtttttctcaactaggtttttaaaacaccaca

SEQ ID NO: 1103 - DNA, 749 bp, Artificial
  Mutations within GlyA3B4 introduced by GmGlyA3B4_T01TALE nuclease
gttcatgtacggttgcagatataaacgaagcatagcttatgtatgaggtgtaacaaaattggaaacaatagccatgcaaggtgaagaatgtcaccaactcagaaacccttcttcattgacgtgtccctcactcactctcctctcttcactataaatcgccactcttcgtgttctccacttcaccaactccttcaaacttattaacactttccttagttcaatatggggaagcccttcttcactctctctctttcttccctttgcttgctactgcttgccaccgccattgctggcgatggccaccacctgctggggggtcaagccgtgggcctggcacagcaccggcaacagcgcctgcaccgtctccagcgcctgctttgctattacctccagcaagttcaacgagtgccaactcaacaacctcaacgcgttggaacccgaccaccgcgttgagtccgaaggtggtcttattgaaacatggaactctcaacaccctgagctgcaatgcgccggtgtcactgtttccaaacgcaccctcaaccgcaacggcctccacttgccatcttactcaccttatccccaaaatgatcattgtcgttcaaggtgcgtaatattagtaagaagtatttatcgcttaacgtgataacaataatagtaatatgaaaatatttattaaattttttataattaatctcttgctagaaaatttgattaatcatttttagtagaatttgtttttctcaactagg

SEQ ID NO: 1104 - DNA, 642 bp, Artificial
  Mutations within GlyA3B4 introduced by GmGlyA3B4_T01TALE nuclease
gttcatgtacggttgcagatataaacgaagcatagcttatgtatgaggtgtaacaaaattggaaacaatagccatgcaaggtgaagaatgtcaccaactcagaaacccttcttcattgacgtgtccctcactcactctcctctcttcactataaatcgccactcttcgtgttctccacttcaccaactccttcaaacttattaacactttccttagttcaatatggggaagcccttcttcactctctctctttcttccctttgcttgctacactcttgtcgagtgcatgctttgctattacctccagcaagttcaacgagtgccaactcaacaacctcaacgcgttggaacccgaccaccgcgttgagtccgaaggtggtcttattgaaacatggaactctcaacaccctgagctgcaatgcgccggtgtcactgtttccaaacgcaccctcaaccgcaacggcctccacttgccatcttactcaccttatccccaaatgatcattgtcgttcaaggtgcgtaatattagtaagagtatttatcagcttaacgtgatacaataatagtaatatgaaatatttattaaatttttataattaatctctgctagaaaatttgattaatcattttagtagaatttg

SEQ ID NO: 1105 - DNA, 608 bp, Artificial
  Mutations within GlyA3B4 introduced by GmGlyA3B4_T01TALE nuclease
gttcatgtacggttgcagatataaacgaagcatagcttatgtatgaggtgtaacaaaattggaaacaatagccatgcaaggtgaagaatgtcaccaactcagaaacccttcttcattgacgtgtccctcactcactctcctctcttcactataaatcgccactcttcgtgttctccacttcaccaactccttcaaacttattaacactttccttagttcaatatggggaagcccttcttcactctctctctttcttccctttgcttgccttgtcgagtgcatgctttgctattacctccagcaagttcaacgagtgccaactcaacaacctcaacgcgttggaacccgaccaccgcgttgagtccgaaggtggtcttattgaaacatggaactctcaacaccctgagctgcaatgcgccggtgtcactgtttccaaacgcaccctcaaccgcaacggcctccacttgccatcttactcaccttatccccaaatgatcattgtcgttcaaggtgcgtaatattagtaagaagtatttatcagcttaacgtgataacaataatagtaatatgaaatatttattaaattttttataattaatctctgctag

SEQ ID NO: 1106 - DNA, 667 bp, Artificial
  Mutations within GlyA3B4 introduced by GmGlyA3B4_T01TALE nuclease
gttcatgtacggttgcagatataaacgaagcatagcttatgtatgaggtgtaacaaaattggaaacaatagccatgcaaggtgaagaatgtcaccaactcagaaacccttcttcattgacgtgtccctcactcactctcctctcttcactataaatcgccactcttcgtgttctccacttcaccaactccttcaaacttattaacactttccttagttcaatatggggaagcccttcttcactctctctctttcttccctttgcttgctatgtcgagtgcatgctttgctattacctccagcaagttcaacgagtgccaactcaacaacctcaacgcgttggaacccgaccaccgcgttgagtccgaaggtggtcttattgaaacatggaactctcaacaccctgagctgcaatgcgccggtgtcactgtttccaaacgcaccctcaaccgcaacggcctccacttgccatcttactcaccttatccccaaatgatcattgtcgttcaaggtgcgtaatattagtaagaagtatttatcagcttaacgtgataacaataatagtaatatgaaatatttattaaatttttataattaatctctgctagaaaatttgattaatcattttagtagaatttgttttctcaactaggttttaaaacaccaca

SEQ ID NO: 1107 - DNA, 637 bp, Artificial
  Mutations within GlyA3B4 introduced by GmGlyA3B4_T01TALE nuclease
gttcatgtacggttgcagatataaacgaagcatagcttatgtatgaggtgtaacaaaattggaaacaatagccatgcaaggtgaagaatgtcaccaactcagaaacccttcttcattgacgtgtccctcactcactctcctctcttcactataaatcgccactcttcgtgttctccacttcaccaactccttcaaacttattaacactttccttagttcaatatggggaagcccttcttcactctctctctttcttccctttgcttgctcttgtcgagtgcatgctttgctattacctccagcaagttcaacgagtgccaactcaacaacctcaacgcgttggaacccgaccaccgcgttgagtccgaaggtggtcttattgaaacatggaactctcaacaccctgagctgcaatgcgccggtgtcactgtttccaaacgcaccctcaaccgcaacggcctccacttgccatcttactcaccttatccccaaatgatcattgtcgttcaaggtgcgtaatattagtaagagtatttatcagcttaacgtgataacaatatagtaatatgaaatatttattaaatttttataattaatctctgctagaaaatttgattaatcattttagtagaatttg

SEQ ID NO: 1108 - DNA, 665 bp, Artificial
  Mutations within GlyA3B4 introduced by GmGlyA3B4_T01TALE nuclease
gttcatgtacggttgcagatataaacgaagcatagcttatgtatgaggtgtaacaaaattggaaacaatagccatgcaaggtgaagaatgtcaccaactcagaaacccttcttcattgacgtgtccctcactcactctcctctcttcactataaatcgccactcttcgtgttctccacttcaccaactccttcaaacttattaacactttccttagttcaatatggggaagcccttcttcactctctctctttcttccctttgcttgctcgagtgcatgctttgctattacctccagcaagttcaacgagtgccaactcaacaacctcaacgcgttggaacccgaccaccgcgttgagtccgaaggtggtcttattgaaacatggaactctcaacaccctgagctgcaatgcgccggtgtcactgtttccaaacgcaccctcaaccgcaacggcctccacttgccatcttactcaccttatcccccaaatgatcattgtcgttcaaggtgcgtaatattagtaagaagtatttatcagcttaacgtgataacaataatagtaatatgaaatatttattaaattttttataattaatctctgctagaaaatttgattaatctttttagtagaattgttttttctcaactaggtttaaaacaccaca

SEQ ID NO: 1109 - DNA, 608 bp, Artificial; identical to SEQ ID NO: 546
  Mutations within GlyA3B4 introduced by GmGlyA3B4_T01TALE nuclease

SEQ ID NO: 1110 - DNA, 608 bp, Artificial
  Mutations within GlyA3B4 introduced by GmGlyA3B4_T01TALE nuclease
gttcatgtacggttgcagatataaacgaagcatagcttatgtatgaggtgtaacaaaattggaaacaatagccatgcaaggtgaagaatgtcaccaactcagaaacccttcttcattgacgtgtccctcactcactctcctctcttcactataaatcgccactcttcgtgttctccacttcaccaactccttcaaacttattaacactttccttagttcaatatggggaagcccttcttcactctctctctttcttccctttgcttgcttgtcgagtgcatgctttgctattacctccagcaagttcaacgagtgccaactcaacaacctcaacgcgttggaacccgaccaccgcgttgagtccgaaggtggtcttattgaaacatggaactctcaacaccctgagctgcaatgcgccggtgtcactgtttccaaacgcaccctcaaccgcaacggcctccacttgccatcttactcaccttactaccccaaatgatccattgtcgttcaaggtgcgtaatatttagtaagaagtatttatcagcttaacgtgataacaataatagtaatatgaaattatttattaaatttttataattaatctctgc

SEQ ID NO: 1111 - DNA, 668 bp, Artificial; identical to SEQ ID NO: 1084
  Mutations within GlyA3B4 introduced by GmGlyA3B4_T01TALE nuclease

SEQ ID NO: 1112 - DNA, 663 bp, Artificial
  Mutations within GlyA3B4 introduced by GmGlyA3B4_T01TALE nuclease
gttcatgtacggttgcagatataaacgaagcatagcttatgtatgaggtgtaacaaaattggaaacaatagccatgcaaggtgaagaatgtcaccaactcagaaacccttcttcattgacgtgtccctcactcactctcctctcttcactataaatcgccactcttcgtgttctccacttcaccaactccttcaaacttattaacactttccttagttcaatatggggaagcccttcttcactctctctctttcttccctttgcttgctacactcttgtcgagtgcatgctttgctattacctccagcaagttcaacgagtgccaactcaacaacctcaacgcgttggaacccgaccaccgcgttgagtccgaaggtggtcttattgaaacatggaactctcaacaccctgagctgcaatgcgccggtgtcactgtttccaaacgcaccctcaaccgcaacggcctccacttgccatcttactcaccttatccccaaatgatcattgtcgttcaaggtgcgtaatattagtaagagtatttatcagcttaacgtgataacaatatagtaatatgaaatatttattaaatttttataattaatctctgctagaaaatttgattaatcattttagtagaatttgttttctcaactaggttttaaa

SEQ ID NO: 1113 - DNA, 664 bp, Artificial
  Mutations within GlyA3B4 introduced by GmGlyA3B4_T01TALE nuclease
gttcatgtacggttgcagatataaacgaagcatagcttatgtatgaggtgtaacaaaattggaaacaatagccatgcaaggtgaagaatgtcaccaactcagaaacccttcttcattgacgtgtccctcactcactctcctctcttcactataaatcgccactcttcgtgttctccacttcaccaactccttcaaacttattaacactttccttagttcaatatggggaagcccttcttcactctctctctttcttccctttgcttcgagtgcatgctttgctattacctccagcaagttcaacgagtgccaactcaacaacctcaacgcgttggaacccgaccaccgcgttgagtccgaaggtggtcttattgaaacatggaactctcaacaccctgagctgcaatgcgccggtgtcactgtttccaaacgcaccctcaaccgcaacggcctccacttgccatcttactcaccttatccccaaatgatcattgtcgttcaaggtgcgtaatattagtaagaagtatttatcagcttaacgtgataacaataatagtaatatgaaatatttattaaattttttataattaatctctgctagaaaatttgattaatcatttttagtagaatttgttttttctcaactaggttttaaaacaccaca

SEQ ID NO: 1114 - DNA, 616 bp, Artificial
  Mutations within GlyA3B4 introduced by GmGlyA3B4_T01TALE nuclease
gttcatgtacggttgcagatataaacgaagcatagcttatgtatgaggtgtaacaaaattggaaacaatagccatgcaaggtgaagaatgtcaccaactcagaaacccttcttcattgacgtgtccctcactcactctcctctcttcactataaatcgccactcttcgtgttctccacttcaccaactccttcaaacttattaacactttccttagttcaatatggggaagcccttcttcactctctctctttcttccctttacaacctcaacgagtgccaactcaacaacctcaacgcgttggaacccgaccaccgcgttgagtccgaaggtggtcttattgaaacatggaactctcaacaccctgagctgcaatgcgccggtgtcactgtttccaaacgcaccctcaaccgcaacggcctccacttgccatcttactcaccttatccccaaatgatcattgtcgttcaaggtgcgtaatattagtaagaagtatttatcagcttaacgtgataacaataatagtaatatgaaatatttattaattttttataattaatctctgctagaaaatttgattaatcatttttagtagaatttgtttttctcaactagg

SEQ ID NO: 1115 - DNA, 608 bp, Artificial
  Mutations within GlyA3B4 introduced by GmGlyA3B4_T01TALE nuclease
gttcatgtacggttgcagatataaacgaagcatagcttatgtatgaggtgtaacaaaattggaaacaatagccatgcaaggtgaagaatgtcaccaactcagaaacccttcttcattgacgtgtccctcactcactctcctctcttcactataaatcgccactcttcgtgttctccacttcaccaactccttcaaacttattaacactttccttagttcaatatggggaagcccttcttcactctctctctttcttccctttgcttgcttgtcgagtgcatgctttgctattacctccagcaagttcaacgagtgccaactcaacaacctcaacgcgttggaacccgaccaccgcgttgagtccgaaggtggtcttattgaaacatggaactctcaacaccctgagctgcaatgcgccggtgtcactgtttccaaacgcaccctcaaccgcaacggcctccacttgccatcttactcaccttatcccccaaatgatcattgtcgttcaaggtgcgtaaatattagtaagaagtatttatcagcttaacgtgataacaataatagtaatatgaaatatttattaaatttttataattaatctctgctag

SEQ ID NO: 1116 - DNA, 676 bp, Artificial
  Mutations within GlyA3B4 introduced by GmGlyA3B4_T01TALE nuclease
gttcatgtacggttgcagatataaacgaagcatagcttatgtatgaggtgtaacaaaattggaaacaatagccatgcaaggtgaagaatgtcaccaactcagaaacccttcttcattgacgtgtccctcactcactctcctctcttcactataaatcgccactcttcgtgttctccacttcaccaactccttcaaacttattaacactttccttagttcaatatggggaagcccttcttcactctctctctttcttccctttgcttgctttccagcgcctgcttgccaccaatattgctggcgatggccaccacctgctggggggtcaagccgtgggcctggcacagcaccggcaaccgcgctggaccgtctccagcgcctgcttgccgttgtcgagtgcatgctttgctattacctccagcaagttcaacgagtgccaactcaacaacctcaacgcgttggaacccgaccaccgcgttgagtccgaaggtggtcttattgaaacatggaactctcaacaccctgagctgcaatgcgccggtgtcactgtttccaaacgcaccctcaaccgcaacggcctccacttgccatcttactcaccttatccccaaatgatcattgtcgttcaaggtgcgtaatattagtaagaagtatttcatcagcttaacgtgataac

SEQ ID NO: 1117 - DNA, 653 bp, Artificial
  Mutations within GlyA3B4 introduced by GmGlyA3B4_T01TALE nuclease
gttcatgtacggttgcagatataaacgaagcatagcttatgtatgaggtgtaacaaaattggaaacaatagccatgcaaggtgaagaatgtcaccaactcagaaacccttcttcattgacgtgtccctcactcactctcctctcttcactataaatcgccactcttcgtgttctccacttcaccaactccttcaaacttattaacactttccttagttcaatatggggaagcccttcttcactctctctctttcttccctttgcttgcttgtcgagtgcatgctttgctattacctccagcaagttcaacgagtgccaactcaacaacctcaacgcgttggaacccgaccaccgcgttgagtccgaaggtggtcttattgaaacatggaactctcaacaccctgagctgcaatgcgccggtgtcactgtttccaaacgcaccctcaaccgcaacggcctccacttgccatcttactcaccttatccccaaatgatcattgtcgttcaaggtgcgtaatattagtaagaagtatttatcagcttaacgtgataacaataatagtaatatgaaatatttattaaattttttataattaatctctgctagaaaatttgattaatcatttttagtagaatttgttttttctcaacta

SEQ ID NO: 1118 - DNA, 728 bp, Artificial
  Mutations within GlyA3B4 introduced by GmGlyA3B4_T01TALE nuclease
gttcatgtacggttgcagatataaacgaagcatagcttatgtatgaggtgtaacaaaattggaaacaatagccatgcaaggtgaagaatgtcaccaactcagaaacccttcttcattgacgtgtccctcactcactctcctctcttcactataaatcgccactcttcgtgttctccacttcaccaactccttcaaacttattaacactttccttagttcaatatggggaagcccttcttcactctctctctttcttccctttgcttgcttgccgccatcgtggctggcgatggccaccacctgctccggggtcaagccgtgggcctggcacagcaccggcaacagcctcttgtcgagtgcatgctttgctattacctccagcaagttcaacgagtgccaactcaacaacctcaacgcgttggaccgaccaccgcgttgagtccgaaggtggtcttattgaaacatggaactctcaacaccctgagctgcaatgcgccggtgtcactgtttccaaacgcaccctcaaccgcaacggcctccacttgccatcttactcacctttatccccaaatgatcattgtcgttcaaggtgcgtaatattagtaagaagtatttatcagcttaacgtgataacaataatagtaatatgaaatatttattaaattttttataattaatctctgctagaaaaatttgattaatcatttttagtagaatttgtttttctc

SEQ ID NO: 1119 - DNA, 759 bp, Artificial
  Mutations within GlyA3B4 introduced by GmGlyA3B4_T01TALE nuclease
  misc_feature (643): n is a or c or t or g
gttcatgtacggttgcagatataaacgaagcatagcttatgtatgaggtgtaacaaaattggaaacaatagccatgcaaggtgaagaatgtcaccaactcagaaacccttcttcattgacgtgtccctcactcactctcctctcttcactataaatcgccactcttcgtgttctccacttcaccaactccttcaaacttattaacactttccttagttcaatatggggaagcccttcttcactctctctctttcttccctttgcttgcgccacgttttgcaatcttgagaagttggcctgtgtccaactgtaacggtggacctctcaactctcccgccaccgtgagcaaggcctccagagcgcgtgcgccggaccactgtttgccgacgctcttgtcgagtgcatgctttgctattacctccagcaagttcaacgagtgccaactcaacaacctcaacgcgttggaacccgaccaccgcgttgagtccgaaggtggtcttattgaaacatggactctcaacaccctgagctgcaatgcgccggtgtcactgtttccaaaacgcaccctcaaccgcaacggcctccacttgccatcttactcaccttatccccaaatgatcattgtcgttcaaggtgcgtaatnttagtaagaagtatttatcagcttaacgtgataacaataatagtaatatgaaatatttattaaaattttttataattaatctcttgctagaaaatttgattaatcatttttagtag

SEQ ID NO: 1120 - DNA, 668 bp, Artificial
  Mutations within GlyA3B4 introduced by GmGlyA3B4_T01TALE nuclease
gttcatgtacggttgcagatataaacgaagcatagcttatgtatgaggtgtaacaaaaattggaaacaatagccatgcaaggtgaagaatgtcaccaactcagaaacccttcttcattgacgtgtccctcactcactctcctctcttcactataaatcgccactcttcgtgttctccacttcaccaactccttcaaacttattaacactttccttagttcaatatggggaagcccttcttcactctctctctttcttccctttgcttgctcttgtcgagtgcatgctttgctattacctccagcaagttcaacgagtgccaactcaacaacctcaacgcgttggaacccgaccaccgcgttgagtccgaaggtggtcttattgaaacatggaactctcaacaccctgagctgcaatgcgccggtgtcactgtttccaaacgcaccctcaaccgcaacggcctccacttgccatcttactcaccttatccccaaatgatcattgtcgttcaaggtgcgtaatattagtaagagtatttatcagcttaacgtgataacaatatagtaatatgaaatatttattaaatttttataattaatctctgctagaaaatttgattaatcattttagtagaatttgtttttctcaactaggttttaaaacaccaca

SEQ ID NO: 1121 - DNA, 608 bp, Artificial
  Mutations within GlyA3B4 introduced by GmGlyA3B4_T01TALE nuclease
gttcatgtacggttgcagatataaacgaagcatagcttatgtatgaggtgtaacaaaattggaaacaatagccatgcaaggtgaagaatgtcaccaactcagaaacccttcttcattgacgtgtccctcactcactctcctctcttcactataaatcgccactcttcgtgttctccacttcaccaactccttcaaacttattaacactttccttagttcaatatggggaagcccttcttcactctctctctttcttccctttgcttgctgtcgagtgcatgctttgctattacctccagcaagttcaacgagtgccaactcaacaacctcaacgcgttggaacccgaccaccgcgttgagtccgaaggtggtcttattgaaacatggaactctcaacaccctgagctgcaatgcgccggtgtcactgtttccaaacgcaccctcaaccgcaacggcctccacttgccatcttactcaccttatcccccaaatgatcattgtcgttcaaggtgcgtaaatattagtaagaagtatttatcagcttaacgtgataacaataatagtaatatgaaatatttattaaattttttataattaatctctgctag

SEQ ID NO: 1122 - DNA, 660 bp, Artificial
  Mutations within GlyA3B4 introduced by GmGlyA3B4_T01TALE nuclease
gttcatgtacggttgcagatataaacgaagcatagcttatgtatgaggtgtaacaaaattggaaacaatagccatgcaaggtgaagaatgtcaccaactcagaaacccttcttcattgacgtgtccctcactcactctcctctcttcactataaatcgccactcttcgtgttctccacttcaccaactccttcaaacttattaacactttccttagttcaatatggggaagcccttcttcactctctctctttcttccctttgcttgctcttgtcgagtgcatgctttgctattacctccagcaagttcaacgagtgccaactcaacaacctcaacgcgttggaacccgaccaccgcgttgagtccgaaggtggtcttattgaaacatggaactctcaacaccctgagctgcaatgcgccggtgtcactgtttccaaacgcaccctcaaccgcaacggcctccacttgccatcttactcaccttatccccaaatgatcattgtcgttcaaggtgcgtaatattagtaagagtatttatcagcttaacgtgataacaatatagtaatatgaaatatttattaaatttttataattaatctctgctagaaaatttgattaatcattttagtagaatttgtttttctcaactaggtttttaaa

SEQ ID NO: 1123 - DNA, 634 bp, Artificial
  Mutations within GlyA3B4 introduced by GmGlyA3B4_T01TALE nuclease
gttcatgtacggttgcagatataaacgaagcatagcttatgtatgaggtgtaacaaaattggaaacaatagccatgcaaggtgaagaatgtcaccaactcagaaacccttcttcattgacgtgtccctcactcactctcctctcttcactataaatcgccactcttcgtgttctccacttcaccaactccttcaaacttattaacactttccttagttcaatatggggaagcccttcttcactctctctctttcttccctttgcttcttgtcgagtgcatgctttgctattacctccagcaagttcaacgagtgccaactcaacaacctcaacgcgttggaacccgaccaccgcgttgagtccgaaggtggtcttattgaaacatggaactctcaacaccctgagctgcaatgcgccggtgtcactgtttccaaacgcaccctcaaccgcaacggcctccacttgccatcttactcaccttatcccccaaatgatcattgtcgttcaaggtgcgtaatattagtaagaagtatttatcagcttaacgtgataacaataatagtaatatgaaatatttattaaattttttataattaatctctgctagaaaatttgattaatctttttagtagaa

SEQ ID NO: 1124 - DNA, 644 bp, Artificial
  Mutations within GlyA3B4 introduced by GmGlyA3B4_T01TALE nuclease
gttcatgtacggttgcagatataaacgaagcatagcttatgtatgaggtgtaacaaaattggaaacaatagccatgcaaggtgaagaatgtcaccaactcagaaacccttcttcattgacgtgtccctcactcactctcctctcttcactataaatcgccactcttcgtgttctccacttcaccaactccttcaaacttattaacactttccttagttcaatatggggaagcccttcttcactctctctctttcttccctttgcttgtgcatgctttgctattacctccagcaagttcaacgagtgccaactcaacaacctcaacgcgttggaacccgaccaccgcgttgagtccgaaggtggtcttattgaaacatggaactctcaacaccctgagctgcaatgcgccggtgtcactgtttccaaacgcaccctcaaccgcaacggcctccacttgccatcttactcaccttatccccaaatgatcattgtcgttcaaggtgcgtaatattagtaagaagtatttatcagcttaacgtgataacaataatagtaatatgaaatatttattaaattttttataattaatctctgctagaaaatttgattaatcatttttagtagaatttgttttttctcaacta

SEQ ID NO: 1125 - DNA, 664 bp, Artificial
  Mutations within GlyA3B4 introduced by GmGlyA3B4_T01TALE nuclease
gttcatgtacggttgcagatataaacgaagcatagcttatgtatgaggtgtaacaaaaattggaaacaatagccatgcaaggtgaagaatgtcaccaactcagaaacccttcttcattgacgtgtccctcactcactctcctctcttcactataaatcgccactcttcgtgttctccacttcaccaactccttcaaacttattaacactttccttagttcaatatggggaagcccttcttcactctctctctttcttccctttgcttgctattgtcgagtgcatgctttgctattacctccagcaagttcaacgagtgccaactcaacaacctcaacgcgttggaacccgaccaccgcgttgagtccgaaggtggtcttattgaaacatggaactctcaacaccctgagctgcaatgcgccggtgtcactgtttccaaacgcaccctcaaccgcaacggcctccacttgccatcttactcaccttatccccaaatgatcattgtcgttcaaggtgcgtaatattagtaagagtatttatcagcttaacgtgataacaataatagtaatatgaaaatatttattaaatttttataattaatctctgctagaaaatttgattaatcattttagtagaatttgtttttctcaactaggtttttaaaa

SEQ ID NO: 1126 - DNA, 685 bp, Artificial
  Mutations within GlyA3B4 introduced by GmGlyA3B4_T01TALE nuclease
gttcatgtacggttgcagatataaacgaagcatagcttatgtatgaggtgtaacaaaattggaaacaatagccatgcaaggtgaagaatgtcaccaactcagaaacccttcttcattgacgtgtccctcactcactctcctctcttcactataaatcgccactcttcgtgttctccacttcaccaactccttcaaacttattaacactttccttagttcaatatggggaagcccttcttcactctctctctttcttccctttgcttttgtcgagtgcatgctttgctattacctccagcaagttcaacgagtgccaactcaacaacctcaacgcgttggaacccgaccaccgcgttgagtccgaaggtggtcttattgaaacatggaactctcaacaccctgagctgcaatgcgccggtgtcactgtttccaaacgcaccctcaaccgcaacggcctccacttgccatcttactcaccttatccccaaatgatcattgtcgttcaaggtgcgtaatattagtaagaagtatttatcagcttaacgtgataacaataatagtaatatgaaatatttattaaattttttataattaatctctgctagaaaatttgattaatcatttttagtagaatttgttttttctcaactaggttttaaaacaccacactagactgccaaggcac

SEQ ID NO: 1127 - DNA, 643 bp, Artificial
  Mutations within GlyA3B4 introduced by GmGlyA3B4_T01TALE nuclease
gttcatgtacggttgcagatataaacgaagcatagcttatgtatgaggtgtaacaaaattggaaacaatagccatgcaaggtgaagaatgtcaccaactcagaaacccttcttcattgacgtgtccctcactcactctcctctcttcactataaatcgccactcttcgtgttctccacttcaccaactccttcaaacttattaacactttccttagttcaatatggggaagcccttcttcactctctctctttcttccctttgctttgtcgagtgcatgctttgctattacctccagcaagttcaacgagtgccaactcaacaacctcaacgcgttggaacccgaccaccgcgttgagtccgaaggtggtcttattgaaacatggaactctcaacaccctgagctgcaatgcgccggtgtcactgtttccaaacgcaccctcaaccgcaacggcctccacttgccatcttactcaccttatcccccaaatgatcattgtcgttcaaggtgcgtaatattagtaagaagtatttatcagcttaacgtgataacaataatagtaatatgaaatatttattaaattttttataattaatctctgctagaaaatttgattaatcatttttagtagaatttgtttttt

SEQ ID NO: 1128 - DNA, 619 bp, Artificial; identical to SEQ ID NO: 1085
  Mutations within GlyA3B4 introduced by GmGlyA3B4_T01TALE nuclease

SEQ ID NO: 1129 - DNA, 667 bp, Artificial
  Mutations within GlyA3B4 introduced by GmGlyA3B4_T01TALE nuclease
gttcatgtacggttgcagatataaacgaagcatagcttatgtatgaggtgtaacaaaattggaaacaatagccatgcaaggtgaagaatgtcaccaactcagaaacccttcttcattgacgtgtccctcactcactctcctctcttcactataaatcgccactcttcgtgttctccacttcaccaactccttcaaacttattaacactttccttagttcaatatggggaagcccttcttcactctctctctttcttccctttgcttgtcgagtgcatgctttgctattacctccagcaagttcaacgagtgccaactcaacaacctcaacgcgttggaacccgaccaccgcgttgagtccgaaggtggtcttattgaaacatggaactctcaacaccctgagctgcaatgcgccggtgtcactgtttccaaacgcaccctcaaccgcaacggcctccacttgccatcttactcaccttatccccaaatgatcattgtcgttcaaggtgcgtaatattagtaagaagtatttatcagctttaacgtgataacaataatagtaatatgaaatatttattaaattttttataattaatctctgctagaaaatttgattaatcatttttagtagaatttgttttttctcaactaggttttaaaacaccaca

SEQ ID NO: 1130 - DNA, 650 bp, Artificial
  Mutations within GlyA3B4 introduced by GmGlyA3B4_T01TALE nuclease
gttcatgtacggttgcagatataaacgaagcatagcttatgtatgaggtgtaacaaaattggaaacaatagccatgcaaggtgaagaatgtcaccaactcagaaacccttcttcattgacgtgtccctcactcactctcctctcttcactataaatcgccactcttcgtgttctccacttcaccaactccttcaaacttattaacactttccttagttcaatatggggaagcccttcttcactctctctctttcttccctttgctattacctccagcaagttcaacgagtgccaactcaacaacctcaacgcgttggaacccgaccaccgcgttgagtccgaaggtggtcttattgaaacatggaactctcaacacccctgagctgcaatgcgccggtgtcactgtttccaaacgcaccctcaaccgcaacggcctccacttgccatcttactcaccttatccccaaatgatcattgtcgttcaaggtgcgtaatattagtaagaagtatttatcagcttaacgtgataacaataatagtaatatgaaatatttattaaattttttataattaattctctgctagaaaatttgattaatcatttttagtagaattttgttttttctcaactaggtttttaaaacaccaca

SEQ ID NO: 1131 - DNA, 623 bp, Artificial
  Mutations within GlyA3B4 introduced by GmGlyA3B4_T01TALE nuclease
gttcatgtacggttgcagatataaacgaagcatagcttatgtatgaggtgtaacaaaattggaaacaatagccatgcaaggtgaagaatgtcaccaactcagaaacccttcttcattgacgtgtccctcactcactctcctctcttcactataaatcgccactcttcgtgttctccacttcaccaactccttcaaacttattaacactttccttagttcaatatggggaagcccttcttcactctctctctttcttccctttgcttgctactactcttgtcgagtgcatgctttgctattacctccagcaagttcaacgagtgccaactcaacaacctcaacgcgttggaacccgaccaccgcgttgagtccgaaggtggtcttattgaaacatggaactctcaacaccctgagctgcaatgcgccggtgtcactgtttccaaacgcaccctcaaccgcaacggcctccacttgccatcttactcaccttatccccaaatgatcattgtcgttcaaggtgcgtatattagtaagaagtatttatcagcttaacgtgatacaataatagtaatatgaaatatttattaaaattttttataattaatctctgctagaaaatttga

SEQ ID NO: 1132 - DNA, 604 bp, Artificial
  Mutations within GlyA3B4 introduced by GmGlyA3B4_T01TALE nuclease
gttcatgtacggttgcagatataaacgaagcatagcttatgtatgaggtgtaacaaaattggaaacaatagccatgcaaggtgaagaatgtcaccaactcagaaacccttcttcattgacgtgtccctcactcactctcctctcttcactataaatcgccactcttcgtgttctccacttcaccaactccttcaaacttattaacactttccttagttcaatatggggaagcccttcttcactctctctctttcttccctttgcttgtcgagtgcatgctttgctattacctccagcaagttcaacgagtgccaactcaacaacctcaacgcgttggaacccgaccaccgcgttgagtccgaaggtggtcttattgaaacatggaactctcaacaccctgagctgcaatgcgccggtgtcactgtttccaaacgcaccctcaaccgcaacggcctccacttgccatcttactcaccttatcccccaaatgatcattgtcgttcaaggtgcgtaatattagtaagaagtatttatcagcttaacgtgataacaataatagtaatatgaaatatttattaaattttttataattaatctctgctag

SEQ ID NO: 1133 - DNA, 616 bp, Artificial
  Mutations within GlyA3B4 introduced by GmGlyA3B4_T01TALE nuclease
gttcatgtacggttgcagatataaacgaagcatagcttatgtatgaggtgtaacaaaattggaaacaatagccatgcaaggtgaagaatgtcaccaactcagaaacccttcttcattgacgtgtccctcactcactctcctctcttcactataaatcgccactcttcgtgttctccacttcaccaactccttcaaacttattaacactttccttagttcaatatggggaagcccttcttcactctctctctttcttccctttgcttcgagtgcatgctttgctattacctccagcaagttcaacgagtgccaactcaacaacctcaacgcgttggaacccgaccaccgcgttgagtccgaaggtggtcttattgaaacatggaactctcaacaccctgagctgcaatgcgccggtgtcactgtttccaaacgcaccctcaaccgcaacggcctccacttgccatcttactcaccttatccccaaatgatcattgtcgttcaaggtgcgtaatattagtaagaagtatttatcagcttaacgtgataacaataatagtaatatgaaatatttattaaattttttataattaatctctgctagaaaatttgattaatc

SEQ ID NO: 1134 - DNA, 633 bp, Artificial
  Mutations within GlyA3B4 introduced by GmGlyA3B4_T01TALE nuclease
gttcatgtacggttgcagatataaacgaagcatagcttatgtatgaggtgtaacaaaattggaaacaatagccatgcaaggtgaagaatgtcaccaactcagaaacccttcttcattgacgtgtccctcactcactctcctctcttcactataaatcgccactcttcgtgttctccacttcaccaactccttcaaacttattaacactttccttagttcaatatggggaagcccttcttcactctctctctttcttccctttgcttgcttcgagtgcatgctttgctattacctccagcaagttcaacgagtgccaactcaacaacctcaacgcgttggaacccgaccaccgcgttgagtccgaaggtggtcttattgaaacatggaactctcaacaccctgagctgcaatgcgccggtgtcactgtttccaaacgcaccctcaaccgcaacggcctccacttgccatcttactcaccttatccccaaatgatcattgtcgttcaaggtgcgtaatattagtaagaagtatttatcagcttaacgtgataacaataatagtaatatgaaatatttattaaattttttataattaatctctgctagaaaatttgattaatcatttttagtagaa

SEQ ID NO: 1135 - DNA, 652 bp, Artificial
  Mutations within GlyA3B4 introduced by GmGlyA3B4_T01TALE nuclease
gttcatgtacggttgcagatataaacgaagcatagcttatgtatgaggtgtaacaaaattggaaacaatagccatgcaaggtgaagaatgtcaccaactcagaaacccttcttcattgacgtgtccctcactcactctcctctcttcactataaatcgccactcttcgtgttctccacttcaccaactccttcaaacttattaacactttccttagttcaatatggggaagcccttctcactctctctcttgtcgagtgcatgctttgctattacctccagcaagttcaacgagtgccaactcaacaacctcaacgcgttggaacccgaccaccgcgttgagtccgaaggtggtcttattgaaacatggaactctcaacaccctgagctgcaatgcgccggtgtcactgtttccaaacgcaccctcaaccgcaacggcctccacttgccatcttactcaccttatcccccaaatgatcattgtcgttcaaggtgcgtaatattagtaagaagtatttatcagcttaacgtgataacaataatagtaatatgaaatatttattaaattttttataattaatctctgctagaaaatttgattaatcatttttagtagaatttgttttttctcaactaggttttaaaacaccaca

SEQ ID NO: 1136 - DNA, 616 bp, Artificial
  Mutations within GlyA3B4 introduced by GmGlyA3B4_T01TALE nuclease
gttcatgtacggttgcagatataaacgaagcatagcttatgtatgaggtgtaacaaaattggaaacaatagccatgcaaggtgaagaatgtcaccaactcagaaacccttcttcattgacgtgtccctcactcactctcctctcttcactataaatcgccactcttcgtgttctccacttcaccaactccttcaaacttattaacactttccttagttcaatatggggaagcccttcttcactctctctctttcttccctttgcttgctcgtctccagcggctgttgccggtgctgtgccaggcccacggcttgaccccccagcaggtggtggccatcgccaactcttgtcgagtgcatgctttgctattacctccagcaagttcaacgagtgccaactcaacaacctcaacgcgttggaacccgaccaccgcgttgagtccgaaggtggtcttattgaaacatggaactctcaacaccctgagctgcaatgcgccggtgtcactgtttccaaacgcaccctcaaccgcaacggcctccacttgccatcttactcaccttatccccaaatgatcattgtcgttcaaggtgcgtaatattagtaagaagtatttatc

SEQ ID NO: 1137 - DNA, 648 bp, Artificial
  Mutations within GlyA3B4 introduced by GmGlyA3B4_T01TALE nuclease
gttcatgtacggttgcagatataaacgaagcatagcttatgtatgaggtgtaacaaaattggaaacaatagccatgcaaggtgaagaatgtcaccaactcagaaacccttcttcattgacgtgtccctcactcactctcctctcttcactataaatcgccactcttcgtgttctccacttcaccaactccttcaaacttattaacactttccttagttcaatatggggaagcccttcttcactctctctctttcttccctttgcttgcagtgcatgctttgctattacctccagcaagttcaacgagtgccaactcaacaacctcaacgcgttggaacccgaccaccgcgttgagtccgaaggtggtcttattgaaacatggaactctcaacaccctgagctgcaatgcgccggtgtcactgtttccaaacgcaccctcaaccgcaacggcctccacttgccatcttactcaccttatccccaaatgatcattgtcgttcaaggtgcgtaaatattagtaagaagtatttatcagcttaacgtgataacaataatagtaatatgaaatatttattaaattttttataattaatctctgctagaaaatttgattaatctttttagtagaattgttttttctcaactagg

SEQ ID NO: 1138 - DNA, 672 bp, Artificial
  Mutations within GlyA3B4 introduced by GmGlyA3B4_T01TALE nuclease
gttcatgtacggttgcagatataaacgaagcatagcttatgtatgaggtgtaacaaaattggaaacaatagccatgcaaggtgaagaatgtcaccaactcagaaacccttcttcattgacgtgtccctcactcactctcctctcttcactataaatcgccactcttcgtgttctccacttcaccaactccttcaaacttattaacactttccttagttcaatatggggaagcccttcttcactctctctctttcttccctttgcttgcttgtcgagtgcatgctttgctattacctccagcaagttcaacgagtgccaactcaacaacctcaacgcgttggaacccgaccaccgcgttgagtccgaaggtggtcttattgaaacatggaactctcaacaccctgagctgcaatgcgccggtgtcactgtttccaaacgcaccctcaaccgcaacggcctccacttgccatcttactcaccttatcccccaaatgatcattgtcgttcaaggtgcgtaatattagtaagaagtatttatcagcttaacgtgataacaataatagtaatatgaaatattttattaaattttttataattaatctctgctagaaaatttgattaatcatttttagtagaatttgttttttctcaactaggttttaaaacaccaca

SEQ ID NO: 1139 - DNA, 670 bp, Artificial
  Mutations within GlyA3B4 introduced by GmGlyA3B4_T01TALE nuclease
gttcatgtacggttgcagatataaacgaagcatagcttatgtatgaggtgtaacaaaattggaaacaatagccatgcaaggtgaagaatgtcaccaactcagaaacccttcttcattgacgtgtccctcactcactctcctctcttcactataaatcgccactcttcgtgttctccacttcaccaactccttcaaacttattaacactttccttagttcaatatggggaagcccttcttcactctctctctttcttccctttgcttgctctcgagtgcatgctttgctattacctccagcaagttcaacgagtgccaactcaacaacctcaacgcgttggaacccgaccaccgcgttgagtccgaaggtggtcttattgaaacatggaactctcaacaccctgagctgcaatgcgccggtgtcactgtttccaaacgcaccctcaaccgcaacggcctccacttgccatcttactcaccttatccccaaatgatcattgtcgttcaaggtgcgtaaatattagtaagaagtatttatcagctttaacgtgataacaataatagtaatatgaaatatttattaaattttttataattaatctctgctagaaaatttgattaatcatttttagtagaatttgttttttctcaactaggttttaaaacaccca

SEQ ID NO: 1140 - DNA, 605 bp, Artificial
  Mutations within GlyA3B4 introduced by GmGlyA3B4_T01TALE nuclease
gttcatgtacggttgcagatataaacgaagcatagcttatgtatgaggtgtaacaaaattggaaacaatagccatgcaaggtgaagaatgtcaccaactcagaaacccttcttcattgacgtgtccctcactcactctcctctcttcactataaatcgccactcttcgtgttctccacttcaccaactccttcaaacttattaacactttccttagttcaatatggggaagcccttcttcactctctctcttgtcgagtgcatgctttgctattacctccagcaagttcaacgagtgccaactcaacaacctcaacgcgttggaacccgaccaccgcgttgagtccgaaggtggtcttattgaaacatggaactctcaacaccctgagctgcaatgcgccggtgtcactgtttccaaacgcaccctcaaccgcaacggcctccacttgccatcttactcaccttatcccccaaatgatcattgtcgttcaaggtgcgtaatattagtaagaagtatttatcagcttaacgtgataacaataatagtaatatgaaatatttattaaattttttataattaatctctgctagaaaatttgattaatc

SEQ ID NO: 1141 - DNA, 399 bp, Artificial; identical to SEQ ID NO: 621
  Mutations within GlyA3B4 introduced by GmGlyA3B4_T01TALE nuclease

SEQ ID NO: 1142 - DNA, 581 bp, Artificial; identical to SEQ ID NO: 820
  Mutations within GlyA3B4 introduced by GmGlyA3B4_T01TALE nuclease

SEQ ID NO: 1143 - DNA, 650 bp, Artificial
  Mutations within GlyA3B4 introduced by GmGlyA3B4_T01TALE nuclease
gttcatgtacggttgcagatataaacgaagcatagcttatgtatgaggtgtaacaaaattggaaacaatagccatgcaaggtgaagaatgtcaccaactcagaaacccttcttcattgacgtgtccctcactcactctcctctcttcactataaatcgccactcttcgtgttctccacttcaccaactccttcaaacttattaacactttccttagttcaatatggggaagcccttcttcactctctctctttcttccctttgcttgcgcatgcttgcttgcattatcctccagcaagttcaacgagtgccaactcaacaacctcaacgcgttggaacccgaccaccgcgttgagtccgaaggtggtcttattgaaacatggaactctcaacaccctgagctgcaatgcgccggtgtcactgtttccaaacgcaccctcaaccgcaacggcctccacttgccatcttactcaccttatcccccaaatgatcattgtcgttcaaggtgcgtaatattagtaagaagtatttatcagcttaacgtgataacaataatagtaatatgaaatatttattaaattttttataattaatctctgctagaaaatttgattaatcatttttagtagaatttgttttttctcaactagg

SEQ ID NO: 1144 - DNA, 726 bp, Artificial
  Mutations within GlyA3B4 introduced by GmGlyA3B4_T01TALE nuclease
  misc_feature (627); (670): n is a or c or t or g
gttcatgtacggttgcagatataaacgaagcatagcttatgtatgaggtgtaacaaaattggaaacaatagccatgcaaggtgaagaatgtcaccaactcagaaacccttcttcattgacgtgtccctcactcactctcctctcttcactataaatcgccactcttcgtgttctccacttcaccaactccttcaaacttattaacactttccttagttcaatatggggaagcccttcttcactctctctctttcttccctttgcttgctggtccagcggctgttgccggtgctgtgccaggcccacggcttgaccccccagcaggtggtggccatcgccagcaatggcggtggcaagcaggcgctggagacggtcctcttgtcgagtgcatgctttgctattacctccagcaagttcaacgagtgccactcaacaactcaacgcgttgaaccgaccaccgcgttgagtccgaaggtggtcttattgaaacatggaactctcaagcaccctgagctgcaatgcgccggtgtcactgtttccaaacgcaccctcaaccgcaacggcctccacttgccattcttactcaccttatccccaaatgatcattgtcgttcaaggtgcgtaatnttagtaagaagtatttcatcagcttaacgtgataacaataatngtaatatgaaatatttattaaattttttataataatctctgctagaaaatttgatt

SEQ ID NO: 1145 - DNA, 867 bp, Artificial
  Mutations within GlyA3B4 introduced by GmGlyA3B4_T01TALE nuclease
gttcatgtacggttgcagatataaacgaagcatagcttatgtatgaggtgtaacaaaattggaaacaatagccatgcaaggtgaagaatgtcaccaactcagaaacccttcttcattgacgtgtccctcactcactctcctctcttcactataaatcgccactcttcgtgttctccacttcaccaactccttcaaacttattaacactttccttagttcaatatggggaagcccttcttcactctctctctttcttccctttgcttgctagactaaaaaataattattctaaattaagaaactaaaattatatttaagtcataaaacaatagataaaattaacagagtcgacgggcccgggatccgatccaatgctatgaccatgattacgaattcccgatctagtaacatagatgacaccgcgcgcgataatttatcctagtttgcgcgctatattttgttttctatcgcgtattaaactcttgtcgagtgcatgctttgctattacctccagcaagttcaacgagtgccaactcaacaacctcaacgcgttggaacccgaccaccgcgttgagtccgaaggtggtcttattgaaacatggaactctcaacaccctgagctgcaatgcgccggtgtcactgtttccaaaacgcaccctcaaccgcaacggcctccaacttgccatcttactcacctttaatccccaaaatgatcatttgtcgttcaaggtgcgtaatattagtaagaagtatttatcagcttaacgtgataacaataatagtaatatgaaatatttattaaattttttcataattaatctctgctagaaaatttgattaatcattttagtagaatttgtttttctc

SEQ ID NO: 1146 - DNA, 590 bp, Artificial
  Mutations within GlyA3B4 introduced by GmGlyA3B4_T01TALE nuclease
gttcatgtacggttgcagatataaacgaagcatagcttatgtatgaggtgtaacaaaattggaaacaatagccatgcaaggtgaagaatgtcaccaactcagaaacccttcttcattgacgtgtccctcactcactctcctctcttcactataaatcgccactcttcgtgttctccacttcaccaactccttcaaacttattaacactttccttagttcaatatggggaagcccttcttcactctctctctttcttccctttgctgtcgagtgcatgctttgctattacctccagcaagttcaacgagtgccaactcaacaacctcaacgcgttggaacccaaccaccgcgttgagtccgaaggtggtcttattgaaacatggaactctcaacaccctgagctgcaatgcgccggtgtcactgtttccaaacgcaccctcaaccgcaacggcctccacttgccatcttactcaccttatccccaaatgatcattgtcgttcaaggtgcgtaatattagtaagaagtatttatcagcttaacgtgataacaataatagtaatatgaaatatttattaaattttttataatt

SEQ ID NO: 1147 - DNA, 655 bp, Artificial
  Mutations within GlyA3B4 introduced by GmGlyA3B4_T01TALE nuclease
gttcatgtacggttgcagatataaacgaagcatagcttatgtatgaggtgtaacaaaattggaaacaatagccatgcaaggtgaagaatgtcaccaactcagaaacccttcttcattgacgtgtccctcactcactctcctctcttcactataaatcgccactcttcgtgttctccacttcaccaactccttcaaacttattaacactttccttagttcaatatggggaagcccttcttcactctctctctttcttccctttgcttcttgtcgagtgcatgctttgctattacctccagcaagttcaacgagtgccaactcaacaacctcaacgcgttggaacccgaccaccgcgttgagtccgaaggtggtcttattgaaacatggaactctcaacaccctgagctgcaatgcgccggtgtcactgtttccaaacgcaccctcaaccgcaacggcctccacttgccatcttactcaccttatccccaaatgatcattgtcgttcaaggtgcgtaaatattagtaagaagtatttatcagcttaacgtgataacaataatagtaatatgaaatatttattaaattttttataattaatctctgctagaaaatttgattaatcatttttagtagaatttgttttttctcaactagg

SEQ ID NO: 1148 - DNA, 656 bp, Artificial
  Mutations within GlyA3B4 introduced by GmGlyA3B4_T01TALE nuclease
gttcatgtacggttgcagatataaacgaagcatagcttatgtatgaggtgtaacaaaattggaaacaatagccatgcaaggtgaagaatgtcaccaactcagaaacccttcttcattgacgtgtccctcactcactctcctctcttcactataaatcgccactcttcgtgttctccacttcaccaactccttcaaacttattaacactttccttagttcaatatggggaagcccttcttcactctctctctttcttccctttgcttgcttgtcgagtgcatgctttgctattacctccagcaagttcaacgagtgccaactcaacaacctcaacgcgttggaacccgaccaccgcgttgagtccgaaggtggtcttattgaaacatggaactctcaacaccctgagctgcaatgcgccggtgtcactgtttccaaacgcaccctcaaccgcaacggcctccacttgccatcttactcaccttatcccccaaatgatcattgtcgttcaaggtgcgtaaatattagtaagaagtatttatcagcttaacgtgataacaataatagtaatatgaaatatttattaaattttttataattaaatctctgctagaaaatttgattaatctttttagtagaattgttttttctcaactagg

SEQ ID NO: 1149 - DNA, 671 bp, Artificial
  Mutations within GlyA3B4 introduced by GmGlyA3B4_T01TALE nuclease
  misc_feature (534): n is a or c or t or g
gttcatgtacggttgcagatataaacgaagcatagcttatgtatgaggtgtaacaaaattggaaacaatagccatgcaaggtgaagaatgtcaccaactcagaaacccttcttcattgacgtgtccctcactcactctcctctcttcactataaatcgccactcttcgtgttctccacttcaccaactccttcaaacttattaacactttccttagttcaatatggggaagcccttcttcactctctctctttcttccctttgcttgctctgtcgtagtgcatgctttgctattacctccagcaagttcaacgagtgccaactcaacaacctcaacgcgttggaacccgaccaccgcgttgagtccgaaggtggtcttattgaaacatggaactctcaacaccctgagctgcaatgcgccggtgtcactgtttccaaacgcaccctcaaccgcaacggcctccacttgccatcttactcaccttatcccccaaatgatcattgtcgttcaagggtgcgtaatattagtaagagnatttatcagcttaacgtgataacaataatagtaatatgaaatatttattaaatttttataattaatctctgctagaaaatttgattaatcattttagtagaatttgtttttctcaactaggtttttaaaacaccaca

SEQ ID NO: 1150 - DNA, 626 bp, Artificial
  Mutations within GlyA3B4 introduced by GmGlyA3B4_T01TALE nuclease
gttcatgtacggttgcagatataaacgaagcatagcttatgtatgaggtgtaacaaaattggaaacaatagccatgcaaggtgaagaatgtcaccaactcagaaacccttcttcattgacgtgtccctcactcactctcctctcttcactataaatcgccactcttcgtgttctccacttcaccaactccttcaaacttattaacactttccttagttcaatatggggaagcccttcttcactctctctctttcttccctttgcttgctactactcttgtcgagtgcatgctttgctattacctccagcaagttcaacgagtgccaactcaacaacctcaacgcgttggaacccgaccaccgcgttgagtccgaaggtggtcttattgaaacatggaactctcaacacccctgagctgcaatgcgccggtgtcactgtttccaaacgcaccctcaaccgcaacggcctccacttgccatcttactcaccttatccccaaatgatcattgtcgttcaaggtgcgtatattagtaagaagtattttatcagcttaacgtgataacaataatagtaatatgaaatatttattaaaattttttataattaatctctgctagaaaatttga

SEQ ID NO: 1151 - DNA, 656 bp, Artificial
  Mutations within GlyA3B4 introduced by GmGlyA3B4_T01TALE nuclease
gttcatgtacggttgcagatataaacgaagcatagcttatgtatgaggtgtaacaaaattggaaacaatagccatgcaaggtgaagaatgtcaccaactcagaaacccttcttcattgacgtgtccctcactcactctcctctcttcactataaatcgccactcttcgtgttctccacttcaccaactccttcaaacttattaacactttccttagttcaatatggggaagcccttcttcactctctctctttcttccctttgcttgctatttgctattacctccagcaagttcaacgagtgccaactcaacaacctcaacgcgttggaacccgaccaccgcgttgagtccgaaggtggtcttattgaaacatggaactctcaacaccctgagctgcaatgcgccggtgtcactgtttccaaacgcaccctcaaccgcaacggcctccacttgccatcttactcaccttatccccaaatgatcattgtcgttcaaggtgcgtaatattagtaagaagtatttatcagcttaacgtgataacaataatagtaatatgaaatatttattaaattttttataattaatctctgctagaaaatttgattaatcatttttagtagaatttgttttttctcaactaggttttaaacaccaca

SEQ ID NO: 1152 - DNA, 619 bp, Artificial
  Mutations within GlyA3B4 introduced by GmGlyA3B4_T01TALE nuclease
gttcatgtacggttgcagatataaacgaagcatagcttatgtatgaggtgtaacaaaattggaaacaatagccatgcaaggtgaagaatgtcaccaactcagaaacccttcttcattgacgtgtccctcactcactctcctctcttcactataaatcgccactcttcgtgttctccacttcaccaactccttcaaacttattaacactttccttagttcaatatggggaagcccttcttcactctctctctttcttccctttgcttgctggccatcgccagccacgatggcggcaagcaggcgctggagacggtctcttgtcgagtgcatgctttgctattacctccagcaagttcaacgagtgccaactcaacaacctcaacgcgttggaacccgaccaccgcgttgagtccgaaggtggtcttattgaaacatggaactctcaacaccctgagctgcaatgcgccggtgtcactgtttccaaacgcaccctcaaccgcaacggcctccacttgccatcttactcacctttatccccaaatgatcattgtcgttcaaggtgcgtaatattagtaagaagtatttatcagcttaacgtgataacaataatagtaatatg

SEQ ID NO: 1153 - DNA, 609 bp, Artificial; identical to SEQ ID NO: 610
  Mutations within GlyA3B4 introduced by GmGlyA3B4_T01TALE nuclease

SEQ ID NO: 1154 - DNA, 745 bp, Artificial
  Mutations within GlyA3B4 introduced by GmGlyA3B4_T01TALE nuclease
gttcatgtacggttgcagatataaacgaagcatagcttatgtatgaggtgtaacaaaattggaaacaatagccatgcaaggtgaagaatgtcaccaactcagaaacccttcttcattgacgtgtccctcactcactctcctctcttcactataaatcgccactcttcgtgttctccacttcaccaactccttcaaacttattaacactttccttagttcaatatggggaagcccttcttcactctctctctttcttccctttgcttgctatgaagaagaagctagaggtgggaaatactcaagtcattctcttgaaaaagttgctgcaatgatatgcaacaaaatatcactatacggagtcaaggtaattatagtgttcacatgaacatttctcccatgaaaatatatattttctgactcttgtcgagtgcatgctttgctattacctccagcaagttcaacgagtgccaactcaacaactcaacgcgttggaacccgaccaccgcgttgagtccgaaggtggtcttattgaaacatggaactctcaacaccctgagctgcaatgcgccggtgtcactgtttccaaacgcaccctcaaccgcaacggcctccacttgccatcttactcaccttatccccaaatgatcattgtcgttcaaggtgcgtaatattagtaagaagtatttatcagcttaacgtgataacaataatagtaatatgaaatatttattaaatttttataatt

SEQ ID NO: 1155 - DNA, 702 bp, Artificial
  Mutations within GlyA3B4 introduced by GmGlyA3B4_T01TALE nuclease
gttcatgtacggttgcagatataaacgaagcatagcttatgtatgaggtgtaacaaaattggaaacaatagccatgcaaggtgaagaatgtcaccaactcagaaacccttcttcattgacgtgtccctcactcactctcctctcttcactataaatcgccactcttcgtgttctccacttcaccaactccttcaaacttattaacactttccttagttcaatatggggaagcccttcttcactctctctctttcttccctttgcttgctggccatcgccagccacgatggcggcaagcaggcgctggagacggtctcttgtcgagtgcatgctttgctattacctccagcaagttcaacgagtgccaactcaacaacctcaacgcgttggaacccgaccaccgcgttgagtccgaaggtggtcttattgaaacatggaactctcaacaccctgagctgcaatgcgccggtgtcactgtttccaaacgcaccctcaaccgcaacggcctccacttgccatcttactcaccttatccccaaatgatcattgtcgttcaaggtgcgtaatattagtaagaagtatttatcagcttaacgtgataacaataatagtaatatgaaatatttattaaattttttataaattaatctctgctagaaaatttgattaatcatttttagtagaatttgtttttctcaacta

SEQ ID NO: 1156 - DNA, 594 bp, Artificial
  Mutations within GlyA3B4 introduced by GmGlyA3B4_T01TALE nuclease
gttcatgtacggttgcagatataaacgaagcatagcttatgtatgaggtgtaacaaaattggaaacaatagccatgcaaggtgaagaatgtcaccaactcagaaacccttcttcattgacgtgtccctcactcactctcctctcttcactataaatcgccactcttcgtgttctccacttcaccaactccttcaaacttattaacactttccttgtcgagtgcatgctttgctattacctccagcaagttcaacgagtgccaactcaacaacctcaacgcgttggaacccgaccaccgcgttgagtccgaaggtggtcttattgaacatggaactctcaacaccctgagctgcaatgcgccggtgtcactgtttccaaacgcaccctcaaccgcaacggcctccacttgccatcttactcaccttatccccaaatgatcattgtcgttcaaggtgcgtaatattagtaagaagtatttatcagcttaacgtgataacaataatagtaatatgaaatatttattaaattttttataattaatctctgctagaaaatttgatttaatcatttttagtagaatttgtttttctcaac

SEQ ID NO: 1157 - DNA, 664 bp, Artificial
  Mutations within GlyA3B4 introduced by GmGlyA3B4_T01TALE nuclease
gttcatgtacggttgcagatataaacgaagcatagcttatgtatgaggtgtaacaaaattggaaacaatagccatgcaaggtgaagaatgtcaccaactcagaaacccttcttcattgacgtgtccctcactcactctcctctcttcactataaatcgccactcttcgtgttctccacttcaccaactccttcaaacttattaacactttccttagttcaatatggggaagcccttcttcactctctctctttcttccctttgctgtcgagtgcatgctttgctattacctccagcaagttcaacgagtgccaactcaacaacctcaacgcgttggaacccgaccaccgcgttgagtccgaaggtggtcttattgaaacatggaactctcaacaccctgagctgcaatgcgccggtgtcactgtttccaaacgcacctcaaccgcaacggcctccacttgccatcttactcaccttatccccaaatgatcattgtcgttcaaggtgcgtaatattagtaagaagtatttatcagcttaacgtgataacaataatagtaatatgaaatatttattaaattttttataattaatctctgctagaaaatttgattaatcatttttagtagaatttgttttttctcaactaggttttaaaacaccaca

SEQ ID NO: 1158 - DNA, 550 bp, Artificial
  Mutations within GlyA3B4 introduced by GmGlyA3B4_T01TALE nuclease
gttcatgtacggttgcagatataaacgaagcatagcttatgtatgaggtgtaacaaaattggaaacaatagccatgcaaggtgaagaatgtcaccaactcagaaacccttcttcattgacgtgtccctcactcactctcctctcttcactataaatcgccactcttcgagtgcatgcttttgctattacctccagcaagttcaacgagtgccaactcaacaacctcaacgcgttggaacccgaccaccgcgttgagtccgaaggtggtcttattgaaacatggaactctcaacaccctgagctgcaatgcgccggtgtcactgtttccaaacgcaccctcaaccgcaacggcctccacttgccatcttactcaccttatcccccaaatgatcattgtcgttcaaggtgcgtaatattagtaagaagtatttatcagcttaacgtgataacaataatagtaatatgaaatatttattaaattttttataattaatctctgctagaaaatttgattaatcatttttagtagaatttgtttttctcaactagg

SEQ ID NO: 1159 - DNA, 654 bp, Artificial
  Mutations within GlyA3B4 introduced by GmGlyA3B4_T01TALE nuclease
gttcatgtacggttgcagatataaacgaagcatagcttatgtatgaggtgtaacaaaattggaaacaatagccatgcaaggtgaagaatgtcaccaactcagaaacccttcttcattgacgtgtccctcactcactctcctctcttcactataaatcgccactcttcgtgttctccacttcaccaactccttcaaacttattaacactttccttagttcaatatggggaagcccttcttcactctctctctttcttccctttgcttgctctcgagtgcatgctttgctattacctccagcaagttcaacgagtgccaactcaacaacctcaacgcgttggaacccgaccaccgcgttgagtccgaaggtggtcttattgaaacatggaactctcaacaccctgagctgcaatgcgccggtgtcactgtttccaaacgcaccctcaaccgcaacggcctccacttgccatcttactcaccttatccccaaatgatcattgtcgttcaaggtgcgtaatattagtaagaagtatttatcagcttaacgtgataacaataatagtaatatgaaatatttattaaattttttataattaatctctgctagaaaatttgattaatcatttttagtagaatttgttttttctcaactagg

SEQ ID NO: 1160 - DNA, 654 bp, Artificial
  Mutations within GlyA3B4 introduced by GmGlyA3B4_T01TALE nuclease
gttcatgtacggttgcagatataaacgaagcatagcttatgtatgaggtgtaacaaaattggaaacaatagccatgcaaggtgaagaatgtcaccaactcagaaacccttcttcattgacgtgtccctcactcactctcctctcttcactataaatcgccactcttcgtgttctccacttcaccaactccttcaaacttattaacactttccttagttcaatatggggaagcccttcttcactctctctctttcttccctttgcttgtcttgtcgagtgcatgctttgctattacctccagcaagttcaacgagtgccaactcaacaacctcaacgcgttggaacccgaccaccgcgttgagtccgaaggtggtcttattgaaacatggaactctcaacaccctgagctgcaatgcgccggtgtcactgtttccaaacgcaccctcaaccgcaacggcctccacttgccatcttactcaccttatccccaaatgatcattgtcgttcaaggtgcgtaatattagtaagaagtatttatcagcttaacgtgataacaataatagtaatatgaaatatttattaaattttttataattaatctctgctagaaaatttgattaatctttttagtagaattgttttttctcaactagg

SEQ ID NO: 1161 - DNA, 560 bp, Artificial; identical to SEQ ID NO: 870
  Mutations within GlyA3B4 introduced by GmGlyA3B4_T01TALE nuclease

SEQ ID NO: 1162 - DNA, 615 bp, Artificial
  Mutations within GlyA3B4 introduced by GmGlyA3B4_T01TALE nuclease
gttcatgtacggttgcagatataaacgaagcatagcttatgtatgaggtgtaacaaaattggaaacaatagccatgcaaggtgaagaatgtcaccaactcagaaacccttcttcattgacgtgtccctcactcactctcctctcttcactataaatcgccactcttcgtgttctccacttcaccaactccttcaaacttattaacactttccttagttcaatatggggaagcccttcttcactctctctctttcttccctttgcttgctactgcttgccaccgccattgctggcgatggccaccacctgctggggggtcaagccgtgggcctggcacagcaccggcaacagcgcctgcaccgtctccagcgcctgctttgctattacctccagcaagttcaacgagtgccaactcaacaacctcaacgcgttggaacccgaccaccgcgttgagtccgaaggtggtcttattgaaacatggaactctcaacaccctgagctgcaatgcgccggtgtcactgtttccaaacgcaccctcaaccgcaacggcctccacttgccatcttactcaccttatccccaaatgatcattgtcgttcaaggtgcgtaatatta

SEQ ID NO: 1163 - DNA, 655 bp, Artificial
  Mutations within GlyA3B4 introduced by GmGlyA3B4_T01TALE nuclease
gttcatgtacggttgcagatataaacgaagcatagcttatgtatgaggtgtaacaaaattggaaacaatagccatgcaaggtgaagaatgtcaccaactcagaaacccttcttcattgacgtgtccctcactcactctcctctcttcactataaatcgccactcttcgtgttctccacttcaccaactccttcaaacttattaacactttccttagttcaatatggggaagcccttcttcactctctctctttcttcgagtgcatgctttgctattacctccagcaagttcaacgagtgccaactcaacaacctcaacgcgttggaacccgaccaccgcgttgagtccgaaggtggtcttattgaaacatggaactctcaacaccctgagctgcaatgcgccggtgtcactgtttccaaacgcaccctcaaccgcaacggcctccacttgccatcttactcaccttatccccaaatgatcattgtcgttcaaggtgcgtaaatattagtaagaagtatttatcagcttaacgtgataacaataatagtaatatgaaatatttattaaattttttataattaatctctgctagaaaatttgattaatcatttttagtagaatttgttttttctcaactaggttttaaaacaccaca

SEQ ID NO: 1164 - DNA, 667 bp, Artificial
  Mutations within GlyA3B4 introduced by GmGlyA3B4_T01TALE nuclease
gttcatgtacggttgcagatataaacgaagcatagcttatgtatgaggtgtaacaaaattggaaacaatagccatgcaaggtgaagaatgtcaccaactcagaaacccttcttcattgacgtgtccctcactcactctcctctcttcactataaatcgccactcttcgtgttctccacttcaccaactccttcaaacttattaacactttccttagttcaatatggggaagcccttcttcactctctctctttcttccctttgcttgctattgtcgagtgcatgctttgctattacctccagcaagttcaacgagtgccaactcaacaacctcaacgcgttggaacccgaccaccgcgttgagtccgaaggtggtcttattgaaacatggaactctcaacaccctgagctgcaatgcgccggtgtcactgtttccaaacgcaccctcaaccgcaacggcctccacttgccatcttactcaccttatccccaaatgatcattgtcgttcaaggtgcgtaatattagtaagagtatttatcagcttaacgtgataacaataatagtaatatgaaatatttattaaatttttataattaatctctgctagaaaatttgattaatcattttagtagaatttgtttttctcaactaggtttttaaaacacca

SEQ ID NO: 1165 - DNA, 656 bp, Artificial
  Mutations within GlyA3B4 introduced by GmGlyA3B4_T01TALE nuclease
gttcatgtacggttgcagatataaacgaagcatagcttatgtatgaggtgtaacaaaattggaaacaatagccatgcaaggtgaagaatgtcaccaactcagaaacccttcttcattgacgtgtccctcactcactctcctctcttcactataaatcgccactcttcgtgttctccacttcaccaactccttcaaacttattaacactttccttagttcaatatggggaagcccttcttcactctctctctttcttccctttgcttgtcttgtcgagtgcatgctttgctattacctccagcaagttcaacgagtgccaactcaacaacctcaacgcgttggaacccgaccaccgcgttgagtccgaaggtggtcttattgaaacatggaactctcaacaccctgagctgcaatgcgccggtgtcactgtttccaaacgcaccctcaaccgcaacggcctccacttgccatcttactcaccttatcccccaaatgatcattgtcgttcaaggtgcgtaaatattagtaagaagtatttatcagcttaacgtgataacaataatagtaatatgaaatatttattaaattttttataattaatctctgctagaaaatttgattaatctttttagtagaattgttttttctcaactagg

SEQ ID NO: 1166 - DNA, 650 bp, Artificial
  Mutations within GlyA3B4 introduced by GmGlyA3B4_T01TALE nuclease
gttcatgtacggttgcagatataaacgaagcatagcttatgtatgaggtgtaacaaaattggaaacaatagccatgcaaggtgaagaatgtcaccaactcagaaacccttcttcattgacgtgtccctcactcactctcctctcttcactataaatcgccactcttcgtgttctccacttcaccaactccttcaaacttattaacactttccttagttcaatatggggaagcccttcttcactctctctctttcttccctttgcttgcttgtcgagtgcatgctttgctattacctccagcaagttcaacgagtgccaactcaacaacctcaacgcgttggaacccgaccaccgcgttgagtccgaaggtggtcttattgaaacatggaactctcaacacctgagctgcaatgcgccggtgtcactgtttccaaacgcaccctcaaccgcaacggcctccacttgccatcttactcaccttatcccccaaatgatcattgtcgttcaaggtgcgtaatattagtaagaagtatttatcagcttaacgtgataacaataatagtaatatgaaatatttattaaattttttataattaatctctgctagaaaatttgattaatctttttagtagaattgtttttctcaacta

SEQ ID NO: 1167 - DNA, 636 bp, Artificial
  Mutations within GlyA3B4 introduced by GmGlyA3B4_T01TALE nuclease
gttcatgtacggttgcagatataaacgaagcatagcttatgtatgaggtgtaacaaaattggaaacaatagccatgcaaggtgaagaatgtcaccaactcagaaacccttcttcattgacgtgtccctcactcactctcctctcttcactataaatcgccactcttcgtgttctccacttcaccaactccttcaaacttattaacactttccttagttcaatatggggaagcccttcttcactctctctctttcttccctttgcttgcttgtcgagtgcatgctttgctattacctccagcaagttcaacgagtgccaactcaacaacctcaacgcgttggaacccgaccaccgcgttgagtccgaaggtggtcttattgaaacatggaactctcaacaccctgagctgcaatgcgccggtgtcactgtttccaaacgcaccctcaaccgcaacggcctccacttgccatcttactcaccttatcccccaaatgatcattgtcgttcaaggtgcgtaatattagtaagaagtatttatcagcttaacgtgataacaataatagtaatatgaaatatttattaaattttttataattaatctctgctagaaaatttgattaatcatttttagtagaa

SEQ ID NO: 1168 - DNA, 644 bp, Artificial
  Mutations within GlyA3B4 introduced by GmGlyA3B4_T01TALE nuclease
gttcatgtacggttgcagatataaacgaagcatagcttatgtatgaggtgtaacaaaattggaaacaatagccatgcaaggtgaagaatgtcaccaactcagaaacccttcttcattgacgtgtccctcactcactctcctctcttcactataaatcgccactcttcgtgttctccacttcaccaactccttcaaacttattaacactttccttagttcaatatggggaagcccttcttcacttgtcgagtgcatgctttgctattacctccagcaagttcaacgagtgccaactcaacaacctcaacgcgttggaacccgaccaccgcgttgagtccgaaggtggtcttattgaaacatggaactctcaacaccctgagctgcaatgcgccggtgtcactgtttccaaacgcaccctcaaccgcaacggcctccacttgccatcttactcaccttatccccaaatgatcattgtcgttcaaggtgcgtaatattagtaagaagtatttatcagcttaacgtgataacaataatagtaatatgaaatatttattaaattttttataattaatctctgctagaaaatttgattaatcatttttagtagaatttgttttttctcaactaggttttaaaacaccaca

SEQ ID NO: 1169 - DNA, 609 bp, Artificial
  Mutations within GlyA3B4 introduced by GmGlyA3B4_T01TALE nuclease
gttcatgtacggttgcagatataaacgaagcatagcttatgtatgaggtgtaacaaaattggaaacaatagccatgcaaggtgaagaatgtcaccaactcagaaacccttcttcattgacgtgtccctcactcactctcctctcttcactataaatcgccactcttcgtgttctccacttcaccaactccttcaaacttattaacactttccttagttcaatatggggaagcccttcttcactctctctctttcttccctttgcttgctttgtcgagtgcatgctttgctattacctccagcaagttcaacgagtgccaactcaacaacctcaacgcgttggaacccgaccaccgcgttgagtccgaaggtggtcttattgaaacatggaactctcaacaccctgagctgcaatgcgccggtgtcactgtttccaaacgcaccctcaaccgcaacggcctccacttgccatcttactcaccttatcccccaaatgatcattgtcgttcaaggtgcgtaatattagtaagaagtatttatcagcttaacgtgataacaataatagtaatatgaaatatttattaaattttttataattaatctctgctag

SEQ ID NO: 1170 - DNA, 593 bp, Artificial
  Mutations within GlyA3B4 introduced by GmGlyA3B4_T01TALE nuclease
gttcatgtacggttgcagatataaacgaagcatagcttatgtatgaggtgtaacaaaattggaaacaatagccatgcaaggtgaagaatgtcaccaactcagaaacccttcttcattgacgtgtccctcactcactctcctctcttcactataaatcgccactcttcgtgttctccacttcaccaactccttcaaacttattaacactttccttagttcaatatggggaagcccttcttcactctctctctttcttccctttgcttgctgccgtgggcctggcacagcaccggcaacagcgctggaccgtctccagcgcctcttgtcgagtgcatgctttgctattacctccagcaagttcaacgagtgccaactcaacaacctcaacgcgttggaacccgaccaccgcgttgagtccgaaggtggtcttattgaaacatggaactctcaacaccctgagctgcaatgcgccggtgtcactgtttccaaacgcaccctcaaccgcaacggcctccacttgccatcttactcacctttatccccaaatgatcattgtcgttcaaggtgcgtaatattagtaagaagtatttatc

SEQ ID NO: 1171 - DNA, 652 bp, Artificial
  Mutations within GlyA3B4 introduced by GmGlyA3B4_T01TALE nuclease
gttcatgtacggttgcagatataaacgaagcatagcttatgtatgaggtgtaacaaaattggaaacaatagccatgcaaggtgaagaatgtcaccaactcagaaaccccttcttcattgacgtgtccctcactcactctcctctcttcactataaatcgccactcttcgtgttctccacttcaccaactccttcaaacttattaacactttccttagttcaatatggggaagcccttcttcactctctctcttgtcgagtgcatgctttgctattacctccagcaagttcaacgagtgccaactcaacaacctcaacgcgttggaacccgaccaccgcgttgagtccgaaggtggtcttattgaaacatggaactctcaacaccctgagctgcaatgcgccggtgtcactgtttccaaacgcaccctcaaccgcaacggcctccacttgccatcttactcaccttatcccccaaatgatcattgtcgttcaaggtgcgtaatattagtaagaagtatttatcagcttaacgtgataacaataatagtaatatgaaatatttattaaattttttataattaatctctgctagaaaatttgattaatcatttttagtagaatttgttttttctcaactaggttttaaaacacca

SEQ ID NO: 1172 - DNA, 560 bp, Artificial
  Mutations within GlyA3B4 introduced by GmGlyA3B4_T01TALE nuclease
gttcatgtacggttgcagatataaacgaagcatagcttatgtatgaggtgtaacaaaattggaaacaatagccatgcaaggtgaagaatgtcaccaactcagaaacccttcttcattgacgtgtccctcactcactctcctctcttcactataaatcgccactcttcgtgttctccacttcaccaactccttcaaacttattaacactttccttagttcaatatggggaagcccttcttcactctctctctttcttccctttgcttgctactactcttgtcgagtgcatgctttgctattacctccagcaagttcaacgagtgccaactcaacaacctcaacgcgttggaacccgaccaccgcgttgagtccgaaggtggtcttattgaaacatggaactctcaacaccctgagctgcaatgcgccggtgtcactgtttccaaacgcaccctcaaccgcaacggcctccacttgccatcttactcaccttatccccaaatgatcattgtcgttcaaggtgcgtatattagtaagaagtatttatcagcttaacgtgatac

SEQ ID NO: 1173 - DNA, 670 bp, Artificial; identical to SEQ ID NO: 676
  Mutations within GlyA3B4 introduced by GmGlyA3B4_T01TALE nuclease

SEQ ID NO: 1174 - DNA, 657 bp, Artificial
  Mutations within GlyA3B4 introduced by GmGlyA3B4_T01TALE nuclease
gttcatgtacggttgcagatataaacgaagcatagcttatgtatgaggtgtaacaaaattggaaacaatagccatgcaaggtgaagaatgtcaccaactcagaaacccttcttcattgacgtgtccctcactcactctcctctcttcacgatttatagggttcacgctcaacaaaatcgcatatcaatttcacaacaattggtatgccaaacatatataattcactgtaataattataaggataaaatgaaatcttgtcgagtgcatgctttgctattacctccagcaagttcaacgagtgccaactcaacaacctcaacgcgttggaacccgaccaccgcgttgagtccgaaggtggtcttattgaaacatggaactctcaacaccctgagctgcaatgcgccggtgtcactgtttccaaacgcaccctcaaccgcaacggcctccacttgccatcttactcaccttatccccaaatgatcattgtcgttcaaggtgcgtaatattagtaagaagtatttatcagcttaacgtgataacaataatagtaatatgaaatatttattaaattttttataattaatctctgctagaaaatttgattaatcattttttagtagaatttgttttttctcaactaggttttaaaacaccaca

SEQ ID NO: 1175 - DNA, 608 bp, Artificial
  Mutations within GlyA3B4 introduced by GmGlyA3B4_T01TALE nuclease
gttcatgtacggttgcagatataaacgaagcatagcttatgtatgaggtgtaacaaaattggaaacaatagccatgcaaggtgaagaatgtcaccaactcagaaacccttcttcattgacgtgtccctcactcactctcctctcttcactataaatcgccactcttcgtgttctccacttcaccaactccttcaaacttattaacactttccttagttcaatatggggaagcccttcttcactctctctctttcttccctttgcttgttgtcgagtgcatgctttgctattacctccagcaagttcaacgagtgccaactcaacaacctcaacgcgttggaacccgaccaccgcgttgagtccgaaggtggtcttattgaaacatggaactctcaacaccctgagctgcaatgcgccggtgtcactgtttccaaacgcaccctcaaccgcaacggcctccacttgccatcttactcaccttatcccccaaatgatcattgtcgttcaaggtgcgtaaatattagtaagaagtatttatcagcttaacgtgataacaataatagtaatatgaaatatttattaaattttttataattaatctctgctag

SEQ ID NO: 1176 - DNA, 744 bp, Artificial
  Mutations within GlyA3B4 introduced by GmGlyA3B4_T01TALE nuclease
  misc_feature (674): n is a or c or t or g
gttcatgtacggttgcagatataaacgaagcatagcttatgtatgaggtgtaacaaaattggaaacaatagccatgcaaggtgaagaatgtcaccaactcagaaacccttcttcattgacgtgtccctcactcactctcctctcttcactataaatcgccactcttcgtgttctccacttcaccaactccttcaaacttattaacactttccttagttcaatatggggaagcccttcttcactctctctctttcttccctttgcttatcgtggctggcgatggccaccacctgctccggggtcaagccgtgggcctggcacagcaccggcaacagccgctggaccgtctccagcgcctgcactcttgtcgagtgcatgctttgctattacctccagcaagttcaacgagtgccaactcaacaacctcaacgcgttggaacccgaccaccgcgttgagtccgaaggtggtcttattgaaacatggaactctcaacaccctgagctgcaatgcgccggtgtcactgtttccaaacgcaccctcaaccgcaacggcctccacttgccatcttactcaccttatccccaaatgatcattgtcgttcaaggtgcgtaatattagtaagaagtatttatcgcttaacgtgataacaataatagtaatatgaaaatatttnttaaattttttataattaatctcttgctagaaaatttgattaatcatttttagtagaatttgtttttctc

SEQ ID NO: 1177 - DNA, 668 bp, Artificial
  Mutations within GlyA3B4 introduced by GmGlyA3B4_T01TALE nuclease
  misc_feature (532): n is a or c or t or g
gttcatgtacggttgcagatataaacgaagcatagcttatgtatgaggtgtaacaaaattggaaacaatagccatgcaaggtgaagaatgtcaccaactcagaaacccttcttcattgacgtgtccctcactcactctcctctcttcactataaatcgccactcttcgtgttctccacttcaccaactccttcaaacttattaacactttccttagttcaatatggggaagcccttcttcactctctctctttcttccctttgcttgctatctctagctgcgtgctttgctattacctccagcaagttcaacgagtgccaactcaacaacctcaacgcgttggaacccgaccaccgcgttgagtccgaaggtggtcttattgaaacatggaactctcaacaccctgagctgcaatgcgccggtgtcactgtttccaaacgcaccctcaaccgcaacggcctccacttgccatcttactcaccttatccccaaatgatcattgtcgttcaaggtgcgtaatattagtaagagnatttatcagcttaacgtgataacaatatagtaatatgaaatatttattaaatttttataattaatctctgctagaaaatttgattaatcattttagtagaatttgtttttctcaactaggtttttaaaacaccaca

SEQ ID NO: 1178 - DNA, 607 bp, Artificial; identical to SEQ ID NO: 708
  Mutations within GlyA3B4 introduced by GmGlyA3B4_T01TALE nuclease

SEQ ID NO: 1179 - DNA, 617 bp, Artificial
  Mutations within GlyA3B4 introduced by GmGlyA3B4_T01TALE nuclease
gttcatgtacggttgcagatataaacgaagcatagcttatgtatgaggtgtaacaaaattggaaacaatagccatgcaaggtgaagaatgtcaccaactcagaaacccttcttcattgacgtgtccctcactcactctcctctcttcactataaatcgccactcttcgtgttctccacttcaccaactccttcaaacttattaacactttccttagttcaatatggggaagcccttcttcactctctctcttgtcgagtgcatgctttgctattacctccagcaagttcaacgagtgccaactcaacaacctcaacgcgttggaacccgaccaccgcgttgagtccgaaggtggtcttattgaaacatggaactctcaacaccctgagctgcaatgcgccggtgtcactgtttccaaacgcaccctcaaccgcaacggcctccacttgccatcttactcaccttatcccccaaatgatcattgtcgttcaaggtgcgtaatattagtaagaagtatttatcagcttaacgtgataacaataatagtaatatgaaatatttattaaattttttataattaatctctgctagaaaatttgattaatctttttagtagaa

SEQ ID NO: 1180 - DNA, 561 bp, Artificial
  Mutations within GlyA3B4 introduced by GmGlyA3B4_T01TALE nuclease
gttcatgtacggttgcagatataaacgaagcatagcttatgtatgaggtgtaacaaaattggaaacaatagccatgcaaggtgaagaatgtcaccaactcagaaaccccttcttcattgacgtgtccctcactcactctcctctcttcactataaatcgccactcttcgagtgcatgcttttgctattacctccagcaagttcaacgagtgccaactcaacaacctcaacgcgttggaacccgaccaccgcgttgagtccgaaggtggtcttattgaaacatggaactctcaacaccctgagctgcaatgcgccggtgtcactgtttccaaacgcaccctcaaccgcaacggcctccacttgccatcttactcaccttatcccccaaatgatcattgtcgttcaaggtgcgtaatattagtaagaagtatttatcagcttaacgtgataacaataatagtaatatgaaatatttattaaattttttataattaatctctgctagaaaatttgattaatcatttttagtagaatttgtttttctcaactaggtttttaaaca

SEQ ID NO: 1181 - DNA, 648 bp, Artificial
  Mutations within GlyA3B4 introduced by GmGlyA3B4_T01TALE nuclease
  misc_feature (278): n is a or c or t or g
gttcatgtacggttgcagatataaacgaagcatagcttatgtatgaggtgtaacaaaattggaaacaatagccatgcaaggtgaagaatgtcaccaactcagaaacccttcttcattgacgtgtccctcactcactctcctctcttcactataaatcgccactcttcgtgttctccacttcaccaactccttcaaacttattaacactttccttagttcaatatggggaagcccttcttcactctctctctttcttccctttgcttgctactctacgntgctttgctattacctccagcaagttcaacgagtgccaactcaacaacctcaacgcgttggaacccgaccaccgcgttgagtccgaaggtggtcttattgaaacatggaactctcaacaccctgagctgcaatgcgccggtgtcactgtttccaaacgcaccctcaaccgcaacggcctccacttgccatcttactcaccttatccccaaatgatcattgtcgttcaaggtgcgtaatattagtaagagtatttatcagcttaacgtgataacaataatagtaatatgaaatatttattaaatttttataattaatctctgctagaaaatttgattaatcattttagtagaatttgttttctcaactagg

SEQ ID NO: 1182 - DNA, 655 bp, Artificial
  Mutations within GlyA3B4 introduced by GmGlyA3B4_T01TALE nuclease
gttcatgtacggttgcagatataaacgaagcatagcttatgtatgaggtgtaacaaaattggaaacaatagccatgcaaggtgaagaatgtcaccaactcagaaacccttcttcattgacgtgtccctcactcactctcctctcttcactataaatcgccactcttcgtgttctccacttcaccaactccttcaaacttattaacactttccttagttcaatatggggaagcccttcttcactctctctctttcttccctttgctttgtcgagtgcatgttttgctattacctccagcaagttcaacgagtgccaactcaacaacctcaacgcgttggaacccgaccaccgcgttgagtccgaaggtggtcttattgaaacatggaactctcaacaccctgagctgcaatgcgccggtgtcactgtttccaaacgcaccctcaaccgcaacggcctccacttgccatcttactcaccttatcccccaaatgatcattgtcgttcaaggtgcgtaaatattagtaagaagtatttatcagcttaacgtgataacaataatagtaatatgaaatatttattaaattttttataattaatctctgctagaaaatttgattaatctttttagtagaattgtttttctcaactaggtttt

SEQ ID NO: 1183 - DNA, 654 bp, Artificial
  Mutations within GlyA3B4 introduced by GmGlyA3B4_T01TALE nuclease
gttcatgtacggttgcagatataaacgaagcatagcttatgtatgaggtgtaacaaaattggaaacaatagccatgcaaggtgaagaatgtcaccaactcagaaacccttcttcattgacgtgtccctcactcactctcctctcttcactataaatcgccactcttcgtgttctccacttcaccaactccttcaaacttattaacactttccttagttcaatatggggaagcccttcttcactctctctctttcttccctttgcttgctactactcttgtcgagtgcatgctttgctattacctccagcaagttcaacgagtgccaactcaacaacctcaacgcgttggaacccgaccaccgcgttgagtccgaaggtggtcttattgaaacatggaactctcaacaccctgagctgcaatgcgccggtgtcactgtttccaaacgcaccctcaaccgcaacggcctccacttgccatcttactcaccttatccccaaatgatcattgtcgttcaaggtgcgtaatattagtaagaagtatttatcagcttaacgtgataacaataatagtaatatgaaatattattaaaattttttataattaatctctgctagaaaatttgattaatcattttagtagaatttgtttttctc

SEQ ID NO: 1184 - DNA, 675 bp, Artificial
  Mutations within GlyA3B4 introduced by GmGlyA3B4_T01TALE nuclease
  misc_feature (630); (673): n is a or c or t or g
gttcatgtacggttgcagatataaacgaagcatagcttatgtatgaggtgtaacaaaattggaaacaatagccatgcaaggtgaagaatgtcaccaactcagaaacccttcttcattgacgtgtccctcactcactctcctctcttcactataaatcgccactcttcgtgttctccacttcaccaactccttcaaacttattaacactttccttagttcaatatggggaagcccttcttcactctctctctttcttccctttgcttgctggtccagcggctgttgccggtgctgtgccaggcccacggcttgaccccccagcaggtggtggccatcgccagcaatggcggtggcaagcaggcgctggagacggtcctcttgtcgagtgcatgcttttgctattacctccagcaagttcaacgagtgccaactcaacaacctcaacgcgttggaacccgaccaccgcgttgagtccgaaggtggtcttattgaaacatggaactctcaacaccctgagctgcaatgcgccggtgtcactgtttccaaacgcaccctcaaccgcaacggcctccacttgccatcttactcaccttatccccaaatgatcattgtcgttcaaggtgcgtaatnttagtaagaagtatttcatcagcttaacgtgataacaataatngt

SEQ ID NO: 1185 - DNA, 592 bp, Artificial
  Mutations within GlyA3B4 introduced by GmGlyA3B4_T01TALE nuclease
gttcatgtacggttgcagatataaacgaagcatagcttatgtatgaggtgtaacaaaattggaaacaatagccatgcaaggtgaagaatgtcaccaactcagaaaccccttcttcattgacgtgtccctcactcactctcctctcttcactataaatcgccactcttcgtgttctccacttcaccaactccttcaaacttattaacactttccttagttcaatatggggaagcccttcttcactctctctctttcttccctttgcttcgagtgcatgctttgctattacctccagcaagttcaacgagtgccaactcaacaacctcaacgcgttggaacccgaccaccgcgttgagtccgaaggtggtcttattgaaacatggaactctcaacaccctgagctgcaatgcgccggtgtcactgtttccaaacgcaccctcaaccgcaacggcctccacttgccatcttactcaccttatcccccaaatgatcattgtcgttcaaggtgcgtaaatattagtaagaagtatttatcagcttaacgtgataacaataatagtaatatgaaatatttattaaattttttataatt

SEQ ID NO: 1186 - DNA, 655 bp, Artificial
  Mutations within GlyA3B4 introduced by GmGlyA3B4_T01TALE nuclease
gttcatgtacggttgcagatataaacgaagcatagcttatgtatgaggtgtaacaaaattggaaacaatagccatgcaaggtgaagaatgtcaccaactcagaaacccttcttcattgacgtgtccctcactcactctcctctcttcacgatttatagggttcacgctcaacaaaatcgcatatcaatttcacaacaattggtatgccaaacatatataattcactgtaataattataaggataaaatgaaatcttgtcgagtgcatgctttgctattacctccagcaagttcaacgagtgccaactcaacaacctcaacgcgttggaacccgaccaccgcgttgagtccgaaggtggtcttattgaaacatggaactctcaacaccctgagctgcaatgcgccggtgtcactgtttccaaacgcaccctcaaccgcaacggcctccacttgccatcttactcaccttatccccaaatgatcattgtcgttcaaggtgcgtaatattagtaagaagtatttatcagcttaacgtgataacaataatagtaatatgaaatatttattaaattttttataattaattctctgctagaaaatttgattaatcatttttagtagaatttgttttttctcaactaggttttaaaacacca

SEQ ID NO: 1187 - DNA, 667 bp, Artificial
  Mutations within GlyA3B4 introduced by GmGlyA3B4_T01TALE nuclease
gttcatgtacggttgcagatataaacgaagcatagcttatgtatgaggtgtaacaaaattggaaacaatagccatgcaaggtgaagaatgtcaccaactcagaaacccttcttcattgacgtgtccctcactcactctcctctcttcactataaatcgccactcttcgtgttctccacttcaccaactccttcaaacttattaacactttccttagttcaatatggggaagcccttcttcactctctctctttcttccctttgcttgtcgagtgcatgctttgctattacctccagcaagttcaacgagtgccaactcaacaacctcaacgcgttggaacccgaccaccgcgttgagtccgaaggtggtcttattgaaacatggaactctcaacaccctgagctgcaatgcgccggtgtcactgtttccaaacgcaccctcaaccgcaacggcctccacttgccatcttactcaccttatcccccaaatgatcattgtcgttcaaggtgcgtaaatattagtaagaagtatttatcagcttaacgtgataacaataatagtaatatgaaatatttattaaattttttataattaatctctgctagaaaatttgattaatctttttagtagaatttgttttttctcaactaggttttaaaacaccaca

SEQ ID NO: 1188 - DNA, 763 bp, Artificial
  Mutations within GlyA3B4 introduced by GmGlyA3B4_T01TALE nuclease
  misc_feature (649): n is a or c or t or g
gttcatgtacggttgcagatataaacgaagcatagcttatgtatgaggtgtaacaaaaattggaaacaatagccatgcaaggtgaagaatgtcaccaactcagaaacccttcttcattgacgtgtccctcactcactctcctctcttcactataaatcgccactcttcgtgttctccacttcaccaactccttcaaacttattaacactttccttagttcaatatggggaagcccttcttcactctctctctttcttccctttgcttgcttgttctgatgatgatcctagccgaataaaatcatctgcttcgccgttcaaaggcaaaattgacctcaatatccaaccagagcgagaatgtcaaagatccaagatctggaaggtgaattgcagcgtttgaaaaatttgatgcaaatctagacatgttgactgggttgattcagatgatagtggattccggtcaaagaatgtgttatttgcaagtggtaatgaatattcttctgattgtgactcttgtcgagtgcatgctttgctattacctccagcaagttcaacgagtgccaactcaacaacctcaacgcgttggaacccgacctaccgcgttgagtccgaaggtggtcttattgaaacatggactctcaacaccctgngctgcaatgcgccggtgtcactgtttccaaacgcaccctcaaccgcaacggcctccacttgccatcattactcaccttatccccaaatgatcattgtcgttcaaggtgcgtaat

SEQ ID NO: 1189 - DNA, 687 bp, Artificial
  Mutations within GlyA3B4 introduced by GmGlyA3B4_T01TALE nuclease
gttcatgtacggttgcagatataaacgaagcatagcttatgtatgaggtgtaacaaaattggaaacaatagccatgcaaggtgaagaatgtcaccaactcagaaacccttcttcattgacgtgtccctcactcactctcctctcttcactataaatcgccactcttcgtgttctccacttcaccaactccttcaaacttattaacactttccttagttcaatatggggaagcccttcttcactctctctctttcttccctttgcttgctcgtctccagcggctgttgccggtgctgtgccaggcccacggcttgaccccccagcaggtggtggccatcgccaactcttgtcgagtgcatgctttgctattacctccagcaagttcaacgagtgccaactcaacaacctcaacgcgttggaacccgaccaccgcgttgagtccgaaggtggtcttattgaaacatggaactctcaacaccctgagctgcaatgcgccggtgtcactgtttccaaacgcaccctcaaccgcaacggcctccacttgccatctttactcacccttatccccaaatgatcattgtcgttcaaggtgcgtaatattagtaagaagtatttatcagcttaacgtgataacaataatagtaatatgaaatatttattaaattttttataattaatctctgctag

SEQ ID NO: 1190 - DNA, 545 bp, Artificial
  Mutations within GlyA3B4 introduced by GmGlyA3B4_T01TALE nuclease
gttcatgtacggttgcagatataaacgaagcatagcttatgtatgaggtgtaacaaaattggaaacaatagccatgcaaggtggaagaatgtcaccaactcagaaaccccttcttcattgacgtgtccctcactcactctcctctcttcactataaatcgccactcttcgtgttctccacttcaccaactccttcaaacttattaacactttccttagttcaatatggggaagcccttcttcactctctctctttcttccctttgctattacctccagcaagttcaacgagtgccaactcaacaacctcaacgcgttggaacccgaccaccgcgttgagtccgaaggtggtcttattgaaacatggaactctcaacaccctgagctgcaatgcgccggtgtcactgtttccaaacgcaccctcaaccgcaacggcctccacttgccatcttactcaccttatcccccaaatgatcattgtcgttcaaggtgcgtaatattagtaagaagtatttatcagcttaacgtgataacaataatagtaat

SEQ ID NO: 1191 - DNA, 651 bp, Artificial
  Mutations within GlyA3B4 introduced by GmGlyA3B4_T01TALE nuclease
gttcatgtacggttgcagatataaacgaagcatagcttatgtatgaggtgtaacaaaattggaaacaatagccatgcaaggtgaagaatgtcaccaactcagaaacccttcttcattgacgtgtccctcactcactctcctctcttcactataaatcgccactcttcgtgttctccacttcaccaactccttcaaacttattaacactttccttagttcaatatggggaagcccttcttcactctctctcttgtcgagtgcatgctttgctattacctccagcaagttcaacgagtgccaactcaacaacctcaacgcgttggaacccgaccaccgcgttgagtccgaaggtggtcttattgaaacatggaactctcaacaccctgagctgcaatgcgccggtgtcactgtttccaaacgcaccctcaaccgcaacggcctccacttgccatcttactcaccttatccccaaatgatcattgtcgttcaaggtgcgtaaatattagtaagaagtatttatcagcttaacgtgataacaataatagtaatatgaaatatttattaaattttttataattaatctctgctagaaaatttgattaatcatttttagtagaatttgttttttctcaactaggttttaaaacacca

SEQ ID NO: 1192 - DNA, 666 bp, Artificial
  Mutations within GlyA3B4 introduced by GmGlyA3B4_T01TALE nuclease
gttcatgtacggttgcagatataaacgaagcatagcttatgtatgaggtgtaacaaaattggaaacaatagccatgcaaggtgaagaatgtcaccaactcagaaacccttcttcattgacgtgtccctcactcactctcctctcttcactataaatcgccactcttcgtgttctccacttcaccaactccttcaaacttattaacactttccttagttcaatatggggaagcccttcttcactctctctctttcttccctttgcttgtcgagtgcatgctttgctattacctccagcaagttcaacgagtgccaactcaacaacctcaacgcgttggaacccgaccaccgcgttgagtccgaaggtggtcttattgaaacatggaactctcaacaccctgagctgcaatgcgccggtgtcactgtttccaaacgcaccctcaaccgcaacggcctccacttgccatcttactcaccttatcccccaaatgatcattgtcgttcaaggtgcgtaaatattagtaagaagtatttatcagcttaacgtgataacaataatagtaatatgaaatatttattaaattttttataattaatctctgctagaaaatttgattaatcatttttagtagaatttgttttttctcaactaggttttaaaacacca

SEQ ID NO: 1193 - DNA, 619 bp, Artificial
  Mutations within GlyA3B4 introduced by GmGlyA3B4_T01TALE nuclease
gttcatgtacggttgcagatataaacgaagcatagcttatgtatgaggtgtaacaaaattggaaacaatagccatgcaaggtgaagaatgtcaccaactcagaaacccttcttcattgacgtgtccctcactcactctcctctcttcactataaatcgccactcttcgtgttctccacttcaccaactccttcaaacttattaacactttccttagttcaatatggggaagcccttcttcactctctctctttcttccctttgcttgttgtcgagtgcatgctttgctattacctccagcaagttcaacgagtgccaactcaacaacctcaacgcgttggaacccgaccaccgcgttgagtccgaaggtggtcttattgaaacatggaactctcaacaccctgagctgcaatgcgccggtgtcactgtttccaaacgcaccctcaaccgcaacggcctccacttgccatcttactcaccttatcccccaaatgatcattgtcgttcaaggtgcgtaaatattagtaagaagtatttatcagcttaacgtgataacaataatagtaatatgaaatatttattaaattttttataattaatctctgctagaaaatttgatt

SEQ ID NO: 1194 - DNA, 656 bp, Artificial
  Mutations within GlyA3B4 introduced by GmGlyA3B4_T01TALE nuclease
gttcatgtacggttgcagatataaacgaagcatagcttatgtatgaggtgtaacaaaattggaaacaatagccatgcaaggtgaagaatgtcaccaactcagaaacccttcttcattgacgtgtccctcactcactctcctctcttcactataaatcgccactcttcgtgttctccacttcaccaactccttcaaacttattaacactttccttagttcaatatggggaagcccttcttcactctctctctttcttccctttgcttgctttgctattacctccagcaagttcaacgagtgccaactcaacaacctcaacgcgttggaacccgaccaccgcgttgagtccgaaggtggtcttattgaaacatggaactctcaacaccctgagctgcaatgcgccggtgtcactgttttccaaacgcaccctcaaccgcaacggcctccacttgccatcttactcaccttatccccaaatgatcattgtcgttcaaggtgcgtaatattagtaagaagtatttatcagctttaacgtgataacaataatagtaatatgaaatatttattaaattttttataattaatctctgctagaaaatttgattaatcatttttagtagaatttgttttttctcaactaggttttaaacaccaca

SEQ ID NO: 1195 - DNA, 657 bp, Artificial
  Mutations within GlyA3B4 introduced by GmGlyA3B4_T01TALE nuclease
gttcatgtacggttgcagatataaacgaagcatagcttatgtatgaggtgtaacaaaattggaaacaatagccatgcaaggtgaagaatgtcaccaactcagaaacccttcttcattgacgtgtccctcactcactctcctctcttcactataaatcgccactcttcgtgttctccacttcaccaactccttcaaacttattaacactttccttagttcaatatggggaagcccttcttcactctctctctttcttgtcgagtgcatgctttgctattacctccagcaagttcaacgagtgccaactcaacaacctcaacgcgttggaacccgaccaccgcgttgagtccgaaggtggtcttattgaaacatggaactctcaacaccctgagctgcaatgcgccggtgtcactgtttccaacgcacctcaaccgcaacggcctccacttgccatcttactcaccttatccccaaatgatcattgtccgttcaaggtgcgtaataattagtaagaagtatttatcagctttaacgtgataacaataatagtaatatgaaatatttattaaattttttataattaatctctgctagaaaatttgattaatcatttttagtagaatttgttttttctcaactaggttttaaaacaccaca

SEQ ID NO: 1196 - DNA, 663 bp, Artificial
  Mutations within GlyA3B4 introduced by GmGlyA3B4_T01TALE nuclease
gttcatgtacggttgcagatataaacgaagcatagcttatgtatgaggtgtaacaaaattggaaacaatagccatgcaaggtgaagaatgtcaccaactcagaaacccttcttcattgacgtgtccctcactcactctcctctcttcactataaatcgccactcttcgtgttctccacttcaccaactccttcaaacttattaacactttccttagttcaatatggggaagcccttcttcactctctctctttcttccctttgcttgcagtgcatgctttgctattacctccagcaagttcaacgagtgccaactcaacaacctcaacgcgttggaacccgaccaccgcgttgagtccgaaggtggtcttattgaaacatggaactctcaacaccctgagctgcaatgcgccggtgtcactgtttccaaacgcaccctcaaccgcaacggcctccacttgccatcttactcaccttatccccaaatgatcattgtcgttcaaggtgcgtaatattagtaagaagtatttatcagcttaacgtgataacaataatagtaatatgaaatatttattaaattttttataattaatctctgctagaaaatttgattaatcatttttagtagaatttgttttttctcaactaggttttaaaacaccac

SEQ ID NO: 1197 - DNA, 775 bp, Artificial
  Mutations within GlyA3B4 introduced by GmGlyA3B4_T01TALE nuclease
  misc_feature (651): n is a or c or t or g
gttcatgtacggttgcagatataaacgaagcatagcttatgtatgaggtgtaacaaaattggaaacaatagccatgcaaggtgaagaatgtcaccaactcagaaacccttcttcattgacgtgtccctcactcactctcctctcttcactataaatcgccactcttcgtgttctccacttcaccaactccttcaaacttattaacactttccttagttcaatatggggaagcccttcttcactctctctctttcttccctttgcttgctccacggcttgaccccggagcaggtggtggccatcgccagcaatattggtggcaagcaggcttcagcagagcgcagataccaaatactgttcttctagtgtagccgtagttaggccaccacttcaagaactcttgtcgagtgcatgctttgctattacctccagcaagttcaacgagtgccaactcaacaacctcaacgcgttggaacccgaccaccgcgttgagtccgaaggtggtcttattgaaacatggactctcaacaccctgagctgcaatgcgccggtgtcactgtttccaaacgcaccctcaaaccgcaacggcctccacttgccatcttactcaccttatccccaaatgatcattgtcgttcaaggtgcgtaatnttagtaagaagtatttatcagcttaacgtgataacaataatagtaatatgaaatatttattaaattttttataattaatctctgctagaaaatttgattaatcatttttagtagaatttgtttc

SEQ ID NO: 1198 - DNA, 651 bp, Artificial
  Mutations within GlyA3B4 introduced by GmGlyA3B4_T01TALE nuclease
  misc_feature (550): n is a or c or t or g
gttcatgtacggttgcagatataaacgaagcatagcttatgtatgaggtgtaacaaaaattggaaacaatagccatgcaaggtgaagaatgtcaccaactcagaaacccttcttcattgacgtgtccctcactcactctcctctcttcactataaatcgccactcttcgtgttctccacttcaccaactccttcaaacttattaacactttccttagttcaatatggggaagcccttcttcactctctctcttgtcgagtgcatgctttgctattacctccagcaagttcaacgagtgccaactcaacaacctcaacgcgttggaacccgaccaccgcgttgagtccgaaggtggtcttattgaaacatggaactctcaacaccctgagctgcaatgcgccggtgtcactgtttccaaacgcaccctcaaccgcaacggcctccacttgccatcttactcaccttatccccaaatgatcattgtcgttcaaggtgcgtaatattagtaagaagtatttatcagcttaacgtgataacaataatagtaatntgaaatatttattaaattttttataattaatctctgctagaaaatttgattaatctttttagtagaatttgttttttctcaactaggttttaaacaccaca

SEQ ID NO: 1199 - DNA, 775 bp, Artificial
  Mutations within GlyA3B4 introduced by GmGlyA3B4_T01TALE nuclease
  misc_feature (644): n is a or c or t or g
gttcatgtacggttgcagatataaacgaagcatagcttatgtatgaggtgtaacaaaattggaaacaatagccatgcaaggtgaagaatgtcaccaactcagaaacccttcttcattgacgtgtccctcactcactctcctctcttcactataaatcgccactcttcgtgttctccacttcaccaactccttcaaacttattaacactttccttagttcaatatggggaagcccttcttcactctctctctttcttccctttgcttgcgccacgttttgcaatcttgagaagttggcctgtgtccaactgtaacggtggacctctcaactctcccgccaccgtgagcaaggcctccagagcgcgtgcgccggaccactgtttgccgacgctcttgtcgagtgcatgctttgctattacctccagcaagttcaacgagtgccaactcaacaacctcaacgcgttggaacccgaccaccgcgttgagtccgaaggtggtcttattgaaacatggactctcaacaccctgagctgcaatgcgccggtgtcactgtttccaaaacgcaccctcaaccgcaacggcctccacttgccaatcttactcaccttatccccaaatgatcattgtcgttcaaggtgcgtaatnttagtaagaagtatttatcagcttaacgtgataacaataatagtaatatgaaatatttattaaaattttttataattaaatctcttgctagaaaatttgattaatcatttttagtagaatttgtttttctc

SEQ ID NO: 1200 - DNA, 663 bp, Artificial
  Mutations within GlyA3B4 introduced by GmGlyA3B4_T01TALE nuclease
gttcatgtacggttgcagatataaacgaagcatagcttatgtatgaggtgtaacaaaattggaaacaatagccatgcaaggtgaagaatgtcaccaactcagaaacccttcttcattgacgtgtccctcactcactctcctctcttcactataaatcgccactcttcgtgttctccacttcaccaactccttcaaacttattaacactttccttagttcaatatggggaagcccttcttcactctctctctttcttcgagtgcatgctttgctattacctccagcaagttcaacgagtgccaactcaacaacctcaacgcgttggaacccgaccaccgcgttgagtccgaaggtggtcttattgaaacatggaactctcaacaccctgagctgcaatgcgccggtgtcactgtttccaaacgcaccctcaaccgcaacggcctccacttgccatcttactcaccttatcccccaaatgatcattgtcgttcaaggtgcgtaaatattagtaagaagtatttatcagctttaacgtgataacaataatagtaatatgaaatattttattaaatttttttaataaattaaatctctgctagaaaattttgattaatcatttttagtagaatttgttttttctcaactaggttttaaaacaccaca

SEQ ID NO: 1201 - DNA, 629 bp, Artificial
  Mutations within GlyA3B4 introduced by GmGlyA3B4_T01TALE nuclease
gttcatgtacggttgcagatataaacgaagcatagcttatgtatgaggtgtaacaaaattggaaacaatagccatgcaaggtgaagaatgtcaccaactcagaaacccttcttcattgacgtgtccctcactcactctcctctcttcactataaatcgccactcttcgtgttctccacttcaccaactccttcaaacttattaacactttccttagttcaatatggggaagcccttcttcactctctctctttcttccctttgcttgctgtcgagtgcatgctttgctattacctccagcaagttcaacgagtgccaactcacaacctcaacgcgttggaacccgaccaccgcgttgagtccgaaggtggtcttattgaaacatggaactctcaacaccctgagctgcaatgcgccggtgtcactgtttccaaacgcaccctcaaccgcaacggcctccacttgccatcttactcaccttatcccccaaatgatcattgtcgttcaaggtgcgtaaatattagtaagaagtatttatcagcttaacgtgataacaataatagtaatatgaaatatttattaaattttttataattaatctctgctagaaaatttgattaatctttttag

SEQ ID NO: 1202 - DNA, 661 bp, Artificial
  Mutations within GlyA3B4 introduced by GmGlyA3B4_T01TALE nuclease
gttcatgtacggttgcagatataaacgaagcatagcttatgtatgaggtgtaacaaaattggaaacaatagccatgcaaggtgaagaatgtcaccaactcagaaacccttcttcattgacgtgtccctcactcactctcctctcttcactataaatcgccactcttcgtgttctccacttcaccaactccttcaaacttattaacactttccttagttcaatatggagcatcgcttcatcatctctctctttcttccctttgcttcttgtcgagtgcatgctttgctattacctccagcaagttcaacgagtgccaactcaacaacctcaacgcgttggaacccgaccaccgcgttgagtccgaaggtggtcttattgaaacatggaactctcaacaccctgagctgcaatgcgccggtgtcactgtttccaaacgcaccctcaaccgcaacggcctccacttgccatcttactcaccttatcccccaaatgatcattgtcgttcaaggtgcgtaatattagtaagaagtatttatcagcttaacgtgataacaataatagtaatatgaaatatttattaaattttttataattaatctctgctagaaaatttgattaatctttttagtagaattgttttttctcaactaggtttaaaaca

SEQ ID NO: 1203 - DNA, 645 bp, Artificial
  Mutations within GlyA3B4 introduced by GmGlyA3B4_T01TALE nuclease
gttcatgtacggttgcagatataaacgaagcatagcttatgtatgaggtgtaacaaaattggaaacaatagccatgcaaggtgaagaatgtcaccaactcagaaacccttcttcattgacgtgtccctcactcactctcctctcttcactataaatcgccactcttcgtgttctccacttcaccaactccttcaaacttattaacactttccttagttcaatatggggaagcccttcttcactctctctctttcttcactcttgtcgagtgcatgctttgctattacctccagcaagttcaacgagtgccaactcaacaacctcaacgcgttggaacccgaccaccgcgttgagtccgaaggtggtcttattgaaacatggaactctcaacaccctgagctgcaatgcgccggtgtcactgtttccaaacgcaccctcaaccgcaacggcctccacttgccatcttactcaccttatccccaaatgatcattgtcgttcaaggtgcgtaaatattagtaagaagtatttatcagcttaacgtgataacaataatagtaatatgaaatatttattaaattttttataattaatctctgctagaaaatttgattaatcatttttagtagaatttgttttttctcaac

SEQ ID NO: 1204 - DNA, 750 bp, Artificial
  Mutations within GlyA3B4 introduced by GmGlyA3B4_T01TALE nuclease
gttcatgtacggttgcagatataaacgaagcatagcttatgtatgaggtgtaacaaaattggaaacaatagccatgcaaggtgaagaatgtcaccaactcagaaacccttcttcattgacgtgtccctcactcactctcctctcttcactataaatcgccactcttcgtgttctccacttcaccaactccttcaaacttattaacactttccttagttcaatatggggaagcccttcttcactctctctctttcttccctttgcttgctactgcttgccaccgccattgctggcgatggccaccacctgctggggggtcaagccgtgggcctggcacagcaccggcaacagcgcctgcaccgtctccagcgcctgctttgctattacctccagcaagttcaacgagtgccaactcaacaacctcaacgcgttggaacccgaccaccgcgttgagtccgaaggtggtcttattgaaacatggaactctcaacaccctgagctgcaatgcgccggtgtcactgtttccaaacgcaccctcaaccgcaacggcctccacttgccatcttactcaccttatccccaaaatgatcattgtcgttcaaggtgcgtaatattagtaagaagtatttatcagcttaacgtgataacaataattagtaatatgaaaatatttattaaattttttataattaatctctgctagaaaatttgattaatcatttttagtagaatttgtttttctcaactagg

SEQ ID NO: 1205 - DNA, 664 bp, Artificial
  Mutations within GlyA3B4 introduced by GmGlyA3B4_T01TALE nuclease
gttcatgtacggttgcagatataaacgaagcatagcttatgtatgaggtgtaacaaaattggaaacaatagccatgcaaggtgaagaatgtcaccaactcagaaacccttcttcattgacgtgtccctcactcactctcctctcttcactataaatcgccactcttcgtgttctccacttcaccaactccttcaaacttattaacactttccttagttcaatatggggaagcccttcttcactctctctctttcttccctttgcttgctatgtcgagtgcatgctttgctattacctccagcaagttcaacgagtgccaactcaacaacctcaacgcgttggaacccgaccaccgcgttgagtccgaaggtggtcttattgaaacatggaactctcaacaccctgagctgcaatgcgccggtgtcactgtttccaaacgcaccctcaaccgcaacggcctccacttgccatcttactcaccttatccccaaatgatcattgtcgttcaaggtgcgtaatattagtaagagtatttatcagcttaacgtgataacaatatagtaatatgaaatatttattaaatttttataattaatctctgctagaaaatttgattaatcattttagtagaatttgtttttctcaactaggttttaaaacacca

SEQ ID NO: 1206 - DNA, 632 bp, Artificial
  Mutations within GlyA3B4 introduced by GmGlyA3B4_T01TALE nuclease
gttcatgtacggttgcagatataaacgaagcatagcttatgtatgaggtgtaacaaaattggaaacaatagccatgcaaggtgaagaatgtcaccaactcagaaaccccttcttcattgacgtgtccctcactcactctcctctcttcactataaatcgccactcttcgtgttctccacttcaccaactccttcaaacttattaacactttccttagttcaatatggggaagcccttcttcactctctctctttcttccctttgcttgtcgagtgcatgctttgctattacctccagcaagttcaacgagtgccaactcaacaacctcaacgcgttggaacccgaccaccgcgttgagtccgaaggtggtcttattgaaacatggaactctcaacaccctgagctgcaatgcgccggtgtcactgtttccaaacgcaccctcaaccgcaacggcctccacttgccatcttactcaccttatcccccaaatgatcattgtcgttcaaggtgcgtaatattagtaagaagtatttatcagcttaacgtgataacaataatagtaatatgaaatatttattaaattttttataattaatctctgctagaaaatttgattaatctttttagtagaa

SEQ ID NO: 1207 - DNA, 728 bp, Artificial
  Mutations within GlyA3B4 introduced by GmGlyA3B4_T01TALE nuclease
  misc_feature (621): n is a or c or t or g
gttcatgtacggttgcagatataaacgaagcatagcttatgtatgaggtgtaacaaaattggaaacaatagccatgcaaggtgaagaatgtcaccaactcagaaacccttcttcattgacgtgtccctcactcactctcctctcttcactataaatcgccactcttcgtgttctccacttcaccaactccttcaaacttattaacactttccttagttcaatatggggaagcccttcttcactctctctctttcttccctttgcttgctacttccccggcagtgctttcatttcagcgtacaatcgccacattgctgcacatccggtaagcgataacgctggcagcaagtgcggcgcaccagcaggccgtcgcgcagtaccacggtacgccagagtggattatcttcaccgttcgtgagcgtttttctcaaaaaagagggcatggcgcagcgattcaacagtagcctcgccgagcagttgcttcatctcgagtgcatgctttgctatttacctccagcaagttcaacgagtgccaactcaacaacctcaacgcgttggaacccgaccaccgcgttgagtccgaaggtggtcttattgaaacatggactctcaacaccctgngctgcaatgcgccggtgtcactgtttccaaacgcaccctcaaaccgcaacggcctccacttgccatcttactcaccttatccccaaatgatcattgtcgttcaaggt

SEQ ID NO: 1208 - DNA, 648 bp, Artificial
  Mutations within GlyA3B4 introduced by GmGlyA3B4_T01TALE nuclease
gttcatgtacggttgcagatataaacgaagcatagcttatgtatgaggtgtaacaaaattggaaacaatagccatgcaaggtgaagaatgtcaccaactcagaaacccttcttcattgacgtgtccctcactcactctcctctcttcactataaatcgccactcttcgtgttctccacttcaccaactccttcaaacttattaacactttccttagttcaatatggggaagcccttcttcactctctctctttcttccctttgctattacctccagcaagttcaacgagtgccaactcaacaacctcaacgcgttggaacccgaccaccgcgttgagtccgaaggtggtcttattgaaacatggaactctcaacaccctgagctgcaatgcgccggtgtcactgtttccaaacgcaccctcaaccgcaacggcctccacttgccatcttactcaccttatccccaaatgatcattgtcgttcaaggtgcgtaatattagtaagaagtatttatcagcttaacgtgataacaataatagtaatatgaaatatttattaaattttttataattaattctctgctagaaaatttgattaatcatttttagtagaattttgttttttctcaactaggtttttaaacaccaca

SEQ ID NO: 1209 - DNA, 649 bp, Artificial
  Mutations within GlyA3B4 introduced by GmGlyA3B4_T01TALE nuclease
gttcatgtacggttgcagatataaacgaagcatagcttatgtatgaggtgtaacaaaattggaaacaatagccatgcaaggtgaagaatgtcaccaactcagaaacccttcttcattgacgtgtccctcactcactctcctctcttcactataaatcgccactcttcgtgttctccacttcaccaactccttcaaacttattaacactttccttagttcaatatggggaagcccttcttcactctctctctttcttccctttgcttgcttcgagtgcatgctttgctattacctccagcaagttcaacgagtgccaactcaacaacctcaacgcgttggaacccgaccaccgcgttgagtccgaaggtggtcttattgaaacatggaactctcaacaccctgagctgcaatgcgccggtgtcactgtttccaaacgcaccctcaaccgcaacggcctccacttgccatcttactcaccttatccccaaatgatcattgtcgttcaaggtgcgtaatattagtaagaagtatttatcagcttaacgtgataacaataatagtaatatgaaatatttattaaattttttataattaatctctgctagaaaatttgattaatctttttagtagaattgttttttctcaacta

SEQ ID NO: 1210 - DNA, 647 bp, Artificial
  Mutations within GlyA3B4 introduced by GmGlyA3B4_T01TALE nuclease
gttcatgtacggttgcagatataaacgaagcatagcttatgtatgaggtgtaacaaaattggaaacaatagccatgcaaggtgaagaatgtcaccaactcagaaacccttcttcattgacgtgtccctcactcactctcctctcttcactataaatcgccactcttcgtgttctccacttcaccaactccttcaaacttattaacactttccttagttcaatatggggaagcccttcttcactctctctctttcttccctttgcttgctattgtcgagtgcatgctttgctattacctccagcaagttcaacgagtgccaactcaacaacctcaacgcgttggaacccgaccaccgcgttgagtccgaaggtggtcttattgaaacatggaactctcaacaccctgagctgcaatgcgccggtgtcactgtttccaaacgcaccctcaaccgcaacggcctccacttgccatcttactcaccttatccccaaatgatcattgtcgttcaaggtgcgtaatattagtaagaagtatttatcagcttaacgtgataacaataatagtaatatgaaatatttattaaatttttataattaatctctgctagaaaatttgattaatcattttagtagaatttgtttttctc

SEQ ID NO: 1211 - DNA, 542 bp, Artificial
  Mutations within GlyA3B4 introduced by GmGlyA3B4_T01TALE nuclease
gttcatgtacggttgcagatataaacgaagcatagcttatgtatgaggtgtaacaaaattggaaacaatagccatgcaaggtgaagaatgtcaccaactcagaaacccttcttcattgacgtgtccctcactcactctcctctcttcactataaatcgccactcttcgtgttctccacttcacctccagcaagttcaacgagtgccaactcaacaacctcaacgcgttggaacccgaccaccgcgttgagtccgaaggtggtcttattgaaacatggaactctcaacaccctgagctgcaatgcgccggtgtcactgtttccaaacgcaccctcaaccgcaacggcctccacttgccatcttactcaccttatccccaaatgatcattgtcgttcaaggtgcgtaatattagtaagaagtatttatcagcttaacgtgataacaataatagtaatatgaaatatttattaaattttttataattaatctctgctagaaaatttgattaatcattttagtagaatttgtttttctcaactagg

SEQ ID NO: 1212 - DNA, 632 bp, Artificial
  Mutations within GlyA3B4 introduced by GmGlyA3B4_T01TALE nuclease
gttcatgtacggttgcagatataaacgaagcatagcttatgtatgaggtgtaacaaaattggaaacaatagccatgcaaggtgaagaatgtcaccaactcagaaacccttcttcattgacgtgtccctcactcactctcctctcttcactataaatcgccactcttcgtgttctccacttcaccaactccttcaaacttattaacactttccttagttcaatatggggaagcccttcttcactctctctctttcttccctttgcttgccttgtcgagtgcatgctttgctattacctccagcaagttcaacgagtgccaactcaacaacctcaacgcgttggaacccgaccaccgcgttgagtccgaaggtggtcttattgaaacatggaactctcaacaccctgagctgcaatgcgccggtgtcactgtttccaaacgcaccctcaaccgcaacggcctccacttgccatcttactcaccttatcccccaaatgatcattgtcgttcaaggtgcgtaatattagtaagaagtatttatcagctttaacgtgataacaataatagtaatatgaaatatttattaaattttttataattaatctctgctagaaaatttgattaatctttttag

SEQ ID NO: 1213 - DNA, 660 bp, Artificial
  Mutations within GlyA3B4 introduced by GmGlyA3B4_T01TALE nuclease
gttcatgtacggttgcagatataaacgaagcatagcttatgtatgaggtgtaacaaaattggaaacaatagccatgcaaggtgaagaatgtcaccaactcagaaacccttcttcattgacgtgtccctcactcactctcctctcttcactataaatcgccactcttcgtgttctccacttcaccaactccttcaaacttattaacactttccttagttcaatatggggaagcccttcttcactctctctctttcttccctttgcttgctactactcttgtcgagtgcatgctttgctattacctccagcaagttcaacgagtgccaactcaacaacctcaacgcgttggaacccgaccaccgcgttgagtccgaaggtggtcttattgaaacatggaactctcaacaccctgagctgcaatgcgccggtgtcactgtttccaaacgcaccctcaaccgcaacggcctccacttgccatcttactcaccttatccccaaatgatcattgtcgttcaaggtgcgtatattagtaagaagtatttatcagcttaacgtgataacaataatagtaatatgaaatattattaaattttttataattaatctctgctagaaaatttgattaatcattttagtagaatttgtttttcttcaactagg

SEQ ID NO: 1214 - DNA, 536 bp, Artificial
  Mutations within GlyA3B4 introduced by GmGlyA3B4_T01TALE nuclease
gttcatgtacggttgcagatataaacgaagcatagcttatgtatgaggtgtaacaaaattggaaacaatagccatgcaaggtgaagaatgtcaccaactcagaaacccttcttcattgacgtgtccctcactcactctcctctcttcgagtgcatgctttgctattacctccagcaagttcaacgagtgccaactcaacaacctcaacgcgttggaacccgaccaccgcgttgagtccgaaggtggtcttattgaaacatggaactctcaacaccctgagctgcaatgcgccggtgtcactgtttccaaacgcaccctcaaccgcaacggcctccacttgccatcttactcaccttatccccaaatgatcattgtcgttcaaggtgcgtaatattagtaagaagtatttatcagcttaacgtgataacaataatagtaatatgaaatatttattaaattttttataattaatctctgctagaaaatttgattaatcatttttagtagaatttgtttttctcaactaggttttaaac

SEQ ID NO: 1215 - DNA, 760 bp, Artificial
  Mutations within GlyA3B4 introduced by GmGlyA3B4_T01TALE nuclease
  misc_feature (643): n is a or c or t or g
gttcatgtacggttgcagatataaacgaagcatagcttatgtatgaggtgtaacaaaattggaaacaatagccatgcaaggtgaagaatgtcaccaactcagaaacccttcttcattgacgtgtccctcactcactctcctctcttcactataaatcgccactcttcgtgttctccacttcaccaactccttcaaacttattaacactttccttagttcaatatggggaagcccttcttcactctctctctttcttccctttgcttgcgccacgttttgcaatcttgagaagttggcctgtgtccaactgtaacggtggacctctcaactctcccgccaccgtgagcaaggcctccagagcgcgtgcgccggaccactgtttgccgacgctcttgtcgagtgcatgctttgctattacctccagcaagttcaacgagtgccaactcaacaacctcaacgcgttggaacccgaccaccgcgttgagtccgaaggtggtcttattgaacatggactctcaacaccctgagctgcaatgcgccggtgtcactgtttccaaaacgcaccctcaaaccgcaacggcctccacttgccatcttactcaccttatccccaaatgatcattgtcgttcaaggtgcgtaatnttagtaagaagtatttatcagcttaacgtgataacaataatagtaatatgaaatatttattaaaattttttataattaaatctcttgctagaaaatttgattaatcatttttagtag

SEQ ID NO: 1216 - DNA, 604 bp, Artificial; identical to SEQ ID NO: 673
  Mutations within GlyA3B4 introduced by GmGlyA3B4_T01TALE nuclease

SEQ ID NO: 1217 - DNA, 729 bp, Artificial
  Mutations within GlyA3B4 introduced by GmGlyA3B4_T01TALE nuclease
  misc_feature (667): n is a or c or t or g
gttcatgtacggttgcagatataaacgaagcatagcttatgtatgaggtgtaacaaaattggaaacaatagccatgcaaggtgaagaatgtcaccaactcagaaacccttcttcattgacgtgtccctcactcactctcctctcttcactataaatcgccactcttcgtgttctccacttcaccaactccttcaaacttattaacactttccttagttcaatatggggaagcccttcttcactctctctctttcttccctttgcttgctacttgccgccatcgtggctggcgatggccaccacctgctccggggtcaagccgtgggcctggcacagcaccggcaacagccgctggaccgtctccagcgcctgctcttgtcgagtgcatgctttgctattacctccagcaagttcaacgagtgccaactcaacaacctcaacgcgttgaaccgaccaccgcgttgagtcccgaaggtggtcttattgaaacatggaactctcaacaccctgagctgcaatgcgccggtgtcactgtttccaaacgcaccctcaaccgcaacggcctccacttgccatcttactcaccttatccccaaatgatcattgtcgttcaaggtgcgtaatattagtaagaagtatttatcagcttaacgtgataacaataatngtaatatgaaatatttattaaattttttataattaatctctgctagaaaatttgattaatca

SEQ ID NO: 1218 - DNA, 655 bp, Artificial
  Mutations within GlyA3B4 introduced by GmGlyA3B4_T01TALE nuclease
gttcatgtacggttgcagatataaacgaagcatagcttatgtatgaggtgtaacaaaattggaaacaatagccatgcaaggtgaagaatgtcaccaactcagaaacccttcttcattgacgtgtccctcactcactctcctctcttcactataaatcgccactcttcgtgttctccacttcaccaactccttcaaacttattaacactttccttagttcaatatggggaagcccttcttcactctctctctttcttccctttgcttgctatttgctattacctccagcaagttcaacgagtgccaactcaacaacctcaacgcgttggaacccgaccaccgcgttgagtccgaaggtggtcttattgaaacatggaactctcaacaccctgagctgcaatgcgccggtgtcactgtttccaaacgcaccctcaaccgcaacggcctccacttgccatcttactcaccttatcccccaaatgatcattgtcgttcaaggtgcgtaatattagtaagaagtatttatcagcttaacgtgataacaataatagtaatatgaaatatttattaaattttttataattaatctctgctagaaaatttgattaatcatttttagtagaatttgttttttctcaactaggttttaaacacca

SEQ ID NO: 1219 - DNA, 652 bp, Artificial
  Mutations within GlyA3B4 introduced by GmGlyA3B4_T01TALE nuclease
gttcatgtacggttgcagatataaacgaagcatagcttatgtatgaggtgtaacaaaattggaaacaatagccatgcaaggtgaagaatgtcaccaactcagaaacccttcttcattgacgtgtccctcactcactctcctctcttcactataaatcgccactcttcgtgttctccacttcaccaactccttcaaacttattaacactttccttagttcaatatggggaagcccttcttcactctctctcttgtcgagtgcatgctttgctattacctccagcaagttcaacgagtgccaactcaacaacctcaacgcgttggaacccgaccaccgcgttgagtccgaaggtggtcttattgaaacatggaactctcaacaccctgagctgcaatgcgccggtgtcactgtttccaaacgcaccctcaaccgcaacggcctccacttgccatcttactcaccttatcccccaaatgatcattgtcgttcaaggtgcgtaatattagtaagaagtatttatcagcttaacgtgataacaataatagtaatatgaaatatttattaaattttttataattaatctctgctagaaaatttgattaatcatttttagtagaatttgttttttctcaactaggttttaaaacaccac

SEQ ID NO: 1220 - DNA, 618 bp, Artificial
  Mutations within GlyA3B4 introduced by GmGlyA3B4_T01TALE nuclease
  misc_feature (510): n is a or c or t or g
gttcatgtacggttgcagatataaacgaagcatagcttatgtatgaggtgtaacaaaattggaaacaatagccatgcaaggtgaagaatgtcaccaactcagaaacccttcttcattgacgtgtccctcactcactctcctctcttcactataaatcgccactcttcgtgttctccacttcaccaactccttcaaacttattaacactttccttagttcaatatggggaagcccttcttcactctctctctttcttccctttgcttgtcgagtgcatgctttgctattacctccagcaagttcaacgagtgccaactcaacaacctcaacgcgttggaacccgaccaccgcgttgagtccgaaggtggtcttattgaaacatggaactctcaacaccctgagctgcaatgcgccggtgtcactgtttccaaacgcaccctcaaccgcaacggcctccacttgccatcttactcaccttatccccaaatgatcattgtcgttcaaggtgcntaatattagtaagaagtatttatcagcttaacgtgataacaataatagtaatatgaaatatttattaaattttttataattaatctctgctagaaaatttgattaatc

SEQ ID NO: 1221 - DNA, 650 bp, Artificial
  Mutations within GlyA3B4 introduced by GmGlyA3B4_T01TALE nuclease
gttcatgtacggttgcagatataaacgaagcatagcttatgtatgaggtgtaacaaaattggaaacaatagccatgcaaggtgaagaatgtcaccaactcagaaacccttcttcattgacgtgtccctcactcactctcctctcttcactctaaatcgccactcttcgtgttctccacttcaccaactccttcaaacttattaacactttccttagttcaatatggggaagcccttcttcactctctctctttcttccctttgcttgcttggtggcgatggccaccacctgctccggggtcaagccgtgggcctggcacagcaccggcaacagccgctggaccgtctccagcgcctgcttgccaccaatattgctggcgatggccaccacctgctccggggtcaagccgtgggcctggcacagcaccggcaacagccgctcttgtcgagtgcatgctttgctattacctccagcaagttcaacgagtgccaactcaacaacctcaacgcgttggaacccgaccaccgcgttgagtccgaaggtggtcttattgaaacatggaactctcaacaccctgagctgcaatgcgccggtgtcactgtttccaaacgcaccctcaaccgcaacggcctccacttgccatcttactc

SEQ ID NO: 1222 - DNA, 600 bp, Artificial
  Mutations within GlyA3B4 introduced by GmGlyA3B4_T01TALE nuclease
gttcatgtacggttgcagatataaacgaagcatagcttatgtatgaggtgtaacaaaattggaaacaatagccatgcaaggtgaagaatgtcaccaactcagaaacccttcttcattgacgtgtccctcactcactctcctctcttcactataaatcgccactcttcgtgttctccacttcaccaactccttcaaacttattaacactttccttagttcaatatgtcgagtgcatgctttgctattacctccagcaagttcaacgagtgccaactcaacaacctcaacgcgttggaacccgaccaccgcgttgagtccgaaggtggtcttattgaaacatggaactctcaacaccctgagctgcaatgcgccggtgtcactgtttccaaacgcaccctcaaccgcaacggcctccacttgccatcttactcaccttatccccaaatgatcattgtcgttcaaggtgcgtaatattagtaagaagtatttatcagcttaacgtgataacaataatagtaatatgaaatatttattaatttttataattaatctctgctagaaatttgattaatcatttttagtagaatttgtttttctcaa

SEQ ID NO: 1223 - DNA, 639 bp, Artificial
  Mutations within GlyA3B4 introduced by GmGlyA3B4_T01TALE nuclease
gttcatgtacggttgcagatataaacgaagcatagcttatgtatgaggtgtaacaaaattggaaacaatagccatgcaaggtgaagaatgtcaccaactcagaaacccttcttcattgacgtgtccctcactcactctcctctcttcactataaatcgccactcttcgtgttctccacttcaccaactccttcaaacttattaacactttccttagttcaatatggggaagcccttcttcactctctcttcgagtgcatgctttgctattacctccagcaagttcaacgagtgccaactcaacaacctcaacgcgttggaacccgaccaccgcgttgagtccgaaggtggtcttattgaaacatggaactctcaacacccctgagctgcaatgcgccggtgtcactgtttccaaacgcaccctcaaccgcaacggcctccacttgccatcttactcaccttatccccaaatgatcattgtcgttcaaggtgcgtaatattagtaagaagtatttatcagctttaacgtgataacaataatagtaatatgaaatatttattaaattttttataattaatctctgctagaaaattgattaatcatttttagtagaatttgttttttctcaactaggttttt

SEQ ID NO: 1224 - DNA, 703 bp, Artificial
  Mutations within GlyA3B4 introduced by GmGlyA3B4_T01TALE nuclease
  misc_feature (617): n is a or c or t or g
gttcatgtacggttgcagatataaacgaagcatagcttatgtatgaggtgtaacaaaattggaaacaatagccatgcaaggtgaagaatgtcaccaactcagaaacccttcttcattgacgtgtccctcactcactctcctctcttcactataaatcgccactcttcgtgttctccacttcaccaactccttcaaacttattaacactttccttagttcaatatggggaagcccttcttcactctctctctttcttccctttgcttgctagcagcggctgttgccggtgctgtgccaggcccacggcttgaccccggagcaggtggtggccatcgccagccacgatggcggcaagcaggcgcactcttgtcgagtgcatgctttgctattacctccagcaagttcaacgagtgccaactcaacaacctcaacgcgttggaacccgaccaccgcgttgagtccgaaggtggtcttattgaaacatggaactctcaacaccctgagctgcaatgcgccggtgtcactgtttccaaacgcaccctcaaccgcaacggcctccacttgccatcttactcaccttatccccaaatgatcattgtcgttcaaggtgcgtaatnttagtaagaagtatttatcagcttaacgtgataacaataatagtaatatgaaatatttaattaaattttttataattaatctctgc

SEQ ID NO: 1225 - DNA, 671 bp, Artificial
  Mutations within GlyA3B4 introduced by GmGlyA3B4_T01TALE nuclease
gttcatgtacggttgcagatgataaacgaagcatagcttatgtatgaggtgtaacgaaaattggaaacaatagccatgcaaggtgaagaatgtcaccaactcagaaacccttcttcattgacgtgtccctcactcactctcctctcttcactataaatcgccactcttcgtgttctccacttcaccaactccttcaaacttattaacactttccttagttcaatatggggaagcccttcttcactctctctctttcttccctttgcttgctgtcgagtgcatgctttgctattacctccagcaagttcaacgagtgccaactcaacaacctcaacgcgttggaacccgaccaccgcgttgagtccgaaggtggtcttattgaaacatggaactctcaacaccctgagctgcaatgcgccggtgtcactgtttccaaacgcaccctcaaccgcaacggcctccacttgccatcttactcaccttatcccccaaatgatcattgtcgttcaaggtgcgtaatattagtaagaagtatttatcagcttaacgtgataacaataatagtaatatgaaatatttattaaattttttataattaatctctgctagaaaatttgattaatcatttttagtagaatttgttttttctcaactaggttttaaaacaccac

SEQ ID NO: 1226 - DNA, 501 bp, Artificial; identical to SEQ ID NO: 544
  Mutations within GlyA3B4 introduced by GmGlyA3B4_T01TALE nuclease

SEQ ID NO: 1227 - DNA, 411 bp, Artificial; identical to SEQ ID NO: 523
  Mutations within GlyA3B4 introduced by GmGlyA3B4_T01TALE nuclease

SEQ ID NO: 1228 - DNA, 622 bp, Artificial; identical to SEQ ID NO: 685
  Mutations within GlyA3B4 introduced by GmGlyA3B4_T01TALE nuclease

SEQ ID NO: 1229 - DNA, 672 bp, Artificial
  Mutations within GlyA3B4 introduced by GmGlyA3B4_T01TALE nuclease
gttcatgtacggttgcagatataaacgaagcatagcttatgtatgaggtgtaacaaaattggaaacaatagccatgcaaggtgaagaatgtcaccaactcagaaacccttcttcattgacgtgtccctcactcactctcctctcttcactataaatcgccactcttcgtgttctccacttcaccaactccttcaaacttattaacactttccttagttcaatatggggaagcccttcttcactctctctctttcttccctttgcttgctggcgatggccaccacctgctccgggtcaagccgtgggcctggcacagcaccggcaacagccgctggaccgtctccagcgcctgcttgccaccgccattcttgtcgagtgcatgctttgctattacctccagcaagttcaacgagtgccaactcacacctcaacgcgttggaacccgaccaccgcgttgagtccgaaggtggtcttattgaaacatggaactctcaacaccctgagctgcaatgcgccggtgtcactgtttccaaacgcaccctcaaccgcaacggcctccacttgccatcttactcaccttatccccaaatgatcattgtcgttcaaggtgcgtaatattagtaagaagtatttatcagcttaacgtgataacaataatagtaatatgaaaat

SEQ ID NO: 1230 - DNA, 780 bp, Artificial
  Mutations within GlyA3B4 introduced by GmGlyA3B4_T01TALE nuclease
gttcatgtacggttgcagatataaacgaagcatagcttatgtatgaggtgtaacaaaattggaaacaatagccatgcaaggtgaagaatgtcaccaactcagaaaccccttcttcattgacgtgtccctcactcactctcctctcttcactataaatcgccactcttcgtgttctccacttcaccaactccttcaaacttattaacactttccttagttcaatatggggaagcccttcttcactctctctctttcttccctttgcttgcttttaaagaatccataaatttcaatttagccttcttgatgaagagcgggtggagcttatgttcgaataggatgcgttgtgggtcagaataatcagagaaaagtatcactgtggagaatctttgatccccagatattgattgtaataggtttgagactatttgtcgagtgcatgctttgctattacctccagcaagttcaacgagtgccaactcaacaacctcaacgcgttggaacccgaccaccgcgttgagtccgaaggtggtcttattgaaacatggactctcaacaccctgagctgcaatgcgccggtgtcactgtttccaaaacgcaccctcaaccgcaacggcctccacttgccaatcttactcaccttatccccaaatgatcattgtcgttcaaggtgcgtaatattagtaagaagtatttatcagcttaacgtgataacaataatagtaatatgaaatatttattaaaattttttataattaaatctcttgctagaaaatttga

SEQ ID NO: 1231 - DNA, 672 bp, Artificial
  Mutations within GlyA3B4 introduced by GmGlyA3B4_T01TALE nuclease
gttcatgtacggttgcagatataaacgaagcatagcttatgtatgaggtgtaacaaaattggaaacaatagccatgcaaggtgaagaatgtcaccaactcagaaacccttcttcattgacgtgtccctcactcactctcctctcttcactataaatcgccactcttcgtgttctccacttcaccaactccttcaaacttattaacactttccttagttcaatatggggaagcccttcttcactctctctctttcttccctttgcttgcttgtcgagtgcatgctttgctattacctccagcaagttcaacgagtgccaactcaacaacctcaacgcgttggaacccgaccaccgcgttgagtccgaaggtggtcttattgaaacatggaactctcaacaccctgagctgcaatgcgccggtgtcactgtttccaaacgcaccctcaaccgcaacggcctccacttgccatcttactcaccttatcccccaaatgatcattgtcgttcaaggtgcgtaatattagtaagaagtatttatcagcttaacgtgataacaataatagtaatatgaaatatttatttaaatttttaattaattaatctctgctagaaaatttgattaatcatttttagtagaatttgttttttctcaactaggttttaaacaccaca

SEQ ID NO: 1232 - DNA, 718 bp, Artificial
  Mutations within GlyA3B4 introduced by GmGlyA3B4_T01TALE nuclease
gttcatgtacggttgcagatataaacgaagcatagcttatgtatgaggtgtaacaaaattggaaacaatagccatgcaaggtgaagaatgtcaccaactcagaaacccttcttcattgacgtgtccctcactcactctcctctcttcactataaatcgccactcttcgtgttctccacttcaccaactccttcaaacttattaacactttccttagttcaatatggggaagcccttcttcactctctctctttcttccctttgcttgctgccgtgggcctggcacagcaccggcaacagcgctggaccgtctccagcgcctcttgtcgagtgcatgctttgctattacctccagcaagttcaacgagtgccaactcaacaacctcaacgcgttggaacccgaccaccgcgttgagtccgaaggtggtcttattgaaacatggaactctcaacaccctgagctgcaatgcgccggtgtcactgtttccaaacgcaccctcaaccgcaacggcctccacttgccatcttactcacctttatccccaaatgatcattgtcgttcaaggtgcgtaatattagtaagaagtatttatcagcttaacgtgataacaataatagtatatgaaatatttattaaatttttttcataattaatctctgctagaaaaatttgattaatcatttttagtagaatttgtttttctcaactaggttttaaa

SEQ ID NO: 1233 - DNA, 654 bp, Artificial
  Mutations within GlyA3B4 introduced by GmGlyA3B4_T01TALE nuclease
gttcatgtacggttgcagatataaacgaagcatagcttatgtatgaggtgtaacaaaattggaaacaatagccatgcaaggtgaagaatgtcaccaactcagaaacccttcttcattgacgtgtccctcactcactctcctctcttcactataaatcgccactcttcgtgttctccacttcaccaactccttcaaacttattaacactttccttagttcaatatggggaagcccttcttcactctctctctttcttccctttgcttgctatttgctattacctccagcaagttcaacgagtgccaactcaacaacctcaacgcgttggaacccgaccaccgcgttgagtccgaaggtggtcttattgaaacatggaactctcaacaccctgagctgcaatgcgccggtgtcactgtttccaaacgcaccctcaaccgcaacggcctccacttgccatcttactcaccttatccccaaatgatcattgtcgttcaaggtgcgtaatattagtaagaagtatttatcagcttaacgtgataacaataatagtaatatgaaatatttattaaattttttataattaatctctgctagaaaatttgattaatcatttttagtagaatttgttttttctcaactaggttttaaacacca

SEQ ID NO: 1234 - DNA, 650 bp, Artificial
  Mutations within GlyA3B4 introduced by GmGlyA3B4_T01TALE nuclease
gttcatgtacggttgcagatataaacgaagcatagcttatgtatgaggtgtaacaaaattggaaacaatagccatgcaaggtgaagaatgtcaccaactcagaaacccttcttcattgacgtgtccctcactcactctcctctcttcactataaatcgccactcttcgtgttctccacttcaccaactccttcaaacttattaacactttccttagttcaatatggggaagcccttcttcactctctctctttcttccctttgcttgctattacctccagcaagttcaacgagtgccaactcaacaacctcaacgcgttggaacccgaccaccgcgttgagtccgaaggtggtcttattgaaacatggaactctcaacaccctgagctgcaatgcgccggtgtcactgtttccaaacgcaccctcaaccgcaacggcctccacttgccatcttactcaccttatccccaaatgatcattgtcgttcaaggtgcgtaatattagtaagaagtatttatcagcttaacgtgataacaataatagtaatatgaaatatttattaaattttttataattaatctctgctagaaaatttgattaatcatttttagtagaatttgttttttctcaactaggttttaaaacaccaca

SEQ ID NO: 1235 - DNA, 440 bp, Artificial
  Mutations within GlyA3B4 introduced by GmGlyA3B4_T01TALE nuclease
gttcatgtacggttgcagatataaacgaagcatagcttatgtatgaggtgtaacaaaattggaaacaatagccatgcaaggtgaagaatgtcaccaactcagaaaccctcttcattgacgtgtccctcactcactctcctctcttcactataaatcgccactcttcgtgttctccacttcaccaactccttcaaacttattaacactttccttagttcaatatggggaagcccttcttcactctctctctttcttccctttgcttttgtctgagtgcatgctttgctattacctccagcaagttcaacgagtgccaactcaacaacctcaacgcgttggaacccgaccaccgcgttgagtccgaaggtggtcttattgaaacatggaactctcaacacctgagctgcaatgcgccggtgtcactgtttccaaacgcaccc

SEQ ID NO: 1236 - DNA, 543 bp, Artificial
  Mutations within GlyA3B4 introduced by GmGlyA3B4_T01TALE nuclease
gttcatgtacggttgcagatataaacgaagcatagcttatgtatgaggtgtaacaaaattggaaacaatagccatgcaaggtgaagaatgtcaccaactcagaaacccttcttcattgacgtgtccctcactcactctcctctcttcactataaatcgccactcttcgtgttctccacttcaccaactccttcaaacttattaacactttccttagttcaatatggggaagcccttcttcactctctctctttcttccctttgcttgctactactcttgtcgagtgcatgctttgctattacctccagcaagttcagcgagtgccaactcaacaacctcaacgcgttggaacccgaccaccgcgttgagtccgaaggtgggtcttattgaaacatggaactctcaacacccctgagctgcaatgcgccggtgtcactgtttccaaacgcaccctcaaccgcaacggcctcccacttgccatcttactcaccttatcccccaaatgatcattgtcgttcaaggtgcgtatattagtaagaagta

SEQ ID NO: 1237 - DNA, 623 bp, Artificial; identical to SEQ ID NO: 565
  Mutations within GlyA3B4 introduced by GmGlyA3B4_T01TALE nuclease

SEQ ID NO: 1238 - DNA, 656 bp, Artificial
  Mutations within GlyA3B4 introduced by GmGlyA3B4_T01TALE nuclease
gttcatgtacggttgcagatataaacgaagcatagcttatgtatgaggtgtaacaaaattggaaacaatagccatgcaaggtgaagaatgtcaccaactcagaaacccttcttcattgacgtgtccctcactcactctcctctcttcactataaatcgccactcttcgtgttctccacttcaccaactccttcaaacttattaacactttccttagttcaatatggggaagcccttcttcactctctctctttcttccctttgcttgcttgtcgagtgcatgctttgctattacctccagcaagttcaacgagtgccaactcaacaacctcaacgcgttggaacccgaccaccgcgttgagtccgaaggtggtcttattgaaacatggaactctcaacaccctgagctgcaatgcgccggtgtcactgtttccaaacgcaccctcaaccgcaacggcctccacttgccatcttactcaccttatccccaaatgatcattgtcgttcaaggtgcgtaatattagtaagaagtatttatcagcttaacgtgataacaataatagtaatatgaaatatttattaaattttttataattaatctctgctagaaaatttgattaatctttttagtagaattgttttttctcaactaggttt

SEQ ID NO: 1239 - DNA, 655 bp, Artificial
  Mutations within GlyA3B4 introduced by GmGlyA3B4_T01TALE nuclease
gttcatgtacggttgcagatataaacgaagcatagcttatgtatgaggtgtaacaaaattggaaacaatagccatgcaaggtgaagaatgtcaccaactcagaaacccttcttcattgacgtgtccctcactcactctcctctcttcactataaatcgccactcttcgtgttctccacttcaccaactccttcaaacttattaacactttccttagttcaatatggggaagcccttcttcactctctctctttcttccctttgcttgcttgtcgagtgcatgctttgctattacctccagcaagttcaacgagtgccaactcaacaacctcaacgcgttggaacccgaccaccgcgttgagtccgaaggtggtcttattgaaacatggaactctcaacaccctgagctgcaatgcgccggtgtcactgtttccaaacgcaccctcaaccgcaacggcctccacttgccatcttactcaccttatccccaaatgatcattgtcgttcaaggtgcgtaaatattagtaagaagtatttatcagcttaacgtgataacaataatagtaatatgaaatatttattaaattttttataattaatctctgctagaaaatttgattaatcatttttagtagaattgttttttctcaactagg

SEQ ID NO: 1240 - DNA, 660 bp, Artificial
  Mutations within GlyA3B4 introduced by GmGlyA3B4_T01TALE nuclease
gttcatgtacggttgcagatataaacgaagcatagcttatgtatgaggtgtaacaaaattggaaacaatagccatgcaaggtgaagaatgtcaccaactcagaaacccttcttcattgacgtgtccctcactcactctcctctcttcactataaatcgccactcttcgtgttctccacttcaccaactccttcaaacttattaacactttccttagttcaatatggggaagcccttcttcactctctctctttcttccctttgcttgctagcagcggctgttgccggtgctgtgccaggcccacggcttgaccccggagcaggtggtggccatcgccagccacgatggcggcaagcaggcgcactcttgtcgagtgcatgctttgctattacctccagcaagttcaacgagtgccaactcaacaacctcaacgcgttggaacccgaccaccgcgttgagtccgaaggtggtcttattgaaacatggaactctcaacaccctgagctgcaatgcgccggtgtcactgtttccaaacgcaccctcaaccgcaacgggcctccaacttgccatcttactcaccttatccccaaatgatcattgtcgttcaaggtgcgtaatattagtaagaagtatttatcagcttaacgtgataacaataat

SEQ ID NO: 1241 - DNA, 654 bp, Artificial
  Mutations within GlyA3B4 introduced by GmGlyA3B4_T01TALE nuclease
gttcatgtacggttgcagatataaacgaagcatagcttatgtatgaggtgtaacaaaattggaaacaatagccatgcaaggtgaagaatgtcaccaactcagaaacccttcttcattgacgtgtccctcactcactctcctctcttcactataaatcgccactcttcgtgttctccacttcaccaactccttcaaacttattaacactttccttagttcaatatggggaagcccttcttcactctctctctttcttccctttgcttgtcttgtcgagtgcatgctttgctattacctccagcaagttcaacgagtgccaactcaacaacctcaacgcgttggaacccgaccaccgcgttgagtccgaaggtggtcttattgaaacatggaactctcaacacctgagctgcaatgcgccggtgtcactgtttccaaacgcaccctcaaccgcaacggcctccacttgccatcttactcaccttatcccccaaatgatcattgtcgttcaaggtgcgtaatattagtaagaagtatttatcagcttaacgtgataacaataatagtaatatgaaatatttattaaattttttataattaatctctgctagaaaatttgattaatctttttagtagaaatttgttttttctcaacta

SEQ ID NO: 1242 - DNA, 649 bp, Artificial
  Mutations within GlyA3B4 introduced by GmGlyA3B4_T01TALE nuclease
gttcatgtacggttgcagatataaacgaagcatagcttatgtatgaggtgtaacaaaattggaaacaatagccatgcaaggtgaagaatgtcaccaactcagaaacccttcttcattgacgtgtccctcactcactctcctctcttcactataaatcgccactcttcgtgttctccacttcaccaactccttcaaacttattaacactttccttagttcaatatggggaagcccttcttcactctctctctttcttccctttgcttgtcgagtgcatgctttgctattacctccagcaagttcaacgagtgccaactcaacaacctcaacgcgttggaacccgaccaccgcgttgagtccgaaggtggtcttattgaaacatggaactctcaacaccctgagctgcaatgcgccggtgtcactgtttccaaacgcaccctcaaccgcaacggcctccacttgccatcttactcaccttatccccaaatgatcattgtcgttcaaggtgcgtaatattagtaagaagtatttatcagcttaacgtgataacaataatagtaatatgaaatatttattaaattttttataattaatctctgctagaaaattgattaatcatttttagtagaattgttttttctcaactagg

SEQ ID NO: 1243 - DNA, 635 bp, Artificial; identical to SEQ ID NO: 933
  Mutations within GlyA3B4 introduced by GmGlyA3B4_T01TALE nuclease

SEQ ID NO: 1244 - DNA, 656 bp, Artificial
  Mutations within GlyA3B4 introduced by GmGlyA3B4_T01TALE nuclease
gttcatgtacggttgcagatataaacgaagcatagcttatgtatgaggtgtaacaaaattggaaacaatagccatgcaaggtgaagaatgtcaccaactcagaaacccttcttcattgacgtgtccctcactcactctcctctcttcactataaatcgccactcttcgtgttctccacttcaccaactccttcaaacttattaacactttccttagttcaatatggggaagcccttcttcactctctctctttcttccctttgcttgctttgctattacctccagcaagttcaacgagtgccactcacaacctcaacgcgttggaacccgaccaccgcgttgagtccgaaggtggtcttattgaaacatggaactctcaacacccctgagctgcaatgcgccggtgtcactgttttccaaacgcaccctcaaccgcaacggcctccacttgccatcttactcaccttatcccccaaatgatcattgtcgttcaaggtgcgtaatattagtaagaagtatttatcagcttaacgtgataacaataatagtaatatgaaatatttattaaattttttataattaatctctgctagaaaatttgattaatcattttttagtagaatttgttttttctcaactaggttttaaacaccaca

SEQ ID NO: 1245 - DNA, 671 bp, Artificial
  Mutations within GlyA3B4 introduced by GmGlyA3B4_T01TALE nuclease
gttcatgtacggttgcagatataaacgaagcatagcttatgtatgaggtgtaacaaaattggaaacaatagccatgcaaggtgaagaatgtcaccaactcagaaacccttcttcattgacgtgtccctcactcactctcctctcttcactataaatcgccactcttcgtgttctccacttcaccaactccttcaaacttattaacactttccttagttcaatatggggaagcccttcttcactctctctctttcttccctttgcttcttgtcgagtgcatgctttgctattacctccagcaagttcaacgagtgccaactcaacaacctcaacgcgttggaacccgaccaccgcgttgagtccgaaggtggtcttattgaaacatggaactctcaacaccctgagctgcaatgcgccggtgtcactgtttccaaacgcaccctcaaccgcaacggcctccacttgccatcttactcaccttatccccaaatcgatcattgtcgttcaaggtgcgtaaatattagtaagaagtatttatcagcttaacgtgataacaataatagtaatatgaaatatttattaaattttttataattaatctctgctagaaaatttgattaatcatttttagtagaatttgttttttctcaactaggttttaaaacaccaca

SEQ ID NO: 1246 - DNA, 649 bp, Artificial
  Mutations within GlyA3B4 introduced by GmGlyA3B4_T01TALE nuclease
gttcatgtacggttgcagatataaacgaagcatagcttatgtatgaggtgtaacaaaattggaaacaatagccatgcaaggtgaagaatgtcaccaactcagaaacccttcttcattgacgtgtccctcactcactctcctctcttcactataaatcgccactcttcgtgttctccacttcaccaactccttcaaacttattaacactttccttagttcaatatggggaagcccttcttcactctctcttcgagtgcatgctttgctattacctccagcaagttcaacgagtgccaactcaacaacctcaacgcgttggaacccgaccaccgcgttgagtccgaaggtggtcttattgaaacatggaactctcaacacccctgagctgcaatgcgccggtgtcactgtttccaaacgcaccctcaaccgcaacggcctccacttgccatcttactcaccttatcccccaaatgatcattgtcgttcaaggtgcgtaatattagtaagaagtatttatcagcttaacgtgataacaataatagtaatatgaaatatttattaaattttttataattaatctctgctagaaaatttgattaatcattttttagtagaatttgttttttctcaactaggttttaaacaccac

SEQ ID NO: 1247 - DNA, 747 bp, Artificial
  Mutations within GlyA3B4 introduced by GmGlyA3B4_T01TALE nuclease
gttcatgtacggttgcagatataaacgaagcatagcttatgtatgaggtgtaacaaaattggaaacaatagccatgcaaggtgaagaatgtcaccaactcagaaacccttcttcattgacgtgtccctcactcactctcctctcttcactataaatcgccactcttcgtgttctccacttcaccaactccttcaaacttattaacactttccttagttcaatatggggaagcccttcttcactctctctctttcttccctttgcttgctattgaccccggagcaggtggtggccatcgccagccacgatggcggcaagcaggcgctggagacggtccagcggctgttgccggtgctgtgccaggcccacggcttgactcttgtcgagtgcatgctttgctattacctccagcaagttcaacgagtgccaactcaacaacctcaacgcgttggaacccgaccaccgcgttgagtccgaaggtggtcttattgaaacatggaactctcaacaccctgagctgcaatgcgccggtgtcactgtttccaaacgcaccctcaaccgcaacggcctccacttgccatcttactcaccttatccccaaaatgatcattgtcgttcaaggtgcgtaatattagtaagaagtatttatcagcttaacgtgataacaaataatagtaatatgaaatattttattaaattttttataattaatctctgctagaaaatttgattaatcatttttagtag

SEQ ID NO: 1248 - DNA, 683 bp, Artificial
  Mutations within GlyA3B4 introduced by GmGlyA3B4_T01TALE nuclease
gttcatgtacggttgcagatataaacgaagcatagcttatgtatgaggtgtaacaaaattggaaacaatagccatgcaaggtgaagaatgtcaccaactcagaaacccttcttcattgacgtgtccctcactcactctcctctcttcactataaatcgccactcttcgtgttctccacttcaccaactccttcaaacttattaacactttccttagttcaatatggggaagcccttcttcactctctctctttcttccctttgcttgctcgtctccagcggctgttgccggtgctgtgccaggcccacggcttgaccccccagcaggtggtggccatcgccaactcttgtcgagtgcatgctttgctattacctccagcaagttcaacgagtgccaactcaacaacctcaacgcgttggaacccgaccaccgcgttgagtccgaaggtggtcttattgaaacatggaactctcaacaccctgagctgcaatgcgccggtgtcactgtttccaaacgcaccctcaaccgcaacggcctccacttgccatcttactcaccttatccccaaatgatcattgtcgttcaaggtgcgtaatattagtaagaagtattatcagcttaacgtgatacaataatagtaatatgaaatatttattaaattttttataattaatctctgctag

SEQ ID NO: 1249 - DNA, 563 bp, Artificial
  Mutations within GlyA3B4 introduced by GmGlyA3B4_T01TALE nuclease
gttcatgtacggttgcagatataaacgaagcatagcttatgtatgaggtgtaacaaaattggaaacaatagccatgcaaggtgaagaatgtcaccaactcagaaacccttcttcattgacgtgtccctcactcactctcctctcttcactataaatcgccactcttcgtgttctccacttcaccaactccttcaaacttattaacactttccttagttcaatatggggaagcccttcttcactctctctctttcttccctttgcttcgagtgcatgctttgctattacctccagcaagttcaacgagtgccaactcaacaacctcaacgcgttggaacccgaccaccgcgttgagtccgaaggtggtcttattgaaacatggaactctcaacaccctgagctgcaatgcgccggtgtcactgtttccaacgcaccctcaaccgcaacggcctccaccttgccatcttactcacccttatcccccaaatgatcattgtccgttcaaggtgcgtaatattagtcaagaagtatttatcagcttacgtgataacaataatagtaat

SEQ ID NO: 1250 - DNA, 477 bp, Artificial; identical to SEQ ID NO: 515
  Mutations within GlyA3B4 introduced by GmGlyA3B4_T01TALE nuclease

SEQ ID NO: 1251 - DNA, 629 bp, Artificial
  Mutations within GlyA3B4 introduced by GmGlyA3B4_T01TALE nuclease
gttcatgtacggttgcagatataaacgaagcatagcttatgtatgaggtgtaacaaaattggaaacaatagccatgcaaggtgaagaatgtcaccaactcagaaacccttcttcattgacgtgtccctcactcactctcctctcttcactataaatcgccactcttcgtgttctccacttcaccaactccttcaaacttattaacactttccttagttcaatatggggaagcccttcttcactctctctctttcttccctttgcttttgtcgagtgcatgctttgctattacctccagcaagttcaacgagtgccaactcaacaacctcaacgcgttggaacccgaccaccgcgttgagtccgaaggtggtcttattgaaacatggaactctcaacaccctgagctgcaatgcgccggtgtcactgtttccaaacgcaccctcaaccgcaacggcctccacttgccatcttactcaccttatccccaaatgatcattgtcgttcaaggtgcgtaatattagtaagaagtatttatcagcttaacgtgataacaataatagtaatatgaaatatttattaaattttttataattaatctctgctagaaaatttgattaatctttttagta

SEQ ID NO: 1252 - DNA, 658 bp, Artificial
  Mutations within GlyA3B4 introduced by GmGlyA3B4_T01TALE nuclease
gttcatgtacggttgcagatataaacgaagcatagcttatgtatgaggtgtaacaaaattggaaacaatagccatgcaaggtgaagaatgtcaccaactcagaaacccttcttcattgacgtgtccctcactcactctcctctcttcactataaatcgccactcttcgtgttctccacttcaccaactccttcaaacttattaacactttccttagttcaatatggggaagcccttcttcactctctctctttcttccctttgcttgccttgtcgagtgcatgctttgctattacctccagcaagttcaacgagtgccaactcaacaacctcaacgcgttggaacccgaccaccgcgttgagtccgaaggtggtcttattgaaacatggaactctcaacaccctgagctgcaatgcgccggtgtcactgtttccaaacgcaccctcaaccgcaacggcctccacttgccatcttactcaccttatcccccaaatgatcattgtcgttcaaggtgcgtaatattagtaagaagtatttatcagcttaacgtgataacaataatagtaatatgaaatatttattaaattttttataattaatctctgctagaaaatttgattaatctttttagtagaattgttttttctcaactaggttt

SEQ ID NO: 1253 - DNA, 657 bp, Artificial
  Mutations within GlyA3B4 introduced by GmGlyA3B4_T01TALE nuclease
gttcatgtacggttgcagatataaacgaagcatagcttatgtatgaggtgtaacaaaaattggaaacaatagccatgcaaggtgaagaatgtcaccaactcagaaacccttcttcattgacgtgtccctcactcactctcctctcttcactataaatcgccactcttcgtgttctccacttcaccaactccttcaaacttattaacactttccttagttcaatatggggaagcccttcttcactctctctctttcttccctttgcttgcttgtcgagtgcatgctttgctattacctccagcaagttcaacgagtgccaactcaacaacctcaacgcgttggaacccgaccaccgcgttgagtccgaaggtggtcttattgaaacatggaactctcaacaccctgagctgcaatgcgccggtgtcactgtttccaaacgcaccctcaaccgcaacggcctccacttgccatcttactcaccttatcccccaaatgatcattgtcgttcaaggtgcgtaatattagtaagaagtatttatcagcttaacgtgataacaataatagtaatatgaaatatttattaaattttttataattaatctctgctagaaaatttgattaatcatttttagtagaatttgttttttctcaactagg

SEQ ID NO: 1254 - DNA, 667 bp, Artificial; identical to SEQ ID NO: 1039
  Mutations within GlyA3B4 introduced by GmGlyA3B4_T01TALE nuclease

SEQ ID NO: 1255 - DNA, 665 bp, Artificial
  Mutations within GlyA3B4 introduced by GmGlyA3B4_T01TALE nuclease
gttcatgtacggttgcagatataaacgaagcatagcttatgtatgaggtgtaacaaaattggaaacaatagccatgcaaggtgaagaatgtcaccaactcagaaacccttcttcattgacgtgtccctcactcactctcctctcttcactataaatcgccactcttcgtgttctccacttcaccaactccttcaaacttattaacactttccttagttcaatatggggaagcccttcttcactctctgatggccaccacctgctggggggtcaagccgtgggcctggcacagcaccggcaacagcgcctgcaccgtctccagcgcctgcttgccaccatcgtggctggcgatactcttgtcgagtgcatgctttgctattacctccagcaagttcaacgagtgccaactcaacaacctcaacgcgttggaacccgaccaccgcgttgagtccgaaggtggtcttattgaaacatggaactctcaacaccctgagctgcaatgcgccggtgtcactgtttccaaacgcaccctcaaccgcaacggcctccacttgccatcttactcaccttatccccaaatgatcattgtcgttcaaggtgcgtaatattagtaagaagtatttatcgcttaacgtgataacaataatagtaatatgaaaatattt

SEQ ID NO: 1256 - DNA, 771 bp, Artificial
  Mutations within GlyA3B4 introduced by GmGlyA3B4_T01TALE nuclease
  misc_feature (701): n is a or c or t or g
gttcatgtacggttgcagatataaacgaagcatagcttatgtatgaggtgtaacaaaattggaaacaatagccatgcaaggtgaagaatgtcaccaactcagaaacccttcttcattgacgtgtccctcactcactctcctctcttcactataaatcgccactcttcgtgttctccacttcaccaactccttcaaacttattaacactttccttagttcaatatggggaagcccttcttcactctctctctttcttccctttgcttgctaccttttaaatatagatacaactactctaattctaatttttatttatagatgacgagacaataattaatttttttatacatcaaaacttagattaggagaaactcttctccaaataaagttagaagaaattacccttgtcgagtgcatgctttgctattacctccagcaagttcaacgagtgccaactcaacaacctcaacgcgttggaacccgaccaccgcgttgaagtccgaaggtggtcttattgaaacatggaactctcaacaccctgagctgcaatgcgccggtgtcactgtttccaaacgcaccctcaaccgcaacggcctccacttgccatcttactcaccttatccccaaaatgatcattgtcgttcaaggtgcgtaatattagtaagaaagtatttcatcagcttaacgtgataacaataatngtaatatgaaatatttattaaattttttataattaatctctgctagaaaatttgattaatcatttttagt

SEQ ID NO: 1257 - DNA, 719 bp, Artificial
  Mutations within GlyA3B4 introduced by GmGlyA3B4_T01TALE nuclease
gttcatgtacggttgcagatataaacgaagcatagcttatgtatgaggtgtaacaaaattggaaacaatagccatgcaaggtgaagaatgtcaccaactcagaaacccttcttcattgacgtgtccctcactcactctcctctcttcactataaatcgccactcttcgtgttctccacttcaccaactccttcaaacttattaacactttccttagttcaatatggggaagcccttcttcactctctctctttcttccctttgcttgctattcctaatttacccttgccttttctctttctctttcttccctttgtcttactcttgtcgagtgcatgctttgctattacctccagcaagttcaacgagtgccaactcaacaacctcacgcgttggaacccgaccaccgcgttgagtccgaaggtggtcttattgaaacatggaactctcaacaccctgagctgcaatgcgccggtgtcactgtttccaaacgcaccctcaaccgcaacggcctccacttgccatcttactcaccttatccccaaatgatcattgtcgttcaaggtgcgtaatattagtaagaagtatttatcagcttaacgtgataacaataatagtaatatgaaatatttattaaatttttataattaatctctgctagaaaatttgattaatcatttttagtagaatttgtttttctcaactaggttttaaacacca

SEQ ID NO: 1258 - DNA, 688 bp, Artificial
  Mutations within GlyA3B4 introduced by GmGlyA3B4_T01TALE nuclease
  misc_feature (49): n is a or c or t or g
gttcatgtacggttgcagatataaacgaagcatagcttatgtatgaggngtaacaaaaattggaaacaatagccatgcaaggtgaagaatgtcaccaactcagaaacccttcttcattgacgtgtccctcactcactctcctctcttcactataaatcgccactcttcgtgttctccacttcaccaactccttcaaacttattaacactttccttagttcaatatggggaagcccttcttcactctctctctttcttccctttgcttgctactttgtttctcatcaaaccaatgacatctttctctggagatcctaactgttttaagcatgataatgggaaatctcattactattacccaaacaaatatgaaacctatattgtcgagtgcatgctttgctattacctccagcaagttcaacgagtgccaactcaacaacctcaacgcgttggaacccgaccaccgcgttgagtccgaaggtggtcttattgaaacatggaactctcaacaccctgagctgcaatgcgccggtgtcactgtttccaaacgcaccctcaaccgcaacggcctccacttgccatcttactcaccttatccccaaatgatcattgtcgttcaaggtgcgtaatattagtaagaagtatttatcgcttaacgtgataacaataatagtaatatgaaaatattt

SEQ ID NO: 1259 - DNA, 676 bp, Artificial
  Mutations within GlyA3B4 introduced by GmGlyA3B4_T01TALE nuclease
gttcatgtacggttgcagatataaacgaagcatagcttatgtatgaggtgtaacaaaaattggaaacaatagccatgcaaggtgaagaatgtcaccaactcagaaacccttcttcattgacgtgtccctcactcactctcctctcttcactataaatcgccactcttcgtgttctccacttcaccaactccttcaaacttattaacactttccttagttcaatatggggaagcccttcttcactctctctctttcttccctttgcttgctgctggaccgtctccagcgcctgcttgccaccgccattgctggcgatggccaccacctgctggggggtcaagccgtgggcctggcacagcaccggcaacaggtgtcgagtgcatgctttgctattacctccagcaagttcaacgagtgccaactcaacacctcaacgcgttggaacccgaccaccgcgttgagtccgaaggtggtcttattgaaacatggaactctcgacaccctgagctgcaatgcgccggtgtcactgtttccaaacgcacctcaaccgcaacggcctccacttgccatcttactcaccttatccccaaatgatcattgtcgttcaaggtgcgtaatattagtaagaagtatttatcgcttaacgtgataacaataatagtaatatgaaatattt

SEQ ID NO: 1260 - DNA, 677 bp, Artificial
  Mutations within GlyA3B4 introduced by GmGlyA3B4_T01TALE nuclease
gttcatgtacggttgcagatataaacgaagcatagcttatgtatgaggtgtaacaaaaattggaaacaatagccatgcaaggtgaagaatgtcaccaactcagaaacccttcttcattgacgtgtccctcactcactctcctctcttcactataaatcgccactcttcgtgttctccacttcaccaactccttcaaacttattaacactttccttagttcaatatggggaagcccttcttcactctctctctttcttccctttgcttgctagcaggcgctggagacggtgcaggcgctgttgccggtgctgtgccaggcccacggcttgaccccccagcaggtggtggcccatcgccagccacgatggctcttgtcgagtgcatgctttgctattacctccagcaagttcaacgagtgccactcaacactcacgcgttggaacccgaccaccgcgttgagtccgaaggtggtcttattgaaacatggaactctcaacaccctgagctgcaatgcgccggtgtcactgtttccaaacgcaccctcaaccgcaacggcctccacttgccatcttactcaccttatccccaaaatgatcattgtcgttcaaggtgcgtaatattagtaagaagtatttatcgcttaacgtgataacaataatagtaatatgaaaatattt

SEQ ID NO: 1261 - DNA, 628 bp, Artificial
  Mutations within GlyA3B4 introduced by GmGlyA3B4_T01TALE nuclease
gttcatgtacggttgcagatataaacgaagcatagcttatgtatgaggtgtaacaaaattggaaacaatagccatgcaaggtgaagaatgtcaccaactcagaaacccttcttcattgacgtgtccctcactcactctcctctcttcactataaatcgccactcttcgtgttctccacttcaccaactccttcaaacttattaacactttccttagttcaatatggggaagcccttcttcactctctctctttttcaatatggtggcctaactacggctacaccacggcttgtcgagtgcatgctttgctattacctccagcaagttcaacgagtgccaactcaacaacctcaacgcgttggaacccgaccaccgcgttgagtccgaaggtggtcttattgaaacatggaactctcaacaccctgagctgcaatgcgccggtgtcactgtttccaaacgcaccctcaaccgcaacggcctccacttgccatcttactcaccttatccccaaatgatcattgtcgttcaaggtgcgtaatattagtaagaagtatttatcagcttaacgtgataacaataatagtaatatgaaatatttattaaattttttataattaatctctgctag

SEQ ID NO: 1262 - DNA, 613 bp, Artificial
  Mutations within GlyA3B4 introduced by GmGlyA3B4_T01TALE nuclease
gttcatgtacggttgcagatataaacgaagcatagcttatgtatgaggtgtaacaaaattggaaacaatagccatgcaaggtgaagaatgtcaccaactcagaaacccttcttcattgacgtgtccctcactcactctcctctcttcactataaatcgccactcttcgtgttctccacttcaccaactccttcaaacttattaacactttccttagttcaatatggggaagcccttcttcactctctctctttcttccctttgcttgctactactcttgtcgagtgcatgctttgctattacctccagcaagttcaacgagtgccaactcaacaacctcaacgcgttggaacccgaccaccgcgttgagtccgaaggtggtcttattgaaacatggaactctcaacaccctgagctgcaatgcgccggtgtcactgtttccaaacgcaccctcaaccgcaacggcctccacttgccatcttactcaccttatccccaaatgatcattgtcgttcaaggtgcgtaatattagtaagaagtatttatcagcttaacgtgataacaataatagtaatatgaatattattaaattttttataattaatctctgctag

SEQ ID NO: 1263 - DNA, 658 bp, Artificial
  Mutations within GlyA3B4 introduced by GmGlyA3B4_T01TALE nuclease
gttcatgtacggttgcagatataaacgaagcatagcttatgtatgaggtgtaacaaaattggaaacaatagccatgcaaggtgaagaatgtcaccaactcagaaacccttcttcattgacgtgtccctcactcactctcctctcttcactataaatcgccactcttcgtgttctccacttcaccaactccttcaaacttattaacactttccttagttcaatatggggaagcccttcttcactctctctctttcttccctttgcttgctattgtcgagtgcatgctttgctattacctccagcaagttcaacgagtgccaactcaacaacctcaacgcgttggaacccgaccaccgcgttgagtccgaaggtggtcttattgaaacatggaactctcaacaccctgagctgcaatgcgccggtgtcactgtttccaaacgcaccctcaaccgcaacggcctccacttgccatcttactcaccttatccccaaatgatcattgtcgttcaaggtgcgtaatattagtaagagtatttatcagcttaacgtgataacaataatagtaatatgaaatatttattaaatttttataattaatctctgctagaaaatttgattaatcattttagtagaatttgtttttctcaactaggttttt

SEQ ID NO: 1264 - DNA, 630 bp, Artificial; identical to SEQ ID NO: 961
  Mutations within GlyA3B4 introduced by GmGlyA3B4_T01TALE nuclease

SEQ ID NO: 1265 - DNA, 608 bp, Artificial; identical to SEQ ID NO: 1121
  Mutations within GlyA3B4 introduced by GmGlyA3B4_T01TALE nuclease

SEQ ID NO: 1266 - DNA, 799 bp, Artificial
  Mutations within GlyA3B4 introduced by GmGlyA3B4_T01TALE nuclease
gttcatgtacggttgcagatataaacgaagcatagcttatgtatgaggtgtaacaaaattggaaacaatagccatgcaaggtgaagaatgtcaccaactcagaaacccttcttcattgacgtgtccctcactcactctcctctcttcactataaatcgccactcttcgtgttctccacttcaccaactccttcaaacttattaacactttccttagttcaatatggggaagcccttcttcactctctctctttcttccctttgcttgctatgaagaagaagctagaggtgggaaatactcaagtcattctcttgaaaaagttgctgcaatgatatgcaacaaaatatcactatacggagtcaaggtaattatagtgttcacatgaacatttctcccatgaaaatatatattttctgactcttgtcgagtgcatgctttgctattacctccagcaagttcaacgagtgccaactcaacaacctcaacgcgttggaacccgaccaccgcgttgagtccgaaggtggtcttattgaaacatggactctcaacaccctgagctgcaatgcgccggtgtcactgtttccaaacgcaccctcaaccgcaacggcctccacttgccatcttactcaccttatccccaaatgatcattgtcgttcaaggtgcgtaatattagtaagaagtatttatcagcttaacgtgataacaataatagtaatatgaaatatttattaaattttttataattaaatctcttgctagaaaatttgattaatcatttttagtagaaatttgtttttc

SEQ ID NO: 1267 - DNA, 583 bp, Artificial
  Mutations within GlyA3B4 introduced by GmGlyA3B4_T01TALE nuclease
gttcatgtacggttgcagatataaacgaagcatagcttatgtatgaggtgtaacaaaattggaaacaatagccatgcaaggtgaagaatgtcaccaactcagaaacccttcttcattgacgtgtccctcactcactctcctctcttcactataaatcgccactcttcgtgttctccacttcaccaactccttcaaacttattaacactttccttagttcaatatggggaagcccttcttcactctctctctttcttccctttgcttgctactactcttgtcgagtgcatgctttgctattacctccagcaagttcaacgagtgccaactcaacaacctcaacgcgttggaacccgaccaccgcgttgagtccgaaggtggtcttattgaaacatggaactctcaacacccctgagctgcaatgcgccggtgtcactgtttccaaacgcaccctcaaccgcaacggcctccacttgccatcttactcaccttatccccaaatgatcattgtcgttcaaggtgcgtaatattagtaagaagtatttatcagcttaacgtgataacaataatagtaatatgaaata

SEQ ID NO: 1268 - DNA, 649 bp, Artificial
  Mutations within GlyA3B4 introduced by GmGlyA3B4_T01TALE nuclease
gttcatgtacggttgcagatataaacgaagcatagcttatgtatgaggtgtaacaaaattggaaacaatagccatgcaaggtgaagaatgtcaccaactcagaaacccttcttcattgacgtgtccctcactcactctcctctcttcactataaatcgccactcttcgtgttctccacttcaccaactccttcaaacttattaacactttccttagttcaatatggggaagcccttcttcactctctctctttcttccctttgcttgtcgagtgcatgctttgctattacctccagcaagttcaacgagtgccaactcaacaacctcaacgcgttggaacccgaccaccgcgttgagtccgaaggtggtcttattgaaacatggaactctcaacaccctgagctgcaatgcgccggtgtcactgtttccaaacgcaccctcaaccgcaacggcctccacttgccatcttactcaccttatcccccaaatgatcattgtcgttcaaggtgcgtaatattagtaagaagtatttatcagcttaacgtgataacaataatagtaatatgaaatatttattaaattttttataattaatctctgctagaaaatttgattaatctttttagtagaattgtttttctcaactagg

SEQ ID NO: 1269 - DNA, 654 bp, Artificial
  Mutations within GlyA3B4 introduced by GmGlyA3B4_T01TALE nuclease
gttcatgtacggttgcagatataaacgaagcatagcttatgtatgaggtgtaacaaaattggaaacaatagccatgcaaggtgaagaatgtcaccaactcagaaacccttcttcattgaccgtgtccctcactcactctcctctcttcactataaatcgccactcttcgtgttctccacttcaccaactccttcaaacttattaacactttccttagttcaatatggggaagcccttcttcactctctctctttcttccctttgcttgctattgtcgagtgcatgctttgctattacctccagcaagttcaacgagtgccaactcaacaacctcaacgcgttggaacccgaccaccgcgttgagtccgaaggtggtcttattgaaacatggaactctcaacaccctgagctgcaatgcgccggtgtcactgtttccaaacgcaccctcaaccgcaacggcctccacttgccatcttactcaccttatccccaaatgatcattgtcgttcaaggtgcgtaatattagtaagagtatttatcagcttaacgtgataacaatatagtaatatgaaatatttattaaatttttattaattaatctctgctagaaaatttgattaatcattttagtagaatttgtttttctcaactagg

SEQ ID NO: 1270 - DNA, 615 bp, Artificial
  Mutations within GlyA3B4 introduced by GmGlyA3B4_T01TALE nuclease
gttcatgtacggttgcagatataaacgaagcatagcttatgtatgaggtgtaacaaaattggaaacaatagccatgcaaggtgaagaatgtcaccaactcagaaacccttcttcattgacgtgtccctcactcactctcctctcttcactataaatcgccactcttcgtgttctccacttcaccaactccttcaaacttattaacactttccttagttcaatatggggaagcccttcttcactctctctctttcttccctttgcttgctactactcttgtcgagtgcatgctttgctattacctccagcaagttcaacgagtgccaactcaacaacctcaacgcgttggaacccgaccaccgcgttgagtccgaaggtggtcttattgaaacatggaactctcaacaccctgagctgcaatgcgccggtgtcactgtttccaaacgcaccctcaaccgcaacggcctccacttgccatcttactcaccttatccccaaatgatcattgtcgttcaaggtgcgtaatattagtaagaagtatttatcagcttaacgtgataacaataatagtaatatgaaatattattaaaattttttataattaatctctgctag

SEQ ID NO: 1271 - DNA, 622 bp, Artificial; identical to SEQ ID NO: 579
  Mutations within GlyA3B4 introduced by GmGlyA3B4_T01TALE nuclease

SEQ ID NO: 1272 - DNA, 615 bp, Artificial
  Mutations within GlyA3B4 introduced by GmGlyA3B4_T01TALE nuclease
gttcatgtacggttgcagatataaacgaagcatagcttatgtatgaggtgtaacaaaattggaaacaatagccatgcaaggtgaagaatgtcaccaactcagaaacccttcttcattgacgtgtccctcactcactctcctctcttcactataaatcgccactcttcgtgttctccacttcaccaactccttcaaacttattaacactttccttagttcaatatggggaagcccttcttcactctctctctttcttccctttgctgagtgcatgctttgctattacctccagcaagttcaacgagtgccaactcaacaacctcaacgcgttggaacccgaccaccgcgttgagtccgaaggtggtcttattgaaacatggaactctcaacaccctgagctgcaatgcgccggtgtcactgtttccaaacgcaccctcaaccgcaacggcctccacttgccatcttactcaccttatcccccaaatgatcattgtcgttcaaggtgcgtaatattagtaagaagtatttatcagcttaacgtgataacaataatagtaatatgaaatatttattaaattttttataattaatctctgctagaaaatttgattaatc

SEQ ID NO: 1273 - DNA, 658 bp, Artificial
  Mutations within GlyA3B4 introduced by GmGlyA3B4_T01TALE nuclease
gttcatgtacggttgcagatataaacgaagcatagcttatgtatgaggtgtaacaaaattggaaacaatagccatgcaaggtgaagaatgtcaccaactcagaaacccttcttcattgacgtgtccctcactcactctcctctcttcactataaatcgccactcttcgtgttctccacttcaccaactccttcaaacttattaacactttccttagttcaatatggggaagcccttcttcactctctctctttcttccctttgcttgcttgtcgagtgcatgctttgctattacctccagcaagttcaacgagtgccaactcaacaacctcaacgcgttggaacccgaccaccgcgttgagtccgaaggtggtcttattgaaacatggaactctcaacaccctgagctgcaatgcgccggtgtcactgtttccaaacgcaccctcaaccgcaacggcctccacttgccatcttactcaccttatcccccaaatgatcattgtcgttcaaggtgcgtaatattagtaagaagtatttatcagcttaacgtgataacaataatagtaatatgaaatatttattaaatttttataattaatctctgctagaaaatttgattaatcatttttagtagaatttgttttttctcaactaggttt

SEQ ID NO: 1274 - DNA, 651 bp, Artificial
  Mutations within GlyA3B4 introduced by GmGlyA3B4_T01TALE nuclease
gttcatgtacggttgcagatataaacgaagcatagcttatgtatgaggtgtaacaaaattggaaacaatagccatgcaaggtgaagaatgtcaccaactcagaaacccttcttcattgacgtgtccctcactcactctcctctcttcactataaatcgccactcttcgtgttctccacttcaccaactccttcaaacttattaacactttccttagttcaatatggggaagcccttcttcactctctctctttcttccctttgcttgtcgagtgcatgctttgctattacctccagcaagttcaacgagtgccaactcaacaacctcaacgcgttggaacccgaccaccgcgttgagtccgaaggtggtcttattgaaacatggaactctcaacaccctgagctgcaatgcgccggtgtcactgtttccaaacgcaccctcaaccgcaacggcctccacttgccatcttactcaccttatccccgaatgatcattgtcgttcaaggtgcgtaatattagtaagaagtatttatcagctttaacgtgataacaataatagtaatatgaaatatttattaaattttttataattaatctctgctagaaaatttgattaatctttttagtagaatttgttttttctcaactagg

SEQ ID NO: 1275 - DNA, 558 bp, Artificial
  Mutations within GlyA3B4 introduced by GmGlyA3B4_T01TALE nuclease
gttcatgtacggttgcagatataaacgaagcatagcttatgtatgaggtgtaacaaaattggaaacaatagccatgcaaggtgaagaatgtcaccaactcagaaacccttcttcattgacgtgtccctcactcactctcctctcttcactataaatcgccactcttcgtgttctccacttcaccaactccttcaaacttattaacactttccttagttcaatatggggaagcccttcttcactctctctctttcttccctttgcttgctactactcttgtcgagtgcatgctttgctattacctccagcaagttcaacgagtgccaactcaacaacctcaacgcgttggaacccgaccaccgcgttgagtccgaaggtggtcttattgaaacatggaactctcaacaccctgagctgcaatgcgccggtgtcactgtttccaaacgcaccctcaaccgcaacggcctccacttgccatcttactcaccttatccccaaatgatcattgtcgttcaaggtgcgtatattagtaagaagtatttatcagcttaacgtgat

SEQ ID NO: 1276 - DNA, 751 bp, Artificial
  Mutations within GlyA3B4 introduced by GmGlyA3B4_T01TALE nuclease
gttcatgtacggttgcagatataaacgaagcatagcttatgtatgaggtgtaacaaaattggaaacaatagccatgcaaggtgaagaatgtcaccaactcagaaacccttcttcattgacgtgtccctcactcactctcctctcttcactataaatcgccactcttcgtgttctccacttcaccaactccttcaaacttattaacactttccttagttcaatatggggaagcccttcttcactctctgatggccaccacctgctggggggtcaagccgtgggcctggcacagcaccggcaacagcgcctgcaccgtctccagcgcctgcttgccaccatcgtggctggcgatactcttgtcgagtgctatgctttgctattaccctccagcaaagttcaacgagtgccaactcaacaacctcacgcgttggaacccgaccaccgcgttgagtccgaaggtggtcttattgaaacatggaactctcaacaccctgagctgcaatgcgccggtgtcactgtttccaaacgcaccctcaaccgcaacggcctccacttgccatcttactcaccttatccccaaatgatcattgtcgttcaaggtgcgtaatattagtaagaagtatttatcagcttaacgtgataacaataatagtaatatgaaaatatttattaaattttttataattaatctctgctagaaaatttgattaatcatttttagtagaatttgtttttctcaactaggtttaaa

SEQ ID NO: 1277 - DNA, 658 bp, Artificial
  Mutations within GlyA3B4 introduced by GmGlyA3B4_T01TALE nuclease
gttcatgtacggttgcagatataaacgaagcatagcttatgtatgaggtgtaacaaaattggaaacaatagccatgcaaggtgaagaatgtcaccaactcagaaacccttcttcattgacgtgtccctcactcactctcctctcttcactataaatcgccactcttcgtgttctccacttcaccaactccttcaaacttattaacactttccttagttcaatatggggaagcccttcttcactctctctctttcttccctttgcttgctcgtctccagcggctgttgccggtgctgtgccaggcccacggcttgaccccccagcaggtggtggccatcgccaactcttgtcgagtgcatgctttgctattacctccagcaagttcaacgagtgccaactcaacaacctcaacgcgttggaacccgaccaccgcgttgagtccgaaggtggtcttattgaaacatggaactctcaacaccctgagctgcaatgcgccggtgtcactgtttccaaacgcacctcaaccgcaacggcctccacttgccatctttactcaccttatccccaaatgatcattgtcgttcaaggtgcgtaatattagtaagaagtatttatcagcttaacgtgataacaataatagtaatatgaaatatttatt

SEQ ID NO: 1278 - DNA, 465 bp, Artificial; identical to SEQ ID NO: 900
  Mutations within GlyA3B4 introduced by GmGlyA3B4_T01TALE nuclease

SEQ ID NO: 1279 - DNA, 651 bp, Artificial
  Mutations within GlyA3B4 introduced by GmGlyA3B4_T01TALE nuclease
gttcatgtacggttgcagatataaacgaagcatagcttatgtatgaggtgtaacaaaattggaaacaatagccatgcaaggtgaagaatgtcaccaactcagaaacccttcttcattgacgtgtccctcactcactctcctctcttcacgatttatagggttcacgctcaacaaaatcgcatatcaatttcacaacaattggtatgccaaacatatataattcactgtaataattataaggataaaatgaaatcttgtcgagtgcatgctttgctattacctccagcaagttcaacgagtgccaactcaacaacctcaacgcgttggaacccgaccaccgcgttgagtccgaaggtggtcttattgaaacatggaactctcaacaccctgagctgcaatgcgccggtgtcactgtttccaaacgcaccctcaaccgcaacggcctccacttgccatcttactcaccttatccccaaatgatcattgtcgttcaaggtgcgtaatattagtaagaagtatttatcagctttaacgtgataacaataatagtaatatgaaatattttattaaatttttttataatttaatctctgctagaaaatttgattaatcattttttagtagaatttgttttttctcaactaggttttt

SEQ ID NO: 1280 - DNA, 652 bp, Artificial
  Mutations within GlyA3B4 introduced by GmGlyA3B4_T01TALE nuclease
gttcatgtacggttgcagatataaacgaagcatagcttatgtatgaggtgtaacaaaattggaaacaatagccatgcaaggtgaagaatgtcaccaactcagaaacccttcttcattgacgtgtccctcactcactctcctctcttcactataaatcgccactcttcgtgttctccacttcaccaactccttcaaacttattaacactttccttagttcaatatggggaagcccttcttcactctctctctttcttccctttgcttgcagtgcatgctttgctattacctccagcaagttcaacgagtgccaactcaacaacctcaacgcgttggaacccgaccaccgcgttgagtccgaaggtggtcttattgaaacatggaactctcaacaccctgagctgcaatgcgccggtgtcactgtttccaaacgcaccctcaaccgcaacggcctccacttgccatcttactcaccttatcccccaaatgatcattgtcgttcaaggtgcgtaaatattagtaagaagtatttatcagcttaacgtgataacaataatagtaatatgaaatatttattaaattttttataattaatctctgctagaaaatttgattaatctttttagtagaattgttttttctcaactaggttt

SEQ ID NO: 1281 - DNA, 636 bp, Artificial
  Mutations within GlyA3B4 introduced by GmGlyA3B4_T01TALE nuclease
  misc_feature (532): n is a or c or t or g
gttcatgtacggttgcagatataaacgaagcatagcttatgtatgaggtgtaacaaaattggaaacaatagccatgcaaggtgaagaatgtcaccaactcagaaacccttcttcattgacgtgtccctcactcactctcctctcttcactataaatcgccactcttcgtgttctccacttcaccaactccttcaaacttattaacactttccttagttcaatatggggaagcccttcttcactctctctctttcttccctttgcttgctcttgtcgagtgcatgctttgctattacctccagcaagttcaacgagtgccaactcaacaacctcaacgcgttggaacccgaccaccgcgttgagtccgaaggtggtcttattgaaacatggaactctcaacaccctgagctgcaatgcgccggtgtcactgtttccaaacgcaccctcaaccgcaacggcctccacttgccatcttactcaccttatccccaaatgatcattgtcgttcaaggtgcgtaatattagtaagagnatttatcagcttaacgtgatacaatatagtaatatgaaatatttattaaatttttataattaatctctgctagaaaatttgattaatcattttagtagaatttg

SEQ ID NO: 1282 - DNA, 648 bp, Artificial
  Mutations within GlyA3B4 introduced by GmGlyA3B4_T01TALE nuclease
gttcatgtacggttgcagatataaacgaagcatagcttatgtatgaggtgtaacaaaattggaaacaatagccatgcaaggtgaagaatgtcaccaactcagaaacccttcttcattgacgtgtccctcactcactctcctctcttcactataaatcgccactcttcgtgttctccacttcaccaactccttcaaacttattaacactttccttagttcaatatggggaagcccttcttcactctctctctttcttccctttgctattacctccagcaagttcaacgagtgccaactcaacaacctcaacgcgttggaacccgaccaccgcgttgagtccgaaggtggtcttattgaaacatggaactctcaacacccctgagctgcaatgcgccggtgtcactgtttccaaacgcaccctcaaccgcaacggcctccacttgccatcttactcaccttatcccccaaatgatcattgtcgttcaaggtgcgtaatattagtaagaagtatttatcagcttaacgtgataacaataatagtaatatgaaatatttattaaattttttataattaatctctgctagaaaatttgattaatcattttttagtagaatttgttttttctcaactaggttttaaacaccaca

SEQ ID NO: 1283 - DNA, 607 bp, Artificial
  Mutations within GlyA3B4 introduced by GmGlyA3B4_T01TALE nuclease
gttcatgtacggttgcagatataaacgaagcatagcttatgtatgaggtgtaacaaaaattggaaacaatagccatgcaaggtgaagaatgtcaccaactcagaaacccttcttcattgacgtgtccctcactcactctcctctcttcactataaatcgccactcttcgtgttctccacttcaccaactccttcaaacttattaacactttccttagttcaatatggggaagcccttcttcactctctctctttcttccctttgcttttgtcgagtgcatgctttgctattacctccagcaagttcaacgagtgccaactcaacaacctcaacgcgttggaacccgaccaccgcgttgagtccgaaggtggtcttattgaaacatggaactctcaacaccctgagctgcaatgcgccggtgtcactgtttccaaacgcaccctcaaccgcaacggcctccacttgccatcttactcaccttatcccccaaatgatcattgtcgttcaaggtgcgtaatattagtaagaagtatttatcagcttaacgtgataacaataatagtaatatgaaatatttattaaattttttataattaatctctgctag

SEQ ID NO: 1284 - DNA, 613 bp, Artificial
  Mutations within GlyA3B4 introduced by GmGlyA3B4_T01TALE nuclease
gttcatgtacggttgcagatataaacgaagcatagcttatgtatgaggtgtaacaaaattggaaacaatagccatgcaaggtgaagaatgtcaccaactcagaaacccttcttcattgacgtgtccctcactcactctcctctcttcactataaatcgccactcttcgtgttctccacttcaccaactccttcaaacttattaacactttccttagttcaatatgtcgagtgcatgctttgctattacctccagcaagttcaacgagtgccaactcaacaacctcaacgcgttggaacccgaccaccgcgttgagtccgaaggtggtcttattgaaacatggaactctcaacaccctgagctgcaatgcgccggtgtcactgtttccaaacgcaccctcaaccgcaacggcctccacttgccatcttactcaccttatcccccaaatgatcattgtcgttcaaggtgcgtaatattagtaagaagtatttatcagcttaacgtgataacaataatagtaatatgaaatatttattaattttttataattaatctctgctagaaaatttgattaatcatttttagtagaatttgtttttctcaactaggttttt

SEQ ID NO: 1285 - DNA, 676 bp, Artificial
  Mutations within GlyA3B4 introduced by GmGlyA3B4_T01TALE nuclease
gttcatgtacggttgcagatataaacgaagcatagcttatgtatgaggtgtaacaaaattggaaacaatagccatgcaaggtgaagaatgtcaccaactcagaaacccttcttcattgacgtgtccctcactcactctcctctcttcactataaatcgccactcttcgtgttctccacttcaccaactccttcaaacttattaacactttccttagttcaatatggggaagcccttcttcactctctctctttcttccctttgcttgctcgtctccagcggctgttgccggtgctgtgccaggcccacggcttgaccccccagcaggtggtggccatcgccaactcttgtcgagtgcatgctttgctattacctccagcaagttcaacgagtgccaactcaacaacctcaacgcgttggaacccgaccaccgcgttgagtccgaaggtggtcttattgaaacatggaactctcaacaccctgagctgcaatgcgccggtgtcactgtttccaaacgcacctcaaccgcaacggcctccacttgccatctttactcaccttatccccaaatgatcattgtcgttcaaggtgcgtaatattagtaagaagtatttatcagcttaacgtgataacaataatagtaatatgaaatatttattaaattttttataattaat

SEQ ID NO: 1286 - DNA, 712 bp, Artificial
  Mutations within GlyA3B4 introduced by GmGlyA3B4_T01TALE nuclease
gttcatgtacggttgcagatataaacgaagcatagcttatgtatgaggtgtaacaaaattggaaacaatagccatgcaaggtgaagaatgtcaccaactcagaaacccttcttcattgacgtgtccctcactcactctcctctcttcactataaatcgccactcttcgtgttctccacttcaccaactccttcaaacttattaacactttccttagttcaatatggggaagcccttcttcactctctctctttcttccctttgcttgctattcctaatttacccttgccttttctctttctctttcttcctttgtcttactcttgtcgagtgcatgctttgctattacctccagcaagttcaacgagtgccaactcaacaacctcaacgcgttggaacccgaccaccgcgttgagtccgaaggtggtcttattgaaacatggaactctcaacaccctgagctgcaatgcgccggtgtcactgtttccaaacgcaccctcaaccgcaacggcctccacttgccatcttactcaccttatccccaaatgatcattgtcgttcaaggtgcgtaatattagtaagaagtatttatcagcttaacgtgataacaataatagtaatatgaaatatttattaaatttttataattaatctctgctagaaaatttgattaatcatttttagtagaatttgttttttctcaactaggtttt

SEQ ID NO: 1287 - DNA, 648 bp, Artificial
  Mutations within GlyA3B4 introduced by GmGlyA3B4_T01TALE nuclease
gttcatgtacggttgcagatataaacgaagcatagcttatgtatgaggtgtaacaaaattggaaacaatagccatgcaaggtgaagaatgtcaccaactcagaaacccttcttcattgacgtgtccctcactcactctcctctcttcactataaatcgccactcttcgtgttctccacttcaccaactccttcaaacttattaacactttccttagttcaatatggggaagcccttcttcactctctctctttcttccctttgcttgctgctctgatgccgcatagttaagccagccccgacacccgccaacacccgctgacgcgccctgacgggcttgtctgctactcttgtcgagtgcatgctttgctattacctccagcaagttcaacgagtgccactcaacaacctcaacgcgttggaacccgaccaccgcgttgagtccgaaggtggtcttattgaaacatggaactctcaacaccctgagctgcaatgcgccggtgtcactgtttccaaacgcaccctcaaccgcaacggcctccacttgccatcttactcaccttatccccaaatgatcattgtcgttcaaggtgcgtaatattagtaagaagtatttatcgcttaacgtgataacaataatagtaatatg

SEQ ID NO: 1288 - DNA, 649 bp, Artificial
  Mutations within GlyA3B4 introduced by GmGlyA3B4_T01TALE nuclease
gttcatgtacggttgcagatataaacgaagcatagcttatgtatgaggtgtaacaaaattggaaacaatagccatgcaaggtgaagaatgtcaccaactcagaaacccttcttcattgacgtgtccctcactcactctcctctcttcactataaatcgccactcttcgtgttctccacttcaccaactccttcaaacttattaacactttccttagttcaatatggggaagcccttcttcactctctctctttcttccctttgctattacctccagcaagttcaacgagtgccaactcaacaacctcaacgcgttggaacccgaccaccgcgttgagtccgaaggtggtcttattgaaacatggaactctcaacaccctgagctgcaatgcgccggtgtcactgttttccaaacgcaccctcaaccgcaacggcctccacttgccatcttactcaccttatcccccaaatgatcattgtcgttcaaggtgcgtaatattagtaagaagtatttatcagcttaacgtgataacaataatagtaatatgaaatattttattaaatttttttataattaatctctgctagaaaatttgattaatcatttttagtagaatttgttttttctcaactaggttttaaacaccaca

SEQ ID NO: 1289 - DNA, 715 bp, Artificial
  Mutations within GlyA3B4 introduced by GmGlyA3B4_T01TALE nuclease
gttcatgtacggttgcagatataaacgaagcatagcttatgtatgaggtgtaacaaaattggaaacaatagccatgcaaggtgaagaatgtcaccaactcagaaacccttcttcattgacgtgtccctcactcactctcctctcttcactataaatcgccactcttcgtgttctccacttcaccaactccttcaaacttattaacactttccttagttcaatatggggaagcccttcttcactctctctctttcttccctttgcttgctattcctaatttacccttgccttttctctttctctttcttccctttgtcttactcttgtcgagtgcatgctttgctattacctccagcaagttcaacgagtgccaactcaacaaccctcaacgcgttggaaccccgaccaccgcgttgagtccgaaggtggtcttattgaaacatggaactctcaacaccctgagctgcaatgcgccggtgtcactgtttccaaacgcaccctcaaccgcaacggcctccacttgccatcttactcaccttatccccaaatgatcattgtcgttcaaggtgcgtaatattagtaagaagtatttatcagcttaacgtgataacaataatagtaatatgaaatatttattaaattttttataattaatctctgctagaaaatttgattaatcatttttagtagaatttgtttttctcaactaggtttt

SEQ ID NO: 1290 - DNA, 649 bp, Artificial
  Mutations within GlyA3B4 introduced by GmGlyA3B4_T01TALE nuclease
gttcatgtacggttgcagatataaacgaagcatagcttatgtatgaggtgtaacaaaattggaaacaatagccatgcaaggtgaagaatgtcaccaactcagaaacccttcttcattgacgtgtccctcactcactctcctctcttcactataaatcgccactcttcgtgttctccacttcaccaactccttcaaacttattaacactttccttagttcaatatggggaagcccttcttcactctctcttgtcgagtgcatgctttgctattacctccagcaagttcaacgagtgccaactcaacaacctcaacgcgttggaacccgaccaccgcgttgagtccgaaggtggtcttattgaaacatggaactctcaacaccctgagctgcaatgcgccggtgtcactgttttccaaacgcaccctcaaccgcaacggcctccacttgccatcttactcaccttatccccaaatgatcattgtcgttcaaggtgcgtaatattagtaagaagtatttatcagcttaacgtgataacaataatagtaatatgaaatatttattaaattttttataattaatctctgctagaaaatttgattaatcatttttagtagaatttgttttttctcaactaggttttaaaacaacc

SEQ ID NO: 1291 - DNA, 731 bp, Artificial
  Mutations within GlyA3B4 introduced by GmGlyA3B4_T01TALE nuclease
  misc_feature (642): n is a or c or t or g
gttcatgtacggttgcagatataaacgaagcatagcttatgtatgaggtgtaacaaaattggaaacaatagccatgcaaggtgaagaatgtcaccaactcagaaacccttcttcattgacgtgtccctcactcactctcctctcttcactataaatcgccactcttcgtgttctccacttcaccaactccttcaaacttattaacactttccttagttcaatatggggaagcccttcttcactctctctctttcttccctttgcttgctttccagcgcctgcttgccaccaatattgctggcgatggccaccacctgctggggggtcaagccgtgggcctggcacagcaccggcaaccgcgctggaccgtctccagcgcctgcttgccgttgtcgagtgcatgcttttgctattacctccagcaagttcaacgagtgccaactcaacaacctcaacgcgttggaacccgaccaccgcgttgagtccgaaggtggtcttattgaaacatggaactctcaacaccctgagctgcaatgcgccggtgtcactgtttccaaacgcaccctcaaccgcaacggcctccacttgccattcttactcaccttatccccaaatgatcattgtcgttcaaggtgcgtaatnttagtaagaagtatttcatcagcttaacgtgataacaataatagtaatatgaaatatttattaaattttttataattaatctctgctag

SEQ ID NO: 1292 - DNA, 670 bp, Artificial
  Mutations within GlyA3B4 introduced by GmGlyA3B4_T01TALE nuclease
gttcatgtacggttgcagatataaacgaagcatagcttatgtatgaggtgtaacaaaattggaaacaatagccatgcaaggtgaagaatgtcaccaactcagaaacccttcttcattgacgtgtccctcactcactctcctctcttcactataaatcgccactcttcgtgttctccacttcaccaactccttcaaacttattaacactttccttagttcaatatggggaagcccttcttcactctctctctttcttccctttgcttgcttgtcgagtgcatgctttgctattacctccagcaagttcaacgagtgccaactcaacaacctcaacgcgttggaacccgaccaccgcgttgagtccgaaggtggtcttattgaaacatggaactctcaacaccctgagctgcaatgcgccggtgtcactgtttccaaacgcaccctcaaccgcaacggcctccacttgccatcttactcaccttatcccccaaatgatcattgtcgttcaaggtgcgtaaatattagtaagaagtatttatcagcttaacgtgataacaataatagtaatatgaaatatttattaaattttttataattaatctctgctagaaaatttgattaatcatttttagtagaattgttttttctcaactaggttttaaacaccaca

SEQ ID NO: 1293 - DNA, 727 bp, Artificial
  Mutations within GlyA3B4 introduced by GmGlyA3B4_T01TALE nuclease
  misc_feature (628); (670): n is a or c or t or g
gttcatgtacggttgcagatataaacgaagcatagcttatgtatgaggtgtaacaaaattggaaacaatagccatgcaaggtgaagaatgtcaccaactcagaaacccttcttcattgacgtgtccctcactcactctcctctcttcactataaatcgccactcttcgtgttctccacttcaccaactccttcaaacttattaacactttccttagttcaatatggggaagcccttcttcactctctctctttcttccctttgcttgctggtccagcggctgttgccggtgctgtgccaggcccacggcttgaccccccagcaggtggtggccatcgccagcaatggcggtggcaagcaggcgctggagacggtcctcttgtcgagtgcatgctttgctattacctccagcaagttcaacgagtgccaactcaacacctcaacgcgttggaacccgaccaccgcgttgagtccgaaggtggtcttattgaaacatggaactctcaacaccctgagctgcaatgcgccggtgtcactgtttccaaacgcaccctcaaccgcaacggcctccacttgccatcttactcaccttatccccaaatgatcattgtcgttcaaggtgcgtaatnttagtaagaagtatttatcagcttaacgtgataacaataatngtaatatgaaatatttattaaattttttataattaatctctgctagaaaatttgatt

SEQ ID NO: 1294 - DNA, 668 bp, Artificial
  Mutations within GlyA3B4 introduced by GmGlyA3B4_T01TALE nuclease
gttcatgtacggttgcagatataaacgaagcatagcttatgtatgaggtgtaacaaaattggaaacaatagccatgcaaggtgaagaatgtcaccaactcagaaacccttcttcattgacgtgtccctcactcactctcctctcttcactataaatcgccactcttcgtgttctccacttcaccaactccttcaaacttattaacactttccttagttcaatatggggaagcccttcttcactctctctctttcttccctttgctattacctcgagtgcatgctttgctattacctccagcaagttcaacgagtgccaactcaacaacctcaacgcgttggaacccgaccaccgcgttgagtccgaaggtggtcttattgaaacatggaactctcaacaccctgagctgcaatgcgccggtgtcactgtttccaaacgcaccctcaaccgcaacggcctccacttgccatcttactcaccttatccccaaatgatcattgtcgttcaaggtgcgtaatattagtaagagtatttatcagcttaacgtgataacaataatagtaatatgaaatatttattaaatttttataattaatctctgctagaaaatttgattaatcatttttagtagaatttgtttttctcaactaggtttttaaaacaccaca

SEQ ID NO: 1295 - DNA, 553 bp, Artificial
  Mutations within GlyA3B4 introduced by GmGlyA3B4_T01TALE nuclease
gttcatgtacggttgcagatataaacgaagcatagcttatgtatgaggtgtaacaaaattggaaacaatagccatgcaaggtgaagaatgtcaccaactcagaaacccttcttcattgacgtgtccctcactcactctcctctcttcactataaatcgccactcttcgtgttctccacttcacctccagcaagttcaacgagtgccaactcaacaacctcaacgcgttggaacccgaccaccgcgttgagtccgaaggtggtcttattgaaacatggaatctcatcaaccacctgagctgcaatgcgccggtgtcactgttttccaaacgcaccctcaaccgcaacggcctccacttgccatcttactcaccttatccccaaatgatcattgtcgttcaaggtgcgtaatattagtaagaagtatttatcagcttaacgtgataacaataatagtaatatgaaatatttattaaattttttataattaatctctgctagaaaatttgattaatcatttttagtagaatttgtttttctcaactaagggttttt

SEQ ID NO: 1296 - DNA, 655 bp, Artificial
  Mutations within GlyA3B4 introduced by GmGlyA3B4_T01TALE nuclease
gttcatgtacggttgcagatataaacgaagcatagcttatgtatgaggtgtaacaaaattggaaacaatagccatgcaaggtgaagaatgtcaccaactcagaaacccttcttcattgacgtgtccctcactcactctcctctcttcactataaatcgccactcttcgtgttctccacttcaccaactccttcaaacttattaacactttccttagttcaatatggggaagcccttcttcactctctctctttcttccctttgcttgctttgtcgagtgcatgctttgctattacctccagcaagttcaacgagtgccaactcaacaacctcaacgcgttggaacccgaccaccgcgttgagtccgaaggtggtcttattgaaacatggaactctcaacaccctgagctgcaatgcgccggtgtcactgtttccaaacgcaccctcaaccgcaacggcctccacttgccatcttactcaccttatccccaaatgatcattgtcgttcaaggtgcgtaaatattagtaagaagtatttatcagcttaacgtgataacaataatagtaatatgaaatatttattaaattttttataattaatctctgctagaaaatttgattaatctttttagtagaattgttttttctcaactagg

SEQ ID NO: 1297 - DNA, 556 bp, Artificial
  Mutations within GlyA3B4 introduced by GmGlyA3B4_T01TALE nuclease
gttcatgtacggttgcagatataaacgaagcatagcttatgtatgaggtgtaacaaaattggaaacaatagccatgcaaggtgaagaatgtcaccaactcagaaacccttcttcattgacgtgtccctcactcactctcctctcttcactataaatcgccactcttcgtgttctccacttcaccaactccttcaaacttattaacactttccttagttcaatatggggaagcccttcttcactctctctctttcttccctttgcttgctcgagtgcatgctttgctattacctccagcaagttcaacgagtgccaactcaacaacctcaacgcgttggaacccgaccaccgcgttgagtccgaaggtggtcttattgaaacatggaactctcaacaccctgagctgcaatgcgccggtgtcactgtttccaaacgcaccctcaaccgcaacggcctccacttgccatcttactcaccttatccccaaaatgatcattgtcgttcaaggtgcgtaaatattagtaagaagtatttatcagcttaacgtgataacaat

SEQ ID NO: 1298 - DNA, 651 bp, Artificial
  Mutations within GlyA3B4 introduced by GmGlyA3B4_T01TALE nuclease
gttcatgtacggttgcagatataaacgaagcatagcttatgtatgaggtgtaacaaaattggaaacaatagccatgcaaggtgaagaatgtcaccaactcagaaacccttcttcattgacgtgtccctcactcactctcctctcttcactataaatcgccactcttcgtgttctccacttcaccaactccttcaaacttattaacactttccttagttcaatatggggaagcccttcttcactctctctctttcttccctttgcttgtcgagtgcatgctttgctattacctccagcaagttcaacgagtgccaactcaacaacctcaacgcgttggaacccgaccaccgcgttgagtccgaaggtggtcttattgaaacatggaactctcaacaccctgagctgcaatgcgccggtgtcactgtttccaaacgcaccctcaaccgcaacggcctccacttgccatcttactcaccttatcccccaaatgatcattgtcgttcaaggtgcgtaaatattagtaagaagtatttatcagcttaacgtgataacaataatagtaatatgaaatatttattaaattttttataattaatctctgctagaaaatttgattaatctttttagtagaattgttttttctcaactagg

SEQ ID NO: 1299 - DNA, 741 bp, Artificial
  Mutations within GlyA3B4 introduced by GmGlyA3B4_T01TALE nuclease
  misc_feature (669): n is a or c or t or g
gttcatgtacggttgcagatataaacgaagcatagcttatgtatgaggtgtaacaaaattggaaacaatagccatgcaaggtgaagaatgtcaccaactcagaaacccttcttcattgacgtgtccctcactcactctcctctcttcactataaatcgccactcttcgtgttctccacttcaccaactccttcaaacttattaacactttccttagttcaatatggggaagcccttcttcactctctctctttcttccctttgcttgctattgaccccggagcaggtggtggccatcgccagccacgatggcggcaagcaggcgctggagacggtccagcggctgttgccggtgctgtgccaggcccacggcttgactcttgtcgagtgcatgctttgctattacctccagcaagttcaacgagtgccaactcaacactcaacgcgttgaacccgaccaccgcgttgagtccgaaggtggtcttattgaaacatggaactctcaacaccctgagctgcaatgcgccggtgtcactgtttccaaacgcaccctcaaccgcaacggcctccacttgccatcttactcaccttatccccaaatgatcattgtcgttcaaggtgcgtaatattagtaagaagtatttatcagcttaacgtgataacaataatngtaatatgaaatattttattaaattttttataataatctctgctagaaaatttgattaatcatttttagtag

SEQ ID NO: 1300 - DNA, 545 bp, Artificial
  Mutations within GlyA3B4 introduced by GmGlyA3B4_T01TALE nuclease
gttcatgtacggttgcagatataaacgaagcatagcttatgtatgaggtgtaacaaaattggaaacaatagccatgcaaggtgaagaatgtcaccaactcagaaacccttcttcattgacgtgtccctcactcactctcctctcttcactataaatcgccactcttcgagtgcatgctttgctattacctccagcaagttcaacgagtgccaactcaacaacctcaacgcgttggaacccgaccaccgcgttgagtccgaaggtggtcttattgaaacatggaactctcaacaccctgagctgcaatgcgccggtgtcactgtttccaaacgcaccctcaaccgcaacggcctccacttgccatcttactcaccttatccccaaatgatcattgtcgttcaaggtgcgtaatattagtaagaagtatttatcagcttaacgtgataacaataatagtaatatgaaatatttattaaattttttataattaatctctgctagaaaatttgattaatcatttttagtagaatttgtttttctcaact

SEQ ID NO: 1301 - DNA, 636 bp, Artificial
  Mutations within GlyA3B4 introduced by GmGlyA3B4_T01TALE nuclease
gttcatgtacggttgcagatataaacgaagcatagcttatgtatgaggtgtaacaaaattggaaacaatagccatgcaaggtgaagaatgtcaccaactcagaaacccttcttcattgacgtgtccctcactcactctcctctcttcactataaatcgccactcttcgtgttctccacttcaccaactccttcaaacttattaacactttccttagttcaatatggggaagcccttcttcactctctctctttcttccctttgctattacctccagcaagttcaacgagtgccaactcaacaacctcaacgcgttggaacccgaccaccgcgttgagtccgaaggtgctcttattgaaacatggaactctcaacaccctgagctgcaatgcgccggtgtcactgtttccaaacgcaccctcaaccgcaacggcctccacttgccatcttactcaccttatcccccaaatgatcattgtcgttcaaggtgcgtaatattagtaagaagtatttatcagcttaacgtgataacaataatagtaatatgaaatatttattaaattttttataattaatctctgctagaaaatttgattaatcatttttagtagaatttgttttttctcaactaggtttt

SEQ ID NO: 1302 - DNA, 591 bp, Artificial
  Mutations within GlyA3B4 introduced by GmGlyA3B4_T01TALE nuclease
gttcatgtacggttgcagatataaacgaagcatagcttatgtatgaggtgtaacaaaattggaaacaatagccatgcaaggtgaagaatgtcaccaactcagaaacccttcttcattgacgtgtccctcactcactctcctctcttcactataaatcgccactcttcgtgttctccacttcaccaactccttcaaacttattaacactttccttagtttccagcaagttcaacgagtgccaactcaacaacctcaacgcgttggaacccgaccaccgcgttgagtccgaaggtggtcttattgaaacatggaactctcaacaccctgagctgcaatgcgccggtgtcactgtttccaaacgcaccctcaaccgcaacggcctccacttgccatcttactcaccttatccccaaatgatcattgtcgttcaaggtgcgtaatattagtaagaagtatttatcagcttaacgtgataacaataatagtaatatgaaatatttattaaatttttttataattaatctctgctagaaaattttgattaatcatttttagtagaatttgtttttctcaactaggttttaaacacca

SEQ ID NO: 1303 - DNA, 622 bp, Artificial
  Mutations within GlyA3B4 introduced by GmGlyA3B4_T01TALE nuclease
gttcatgtacggttgcagatataaacgaagcatagcttatgtatgaggtgtaacaaaattggaaacaatagccatgcaaggtgaagaatgtcaccaactcagaaacccttcttcattgacgtgtccctcactcactctcctctcttcactataaatcgccactcttcgtgttctccacttcaccaactccttcaaacttattaacactttccttagttcaatatggggaagcccttcttcactctctctctttcttccctttgcttttgtcgagtgcatgctttgctattacctccagcaagtttcaacgagtgccaactcaacaacctcaacgcgttggaacccgaccaccgcgttgagtccgaaggtggtcttattgaaacatggaactctcaacaccctgagctgcaatgcgccggtgtcactgtttccaaacgcaccctcaaccgcaacggcctccacttgccatcttactcaccttatcccccaaatgatcattgtcgttcaaggtgcgtaatattagtaagaagtatttatcagcttaacgtgataacaataatagtaatatgaaatatttattaaattttttataattaatctctgctagaaaatttgattaatc

SEQ ID NO: 1304 - DNA, 647 bp, Artificial
  Mutations within GlyA3B4 introduced by GmGlyA3B4_T01TALE nuclease
gttcatgtacggttgcagatataaacgaagcatagcttatgtatgaggtgtaacaaaattggaaacaatagccatgcaaggtgaagaatgtcaccaactcagaaaccccttcttcattgacgtgtccctcactcactctcctctcttcactataaatcgccactcttcgtgttctccacttcaccaactccttcaaacttattaacactttccttagttcaatatggggaagcccttcttcactctctctctttcttccctttgctattacctccagcaagttcaacgagtgccaactcaacaacctcaacgcgttggaacccgaccaccgcgttgagtccgaaggtggtcttattgaaacatggaactctcaacacccctgagctgcaatgcgccggtgtcactgtttccaaacgcaccctcaaccgcaacggcctccacttgccatcttactcaccttatccccaaatgatcattgtcgttcaaggtgcgtaatattagtaagaagtatttatcagctttaacgtgataacaataatagtaatatgaaatatttattaaattttttataattaatctctgctagaaaatttgattaatcatttttagtagaatttgttttttctcaactaggttttaaacaccac

SEQ ID NO: 1305 - DNA, 848 bp, Artificial
  Mutations within GlyA3B4 introduced by GmGlyA3B4_T01TALE nuclease
gttcatgtacggttgcagatataaacgaagcatagcttatgtatgaggtgtaacaaaattggaaacaatagccatgcaaggtgaagaatgtcaccaactcagaaacccttcttcattgacgtgtccctcactcactctcctctcttcactataaatcgccactcttcgtgttctccacttcaccaactccttcaaacttattaacactttccttagttcaatatggggaagcccttcttcactctctctctttcttccctttgcttgcttgttctgatgatgatcctagccgaataaaatcatctgcttcgccgttcaaaggcaaaattgacctcaatatccaaccagagcgagaatgtcaaagatccaagatctggaaggtgaattgcagcgtttgaaaaatttgaatgcaaaatctagacatgttgactgggttgattcagatgatagtggattccggtcaaagaatgtgttatttgcaagtggtaatgaatattcttctgattgtgactcttgtcgagtgcatgctttgctattacctccagcaagttcaacgagtgccaactcaacaacctcaacgcgttggaacccgaccaccgcgttgagtccgaaggtggtcttattgaaacatggaactctcaacaccctgagctgcaatgcgccggtgtcactgtttccaaacgcaccctcaaccgcaacggcctccacttgccatcttactcaccttatccccaaatgatcattgtcgttcaaggtgcgtaatattagtaagaagtatttatcagcttaacgtgataacaataatagtaatatgaaatattattaaatttttataattaatctctgct

SEQ ID NO: 1306 - DNA, 746 bp, Artificial
  Mutations within GlyA3B4 introduced by GmGlyA3B4_T01TALE nuclease
gttcatgtacggttgcagatataaacgaagcatagcttatgtatgaggtgtaacaaaattggaaacaatagccatgcaaggtgaagaatgtcaccaactcagaaacccttcttcattgacgtgtccctcactcactctcctctcttcactataaatcgccactcttcgtgttctccacttcaccaactccttcaaacttattaacactttccttagttcaatatggggaagcccttcttcactctctctctttcttccctttgcttgctatccagcgcctgcttgccaccgccattgctggcgatggccaccacctgctggggggtcaagccgtgggcctggcacagcaccggcaacagcgcctgcaccgtctccagcgcctgcttgccaccaatattgctggcgatggccaccacctgctccggggtcaagccgtgggcctggcacagcactcttgtcgagtgcatgctttgctattacctccagcaagttcaacgagtgccaactcaacaacctcaacgcgttggaacccgaccaccgcgttgagtccgaaggtggtcttattgaaacatggaactctcaacaccctgagctgcaatgcgccggtgtcactgtttccaaaacgcaccctcaaccgcaacggcctccacttgccatcttactcaccttatccccaaaatgatcattgtcgttcaaggtgcgtaatattcagtaagaagtatttatcagcttaacgtgataacaat

SEQ ID NO: 1307 - DNA, 631 bp, Artificial
  Mutations within GlyA3B4 introduced by GmGlyA3B4_T01TALE nuclease
gttcatgtacggttgcagatataaacgaagcatagcttatgtatgaggtgtaacaaaattggaaacaatagccatgcaaggtgaagaatgtcaccaactcagaaacccttcttcattgacgtgtccctcactcactctcctctcttcactataaatcgccactcttcgtgttctccacttcaccaactccttcaaacttattaacactttccttagttcaatatggggaagcccttcttcactctctctctttcttccctttgcttgtcgagtgcatgctttgctattacctccagcaagttcaacgagtgccaactcaacaacctcaacgcgttggaacccgaccaccgcgttgagtccgaaggtggtcttattgaaacatggaactctcaacaccctgagctgcaatgcgccggtgtcactgtttccaaacgcaccctcaaccgcaacggcctccacttgccatcttactcaccttatccccaaatgatcattgtcgttcaaggtgcgtaatattagtaagaagtatttatcagcttaacgtgataacaataatagtaatatgaaatatttattaaattttttataattaatctctgctagaaaatttgattaatcatttttagtagaa

SEQ ID NO: 1308 - DNA, 667 bp, Artificial
  Mutations within GlyA3B4 introduced by GmGlyA3B4_T01TALE nuclease
gttcatgtacggttgcagatataaacgaagcatagcttatgtatgaggtgtaacaaaattggaaacaatagccatgcaaggtgaagaatgtcaccaactcagaaacccttcttcattgacgtgtccctcactcactctcctctcttcactataaatcgccactcttcgtgttctccacttcaccaactccttcaaacttattaacactttccttagttcaatatggggaagcccttcttcactctctctctttcttccctttgcttgcttgtcgagtgcatgctttgctattacctccagcaagttcaacgagtgccaactcaacaacctcaacgcgttggaacccgaccaccgcgttgagtccgaaggtggtcttattgaaacatggaactctcaacaccctgagctgcaatgcgccggtgtcactgtttccaaacgcaccctcaaccgcaacggcctccacttgccatcttactcaccttatccccaaatgatcattgtcgttcaaggtgcgtaaatattagtaagaagtatttatcagcttaacgtgataacaataatagtaatatgaaatatttattaaattttttataattaatctctgctagaaaatttgattaatctttttagtagaattgttttttctcaactaggtttaaaacaccac

SEQ ID NO: 1309 - DNA, 667 bp, Artificial
  Mutations within GlyA3B4 introduced by GmGlyA3B4_T01TALE nuclease
gttcatgtacggttgcagatataaacgaagcatagcttatgtatgaggtgtaacaaaattggaaacaatagccatgcaaggtgaagaatgtcaccaactcagaaaccccttcttcattgacgtgtccctcactcactctcctctcttcactataaatcgccactcttcgtgttctccacttcaccaactccttcaaacttattaacactttccttagttcaatatggggaagcccttcttcactctctctctttcttccctttgcttgccaacttacttctgacaacgatcggaggaccgaaggagctaaccgcttttttgcacaacatgggggatcatgtaactcgccttgatcgttgggaaccggagctgaatgaagccataccaaactcttgtcgagtgcatgctttgctattacctccagcaagttcaacgagtgccaactcaacaacctcaacgcgttggaacccgaccaccgcgttgagtccgaaggtggtcttattgaaacatggaactctcaacaccctgagctgcaatgcgccggtgtcactgtttccaaacgcaccctcaaccgcaacggcctccacttgccatcttactcaccttgatccccaaatgatcattgtcgttcaaggtgcgtaatcattagtaagaagtatttatcagc

SEQ ID NO: 1310 - DNA, 631 bp, Artificial; identical to SEQ ID NO: 1307
  Mutations within GlyA3B4 introduced by GmGlyA3B4_T01TALE nuclease

SEQ ID NO: 1311 - DNA, 670 bp, Artificial
  Mutations within GlyA3B4 introduced by GmGlyA3B4_T01TALE nuclease
gttcatgtacggttgcagatataaacgaagcatagcttatgtatgaggtgtaacaaaattggaaacaatagccatgcaaggtgaagaatgtcaccaactcagaaacccttcttcattgacgtgtccctcactcactctcctctcttcactataaatcgccactcttcgtgttctccacttcaccaactccttcaaacttattaacactttccttagttcaatatggggaagcccttcttcactctctctctttcttccctttgcttgcttgtcgagtgcatgctttgctattacctccagcaagttcaacgagtgccaactcaacaacctcaacgcgttggaacccgaccaccgcgttgagtccgaaggtggtcttattgaaacatggaactctcaacaccctgagctgcaatgcgccggtgtcactgtttccaaacgcaccctcaaccgcaacggcctccacttgccatcttactcaccttatccccaaatgatcattgtcgttcaaggtgcgtaaatattagtaagaagtatttatcagcttaacgtgataacaataaatagtaatatgaaatatttattaaattttttataattaatctctgctagaaaatttgattaatcatttttagtagaatttgttttttctcaactaggttttaaaacacca

SEQ ID NO: 1312 - DNA, 578 bp, Artificial; identical to SEQ ID NO: 1061
  Mutations within GlyA3B4 introduced by GmGlyA3B4_T01TALE nuclease

SEQ ID NO: 1313 - DNA, 608 bp, Artificial; identical to SEQ ID NO: 1121
  Mutations within GlyA3B4 introduced by GmGlyA3B4_T01TALE nuclease

SEQ ID NO: 1314 - DNA, 656 bp, Artificial
  Mutations within GlyA3B4 introduced by GmGlyA3B4_T01TALE nuclease
  misc_feature (279): n is a or c or t or g
gttcatgtacggttgcagatataaacgaagcatagcttatgtatgaggtgtaacaaaattggaaacaatagccatgcaaggtgaagaatgtcaccaactcagaaacccttcttcattgacgtgtccctcactcactctcctctcttcactataaatcgccactcttcgtgttctccacttcaccaactccttcaaacttattaacactttccttagttcaatatggggaagcccttcttcactctctctctttcttccctttgcttgctacttctacgntgctttgctattacctccagcaagttcaacgagtgccaactcaacaacctcaacgcgttggaacccgaccaccgcgttgagtccgaaggtggtcttattgaaacatggaactctcaacaccctgagctgcaatgcgccggtgtcactgtttccaaacgcaccctcaaccgcaacggcctccacttgccatcttactcaccttatccccaaatgatcattgtcgttcaaggtgcgtaatattagtaagagtatttatcagcttaacgtgatacaataatagtaatatgaaatatttattaaatttttataattaatctctgctagaaaatttgattaatcattttagtagaatttgttttctcaactaggttttaaaa

SEQ ID NO: 1315 - DNA, 622 bp, Artificial; identical to SEQ ID NO: 579
  Mutations within GlyA3B4 introduced by GmGlyA3B4_T01TALE nuclease

SEQ ID NO: 1316 - DNA, 670 bp, Artificial
  Mutations within GlyA3B4 introduced by GmGlyA3B4_T01TALE nuclease
gttcatgtacggttgcagatataaacgaagcatagcttatgtatgaggtgtaacaaaattggaaacaatagccatgcaaggtgaagaatgtcaccaactcagaaacccttcttcattgacgtgtccctcactcactctcctctcttcactataaatcgccactcttcgtgttctccacttcaccaactccttcaaacttattaacactttccttagttcaatatggggaagcccttcttcactctctctctttcttccctttgcttttgtcgagtgcatgctttgctattacctccagcaagttcaacgagtgccaactcaacaacctcaacgcgttggaacccgaccaccgcgttgagtccgaaggtggtcttattgaaacatggaactctcaacaccctgagctgcaatgcgccggtgtcactgtttccaaacgcaccctcaaccgcaacggcctccacttgccatcttactcaccttatccccaaatgatcattgtcgttcaaggtgcgtaaatattagtaagaagtatttatcagctttaacgtgataacaataatagtaatatgaaatatttattaaattttttataattaatctctgctagaaaatttgattaatcatttttagtagaatttgttttttctcaactaggttttaaaacaccaca

SEQ ID NO: 1317 - DNA, 644 bp, Artificial
  Mutations within GlyA3B4 introduced by GmGlyA3B4_T01TALE nuclease
gttcatgtacggttgcagatataaacgaagcatagcttatgtatgaggtgtaacaaaaattggaaacaatagccatgcaaggtgaagaatgtcaccaactcagaaacccttcttcattgacgtgtccctcactcactctcctctcttcactataaatcgccactcttcgtgttctccacttcaccaactccttcaaacttattaacactttccttagttcaatatggggaagcccttcttcacttgtcgagtgcatgctttgctattacctccagcaagttcaacgagtgccaactcaacaacctcaacgcgttggaacccgaccaccgcgttgagtccgaaggtggtcttattgaaacatggaactctcaacacccctgagctgcaatgcgccggtgtcactgtttccaaacgcaccctcaaccgcaacggcctccacttgccatcttactcaccttatcccccaaatgatcattgtcgttcaaggtgcgtaatattagtaagaagtatttatcagcttaacgtgataacaataatagtaatatgaaatatttattaaattttttataattaatctctgctagaaaatttgattaatcatttttagtagaatttgttttttctcaactaggttttaaacacca

SEQ ID NO: 1318 - DNA, 654 bp, Artificial
  Mutations within GlyA3B4 introduced by GmGlyA3B4_T01TALE nuclease
gttcatgtacggttgcagatataaacgaagcatagcttatgtatgaggtgtaacaaaattggaaacaatagccatgcaaggtgaagaatgtcaccaactcagaaacccttcttcattgacgtgtccctcactcactctcctctcttcactataaatcgccactcttcgtgttctccacttcaccaactccttcaaacttattaacactttccttagttcaatatggggaagcccttcttcactctctctctttcttccctttgcttgcttgtcgagtgcatgctttgctattacctccagcaagttcaacgagtgccaactcaacaacctcaacgcgttggaacccgaccaccgcgttgagtccgaaggtggtcttattgaaacatggaactctcaacaccctgagctgcaatgcgccggtgtcactgtttccaaacgcaccctcaaccgcaacggcctccacttgccatcttactcaccttatccccaaatgatcattgtcgttcaaggtgcgtaatattagtaagaagtatttatcagcttaacgtgataacaataatagtaatatgaaatatttattaaattttttataattaatctctgctagaaaatttgattaatctttttagtagaatttgttttttctcaactagg

SEQ ID NO: 1319 - DNA, 641 bp, Artificial
  Mutations within GlyA3B4 introduced by GmGlyA3B4_T01TALE nuclease
gttcatgtacggttgcagatataaacgaagcatagcttatgtatgaggtgtaacaaaattggaaacaatagccatgcaaggtgaagaatgtcaccaactcagaaacccttcttcattgacgtgtccctcactcactctcctctcttcactataaatcgccactcttcgtgttctccacttcaccaactccttcaaacttattaacactttccttagttcaatatggggaagcccttcttcactctctctctttcttccctttgcttgctactttgtttctcatcaaaccaatgacatctttctctggagatcctaactgttttaagcatgataatgggaaatctcattactattacccaaacaaatatgaaacctatattgtcgagtgcatgctttgctattacctccagcaagttcaacgagtgccaactcaacaacctcaacgcgttggaacccgaccaccgcgttgagtccgaaggtggtcttattgaaacatggaactctcaacaccctgagctgcaatgcgccggtgtcactgtttccaaacgcaccctcaaccgcaacggcctccacttgccatcttactcaccttatccccaaatgatcattgtcgttcaaggtgcgtaatattagtaagaagt

SEQ ID NO: 1320 - DNA, 743 bp, Artificial
  Mutations within GlyA3B4 introduced by GmGlyA3B4_T01TALE nuclease
gttcatgtacggttgcagatataaacgaagcatagcttatgtatgaggtgtaacaaaattggaaacaatagccatgcaaggtgaagaatgtcaccaactcagaaacccttcttcattgacgtgtccctcactcactctcctctcttcactataaatcgccactcttcgtgttctccacttcaccaactccttcaaacttattaacactttccttagttcaatatggggaagcccttcttcactctctctctttcttccctttgcttgcttgccgccatcgtggctggcgatggccaccacctgctccggggtcaagccgtgggcctggcacagcaccggcaacagcctcttgtcgagtgcatgctttgctattacctccagcaagttcaacgagtgccaactcacaacctcaacgcgttggaacccgaccaccgcgttgagtccgaaggtggtcttattgaaacatggaactctcaacaccctgagctgcaatgtgccggtgtcactgtttccaaacgcaccctcaaccgcaacggcctccacttgccatcttactcaccttatccccaaatgatcattgtcgttcaaggtgcgtaatattagtaagaagtatttatcagcttaacgtgataacaataatagtaatatgaaatatttattaaattttttataattaatctctgctagaaaaatttgattaatcatttttagtagaatttgtttttctcaactaggttttaaac

SEQ ID NO: 1321 - DNA, 606 bp, Artificial
  Mutations within GlyA3B4 introduced by GmGlyA3B4_T01TALE nuclease
gttcatgtacggttgcagatataaacgaagcatagcttatgtatgaggtgtaacaaaattggaaacaatagccatgcaaggtgaagaatgtcaccaactcagaaacccttcttcattgacgtgtccctcactcactctcctctcttcactataaatcgccactcttcgtgttctccacttcaccaactccttcaaacttattaacactttccttagttcaatatggggaagcccttcttcactctctctctttcttccctttgctcttgtcgagtgcatgttttgctattacctccagcaagttcaacgagtgccaactcaacaacctcaacgcgttggaacccgaccaccgcgttgagtccgaaggtggtcttattgaaacatggaactctcaacaccctgagctgcaatgcgccggtgtcactgtttccaaacgcaccctcaaccgcaacggcctccacttgccatcttactcaccttatccccaaatgatcattgtcgttcaaggtgcgtaaatattagtaagaagtatttatcagcttaacgtgataacaataatagtaatatgaaatatttattaaattttttataattaatctctgctag

SEQ ID NO: 1322 - DNA, 642 bp, Artificial
  Mutations within GlyA3B4 introduced by GmGlyA3B4_T01TALE nuclease
gttcatgtacggttgcagatataaacgaagcatagcttatgtatgaggtgtaacaaaattggaaacaatagccatgcaaggtgaagaatgtcaccaactcagaaacccttcttcattgacgtgtccctcactcactctcctctcttcactataaatcgccactcttcgtgttctccacttcaccaactccttcaaacttattaacactttccttagttcaatatggggaagcccttcttcactctctctcatgctttgctattacctccagcaagttcaacgagtgccaactcaacaacctcaacgcgttggaacccgaccaccgcgttgagtccgaaggtggtcttattgaaacatggaactctcaacacccctgagctgcaatgcgccggtgtcactgtttccaaacgcaccctcaaccgcaacggcctccacttgccatcttactcaccttatcccccaaatgatcattgtcgttcaaggtgcgtaatattagtaagaagtatttatcagcttaacgtgataacaataatagtaatatgaaatatttattaaattttttataattaatctctgctagaaaatttgattaatcatttttagtagaatttgttttttctcaactaggttttaaacaccaca

SEQ ID NO: 1323 - DNA, 622 bp, Artificial
  Mutations within GlyA3B4 introduced by GmGlyA3B4_T01TALE nuclease
gttcatgtacggttgcagatataaacgaagcatagcttatgtatgaggtgtaacaaaattggaaacaatagccatgcaaggtgaagaatgtcaccaactcagaaacccttcttcattgacgtgtccctcactcactctcctctcttcactataaatcgccactcttcgtgttctccacttcaccaactccttcaaacttattaacactttccttagttcaatatggggaagcccttcttcactctctctctttcttccctttgcttgcttgtcgagtgcatgctttgctattacctccagcaagttcaacgagtgccaactcaacaacctcaacgcgttggaacccgaccaccgcgttgagtccgaaggtggtcttattgaaacatggaactctcaacaccctgagctgcaatgcgccggtgtcactgtttccaaacgcaccctcaaccgcaacggcctccacttgccatcttactcaccttatccccaaatgatcattgtcgttcaaggtgcgtaaatattagtaagaagtatttatcagcttaacgtgataacaataatagtaatatgaaatatttattaaattttttataattaatctctgctagaaaatttgattaat

SEQ ID NO: 1324 - DNA, 609 bp, Artificial
  Mutations within GlyA3B4 introduced by GmGlyA3B4_T01TALE nuclease
gttcatgtacggttgcagatataaacgaagcatagcttatgtatgaggtgtaacaaaattggaaacaatagccatgcaaggtgaagaatgtcaccaactcagaaacccttcttcattgacgtgtccctcactcactctcctctcttcactataaatcgccactcttcgtgttctccacttcaccaactccttcaaacttattaacactttccttagttcaatatggggaagcccttcttcactctctctctttcttccctttgcttgtcttgtcgagtgcatgctttgctattacctccagcaagttcaacgagtgccaactcaacaacctcaacgcgttggaacccgaccaccgcgttgagtccgaaggtggtcttattgaaacatggaactctcaacaccctgagctgcaatgcgccggtgtcactgtttccaaacgcaccctcaaccgcaacggcctccacttgccatcttactcaccttatcccccaaatgatcattgtcgttcaaggtgcgtaatattagtaagaagtatttatcagcttaacgtgataacaataatagtaatatgaaatatttattaaattttttataattaatctctgctag

SEQ ID NO: 1325 - DNA, 804 bp, Artificial
  Mutations within GlyA3B4 introduced by GmGlyA3B4_T01TALE nuclease
gttcatgtacggttgcagatataaacgaagcatagcttatgtatgaggtgtaacaaaattggaaacaatagccatgcaaggtgaagaatgtcaccaactcagaaacccttcttcattgacgtgtccctcactcactctcctctcttcactataaatcgccactcttcgtgttctccacttcaccaactccttcaaacttattaacactttccttagttcaatatggggaagcccttcttcactctctctctttcttccctttgcttgctatgaagaagaagctagaggtgggaaatactcaagtcattctcttgaaaaagttgctgcaatgatatgcaacaaaatatcactatacggagtcaaggtaattatagtgttcacatgaacatttctcccatgaaaatatatattttctgactcttgtcgagtgcatgctttgctattacctccagcaagttcaacgagtgccaactcaacaacctcaacgcgttggaacccgaccaccgcgttgagtccgaaggtggtcttattgaaacatggaactctcaacaccctgagctgcaatgcgccggtgtcactgtttccaaacgcaccctcaaaccgcaacggcctccacttgccatcttactcaccttatccccaaatgatcattgtcgttcaaggtgcgtaatattagtaagaagtatttatcagcttaacgtgataacaataatagtaatatgaaatatttattaaattttttataattaatctcttgctagaaaatttgattaatcatttttagtagaaatttgtttttctcaa

SEQ ID NO: 1326 - DNA, 755 bp, Artificial
  Mutations within GlyA3B4 introduced by GmGlyA3B4_T01TALE nuclease
gttcatgtacggttgcagatataaacgaagcatagcttatgtatgaggtgtaacaaaattggaaacaatagccatgcaaggtgaagaatgtcaccaactcagaaacccttcttcattgacgtgtccctcactcactctcctctcttcactataaatcgccactcttcgtgttctccacttcaccaactccttcaaacttattaacactttccttagttcaatatggggaagcccttcttcactctctctctttcttccctttgcttgctactgcttgccaccgccattgctgcgatggccaccacctgctggggggtcaagccgttgggcctggcacagcaccggcaacagcgcctgcaccgtctccagcgcctgctttgctattacctccagcaagttcaacgagtgccactcaacactcacgcgttggaacccgaccaccgcgttgagtccgaaggtggtcttattgaaacatggaactctcaacaccctgagctgcaatgcgccggtgtcactgtttccaaacgcaccctcaaccgcaacggcctccacttgccatcttactcaccttatccccaaaatgatcattgtcgttcaaggtgcgtaatattagtaagaagtatttatcgcttaacgtgataacaataattagtaatatgaaaatatttatttaaatttttttataattaatctcttgctagaaaattttgataatcatttttagtagaatttgtttttctcaactaggttttaaa

SEQ ID NO: 1327 - DNA, 688 bp, Artificial
  Mutations within GlyA3B4 introduced by GmGlyA3B4_T01TALE nuclease
gttcatgtacggttgcagatataaacgaagcatagcttatgtatgaggtgtaacaaaaattggaaacaatagccatgcaaggtgaagaatgtcaccaactcagaaacccttcttcattgacgtgtccctcactcactctcctctcttcactataaatcgccactcttcgtgttctccacttcaccaactccttcaaacttattaacactttccttagttcaatatggggaagcccttcttcactctctctctttttcaatatggtggcctaactacggctacaccacggcttgtcgagtgcatgctttgctattacctccagcaagttcaacgagtgccaactcaacaacctcaacgcgttggaacccgaccaccgcgttgagtccgaaggtggtcttattgaaacatggaactctcaacaccctgagctgcaatgcgccggtgtcactgtttccaaacgcaccctcaaccgcaacggcctccacttgccatcttactcaccttatccccaaatgatcattgtcgttcaaggtgcgtaatattagtaagaagtatttatcagcttaacgtgataacaataatagtaatatgaaaatatttattaaaattttttataattaatctctgctagaaaatttgattaatcatttttagtagaatttgtttttctcaactaggttttaaaaca

SEQ ID NO: 1328 - DNA, 646 bp, Artificial; identical to SEQ ID NO: 564
  Mutations within GlyA3B4 introduced by GmGlyA3B4_T01TALE nuclease

SEQ ID NO: 1329 - DNA, 775 bp, Artificial
  Mutations within GlyA3B4 introduced by GmGlyA3B4_T01TALE nuclease
gttcatgtacggttgcagatataaacgaagcatagcttatgtatgaggtgtaacaaaattggaaacaatagccatgcaaggtgaagaatgtcaccaactcagaaacccttcttcattgacgtgtccctcactcactctcctctcttcactataaatcgccactcttcgtgttctccacttcaccaactccttcaaacttattaacactttccttagttcaatatggggaagcccttcttcactctctctctttcttccctttgcttgctactccggggtcaagttgagcggggcacccgtcagtgcattgcgccatgcatgcactgcctccactgcggtcacgccgccacgttttgcaatcttgagaagttggcctcttgtcgagtgcatgcttttgctattacctccagcaagttcaacgagtgccaactcaacacctcaacgcgttggaacccgaccaccgcgttgagtccgaaggtggtcttattgaaacatggaactctcaacaccctgagctgcaatgcgccggtgtcactgtttccaaacgcaccctcaaccgcaacggcctccacttgccatcttactcaccttatccccaaaatgatcattgtcgttcaaggtgcgtaatattagtaagaagtatttatcgcttaacgtgataacaataatagtaatatgaaaatatttattaaattttttataattaatctctgctagaaaatttgattaatcatttttagtagaatttgtttttctcaactaggtttaaacacca

SEQ ID NO: 1330 - DNA, 667 bp, Artificial
  Mutations within GlyA3B4 introduced by GmGlyA3B4_T01TALE nuclease
gttcatgtacggttgcagatataaacgaagcatagcttatgtatgaggtgtaacaaaattggaaacaatagccatgcaaggtgaagaatgtcaccaactcagaaaccccttcttcattgacgtgtccctcactcactctcctctcttcactataaatcgccactcttcgtgttctccacttcaccaactccttcaaacttattaacactttccttagttcaatatgggggaagcccttcttcactctctctctttcttccctttgcttcgagtgcatgctttgctattacctccagcaagttcaacgagtgccaactcaacaacctcaacgcgttggaacccgaccaccgcgttgagtccgaaggtggtcttattgaaacatggaactctcaacaccctgagctgcaatgcgccggtgtcactgtttccaaacgcaccctcaaccgcaacggcctccacttgccatcttactcaccttatcccccaaatgatcattgtcgttcaaggtgcgtaatattagtaagaagtatttatcagctttaacgtgataacaataatagtaatatgaaatatttattaaattttttataattaatctctgctagaaaatttgattaatcatttttagtagaatttgttttttctcaactaggttttaaaacaccac

SEQ ID NO: 1331 - DNA, 579 bp, Artificial
  Mutations within GlyA3B4 introduced by GmGlyA3B4_T01TALE nuclease
gttcatgtacggttgcagatataaacgaagcatagcttatgtatgaggtgtaacaaaattggaaacaatagccatgcaaggtgaagaatgtcaccaactcagaaacccttcttcattgacgtgtccctcactcactctcctctcttcactataaatcgccactcttcgtgttctccacttcaccaactccttcaaacttattaacactttccttagttcaatatggggaagcccttcttcactctctctctttcttccctttgcttgctactactcttgtcgagtgcatgctttgctattacctccagcaagttcaacgagtgccaactcaacaacctcaacgcgttggaacccgaccaccgcgttgagtccgaaggtggtcttattgaaacatggaactctcaacaccctgagctgcaatgcgccggtgtcactgtttccaaacgcaccctcaaccgcaacggcctccacttgccatcttactcaccttatccccaaatgatcattgtcgttcaagtgcgtatattagtaagaagtatttatcagcttaacgtgatacaataatagtaatatgaaata

SEQ ID NO: 1332 - DNA, 667 bp, Artificial; identical to SEQ ID NO: 836
  Mutations within GlyA3B4 introduced by GmGlyA3B4_T01TALE nuclease

SEQ ID NO: 1333 - DNA, 636 bp, Artificial
  Mutations within GlyA3B4 introduced by GmGlyA3B4_T01TALE nuclease
gttcatgtacggttgcagatataaacgaagcatagcttatgtatgaggtgtaacaaaattggaaacaatagccatgcaaggtgaagaatgtcaccaactcagaaacccttcttcattgacgtgtccctcactcactctcctctcttcactataaatcgccactcttcgtgttctccacttcaccaactccttcaaacttattaacactttccttagttcaatatggggaagcccttcttcactctctctctttcttccctttgcttgcttgtcgagtgcatgctttgctattacctccagcaagttcaacgagtgccaactcaacaacctcaacgcgttggaacccgaccaccgcgttgagtccgaaggtggtcttattgaaacatggaactctcaacaccctgagctgcaatgcgccggtgtcactgtttccaaacgcaccctcaaccgcaacggcctccacttgccatcttactcaccttatccccaaatgatcattgtcgttcaaggtgcgtaaatattagtaagaagtatttatcagcttaacgtgataacaataatagtaatatgaaatatttattaaattttttataattaatctctgctagaaaatttgattaatcatttttagtagaa

SEQ ID NO: 1334 - DNA, 613 bp, Artificial
  Mutations within GlyA3B4 introduced by GmGlyA3B4_T01TALE nuclease
gttcatgtacggttgcagatataaacgaagcatagcttatgtatgaggtgtaacaaaattggaaacaatagccatgcaaggtgaagaatgtcaccaactcagaaacccttcttcattgacgtgtccctcactcactctcctctcttcactataaatcgccactcttcgtgttctccacttcaccaactccttcaaacttattaacactttccttagttcaatatggggaagcccttcttcactctctctctttctttccttgtcgagtgcatgctttgctattacctccagcaagttcaacgagtgccaactcaacaacctcacgcgttggaacccgaccaccgcgttgagtccgaaggtggtcttattgaaacatggaactctcaacaccctgagctgcaatgcgccggtgtcactgtttccaaacgcaccctcaaccgcaacggcctccacttgccatcttactcaccttatcccccaaatgatcattgtcgttcaaggtgcgtaatattagtaagaagtatttatcagcttaacgtgataacaataatagtaatatgaaatatttattaaattttttataattaatctctgctagaaaatttgattaatc

SEQ ID NO: 1335 - DNA, 605 bp, Artificial
  Mutations within GlyA3B4 introduced by GmGlyA3B4_T01TALE nuclease
gttcatgtacggttgcagatataaacgaagcatagcttatgtatgaggtgtaacaaaattggaaacaatagccatgcaaggtgaagaatgtcaccaactcagaaacccttcttcattgacgtgtccctcactcactctcctctcttcactataaatcgccactcttcgtgttctccacttcaccaactccttcaaacttattaacactttccttagttcaatatggggaagcccttcttcactctctctctttcttccctttgcttcttgtcgagtgcatgctttgctattacctccagcaagttcaacgagtgccaactcaacaacctcaacgcgttggaacccgaccaccgcgttgagtccgaaggtggtcttattgaaacatggaactctcaacaccctgagctgcaatgcgccggtgtcactgtttccaaacgcaccctcaaccgcaacggcctccacttgccatcttactcaccttatccccaaatgatcttgtcgttcaaggtgcgtaatattagtaagaagtatttatcagcttaacgtgataacaataatagtaatatgaaatatttattaaattttttataattaatctctgctag

SEQ ID NO: 1336 - DNA, 655 bp, Artificial
  Mutations within GlyA3B4 introduced by GmGlyA3B4_T01TALE nuclease
gttcatgtacggttgcagatataaacgaagcatagcttatgtatgaggtgtaacaaaattggaaacaatagccatgcaaggtgaagaatgtcaccaactcagaaacccttcttcattgacgtgtccctcactcactctcctctcttcactataaatcgccactcttcgtgttctccacttcaccaactccttcaaacttattaacactttccttagttcaatatggggaagcccttcttcactctctctctttcttccctttgcttgtcgagtgcatgctttgctattacctccagcaagttcaacgagtgccaactcaacaacctcaacgcgttggaacccgaccaccgcgttgagtccgaaggtggtcttattgaaacatggaactctcaacaccctgagctgcaatgcgccggtgtcactgtttccaaacgcaccctcaaccgcaacggcctccacttgccatcttactcaccttatccccaaatgatcattgtcgttcaaggtgcgtaatattagtaagaagtatttatcagcttaacgtgataacaataatagtaatatgaaatatttattaaattttttataattaatctctgctagaaaatttgattaatcatttttagtagaatttgttttttctcaactaggtttt

SEQ ID NO: 1337 - DNA, 443 bp, Artificial
  Mutations within GlyA3B4 introduced by GmGlyA3B4_T01TALE nuclease
gttcatgtacggttgcagatataaacgaagcatagcttatgtatgaggtgtaacaaaagttggaaacaatagccatgcaaggtgaagaatgtcaccaactcagaaacccttcttcattgacgtgtccctcactcactctcctctcttcactataaatcgccactcttcgtgttctccacttcaccaactccttcaaacttattaacactttccttagttcaatatggggaagcccttcttcactctctctctttcttccctttgcttgcttgtcgagtgcatgctttgctattacctccagcaagttcaacgagtgccaactcaacaacctcaacgcgttggaacccgaccaccgcgttgagtccgaaggtggtcttattgaaacatggaactctcaacacctgagctgcaatgcgccggtgtcactgtttccaaacgcaccc

SEQ ID NO: 1338 - DNA, 598 bp, Artificial; identical to SEQ ID NO: 784
  Mutations within GlyA3B4 introduced by GmGlyA3B4_T01TALE nuclease

SEQ ID NO: 1339 - DNA, 635 bp, Artificial
  Mutations within GlyA3B4 introduced by GmGlyA3B4_T01TALE nuclease
  misc_feature (516): n is a or c or t or g
gttcatgtacggttgcagatataaacgaagcatagcttatgtatgaggtgtaacaaaattggaaacaatagccatgcaaggtgaagaatgtcaccaactcagaaacccttcttcattgacgtgtccctcactcactctcctctcttcactataaatcgccactcttcgtgttctccacttcaccaactccttcaaacttattaacactttccttagttcaatatggggaagcccttcttcactctctctctttcttccctttgcttgcttgtcgagtgcatgctttgctattacctccagcaagttcaacgagtgccaactcaacaacctcaacgcgttggaacccgaccaccgcgttgagtccgaaggtggtcttattgaaacatggaactctcaacaccctgagctgcaatgcgccggtgtcactgtttccaaacgcaccctcaaccgcaacggcctccacttgccatcttactcaccttatcccccaaatgatcattgtcgttcaaaggtgcntaaatattagtaagaagtatttatcagcttaacgtgataacaataatagtaatatgaaatatttattaaatttttataattaatctctgctagaaaaatttgattaatctttttagtag

SEQ ID NO: 1340 - DNA, 732 bp, Artificial
  Mutations within GlyA3B4 introduced by GmGlyA3B4_T01TALE nuclease
gttcatgtacggttgcagatataaacgaagcatagcttatgtatgaggtgtaacaaaattggaaacaatagccatgcaaggtgaagaatgtcaccaactcagaaacccttcttcattgacgtgtccctcactcactctcctctcttcactataaatcgccactcttcgtgttctccacttcaccaactccttcaaacttattaacactttccttagttcaatatggggaagcccttcttcactctctctctttcttccctttgcttgcttgccgccatcgtggctggcgatggccaccacctgctccgggtcaagccgtgggcctggcacagcaccggcaacagcctcttgtcgagtgcatgctttgctattacctccagcaagttcaacgagtgccaactcaacaacctcaacgcgttggaacccgaccaccgcgttgagtccgaaggtggtcttattgaaacatggaactctcaacaccctgagctgcaaatgcgccggtgtcactgtttccaaacgcaccctcaaccgcaacggcctccacttgccatcttactcaccttatccccaaatgatcattgtcgttcaaggtgcgtaatattagtaagaagtatttatcagcttaacgtgataacaataatagtaatatgaaatatttattaaaattttttataattaatctctgctagaaaaatttgattaatcatttttagtagaatttgtttttctcaa

SEQ ID NO: 1341 - DNA, 635 bp, Artificial
  Mutations within GlyA3B4 introduced by GmGlyA3B4_T01TALE nuclease
gttcatgtacggttgcagatataaacgaagcatagcttatgtatgaggtgtaacaaaattggaaacaatagccatgcaaggtgaagaatgtcaccaactcagaaacccttcttcattgacgtgtccctcactcactctcctctcttcactataaatcgccactcttcgtgttctccacttcaccaactccttcaaacttattaacactttccttagttcaatatggggaagcccttcttcactctctctctttcttccctttgcttgcttgtcgagtgcatgctttgctattacctccagcaagttcaacgagtgccaactcaacaacctcaacgcgttggaacccgaccaccgcgttgagtccgaaggtggtcttattgaaacatggaactctcaacaccctgagctgcaatgcgccggtgtcactgtttccaaacgcaccctcaaccgcaacggcctccacttgccatcttactcaccttatcccccaaatgatcattgtcgttcaaggtgcgtaatattagtaagaagtatttatcagcttaacgtgataacaataatagtaatatgaaatatttattaaattttttataattaatctctgctagaaaatttgattaatctttttagtagaa

SEQ ID NO: 1342 - DNA, 764 bp, Artificial
  Mutations within GlyA3B4 introduced by GmGlyA3B4_T01TALE nuclease
gttcatgtacggttgcagatataaacgaagcatagcttatgtatgaggtgtaacaaaattggaaacaatagccatgcaaggtgaagaatgtcaccaactcagaaacccttcttcattgacgtgtccctcactcactctcctctcttcactataaatcgccactcttcgtgttctccacttcaccaactccttcaaacttattaacactttccttagttcaatatggggaagcccttcttcactctctctctttcttccctttgcttgctagcagcggctgttgccggtgctgtgccaggcccacggcttgaccccggagcaggtggtggccatcgccagccacgatggcggcaagcaggcacactcttgtcgagtgcatgctttgctattacctccagcaagttcaacgagtgccaactcaacacctcaacgcgttggaacccgaccaccgcgttgagtccgaaggtggtcttattgaaacatggaactctcaacaccctgagctgcaatgcgccggtgtcactgtttccaaacgcaccctcaaccgcaacggcctccacttgccatcttactcaccttatccccaaaatgatcattgtcgttcaaggtgcgtaatattagtaagaagtatttatcgcttaacgtgataacaataatagtaatatgaaaatatttattaaattttttataattaatctctgctagaaaatttgattaatcaatttttagtagaatttgtttttctcaactaggtttaaacacca

SEQ ID NO: 1343 - DNA, 791 bp, Artificial
  Mutations within GlyA3B4 introduced by GmGlyA3B4_T01TALE nuclease
gttcatgtacggttgcagatataaacgaagcatagcttatgtatgaggtgtaacaaaattggaaacaatagccatgcaaggtgaagaatgtcaccaactcagaaacccttcttcattgacgtgtccctcactcactctcctctcttcactataaatcgccactcttcgtgttctccacttcaccaactccttcaaacttattaacactttccttagttcaatatggggaagcccttcttcactctctctctttcttccctttgcttgccaacttacttctgacaacgatcggaggaccgaaggagctaaccgcttttttgcacaacatgggggatcatgtaactcgccttgatcgttgggaaccggagctgaatgaagccataccaaactcttgtcgagtgcatgctttgctattacctccagcaagttcaacgagtgccaactcaacaacctcaacgcgttggaacccgaccaccgcgttgagtccgaaggtggtcttattgaaacatggaactctcaacaccctgagctgcaatgcgccggtgtcactgtttccaaacgcaccctcaaccgcaacggcctccacttgccatcttactcaccttatccccaaaatgatcattcgtcgttcaaggtgcgtaatcattagtaagaagtatttatcagcttaacgtgataacaataatagtaatatgaaatatttatttaaattttttataaattaatctctgctagaaaattttgattaaattcatttttagtagaatttgttttttctcaaactaggtttt

SEQ ID NO: 1344 - DNA, 653 bp, Artificial; identical to SEQ ID NO: 864
  Mutations within GlyA3B4 introduced by GmGlyA3B4_T01TALE nuclease

SEQ ID NO: 1345 - DNA, 623 bp, Artificial
  Mutations within GlyA3B4 introduced by GmGlyA3B4_T01TALE nuclease
gttcatgtacggttgcagatataaacgaagcatagcttatgtatgaggtgtaacaaaattggaaacaatagccatgcaaggtgaagaatgtcaccaactcagaaacccttcttcattgacgtgtccctcactcactctcctctcttcactataaatcgccactcttcgtgttctccacttcaccaactccttcaaacttattaacactttccttagttcaatatggggaagcccttcttcactctctctctttcttccctttgcttgcttgtcgagtgcatgctttgctattacctccagcaagtttcaacgagtgccaactcaacaacctcaacgcgttggaacccgaccaccgcgttgagtccgaaggtggtcttattgaaacatggaactctcaacaccctgagctgcaatgcgccggtgtcactgtttccaaacgcaccctcaaccgcaacggcctccacttgccatcttactcaccttatccccaaatgatcttgtcgttcaaggtgcgtaaatattagtaagaagtatttatcagcttaacgtgataacaataatagtaatatgaaatatttattaaattttttataattaatctctgctagaaaatttgattaatc

SEQ ID NO: 1346 - DNA, 745 bp, Artificial
  Mutations within GlyA3B4 introduced by GmGlyA3B4_T01TALE nuclease
  misc_feature (639): n is a or c or t or g
gttcatgtacggttgcagatataaacgaagcatagcttatgtatgaggtgtaacaaaattggaaacaatagccatgcaaggtgaagaatgtcaccaactcagaaacccttcttcattgacgtgtccctcactcactctcctctcttcactataaatcgccactcttcgtgttctccacttcaccaactccttcaaacttattaacactttccttagttcaatatggggaagcccttcttcactctctctctttcttccctttgcttgcttacgccagctggcgaaaggggatgtgctgcaaggcgattaagttgggtaacgccagggttttccccagtcacgacgtttgtaaaaacgacggcccagtgaattcgagctcggtacctcgcgaatgcatctagatccaatgatcatgagcggagaattaagggagtcacgttatgacccccgccgatgacgcgggacaagccgtttacgtttggaactgacagaaccgcaacgttgtcgagtgcatgctttgctatttacctccagcaagttcaacgagtgccaactcaacaacctcaacgcgttggaacccgaccaccgcgttgagtccgaaggtggtcttattgaaacatggaactctcaacaccctgngctgcaatgcgccggtgtcactgtttccaaacgcaccctcaaccgcaacggcctccacttgccatcttactcaccttatccccaaatgatcattgtcgttcaaggt

SEQ ID NO: 1347 - DNA, 654 bp, Artificial
  Mutations within GlyA3B4 introduced by GmGlyA3B4_T01TALE nuclease
gttcatgtacggttgcagatataaacgaagcatagcttatgtatgaggtgtaacaaaattggaaacaatagccatgcaaggtgaagaatgtcaccaactcagaaacccttcttcattgacgtgtccctcactcactctcctctcttcactctaaatcgccactcttcgtgttctccacttcaccaactccttcaaacttattaacactttccttagttcaatatggggaagcccttcttcactctctctctttcttccctttgcttgcttggtggcgatggccaccacctgctccggggtcaagccgtgggcctggcacagcaccggcaacagccgctggaccgtctccagcgcctgcttgccaccaatattgctggcgatggccaccacctgctccggggtcaagccgtgggcctggcacagcaccggcaacagccgctcttgtcgagtgcatgctttgctattacctccagcaagttcaacgagtgccaactcaacacctcacgcgttggaacccgaccaccgcgttgagtccgaaggtggtcttattgaaacatggaactctcaacaccctgagctgcaatgcgccggtgtcactgtttccaaacgcaccctcaaccgcaacggcctccacttgccatcttactcacctta

SEQ ID NO: 1348 - DNA, 512 bp, Artificial
  Mutations within GlyA3B4 introduced by GmGlyA3B4_T01TALE nuclease
gttcatgtacggttgcagatataaacgaagcatagcttatgtatgaggtgtaacaaaattggaaacaatagccatgcaaggtgaagaatgtcaccaactcagaaacccttcttcattgtcgagtgcatgctttgctattacctccagcaagttcaacgagtgccaactcaacaacctcaacgcgttggaacccgaccaccgcgttgagtccgaaggtggtcttattgaaacatggaactctcaacaccctgagctacaatgcgccggtgtcactgtttccaaacgcaccctcaaccgcaacggcctccacttgccatcttactcaccttatccccaaatgatcattgtcgttcaaggtgcgtaatattagtaagaagtatttatcagcttaacgtgataacaataatagtaatatgaaatatttattaaattttttataattaatctctgctagaaaatttgattaatcattttttagtagaatttgttttttctcaactaggttttaaaca

SEQ ID NO: 1349 - DNA, 633 bp, Artificial
  Mutations within GlyA3B4 introduced by GmGlyA3B4_T01TALE nuclease
gttcatgtacggttgcagatataaacgaagcatagcttatgtatgaggtgtaacaaaattggaaacaatagccatgcaaggtgaagaatgtcaccaactcagaaacccttcttcattgacgtgtccctcactcactctcctctcttcactataaatcgccactcttcgtgttctccacttcaccaactccttcaaacttattaacactttccttagttcaatatggggaagcccttcttgtcgagtgcatgctttgctattacctccagcaagttcaacgagtgccaactcaacaacctcaacgcgttggaacccgaccaccgcgttgagtccgaaggtggtcttattgaaacatggaactctcaacaccctgagctgcaatgcgccggtgtcactgtttccaaacgcaccctcaaccgcaacggcctccacttgccatcttactcaccttatccccaaatgatcattgtcgttcaaggtgcgtaatattagtaagaagtatttatcagcttaacgtgataacaataatagtaatatgaaatatttattaattttttataattaatctctgctagaaaatttgattaatcatttttagtagaatttgtttttctcaactaggtttttaaaaca

SEQ ID NO: 1350 - DNA, 647 bp, Artificial
  Mutations within GlyA3B4 introduced by GmGlyA3B4_T01TALE nuclease
gttcatgtacggttgcagatataaacgaagcatagcttatgtatgagttgtaacaaaattggaaacaatagccatgcaaggtgaagaatgtcaccaactcagaaacccttcttcattgacgtgtccctcactcactctcctctcttcactataaatcgccactcttcgtgttctccacttcaccaactccttcaaacttattaacactttccttagttcaatatggggaagcccttcttcactctctctctttcttccctttgcttgctacactcttgtcgagtgcatgctttgctattacctccagcaagttcaacgagtgccaactcaacaacctcaacgcgttggaacccgaccaccgcgttgagtccgaaggtggtcttattgaaacatggaactctcaacaccctgagctgcaatgcgccggtgtcactgtttccaaacgcaccctcaaccgcaacggcctccacttgccatcttactcaccttatccccaaatgatcattgtcgttcaaggtgcgtaatattagtaagagtatttatcagcttaacgtgataacaataatagtaatatgaaatatttattaaatttttataattaatctctgctagaaaatttgattaatcattttagtgaatttgttttc

SEQ ID NO: 1351 - DNA, 665 bp, Artificial
  Mutations within GlyA3B4 introduced by GmGlyA3B4_T01TALE nuclease
  misc_feature (619); (661): n is a or c or t or g
gttcatgtacggttgcagatataaacgaagcatagcttatgtatgaggtgtaacaaaattggaaacaatagccatgcaaggtgaagaatgtcaccaactcagaaacccttcttcattgacgtgtccctcactcactctcctctcttcactataaatcgccactcttcgtgttctccacttcaccaactccttcaaacttattaacactttccttagttcaatatggggaagcccttcttcactctctctctttcttccctttgcttgctagcagcggctgttgccggtgctgtgccaggcccacggcttgaccccggagcaggtggtggccatcgccagccacgatggcggcaagcaggcgcactcttgtcgagtgcatgctttgctattacctccagcaagttcaacgagtgccaactcaacaacctcaacgcgttggaacccgaccaccgcgttgagtccgaaggtggtcttattgaaacatggaactctcaacaccctgagctgcaatgcgccggtgtcactgttttccaaacgcaccctcaaccgcaacgggcctccacttgccatcttactcaccttatccccaaatgatcattgtcgttcaaggtgcgtaatnttagtaagaagtatttatcagcttaacgtgataacaataatngtaa

SEQ ID NO: 1352 - DNA, 540 bp, Artificial
  Mutations within GlyA3B4 introduced by GmGlyA3B4_T01TALE nuclease
gttcatgtacggttgcagatataaacgaagcatagcttatgtatgaggtgtaacaaaattggaaacaatagccatgcaaggtgaagaatgtcaccaactcagaaacccttcttcattgacgtgtccctcactcactctcctctcttcgagtgcatgctttgctattacctccagcaagttcaacgagtgccaactcaacaacctcaacgcgttggaacccgaccaccgcgttgagtccgaaggtggtcttattgaaacatggaactctcaacaccctgagctgcaatgcgccggtgtcactgtttccaaacgcaccctcaaccgcaacggcctccacttgccatcttactcaccttatccccaaatgatcattgtcgttcaaggtgcgtaatattagtaagaagtattttatcagcttaacgtgataacaataatagtaatatgaaatattttattaaatttttttataattaatctctgctagaaaatttgattaatcatttttagtagaatttgtttttctcaactaggttttaaaca

SEQ ID NO: 1353 - DNA, 672 bp, Artificial
  Mutations within GlyA3B4 introduced by GmGlyA3B4_T01TALE nuclease
gttcatgtacggttgcagatataaacgaagcatagcttatgtatgaggtgtaacaaaattggaaacaatagccatgcaaggtgaagaatgtcaccaactcagaaacccttcttcattgacgtgtccctcactcactctcctctcttcactataaatcgccactcttcgtgttctccacttcaccaactccttcaaacttattaacactttccttagttcaatatggggaagcccttcttcactctctctctttcttccctttgcttgcttgtcgagtgcatgctttgctattacctccagcaagttcaacgagtgccaactcaacaacctcaacgcgttggaacccgaccaccgcgttgagtccgaaggtggtcttattgaaacatggaactctcaacaccctgagctgcaatgcgcccggtgtcactgtttccaaacgcaccctcaaccgcaacggcctccacttgccatcttactcaccttatcccccaaatgatcattgtcgttcaaggtgcgtaatattagtaagaagtatttatcagcttaacgtgataacaataatagtaatatgaaatatttattaaattttttataattaatctctgctagaaaatttgattaatcatttttagttagaatttgttttttctcaactaggttttaaacaccaca

SEQ ID NO: 1354 - DNA, 648 bp, Artificial
  Mutations within GlyA3B4 introduced by GmGlyA3B4_T01TALE nuclease
gttcatgtacggttgcagatataaacgaagcatagcttatgtatgaggtgtaacaaaattggaaacaatagccatgcaaggtgaagaatgtcaccaactcagaaacccttcttcattgacgtgtccctcactcactctcctctcttcactataaatcgccactcttcgtgttctccacttcaccaactccttcaaacttattaacactttccttagttcaatatggggaagcccttcttcactctctctctttcttccctttgctattacctccagcaagttcaacgagtgccaactcaacaacctcaacgcgttggaacccgaccaccgcgttgagtccgaaggtggtcttattgaaacatggaactctcaacacccctgagctgcaatgcgccggtgtcactgttttccaaacgcaccctcaaccgcaacggcctccacttgccatcttactcaccttatcccccaaatgatcattgtcgttcaaggtgcgtaatattagtaagaagtatttatcagcttaacgtgataacaataatagtaatatgaaatatttattaaattttttataattaatctctgctagaaaatttgattaatcatttttagtagaatttgttttttctcaactaggttttaaacaccaca

SEQ ID NO: 1355 - DNA, 655 bp, Artificial
  Mutations within GlyA3B4 introduced by GmGlyA3B4_T01TALE nuclease
gttcatgtacggttgcagatataaacgaagcatagcttatgtatgaggtgtaacaaaattggaaacaatagccatgcaaggtgaagaatgtcaccaactcagaaacccttcttcattgacgtgtccctcactcactctcctctcttcactataaatcgccactcttcgtgttctccacttcaccaactccttcaaacttattaacactttccttagttcaatatggggaagcccttcttcactctctctctttcttccctttgcttgcttgtcgagtgcatgctttgctattacctccagcaagttcaacgagtgccaactcaacaacctcaacgcgttggaacccgaccaccgcgttgagtccgaaggtggtcttattgaaacatggaactctcaacaccctgagctgcaatgcgccggtgtcactgtttccaaacgcaccctcaaccgcaacggcctccacttgccatcttactcaccttatcccccaaatgatcattgtcgttcaaggtgcgtaaatattagtaagaagtatttatcagcttaacgtgataacaataatagtaatatgaaatatttattaaattttttataattaatctctgctagaaaatttgattaatctttttagtagaattgttttttctcaactagg

SEQ ID NO: 1356 - DNA, 537 bp, Artificial
  Mutations within GlyA3B4 introduced by GmGlyA3B4_T01TALE nuclease
gttcatgtacggttgcagatataaacgaagcatagcttatgtatgaggtgtaacaaaattggaaacaatagccatgcaaggtgaagaatgtcaccaactcagaaacccttcttcattgacgtgtccctcactcactctcctctcttcgagtgcatgctttgctattacctccagcaagttcaacgagtgccaactcaacaacctcaacgcgttggaacccgaccaccgcgttgagtccgaaggtggtcttattgaaacatggaactctcaacaccctgagctgcaatgcgccggtgtcactgtttccaaacgcaccctcaaccgcaacggcctccacttgccatcttactcaccttatccccaaatgatcattgtcgttcaaggtgcgtaatattagtaagaagtatttatcagcttaacgtgataacaataatagtaatatgaaatatttattaaattttttataattaatctctgctagaaaatttgattaatcatttttagtagaatttgtttttctcaactaggttttaaaca

SEQ ID NO: 1357 - DNA, 509 bp, Artificial
  Mutations within GlyA3B4 introduced by GmGlyA3B4_T01TALE nuclease
gttcatgtacggttgcagatataaacgaagcatagcttatgtatgaggtgtaacaaaattggaaacaatagccatgcaaggtgaagaatgtcaccaactcagaaacccttcttcattgacgtgtccctcactcactctcctctcttcgagtgcatgctttgctattacctccagcaagttcaacgagtgccaactcaacaacctcaacgcgttggaacccgaccaccgcgttgagtccgaaggtggtcttattgaaacatggaactctcaacaccctgagctgcaatgcgccggtgtcactgtttccaaacgcaccctcaaccgcaacggcctccacttgccatcttactcaccttatccccaaatgatcattgtcgttcaaggtgcgtaatattagtaagaagtatttatcagcttaacgtgataacaataatagtaatatgaaatatttattaaattttttataattaatctctgctagaaaatttgattaatcatttttagtagaa

SEQ ID NO: 1358 - DNA, 707 bp, Artificial
  Mutations within GlyA3B4 introduced by GmGlyA3B4_T01TALE nuclease
  misc_feature (624): n is a or c or t or g
gttcatgtacggttgcagatataaacgaagcatagcttatgtatgaggtgtaacaaaattggaaacaatagccatgcaaggtgaagaatgtcaccaactcagaaaccccttcttcattgacgtgtccctcactcactctcctctcttcactataaatcgccactcttcgtgttctccacttcaccaactccttcaaacttattaacactttccttagttcaatatggggaagcccttcttcactctctctctttcttccctttgcttgctacttccccggcagtgctttcatttcagcgtacaatcgccacattgctgcacatccggtaagcgataacgctggcagcaagtgcggcgcaccagcaggccgtcgcgcagtaccacggtacgcccagagtggattatcttcaccgttcgtgagcgtttttctcaaaaaagagggcatggcgcagcgattcaacagtagcctcgccgagcagttgcttcatctcgagtgcatgctttgctatttacctccagcaagttcaacgagtgccaactcaacaacctcaacgcgttggaacccgaccaccgcgttgagtccgaaggtggtcttattgaaacatggaactctcaacaccctgngctgcaatgcgccggtgtcactgtttccaaacgcaccctcaaccgcaacggcctccacttgccatcttactcaccttatcccc

SEQ ID NO: 1359 - DNA, 658 bp, Artificial
  Mutations within GlyA3B4 introduced by GmGlyA3B4_T01TALE nuclease
gttcatgtacggttgcagatataaacgaagcatagcttatgtatgaggtgtaacaaaattggaaacaatagccatgcaaggtgaagaatgtcaccaactcagaaaccccttcttcattgacgtgtccctcactcactctcctctcttcactataaatcgccactcttcgtgttctccacttcaccaactccttcaaacttattaacactttccttagttcaatatggggaagcccttcttcactctctctctttcttccctttgcttgtcgagtgcatgctttgctattacctccagcaagttcaacgagtgccaactcaacaacctcaacgcgttggaacccgaccaccgcgttgagtccgaaggtggtcttattgaaacatggaactctcaacaccctgagctgcaatgcgccggtgtcactgtttccaaacgcaccctcaaccgcaacggcctccacttgccatcttactcaccttatcccccaaatgatcattgtcgttcaaggtgcgtaaatattagtaagaagtatttatcagcttaacgtgataacaataatagtaatatgaaatatttattaaattttttataattaatctctgctagaaaatttgattaatcatttttagtagaatttgttttttctcaactaggtttt

SEQ ID NO: 1360 - DNA, 651 bp, Artificial
  Mutations within GlyA3B4 introduced by GmGlyA3B4_T01TALE nuclease
gttcatgtacggttgcagatataaacgaagcatagcttatgtatgaggtgtaacaaaattggaaacaatagccatgcaaggtgaagaatgtcaccaactcagaaacccttcttcattgacgtgtccctcactcactctcctctcttcactataaatcgccactcttcgtgttctccacttcaccaactccttcaaacttattaacactttccttagttcaatatggggaagcccttcttcactctctctctttcttccctttgctttgtcgagtgcatgctttgctattacctccagcaagtttcaacgagtgccaactcaacaacctcaacgcgttggaacccgaccaccgcgttgagtccgaaggtggtcttattgaaacatggaactctcaacaccctgagctgcaatgcgccggtgtcactgtttccaaacgcaccctcaaccgcaacggcctccacttgccatcttactcaccttatccccaaatgatcattgtcgttcaaggtgcgtaatattagtaagaagtatttatcagcttaacgtgataacaataatagtaatatgaaatatttattaaattttttataattaatctctgctagaaaatttgattaatcatttttagtagaatttgttttttctcaacta

SEQ ID NO: 1361 - DNA, 613 bp, Artificial
  Mutations within GlyA3B4 introduced by GmGlyA3B4_T01TALE nuclease
gttcatgtacggttgcagatataaacgaagcatagcttatgtatgaggtgtaacaaaattggaaacaatagccatgcaaggtgaagaatgtcaccaactcagaaacccttcttcattgacgtgtccctcactcactctcctctcttcactataaatcgccactcttcgtgttctccacttcaccaactccttcaaacttattaacactttccttagttcaatatggggaagcccttcttcactctctctctttcttccctttgcttgctactactcttgtcgagtgcatgctttgctattacctccagcaagttcaacgagtgccaactcaacaacctcaacgcgttggaacccgaccaccgcgttgagtccgaaggtggtcttattgaaacatggaactctcaacaccctgagctgcaatgcgccggtgtcactgtttccaaacgcaccctcaaccgcaacggcctccacttgccatcttactcaccttatccccaaatgatcattgtcgttcaaggtgcgtaatattagtaagaagtatttatcagcttaacgtgatacaataatagtaatatgaaatattattaaattttttataattaatctctgctag

SEQ ID NO: 1362 - DNA, 541 bp, Artificial
  Mutations within GlyA3B4 introduced by GmGlyA3B4_T01TALE nuclease
gttcatgtacggttgcagatataaacgaagcatagcttatgtatgaggtgtaacaaaattggaaacaatagccatgcaaggtgaagaatgtcaccaactcagaaacccttcttcattgacgtgtccctcactcactctcctctcttcactataaatcgccactcttcgtgttctccacttcacctccagcaagttcaacgagtgccaactcaacaacctcaacgcgttggaacccgaccaccgcgttgagtccgaaggtggtcttattgaaacatggaactctcaacaccctgagctgcaatgcgccggtgtcactgttttccaaacgcaccctcaaccgcaacggcctccacttgccatcttactcaccttatcccccaaatgatcattgtcgttcaaggtgcgtaatattagtaagaagtatttatcagcttaacgtgataacaataatagtaatatgaaatatttattaaattttttataattaatctctgctagaaaatttgattaatcatttttagtagaatttgtttttctcaac

SEQ ID NO: 1363 - DNA, 666 bp, Artificial
  Mutations within GlyA3B4 introduced by GmGlyA3B4_T01TALE nuclease
gttcatgtacggttgcagatataaacgaagcatagcttatgtatgaggtgtaacaaaattggaaacaatagccatgcaaggtgaagaatgtcaccaactcagaaacccttcttcattgacgtgtccctcactcactctcctctcttcactataaatcgccactcttcgtgttctccacttcaccaactccttcaaacttattaacactttccttagttcaatatggggaagcccttcttcactctctctctttcttccctttgcttgctatgtcgtagtgcatgctttgctattacctccagcaagttcaacgagtgccaactcaacaacctcaacgcgttggaacccgaccaccgcgttgagtccgaaggtggtcttattgaaacatggaactctcaacaccctgagctgcaatgcgccggtgtcactgtttccaaacgcaccctcaaccgcaacggcctccacttgccatcttactcaccttatccccaaatgatcattgtcgttcaaggtgcgtaatattagtaagagtatttatcagcttaacgtgataacaatatagtaatatgaaatatttattaaatttttataattaatctctgctagaaaatttgattaatcattttagtagaatttgtttttctcaactaggtttttaaaacacca

SEQ ID NO: 1364 - DNA, 645 bp, Artificial
  Mutations within GlyA3B4 introduced by GmGlyA3B4_T01TALE nuclease
gttcatgtacggttgcagatataaacgaagcatagcttatgtatgaggtgtaacaaaattggaaacaatagccatgcaaggtgaagaatgtcaccaactcagaaacccttcttcattgacgtgtccctcactcactctccatctcttcactataaatcgccactcttcgtgttctccacttcaccaactccttcaaacttattaacactttccttagttcaatatggggaagcccttcttcactctctctctttcttccctttgcttgctatttgctattacctccagcaagttcaacgagtgccaactcaacaacctcaacgcgttggaacccgaccaccgcgttgagtccgaaggtggtcttattgaaacatggaactctcaacacccctgagctgcaatgcgccgggtgtcactgtttccaacgcaccctcaaccgcaacggcctccacttgccatcttactcaccttatcccccaaatgatcattgtcgttcaaggtgcgtaatattagtaagaagtatttatcagcttaacgtgataacaataatagtaatatgaaatatttattaaattttttataattaatctctgctagaaaatttgattaatcattttttagtagaatttgtttttttctcaacta

SEQ ID NO: 1365 - DNA, 650 bp, Artificial
  Mutations within GlyA3B4 introduced by GmGlyA3B4_T01TALE nuclease
gttcatgtacggttgcagatataaacgaagcatagcttatgtatgaggtgtaacaaaattggaaacaatagccatgcaaggtgaagaatgtcaccaactcagaaacccttcttcattgacgtgtccctcactcactctcctctcttcactataaatcgccactcttcgtgttctccacttcaccaactccttcaaacttattaacactttccttagttcaatatggggaagcccttcttcactctctctctttcttccttgtcgagtgcatgctttgctattacctccagcaagtttcaacgagtgccaactcaacaacctcaacgcgttggaacccgaccaccgcgttgagtccgaaggtggtcttattgaaacatggaactctcaacaccctgagctgcaatgcgccggtgtcactgtttccaaacgcaccctcaaccgcaacggcctccacttgccatcttactcaccttatcccccaaatgatcattgtcgttcaaggtgcgtaatattagtaagaagtatttatcagcttaacgtgataacaataatagtaatatgaaatatttattaaattttttataattaatctctgctagaaaatttgattaatctttttagtagaatttgttttttctcaactaggtttt

SEQ ID NO: 1366 - DNA, 658 bp, Artificial
  Mutations within GlyA3B4 introduced by GmGlyA3B4_T01TALE nuclease
  misc_feature (281): n is a or c or t or g
gttcatgtacggttgcagatataaacgaagcatagcttatgtatgaggtgtaacaaaattggaaacaatagccatgcaaggtgaagaatgtcaccaactcagaaacccttcttcattgacgtgtccctcactcactctcctctcttcactataaatcgccactcttcgtgttctccacttcaccaactccttcaaacttattaacactttccttagttcaatatggggaagcccttcttcactctctctctttcttccctttgcttgtctacctctacggntgctttgctattacctccagcaagttcaacgagtgccaactcaacaacctcaacgcgttggaacccgaccaccgcgttgagtccgaaggtggtcttattgaaacatggaactctcaacaccctgagctgcaatgcgccggtgtcactgtttccaaacgcaccctcaaccgcaacggcctccacttgccatcttactcaccttatccccaaatgatcattgtcgttcaaggtgcgtaatattagtaagagtatttatcagcttaacgtgataacaatatagtaatatgaaatatttattaaatttttataattaatctctgctagaaaatttgattaatcattttagtagaatttgttttctcaactaggttttaaaa

SEQ ID NO: 1367 - DNA, 735 bp, Artificial
  Mutations within GlyA3B4 introduced by GmGlyA3B4_T01TALE nuclease
  misc_feature (693): n is a or c or t or g
gttcatgtacggttgcagatataaacgaagcatagcttatgtatgaggtgtaacaaaattggaaacaatagccatgcaaggtgaagaatgtcaccaactcagaaacccttcttcattgacgtgtccctcactcactctcctctcttcactataaatcgccactcttcgtgttctccacttcaccaactccttcaaacttattaacactttccttagttcaatatggggaagcccttcttcactctctctctttcttccctttgctcatcgccagcaatggcggtggcaagcaggcgctggagacggtccagcggctgttgccggtgctgtgccaggcccacggcttgaccccctgtcgagtgcatgctttgctattacctccagcaagttcaacgagtgccaactcaacaacctcaacgcgttggaacccgaccaccgcgttgagtccgaaggtggtcttattgaaacatggaactctcaacaccctgagctgcaatgcgccggtgtcactgtttccaaacgcaccctcaaccgcaatcggcctccacttgccaatcttactcacctttatccccaaatgatcattgtcgttcaaggtgcgtaatattagtaagaagtcatttatcagcttaacgtgaaacaataatagtaatatgaaaatatttattaaattttttataattaatctctgcnagaaaaatttgattaatcatttttagtagaatttgtttttct

SEQ ID NO: 1368 - DNA, 715 bp, Artificial
  Mutations within GlyA3B4 introduced by GmGlyA3B4_T01TALE nuclease
  misc_feature (626); (674): n is a or c or t or g
gttcatgtacggttgcagatataaacgaagcatagcttatgtatgaggtgtaacaaaattggaaacaatagccatgcaaggtgaagaatgtcaccaactcagaaacccttcttcattgacgtgtccctcactcactctcctctcttcactataaatcgccactcttcgtgttctccacttcaccaactccttcaaacttattaacactttccttagttcaatatggggaagcccttcttcactctctctctttcttccctttgcttgctacttgccgccatcgtggctggcgatggccaccacctgctccggggtcaagccgtgggcctggcacagcaccggcaacagccgctggaccgtctccagcgcctgctcttgtcgagtgcatgcttgctattacctccagcaagttcaacgagtgccaactcaacaacctcaacgcgttggaacccgaccaccgcgttgagtcccgaaggtggtcttattgaaacatggaactctcaacaccctgagctgcaatgcgccggtgtcactgtttccaaacgcaccctcaaccgcaacggcctccaacttgccatcttactcaccttatcccaaatgatcattgtcgttcaaggtgcgtaatnttagtaagaagtatttatcagcttaacgtgataacaataataggtaanatgaaatatttattaaattttttataattaatctctgctag

SEQ ID NO: 1369 - DNA, 679 bp, Artificial
  Mutations within GlyA3B4 introduced by GmGlyA3B4_T01TALE nuclease
gttcatgtacggttgcagatataaacgaagcatagcttatgtaatgaggtgtaacaaaattggaaacaatagccatgcaaggtgaagaatgtcaccaactcagaaacccttcttcattgacgtgtccctcactcactctcctctcttcactataaatcgccactcttcgtgttctccacttcaccaactccttcaaacttattaacactttccttagttcaatatggggaagcccttcttcactctctctctttcttccctttgcttgctcatcgttccgtgatgctgagtcgacattgccttttttggcctattttacctccagcaagttcaacgagtgccaactcaacaacctcaacgcgttggaacccgaccaccgcgttgagtccgaaggtggtcttattgaaacatggaactctcaacaccctgagctgcaatgcgccggtgtcactgtttccaaacgcaccctcaaccgcaacggcctccacttgccatcttactcaccttatccccaaatgatcattgtcgttcaaggtgcgtaatattagtaagaagtatttatcagcttaacgtgataacaataatagtaatatgaaatatttattaaatttttataattaatctctgctagaaaatttgattaaatcatttttagtagaatttgtttttctcaactagg

SEQ ID NO: 1370 - DNA, 605 bp, Artificial
  Mutations within GlyA3B4 introduced by GmGlyA3B4_T01TALE nuclease
gttcatgtacggttgcagatataaacgaagcatagcttatgtatgaggtgtaacaaaattggaaacaatagccatgcaaggtgaagaatgtcaccaactcagaaacccttcttcattgacgtgtccctcactcactctcctctcttcactataaatcgccactcttcgtgttctccacttcaccaactccttcaaacttattaacactttccttagttcaatatggggaagcccttcttcactctctctctttcttccctttgctattacctcgagtgcatgcttttgctattacctccagcaagttcaacgagtgccaactcaacaacctcaacgcgttggaacccgaccaccgcgttgagtccgaaggtggtcttattgaaacatggaactctcaacaccctgagctgcaatgcgccggtgtcactgtttccaaacgcaccctcaaccgcaacggcctccacttgccatcttactcaccttatccccaaatgatcatagtcgttcaaggtgcgtaatattagtaagaagtatttatcagcttaacgtgataacaataatagtaatatgaaatatttattaaattttttataattaatctctgc

SEQ ID NO: 1371 - DNA, 655 bp, Artificial
  Mutations within GlyA3B4 introduced by GmGlyA3B4_T01TALE nuclease
gttcatgtacggttgcagatataaacgaagcatagcttatgtatgaggtgtaacaaaattggaaacaatagccatgcaaggtgaagaatgtcaccaactcagaaacccttcttcattgacgtgtccctcactcactctcctctcttcactataaatcgccactcttcgtgttctccacttcaccaactccttcaaacttattaacactttccttagttcaatatggggaagcccttcttcactctctctctttcttccctttgctcttgtcgagtgcatgctttgctattacctccagcaagttcaacgagtgccaactcaacaacctcaacgcgttggaacccgaccaccgcgttgagtccgaaggtggtcttattgaaacatggaactctcaacaccctgagctgcaatgcgccggtgtcactgtttccaaacgcaccctcaaccgcaacggcctccacttgccatcttactcaccttatcccccaaatgatcattgtcgttcaaaggtgcgtaaatattagtaagaagtatttatcagcttaacgtgataacaataatagtaatatgaaatatttattaaattttttataattaatctctgctagaaaatttgattaatcatttttagtagaattgttttttctcaactagg

SEQ ID NO: 1372 - DNA, 671 bp, Artificial; identical to SEQ ID NO: 635
  Mutations within GlyA3B4 introduced by GmGlyA3B4_T01TALE nuclease

SEQ ID NO: 1373 - DNA, 611 bp, Artificial
  Mutations within GlyA3B4 introduced by GmGlyA3B4_T01TALE nuclease
gttcatgtacggttgcagatataaacgaagcatagcttatgtatgaggtgtaacaaaattggaaacaatagccatgcaaggtgaagaatgtcaccaactcagaaacccttcttcattgacgtgtccctcactcactctcctctcttcactataaatcgccactcttcgtgttctccacttcaccaactccttcaaacttattaacactttccttagttcaatatggggaagcccttcttcactctctctctttcttccctttgcttgcttgtcgagtgcatgctttgctattacctccagcaagttcaacgagtgccaactcaacaacctcaacgcgttggaacccgaccaccgcgttgagtccgaaggtggtcttattgaaacatggaactctcaacaccctgagctgcaatgcgccggtgtcactgtttccaaacgcaccctcaaccgcaacggcctccacttgccatcttactcaccttatcccccaaatgatcattgtcgttcaaggtgcgtaaatattagtaagaagtatttatcagctttaacgtgataacaataatagtaatatgaaatatttattaaattttttataattaaatctctgctag

SEQ ID NO: 1374 - DNA, 579 bp, Artificial
  Mutations within GlyA3B4 introduced by GmGlyA3B4_T01TALE nuclease
gttcatgtacggttgcagatataaacgaagcatagcttatgtatgaggtgtaacaaaattggaaacaatagccatgcaaggtgaagaatgtcaccaactcagaaacccttcttcattgacgtgtccctcactcactctcctctcttcactataaatcgccactcttcgtgttctccacttcaccaactccttcaaacttattaacactttccttagttcaatatggggaagcccttcttcactctctctctttcttccctttgcttgctactactcttgtcgagtgcatgctttgctattacctccagcaagttcaacgagtgccaactcaacaacctcaacgcgttggaacccgaccaccgcgttgagtccgaaggtggtcttattgaacatggaactctcaacaccctgagctgcaatgcgccggtgtcactgtttccaaacgcacctcaaccgcaacggcctccacttgccatcttactcaccttatccccaaatgatcattgtcgttcaaggtgcgtatattagtaagaagtatttatcagcttaacgtgataacaataatagtaatatgaaata

SEQ ID NO: 1375 - DNA, 663 bp, Artificial
  Mutations within GlyA3B4 introduced by GmGlyA3B4_T01TALE nuclease
gttcatgtacggttgcagatataaacgaagcatagcttatgtatgaggtgtaacaaaattggaaacaatagccatgcaaggtgaagaatgtcaccaactcagaaacccttcttcattgacgtgtccctcactcactctcctctcttcactataaatcgccactcttcgtgttctccacttcaccaactccttcaaacttattaacactttccttagttcaatatggggaagcccttcttcactctctctctttcttccctttgcttgctattgtcgagtgcatgctttgctattacctccagcaagttcaacgagtgccaactcaacaacctcaacgcgttggaacccgaccaccgcgttgagtccgaaggtggtcttattgaaacatggaactctcaacaccctgagctgcaatgcgccggtgtcactgtttccaaacgcaccctcaaccgcaacggcctccacttgccatcttactcaccttatccccaaatgatcattgtcgttcaaggtgcgtaatattagtaagagtatttatcagcttaacgtgataacaatatagtaatatgaaatatttattaaatttttataattaatctctgctagaaaatttgattaatcattttagtagaatttgttttctcaactaggttttaaacacca

SEQ ID NO: 1376 - DNA, 672 bp, Artificial
  Mutations within GlyA3B4 introduced by GmGlyA3B4_T01TALE nuclease
gttcatgtacggttgcagatataaacgaagcatagcttatgtatgaggtgtaacaaaattggaaacaatagccatgcaaggtgaagaatgtcaccaactcagaaacccttcttcattgacgtgtccctcactcactctcctctcttcactataaatcgccactcttcgtgttctccacttcaccaactccttcaaacttattaacactttccttagttcaatatggggaagcccttcttcactctctctctttcttccctttgcttttgtcgagtgcatgctttgctattacctccagcaagttcaacgagtgccaactcaacaacctcaacgcgttggaacccgaccaccgcgttgagtccgaaggtggtcttattgaaacatggaactctcaacaccctgagctgcaatgcgccggtgtcactgtttccaacgcaccctcaaccgcaacggcctccacttgccatcttactcaccttatcccccaaatgatcattgtcgttcaaggtgcgtaaatattagtcaagaagtattttatcagctttaacgtgataacaataatagtaatatgaaatatttattaaattttttataattaatctctgctagaaaatttgattaatcatttttagtagaatttgttttttctcaactaggttttaaaacaccaca

SEQ ID NO: 1377 - DNA, 667 bp, Artificial
  Mutations within GlyA3B4 introduced by GmGlyA3B4_T01TALE nuclease
gttcatgtacggttgcagatataaacgaagcatagcttatgtatgaggtgtaacaaaattggaaacaatagccatgcaaggtgaagaatgtcaccaactcagaaacccttcttcattgacgtgtccctcactcactctcctctcttcactataaatcgccactcttcgtgttctccacttcaccaactccttcaaacttattaacactttccttagttcaatatggggaagcccttcttcactctctctctttcttccctttgcttttgtcgagtgcatgctttgctattacctccagcaagttcaacgagtgccaactcaacaacctcaacgcgttggaacccgaccaccgcgttgagtccgaaggtggtcttattgaaacatggaactctcaacaccctgagctgcaatgcgccggtgtcactgtttccaaacgcaccctcaaccgcaacggcctccacttgccatcttactcaccttatccccaaatgatcattgtcgttcaaggtgcgtaaatattagtaagaagtatttatcagcttaacgtgataacaataatagtaatatgaaatatttattaaattttttataattaatctctgctagaaaatttgattaatcatttttagtagaatttgttttttctcaactaggttttaaaacacca

SEQ ID NO: 1378 - DNA, 645 bp, Artificial; identical to SEQ ID NO: 665
  Mutations within GlyA3B4 introduced by GmGlyA3B4_T01TALE nuclease

SEQ ID NO: 1379 - DNA, 669 bp, Artificial; identical to SEQ ID NO: 783
  Mutations within GlyA3B4 introduced by GmGlyA3B4_T01TALE nuclease

SEQ ID NO: 1380 - DNA, 667 bp, Artificial
  Mutations within GlyA3B4 introduced by GmGlyA3B4_T01TALE nuclease
gttcatgtacggttgcagatataaacgaagcatagcttatgtatgaggtgtaacaaaattggaaacaatagccatgcaaggtgaagaatgtcaccaactcagaaacccttcttcattgacgtgtccctcactcactctcctctcttcactataaatcgccactcttcgtgttctccacttcaccaactccttcaaacttattaacactttccttagttcaatatggggaagcccttcttcactctctctctttcttccctttgcttgctatgtcgagtgcatgctttgctattacctccagcaagttcaacgagtgccaactcaacaacctcaacgcgttggaacccgaccaccgcgttgagtccgaaggtggtcttattgaaacatggaactctcaacaccctgagctgcaatgcgccggtgtcactgtttccaaacgcaccctcaaccgcaacggcctccacttgccatcttactcaccttatccccaaatgatcattgtcgttcaaggtgcgtaatattagtaagagtatttatcagcttaacgtgataacaataatagtaatatgaaatatttattaaatttttataattaatctctgctagaaaatttgattaatcattttagtagaatttgttttctcaactaggtttttaaaacaccaca

SEQ ID NO: 1381 - DNA, 657 bp, Artificial
  Mutations within GlyA3B4 introduced by GmGlyA3B4_T01TALE nuclease
gttcatgtacggttgcagatataaacgaagcatagcttatgtatgaggtgtaacaaaattggaaacaatagccatgcaaggtgaagaatgtcaccaactcagaaacccttcttcattgacgtgtccctcactcactctcctctcttcactataaatcgccactcttcgtgttctccacttcaccaactccttcaaacttattaacactttccttagttcaatatggggaagcccttcttcactctctctctttcttgtcgagtgcatgctttgctattacctccagcaagttcaacgagtgccaactcaacaacctcaacgcgttggaacccgaccaccgcgttgagtccgaaggtggtcttattgaaacatggaactctcaacaccctgagctgcaatgcgccggtgtcactgtttccaaacgcaccctcaaccgcaacggcctccacttgccatcttactcaccttatccccaaatgatcattgtcgttcaaggtgcgtaaatattagtaagaagtatttatcagcttaacgtgataacaataatagtaatatgaaatatttattaaattttttataattaatctctgctagaaaatttgattaatcatttttagtagaatttgttttttctcaactaggttttaaaacaccaca

SEQ ID NO: 1382 - DNA, 596 bp, Artificial
  Mutations within GlyA3B4 introduced by GmGlyA3B4_T01TALE nuclease
gttcatgtacggttgcagatataaacgaagcatagcttatgtatgaggtgtaacaaaattggaaacaatagccatgcaaggtgaagaatgtcaccaactcagaaacccttcttcattgacgtgtccctcactcactctcctctcttcactataaatcgccactcttcgtgttctccacttcaccaactccttcaaacttattaacactttccttagttcaatatggggaagcccttcttcactctctctctttcttccctttgcttttgtcgagtgcatgctttgctattacctccagcaagttcaacgagtgccaactcaacaacctcaacgcgttggaacccgaccaccgcgttgagtccgaaggtggtcttattgaaacatggaactctcaacaccctgagctgcaatgcgccggtgtcactgtttccaaacgcaccctcaaccgcaacggcctccacttgccatcttactcaccttatcccccaaatgatcattgtcgttcaaggtgcgtaaatattagtaagaagtatttatcagctttaacgtgataacaataatagtaatatgaaatatttattaaattttttataatt

SEQ ID NO: 1383 - DNA, 800 bp, Artificial
  Mutations within GlyA3B4 introduced by GmGlyA3B4_T01TALE nuclease
  misc_feature (675): n is a or c or t or g
gttcatgtacggttgcagatataaacgaagcatagcttatgtatgaggtgtaacaaaattggaaacaatagccatgcaaggtgaagaatgtcaccaactcagaaacccttcttcattgacgtgtccctcactcactctcctctcttcactataaatcgccactcttcgtgttctccacttcaccaactccttcaaacttattaacactttccttagttcaatatgggggaagcccttcttcactctctcctcttccttccttgcttgctatgaagaagaagctagaggtgggaaatactcaagtcattctcttgaaaaagttgctgcaatgatatgcaacaaaatatcactatacggagtcaaggtaattatagtgttcacatgaacatttctcccatgaaaatatatattttctgactcttgtcgagtgcatgctttgctattacctccagcaagttcaacgagtgccaactcaacaacctcaacgcgttggaacccgaccaccgcgttgagtccgaaggtggtcttattgaaacatggaactctcaacaccctgagctgcaatgcgccggtgtcactgtttccaaacgcaccctcaaccgcaacggcctccacttgccatcttactcaccttatcccccaaaatgatcttgtcgttcaaggtgcgtaatattngtaagaagtatttatcagcttaacgtgataacaataatagtaatatgaaatatttattaaattttttataattaaatctcttgctagaaaatttgattaatcatttttagtagaaatttgttttc

SEQ ID NO: 1384 - DNA, 634 bp, Artificial; identical to SEQ ID NO: 1123
  Mutations within GlyA3B4 introduced by GmGlyA3B4_T01TALE nuclease

SEQ ID NO: 1385 - DNA, 775 bp, Artificial
  Mutations within GlyA3B4 introduced by GmGlyA3B4_T01TALE nuclease
  misc_feature (692): n is a or c or t or g
gttcatgtacggttgcagatataaacgaagcatagcttatgtatgaggtgtaacaaaattggaaacaatagccatgcaaggtgaagaatgtcaccaactcagaaacccttcttcattgacgtgtccctcactcactctcctctcttcactataaatcgccactcttcgtgttctccacttcaccaactccttcaaacttattaacactttccttagttcaatatggggaagcccttcttcactctctctctttcttccctttgcttgctactgcacaaaaaagacccaccaagaagcttaaaggcacgcttagcgcgaaagcccgcactaagcgcgaagtcaacgtgaaaaataagttatctggtgtgcatgattcaagaaaaagatagtggcaaatcttggatcaaattctggagtatcacaaagacacacctggaaaaggattttttatttaaaagaggtgatctttgtcttaacacattggagggtacatcctttatggtacaagtagagggtacatctacttgggttgttgactgagaacagagagggtacatctcttgtcgagtgcatgctttgctatttacctccagcaagttcaacgagtgccaactcaacaacctcaacgcgttggaacccgaccaccgcgttgagtccgaaggtggtcttattgaaacatggaactctcaacnccctgagctgcaatgcgccggtgtcactgtttccaaacgcaccctcaaccgcaacggcctccacttgccatcttactcacctt

SEQ ID NO: 1386 - DNA, 654 bp, Artificial
  Mutations within GlyA3B4 introduced by GmGlyA3B4_T01TALE nuclease
gttcatgtacggttgcagatataaacgaagcatagcttatgtatgaggtgtaacaaaattggaaacaatagccatgcaaggtgaagaatgtcaccaactcagaaacccttcttcattgacgtgtccctcactcactctcctctcttcactataaatcgccactcttcgtgttctccacttcaccaactccttcaaacttattaacactttccttagttcaatatggggaagcccttcttcactctctctctttcttccctttgcttgtcgagtgcatgctttgctattacctccagcaagttcaacgagtgccaactcaacaacctcaacgcgttggaacccgaccaccgcgttgagtccgaaggtggtcttattgaaacatggaactctcaacaccctgagctgcaatgcgccggtgtcactgtttccaaacgcaccctcaaccgcaacggcctccacttgccatcttactcaccttatccccaaatgatcattgtcgttcaaggtgcgtaatattagtaagaagtatttatcagcttaacgtgataacaataatagtaatatgaaatatttattaaattttttataattaatctctgctagaaaatttgattaatcatttttagtagaattgttttttctcaactaggtttt

SEQ ID NO: 1387 - DNA, 636 bp, Artificial
  Mutations within GlyA3B4 introduced by GmGlyA3B4_T01TALE nuclease
gttcatgtacggttgcagatataaacgaagcatagcttatgtatgaggtgtaacaaaattggaaacaatagccatgcaaggtgaagaatgtcaccaactcagaaacccttcttcattgacgtgtccctcactcactctcctctcttcactataaatcgccactcttcgtgttctccacttcaccaactccttcaaacttattaacactttccttagttcaatatggggaagcccttcttcactctctctctttcttcgagtgcatgctttgctattacctccagcaagttcaacgagtgccaactcaacaacctcaacgcgttggaacccgaccaccgcgttgagtccgaaggtggtcttattgaaacatggaactctcaacaccctgagctgcaatgcgccggtgtcactgtttccaaacgcaccctcaaccgcaacggcctccacttgccatcttactcaccttatccccaaatgatcattgtcgttcaaggtgcgtaatattagtaagaagtatttatcagcttaacgtgataacaataatagtaatatgaaatatttattaaattttttataattaatctctgctagaaaatttgattaatctttttagtagaatttgttttttctcaacta

SEQ ID NO: 1388 - DNA, 654 bp, Artificial
  Mutations within GlyA3B4 introduced by GmGlyA3B4_T01TALE nuclease
gttcatgtacggttgcagatataaacgaagcatagcttatgtatgaggtgtaacaaaattggaaacaatagccatgcaaggtgaagaatgtcaccaactcagaaacccttcttcattgacgtgtccctcactcactctcctctcttcactataaatcgccactcttcgtgttctccacttcaccaactccttcaaacttattaacactttccttagttcaatatggggaagcccttcttcactctctctctttcttccctttgcttgctttgctattacctccagcaagttcaacgagtgccaactcaacaacctcaacgcgttggaacccgaccaccgcgttgagtccgaaggtggtcttattgaaacatggaactctcaacaccctgagctgcaatgcgccggtgtcactgtttccaaacgcaccctcaaccgcaacggcctccacttgccatcttactcaccttatcccccaaatgatcattgtcgttcaaggtgcgtaatattagtaagaagtatttatcagctttaacgtgataacaataatagtaatatgaaatatttattaaattttttataattaatctctgctagaaaatttgattaatcatttttagtagaatttgtttttctcaactaggttttaaaacacca

SEQ ID NO: 1389 - DNA, 656 bp, Artificial
  Mutations within GlyA3B4 introduced by GmGlyA3B4_T01TALE nuclease
gttcatgtacggttgcagatataaacgaagcatagcttatgtatgaggtgtaacaaaattggaaacaatagccatgcaaggtgaagaatgtcaccaactcagaaacccttcttcattgacgtgtccctcactcactctcctctcttcactataaatcgccactcttcgtgttctccacttcaccaactccttcaaacttattaacactttccttagttcaatatggggaagcccttcttcactctctctctttcttccctttgcttgctatttgctattacctccagcaagttcaacgagtgccaactcaacaacctcaacgcgttggaacccgaccaccgcgttgagtccgaaggtggtcttattgaaacatggaactctcaacacccctgagctgcaatgcgccggtgtcactgtttccaaacgcaccctcaaccgcaacggcctccacttgccatcttactcaccttatccccaaatgatcattgtcgttcaaggtgcgtaatattagtaagaagtatttatcagcttaacgtgataacaataatagtaatatgaaatatttattaaattttttataattaattctctgctagaaaatttgattaatcatttttagtagaatttgtttttctcaactaggttttaaaacacca

SEQ ID NO: 1390 - DNA, 468 bp, Artificial
  Mutations within GlyA3B4 introduced by GmGlyA3B4_T01TALE nuclease
  misc_feature (279): n is a or c or t or g
gttcatgtacggttgcagatataaacgaagcatagcttatgtatgaggtgtaacaaaattggaaacaatagccatgcaaggtgaagaatgtcaccaactcagaaacccttcttcattgacgtgtccctcactcactctcctctcttcactataaatcgccactcttcgtgttctccacttcaccaactccttcaaacttattaacactttccttagttcaatatggggaagcccttcttcactctctctctttcttccctttgcttgctacttctacgngtgctttgctattacctccagcaagttcaacgagtgccaactcaacaacctcaacgcgttggaacccgaccaccgcgttgagtccgaaggtggtcttattgaaacatggaactctcaacaccctgagctgcaatgcgccggtgtcactgtttccaaacgcaccctcaaccgcaacggcctccacttgcc

SEQ ID NO: 1391 - DNA, 688 bp, Artificial
  Mutations within GlyA3B4 introduced by GmGlyA3B4_T01TALE nuclease
gttcatgtacggttgcagatataaacgaagcatagcttatgtatgaggtgtaacaaaattggaaacaatagccatgcaaggtgaagaatgtcaccaactcagaaacccttcttcattgacgtgtccctcactcactctcctctcttcactataaatcgccactcttcgtgttctccacttcaccaactccttcaaacttattaacactttccttagttcaatatggggaagcccttcttcactctctctctttttcaatatggtggcctaactacggctacaccacggcttgtcgagtgcatgctttgctattacctccagcaagttcaacgagtgccaactcaacaacctcaacgcgttggaacccgaccaccgcgttgagtccgaaggtggtcttattgaaacatggaactctcaacaccctgagctgcaatgcgccggtgtcactgtttccaaacgcaccctcaaccgcaacggcctccacttgccatcttactcaccttatccccaaatgatcattgtcgttcaaggtgcgtaatattagtaagaagtatttatcagcttaacgtgataacaataatagtaatatgaaatatttattaaatttttataattaatctctgctagaaaatttgattaatcatttttatgtagaatttgtttttctcaactaggttttaaaacacca

SEQ ID NO: 1392 - DNA, 614 bp, Artificial
  Mutations within GlyA3B4 introduced by GmGlyA3B4_T01TALE nuclease
gttcatgtacggttgcagatataaacgaagcatagcttatgtatgaggtgtaacaaaattggaaacaatagccatgcaaggtgaagaatgtcaccaactcagaaacccttcttcattgacgtgtccctcactcactctcctctcttcactataaatcgccactcttcgtgttctccacttcaccaactccttcaaacttattaacactttccttagttcaatatggggaagccaggccgaccgcatgctttgctattacctccagcaagttcaacgagtgccaactcaacaacctcaacgcgttggaacccgaccaccgcgttgagtccgaaggtggtcttattgaaacatggaactctcaacaccctgagctgcaatgcgccggtgtcactgtttccaaacgcaccctcaaccgcaacggcctccacttgccatcttactcaccttatccccaaatgatcattgtcgttcaaggtgcgtaatattagtaagaagtatttatcagcttaacgtgataacaataatagtaatatgaaatatttattaatttttataattaatctctgctagaaatttgattaatcatttttagtagaatttgtttttctcaacta

SEQ ID NO: 1393 - DNA, 513 bp, Artificial; identical to SEQ ID NO: 645
  Mutations within GlyA3B4 introduced by GmGlyA3B4_T01TALE nuclease

SEQ ID NO: 1394 - DNA, 628 bp, Artificial
  Mutations within GlyA3B4 introduced by GmGlyA3B4_T01TALE nuclease
  misc_feature (513): n is a or c or t or g
gttcatgtacggttgcagatataaacgaagcatagcttatgtatgaggtgtaacaaaaattggaaacaatagccatgcaaggtgaagaatgtcaccaactcagaaacccttcttcattgacgtgtccctcactcactctcctctcttcactataaatcgccactcttcgtgttctccacttcaccaactccttcaaacttattaacactttccttagttcaatatggggaagcccttcttcactctctctctttcttccctttgcttttgtcgagtgcatgctttgctattacctccagcaagttcaacgagtgccaactcaacaacctcaacgcgttggaacccgaccaccgcgttgagtccgaaggtggtcttattgaaacatggaactctcaacaccctgagctgcaatgcgccggtgtcactgtttccaaacgcaccctcaaccgcaacggcctccacttgccatcttactcaccttatccccaaatgatcattgtcgttcaaggtgcntaaatattagtaagaagtatttatcagcttaacgtgataacaataatagtaatatgaaatatttattaaattttttataattaatctctgctagaaaatttgattaatcttttta

SEQ ID NO: 1395 - DNA, 636 bp, Artificial
  Mutations within GlyA3B4 introduced by GmGlyA3B4_T01TALE nuclease
  misc_feature (347); (348): n is a or c or t or g
gttcatgtacggttgcagatataaacgaagcatagcttatgtatgaggtgtaacaaaattggaaacaatagccatgcaaggtgaagaatgtcaccaactcagaaacccttcttcattgacgtgtccctcactcactctcctctcttcactataaatcgccactcttcgtgttctccacttcaccaactccttcaaacttattaacactttccttagttcaatatggggaagcccttcttcactctctctctttcttccctttgcttgctatgtcgagtgcatgctttgctattacctccagcaagttcaacgagtgccaactcaacaacctcaacgcgttggaaccnnccaccgcgttgagtccgaaggtggtcttattgaaacatggaactctcaacaccctgagctgcaatgcgccggtgtcactgtttccaaacgcaccctcaaccgcaacggcctccacttgccatcttactcaccttatccccaaatgatcattgtcgttcaaggtgcgtaatattagtaagagtatttatcagcttaacgtgataacaataatagtaatatgaaatatttattaaatttttataattaatctctgctagaaaatttgattaatcattttagtagaatttg

SEQ ID NO: 1396 - DNA, 656 bp, Artificial
  Mutations within GlyA3B4 introduced by GmGlyA3B4_T01TALE nuclease
gttcatgtacggttgcagatataaacgaagcatagcttatgtatgaggtgtaacaaaattggaaacaatagccatgcaaggtgaagaatgtcaccaactcagaaacccttcttcattgacgtgtccctcactcactctcctctcttcactataaatcgccactcttcgtgttctccacttcaccaactccttcaaacttattaacactttccttagttcaatatggggaagcccttcttcactctctctctttcttccctttgcttgtcgagtgcatgctttgctattacctccagcaagttcaacgagtgccaactcaacaacctcaacgcgttggaacccgaccaccgcgttgagtccgaaggtggtcttattgaaacatggaactctcaacaccctgagctgcaatgcgccggtgtcactgtttccaaacgcaccctcaaccgcaacggcctccacttgccatcttactcaccttatcccccaaatgatcattgtcgttcaaggtgcgtaatattagtaagaagtatttatcagcttaacgtgataacaataatagtaatatgaaatatttattaaattttttataattaatctctgctagaaaatttgattaatcatttttagtagaatttgttttttctcaactaggtttt

SEQ ID NO: 1397 - DNA, 653 bp, Artificial
  Mutations within GlyA3B4 introduced by GmGlyA3B4_T01TALE nuclease
gttcatgtacggttgcagatataaacgaagcatagcttatgtatgaggtgtaacaaaattggaaacaatagccatgcaaggtgaagaatgtcaccaactcagaaacccttcttcattgacgtgtccctcactcactctcctctcttcactataaatcgccactcttcgtgttctccacttcaccaactccttcaaacttattaacactttccttagttcaatatggggaagcccttcttcactctctctctttcttccctttgcttgcttgtcgagtgcatgctttgctattacctccagcaagttcaacgagtgccaactcaacaacctcaacgcgttggaacccgaccaccgcgttgagtccgaaggtggtcttattgaaacatggaactctcaacaccctgagctgcaatgcgccggtgtcactgtttccaaacgcaccctcaaccgcaacggcctccacttgccatcttactcaccttatcccccaaatgatcattgtcgttcaaggtgcgtaatattagtaagaagtatttatcagcttaacgtgataacaataatagtaatatgaaatatttattaaattttttataattaatctctgctagaaaatttgattaatctttttagtagaatttgttttttctcaacta

SEQ ID NO: 1398 - DNA, 605 bp, Artificial
  Mutations within GlyA3B4 introduced by GmGlyA3B4_T01TALE nuclease
gttcatgtacggttgcagatataaacgaagcatagcttatgtatgaggtgtaacaaaattggaaacaatagccatgcaaggtgaagaatgtcaccaactcagaaacccttcttcattgacgtgtccctcactcactctcctctcttcactataaatcgccactcttcgtgttctccacttcaccaactccttcaaacttattaacactttccttagttcaatatggggaagcccttcttcactctctctctttcttccctttgcttgctactactcttgtcgagtgcatgctttgctattacctccagcaagttcaacgagtgccaactcaacaacctcaacgcgttgaacccgaccaccgcgttgagtccgaaggtggtcttatgaacatggaactctcaacacccctgagctgcaatgcgccggtgtcactgtttccaaacgcaccctcaaccgcaacgcctccacttgccatcttactcaccttatccccaaatgatcattgtcgttcaaggtgcgtatatttagtaagaagtatttatcagcttaacgtgataacaataatagtaatatgaaatattattaaattttttataattaatctc

SEQ ID NO: 1399 - DNA, 537 bp, Artificial; identical to SEQ ID NO: 1356
  Mutations within GlyA3B4 introduced by GmGlyA3B4_T01TALE nuclease

SEQ ID NO: 1400 - DNA, 611 bp, Artificial
  Mutations within GlyA3B4 introduced by GmGlyA3B4_T01TALE nuclease
gttcatgtacggttgcagatataaacgaagcatagcttatgtatgaggtgtaacaaaattggaaacaatagccatgcaaggtgaagaatgtcaccaactcagaaaccccttcttcattgacgtgtccctcactcactctcctctcttcactataaatcgccactcttcgtgttctccacttcaccaactccttcaaacttattaacactttccttagttcaatatggggaagcccttcttgcactctctctctttcttccctttgcttgcttgtcgaagtgcatgctttgctattacctccagcaagttcaacgagtgccaactcaacaacctcaacgcgttggaacccgaccaccgcgttgagtccgaaggtggtcttattgaaacatggaactctcaacaccctgagctgcaatgcgccggtgtcactgtttcccaaacgcaccctcaaccgcaacggcctccacttgccatcttactcaccttatcccccaaatgatcattgtcgttcaaggtgcgtaaatattagtaagaagtatttatcagcttaacgtgataacaataatagtaatatgaaatatttattaaattttttataattaatctctgct

SEQ ID NO: 1401 - DNA, 519 bp, Artificial
  Mutations within GlyA3B4 introduced by GmGlyA3B4_T01TALE nuclease
  misc_feature (141): n is a or c or t or g
gttcatgtacggttgcagatataaacgaagcatagcttatgtatgaggtgtaacaaaattggaaacaatagccatgcaaggtgaagaatgtcaccaactcagaaacccttcttcattgacgtgtccctcactcactctccnctcttcactataaatcgccactcttcgtgttctccacttcaccaactccttcaaactttattaacacttttccttagttcaatatggggaagcccttcttcactctctctctttcttccctttgcttgctactactcttgtcgagtgcatgctttgctattacctccagcaagttcaacgagtgccaactcaacaacctcaacgcgttggaacccgaccaccgcgttgagtccgaaggtggtcttattgaaacatggaactctcaacacccctgagctgcaatgcgccggtgtcactgtttccaaacgcaccctcaaccgcaacggcctccacttgccatcttactcaccttatccccaaatgatcattgtcgttcaa

SEQ ID NO: 1402 - DNA, 666 bp, Artificial
  Mutations within GlyA3B4 introduced by GmGlyA3B4_T01TALE nuclease
gttcatgtacggttgcagatataaacgaagcatagcttatgtatgaggtgtaacaaaaattggaaacaatagccatgcaaggtgaagaatgtcaccaactcagaaacccttcttcattgacgtgtccctcactcactctcctctcttcactataaatcgccactcttcgtgttctccacttcaccaactccttcaaacttattaacactttccttagttcaatatggggaagcccttcttcactctctctctttcttcactcttgtcgagtgcatgctttgctattacctccagcaagttcaacgagtgccaactcaacaacctcaacgcgttggaacccgaccaccgcgttgagtccgaaggtggtcttattgaaacatggaactctcaacaccctgagctgcaatgcgccggtgtcactgtttccaaacgcaccctcaaccgcaacggcctccacttgccatcttactcaccttatcccccaaatgatcattgtcgttcaaggtgcgtaaatattagtaagaagtatttatcagcttaacgtgataacaataatagtaatatgaaatatttattaaattttttataattaatctctgctagaaaatttgattaatcatttttagtagaatttgttttttctcaactaggttttaaaacaccaca

SEQ ID NO: 1403 - DNA, 639 bp, Artificial
  Mutations within GlyA3B4 introduced by GmGlyA3B4_T01TALE nuclease
  misc_feature (538): n is a or c or t or g
gttcatgtacggttgcagatataaacgaagcatagcttatgtatgaggtgtaacaaaattggaaacaatagccatgcaaggtgaagaatgtcaccaactcagaaacccttcttcattgacgtgtccctcactcactctcctctcttcactataaatcgccactcttcgtgttctccacttcaccaactccttcaaacttattaacactttccttagttcaatatggggaagcccttcttcactctctctctttcttccctttgcttgctacactcttgtcgagtgcatgctttgctattacctccagcaagttcaacgagtgccaactcaacaacctcaacgcgttggaacccgaccaccgcgttgagtccgaaggtggtcttattgaaacatggaactctcaacaccctgagctgcaatgcgccggtgtcactgtttccaaacgcaccctcaaccgcaacggcctccacttgccatcttactcaccttatccccaaatgatcattgtcgttcaaggtgcgtaatattagtaagaagnatttatcagcttaacgtgataacaatatagtaatatgaaatatttattaaatttttataattaatctctgctagaaaatttgattaatcattttagtagaa

SEQ ID NO: 1404 - DNA, 671 bp, Artificial
  Mutations within GlyA3B4 introduced by GmGlyA3B4_T01TALE nuclease
gttcatgtacggttgcagatataaacgaagcatagcttatgtatgaggtgtaacaaaattggaaacaatagccatgcaaggtgaagaatgtcaccaactcagaaacccttcttcattgacgtgtccctcactcactctcctctcttcactataaatcgccactcttcgtgttctccacttcaccaactccttcaaacttattaacactttccttagttcaatatggggaagcccttcttcactctctctctttcttccctttgcttgttctactcttgtcgagtgcatgctttgctattacctccagcaagttcaacgagtgccaactcaacaacctcaacgcgttggaacccgaccaccgcgttgagtccgaaggtggtcttattgaaacatggaactctcaacaccctgagctgcaatgcgccggtgtcactgtttccaaacgcaccctcaaccgcaacggcctccacttgccatcttactcaccttatccccaaatgatcattgtcgttcaaggtgcgtaatattagtaagagtatttatcagcttaacgtgataacaatatagtaatatgaaatatttattaaatttttataattaatctctgctagaaaatttgattaatcattttagtagaatttgttttctcaactaggttttaaaacaccaca

SEQ ID NO: 1405 - DNA, 669 bp, Artificial; identical to SEQ ID NO: 1037
  Mutations within GlyA3B4 introduced by GmGlyA3B4_T01TALE nuclease

SEQ ID NO: 1406 - DNA, 655 bp, Artificial
  Mutations within GlyA3B4 introduced by GmGlyA3B4_T01TALE nuclease
gttcatgtacggttgcagatataaacgaagcatagcttatgtatgaggtgtaacaaaattggaaacaatagccatgcaaggtgaagaatgtcaccaactcagaaacccttcttcattgacgtgtccctcactcactctcctctcttcactataaatcgccactcttcgtgttctccacttcaccaactccttcaaacttattaacactttccttagttcaatatggggaagcccttcttcactctctctctttcttccctttgcttgctttgctattacctccagcaagttcaacgagtgccaactcaacaacctcaacgcgttggaacccgaccaccgcgttgagtccgaaggtggtcttattgaaacatggaactctcaacaccctgagctgcaatgcgccggtgtcactgtttccaaacgcaccctcaaccgcaacggcctccacttgccatcttactcaccttatccccaaatgatcattgtcgttcaaggtgcgtaatattagtaagaagtatttatcagcttaacgtgataacaataatagtaatatgaaatatttattaaattttttataattaatctctgctagaaaatttgattaatcatttttagtagaatttgttttttctcaactaggttttaaaacaccaca

SEQ ID NO: 1407 - DNA, 607 bp, Artificial; identical to SEQ ID NO: 708
  Mutations within GlyA3B4 introduced by GmGlyA3B4_T01TALE nuclease

SEQ ID NO: 1408 - DNA, 608 bp, Artificial
  Mutations within GlyA3B4 introduced by GmGlyA3B4_T01TALE nuclease
gttcatgtacggttgcagatataaacgaagcatagcttatgtatgaggtgtaacaaaattggaaacaatagccatgcaaggtgaagaatgtcaccaactcagaaacccttcttcattgacgtgtccctcactcactctcctctcttcactataaatcgccactcttcgtgttctccacttcaccaactccttcaaacttattaacactttccttagttcaatatggggaagcccttcttcactctctctctttcttccctttgcttgctgtcgagtgcatgctttgctattacctccagcaagttcaacgagtgccaactcaacaacctcaacgcgttggaacccgaccaccgcgttgagtccgaaggtggtcttattgaaacatggaactctcaacaccctgagctgcaatgcgccggtgtcactgtttccaaacgcaccctcaaccgcaacggcctccacttgccatcttactcaccttactccccaaatgatcattgtcgttcaaggtgcgtaaatattagtaagaagtatttatcagcttaacgtgataacaataatagtaatatgaaatatttattaaattttttataattaatctctgctag

SEQ ID NO: 1409 - DNA, 653 bp, Artificial
  Mutations within GlyA3B4 introduced by GmGlyA3B4_T01TALE nuclease
gttcatgtacggttgcagatataaacgaagcatagcttatgtatgaggtgtaacaaaattggaaacaatagccatgcaaggtgaagaatgtcaccaactcagaaacccttcttcattgacgtgtccctcactcactctcctctcttcactataaatcgccactcttcgtgttctccacttcaccaactccttcaaacttattaacactttccttagttcaatatggggaagcccttcttcactctctctctttcttccctttgcttgcttgtcgagtgcatgctttgctattacctccagcaagttcaacgagtgccaactcaacaacctcaacgcgttggaacccgaccaccgcgttgagtccgaaggtggtcttattgaaacatggaactctcaacaccctgagctgcaatgcgccggtgtcactgtttccaaacgcaccctcaaccgcaacggcctccacttgccatcttactcaccttatcccccaaatgatcattgtcgttcaaggtgcgtaatattagtaagaagtatttatcagcttaacgtgataacaataatagtaatatgaaatatttattaaatttttataattaatctctgctagaaaatttgattaatcatttttagtagaattgtttttctcaactagg

SEQ ID NO: 1410 - DNA, 636 bp, Artificial
  Mutations within GlyA3B4 introduced by GmGlyA3B4_T01TALE nuclease
gttcatgtacggttgcagatataaacgaagcatagcttatgtatgaggtgtaacaaaattggaaacaatagccatgcaaggtgaagaatgtcaccaactcagaaacccttcttcattgacgtgtccctcactcactctcctctcttcactataaatcgccactcttcgtgttctccacttcaccaactccttcaaacttattaacactttccttagttcaatatggggaagcccttcttcactctctctctttcttccctttgcttgcttgtcgagtgcatgctttgctattacctccagcaagttcaacgagtgccaactcaacaacctcaacgcgttggaacccgaccaccgcgttgagtccgaaggtggtcttattgaaacatggaactctcaacaccctgagctgcaatgcgccggtgtcactgtttccaaacgcaccctcaaccgcaacggcctccacttgccatcttactcaccttatcccccaaatgatcattgtcgttcaaggtgcgtaatattagtaagaagtatttatcagcttaacgtgataacaataatagtaatatgaaatattttattaaattttttataattaatctctgctagaaaatttgattaatctttttagtagaa

SEQ ID NO: 1411 - DNA, 656 bp, Artificial
  Mutations within GlyA3B4 introduced by GmGlyA3B4_T01TALE nuclease
gttcatgtacggttgcagatataaacgaagcatagcttatgtatgaggtgtaacaaaattggaaacaatagccatgcaaggtgaagaatgtcaccaactcagaaacccttcttcattgacgtgtccctcactcactctcctctcttcactataaatcgccactcttcgtgttctccacttcaccaactccttcaaacttattaacactttccttagttcaatatggggaagcccttcttcactctctctctttcttccctttgcttgctactactcttgtcgagtgcatgctttgctattacctccagcaagttcaacgagtgccaactcaacaacctcaacgcgttggaacccgaccaccgcgttgagtccgaaggtggtcttattgaaacatggaactctcaacaccctgagctgcaatgcgccggtgtcactgtttccaaacgcaccctcaaccgcaacggcctccacttgccatcttactcaccttatccccaaatgatcattgtcgttcaaggtgcgtatattagtaagaagtattttatcagcttaacgtgatacaataatagtaatatgaaatatttattaaattttttataattaatctctgctagaaaatttgattaatcatttttagtagaattttgtttttcttc

SEQ ID NO: 1412 - DNA, 647 bp, Artificial
  Mutations within GlyA3B4 introduced by GmGlyA3B4_T01TALE nuclease
gttcatgtacggttgcagatataaacgaagcatagcttatgtatgaggtgtaacaaaattggaaacaatagccatgcaaggtgaagaatgtcaccaactcagaaacccttcttcattgacgtgtccctcactcactctcctctcttcactataaatcgccactcttcgtgttctccacttcaccaactccttcaaacttattaacactttccttagttcaatatggggaagcccttcttcactctctctctttcttccctttgctattacctccagcaagttcaacgagtgccaactcaacaacctcaacgcgttggaacccgaccaccgcgttgagtccgaaggtggtcttattgaaacatggaactctcaacacccctgagctgcaatgcgccggtgtcactgtttccaaacgcaccctcaaccgcaacggcctccacttgccatcttactcaccttatcccccaaatgatcattgtcgttcaaggtgcgtaatattagtaagaagtatttatcagcttaacgtgataacaataatagtaatatgaaatatttattaaattttttataattaatctctgctagaaaatttgattaatcatttttagtagaatttgttttttctcaactaggttttaaacaccaca

SEQ ID NO: 1413 - DNA, 648 bp, Artificial
  Mutations within GlyA3B4 introduced by GmGlyA3B4_T01TALE nuclease
gttcatgtacggttgcagatataaacgaagcatagcttatgtatgaggtgtaacaaaattggaaacaatagccatgcaaggtgaagaatgtcaccaactcagaaacccttcttcattgacgtgtccctcactcactctcctctcttcactataaatcgccactcttcgtgttctccacttcaccaactccttcaaacttattaacactttccttagttcaatatggggaagcccttcttcactctctcttcgagtgcatgctttgctattacctccagcaagttcaacgagtgccaactcacaacctcaacgcgttggaacccgaccaccgcgttgagtccgaaggtggtcttattgaaacatggaactctcaacaccctgagctgcaatgcgccggtgtcactgttttccaaacgcaccctcaaccgcaacggcctccacttgccatcttactcaccttatcccccaaatgatcattgtcgttcaaggtgcgtaatattagtaagaagtatttatcagcttaacgtgataacaataatagtaatatgaaatatttattaaattttttataattaatctctgctagaaaatttgattaatcatttttagtagaatttgttttttctcaactaggtttttaaaacacca

SEQ ID NO: 1414 - DNA, 667 bp, Artificial
  Mutations within GlyA3B4 introduced by GmGlyA3B4_T01TALE nuclease
gttcatgtacggttgcagatataaacgaagcatagcttatgtatgaggtgtaacaaaattggaaacaatagccatgcaaggtgaagaatgtcaccaactcagaaacccttcttcattgacgtgtccctcactcactctcctctcttcactataaatcgccactcttcgtgttctccacttcaccaactccttcaaacttattaacactttccttagttcaatatggggaagcccttcttcactctctctctttcttccctttgcttgccgagtgcatgctttgctattacctccagcaagttcaacgagtgccaactcaacaacctcaacgcgttggaacccgaccaccgcgttgagtccgaaggtggtcttattgaaacatggaactctcaacaccctgagctgcaatgcgccggtgtcactgtttccaaacgcacctcaaccgcaacggcctccacttgccatcttactcaccttatcccccaaatgatcattgtcgttcaaggtgcgtaaatattagtaagaagtattttatcagctttaacgtgataacaataatagtaatatgaaatatttattaaattttttataattaatctctgctagaaaatttgattaatcatttttagtagaatttgttttttctcaactaggttttaaaacacca

SEQ ID NO: 1415 - DNA, 614 bp, Artificial
  Mutations within GlyA3B4 introduced by GmGlyA3B4_T01TALE nuclease
gttcatgtacggttgcagatataaacgaagcatagcttatgtatgaggtgtaacaaaattggaaacaatagccatgcaaggtgaagaatgtcaccaactcagaaacccttcttcattgacgtgtccctcactcactctcctctcttcactataaatcgccactcttcgtgttctccacttcaccaactccttcaaacttattaacactttccttagttcaatatggggaagcccttcgagtgcatgctttgctattacctccagcaagttcaacgagtgccaactcaacaacctcaacgcgttggaacccgaccaccgcgttgagtccgaaggtggtcttattgaaacatggaactctcaacaccctgagctgcaatgcgccggtgtcactgtttccaaacgcaccctcaaccgcaacggcctccacttgccatcttactcaccttatccccaaatgatcattgtcgttcaaggtgcgtaatattagtaagaagtatttatcagcttaacgtgataacaataatagtaatatgaaatatttattaattttttataattaatctctgctagaaaatttgattaatcatttttagtagaatttgtttttctcaact

SEQ ID NO: 1416 - DNA, 534 bp, Artificial
  Mutations within GlyA3B4 introduced by GmGlyA3B4_T01TALE nuclease
gttcatgtacggttgcagatataaacgaagcatagcttatgtatgaggtgtaacaaaattggaaacaatagccatgcaaggtgaagaatgtcaccaactcagaaacccttcttcattgacgtgtccctcactcactctcctctcttcactataaatcgccactcttcgtgttctccacttcaccaactccttcaaacttattaacactttccttagttcaatatggggaagccaggccgaccgcatgctttgctattacctccagcaagttcaacgagtgccaactcaacaacctcaacgcgttggaacccgaccaccgcgttgagtccgaaggtggtcttattgaaacatggaactctcaacaccctgagctgcaatgcgccggtgtcactgtttccaaacgcaccctcaaccgcaacggcctccacttgccatcttactcaccttatccccaaatgatcattgtcgttcaaggtgcgtaatattagtaagaagtatttatcagcttaacgtgataacaataatagtaatatg

SEQ ID NO: 1417 - DNA, 664 bp, Artificial
  Mutations within GlyA3B4 introduced by GmGlyA3B4_T01TALE nuclease
  misc_feature (628): n is a or c or t or g
gttcatgtacggttgcagatataaacgaagcatagcttatgtatgaggtgtaacaaaattggaaacaatagccatgcaaggtgaagaatgtcaccaactcagaaacccttcttcattgacgtgtccctcactcactctcctctcttcactataaatcgccactcttcgtgttctccacttcaccaactccttcaaacttattaacactttccttagttcaatatggggaagcccttcttcactctctctctttcttccctttgcttgctggtccagcggctgttgccggtgctgtgccaggccacggcttgaccccccagcaggtggtggccatcgccagcaatggcggtggcaagcaggcgctggagacggtcctcttgtcgagtgcatgctttgctattacctccagcaagttcaacgagtgccaactcaacaacctcaacgcgttggaacccgaccaccgcgttgagtccgaaggtggtcttattgaaacatggaactctcaacaccctgagctgcaatgcgccggtgtcactgtttccaaacgcaccctcaaccgcaacggcctccaacttgccatcttactcaccttatcccaaatgatcattgtcgttcaaggtgcgtaatnttagtaagaagtatttcatcagcttaacgtgataac

SEQ ID NO: 1418 - DNA, 607 bp, Artificial
  Mutations within GlyA3B4 introduced by GmGlyA3B4_T01TALE nuclease
gttcatgtacggttgcagatataaacgaagcatagcttatgtatgaggtgtaacaaaattggaaacaatagccatgcaaggtgaagaatgtcaccaactcagaaacccttcttcattgacgtgtccctcactcactctcctctcttcactataaatcgccactcttcgtgttctccacttcaccaactccttcaaacttattaacactttccttagttcaatatggggaagcccttcttcactctctctctttcttccctttgcttttgtcgagtgcatgctttgctattacctccagcaagttcaacgagtgccaactcaacaacctcaacgcgttggaactcgaccaccgcgttgagtccgaaggtggtcttattgaaacatggaactctcaacaccctgagctgcaatgcgccggtgtcactgtttccaaacgcaccctcaaccgcaacggcctccacttgccatcttactcaccttatcccccaaatgatcattgtcgttcaaggtgcgtaaatattagtaagaagtatttatcagcttaacgtgataacaataatagtaatatgaaatatttattaaattttttataattaatctctgctag

SEQ ID NO: 1419 - DNA, 559 bp, Artificial
  Mutations within GlyA3B4 introduced by GmGlyA3B4_T01TALE nuclease
gttcatgtacggttgcagatataaacgaagcatagcttatgtatgaggtgtaacaaaaattggaaacaatagccatgcaaggtgaagaatgtcaccaactcagaaacccttcttcattgacgtgtccctcactcactctcctctcttcactataaatcgccactcttcgtgttctccacttcaccaactccttcaaacttattaacactttccttagtttccagcaagttcaacgagtgccactcaacaacctcaacgcgttggaacccgaccaccgcgttgagtccgaaggtggtcttattgaaacatggaactctcaacaccctgagctgcaatgcgccggtgtcactgtttccaaacgcaccctcaaccgcaacggcctccacttgccatcttactcaccttatccccaaatgatcattgtcgttcaaggtgcgtaatattagtaagaagtatttatcagcttaacgtgataacaataatagtaatatgaaatatttattaaattttttataattaatctctgctagaaaattttgattaatcatttttagtagaa

SEQ ID NO: 1420 - DNA, 504 bp, Artificial
  Mutations within GlyA3B4 introduced by GmGlyA3B4_T01TALE nuclease
gttcatgtacggttgcagatataaacgaagcatagcttatgtatgaggtgtaacaaaattggaaacaatagccatgcaaggtgaagaatgtcaccaactcagaaaccccttcttcattgacgtgtccctcactcactctcctctcttcactataaatcgccactcttcgagtgcatgctttgctattacctccagcaagttcaacgagtgccaactcaacacctcaacgcgttggaacccgaccaccgcgttgagtccgaaggtggtcttattgaaacatggaactctcaacaccctgagctgcaatgcgccggtgtcactgtttccaaacgcaccctcaaccgcaacggcctccacttgccatcttactcaccttatcccccaaatgatcattgtcgttcaaggtgcgtaatattagtaagaagtatttatcagcttacgtgataacaataatagtaatagaaatatttattaaattttttataattaatctctgctagaaaa

SEQ ID NO: 1421 - DNA, 659 bp, Artificial
  Mutations within GlyA3B4 introduced by GmGlyA3B4_T01TALE nuclease
gttcatgtacggttgcagatataaacgaagcatagcttatgtatgaggtgtaacaaaattggaaacaatagccatgcaaggtgaagaatgtcaccaactcagaaacccttcttcattgacgtgtccctcactcactctcctctcttcactataaatcgccactcttcgtgttctccacttcaccaactccttcaaacttattaacactttccttagttcaatatggggaagcccttcttcactctctctctttcttccctttgcttgctttgctattacctccagcaagttcaacgagtgccaactcaacaacctcaacgcgttggaacccgaccaccgcgttgagtccgaaggtggtcttattgaaacatggaactctcaacacccctgagctgcaatgcgccggtgtcactgtttccaaacgcaccctcaaccgcaacggcctccacttgccatcttactcaccttatccccaaatgatcattgtcgttcaaggtgcgtaatattagtaagaagtatttatcagctttaacgtgataacaataatagtaatatgaaatatttattaaattttttataattaatctcttgctagaaaatttgattaatcattttttagtagaatttgttttttctcaactaggttttaaaacaccaca

SEQ ID NO: 1422 - DNA, 645 bp, Artificial
  Mutations within GlyA3B4 introduced by GmGlyA3B4_T01TALE nuclease
gttcatgtacggttgcagatataaacgaagcatagcttatgtatgaggtgtaacaaaattggaaacaatagccatgcaaggtgaagaatgtcaccaactcagaaacccttcttcattgacgtgtccctcactcactctcctctcttcactataaatcgccactcttcgtgttctccacttcaccaactccttcaaacttattaacactttccttagttcaatatggggaagcccttcttcactctctctctttctttccttgtcgagtgcatgctttgctattacctccagcaagttcaacgagtgccaactcaacaacctcaacgcgttggaacccgaccaccgcgttgagtccgaaggtggtcttattgaaacatggaactctcaacaccctgagctgcaatgcgccggtgtcactgtttccaaacgcaccctcaaccgcaacggcctccacttgccatcttactcaccttatcccccaaatgatcattgtcgttcaaggtgcgtaatattagtaagaagtatttatcagctttaacgtgataacaataatagtaatatgaaatatttattaaattttttataattaatctctgctagaaaatttgattaatctttttagtagaatttgttttttctcaacta

SEQ ID NO: 1423 - DNA, 677 bp, Artificial
  Mutations within GlyA3B4 introduced by GmGlyA3B4_T01TALE nuclease
gttcatgtacggttgcagatataaacgaagcatagcttatgtatgaggtgtaacaaaattggaaacaatagccatgcaaggtgaagaatgtcaccaactcagaaacccttcttcattgacgtgtccctcactcactctcctctcttcactataaatcgccactcttcgtgttctccacttcaccaactccttcaaacttattaacactttccttagttcaatatggggaagcccttcttcactctctctctttcttccctttgcttgctactgcacaaaaaagacccaccaagaagcttaaaggcacgcttagcgcgaaagcccgcactaagcgcgaagtcaacgtgaaaaataagttatctggtgtgcatgattcaagaaaaagatagtggcaaatcttggatcaaattctggagtatcacaaagacacacctggaaaaggattttttatttaaaagaggtgatctttgtcttaacacattggagggtacatcctttatggtacaagtagagggtacatctacttgggttgttgactgagaacaggagagggtacatctcttgtcgagtgcatgctttgctattacctccagcaagttcaacgagtgccaactcaacaacctcaacgcgttggaaccgaccaccgcgttgagtccgaaggtggtgccatttcgaac

SEQ ID NO: 1424 - DNA, 579 bp, Artificial
  Mutations within GlyA3B4 introduced by GmGlyA3B4_T01TALE nuclease
gttcatgtacggttgcagatataaacgaagcatagcttatgtatgaggtgtaacaaaattggaaacaatagccatgcaaggtgaagaatgtcaccaactcagaaacccttcttcattgacgtgtccctcactcactctcctctcttcactataaatcgccactcttcgtgttctccacttcaccaactccttcaaacttattaacactttccttagttcaatatggggaagcccttcttcactctctctctttcttccctttgcttgccccgaccaccgcgttgagtccgaaggtggtcttattgaaacatggaactctcaacaccctgagctgcaatgcgccggtgtcactgtttccaaacgcaccctcaaccgcaacggcctccacttgccatcttactcaccttatccccaaatgatcattgtcgttcaaggtgcgtaatattagtaagaagtatttatcagcttaacgtgataacaataatagtaatatgaaatatttattaaattttttataattaatctctgctagaaaatttgattaatcatttttagtagaatttgtttttctcaactagg

SEQ ID NO: 1425 - DNA, 599 bp, Artificial
  Mutations within GlyA3B4 introduced by GmGlyA3B4_T01TALE nuclease
gttcatgtacggttgcagatataaacgaagcatagcttatgtatgaggtgtaacaaaaattggaaacaatagccatgcaaggtgaagaatgtcaccaactcagaaacccttcttcattgacgtgtccctcactcactctcctctcttcactataaatcgccactcttcgtgttctccacttcaccaactccttcaaacttattaacactttccttagttcaatatggggaagcccttcttcactctctctctttcttccctttgcttgctatccagcgcctgcttgccaccgccattgctggcgatggccaccacctgctggggggtcaagccgttgggccctggcacagcaccggcaacagcgcctgcaccgtctccagcgcctgcttgccaccaatattgctggcgatggccaccacctgctccgggtcaagccgtgggcctggcacagcactcttgtcgagtgcatgctttgctattacctccagcaagttcaacgagtgccaactcaacaacctcaacgcgttggaaccgaccaccgcgtttgaagtccgaaggtggtcttattgaaacatggaactctcaacaccctgagctgc

SEQ ID NO: 1426 - DNA, 647 bp, Artificial
  Mutations within GlyA3B4 introduced by GmGlyA3B4_T01TALE nuclease
gttcatgtacggttgcagatataaacgaagcatagcttatgtatgaggtgtaacaaaattggaaacaatagccatgcaaggtgaagaatgtcaccaactcagaaacccttcttcattgacgtgtccctcactcactctcctctcttcacgatttatagggttcacgctcaacaaaatcgcatatcaatttcacaacaattggtatgccaaacatatataattcactgtaataattataaggataaaatgaaatcttgtcgagtgcatgctttgctattacctccagcaagttcaacgagtgccaactcaacaacctcaacgcgttggaacccgaccaccgcgttgagtccgaaggtggtcttattgaaacatggaactctcaacaccctgagctgcaatgcgccggtgtcactgtttccaaacgcaccctcaaccgcaacggcctccacttgccatcttactcaccttatccccaaatgatcattgtcgttcaaggtgcgtaatattagtaagaagtatttatcagctttaacgtgataacaataatagtaatatgaaatatttattaaattttttataattaatctctgctagaaaatttgattaatcattttttagtagaatttgttttttctcaactaggtttt

SEQ ID NO: 1427 - DNA, 652 bp, Artificial
  Mutations within GlyA3B4 introduced by GmGlyA3B4_T01TALE nuclease
gttcatgtacggttgcagatataaacgaagcatagcttatgtatgaggtgtaacaaaattggaaacaatagccatgcaaggtgaagaatgtcaccaactcagaaacccttcttcattgacgtgtccctcactcactctcctctcttcactataaatcgccactcttcgtgttctccacttcaccaactccttcaaacttattaacactttccttagttcaatatggggaagcccttcttcactctctctctttcttccctttgcttcttgtcgagtgcatgctttgctattacctccagcaagttcaacgagtgccaactcaacaacctcaacgcgttggaacccgaccaccgcgttgagtccgaaggtggtcttattgaaacatggaactctcaacaccctgagctgcaatgcgccggtgtcactgtttccaaacgcaccctcaccgcaacggcctccacttgccatcttactcaccttatccccaaatgatcattgtcgttcaaggtgcgtaatattagtaagaagtatttatcagcttaacgtgataacaataatagtaatatgaaatatttattaaattttttataattaatctctgctagaaaatttgattaatctttttagtagaatttgttttttctcaactagg

SEQ ID NO: 1428 - DNA, 644 bp, Artificial
  Mutations within GlyA3B4 introduced by GmGlyA3B4_T01TALE nuclease
gttcatgtacggttgcagatataaacgaagcatagcttatgtatgaggtgtaacaaaattggaaacaatagccatgcaaggtgaagaatgtcaccaactcagaaaccccttcttcattgacgtgtccctcactcactctcctctcttcactataaatcgccactcttcgtgttctccacttcaccaactccttcaaacttattaacactttccttagttcaatatggggaagcccttcttcactctctctctttcttccctttgcttgctacactcttgtcgagtgcatgctttgctattacctccagcaagttcaacgagtgccaactcaacaacctcaacgcgttggaacccgaccaccgcgttgagtccgaaggtggtcttattgaaacatggaactctcaacaccctgagctgcaatgcgccggtgtcactgtttccaaacgcaccctcaaccgcaacggcctccacttgccatcttactcaccttatccccaaatgatcattgtcgttcaaggtgcgtaatattagtaagagtatttatcagcttaacgtgataacaataatagtaatatgaaatatttattaaatttttataattaatctctgctagaaaatttgattaatcattttagtagaatttg

SEQ ID NO: 1429 - DNA, 717 bp, Artificial
  Mutations within GlyA3B4 introduced by GmGlyA3B4_T01TALE nuclease
gttcatgtacggttgcagatataaacgaagcatagcttatgtatgaggtgtaacaaaattggaaacaatagccatgcaaggtgaagaatgtcaccaactcagaaacccttcttcattgacgtgtccctcactcactctcctctcttcactataaatcgccactcttcgtgttctccacttcaccaactccttcaaacttattaacactttccttagttcaatatggggaagcccttcttcactctctctctttcttccctttgcttgctattcctaatttacccttgccttttctctttctctttcttccctttgtcttactcttgtcgagtgcatgctttgctattacctccagcaagttcaacgagtgccaactcaacaacctcaacgcgttggaacccgaccaccgcgtttgagtccgaaggtggtcttattgaaacatggaactctcaacaccctgagctgcaatgcgccggtgtcactgtttccaaacgcaccctcaaccgcaacggcctccacttgccatcttactcaccttatccccaaatgatcattgtcgttcaaggtgcgtaatattagtaagaagtatttatcagcttaacgtgataacaataatagtaatatgaaatatttattaaatttttataattaatctctgctagaaaatttgattaatcatttttagtagaatttgtttttctcaactaggttttaaaa

SEQ ID NO: 1430 - DNA, 545 bp, Artificial
  Mutations within GlyA3B4 introduced by GmGlyA3B4_T01TALE nuclease
gttcatgtacggttgcagatataaacgaagcatagcttatgtatgaggtgtaacaaaattggaaacaatagccatgcaaggtgaagaatgtcaccaactcagaaaccccttcttcattgacgtgtccctcactcactctcctctcttcactataaatcgccactcttcgtgttctccacttcaccaactccttcaaacttattaacacttgtcgagtgcatgctttgctattacctccagcaagttcaacgagtgccaactcaacaacctcaacgcgttggaacccgaccaccgcgttgagtccgaaggtggtcttattgaacatggaactctcaacaccctgagctgcaatgcgccggtgtcactgtttccaaacgcaccctcaaccgcaacggcctccacttgccatcttactcaccttatccccaaatgatcattgtcgttcaaggtgcgtaatattagtaagaagtatttatcagcttaacgtgataacaatatagtaatatgaaatatttattaaattttttataattaatctctgctag

SEQ ID NO: 1431 - DNA, 724 bp, Artificial
  Mutations within GlyA3B4 introduced by GmGlyA3B4_T01TALE nuclease
gttcatgtacggttgcagatataaacgaagcatagcttatgtatgaggtgtaacaaaattggaaacaatagccatgcaaggtgaagaatgtcaccaactcagaaacccttcttcattgacgtgtccctcactcactctcctctcttcactataaatcgccactcttcgtgttctccacttcaccaactccttcaaacttattaacactttccttagttcaatatggggaagcccttcttcactctctctctttcttccctttgcttgctgctctgatgccgcatagttaagccagccccgacacccgccaacacccgctgacgcgccctgacgggcttgtctgctactcttgtcgagtgcatgctttgctattacctccagcaagttcaacgagtgccaactcaacaacctcacgcgttggaacccgaccaccgcgttgagtccgaaggtggtcttattgaaacatggaactctcaacaccctgagctgcaatgcgccggtgtcactgtttccaaacgcaccctcaaccgcaacggcctccacttgccatcttactcaccttatccccaaatgatcattgtcgttcaaggtgcgtaatattagtaagaagtatttatcgcttaacgtgataacaataatagtaatatgaaaatatttattaaattttttataattaatctctgctagaaaatttgattaatcatttttagtagaatttgttttt

SEQ ID NO: 1432 - DNA, 625 bp, Artificial
  Mutations within GlyA3B4 introduced by GmGlyA3B4_T01TALE nuclease
gttcatgtacggttgcagatataaacgaagcatagcttatgtatgaggtgtaacaaaattggaaacaatagccatgcaaggtgaagaatgtcaccaactcagaaacccttcttcattgacgtgtccctcactcactctcctctcttcactataaatcgccactcttcgtgttctccacttcaccaactccttcaaacttattaacactttccttagttcaatatggggaagcccttcttcactctctctctttcttccctttgcttgtcgagtgcatgctttgctattacctccagcaagttcaacgagtgccaactcaacaacctcaacgcgttggaacccgaccaccgcgttgagtccgaaggtggtcttattgaaacatggaactctcaacaccctgagctgcaatgcgccggtgtcactgtttccaaacgcaccctcaaccgcaacggcctccacttgccatcttactcaccttatccccaaatgatcattgtcgttcaaggtgcgtaatattagtaagaagtatttatcagcttaacgtgataacaataatagtaatatgaaatatttattaaattttttataattaatctctgctagaaaatttgattaatctttttag

SEQ ID NO: 1433 - DNA, 737 bp, Artificial
  Mutations within GlyA3B4 introduced by GmGlyA3B4_T01TALE nuclease
  misc_feature (629); (678): n is a or c or t or g
gttcatgtacggttgcagatataaacgaagcatagcttatgtatgaggtgtaacaaaattggaaacaatagccatgcaaggtgaagaatgtcaccaactcagaaacccttcttcattgacgtgtccctcactcactctcctctcttcactataaatcgccactcttcgtgttctccacttcaccaactccttcaaacttattaacactttccttagttcaatatggggaagcccttcttcactctctctctttcttccctttgcttgctaccacctgctgagggtcaagccgtgggcctggcacagcaccggcaacagccgctggaccgtctccagcgcctgcttgccaccgccattgctggcgatggccactcttgtcgagtgcatgcttttgctattacctccagcaagttcaacgagtgccaactcaacaactcaacgcgttggaacccgaccaccgcgttgagtccgaaggtggtcttattgaaacatggaactctcaacaccctgagctgcaatgcgccggtgtcactgtttccaaacgcaccctcaaccgcaacgggcctccaacttgccatcttactcaccttatccccaaatgatccaattgtcgttcaaggtgcgtaatnttagtaagaagtatttcatcagctttaacgtgataacaataatagtaanatgaaatatttaattaaattttttataattaatcttctgctagaaaatttgattaatca

SEQ ID NO: 1434 - DNA, 657 bp, Artificial
  Mutations within GlyA3B4 introduced by GmGlyA3B4_T01TALE nuclease
gttcatgtacggttgcagatataaacgaagcatagcttatgtatgaggtgtaacaaaattggaaacaatagccatgcaaggtgaagaatgtcaccaactcagaaacccttcttcattgacgtgtccctcactcactctcctctcttcactataaatcgccactcttcgtgttctccacttcaccaactccttcaaacttattaacactttccttagttcaatatggggaagcccttcttcactctctctctttcttccctttgcttgctcgtctccagcggctgttgccggtgctgtgccaggcccacggcttgaccccccagcaggtggtggccatcgccaactcttgtcgagtgcatgctttgctattacctccagcaagttcaacgagtgccaactcaacaactcacgcgttggaacccgaccaccgcgttgagtccgaaggtggtccttattgaaacatggaactctcaacaccctgagctgcaatgcgccggtgtcactgtttccaaacgcaccctcaaccgcaacggcctccacttgccatcttactcaccttatccccaaatgatcattgtcgttcaaggtgcgtaatattagtaagaagtatttatcagcttaacgtgataacaataatagtaatatgaaatatttatt

SEQ ID NO: 1435 - DNA, 653 bp, Artificial; identical to SEQ ID NO: 587
  Mutations within GlyA3B4 introduced by GmGlyA3B4_T01TALE nuclease

SEQ ID NO: 1436 - DNA, 664 bp, Artificial
  Mutations within GlyA3B4 introduced by GmGlyA3B4_T01TALE nuclease
gttcatgtacggttgcagatataaacgaagcatagcttatgtatgaggtgtaacaaaattggaaacaatagccatgcaaggtgaagaatgtcaccaactcagaaacccttcttcattgacgtgtccctcactcactctcctctcttcactataaatcgccactcttcgtgttctccacttcaccaactccttcaaacttattaacactttccttagttcaatatggggaagcccttcttcactctctctctttcttccctttgcttgctatgtcgagtgcatgctttgctattacctccagcaagttcaacgagtgccaactcaacaacctcaacgcgttggaacccgaccaccgcgttgagtccgaaggtggtcttattgaaacatggaactctcaacaccctgagctgcaatgcgccggtgtcactgtttccaaacgcaccctcaaccgcaacggcctccacttgccatcttactcaccttatccccaaatgatcattgtcgttcaaggtgcgtaatattagtaagagtatttatcagcttaacgtgataacaataatagtaatatgaaatatttattaaatttttataattaatctctgctagaaaatttgattaatcattttagtagaatttgtttttctcaactaggttttaaacacca

SEQ ID NO: 1437 - DNA, 643 bp, Artificial
  Mutations within GlyA3B4 introduced by GmGlyA3B4_T01TALE nuclease
gttcatgtacggttgcagatataaacgaagcatagcttatgtatgaggtgtaacaaaattggaaacaatagccatgcaaggtgaagaatgtcaccaactcagaaacccttcttcattgacgtgtccctcactcactctcctctcttcactataaatcgccactcttcgtgttctccacttcaccaactccttcaaacttattaacactttccttagttcaatatggggaagcccttcttcactctctctcttgtcgagtgcatgctttgctattacctccagcaagttcaacgagtgccaactcaacaacctcaacgcgttggaacccgaccaccgcgttgagtccgaaggtggtcttattgaaacatggaactctcaacacccctgagctgcaatgcgccggtgtcactgtttccaaacgcaccctcaaccgcaacggcctccacttgccatcttactcaccttatcccccaaatgatcattgtcgttcaaggtgcgtaatattagtaagaagtatttatcagcttaacgtgataacaataatagtaatatgaaatatttattaaattttttataattaatctctgctagaaaatttgattaatcatttttagtagaatttgttttttctcaactaggtttt

SEQ ID NO: 1438 - DNA, 649 bp, Artificial
  Mutations within GlyA3B4 introduced by GmGlyA3B4_T01TALE nuclease
gttcatgtacggttgcagatataaacgaagcatagcttatgtatgaggtgtaacaaaattggaaacaatagccatgcaaggtgaagaatgtcaccaactcagaaacccttcttcattgacgtgtccctcactcactctcctctcttcactataaatcgccactcttcgtgttctccacttcaccaactccttcaaacttattaacactttccttagttcaatatggggaagcccttcttcactctctctctttcttccctttgcttgcagtgcatgctttgctattacctccagcaagttcaacgagtgccaactcaacaacctcaacgcgttggaacccgaccaccgcgttgagtccgaaggtggtcttattgaaacatggaactctcaacaccctgagctgcaatgcgccggtgtcactgtttccaaacgcaccctcaaccgcaacggcctccacttgccatcttactcaccttatccccaaatgatcattgtcgttcaaggtgcgtaaatattagtaagaagtatttatcagcttaacgtgataacaataatagtaatatgaaatatttattaaattttttataattaatctctgctagaaaatttgattaatctttttagtagaatttgttttttctcaactagg

SEQ ID NO: 1439 - DNA, 753 bp, Artificial
  Mutations within GlyA3B4 introduced by GmGlyA3B4_T01TALE nuclease
  misc_feature (677): n is a or c or t or g
gttcatgtacggttgcagatataaacgaagcatagcttatgtatgaggtgtaacaaaattggaaacaatagccatgcaaggtgaagaatgtcaccaactcagaaacccttcttcattgacgtgtccctcactcactctcctctcttcactataaatcgccactcttcgtgttctccacttcaccaactccttcaaacttattaacactttccttagttcaatatggggaagcccttcttcactctctctctttcttccctttgcttgctagcaggcgctggagacggtgcaggcgctgttgccggtgctgtgccaggcccacggcttgaccccccagcaggtggtggcccatcgccagccacgatggctcttgtcgagtgcatgctttgctattacctccagcaagttcaacgagtgccaactcaacaacctcacgcgttggaacccgaccaccgcgttgagtccgaaggtggtcttattgaaacatggaactctcaacaccctgagctgcaatgcgccggtgtcactgtttccaacgcacctcaaccgcaacggcctccacttgccatcttactcaccttatccccaaatgatcattgtcgttcaaggtgcgtaatattagtaagaagtatttatcgcttaacgtgataacaataatagtaatatgaaaatatttnttaaattttttataattaatctctgctagaaaatttgattaatcatttttagtagaatttgtttttctcaactagg

SEQ ID NO: 1440 - DNA, 669 bp, Artificial
  Mutations within GlyA3B4 introduced by GmGlyA3B4_T01TALE nuclease
gttcatgtacggttgcagatataaacgaagcatagcttatgtatgaggtgtaacaaaattggaaacaatagccatgcaaggtgaagaatgtcaccaactcagaaacccttcttcattgacgtgtccctcactcactctcctctcttcactataaatcgccactcttcgtgttctccacttcaccaactccttcaaacttattaacactttccttagttcaatatggggaagcccttcttcactctctctctttcttccctttgcttgctcgtctccagcggctgttgccggtgctgtgccaggcccacggcttgaccccccagcaggtggtggccatcgccaactcttgtcgagtgcatgctttgctattacctccagcaagttcaacgagtgccaactcaacaacctcaacgcgttggaacccgaccaccgcgttgagtccgaaggtggtcttattgaaacatggaactctcaacaccctgagctgcaatgcgccggtgtcactgtttccaaacgcaccctcaaccgcaacggcctccacttgccatctttactcaccttatccccaaatgatcattgtcgttcaaggtgcgtaatattagtaagaagtatttatcagcttaacgtgataacaataatagtaatatgaaatatttattaaatttttta

SEQ ID NO: 1441 - DNA, 627 bp, Artificial
  Mutations within GlyA3B4 introduced by GmGlyA3B4_T01TALE nuclease
gttcatgtacggttgcagatataaacgaagcatagcttatgtatgaggtgtaacaaaattggaaacaatagccatgcaaggtgaagaatgtcaccaactcagaaaccccttcttcattgacgtgtccctcactcactctcctctcttcactataaatcgccactcttcgtgttctccacttcaccaactccttcaaacttattaacactttccttagttcaatatggggaagcccttcttcactctctctctttcttccctttgcttgctgccgtgggcctggcacagcaccggcaacagcgctggaccgtctccagcgcctcttgtcgagtgcatgctttgctattacctccagcaagttcaacgagtgccactcaacaacctcaacgcgttggacccgaccaccgcgttgagtccgaaggtggtcttattgaaacatggaactctcaacgccctgagctgcaatgcgccggtgtcactgtttccaaacgcaccctcaaccgcaacggcctccacttgccatcttactcaccttatccccaaatgatcattgtcgttcaaggtgcgtaatattagtaagaagtatttatcagcttaacgtgataacaataatagtaatatgaaata

SEQ ID NO: 1442 - DNA, 580 bp, Artificial
  Mutations within GlyA3B4 introduced by GmGlyA3B4_T01TALE nuclease
gttcatgtacggttgcagatataaacgaagcatagcttatgtatgaggtgtaacaaaattggaaacaatagccatgcaaggtgaagaatgtcaccaactcagaaacccttcttcattgacgtgtccctcactcactctcctctcttcactataaatcgccactcttcgtgttctccacttcaccaactccttcaaacttattaacactttccttagttcaatatggggaagcccttcttcactctctctctttcttccctttgcttgccccgaccaccgcgttgagtccgaaggtggtcttattgaaacatggaactctcaacaccctgagctgcaatgcgccggtgtcactgtttccaaacgcaccctcaaccgcaacggcctccacttgccatcttactcaccttatccccaaaatgatcattgtcgttcaaggtgcgtaatattagtaagaagtatttatcagcttaacgtgataacaataatagtaatatgaaatatttattaaattttttataattaatctctgctagaaaatttgattaatcatttttagtagaatttgtttttctcaactagg

SEQ ID NO: 1443 - DNA, 501 bp, Artificial; identical to SEQ ID NO: 544
  Mutations within GlyA3B4 introduced by GmGlyA3B4_T01TALE nuclease

SEQ ID NO: 1444 - DNA, 643 bp, Artificial
  Mutations within GlyA3B4 introduced by GmGlyA3B4_T01TALE nuclease
  misc_feature (334): n is a or c or t or g
gttcatgtacggttgcagatataaacgaagcatagcttatgtatgaggtgtaacaaaattggaaacaatagccatgcaaggtgaagaatgtcaccaactcagaaacccttcttcattgacgtgtccctcactcactctcctctcttcactataaatcgccactcttcgtgttctccacttcaccaactccttcaaacttattaacactttccttagttcaatatggggaagcccttcttcactctctctctttcttccctttgcttgctacggcttgaccccccagcaggtggtggccatcgccagcaatggcggtggcaagcaggcgctgganacggtccagcggctgttgccggtgctgtgccaggcccacggcttgaccccccagcaggtggtggccatcgccagcaatggcggtggcaagcaggcgctggactcttgtcgagtgcatgctttgctattacctccagcaagttcaacgagtgccaactcaacaacctcaacgcgttggaacccgaccaccgcgttgagtccgaaggtggtcttattgaaacatggaactctcaacaccctgagctgcaatgcgccggtgtcactgtttccaaacgcaccctcaaccgcaacggcctccacttgccatctt

SEQ ID NO: 1445 - DNA, 667 bp, Artificial; identical to SEQ ID NO: 836
  Mutations within GlyA3B4 introduced by GmGlyA3B4_T01TALE nuclease

SEQ ID NO: 1446 - DNA, 555 bp, Artificial
  Mutations within GlyA3B4 introduced by GmGlyA3B4_T01TALE nuclease
gttcatgtacggttgcagatataaacgaagcatagcttatgtatgaggtgtaacaaaattggaaacaatagccatgcaaggtgaagaatgtcaccaactcagaaacccttcttcattgacgtgtccctcactcactctcctctcttcacgatttatagggttcacgctcaacaaaatcgcatatcaatttcacaacaattggtatgccaaacatatataattcactgtaataattataaggataaaatgaaatcttgtcgagtgcatgctttgctattacctccagcaagttcaacgagtgccaactcaacaacctcaacgcgttggaacccgaccaccgcgttgagtccgaaggtggtcttattgaaacatggaactctcaacacccctgagctgcaatgcgccggtgtcactgtttccaaacgcaccctcaaccgcaacggcctccacttgccatcttactcaccttatcccccaaatgatcattgtcgttcaaggtgcgtaatattagtaagaagtatttatcagctttaacgtgataacaataatagtaat

SEQ ID NO: 1447 - DNA, 764 bp, Artificial
  Mutations within GlyA3B4 introduced by GmGlyA3B4_T01TALE nuclease
gttcatgtacggttgcagatataaacgaagcatagcttatgtatgaggtgtaacaaaattggaaacaatagccatgcaaggtgaagaatgtcaccaactcagaaacccttcttcattgacgtgtccctcactcactctcctctcttcactataaatcgccactcttcgtgttctccacttcaccaactccttcaaacttattaacactttccttagttcaatatggggaagcccttcttcactctctctctttcttccctttgcttgctactttgtttctcatcaaaccaatgacatctttctctggagatcctaactgttttaagcatgataatgggaaatctcattactattacccaaacaaatatgaaacctatattgtcgagtgcatgctttgctattacctccagcaagttcaacgagtgccaactcaacaacctcaacgcgttggaacccgaccaccgcgttgagtccgaaggtggtcttattgaaacatggaactctcaacaccctgagctgcaatgcgccggtgtcactgtttccaaacgcaccctcaaccgcaacggcctccacttgccatcttactcaccttatccccaaatgatcattgtcgttcaaggtgcgtaatattagtaagaagtatttatcgcttaacgtgataacaataatagtaatatgaaaatatttattaaattttttataattaatctctgctagaaaatttgattaatcatttttagtagaatttgtttttctcaactagg

SEQ ID NO: 1448 - DNA, 588 bp, Artificial
  Mutations within GlyA3B4 introduced by GmGlyA3B4_T01TALE nuclease
gttcatgtacggttgcagatataaacgaagcatagcttatgtatgaggtgtaacaaaattggaaacaatagccatgcaaggtgaagaatgtcaccaactcagaaacccttcttcattgacgtgtccctcactcactctcctctcttcactataaatcgccactcttcgtgttctccacttcaccaactccttcaaacttattaacactttccttagttcaatatggggaagcccttcttcactctctctctttcttccctttgcttgctactactcttgtcgagtgcatgctttgctattacctccagcaagttcaacgagtgccaactcaacaacctcaacgcgttggaacccgaccaccgcgttgagtccgaaggtggtcttattgaaacatggaactctcaacacccctgagctgcaatgcgccggtgtcactgtttccaaacgcaccctcaaccgcaacggcctccacttgccatcttactcaccttatccccaaatgatcattgtcgttcaaggtgcgtaatattagtaagaagtatttatcagcttaacgtgataacaataatagtaatatgaaatattatt

SEQ ID NO: 1449 - DNA, 765 bp, Artificial
  Mutations within GlyA3B4 introduced by GmGlyA3B4_T01TALE nuclease
  misc_feature (698): n is a or c or t or g
gttcatgtacggttgcagatataaacgaagcatagcttatgtatgaggtgtaacaaaattggaaacaatagccatgcaaggtgaagaatgtcaccaactcagaaacccttcttcattgacgtgtccctcactcactctcctctcttcactataaatcgccactcttcgtgttctccacttcaccaactccttcaaacttattaacactttccttagttcaatatggggaagcccttcttcactctctctctttcttccctttgcttgctaccttttaaatatagatacaactactctaattctaattttttatttatagatgacgagacaataattaatttttttatacatcaaaacttagattaggagaaactcttctccaaataaagttagaagaaattacccttgtcgagtgcatgctttgctattacctccagcaagttcaacgagtgccaactcaacaacctcaacgcgttggaacccgaccaccgcgttgagtccgaaggtggtcttattgaaacatggaactctcaacaccctgagctgcaatgcgccggtgtcactgtttccaaacgcaccctcaaccgcaacggcctccacttgccatcttactcaccttatcccaaatgatcattgtcgttcaaggtgcgtaatattagtaagaagtatttcatcagcttaacgtgataacaataatngtaatatgaaatattttattaaattttttataattaatctctgctagaaaatttgattaatcatttt

SEQ ID NO: 1450 - DNA, 615 bp, Artificial; identical to SEQ ID NO: 938
  Mutations within GlyA3B4 introduced by GmGlyA3B4_T01TALE nuclease

SEQ ID NO: 1451 - DNA, 651 bp, Artificial
  Mutations within GlyA3B4 introduced by GmGlyA3B4_T01TALE nuclease
gttcatgtacggttgcagatataaacgaagcatagcttatgtatgaggtgtaacaaaattggaaacaatagccatgcaaggtgaagaatgtcaccaactcagaaacccttcttcattgacgtgtccctcactcactctcctctcttcactataaatcgccactcttcgtgttctccacttcaccaactccttcaaacttattaacactttccttagttcaatatggggaagcccttcttcactctctctctttctttccttgtcgagtgcatgctttgctattacctccagcaagttcaacgagtgccaactcaacaacctcaacgcgttggaacccgaccaccgcgttgagtccgaaggtggtcttattgaaacatggaactctcaacaccctgagctgcaatgcgccggtgtcactgtttccaaacgcaccctcaaccgcaacggcctccacttgccatcttactcaccttatcccccaaatgatcattgtcgttcaaggtgcgtaaatattagtaagaagtatttatcagcttaacgtgataacaataatagtaatatgaaatatttattaaatttttataattaattctctgctagaaaatttgattaatcatttttagtagaatttgtttttctcaactaggtttt

SEQ ID NO: 1452 - DNA, 670 bp, Artificial
  Mutations within GlyA3B4 introduced by GmGlyA3B4_T01TALE nuclease
gttcatgtacggttgcagatataaacgaagcatagcttatgtatgaggtgtaacaaaattggaaacaatagccatgcaaggtgaagaatgtcaccaactcagaaacccttcttcattgacgtgtccctcactcactctcctctcttcactataaatcgccactcttcgtgttctccacttcaccaactccttcaaacttattaacactttccttagttcaatatggggaagcccttcttcactctctctctttcttccctttgcttgctttgtcgagtgcatgctttgctattacctccagcaagttcaacgagtgccaactcaacaacctcaacgcgttggaacccgaccaccgcgttgagtccgaaggtggtcttattgaaacatggaactctcacaccctgagctgcaatgcgccggtgtcactgtttccaaacgcaccctcaaccgcaacggcctccacttgccatcttactcaccttatcccccaaatgatcattgtcgttcaaggtgcgtaaatattagtaagaagtatttatcagcttaacgtgataacaataatagtaatatgaaatatttattaaattttttataattaatctctgctagaaaatttgattaatcatttttagtagaatttgttttttctcaactaggttttaaaacacca

SEQ ID NO: 1453 - DNA, 507 bp, Artificial
  Mutations within GlyA3B4 introduced by GmGlyA3B4_T01TALE nuclease
gttcatgtacggttgcagatataaacgaagcatagcttatgtatgaggtgtaacaaaattggaaacaaatagccatgcaaggtgaagaatgtcaccaactcagaaacccttcttcattgacgtgtccctcactcactctcctctcttcactataaatcgccactcttcgtgttctccacttcaccaactccttcaaacttattaacactttccttagttcaatatggggaagcccttcttcactctctctctttcttccctttgcttgcttgtcgagtgcatgctttgctattacctccagcaagtttcaacgagtgccaactcaacaacctcaacgcgttggaacccgaccaccgcgttgagtcccgaaggtggtcttattgaaacatggaactctcaacaccctgagctgcaatgcgccggtgtcactgtttccaaacgcaccctcaaccgcaacggcctccacttgccatcttactcaccttatcccccaaatgatcttgtccg

SEQ ID NO: 1454 - DNA, 583 bp, Artificial
  Mutations within GlyA3B4 introduced by GmGlyA3B4_T01TALE nuclease
gttcatgtacggttgcagatataaacgaagcatagcttatgtatgaggtgtaacaaaattggaaacaatagccatgcaaggtgaagaatgtcaccaactcagaaacccttcttcattgacgtgtccctcactcactctcctctcttcactataaatcgccactcttcgtgttctccacttcaccaactccttcaaacttattaacactttccttagttcaatatggggaagcccttcttcactctctctctttcttccctttgcttgctactactcttgtcgagtgcatgctttgctattacctccagcaagttcaacgagtgccaactcaacaacctcaacgcgttggaacccgaccaccgcgttgagtccgaaggtggtcttattgaaacatggaactctcaacaccctgagctgcaatgcgccggtgtcactgtttccaaacgcaccctcaaccgcaacggcctccacttgccatcttactcaccttatccccaaatgatcattgtcgttcaaggtgcgtaatattagtaagaagtattttatcagcttaacgtgataacaataatagtaatatgaaata

SEQ ID NO: 1455 - DNA, 655 bp, Artificial; identical to SEQ ID NO: 1218
  Mutations within GlyA3B4 introduced by GmGlyA3B4_T01TALE nuclease

SEQ ID NO: 1456 - DNA, 665 bp, Artificial
  Mutations within GlyA3B4 introduced by GmGlyA3B4_T01TALE nuclease
gttcatgtacggttgcagatataaacgaagcatagcttatgtatgaggtgtaacaaaattggaaacaatagccatgcaaggtgaagaatgtcaccaactcagaaaccccttcttcattgacgtgtccctcactcactctcctctcttcactataaatcgccactcttcgtgttctccacttcaccaactccttcaaacttattaacactttccttagttcaatatggggaagcccttcttcactctctctctttcttccctttgcttgctattcctaatttacccttgccttttctctttctctttcttccctttgtcttactcttgtcgagtgcatgctttgctattacctccagcaagttcaacgagtgccaactcaacaacctcaacgcgttggaaccccgaccaccgcgttgagtccgaaggtggtcttattgaaacatggaactctcaacaccctgagctgcaatgcgccggtgtcactgtttccaaaacgcaccctcaaccgcaacggcctccacttgccatcttactcaccttatccccaaatgatcattgtcgttcaaggtgcgtaatattagtaagaagtatttatcagcttaacgtgataacaataatagtaaatatgaaatatttattaaatttttataattaatctctgctag

SEQ ID NO: 1457 - DNA, 586 bp, Artificial
  Mutations within GlyA3B4 introduced by GmGlyA3B4_T01TALE nuclease
  misc_feature (449): n is a or c or t or g
gttcatgtacggttgcagatataaacgaagcatagcttatgtatgaggtgtaacaaaaattggaaacaatagccatgcaaggtgaagaatgtcaccaactcagaaaccccttcttcattgacgtgtccctcactcactctcctctcttcactataaatcgccactcttcgtgttctccacttcaccaactccttcaaacttattaacactttccttagttcaatatggggaagcccttcttcactctctctctttcttccctttgcttgctggccatcgccagccacgatggcggcaagcaggcgctggagacggtctcttgtcgagtgcatgctttgctattacctccagcaagttcaacgagtgccaactcaacacctcaacgcgttggaacccgaccaccgcgttgagtccgaaggtggtcttattgaaaacatggaactctcaanaccctgagctgcaatgcgccggtgtcactgtttccaaacgcacccctcaaccgcaacgggcctccacttgccatcttactcacccttatccccaaatgatcattgtcgttcaaggtgcgtaatattagtaagaagta

SEQ ID NO: 1458 - DNA, 651 bp, Artificial
  Mutations within GlyA3B4 introduced by GmGlyA3B4_T01TALE nuclease
gttcatgtacggttgcagatataaacgaagcatagcttatgtatgaggtgtaacaaaattggaaacaatagccatgcaaggtgaagaatgtcaccaactcagaaacccttcttcattgacgtgtccctcactcactctcctctcttcactataaatcgccactcttcgtgttctccacttcaccaactccttcaaacttattaacactttccttagttcaatatggggaagcccttcttcactctctctctttcttccctttgcttgctattacctccagcaagttcaacgagtgccaactcaacaacctcaacgcgttggaacccgaccaccgcgttgagtccgaaggtggtcttattgaaacatggaactctcaacacccctgagctgcaatgcgccggtgtcactgttttccaaacgcaccctcaaccgcaacggcctccacttgccatcttactcaccttatcccccaaatgatcattgtcgttcaaggtgcgtaatattagtaagaagtatttatcagcttaacgtgataacaataatagtaatatgaaatatttattaaattttttataattaatctctgctagaaaatttgattaatcatttttagtagaatttgttttttctcaactaggttttaaaacacca

SEQ ID NO: 1459 - DNA, 656 bp, Artificial
  Mutations within GlyA3B4 introduced by GmGlyA3B4_T01TALE nuclease
gttcatgtacggttgcagatataaacgaagcatagcttatgtatgaggtgtaacaaaattggaaacaatagccatgcaaggtgaagaatgtcaccaactcagaaacccttcttcattgacgtgtccctcactcactctcctctcttcactataaatcgccactcttcgtgttctccacttcaccaactccttcaaacttattaacactttccttagttcaatatggggaagcccttcttcactctctctctttcttccctttgcttgctctcgagtgcatgctttgctattacctccagcaagttcaacgagtgccaactcaacaacctcaacgcgttggaacccgaccaccgcgttgagtccgaaggtggtcttattgaaacatggaactctcaacaccctgagctgcaatgcgccggtgtcactgtttccaaacgcaccctcaaccgcaacggcctccacttgccatcttactcaccttatcccccaaatgatcattgtcgttcaaggtgcgtaaatattagtaagaagtatttatcagcttaacgtgataacaataatagtaatatgaatatttattaaattttttataattaatctctgctagaaaatttgattaatctttttagtagaattgttttttctcaactaggttt

SEQ ID NO: 1460 - DNA, 689 bp, Artificial
  Mutations within GlyA3B4 introduced by GmGlyA3B4_T01TALE nuclease
gttcatgtacggttgcagatataaacgaagcatagcttatgtatgaggtgtaacaaaattggaaacaatagccatgcaaggtgaagaatgtcaccaactcagaaacccttcttcattgacgtgtccctcactcactctcctctcttcactataaatcgccactcttcgtgttctccacttcaccaactccttcaaacttattaacactttccttagttcaatatggggaagcccttcttcactctctctctttcttccctttgcttgccaacttacttctgacaacgatcggaggaccgaaggagctaaccgcttttttgcacaacatgggggatcatgtaactcgccttgatcgttgggaaccggagctgaatgaagccataccaaactcttgtcgagtgcatgctttgctattacctccagcaagttcaacgagtgccaactcaacaacctcaacgcgttggaacccgaccaccgcgttgagtccgaaggtggtcttattgaaacatggaactctcaacaccctgagctgcaatgcgccggtgtcactgtttccaaacgcaccctcaaccgcaacggcctccacttgccatcttactcaccttatccccaaaatgatcattgtcgttcaaggtgcgtaaatcattagtaagaagtatttatcagcttaacgtgataacaataatagt

SEQ ID NO: 1461 - DNA, 777 bp, Artificial
  Mutations within GlyA3B4 introduced by GmGlyA3B4_T01TALE nuclease
gttcatgtacggttgcagatataaacgaagcatagcttatgtatgaggtgtaacaaaaattggaaacaatagccatgcaaggtgaagaatgtcaccaactcagaaacccttcttcattgacgtgtccctcactcactctcctctcttcactataaatcgccactcttcgtgttctccacttcaccaactccttcaaacttattaacactttccttagttcaatatgggggaagcccttcttcactctctctctttcttccctttgcttgccaacttacttctgacaacgatcggaggaccgaaggagctaaccgctttttttgcacaacatgggggatcatgtaaactcgccttgatcgttggggaaccggagctgaatgaagccataccaaactcttgtcgagtgcatgctttgctattacctccagcaagttcaacgagtgccaactcaacaacctcaacgcgttggaacccgaccaccgcgttgagtccgaaggtggtcttattgaaacatggaactctcaacaccctgagctgcaatgcgccggtgtcactgttttccaaacgcaccctcaaccgcaacggcctccacttgccatcttactcacctttatccccaaatgatcattgtcgttcaaggtgcgtaatattagtaagaagtatttatcagcttaacgtgataacaataatagtaatatgaaatatttattaaattttttataattaaatctctgctagaaaatttgattaattcattttagtagaatttgtttttct

SEQ ID NO: 1462 - DNA, 708 bp, Artificial
  Mutations within GlyA3B4 introduced by GmGlyA3B4_T01TALE nuclease
gttcatgtacggttgcagatataaacgaagcatagcttatgtatgaggtgtaacaaaaattggaaacaatagccatgcaaggtgaagaatgtcaccaactcagaaacccttcttcattgacgtgtccctcactcactctcctctcttcactataaatcgccactcttcgtgttctccacttcaccaactccttcaaacttattaacactttccttagttcaatatggggaagcccttcttcactctctctctttcttccctttgcttgctgccgtgggcctggcacagcaccggcaacagcgctggaccgtctccagcgcctcttgtcgagtgcatgctttgctattacctccagcaagttcaacgagtgccaactcaacaacctcaacgcgttggaacccgaccaccgcgttgagtccgaaggtggtcttattgaaacatggaactctcaacaccctgagctgcaatgcgccggtgtcactgtttccaaacgcaccctcaaccgcaacggcctccacttgccatcttactcacctttatccccaaatgatcattgtcgttcaaggtgcgcaatattagtaagaagtatttatcagcttaacgtgataacaataatagtaatatgaaatatttattaaaattttttataattaatctctgctagaaaaatttgattaatcatttttagtagaatttgtttttctcaac

SEQ ID NO: 1463 - DNA, 719 bp, Artificial
  Mutations within GlyA3B4 introduced by GmGlyA3B4_T01TALE nuclease
gttcatgtacggttgcagatataaacgaagcatagcttatgtatgaggtgtaacaaaattggaaacaatagccatgcaaggtgaagaatgtcaccaactcagaaacccttcttcattgacgtgtccctcactcactctcctctcttcactataaatcgccactcttcgtgttctccacttcaccaactccttcaaacttattaacactttccttagttcaatatggggaagcccttcttcactctctctctttcttccctttgcttgctactaaccgcttttttgcacaacatggggatcatgtaactcgccttgatcgttgggaaccggagctgaatgaagccataccaaacgacgagcgtgacaccacgatgcctgtagcaatggcaacaacgttgcgcaaactattaactggcgaactacttactctagcttcccggcaacaattaatagactggattgtcgagtgcatgctttgctattacctccagcaagttcaacgagtgccaactcaacaacctcaacgcgttggaacccgaccaaccgcgttgagtccgaaggtggtcttattgaaacatggaactctcaacaccctgagctgcaatgcgccggtgtcactgtttccaaacgcaccctcaaccgcaacggcctccacttgccatcttactcaccttatccccaaatgatcattgtcgttcaaggtgcgtaatattagtaag

SEQ ID NO: 1464 - DNA, 608 bp, Artificial; identical to SEQ ID NO: 546
  Mutations within GlyA3B4 introduced by GmGlyA3B4_T01TALE nuclease

SEQ ID NO: 1465 - DNA, 606 bp, Artificial; identical to SEQ ID NO: 669
  Mutations within GlyA3B4 introduced by GmGlyA3B4_T01TALE nuclease

SEQ ID NO: 1466 - DNA, 669 bp, Artificial
  Mutations within GlyA3B4 introduced by GmGlyA3B4_T01TALE nuclease
gttcatgtacggttgcagatataaacgaagcatagcttatgtatgaggtgtaacaaaattggaaacaatagccatgcaaggtgaagaatgtcaccaactcagaaacccttcttcattgacgtgtccctcactcactctcctctcttcactataaatcgccactcttcgtgttctccacttcaccaactccttcaaacttattaacactttccttagttcaatatggggaagcccttcttcactctctctctttcttccctttgcttgctactgcttgccaccgccattgctggcgatggccaccacctgctggggggtcaagccgtgggcctggcacagcaccggcaacagcgcctgcaccgtctccagcgcctgctttgctattacctccagcaagttcaacgagtgccactcaacaacctcacgcgttggaacccgaccaccgcgttgagtccgaaggtggtcttattgaaacatggaactctcaacaccctgagctgcaatgcgccggtgtcactgtttccaaacgcaccctcaaccgcaacggcctccacttgccatcttactcaccttatccccaaatgatcattgtcgttcaaggtgcgtaatattagtaagaagtatttatcagcttaacgtgataacaataatagtaatatgaaaatattt

SEQ ID NO: 1467 - DNA, 629 bp, Artificial
  Mutations within GlyA3B4 introduced by GmGlyA3B4_T01TALE nuclease
gttcatgtacggttgcagatataaacgaagcatagcttatgtatgaggtgtaacaaaattggaaacaatagccatgcaaggtgaagaatgtcaccaactcagaaacccttcttcattgacgtgtccctcactcactctcctctcttcactataaatcgccactcttcgtgttctccacttcaccaactccttcaaacttattaacactttccttagttcaatatggggaagcccttcttcactctctctctttcttccctttgctttgtcgagtgcatgctttgctattacctccagcaagttcaacgagtgccaactcaacaacctcaacgcgttggaacccgaccaccgcgttgagtccgaaggtggtcttattgaaacatggaactctcaacaccctgagctgcaatgcgccggtgtcactgtttccaaacgcaccctcaaccgcaacggcctccacttgccatcttactcaccttatcccccaaatgatcattgtcgttcaaggtgcgtaaatattagtaagaagtatttatcagctttaacgtgataacaataatagtaatatgaaatatttattaaattttttataattaatctctgctagaaaatttgattaatctttttag

SEQ ID NO: 1468 - DNA, 789 bp, Artificial
  Mutations within GlyA3B4 introduced by GmGlyA3B4_T01TALE nuclease
gttcatgtacggttgcagatataaacgaagcatagcttatgtatgaggtgtaacaaaaattggaaacaatagccatgcaaggtgaagaatgtcaccaactcagaaacccttcttcattgacgtgtccctcactcactctcctctcttcactataaatcgccactcttcgtgttctccacttcaccaactccttcaaacttattaacactttccttagttcaatatggggaagcccttcttcactctctctctttcttccctttgcttgccaacttacttctgacaacgatcggaggaccgaaggagctaaccgctttttttgcacaacatgggggatcatgtaactcgccttgatcgttggggaaccggagctgaatgaagccataccaaactcttgtcgagtgcatgctttgctattacctccagcaagttcaacgagtgccaactcaacaacctcaacgcgttggaacccgaccaccgcgttgagtccgaaggtggtcttattgaaacatggaactctcaacaccctgagctgcaatgcgccggtgtcactgtttccaaacgcaccctcaaccgcaacggcctccacttgccatcttactcaccttatccccaaatgatcattgtcgttcaaggtgcgtaatcattagtaagaagtatttatcagcttaacgtgataacaataatagtaatatgaaaatatttattaaaatttttttataaattaatctctgctagaaaattttgattaatcattttagtagaatttgtttttctcaactaggtttt

SEQ ID NO: 1469 - DNA, 650 bp, Artificial
  Mutations within GlyA3B4 introduced by GmGlyA3B4_T01TALE nuclease
gttcatgtacggttgcagatataaacgaagcatagcttatgtatgaggtgtaacaaaattggaaacaatagccatgcaaggtgaagaatgtcaccaactcagaaacccttcttcattgacgtgtccctcactcactctcctctcttcactataaatcgccactcttcgtgttctccacttcaccaactccttcaaacttattaacactttccttagttcaatatggggaagcccttcttcactctctctctttcttccctttgcttgtcgagtgcatgctttgctattacctccagcaagttcaacgagtgccaactcaacaacctcaacgcgttggaacccgaccaccgcgttgagtccgaaggtggtcttattgaaacatggaactctcaacaccctgagctgcaatgcgccggtgtcactgtttccaaacgcaccctcaaccgcaacggcctccacttgccatcttactcaccttatccccaaatgatcattgtcgttcaaggtgcgtaatattagtaagaagtatttatcagcttaacgtgataacaataatagtaatatgaaatatttattaaatttttataattaatctctgctagaaaatttgattaatcatttttagtagaatttgttttttctcaactagg

SEQ ID NO: 1470 - DNA, 764 bp, Artificial
  Mutations within GlyA3B4 introduced by GmGlyA3B4_T01TALE nuclease
  misc_feature (687): n is a or c or t or g
gttcatgtacggttgcagatataaacgaagcatagcttatgtatgaggtgtaacaaaattggaaacaatagccatgcaaggtgaagaatgtcaccaactcagaaacccttcttcattgacgtgtccctcactcactctcctctcttcactataaatcgccactcttcgtgttctccacttcaccaactccttcaaacttattaacactttccttagttcaatatggggaagcccttcttcactctctctctttcttccctttgcttgctactttgtttctcatcaaaccaatgacatctttctctggagatcctaactgttttaagcatgataatgggaaatctcattactattacccaaacaaatatgaaacctatattgtcgagtgcatgctttgctattacctccagcaagttcaacgagtgccaactcaacaacctcacgcgttggaacccgaccaccgcgttgagtccgaaggtggtcttattgaaacatggaactctcaacaccctgagctgcaatgcgccggtgtcactgtttccaaacgcaccctcaaccgcaacggcctccacttgccatcttactcaccttatccccaaatgatcattgtcgttcaaggtgcgtaatattagtaagaagtatttatcgcttaacgtgataacaataatagtaatatgaaaatatttnttaaattttttataattaatctcttgctagaaaatttgattaatcatttttagtagaatttgtttttctcaactagg

SEQ ID NO: 1471 - DNA, 636 bp, Artificial
  Mutations within GlyA3B4 introduced by GmGlyA3B4_T01TALE nuclease
gttcatgtacggttgcagatataaacgaagcatagcttatgtatgaggtgtaacaaaattggaaacaatagccatgcaaggtgaagaatgtcaccaactcagaaaccccttcttcattgacgtgtccctcactcactctcctctcttcactataaatcgccactcttcgtgttctccacttcaccaactccttcaaacttattaacactttccttagttcaatatggggaagcccttcttcactctctctctttcttccctttgcttgttgtcgagtgcatgctttgctattacctccagcaagttcaacgagtgccaactcaacaacctcaacgcgttggaacccgaccaccgcgttgagtccgaaggtggtcttattgaaacatggaactctcaacaccctgagctgcaatgcgccggtgtcactgtttccaaacgcaccctcaaccgcaacggcctccacttgccatcttactcaccttatcccccaaatgatcattgtcgttcaaggtgcgtaatattagtaagaagtatttatcagcttaacgtgataacaataatagtaatatgaaatatttattaaattttttataattaatctctgctagaaaatttgattaatcatttttagtagaa

SEQ ID NO: 1472 - DNA, 608 bp, Artificial; identical to SEQ ID NO: 546
  Mutations within GlyA3B4 introduced by GmGlyA3B4_T01TALE nuclease

SEQ ID NO: 1473 - DNA, 654 bp, Artificial
  Mutations within GlyA3B4 introduced by GmGlyA3B4_T01TALE nuclease
gttcatgtacggttgcagatataaacgaagcatagcttatgtatgaggtgtaacaaaattggaaacaatagccatgcaaggtgaagaatgtcaccaactcagaaacccttcttcattgacgtgtccctcactcactctcctctcttcacgatttatagggttcacgctcaacaaaatcgcatatcaatttcacaacaattggtatgccaaacatatataattcactgtaataattataaggataaaatgaaatcttgtcgagtgcatgctttgctattacctccagcaagttcaacgagtgccaactcaacaacctcaacgcgttggaacccgaccaccgcgttgagtccgaaggtggtcttattgaaacatggaactctcaacaccctgagctgcaatgcgccggtgtcactgtttccaaacgcaccctcaaccgcaacggcctccacttgccatcttactcaccttatccccaaatgatcattgtcgttcaaggtgcgtaatattagtaagaagtatttatcagcttaacgtgataacaataatagtaatatgaaatatttattaaattttttataattaatctctgctagaaaatttgattaatcatttttagtagaatttgttttttctcaactaggttttaaaacacca

SEQ ID NO: 1474 - DNA, 733 bp, Artificial
  Mutations within GlyA3B4 introduced by GmGlyA3B4_T01TALE nuclease
  misc_feature (691): n is a or c or t or g
gttcatgtacggttgcagatataaacgaagcatagcttatgtatgaggtgtaacaaaattggaaacaatagccatgcaaggtgaagaatgtcaccaactcagaaacccttcttcattgacgtgtccctcactcactctcctctcttcactataaatcgccactcttcgtgttctccacttcaccaactccttcaaacttattaacactttccttagttcaatatggggaagcccttcttcactctctctctttcttccctttgcttgctacagcaccggcaacagccgctggaccgtctccagcgcctgcttgccgccatcgtggctggcgatggccaccacctgctccggggtcaagccgtgggcctggcacagcaccggcaacagccgctggactcttgtcgagtgcatgcttttgctattacctccagcaagttcaacgagtgccaactcaacaacctcaacgcgttggaacccgaccaccgcgttgagtccgaaggtggtcttattgaaacatggaactctcaacaccctgagctgcaatgcgccggtgtcactgtttccaaacgcaccctcaaccgcaacggcctccacttgccatcttactcaccttatcccaaatgatcattgtcgttcaaggtgcgtaatatagtaagaagtatttatcagcttaacgtgataacaaataatngtaatatgaaatatttattaaatttttataattaatctctgc

SEQ ID NO: 1475 - DNA, 608 bp, Artificial; identical to SEQ ID NO: 896
  Mutations within GlyA3B4 introduced by GmGlyA3B4_T01TALE nuclease

SEQ ID NO: 1476 - DNA, 655 bp, Artificial
  Mutations within GlyA3B4 introduced by GmGlyA3B4_T01TALE nuclease
gttcatgtacggttgcagatataaacgaagcatagcttatgtatgaggtgtaacaaaattggaaacaatagccatgcaaggtgaagaatgtcaccaactcagaaacccttcttcattgacgtgtccctcactcactctcctctcttcactataaatcgccactcttcgtgttctccacttcaccaactccttcaaacttattaacactttccttagttcaatatggggaagcccttcttcactctctctctttcttccctttgcttgctaccttttaaatatagatacaactactctaattctaattttttattttatagatgacgagacaataattaatttttttatacatcaaaacttagattaggagaaaactcttctccaaataaagttagaagaaattaccccttgtcgagtgcatgcttttgctattacctccagcaagttcaacgagtgccaactcaacaacctcaacgcgttggaacccgaccaccgcgttgagtcccgaaggtggtcttattgaaacatggaactctcaacaccctgagctgcaatgcgccggtgtcactgttttccaaacgcaccctcaaccgcaacggcctccacttgccatcttactcaccttatccccaaatgatcattgtcgttcaaggtg

SEQ ID NO: 1477 - DNA, 615 bp, Artificial
  Mutations within GlyA3B4 introduced by GmGlyA3B4_T01TALE nuclease
gttcatgtacggttgcagatataaacgaagcatagcttatgtatgaggtgtaacaaaattggaaacaatagccatgcaaggtgaagaatgtcaccaactcagaaacccttcttcattgacgtgtccctcactcactctcctctcttcactataaatcgccactcttcgtgttctccacttcaccaactccttcaaacttattaacactttccttagttcaatatggggaagcccttcttcactctctctctttcttccctttgcttgctactactcttgtcgagtgcatgctttgctattacctccagcaagttcaacgagtgccaactcaacaacctcaacgcgttggaacccgaccaccgcgttgagtccgaaggtggtcttattgaaacatggaactctcaacaccctgagctgcaatgcgccggtgtcactgtttccaaacgcaccctcaaccgcaacggcctccacttgccatcttactcaccttatccccaaatgatcattgtcgttcaaggtgcgtaatattagtaagaagtatttatcagcttaacgtgataacaataatagtaatatgaaatattattaaattttttataattaaatctctgctag

SEQ ID NO: 1478 - DNA, 622 bp, Artificial; identical to SEQ ID NO: 579
  Mutations within GlyA3B4 introduced by GmGlyA3B4_T01TALE nuclease

SEQ ID NO: 1479 - DNA, 740 bp, Artificial
  Mutations within GlyA3B4 introduced by GmGlyA3B4_T01TALE nuclease
  misc_feature (640); (683): n is a or c or t or g
gttcatgtacggttgcagatataaacgaagcatagcttatgtatgaggtgtaacaaaattggaaacaatagccatgcaaggtgaagaatgtcaccaactcagaaacccttcttcattgacgtgtccctcactcactctcctctcttcactataaatcgccactcttcgtgttctccacttcaccaactccttcaaacttattaacactttccttagttcaatatggggaagcccttcttcactctctctctttcttccctttgcttgctttccagcgcctgcttgccaccaatattgctggcgatggccaccacctgctggggggtcaagccgtgggcctggcacagcaccggcaaccgcgctggaccgtctccagcgcctgcttgccgttgtcgagtgcatgctttgctattacctccagcaagttcaacgagtgccaactcaacaacctcaacgcgttggaacccgaccaccgcgttgagtccgaaggtggtcttattgaaacatggaactctcaacaccctgagctgcaatgcgccggtgtcactgtttccaaacgcaccctcaaccgcaacggcctccacttgccatcttactcaccttatccccaaatgatcattgtcgttcaaggtgcgtaatnttagtaagaagtatttcatcagcttaacgtgataacaataatngtaatatgaaatatttattaaattttttataattaatctctgctagaaaatttgatt

SEQ ID NO: 1480 - DNA, 649 bp, Artificial
  Mutations within GlyA3B4 introduced by GmGlyA3B4_T01TALE nuclease
gttcatgtacggttgcagatataaacgaagcatagcttatgtatgaggtgtaacaaaattggaaacaatagccatgcaaggtgaagaatgtcaccaactcagaaacccttcttcattgacgtgtccctcactcactctcctctcttcactataaatcgccactcttcgtgttctccacttcaccaactccttcaaacttattaacactttccttagttcaatatggggaagcccttcttcactctctctctttcttccctttgcttgctattacctccagcaagttcaacgagtgccaactcaacaacctcaacgcgttggaacccgaccaccgcgttgagtccgaaggtggtcttattgaaacatggaactctcaacacccctgagctgcaatgcgccggtgtcactgtttccaaacgcaccctcaaccgcaacggcctccacttgccatcttactcaccttatcccccaaatgatcattgtcgttcaaggtgcgtaatattagtaagaagtatttatcagcttaacgtgataacaataatagtaatatgaaatatttattaaattttttataattaatctctgctagaaaatttgattaatcatttttagtagaatttgttttttctcaactaggttttaaacacca

SEQ ID NO: 1481 - DNA, 651 bp, Artificial
  Mutations within GlyA3B4 introduced by GmGlyA3B4_T01TALE nuclease
gttcatgtacggttgcagatataaacgaagcatagcttatgtatgaggtgtaacaaaattggaaacaatagccatgcaaggtgaagaatgtcaccaactcagaaacccttcttcattgacgtgtccctcactcactctcctctcttcactataaatcgccactcttcgtgttctccacttcaccaactccttcaaacttattaacactttccttagttcaatatggggaagcccttcttcactctctctcttgtcgagtgcatgctttgctattacctccagcaagttcaacgagtgccaactcaacaacctcaacgcgttggaacccgaccaccgcgttgagtccgaaggtggtcttattgaaacatggaactctcaacaccctgagctgcaatgcgccggtgtcactgtttccaaacgcaccctcaaccgcaacggcctccacttgccatcttactcaccttatcccccaaatgatcattgtcgttcaaggtgcgtaatattagtaagaagtatttatcagcttaacgtgataacaataatagtaatatgaaatatttattaaattttttataattaatctctgctagaaaatttgattaatcatttttagtagaatttgttttttctcaactaggttttaaaacacca

SEQ ID NO: 1482 - DNA, 778 bp, Artificial
  Mutations within GlyA3B4 introduced by GmGlyA3B4_T01TALE nuclease
gttcatgtacggttgcagatataaacgaagcatagcttatgtatgaggtgtaacaaaattggaaacaatagccatgcaaggtgaagaatgtcaccaactcagaaacccttcttcattgacgtgtccctcactcactctcctctcttcactataaatcgccactcttcgtgttctccacttcaccaactccttcaaacttattaacactttccttagttcaatatggggaagcccttcttcactctctctctttcttccctttgcttgctactccagcgcctgcttgccgccatcgtggctggcgatggccaccacctgctccggggtcaagttgagcggggcacccgtcagtgcattgcgccatgcatgcactgcctccactgcggtcacgccgccacgttttgcaatcttgagaagttggcctgtgtccaactgtaacggtggacctctcaactctcccgccaccgtgagcaaggcctccagagcgcgtgcgccggaccactgtttgccgacgccaacgatcgcttcgtgtgtcgcctctggcaacgctgcgatcatgtcctgatacttgacagcgacggtccctaacgctgccgggtgtcttgtcgagtgcatgctttgctattacctccagcaagtcaacgagtgccaactcaacacctcaacgcgttggaacccgaccaccgcgttgaagtccgaaggtggtcttattgaaactggaacctcagcaccctgagctgcaatgcgccggtgtcactgtttccaaacgcaccctcaa

SEQ ID NO: 1483 - DNA, 667 bp, Artificial
  Mutations within GlyA3B4 introduced by GmGlyA3B4_T01TALE nuclease
gttcatgtacggttgcagatataaacgaagcatagcttatgtatgaggtgtaacaaaattggaaacaatagccatgcaaggtgaagaatgtcaccaactcagaaacccttcttcattgacgtgtccctcactcactctcctctcttcactataaatcgccactcttcgtgttctccacttcaccaactccttcaaacttattaacactttccttagttcaatatggggaagcccttcttcactctctctctttttcaatatggtggcctaactacggctacaccacggcttgtcgagtgcatgctttgctattacctccagcaagttcaacgagtgccaactcaacaacctcaacgcgttggaacccgaccaccgcgttgagtccgaaggtggtcttattgaaacatggaactctcaacaccctgagctgcaatgcgccggtgtcactgtttccaaacgcaccctcaaccgcaacggcctccacttgccatcttactcaccttatccccaaatgatcattgtcgttcaaggtgcgtaatattagtaagaagtatttatcagcttaacgtgataacaataatagtaatatgaaatatttattaaatttttataattaatctctgctagaaaatttgattaatcatttttatgtagaatttgtttttct

SEQ ID NO: 1484 - DNA, 671 bp, Artificial; identical to SEQ ID NO: 635
  Mutations within GlyA3B4 introduced by GmGlyA3B4_T01TALE nuclease

SEQ ID NO: 1485 - DNA, 649 bp, Artificial
  Mutations within GlyA3B4 introduced by GmGlyA3B4_T01TALE nuclease
gttcatgtacggttgcagatataaacgaagcatagcttatgtatgaggtgtaacaaaattggaaacaatagccatgcaaggtgaagaatgtcaccaactcagaaacccttcttcattgacgtgtccctcactcactctcctctcttcactataaatcgccactcttcgtgttctccacttcaccaactccttcaaacttattaacactttccttagttcaatatggggaagcccttcttcactctctctctttcttcactcttgtcgagtgcatgctttgctattacctccagcaagttcaacgagtgccaactcaacaacctcaacgcgttggaacccgaccaccgcgttgagtccgaaggtggtcttattgaaacatggaactctcaacaccctgagctgcaatgcgccggtgtcactgtttccaaacgcaccctcaaccgcaacggcctccacttgccatcttactcaccttatcccccaaatgatcattgtcgttcaaggtgcgtaaatattagtaagaagtatttatcagcttaacgtgataacaataatagtaatatgaaatatttattaaattttttataattaatctctgctagaaaatttgattaatctttttagtagaatttgttttttctcaactagg

SEQ ID NO: 1486 - DNA, 577 bp, Artificial
  Mutations within GlyA3B4 introduced by GmGlyA3B4_T01TALE nuclease
gttcatgtacggttgcagatataaacgaagcatagcttatgtatgaggtgtaacaaaattggaaacaatagccatgcaaggtgaagaatgtcaccaactcagaaacccttcttcattgacgtgtccctcactcactctcctctcttcactataaatcgccactcttcgtgttctccacttcaccaactccttcaaacttattaacactttccttagttcaatatggggaagcccttcttcactctctctctttcttccctttgcttgctgcaagttcaacgagtgccaactcaacaacctcaacgcgttggaacccgaccaccgcgttgagtccgaaggtggtcttattgaaacatggaactctcaacaccctgagctgcaatgcgccggtgtcactgtttccaaacgcaccctcaaccgcaacggcctccacttgccatcttactcaccttatccccaaatgatcattgtcgttcaaggtgcgtaatattagtaagaagtatttatcagcttaacgtgataacaataatagtaatatgaaatatttattaattttttataatttaatctctgctag

SEQ ID NO: 1487 - DNA, 653 bp, Artificial
  Mutations within GlyA3B4 introduced by GmGlyA3B4_T01TALE nuclease
gttcatgtacggttgcagatataaacgaagcatagcttatgtatgaggtgtaacaaaattggaaacaatagccatgcaaggtgaagaatgtcaccaactcagaaacccttcttcattgacgtgtccctcactcactctcctctcttcactataaatcgccactcttcgtgttctccacttcaccaactccttcaaacttattaacactttccttagttcaatatggggaagcccttcttcactctctctctttcttccctttgcttgctttgctattacctccagcaagttcaacgagtgccaactcaacaacctcaacgcgttggaacccgaccaccgcgttgagtccgaaggtggtcttattgaaacatggaactctcaacaccctgagctgcaatgcgccggtgtcactgtttccaaacgcaccctcaaccgcaacggcctccacttgccatcttactcaccttatcccccaaatgatcattgtcgttcaaggtgcgtaatattagtaagaagtatttatcagcttaacgtgataacaataatagtaatatgaaatatttattaaattttttataattaatctctgctagaaaatttgattaatcatttttagtagaatttgttttttctcaactaggttttaaacacca

SEQ ID NO: 1488 - DNA, 608 bp, Artificial; identical to SEQ ID NO: 546
  Mutations within GlyA3B4 introduced by GmGlyA3B4_T01TALE nuclease

SEQ ID NO: 1489 - DNA, 634 bp, Artificial
  Mutations within GlyA3B4 introduced by GmGlyA3B4_T01TALE nuclease
gttcatgtacggttgcagatataaacgaagcatagcttatgtatgaggtgtaacaaaattggaaacaatagccatgcaaggtgaagaatgtcaccaactcagaaacccttcttcattgacgtgtccctcactcactctcctctcttcactataaatcgccactcttcgtgttctccacttcaccaactccttcaaacttattaacactttccttagttcaatatggggaagcccttcttcactctctctcttgtcgagtgcatgctttgctattacctccagcaagttcaacgagtgccaactcaacaacctcaacgcgttggaacccgaccaccgcgttgagtccgaaggtggtcttattgaaacatggaactctcaacaccctgagctgcaatgcgccggtgtcactgtttccaaacgcaccctcaccgcaacggcctcacttgccatcttactcaccttatcccccaaatgatcattgtcgttcaaggtgcgtaatattagtaagaagtatttatcagcttaacgtgataacaataatagtaatatgaaatatttattaaattttttataattaatctctgctagaaaatttgattaatctttttagtagaattgttttttctcaactagg

SEQ ID NO: 1490 - DNA, 659 bp, Artificial
  Mutations within GlyA3B4 introduced by GmGlyA3B4_T01TALE nuclease
gttcatgtacggttgcagatataaacgaagcatagcttatgtatgaggtgtaacaaaattggaaacaatagccatgcaaggtgaagaatgtcaccaactcagaaacccttcttcattgacgtgtccctcactcactctcctctcttcacgatttatagggttcacgctcaacaaaaatcgcatatcaatttcacaacaattggtatgccaaacatatataattcactgtaataattataaggataaaatgaaatcttgtcgagtgcatgctttgctattacctccagcaagttcaacgagtgccaactcaacaacctcaacgcgttggaacccgaccaccgcgttgagtccgaaggtggtcttattgaaacatggaactctcaacacccctgagctgcaatgcgccggtgtcactgtttccaaacgcaccctcaaccgcaacggcctccacttgccatcttactcaccttatccccaaatgatcattgtcgttcaaggtgcgtaatattagtaagaagtatttatcagcttaacgtgataacaataatagtaatatgaaatatttattaaatttttttataattaatctctgctagaaaatttgattaatcatttttagtagaatttgttttttctcaactaggttttaaaacaccaca

SEQ ID NO: 1491 - DNA, 470 bp, Artificial
  Mutations within GlyA3B4 introduced by GmGlyA3B4_T01TALE nuclease
gttcatgtacggttgcagatataaacgaagcatagcttatgtatgaggtgtaacaaaattggaaacaatagccatgcaaggtgaagaatgtcaccaactcagaaacccttcttcattgtcgagtgcatgctttgctattacctccagcaagttcaacgagtgccaactcaacaacctcaacgcgttggaacccgaccaccgcgttgagtccgaaggtggtcttattgaaacatggaactctcaacaccctgagctgcaatgcgccggtgtcactgtttccaaaacgcaccctcaaccgcaacggcctccacttgccatcttactcaccttatccccaaaatgatcattgtcgttcaaggtgcgtaatattagtaagaagtatttatcagcttaacgtgataacaataatagtaatatgaaatatttattaaaattttttataattaaatctctgctagaaaaatttgatt

SEQ ID NO: 1492 - DNA, 778 bp, Artificial
  Mutations within GlyA3B4 introduced by GmGlyA3B4_T01TALE nuclease
  misc_feature (624): n is a or c or t or g
gttcatgtacggttgcagatataaacgaagcatagcttatgtatgaggtgtaacaaaattggaaacaatagccatgcaaggtgaagaatgtcaccaactcagaaacccttcttcattgacgtgtccctcactcactctcctctcttcactataaatcgccactcttcgtgttctccacttcaccaactccttcaaacttattaacactttccttagttcaatatggggaagcccttcttcactctctctctttcttccctttgcttgctacttccccggcagtgctttcatttcagcgtacaatcgccacattgctgcacatccggtaagcgataacgctggcagcaagtgcggcgcaccagcaggccgtcgcgcagtaccacgggtacgccagagtggattatcttcaccgttcgtgagcgttttctcaaaaaagagggcatggcgcagcgattcaacagtagcctcgccgagcagttgcttcatctcgagtgcatgctttgctatttacctccagcaagttcaacgagtgccaactcaacaacctcaacgcgttggaacccgaccaccgcgttgagtccgaaggtgggtctttattgaaacatggaactctcaacaccctgngctgcaaatgcgccggtgtcactgtttccaaacgcaccctcaaaccgcaacggcctccacttgccatcttactcaccttatccccaaatgatcattgtcgttcaaggtgcgtaatattagtaagaagtatttatcagcttaacgtgataacaat

SEQ ID NO: 1493 - DNA, 676 bp, Artificial
  Mutations within GlyA3B4 introduced by GmGlyA3B4_T01TALE nuclease
gttcatgtacggttgcagatataaacgaagcatagcttatgtatgaggtgtaacaaaattggaaacaatagccatgcaaggtgaagaatgtcaccaactcagaaacccttcttcattgacgtgtccctcactcactctcctctcttcactataaatcgccactcttcgtgttctccacttcaccaactccttcaaacttattaacactttccttagttcaatatggggaagcccttcttcactctctctctttcttccctttgcttgcttgtcgagtgcatgctttgctattacctccagcaagttcaacgagtgccaactcaacaacctcaacgcgttggaacccgaccaccgcgttgagtccgaaggtggtcttattgaaacatggaactctcaatcaccctgagctgcaatgcgccggtgtcactgtttccaaacgcaccctcaaccgcaacggcctccacttgccatcttactcaccttatcccccaaatgatcattgtcgttcaaggtgcgtaatattagtaagaagtattttatcagctttaacgtgataacaataatagtaatatgaaatattttattaaatttttttataattaatctctgctagaaaatttgattaatcatttttagtagaatttgttttttctcaactaggttttaaaacaccaca

SEQ ID NO: 1494 - DNA, 620 bp, Artificial
  Mutations within GlyA3B4 introduced by GmGlyA3B4_T01TALE nuclease
gttcatgtacggttgcagatataaacgaagcatagcttatgtatgaggtgtaacaaaattggaaacaatagccatgcaaggtgaagaatgtcaccaactcagaaacccttcttcattgacgtgtccctcactcactctcctctcttcactataaatcgccactcttcgtgttctccacttcaccaactccttcaaacttattaacactttccttagttcaatatggggaagcccttcttcactctctctctttcttccctttacaacctcaacgagtgccaactcaacaacctcaacgcgttggaacccgaccaccgcgttgagtccgaaggtggtcttattgaacatggaactctcaacaccctgagctgcaatgcgccggtgtcactgtttccaaacgcaccctcaaccgcaacggcctccacttgccatcttactcaccttatccccaaatgatcattgtcgttcaaggtgcgtaatattagtaagaagtatttatcagcttaacgtgataacaataatagtaatatgaaatatttattaattttttataattaatctctgctagaaaatttgattaatcatttttagtagaatttgtttttctcaactaggttttt

SEQ ID NO: 1495 - DNA, 620 bp, Artificial
  Mutations within GlyA3B4 introduced by GmGlyA3B4_T01TALE nuclease
gttcatgtacggttgcagatataaacgaagcatagcttatgtatgaggtgtaacaaaattggaaacaatagccatgcaaggtgaagaatgtcaccaactcagaaacccttcttcattgacgtgtccctcactcactctcctctcttcactataaatcgccactcttcgtgttctccacttcaccaactccttcaaacttattaacactttccttagttcaatatggggaagcccttcttcactctctctctttcttccctttgcttgtcgagtgcatgctttgctattacctccagcaagttcaacgagtgccaactcaacaacctcaacgcgttggaacccgaccaccgcgtttgagtccgaaggtggtcttattgaaacatggaactctcacaccctgagctgcaatgcgccggtgtcactgtttccaaacgcaccctcaaccgcaacggcctccacttgccatcttactcaccttatcccccaaatgatcattgtcgttcaaggtgcgtaatattagtaagaagtatttatcagctttaacgtgataacaataatagtaatatgaaatatttattaaattttttataattaatctctgctagaaaatttgattaatc

SEQ ID NO: 1496 - DNA, 762 bp, Artificial
  Mutations within GlyA3B4 introduced by GmGlyA3B4_T01TALE nuclease
  misc_feature (450); (620): n is a or c or t or g
gttcatgtacggttgcagatataaacgaagcatagcttatgtatgaggtgtaacaaaattggaaacaatagccatgcaaggtgaagaatgtcaccaactcagaaacccttcttcattgacgtgtccctcactcactctcctctcttcactataaatcgccactcttcgtgttctccacttcaccaactccttcaaacttattaacactttccttagttcaatatggggaagcccttcttcactctctctctttcttccctttgcttgctacttccccggcagtgctttcatttcagcgtacaatcgccacattgctgcacatccggtaagcgataacgctggcagcaagtgcggcgcaccagcaggccgtcgcgcagtaccacgggtacgccagagtggattatcttcaccgttcgtgagcgtttttctcaaaaaagagggcatggcgcngcgattcaacagtagcctcgccgagcagttgcttcatctcgagtgcatgctttgctattacctccagcaagttcaacgagtgccaactcaacaacctcaacgcgttgaaccgaccaccgcgttgagtccgaaggtgggtcttattgaaacatggactctcaacaccctgngctgcaatgcgccggtgtcactgtttccaaacgcaccctcaaaccgcaacggcctccacttgccatcttactcaccttatccccaaatgatcattgtcgttcaaggtgcgtaatattagtaagaagtatttatcagcttaac

SEQ ID NO: 1497 - DNA, 630 bp, Artificial
  Mutations within GlyA3B4 introduced by GmGlyA3B4_T01TALE nuclease
gttcatgtacggttgcagatataaacgaagcatagcttatgtatgaggtgtaacaaaattggaaacaatagccatgcaaggtgaagaatgtcaccaactcagaaacccttcttcattgacgtgtccctcactcactctcctctcttcactataaatcgccactcttcgtgttctccacttcaccaactccttcaaacttattaacactttccttagttcaatatggggaagccaggccgaccgcatgctttgctattacctccagcaagttcaacgagtgccaactcaacaacctcaacgcgttggaaccgaccaccgcgttgagtccgaaggtggtcttattgaaacatggaactctcaacaccctgagctgcaatgcgccggtgtcactgtttccaaacgcaccctcaaccgcaacggcctccacttgccatcttactcaccttatccccaaatgatcattgtcgttcaaggtgcgtcaatattagtaagaagtatttatcagcttaacgtgataacaataatagtaatatgaaatatttattaattttttataatttaatctctgctagaaaatttgattaatcatttttagtagaatttgtttttctcaactaggtttttaaaaca

SEQ ID NO: 1498 - DNA, 682 bp, Artificial
  Mutations within GlyA3B4 introduced by GmGlyA3B4_T01TALE nuclease
gttcatgtacggttgcagatataaacgaagcatagcttatgtatgaggtgtaacaaaattggaaacaatagccatgcaaggtgaagaatgtcaccaactcagaaacccttcttcattgacgtgtccctcactcactctcctctcttcactataaatcgccactcttcgtgttctccacttcaccaactccttcaaacttattaacactttccttagttcaatatggggaagcccttcttcactctctctctttcttccctttgcttgctactccggggtcaagttgagcggggcacccgtcagtgcattgcgccatgcatgcactgcctccactgcggtcacgccgccacgttttgcaatcttgagaagttggcctcttgtcgagtgcatgctttgctattacctccagcaagttcaacgagtgccaactcaacacctcaacgcgttggaacccgaccaccgcgttgagtccgaaggtggtcttattgaaacatggaactctcaacaccctgagctgcaatgcgccggtgtcactgtttccaaacgcaccctcaaccgcaacggcctccactttgccatcttactcaccttatccccaaaatgatcattgtcgttcaaggtgcgtaatattagtaagaagtatttatcgcttaacgtgataacaataatagtaatatgaaaa

SEQ ID NO: 1499 - DNA, 672 bp, Artificial
  Mutations within GlyA3B4 introduced by GmGlyA3B4_T01TALE nuclease
gttcatgtacggttgcagatataaacgaagcatagcttatgtatgaggtgtaacaaaaattggaaacaatagccatgcaaggtgaagaatgtcaccaactcagaaacccttcttcattgacgtgtccctcactcactctcctctcttcactataaatcgccactcttcgtgttctccacttcaccaactccttcaaacttattaacactttccttagttcaatatggggaagcccttcttcactctctctctttcttccctttgcttatcgtggctggcgatggccaccacctgctccggggtcaagccgtgggcctggcacagcaccggcaacagccgctggaccgtctccagcgcctgcactcttgtcgagtgcatgctttgctattacctccagcaagttcaacgagtgccaactcaacaacctcaacgcgttggaacccgaccaccgcgttgagtccgaaggtggtcttattgaaacatggaactctcaacaccctgagctgcaatgcgccggtgtcactgtttccaaacgcacctcaaccgcaacggcctccacttgccatcttactcaccttatcccaaatgatcattgtcgttcaaggtgcgtaatattagtaagaagtatttatcgcttaacgtgataacaataatagtaatatgaaaatattt

SEQ ID NO: 1500 - DNA, 785 bp, Artificial
  Mutations within GlyA3B4 introduced by GmGlyA3B4_T01TALE nuclease
gttcatgtacggttgcagatataaacgaagcatagcttatgtatgaggtgtaacaaaattggaaacaatagccatgcaaggtgaagaatgtcaccaactcagaaacccttcttcattgacgtgtccctcactcactctcctctcttcactataaatcgccactcttcgtgttctccacttcaccaactccttcaaacttattaacactttccttagttcaatatggggaagcccttcttcactctctctctttcttccctttgcttgctatgaagaagaagctagaggtgggaaatactcaagtcattctcttgaaaaagttgctgcaatgatatgcaacaaaatatcactatacggagtcaaggtaattatagtgttcacatgaacatttctcccatgaaaatatatattttctgactcttgtcgagtgcatgctttgctattacctccagcaagttcaacgagtgccaactcaacaacctcaacgcgttggaacccgaccaccgcgttgagtccgaaggtggtcttattgaaacatggaactctcaacaccctgagctgcaatgcgccggtgtcactgtttccaaacgcaccctcaaaccgcaacggcctccacttgccatcttactcaccttatccccaaatgatcattgtcgttcaaggtgcgtaatattagtaagaagtatttatcagcttaacgtgataacaataatagtaatatgaaatatttattaaatttttataattaatctctgctagaaaatttgattaatcatttttagtag

SEQ ID NO: 1501 - DNA, 630 bp, Artificial
  Mutations within GlyA3B4 introduced by GmGlyA3B4_T01TALE nuclease
  misc_feature (276); (279); (528): n is a or c or t or g
gttcatgtacggttgcagatataaacgaagcatagcttatgtatgaggtgtaacaaaattggaaacaatagccatgcaaggtgaagaatgtcaccaactcagaaacccttcttcattgacgtgtccctcactcactctcctctcttcactataaatcgccactcttcgtgttctccacttcaccaactccttcaaacttattaacactttccttagttcaatatggggaagcccttcttcactctctctctttcttccctttgcttgctacttctncgntgctttgctattacctccagcaagttcaacgagtgccaactcaacaacctcaacgcgttggaacccgaccaccgcgttgagtccgaaggtggtcttattgaaacatggaactctcaacaccctgagctgcaatgcgccggtgtcactgtttccaaacgcaccctcaaccgcaacggcctccacttgccatcttactcaccttatccccaaatgatcatttcgttcaaggtgcgtaatattagtaagagnatttatcagcttaacgtgataacaatatagtaatatgaaaatatttattaaatttttataattaatctctgctagaaaatttgattaatcattttagtagaa

SEQ ID NO: 1502 - DNA, 529 bp, Artificial
  Mutations within GlyA3B4 introduced by GmGlyA3B4_T01TALE nuclease
gttcatgtacggttgcagatataaacgaagcatagcttatgtatgaggtgtaacaaaattggaaacaatagccatgcaaggtgaagaatgtcaccaactcagaaaccccttcttcattgacgtgtccctcactcactctcctctcttcactataaatcgccactcttcgtgttctccacttcaccaactccttcaaacttattaacactttccttagttcaatatggggaagcccttcttcactctctctctttcttccctttgcttgctatccagcgcctgcttgccaccgccattgctggcgatggccaccacctgctgggggtcaagccgttgggcctggcacagcaccggcaacagcgcctgcaccgtctccagcgcctgcttgccaccaatacttgctggcgatggccaccacctgctccgggtcaagccgtgggcctggcacagcactcttgtcgagtgcatgctttgctattacctccagcaagcttcaacgagtgccaactcaacaacctcaacgcgttgg

SEQ ID NO: 1503 - DNA, 622 bp, Artificial; identical to SEQ ID NO: 579
  Mutations within GlyA3B4 introduced by GmGlyA3B4_T01TALE nuclease

SEQ ID NO: 1504 - DNA, 782 bp, Artificial
  Mutations within GlyA3B4 introduced by GmGlyA3B4_T01TALE nuclease
gttcatgtacggttgcagatataaacgaagcatagcttatgtatgaggtgtaacaaaattggaaacaatagccatgcaaggtgaagaatgtcaccaactcagaaacccttcttcattgacgtgtccctcactcactctcctctcttcactataaatcgccactcttcgtgttctccacttcaccaactccttcaaacttattaacactttccttagttcaatatggggaagcccttcttcactctctctctttcttccctttgcttgccaacttacttctgacaacgatcggaggaccgaaggagctaaccgcttttttgcacaacatgggggatcatgtaactcgccttgatcgttgggaaccggagctgaatgaagccataccaaactcttgtcgagtgcatgctttgctattacctccagcaagttcaacgagtgccaactcaacaacctcaacgcgttggaacccgaccaccgcgttgagtccgaaggtggtcttattgaaacatggaactctcaacacctgagctgcaatgcgccggtgtcactgtttccaaacgcaccctcaaccgcaacggcctccacttgccatcttactcaccttatccccaaatgatcattgtcgttcaaggtgcgtaatcattagtaagaagtatttatcagcttaacgtgataacaataatagtaatatgaaatatttattaaattttttataattaatctctgctagaaaattttgattaatcatttttagtagaatttgtttttctcaactaggtttt

SEQ ID NO: 1505 - DNA, 636 bp, Artificial
  Mutations within GlyA3B4 introduced by GmGlyA3B4_T01TALE nuclease
gttcatgtacggttgcagatataaacgaagcatagcttatgtatgaggtgtaacaaaattggaaacaatagccatgcaaggtgaagaatgtcaccaactcagaaacccttcttcattgacgtgtccctcactcactctcctctcttcactataaatcgccactcttcgtgttctccacttcaccaactccttcaaacttattaacactttccttagttcaatatggggaagcccttcttcactctctctctttcttccctttgcttgccttgtcgagtgcatgctttgctattacctccagcaagttcaacgagtgccaactcaacaacctcaacgcgttggaacccgaccaccgcgttgagtccgaaggtggtcttattgaaacatggaactctcaacaccctgagctgcaatgcgccggtgtcactgtttccaaacgcaccctcaaccgcaacggcctccacttgccatcttactcaccttatccccaaatgatcattgtcgttcaaggtgcgtaatattagtaagaagtatttatcagcttaacgtgataacaataatagtaatatgaaatatttattaaattttttataattaatctctgctagaaaatttgattaatcatttttagtagaa

SEQ ID NO: 1506 - DNA, 670 bp, Artificial
  Mutations within GlyA3B4 introduced by GmGlyA3B4_T01TALE nuclease
gttcatgtacggttgcagatataaacgaagcatagcttatgtatgaggtgtaacaaaattggaaacaatagccatgcaaggtgaagaatgtcaccaactcagaaacccttcttcattgacgtgtccctcactcactctcctctcttcactataaatcgccactcttcgtgttctccacttcaccaactccttcaaacttattaacactttccttagttcaatatggggaagcccttcttcactctctctctttcttccctttgcttgcttgtcgagtgcatgctttgctattacctccagcaagttcaacgagtgccaactcaacaacctcaacgcgttggaacccgaccaccgcgttgagtccgaaggtggtcttattgaaacatggaactctcaacaccctgagctgcaatgcgccggtgtcactgtttccaaacgcaccctcaaccgcaacggcctccacttgccatcttactcaccttatccccaaatgatcattgtcgttcaaggtgcgtaatattagtaagaagtatttatcagcttaacgtgataacaataatagtaatatgaaatatttattaaatttttttataattaatctctgctagaaaatttgattaatctttttagtagaatttgttttttctcaactaggttttaaaacaccaca

SEQ ID NO: 1507 - DNA, 568 bp, Artificial
  Mutations within GlyA3B4 introduced by GmGlyA3B4_T01TALE nuclease
gttcatgtacggttgcagatataaacgaagcatagcttatgtatgaggtgtaacaaaattggaaacaatagccatgcaaggtgaagaatgtcaccaactcagaaacccttcttcattgacgtgtccctcactcactctcctctcttcactataaatcgccactcttcgtgttctccacttcaccaactccttcaaacttattaacactttccttagttcaatatggggaagcccttcttcactctctctctttcttccctttgcttgccttgtcgagtgcatgctttgctattacctccagcaagttcaacgagtgccaactcaacaacctcaacgcgttggaacccgaccaccgcgttgagtccgaaggtggtcttattgaaacatggaactctcaacaccctgagctgcaatgcgccggtgtcactgtttccaaacgcaccctcaaccgcaacggcctccacttgccatcttactcaccttatcccccaaatgatcattgtcgttcaaggtgcgtaatattagtaagaagtatttatcagcttaacgtgataacaataatagtaat

SEQ ID NO: 1508 - DNA, 436 bp, Artificial
  Mutations within GlyA3B4 introduced by GmGlyA3B4_T01TALE nuclease
gttcatgtacggttgcagatataaaccgaagcatagcttatgtatgaggtgtaacaaaagttggaaatcaatagccatgcaaggtgaagaatgtcaccaactcagaaaccctcttctattgacgtgtccctcactcactctcctctcttcactataaatcgccactcttcgtgttctcctacttcaccaaatctccttcaaatcttattaaaccatctttccctttctagttcaaatatggggaaatgcccattcttcatctctctctctttcttcccttgcttgtctgtggctggcggatggccatgccaccatctgctccggggttgcaatgccgatgggccgtgggccatcgagcaagccgccgaacagccgctggaccgtctccagcgcctgcactcttgtcgagtgcatgctttgctattacctccagcaa

SEQ ID NO: 1509 - DNA, 687 bp, Artificial
  Mutations within GlyA3B4 introduced by GmGlyA3B4_T01TALE nuclease
gttcatgtacggttgcagatataaacgaagcatagcttatgtatgaggtgtaacaaaaattggaaacaatagccatgcaaggtgaagaatgtcaccaactcagaaacccttcttcattgacgtgtccctcactcactctcctctcttcactataaatcgccactcttcgtgttctccacttcaccaactccttcaaacttattaacactttccttagttcaatatggggaagcccttcttcactctctctcttttttcaatatggtggcctaactacggctacaccacggcttgtcgagtgcatgctttgctattacctccagcaagttcaacgagtgccaactcaacaacctcaacgcgttggaacccgaccaccgcgttgagtccgaaggtggtcttattgaaacatggaactctcaacaccctgagctgcaatgcgccggtgtcactgtttccaaacgcaccctcaaccgcaacggcctccacttgccatcttactcaccttatccccaaatgatcattgtcgttcaaggtgcgtaatattagtaagaagtatttatcagcttaacgtgataacaataatagtaatatgaaatatttattaaattttttataattaatctctgctagaaaatttgattaatcatttttagtagaatttgtttttctcaactaggttttaaaaca

SEQ ID NO: 1510 - DNA, 668 bp, Artificial
  Mutations within GlyA3B4 introduced by GmGlyA3B4_T01TALE nuclease
gttcatgtacggttgcagatataaacgaagcatagcttatgtatgaggtgtaacaaaaattggaaacaatagccatgcaaggtgaagaatgtcaccaactcagaaacccttcttcattgacgtgtccctcactcactctcctctcttcactataaatcgccactcttcgtgttctccacttcaccaactccttcaaacttattaacactttccttagttcaatatggggaagcccttcttcactctctctctttcttccctttgcttgctcttgtcgagtgcatgctttgctattacctccagcaagttcaacgagtgccaactcaacaacctcaacgcgttggaacccgaccaccgcgttgagtccgaaggtggtcttattgaaacatggaactctcaacaccctgagctgcaatgcgccggtgtcactgtttccaaacgcaccctcaaccgcaacggcctccacttgccatcttactcaccttatccccaaatgatcattgtcgttcaaggtgcgtaatattagtaagaagtatttatcagcttaacgtgataacaataatagtaatatgaaatatttattaaatttttataattaatctctgctagaaaatttgattaatcattttagtagaatttgtttttctcaactaggttttaaaacacca

SEQ ID NO: 1511 - DNA, 657 bp, Artificial
  Mutations within GlyA3B4 introduced by GmGlyA3B4_T01TALE nuclease
gttcatgtacggttgcagatataaacgaagcatagcttatgtatgaggtgtaacaaaattggaaacaatagccatgcaaggtgaagaatgtcaccaactcagaaacccttcttcattgacgtgtccctcactcactctcctctcttcactataaatcgccactcttcgtgttctccacttcaccaactccttcaaacttattaacactttccttagttcaatatggggaagcccttcttcactctctctctttcttccctttgcttgctactactcttgtcgagtgcatgctttgctattacctccagcaagttcaacgagtgccaactcaacaacctcaacgcgttggaacccgaccaccgcgttgagtccgaaggtggtcttattgaacatggaactctcaacaccctgagctgcaatgcgccggtgtcactgtttccaaacgcaccctcaaccgcaacggcctccacttgccatcttactcaccttatccccaaatgatcattgtcgttcaaggtgcgtatatttagtaagaagtatttatcagcttaacgtgataacaataatagtaatatgaaatatttattaaattttttataattaatctctgctagaaaatttgattaatcatttttagtagaatttgtttttcttcaa

SEQ ID NO: 1512 - DNA, 607 bp, Artificial; identical to SEQ ID NO: 708
  Mutations within GlyA3B4 introduced by GmGlyA3B4_T01TALE nuclease

SEQ ID NO: 1513 - DNA, 668 bp, Artificial
  Mutations within GlyA3B4 introduced by GmGlyA3B4_T01TALE nuclease
gttcatgtacggttgcagatataaacgaagcatagcttatgtatgaggtgtaacaaaattggaaacaatagccatgcaaggtgaagaatgtcaccaactcagaaacccttcttcattgacgtgtccctcactcactctcctctcttcactataaatcgccactcttcgtgttctccacttcaccaactccttcaaacttattaacactttccttagttcaatatggggaagcccttcttcactctctctctttcttccctttgctcttgtcgagtgcatgttttgctattacctccagcaagttcaacgagtgccaactcaacaacctcaacgcgttggaacccgaccaccgcgttgagtccgaaggtggtcttattgaaacatggaactctcaacaccctgagctgcaatgcgccggtgtcactgtttccaaacgcaccctcaaccgcaacggcctccacttgccatcttactcaccttatcccccaaatgatcattgtcgttcaaggtgcgtaatattagtaagaagtatttatcagctttaacgtgataacaataatagtaatatgaaatatttattaaattttttataattaatctctgctagaaaatttgattaatcatttttagtagaatttgttttttctcaactaggttttaaaacacca

SEQ ID NO: 1514 - DNA, 623 bp, Artificial; identical to SEQ ID NO: 565
  Mutations within GlyA3B4 introduced by GmGlyA3B4_T01TALE nuclease

SEQ ID NO: 1515 - DNA, 644 bp, Artificial
  Mutations within GlyA3B4 introduced by GmGlyA3B4_T01TALE nuclease
gttcatgtacggttgcagatataaacgaagcatagcttatgtatgaggtgtaacaaaattggaaacaatagccatgcaaggtgaagaatgtcaccaactcagaaacccttcttcattgacgtgtccctcactcactctcctctcttcactataaatcgccactcttcgtgttctccacttcaccaactccttcaaacttattaacactttccttagttcaatatggggaagcccttcttcactctctctctttcttccctttgcttgctactactcttgtcgagtgcatgctttgctattacctccagcaagttcaacgagtgccaactcaacaacctcaacgcgttggaacccgaccaccgcgttgagtccgaaggtggtcttattgaaacatggaactctcaacacccctgagctgcaatgcgccggtgtcactgtttccaaacgcaccctcaaccgcaacggcctccacttgccatcttactcaccttatccccaaatgatcattgtcgttcaaggtgcgtaatattagtaagaagtattttatcagcttaacgtgatacaataatagtaatatgaaatatttattaaattttttataattaatctctgctagaaaatttgattaatcatttttagtagaa

SEQ ID NO: 1516 - DNA, 652 bp, Artificial
  Mutations within GlyA3B4 introduced by GmGlyA3B4_T01TALE nuclease
gttcatgtacggttgcagatataaacgaagcatagcttatgtatgaggtgtaacaaaattggaaacaatagccatgcaaggtgaagaatgtcaccaactcagaaacccttcttcattgacgtgtccctcactcactctcctctcttcactataaatcgccactcttcgtgttctccacttcaccaactccttcaaacttattaacactttccttagttcaatatggggaagcccttcttcactctctctctttcttccctttgcttgcttgtcgagtgcatgctttgctattacctccagcaagttcaacgagtgccaactcaacaacctcaacgcgttggaacccgaccaccgcgttgagtccgaaggtggtcttattgaaacatggaactctcaacaccctgagctgcaatgcgccggtgtcactgtttccaaacgcaccctcaaccgcaacggcctccacttgccatcttactcaccttatcccccaaatgatcattgtcgttcaaggtgcgtaaatattagtaagaagtatttatcagcttaacgtgataacaataatagtaatatgaaatatttattaaattttttataattaatctctgctagaaaatttgattaatctttttagtagaattgttttttctcaact

SEQ ID NO: 1517 - DNA, 654 bp, Artificial; identical to SEQ ID NO: 985
  Mutations within GlyA3B4 introduced by GmGlyA3B4_T01TALE nuclease

SEQ ID NO: 1518 - DNA, 670 bp, Artificial; identical to SEQ ID NO: 617
  Mutations within GlyA3B4 introduced by GmGlyA3B4_T01TALE nuclease

SEQ ID NO: 1519 - DNA, 660 bp, Artificial
  Mutations within GlyA3B4 introduced by GmGlyA3B4_T01TALE nuclease
  misc_feature (280); (283); (534): n is a or c or t or g
gttcatgtacggttgcagatataaacgaagcatagcttatgtatgaggtgtaacaaaattggaaacaatagccatgcaaggtgaagaatgtcaccaactcagaaacccttcttcattgacgtgtccctcactcactctcctctcttcactataaatcgccactcttcgtgttctccacttcaccaactccttcaaacttattaacactttccttagttcaatatgggggaaacgtccttcattcatctctcttctcctttgtcctttgctgctctctctncgntgctttgctattacctccagcaagttcaacgagtgccaactcaacaacctcaacgcgttggaacccgaccaccgcgttgagtccgaaggtggtcttattgaaacatggaactctcaacaccctgagctgcaatgcgccggtgtcactgtttccaaacgcaccctcaaccgcaacggcctccacttgccatcttactcaccttatcccccaaatgatcattgtcgttcaaggtgcgtaatattagtaagagnatttatcagcttaacgtgataacaatatagtaatatgaaatatttattaaatttttataattaatctctgctagaaaatttgattaatcattttagtagaatttgttttctcaactaggttttaaa

SEQ ID NO: 1520 - DNA, 543 bp, Artificial; identical to SEQ ID NO: 640
  Mutations within GlyA3B4 introduced by GmGlyA3B4_T01TALE nuclease

SEQ ID NO: 1521 - DNA, 659 bp, Artificial
  Mutations within GlyA3B4 introduced by GmGlyA3B4_T01TALE nuclease
gttcatgtacggttgcagatataaacgaagcatagcttatgtatgaggtgtaacaaaattggaaacaatagccatgcaaggtgaagaatgtcaccaactcagaaaccccttcttcattgacgtgtccctcactcactctcctctcttcactataaatcgccactcttcgtgttctccacttcaccaactccttcaaacttattaacactttccttagttcaatatgggggaagcccttcttcactctctctctttcttccctttgcttgctattgtcgagtgcatgctttgctattacctccagcaagttcaacgagtgccaactcaacaacctcaacgcgttggaacccgaccaccgcgttgagtccgaaggtggtcttattgaaacatggaactctcaacaccctgagctgcaatgcgccggtgtcactgtttccaaacgcaccctcaaccgcaacggcctccacttgccatcttactcaccttatccccaaatgatcattgtcgttcaaggtgcgtaatattagtaagagtatttatcagcttaacgtgataacaatatagtaatatgaaatatttattaaatttttataattaatctctgctagaaaatttgattaatcattttagtagaatttgtttttctcaactaggttttt

SEQ ID NO: 1522 - DNA, 602 bp, Artificial
  Mutations within GlyA3B4 introduced by GmGlyA3B4_T01TALE nuclease
gttcatgtacggttgcagatataaacgaagcatagcttatgtatgaggtgtaacaaaattggaaacaatagccatgcaaggtgaagaatgtcaccaactcagaaacccttcttcattgacgtgtccctcactcactctcctctcttcactataaatcgccactcttcgtgttctccacttcaccaactccttcaaacttattaacactttccttagttcaatatggggaagcccttcttcactctctctctttcttccctttgcttgtcgagtgcatgctttgctattacctccagcaagttcaacgagtgccaactcaacaacctcaacgcgttggaacccgaccaccgcgttgagtccgaaggtggtcttattgaaacatggaactctcaacaccctgagctgcaatgcgccggtgtcactgtttccaaacgcaccctcaaccgcaacggcctccacttgccatcttactcaccttatcccccaaatgatcattgtcgttcaaggtgcgtaatattagtaagaagtatttatcagcttaacgtgataacaataatagtaatatgaaatatttattaaattttttataattaatctctgct

SEQ ID NO: 1523 - DNA, 760 bp, Artificial
  Mutations within GlyA3B4 introduced by GmGlyA3B4_T01TALE nuclease
  misc_feature (632); (675): n is a or c or t or g
gttcatgtacggttgcagatataaacgaagcatagcttatgtatgaggtgtaacaaaattggaaacaatagccatgcaaggtgaagaatgtcaccaactcagaaacccttcttcattgacgtgtccctcactcactctcctctcttcactataaatcgccactcttcgtgttctccacttcaccaactccttcaaacttattaacactttccttagttcaatatggggaagcccttcttcactctctctctttcttccctttgcttgctggtccagcggctgttgccggtgctgtgccaggccacggcttgaccccccagcaggtggtggccatcgccagcaatggcggtggcaagcaggcgctggagacggtcctcttgtcgagtgcatgcttttgctattacctccagcaagttcaacgagtgccaactcaacaacctcaacgcgttggaacccgaccaccgcgttgagtccgaaggtggtcttattgaaacatggaactctcaacaccctgagctgcaatgcgccggtgtcactgttttccaaacgcaccctcaaccgcaacggcctccacttgccattcttactcaccttatccccaaaatgatcattgtcgttcaaggtgcgtaatnttagtaagaagtatttcatcagcttaacgtgataacaataatngtaatatgaaatatttattaaattttttataataatctctgctagaaaatttgattaatcatttttagtagaaatttgtttttct

SEQ ID NO: 1524 - DNA, 633 bp, Artificial
  Mutations within GlyA3B4 introduced by GmGlyA3B4_T01TALE nuclease
  misc_feature (533): n is a or c or t or g
gttcatgtacggttgcagatataaacgaagcatagcttatgtatgaggtgtaacaaaattggaaacaatagccatgcaaggtgaagaatgtcaccaactcagaaacccttcttcattgacgtgtccctcactcactctcctctcttcactataaatcgccactcttcgtgttctccacttcaccaactccttcaaacttattaacactttcattagttcaatatggggaagcccttcttcactctctctctttcttccctttgtcttactcttgtcgagtgcatgctttgctattacctccagcaagttcaacgagtgccaactcaacaacctcaacgcgttggaacccgaccaccgcgttgagtccgaaggtggtcttattgaaacatggaactctcaacaccctgagctgcaatgcgccggtgtcactgtttccaaacgcaccctcaaccgcaacggcctccacttgccatcttactcaccttatccccaaatgatcattgtcgttcaaggtgcgtaatattagtaagagnatttatcagcttaacgtgatacaatatagtaatatgaaatatttattaaatttttataattaatctctgctagaaaatttgattaatcattttagtagaa

SEQ ID NO: 1525 - DNA, 557 bp, Artificial
  Mutations within GlyA3B4 introduced by GmGlyA3B4_T01TALE nuclease
gttcatgtacggttgcagatataaacgaagcatagcttatgtatgaggtgtaacaaaattggaaacaatagccatgcaaggtgaagaatgtcaccaactcagaaacccttcttcattgacgtgtccctcactcactctcctctcttcactataaatcgccactcttcgtgttctccacttcaccaactccttcaaacttattaacactttccttagttcaatatggggaagcccttcttcactctctctctttcttccctttgcttgctactactcttgtcgagtgcatgctttgctattacctccagcaagttcaacgagtgccaactcaacaacctcaacgcgttggaacccgaccaccgcgttgagtccgaaggtggtcttattgaacatggaactctcaacaccctgagctgcaatgcgccggtgtcactgtttccaaacgcaccctcaaccgcaacggcctccacttgccatcttactcaccttatccccaaatgatcattgtcgttcaaggtgcgtatattagtaagaagtatttatcagcttaacgtgat

SEQ ID NO: 1526 - DNA, 632 bp, Artificial
  Mutations within GlyA3B4 introduced by GmGlyA3B4_T01TALE nuclease
gttcatgtacggttgcagatataaacgaagcatagcttatgtatgaggtgtaacaaaattggaaacaatagccatgcaaggtgaagaatgtcaccaactcagaaacccttcttcattgacgtgtccctcactcactctcctctcttcactataaatcgccactcttcgtgttctccacttcaccaactccttcaaacttattaacactttccttagttcaatatggggaagcccttcttcactctctctctttcttccctttgcttgctctcgagtgcatgctttgctattacctccagcaagttcaacgagtgccaactcaacaacctcaacgcgttggaacccgaccaccgcgttgagtccgaaggtggtcttattgaaacatggaactctcaacaccctgagctgcaatgcgccggtgtcactgtttccaaacgcaccctcaaccgcaacggcctccacttgccatcttactcaccttatcccccaaatgatcattgtcgttcaaggtgcgtaatattagtaagaagtatttatcagcttaacgtgataacaataatagtaatatgaaatatttattaaattttttataattaatctctgctagaaaatttgattaatctttttagtag

SEQ ID NO: 1527 - DNA, 608 bp, Artificial; identical to SEQ ID NO: 896
  Mutations within GlyA3B4 introduced by GmGlyA3B4_T01TALE nuclease

SEQ ID NO: 1528 - DNA, 690 bp, Artificial
  Mutations within GlyA3B4 introduced by GmGlyA3B4_T01TALE nuclease
gttcatgtacggttgcagatataaacgaagcatagcttatgtatgaggtgtaacaaaattggaaacaatagccatgcaaggtgaagaatgtcaccaactcagaaacccttcttcattgacgtgtccctcactcactctcctctcttcactataaatcgccactcttcgtgttctccacttcaccaactccttcaaacttattaacactttccttagttcaatatggggaagcccttcttcactctctctctttcttccctttgcttgctagcgcctgcttgccgccatcgtgcttgtcgagtgcatgctttgctattacctccagcaagttcaacgagtgccaactcaacaacctcaacgcgttggaacccgaccaccgcgttgagtccgaaggtggtcttattgaaacatggaactctcaacaccctgagctgcaatgcgccggtgtcactgtttccaaacgcaccctcaaccgcaacggcctccacttgccatcttactcaccttatccccaaatgatcattgtcgttcaaggtgcgtaatattagtaagaagtatttatcagcttaacgtgataacaataatagtaatatgaaatatttattaaattttttataattaattctctgctagaaaatttgattaatcatttttagtagaatttgtttttctcaactaggttttaaaaca

SEQ ID NO: 1529 - DNA, 618 bp, Artificial
  Mutations within GlyA3B4 introduced by GmGlyA3B4_T01TALE nuclease
gttcatgtacggttgcagatataaacgaagcatagcttatgtatgaggtgtaacaaaattggaaacaatagccatgcaaggtgaagaatgtcaccaactcagaaaccccttcttcattgacgtgtccctcactcactctcctctcttcactataaatcgccactcttcgtgttctccacttcaccaactccttcaaacttattaacactttccttagttcaatatggggaagcccttcttcactctctctctttcttccctttgcttgctgctctgatgccgcatagttaagccagccccgacacccgccaacacccgctgacgcgccctgacgggcttgtctgctactcttgtcgagtgcatgctttgctattacctccagcaagttcaacgagtgccactcaacacctcaacgcgttggaacccgaccaccgcgttgagtccgaaggtggtcttattgaaacatggaactctcaacaccctgagctgcaatgcgccggtgtcactgtttccaaacgcaccctcaaccgcaacggcctccacttgccatcttactcaccttatccccaaatgatcattgtcgttcaaggtgcgtaatattagtaagaagtatttatc

SEQ ID NO: 1530 - DNA, 781 bp, Artificial
  Mutations within GlyA3B4 introduced by GmGlyA3B4_T01TALE nuclease
gttcatgtacggttgcagatataaacgaagcatagcttatgtatgaggtgtaacaaaaattggaaacaatagccatgcaaggtgaagaatgtcaccaactcagaaacccttcttcattgacgtgtccctcactcactctcctctcttcactataaatcgccactcttcgtgttctccacttcaccaactccttcaaacttattaacactttccttagttcaatatggggaagcccttcttcactctctctctttcttccctttgcttgctacagcaccggcaacagccgctggaccgtctccagcgcctgcttgccgccatcgtggctggcgatggccaccacctgctccggggtcaagccgtgggcctggcacagcaccggcaacagccgctggactcttgtcgagtgcatgctttgctattacctccagcaagttcaacgagtgccaactcaacaacctcaacgcgttggaacccgaccaccgcgttgagtccgaaggtggtcttattgaaacatggaactctcaacaccctgagctgcaatgcgccggtgtcactgtttccaaacgcaccctcaaccgcaacggcctccacttgccatcttactcaccttatccccaaatgatcattgtcgttcaaggtgcgtaatattagtaagaagtatttatcagcttaacgtgataacaaataatagtaatatgaaaatattttattaaattttttataattaatctctgctagaaaatttgattaatcatttttagtagaatttgtttttctc

SEQ ID NO: 1531 - DNA, 699 bp, Artificial
  Mutations within GlyA3B4 introduced by GmGlyA3B4_T01TALE nuclease
gttcatgtacggttgcagatataaacgaagcatagcttatgtatgaggtgtaacaaaattggaaacaatagccatgcaaggtgaagaatgtcaccaactcagaaacccttcttcattgacgtgtccctcactcactctcctctcttcactataaatcgccactcttcgtgttctccacttcaccaactccttcaaacttattaacactttccttagttcaatatggggaagcccttcttcactctctctctttcttccctttgcttgctaccttttaaatatagatacaactactctaattctaatttttattttatagattgacgagacaataattaatttttttatacatcaaaacttagattaggagaaactcttctccaaataaagttagaagaaattacccttgtcgagtgcatgctttgctattacctccagcaagttcaacgagtgccaactcaacaacctcaacgcgttggaacccgaccaccgcgttgagtcccgaaggtggtcttattgaaacatggaactctcaacaccctgagctgcaatgcgccggtgtcactgtttccaaacgcaccctcaaccgcaacggcctccacttgccattcttactcaccttatcccaaatgatcattgtcgttcaaggtgcgtaatatagtaagaagtatttcatcagcttaacgtgataacaataat

SEQ ID NO: 1532 - DNA, 531 bp, Artificial
  Mutations within GlyA3B4 introduced by GmGlyA3B4_T01TALE nuclease
gttcatgtacggttgcagatataaacgaagcatagcttatgtatgaggtgtaacaaaaattggaaacaatagccatgcaaggtgaagaatgtcaccaactcagaaacccttcttcattgacgtgtccctcactcactctcctctcttcactataaatcgccactcttcgtgttctccacttcaccaactccttcaaacttattaacactttccttagttcaatatggggaagcccttcttcactctctctctttcttccctttgcttgctactactcttgtcgagtgcatgctttgctattacctccagcaagttcaacgagtgccaaactcaacaacctcaacgcgttggaacccgaccacccgcgttgagtccgaaggtggtcttattgaaaacatggaactctcaacacccctgagcatgcaaatgcgccggtgatcacatgttttccaaaacgccaacccctcaaccgcaacggacctcccaacttgccatcttactcaccttatccccaaatgatcattgtcgttc

SEQ ID NO: 1533 - DNA, 743 bp, Artificial
  Mutations within GlyA3B4 introduced by GmGlyA3B4_T01TALE nuclease
  misc_feature (624); (666): n is a or c or t or g
gttcatgtacggttgcagatataaacgaagcatagcttatgtatgaggtgtaacaaaattggaaacaatagccatgcaaggtgaagaatgtcaccaactcagaaacccttcttcattgacgtgtccctcactcactctcctctcttcactataaatcgccactcttcgtgttctccacttcaccaactccttcaaacttattaacactttccttagttcaatatggggaagcccttcttcactctctctctttcttccctttgcttgctacttgccgccatcgtggctggcgatggccaccacctgctccggggtcaagccgtgggcctggcacagcaccggcaacagccgctggaccgtctccagcgcctgctcttgtcgagtgcatgctttgctattacctccagcaagttcaacgagtgccaactcaacaacctcaacgcgttgaaccgaccaccgcgttgagtccgaaggtggtcttattgaaacatggaactctcaacaccctgagctgcaatgcgccggtgtcactgtttccaaacgcaccctcaaccgcaacggcctccacttgccatcttactcaccttatccccaaatgatcattgtcgttcaaggtgcgtaatntagtaagaagtatttatcagcttaacgtgataacaaataatngtaatatgaaatatttattaaattttttataattaatctctgctagaaaatttgattaatcattttagtagaatttg

SEQ ID NO: 1534 - DNA, 668 bp, Artificial
  Mutations within GlyA3B4 introduced by GmGlyA3B4_T01TALE nuclease
gttcatgtacggttgcagatataaacgaagcatagcttatgtatgaggtgtaacaaaattggaaacaatagccatgcaaggtgaagaatgtcaccaactcagaaaccccttcttcattgacgtgtccctcactcactctcctctcttcactataaatcgccactcttcgtgttctccactcaccaactccttcaaacttattaacactttccttagttcaatatggggaagcccttcttcactctctctctttcttccctttgcttgctatgtcgagtgcatgctttgctattacctccagcaagttcaacgagtgccaactcaacaacctcaacgcgttggaacccgaccaccgcgttgagtccgaaggtggtcttattgaaacatggaactctcaacaccctgagctgcaatgcgccggtgtcactgtttccaaacgcaccctcaaccgcaacggcctccacttgccatcttactcaccttatccccaaatgatcattgtcgttcaaggtgcgtaatattagtaagaagtatttatcagcttaacgtgataacaataatagtaatatgaaatatttattaaatttttataattaatctctgctagaaaatttgattaatcatttttagtagaatttgtttttctcaactaggtttttaaaacacca

SEQ ID NO: 1535 - DNA, 620 bp, Artificial
  Mutations within GlyA3B4 introduced by GmGlyA3B4_T01TALE nuclease
gttcatgtacggttgcagatataaacgaagcatagcttatgtatgaggtgtaacaaaattggaaacaatagccatgcaaggtgaagaatgtcaccaactcagaaacccttcttcattgacgtgtccctcactcactctcctctcttcactataaatcgccactcttcgtgttctccacttcaccaactccttcaaacttattaacactttccttagttcaatatggggaagcccttcttcactctctctctttcttccctttgcttttgtcgagtgcatgctttgctattacctccagcaagttcaacgagtgccaactcaacaacctcaacgcgttggaacccgaccaccgcgttgagtccgaaggtggtcttattgaaacatggaactctcaacaccctgagctgcaatgcgccggtgtcactgtttccaaacgcaccctcaaccgcaacggcctccacttgccatcttactcaccttatccccaaatgatcattgtcgttcaaggtgcgtaatattagtaagaagtatttatcagcttaacgtgataacaataatagtaatatgaaatatttattaaattttttataattaatctctgctagaaaatttgattaatc

SEQ ID NO: 1536 - DNA, 594 bp, Artificial
  Mutations within GlyA3B4 introduced by GmGlyA3B4_T01TALE nuclease
gttcatgtacggttgcagatataaacgaagcatagcttatgtatgaggtgtaacaaaattggaaacaatagccatgcaaggtgaagaatgtcaccaactcagaaacccttcttcattgacgtgtccctcactcactctcctctcttcactataaatcgccactcttcgtgttctccacttcaccaactccttcaaacttattaacactttccttagttcaatatggggaagcccttcttcactctctctctttcttccctttgcttgtcttgtcgagtgcatgctttgctattacctccagcaagttcaacgagtgccaactcaacaacctcaacgcgttggaacccgaccaccgcgttgagtccgaaggtggtcttattgaaacatggaactctcaacaccctgagctgcaatgcgccggtgtcactgtttccaaacgcaccctcaaccgcaacggcctccacttgccatcttactcaccttatcccccaaatgatcattgtcgttcaaggtgcgtaaatattagtaagaagtatttatcagcttaacgtgataacaataatagtaatatgaaatatttattaaattttttat

SEQ ID NO: 1537 - DNA, 518 bp, Artificial
  Mutations within GlyA3B4 introduced by GmGlyA3B4_T01TALE nuclease
gttcatgtacggttgcagatataaacgaagcatagcttatgtatgaggtgtaacaaaattggaaacaatagccatgcaaggtgaagaatgtcaccaactcagaaacccttcttcattgacgtgtccctcactcactctcctctcttcactataaatcgccactcttcgtgttctccacttcaccaactccttcaaacttattaacactttccttagttcaatatggggaagcccttcttcactctctctctttcttccctttgcttgctacagcaccggcaacagccgctggacccgtctccagcgcctgcttgccgccatcgtggctggcgatggcccaccacctgctccgggtcaagccgtgggcctggcacagcaccggcaacagccgctggactcttgtcgagtgcatgctttgctattacctccagcaagttcaacgagtgccaactcaacaacctcaacgcgttggaacccgaccaccgcgttgagtcccgaaggtggtcttattgaaacat

SEQ ID NO: 1538 - DNA, 645 bp, Artificial; identical to SEQ ID NO: 994
  Mutations within GlyA3B4 introduced by GmGlyA3B4_T01TALE nuclease

SEQ ID NO: 1539 - DNA, 593 bp, Artificial
  Mutations within GlyA3B4 introduced by GmGlyA3B4_T01TALE nuclease
gttcatgtacggttgcagatataaacgaagcatagcttatgtatgaggtgtaacaaaattggaaacaatagccatgcaaggtgaagaatgtcaccaactcagaaacccttcttcattgacgtgtccctcactcactctcctctcttcactataaatcgccactcttcgtgttctccacttcaccaactccttcaaacttattaacactttccttagttcaatatggggaagcccttcttcactctctctctttcttccctttgcttgctgccgtgggcctggcacagcaccggcaacagcgctggaccgtctccagcgcctcttgtcgagtgcatgctttgctattacctccagcaagttcaacgagtgccaactcaacaacctcacgcgttggaacccgaccaccgcgttgagtccgaaggtgtcttattgaaacatggaactctcaacaccctgagctgcaatgcgccggtgtcactgtttccaaacgcaccctcaaccgcaacggcctccacttgccatcttactcaccttatccccaaatgatcattgtcgttcaaggtgcgtaatattagtaagaagtatttatcagc

SEQ ID NO: 1540 - DNA, 628 bp, Artificial
  Mutations within GlyA3B4 introduced by GmGlyA3B4_T01TALE nuclease
gttcatgtacggttgcagatataaacgaagcatagcttatgtatgaggtgtaacaaaattggaaacaatagccatgcaaggtgaagaatgtcaccaactcagaaacccttcttcattgacgtgtccctcactcactctcctctcttcactataaatcgccactcttcgtgttctccacttcaccaactccttcaaacttattaacactttccttagttcaatatggggaagcccttcttcactctctctctttcttccctttgcttgctgcaagttcaacgagtgccaactcaacaacctcaacgcgttggaacccgaccaccgcgttgagtccgaaggtggtcttattgaaacatggaactctcaacaccctgagctgcaatgcgccggtgtcactgtttccaaacgcaccctcaaccgcaacggcctccacttgccatcttactcaccttatccccaaatgatcattgtcgttcaaggtgcgtaatattagtaagaagtatttatcagcttaacgtgataacaataatagtaatatgaaatatttattaattttttataattaatctctgctagaaaatttgattaatcatttttagtagaatttgtttttctcaactaggttttt

SEQ ID NO: 1541 - DNA, 666 bp, Artificial
  Mutations within GlyA3B4 introduced by GmGlyA3B4_T01TALE nuclease
gttcatgtacggttgcagatataaacgaagcatagcttatgtatgaggtgtaacaaaattggaaacaatagccatgcaaggtgaagaatgtcaccaactcagaaacccttcttcattgacgtgtccctcactcactctcctctcttcactataaatcgccactcttcgtgttctccacttcaccaactccttcaaacttattaacactttccttagttcaatatggggaagcccttcttcactctctctctttcttccctttgcttgctattgtcgagtgcatgctttgctattacctccagcaagttcaacgagtgccaactcaacaacctcaacgcgttggaacccgaccaccgcgttgagtccgaaggtggtcttattgaaacatggaactctcaacaccctgagctgcaatgcgccggtgtcactgtttccaaacgcaccctcaaccgcaacggcctccacttgccatcttactcaccttatccccaaatgatcattgtcgttcaaggtgcgtaatattagtaagagtatttatcagcttaacgtgataacaatatagtaatatgaaatatttattaaatttttataattaatctctgctagaaaatttgattaatcattttagtagaatttgtttttctcaactaggtttttaaaacacca

SEQ ID NO: 1542 - DNA, 671 bp, Artificial
  Mutations within GlyA3B4 introduced by GmGlyA3B4_T01TALE nuclease
gttcatgtacggttgcagatataaacgaagcatagcttatgtatgaggtgtaacaaaattggaaacaatagccatgcaaggtgaagaatgtcaccaactcagaaacccttcttcattgacgtgtccctcactcactctcctctcttcactataaatcgccactcttcgtgttctccacttcaccaactccttcaaacttattaacactttccttagttcaatatggggaagcccttcttcactctctctctttcttccctttgcttttgtcgagtgcatgctttgctattacctccagcaagttcaacgagtgccaactcaacaacctcaacgcgttggaacccgaccaccgcgttgagtccgaaggtggtcttattgaaacatggaactctcaacaccctgagctgcaatgcgccggtgtcactgtttccaaacgcaccctcaaccgcaacggcctccacttgccatcttactcaccttatcccccaaatgatcattgtcgttcaaggtgcgtaaatattagtaagaagtatttatcagcttaacgtgataacaataatagtaatatgaaatatttattaaattttttataattaatctctgctagaaaatttgattaatcattttttagtagaatttgttttttctcaactaggttttaaaacaccaca

SEQ ID NO: 1543 - DNA, 614 bp, Artificial
  Mutations within GlyA3B4 introduced by GmGlyA3B4_T01TALE nuclease
gttcatgtacggttgcagatataaacgaagcatagcttatgtatgaggtgtaacaaaattggaaacaatagccatgcaaggtgaagaatgtcaccaactcagaaacccttcttcattgacgtgtccctcactcactctcctctcttcactataaatcgccactcttcgtgttctccacttcaccaactccttcaaacttattaacactttccttagttcaatatggggaagcccttcttcactctctctctttcttccctttgcttgctactactcttgtcgagtgcatgctttgctattacctccagcaagttcaacgagtgccaactcaacaacctcaacgcgttggaacccgaccaccgcgttgagtccgaaggtggtcttattgaaacatggaactctcaacaccctgagctgcaatgcgccggtgtcactgtttccaaacgcaccctcaaccgcaacggcctccacttgccatcttactcaccttatccccaaatgatcattgtcgttcaaggtgcgtaatattagtaagaagtattttatcagcttaacgtgataacaataatagtaatatgaaatatttattaaaattttttataattaatctctgc

SEQ ID NO: 1544 - DNA, 654 bp, Artificial
  Mutations within GlyA3B4 introduced by GmGlyA3B4_T01TALE nuclease
gttcatgtacggttgcagatataaacgaagcatagcttatgtatgaggtgtaacaaaattggaaacaatagccatgcaaggtgaagaatgtcaccaactcagaaacccttcttcattgacgtgtccctcactcactctcctctcttcactataaatcgccactcttcgtgttctccacttcaccaactccttcaaacttattaacactttccttagttcaatatggggaagcccttcttcactctctctctttcttccctttgcttttgtcgagtgcatgctttgctattacctccagcaagttcaacgagtgccaactcaacaacctcaacgcgttggaacccgaccaccgcgttgagtccgaaggtggtcttattgaaacatggaactctcaacaccctgagctgcaatgcgccggtgtcactgtttccaaacgcaccctcaaccgcaacggcctccacttgccatcttactcaccttatcccccaaatgatcattgtcgttcaaggtgcgtaatattagtaagaagtatttatcagcttaacgtgataacaataatagtaatatgaaatatttattaaattttttataattaatctctgctagaaaatttgattaatcatttttagtagaatttgttttttctcaactagg

SEQ ID NO: 1545 - DNA, 750 bp, Artificial
  Mutations within GlyA3B4 introduced by GmGlyA3B4_T01TALE nuclease
gttcatgtacggttgcagatataaacgaagcatagcttatgtatgaggtgtaacaaaattggaaacaatagccatgcaaggtgaagaatgtcaccaactcagaaacccttcttcattgacgtgtccctcactcactctcctctcttcactataaatcgccactcttcgtgttctccacttcaccaactccttcaaacttattaacactttccttagttcaatatggggaagcccttcttcactctctctctttcttccctttgcttatcgtggctggcgatggccaccacctgctccggggtcaagccgtgggcctggcacagcaccggcaacagccgctggaccgtctccagcgcctgcactcttgtcgagtgcatgctttgctattacctccagcaagttcaacgagtgccaactcaacaacctcaacgcgttggaacccgaccaccgcgttgagtccgaaggtggtcttattgaaacatggaactctcaacaccctgagctgcaatgcgccggtgtcactgtttccaaacgcaccctcaaccgcaacggcctccacttgccatcttactcaccttatccccaaatgatcattgtcgttcaaggtgcgtaatattagtaagaagtatttatcgcttaacgtgataacaataatagtaatatgaaaatatttattaaattttttataattaatctctgctagaaaatttgattaatcatttttagtagaatttgtttttctcaactagg

SEQ ID NO: 1546 - DNA, 609 bp, Artificial; identical to SEQ ID NO: 610
  Mutations within GlyA3B4 introduced by GmGlyA3B4_T01TALE nuclease

SEQ ID NO: 1547 - DNA, 547 bp, Artificial
  Mutations within GlyA3B4 introduced by GmGlyA3B4_T01TALE nuclease
gttcatgtacggttgcagatataaacgaagcatagcttatgtatgaggtgtaacaaaattggaaacaatagccatgcaaggtgaagaatgtcaccaactcagaaacccttcttcattgacgtgtccctcactcactctcctctcttcactataaatcgccactcttcgtgttctccacttcaccaactccttcaaacttattaacacttgtcgagtgcatgctttgctattacctccagcaagttcaacgagtgccaactcaacaacctcaacgcgttggaacccgaccaccgcgttgagtccgaaggtggtcttattgaaacatggaactctcaacaccctgagctgcaatgcgccggtgtcactgtttccaaacgcaccctcaaccgcaacggcctccacttgccatcttactcaccttatccccaaaatgatcattgtcgttcaaggtgcgtaatattagtaagaagtatttatcagcttaacgtgataacaataatagtaatatgaaatatttattaaattttttataattaatctctgctag

SEQ ID NO: 1548 - DNA, 827 bp, Artificial
  Mutations within GlyA3B4 introduced by GmGlyA3B4_T01TALE nuclease
  misc_feature (695): n is a or c or t or g
gttcatgtacggttgcagatataaacgaagcatagcttatgtatgaggtgtaacaaaattggaaacaatagccatgcaaggtgaagaatgtcaccaactcagaaaccccttcttcattgacgtgtccctcactcactctcctctcttcactataaatcgccactcttcgtgttctccacttcaccaactccttcaaacttattaacactttccttagttcaatatggggaagcccttcttcactctctctctttcttccctttgcttgctactgcacaaaaaagacccaccaagaagcttaaaggcacgcttagcgcgaaagcccgcactaagcgcgaagtcaacgtgaaaaataagttatctggtgtgcatgattcaagaaaaagatagtggcaaatcttggatcaaattctggagtatcacaaagacacacctggaaaaaggattttttatttaaaagaggtgatctttgtcttaacacattggagggtacatccctttatggtacaagtagagggtacatctacttgggttgttgactgagaacaggagagggtacatctcttgtcgagtgcatgctttgctattacctccagcaagttcaacgagtgccaactcaacaacctcaacgcgttggaacccgaccaccgcgttgagtccgaaggtggtcttattgaaacatggaactctcaacnccctgagctgcaatgcgccggtgtcactgtttccaaacgcaccctcaaccgcaacggcctccacttgccatcttactcaccttatccccaaatgatcattgtcgttcaaggtgcgtaatattagtaagaagt

SEQ ID NO: 1549 - DNA, 858 bp, Artificial
  Mutations within GlyA3B4 introduced by GmGlyA3B4_T01TALE nuclease
  misc_feature (695): n is a or c or t or g
gttcatgtacggttgcagatataaacgaagcatagcttatgtatgaggtgtaacaaaattggaaacaatagccatgcaaggtgaagaatgtcaccaactcagaaacccttcttcattgacgtgtccctcactcactctcctctcttcactataaatcgccactcttcgtgttctccacttcaccaactccttcaaacttattaacactttccttagttcaatatggggaagcccttcttcactctctctctttcttccctttgcttgctactgcacaaaaaagacccaccaagaagcttaaaggcacgcttagcgcgaaagcccgcactaagcgcgaagtcaacgtgaaaaataagttatctggtgtgcatgattcaagaaaaagatagtggcaaatcttggatcaaattctggagtatcacaaagacacacctggaaaaaggattttttatttaaaagaggtgatctttgtcttaacacattgggagggtacatccttttatggtacaagtagagggtacatctacttgggttgttgactgagaacaggagagggtacatctcttgtcgagtgcatgctttgctattacctccagcaagttcaacgagtgccaactcaacaacctcaacgcgttggaacccgaccaccgcgttgagtccgaaggtggtcttattgaaacatggaactctcaacnccctgagctgcaatgcgccggtgtcactgtttccaaacgcaccctcaaccgcaacggcctccacttgccatcttactcaccttgatcccaaatgatcattgtcgttcaaggtgcgtatattagtaagaagtattatcagctaacgtgataacaataatagtat

SEQ ID NO: 1550 - DNA, 610 bp, Artificial
  Mutations within GlyA3B4 introduced by GmGlyA3B4_T01TALE nuclease
gttcatgtacggttgcagatataaacgaagcatagcttatgtatgaggtgtaacaaaattggaaacaatagccatgcaaggtgaagaatgtcaccaactcagaaacccttcttcattgacgtgtccctcactcactctcctctcttcactataaatcgccactcttcgtgttctccacttcaccaactccttcaaacttattaacactttccttagttcaatatggggaagcccttcttcactctctctctttcttccctttgcttgtcttgtcgagtgcatgctttgctattacctccagcaagttcaacgagtgccaactcaacaacctcaacgcgttggaacccgaccaccgcgttgagtccgaaggtggtcttattgaaacatggaactctcaacaccctgagctgcaatgcgccggtgtcactgtttccaaacgcaccctcaaccgcaacggcctccacttgccatcttactcaccttatcccccaaatgatcattgtcgttcaaggtgcgtaaatattagtaagaagtatttatcagcttaacgtgataacaataatagtaatatgaaatatttattaaattttttataattaatctctgctag

SEQ ID NO: 1551 - DNA, 777 bp, Artificial
  Mutations within GlyA3B4 introduced by GmGlyA3B4_T01TALE nuclease
gttcatgtacggttgcagatataaacgaagcatagcttatgtatgaggtgtaacaaaattggaaacaatagccatgcaaggtgaagaatgtcaccaactcagaaacccttcttcattgacgtgtccctcactcactctcctctcttcactataaatcgccactcttcgtgttctccacttcaccaactccttcaaacttattaacactttccttagttcaatatggggaagcccttcttcactctctctctttcttccctttgcttgctactccagcgcctgcttgccgccatcgtggctggcgatggccaccacctgctccggggtcaagttgagcggggcacccgtcagtgcattgcgccatgcatgcactgcctccactgcggtcacgccgccacgttttgcaatcttgagaagttggcctgtgtccaactgtaacggtggacctctcaactctcccgccaccgtgagcaaggcctccagagcgcgtgcgccggaccactgtttgccgacgccaacgatcgcttcgtgtgtcgcctctggcaacgctgcgatcatgtcctgatacttgacagcgacggtccctaacgctgccgggtgtcttgtcgagtgctgctttgctattacctccagcaagttcaacgagtgccaactcaacacctcaacgcgttggaccgaccaccgcgttgagtccgaaggtggtcttattgaaacatggaactctcaacaccctgagctgcaatgcgccggtgtcactgtttccaaacgcaccctcaa

SEQ ID NO: 1552 - DNA, 618 bp, Artificial
  Mutations within GlyA3B4 introduced by GmGlyA3B4_T01TALE nuclease
gttcatgtacggttgcagatataaacgaagcatagcttatgtatgaggtgtaacaaaattggaaacaatagccatgcaaggtgaagaatgtcaccaactcagaaacccttcttcattgacgtgtccctcactcactctcctctcttcactataaatcgccactcttcgtgttctccacttcaccaactccttcaaacttattaacactttccttagttcaatatggggaagcccttcttcactctctctctttcttccctttgcttgctactactcttgtcgagtgcatgctttgctattacctccagcaagttcaacgagtgccaactcaacaacctcaacgcgttggaacccgaccaccgcgttgagtccgaaggtggtcttattgaaacatggaactctcaacacccctgagctgcaatgcgccggtgtcactgtttccaaacgcaccctcaaccgcaacggcctccacttgccatcttactcaccttatccccaaatgatcattgtcgttcaaggtgcgtaatattagtaagaagtatttatcagcttaacgtgatacaataatagtaatatgaaatattattaaattttttataattaatctctgctagaaaa

SEQ ID NO: 1553 - DNA, 582 bp, Artificial; identical to SEQ ID NO: 782
  Mutations within GlyA3B4 introduced by GmGlyA3B4_T01TALE nuclease

SEQ ID NO: 1554 - DNA, 608 bp, Artificial
  Mutations within GlyA3B4 introduced by GmGlyA3B4_T01TALE nuclease
gttcatgtacggttgcagatataaacgaagcatagcttatgtatgaggtgtaacaaaattggaaacaatagccatgcaaggtgaagaatgtcaccaactcagaaacccttcttcattgacgtgtccctcactcactctcctctcttcactataaatcgccactcttcgtgttctccacttcaccaactccttcaaacttattaacactttccttagttcaatatggggaagcccttcttcactctctctctttcttccctttgcttgctgtcgagtgcatgctttgctattacctccgcaagttcaacgagtgccaactcaacaacctcaacgcgttggaacccgaccaccgcgttgagtccgaaggtggtcttattgaaacatggaactctcaacaccctgagctgcaatgcgccggtgtcactgtttccaaacgcaccctcaaccgcaacggcctccacttgccatcttactcaccttatcccccaaatgatcattgtcgttcaaggtgcgtaaatattagtaagaagtatttatcagcttaacgtgataacaataatagtaatatgaaatatttattaaattttttaataattaatctctgctag

SEQ ID NO: 1555 - DNA, 503 bp, Artificial
  Mutations within GlyA3B4 introduced by GmGlyA3B4_T01TALE nuclease
gttcatgtacggttgcagatataaacgaagcatagcttatgtatgaggtgtaacaaaattggaaacaatagccatgcaaggtgaagaatgtcaccaactcagaaacccttcttcattgacgtgtccctcactcactctcctctcttcactataaatcgccactcttcgagtgcatgcttttgctattacctccagcaagttcaacgagtgccaactcaacaacctcaacgcgttggaacccgaccaccgcgttgagtccgaaggtggtcttattgaaacatggaactctcaacaccctgagctgcaatgcgccggtgtcactgtttccaaacgcaccctcaaccgcaacggcctccacttgccatcttactcaccttatcccccaaatgatcattgtcgttcaaggtgcgtaatattagtaagaagtatttatcagcttaacgtgataacaataatagtaatatgaaatatttattaaattttttataattaatctctgctag

SEQ ID NO: 1556 - DNA, 647 bp, Artificial; identical to SEQ ID NO: 1412
  Mutations within GlyA3B4 introduced by GmGlyA3B4_T01TALE nuclease

SEQ ID NO: 1557 - DNA, 577 bp, Artificial
  Mutations within GlyA3B4 introduced by GmGlyA3B4_T01TALE nuclease
gttcatgtacggttgcagatataaacgaagcatagcttatgtatgaggtgtaacaaaattggaaacaatagccatgcaaggtgaagaatgtcaccaactcagaaacccttcttcattgacgtgtccctcactcactctcctctcttcactataaatcgccactcttcgtgttctccacttcaccaactccttcaaacttattaacactttccttagttcaatatggggaagcccttcttcactctctctctttcttccctttgcttgctactactcttgtcgagtgcatgctttgctattacctccagcaagttcaacgagtgccaactcaacaacctcaacgcgttggaacccgaccaccgcgttgagtccgaaggtggtcttattgaacatggaactctcaacaccctgagctgcaatgcgccggtgtcactgtttccaaacgcaccctcaaccgcaacggcctccacttgccatcttactcaccttatccccaaatgatcattgtcgttcaaggtgcatatattagtaagaagtatttatcagcttaacgtgatacaataatagtaatatgaaa

SEQ ID NO: 1558 - DNA, 652 bp, Artificial
  Mutations within GlyA3B4 introduced by GmGlyA3B4_T01TALE nuclease
gttcatgtacggttgcagatataaacgaagcatagcttatgtatgaggtgtaacaaaattggaaacaatagccatgcaaggtgaagaatgtcaccaactcagaaacccttcttcattgacgtgtccctcactcactctcctctcttcactataaatcgccactcttcgtgttctccacttcaccaactccttcaaacttattaacactttccttagttcaatatggggaagcccttcttcactctctctctttcttccctttgcttgcttgtcgagtgcatgctttgctattacctccagcaagttcaacgagtgccaactcaacaacctcaacgcgttggaacccgaccaccgcgttgagtccgaaggtggtcttattgaaacatggaactctcaacaccctgagctgcaatgcgccggtgtcactgtttccaaacgcaccctcaaccgcaacggcctccacttgccatcttactcaccttatccccaaatgatcattgtcgttcaaggtgcgtaaatattagtaagaagtatttatcagcttaacgtgataacaataatagtaatatgaaatatttattaaattttttataattaatctctgctagaaaatttgattaatctttttagtagaattgttttttctcaacta

SEQ ID NO: 1559 - DNA, 647 bp, Artificial
  Mutations within GlyA3B4 introduced by GmGlyA3B4_T01TALE nuclease
gttcatgtacggttgcagatataaacgaagcatagcttatgtatgaggtgtaacaaaattggaaacaatagccatgcaaggtgaagaatgtcaccaactcagaaacccttcttcattgacgtgtccctcactcactctcctctcttcactataaatcgccactcttcgtgttctccacttcaccaactccttcaaacttattaacactttccttagttcaatatggggaagcccttcttcactctctctctttcttccctttgcttgctactttgtttctcatcaaaccaatgacatctttctctggagatcctaactgttttaagcatgataatgggaaatctcattactattacccaaacaaatatgaaacctatattgtcgagtgcatgctttgctattacctccagcaagttcaacgagtgccaactcaacaacctcaacgcgttggaacccgaccaccgcgttgagtccgaaggtggtcttattgaaacatggaactctcaacaccctgagctgcaatgcgccggtgtcactgtttccaaacgcaccctcaaccgcaacggcctccacttgccatcttactcaccttatcccaaatgatcattgtcgttcaaggtgcgtaatattagtaagaagtatttatc

SEQ ID NO: 1560 - DNA, 559 bp, Artificial
  Mutations within GlyA3B4 introduced by GmGlyA3B4_T01TALE nuclease
gttcatgtacggttgcagatataaacgaagcatagcttatgtatgaggtgtaacaaaaattggaaacaatagccatgcaaggtgaagaatgtcaccaactcagaaacccttcttcattgacgtgtccctcactcactctcctctcttcactataaatcgccactcttcgtgttctccacttcaccaactccttcaaacttattaacactttccttagttcaatatggggaagcccttcttcactctctctctttcttccctttgcttgcttgtcgagtgcatgctttgctattacctccagcaagttcaacgagtgccaactcaacaacctcaacgcgttggaacccgaccaccgcgttgagtccgaaggtggtcttattgaaacatggaactctcaacaccctgagctgcaatgcgccggtgtcactgtttccaaacgcaccctcaaccgcaacggcctccacttgccatcttactcaccttatcccccaaatgatcattgtcgttcaaggtgcgtaatattagtaagaagtatttatcagcttaacgtgataacaat

SEQ ID NO: 1561 - DNA, 763 bp, Artificial
  Mutations within GlyA3B4 introduced by GmGlyA3B4_T01TALE nuclease
gttcatgtacggttgcagatataaacgaagcatagcttatgtatgaggtgtaacaaaattggaaacaatagccatgcaaggtgaagaatgtcaccaactcagaaacccttcttcattgacgtgtccctcactcactctcctctcttcactataaatcgccactcttcgtgttctccacttcaccaactccttcaaacttattaacactttccttagttcaatatggggaagcccttcttcactctctctctttcttccctttgcttgctgttaccagtggctgctgccagtggcgataagtcgtgtcttaccgggttggactcaagacgatagttaccggataaggcgcagcggtcgggctgaacgggggttcgtgcacacagcccagcttggagcgaacgacctacaccgaactgagatactcttgtcgagtgcatgctttgctattacctccagcaagttcaacgagtgccaactcaacaacctcaacgcgttggaacccgaccaccgcattgagtccgaaggtggtcttattgaaacatggaactctcaacaccctgagctgcaatgcgccggtgtcactgtttccaaaacgcaccctcaaccgcaacggcctccacttgccatcttactcaccttatccccaaatgatcattgtcgttcaaggtgcgtaatattagtaagaagtatttatcagcttaacgtgataacaataatagtaatatgaaatatttattaaaattttttataattaatctctgct

SEQ ID NO: 1562 - DNA, 656 bp, Artificial
  Mutations within GlyA3B4 introduced by GmGlyA3B4_T01TALE nuclease
gttcatgtacggttgcagatataaacgaagcatagcttatgtatgaggtgtaacaaaattggaaacaatagccatgcaaggtgaagaatgtcaccaactcagaaacccttcttcattgacgtgtccctcactcactctcctctcttcactataaatcgccactcttcgtgttctccacttcaccaactccttcaaacttattaacactttccttagttcaatatggggaagcccttcttcactctctctctttcttccctttgcttgctatttgctattacctccagcaagttcaacgagtgccaactcaacaacctcaacgcgttggaacccgaccaccgcgttgagtccgaaggtggtcttattgaaacatggaactctcaacaccctgagctgcaatgcgccggtgtcactgtttccaaacgcaccctcaaccgcaacggcctccacttgccatcttactcaccttatcccccaaatgatcattgtcgttcaaggtgcgtaatattagtaagaagtatttatcagcttaacgtgataacaataatagtaatatgaaatattattaaatttttataattaattctctgctagaaaatttgattaatcatttttagtagaatttgttttttctcaactaggttttaaacaccaca

SEQ ID NO: 1563 - DNA, 525 bp, Artificial
  Mutations within GlyA3B4 introduced by GmGlyA3B4_T01TALE nuclease
gttcatgtacggttgcagatataaacgaagcatagcttatgtatgaggtgtaacaaaattggaaacaatagccatgcaaggtgaagaatgtcaccaactcagaaacccttcttcattgacgtgtccctcactcactctcctctcttcactataaatcgccactcttcgtgttctccacttcaccaactccttcaaacttattaacactttccttagttcaatatggggaagcccttcttcactctctctctttcttccctttgcttgctactactcttgtcgagtgcatgctttgctattacctccagcaagttcaacgagtgccaactcaacaacctcaacgcgttggaacccgaccaccgcgttgagtccgaaggtggtcttattgaaacatggaactctcaacacccctgagctgcaatgcgccggtgtcactgtttccaaacgcaccctcaaccgcaacggcctcccacttgccatcttactcaccttatccccaaatgatcattgtcgttcaaggtgcgt

SEQ ID NO: 1564 - DNA, 754 bp, Artificial
  Mutations within GlyA3B4 introduced by GmGlyA3B4_T01TALE nuclease
  misc_feature (627); (669): n is a or c or t or g
gttcatgtacggttgcagatataaacgaagcatagcttatgtatgaggtgtaacaaaattggaaacaatagccatgcaaggtgaagaatgtcaccaactcagaaacccttcttcattgacgtgtccctcactcactctcctctcttcactataaatcgccactcttcgtgttctccacttcaccaactccttcaaacttattaacactttccttagttcaatatggggaagcccttcttcactctctctctttcttccctttgcttgctacttgccgccatcgtggctggcgatggccaccacctgctccggggtcaagccgtgggcctggcacagcaccggcaacagccgctggaccgtctccagcgcctgctcttgtcgagtgcatgctttgctattacctccagcaagttcaacgagtgccaactcaacaacctcaacgcgttggaacccgaccaccgcgttgagtccgaaggtggtcttattgaaacatggaactctcaacacccctgagctgcaatgcgccggtgtcactgtttccaaacgcaccctcaaccgcaacggcctccacttgccatcttactcaccttatccccaaatgatcattgtcgttcaaggtgcgtaatnttagtaagaagtatttatcagcttaacgtgataacaataatngtaatatgaaatatttattaaattttttataattaatctctgctagaaaatttgattaatcatttttagtagaaatttgtttttc

SEQ ID NO: 1565 - DNA, 614 bp, Artificial
  Mutations within GlyA3B4 introduced by GmGlyA3B4_T01TALE nuclease
gttcatgtacggttgcagatataaacgaagcatagcttatgtatgaggtgtaacaaaattggaaacaatagccatgcaaggtgaagaatgtcaccaactcagaaacccttcttcattgacgtgtccctcactcactctcctctcttcactataaatcgccactcttcgtgttctccacttcaccaactccttcaaacttattaacactttccttagttcaatatggggaagcccttcttcactctctctctttcttccctttgcttgcttgtcgagtgcatgctttgctattacctccagcaagttcaacgagtgccaactcaacaacctcaacgcgttggaacccgaccaccgcgttgagtccgaaggtggtcttattgaaacatggaactctcaacacccctgagctgcaatgcgccggtgtcactgtttccaaacgcaccctcaaccgcaacggcctccacttgccatcttactcaccttatcccccaaatgatcattgtcgttcaaggtgcgtaaatattagtaagaagtatttatcagcttaacgtgataacaataatagtaatatgaaatatttattaaattttttataattaatctctgctagaaaa

SEQ ID NO: 1566 - DNA, 649 bp, Artificial
  Mutations within GlyA3B4 introduced by GmGlyA3B4_T01TALE nuclease
gttcatgtacggttgcagatataaacgaagcatagcttatgtatgaggtgtaacaaaattggaaacaatagccatgcaaggtgaagaatgtcaccaactcagaaacccttcttcattgacgtgtccctcactcactctcctctcttcactataaatcgccactcttcgtgttctccacttcaccaactccttcaaacttattaacactttccttagttcaatatggggaagcccttcttcactctctctctttcttccctttgcttcgagtgcatgctttgctattacctccagcaagttcaacgagtgccaactcaacaacctcaacgcgttggaacccgaccaccgcgttgagtccgaaggtggtcttattgaaacatggaactctcaacaccctgagctgcaatgcgccggtgtcactgtttccaaacgcaccctcaaccgcaacggcctccacttgccatcttactcaccttatcccccaaatgatcattgtcgttcaaggtgcgtaatattagtaagaagtatttatcagcttaacgtgataacaataatagtaatatgaaatatttattaaattttttataattaatctctgctagaaaatttgattaatcatttttagtagaatttgtttttctcaactagg

SEQ ID NO: 1567 - DNA, 608 bp, Artificial
  Mutations within GlyA3B4 introduced by GmGlyA3B4_T01TALE nuclease
gttcatgtacggttgcagatataaacgaagcatagcttatgtatgaggtgtaacaaaattggaaacaatagccatgcaaggtgaagaatgtcaccaactcagaaacccttcttcattgacgtgtccctcactcactctcctctcttcactataaatcgccactcttcgtgttctccacttcaccaactccttcaaacttattaacactttccttgtcgagtgcatgctttgctattacctccagcaagttcaacgagtgccaactcaacaacctcaacgcgttggaacccgaccaccgcgttgagtccgaaggtggtcttattgaaacatggaactctcaacaccctgagctgcaatgcgccggtgtcactgtttccaaacgcaccctcaaccgcaacggcctccacttgccatcttactcaccttatccccaaaatgatcattgtcgttcaaggtgcgtaatattagtaagaagtatttatcagcttaacgtgataacaataatagtaatatgaaatatttattaaattttttataattaatctctgctagaaaatttgattaatcatttttagtagaatttgtttttctcaactaggtttttaaaa

SEQ ID NO: 1568 - DNA, 688 bp, Artificial
  Mutations within GlyA3B4 introduced by GmGlyA3B4_T01TALE nuclease
gttcatgtacggttgcagatataaacgaagcatagcttatgtatgaggtgtaacaaaattggaaacaatagccatgcaaggtgaagaatgtcaccaactcagaaacccttcttcattgacgtgtccctcactcactctcctctcttcactataaatcgccactcttcgtgttctccacttcaccaactccttcaaacttattaacactttccttagttcaatatggggaagcccttcttcactctctctctttcttccctttgcttgccaacttacttctgacaacgatcggaggaccgaaggagctaaccgctttttttgcacaacatgggggatcatgtaactcgcccttgatcgttggggaaccggagctgaatgaagccataccaaactcttgtcgagtgcatgctttgctattacctccagcaagttcaacgagtgccaactcaacaacctcaacgcgttggaacccgaccaccgcgttgagtccgaaggtggtcttattgaaacatggaactctcaacacctgagctgcaatgcgccggtgtcactgtttccaaacgcaccctcaaccgcaacggcctccacttgccatcttactcaccttatccccaaatgatcattgtcgttcaaggtgcgtaatattagtaagaagtatttatcagcttaacgtgataacaataatagt

SEQ ID NO: 1569 - DNA, 596 bp, Artificial
  Mutations within GlyA3B4 introduced by GmGlyA3B4_T01TALE nuclease
gttcatgtacggttgcagatataaacgaagcatagcttatgtatgaggtgtaacaaaattggaaacaatagccatgcaaggtgaagaatgtcaccaactcagaaacccttcttcattgacgtgtccctcactcactctcctctcttcactataaatcgccactcttcgtgttctccacttcaccaactccttcaaacttattaacactttccttgtcgagtgcatgctttgctattacctccagcaagttcaacgagtgccaactcaacaacctcaacgcgttggaacccgaccaccgcgttgagtccgaaggtggtcttattgaaacatggaactctcaacaccctgagctgcaatgcgccggtgtcactgtttccaaacgcaccctcaaccgcaacggcctccacttgccatcttactcaccttatccccaaaatgatcattgtcgttcaaggtgcgtaatattagtaagaagtatttatcagcttaacgtgataacaataatagtaatagaaatatttattaaaattttttataattaatctctgctagaaaatttgattaaatcatttttagtagaatttgtttttctcaac

SEQ ID NO: 1570 - DNA, 654 bp, Artificial; identical to SEQ ID NO: 1318
  Mutations within GlyA3B4 introduced by GmGlyA3B4_T01TALE nuclease

SEQ ID NO: 1571 - DNA, 665 bp, Artificial
  Mutations within GlyA3B4 introduced by GmGlyA3B4_T01TALE nuclease
  misc_feature (507): n is a or c or t or g
gttcatgtacggttgcagatataaacgaagcatagcttatgtatgaggtgtaacaaaattggaaacaatagccatgcaaggtgaagaatgtcaccaactcagaaacccttcttcattgacgtgtccctcactcactctcctctcttcactataaatcgccactcttcgtgttctccacttcaccaactccttcaaacttattaacactttccttagttcaatatggggaagcccttcttcactctctctctttcttcactcttgtcgagtgcatgctttgctattacctccagcaagttcaacgagtgccaactcaacaacctcaacgcgttggaacccgaccaccgcgttgagtccgaaggtggtcttattgaaacatggaactctcaacaccctgagctgcaatgcgccggtgtcactgtttccaaacgcaccctcaaccgcaacggcctccacttgccatcttactcaccttatccccaaatgatcattgtcgttcaaggtgcntaattattagtaagaatgtattatcagcttaacgtgataacaataatagtaatatgaaatattttattaaatttttttataattaatctctgctagaaaatttgattaatctttttagtagaatttgttttttctcaactaggttttaaaacaccaca

SEQ ID NO: 1572 - DNA, 749 bp, Artificial
  Mutations within GlyA3B4 introduced by GmGlyA3B4_T01TALE nuclease
gttcatgtacggttgcagatataaacgaagcatagcttatgtatgaggtgtaacaaaattggaaacaatagccatgcaaggtgaagaatgtcaccaactcagaaacccttcttcattgacgtgtccctcactcactctcctctcttcactataaatcgccactcttcgtgttctccacttcaccaactccttcaaacttattaacactttccttagttcaatatggggaagcccttcttcactctctctctttcttccctttgctcatcgccagcaatggcggtggcaagcaggcgctggagacggtccagcggctgttgccggtgctgtgccaggcccacggcttgaccccctgtcgagtgcatgctttgctattacctccagcaagttcaacgagtgccaactcaacaacctcaacgcgttggaacccgaccaccgcgttgagtccgaaggtggtcttattgaaacatggaactctcaacaccctgagctgcaatgcgccggtgtcactgtttccaaacgcaccctcaaccgcaacggcctccactttgccatcttactcacctttatccccaaatgatcattgtcgttcaaggtgcgtaatattagtaagaagtatttatcagcttaacgtgataacaataatagtaatatgaaatatttattaaattttttataataatctctgctagaaaaatttgattaatcatttttagtagaatttgtttttctcaactaggttttaaaca

SEQ ID NO: 1573 - DNA, 628 bp, Artificial
  Mutations within GlyA3B4 introduced by GmGlyA3B4_T01TALE nuclease
gttcatgtacggttgcagatataaacgaagcatagcttatgtatgaggtgtaacaaaattggaaacaatagccatgcaaggtgaagaatgtcaccaactcagaaacccttcttcattgacgtgtccctcactcactctcctctcttcactataaatcgccactcttcgtgttctccacttcaccaactccttcaaacttattaacactttccttagttcaatatgggggaagcccttcgagtgcatgctttgctattacctccagcaagttcaacgagtgccaactcaacaacctcaacgcgttggaacccgaccaccgcgttgagtccgaaggtggtcttattgaaacatggaactctcaacaccctgagctgcaatgcgccaggtgtcactgtttccaaacgtcaccctcaaccgcaacggcctccacttgccatcttactcaccttatccccaaatgatcattgtcgttcaaggtgcgtaatattagtaagaagtatttatcagcttaacgtgataacaataatagtaatatgaatatttattaattttttataattaatctctgctagaaatttgattaatcatttttagtagaatttgtttttctcaactaggtttttaaaca

SEQ ID NO: 1574 - DNA, 608 bp, Artificial; identical to SEQ ID NO: 1034
  Mutations within GlyA3B4 introduced by GmGlyA3B4_T01TALE nuclease

SEQ ID NO: 1575 - DNA, 590 bp, Artificial
  Mutations within GlyA3B4 introduced by GmGlyA3B4_T01TALE nuclease
gttcatgtacggttgcagatataaacgaagcatagcttatgtatgaggtgtaacaaaattggaaacaatagccatgcaaggtgaagaatgtcaccaactcagaaacccttcttcattgacgtgtccctcactcactctcctctcttcactataaatcgccactcttcgtgttctccacttcaccaactccttcaaacttattaacactttccttagttcaatatggggaagcccttcttcactctctctctttcttccctttgcttgcttgtcgagtgcatgctttgctattacctccagcaagttcaacgagtgccaactcaacaacctcaacgcgttggaacccgaccaccgcgttgagtccgaaggtggtcttattgaaacatggaactctcaacaccctgagctgcaatgcgccggtgtcactgtttccaaacgcaccctcaaccgcaacggcctccacttgccatcttactcaccttatccccaaatgatcattgtcgttcaaggtgcgtaaatattagtaagaagtatttatcagcttaacgtgataacaataatagtaatatgaaatatttattaaatttttt

SEQ ID NO: 1576 - DNA, 606 bp, Artificial
  Mutations within GlyA3B4 introduced by GmGlyA3B4_T01TALE nuclease
gttcatgtacggttgcagatataaacgaagcatagcttatgtatgaggtgtaacaaaattggaaacaatagccatgcaaggtgaagaatgtcaccaactcagaaacccttcttcattgacgtgtccctcactcactctcctctcttcactataaatcgccactcttcgtgttctccacttcaccaactccttcaaacttattaacactttccttagttcaatatggggaagcccttcttcactctctctctttcttccctttgctcttgtcgagtgcatgttttgctattacctccagcaagttcaacgagtgccaactcaacaacctcaacgcgttggaacccgaccaccgcgttgagtccgaaggtggtcttattgaaacatggaactctcaacaccctgagctgcaatgcgccggtgtcactgtttccaaacgcaccctcaaccgcaacggcctccacttgccatcttactcaccttatcccccaaatgatcattgtcgttcaaggtgcgtaatattagtaagaagtatttatcagcttaacgtgataacaataatagtaatatgaaatatttattaaattttttataattaatctctgctag

SEQ ID NO: 1577 - DNA, 770 bp, Artificial
  Mutations within GlyA3B4 introduced by GmGlyA3B4_T01TALE nuclease
  misc_feature (642): n is a or c or t or g
gttcatgtacggttgcagatataaacgaagcatagcttatgtatgaggtgtaacaaaattggaaacaatagccatgcaaggtgaagaatgtcaccaactcagaaacccttcttcattgacgtgtccctcactcactctcctctcttcactataaatcgccactcttcgtgttctccacttcaccaactccttcaaacttattaacactttccttagttcaatatggggaagcccttcttcactctctctctttcttccctttgcttgcgccacgttttgcaatcttgagaagttggcctgtgtccaactgtaacggtggacctctcaactctcccgccaccgtgagcaaggcctccagagcgcgtgcgccggaccactgtttgccgacgctcttgtcgagtgcatgctttgctattacctccagcaagttcaacgagtgccaactcaacaacctcaacgcgttggaacccgaccaccgcgttgagtccgaaggtggtcttattgaaacatggactctcaacaccctgagctgcaatgcgccggtgtcactgtttccaaacgcaccctcaaccgcaacggcctccacttgccatcttactcaccttatccccaaatgatcattgtcgttcaaggtgcgtaatnttagtaagaagtatttatcagcttaacgtgataacaataatagtaatatgaaatatttattaaattttttataattaaatctcttgctagaaaatttgattaatcatttttagtagaatttgtttttc

SEQ ID NO: 1578 - DNA, 654 bp, Artificial
  Mutations within GlyA3B4 introduced by GmGlyA3B4_T01TALE nuclease
gttcatgtacggttgcagatataaacgaagcatagcttatgtatgaggtgtaacaaaattggaaacaatagccatgcaaggtgaagaatgtcaccaactcagaaacccttcttcattgacgtgtccctcactcactctcctctcttcactataaatcgccactcttcgtgttctccacttcaccaactccttcaaacttattaacactttccttagttcaatatggggaagcccttcttcactctctctctttcttccctttgcttgctctcgagtgcatgctttgctattacctccagcaagttcaacgagtgccaactcaacaacctcaacgcgttggaacccgaccaccgcgttgagtccgaaggtggtcttattgaaacatggaactctcaacaccctgagctgcaatgcgccggtgtcactgtttccaaacgcaccctcaaccacaacggcctccacttgccatcttactcaccttatcccccaaatgatcattgtcgttcaaggtgcgtaaatattagtaagaagtatttatcagcttaacgtgataacaataatagtaatatgaaatatttattaaattttttataattaatctctgctagaaaatttgattaatctttttagtagaattgttttttctcaactagg

SEQ ID NO: 1579 - DNA, 631 bp, Artificial
  Mutations within GlyA3B4 introduced by GmGlyA3B4_T01TALE nuclease
gttcatgtacggttgcagatataaacgaagcatagcttatgtatgaggtgtaacaaaattggaaacaatagccatgcaaggtgaagaatgtcaccaactcagaaacccttcttcattgacgtgtccctcactcactctcctctcttcactataaatcgccactcttcgtgttctccacttcaccaactccttcaaacttattaacactttccttagttcaatatggggaagcccttcttcactctctctctttcttccctttgctgtcgagtgcatgctttgctattacctccagcaagttcaacgagtgccaactcaacaacctcaacgcgttggaacccgaccaccgcgttgagtccgaaggtggtcttattgaaacatggaactctcaacaccctgagctgcaatgcgccggtgtcactgtttccaaacgcaccctcaaccgcaacggcctccacttgccatcttactcaccttatcccccaaatgatcttgtcgttcaaggtgcgtaaatattagtaagaagtatttatcagcttaacgtgataacaataatagtaatatgaaatatttattaaattttttataattaatctctgctagaaaatttgattaatcatttttagtagaa

SEQ ID NO: 1580 - DNA, 656 bp, Artificial
  Mutations within GlyA3B4 introduced by GmGlyA3B4_T01TALE nuclease
gttcatgtacggttgcagatataaacgaagcatagcttatgtatgaggtgtaacaaaattggaaacaatagccatgcaaggtgaagaatgtcaccaactcagaaacccttcttcattgacgtgtccctcactcactctcctctcttcacgatttatagggttcacgctcaacaaaatcgcatatcaatttcacaacaattggtatgccaaacatatataattcactgtaataattataaggataaaatgaaatcttgtcgagtgcatgctttgctattacctccagcaagttcaacgagtgccaactcaacaacctcaacgcgttggaacccgaccaccgcgttgagtccgaaggtggtcttattgaaacatggaactctcaacaccctgagctgcaatgcgccggtgtcactgtttccaaacgcaccctcaaccgcaacggcctccacttgccatcttactcaccttatccccaaatgatcattgtcgttcaaggtgcgtaatattagtaagaagtatttatcagcttaacgtgataacaataatagtaatatgaaatatttattaaattttttataattaatctctgctagaaaatttgattaatcatttttagtagaatttgttttttctcaactaggttttaaaacaccaca

SEQ ID NO: 1581 - DNA, 655 bp, Artificial
  Mutations within GlyA3B4 introduced by GmGlyA3B4_T01TALE nuclease
gttcatgtacggttgcagatataaacgaagcatagcttatgtatgaggtgtaacaaaattggaaacaatagccatgcaaggtgaagaatgtcaccaactcagaaacccttcttcattgacgtgtccctcactcactctcctctcttcactataaatcgccactcttcgtgttctccacttcaccaactccttcaaacttattaacactttccttagttcaatatggggaagcccttcttcactctctctctttcttccctttgcttgttgtcgagtgcatgctttgctattacctccagcaagttcaacgagtgccaactcaacaacctcaacgcgttggaacccgaccaccgcgttgagtccgaaggtggtcttattgaaacatggaactctcaacaccctgagctgcaatgcgccggtgtcactgtttccaaacgcaccctcaaccgcaacggcctccacttgccatcttactcaccttatcccccaaatgatcattgtcgttcaaggtgcgtaatattagtaagaagtatttatcagcttaacgtgataacaataatagtaatatgaaatatttattaaattttttataattaatctctgctagaaaatttgattaatcatttttagtagaatttgttttttctcaactagg

SEQ ID NO: 1582 - DNA, 656 bp, Artificial
  Mutations within GlyA3B4 introduced by GmGlyA3B4_T01TALE nuclease
gttcatgtacggttgcagatataaacgaagcatagcttatgtatgaggtgtaacaaaattggaaacaatagccatgcaaggtgaagaatgtcaccaactcagaaaccccttcttcattgacgtgtccctcactcactctcctctcttcactataaatcgccactcttcgtgttctccacttcaccaactccttcaaacttattaacactttccttagttcaatatggggaagcccttcttcactctctctctttcttccctttgctattacctcgagtgcatgctttgctattacctccagcaagttcaacgagtgccaactcaacaacctcaacgcgttggaacccgaccaccgcgttgagtccgaaggtggtcttattgaaacatggaactctcaacaccctgagctgcaatgcgccggtgtcactgtttccaaacgcaccctcaaccgcaacggcctccacttgccatcttactcaccttatccccaaatgatcattgtcgttcaaggtgcgtaatattagtaagagtatttatcagcttaacgtgataacaatatagtaatatgaaatatttattaaatttttataattaatctctgctagaaaatttgattaatcattttagtagaatttgtttttctcaactaggttttt

SEQ ID NO: 1583 - DNA, 769 bp, Artificial
  Mutations within GlyA3B4 introduced by GmGlyA3B4_T01TALE nuclease
  misc_feature (701): n is a or c or t or g
gttcatgtacggttgcagatataaacgaagcatagcttatgtatgaggtgtaacaaaattggaaacaatagccatgcaaggtgaagaatgtcaccaattcagaaacccttcttcattgacgtgtccctcactcactctcctctcttcactataaatcgccactcttcgtgttctccacttcaccaactccttcaaacttattaacactttccttagttcaatatggggaagcccttcttcactctctctctttcttccctttgcttgctaccttttaaatatagatacaactactctaattctaatttttatttatagatgacgagacaataattaattttttatacatcaaaacttagattaggagaaaactcttctccaaataaagttagaagaaattacccttgtcgagtgcatgctttgctattacctccagcaagttcaacgagtgccaactcaacaacctcaacgcgttggaacccgaccaccgcgttgagtcccgaaggtggtcttattgaaacatggaactctcaacaccctgagctgcaatgcgccggtgtcactgtttccaaacgcaccctcaaccgcaacggcctccacttgccattcttactcaccttatccccaaaatgatcattgtcgttcaaggtgcgtaatattagtaagaagtatttcatcagcttaacgtgataacaataatngtaatatgaaatatttattaaattttttataataatctctgctagaaaatttgattaatcatttttag

SEQ ID NO: 1584 - DNA, 635 bp, Artificial
  Mutations within GlyA3B4 introduced by GmGlyA3B4_T01TALE nuclease
  misc_feature (530): n is a or c or t or g
gttcatgtacggttgcagatataaacgaagcatagcttatgtatgaggtgtaacaaaattggaaacaatagccatgcaaggtgaagaatgtcaccaactcagaaacccttcttcattgacgtgtccctcactcactctcctctcttcactataaatcgccactcttcgtgttctccacttcaccaactccttcaaacttattaacactttccttagttcaatatggggaagcccttcttcactctctctctttcttccctttgctattacctcgagtgcatgctttgctattacctccagcaagttcaacgagtgccaactcaacaacctcaacgcgttggaacccgaccaccgcgttgagtccgaaggtggtcttattgaaacatggaactctcaacaccctgagctgcaatgcgccggtgtcactgtttccaaacgcaccctcaaccgcaacggcctccacttgccatcttactcaccttatccccaaatgatcattgtcgttcaaggtgcgtaatattagtaagagnatttatcagcttaacgtgataacaatatagtaatatgaaatatttattaaatttttataattaatctctgctagaaaatttgattaatcattttagtagaatttg

SEQ ID NO: 1585 - DNA, 606 bp, Artificial
  Mutations within GlyA3B4 introduced by GmGlyA3B4_T01TALE nuclease
gttcatgtacggttgcagatataaacgaagcatagcttatgtatgaggtgtaacaaaattggaaacaatagccatgcaaggtgaagaatgtcaccaactcagaaaccccttcttcattgacgtgtcccctcactcactctcctctcttcactataaatcgccactcttcgtgttctccacttcaccaactccttcaaacttattaacactttccttagttcaatatggggaagcccttcttcactctctctcttgtcgagtgcatgctttgctattacctccagcaagttcaacgagtgccaactcacaactcacgcgttggaacccgaccaccgcgttgagtcccgaaggtggtcttattgaaacatggaactctcaacaccctgagctgcaatgcgccggtgtcactgtttccaaacgcacccctcaaccgcaacggcctccacttgccatcttactcaccttatcccccaaatgatcattgtcgttcaaggtgcgtaatattagtaagaagtatttatcagcttaacgtgataacaataatagtaatatgaaatatttattaaattttttataattaatctctgctagaaaatttgattaatc

SEQ ID NO: 1586 - DNA, 619 bp, Artificial
  Mutations within GlyA3B4 introduced by GmGlyA3B4_T01TALE nuclease
gttcatgtacggttgcagatataaacgaagcatagcttatgtatgaggtgtaacaaaattggaaacaatagccatgcaaggtgaagaatgtcaccaactcagaaacccttcttcattgacgtgtccctcactcactctcctctcttcactataaatcgccactcttcgtgttctccacttcaccaactccttcaaacttattaacacctttccttagttcaatatgggggaagcccttcttcactctctctctttcttccctttgcttgctactactcttgtcgagtgcatgctttgctattacctccagcaagttcaacgagtgccaactcaacaacctcaacgcgtttggaacccgaccaccgcgttgagtccgaaggtggtcttattgaaaacatggaactctcaacacccctgagctgcaatgcgccggtgtcactgtttccaaacgcaccctcaaccgcaacggcctccacttgccatcttactcaccttatccccaatgatcattgtcgttcaaggtgcgtatattagtaagaagtatttatcagcttacgtgatacaataatagtaatatgaaatattattaaattttttataattaatctctgctagaaaa

SEQ ID NO: 1587 - DNA, 607 bp, Artificial
  Mutations within GlyA3B4 introduced by GmGlyA3B4_T01TALE nuclease
gttcatgtacggttgcagatataaacgaagcatagcttatgtatgaggtgtaacaaaattggaaacaatagccatgcaaggtgaagaatgtcaccaactcagaaacccttcttcattgacgtgtccctcactcactctcctctcttcactataaatcgccactcttcgtgttctccacttcaccaactccttcaaacttattaacactttccttagttcaatatgggggaagcccttcttcactctctctctttcttccctttgctcttgtcgagtgcatgctttgctattacctccagcaagttcaacgagtgccaactcaacaacctcaacgcgttggaacccgaccaccgcgttgagtccgaaggtggtcttattgaaacatggaactctcaacaccctgagctgcaatgcgccggtgtcactgtttccaaacgcaccctcaaccgcaacggcctccacttgccatcttactcaccttatcccccaaatgatcattgtcgttcaaggtgcgtaatattagtaagaagtatttatcagcttaacgtgataacaataatagtaatatgaaatatttattaaattttttataattaatctctgctag

SEQ ID NO: 1588 - DNA, 770 bp, Artificial
  Mutations within GlyA3B4 introduced by GmGlyA3B4_T01TALE nuclease
  misc_feature (693): n is a or c or t or g
gttcatgtacggttgcagatataaacgaagcatagcttatgtatgaggtgtaacaaaattggaaacaatagccatgcaaggtgaagaatgtcaccaactcagaaacccttcttcattgacgtgtccctcactcactctcctctcttcactataaatcgccactcttcgtgttctccacttcaccaactccttcaaacttattaacactttccttagttcaatatggggaagcccttcttcactctctctctttcttccctttgcttgctacagcaccggcaacagccgctggaccgtctccagcgcctgcttgccgccatcgtggctggcgatggccaccacctgctccggggtcaagccgtgggcctggcacagcaccggcaacagccgctggactcttgtcgagtgcatgcttttgctattacctccagcaagttcaacgagtgccaactcaacaacctcaacgcgttggaacccgaccaccgcgttgagtccgaaggtggtcttattgaaacatggaactctcaacaccctgagctgcaatgcgccggtgtcactgtttccaaacgcaccctcaaccgcaacggcctccacttgccatcttactcaccttatccccaaaatgatcattgtcgttcaaggtgcgtaatattagtaagaagtatttatcagcttaacgtgataacaataatngtaatatgaaatatttattaaatttttataattaatctctgctagaaaatttgattaatcatttttagtagaatttg

SEQ ID NO: 1589 - DNA, 447 bp, Artificial
  Mutations within GlyA3B4 introduced by GmGlyA3B4_T01TALE nuclease
gttcatgtacggttgcagatataaacgaagcatagcttatgtatgaggtgtaacaaaaattggaaacaatagccatgcaaaggtgaagaatgtcaccaactcagaaacccttcttcattgacgtgtccctcactcactctcctctcttcactataaatcgccactcttcgtgttctccacttcaccaactccttcaaacttattaacactttccttagttcaatatggggaagcccttcttcactctctctctttcttccctttgcttgtcgagtgcatgctttgctattacctccagcaagttcaacgagtgccaactcaacaacctcaacgcgttggaacccgaccaccgcgttgagtccgaaggtggtcttattgaaacatggaactctcaacaccctgagctgcaatgcgccggtgtcactgtttccaaacgcaccctcaacc

SEQ ID NO: 1590 - DNA, 435 bp, Artificial
  Mutations within GlyA3B4 introduced by GmGlyA3B4_T01TALE nuclease
gttcatgtacggttgcagatataaaacgaagcatagcttatgtatgaggtgtaacaaaaaattggaaacaatagccatgcaaggtgaagaatgtcaccaactcagaaacccttcttcattgacgtgtccctcactcactctcctctcttcactataaatcgccactcttcgtgttctccacttcaccaactccttcaaacttattaacactttccttagttcaatatggggaagcccttcttcactctctctctttcttccctttgcttgctagcaggcgctggagacggtgcaggcgctgttgccggtgctgtgccaggcccacggcttgacccccccagcaggtggtggccatcgccagccacgatgctcttgtcgagtgcatgctttgctattacctccagcaagttcaacgagtgccaactcaacaacctc

SEQ ID NO: 1591 - DNA, 651 bp, Artificial
  Mutations within GlyA3B4 introduced by GmGlyA3B4_T01TALE nuclease
gttcatgtacggttgcagatataaacgaagcatagcttatgtatgaggtgtaacaaaattggaaacaatagccatgcaaggtgaagaatgtcaccaactcagaaacccttcttcattgacgtgtccctcactcactctcctctcttcactataaatcgccactcttcgtgttctccacttcaccaactccttcaaacttattaacactttccttagttcaatatggggaagcccttcttcactctctctctttcttccctttgcttgctcgagtgcatgctttgctattacctccagcaagttcaacgagtgccaactcaacaacctcaacgcgttggaacccgaccaccgcgttgagtccgaaggtggtcttattgaaacatggaactctcaacaccctgagctgcaatgcgccggtgtcactgtttccaaacgcaccctcaaccgcaacggcctccacttgccatcttactcaccttatcccccaaatgatcattgtcgttcaaggtgcgtaaatattagtaagaagtatttatcagcttaacgtgataacaataatagtaatatgaatatttattaaatttttataattaatctctgctagaaaatttgattaatctttttagtagaatttgttttttctcaactagg

SEQ ID NO: 1592 - DNA, 661 bp, Artificial
  Mutations within GlyA3B4 introduced by GmGlyA3B4_T01TALE nuclease
  misc_feature (633): n is a or c or t or g
gttcatgtacggttgcagatataaacgaagcatagcttatgtatgaggtgtaacaaaattggaaacaatagccatgcaaggtgaagaatgtcaccaactcagaaacccttcttcattgacgtgtccctcactcactctcctctcttcactataaatcgccactcttcgtgttctccacttcaccaactccttcaaacttattaacactttccttagttcaatatggggaagcccttcttcactctctctctttcttccctttgcttgcttacgccagctggcgaaaggggatgtgctgcaaggcgattaagttgggtaacgccagggttttcccagtcacgacgttgtaaaacgacggccagtgaattcgagctcggtacctcgcgaatgcatctagatccaatgatcatgagcggagaattaagggagtcacgttatgacccccgccgatgacgcgggacaagccgttttacgtttggaactgacagaaccgcaacgttgtcgagtgcatgctttgctattacctccagcaagttcaacgagtgccaactcaacaacctcacgcgttggaacccgaccaccgcgttgagtccgaaggtggtcttattgaaacatggactctcaacaccctgngctgcaatgcgccggtgtcactgtttcc

SEQ ID NO: 1593 - DNA, 582 bp, Artificial
  Mutations within GlyA3B4 introduced by GmGlyA3B4_T01TALE nuclease
  misc_feature (499): n is a or c or t or g
gttcatgtacggttgcagatataaacgaagcatagcttatgtatgaggtgtaacaaaattggaaacaatagccatgcaaggtgaagaatgtcaccaactcagaaacccttcttcattgacgtgtccctcactcactctcctctcttcactataaatcgccactcttcgtgttctccacttcaccaactccttcaaacttattaacactttccttagttcaatatggggaagcccttcttcactctctctctttcttccctttgcttgccccgaccaccgcgttgagtccgaaggtggtcttattgaaacatggaactctcaacaccctgagctgcaatgcgccggtgtcactgtttccaaacgcaccctcaaccgcaacggcctccacttgccatcttactcaccttatccccaaatgatcattgtcgttcaaggtgcgtaatattagtaagaagtatttatcagcttaacgtgataacaataatagtaatatgaaatntttattaaattttttatataatctctgctagaaattgataatcattttagtagaatttgtttttctcaactaggttttaaaca

SEQ ID NO: 1594 - DNA, 616 bp, Artificial
  Mutations within GlyA3B4 introduced by GmGlyA3B4_T01TALE nuclease
gttcatgtacggttgcagatataaacgaagcatagcttatgtatgaggtgtaacaaaattggaaacaatagccatgcaaggtgaagaatgtcaccaactcagaaacccttcttcattgacgtgtccctcactcactctcctctcttcactataaatcgccactcttcgtgttctccacttcaccaactccttcaaacttattaacactttccttagttcaatatgggggaagcccttcttcactctctctctttcttccctttgcttgctactactcttgtcgagtgcatgctttgctattacctccagcaagttcaacgagtgccaactcaacaacctcaacgcgttggaacccgaccaccgcgttgagtccgaaggtggtcttattgaaacatggaactctcaacaccctgagctgcaatgcgccggtgtcactgtttccaaacgcaccctcaaccgcaacggcctccacttgccatcttactcaccttatccccaaatgatcattgtcgttcaaggtgcgtaatattagtaagaagtatttatcagcttaacgtgataacaataatagtaatatgaaatatttattaaattttttataattaatctctgctag

SEQ ID NO: 1595 - DNA, 642 bp, Artificial
  Mutations within GlyA3B4 introduced by GmGlyA3B4_T01TALE nuclease
gttcatgtacggttgcagatataaacgaagcatagcttatgtatgaggtgtaacaaaaattggaaacaatagccatgcaaggtgaagaatgtcaccaactcagaaacccttcttcattgacgtgtccctcactcactctcctctcttcactataaatcgccactcttcgtgttctccacttcaccaactccttcaaacttattaacactttccttagttcaatatggggaagcccttcttcactctctctctttcttccctttgcttgccaacttacttctgacaacgatcggaggaccgaaggagctaaccgctttttttgcacaacatgggggatcatgtaactcgccttgatcgttgggaaccggagctgaatgaagccataccaaactcttgtcgagtgcatgctttgctattacctccagcaagttcaacgagtgccaactcaacaacctcaacgcgttggaacccgaccacccgcgttgagtccgaaggtggtcttattgaaacatggaactctcaacaccctgagctgcaatgcgccggtgtcactgtttccaaacgcaccctcaaccgcaacggcctccacttgccatcttactcaccttgatccccaaatgatcattgtcgttcaaggtgcgt

SEQ ID NO: 1596 - DNA, 651 bp, Artificial
  Mutations within GlyA3B4 introduced by GmGlyA3B4_T01TALE nuclease
gttcatgtacggttgcagatataaacgaagcatagcttatgtatgaggtgtaacaaaattggaaacaatagccatgcaaggtgaagaatgtcaccaactcagaaacccttcttcattgacgtgtccctcactcactctcctctcttcactataaatcgccactcttcgtgttctccacttcaccaactccttcaaacttattaacactttccttagttcaatatggggaagcccttcttcactctctctctttcttccctttgcttgtcgagtgcatgctttgctattacctccagcaagttcaacgagtgccaactcaacaacctcaacgcgttggaacccgaccaccgcgttgagtccgaaggtggtcttattgaaacatggaactctcaacaccctgagctgcaatgcgccggtgtcactgtttccaaacgcaccctcaaccgcaacggcctccacttgccatcttactcaccttatcccccaaatgatcattgtcgttcaaggtgcgtaatattagtaagaagtatttatcagcttaacgtgataacaataatagtaatatgaaatatttattaaattttttataattaatctctgctagaaaatttgattaatctttttagtagaatttgttttttctcaactagg

SEQ ID NO: 1597 - DNA, 655 bp, Artificial; identical to SEQ ID NO: 600
  Mutations within GlyA3B4 introduced by GmGlyA3B4_T01TALE nuclease

SEQ ID NO: 1598 - DNA, 664 bp, Artificial
  Mutations within GlyA3B4 introduced by GmGlyA3B4_T01TALE nuclease
gttcatgtacggttgcagatataaacgaagcatagcttatgtatgaggtgtaacaaaattggaaacaatagccatgcaaggtgaagaatgtcaccaactcagaaaccccttcttcattgacgtgtccctcactcactctcctctcttcactataaatcgccactcttcgtgttctccacttcaccaactccttcaaacttattaacactttccttagttcaatatgggggaagcccttcttcactctctctctttcttccctttgctgagtgcatgctttgctattacctccagcaagttcaacgagtgccaactcaacaacctcaacgcgttggaacccgaccaccgcgttgagtccgaaggtggtcttattgaaacatggaactctcaacaccctgagctgcaatgcgccggtgtcactgtttccaaacgcaccctcaaccgcaacggcctccacttgccatcttactcaccttatcccccaaatgatcattgtcgttcaaggtgcgtaatattagtaagaagtatttatcagcttaacgtgataacaataatagtaatatgaaatatttattaaattttttataattaatctctgctagaaaatttgattaatctttttagtagaatttgttttttctcaactaggttttaaaacaccaca

SEQ ID NO: 1599 - DNA, 713 bp, Artificial
  Mutations within GlyA3B4 introduced by GmGlyA3B4_T01TALE nuclease
gttcatgtacggttgcagatataaacgaagcatagcttatgtatgaggtgtaacaaaattggaaacaatagccatgcaaggtgaagaatgtcaccaactcagaaacccttcttcattgacgtgtccctcactcactctcctctcttcactataaatcgccactcttcgtgttctccacttcaccaactccttcaaacttattaacactttccttagttcaatatggggaagcccttcttcactctctctctttcttccctttgcttgctattcctaatttacccttgccttttctctttctctttcttccctttgtcttactcttgtcgagtgcatgctttgctattacctccagcaagttcaacgagtgccaactcaacaacctcaacgcgttggaacccgaccaccgcgttgagtccgaaggtggtcttattgaaacatggaactctcaacaccctgagctgcaatgcgccggtgtcactgtttccaaacgcaccctcaaccgcaacggcctccacttgccatcttactcaccttatccccaaatgatcattgtcgttcaaggtgcgtaatattagtaagaagtatttatcagcttaacgtgataacaataatagtaatatgaaatatttattaaatttttataattaatctctgctagaaaatttgattaatcatttttagtagaatttgttttttctcaactaggtttt

SEQ ID NO: 1600 - DNA, 644 bp, Artificial
  Mutations within GlyA3B4 introduced by GmGlyA3B4_T01TALE nuclease
gttcatgtacggttgcagatataaacgaagcatagcttatgtatgaggtgtaacaaaattggaaacaatagccatgcaaggtgaagaatgtcaccaactcagaaacccttcttcattgacgtgtccctcactcactctcctctcttcactataaatcgccactcttcgtgttctccacttcaccaactccttcaaacttattaacactttccttagttcaatatggggaagcccttcttcactctctctctttcttccctttgcttgctatccacggacagcacggcgccgttgcagttggtgatgtggttcagcctggtcagctgggccttgtagttgccctcttgtcgagtgcatgctttgctattacctccagcaagttcaacgagtgccaactcaacaacctcaacgcgttggaacccgaccaccgcgttgagtccgaaggtggtcttattgaaacatggaactctcaacaccctgagctgcaatgcgccggtgtcactgtttccaaacgcaccctcaaccgcaacggcctccacttgccatcttactcaccttatccccaaatgatcattgtcgttcaaggtgcgtaatattagtaagaagtatttatcgcttaacgtgataacaataatagtaatatg

SEQ ID NO: 1601 - DNA, 721 bp, Artificial
  Mutations within GlyA3B4 introduced by GmGlyA3B4_T01TALE nuclease
gttcatgtacggttgcagatataaacgaagcatagcttatgtatgaggtgtaacaaaattggaaacaatagccatgcaaggtgaagaatgtcaccaactcagaaacccttcttcattgacgtgtccctcactcactctcctctcttcactataaatcgccactcttcgtgttctccacttcaccaactccttcaaacttattaacactttccttagttcaatatggggaagcccttcttcactctctctctttcttccctttgcttgctattcctaatttacccttgccttttctctttctctttcttccctttgtcttactcttgtcgagtgcatgctttgctattacctccagcaagttcaacgagtgccaactcaacaaccctcaacgcgttggaaccccgaccaccgcgttgagtccgaaggtggtcttattgaaacatggaactctcaacaccctgagctgcaatgcgccggtgtcactgtttccaaacgcaccctcaaccgcaacggcctccacttgccatcttactcaccttatccccaaatgatcattgtcgttcaaggtgcgtaatattagtaagaagtatttatcagcttaacgtgataacaataatagtaatatgaaatatttattaaattttttataattaatctctgctagaaaatttgattaatcatttttagtagaatttgtttttctcaactaggttttaaaaca

SEQ ID NO: 1602 - DNA, 637 bp, Artificial
  Mutations within GlyA3B4 introduced by GmGlyA3B4_T01TALE nuclease
gttcatgtacggttgcagatataaacgaagcatagcttatgtatgaggtgtaacaaaattggaaacaatagccatgcaaggtgaagaatgtcaccaactcagaaacccttcttcattgacgtgtccctcactcactctcctctcttcactataaatcgccactcttcgtgttctccacttcaccaactccttcaaacttattaacactttccttagttcaatatggggaagcccttcttcactctctctctttcttccctttgctattacctccagcaagttcaacgagtgccaactcaacaacctcaacgcgttggaacccgaccaccgcgttgagtccgaaggtggtcttattgaaacatggaactctcaacacccctgagctgcaatgcgccggtgtcactgtttccaaacgcaccctcaaccgcaacggcctccacttgccatcttactcaccttatcccccaaatgatcattgtcgttcaaggtgcgtaatattagtaagaagtatttatcagcttaacgtgataacaataatagtaatatgaaatatttattaaattttttataattaatctctgctagaaaatttgattaatcatttttagtagaatttgttttttctcaactaggtttt

SEQ ID NO: 1603 - DNA, 593 bp, Artificial
  Mutations within GlyA3B4 introduced by GmGlyA3B4_T01TALE nuclease
gttcatgtacggttgcagatataaacgaagcatagcttatgtatgaggtgtaacaaaattggaaacaatagccatgcaaggtgaagaatgtcaccaactcagaaacccttcttcattgacgtgtccctcactcactctcctctcttcactataaatcgccactcttcgtgttctccacttcaccaactccttcaaacttattaacactttccttagttcaatatggggaagcccttcttcactctctctctttcttccctttgcttgctaccttttaaatcattaagatacaactactctaattctaatttttatttattatgatgacgagacaataattaatttttttatacatcaaaacttagattaggagaaactcttctccaaataaagttagaagaaattacccttgtcgagtgcatgctttgctattacctccagcaagttcaacgagtgccaactcaacaacctcaacgcgttggaacccgaccaccgcgttgagtcccgaaggtggtcttattgaaacatggaactctcaacaccctgagctgcaatgcgccggtgtcactgtttccaaacgcaccctcaaccgc

SEQ ID NO: 1604 - DNA, 660 bp, Artificial
  Mutations within GlyA3B4 introduced by GmGlyA3B4_T01TALE nuclease
gttcatgtacggttgcagatataaacgaagcatagcttatgtatgaggtgtaacaaaattggaaacaatagccatgcaaggtgaagaatgtcaccaactcagaaacccttcttcattgacgtgtccctcactcactctcctctcttcactataaatcgccactcttcgtgttctccacttcaccaactccttcaaacttattaacactttccttagttcaatatggggaagcccttcttcactctctctctttcttccctttgcttgcttgtcgagtgcatgctttgctattacctccagcaagttcaacgagtgccaactcaacaacctcaacgcgttggaacccgaccaccgcgttgagtccgaaggtggtcttattgaaacatggaactctcaacaccctgagctgcaatgcgccggtgtcactgtttccaaacgcaccctcaaccgcaacggcctccacttgccatcttactcaccttatcccccaaatgatcattgtcgttcaaggtgcgtaatattagtaagaagtatttatcagcttaacgtgataacaataatagtaatatgaaatatttattaaattttttataattaatctctgctagaaaatttgattaatcatttttagtagaatttgttttttctcaactaggtttt

SEQ ID NO: 1605 - DNA, 607 bp, Artificial
  Mutations within GlyA3B4 introduced by GmGlyA3B4_T01TALE nuclease
gttcatgtacggttgcagatataaacgaagcatagcttatgtatgaggtgtaacaaaattggaaacaatagccatgcaaggtgaagaatgtcaccaactcagaaacccttcttcattgacgtgtccctcactcactctcctctcttcactataaatcgccactcttcgtgttctccacttcaccaactccttcaaacttattaacactttccttagttcaatatggggaagcccttcttcactctctctctttcttccctttgcttgcttgtcgagtgcatgctttgctattacctccagcaagttcaacgagtgccaactcaacaacctcaacgcgttggaacccgaccaccgcgttgagtccgaaggtggtcttattgaaacatggaactctcaacaccctgagctgcaatgcgccggtgtcactgtttccaaacgcaccctcaaccgcaacggcctccacttgccatcttactcaccttatcccccaaatgatcattgtcgttcaaggtgcgtaatattagtcaagaagtatttatcagcttaacgtgataacaataatagtaatatgaaatatttattaaattttttataattaatctctgct

SEQ ID NO: 1606 - DNA, 629 bp, Artificial
  Mutations within GlyA3B4 introduced by GmGlyA3B4_T01TALE nuclease
gttcatgtacggttgcagatataaacgaagcatagcttatgtatgaggtgtaacaaaattggaaacaatagccatgcaaggtgaagaatgtcaccaactcagaaacccttcttcattgacgtgtccctcactcactctcctctcttcactataaatcgccactcttcgtgttctccacttcaccaactccttcaaacttattaacactttccttagttcaatatggggaagcccttcttcactctctctctttcttccctttgcttgctactttgtttctcatcaaaccaatgacatctttctctggagatcctaactgttttaagcatgataatgggaaatctcattactattacccaaacaaatatgaaacctatattgtcgagtgcatgctttgctattacctccagcaagttcaacgagtgccaactcaacaacctcaacgcgttggaacccgaccaccgcgttgagtccgaaggtggtcttattgaaacatggaactctcaacacctgagctgcaatgcgccggtgtcactgtttccaaacgcacctcaaccgcaacggcctccacttgccatcttactcaccttatcccaaatgatcattgtcgttcaaggtgcgtaatatta

SEQ ID NO: 1607 - DNA, 695 bp, Artificial
  Mutations within GlyA3B4 introduced by GmGlyA3B4_T01TALE nuclease
gttcatgtacggttgcagatataaacgaagcatagcttatgtatgaggtgtaacaaaattggaaacaatagccatgcaaggtgaagaatgtcaccaactcagaaacccttcttcattgacgtgtccctcactcactctcctctcttcactataaatcgccactcttcgtgttctccacttcaccaactccttcaaacttattaacactttccttagttcaatatggggaagcccttcttcactctctctctttcttccctttgcttgctaccttttaaatatagatacaactactctaattctaattttttattttatagatgacgagacaataattaatttttttatacatcaaaacttagattaggagaaaactcttctccaaataaagttagaagaaattacccttgtcgagtgcatgctttgctattacctccagcaagttcaacgagtgccaactcaacaacctcaacgcgttggaacccgaccaccgcgttgagtccgaaggtggtcttattgaaacatggaactctcaacaccctgagctgcaatgcgccggtgtcactgttttccaaacgcaccctcaaccgcaacggcctccacttgccatcttactcaccttatccccaaaatgatcattgtcgttcaaggtgcgtaatattagtaagaagtatttcatcagcttaacgtgataa

SEQ ID NO: 1608 - DNA, 670 bp, Artificial
  Mutations within GlyA3B4 introduced by GmGlyA3B4_T01TALE nuclease
gttcatgtacggttgcagatataaacgaagcatagcttatgtatgaggtgtaacaaaattggaaacaatagccatgcaaggtgaagaatgtcaccaactcagaaacccttcttcattgacgtgtccctcactcactctcctctcttcactataaatcgccactcttcgtgttctccacttcaccaactccttcaaacttattaacactttccttagttcaatatggggaagcccttcttcactctctctctttcttccctttgcttgctttgtcgagtgcatgctttgctattacctccagcaagttcaacgagtgccaactcaacaacctcaacgcgttggaacccgaccaccgcgttgagtccgaaggtggtcttattgaaacatggaactctcaacaccctgagctgcaatgcgccggtgtcactgtttccaaacgcaccctcaaccgcaacggcctccacttgccatcttactcaccttatcccccaaatgatcattgtcgttcaaggtgcgtaaatattagtaagaagtatttatcagcttaacgtgataacaataatagtaatatgaaatatttattaaattttttataattaatctctgctagaaaatttgattaatctttttagtagaattgttttttctcaactaggtttaaaacaccaca

SEQ ID NO: 1609 - DNA, 591 bp, Artificial
  Mutations within GlyA3B4 introduced by GmGlyA3B4_T01TALE nuclease
  misc_feature (539): n is a or c or t or g
gttcatgtacggttgcagatataaacgaagcatagcttatgtatgaggtgtaacaaaattggaaacaatagccatgcaaggtgaagaatgtcaccaactcagaaacccttcttcattgacgtgtccctcactcactctcctctcttcactataaatcgccactcttcgtgttctccacttcaccaactccttcaaacttattaacacttgtcgagtgcatgctttgctattacctccagcaagttcaacgagtgccaactcaacaacctcaacgcgttggaacccgaccaccgcgttgagtccgaaggtggtcttattgaacatggaactctcaacaccctgagctgcaatgcgccggtgtcactgtttccaaacgcaccctcaaccgcaacggcctccacttgccatcttactcaccttatccccaaatgatcattgtcgttcaaggtgcgtaatattagtaagaagtatttatcagcttaacgtgataacaatatagtaatatgaaatatttattaaattttttataattaatctcngctagaaaatttgattaatcatttttagtagaatttgtttttctcaactagg

SEQ ID NO: 1610 - DNA, 785 bp, Artificial
  Mutations within GlyA3B4 introduced by GmGlyA3B4_T01TALE nuclease
gttcatgtacggttgcagatataaacgaagcatagcttatgtatgaggtgtaacaaaattggaaacaatagccatgcaaggtgaagaatgtcaccaactcagaaacccttcttcattgacgtgtccctcactcactctcctctcttcactataaatcgccactcttcgtgttctccacttcaccaactccttcaaacttattaacactttccttagttcaatatggggaagcccttcttcactctctctctttcttccctttgcttgctatgaagaagaagctagaggtgggaaatactcaagtcattctcttgaaaaagttgctgcaatgatatgcaacaaaatatcactatacggagtcaaggtaaattatagtgttcacatgaacatttctcccatgaaaatatatattttctgactcttgtcgagtgcatgctttgctattacctccagcaagttcaacgagtgccaactcaacaacctcaacgcgttggaacccgaccaccgcgttgagtccgaaggtggtcttattgaaacatggactctcaacaccctgagctgcaatgcgccggtgtcactgtttccaaacgcaccctcaaccgcaacggcctccacttgccatcttactcaccttatccccaaatgatcattgtcgttcaaggtgcgtaatattagtaagaagtatttatcagcttaacgtgataacaataatagtaatatgaaatatttattaaatttttataattaatctcttgctagaaaatttgattaatcatttttagtag

SEQ ID NO: 1611 - DNA, 747 bp, Artificial
  Mutations within GlyA3B4 introduced by GmGlyA3B4_T01TALE nuclease
gttcatgtacggttgcagatataaacgaagcatagcttatgtaagaggtgtaacaaaaattggaaacaatagccatgcaaggtgaagaatgtcaccaactcagaaaccccttcttcattgacgtgtccctcactcactctcctctcttcactataaatcgccactcttcgtgttctccacttcaccaactccttcaaacttattaacactttccttagttcaatatggggaagcccttcttcactctctctctttcttccctttgcttgcttgccgccatcgtggctggcgatggccaccacctgctccggggtcaagccgtgggcctggcacagcaccggcaacagcctcttgtcgagtgcatgctttgctattacctccagcaagttcaacgagtgccaactcaacaacctcaacgcgttggaacccgaccaccgcgttgagtccgaaggtggtcttattgaaacatggaactctcaacaccctgagctgcaatgtgccggtgtcactgtttccaaacgcaccctcaaccgcaacggcctccacttgccatcttactcaccttatccccaaatgatcattgtcgttcaaggtgcgtaatattagtaagaagtatttatcagcttaaccgtgataacaataatagtaatatgaaaatatttattaaattttttataattaatctctgctagaaaaatttgattaatcatttttagtagaatttgtttttctcaactaggttttaaa

SEQ ID NO: 1612 - DNA, 731 bp, Artificial
  Mutations within GlyA3B4 introduced by GmGlyA3B4_T01TALE nuclease
  misc_feature (626): n is a or c or t or g
gttcatgtacggttgcagatataaacgaagcatagcttatgtatgaggtgtaacaaaattggaaacaatagccatgcaaggtgaagaatgtcaccaactcagaaacccttcttcattgacgtgtcccctcactcactctcctctcttcactataaaatcgccactcttcgtgttctccacttcaccaactccttcaaacttattaacactttccttagttcaatatggggaagcccttcttcactctctctctttcttccctttgcttgctaccacctgctgaggggtcaagccgtgggcctggcacagcaccggcaacagccgctggaccgtctccagcgcctgcttgccaccgccattgctggcgatggccactcttgtcgagtgcatgctttgctattacctccagcaagttcaacgagtgccactcaacactcaacgcgttgaacccgaccaccgcgttgagtcccgaaggtggtcttattgaaacatggaactctcaacaccctgagctgcaatgcgccggtgtcactgtttccaaacgcaccctcaaccgcaacggcctccacttgccattcttactcaccttatccccaaatgatcattgtcgttcaaggtgcgtaatnttagtaagaagtatttcatcagcttaacgtgataacaataatagtaatatgaaatattttattaaattttttataataatctctgctagaaaatttgattaatca

SEQ ID NO: 1613 - DNA, 680 bp, Artificial
  Mutations within GlyA3B4 introduced by GmGlyA3B4_T01TALE nuclease
gttcatgtacggttgcagatataaacgaagcatagcttatgtatgaggtgtaacaaaattggaaacaatagccatgcaaggtgaagaatgtcaccaactcagaaacccttcttcattgacgtgtccctcactcactctcctctcttcactataaatcgccactcttcgtgttctccacttcaccaactccttcaaacttattaacactttccttagttcaatatggggaagcccttcttcactctctctctttcttccctttgcttgctcgtctccagcggctgttgccggtgctgtgccaggcccacggcttgaccccccagcaggtggtggccatcgccaactcttgtcgagtgcatgctttgctattacctccagcaagttcaacgagtgccaactcaacaacctcaacgcgttggaacccgaccaccgcgttgagtccgaaggtggtcttattgaaacatggaactctcaacaccctgagctgcaatgcgccggtgtcactgtttccaaacgcaccctcaaccgcaacggcctccacttgccatcttactcaccttatccccaaatgatcattgtcgttcaaggtgcgtaatattagtaagaagtattatcagcttaacgtgataacaataatagtaatatgaaatatttattaaattttttataattaatctctg

SEQ ID NO: 1614 - DNA, 477 bp, Artificial
  Mutations within GlyA3B4 introduced by GmGlyA3B4_T01TALE nuclease
  misc_feature (412): n is a or c or t or g
gttcatgtacggttgcagatataaacgaagcatagcttatgtatgaggtgtaacaaaattggaaacaatagccatgcaaggtgaagaatgtcaccaactcagaaacccttcttcattgacgtgtccctcactcactctcctctcttcactataaatcgccactcttcgagtgcatgcttttgctattacctccagcaagtttcaaacgagtgccaactcaacaacctcaacgcgttggaacccgaccaccgcgttgagtccgaaggtggtcttattgaaacatggaactctcaacaccctgagctgcaatgcgccggtgtcactgtttccaaacgcaccctcaaccgcaacggcctccacttgccatcttactcaccttatccccaaatgatcattgtcgttcaaggtgcgnaatattagtaagaagtatttatcagcttaacgtgataacaataatagtaatatgaaatatttatt

SEQ ID NO: 1615 - DNA, 547 bp, Artificial
  Mutations within GlyA3B4 introduced by GmGlyA3B4_T01TALE nuclease
gttcatgtacggttgcagatataaacgaagcatagcttatgtatgaggtgtaacaaaaattggaaacaatagccatgcaaggtgaagaatgtcaccaactcagaaacccttcttcattgacgtgtccctcactcactctcctctcttcactataaatcgccactcttcgtgttctccacttcaccaactccttcaaacttattaacactttccttagttcaatatggggaagcccttcttcactctctctctttcttccctttgctattacctccagcaagttcaacgagtgccaactcacaacctcaacgcgttggaacccgaccaccgcgttgagtcccgaaggtggtcttattgaaacatggaactctcaacaccctgagctgcaatgcgccggtgtcactgttttccaaacgcaccctcaaccgcaacggcctcaccttgccatcttactcaccttatccccaaatgatccattgtccgttcaaggtgcgtaatattagtaagaagtatttatcagctttaacgtgataacaataatagtaat

SEQ ID NO: 1616 - DNA, 761 bp, Artificial
  Mutations within GlyA3B4 introduced by GmGlyA3B4_T01TALE nuclease
  misc_feature (644): n is a or c or t or g
gttcatgtacggttgcagatataaacgaagcatagcttatgtatgaggtgtaacaaaattggaaacaatagccatgcaaggtgaagaatgtcaccaactcagaaacccttcttcattgacgtgtccctcactcactctcctctcttcactataaatcgccactcttcgtgttctccacttcaccaactccttcaaacttattaacactttccttagttcaatatggggaagcccttcttcactctctctctttcttccctttgcttgcgccacgttttgcaatcttgagaagttggcctgtgtccaactgtaacggtggacctctcaactctcccgccaccgtgagcaaggcctccagagcgcgtgcgccggaccactgtttgccgacgctcttgtcgagtgcatgctttgctattacctccagcaagttcaacgagtgccaactcaacaacctcaacgcgttggaacccgaccaccgcgttgagtccgaaggtggtcttattgaacatggactctcaacaccctgagctgcaatgcgccggtgtcactgttttccaaaacgcaccctcaaaccgcaacggcctccacttgccatcttactcaccttatccccaaatgatcattgtcgttcaaggtgcgtaatnttagtaagaagtatttatcagcttaacgtgataacaataatagtaatatgaaatatttattaaaattttttataattaaatctcttgctagaaaatttgattaatcatttttagtag

SEQ ID NO: 1617 - DNA, 546 bp, Artificial
  Mutations within GlyA3B4 introduced by GmGlyA3B4_T01TALE nuclease
gttcatgtacggttgcagatataaacgaagcatagcttatgtatgaggtgtaacaaaattggaaacaatagccatgcaaggtgaagaatgtcaccaactcagaaacccttcttcattgacgtgtccctcactcactctcctctcttcactataaatcgccactcttcgtgttctccacttcaccaactccttcaaacttattaacactttccttagttcaatatggggaagcccttcttcactctctctctttcttccctttgctattacctccagcaagttcaacgagtgccaactcaacaacctcaacgcgttggaacccgaccaccgcgttgagtccgaaggtggtcttattgaaacatggaactctcaacacccctgagctgcaatgcgccggtgtcactgtttccaaacgcaccctcaaccgcaacggcctccacttgccatcttactcaccttatccccaaatgatcattgtcgttcaaggtgcgtaatattagtaagaagtatttatcagcttaacgtgataacaataatagtaatatg

SEQ ID NO: 1618 - DNA, 626 bp, Artificial
  Mutations within GlyA3B4 introduced by GmGlyA3B4_T01TALE nuclease
gttcatgtacggttgcagatataaacgaagcatagcttatgtatgaggtgtaacaaaattggaaacaatagccatgcaaggtgaagaatgtcaccaactcagaaacccttcttcattgacgtgtccctcactcactctcctctcttcactataaatcgccactcttcgtgttctccacttcaccaactccttcaaacttattaacactttccttagttcaatatggggaagcccttcttcactctctctctttcttccctttgcttgtcgagtgcatgctttgctattacctccagcaagttcaacgagtgccaactcaacaacctcaacgcgttggaacccgaccaccgcgttgagtccgaaggtggtcttattgaaacatggaactctcaacaccctgagctgcaatgcgccggtgtcactgtttccaaacgcaccctcaaccgcaacggcctccacttgccatcttactcaccttatcccccaaatgatcattgtcgttcaaggtgcgtaatattagtaagaagtatttatcagctttaacgtgataacaataatagtaatatgaaatatttattaaattttttataattaatctctgctagaaaatttgattaatcttttta

SEQ ID NO: 1619 - DNA, 593 bp, Artificial
  Mutations within GlyA3B4 introduced by GmGlyA3B4_T01TALE nuclease
gttcatgtacggttgcagatataaacgaagcatagcttatgtatgaggtgtaacaaaaattggaaacaatagccatgcaaggtgaagaatgtcaccaactcagaaacccttcttcattgacgtgtccctcactcactctcctctcttcactataaatcgccactcttcgtgttctccacttcaccaactccttcaaacttattaacactttccttagttcaatatggggaagcccttcttcactctctctctttcttccctttgcttgcttcgagtgcatgctttgctattacctccagcaagttcaacgagtgccaactcaacaacctcaacgcgttggaacccgaccaccgcgttgaagtccgaaggtggtcttattgaaacatggaactctcaacaccctgagctgcaatgcgccggtgtcactgtttccaaacgcaccctcaaccgcaacggcctccacttgccatcttactcaccttatcccccaaatgatcattgtcgttcaaggtgcgtaaatattagtaagaagtatttatcagcttaacgtgataacaataatagtaatatgaaatatttattaaattttttat

SEQ ID NO: 1620 - DNA, 645 bp, Artificial
  Mutations within GlyA3B4 introduced by GmGlyA3B4_T01TALE nuclease
gttcatgtacggttgcagatataaacgaagcatagcttatgtatgaggtgtaacaaaattggaaacaatagccatgcaaggtgaagaatgtcaccaactcagaaacccttcttcattgacgtgtccctcactcactctcctctcttcacgatttatagggttcacgctcaacaaaaatcgcatatcaatttcacaacaattggtatgccaaacatatataattcactgtaataattataaggataaaatgaaatcttgtcgagtgcatgctttgctattacctccagcaagttcaacgagtgccaactcaacaacctcaacgcgttggaacccgaccaccgcgttgagtccgaaggtggtcttattgaaacatggaactctcaacaccctgagctgcaatgcgccggtgtcactgtttccaaacgcaccctcaaccgcaacggcctccacttgccatcttactcaccttatccccaaatgatcattgtcgttcaaggtgcgtaatattagtaagaagtatttatcagcttaacgtgataacaataatagtaatatgaaatatttattaaattttttataattaattctctgctagaaaattgattaatcatttttagtagaatttgtttttctcaactaggtttt

SEQ ID NO: 1621 - DNA, 619 bp, Artificial
  Mutations within GlyA3B4 introduced by GmGlyA3B4_T01TALE nuclease
gttcatgtacggttgcagatataaacgaagcatagcttatgtatgaggtgtaacaaaattggaaacaatagccatgcaaggtgaagaatgtcaccaactcagaaacccttcttcattgacgtgtccctcactcactctcctctcttcactataaatcgccactcttcgtgttctccacttcaccaactccttcaaacttattaacactttccttagttcaatatggggaagcccttcttcactctctctctttcttccctttgcttgctgctctgatgccgcatagttaagccagccccgacacccgccaacacccgctgacgcgccctgacgggcttgtctgctactcttgtcgagtgcatgctttgctattacctccagcaagttcaacgagtgccaactcaacaacctcaacgcgttggaacccgaccaccgcgttgagtccgaaggtggtcttattgaaacatggaactctcaacaccctgagctgcaatgcgccggtgtcactgtttccaaacgcaccctcaaccgcaacggcctccacttgccatcttactcaccttatccccaaatgatcattgtcgttcaaggtgcgtaatattagtaagaagtatttatc

SEQ ID NO: 1622 - DNA, 737 bp, Artificial
  Mutations within GlyA3B4 introduced by GmGlyA3B4_T01TALE nuclease
gttcatgtacggttgcagatataaacgaagcatagcttatgtatgaggtgtaacaaaattggaaacaatagccatgcaaggtgaagaatgtcaccaactcagaaacccttcttcattgacgtgtccctcactcactctcctctcttcactataaatcgccactcttcgtgttctccacttcaccaactccttcaaacttattaacactttccttagttcaatatggggaagcccttcttcactctctctctttcttccctttgcttgccaacttacttctgacaacgatcggaggaccgaaggagctaaccgcttttttgcacaacatgggggatcatgtaactcgccttgatcgttggggaaccggagctgaatgaagccataccaaactcttgtcgagtgcatgctttgctattacctccagcaagttcaacgagtgccaactcaacaacctcaacgcgttggaacccgaccaccgcgttgagtccgaaggtggtcttattgaaacatggaactctcaacaccctgagctgcaatgcgccggtgtcactgtttccaaacgcaccctcaaccgcaacggcctccacttgccatcttactcaccttatccccaaatgatcattgtcgttcaaggtgcgtaatcattagtaagaagtatttatcagcttaacgtgataacaataatagtaatatgaaatatttatttaaattttttataattaatctctgctagaaaa

SEQ ID NO: 1623 - DNA, 671 bp, Artificial
  Mutations within GlyA3B4 introduced by GmGlyA3B4_T01TALE nuclease
gttcatgtacggttgcagatataaacgaagcatagcttatgtatgaggtgtaacaaaattggaaacaatagccatgcaaggtgaagaatgtcaccaactcagaaacccttcttcattgacgtgtccctcactcactctcctctcttcactataaatcgccactcttcgtgttctccacttcaccaactccttcaaacttattaacactttccttagttcaatatggggaagcccttcttcactctctctctttcttccctttgcttgcttgtcgagtgcatgctttgctattacctccagcaagttcaacgagtgccaactcaacaacctcaacgcgttggaacccgaccaccgcgttgagtccgaaggtggtcttattgaaacatggaactctcaacaccctgagctgcaatgcgccggtgtcactgtttccaaacgcaccctcaaccgcaacggcctccacttgccatcttactcaccttatcccccaaatgatcattgtcgttcaaggtgcgtaatattagtaagaagtatttatcagcttaacgtgataacaataatagtaatatgaaatatttattaaattttttataattaatctctgctagaaaatttgattaatcatttttagtagaatttgttttttctcaactaggttttaaaacaccaca

SEQ ID NO: 1624 - DNA, 651 bp, Artificial
  Mutations within GlyA3B4 introduced by GmGlyA3B4_T01TALE nuclease
gttcatgtacggttgcagatataaacgaagcatagcttatgtatgaggtgtaacaaaattggaaacaatagccatgcaaggtgaagaatgtcaccaactcagaaacccttcttcattgacgtgtccctcactcactctcctctcttcactataaatcgccactcttcgtgttctccacttcaccaactccttcaaacttattaacactttccttagttcaatatggggaagcccttcttcactctctctctttcttccctttgctgagtgcatgctttgctattacctccagcaagttcaacgagtgccaactcaacaacctcaacgcgttggaacccgaccaccgcgttgagtccgaaggtggtcttattgaaacatggaactctcacaccctgagctgcaatgcgccggtgtcactgtttccaaacgcaccctcaaccgcaacggcctccacttgccatcttactcaccttatcccccaaatgatcattgtcgttcaaggtgcgtaatattagtaagaagtatttatcagcttaacgtgataacaataatagtaatatgaaatatttattaaattttttataattaatctctgctagaaaatttgattaatcatttttagtagaatttgttttttctcaactaggtttt

SEQ ID NO: 1625 - DNA, 747 bp, Artificial
  Mutations within GlyA3B4 introduced by GmGlyA3B4_T01TALE nuclease
gttcatgtacggttgcagatataaacgaagcatagcttatgtatgaggtgtaacaaaaattggaaacaatagccatgcaaggtgaagaatgtcaccaactcagaaacccttcttcattgacgtgtccctcactcactctcctctcttcactataaatcgccactcttcgtgttctccacttcaccaactccttcaaacttattaacactttccttagttcaatatggggaagcccttcttcactctctctctttcttccctttgcttgctatccagcgcctgcttgccaccgccattgctggcgatggccaccacctgctggggggtcaagccgtgggcctggcacagcaccggcaacagcgcctgcaccgtctccagcgcctgcttgccaccaatattgctggcgatggccaccacctgctccggggtcaagccgtgggcctggcacagcactcttgtcgagtgcatgctttgctattacctccagcaagttcaacgagtgccaactcaacaacctcaacgcgttggaacccgaccaccgcgttgagtccgaaggtggtcttattgaaacatggaactctcaacaccctgagctgcaatgcgccggtgtcactgtttccaaacgcaccctcaaccgcaacggcctccacttgccatcttactcaccttatccccaaaatgatcattgtcgttcaaggtgcgtaatattcagtaatgaagtatttatcagcttaacgtgataacaat

SEQ ID NO: 1626 - DNA, 654 bp, Artificial
  Mutations within GlyA3B4 introduced by GmGlyA3B4_T01TALE nuclease
gttcatgtacggttgcagatataaacgaagcatagcttatgtatgaggtgtaacaaaattggaaacaatagccatgcaaggtgaagaatgtcaccaactcagaaacccttcttcattgacgtgtccctcactcactctcctctcttcactataaatcgccactcttcgtgttctccacttcaccaactccttcaaacttattaacactttccttagttcaatatggggaagcccttcttcactctctctctttcttccctttgcttgttgtcgagtgcatgctttgctattacctccagcaagttcaacgagtgccaactcaacaacctcaacgcgttggaacccgaccaccgcgttgagtccgaaggtggtcttattgaaacatggaactctcaacaccctgagctgcaatgcgccggtgtcactgtttccaaacgcaccctcaaccgcaacggcctccacttgccatcttactcaccttatcccccaaatgatcattgtcgttcaaggtgcgtaatattagtaagaagtatttatcagcttaacgtgataacaataatagtaatatgaaatatttattaaattttttataattaatctctgctagaaaatttgattaatctttttagtagaatttgttttttctcaactagg

SEQ ID NO: 1627 - DNA, 620 bp, Artificial
  Mutations within GlyA3B4 introduced by GmGlyA3B4_T01TALE nuclease
gttcatgtacggttgcagatataaacgaagcatagcttatgtatgaggtgtaacaaaattggaaacaatagccatgcaaggtgaagaatgtcaccaactcagaaacccttcttcattgacgtgtccctcactcactctcctctcttcactataaatcgccactcttcgtgttctccacttcaccaactccttcaaacttattaacactttccttagttcaatatggggaagcccttcttcactctctctctttcttccctttgcttgcttgtcgagtgcatgctttgctattacctccagcaagttcaacgagtgccaactcaacaacctcaacgcgttggaacccgaccaccgcgttgagtccgaaggtggtcttattgaaacatggaactctcaacaccctgagctgcaatgcgccggtgtcactgtttccaacgcaccctcaccgcaacggcctccacttgccatcttactcaccttatccccaaatgatcattgtcgttcaaggtgcgtaatattagtaagaagtatttatcagcttaacgtgataacaataatagtaatatgaaatatttattaaattttttataattaatctctgctagaaaatttgattaatc

SEQ ID NO: 1628 - DNA, 431 bp, Artificial
  Mutations within GlyA3B4 introduced by GmGlyA3B4_T01TALE nuclease
gttcatgtacggttgcagatataaacgaagcatagcttatgtatgaggtgtaacaaaattggaaacaatagccatgcaaggtgaagaatgtcaccaactcagaaacccttcttcattgacgtgtccctcactcactctcctctcttcactataaatcgccactcttcgtgttctccacttcaccaactccttcaaacttattaacactttccttagttcaatatggggaagcccttcttcactctctctctttcttccctttgcttgctactattgtcgttcaaggtgcgtaatattagtaagaagtatttatcagcttaacgtgataacaataatagtaatatgaaatatttattaaattttttataattaatctctgctagaaaatttgattaatcatttttagtagaatttgttttttctcaactagg

SEQ ID NO: 1629 - DNA, 608 bp, Artificial
  Mutations within GlyA3B4 introduced by GmGlyA3B4_T01TALE nuclease
  misc_feature (515): n is a or c or t or g
gttcatgtacggttgcagatataaacgaagcatagcttatgtatgaggtgtaacaaaattggaaacaatagccatgcaaggtgaagaatgtcaccaactcagaaacccttcttcattgacgtgtccctcactcactctcctctcttcactataaatcgccactcttcgtgttctccacttcaccaactccttcaaacttattaacactttccttagttcaatatggggaagcccttcttcactctctctctttcttccctttgcttgcttgtcgagtgcatgctttgctattacctccagcaagttcaacgagtgccaactcaacaacctcaacgcgttggaacccgaccaccgcgttgagtccgaaggtggtcttattgaaacatggaactctcaacaccctgagctgcaatgcgccggtgtcactgtttccaaacgcaccctcaaccgcaacggcctccacttgccatcttactcaccttatcccccaaatgatcattgtcgttcaaggtgcntaatattagtaagaagtatttatcagcttaacgtgataacaataatagtaatatgaaatatttattaaattttttataattaatctctgctag

SEQ ID NO: 1630 - DNA, 607 bp, Artificial
  Mutations within GlyA3B4 introduced by GmGlyA3B4_T01TALE nuclease
gttcatgtacggttgcagatataaacgaagcatagcttatgtatgaggtgtaacaaaattggaaacaatagccatgcaaggtgaagaatgtcaccaactcagaaacccttcttcattgacgtgtccctcactcactctcctctcttcactataaatcgccactcttcgtgttctccacttcaccaactccttcaaacttattaacactttccttagttcaatatggggaagcccttcttcactctctctctttcttccctttgcttgcttgtcgagtgcatgctttgctattacctccagcaagttcagcgagtgccaactcaacaacctcaacgcgttggaacccgaccaccgcgttgagtccgaaggtggtcttattgaaacatggaactctcaacaccctgagctgcaatgcgccggtgtcactgtttccaaacgcaccctcaaccgcaacggcctccacttgccatcttactcaccttatccccaaatgatcattgtcgttcaaggtgcgtaatattagtaagaagtatttatcagcttaacgtgataacaataatagtaatatgaaatatttattaaattttttataattaatctctgctag

SEQ ID NO: 1631 - DNA, 658 bp, Artificial
  Mutations within GlyA3B4 introduced by GmGlyA3B4_T01TALE nuclease
gttcatgtacggttgcagatataaacgaagcatagcttatgtatgaggtgtaacaaaattggaaacaatagccatgcaaggtgaagaatgtcaccaactcagaaacccttcttcattgacgtgtccctcactcactctcctctcttcactataaatcgccactcttcgtgttctccacttcaccaactccttcaaacttattaacactttccttagttcaatatggggaagcccttcttcactctctctctttcttccctttgcttgctgctctgatgccgcatagttaagccagccccgacacccgccaacacccgctgacgcgccctgacgggcttgtctgctactcttgtcgagtgcatgctttgctattacctccagcaagttcaacgagtgccaactcaacaacctcaacgcgttggaacccgaccaccgcgttgagtccgaaggtggtcttattgaaacatggaactctcaacaccctgagctgcaatgcgccggtgtcactgtttccaaacgcaccctcaaccgcaacggcctccacttgccatcttactcaccttatccccaaatgatcattgtcgttcaaggtgcgtaatattagtaagaagtatttatcgcttaacgtgataacaataatagtaatatgaaaatattt

SEQ ID NO: 1632 - DNA, 636 bp, Artificial
  Mutations within GlyA3B4 introduced by GmGlyA3B4_T01TALE nuclease
gttcatgtacggttgcagatataaacgaagcatagcttatgtatgaggtgtaacaaaattggaaacaatagccatgcaaggtgaagaatgtcaccaactcagaaacccttcttcattgacgtgtccctcactcactctcctctcttcactataaatcgccactcttcgtgttctccacttcaccaactccttcaaacttattaacactttccttagttcaatatggggaagcccttcttcactctctctctttcttccctttgcttgtcttgtcgagtgcatgctttgctattacctccagcaagttcaacgagtgccaactcaacaacctcaacgcgttggaacccgaccaccgcgttgagtccgaaggtggtcttattgaaacatggaactctcaacaccctgagctgcaatgcgccggtgtcactgtttccaaacgcaccctcaaccgcaacggcctccacttgccatcttactcaccttatcccccaaatgatcttgtcgttcaaggtgcgtaaatattagtaagaagtatttatcagcttaacgtgataacaataatagtaatatgaaatatttattaaattttttataattaatctctgctagaaaatttgattaatctttttagtagaa

SEQ ID NO: 1633 - DNA, 649 bp, Artificial; identical to SEQ ID NO: 598
  Mutations within GlyA3B4 introduced by GmGlyA3B4_T01TALE nuclease

SEQ ID NO: 1634 - DNA, 654 bp, Artificial
  Mutations within GlyA3B4 introduced by GmGlyA3B4_T01TALE nuclease
gttcatgtacggttgcagatataaacgaagcatagcttatgtatgaggtgtaacaaaattggaaacaatagccatgcaaggtgaagaatgtcaccaactcagaaaccccttcttcattgacgtgtccctcactcactctcctctcttcactataaatcgccactcttcgtgttctccacttcaccaactccttcaaacttattaacactttccttagttcaatatggggaagcccttcttcactctctctctttcttccctttgcttgcttgtcgagtgcatgctttgctattacctccagcaagttcaacgagtgccaactcaacaacctcaacgcgttggaacccgaccaccgcgttgagtccgaaggtggtcttattgaaacatggaactctcaacaccctgagctgcaatgcgccggtgtcactgtttccaacgcaccctcaaccgcaacggcctccacttgccatcttactcaccttatccccaaatgatcattgtccgttcaaggtgcgtaatattagtaagaagtatttatcagctttaacgtgataacaataatagtaatatgaaatatttattaaattttttataattaatctctgctagaaaatttgattaatcatttttagtagaatttgttttttctcaact

SEQ ID NO: 1635 - DNA, 653 bp, Artificial
  Mutations within GlyA3B4 introduced by GmGlyA3B4_T01TALE nuclease
gttcatgtacggttgcagatataaacgaagcatagcttatgtatgaggtgtaacaaaattggaaacaatagccatgcaaggtgaagaatgtcaccaactcagaaacccttcttcattgacgtgtccctcactcactctcctctcttcactataaatcgccactcttcgtgttctccacttcaccaactccttcaaacttattaacactttccttagttcaatatggggaagcccttcttcactctctctctttcttccctttgcttgcttcgagtgcatgctttgctattacctccagcaagttcaacgagtgccaactcaacaacctcaacgcgttggaacccgaccaccgcgttgagtccgaaggtggtcttattgaaacatggaactctcaacaccctgagctgcaatgcgccggtgtcactgtttccaaacgcaccctcaaccgcaacggcctccacttgccatcttactcaccttatcccccaaatgatcattgtcgttcaaggtgcgtaaatattagtaagaagtatttatcagcttaacgtgataacaataatagtaatatgaaatatttattaaattttttataattaatctctgctagaaaatttgattaatctttttagtagaattgttttttctcaactagg

SEQ ID NO: 1636 - DNA, 691 bp, Artificial
  Mutations within GlyA3B4 introduced by GmGlyA3B4_T01TALE nuclease
  misc_feature (625): n is a or c or t or g
gttcatgtacggttgcagatataaacgaagcatagcttatgtatgaggtgtaacaaaattggaaacaatagccatgcaaggtgaagaatgtcaccaactcagaaaccccttcttcattgacgtgtccctcactcactctcctctcttcactataaatcgccactcttcgtgttctccacttcaccaactccttcaaacttattaacactttccttagttcaatatggggaagcccttcttcactctctctctttcttccctttgcttgctacttccccggcagtgctttcatttcagcgtacaatcgccacattgctgcacatccggtaagcgataacgctggcagcaagtgcggcgcaccagcaggccgtcgcgcagtaccacgggtacgccagagtggattatcttcaccgttcgtgagcgtttttctcaaaaaagagggcatggcgcagcgattcaacagtagcctcgccgagcagttgcttcatctcgagtgcatgctttgctattacctccagcaagttcaacgagtgccaactcaacaacctcacgcgttggaacccgaccaccgcgttgagtccgaaggtgggtctttattgaaaccatggaactctcaacaccctgngctgcaatgcgccggtgtcactgtttccaaacgcaccctcaaccgcaacggcctccacttgccatc

SEQ ID NO: 1637 - DNA, 448 bp, Artificial
  Mutations within GlyA3B4 introduced by GmGlyA3B4_T01TALE nuclease
gttcatgtacggttgcagatataaacgaagcatagcttatgtatgaggtgtaacaaaattggaaacaatagccatgcaaggtgaagaatgtcaccaactcagaaacccttcttcattgacgtgtccctcactcactctcctctcttcactataaatcgccactcttcgtgttctccacttcaccaactccttcaaacttattaacactttccttagttcaatatggggaagcccttcttcactctctctctttcttccctttgcttgctactattgtcgttcaaggtgcgtaatattagtaagaagtatttatcagcttaacgtgataacaataatagtaatatagaaatatttatttaaattttttataattaatctctgctagaaaaattttgattaatcatttttagtagaattttgttttttctcaactaggttttaaacacca

SEQ ID NO: 1638 - DNA, 586 bp, Artificial
  Mutations within GlyA3B4 introduced by GmGlyA3B4_T01TALE nuclease
gttcatgtacggttgcagatataaacgaagcatagcttatgtatgaggtgtaacaaaattggaaacaatagccatgcaaggtgaagaatgtcaccaactcagaaacccttcttcattgacgtgtccctcactcactctcctctcttcactataaatcgccactcttcgtgttctccacttcaccaactccttcaaacttattaacactttccttagttcaatatggggaagcccttcttcactctctctctttttcaatatggtggcctaactacggctacaccacggcttgtcgagtgcatgctttgctattacctccagcaagttcaacgagtgccaactcaacaacctcaacgcgttggaacccgaccaccgcgttgagtccgaaggtggtcttattgaaacatggaactctcaaccacccctgagctgcaatgcgccggtgtcactgtttccaaacgcaccctcaaccgcaacggcctccacttgccatcttactcaccttatccccaaatgatcattgtcgttcaaggtgcgtaatattagtaagaagtatttatcagcttaacgtgataacaataatagt

SEQ ID NO: 1639 - DNA, 383 bp, Artificial
  Mutations within GlyA3B4 introduced by GmGlyA3B4_T01TALE nuclease
gttcatgtacggttgcagatataaacgaagcatagcttatgtatgaggtgtaacaaaattggaaacaatagccatgcaaggtgaagaatgtcaccaactcagaaacccttcttcattgacgtgtccctcactcactctcctctcttcactataaatcgccactcttcgtgttctccacttcaccaactccttcaaacttattaacactttccttagttcaatatggggaagcccttcttcactctctctctttcttccctttgcttgctactattgtcgttcaaggtgcgtaatatttagtaagagtatttcatcagcttaacgtgataacaataactagtaatatgaaatatttattaatttttataattaatctctgctag

SEQ ID NO: 1640 - DNA, 602 bp, Artificial
  Mutations within GlyA3B4 introduced by GmGlyA3B4_T01TALE nuclease
gttcatgtacggttgcagatataaacgaagcatagcttatgtatgaggtgtaacaaaaattggaaacaatagccatgcaaggtgaagaatgtcaccaactcagaaacccttcttcattgacgtgtccctcactcactctcctctcttcactataaatcgccactcttcgtgttctccacttcaccaactccttcaaacttattaacactttccttagttcaatatggggaagcccttcttcactctctctctttcttccctttgcttgctactactcttgtcgagtgcatgctttgctattacctccagcaagttcaacgagtgccaactcaacaacctcaacgcgttggaacccgaccaccgcgttgagtccgaaggtggtcttattgaaacatggaactctcaacacccctgagctgcaatgcgccggtgtcactgtttccaaacgcaccctcaaccgcaacggcctccacttgccatcttactcaccttatccccaaatgatcattgtcgttcaaggtgcgtaatattagtaagaagtatttatcagcttacgtgatacaataatagtaatatgaaatattattaaattttttataatt

SEQ ID NO: 1641 - DNA, 622 bp, Artificial
  Mutations within GlyA3B4 introduced by GmGlyA3B4_T01TALE nuclease
gttcatgtacggttgcagatataaacgaagcatagcttatgtatgaggtgtaacaaaattggaaacaatagccatgcaaggtgaagaatgtcaccaactcagaaacccttcttcattgacgtgtccctcactcactctcctctcttcactataaatcgccactcttcgtgttctccacttcaccaactccttcaaacttattaacactttccttagttcaatatggggaagcccttcttcactctctctctttcttccctttgcttgctactactcttgtcgagtgcatgctttgctattacctccagcaagttcaacgagtgccaactcaacaacctcaacgcgttggaacccgaccaccgcgttgagtccgaaggtggtcttattgaaacatggaactctcaacacccctgagctgcaatgcgccggtgtcactgtttccaaacgcaccctcaaccgcaacggcctccacttgccatcttactcaccttatccccaatgatcattgtcgttcaaggtgcgtatattagtaagaagtatttatcagcttaacgtgatacaataatagtaatatgaaatatttattaaattttttataattaatctctgctagaaaatttga

SEQ ID NO: 1642 - DNA, 663 bp, Artificial
  Mutations within GlyA3B4 introduced by GmGlyA3B4_T01TALE nuclease
  misc_feature (627): n is a or c or t or g
gttcatgtacggttgcagatataaacgaagcatagcttatgtatgaggtgtaacaaaattggaaacaatagccatgcaaggtgaagaatgtcaccaactcagaaacccttcttcattgacgtgtccctcactcactctcctctcttcactataaatcgccactcttcgtgttctccacttcaccaactccttcaaacttattaacactttccttagttcaatatggggaagcccttcttcactctctctctttcttccctttgcttgctaccacctgctgaggggtcaagccgtgggcctggcacagcaccggcaacagccgctggaccgtctccagcgcctgcttgccaccgccattgctggcgatggccactcttgtcgagtgcatgctttgctattacctccagcaagttcaacgagtgccaactcaacaacctcaacgcgttggaacccgaccaccgcgttgagtccgaaggtggtcttattgaaacatggaactctcaacaccctgagctgcaatgcgccggtgtcactgtttccaaacgcaccctcaaccgcaacggcctccaacttgccatcttactcaccttatccccaaatgatcattgtcgttcaaggtgcgtaatnttagtaagaagtatttcatcagcttaacgtgataac

SEQ ID NO: 1643 - DNA, 639 bp, Artificial
  Mutations within GlyA3B4 introduced by GmGlyA3B4_T01TALE nuclease
gttcatgtacggttgcagatataaacgaagcatagcttatgtatgaggtgtaacaaaattggaaacaatagccatgcaaggtgaagaatgtcaccaactcagaaacccttcttcattgacgtgtccctcactcactctcctctcttcactataaatcgccactcttcgtgttctccacttcaccaactccttcaaacttattaacactttccttagttcaatatggggaagcccttcttcactctctcttcgagtgcatgctttgctattacctccagcaagttcaacgagtgccaactcaacaacctcaacgcgttggaacccgaccaccgcgttgagtccgaaggtggtcttattgaaacatggaactctcaacacccctgagctgcaatgcgccggtgtcactgtttccaaacgcaccctcaaccgcaacggcctccacttgccatcttactcaccttatcccccaaatgatcattgtcgttcaaggtgcgtaatattagtaagaagtatttatcagcttaacgtgataacaataatagtaatatgaaatatttattaaattttttataattaatctctgctagaaaatttgattaatcatttttagtagaatttgttttttctcaactaggtttt

SEQ ID NO: 1644 - DNA, 858 bp, Artificial
  Mutations within GlyA3B4 introduced by GmGlyA3B4_T01TALE nuclease
gttcatgtacggttgcagatataaacgaagctagcttatgtatgaggtgtaacaaaattggaaacaatagccatgcaaggtgaagaatgtcaccaactcagaaacccttcttcattgacgtgtccctcactcactctcctctcttcactataaatcgccactcttcgtgttctccacttcaccaactccttcaaacttattaacactttccttagttcaatatggggaagcccttcttcactctctctctttcttccctttgcttgcttgttctgatgatgatcctagccgaataaaatcatctgcttcgccgttcaaaggcaaaattgacctcaatatccaaccagagcgagaatgtcaaagatccaagatctggaaggtgaattgcagcgtttgaaaaatttgaatgcaaaatctagacatgttgactgggttgattcagatgatagtggattccggtcaaagaatgtgttatttgcaagtggtaatgaatattcttctgattgtgactcttgtcgagtgcatgctttgctattacctccagcaagttcaacgagtgccaactcaacaacctcaacgcgttggaacccgaccaccgcgttgagtccgaaggtggtcttattgaacatggactctcaacaccctgagctgcaatgcgccggtgtcactgtttccaaacgcaccctcaaccgcaacggcctccacttgccatcattactcaccttatccccaaatgatcattgtcgttcaaggtgcgtaatattagtaagaagtatttatcagcttacgtgataacaatatagtaatatgaatattattaatttttataattaatctctgctagaaaatttgattaaa

SEQ ID NO: 1645 - DNA, 636 bp, Artificial
  Mutations within GlyA3B4 introduced by GmGlyA3B4_T01TALE nuclease
gttcatgtacggttgcagatataaacgaagcatagcttatgtatgaggtgtaacaaaattggaaacaatagccatgcaaggtgaagaatgtcaccaactcagaaacccttcttcattgacgtgtccctcactcactctcctctcttcactataaatcgccactcttcgtgttctccacttcaccaactccttcaaacttattaacactttccttagttcaatatggggaagcccttcttcactctctctctttcttccctttgctattacctccagcaagttcaacgagtgccaactcaacaacctcaacgcgttggaacccgaccaccgcgttgagtccgaaggtggtcttattgaaacatggaactctcaacacccctgagctgcaatgcgccggtgtcactgtttccaaacgcaccctcaaccgcaacggcctccacttgccatcttactcaccttatccccaaatgatcattgtcgttcaaggtgcgtaatattagtaagaagtatttatcagcttaacgtgataacaataatagtaatatgaaatatttattaaattttttataattaatctctgctagaaaatttgattaatcatttttagtagaatttgttttttctcaactaggtttt

SEQ ID NO: 1646 - DNA, 652 bp, Artificial
  Mutations within GlyA3B4 introduced by GmGlyA3B4_T01TALE nuclease
gttcatgtacggttgcagatataaacgaagcatagcttatgtatgaggtgtaacaaaattggaaacaatagccatgcaaggtgaagaatgtcaccaactcagaaacccttcttcattgacgtgtccctcactcactctcctctcttcactataaatcgccactcttcgtgttctccacttcaccaactccttcaaacttattaacactttccttagttcaatatggggaagcccttcttcactctctctctttcttccctttgctttgtcgagtgcatgctttgctattacctccagcaagttcaacgagtgccaactcaacaacctcaacgcgttggaacccgaccaccgcgttgagtccgaaggtggtcttattgaaacatggaactctcaacaccctgagctgcaatgcgccggtgtcactgtttccaaacgcaccctcaaccgcaacggcctccacttgccatcttactcaccttatcccccaaatgatcattgtcgttcaaggtgcgtaaatattagtaagaagtatttatcagcttaacgtgataacaataatagtaatatgaaatatttattaaattttttataattaatctctgctagaaaatttgattaatctttttagtagaattgttttttctcaactagg

SEQ ID NO: 1647 - DNA, 669 bp, Artificial; identical to SEQ ID NO: 802
  Mutations within GlyA3B4 introduced by GmGlyA3B4_T01TALE nuclease

SEQ ID NO: 1648 - DNA, 610 bp, Artificial
  Mutations within GlyA3B4 introduced by GmGlyA3B4_T01TALE nuclease
gttcatgtacggttgcagatataaacgaagcatagcttatgtatgaggtgtaacaaaattggaaacaatagccatgcaaggtgaagaatgtcaccaactcagaaacccttcttcattgacgtgtccctcactcactctcctctcttcactataaatcgccactcttcgtgttctccacttcaccaactccttcaaacttattaacactttccttagttcaatatggggaagcccttcttcactctctctctttcttccctttgcttgccttgtcgagtgcatgctttgctattacctccagcaagttcaacgagtgccaactcaacaacctcaacgcgttggaacccgaccaccgcgttgagtccgaaggtggtcttattgaaacatggaactctcaacaccctgagctgcaatgcgccggtgtcactgtttccaaacgcaccctcaaccgcaacggcctccacttgccatcttactcaccttatcccccaaatgatcattgtcgttcaaggtgcgtaaatattagtaagaagtatttatcagcttaacgtgataacaataatagtaatatgaaatatttattaaattttttataattaatctctgctag

SEQ ID NO: 1649 - DNA, 605 bp, Artificial
  Mutations within GlyA3B4 introduced by GmGlyA3B4_T01TALE nuclease
  misc_feature (511): n is a or c or t or g
gttcatgtacggttgcagatataaacgaagcatagcttatgtatgaggtgtaacaaaattggaaacaatagccatgcaaggtgaagaatgtcaccaactcagaaacccttcttcattgacgtgtccctcactcactctcctctcttcactataaatcgccactcttcgtgttctccacttcaccaactccttcaaacttattaacactttccttagttcaatatggggaagcccttcttcactctctctctttcttccctttgcttgtcgagtgcatgctttgctattacctccagcaagttcaacgagtgccaactcaacaacctcaacgcgttggaacccgaccaccgcgttgagtccgaaggtggtcttattgaaacatggaactctcaacaccctgagctgcaatgcgccggtgtcactgtttccaaacgcaccctcaaccgcaacggcctccacttgccatcttactcaccttatcccccaaatgatcattgtcgttcaaggtgcntaataattagtaagaagtatttatcagcttaacgtgataacaataatagtaatatgaaatatttattaaattttttataattaatctctgctag

SEQ ID NO: 1650 - DNA, 615 bp, Artificial
  Mutations within GlyA3B4 introduced by GmGlyA3B4_T01TALE nuclease
gttcatgtacggttgcagatataaacgaagcatagcttatgtatgaggtgtaacaaaattggaaacaatagccatgcaaggtgaagaatgtcaccaactcagaaacccttcttcattgacgtgtccctcactcactctcctctcttcactataaatcgccactcttcgtgttctccacttcaccaactccttcaaacttattaacactttccttagttcaatatggggaagccaggccgaccgcatgctttgctattacctccagcaagttcaacgagtgccaactcaacaacctcaacgcgttggaaccgaccaccgcgttgagtccgaaggtggtcttattgaaacatggaactctcaacaccctgagctgcaatgcgccggtgtcactgtttccaaacgcaccctcaaccgcaacggcctccacttgccatcttactcaccttatccccaaatgatcattgtcgttcaaggtgcgtaatattagtaagaagtatttatcagcttaacgtgataacaataatagtaatatgaatatttattaatttttataattaatctctgctagaaaatttgattaatcatttttagtagaatttgtttttctcaactagg

SEQ ID NO: 1651 - DNA, 695 bp, Artificial
  Mutations within GlyA3B4 introduced by GmGlyA3B4_T01TALE nuclease
gttcatgtacggttgcagatataaacgaagcatagcttatgtatgaggtgtaacaaaattggaaacaatagccatgcaaggtgaagaatgtcaccaactcagaaacccttcttcattgacgtgtccctcactcactctcctctcttcactataaatcgccactcttcgtgttctccacttcaccaactccttcaaacttattaacactttccttagttcaatatggggaagcccttcttcactctctctctttttcaatatggtggcctaactacggctacacccacggcttgtcgagtgcatgctttgctattacctccagcaagttcaacgagtgccaactcaacaacctcaacgcgttggaacccgaccaccgcgttgagtccgaaggtggtcttattgaaacatggaactctcaacaccctgagctgcaatgcgccggtgtcactgtttccaaacgcaccctcaaccgcaacggcctccacttgccatcttactcaccttatccccaaatgatcattgtcgttcaaggtgcgtaatattagtaagaagtatttatcagcttaacgtgataacaataatagtaaatatgaaaatatttatttaaattttttaataattaatctctgctagaaaatttgattaatcatttttatgtagaatttgttttttctcaactaggttttaaaacacca

SEQ ID NO: 1652 - DNA, 762 bp, Artificial
  Mutations within GlyA3B4 introduced by GmGlyA3B4_T01TALE nuclease
  misc_feature (645): n is a or c or t or g
gttcatgtacggttgcagatataaacgaagcatagcttatgtatgaggtgtaacaaaattggaaacaatagccatgcaaggtgaagaatgtcaccaactcagaaacccttcttcattgacgtgtccctcactcactctcctctcttcactataaatcgccactcttcgtgttctccacttcaccaactccttcaaacttattaacactttccttagttcaatatggggaagcccttcttcactctctctctttcttccctttgcttgcgccacgttttgcaatcttgagaagttggcctgtgtccaactgtaacggtggacctctcaactctcccgccaccgtgagcaaggcctccagagcgcgtgcgccggaccactgtttgccgacgctcttgtcgagtgcatgctttgctattacctccagcaagttcaacgagtgccaactcaacaacctcaacgcgttggaacccgaccaccgcgttgagtccgaaggtggtcttattgaaacatggactctcaacaccctgagctgcaatgcgccggtgtcactgttttccaaaacgcaccctcaaaccgcaacggcctccacttgccatcttactcaccttatccccaaatgatcattgtcgttcaaggtgcgtaatnttagtaagaagtatttatcagcttaacgtgataacaataatagtaatatgaaatatttattaaaattttttataattaaatctcttgctagaaaatttgattaatcatttttagtag

SEQ ID NO: 1653 - DNA, 656 bp, Artificial
  Mutations within GlyA3B4 introduced by GmGlyA3B4_T01TALE nuclease
gttcatgtacggttgcagatataaacgaagcatagcttatgtatgaggtgtaacaaaattggaaacaatagccatgcaaggtgaagaatgtcaccaactcagaaacccttcttcattgacgtgtccctcactcactctcctctcttcactataaatcgccactcttcgtgttctccacttcaccaactccttcaaacttattaacactttccttagttcaatatggggaagcccttcttcactctctctcttgtcgagtgcatgctttgctattacctccagcaagttcaacgagtgccaactcaacaacctcaacgcgttggaacccgaccaccgcgttgagtccgaaggtggtcttattgaaacatggaactctcaacacccctgagctgcaatgcgccggtgtcactgtttccaacgcaccctcaaccgcaacggcctccacttgccatcttactcaccttatcccccaaatgatcattgtcgttcaaggtgcgtaatattagtaagaagtatttatcagcttaacgtgataacaataatagtaatatgaaatattttattaaatttttttataattaatctctgctagaaaatttgattaatcattttttagtagaatttgttttttctcaactaggttttaaaacaccaca

SEQ ID NO: 1654 - DNA, 653 bp, Artificial
  Mutations within GlyA3B4 introduced by GmGlyA3B4_T01TALE nuclease
gttcatgtacggttgcagatataaacgaagcatagcttatgtatgaggtgtaacaaaattggaaacaatagccatgcaaggtgaagaatgtcaccaactcagaaacccttcttcattgacgtgtccctcactcactctcctctcttcactataaatcgccactcttcgtgttctccacttcaccaactccttcaaacttattaacactttccttagttcaatatggggaagcccttcttcactctctctctttcttccctttgctcttgtcgagtgcatgttttgctattacctccagcaagttcaacgagtgccaactcaacaacctcaacgcgttggaacccgaccaccgcgttgagtccgaaggtggtcttattgaaacatggaactctcaacaccctgagctgcaatgcgccggtgtcactgtttccaaacgcaccctcaaccgcaacggcctccacttgccatcttactcaccttatcccccaaatgatcattgtcgttcaaggtgcgtaaatattagtaagaagtatttatcagcttaacgtgataacaataatagtaatatgaaatatttattaaattttttataattaatctctgctagaaaatttgattaatctttttagtagaattgttttttctcaactagg

SEQ ID NO: 1655 - DNA, 571 bp, Artificial
  Mutations within GlyA3B4 introduced by GmGlyA3B4_T01TALE nuclease
gttcatgtacggttgcagatataaacgaagcatagcttatgtatgaggtgtaacaaaaattggaaacaatagccatgcaaggtgaagaatgtcaccaactcagaaaccccttctccattgacgtgtccctcactcactctcctctcttcactataaatcgccactcttcgtgttctccacttcaccaactccttcaaacttattaacactttccttagttcaatatggggaagcccttcttcactctctctctttcttccctttgctattacctccagcaagttcaacgagtgccaactcaacaacctcaacgcgttggaacccgaccaccgcgttgagtccgaaggtggtcttattgaaacatggaactctcaacacccctgagctgcaatgcgccggtgtcactgtttccaaacgcaccctcaaccgcaacggcctccacttgccatcttactcaccttatcccccaaatgatcattgtcgttcaaggtgcgtaatattagtaagaagtatttatcagcttaacgtgataacaataatagtaatatgaaatatttattaaattttttat

SEQ ID NO: 1656 - DNA, 432 bp, Artificial
  Mutations within GlyA3B4 introduced by GmGlyA3B4_T01TALE nuclease
gttcatgtacggttgcagatataaacgaagcatagcttatgtatgaggtgtaacaaaattggaaacaatagccatgcaaggtgaagaatgtcaccaactcagaaacccttcttcattgacgtgtccctcactcactctcctctcttcactataaatcgccactcttcgtgttctccacttcacctccagcaagttcaacgagtgccaactcaacaacctcaacgcgttggaacccgaccacccgcgttgagtccgaaggtggtcttattgaaacatggaactctcaacaccctgagctgcaatgcgccggtgtcactgtttccaaacgcaccctcaaccgcaacggcctccacttgccatcttactcaccttatcccccaaatgatcattgtcgttcaaggtgcgtaatattagtaagaagtatttatcagc

SEQ ID NO: 1657 - DNA, 677 bp, Artificial
  Mutations within GlyA3B4 introduced by GmGlyA3B4_T01TALE nuclease
gttcatgtacggttgcagatataaacgaagcatagcttatgtatgaggtgtaacaaaattggaaacaatagccatgcaaggtgaagaatgtcaccaactcagaaacccttcttcattgacgtgtccctcactcactctcctctcttcactataaatcgccactcttcgtgttctccacttcaccaactccttcaaacttattaacactttccttagttcaatatggggaagcccttcttcactctctctctttcttccctttgcttgctactactcttgtcgagtgcatgctttgctattacctccagcaagttcaacgagtgccaactcaacaacctcaacgcgttggaacccgaccaccgcgttgagtccgaaggtggtcttattgaaacatggaactctcaacacccctgagctgcaatgcgccggtgtcactgtttccaaacgcaccctcaaccgcaacggcctccacttgccatcttactcaccttatccccaaatgatcattgtcgttcaaggtgcgtaatattagtaagaagtattttatcagcttaacgtgataacaataatagtaatatgaaatatttattaaaattttttataaattaatctctgctagaaaatttgattaatcatttttagtgaatttgtttttctcaactaggttttaaacacca

SEQ ID NO: 1658 - DNA, 654 bp, Artificial
  Mutations within GlyA3B4 introduced by GmGlyA3B4_T01TALE nuclease
gttcatgtacggttgcagatataaacgaagcatagcttatgtatgaggtgtaacaaaattggaaacaatagccatgcaaggtgaagaatgtcaccaactcagaaacccttcttcattgacgtgtccctcactcactctcctctcttcactataaatcgccactcttcgtgttctccacttcaccaactccttcaaacttattaacactttccttagttcaatatggggaagcccttcttcactctctctctttcttccctttgcttttgtcgagtgcatgctttgctattacctccagcaagttcaacgagtgccaactcaacaacctcaacgcgttggaacccgaccaccgcgttgagtccgaaggtggtcttattgaaacatggaactctcaacaccctgagctgcaatgcgccggtgtcactgtttccaaacgcaccctcaaccgcaacggcctccacttgccatcttactcaccttatcccccaaatgatcattgtcgttcaaggtgcgtaaatattagtaagaagtatttatcagcttaacgtgataacaataatagtaatatgaaatatttattaaattttttataattaatctctgctagaaaatttgattaatctttttagtagaatttgttttttctcaactagg

SEQ ID NO: 1659 - DNA, 760 bp, Artificial
  Mutations within GlyA3B4 introduced by GmGlyA3B4_T01TALE nuclease
  misc_feature (643): n is a or c or t or g
gttcatgtacggttgcagatataaacgaagcatagcttatgtatgaggtgtaacaaaattggaaacaatagccatgcaaggtgaagaatgtcaccaactcagaaacccttcttcattgacgtgtccctcactcactctcctctcttcactataaatcgccactcttcgtgttctccacttcaccaactccttcaaacttattaacactttccttagttcaatatggggaagcccttcttcactctctctctttcttccctttgcttgcgccacgttttgcaatcttgagaagttggcctgtgtccaactgtaacggtggacctctcaactctcccgccaccgtgagcaaggcctccagagcgcgtgcgccggaccactgtttgccgacgctcttgtcgagtgcatgctttgctattacctccagcaagttcaacgagtgccaactcaacaacctcaacgcgttggaacccgaccaccgcgttgagtccgaaggtggtcttattgaaacatggactctcaacaccctgagctgcaatgcgccggtgtcactgtttccaaaacgcaccctcaaccgcaacggcctccacttgccatcttactcaccttatccccaaatgatcattgtcgttcaaggtgcgtaatnttagtaagaagtatttatcagcttaacgtgataacaataatagtaatatgaaaatatttattaaaattttttataattaatctcttgctagaaaatttgattaatcatttttagtag

SEQ ID NO: 1660 - DNA, 714 bp, Artificial
  Mutations within GlyA3B4 introduced by GmGlyA3B4_T01TALE nuclease
gttcatgtacggttgcagatataaacgaagcatagcttatgtatgaggtgtaacaaaattggaaacaatagccatgcaaggtgaagaatgtcaccaactcagaaacccttcttcattgacgtgtccctcactcactctcctctcttcactataaatcgccactcttcgtgttctccacttcaccaactccttcaaacttattaacactttccttagttcaatatggggaagcccttcttcactctctctctttcttccctttgcttgctattcctaatttacccttgccttttctctttctctttcttccctttgtcttactcttgtcgagtgcatgctttgctattacctccagcaagttcaacgagtgccaactcaacaacctcaacgcgttggaacccgaccaccgcgttgagtccgaaggtggtcttattgaaacatggaactctcaacaccctgagctgcaatgcgccggtgtcactgtttccaaacgcaccctcaaccgcaacggcctccacttgccatcttactcaccttatccccaaatgatcattgtcgttcaaggtgcgtaatattagtaagaagtatttatcagcttaacgtgataacaataatagtaatatgaaatatttattaaattttttataattaatctctgctagaaaatttgattaatcatttttagtagaatttgttttttctcaactaggtttt

SEQ ID NO: 1661 - DNA, 806 bp, Artificial
  Mutations within GlyA3B4 introduced by GmGlyA3B4_T01TALE nuclease
  misc_feature (677): n is a or c or t or g
gttcatgtacggttgcagatataaacgaagcatagcttatgtatgaggtgtaacaaaattggaaacaatagccatgcaaggtgaagaatgtcaccaactcagaaaccccttcttcattgacgtgtccctcactcactctcctctcttcactataaatcgccactcttcgtgttctccacttcaccaactccttcaaacttattaacactttccttagttcaatatggggaagcccttcttcactctctctctttcttccctttgcttgcttttaaagaatccataaatttcaatttagccttcttgatgaagagcgggtggagcttatgttcgaataggatgcgttgtgggtcagaataatcagagaaaagtatcactgtggagaatctttgatcccagatattgattgtaataggtttgagactatttgtcgagtgcatgctttgctattacctccagcaagttcaacgagtgccaactcaacaacctcaacgcgttggaacccgaccaccgcgttgagtccgaaggtggtcttattgaaacatggactctcaacaccctgagctgcaatgcgccggtgtcactgtttccaaacgcaccctcaaccgcaacggcctccacttgccaatcttactcaccttatccccaaatgatcattgtcgtcaaggtgcgtaatnttagtaagaagtatttatcagcttaacgtgataacaataatagtaatatgaaatatttattaaattttttataattaaatctcttgctagaaaatttgattaatcatttttagtagaaatttgtttttc

SEQ ID NO: 1662 - DNA, 777 bp, Artificial
  Mutations within GlyA3B4 introduced by GmGlyA3B4_T01TALE nuclease
gttcatgtacggttgcagatataaacgaagcatagcttatgtatgaggtgtaacaaaattggaaacaatagccatgcaaggtgaagaatgtcaccaactcagaaacccttcttcattgacgtgtccctcactcactctcctctcttcactataaatcgccactcttcgtgttctccacttcaccaactccttcaaacttattaacactttccttagttcaatatgggggaagcccttcttcactctctctctttcttccctttgcttgctactccagcgcctgcttgccgccatcgtggctggcgatggccaccacctgctccggggtcaagttgagcggggcacccgtcagtgcattgcgccatgcatgcactgcctccactgcggtcacgccgccacgttttgcaatcttgagaagttggcctgtgtccaactgtaacggtggacctctcaactctcccgccaccgtgagcaaggcctccagagcgcgtgcgccggaccactgtttgccgacgccaacgatcgcttcgtgtgtcgcctctggcaacgctgcgatcatgtcctgatacttgacagcgacggtccctaacgctgccggggtgtcttgtcgagtgcatgctttgcctattacctccagcaagtcaacgagtgccactcaacaacctcacgcgttggacccgaccacgcgttgagtccgaaggtggtcttattgaaacatggactctcacaccctgagctgcaatgcgccggtgtcactgtttccaaacgcaccctcaa

SEQ ID NO: 1663 - DNA, 670 bp, Artificial
  Mutations within GlyA3B4 introduced by GmGlyA3B4_T01TALE nuclease
  misc_feature (532): n is a or c or t or g
gttcatgtacggttgcagatataaacgaagcatagcttatgtatgaggtgtaacaaaattggaaacaatagccatgcaaggtgaagaatgtcaccaactcagaaacccttcttcattgacgtgtccctcactcactctcctctcttcactataaatcgccactcttcgtgttctccacttcaccaactccttcaaacttattaacactttccttagttcaatatggggaagcccttcttcactctctctctttcttccctttgcttgctattgtcgagtgcatgctttgctattacctccagcaagttcaacgagtgccaactcaacaacctcaacgcgttggaacccgaccaccgcgttgagtccgaaggtggtcttattgaaacatggaactctcaacaccctgagctgcaatgcgccggtgtcactgtttccaaacgcaccctcaaccgcaacggcctccacttgccatcttactcaccttatccccaaatgatcattgtcgttcaaggtgcgtaatattagtaagagnatttatcagcttaacgtgataacaataatagtaatatgaaaatatttattaaatttttataattaatctctgctagaaaatttgattaatcattttagtagaatttgtttttctcaactaggtttttaaaacaccaca

SEQ ID NO: 1664 - DNA, 671 bp, Artificial; identical to SEQ ID NO: 1623
  Mutations within GlyA3B4 introduced by GmGlyA3B4_T01TALE nuclease

SEQ ID NO: 1665 - DNA, 545 bp, Artificial
  Mutations within GlyA3B4 introduced by GmGlyA3B4_T01TALE nuclease
gttcatgtacggttgcagatataaacgaagcatagcttatgtatgaggtgtaacaaaattggaaacaatagccatgcaaggtgaagaatgtcaccaactcagaaacccttcttcattgacgtgtccctcactcactctcctctcttcactataaatcgccactcttcgagtgcatgcttttgctattacctccagcaagttcaacgagtgccaactcaacaacctcaacgcgttggaacccgaccaccgcgttgagtccgaaggtggtcttattgaaacatggaactctcaacaccctgagctgcaatgcgccggtgtcactgtttccaaacgcaccctcaaccgcaacggcctccacttgccatcttactcaccttatccccaaatgatcattgtcgttcaaggtgcgtaatattagtaagaagtatttatcagcttaacgtgataacaataatagtaatatgaaatatttattaaattttttataattaatctctgctagaaaatttgattaatcatttttagtagaatttgtttttctcaac

SEQ ID NO: 1666 - DNA, 667 bp, Artificial
  Mutations within GlyA3B4 introduced by GmGlyA3B4_T01TALE nuclease
gttcatgtacggttgcagatataaacgaagcatagcttatgtatgaggtgtaacaaaattggaaacaatagccatgcaaggtgaagaatgtcaccaactcagaaacccttcttcattgacgtgtccctcactcactctcctctcttcactataaatcgccactcttcgtgttctccacttcaccaactccttcaaacttattaacactttccttagttcaatatggggaagcccttcttcactctctctctttcttccctttgcttcttgtcgagtgcatgctttgctattacctccagcaagttcaacgagtgccaactcaacaacctcaacgcgttggaacccgaccaccgcgttgagtccgaaggtggtcttattgaaacatggaactctcaacaccctgagctgcaatgcgccggtgtcactgtttccaaacgcaccctcaaccgcaacggcctccacttgccatcttactcaccttatccccaaatgatcattgtcgttcaaggtgcgtaatattagtaagaagtatttatcagcttaacgtgataacaataatagtaatatgaaatatttattaaattttttataattaatctctgctagaaaatttgattaatcatttttagtagaatttgttttttctcaactaggtttaaacaccaca

SEQ ID NO: 1667 - DNA, 674 bp, Artificial
  Mutations within GlyA3B4 introduced by GmGlyA3B4_T01TALE nuclease
gttcatgtacggttgcagatataaacgaagcatagcttatgtatgaggtgtaacaaaaatttggaaacaatagccatgcaaggtgaagaatgtcaccaactcagaaacccttcttcattgacgtgtccctcactcactctcctctcttcactataaatcgccactcttcgtgttctccacttcaccaactccttcaaacttattaacactttccttagttcaatatgggggaagcccttcttcactctctctctttcttccctttgcttgctgtcgagtgcatgctttgctattacctccagcaagttcaacgagtgccaactcaacaacctcaacgcgttggaacccgaccaccgcgttgagtccgaaggtggtcttattgaaacatggaactctcaacaccctgagctgcaatgcgccggtgtcactgtttccaacgcaccctcaaccgcaacggcctccacttgccatcttactcaccttatccccaaatgatcattgtcgttcaaggtgcgtaaatattagtaagaagtattttatcagcttaacgtgataacaataatagtaatatgaaatattttattaaattttttataattaatctctgctagaaaaatttgattaatctttttagtagaatttgttttttctcaactaggttttaaaacaccaca

SEQ ID NO: 1668 - DNA, 657 bp, Artificial
  Mutations within GlyA3B4 introduced by GmGlyA3B4_T01TALE nuclease
gttcatgtacggttgcagatataaacgaagcatagcttatgtatgaggtgtaacaaaattggaaacaatagccatgcaaggtgaagaatgtcaccaactcagaaaccccttcttcattgacgtgtccctcactcactctcctctcttcactataaatcgccactcttcgtgttctccacttcaccaactccttcaaacttattaacactttccttagttcaatatggggaagcccttcttcactctctctctttcttccctttgcttgctactactcttgtcgagtgcatgctttgctattacctccagcaagttcaacgagtgccaactcaacaacctcaacgcgttggaacccgaccaccgcgttgagtccgaaggtggtcttattgaaacatggaactctcaacacccctgagctgcaatgcgccggtgtcactgtttccaaacgcacctcaaccgcaacggcctccacttgccatcttactcaccttatccccaaatgatcattgtcgttcaaggtgcgtatattagtaagaagtatttatcagcttaacgtgatacaataatagtaatatgaaatatttattaaattttttataattaatctctgctagaaaatttgattaatcatttttagtagaatttgtttttcttcaa

SEQ ID NO: 1669 - DNA, 385 bp, Artificial
  Mutations within GlyA3B4 introduced by GmGlyA3B4_T01TALE nuclease
gttcatgtacggttgcagataactattacctccagcaagttcaacgagtgccaactcaacaacctcaacgcgttggaacccgcaccaccgcgttgagtccgaaggtggtcttattgaaacatggaactctcaacacctgcagctgcaatgcgccggtgtcactgtttccaaacgcacctcaaccgcaacggcctccacttgccatcttactcaccttatcccaacaatacattgtcgttcaaggtgcgtaatattagtaagaagtatttatcagcttaacgtgataacaataatagtaatatgaaatatttattaaatttttataattaatctctgctagaaaatttgattaatcattttagtagaatttgttttctcaactagg

SEQ ID NO: 1670 - DNA, 373 bp, Artificial
  Mutations within GlyA3B4 introduced by GmGlyA3B4_T01TALE nuclease
gttcatgtacggttgcagataactattacctccagcaagttcaacgagtgccaactcaacaacctcaacgcgttggaacccgaccaccgcgttgagtccgaaggtggtcttattgaaacatggaactctcaacaccctgagctgcaatgcgccggtgtcactgtttccaaacgcaccctcaaccgcaacggcctccacttgccatcttactcaccttatcccaactgatcattgtcgttcaaggtgcgtaatattagtaagaagtatttatcagcttaacgtgataacaataatagtaatatgaaatatttattaaattttttataattaatctctgctagaaaatttgattaatcatttttagtagaatttg

SEQ ID NO: 1671 - DNA, 393 bp, Artificial
  Mutations within GlyA3B4 introduced by GmGlyA3B4_T01TALE nuclease
gttcatgtacggttgcagatataaacgaagcatagcttatgtatgaggtgtgacaaaattggaaacaatagccatgcaaggtgaagaatgtcaccaactcagaaacccttcttcattgacgtgtccctcactcactctcctctcttcactataaatcgccactcttcgtgttctccacttcaccaactccttcaaacttattaacactttccttagttcaatatggggaagcccttcttcactctctctctacaataatagtaatatgaaatatttattaaattttttataattaatctctgctagaaaatttgattaatcattttagtagaatttgtttttctcaactaggtttaaacaccacactaagactgccaaggcacacaggggata

SEQ ID NO: 1672 - DNA, 409 bp, Artificial
  Mutations within GlyA3B4 introduced by GmGlyA3B4_T01TALE nuclease
gttcatgtacggttgcagatataaacgaagcatagcttatgtatgaggtgtaacaaaattggaaacaatagccatgcaaggtgaagaatgtcaccaactcagaaacccttcttcattgacgtgtccctcactcactctcctctcttcactataaatcgccactcttcgtgttctccacttcaccaactccttcaaacttattaacactttccttagttcaatatggggaagcccttcttcactctctctctttcttccctttgcttgctactcttgtcgagtgcatatcagcttaacgtgataacaataatagtaatatgaaatatttattaaattttttataattaatctctgctagaaaatttgattaatcatttttagtagaatttgtttttctcaactaggtttt

SEQ ID NO: 1673 - DNA, 476 bp, Artificial
  Mutations within GlyA3B4 introduced by GmGlyA3B4_T01TALE nuclease
gttcatgtacggttgcagatataaacgaagcatagcttatgtatgaggtgtaacaaaattggaaacaatagccatgcaaggtgaagaatgtcaccaactcagaaacccttcttcattgacgtgccaactcaacaacctcaacgcgttggaacccgaccaccgcgttgagtccgaaggtggtcttattgaaacatggaactctcaacaccctgagctgcaatgcgccggtgtcactgtttccaaacgcaccctcaaccgcaacggcctccacttgccatcttactcaccttatcccccaaatgatcattgtcgttcaaggtgcgtaatattagtaagaagtatttatcagcttaacgtgataacaataatagtaatatgaaatatttattaaattttttataattaatctctgctagaaaatttgattaatcatttttagtagaatttgtttttctcaactaggtttttaaacacca

SEQ ID NO: 1674 - DNA, 386 bp, Artificial
  Mutations within GlyA3B4 introduced by GmGlyA3B4_T01TALE nuclease
gttcatgtacggttgcagatataaacgaagcatagcttatgtatgaggtgtaacaaaattggaaacaatagccatgcaaggtgaagaatgtcaccaactcagaaacccttcttcaccgcgttgagtccgaaggtggtcttattgaaacatggaactctcaacaccctgagctgcaatgcgccggtgtcactgtttccaaacgcaccctcaaccgcaacggcctccacttgccatcttactcaccttatccccaaatgatcattgtcgttcaaggtgcgtaatattagtaagaagtatttatcagcttaacgtgataacaataatagtaatatgaaatatttattaaatttttataattaatctctgctagaaaatttgattaatca

SEQ ID NO: 1675 - DNA, 423 bp, Artificial
  Mutations within GlyA3B4 introduced by GmGlyA3B4_T01TALE nuclease
gttcatgtacggttgcagatataaacgaagcatagcttatgtatgaggtgtaacaaaattggaaacaatagccatgcaaggtgaagaatgtcaccaactcagaaacccttcttcattgacgtgtccctcactcactctcctctcttcactataaatcgccactcttcgtgttctccacttcaccaactccttcaaacgcaccctcaaccgcaacggcctccacttgccatcttactcaccttatcccaaatgatcattgtcgttcaaggtgcgtaatattagtaagaagtatttatcagcttaacgtgataacaataatagtaatatgaaatatttattaaattttttataattaatctctgctagaaaatttgattaatcatttttagtagaatttgtttttctcaactaggtttaacacca

SEQ ID NO: 1676 - DNA, 502 bp, Artificial
  Mutations within GlyA3B4 introduced by GmGlyA3B4_T01TALE nuclease
gttcatgtacggttgcagatataaacgaagcatagcttatgtatgaggtgtaacaaaattggaaacaatagccatgcaaggtgaagaatgtcaccaactcagaaacccttcttcattgacgtgtccctcactcactctcctctcttcactataaatcgccactcttcgtgttctccacttcaccaactccttcaaacttattaacactttccttagttcaatatggggaagcccttcttcactctcaacaccctgagctgcaatgcgccggtgtcactgtttccaaacgcaccctcaaccgcaacggcctccacttgccatcttactcaccttatccccaaatgatcattgtcgttcaaggtgcgtaatattagtaagaagtattttatcagcttaacgtgataacaataatagtaatatgaaatatttattaaattttttataattaatctctgctagaaaatttgattaatcatttttagtagaatttgtttttctcaac

SEQ ID NO: 1677 - DNA, 417 bp, Artificial
  Mutations within GlyA3B4 introduced by GmGlyA3B4_T01TALE nuclease
gttcatgtacggttgcagatataaacgaagcatagcttatgtatgaggtgtaacaaaattggaaacaatagccatgcaaggtgaagaatgtcaccaactcagaaacccttcttcattgacgtgtccctcactcactctcctctcttcactataaatcgccactcttcgtgttctccacttcaccaactccttcaaacttattaacactttccttagttcaatatggggaagcccttcttcactctctctctttcttccctttgcttgctactcttgtcgagtgcatatcagcttaacgtgataacaataatagtaatatgaaatatttattaaattttttataattaatctctgctagaaaatttgattaatcatttttagtagaatttgtttttctcaactaggttttaaacacca

SEQ ID NO: 1678 - DNA, 463 bp, Artificial
  Mutations within GlyA3B4 introduced by GmGlyA3B4_T01TALE nuclease
gttcatgtacggttgcagatataaacgaagcatagcttatgtatgaggtgtaacaaaattggaaacaatagccatgcaaggtgaagaatgtcaccaactcagaaacccttcttcattgacgtgtccctcactcactctcctccagcaagttcaacgagtgccaactcaacaacctcaacgcgttggaacccgaccaccgcgttgagtccgaaggtggtcttattgaaacatggaactctcaacaccctgagctgcaatgcgccggtgtcactgtttccaaacgcaccctcaaccgcaacggcctccacttgccatcttactcaccttatccccaaatgatcattgtcgttcaaggtgcgtaatattagtaagaagtatttatcagcttaacgtgataacaataatagtaatatgaaatatttattaaattttttataattaatctctgctagaaaatttgatt

SEQ ID NO: 1679 - DNA, 515 bp, Artificial
  Mutations within GlyA3B4 introduced by GmGlyA3B4_T01TALE nuclease
gttcatgtacggttgcagatataaacgaagcatagcttatgtatgaggtgtaacaaaattggaaacaatagccatgcaaggtgaagaatgtcaccaactcagaaacccttcttcattgacgtgtccctcactcactctcctctcttcactataaatcgccactcttcgtgttctccacttcaccaacgcgttggaacccgaccaccgcgttgagtccgaaggtggtcttattgaaacatggaactctcaacaccctgagctgcaatgcgccggtgtcactgtttccaaacgcaccctcaaccgcaacggcctccacttgccatcttactcaccttatccccaaatgatcattgtcgttcaaggtgcgtaatattagtaagaagtatttatcagcttaacgtgataacaataatagtaatatgaaatatttattaaattttttataattaatctctgctagaaaatttgattaatcatttttagtagaatttgtttttctcaactaggtttaaaca

SEQ ID NO: 1680 - DNA, 660 bp, Artificial
  Mutations within GlyA3B4 introduced by GmGlyA3B4_T01TALE nuclease
gttcatgtacggttgcagatataaacgaagcatagcttatgtatgaggtgtaacaaaattggaaacaatagccatgcaaggtgaagaatgtcaccaactcagaaacccttcttcattgacgtgtccctcactcactctcctctcttcactataaatcgccactcttcgtgttctccacttcaccaactccttcaaacttattaacactttccttagttcaatatggggaagcccttcttcactctctctctttcttccctttgcttgctactcttgtcgagtgcaattacctccagcaagttcaacgagtgccaactcaacaacctcaacgcgttggaacccgaccaccgcgttgagtccgaaggtggtcttattgaaacatggaactctcaacaccctgagctgcaatgcgccggtgtcactgtttccaaacgcaccctcaaccgcaacggcctccacttgccatcttactcaccttatccccaaatgatcattgtcgttcaaggtgcgtaatattagtaagaagtatttatcagcttaacgtgataacaataatagtaatatgaaatatttattaaatttttataattaatctctgctagaaaatttgattaatcattttagtagaatttgttttctcaactaggttttaaaacacca

SEQ ID NO: 1681 - DNA, 569 bp, Artificial
  Mutations within GlyA3B4 introduced by GmGlyA3B4_T01TALE nuclease
gttcatgtacggttgcagatataaacgaagcatagcttatgtatgaggtgtaacaaaattggaaacaatagccatgcaaggtgaagaatgtcaccaactcagaaacccttcttcattgacgtgtccctcactcactctcctctcttcactataaatcgccactcttcgtgttctccacttcaccaactccttcaaacttattaacactttccttagttcaacgagtgccaactcaacaacctcaacgcgttggaacccgaccaccgcgttgagtccgaaggtggtcttattgaaacatggaactctcaacaccctgagctgcaatgcgccggtgtcactgtttccaaacgcaccctcaaccgcaacggcctccacttgccatcttactcaccttatccccaaatgatcattgtcgttcaaggtgcgtaatattagtaagaagtatttatcagcttaacgtgataacaataatagtaatatgaaatatttattaaattttttatattaatctctgctagaaaatttgattaatcattttagtagaatttgtttttctcaactaggttttt

SEQ ID NO: 1682 - DNA, 417 bp, Artificial; identical to SEQ ID NO: 1677
  Mutations within GlyA3B4 introduced by GmGlyA3B4_T01TALE nuclease

SEQ ID NO: 1683 - DNA, 561 bp, Artificial
  Mutations within GlyA3B4 introduced by GmGlyA3B4_T01TALE nuclease
gttcatgtacggttgcagatataaacgaagcatagcttatgtatgaggtgtaacaaaattggaaacaatagccatgcaaggtgaagaatgtcaccaactcagaaacccttcttcattgacgtgtccctcactcactctcctctcttcactataaatcgccactcttcgtgttctccacttcaccaactccttcaaacttattaacactttccttagttcaacaacctcaacgcgttggaacccgaccaccgcgttgagtccgaaggtggtcttattgaaacatggaactctcaacaccctgagctgcaatgcgccggtgtcactgtttccaaacgcaccctcaaccgcaacggcctccacttgccatcttactcaccttatccccaaatgatcattgtcgttcaaggtgcgtaatattagtaagaagtatttatcagcttaacgtgataacaataatagtaatatgaaatatttattaaattttttataattaatctctgctagaaaatttgattaaatcatttttagtagaatttgtttttctcaactaggttttaaaca

SEQ ID NO: 1684 - DNA, 426 bp, Artificial
  Mutations within GlyA3B4 introduced by GmGlyA3B4_T01TALE nuclease
gttcatgtacggttgcagatataaacgaagcatagcttatgtatgaggtgtaacaaaattggaaacaatagccatgcaaggtgaagaatgtcaccaactcagaaacccttcttcattgacgtgtccctcactcactctcctctcttcactataaatcgccactcttcgtgttctccacttcaccaactccttcaaacgcaccctcaaccgcaacggcctccacttgccatcttactcaccttatccccaaatgatcattgtcgttcaaggtgcgtaatattagtaagaagtatttatcagcttaacgtgataacaataatagtaatatgaaatatttattaaattttttataattaatctctgctagaaaatttgattaatcatttttagtagaatttgtttttctcaactaggttttaaacacca

SEQ ID NO: 1685 - DNA, 398 bp, Artificial
  Mutations within GlyA3B4 introduced by GmGlyA3B4_T01TALE nuclease
gttcatgtacggttgcagatataaacgaagcatagcttatgtatgaggtgtaacaaaattggaaacaatagccatgcaaggtgaagaatgtcaccaactcagaaacccttcttcattgacgtgtccctcactcactctcctctcttcactataaatcgccactcttcgtgttctccacttcaccaactccttcaaacttattaacactttccttagttcaatatggggaagcccttcttcactctctctctttcttccctttgcttgctactcttgtcgagtgcatatcagcttaacgtgataacaataatagtaatatgaaatatttattaaattttttataattaatctctgctagaaaatttgattaatcatttttagtagaatttgtttttctc

SEQ ID NO: 1686 - DNA, 457 bp, Artificial
  Mutations within GlyA3B4 introduced by GmGlyA3B4_T01TALE nuclease
gttcatgtacggttgcagatataaacgaagcatagcttatgtatgaggtgtaacaaaattggaaacaatagccatgcaaggtgaagaatgtcaccaactcaggatgctatcaacaacctcaacgcgttggaacccgaccaccgcgttgagtccgaaggtggtcttattgaaacatggaactctcaacaccctgagctgcaatgcgccggtgtcactgtttccaaacgcaccctcaaccgcaacggcctccacttgccatcttactcaccttatccccaaatgatcattgtcgttcaaggtgcgtaatattagtaagaagtatttatcagcttaacgtgataacaataatagtaatatgaaatatttattaaattttttataattaatctctgctagaaaatttgattaatcatttttagtagaatttgtttttctcaactaggttttaaacaccaca

SEQ ID NO: 1687 - DNA, 473 bp, Artificial
  Mutations within GlyA3B4 introduced by GmGlyA3B4_T01TALE nuclease
gttcatgtacggttgcagatataaacgaagcatagcttatgtatgaggtgtaacaaaattggaaacaatagccatgcaaggtgaagaatgtcaccaactcagaaacccttcttcattgacgtgtccctcactcactctttgctattacctccagcaagttcaacgagtgccaactcaacaacctcaacgcgttggaacccgaccaccgcgttgagtccgaaggtggtcttattgaaacatggaactctcaacaccctgagctgcaatgcgccggtgtcactgtttccaaacgcaccctcaaccgcaacggcctccacttgccatcttactcaccttatccccaaatgatcattgtcgttcaaggtgcgtaatattagtaagaagtatttatcagcttaacgtgataacaataatagtaatatgaaatatttattaaaattttttataattaatctctgctagaaaatttgatt

SEQ ID NO: 1688 - DNA, 426 bp, Artificial; identical to SEQ ID NO: 1684
  Mutations within GlyA3B4 introduced by GmGlyA3B4_T01TALE nuclease

SEQ ID NO: 1689 - DNA, 656 bp, Artificial
  Mutations within GlyA3B4 introduced by GmGlyA3B4_T02TALE nuclease
  misc_feature (528): n is a or c or t or g
gttcatgtacggttgcagatataaacgaagcatagcttatgtatgaggtgtaacaaaattggaaacaatagccatgcaaggtgaagaatgtcaccaactcagaaacccttcttcattgacgtgtccctcactcactctcctctcttcactataaatcgccactcttcgtgttctccacttcaccaactccttcaaacttattaacactttccttagttcaatatggggaagcccttcttcactctctctctttcttccctttgcttgctactcttgtcgagtgcgctattacctccagcaagttcaacgagtgccaactcaacaacctcaacgcgttggaacccgaccaccgcgttgagtccgaaggtggtcttattgaaacatggaactctcaacaccctgagctgcaatgcgccggtgtcactgtttccaaacgcaccctcaaccgcaacggcctccacttgccatcttactcaccttatccccaaatgatcattgtcgttcaaggtgcgtaatattagtaagagnatttatcagcttaacgtgataacaatatagtaatatgaaatatttattaaatttttataattaatctctgctagaaaatttgattaatcattttagtagaatttgttttctcaactaggtttttaaaa

SEQ ID NO: 1690 - DNA, 532 bp, Artificial
  Mutations within GlyA3B4 introduced by GmGlyA3B4_T02TALE nuclease
gttcatgtacggttgcagatataaacgaagcatagcttatgtatgaggtgtaacaaaattggaaacaatagccatgcaaggtgaagaatgtcaccaactcagaaacccttcttcattgacgtgtccctcactcactctcctctcttcactataaatcgccactcttcgtgttctccacttcaccaactccttcaaacttattaacactttccttagttcaatatggaacccgaccaccgcgttgagtccgaaggtggtcttattgaaacatggaactctcaacaccctgagctgcaatgcgccggtgtcactgtttccaaacgcaccctcaaccgcaacggcctccacttgccatcttactcaccttatccccaaatgatcattgtcgttcaaggtgcgtaatattagtaagaagtatttatcagcttaacgtgataacaataatagtaatatgaaatatttattaaattttttataattaatctctgctagaaaatttgattaatcatttttagtagaatttgtttttctc

SEQ ID NO: 1691 - DNA, 588 bp, Artificial
  Mutations within GlyA3B4 introduced by GmGlyA3B4_T02TALE nuclease
gttcatgtacggttgcagatataaacgaagcatagcttatgtatgaggtgtaacaaaattggaaacaatagccatgcaaggtgaagaatgtcaccaactcagaaacccttcttcattgacgtgtccctcactcactctcctctcttcactataaatcgccactcttcgtgttctccacttcaccaactccttcaaacttattaacactttccttagttcaatatggggaagcccttcttcactctctctctttcttccagcaagttcaacgagtgccaactcaacaacctcaacgcgttggaacccgaccaccgcgttgagtccgaaggtggtcttattgaaacatggaactctcaacaccctgagctgcaatgcgccggtgtcactgtttccaaacgcaccctcaaccgcaacggcctccacttgccatcttactcaccttatccccaaatgatcattgtcgttcaaggtgcgtaatattagtaagaagtatttatcagcttaacgtgataacaataatagtaatatgaaatatttattaatttttataattaatctctgctagaaaatttgattaatcatttttag

SEQ ID NO: 1692 - DNA, 584 bp, Artificial
  Mutations within GlyA3B4 introduced by GmGlyA3B4_T02TALE nuclease
gttcatgtacggttgcagatataaacgaagcatagcttatgtatgaggtgtaacaaaattggaaacaatagccatgcaaggtgaagaatgtcaccaactcagaaacccttcttcattgacgtgtccctcactcactctcctctcttcactataaatcgccactcttcgtgttctccacttcaccaactccttcaaacttattaacactttccttagttcaatatggggaagcccttcttcactctctctctttcttccctttgcttgctactcttgtcgagtgcatgctggcgatggccaccacctgctgggggtcaagccgtgggcctggcacagcaccggcaacagccgctggaccgtcactgtttccaaacgcaccctcaaccgcaacggcctccacttgccatcttactcaccttatccccaaatgatcattgtcgttcaaggtgcgtaatattagtaagaagtatttatcagcttaacgtgataacaataatagtaatatgaatatttattaaatttttataattaatctctgctagaaaatttgattaatcatttttagtagaatttgtttttctcaa

SEQ ID NO: 1693 - DNA, 583 bp, Artificial
  Mutations within GlyA3B4 introduced by GmGlyA3B4_T02TALE nuclease
gttcatgtacggttgcagatataaacgaagcatagcttatgtatgaggtgtaacaaaattggaaacaatagccatgcaaggtgaagaatgtcaccaactcagaaacccttcttcattgacgtgtccctcactcactctcctctcttcactataaatcgccactcttcgtgttctccacttcaccaactccttcaaacttattaacactttccttagttcaatattacctccagcaagttcaacgagtgccaactcaacaacctcaacgcgttggaacccgaccaccgcgttgagtccgaaggtggtcttattgaaacatggaactctcaacaccctgagctgcaatgcgccggtgtcactgtttccaaacgcaccctcaaccgcaacggcctccacttgccatcttactcaccttatcccccaaatgatcattgtcgttcaaggtgcgtaatattagtaagaagtatttatcagcttaacgtgataacaataatagtaatatgaaatatttattaaattttttataattaatctctgctagaaaatttgattaatcatttttagtagaatttgtttttctcaa

SEQ ID NO: 1694 - DNA, 661 bp, Artificial
  Mutations within GlyA3B4 introduced by GmGlyA3B4_T02TALE nuclease
gttcatgtacggttgcagatataaacgaagcatagcttatgtatgaggtgtaacaaaattggaaacaatagccatgcaaggtgaagaatgtcaccaactcagaaacccttcttcattgacgtgtccctcactcactctcctctcttcactataaatcgccactcttcgtgttctccacttcaccaactccttcaaacttattaacactttccttagttcaatatggggaagcccttcttcactctctctctttcttccctttgcttgctactcttgtcgagtgcatattacctccagcaagttcaacgagtgccaactcaacaacctcaacgcgttggaacccgaccaccgcgttgagtccgaaggtggtcttattgaaacatggaactctcaacaccctgagctgcaatgcgccggtgtcactgtttccaaacgcaccctcaaccgcaacggcctccacttgccatcttactcaccttatccccaaatgatcattgtcgttcaaggtgcgtaatattagtaagaagtatttatcagcttaacgtgataacaataatagtaatatgaaatatttattaaatttttataattaatctctgctagaaaatttgattaatcattttagtagaatttgttttctcaactaggttttaaaacacca

SEQ ID NO: 1695 - DNA, 457 bp, Artificial
  Mutations within GlyA3B4 introduced by GmGlyA3B4_T02TALE nuclease
gttcatgtacggttgcagatataaacgaagcatagcttatgtatgaggtgtaacaaaattggaaacaatagccatgctattacctccagcaagttcaacgagtgccaactcaacaacctcaacgcgttggaacccgaccaccgcgttgagtccgaaggtggtcttattgaaacatggaactctcaacaccctgagctgcaatgcgccggtgtcactgtttccaaacgcaccctcaaccgcaacggcctccacttgccatcttactcaccttatccccaaatgatcattgtcgttcaaggtgcgtaatattagtaagaagtatttatcagcttaacgtgataacaataatagtaatatgaaatatttattaaattttttataattaatctctgctagaaaatttgattaatcatttttagtagaatttgtttttctcaactaggttttaaacaccaca

SEQ ID NO: 1696 - DNA, 509 bp, Artificial
  Mutations within GlyA3B4 introduced by GmGlyA3B4_T02TALE nuclease
gttcatgtacggttgcagatataaacgaagcatagcttatgtatgaggtgtaacaaaattggaaacaatagccatgcaaggtgaagaatgtcaccaactcagaaacccttcttcattgacgtgtccctcactcactctcctctcttcactataaatcgccactcttcgtgttctccacttcaccaactccttcaaacttattaacactttccttagttcaatatggggaagcccttcttcactctctctctttcttccctttgcttgctactcttgtcactgtttccaaacgcaccctcaaccgcaacggcctccacttgccatcttactcaccttatccccaaatgatcattgtcgttcaaggtgcgtaatattagtaagaagtatttatcagcttaacgtgataacaataatagtaatatgaaatatttattaaattttttataattaattctcattgctagaaaatttgattaatcatttttaagtagaatttgtttttcttcaac

SEQ ID NO: 1697 - DNA, 652 bp, Artificial
  Mutations within GlyA3B4 introduced by GmGlyA3B4_T02TALE nuclease
gttcatgtacggttgcagatataaacgaagcatagcttatgtatgaggtgtaacaaaattggaaacaatagccatgcaaggtgaagaatgtcaccaactcagaaacccttcttcattgacgtgtccctcactcactctcctctcttcactataaatcgccactcttcgtgttctccacttcaccaactccttcaaacttattaacactttccttagttcaatatggggaagcccttcttcactctctctctttcttccctttgcttgctactcttgtcgagtgcagctattacctccagcaagttcaacgagtgccaactcaacaacctcaacgcgttggaacccgaccaccgcgttgagtccgaaggtggtcttattgaaacatggaactctcaacaccctgagctgcaatgcgccggtgtcactgtttccaaacgcaccctcaaccgcaacggcctccacttgccatcttactcaccttatccccaaatgatcattgtcgttcaaggtgcgtaatattagtaagagtatttatcagcttaacgtgataacaatatagtaatatgaaatatttattaaatttttataattaatctctgctagaaaatttgattaatcattttagtagaatttgttttctcaactaggtttt

SEQ ID NO: 1698 - DNA, 534 bp, Artificial
  Mutations within GlyA3B4 introduced by GmGlyA3B4_T02TALE nuclease
gttcatgtacggttgcagatataaacgaagcatagcttatgtatgaggtgtaacaaaattggaaacaatagccatgcaaggtgaagaatgtcaccaactcagaaacccttcttcattgacgtgtccctcactcactctcctctcttcactataaatcgccactcttcgtgttcaacgagtgccaactcaacaacctcaacgcgttggaacccgaccaccgcgttgagtccgaaggtggtcttattgaaacatggaactctcaacaccctgagctgcaatgcgccggtgtcactgtttccaaacgcaccctcaaccgcaacggcctccacttgccatcttactcaccttatccccaaaatgatcattgtcgttcaaggtgcgtaatattagtaagaagtattttatcagcttaacgtgataacaataatagtaatatgaaaatatttattaaattttttataattaatctctgctagaaaatttgattaatcatttttagtagaatttgtttttctcaactaggtttaaacacca

SEQ ID NO: 1699 - DNA, 577 bp, Artificial
  Mutations within GlyA3B4 introduced by GmGlyA3B4_T02TALE nuclease
gttcatgtacggttgcagatataaacgaagcatagcttatgtatgaggtgtaacaaaattggaaacaatagccatgcaaggtgaagaatgtcaccaactcagaaacccttcttcattgacgtgtccctcactcactctcctctcttcactataaatcgccactcttcgtgttctccacttcaccaactccttcaaacttattaacactttccttagttcaatatggggaagcccttcttcactctctctctttcttccctttgcttgctactcttgtcgagtccgaaggtggtcttattgaaacatggaactctcaacaccctgagctgcaatgcgccggtgtcacttgttccaaacgcaccctcaaccgcaacggcctccacttgccatcttactcaccttatccccaaaatgatcattgtcgttcaaggtgcgtaatattagtaagaagtatttatcagcttaacgtgataacaataatagtaatatgaaatatttattaaattttttatattaatctctgctagaaaattgattaatcattttagtagaatttgtttttctcaactaggttttt

SEQ ID NO: 1700 - DNA, 649 bp, Artificial; identical to SEQ ID NO: 858
  Mutations within GlyA3B4 introduced by GmGlyA3B4_T02TALE nuclease

SEQ ID NO: 1701 - DNA, 517 bp, Artificial
  Mutations within GlyA3B4 introduced by GmGlyA3B4_T02TALE nuclease
gttcatgtacggttgcagatataaacgaagcatagcttatgtatgaggtgtaacaaaattggaaacaatagccatgcaaggtgaagaatgtcaccaactcagaaacccttcttcattgacgtgtccctcactcactctttgctattacctccagcaagttcaacgagtgccaactcaacaacctcaacgcgttggaacccgaccaccgcgttgagtccgaaggtggtcttattgaaacatggaactctcaacaccctgagctgcaatgcgcggtgtcactgtttccaaacgcaccctcaaccgcaacggcctccacttgccatcttactcaccttatccccaaatgatcattgtcgttcaaggtgcgtaatattagtaagaagtatttatcagcttaacgtgataacaataatagtaatatgaaatatttattaaaattttttataattaatctctgctagaaaatttgattaatcatttttagtagaatttgtttttctcaactaggttttaaata

SEQ ID NO: 1702 - DNA, 662 bp, Artificial
  Mutations within GlyA3B4 introduced by GmGlyA3B4_T02TALE nuclease
gttcatgtacggttgcagatataaacgaagcatagcttatgtatgaggtgtaacaaaattggaaacaatagccatgcaaggtgaagaatgtcaccaactcagaaacccttcttcattgacgtgtccctcactcactctcctctcttcactataaatcgccactcttcgtgttctccacttcaccaactccttcaaacttattaacactttccttagttcaatatggggaagcccttcttcactctctctctttcttccctttgcttgctactcttgtcgagtgcatctattacctccagcaagttcaacgagtgccaactcaacaacctcaacgcgttggaacccgaccaccgcgttgagtccgaaggtggtcttattgaaacatggaactctcaacaccctgagctgcaatgcgccggtgtcactgtttccaaacgcaccctcaaccgcaacggcctccacttgccatcttactcaccttatccccaaatgatcattgtcgttcaaggtgcgtaatattagtaagaagtatttatcagcttaacgtgataacaatatagtaatatgaaatatttattaaatttttataattaatctctgctagaaaatttgattaatcattttagtagaatttgttttctcaactaggttttaaaacacca

SEQ ID NO: 1703 - DNA, 417 bp, Artificial; identical to SEQ ID NO: 1677
  Mutations within GlyA3B4 introduced by GmGlyA3B4_T02TALE nuclease

SEQ ID NO: 1704 - DNA, 658 bp, Artificial
  Mutations within GlyA3B4 introduced by GmGlyA3B4_T02TALE nuclease
gttcatgtacggttgcagatataaacgaagcatagcttatgtatgaggtgtaacaaaattggaaacaatagccatgcaaggtgaagaatgtcaccaactcagaaacccttcttcattgacgtgtccctcactcactctcctctcttcactataaatcgccactcttcgtgttctccacttcaccaactccttcaaacttattaacactttccttagttcaatatggggaagcccttcttcactctctctctttcttccctttgcttgctactcttgtcgagtgcctccagcaagttcaacgagtgccaactcaacaacctcaacgcgttggaacccgaccaccgcgttgagtccgaaggtggtcttattgaaacatggaactctcaacaccctgagctgcaatgcgccggtgtcactgtttccaaacgcaccctcaaccgcaacggcctccacttgccatcttactcaccttatcccccaaatgatcattgtcgttcaaggtgcgtaatattagtaagaagtatttatcagcttaacgtgataacaataatagtaatatgaaatatttattaaattttttataattaatctctgctagaaaatttgattaatctttttagtagaattgttttttctcaactaggtttaaaacaccaca

SEQ ID NO: 1705 - DNA, 558 bp, Artificial
  Mutations within GlyA3B4 introduced by GmGlyA3B4_T02TALE nuclease
gttcatgtacggttgcagatataaacgaagcatagcttatgtatgaggtgtaacaaaattggaaacaatagccatgcaaggtgaagaatgtcaccaactcagaaacccttcttcattgacgtgtccctcactcactctcctctcttcactataaatcgccactcttcgtgttctccacttcaccaactccttcaaacttattaacactttccttagttcaatatggggaagcccttcttcacattacctccagcaagttcaacgagtgccaactcaacaacctcaacgcgttggaacccgaccaccgcgttgagtccgaaggtggtcttattgaaacatggaactctcaacaccctgagctgcaatgcgccggtgtcactgtttccaaacgcaccctcaaccgcaacggcctccacttgccatcttactcaccttatccccaaatgatcattgtcgttcaaggtgcgtaatattagtaagaagtatttatcagcttaacgtgataacaataatagtaatatgaaatatttattaatttttataattaatctctgctag

SEQ ID NO: 1706 - DNA, 457 bp, Artificial; identical to SEQ ID NO: 1695
  Mutations within GlyA3B4 introduced by GmGlyA3B4_T02TALE nuclease

SEQ ID NO: 1707 - DNA, 505 bp, Artificial
  Mutations within GlyA3B4 introduced by GmGlyA3B4_T02TALE nuclease
gttcatgtacggttgcagatataaacgaagcatagcttatgtatgaggtgtaacaaaattggaaacaatagccatgcaaggtgaagaatgtcaccaactcagaaacccttcttcattgacgtgtccctcactcactctcctctcttcactataaatcgccactcttcgtgttctccacttcaccaactccttcagcaagttcaacgagtgccaactcaacaacctcaacgcgttggaacccgaccaccgcgttgagtccgaaggtggtcttattgaaacatggaactctcaacaccctgagctgcaatgcgccggtgtcactgtttccaaacgcaccctcaaccgcaacggcctccacttgccatcttactcaccttatccccaaatgatcattgtcgttcaaggtgcgtaatattagtaagaagtatttatcagcttaacgtgataacaataatagtaatatgaaatatttattaaattttttataattaatctctgctagaaa

SEQ ID NO: 1708 - DNA, 457 bp, Artificial; identical to SEQ ID NO: 1686
  Mutations within GlyA3B4 introduced by GmGlyA3B4_T02TALE nuclease

SEQ ID NO: 1709 - DNA, 619 bp, Artificial
  Mutations within GlyA3B4 introduced by GmGlyA3B4_T02TALE nuclease
gttcatgtacggttgcagatataaacgaagcatagcttatgtatgaggtgtaacaaaattggaaacaatagccatgcaaggtgaagaatgtcaccaactcagaaacccttcttcattgacgtgtccctcactcactctcctctcttcactataaatcgccactcttcgtgttctccacttcaccaactccttcaaacttattaacactttccttagttcaatatggggaagcccttcttcactctctctctttcgttcctccagcaagttcaacgagtgccaactcaacaacctcaacgcgttggaaccgaccaccgcgttgagtccgaaggtggtcttattgaaacatggaactctcaacaccctgagctgcaatgcgccggtgtcactgtttccaaacgcaccctcaaccgcaacggcctccacttgccatcttactcaccttatccccaaatgatcattgtcgttcaaggtgcgtaatattagtaagaagtatttatcagcttaacgtgataacaataatagtaatatgaaatatttattaattttttataattaatctctgctagaaatttgattaatcatttttagtagaatttgtttttctcaactaggtttt

SEQ ID NO: 1710 - DNA, 509 bp, Artificial
  Mutations within GlyA3B4 introduced by GmGlyA3B4_T02TALE nuclease
gttcatgtacggttgcagatataaacgaagcatagcttatgtatgaggtgtaacaaaattggaaacaatagccatgcaaggtgaagaatgtcaccaactcagaaacccttcttcattgacgtgtccctcactcactctttgctattacctccagcaagttcaacgagtgccaactcaacaacctcaacgcgttggaacccgaccaccgcgttgagtccgaaggtggtcttattgaaacatggaactctcaacaccctgagctgcaatgcgccggtgtcactgtttccaaacgcaccctcaaccgcaacggcctccacttgccatcttactcaccttatccccaaatgatcattgtcgttcaaggtgcgtaatattagtaagaagtatttatcagcttaacgtgataacaataatagtaatatgaaatatttattaaaattttttataattaatctctgctagaaaatttgattaatcatttttagtagaatttgtttttctcaactagg

SEQ ID NO: 1711 - DNA, 426 bp, Artificial
  Mutations within GlyA3B4 introduced by GmGlyA3B4_T02TALE nuclease
gttcatgtacggttgcagatataaacgaagcatagcttatgtatgaggtgtaacaaaattggaaacaatagccatgcaaggtgaagaatgtcaccaactcagaaacccttcttcaccgcgttgagtccgaaggtggtcttattgaaacatggaactctcaacaccctgagctgcaatgcgccggtgtcactgtttccaaacgcaccctcaaccgcaacggcctccacttgccatcttactcaccttatccccaaatgatcattgtcgttcaaggtgcgtaatattagtaagaagtatttatcagcttaacgtgataacaataatagtaatatgaaatatttattaaattttttataattaatctctgctagaaaatttgattaatcatttttagtagaattttgtttttctcaactaggttttaaa

SEQ ID NO: 1712 - DNA, 664 bp, Artificial
  Mutations within GlyA3B4 introduced by GmGlyA3B4_T02TALE nuclease
gttcatgtacggttgcagatataaacgaagcatagcttatgtatgaggtgtaacaaaattggaaacaatagccatgcaaggtgaagaatgtcaccaactcagaaacccttcttcattgacgtgtccctcactcactctcctctcttcactataaatcgccactcttcgtgttctccacttcaccaactccttcaaacttattaacactttccttagttcaatatggggaagcccttcttcactctctctctttcttccctttgcttgctactcttgtcgagtgcatgcgattacctccagcaagttcaacgagtgccaactcaacaacctcaacgcgttggaacccgaccaccgcgttgagtccgaaggtggtcttattgaaacatggaactctcaacaccctgagctgcaatgcgccggtgtcactgtttccaaacgcaccctcaaccgcaacggcctccacttgccatcttactcaccttatccccaaatgatcattgtcgttcaaggtgcgtaatattagtaagaagtatttatcagcttaacgtgataacaataatagtaatatgaaatatttattaaatttttataattaatctctgctagaaaatttgattaatcattttagtagaatttgttttctcaactaggttttaaaacacca

SEQ ID NO: 1713 - DNA, 417 bp, Artificial; identical to SEQ ID NO: 1677
  Mutations within GlyA3B4 introduced by GmGlyA3B4_T02TALE nuclease

SEQ ID NO: 1714 - DNA, 489 bp, Artificial
  Mutations within GlyA3B4 introduced by GmGlyA3B4_T02TALE nuclease
gttcatgtacggttgcagatataaacgaagcatagcttatgtatgaggtgtaacaaaattggaaacaatagccatgcaaggtgaagaatgtcaccaactcagaaacccttcttcattgacgtgtccctcaacgagtgccaactcaacaacctcaacgcgttggaacccgaccaccgcgttgagtccgaaggtggtcttattgaaacatggaactctcaacaccctgagctgcaatgcgccggtgtcactgtttccaaacgcaccctcaaccgcaacggcctccacttgccatcttactcaccttatccccaaatgatcattgtcgttcaaggtgcgtaatattagtaagaagtatttatcagcttaacgtgataacaataatagtaatatgaaatatttattaaattttttataattaatctctgctagaaaatttgattaatcatttttagtagaatttgtttttctcaactaggtttttaaacacca

SEQ ID NO: 1715 - DNA, 664 bp, Artificial
  Mutations within GlyA3B4 introduced by GmGlyA3B4_T02TALE nuclease
gttcatgtacggttgcagatataaacgaagcatagcttatgtatgaggtgtaacaaaattggaaacaatagccatgcaaggtgaagaatgtcaccaactcagaaacccttcttcattgacgtgtccctcactcactctcctctcttcactataaatcgccactcttcgtgttctccacttcaccaactccttcaaacttattaacactttccttagttcaatatggggaagcccttcttcactctctctctttcttccctttgcttgctactcttgtcgagtgcatgctattacctccagcaagttcaacgagtgccaactcaacaacctcaacgcgttggaacccgaccaccgcgttgagtccgaaggtggtcttattgaaacatggaactctcaacaccctgagctgcaatgcgccggtgtcactgtttccaaacgcaccctcaaccgcaacggcctccacttgccatcttactcaccttatccccaaatgatcattgtcgttcaaggtgcgtaatattagtaagagtatttatcagcttaacgtgataacaatatagtaatatgaaatatttattaaatttttataattaatctctgctagaaaatttgattaatcattttagtagaatttgttttctcaactaggtttttaaacaccaca

SEQ ID NO: 1716 - DNA, 500 bp, Artificial
  Mutations within GlyA3B4 introduced by GmGlyA3B4_T02TALE nuclease
gttcatgtacggttgcagatataaacgaagcatagcttatgtatgaggtgtaacaaaattggaaacaatagccatgcaaggtgaagaatgtcaccaactcagaaacccttcttcattgacgtgtccctcactcactctcctctcttcactataaatcgccactcttcgtgttctccacttcaccaactccttcaaacttattaacactttccttagttcaatatggggaagcccttcttcactctccctcaaccgcaacggcctccacttgccatcttactcaccttatccccaaatgatcattgtcgttcaaggtgcgtaatattagtaagaagtatttatcagcttaacgtgataacaataatagtaatatgaaatatttattaaattttttataattaatctctgctagaaaatttgattaatcatttttagtagaatttgtttttctcaactaggttttaaacaccacactgaactgccaaggcacacaggggata

SEQ ID NO: 1717 - DNA, 660 bp, Artificial
  Mutations within GlyA3B4 introduced by GmGlyA3B4_T02TALE nuclease
gttcatgtacggttgcagatataaacgaagcatagcttatgtatgaggtgtaacaaaattggaaacaatagccatgcaaggtgaagaatgtcaccaactcagaaacccttcttcattgacgtgtccctcactcactctcctctcttcactataaatcgccactcttcgtgttctccacttcaccaactccttcaaacttattaacactttccttagttcaatatggggaagcccttcttcactctctctctttcttccctttgcttgctactcttgtcgagtgctattacctccagcaagttcaacgagtgccaactcaacaacctcaacgcgttggaacccgaccaccgcgttgagtccgaaggtggtcttattgaaacatggaactctcaacaccctgagctgcaatgcgccggtgtcactgtttccaaacgcaccctcaaccgcaacggcctccacttgccatcttactcaccttatccccaaatgatcattgtcgttcaaggtgcgtaatattagtaagaagtatttatcagcttaacgtgataacaataatagtaatatgaaatatttattaaatttttataattaatctctgctagaaaatttgattaatcattttagtagaatttgttttctcaactaggttttaaaacacca

SEQ ID NO: 1718 - DNA, 529 bp, Artificial
  Mutations within GlyA3B4 introduced by GmGlyA3B4_T02TALE nuclease
gttcatgtacggttgcagatataaacgaagcatagcttatgtatgaggtgtaacaaaattggaaacaatagccatgcaaggtgaagaatgtcaccaactcagaaacccttcttcattgacgtgtccctcactcactctcctctcttcactataaatcgccactcttcgtgttctccacttcaccaactcaacaacctcaacgcgttggaacccgaccaccgcgttgagtccgaaggtggtcttattgaaacatggaactctcaacaccctgagctgcaatgcgccggtgtcactgtttccaaacgcaccctcaaccgcaacggcctccacttgccatcttactcaccttatccccaaatgatcattgtcgttcaaggtgcgtaatattagtaagaagtatttatcagcttaacgtgataacaataatagtaatatgaaatatttattaaattttttataattaatctctgctagaaaatttgattaatcatttttagtagaatttgtttttctcaactaggttttaaac

SEQ ID NO: 1719 - DNA, 397 bp, Artificial
  Mutations within GlyA3B4 introduced by GmGlyA3B4_T02TALE nuclease
gttcatgtacggttgcagataactattacctccagcaagttcaacgagtgccaactcaacaacctcaacgcgttggaacccgaccaccgcgttgagtccgaaggtggtcttattgaaacatggaactctcaacaccctgagctgcaatgcgccggtgtcactgtttccaaacgcaccctcaaccgcaacggcctccacttgccatcttactcaccttatccccaatgatcattgtcgttcaaggtgcgtaatattagtaagaagtatttatcagcttaacgtgatacaataatagtaatatgaatatttattaaattttttataattaatctctgctagaaattgattaatacattttatgtagaatttgtttttctcaactaggttttaaacacca

SEQ ID NO: 1720 - DNA, 583 bp, Artificial
  Mutations within GlyA3B4 introduced by GmGlyA3B4_T02TALE nuclease
gttcatgtacggttgcagatataaacgaagcatagcttatgtatgaggtgtaacaaaattggaaacaatagccatgcaaggtgaagaatgtcaccaactcagaaaccccttcttcattgacgtgtccctcactcactctcctctcttcactataaatcgccactcttcgtgttctccacttcaccaactccttcaaacttattaacactttccttagttcaatatggggaagcccttcttcactctctctctttcttccctttgcttgctactcttgtcgagtgcatccgaaggtggtcttattgaaacatggaactctcaacaccctgagctgcaatgcgccggtgtcactgtttccaaacgcaccctcaaccgcaacggcctccacttgccatcttactcaccttatccccaaatgatcattgtcgttcaaggtgcgtaatattagtaagaagtatttatcagcttaacgtgataacaataatagtaatatgaaatatttattaaattttttataattaatctctgctagaaaatttgattaatcatttttagtagaatttgtttttctcaactaggtttt

SEQ ID NO: 1721 - DNA, 664 bp, Artificial
  Mutations within GlyA3B4 introduced by GmGlyA3B4_T02TALE nuclease
gttcatgtacggttgcagatataaacgaagcatagcttatgtatgaggtgtaacaaaattggaaacaatagccatgcaaggtgaagaatgtcaccaactcagaaacccttcttcattgacgtgtccctcactcactctcctctcttcactataaatcgccactcttcgtgttctccacttcaccaactccttcaaacttattaacactttccttagttcaatatggggaagcccttcttcactctctctctttcttccctttgcttgctactcttgtcgagtgcatgctattacctccagcaagttcaacgagtgccaactcaacaacctcaacgcgttggaacccgaccaccgcgttgagtccgaaggtggtcttattgaaacatggaactctcaacaccctgagctgcaatgcgccggtgtcactgtttccaaacgcaccctcaaccgcaacggcctccacttgccatcttactcaccttatccccaaatgatcattgtcgttcaaggtgcgtaatattagtaagagtatttatcagcttaacgtgataacaatatagtaatatgaaatatttattaaatttttataattaatctctgctagaaaatttgattaatcattttagtagaatttgtttttctcaactaggttttaaacaccaca

SEQ ID NO: 1722 - DNA, 661 bp, Artificial; identical to SEQ ID NO: 1694
  Mutations within GlyA3B4 introduced by GmGlyA3B4_T02TALE nuclease

SEQ ID NO: 1723 - DNA, 471 bp, Artificial
  Mutations within GlyA3B4 introduced by GmGlyA3B4_T02TALE nuclease
gttcatgtacggttgcagatataaacgaagcatagcttatgtatgaggtgtaacaaaattggaaacaatagccatgcaaggtgaagaatgtcaccaactcagaaacccttcttcattgacgtgtccctcactcactctcctctcttcactataaatcgccactcttcgtgttctccacttcaccaactccttcaaacttattaacactttccttagttcaatatggggaagcccttcttcactctccctcaaccgcaacggcctccacttgccatcttactcaccttatccccaaatgatcattgtcgttcaaggtgcgtaatattagtaagaagtatttatcagcttaacgtgataacaataatagtaatatgaaatatttattaaattttttataattaatctctgctagaaaatttgattaatcatttttagtagaatttgtttttctcaactaggttttaaacacca

SEQ ID NO: 1724 - DNA, 520 bp, Artificial
  Mutations within GlyA3B4 introduced by GmGlyA3B4_T02TALE nuclease
gttcatgtacggttgcagatataaacgaagcatagcttatgtatgaggtgtaacaaaattggaaacaatagccatgcaaggtgaagaatgtcaccaactcagaaacccttcttcattgacgtgtccctcactcactctcctctcttcactataaatcgccactcttcgtgttctattacctccagcaagttcaacgagtgccaactcaacaacctcaacgcgttggaacccgaccaccgcgttgagtccgaaggtggtcttattgaaacatggaactctcaacaccctgagctgcaatgcgccggtgtcactgtttccaaacgcaccctcaaccgcaacggcctccacttgccatcttactcaccttatccccaaatgatcattgtcgttcaaggtgcgtaatattagtaagaagtatttatcagcttaacgtgataacaataatagtaatatgaaatatttattaaattttttataattaatctctgctagaaaatttgattaatcatttttagtagaa

SEQ ID NO: 1725 - DNA, 532 bp, Artificial; identical to SEQ ID NO: 1690
  Mutations within GlyA3B4 introduced by GmGlyA3B4_T02TALE nuclease

SEQ ID NO: 1726 - DNA, 464 bp, Artificial
  Mutations within GlyA3B4 introduced by GmGlyA3B4_T02TALE nuclease
gttcatgtacggttgcagatataaacgaagcatagcttatgtatgaggtgtaacaaaattggaaacaatagccatgcaaggtgaagaatgtcaccaactcagaaacccttcttcattgacgtgtccctcactcactctcctccagcaagttcaacgagtgccaactcaacaacctcaacgcgttggaacccgaccaccgcgttgagtccgaaggtggtcttattgaaacatggaactctcaacaccctgagctgcaatgcgccggtgtcactgtttccaaacgcaccctcaaccgcaacggcctccacttgccatcttactcaccttatccccaaatgatcattgtcgttcaaggtgcgtaatattagtaagaagtatttatcagcttaacgtgataacaataatagtaatatgaaatatttattaaaattttttataattaatctctgctagaaaatttgatt

SEQ ID NO: 1727 - DNA, 548 bp, Artificial
  Mutations within GlyA3B4 introduced by GmGlyA3B4_T02TALE nuclease
gttcatgtacggttgcagatataaacgaagcatagcttatgtatgaggtgtaacaaaattggaaacaatagccatgcaaggtgaagaatgtcaccaactcagaaacccttcttcattgacgtgtccctcactcactctcctctcttcactataaatcgccactcttcgtgttctccacttcaccaactccttcaaacttattacctccagcaagttcaacgagtaccaactcaacaacctcaacgcgttggaacccgaccaccgcgttgagtccgaaggtggtcttattgaaacatggaactctcaacaccctgagctgcaatgcgccggtgtcactgtttccaaacgcaccctcaaccgcaacggcctccacttgccatcttactcaccttatccccaaatgatcattgtcgttcaaggtgcgtaatattagtaagaagtatttatcagcttaacgtgataacaataatagtaatatgaaatatttattaaattttttataattaatctctgctagaaaatttgattaatcattttagtagaatttg

SEQ ID NO: 1728 - DNA, 425 bp, Artificial
  Mutations within GlyA3B4 introduced by GmGlyA3B4_T02TALE nuclease
gttcatgtacggttgcagatataaacgaagcatagcttatgtatgaggtgtaacaaaattggaaacaatagccatgcaaggtgaagaatgtcaccaactcagaaacccttcttcattgacgtgtccctcactcactctcctctcttcactataaatcgccactcttcgtgttctccacttcaccaactccttcaaacgcaccctcaaccgcaacggcctccacttgccatcttactcaccttatcccaaatgatcattgtcgttcaaggtgcgtaatattagtaagaagtatttatcagcttaacgtgataacaataatagtaatatgaaatatttattaaattttttataattaatctctgctagaaaatttgattaatcatttttagtagaatttgtttttctcaactaggttttaaacacca

SEQ ID NO: 1729 - DNA, 661 bp, Artificial
  Mutations within GlyA3B4 introduced by GmGlyA3B4_T02TALE nuclease
gttcatgtacggttgcagatataaacgaagcatagcttatgtatgaggtgtaacaaaattggaaacaatagccatgcaaggtgaagaatgtcaccaactcagaaacccttcttcattgacgtgtccctcactcactctcctctcttcactataaatcgccactcttcgtgttctccacttcaccaactccttcaaacttattaacactttccttagttcaatatggggaagcccttcttcactctctctctttcttccctttgcttgctactcttgtcgagtgcatgctacctccagcaagttcaacgagtgccaactcaacaacctcaacgcgttggaacccgaccaccgcgttgagtccgaaggtggtcttattgaaacatggaactctcaacaccctgagctgcaatgcgccggtgtcactgtttccaaacgcaccctcaaccgcaacggcctccacttgccatcttactcaccttatccccaaatgatcattgtcgttcaaggtgcgtaatattagtaagaagtatttatcagcttaacgtgataacaataatagtaatatgaaatatttattaaatttttataattaatctctgctagaaaatttgattaatcattttagtagaatttgttttctcaactaggttttaaaacacca

SEQ ID NO: 1730 - DNA, 482 bp, Artificial
  Mutations within GlyA3B4 introduced by GmGlyA3B4_T02TALE nuclease
gttcatgtacggttgcagatataaacgaagcatagcttatgtatgaggtgtaacaaaattggaaacaatagccatgcaaggtgaagaatgccaccgccattgctattacctccagcaagttcaacgagtgccaactcaacaacctcaacgcgttggaacccgaccaccgcgttgagtccgaaggtggtcttattgaaacatggaactctcaacaccctgagctgcaatgcgccggtgtcactgtttccaaacgcaccctcaaccgcaacggcctccacttgccatcttactcaccttatccccaaatgatcattgtcgttcaaggtgcgtaatattagtaagaagtatttatcagcttaacgtgataacaataatagtaatatgaaatatttattaaattttttataattaatctctgctagaaaatttgattaatcatttttagtagaatttgtttttctcaactaggtttttaaacacca

SEQ ID NO: 1731 - DNA, 577 bp, Artificial
  Mutations within GlyA3B4 introduced by GmGlyA3B4_T02TALE nuclease
gttcatgtacggttgcagatataaacgaagcatagcttatgtatgaggtgtaacaaaattggaaacaatagccatgcaaggtgaagaatgtcaccaactcagaaacccttcttcattgacgtgtccctcactcactctcctctcttcactataaatcgccactcttcgtgttctccacttcaccaactccttcaaacttattaacactccagcaagttcaacgagtgccaactcaacaacctcaacgcgttggaacccgaccaccgcgttgagtccgaaggtggtcttattgaaacatggaactctcaacaccctgagctgcaatgcgccggtgtcactgtttccaaacgcaccctcaaccgcaacggcctccacttgccatcttactcaccttatccccaaaatgatcattgtcgttcaaggtgcgtaatattagtaagaagtatttatcagcttaacgtgataacaataatagtaatatgaaatatttattaaattttttataattaatctctgctagaaaattgattaaatcatttttagtagaatttgtttttctcaactaggttttaaaaca

SEQ ID NO: 1732 - DNA, 636 bp, Artificial
  Mutations within GlyA3B4 introduced by GmGlyA3B4_T02TALE nuclease
  misc_feature (531): n is a or c or t or g
gttcatgtacggttgcagatataaacgaagcatagcttatgtatgaggtgtaacaaaattggaaacaatagccatgcaaggtgaagaatgtcaccaactcagaaacccttcttcattgacgtgtccctcactcactctcctctcttcactataaatcgccactcttcgtgttctccacttcaccaactccttcaaacttattaacactttccttagttcaatatggggaagcccttcttcactctctctctttcttccctttgcttgctactcttgtcgagtgcattgctattacctccagcaagttcaacgagtgccaactcaacaacctcaacgcgttggaacccgaccaccgcgttgagtccgaaggtggtcttattgaaacatggaactctcaacaccctgagctgcaatgcgccggtgtcactgtttccaaacgcaccctcaaccgcaacggcctccacttgccatcttactcaccttatccccaaatgatcattgtcgttcaaggtgcgtaatattagtaagagnatttatcagcttaacgtgataacaatatagtaatatgaaatatttattaaatttttataattaatctctgctagaaaatttgattaatcattttagtagaatttg

SEQ ID NO: 1733 - DNA, 426 bp, Artificial; identical to SEQ ID NO: 1684
  Mutations within GlyA3B4 introduced by GmGlyA3B4_T02TALE nuclease

SEQ ID NO: 1734 - DNA, 607 bp, Artificial
  Mutations within GlyA3B4 introduced by GmGlyA3B4_T02TALE nuclease
gttcatgtacggttgcagatataaacgaagcatagcttatgtatgaggtgtaacaaaattggaaacaatagccatgcaaggtgaagaatgtcaccaactcagaaacccttcttcattgacgtgtccctcactcactctcctctcttcactataaatcgccactcttcgtgttctccacttcaccaactccttcaaacttattaacactttccttagttcaatatggggaagcccttctccagcaagttcaacgagtgccaactcaacaacctcaacgcgttggaacccgaccaccgcgttgagtccgaaggtggtcttattgaaacatggaactctcaacaccctgagctgcaatgcgccggtgtcactgtttccaaacgcaccctcaaccgcaacggcctccacttgccatcttactcaccttatccccaaaatgatcattgtcgttcaaggtgcgtaatattagtaagaagtatttatcagcttaacgtgataacaatatagtaatatgaaatatttattaaattttttataattaatctctgctagaaaatttgattaatcatttttagtagaatttgtttttctcaactaggtttttaaaaca

SEQ ID NO: 1735 - DNA, 500 bp, Artificial
  Mutations within GlyA3B4 introduced by GmGlyA3B4_T02TALE nuclease
gttcatgtacggttgcagatataaacgaagcatagcttatgtatgaggtgtaacaaaattggaaacaatagccatgcaaggtgaagaatgtcaccaactcagaaacccttcttcattgacgtgtccctcactcactctcctctcttcactataaatcgccactcttcgtgttctccacttcaccaacctccagcaagttcaacgagtgccaactcaacaacctcaacgcgttggaacccgaccaccgcgttgagtccgaaggtggtcttattgaaacatggaactctcaacaccctgagctgcaatgcgccggtgtcactgtttccaaacgcaccctcaaccgcaacggcctccacttgccatcttactcaccttatccccaaatgatcattgtcgttcaaggtgcgtaatattagtaagaagtatttatcagcttaacgtgataacaataatagtaatatgaaatatttattaaattttttataattaatctctgctag

SEQ ID NO: 1736 - DNA, 523 bp, Artificial
  Mutations within GlyA3B4 introduced by GmGlyA3B4_T02TALE nuclease
gttcatgtacggttgcagatataaacgaagcatagcttatgtatgaggtgtaacaaaattggaaacaatagccatgcaaggtgaagaatgtcaccaactcagaaacccttcttcattgacgtgtccctcactcactctcctctcttcactataaatcgccactcttcgtgttctccacttcaccaactccttcaaacttattaacactttccttagttcaatatggggaagcccttcttcactctctctctttcttccctttgcttgctactcttgtcgagtgcataccctgagctgcaatgcgccggtgtcactgtttccaaacgcaccctcaaccgcaacggcctccacttgccatcttactcaccttatccccaaatgatcattgtcgttcaaggtgcgtaatattagtaagaagtatttatcagcttaacgtgataacaataatagtaatatgaaatatttattaaattttttataattaatctctgctagaaaatttgattaatcatttttagtagaa

SEQ ID NO: 1737 - DNA, 453 bp, Artificial
  Mutations within GlyA3B4 introduced by GmGlyA3B4_T02TALE nuclease
gttcatgtacggttgcagatataaacgaagcatagcttatgtatgaggtgtaacaaaattggaaacaattgctattacctccagcaagttcaacgagtgccaactcaacaacctcaacgcgttggaacccgaccaccgcgttgagtccgaaggtggtcttattgaaacatggaactctcaacaccctgagctgcaatgcgccggtgtcactgtttccaaacgcaccctcaaccgcaacggcctccacttgccatcttactcaccttatccccaaatgatcattgtcgttcaaggtgcgtaatattagtaagaagtatttatcagcttaacgtgataacaataatagtaatatgaaatatttattaaattttttataattaatctctgctagaaaatttgattaatcatttttagtagaatttgtttttctcaactaggtttttaaacaccaca

SEQ ID NO: 1738 - DNA, 587 bp, Artificial
  Mutations within GlyA3B4 introduced by GmGlyA3B4_T02TALE nuclease
gttcatgtacggttgcagatataaacgaagcatagcttatgtatgaggtgtaacaaaattggaaacaatagccatgcaaggtgaagaatgtcaccaactcagaaacccttcttcattgacgtgtccctcactcactctcctctcttcactataaatcgccactcttcgtgttctccacttcaccaactccttcaaacttattaacactttccttagttcaatatggggaagcccttcttcactctctctctttcttccctttgcttgctactcttgtcgagtgcatgtccgaaggtggtcttattgaaacatggaactctcaacaccctgagctgcaatgcgccggtgtcactgtttccaaacgcaccctcaaccgcaacggcctccacttgccatcttactcaccttatccccaaatgatcattgtcgttcaaggtgcgtaatattagtaagaagtatttatcagcttaacgtgataacaataatagtaatatgaaatatttattaaattttttataattaatctctgctagaaaatttgattaatcatttttagtagaatttgtttttctcaactaggttttaaa

SEQ ID NO: 1739 - DNA, 654 bp, Artificial
  Mutations within GlyA3B4 introduced by GmGlyA3B4_T02TALE nuclease
  misc_feature (532): n is a or c or t or g
gttcatgtacggttgcagatataaacgaagcatagcttatgtatgaggtgtaacaaaattggaaacaatagccatgcaaggtgaagaatgtcaccaactcagaaacccttcttcattgacgtgtccctcactcactctcctctcttcactataaatcgccactcttcgtgttctccacttcaccaactccttcaaacttattaacactttccttagttcaatatggggaagcccttcttcactctctctctttcttccctttgcttgctactcttgtcgagtgcatggagacggtccagcggctgttgccggtgctgtgccaggcccacggcttgaccccggagcaggtggtggccatcgccagccacgataccctgagctgcaatgcgccggtgtcactgtttccaaacgcaccctcaaccgcaacggcctccacttgccatcttactcaccttatccccaaatgatcattgtcgttcaaggtgcgtaatattagtaagaagtatttatcagcttaacgtgataacaatanagtaatatgaaatatttattaaattttttataattaatctctgctagaaaatttgattaatcatttttagtagaatttgtttttctcaactaggttttaaaacaccacactagactgcaagg

SEQ ID NO: 1740 - DNA, 623 bp, Artificial
  Mutations within GlyA3B4 introduced by GmGlyA3B4_T02TALE nuclease
gttcatgtacggttgcagatataaacgaagcatagcttatgtatgaggtgtaacaaaattggaaacaatagccatgcaaggtgaagaatgtcaccaactcagaaacccttcttcattgacgtgtccctcactcactctcctctcttcactataaatcgccactcttcgtgttctccacttcaccaactccttcaaacttattaacactttccttagttcaatatggggaagcccttcttcactctctctctttcttccagcaagttcaacgagtgccaactcaacaacctcaacgcgttggaacccgaccaccgcgttgagtccgaaggtggtcttattgaaacatggaactctcaacaccctgagctgcaatgcgccggtgtcactgtttccaaacgcaccctcaaccgcaacggcctccacttgccatcttactcaccttatccccaaatgatcattgtcgttcaaggtgcgtaatattagtaagaagtatttatcagcttaacgtgataacaataatagtaatatgaaatatttattaatttttataattaatctctgctagaaaatttgattaatcatttttagtagaatttgtttttctcaactaggtttttaaaaca

SEQ ID NO: 1741 - DNA, 508 bp, Artificial
  Mutations within GlyA3B4 introduced by GmGlyA3B4_T02TALE nuclease
gttcatgtacggttgcagatataaacgaagcatagcttatgtatgaggtgtaacaaaattggaaacaatagccatgcaaggtgaagaatgtcaccaactcagaaacccttcttcattgacgtgtccctcactcactctcctctcttcactacaaatcaccactccttcaacgagtgccaactcaacaacctcaacgcgttggaacccgaccaccgcgttgagtccgaaggtggtcttattgaaacatggaactctcaacaccctgagctgcaatgcgccggtgtcactgtttccaaacgcaccctcaaccgcaacggcctccacttgccatcttactcaccttatccccaaatgatcattgtcgttcaaggtgcgtaatattagtaagaagtattttatcagcttaacgtgataacaataatagtaatatgaaatatttattaaattttttataattaatctctgctagaaaatttgattaatcatttttagtagaatttgtttttct

SEQ ID NO: 1742 - DNA, 642 bp, Artificial
  Mutations within GlyA3B4 introduced by GmGlyA3B4_T02TALE nuclease
gttcatgtacggttgcagatataaacgaagcatagcttatgtatgaggtgtaacaaaattggaaacaatagccatgcaaggtgaagaatgtcaccaactcagaaacccttcttcattgacgtgtccctcactcactctcctctcttcactataaatcgccactcttcgtgttctccacttcaccaactccttcaaacttattaacactttccttagttcaatatggggaagcccttcttcactctctctctttcttccctttgcttgctactcttgtcgagtgcatgcaagttcaacgagtgccaactcaacaacctcaacgcgttggaacccgaccaccgcgttgagtccgaaggtggtcttattgaaacatggaactctcaacaccctgagctgcaatgcgccggtgtcactgtttccaaacgcacctcaaccgcaacggcctccacttgccatcttactcaccttatccccaaatgatcattgtcgttcaaggtgcgtaatattagtaagaagtatttatcagcttaacgtgataacaataatagtaatatgaaatatttattaaattttttataattaatctctgctagaaaatttgattaatctttttagtagaattgttttttctcaactaggttt

SEQ ID NO: 1743 - DNA, 535 bp, Artificial
  Mutations within GlyA3B4 introduced by GmGlyA3B4_T02TALE nuclease
gttcatgtacggttgcagatataaacgaagcatagcttatgtatgaggtgtaacaaaattggaaacaatagccatgcaaggtgaagaatgtcaccaactcagaaacccttcttcattgacgtgtccctcactcactctcctctcttcactataaatcgccactcttcgtgttctccacttcaccaattccttcaaacttattaacactttccttagttcaatatggggaagcccttcttcactctctctctttcttccctttgcttgctactcttgtcgagtgcataccctgagctgcaatgcgccggtgtcactgtttccaaacgcaccctcaaccgcaacggcctccacttgccatcttactcaccttatccccaaatgatcattgtcgttcaaggtgcgtaatattagtaagaagtatttatcagcttaacgtgataacaataatagtaatatgaaatatttattaaattttttataattaatctctgctagaaaatttgattaatcatttttagtagaatttgtttttctc

SEQ ID NO: 1744 - DNA, 417 bp, Artificial; identical to SEQ ID NO: 1677
  Mutations within GlyA3B4 introduced by GmGlyA3B4_T02TALE nuclease

SEQ ID NO: 1745 - DNA, 646 bp, Artificial; identical to SEQ ID NO: 793
  Mutations within GlyA3B4 introduced by GmGlyA3B4_T02TALE nuclease

SEQ ID NO: 1746 - DNA, 471 bp, Artificial; identical to SEQ ID NO: 1723
  Mutations within GlyA3B4 introduced by GmGlyA3B4_T02TALE nuclease

SEQ ID NO: 1747 - DNA, 662 bp, Artificial
  Mutations within GlyA3B4 introduced by GmGlyA3B4_T02TALE nuclease
gttcatgtacggttgcagatataaacgaagcatagcttatgtatgaggtgtaacaaaattggaaacaatagccatgcaaggtgaagaatgtcaccaactcagaaacccttcttcattgacgtgtccctcactcactctcctctcttcactataaatcgccactcttcgtgttctccacttcaccaactccttcaaacttattaacactttccttagttcaatatggggaagcccttcttcactctctctctttcttccctttgcttgctactcttgtcggagtgcatattacctccagcaagttcaacgagtgccaactcaacaacctcaacgcgttggaacccgaccaccgcgttgagtccgaaggtggtcttattgaaacatggaactctcaacaccctgagctgcaatgcgccggtgtcactgtttccaaacgcaccctcaaccgcaacggcctccacttgccatcttactcaccttatccccaaatgatcattgtcgttcaaggtgcgtaatattagtaagaagtatttatcagcttaacgtgataacaatatagtaatatgaaatatttattaaatttttataattaatctctgctagaaaatttgattaatcattttagtagaatttgttttctcaactaggtttttaaaacacca

SEQ ID NO: 1748 - DNA, 500 bp, Artificial; identical to SEQ ID NO: 1735
  Mutations within GlyA3B4 introduced by GmGlyA3B4_T02TALE nuclease

SEQ ID NO: 1749 - DNA, 548 bp, Artificial
  Mutations within GlyA3B4 introduced by GmGlyA3B4_T02TALE nuclease
gttcatgtacggttgcagatataaacgaagcatagcttatgtatgaggtgtaacaaaattggaaacaatagccatgcaaggtgaagaatgtcaccaactcagaaacccttcttcattgacgtgtccctcactcactctcctctcttcactataaatcgccactcttcgtgttctccacttcaccaactccttcaaacttattaacactttccttagttcaatatggggaagcccttcttcactctctctctttcttccctttgcttgctactcttgtcgagtgcatgcccgaccaccgcgttgagtccgaaggtggtcttattgaaacatggaactctcaacaccctgagctgcaatgcgccggtgtcactgtttccaaacgcacctcaacgcacgcctccacttgccatcttactcaccttatccccaaaatgatcattgtcgttcaaggtgcgtaatattagtaagaagtatttatcagcttaacgtgataacaataatagtaatatgaaatatttattaaattttttataattaatctctgctag

SEQ ID NO: 1750 - DNA, 492 bp, Artificial
  Mutations within GlyA3B4 introduced by GmGlyA3B4_T02TALE nuclease
gttcatgtacggttgcagatataaacgaagcatagcttatgtatgaggtgtaacaaaattggaaacaatagccatgcaaggtgaagaatgtcaccaactcagaaacccttcttcattgacgtgtccctcactcactctcctctcttcactataaatcgccactcttcgtgttctccacttcaccaactccttcaaacttattaacactttccttagttcaatatggggaagcccttcttcactctctctctttgagttgacaccctcaacgcgttggaacccgaccaccgcgttgagtccgaaggtggtcttattgaaacatggaactctcaacaccctgagctgcaatgcgccggtgtcactgtttccaaacgcaccctcaaccgcaacggcctccacttgccatcttactcacccttatccccaaaatgatcattgtcgttcaaggtgcgtaatattagtaagaagtatttatcagcttaacgtgataac

SEQ ID NO: 1751 - DNA, 428 bp, Artificial
  Mutations within GlyA3B4 introduced by GmGlyA3B4_T02TALE nuclease
gttcatgtacggttgcagatataaacgaagcatagcttatgtatgaggtgtaacaaaattggaaacaatacctccagcaagttcaacgagtgccaactcaacaacctcaacgcgttggaacccgaccaccgcgttgagtccgaaggtggtcttattgaaacatggaactctcaacaccctgagctgcaatgcgccggtgtcactgtttccaaacgcaccctcaaccgcaacggcctccacttgccatcttactcaccttatcccccaaatgatcattgtcgttcaaggtgcgtaatattagtaagaagtatttatcagcttaacgtgataacaataatagtaatatgaaatatttattaaattttttataattaatctctgctagaaaatttgattaatcatttttagtagaattttgtttttctcaa

SEQ ID NO: 1752 - DNA, 566 bp, Artificial
  Mutations within GlyA3B4 introduced by GmGlyA3B4_T02TALE nuclease
gttcatgtacggttgcagatataaacgaagcatagcttatgtatgaggtgtaacaaaattggaaacaatagccatgcaaggtgaagaatgtcaccaactcagaaacccttcttcattgacgtgtccctcactcactctcctctcttcactataaatcgccactcttcgtgttctccacttcaccaactccttcaaacttattaacactttccttagttcaatatggggaagcccttcttcactctctctctttctttccttagttcaatatggaacccgaccaccgcgttgagtccgaaggtggtcttattgaaacatggaactctcaacaccctgagctgcaatgcgccggtgtcactgtttccaaacgcaccctcaaccgcaacggcctccacttgccatcttactcaccttatccccaaatgatcattgtcgttcaaggtgcgtaatattagtaagaagtatttatcagcttaacgtgataacaataatagtaatatgaaatatttattaaatttttataattaatctctgctagaaaatttgattaatcatttttagtagaa

SEQ ID NO: 1753 - DNA, 533 bp, Artificial
  Mutations within GlyA3B4 introduced by GmGlyA3B4_T02TALE nuclease
gttcatgtacggttgcagatataaacgaagcatagcttatgtatgaggtgtaacaaaattggaaacaatagccatgcaaggtgaagaatgtcaccaactcagaaacccttcttcattgacgtgtccctcactcactctcctctcttcactataaatcgccactcttcgtgttctccacttcaccaactccttcaaacttattaacactttccttagttcaatatggggaagcccttcttcactctctctctttctttccttagttcaatatggaacccgaccaccgcgttgagtccgaaggtggtcttattgaaacatggaactctcaacaccctgagctgcaatgcgccggtgtcactgtttccaaacgcaccctcaaccgcaacggcctccacttgccatcttactcaccttatccccaaatgatcattgtcgttcaaggtgcgtaatattagtaagaagtatttatcagcttaacgtgataacaataatagtaatatgaaatatttattaaattttttataattaatctc

SEQ ID NO: 1754 - DNA, 650 bp, Artificial
  Mutations within GlyA3B4 introduced by GmGlyA3B4_T02TALE nuclease
gttcatgtacggttgcagatataaacgaagcatagcttatgtatgaggtgtaacaaaattggaaacaatagccatgcaaggtgaagaatgtcaccaactcagaaacccttcttcattgacgtgtccctcactcactctcctctcttcactataaatcgccactcttcgtgttctccacttcaccaactccttcaaacttattaacactttccttagttcaatatggggaagcccttcttcactctctctctttcttccctttgcttgctactcttgtcgagtgctattacctccagcaagttcaacgagtgccaactcaacaacctcaacgcgttggaacccgaccaccgcgttgagtccgaaggtggtcttattgaaacatggaactctcaacaccctgagctgcaatgcgccggtgtcactgtttccaaacgcaccctcaaccgcaacggcctccacttgccatcttactcaccttatccccaaatgatcattgtcgttcaaggtgcgtaatattagtaagaagtatttatcagcttaacgtgataacaatatagtaatatgaaatatttattaaatttttataattaatctctgctagaaaatttgattaatcattttagtagaatttgttttctcaactaggtttt

SEQ ID NO: 1755 - DNA, 653 bp, Artificial
  Mutations within GlyA3B4 introduced by GmGlyA3B4_T02TALE nuclease
gttcatgtacggttgcagatataaacgaagcatagcttatgtatgaggtgtaacaaaattggaaacaatagccatgcaaggtgaagaatgtcaccaactcagaaacccttcttcattgacgtgtccctcactcactctcctctcttcactataaatcgccactcttcgtgttctccacttcaccaactccttcaaacttattaacactttccttagttcaatatggggaagcccttcttcactctctctctttcttccctttgcttgctattacctccagcaagttcaacgagtgccaactcaacaacctcaacgcgttggaacccgaccaccgcgttgagtccgaaggtggtcttattgaaacatggaactctcaacacccctgagctgcaatgcgccggtgtcactgtttccaaacgcaccctcaaccgcaacggcctccacttgccatcttactcaccttatccccaaatgatcattgtcgttcaaggtgcgtaatattagtaagaagtatttatcagcttaacgtgataacaataatagtaatatgaaatattttattaaattttttaataattaatctctgctagaaaatttgattaatcatttttagtagaatttgttttttctcaactaggttttaaaacaccaca

SEQ ID NO: 1756 - DNA, 632 bp, Artificial
  Mutations within GlyA3B4 introduced by GmGlyA3B4_T02TALE nuclease
gttcatgtacggttgcagatataaacgaagcatagcttatgtatgaggtgtaacaaaattggaaacaatagccatgcaaggtgaagaatgtcaccaactcagaaacccttcttcattgacgtgtccctcactcactctcctctcttcactataaatcgccactcttcgtgttctccacttcaccaactccttcaaacttattaacactttccttagttcaatatggggaagcccttcttcactctctctctttcttccctttgcttgctactcttgtcgagtgcattacctccagcaagttcaacgagtgccaactcaacaacctcaacgcgttggaacccgaccaccgcgttgagtccgaaggtggtcttattgaaacatggaactctcaacaccctgagctgcaatgcgccggtgtcactgtttccaaacgcaccctcaaccgcaacggcctccacttgccatcttactcaccttatccccaaatgatcattgtcgttcaaggtgcgtaatattagtaagaagtatttatcagcttaacgtgataacaataatagtaatatgaaatatttattaaatttttataattaatctctgctagaaaatttgattaatcattttagtagaatttg

SEQ ID NO: 1757 - DNA, 622 bp, Artificial
  Mutations within GlyA3B4 introduced by GmGlyA3B4_T02TALE nuclease
gttcatgtacggttgcagatataaacgaagcatagcttatgtatgaggtgtaacaaaattggaaacaatagccatgcaaggtgaagaatgtcaccaactcagaaacccttcttcattgacgtgtccctcactcactctcctctcttcactataaatcgccactcttcgtgttctccacttcaccaactccttcaaacttattaacactttccttagttcaatatggggaagcccttcttcactataaacttgcttgctattacctccagcaagttcaacgagtgccaactcaacaacctcaacgcgttggaacccgaccaccgcgttgagtccgaaggtggtcttattgaaacatggaactctcaacaccctgagctgcaatgcgccggtgtcactgtttccaaacgcaccctcaaccgcaacggcctccacttgccatcttactcaccttatccccaaatgatcattgtcgttcaaggtgcgtaatattagtaagaagtatttatcagcttaacgtgataacaataatagtaatatgaaatatttattaattttttataattaatctctgctagaaaatttgattaatcatttttagtagaatttgtttttctcaactagg

SEQ ID NO: 1758 - DNA, 666 bp, Artificial
  Mutations within GlyA3B4 introduced by GmGlyA3B4_T02TALE nuclease
gttcatgtacggttgcagatataaacgaagcatagcttatgtatgaggtgtaacaaaattggaaacaatagccatgcaaggtgaagaatgtcaccaactcagaaacccttcttcattgacgtgtccctcactcactctcctctcttcactataaatcgccactcttcgtgttctccacttcaccaactccttcaaacttattaacactttccttagttcaatatggggaagcccttcttcactctctctctttcttccctttgcttgctactcttgtcgagtgcatgctattacctccagcaagttcaacgagtgccaactcaacaacctcaacgcgttggaacccgaccaccgcgttgagtccgaaggtggtcttattgaaacatggaactctcaacaccctgagctgcaatgcgccggtgtcactgtttccaaacgcaccctcaaccgcaacggcctccacttgccatcttactcaccttatccccaaatgatcattgtcgttcaaggtgcgtaatattagtaagagtatttatcagcttaacgtgataacaataatagtaatatgaaatatttattaaatttttataattaatctctgctagaaaatttgattaatcattttagtagaatttgttttctcaactaggtttttaaaacaccaca

SEQ ID NO: 1759 - DNA, 643 bp, Artificial
  Mutations within GlyA3B4 introduced by GmGlyA3B4_T02TALE nuclease
gttcatgtacggttgcagatataaacgaagcatagcttatgtatgaggtgtaacaaaattggaaacaatagccatgcaaggtgaagaatgtcaccaactcagaaacccttcttcattgacgtgtccctcactcactctcctctcttcactataaatcgccactcttcgtgttctccacttcaccaactccttcaaacttattaacactttccttagttcaatatggggaagcccttcttcactctctctctttcttcccttgctattacctccagcaagttcaacgagtgccaactcaacaacctcaacgcgttggaacccgaccaccgcgttgagtccgaaggtggtcttattgaaacatggaactctcaacaccctgagctgcaatgcgccggtgtcactgtttccaaacgcaccctcaaccgcaacggcctccacttgccatcttactcaccttatccccaaatgatcattgtcgttcaaggtgcgtaatattagtaagaagtatttatcagcttaacgtgataacaataatagtaatatgaaatatttattaaattttttataattaatctctgctagaaaatttgattaatcatttttagtagaatttgttttttctcaactaggttttaaacaccac

SEQ ID NO: 1760 - DNA, 651 bp, Artificial
  Mutations within GlyA3B4 introduced by GmGlyA3B4_T02TALE nuclease
gttcatgtacggttgcagatataaacgaagcatagcttatgtatgaggtgtaacaaaattggaaacaatagccatgcaaggtgaagaatgtcaccaactcagaaacccttcttcattgacgtgtccctcactcactctcctctcttcactataaatcgccactcttcgtgttctccacttcaccaactccttcaaacttattaacactttccttagttcaatatggggaagcccttcttcactctctctctttcttccctttgcttgctactcttgtcgagtgcatgattacctccagcaagttcaacgagtgccaactcaacaacctcaacgcgttggaacccgaccaccgcgttgagtccgaaggtggtcttattgaaacatggaactctcaacaccctgagctgcaatgcgccggtgtcactgtttccaaacgcaccctcaaccgcaacggcctccacttgccatcttactcaccttatccccaaatgatcattgtcgttcaaggtgcgtaatattagtaagaagtatttatcagcttaacgtgatacaatatagtaatatgaaatatttattaaatttttataattaatctctgctagaaaatttgattaatcattttagtagaatttgttttctcaactaggtttt

SEQ ID NO: 1761 - DNA, 652 bp, Artificial
  Mutations within GlyA3B4 introduced by GmGlyA3B4_T02TALE nuclease
gttcatgtacggttgcagatataaacgaagcatagcttatgtatgaggtgtaacaaaattggaaacaatagccatgcaaggtgaagaatgtcaccaactcagaaacccttcttcattgacgtgtccctcactcactctcctctcttcactataaatcgccactcttcgtgttctccacttcaccaactccttcaaacttattaacactttccttagttcaatatggggaagcccttcttcactctctctctttcttccctttgcttgctactcttgtcgagtgcatattacctccagcaagttcaacgagtgccaactcaacaacctcaacgcgttggaacccgaccaccgcgttgagtccgaaggtggtcttattgaaacatggaactctcaacaccctgagctgcaatgcgccggtgtcactgtttccaaacgcaccctcaaccgcaacggcctccacttgccatcttactcaccttatccccaaatgatcattgtcgttcaaggtgcgtaatattagtaagaagtatttatcagcttaacgtgataacaataatagtaatatgaaatatttattaaatttttataattaatctctgctagaaaatttgattaatcattttagtagaatttgttttctcaactaggtttt

SEQ ID NO: 1762 - DNA, 667 bp, Artificial
  Mutations within GlyA3B4 introduced by GmGlyA3B4_T02TALE nuclease
gttcatgtacggttgcagatataaacgaagcatagcttatgtatgaggtgtaacaaaattggaaacaatagccatgcaaggtgaagaatgtcaccaactcagaaacccttcttcattgacgtgtccctcactcactctcctctcttcactataaatcgccactcttcgtgttctccacttcaccaactccttcaaacttattaacactttccttagttcaatatggggaagcccttcttcactctctctctttcttccctttgcttgctactcttgtcgagtgcattgctattacctccagcaagttcaacgagtgccaactcaacaacctcaacgcgttggaacccgaccaccgcgttgagtccgaaggtggtcttattgaaacatggaactctcaacaccctgagctgcaatgcgccggtgtcactgtttccaaacgcaccctcaaccgcaacggcctccacttgccatcttactcaccttatccccaaatgatcattgtcgttcaaggtgcgtaatattagtaagaagtatttatcagcttaacgtgataacaataatagtaatatgaaatatttattaaatttttataattaatctctgctagaaaatttgattaatcattttagtagaatttgttttctcaactaggttttaaaacaccaca

SEQ ID NO: 1763 - DNA, 660 bp, Artificial
  Mutations within GlyA3B4 introduced by GmGlyA3B4_T02TALE nuclease
gttcatgtacggttgcagatataaacgaagcatagcttatgtatgaggtgtaacaaaattggaaacaatagccatgcaaggtgaagaatgtcaccaactcagaaacccttcttcattgacgtgtccctcactcactctcctctcttcactataaatcgccactcttcgtgttctccacttcaccaactccttcaaacttattaacactttccttagttcaatatggggaagcccttcttcactctctctctttcttccctttgcttgctactcttgtcgagtgcatttacctccagcaagttcaacgagtgccaactcaacaacctcaacgcgttggaacccgaccaccgcgttgagtccgaaggtggtcttattgaaacatggaactctcaacaccctgagctgcaatgcgccggtgtcactgtttccaaacgcaccctcaaccgcaacggcctccacttgccatcttactcaccttatccccaaatgatcattgtcgttcaaggtgcgtaatattagtaagaagtatttatcagcttaacgtgataacaataatagtaatatgaaatatttattaaatttttataattaatctctgctagaaaatttgattaatcattttagtagaatttgttttctcaactaggttttaaaacacca

SEQ ID NO: 1764 - DNA, 513 bp, Artificial
  Mutations within GlyA3B4 introduced by GmGlyA3B4_T02TALE nuclease
gttcatgtacggttgcagatataaacgaagcatagcttatgtatgaggtgtaacaaaattggaaacaatagccatgcaaggtgaagaatgtcaccaactcagaaacccttcttcattgacgtgtccctcactcactctcctctcttcactataaatcgccactcttcgtgttctccacttcaccaactccttcaaacttattaacactttccttagttcaatatggggaagcccttcttcactctctctctttcttccctttgcgggtccgaaggtggtcttattgaaacatggaactctcaacaccctgagctgcaatgcgccggtgtcactgtttccaaacgcaccctcaaccgcaacggcctccacttgccatcttactcaccttatccccaaatgatcattgtcgttcaaggtgcgtaatattagtaagaagtatttatcagcttaacgtgataacaataatagtaatatgaaatatttattaaattttttataattaatctctgctag

SEQ ID NO: 1765 - DNA, 663 bp, Artificial
  Mutations within GlyA3B4 introduced by GmGlyA3B4_T02TALE nuclease
gttcatgtacggttgcagatataaacgaagcatagcttatgtatgaggtgtaacaaaattggaaacaatagccatgcaaggtgaagaatgtcaccaactcagaaacccttcttcattgacgtgtccctcactcactctcctctcttcactataaatcgccactcttcgtgttctccacttcaccaactccttcaaacttattaacactttccttagttcaatatggggaagcccttcttcactctctctctttcttccctttgcttgctactcttgtcgagtgcattctattacctccagcaagttcaacgagtgccaactcaacaacctcaacgcgttggaacccgaccaccgcgttgagtccgaaggtggtcttattgaaacatggaactctcaacaccctgagctgcaatgcgccggtgtcactgtttccaaacgcaccctcaaccgcaacggcctccacttgccatcttactcaccttatccccaaatgatcattgtcgttcaaggtgcgtaatattagtaagaagtatttatcagcttaacgtgataacaatatagtaatatgaaatatttattaaatttttataattaatctctgctagaaaatttgattaatcatttatgtagaatttgttttctcaactaggttttaaaacacca

SEQ ID NO: 1766 - DNA, 566 bp, Artificial
  Mutations within GlyA3B4 introduced by GmGlyA3B4_T02TALE nuclease
gttcatgtacggttgcagatataaacgaagcatagcttatgtatgaggtgtaacaaaattggaaacaatagccatgcaaggtgaagaatgtcaccaactcagaaacccttcttcattgacgtgtccctcactcactctcctctcttcactataaatcgccactcttcgtgttctccacttcaccaactccttcaaacttattaacactttccttagttcaacgagtgccaactcaacaacctcaacgcgttggaacccgaccaccgcgttgagtccgaaggtggtcttattgaaacatggaactctcaacaccctgagctgcaatgcgccggtgtcactgtttccaaacgcaccctcaaccgcaacggcctccacttgccatcttactcaccttatccccaaaatgatcattgtcgttcaaggtgcgtaatattagtaagaagtatttatcagcttaacgtgataacaataatagtaatatgaaatatttattaaattttttataattaatctctgctagaaaatttgattaatcattttagtagaatttgtttttctcaactagg

SEQ ID NO: 1767 - DNA, 418 bp, Artificial
  Mutations within GlyA3B4 introduced by GmGlyA3B4_T02TALE nuclease
gttcatgtacggttgcagatataaacgaagcatagcttatgtatgaggtgtaacaaaattggaaacaatagccatgcaaggtgaagaatgtcaccaactcagaaacccttcttcattgacgtgtccctcactcactctcctctcttcactataaatcgccactcttcgtgttctccacttcaccaactccttcaaacgcaccctcaaccgcaacggcctccacttgccatcttactcaccttatccccaaatgatcattgtcgttcaaggtgcgtaatattagtaagaagtatttatcagcttaacgtgataacaataatagtaatatgaaatatttattaaattttttataattaatctctgctagaaaatttgattaatcatttttagtagaatttgtttttctcaactaggtttt

SEQ ID NO: 1768 - DNA, 649 bp, Artificial
  Mutations within GlyA3B4 introduced by GmGlyA3B4_T02TALE nuclease
gttcatgtacggttgcagatataaacgaagcatagcttatgtatgaggtgtaacaaaattggaaacaatagccatgcaaggtgaagaatgtcaccaactcagaaacccttcttcattgacgtgtccctcactcactctcctctcttcactataaatcgccactcttcgtgttctccacttcaccaactccttcaaacttattaacactttccttagttcaatatggggaagcccttcttcactctctctctttcttccctttgcttgcttcacctccagcaagttcaacgagtgccaactcaacaacctcaacgcgttggaacccgaccaccgcgttgagtccgaaggtggtcttattgaaacatggaactctcaacaccctgagctgcaatgcgccggtgtcactgtttccaaacgcaccctcaaccgcaacggcctccacttgccatcttactcaccttatccccaaatgatcattgtcgttcaaggtgcgtaaatattagtaagaagtatttatcagcttaacgtgataacaataatagtaatatgaaatatttattaaattttttataaattaatctctgctagaaaatttgattaatcatttttagtagaatttgttttttctcaactaggttttaaaacacca

SEQ ID NO: 1769 - DNA, 417 bp, Artificial; identical to SEQ ID NO: 1677
  Mutations within GlyA3B4 introduced by GmGlyA3B4_T02TALE nuclease

SEQ ID NO: 1770 - DNA, 470 bp, Artificial
  Mutations within GlyA3B4 introduced by GmGlyA3B4_T02TALE nuclease
gttcatgtacggttgcagatataacgaagcatagcttatgtatgaggtgtaacaaaattggaaacaatagccatgcaaggtgaagaatgtcaccaactcagaaacccttcttcattgacgtgtccctcactcactctcctctcttcactataaatcgccactcttcgtgttctccacttcaccaactccttcaaacttattaacactttccttagttcaatatggggaagcccttcttcactctccctcaaccgcaacggcctccacttgccatcttactcaccttatccccaaatgatcattgtcgttcaaggtgcgtaatattagtaagaagtatttatcagcttaacgtgataacaataatagtaatatgaaatatttattaaattttttataattaatctctgctagaaaatttgattaatcatttttagtagaatttgtttttctcaactaggttttaaacacca

SEQ ID NO: 1771 - DNA, 482 bp, Artificial
  Mutations within GlyA3B4 introduced by GmGlyA3B4_T02TALE nuclease
gttcatgtacggttgcagatataaacgaagcatagcttatgtatgaggtgtaacaaaattggaaacaatagccatgcaaggtgaagaatgccaccgccattgctattacctccagcaagttcaacgagtgccaactcaacaacctcaacgcgttggaacccgaccaccgcgttgagtccgaaggtggtcttattgaaacatggaactctcaacaccctgagctgcaatgcgccggtgtcactgtttccaaacgcaccctcaaccgcaacggcctccacttgccatcttactcaccttatcccccaaatgatcattgtcgttcaaggtgcgtaatattagtaagaagtatttatcagcttaacgtgataacaataatagtaatatgaaatatttattaaattttttataattaatctctgctagaaaattgattaatcatttttagtagaatttgtttttctcaactaggtttttaaacacca

SEQ ID NO: 1772 - DNA, 597 bp, Artificial
  Mutations within GlyA3B4 introduced by GmGlyA3B4_T02TALE nuclease
gttcatgtacggttgcagatataaacgaagcatagcttatgtatgaggtgtaacaaaattggaaacaatagccatgcaaggtgaagaatgtcaccaactcagaaacccttcttcattgacgtgtccctcactcactctcctctcttcactataaatcgccactcttcgtgttctccacttcaccaactccttcaaacttattaacactttccttagttcaatatggggaagcccttcttcactctctctctttcttccctttgcttgctactcttgtcgagtacctccagcaagttcaacgagtgccaactcaacaacctcaacgcgttggaacccgaccaccgcgttgagtccgaaggtggtcttattgaaacatggaactctcaacaccctgagctgcaatgcgccggtgtcactgtttccaaacgcaccctcaaccgcaacggcctccacttgccatcttactcaccttatccccaaatgatcattgtcgttcaaggtgcgtaatattagtaagaagtatttatcagcttaacgtgataacaataatagtaatatgaaatatttattaaattttttataattaatctctgctag

SEQ ID NO: 1773 - DNA, 537 bp, Artificial
  Mutations within GlyA3B4 introduced by GmGlyA3B4_T02TALE nuclease
gttcatgtacggttgcagatataaacgaagcatagcttatgtatgaggtgtaacaaaattggaaacaatagccatgcaaggtgaagaatgtcaccaactcagaaacccttcttcattgacgtgtccctcactcactctcctctcttcactataaatcgccactcttcgtgttctccacttcaccaacctccagcaagttcaacgagtgccaactcaacaacctcaacgcgttggaacccgaccaccgcgttgagtccgaaggtggtcttattgaaacatggaactctcaacaccctgagctgcaatgcgccggtgtcactgtttccaaacgcaccctcaaccgcaacggcctccacttgccatcttactcaccttatccccaaatgatcattgtcgttcaaggtgcgtaatattagtaagaagtatttatcagcttaacgtgataacaataatagtaatatgaaatatttattaaattttttataattaatctctgctagaaaattgattaatcatttttagtagaatttgtttttc

SEQ ID NO: 1774 - DNA, 509 bp, Artificial
  Mutations within GlyA3B4 introduced by GmGlyA3B4_T02TALE nuclease
gttcatgtacggttgcagatataaacgaagcatagcttatgtatgaggtgtaacaaaattggaaacaatagccatgcaaggtgaagaatgtcaccaactcagaaacccttcttcattgacgtgtccctcactcactctcctccagcaagttcaacgagtgccaactcaacaacctcaacgcgttggaacccgaccaccgcgttgagtccgaaggtggtcttattgaaacatggaactctcaacaccctgagctgcaatgcgccggtgtcactgtttccaaacgcaccctcaaccgcaacggcctccacttgccatcttactcaccttatccccaaatgatcattgtcgttcaaggtgcgtaatattagtaagaagtatttatcagcttaacgtgataacaataatagtaatatgaaatatttattaaaattttttataattaatctctgctagaaaatttgattaatcatttttagtagaatttgtttttctcaactaggttttaaaca

SEQ ID NO: 1775 - DNA, 635 bp, Artificial
  Mutations within GlyA3B4 introduced by GmGlyA3B4_T02TALE nuclease
gttcatgtacggttgcagatataaacgaagcatagcttatgtatgaggtgtaacaaaattggaaacaatagccatgcaaggtgaagaatgtcaccaactcagaaacccttcttcattgacgtgtccctcactcactctcctctcttcactataaatcgccactcttcgtgttctccacttcaccaactccttcaaacttattaacactttccttagttcaatatggggaagcccttcttcactctctctctttcttccctttgcttgctactcttgtcgagtgcatgctattacctccagcaagttcaacgagtgccaactcaacaacctcaacgcgttggaacccgaccaccgcgttgagtccgaaggtggtcttattgaaacatggaactctcaacaccctgagctgcaatgcgccggtgtcactgtttccaaacgcaccctcaaccgcaacggcctccacttgccatcttactcaccttatccccaaatgatcattgtcgttcaaggtgcgtaatattagtaagagtatttatcagcttaacgtgataacaatatagtaatatgaaatatttattaaatttttataattaatctctgctagaaaatttgattaatcattttagtagaatttg

SEQ ID NO: 1776 - DNA, 482 bp, Artificial
  Mutations within GlyA3B4 introduced by GmGlyA3B4_T02TALE nuclease
gttcatgtacggttgcagatataaacgaagcatagcttatgtatgaggtgtaacaaaattggaaacaatagccatgcaaggtgaagaatgtcaccaactcagaaacccttcttcattgacgtgtccctcactcactctcctctcttcactataaatcgccactcttcgtgttctccacttcaccaactccttcaaacttattaacactttccttagttcaacgagtgccaactcaacaacctcaacgcgttggaacccgaccaccgcgttgagtccgaaggtggtcttattgaaacatggaactctcaacaccctgagctgcaatgcgccggtgtcactgtttccaaacgcaccctcaaccgcaacggcctccacttgccatcttactcaccttatccccaaaatgatcattgtcgttcaaggtgcgtaatattagtaagaagtatttatcagcttaacgtgataacaataatagtaatatg

SEQ ID NO: 1777 - DNA, 513 bp, Artificial
  Mutations within GlyA3B4 introduced by GmGlyA3B4_T02TALE nuclease
gttcatgtacggttgcagatataaacgaagcatagcttatgtatgaggtgtaacaaaattggaaacaatagccatgcaaggtgaagaatgtcaccaactcagaaacccttcttcattgacgtgtccctcactcactctcctctcttcactataaatcgccactcttcgtgttctccacttcaccaactccttcaaacttattaacactttccttagttcaatatggggaagcccttcttcactctcaacaccctgagctgcaatgcgccggtgtcactgtttccaaacgcaccctcaaccgcaacggcctccacttgccatcttactcaccttatccccaaatgatcattgtcgttcaaggtgcgtaatattagtaagaagtatttatcagcttaacgtgataacaataatagtaatatgaaatatttattaaattttttataattaatctctgctagaaaatttgattaatcatttttagtagaatttgtttttctcaactaggtttaaaca

SEQ ID NO: 1778 - DNA, 504 bp, Artificial
  Mutations within GlyA3B4 introduced by GmGlyA3B4_T02TALE nuclease
gttcatgtacggttgcagatataaacgaagcatagcttatgtatgaggtgtaacaaaattggaaacaatagccatgcaaggtgaagaatgtcaccaactcagaaacccttcttcattgacgtgtccctcactcactctcctctcttcactataaatcgccactcttcgtgttctccacttcaccaactccttcaaacttattaacactttccttagttcaacgagtgccaactcaacaacctcaacgcgttggaacccgaccaccgcgttgagtccgaaggtggtcttattgaaacatggaactctcaacaccctgagctgcaatgcgccggtgtcactgtttccaaacgcaccctcaaccgcaacggcctccacttgccatcttactcaccttatccccaaaatgatcattgtcgttcaaggtgcgtaatattagtaagaagtatttatcagcttaacgtgataacaataatagtaatatgaaatatttattaaattttttat

SEQ ID NO: 1779 - DNA, 653 bp, Artificial
  Mutations within GlyA3B4 introduced by GmGlyA3B4_T02TALE nuclease
gttcatgtacggttgcagatataaacgaagcatagcttatgtatgaggtgtaacaaaattggaaacaatagccatgcaaggtgaagaatgtcaccaactcagaaacccttcttcattgacgtgtccctcactcactctcctctcttcactataaatcgccactcttcgtgttctccacttcaccaactccttcaaacttattaacactttccttagttcaatatggggaagcccttcttcactctctctctttcttccctttgcttgctactcttgtcgagtgcatacctccagcaagttcaacgagtgccaactcaacaacctcaacgcgttggaacccgaccaccgcgttgagtccgaaggtggtcttattgaaacatggaactctcaacaccctgagctgcaatgcgccggtgtcactgtttccaaacgcaccctcaaccgcaacggcctccacttgccatcttactcaccttatccccaaatgatcattgtcgttcaaggtgcgtaatattagtaagaagtatttatcagcttaacgtgataacaataatagtaatatgaaatatttattaaatttttataattaatctctgctagaaaatttgattaatcattttagtagaatttgttttctcaactaggttttaaaa

SEQ ID NO: 1780 - DNA, 666 bp, Artificial
  Mutations within GlyA3B4 introduced by GmGlyA3B4_T02TALE nuclease
gttcatgtacggttgcagatataaacgaagcatagcttatgtatgaggtgtaacaaaattggaaacaatagccatgcaaggtgaagaatgtcaccaactcagaaacccttcttcattgacgtgtccctcactcactctcctctcttcactataaatcgccactcttcgtgttctccacttcaccaactccttcaaacttattaacactttccttagttcaatatggggaagcccttcttcactctctctctttcttccctttgcttgctactcttgtcgagtgcgctattacctccagcaagttcaacgagtgccaactcaacaacctcaacgcgttggaacccgaccaccgcgttgagtccgaaggtggtcttattgaaacatggaactctcaacaccctgagctgcaatgcgccggtgtcactgtttccaaacgcaccctcaaccgcaacggcctccacttgccatcttactcaccttatccccaaatgatcattgtcgttcaaggtgcgtaatattagtaagaagtatttatcagcttaacgtgataacaataatagtaatatgaaatatttattaaatttttataattaatctctgctagaaaatttgattaatcattttagtagaatttgtttttctcaactaggtttttaaaacaccaca

SEQ ID NO: 1781 - DNA, 656 bp, Artificial
  Mutations within GlyA3B4 introduced by GmGlyA3B4_T02TALE nuclease
gttcatgtacggttgcagatataaacgaagcatagcttatgtatgaggtgtaacaaaattggaaacaatagccatgcaaggtgaagaatgtcaccaactcagaaacccttcttcattgacgtgtccctcactcactctcctctcttcactataaatcgccactcttcgtgttctccacttcaccaactccttcaaacttattaacactttccttagttcaatatggggaagcccttcttcactctctctctttcttccctttgcttgctactcttgtcgagacctccagcaagttcaacgagtgccaactcaacaacctcaacgcgttggaacccgaccaccgcgttgagtccgaaggtggtcttattgaaacatggaactctcaacaccctgagctgcaatgcgccggtgtcactgtttccaaacgcaccctcaaccgcaacggcctccacttgccatcttactcaccttatccccaaatgatcattgtcgttcaaggtgcgtaaatattagtaagaagtatttatcagcttaacgtgataacaataatagtaatatgaaatatttattaaattttttataattaatctctgctagaaaatttgattaatctttttagtagaattgtttttctcaactaggtttaaaacaccaca

SEQ ID NO: 1782 - DNA, 657 bp, Artificial
  Mutations within GlyA3B4 introduced by GmGlyA3B4_T02TALE nuclease
gttcatgtacggttgcagatataaacgaagcatagcttatgtatgaggtgtaacaaaattggaaacaatagccatgcaaggtgaagaatgtcaccaactcagaaaccccttcttcattgacgtgtccctcactcactctcctctcttcactataaatcgccactcttcgtgttctccacttcaccaactccttcaaacttattaacactttccttagttcaatatggggaagcccttcttcactctctctctttcttccctttgcttgctactcttgtcgagtgctattacctccagcaagttcaacgagtgccaactcaacaacctcaacgcgttggaacccgaccaccgcgttgagtccgaaggtggtcttattgaaacatggaactctcaacaccctgagctgcaatgcgccggtgtcactgtttccaaacgcaccctcaaccgcaacggcctccacttgccatcttactcaccttatccccaaatgatcattgtcgttcaaggtgcgtaatattagtaagaagtatttatcagcttaacgtgataacaataatagtaatatgaaatatttattaaatttttataattaatctctgctagaaaatttgattaatcattttagtagaatttgtttttctcaactaggttttaaaa

SEQ ID NO: 1783 - DNA, 660 bp, Artificial
  Mutations within GlyA3B4 introduced by GmGlyA3B4_T02TALE nuclease
gttcatgtacggttgcagatataaacgaagcatagcttatgtatgaggtgtaacaaaattggaaacaatagccatgcaaggtgaagaatgtcaccaactcagaaacccttcttcattgacgtgtccctcactcactctcctctcttcactataaatcgccactcttcgtgttctccacttcaccaactccttcaaacttattaacactttccttagttcaatatggggaagcccttcttcactctctctctttcttccctttgcttgctactcttgtcgagtgcatacctccagcaagttcaacgagtgccaactcaacaacctcaacgcgttggaacccgaccaccgcgttgagtccgaaggtggtcttattgaaacatggaactctcaacaccctgagctgcaatgcgccggtgtcactgtttccaaacgcaccctcaaccgcaacggcctccacttgccatcttactcaccttatccccaaatgatcattgtcgttcaaggtgcgtaatattagtaagaagtatttatcagcttaacgtgataacaataatagtaatatgaaatatttattaaatttttataattaatctctgctagaaaatttgattaatcattttagtagaatttgtttttctcaactaggtttttaaaacacca

SEQ ID NO: 1784 - DNA, 634 bp, Artificial
  Mutations within GlyA3B4 introduced by GmGlyA3B4_T02TALE nuclease
gttcatgtacggttgcagatataaacgaagcatagcttatgtatgaggtgtaacaaaattggaaacaatagccatgcaaggtgaagaatgtcaccaactcagaaacccttcttcattgacgtgtccctcactcactctcctctcttcactataaatcgccactcttcgtgttctccacttcaccaacctccttcaaacttattaacactttccttagttcaatatggggaagcccttcttcactctctctctttcttccctttgcttgctattacctccagcaagttcaacgagtgccaactcaacaacctcaacgcgttggaacccgaccaccgcgttgagtccgaaggtggtcttattgaaacatggaactctcaacaccctgagctgcaatgcgccggtgtcactgtttccaaacgcaccctcaaccgcaacggcctccacttgccatcttactcaccttatccccaaatgatcattgtcgttcaaggtgcgtaatattagtaagaagtatttatcagctttaacgtgataacaataatagtaatatgaaatatttattaaattttttataattaatctctgctagaaaattgattaatcatttttagtagaatttgttttttctcaacta

SEQ ID NO: 1785 - DNA, 578 bp, Artificial
  Mutations within GlyA3B4 introduced by GmGlyA3B4_T02TALE nuclease
gttcatgtacggttgcagatataaacgaagcatagcttatgtatgaggtgtaacaaaattggaaacaatagccatgcaaggtgaagaatgtcaccaactcagaaacccttcttcattgacgtgtccctcactcactctcctctcttcactataaatcgccactcttcgtgttctccacttcaccaactccttcaaacttattaacactttccttagttcaatatggggaagcccttcttcactctctctctttcaacgagtgccaactcaacaacctcaacgcgttggaacccgaccaccgcgttgagtccgaaggtggtcttattgaaacatggaactctcaacaccctgagctgcaatgcgccggtgtcactgtttccaaacgcaccctcaaccgcaacggcctccacttgccatcttactcaccttatccccaaatgatcattgtcgttcaaggtgcgtaatattagtaagaagtatttatcagcttaacgtgataacaataatagtaatatgaaatatttattaatttttataattaatctctgctagaaaatttgattaatcatttttagtag

SEQ ID NO: 1786 - DNA, 655 bp, Artificial
  Mutations within GlyA3B4 introduced by GmGlyA3B4_T02TALE nuclease
gttcatgtacggttgcagatataaacgaagcatagcttatgtatgaggtgtaacaaaattggaaacaatagccatgcaaggtgaagaatgtcaccaactcagaaacccttcttcattgacgtgtccctcactcactctcctctcttcactataaatcgccactcttcgtgttctccacttcaccaactccttcaaacttattaacactttccttagttcaatatggggaagcccttcttcactctctctctttcttccctttgcttgctactcttgtcgagtgcatgctattacctccagcaagttcaacgagtgccaactcaacaacctcaacgcgttggaacccgaccaccgcgttgagtccgaaggtggtcttattgaaacatggaactctcaacaccctgagctgcaatgcgccggtgtcactgtttccaaacgcaccctcaaccgcaacggcctccacttgccatcttactcaccttatccccaaatgatcattgtcgttcaaggtgcgtaatattagtaagaagtatttatcagcttaacgtgataacaataatagtaatatgaaatatttattaaatttttataattaatctctgctagaaaatttgattaatcattttagtagaatttgttttctcaactaggtttt

SEQ ID NO: 1787 - DNA, 471 bp, Artificial; identical to SEQ ID NO: 1723
  Mutations within GlyA3B4 introduced by GmGlyA3B4_T02TALE nuclease

SEQ ID NO: 1788 - DNA, 524 bp, Artificial
  Mutations within GlyA3B4 introduced by GmGlyA3B4_T02TALE nuclease
gttcatgtacggttgcagatataaacgaagcatagcttatgtatgaggtgtaacaaaattggaaacaatagccatgcaaggtgaagaatgtcaccaactcagaaacccttcttcattgacgtgtccctcactcactctcctctcttcactataaatcgccactcttcgtgttctccacttcaccaactccttcaaacttattaacactttccttagttcaacgagtgccaactcaacaacctcaacgcgttggaacccgaccaccgcgttgagtccgaaggtggtcttattgaaacatggaactctcaacaccctgagctgcaatgcgccggtgtcactgtttccaaacgcaccctcaaccgcaacggcctccacttgccatcttactcaccttatccccaaaatgatcattgtcgttcaaggtgcgtaatattagtaagaagtatttatcagcttaacgtgataacaataatagtaatatgaaatatttattaaattttttataattaatctctgctagaaaa

SEQ ID NO: 1789 - DNA, 432 bp, Artificial
  Mutations within GlyA3B4 introduced by GmGlyA3B4_T02TALE nuclease
gttcatgtacggttgcagatataaacgaagcatagcttatgtatgaggtgtaacaaaattggaaacaatacctccagcaagttcaacgagtgccaactcaacaacctcaacgcgttggaacccgaccaccgcgttgagtccgaaggtggtcttattgaaacatggaactctcaacaccctgagctgcaatgcgccggtgtcactgtttccaaacgcaccctcaaccgcaacggcctccacttgccatcttactcaccttatccccaaatgatcattgtcgttcaaggtgcgtaatattagtaagaagtatttatcagcttaacgtgataacaataatagtaatatgaaatatttattaaattttttataattaatctctgctagaaaatttgattaatcatttttagtagaattttgtttttctcaactagg

SEQ ID NO: 1790 - DNA, 649 bp, Artificial
  Mutations within GlyA3B4 introduced by GmGlyA3B4_T02TALE nuclease
gttcatgtacggttgcagatataaacgaagcatagcttatgtatgaggtgtaacaaaattggaaacaatagccatgcaaggtgaagaatgtcaccaactcagaaacccttcttcattgacgtgtccctcactcactctcctctcttcactataaatcgccactcttcgtgttctccacttcaccaactccttcaaacttattaacactttccttagttcaatatggggaagcccttcttcactctctctctttcttccctttgcttgctactcttgtcgagtgacctccagcaagttcaacgagtgccaactcaacaacctcaacgcgttggaacccgaccaccgcgttgagtccgaaggtggtcttattgaaacatggaactctcaacaccctgagctgcaatgcgccggtgtcactgtttccaaacgcaccctcaaccgcaacggcctccacttgccatcttactcaccttatcccccaaatgatcattgtcgttcaaggtgcgtaaatattagtaagaagtatttatcagcttaacgtgataacaataatagtaatatgaaatatttattaaattttttataattaatctctgctagaaaatttgattaatctttttagtagaattgttttttctcaactaggttt

SEQ ID NO: 1791 - DNA, 619 bp, Artificial
  Mutations within GlyA3B4 introduced by GmGlyA3B4_T02TALE nuclease
gttcatgtacggttgcagatataaacgaagcatagcttatgtatgaggtgtaacaaaattggaaacaatagccatgcaaggtgaagaatgtcaccaactcagaaacccttcttcattgacgtgtccctcactcactctcctctcttcactataaatcgccactcttcgtgttctccacttcaccaactccttcaaacttattaacactttccttagttcaatatggggaagcccttcttcactctctctctttcttccctttacctccagcaagttcaacgagtgccaactcaacaacctcaacgcgttggaacccgaccaccgcgttgagtccgaaggtggtcttattgaaacatggaactctcaacaccctgagctgcaatgcgccggtgtcactgtttccaaacgcaccctcaaccgcaacggcctccacttgccatcttactcaccttatccccaaatgatcattgtcgttcaaggtgcgtaatattagtaagaagtatttatcagcttaacgtgataacaataatagtaatatgaaatatttattaatttttataattaatctctgctagaaaatttgattaatcatttttagtagaatttgtttttctcaact

SEQ ID NO: 1792 - DNA, 521 bp, Artificial
  Mutations within GlyA3B4 introduced by GmGlyA3B4_T02TALE nuclease
gttcatgtacggttgcagatataaacgaagcatagcttatgtatgaggtgtaacaaaattggaaacaatagccatgcaaggtgaagaatgtcaccaactcagaaacccttcttcattgacgtgtccctcactcactctcctctcttcactataaatcgccactcttcgtgttcaacgagtgccaactcaacaacctcaacgcgttggaacccgaccaccgcgttgagtccgaaggtggtcttattgaaacatggaactctcaacaccctgagctgcaatgcgccggtgtcactgtttccaaacgcaccctcaaccgcaacggcctccacttgccatcttactcaccttatccccaaatgatcattgtcgttcaaggtgcgtaatattagtaagaagtattttatcagcttaacgtgataacaataatagtaatatgaaatatttattaaattttttataattaatctctgctagaaaatttgattaatcatttttagtagaatttgtttttctcaattagg

SEQ ID NO: 1793 - DNA, 582 bp, Artificial
  Mutations within GlyA3B4 introduced by GmGlyA3B4_T02TALE nuclease
gttcatgtacggttgcagatataaacgaagcatagcttatgtatgaggtgtaacaaaattggaaacaatagccatgcaaggtgaagaatgtcaccaactcagaaacccttcttcattgacgtgtccctcactcactctcctctcttcactataaatcgccactcttcgtgttctccacttcaccaactccttcaaacttattaacactttccttagttcaatatggggaagcccttcttcactctctctctttcttccctttgcttgctactcttgtcgaacgcggtggtcttattgaaacatggaactctcaacaccctgagctgcaatgcgccggtgtcactgtttccaaacgcaccctcaaccgcaacggcctccacttgccatcttactcaccttatccccaaatgatcattgtcgttcaaggtgcgtaatattagtaagaagtatttatcagcttaacgtgataacaataatagtaatatgaaatatttattaaattttttataattaatctctgctagaaaatttgattaatcatttttagtagaatttgtttttctcaactaggttttaaacacc

SEQ ID NO: 1794 - DNA, 532 bp, Artificial; identical to SEQ ID NO: 1690
  Mutations within GlyA3B4 introduced by GmGlyA3B4_T02TALE nuclease

SEQ ID NO: 1795 - DNA, 644 bp, Artificial
  Mutations within GlyA3B4 introduced by GmGlyA3B4_T02TALE nuclease
gttcatgtacggttgcagatataaacgaagcatagcttatgtatgaggtgtaacaaaattggaaacaatagccatgcaaggtgaagaatgtcaccaactcagaaacccttcttcattgacgtgtccctcactcactctcctctcttcactataaatcgccactcttcgtgttctccacttcaccaactccttcaaacttattaacactttccttagttcaatatggggaagcccttcttcactctctctctttcttccctttgcttgctattacctccagcaagttcaacgagtgccaactcaacaacctcaacgcgttggaacccgaccaccgcgttgagtccgaaggtggtcttattgaaacatggaactctcaacaccctgagctgcaatgcgccggtgtcactgtttccaaacgcaccctcaaccgcaacggcctccacttgccatcttactcaccttatccccaaatgatcattgtcgttcaaggtgcgtaatattagtaagaagtatttatcagctttaacgtgataacaataatagtaatatgaaatatttattaaattttttataattaatctctgctagaaaatttgattaatcatttttagtagaatttgttttttctcaactaggttttaaaa

SEQ ID NO: 1796 - DNA, 660 bp, Artificial
  Mutations within GlyA3B4 introduced by GmGlyA3B4_T02TALE nuclease
gttcatgtacggttgcagatataaacgaagcatagcttatgtatgaggtgtaacaaaattggaaacaatagccatgcaaggtgaagaatgtcaccaactcagaaacccttcttcattgacgtgtccctcactcactctcctctcttcactataaatcgccactcttcgtgttctccacttcaccaactccttcaaacttattaacactttccttagttcaatatggggaagcccttcttcactctctctctttcttccctttgcttgctactcttgtcgagtgcatgtacctccagcaagttcaacgagtgccaactcaacaacctcaacgcgttggaacccgaccaccgcgttgagtccgaaggtggtcttattgaaacatggaactctcaacaccctgagctgcaatgcgccggtgtcactgtttccaaacgcaccctcaaccgcaacggcctccacttgccatcttactcaccttatccccaaatgatcattgtcgttcaaggtgcgtaatattagtaagaagtatttatcagcttaacgtgataacaataatagtaatatgaaatatttattaaatttttataattaatctctgctagaaaatttgattaatcattttagtagaatttgttttctcaactaggttttaaaacacca

SEQ ID NO: 1797 - DNA, 399 bp, Artificial
  Mutations within GlyA3B4 introduced by GmGlyA3B4_T02TALE nuclease
gttcatgtacggttgcagatataaacgaagcatagcttatgtatgaggtgtaacaaaattggaaacaatagccatgcaaggtgaagaatgtcaccaactcagaaacccttcttcaccgcgttgagtccgaaggtggtcttattgaaacatggaactctcaacaccctgagctgcaatgcgccggtgtcactgtttccaaacgcaccctcaaccgcaacggcctccacttgccatcttactcaccttatccccaaatgatcattgtcgttcaaggtgcgtaatattagtaagaagtatttatcagcttaacgtgataacaataatagtaatatgaaatatttattaaattttttataattaatctctgctagaaaatttgattaatcatttttagtagaa

SEQ ID NO: 1798 - DNA, 658 bp, Artificial
  Mutations within GlyA3B4 introduced by GmGlyA3B4_T02TALE nuclease
gttcatgtacggttgcagatataaacgaagcatagcttatgtatgaggtgtaacaaaattggaaacaatagccatgcaaggtgaagaatgtcaccaactcagaaaccccttcttcattgacgtgtccctcactcactctcctctcttcactataaatcgccactcttcgtgttctccacttcaccaactccttcaaacttattaacactttccttagttcaatatggggaagcccttcttcactctctctctttcttccctttgcttgctactcttgtcgagtgcattgctattacctccagcaagttcaacgagtgccaactcaacaacctcaacgcgttggaacccgaccaccgcgttgagtccgaaggtggtcttattgaaacatggaactctcaacaccctgagctgcaatgcgccggtgtcactgtttccaaacgcaccctcaaccgcaacggcctccacttgccatcttactcaccttatccccaaatgatcattgtcgttcaaggtgcgtaatattagtaagaagtatttatcagcttaacgtgataacaataatagtaatatgaaatatttattaaatttttataattaatctctgctagaaaatttgattaatcattttagtagaatttgtttttctcaactaggtttt

SEQ ID NO: 1799 - DNA, 605 bp, Artificial
  Mutations within GlyA3B4 introduced by GmGlyA3B4_T02TALE nuclease
gttcatgtacggttgcagatataaacgaagcatagcttatgtatgaggtgtaacaaaattggaaacaatagccatgcaaggtgaagaatgtcaccaactcagaaacccttcttcattgacgtgtccctcactcactctcctctcttcactataaatcgccactcttcgtgttctccacttcaccaactccttcaaacttattaacactttccttagttcaatatggggaagcccttcttcactctctctctttctccagcaagttcaacgagtgccaactcaacaacctcaacgcgttggaacccgaccaccgcgttgagtccgaaggtggtcttattgaaacatggaactctcaacaccctgagctgcaatgcgccggtgtcactgtttccaaacgcaccctcaaccgcaacggcctccacttgccatcttactcaccttatccccaaatgatcattgtcgttcaaggtgcgtaatattagtaagaagtatttatcagcttaacgtgataacaataatagtaatatgaatatttattaatttttataattaatctctgctagaaatttgattaatcatttttagtagaatttgtttttctcaac

SEQ ID NO: 1800 - DNA, 662 bp, Artificial
  Mutations within GlyA3B4 introduced by GmGlyA3B4_T02TALE nuclease
gttcatgtacggttgcagatataaacgaagcatagcttatgtatgaggtgtaacaaaattggaaacaatagccatgcaaggtgaagaatgtcaccaactcagaaacccttcttcattgacgtgtccctcactcactctcctctcttcactataaatcgccactcttcgtgttctccacttcaccaactccttcaaacttattaacactttccttagttcaatatggggaagcccttcttcactctctctctttcttccctttgcttgctactcttgtcgagtgcactattacctccagcaagttcaacgagtgccaactcaacaacctcaacgcgttggaacccgaccaccgcgttgagtccgaaggtggtcttattgaaacatggaactctcaacaccctgagctgcaatgcgccggtgtcactgtttccaaacgcaccctcaaccgcaacggcctccacttgccatcttactcaccttatccccaaatgatcattgtcgttcaaggtgcgtaatattagtaagaagtatttatcagcttaacgtgataacaataatagtaatatgaaatatttattaaatttttataattaatctctgctagaaaatttgattaatcattttagtagaatttgttttctcaactaggttttaaaacacca

SEQ ID NO: 1801 - DNA, 560 bp, Artificial
  Mutations within GlyA3B4 introduced by GmGlyA3B4_T02TALE nuclease
gttcatgtacggttgcagatataaacgaagcatagcttatgtatgaggtgtaacaaaattggaaacaatagccatgcaaggtgaagaatgtcaccaactcagaaacccttcttcattgacgtgtccctcactcactctcctctcttcactataaatcgccactcttcgtgttctccacttcaccaactccttcaaacttattaacactttccttagttcaacaacctcaacgcgttggaacccgaccaccgcgttgagtccgaaggtggtcttattgaaacatggaactctcaacaccctgagctgcaatgcgccggtgtcactgtttccaaacgcaccctcaaccgcaacggcctccacttgccatcttactcaccttatccccaaatgatcattgtcgttcaaggtgcgtaatattagtaagaagtatttatcagcttaacgtgataacaataatagtaatatgaaatatttattaaattttttataattaatctctgctagaaaatttgattaaatcatttttagtagaatttgtttttctcaactaggttttaaac

SEQ ID NO: 1802 - DNA, 445 bp, Artificial
  Mutations within GlyA3B4 introduced by GmGlyA3B4_T02TALE nuclease
gttcatgtacggttgcagatataaacgaagcatagcttatgtatgaggtgtaacaaaattggaaacaatacctccagcaagttcaacgagtgccaactcaacaacctcaacgcgttggaacccgaccaccgcgttgagtccgaaggtggtcttattgaaacatggaactctcaacaccctgagctgcaatgcgccggtgtcactgtttccaaacgcaccctcaaccgcaacggcctccacttgccatcttactcaccttatccccaaatgatcattgtcgttcaaggtgcgtaatattagtaagaagtatttatcagcttaacgtgataacaataatagtaatatgaaatattttattaaattttttataattaatctctgctagaaaatttgattaatcatttttagtagaattttgtttttctcaactaggttttaaacacca

SEQ ID NO: 1803 - DNA, 657 bp, Artificial
  Mutations within GlyA3B4 introduced by GmGlyA3B4_T02TALE nuclease
gttcatgtacggttgcagatataaacgaagcatagcttatgtatgaggtgtaacaaaattggaaacaatagccatgcaaggtgaagaatgtcaccaactcagaaacccttcttcattgacgtgtccctcactcactctcctctcttcactataaatcgccactcttcgtgttctccacttcaccaactccttcaaacttattaacactttccttagttcaatatggggaagcccttcttcactctctctctttcttccctttgcttgctactcttgtctattacctccagcaagttcaacgagtgccaactcaacaacctcaacgcgttggaacccgaccaccgcgttgagtccgaaggtggtcttattgaaacatggaactctcaacaccctgagctgcaatgcgccggtgtcactgtttccaaacgcaccctcaaccgcaacggcctccacttgccatcttactcaccttatccccaaatgatcattgtcgttcaaggtgcgtaaatattagtaagaagtatttatcagcttaacgtgataacaataatagtaatatgaaatatttattaaattttttataattaatctctgctagaaaatttgattaatctttttagtagaattgttttttctcaactaggtttaaaacacaca

SEQ ID NO: 1804 - DNA, 636 bp, Artificial; identical to SEQ ID NO: 1645
  Mutations within GlyA3B4 introduced by GmGlyA3B4_T02TALE nuclease

SEQ ID NO: 1805 - DNA, 595 bp, Artificial
  Mutations within GlyA3B4 introduced by GmGlyA3B4_T02TALE nuclease
gttcatgtacggttgcagatataaacgaagcatagcttatgtatgaggtgtaacaaaattggaaacaatagccatgcaaggtgaagaatgtcaccaactcagaaacccttcttcattgacgtgtccctcactcactctcctctcttcactataaatcgccactcttcgtgttctccacttcaccaactccttcaaacttattaacactttccttagttcaatatggggaagcccttcttcactctctctctttcttcccctccagcaagttcaacgagtgccaactcaacaacctcaacgcgttggaaccgaccaccgcgttgagtccgaaggtggtcttattgaaacatggaactctcaacaccctgagctgcaatgcgccggtgtcactgtttccaaacgcaccctcaaccgcaacggcctccacttgccatcttactcaccttatccccaaatgatcattgtcgttcaaggtgcgtaatattagtaagaagtatttatcagcttaacgtgataacaataatagtaatatgaaatatttattaatttttataattaatctctgctagaaaatttgattaatcatttttagtag

SEQ ID NO: 1806 - DNA, 426 bp, Artificial; identical to SEQ ID NO: 1684
  Mutations within GlyA3B4 introduced by GmGlyA3B4_T02TALE nuclease

SEQ ID NO: 1807 - DNA, 640 bp, Artificial
  Mutations within GlyA3B4 introduced by GmGlyA3B4_T02TALE nuclease
gttcatgtacggttgcagatataaacgaagcatagcttatgtatgaggtgtaacaaaattggaaacaatagccatgcaaggtgaagaatgtcaccaactcagaaacccttcttcattgacgtgtccctcactcactctcctctcttcactataaatcgccactcttcgtgttctccacttcaccaactccttcaaacttattaacactttccttagttcaatatggggaagcccttcttcactctctctctttcttccctttgcttgctactcttgtcgacgagtgccaactcaacaacctcaacgcgttggaacccgaccaccgcgttgagtccgaaggtggtcttattgaaacatggaactctcaacaccctgagctgcaatgcgccggtgtcactgtttccaaacgcaccctcaaccgcaacggcctccacttgccatcttactcaccttatccccaaatgatcattgtcgttcaaggtgcgtaatattagtaagaagtatttatcagcttaacgtgataacaataatagtaatatgaaatatttattaaattttttataattaatctctgctagaaaatttgattaatcatttttagtagaatttgttttttctcaactaggttttaaacaccaca

SEQ ID NO: 1808 - DNA, 562 bp, Artificial
  Mutations within GlyA3B4 introduced by GmGlyA3B4_T02TALE nuclease
gttcatgtacggttgcagatataaacgaagcatagcttatgtatgaggtgtaacaaaattggaaacaatagccatgcaaggtgaagaatgtcaccaactcagaaacccttcttcattgacgtgtccctcactcactctcctctcttcactataaatcgccactcttcgtgttctccacttcaccaactccttcaaacttattaacactttccttagttcaacgagtgccaactcaacaacctcaacgcgttggaacccgaccaccgcgttgagtccgaaggtggtcttattgaaacatggaactctcaacaccctgagctgcaatgcgccggtgtcactgtttccaaacgcaccctcaaccgcaacggcctccacttgccatcttactcaccttatccccaaatgatcattgtcgttcaaggtgcgtaatattagtaagaagtatttatcagcttaacgtgataacaataatagtaatatgaaatatttattaaattttttataattaatctctgctagaaattgataatcattttagtagaatttgtttttctcaactagg

SEQ ID NO: 1809 - DNA, 591 bp, Artificial
  Mutations within GlyA3B4 introduced by GmGlyA3B4_T02TALE nuclease
gttcatgtacggttgcagatataaacgaagcatagcttatgtatgaggtgtaacaaaattggaaacaatagccatgcaaggtgaagaatgtcaccaactcagaaacccttcttcattgacgtgtccctcactcactctcctctcttcactataaatcgccactcttcgtgttctccacttcaccaactccttcaaacttattaacactttccttagttcaatatggggaagcccttcttcactctctctctttcttccctttgcttgctactcttgtcgagtgcaagttcaacgagtgccaactcaacaacctcaacgcgttggaacccgaccaccgcgttgagtccgaaggtggtcttattgaaacatggaactctcaacaccctgagctgcaatgcgccggtgtcactgtttccaaacgcaccctcaaccgcaacggcctccacttgccatcttactcaccttatccccaaatgatcattgtcgttcaaggtgcgtaaatattagtaagaagtatttatcagcttaacgtgataacaataatagtaatatgaaatatttattaaattttttataattaatctctgctag

SEQ ID NO: 1810 - DNA, 508 bp, Artificial
  Mutations within GlyA3B4 introduced by GmGlyA3B4_T02TALE nuclease
gttcatgtacggttgcagatataaacgaagcatagcttatgtatgaggtgtaacaaaattggaaacaatagccatgcaaggtgaagaatgtcaccaactcagaaacccttcttcattgacgtgtccctcactcactctcctctcttcactataaatcgccactcttcgtgttctccacttcaccaacgcgttggaacccgaccaccgcgttgagtccgaaggtggtcttattgaaacatggaactctcaacaccctgagctgcaatgcgccggtgtcactgtttccaaacgcaccctcaaccgcaacggcctccacttgccatcttactcaccttatccccaaatgatcattgtcgttcaaggtgcataatattagtaagaagtatttatcagcttaacgtgataacaataatagtaatatgaaatatttattaaattttttataattaatctctgctagaaaatttgattaaatcatttttagtagaatttgtttttctcaactagg

SEQ ID NO: 1811 - DNA, 483 bp, Artificial
  Mutations within GlyA3B4 introduced by GmGlyA3B4_T02TALE nuclease
gttcatgtacggttgcagatataaacgaagcatagcttatgtatgaggtgtaacaaaattggaaacaatagccatgcaaggtgaagaatgccaccgccattgctattacctccagcaagttcaacgagtgccaactcaacaacctcaacgcgttggaacccgaccaccgcgttgagtccgaaggtggtcttattgaaacatggaactctcaacaccctgagctgcaatgcgccggtgtcactgtttccaaacgcaccctcaaccgcaacaggcctccacttgccatcttactcaccttatccccaaatgatcattgtcgttcaaggtgcgtaatattagtaagaagtatttatcagcttaacgtgataacaataatagtaatatgaaatatttattaaattttttataattaatctctgctagaaaatttgattaatcatttttagtagaatttgtttttctcaactaggtttttaaacacca

SEQ ID NO: 1812 - DNA, 666 bp, Artificial
  Mutations within GlyA3B4 introduced by GmGlyA3B4_T02TALE nuclease
gttcatgtacggttgcagatataaacgaagcatagcttatgtatgaggtgtaacaaaattggaaacaatagccatgcaaggtgaagaatgtcaccaactcagaaacccttcttcattgacgtgtccctcactcactctcctctcttcactataaatcgccactcttcgtgttctccacttcaccaactccttcaaacttattaacactttccttagttcaatatggggaagcccttcttcactctctctctttcttccctttgcttgctactcttgtcgagtgcatgctattacctccagcaagttcaacgagtgccaactcaacaacctcaacgcgttggaacccgaccaccgcgttgagtccgaaggtggtcttattgaaacatggaactctcaacaccctgagctgcaatgcgccggtgtcactgtttccaaacgcaccctcaaccgcaacggcctccacttgccatcttactcaccttatccccaaatgatcattgtcgttcaaggtgcgtaatattagtaagagtatttatcagcttaacgtgataacaatatagtaatatgaaatatttattaaatttttataattaatctctgctagaaaatttgattaatcattttagtagaatttgtttttctcaactaggtttttaaaacaccaca

SEQ ID NO: 1813 - DNA, 567 bp, Artificial
  Mutations within GlyA3B4 introduced by GmGlyA3B4_T02TALE nuclease
gttcatgtacggttgcagatataaacgaagcatagcttatgtatgaggtgtaacaaaattggaaacaatagccatgcaaggtgaagaatgtcaccaactcagaaacccttcttcattgacgtgtccctcactcactctcctctcttcactataaatcgccactcttcgtgttctccacttcaccaactccttcaaacttattaacactttccttagttcaacgagtgccaactcaacaacctcaacgcgttggaacccgaccaccgcgttgagtccgaaggtggtcttattgaaacatggaactctcaacaccctgagctgcaatgcgccggtgtcactgtttccaaacgcaccctcaaccgcaacggcctccacttgccatcttactcaccttatccccaaaatgatcattgtcgttcaaggtgcgtaatattagtaagaagtatttatcagcttaacgtgataacaataatagtaatatgaaatatttattaaattttttataattaatctctgctagaaaatttgattaatcatttttagtagaatttgtttttctcaactagg

SEQ ID NO: 1814 - DNA, 527 bp, Artificial
  Mutations within GlyA3B4 introduced by GmGlyA3B4_T02TALE nuclease
gttcatgtacggttgcagatataaacgaagcatagcttatgtatgaggtgtaacaaaattggaaacaatagccatgcaaggtgaagaatgtcaccaactcagaaacccttcttcattgacgtgtccctcactcactctcctctcttcactataaatcgccactcttcgtgttctccacttcaccaactccttcaaacttattaacactttccttacctccagcaagttcaacgagtgccaactcaacaacctcaacgcgttggaacccgaccaccgcgttgagtccgaaggtggtcttattgaaacatggaactctcaacaccctgagctgcaatgcgccggtgtcactgtttccaaacgcaccctcaaccgcaacggcctccacttgccatcttactcaccttatccccaaatgatcattgtcgttcaaggtgcgtaatattagtaagaagtatttatcagcttaacgtgataacaataatagtaatatgaaatatttattaaattttttataattaatctctgct

SEQ ID NO: 1815 - DNA, 660 bp, Artificial; identical to SEQ ID NO: 1717
  Mutations within GlyA3B4 introduced by GmGlyA3B4_T02TALE nuclease

SEQ ID NO: 1816 - DNA, 579 bp, Artificial
  Mutations within GlyA3B4 introduced by GmGlyA3B4_T02TALE nuclease
gttcatgtacggttgcagatataaacgaagcatagcttatgtatgaggtgtaacaaaattggaaacaatagccatgcaaggtgaagaatgtcaccaactcagaaacccttcttcattgacgtgtccctcactcactctcctctcttcactataaatcgccactcttcgtgttctccacttcaccaactccttcaaacttattaacactttccttagttcaatatggggaagcccttcttcactctctctctttcttccctttgcttgctactcaacaacctcaacgcgttggaacccgaccaccgcgttgagtccgaaggtggtcttattgaaacatggaactctcaacaccctgagctgcaatgcgccggtgtcactgtttccaaacgcaccctcaaccgcaacggcctccacttgccatcttactcaccttatccccaaatgatcattgtcgttcaaggtgcgtaatattagtaagaagtatttatcagcttaacgtgataacaataatagtaatatgaaatatttattaatttttataattaatctctgctagaaaatttgattaatcatttttag

SEQ ID NO: 1817 - DNA, 569 bp, Artificial
  Mutations within GlyA3B4 introduced by GmGlyA3B4_T02TALE nuclease
gttcatgtacggttgcagatataaacgaagcatagcttatgtatgaggtgtaacaaaattggaaacaatagccatgcaaggtgaagaatgtcaccaactcagaaacccttcttcattgacgtgtccctcactcactctcctctcttcactataaatcgccactcttcgtgttctccacttcaccaactccttcaaacttattaacactttccttagttcaatatggggaagcccttcttcaacgagtgccaactcaacaacctcaacgcgttggaacccgaccaccgcgttgagtccgaaggtggtcttattgaaacatggaactctcaacaccctgagctgcaatgcgccggtgtcactgtttccaaacgcaccctcaaccgcaacggcctccacttgccatcttactcaccttatccccaaatgatcattgtcgttcaaggtgcgtaatattagtaagaagtatttatcagcttaacgtgataacaataatagtaatatgaaatatttattaaattttttataattaatctcttgctagaaaatttgattaatcatttttagtagaa

SEQ ID NO: 1818 - DNA, 570 bp, Artificial
  Mutations within GlyA3B4 introduced by GmGlyA3B4_T02TALE nuclease
gttcatgtacggttgcagatataaacgaagcatagcttatgtatgaggtgtaacaaaattggaaacaatagccatgcaaggtgaagaatgtcaccaactcagaaacccttcttcattgacgtgtccctcactcactctcctctcttcactataaatcgccactcttcgtgttctccacttcaccaactccttcaaacttattaacactttccttagttcaatatggggaagcccttcttcaccaactcctccagcaagttcaacgagtgccaactcaacaacctcaacgcgttggaacccgaccaccgcgttgagtccgaaggtggtcttattgaaacatggaactctcaacaccctgagctgcaatgcgccggtgtcactgtttccaaacgcaccctcaaccgcaacggcctccacttgccatcttactcaccttatccccaaatgatcattgtcgttcaaggtgcgtaatattagtaagaagtatttatcagcttaacgtgataacaataatagtaatatgaaatatttattaatttttataattaatctctgctagaaaatttgatt

SEQ ID NO: 1819 - DNA, 663 bp, Artificial
  Mutations within GlyA3B4 introduced by GmGlyA3B4_T02TALE nuclease
gttcatgtacggttgcagatataaacgaagcatagcttatgtatgaggtgtaacaaaattggaaacaatagccatgcaaggtgaagaatgtcaccaactcagaaacccttcttcattgacgtgtccctcactcactctcctctcttcactataaatcgccactcttcgtgttctccacttcaccaactccttcaaacttattaacactttccttagttcaatatggggaagcccttcttcactctctctctttcttccctttgcttgctactcttgtcgagtgcatgctattacctccagcaagttcaacgagtgccaactcaacaacctcaacgcgttggaacccgaccaccgcgttgagtccgaaggtggtcttattgaaacatggaactctcaacaccctgagctgcaatgcgccggtgtcactgtttccaaacgcaccctcaaccgcaacggcctccacttgccatcttactcaccttatccccaaatgatcattgtcgttcaaggtgcgtaatattagtaagagtatttatcagcttaacgtgataacaataatagtaatatgaaatatttattaaatttttataattaatctctgctagaaaatttgattaatcattttagtagaatttgtttttctcaactaggttttaaacacca

SEQ ID NO: 1820 - DNA, 459 bp, Artificial
  Mutations within GlyA3B4 introduced by GmGlyA3B4_T02TALE nuclease
gttcatgtacggttgcagatataaacgaagcatagcttatgtatgaggtgtaacaaaattggaaacaatagccatgcaaggtgaagaatgtcaccaactcaggatgctatcaacaacctcaacgcgttggaacccgaccaccgcgttgagtccgaaggtggtcttattgaaacatggaactctcaacaccctgagctgcaatgcgccggtgtcactgtttccaaacgcaccctcaaccgcaacggcctccacttgccatcttactcaccttatccccaaatgatcattgtcgttcaaggtgcgtaatattagtaagaagtatttatcagcttaacgtgataacaataatagtaatatgaaatatttattaaattttttataattaattctctgctagaaaatttgattaatcatttttagtagaatttgtttttctcaactaggtttttaaacaccaca

SEQ ID NO: 1821 - DNA, 533 bp, Artificial
  Mutations within GlyA3B4 introduced by GmGlyA3B4_T02TALE nuclease
gttcatgtacggttgcagatataaacgaagcatagcttatgtatgaggtgtaacaaaattggaaacaatagccatgcaaggtgaagaatgtcaccaactcagaaacccttcttcattgacgtgtccctcactcactctcctctcttcactataaatcgccactcttcgtgttctccacttcaccaactcaacaacctcaacgcgttggaacccgaccaccgcgttgagtccgaaggtggtcttattgaaacatggaactctcaacaccctgagctgcaatgcgccggtgtcactgtttccaaacgcaccctcaaccgcaacggcctccacttgccatcttactcaccttatccccaaatgatcattgtcgttcaaggtgcgtaatattagtaagaagtatttatcagcttaacgtgataacaataatagtaatatgaaaatatttattaaattttttataattaatctctgctagaaaatttgattaatcatttttagtagaatttgtttttctcaactaggtttaaacacca

SEQ ID NO: 1822 - DNA, 581 bp, Artificial
  Mutations within GlyA3B4 introduced by GmGlyA3B4_T02TALE nuclease
gttcatgtacggttgcagatataaacgaagcatagcttatgtatgaggtgtaacaaaattggaaacaatagccatgcaaggtgaagaatgtcaccaactcagaaacccttcttcattgacgtgtccctcactcactctcctctcttcactataaatcgccactcttcgtgttctccacttcaccaactccttcaaacttattaacactttccttagttcaatacctccagcaagttcaacgagtgccaactcaacaacctcaacgcgttggaacccgaccaccgcgttgagtccgaaggtggtcttattgaaacatggaactctcaacaccctgagctgcaatgcgccggtgtcactgtttccaaacgcaccctcaaccgcaacggcctccacttgccatcttactcaccttatcccccaaatgatcattgtcgttcaaggtgcgtaatattagtaagaagtatttatcagcttaacgtgataacaataatagtaatatgaaatatttattaaattttttataattaatctcttgctagaaaatttgattaatcatttttagtagaatttgtttttctcaa

SEQ ID NO: 1823 - DNA, 577 bp, Artificial
  Mutations within GlyA3B4 introduced by GmGlyA3B4_T02TALE nuclease
gttcatgtacggttgcagatataaacgaagcatagcttatgtatgaggtgtaacaaaattggaaacaatagccatgcaaggtgaagaatgtcaccaactcagaaacccttcttcattgacgtgtccctcactcactctcctctcttcactataaatcgccactcttcgtgttctccacttcaccaactccttcaaacttattaacactttccttagttcaatatggggaagcccttcttcactctctctctttcttccctttgcttgctactcaacgagtgccaactcaacaacctcaacgcgttggaacccgaccaccgcgttgagtccgaaggtggtcttattgaaacatggaactctcaacaccctgagctgcaatgcgccggtgtcactgtttccaaacgcaccctcaaccgcaacggcctccacttgccatcttactcaccttatccccaaatgatcattgtcgttcaaggtgcgtaatattagtaagaagtatttatcagcttaacgtgataacaataatagtaatatgaaatatttattaaattttttataattaatctctgctagaaaa

SEQ ID NO: 1824 - DNA, 663 bp, Artificial
  Mutations within GlyA3B4 introduced by GmGlyA3B4_T02TALE nuclease
gttcatgtacggttgcagatataaacgaagcatagcttatgtatgaggtgtaacaaaattggaaacaatagccatgcaaggtgaagaatgtcaccaactcagaaacccttcttcattgacgtgtccctcactcactctcctctcttcactataaatcgccactcttcgtgttctccacttcaccaactccttcaaacttattaacactttccttagttcaatatggggaagcccttcttcactctctctctttcttccttgcttgctactcttgtcgagtgcatgctattacctccagcaagttcaacgagtgccaactcaacaacctcaacgcgttggaacccgaccaccgcgttgagtccgaaggtggtcttattgaaacatggaactctcaacaccctgagctgcaatgcgccggtgtcactgtttccaaacgcaccctcaaccgcaacggcctccacttgccatcttactcaccttatccccaaatgatcattgtcgttcaaggtgcgtaatattagtaagagtatttatcagcttaacgtgataacaataatagtaatatgaaatatttattaaatttttataattaatctctgctagaaaatttgattaatcattttagtagaatttgtttttctcaactaggtttttaaaacacca

SEQ ID NO: 1825 - DNA, 580 bp, Artificial
  Mutations within GlyA3B4 introduced by GmGlyA3B4_T02TALE nuclease
gttcatgtacggttgcagatataaacgaagcatagcttatgtatgaggtgtaacaaaattggaaacaatagccaatgcaaggtgaagaatgtcaccaactcagaaacccttcttcattgacgtgtccctcactcactcatcctctcttcactataaatcgccactcttcgtgttctccacttcaccaactccttcaaacttattaacactttccttagttcaatatggggaagcccttcttcactctctctctttcttccctttgcttgctactcttgtcgagtgccaactcaacaacctcaacgcgttggaacccgaccaccgcgttgagtccgaaggtgggtcttattgaaacatggaactctcaacaccctgagctgcaatgcgccggtgtcactgttttccaaacgcaccctcaaccgcaacggcctccacttgccatcttactcaccttatccccaaatgatcattgtcgttcaaggtgcgtaatattagtaagaagtatttatcagcttaacgtgataacaaataatagtaatatgaaatatttattaaattttttataattaatctctgctag

SEQ ID NO: 1826 - DNA, 639 bp, Artificial
  Mutations within GlyA3B4 introduced by GmGlyA3B4_T02TALE nuclease
gttcatgtacggttgcagatataaacgaagcatagcttatgtatgaggtgtaacaaaattggaaacaatagccatgcaaggtgaagaatgtcaccaactcagaaacccttcttcattgacgtgtccctcactcactctcctctcttcactataaatcgccactcttcgtgttctccacttcaccaactccttcaaacttattaacactttccttagttcaatatggggaagcccttcttcactctctctctttcttccctttgcttgctattacctccagcaagttcaacgagtgccaactcaacaacctcaacgcgttggaacccgaccaccgcgttgagtccgaaggtggtcttattgaaacatggaactctcaacaccctgagctgcaatgcgccggtgtcactgtttccaaacgcaccctcaaccgcaacggcctccacttgccatcttactcaccttatccccaaatgatcattgtcgttcaaggtgcgtaatattagtaagaagtatttatcagcttaacgtgataacaataatagtaatatgaaatatttattaaattttttataattaatctctgctagaaaatttgattaatcatttttagtagaatttgttttttctcaactaggtttt

SEQ ID NO: 1827 - DNA, 666 bp, Artificial
  Mutations within GlyA3B4 introduced by GmGlyA3B4_T02TALE nuclease
  misc_feature (531): n is a or c or t or g
gttcatgtacggttgcagatataaacgaagcatagcttatgtatgaggtgtaacaaaattggaaacaatagccatgcaaggtgaagaatgtcaccaactcagaaacccttcttcattgacgtgtccctcactcactctcctctcttcactataaatcgccactcttcgtgttctccacttcaccaactccttcaaacttattaacactttccttagttcaatatggggaagcccttcttcactctctctctttcttccctttgcttgctactcttgtcgagtgcatggctattacctccagcaagttcaacgagtgccaactcaacaacctcaacgcgttggaacccgaccaccgcgttgagtccgaaggtggtcttattgaaacatggaactctcaacaccctgagctgcaatgcgccggtgtcactgtttccaaacgcaccctcaaccgcaacggcctccacttgccatcttactcaccttatccccaaatgatcattgtcgttcaaggtgcgtaatattagtaagagnatttatcagcttaacgtgataacaataatagtaatatgaaatatttattaaatttttataattaatctctgctagaaaatttgattaatcattttagtagaatttgtttttctcaactaggttttaaacaccaca

SEQ ID NO: 1828 - DNA, 654 bp, Artificial
  Mutations within GlyA3B4 introduced by GmGlyA3B4_T02TALE nuclease
gttcatgtacggttgcagatataaacgaagcatagcttatgtatgaggtgtaacaaaattggaaacaatagccatgcaaggtgaagaatgtcaccaactcagaaacccttcttcattgacgtgtccctcactcactctcctctcttcactataaatcgccactcttcgtgttctccacttcaccaactccttcaaacttattaacactttccttagttcaatatggggaagcccttcttcactctctctctttcttccctttgcttgctactcttgtcgagtgcatactcagtctcaagtcaaacgatgatgccaagtccatctacaaccactcaacgcgttggaacccgaccaccgcgttgagtccgaaggtggtcttattgaaacatggaactctcaacaccctgagctgcaatgcgcggtgtcactgtttccaaacgcaccctcaaccgcaacggcctccacttgccatcttactcaccttatccccaaatgatcattgtcgttcaaggtgcgtaatattagtaagaagtatttatcagcttaacgtgataacaataatagtaatatgaaatatttattaaatttttataattaatctctgctagaaaatttgattaatcattttagtagaatttgtttttctcaactagg

SEQ ID NO: 1829 - DNA, 617 bp, Artificial
  Mutations within GlyA3B4 introduced by GmGlyA3B4_T02TALE nuclease
gttcatgtacggttgcagatataaacgaagcatagcttatgtatgaggtgtaacaaaattggaaacaatagccatgcaaggtgaagaatgtcaccaactcagaaacccttcttcattgacgtgtccctcactcactctcctctcttcactataaatcgccactcttcgtgttctccacttcaccaactccttcaaacttattaacactttccttagttcaatatggggaagcccttcttcactctctctctttcttccctttgcttgctaactcaacaacctcaacgcgttggaacccgaccaccgcgttgagtccgaaggtggtcttattgaaacatggaactctcaacaccctgagctgcaatgcgccggtgtcactgtttccaaacgcaccctcaaccgcaacggcctccacttgccatcttactcaccttatccccaaatgatcattgtcgttcaaggtgcgtaatattagtaagaagtatttatcagcttaacgtgataacaataatagtaatatgaaatatttattaaattttttataattaatctctgctagaaaatttgattaatcatttttagtagaatttgtttttctcaactaggtttttaaaaca

SEQ ID NO: 1830 - DNA, 520 bp, Artificial
  Mutations within GlyA3B4 introduced by GmGlyA3B4_T02TALE nuclease
  misc_feature (519): n is a or c or t or g
gttcatgtacggttgcagatataaacgaagcatagcttatgtatgaggtgtaacaaaattggaaacaatagccatgcaaggtgaagaatgtcaccaactcagaaacccttcttcattgacgtgtccctcactcactctcctctcttcactataaatcgccactcttcgtgttctccacttcaccaactccttcaaacttattaacactttccttagttcaatatggggaagcccttcttcactctctctctttcttccctttgcttgctactcttgtcgagtgttgcttatctatctcctcgcaagtcaagtcagcgatgtcacgctacatcaacctaaccacgttggaacccgaccaccgcgttgagtccgaaggtggtcttattgaaacatggaactctcaacaccctgagctgcaatgcgccggtgtcactgtttccaaacgcaccctcaaccgcaacggcctccacttgccatcttactcaccttatccccaaatgatcattgtcgttcaagtgng

SEQ ID NO: 1831 - DNA, 513 bp, Artificial
  Mutations within GlyA3B4 introduced by GmGlyA3B4_T02TALE nuclease
gttcatgtacggttgcagatataaacgaagcatagcttatgtatgaggtgtaacaaaattggaaacaatacgcatgcaaggtgaagaatgtcaccaactcagaaacccttcttcattgacgtgtccctcactcactctcctctcttcactataaatcgccactcttcgtgttctccacttcaacaacctcaacgcgttggaacccgaccaccgcgttgagtccgaaggtggtcttattgaaacatggaactctcaacaccctgagctgcaatgcgccggtgtcactgtttccaaacgcaccctcaaccgcaacggcctccacttgccatcttactcaccttatccccaaatgatcattgtcgttcaaggtgcgtaatattagtaagaagtatttatcagcttaacgtgataacaataatagtaatatgaaatatttattaaattttttataattaatctctgctagaaaatttgattaatcatttttagtagaatttgtttttctcaactagg

SEQ ID NO: 1832 - DNA, 582 bp, Artificial
  Mutations within GlyA3B4 introduced by GmGlyA3B4_T02TALE nuclease
gttcatgtacggttgcagatataaacgaagcatagcttatgtatgaggtgtaacaaaattggaaacaatagccatgcaaggtgaagaatgtcaccaactcagaaacccttcttcattgacgtgtccctcactcactctcctctcttcactataaatcgccactcttcgtgttctccacttcaccaactccttcaaacttattaacactttccttagttcaatatggggaagcccttcttcaacgagtgccaactcaacaacctcaacgcgttggaacccgaccaccgcgttgagtccgaaggtggtcttattgaaacatggaactctcaacaccctgagctgcaatgcgccggtgtcactgtttccaaacgcaccctcaaccgcaacggcctccacttgccatcttactcaccttatccccaaatgatcattgtcgttcaaggtgcgtaatattagtaagaagtatttatcagcttaacgtgataacaataatagtaatatgaaatatttattaaattttttataattaatctctgctagaaaatttgattaatcatttttagtagaatttgtttttctcaa

SEQ ID NO: 1833 - DNA, 659 bp, Artificial
  Mutations within GlyA3B4 introduced by GmGlyA3B4_T02TALE nuclease
gttcatgtacggttgcagatataaacgaagcatagcttatgtatgaggtgtaacaaaattggaaacaatagccatgcaaggtgaagaatgtcaccaactcagaaacccttcttcattgacgtgtccctcactcactctcctctcttcactataaatcgccactcttcgtgttctccacttcaccaactccttcaaacttattaacactttccttagttcaatatggggaagcccttcttcactctctctctttcttccctttgcttgctactcttgtcgagtgcatgtacctccagcaagttcaacgagtgccaactcaacaacctcaacgcgttggaacccgaccaccgcgttgagtccgaaggtggtcttattgaaacatggaactctcaacaccctgagctgcaatgcgccggtgtcactgtttccaaacgcaccctcaaccgcaacggcctccacttgccatcttactcaccttatccccaaatgatcattgtcgttcaaggtgcgtaatattagtaagaagtatttatcagcttaacgtgataacaataatagtaatatgaaatatttattaaatttttataattaatctctgctagaaaatttgattaatcattttagtagaatttgttttctcaactaggttttaaacacca

SEQ ID NO: 1834 - DNA, 629 bp, Artificial
  Mutations within GlyA3B4 introduced by GmGlyA3B4_T02TALE nuclease
gttcatgtacggttgcagatataaacgaagcatagcttatgtatgaggtgtaacaaaattggaaacaatagccatgcaaggtgaagaatgtcaccaactcagaaacccttcttcattgacgtgtccctcactcactctcctctcttcactataaatcgccactcttcgtgttctccacttcaccaactccttcaaacttattaacactttccttagttcaatatggggaagcccttcttcactctctctctttcttccctttgcttgctactcttgtcgagtgctattacctccagcaagttcaacgagtgccaactcaacaacctcaacgcgttggaacccgaccaccgcgttgagtccgaaggtggtcttattgaaacatggaactctcaacaccctgagctgcaatgcgccggtgtcactgtttccaaacgcaccctcaaccgcaacggcctccacttgccatcttactcaccttatccccaaatgatcattgtcgttcaaggtgcgtaatattagtaagaagtatttatacagtcattaacgtgataacaataatagtaatatgaaaatatttattaaatttttataattaatctctgctagaaaatttgattaatcattttagt

SEQ ID NO: 1835 - DNA, 401 bp, Artificial
  Mutations within GlyA3B4 introduced by GmGlyA3B4_T02TALE nuclease
gttcatgtacggttgcagataactattacctccagcaagttcaacgagtgccaactcaacaacctcaacgcgttggaacccgaccaccgcgttgagtccgaaggtggtcttattgaaacatggaactctcaacaccctgagctgcaatgcgccggtgtcactgtttccaaacgcaccctcaaccgcaacggcctccacttgccatcttactcaccttatccccaaatgatcattgtcgttcaaggtgcgtaatattagtaagaagtatttatcagcttaacgtgataacaataatagtaatatgaaatatttattaaattttttataattaatctctgctagaaaatttgattaatcatttttagtagaatttgtttttctcaactaggttttaaacacca

SEQ ID NO: 1836 - DNA, 661 bp, Artificial
  Mutations within GlyA3B4 introduced by GmGlyA3B4_T02TALE nuclease
gttcatgtacggttgcagatataaacgaagcatagcttatgtatgaggtgtaacaaaattggaaacaatagccatgcaaggtgaagaatgtcaccaactcagaaacccttcttcattgacgtgtccctcactcactctcctctcttcactataaatcgccactcttcgtgttctccacttcaccaactccttcaaacttattaacactttccttagttcaatatggggaagcccttcttcactctctctctttcttccctttgcttgctactcttgtcgagtgcatttacctccagcaagttcaacgagtgccaactcaacaacctcaacgcgttggaacccgaccaccgcgttgagtccgaaggtggtcttattgaaacatggaactctcaacaccctgagctgcaatgcgccggtgtcactgtttccaaacgcaccctcaaccgcaacggcctccacttgccatcttactcaccttatccccaaatgatcattgtcgttcaaggtgcgtaatattagtaagaagtatttatcagcttaacgtgataacaataatagtaatatgaaatatttattaaatttttataattaatctctgctagaaaatttgattaatcattttagtagaatttgttttctcaactaggtttttaaaacacca

SEQ ID NO: 1837 - DNA, 553 bp, Artificial
  Mutations within GlyA3B4 introduced by GmGlyA3B4_T02TALE nuclease
gttcatgtacggttgcagatataaacgaagcatagcttatgtatgaggtgtaacaaaattggaaacaatagccatgcaaggtgaagaatgtcaccaactcagaaacccttcttcattgacgtgtccctcactcactctcctctcttcactataaatcgccactcttcgtgttctccacttcaccaactccttcaaacttattaacactttccttagttcaatatggggaagcccttcttcactctctctcttctcaacgagtgccaactcaacaacctcaacgcgttggaacccgaccaccgcgttgagtccgaaggtggtcttattgaaacatggaactctcaacaccctgagctgcaatgcgccggtgtcactgtttccaaacgcaccctcaaccgcaacggcctccacttgccatcttactcaccttatccccaaatgatcattgtcgttcaaggtgcgtaatattagtaagaagtatttatcagcttaacgtgataacaataatagtaatatgaaatatttattaatttttataattaatctctgctag

SEQ ID NO: 1838 - DNA, 667 bp, Artificial
  Mutations within GlyA3B4 introduced by GmGlyA3B4_T02TALE nuclease
gttcatgtacggttgcagatataaacgaagcatagcttatgtatgaggtgtaacaaaattggaaacaatagccatgcaaggtgaagaatgtcaccaactcagaaacccttcttcattgacgtgtccctcactcactctcctctcttcactataaatcgccactcttcgtgttctccacttcaccaactccttcaaacttattaacactttccttagttcaatatggggaagcccttcttcactctctctctttcttccctttgcttgctactcttgtcgagtgcatgctattacctccagcaagttcaacgagtgccaactcaacaacctcaacgcgttggaacccgaccaccgcgttgagtccgaaggtggtcttattgaaacatggaactctcaacaccctgagctgcaatgcgccggtgtcactgtttccaaacgcaccctcaaccgcaacggcctccacttgccatcttactcaccttatccccaaatgatcattgtcgttcaaggtgcgtaatattagtaagagtatttatcagcttaacgtgataacaataatagtaatatgaaatatttattaaatttttataattaatctctgctagaaaatttgattaatcattttagtagaatttgtttttctcaactaggtttttaaaacaccaca

SEQ ID NO: 1839 - DNA, 569 bp, Artificial
  Mutations within GlyA3B4 introduced by GmGlyA3B4_T02TALE nuclease
  misc_feature (472): n is a or c or t or g
gttcatgtacggttgcagatataaacgaagcatagcttatgtatgaggtgtaacaaaattggaaacaatagccatgcaaggtgaagaatgtcaccaactcagaaacccttcttcattgacgtgtccctcactcactctcctctcttcactataaatcgccactcttcgtgttctccacttcaccaactccttcaaacttattaacactttccttagttcaatatggggaagcccttcttcactctctctctttcttccctttgcttgctactcaacaacctcaacgcgttggaacccgaccaccgcgttgagtccgaaggtggtcttattgaaacatggaactctcaacaccctgagctgcaatgcgccggtgtcactgtttccaaacgcaccctcaaccgcaacggcctccacttgccatcttactcaccttatccccaaatgatctattgtcagttcaggtgacgtaatnttagtaagaatgtattcattcagcttacgtgataacaataatagtaatatgaaatatttattaattttttataattaatctctgctagaaaatttga

SEQ ID NO: 1840 - DNA, 656 bp, Artificial
  Mutations within GlyA3B4 introduced by GmGlyA3B4_T02TALE nuclease
gttcatgtacggttgcagatataaacgaagcatagcttatgtatgaggtgtaacaaaattggaaacaatagccatgcaaggtgaagaatgtcaccaactcagaaacccttcttcattgacgtgtccctcactcactctcctctcttcactataaatcgccactcttcgtgttctccacttcaccaactccttcaaacttattaacactttccttagttcaatatggggaagcccttcttcactctctctctttcttccctttgcttgctattacctccagcaagttcaacgagtgccaactcaacaacctcaacgcgttggaacccgaccaccgcgttgagtccgaaggtggtcttattgaaacatggaactctcaacaccctgagctgcaatgcgccggtgtcactgtttccaaacgcaccctcaaccgcaacggcctccacttgccatcttactcaccttatccccaaatgatcattgtcgttcaaggtgcgtaaatattagtaagaagtatttatcagcttaacgtgataacaataatagtaaatatgaaatatttattaaattttttataaattaaatctctgctagaaaaatttgattaaatcatttttagtagaatttgttttttctcaactaggttttaaaacaccaca

SEQ ID NO: 1841 - DNA, 666 bp, Artificial
  Mutations within GlyA3B4 introduced by GmGlyA3B4_T02TALE nuclease
  misc_feature (531): n is a or c or t or g
gttcatgtacggttgcagatataaacgaagcatagcttatgtatgaggtgtaacaaaattggaaacaatagccatgcaaggtgaagaatgtcaccaactcagaaacccttcttcattgacgtgtccctcactcactctcctctcttcactataaatcgccactcttcgtgttctccacttcaccaactccttcaaacttattaacactttccttagttcaatatggggaagcccttcttcactctctctctttcttccctttgcttgctactcttgtcgagtgcatgctattacctccagcaagttcaacgagtgccaactcaacaacctcaacgcgttggaacccgaccaccgcgttgagtccgaaggtggtcttattgaaacatggaactctcaacaccctgagctgcaatgcgccggtgtcactgtttccaaacgcaccctcaaccgcaacggcctccacttgccatcttactcaccttatccccaaatgatcattgtcgttcaaggtgcgtaatattagtaagaagnatttatcagcttaacgtgataacaataatagtaatatgaaatatttattaaatttttataattaatctctgctagaaaatttgattaatcattttagtagaatttgttttctcaactaggttttaaaacaccaca

SEQ ID NO: 1842 - DNA, 605 bp, Artificial
  Mutations within GlyA3B4 introduced by GmGlyA3B4_T02TALE nuclease
gttcatgtacggttgcagatataaacgaagcatagcttatgtatgaggtgtaacaaaattggaaacaatagccatgcaaggtgaagaatgtcaccaactcagaaacccttcttcattgacgtgtccctcactcactctcctctcttcactataaatcgccactcttcgtgttctccacttcaccaactccttcaaacttattaacactttccttagttcaatatggggaagcccttcttcactctctctctttcttccctttgcttgctactcaacgcgttggaacccgaccaccgcgttgagtccgaaggtggtcttattgaacatggaactctcaacaccctgagctgcaatgcgccggtgtcactgtttccaaacgcaccctcaaccgcaacggcctccacttgccatcttactcaccttatccccaaaatgatcattgtcgttcaaggtgcgtaatattagtaagaagtatttatcagcttaacgtgataacaataatagtaatatgaaatatttattaaattttttataattaatctctgctagaaaatttgattaatcatttttagtagaatttgtttttctcaactaggtttttaaaa

SEQ ID NO: 1843 - DNA, 604 bp, Artificial
  Mutations within GlyA3B4 introduced by GmGlyA3B4_T02TALE nuclease
gttcatgtacggttgcagatataaacgaagcatagcttatgtatgaggtgtaacaaaattggaaacaatagccatgcaaggtgaagaatgtcaccaactcagaaacccttcttcattgacgtgtccctcactcactctcctctcttcactataaatcgccactcttcgtgttctccacttcaccaactccttcaaacttattaacactttccttagttcaatatggggaagcccttcttcactctctctctttcttccctttgcttgctactcttgtcgagtgcatgcgttggaacccgaccaccgcgttgagtccgaaggtggtcttattgaaacatggaactctcaacaccctgagctgcaatgcgccggtgtcactgtttccaaacgcaccctcaaccgcaacggcctccacttgccatcttactcaccttatccccaaatgatcattgtcgttcaaggtgcgtaatattagtaagaagtatttatcagcttaacgtgataacaataatagtaatatgaaatatttattaatttttataattaatctctgctagaaaatttgattaatcatttttagtagaatttgtttttctcaactagg

SEQ ID NO: 1844 - DNA, 566 bp, Artificial; identical to SEQ ID NO: 1766
  Mutations within GlyA3B4 introduced by GmGlyA3B4_T02TALE nuclease

SEQ ID NO: 1845 - DNA, 636 bp, Artificial
  Mutations within GlyA3B4 introduced by GmGlyA3B4_T02TALE nuclease
gttcatgtacggttgcagatataaacgaagcatagcttatgtatgaggtgtaacaaaattggaaacaatagccatgcaaggtgaagaatgtcaccaactcagaaacccttcttcattgacgtgtccctcactcactctcctctcttcactataaatcgccactcttcgtgttctccacttcaccaactccttcaaacttattaacactttccttagttcaatatggggaagcccttcttcactctctctctttcttccctttgcttgctactcttgtcgagtgcatctattacctccagcaagttcaacgagtgccaactcaacaacctcaacgcgttggaacccgaccaccgcgttgagtccgaaggtggtcttattgaaacatggaactctcaacaccctgagctgcaatgcgccggtgtcactgtttccaaacgcaccctcaaccgcaacggcctccacttgccatcttactcaccttatccccaaatgatcattgtcgttcaaggtgcgtaatattagtaagaagtatttatcagcttaacgtgataacaataatagtaatatgaaatatttattaaatttttataattaatctctgctagaaaatttgattaatcattttagtagaatttg

SEQ ID NO: 1846 - DNA, 471 bp, Artificial; identical to SEQ ID NO: 1723
  Mutations within GlyA3B4 introduced by GmGlyA3B4_T02TALE nuclease

SEQ ID NO: 1847 - DNA, 515 bp, Artificial
  Mutations within GlyA3B4 introduced by GmGlyA3B4_T02TALE nuclease
gttcatgtacggttgcagatataaacgaagcatagcttatgtatgaggtgtaacaaaattggaaacaatagccatgcaaggtgaagaatgtcaccaactcagaaacccttcttcattgacgtgtccctcactcactctcctctcttcactataaatcgccactcttcgtgttctccacttcaccaactccttcaaacttattaacactttccttagttcaacaacctcaacgcgttggaacccgaccaccgcgttgagtccgaaggtggtcttattgaaacatggaactctcaacaccctgagctgcaatgcgccggtgtcactgtttccaaacgcaccctcaaccgcaacggcctccacttgccatcttactcaccttatccccaaatgatcattgtcgttcaaggtgcgtaatattagtaagaagtatttatcagcttaacgtgataacaataatagtaatatgaaatatttattaaattttttataattaatctctgctagaaaatttgatt

SEQ ID NO: 1848 - DNA, 660 bp, Artificial; identical to SEQ ID NO: 1763
  Mutations within GlyA3B4 introduced by GmGlyA3B4_T02TALE nuclease

SEQ ID NO: 1849 - DNA, 667 bp, Artificial; identical to SEQ ID NO: 1838
  Mutations within GlyA3B4 introduced by GmGlyA3B4_T02TALE nuclease

SEQ ID NO: 1850 - DNA, 505 bp, Artificial
  Mutations within GlyA3B4 introduced by GmGlyA3B4_T02TALE nuclease
gttcatgtacggttgcagatataaacgaagcatagcttatgtatgaggtgtaacaaaattggaaacaatagccatgcaaggtgaagaatgtcaccaactcagaaacccttcttcattgacgtgtccctcactcactctcctctcttcactataaatcgccactcttcgtgttctccacttcaccaactccttcaaacttattaacactttccttagttcaatatggggaagcccttcttcactctcaacaccctgagctgcaatgcgccggtgtcactgtttccaaacgcaccctcaaccgcaacggcctccacttgccatcttactcaccttatccccaaatgatcattgtcgttcaaggtgcgtaatattagtaagaagtatttatcagcttaacgtgataacaataatagtaatatgaaatatttattaaattttttataattaatctctgctagaaaatttgattaatcatttttagtagaatttgtttttctcaactagg

SEQ ID NO: 1851 - DNA, 571 bp, Artificial
  Mutations within GlyA3B4 introduced by GmGlyA3B4_T02TALE nuclease
gttcatgtacggttgcagatataaacgaagcatagcttatgtatgaggtgtaacaaaattggaaacaatagccatgcaaggtgaagaatgtcaccaactcagaaacccttcttcattgacgtgtccctcactcactctcctctcttcactataaatcgccactcttcgtgttctccacttcaccaactccttcaaacttattaacactttccttagttcaatatggggaagcccttcttcactctctctctttcttccctttgcttgctactcttgtcaactcaacaacctcaacgcgttggaacccgaccaccgcgttgagtccgaaggtggtcttattgaaacatggaactctcaacaccctgagctgcaatgcgccggtgtcactgtttccaaacgcaccctcaaccgcaacggcctccacttgccatcttactcaccttatccccaaatgatcattgtcgttcaaggtgcgtaatattagtaagaagtattatcagcttaacgtgataacaataatagtaatatgaaatatttattaaattttttataattaatctctgctagaaaa

SEQ ID NO: 1852 - DNA, 655 bp, Artificial
  Mutations within GlyA3B4 introduced by GmGlyA3B4_T02TALE nuclease
gttcatgtacggttgcagatataaacgaagcatagcttatgtatgaggtgtaacaaaattggaaacaatagccatgcaaggtgaagaatgtcaccaactcagaaacccttcttcattgacgtgtccctcactcactctcctctcttcactataaatcgccactcttcgtgttctccacttcaccaactccttcaaacttattaacactttccttagttcaatatggggaagcccttcttcactctctctctttcttccctttgcttgctactcttgtcgagtgcatgctattacctccagcaagttcaacgagtgccaactcaacaacctcaacgcgttggaacccgaccaccgcgttgagtccgaaggtggtcttattgaaacatggaactctcaacaccctgagctgcaatgcgccggtgtcactgtttccaaacgcaccctcaaccgcaacggcctccacttgccatcttactcaccttatccccaaatgatcattgtcgttcaaggtgcgtaatattagtaagagtatttatcagcttaacgtgataacaataatagtaatatgaaatatttattaaatttttataattaatctctgctagaaaatttgattaatcattttagtagaatttgtttttctcaactaggtttt

SEQ ID NO: 1853 - DNA, 659 bp, Artificial
  Mutations within GlyA3B4 introduced by GmGlyA3B4_T02TALE nuclease
gttcatgtacggttgcagatataaacgaagcatagcttatgtatgaggtgtaacaaaattggaaacaatagccatgcaaggtgaagaatgtcaccaactcagaaacccttcttcattgacgtgtccctcactcactctcctctcttcactataaatcgccactcttcgtgttctccacttcaccaactccttcaaacttattaacactttccttagttcaatatggggaagcccttcttcactctctctctttcttccctttgcttgctactcttgtcgagtgcattacctccagcaagttcaacgagtgccaactcaacaacctcaacgcgttggaacccgaccaccgcgttgagtccgaaggtggtcttattgaaacatggaactctcaacaccctgagctgcaatgcgccggtgtcactgtttccaaacgcaccctcaaccgcaacggcctccacttgccatcttactcaccttatccccaaatgatcattgtcgttcaaggtgcgtaatattagtaagaagtatttatcagcttaacgtgataacaataatagtaatatgaaatatttattaaatttttataattaatctctgctagaaaatttgattaatcattttagtagaatttgttttctcaactaggttttaaaacacca

SEQ ID NO: 1854 - DNA, 630 bp, Artificial
  Mutations within GlyA3B4 introduced by GmGlyA3B4_T02TALE nuclease
gttcatgtacggttgcagatataaacgaagcatagcttatgtatgaggtgtaacaaaattggaaacaatagccatgcaaggtgaagaatgtcaccaactcagaaacccttcttcattgacgtgtccctcactcactctcctctcttcactataaatcgccactcttcgtgttctccacttcaccaactccttcaaacttattaacactttccttagttcaatatggggaagcccttcttcactctctctctttcttccctttgcttgctactcttgtcgacgagtgccaactcaacaacctcaacgcgttggaacccgaccaccgcgttgagtccgaaggtggtcttattgaaacatggaactctcaacaccctgagctgcaatgcgccggtgtcactgtttccaaacgcaccctcaaccgcaacggcctccacttgccatcttactcaccttatccccaaatgatcattgtcgttcaaggtgcgtaatattagtaagaagtatttatcagcttaacgtgataacaataatagtaatatgaaatatttattaaattttttataattaatctctgctagaaaatttgattaatcatttttagtagaatttgttttttctcaactaggtttt

SEQ ID NO: 1855 - DNA, 659 bp, Artificial
  Mutations within GlyA3B4 introduced by GmGlyA3B4_T02TALE nuclease
gttcatgtacggttgcagatataaacgaagcatagcttatgtatgaggtgtaacaaaattggaaacaatagccatgcaaggtgaagaatgtcaccaactcagaaacccttcttcattgacgtgtccctcactcactctcctctcttcactataaatcgccactcttcgtgttctccacttcaccaactccttcaaacttattaacactttccttagttcaatatggggaagcccttcttcactctctctctttcttccctttgcttgctactcttgtatgcctattacctccagcaagttcaacgagtgccaactcaacaacctcaacgcgttggaacccgaccaccgcgttgagtccgaaggtggtcttattgaaacatggaactctcaacaccctgagctgcaatgcgccggtgtcactgtttccaaacgcaccctcaaccgcaacggcctccacttgccatcttactcaccttatccccaaatgatcattgtcgttcaaggtgcgtaatattagtaagaagtatttatcagcttaacgtgataacaataatagtaatatgaaatatttattaaatttttataattaatctctgctagaaaatttgattaatcattttagtagaatttgttttctcaactaggtttttaaaacacca

SEQ ID NO: 1856 - DNA, 646 bp, Artificial; identical to SEQ ID NO: 793
  Mutations within GlyA3B4 introduced by GmGlyA3B4_T02TALE nuclease

SEQ ID NO: 1857 - DNA, 638 bp, Artificial
  Mutations within GlyA3B4 introduced by GmGlyA3B4_T02TALE nuclease
gttcatgtacggttgcagatataaacgaagcatagcttatgtatgaggtgtaacaaaattggaaacaatagccatgcaaggtgaagaatgtcaccaactcagaaacccttcttcattgacgtgtccctcactcactctcctctcttcactataaatcgccactcttcgtgttctccacttcaccaactccttcaaacttattaacactttccttagttcaatatggggaagcccttcttcactctctctctttcttcccttcttcactctctctctttcttccctttggggataagcccttcttcactctctctctttcttccctttgcggtgtcatctactcttgctattacctccagcaagttcaacgagtgccaactcaacaacctcaacgcgttggaacccgaccaccgcgttgagtccgaaggtggtcttattgaacatggaactctcaacaccctgagctgcaatgcgccggtgtcactgtttccaaacgcaccctcaaccgcaacggcctccacttgccatcttactcaccttatccccaaatgatcattgtcgttcaaggtgcgtaatattagtaagaagtatttatcagcttaacgtgataacaataatagtaatatgaaatatttatt

SEQ ID NO: 1858 - DNA, 659 bp, Artificial
  Mutations within GlyA3B4 introduced by GmGlyA3B4_T02TALE nuclease
gttcatgtacggttgcagatataaacgaagcatagcttatgtatgaggtgtaacaaaattggaaacaatagccatgcaaggtgaagaatgtcaccaactcagaaacccttcttcattgacgtgtccctcactcactctcctctcttcactataaatcgccactcttcgtgttctccacttcaccaactccttcaaacttattaacactttccttagttcaatatggggaagcccttcttcactctctctctttcttccctttgcttgctactcttgtcgagtgcatattacctccagcaagttcaacgagtgccaactcaacaacctcaacgcgttggaacccgaccaccgcgttgagtccgaaggtggtcttattgaaacatggaactctcaacaccctgagctgcaatgcgccggtgtcactgtttccaaacgcaccctcaaccgcaacgcctccactgccatcttactcaccttatccccaaatgatccattgtcgttcaaggtgcgtaatattagtaagaagtattatcagcttaacgtgataacaataatagtaatatgaaatatttattaaatttttataattaatctctgctagaaaatttgattaatcattttagtagaatttgttttctcaactaggttttaaaacacca

SEQ ID NO: 1859 - DNA, 651 bp, Artificial
  Mutations within GlyA3B4 introduced by GmGlyA3B4_T02TALE nuclease
gttcatgtacggttgcagatataaacgaagcatagcttatgtatgaggtgtaacaaaattggaaacaatagccatgcaaggtgaagaatgtcaccaactcagaaacccttcttcattgacgtgtccctcactcactctcctctcttcactataaatcgccactcttcgtgttctccacttcaccaactccttcaaacttattaacactttccttagttcaatatggggaagcccttcttcactctctctctttcttccctttgcttgctattacctccagcaagttcaacgagtgccaactcaacaacctcaacgcgttggaacccgaccaccgcgttgagtccgaaggtggtcttattgaaacatggaactctcaacaccctgagctgcaatgcgccggtgtcactgtttccaaacgcaccctcaaccgcaacggcctccacttgccatcttactcaccttatccccaaatgatcattgtcgttcaaggtgcgtaatattagtaagaagtatttatcagctttaacgtgataacaataatagtaatatgaaatatttattaaattttttataattaatctctgctagaaaatttgattaaatcatttttagtagaatttgttttttctcaactaggttttaaacaccaca

SEQ ID NO: 1860 - DNA, 523 bp, Artificial
  Mutations within GlyA3B4 introduced by GmGlyA3B4_T02TALE nuclease
gttcatgtacggttgcagatataaacgaagcatagcttatgtatgaggtgtaacaaaattggaaacaatagccatgcaaggtgaagaatgtcaccaactcagaaacccttcttcattgacgtgtccctcactcactctcctctcttcactataaatcgccactcttcgtgttctccacttcaccaactcaacaacctcaacgcgttggaacccgaccaccgcgttgagtccgaaggtggtcttattgaaacatggaactctcaacaccctgagctgcaatgcgccggtgtcactgtttccaaacgcaccctcaaccgcaacggcctccacttgccatcttactcaccttatccccaaatgatcattgtcgttcaaggtgcgtaatattagtaagaagtattttatcagcttaacgtgataacaataatagtaatatgaaaatatttattaaattttttataattaatctctgctagaaaatttgattaatcatttttagtagaatttgtttttctcaactagg

SEQ ID NO: 1861 - DNA, 526 bp, Artificial
  Mutations within GlyA3B4 introduced by GmGlyA3B4_T02TALE nuclease
gttcatgtacggttgcagatataaacgaagcatagcttatgtatgaggtgtaacaaaattggaaacaatagccatgcaaggtgaagaatgtcaccaactcagaaacccttcttcattgacgtgtccctcactcactctcctctcttcactataaatcgccactcttcgtgttctccacttcaccaactccttcaaacttattaacactttccttagttcaatatggggaagcccttcttcacttcccttggtcttattgaaacatggaactctcaacaccctgagctgcaatgcgccggtgtcactgtttccaaacgcaccctcaaccgcaacggcctccacttgccatcttactcaccttatccccaaatgatcattgtcgttcaaggtgcgtaatattagtaagaagtatttatcagcttaacgtgataacaataatagtaatatgaaatatttattaaattttttataattaatctctgctagaaaatttgattaatcatttttagtagaatttgtttttctc

SEQ ID NO: 1862 - DNA, 654 bp, Artificial
  Mutations within GlyA3B4 introduced by GmGlyA3B4_T02TALE nuclease
  misc_feature (530): n is a or c or t or g
gttcatgtacggttgcagatataaacgaagcatagcttatgtatgaggtgtaacaaaattggaaacaatagccatgcaaggtgaagaatgtcaccaactcagaaacccttcttcattgacgtgtccctcactcactctcctctcttcactataaatcgccactcttcgtgttctccacttcaccaactccttcaaacttattaacactttccttagttcaatatggggaagcccttcttcactctctctctttcttccctttgcttgctactcttgtcgagtgcatgctattacctccagcaagttcaacgagtgccaactcaacaacctcaacgcgttggaacccgaccaccgcgttgagtccgaaggtggtcttattgaaacatggaactctcaacaccctgagctgcaatgcgccggtgtcactgtttccaaacgcaccctcaaccgcaacggcctccacttgccatcttactcaccttatccccaaatgatcattgtcgttcaaggtgcgtaatattagtaagagnatttatcagcttaacgtgataacaataatagtaatatgaaatatttattaaatttttataattaatctctgctagaaaatttgattaatcattttagtagaatttgttttctcaactaggtttt

SEQ ID NO: 1863 - DNA, 661 bp, Artificial; identical to SEQ ID NO: 1694
  Mutations within GlyA3B4 introduced by GmGlyA3B4_T02TALE nuclease

SEQ ID NO: 1864 - DNA, 581 bp, Artificial
  Mutations within GlyA3B4 introduced by GmGlyA3B4_T02TALE nuclease
gttcatgtacggttgcagatataaacgaagcatagcttatgtatgaggtgtaacaaaattggaaacaatagccatgcaaggtgaagaatgtcaccaactcagaaacccttcttcattgacgtgtccctcactcactctcctctcttcactataaatcgccactcttcgtgttctccacttcaccaactccttcaaacttattaacactttccttagttcaatatggggaagcccttcttcactctcaacaacctcaacgcgttggaacccgaccaccgcgttgagtccgaaggtggtcttattgaaacatggaactctcaacaccctgagctgcaatgcgccggtgtcactgtttccaaacgcaccctcaaccgcaacggcctccacttgccatcttactcaccttatccccaaatgatcattgtcgttcaaggtgcgtaatattagtaagaagtatttatcagcttaacgtgataacaataatagtaatatgaaatatttattaaatttttttataattaatctctgctagaaaattttgattaattcatttttagtagaatttgtttttctcaactagg

SEQ ID NO: 1865 - DNA, 671 bp, Artificial
  Mutations within GlyA3B4 introduced by GmGlyA3B4_T02TALE nuclease
  misc_feature (291); (297): n is a or c or t or g
gttcatgtacggttgcagatataaacgaagcatagcttatgtatgaggtgtaacaaaattggaaacaatagccatgcaaggtgaagaatgtcaccaactcagaaacccttcttcattgacgtgtccctcactcactctcctctcttcactataaatcgccactcttcgtgttctccacttcaccaactccttcaaacttattaacactttccttagttcaatatggggaagcccttcttcactctctctctttcttccctttgcttgctactcttgtcgagtgcttgcttntaatcncctcgcaagtcaatcacgtgtcacctacatcaacctcaacctcagcggttggaacccgaccaccgcgttgagtccgaaggtggtcttattgaaacatggaactctcaacaccctgagctgcaatgcgccggtgtcactgtttccaaacgcaccctcaaccgcaacggcctccacttgccatcttactcaccttatccccaaatgatcattgtcgttcaaggtgcgtaatattagtaagaagtatttatcagcttaacgtgataacaataatagtaatatgaaaatatttattaaatttttataattaatctctgctagaaaatttgataatcattttagtagaatttgtttttctcaactaggtttaaacacca

SEQ ID NO: 1866 - DNA, 629 bp, Artificial
  Mutations within GlyA3B4 introduced by GmGlyA3B4_T02TALE nuclease
gttcatgtacggttgcagatataaacgaagcatagcttatgtatgaggtgtaacaaaattggaaacaatagccatgcaaggtgaagaatgtcaccaactcagaaacccttcttcattgacgtgtccctcactcactctcctctcttcactataaatcgccactcttcgtgttctccacttcaccaactccttcaaacttattaacactttccttagttcaatatggggaagcccttcttcactctctctcttcaaacttattacctccagcaagttcaacgagtgccaactcaacaacctcaacgcgttggaacccgaccaccgcgttgagtccgaaggtggtcttattgaaacatggaactctcaacaccctgagctgcaatgcgccggtgtcactgtttccaaacgcaccctcaaccgcaacggcctccacttgccatcttactcaccttatccccaaatgatcattgtcgttcaaggtgcgtaatattagtaagaagtatttatcagcttaacgtgataacaataatagtaatatgaaatatttattaaattttttataattaatctctgctagaaaatttgattaatcatttttagtagaatttgttttttctcaactaggtttt

SEQ ID NO: 1867 - DNA, 649 bp, Artificial
  Mutations within GlyA3B4 introduced by GmGlyA3B4_T02TALE nuclease
gttcatgtacggttgcagatataaacgaagcatagcttatgtatgaggtgtaacaaaattggaaacaatagccatgcaaggtgaagaatgtcaccaactcagaaacccttcttcattgacgtgtccctcactcactctcctctcttcactataaatcgccactcttcgtgttctccacttcaccaactccttcaaacttattaacactttccttagttcaatatggggaagcccttcttcactctctctctttcttccctttgtcttgctattacctccagcaagttcaacgagtgccaactcaacaacctcaacgcgttggaacccgaccaccgcgttgagtccgaaggtggtcttattgaaacatggaactctcaacaccctgagctgcaatgcgccggtgtcactgtttccaaacgcaccctcaaccgcaacggcctccacttgccatcttactcaccttatccccaaatgatcattgtcgttcaaggtgcgtaatattagtaagaagtatttatcagcttaacgtgataacaataatagtaatatgaaatatttattaaattttttataattaatctctgctagaaaatttgattaatcatttttagtagaatttgttttttctcaactaggttttaaacaccac

SEQ ID NO: 1868 - DNA, 647 bp, Artificial
  Mutations within GlyA3B4 introduced by GmGlyA3B4_T02TALE nuclease
gttcatgtacggttgcagatataaacgaagcatagcttatgtatgaggtgtaacaaaattggaaacaatagccatgcaaggtgaagaatgtcaccaactcagaaacccttcttcattgacgtgtccctcactcactctcctctcttcactataaatcgccactcttcgtgttctccacttcaccaactccttcaaacttattaacactttccttagttcaatatggggaagcccttcttcactctctctctttcttccctttgcttgctactcttgtcgagtgcatccagcaagttcaacgagtgccaactcaacaacctcaacgcgttggaacccgaccaccgcgttgagtccgaaggtggtcttattgaaacatggaactctcaacaccctgagctgcaatgcgccggtgtcactgtttccaaacgcaccctcaaccgcaacggcctccacttgccatcttactcaccttatccccaaatgatcattgtcgttcaaggtgcgtaaatattagtaagaagtatttatcagcttaacgtgataacaataatagtaatatgaaatatttattaaattttttataattaatctctgctagaaaatttgattaatctttttagtagaattgttttttctcaactaggttt

SEQ ID NO: 1869 - DNA, 595 bp, Artificial
  Mutations within GlyA3B4 introduced by GmGlyA3B4_T02TALE nuclease
gttcatgtacggttgcagatataaacgaagcatagcttatgtatgaggtgtaacaaaattggaaacaatagccatgcaaggtgaagaatgtcaccaactcagaaacccttcttcattgacgtgtccctcactcactctcctctcttcactataaatcgccactcttcgtgttctccacttcaccaactccttcaaacttattaacactttccttagttcaatatggggaagcccttcttcactctctctctttcttccctttgcttgctactcttgtcgagtgcacaccgcgttgagtccgaaggtggtcttattgaaacatggaactctcaacaccctgagctgcaatgcgccggtgtcactgtttccaaacgcacccctcaaccgcaacggcctccacttgccatcttactcaccttatccccaaatgatcattgtcgttcaaggtgcgtaatattagtaagaagtatttatcagcttaacgtgataacaataatagtaatatgaaatatttattaaattttttataattaatctctgctagaaaatttgattaatcatttttagtagaatttgtttttctcaactaggtttt

SEQ ID NO: 1870 - DNA, 632 bp, Artificial; identical to SEQ ID NO: 1756
  Mutations within GlyA3B4 introduced by GmGlyA3B4_T02TALE nuclease

SEQ ID NO: 1871 - DNA, 665 bp, Artificial
  Mutations within GlyA3B4 introduced by GmGlyA3B4_T02TALE nuclease
gttcatgtacggttgcagatataaacgaagcatagcttatgtatgaggtgtaacaaaattggaaacaatagccatgcaaggtgaagaatgtcaccaactcagaaacccttcttcattgacgtgtccctcactcactctcctctcttcactataaatcgccactcttcgtgttctccacttcaccaactccttcaaacttattaacactttccttagttcaatatggggaagcccttcttcactctctctctttcttccctttgcttgctactcttgtcgagtgcatctattacctccagcaagttcaacgagtgccaactcaacaacctcaacgcgttggaaacccgaccaccgcgttgagtccgaaggtggtcttattgaaacatggaactctcaacaccctgagctgcaatgcgccggtgtcactgtttccaaacgcaccctcaaccgcaacggcctccacttgccatcttactcaccttatccccaaatgatcattgtcgttcaaggtgcgtaatattagtaagaagtatttatcagcttaacgtgataacaataatagtaatatgaaatatttattaaaatttttataaattaatctctgctagaaaatttgattaatcattttagtagaatttgttttctcaactaggttttaaaacacc

SEQ ID NO: 1872 - DNA, 511 bp, Artificial
  Mutations within GlyA3B4 introduced by GmGlyA3B4_T02TALE nuclease
gttcatgtacggttgcagatataaacgaagcatagcttatgtatgaggtgtaacaaaattggaaacaatagccatgcaaggtgaagaatgtcaccaactcagaaacccttcttcattgacgtgtccctcactcactctcctccagcaagttcaacgagtgccaactcaacaacctcaacgcgttggaacccgaccaccgcgttgagtccgaaggtggtcttattgaaacatggaactctcaacaccctgagctgcaatgcgccggtgtcactgtttccaaacgcaccctcaaccgcaacggcctccacttgccatcttactcaccttatccccaaatgatcattgtcgttcaaggtgcgtaatattagtaagaagtatttatcagcttaacgtgataacaataatagtaatatgaaatatttattaaattttttataattaatctctgctagaaaatttgattaatcatttttagtagaatttgtttttctcaactaggttttaaacacca

SEQ ID NO: 1873 - DNA, 643 bp, Artificial
  Mutations within GlyA3B4 introduced by GmGlyA3B4_T02TALE nuclease
gttcatgtacggttgcagatataaacgaagcatagcttatgtatgaggtgtaacaaaattggaaacaatagccatgcaaggtgaagaatgtcaccaactcagaaacccttcttcattgacgtgtccctcactcactctcctctcttcactataaatcgccactcttcgtgttctccacttcaccaactccttcaaacttattaacactttccttagttcaatatggggaagcccttcttcactctctctctttcttccctttgcttgctactcttgtcgagtgcctccagcaagttcaacgagtgccaactcaacaacctcaacgcgttggaacccgaccaccgcgttgagtccgaaggtggtcttattgaaacatggaactctcaacaccctgagctgcaatgcgccggtgtcactgtttccaaacgcaccctcaaccgcaacggcctccacttgccatcttactcaccttatccccaaatgatcattgtcgttcaaggtgcgtaatattagtaagaagtatttatcagcttaacgtgataacaataatagtaatatgaaatatttattaaattttttataattaatctctgctagaaaatttgattaatctttttagtagaattgttttttctcaactagg

SEQ ID NO: 1874 - DNA, 579 bp, Artificial
  Mutations within GlyA3B4 introduced by GmGlyA3B4_T02TALE nuclease
gttcatgtacggttgcagatataaacgaagcatagcttatgtatgaggtgtaacaaaattggaaacaatagccatgcaaggtgaagaatgtcaccaactcagaaacccttcttcattgacgtgtccctcactcactctcctctcttcactataaatcgccactcttcgtgttctccacttcaccaactccttcaaacttattaacactttccttagttcaatatggggaagcccttcttcactctctctctttcttccctttgcttgctactcttgtcgagtgccaactcaacaacctcaacgcgttggaacccgaccaccgcgttgagtccgaaggtggtcttattgaaacatggaactctcaacaccctgagctgcaatgcgccggtgtcactgtttccaaacgcaccctcaaccgcaacggcctccacttgccatcttactcaccttatccccaaatgatcattgtcgttcaaggtgcgtaatattagtaagaagtatttatcagcttaacgtgataacaataatagtaatatgaaatatttattaaattttttataattaatctctgctagaaaa

SEQ ID NO: 1875 - DNA, 666 bp, Artificial
  Mutations within GlyA3B4 introduced by GmGlyA3B4_T02TALE nuclease
gttcatgtacggttgcagatataaacgaagcatagcttatgtatgaggtgtaacaaaattggaaacaatagccatgcaaggtgaagaatgtcaccaactcagaaacccttcttcattgacgtgtccctcactcactctcctctcttcactataaatcgccactcttcgtgttctccacttcaccaactccttcaaacttattaacactttccttagttcaatatggggaagcccttcttcactctctctctttcttccctttgcttgctactcttgtcgagtgcatgctattacctccagcaagttcaacgagtgccaactcaacaacctcaacgcgttggaacccgaccaccgcgttgagtccgaaggtggtcttattgaaacatggaactctcaacaccctgagctgcaatgcgccggtgtcactgtttccaaacgcaccctcaaccgcaacggcctccacttgccatcttactcaccttatccccaaatgatcattgtcgttcaaggtgcgtaatattagtaagaagtatttatcagcttaacgtgataacaataatagtaatatgaaatatttattaaatttttataattaatctctgctagaaaatttgattaatcattttagtagaatttgtttttctcaactaggtttttaaaacacca

SEQ ID NO: 1876 - DNA, 525 bp, Artificial
  Mutations within GlyA3B4 introduced by GmGlyA3B4_T02TALE nuclease
gttcatgtacggttgcagatataaacgaagcatagcttatgtatgaggtgtaacaaaattggaaacaatagccatgcaaggtgaagaatgtcaccaactcagaaacccttcttcattgacgtgtccctcactcactctcctctcttcactataaatcgccactcttcgtgttctccacttcaccaactccttcaaacttattaacactttccttagttcaatatggggaagcccttcttcactctctctctttcttccctttgctattacctccagcaagttcaacgagtgccaactcaacaacctcaacgcgttggaacccgaccaccgcgttgagtccgaaggtggtcttattgaaacatggaactactcaaacaccccatgagcctgcaaatgcgccaggtgtcactgtttttcccaaaacgcacccctcaaccgcaaacggccatccgcaccttgcctatccttacttcaccttatcccctaaatcagatcaattgtcgttcaaggtgcgtaaatattagt

SEQ ID NO: 1877 - DNA, 659 bp, Artificial; identical to SEQ ID NO: 1853
  Mutations within GlyA3B4 introduced by GmGlyA3B4_T02TALE nuclease

SEQ ID NO: 1878 - DNA, 663 bp, Artificial
  Mutations within GlyA3B4 introduced by GmGlyA3B4_T02TALE nuclease
gttcatgtacggttgcagatataaacgaagcatagcttatgtacgaggtgtaacaaaattggaaacaatagccatgcaaggtgaagaatgtcaccaactcagaaacccttcttcattgacgtgtccctcactcactctcctctcttcactataaatcgccactcttcgtgttctccacttcaccaactccttcaaacttattaacactttccttagttcaatatggggaagcccttcttcactctctctctttcttccctttgcttgctactcttgtcgagtgcatctattacctccagcaagttcaacgagtgccaactcaacaacctcaacgcgttggaacccgaccaccgcgttgagtccgaaggtggtcttattgaaacatggaactctcaacaccctgagctgcaatgcgccggtgtcactgtttccaaacgcaccctcaaccgcaacggcctccacttgccatcttactcaccttatccccaaatgatcattgtcgttcaaggtgcgtaatattagtaagaagtatttatcagcttaacgtgataacaataatagtaatatgaaatatttattaaatttttataattaatctctgctagaaaatttgattaatcattttagtagaatttgttttctcaactaggttttaaaacacca

SEQ ID NO: 1879 - DNA, 666 bp, Artificial; identical to SEQ ID NO: 1812
  Mutations within GlyA3B4 introduced by GmGlyA3B4_T02TALE nuclease

SEQ ID NO: 1880 - DNA, 661 bp, Artificial
  Mutations within GlyA3B4 introduced by GmGlyA3B4_T02TALE nuclease
gttcatgtacggttgcagatataaacgaagcatagcttatgtatgaggtgtaacaaaattggaaacaatagccatgcaaggtgaagaatgtcaccaactcagaaacccttcttcattgacgtgtccctcactcactctcctctcttcactataaatcgccactcttcgtgttctccacttcaccaactccttcaaacttattaacactttccttagttcaatatggggaagcccttcttcactctctctctttcttccctttgcttgctactcttgtcgagtgcatttgctattacctccagcaagttcaacgagtgccaactcaacaacctcaacgcgttggaacccgaccaccgcgttgagtccgaaggtggtcttattgaaacatggaactctcaacaccctgagctgcaatgcgccggtgtcactgtttccaaacgcaccctcaaccgcaacggcctccacttgccatcttactcaccttatccccaaatgatcattgtcgttcaaggtgcgtaatattagtaagagtatttatcagcttaacgtgataacaataatagtaatatgaaatatttattaaatttttataattaatctctgctagaaaatttgattaatcattttagtagaatttgttttctcaactaggtttttaaaa

SEQ ID NO: 1881 - DNA, 632 bp, Artificial
  Mutations within GlyA3B4 introduced by GmGlyA3B4_T02TALE nuclease
gttcatgtacggttgcagatataaacgaagcatagcttatgtatgaggtgtaacaaaattggaaacaatagccatgcaaggtgaagaatgtcaccaactcagaaacccttcttcattgacgtgtccctcactcactctcctctcttcactataaatcgccactcttcgtgttctccacttcaccaactccttcaaacttattaacactttccttagttcaatatggggaagcccttcttcactctctctctttcttccctttgcttgctactcttgtcgagtgctttacctccagcaagttcaacgagtgccaactcaacaacctcaacgcgttggaacccgaccaccgcgttgagtccgaaggtggtcttattgaaacatggaactctcaacaccctgagctgcaatgcgccggtgtcactgtttccaaacgcaccctcaaccgcaacggcctccacttgccatcttactcaccttatccccaaatgatcattgtcgttcaaggtgcgtaatattagtaagaagtatttatcagcttaacgtgataacaataatagtaatatgaaatatttattaaatttttataattaatctctgctagaaaatttgattaatcattttagtagaatttg

SEQ ID NO: 1882 - DNA, 476 bp, Artificial
  Mutations within GlyA3B4 introduced by GmGlyA3B4_T02TALE nuclease
gttcatgtacggttgcagatataaacgaagcatagcttatgtatgaggtgtaacaaaattggaaacaatagccatgcaaggtgaagaatgtcaccaactcagaaacccttcttcattgacgtgtccctcactcactctcctctcttcactataaatcgccactcttcgtgttctccacttcaccaactccttcaaacttattaacactttccttagttcaatatggaacccgaccaccgcgttgagtccgaaggtggtcttattgaaacatggaactctcaacaccctgagctgcaatgcgccggtgtcactgtttccaaacgcaccctcaaccgcaacggcctccacttgccatcttactcaccttatccccaaatgatcattgtcgttcaaggtgcgtaatattagtaagaagtatttatcagcttaacgtgataacaataatagtaatatgaaatatttattaaattttttat

SEQ ID NO: 1883 - DNA, 503 bp, Artificial
  Mutations within GlyA3B4 introduced by GmGlyA3B4_T02TALE nuclease
gttcatgtacggttgcagatataaacgaagcatagcttatgtatgaggtgtaacaaaattggaaacaatagccatgcaaggtgaagaatgtcaccaactcagaaacccttcttcattgacgtgtccctcactcactctcctctcttcactataaatcgccactcttcgtgttctccacttcaccaactccttcaaacttatcaacgagtgccaactcaacaacctcaacgcgttggaacccgaccaccgcgttgagtccgaaggtggtcttattgaaacatggaactctcaacaccctgagctgcaatgcgccggtgtcactgtttccaaacgcaccctcaaccgcaacggcctccacttgccatcttactcaccttatcccccaaatgatcattgtcgttcaaggtgcgtaatattagtaagaagtatttatcagcttaacgtgataacaataatagtaatatgaaatatttattaaattttttataattaatctctgctag

SEQ ID NO: 1884 - DNA, 661 bp, Artificial
  Mutations within GlyA3B4 introduced by GmGlyA3B4_T02TALE nuclease
gttcatgtacggttgcagatataaacgaagcatagcttatgtatgaggtgtaacaaaattggaaacaatagccatgcaaggtgaagaatgtcaccaactcagaaacccttcttcattgacgtgtccctcactcactctcctctcttcactataaatcgccactcttcgtgttctccacttcaccaactccttcaaacttattaacactttccttagttcaatatggggaagcccttcttcactctctctctttcttccctttgcttgctactcttgtcgagtgcatctattacctccagcaagttcaacgagtgccaactcaacaacctcaacgcgttggaacccgaccaccgcgttgagtccgaaggtggtcttattgaaacatggaactctcaacaccctgagctgcaatgcgccggtgtcactgtttccaaacgcaccctcaaccgcaacggcctccacttgccatcttactcaccttatccccaaatgatcattgtcgttcaaggtgcgtaatattagtaagaagtatttatcagcttaacgtgataacaatatagtaatatgaaatatttattaaatttttataattaatctctgctagaaaatttgattaatcattttagtagaatttgttttctcaactaggttttaaacacca

SEQ ID NO: 1885 - DNA, 636 bp, Artificial
  Mutations within GlyA3B4 introduced by GmGlyA3B4_T02TALE nuclease
gttcatgtacggttgcagatataaacgaagcatagcttatgtatgaggtgtaacaaaattggaaacaatagccatgcaaggtgaagaatgtcaccaactcagaaacccttcttcattgacgtgtccctcactcactctcctctcttcactataaatcgccactcttcgtgttctccacttcaccaactccttcaaacttattaacactttccttagttcaatatggggaagcccttcttcactctctctctttcttccctttgcttgctactcttgtcgagtgcatgctattacctccagcaagttcaacgagtgccaactcaacaacctcaacgcgttggaacccgaccaccgcgttgagtccgaaggtggtcttattgaaacatggaactctcaacaccctgagctgcaatgcgccggtgtcactgtttccaaacgcaccctcaaccgcaacggcctccacttgccatcttactcaccttatccccaaatgatcattgtcgttcaaggtgcgtaatattagtaagagtatttatcagcttaacgtgataacaataatagtaatatgaaatatttattaaatttttataattaatctctgctagaaaatttgattaatcattttagtagaatttg

SEQ ID NO: 1886 - DNA, 582 bp, Artificial
  Mutations within GlyA3B4 introduced by GmGlyA3B4_T02TALE nuclease
gttcatgtacggttgcagatataaacgaagcatagcttatgtatgaggtgtaacaaaattggaaacaatagccatgcaaggtgaagaatgtcaccaactcagaaacccttcttcattgacgtgtccctcactcactctcctctcttcactataaatcgccactcttcgtgttctccacttcaccaactccttcaaacttattaacactttccttacctccagcaagttcaacgagtgccaactcaacaacctcaacgcgttggaacccgaccaccgcgttgagtccgaaggtggtcttattgaaacatggaactctcaacaccctgagctgcaatgcgccggtgtcactgtttccaaacgcaccctcaaccgcaacggcctccacttgccatcttactcaccttatccccaaatgatcattgtcgttcaaggtgcgtaatattagtaagaagtatttatcagcttaacgtgataacaataatagtaatatgaaatatttattaaatttttttataattaatctctgctagaaaattttgattaatcatttttagtagaatttgtttttctcaactaggtttt

SEQ ID NO: 1887 - DNA, 668 bp, Artificial
  Mutations within GlyA3B4 introduced by GmGlyA3B4_T02TALE nuclease
gttcatgtacggttgcagatataaacgaagcatagcttatgtatgaggtgtaacaaaattggaaacaatagccatgcaaggtgaagaatgtcaccaactcagaaacccttcttcattgacgtgtccctcactcactctcctctcttcactataaatcgccactcttcgtgttctccacttcaccaactccttcaaacttattaacactttccttagttcaatatggggaagcccttcttcactctctctctttcttccctttgcttgctactcttgtcgagtgcatcgctattacctccagcaagttcaacgagtgccaactcaacaacctcaacgcgttggaacccgaccaccgcgttgagtccgaaggtggtcttattgaaacatggaactctcaacaccctgagctgcaatgcgccggtgtcactgtttccaaacgcaccctcaaccgcaacggcctccacttgccatcttactcaccttatccccaaatgatcattgtcgttcaaggtgcgtaatattagtaagagtatttatcagcttaacgtgataacaataatagtaatatgaaaatatttattaaatttttataattaatctctgctagaaaatttgattaatcattttagtagaatttgtttttctcaactaggtttttaaacaccaca

SEQ ID NO: 1888 - DNA, 653 bp, Artificial
  Mutations within GlyA3B4 introduced by GmGlyA3B4_T02TALE nuclease
gttcatgtacggttgcagatataaacgaagcatagcttatgtatgaggtgtaacaaaattggaaacaatagccatgcaaggtgaagaatgtcaccaactcagaaacccttcttcattgacgtgtccctcactcactctcctctcttcactataaatcgccactcttcgtgttctccacttcaccaactccttcaaacttattaacactttccttagttcaatatggggaagcccttcttcactctctctctttcttccctttgcttgctactcttgtcgagttgctattacctccagcaagttcaacgagtgccaactcaacaacctcaacgcgttggaacccgaccaccgcgttgagtccgaaggtggtcttattgaaacatggaactctcaacaccctgagctgcaatgcgccggtgtcactgtttccaaacgcaccctcaaccgcaacggcctccacttgccatcttactcaccttatccccaaatgatcattgtcgttcaaggtgcgtaatattagtaagaagtatttatcagcttaacgtgataacaatatagtaatatgaaatatttattaaatttttataattaatctctgctagaaaatttgattaatcattttagtagaatttgtttttctcaactaggttttt

SEQ ID NO: 1889 - DNA, 667 bp, Artificial
  Mutations within GlyA3B4 introduced by GmGlyA3B4_T02TALE nuclease
gttcatgtacggttgcagatataaacgaagcatagcttatgtatgaggtgtaacaaaattggaaacaatagccatgcaaggtgaagaatgtcaccaactcagaaacccttcttcattgacgtgtccctcactcactctcctctcttcactataaatcgccactcttcgtgttctccacttcaccaactccttcaaacttattaacactttccttagttcaatatggggaagcccttcttcactctctctctttcttccctttgcttgctactcttgtcgagtgcatgctattacctccagcaagttcaacgagtgccaactcaacaacctcaacgcgttggaacccgaccaccgcgttgagtccgaaggtggtcttattgaaacatggaactctcaacaccctgagctgcaatgcgccggtgtcactgtttccaaacgcaccctcaaccgcaacggcctccacttgccatcttactcaccttatccccaaatgatcattgtcgttcaaggtgcgtaatattagtaagaagtatttatcagcttaacgtgataacaataatagtaatatgaaatatttattaaatttttataattaatctctgctagaaaatttgattaatcattttagtagaatttgtttttctcaactaggttttaaaacaccaca

SEQ ID NO: 1890 - DNA, 639 bp, Artificial
  Mutations within GlyA3B4 introduced by GmGlyA3B4_T02TALE nuclease
gttcatgtacggttgcagatataacgaagcatagcttatgtatgaggtgtaacaaaattggaaacaatagccatgcaaggtgaagaatgtcaccaactcagaaacccttcttcattgacgtgtccctcactcactctcctctcttcactataaatcgccactcttcgtgttctccacttcaccaactccttcaaacttattaacactttccttagttcaatatggggaagcccttcttcactctctctcttcaaacttattacctccagcaagttcaacgagtgccaactcaacaacctcaacgcgttggaacccgaccaccgcgttgagtccgaaggtggtcttattgaaacatggaactctcaacaccctgagctgcaatgcgccggtgtcactgtttccaaacgcaccctcaaccgcaacggcctccacttgccatcttactcaccttatccccaaatgatcattgtcgttcaaggtgcgtaatattagtaagaagtatttatcagctttaacgtgataacaataatagtaatatgaaatatttattaaattttttataattaatctctgctagaaaatttgattaatcatttttagtagaatttgttttttctcaactaggttttaaacaccaca

SEQ ID NO: 1891 - DNA, 666 bp, Artificial; identical to SEQ ID NO: 1875
  Mutations within GlyA3B4 introduced by GmGlyA3B4_T02TALE nuclease

SEQ ID NO: 1892 - DNA, 647 bp, Artificial
  Mutations within GlyA3B4 introduced by GmGlyA3B4_T02TALE nuclease
gttcatgtacggttgcagatataaacgaagcatagcttatgtatgaggtgtaacaaaattggaaacaatagccatgcaaggtgaagaatgtcaccaactcagaaacccttcttcattgacgtgtccctcactcactctcctctcttcactataaatcgccactcttcgtgttctccacttcaccaactccttcaaacttattaacactttccttagttcaatatggggaagcccttcttcactctctctctttcttccctttgcttgctactcttgtcgagtgcattacctccagcaagttcaacgagtgccaactcaacaacctcaacgcgttggaacccgaccaccgcgttgagtccgaaggtggtcttattgaaacatggaactctcaacaccctgagctgcaatgcgccggtgtcactgtttccaaacgcaccctcaaccgcaacggcctccacttgccatcttactcaccttatccccaaatgatcattgtcgttcaaggtgcgtaatattagtaagaagtatttatcagcttaacgtgataacaataatagtaatatgaaatatttattaaatttttataattaatctctgctagaaaatttgattaatcattttagtagaatttgtttttctcaactagg

SEQ ID NO: 1893 - DNA, 634 bp, Artificial
  Mutations within GlyA3B4 introduced by GmGlyA3B4_T02TALE nuclease
gttcatgtacggttgcagatataaacgaagcatagcttatgtatgaggtgtaacaaaattggaaacaatagccatgcaaggtgaagaatgtcaccaactcagaaacccttcttcattgacgtgtccctcactcactctcctctcttcactataaatcgccactcttcgtgttctccacttcaccaactccttcaaacttattaacactttccttagttcaatatggggaagcccttcttcactctctctctttcttccctttgcttgctactcttgtcgagtgcatattacctccagcaagttcaacgagtgccaactcaacaacctcaacgcgttggaacccgaccaccgcgttgagtccgaaggtggtcttattgaaacatggaactctcaacaccctgagctgcaatgcgccggtgtcactgtttccaaacgcaccctcaaccgcaacggcctccacttgccatcttactcaccttatccccaaatgatcattgtcgttcaaggtgcgtaatattagtaagaagtatttatcagcttaacgtgataacaataatagtaatatgaaatatttattaaatttttataattaatctctgctagaaaatttgattaatcattttagtagaatttg

SEQ ID NO: 1894 - DNA, 586 bp, Artificial
  Mutations within GlyA3B4 introduced by GmGlyA3B4_T02TALE nuclease
gttcatgtacggttgcagatataaacgaagcatagcttatgtatgaggtgtaacaaaattggaaacaatagccatgcaaggtgaagaatgtcaccaactcagaaacccttcttcattgacgtgtccctcactcactctcctctcttcactataaatcgccactcttcgtgttctccacttcaccaactccttcaaacttattaacactttccttagttcaatatggggaagcccttcttcactctctctctttcttccctttgcttgctactcttgtcgagtgcacaccgcgttgagtccgaaggtggtcttattgaaacatggaactctcaacaccctgagctgcaatgcgccggtgtcactgtttccaaacgcaccctcaaccgcaacggcctccacttgccatcttactcaccttatccccaaatgatcattgtcgttcaaggtgcgtaatattagtaagaagtatttatcagcttaacgtgataacaataatagtaatatgaaatatttattaaattttttataattaatctctgctagaaaatttgattaatcatttttagtagaatttgtttttctcaac

SEQ ID NO: 1895 - DNA, 633 bp, Artificial
  Mutations within GlyA3B4 introduced by GmGlyA3B4_T02TALE nuclease
gttcatgtacggttgcagatataaacgaagcatagcttatgtatgaggtgtaacaaaattggaaacaatagccatgcaaggtgaagaatgtcaccaactcagaaacccttcttcattgacgtgtccctcactcactctcctctcttcactataaatcgccactcttcgtgttctccacttcaccaactccttcaaacttattaacactttccttagttcaatatggggaagcccttcttcactctctctctttcttccctttgcttgctactcttgtcgagtgcatttacctccagcaagttcaacgagtgccaactcaacaacctcaacgcgttggaacccgaccaccgcgttgagtccgaaggtggtcttattgaaacatggaactctcaacaccctgagctgcaatgcgccggtgtcactgtttccaaacgcaccctcaaccgcaacggcctccacttgccatcttactcaccttatccccaaatgatcattgtcgttcaaggtgcgtaatattagtaagaagtatttatcagcttaacgtgataacaataatagtaatatgaaatatttattaaatttttataattaatctctgctagaaaatttgattaatcattttagtagaatttg

SEQ ID NO: 1896 - DNA, 592 bp, Artificial
  Mutations within GlyA3B4 introduced by GmGlyA3B4_T02TALE nuclease
gttcatgtacggttgcagatataaacgaagcatagcttatgtatgaggtgtaacaaaattggaaacaatagccatgcaaggtgaagaatgtcaccaactcagaaacccttcttcattgacgtgtccctcactcactctcctctcttcactataaatcgccactcttcgtgttctccacttcaccaactccttcaaacttattaacactttccttagttcaatatggggaagcccttcttcactctctctctttcttccctttgcttgctactcttgtcgagtgcatgtccgaaggtggtcttattgaaacatggaactctcaacaccctgagctgcaatgcgccggtgtcactgtttccaaacgcaccctcaaccgcaacggcctccacttgccatcttactcaccttatccccaaatgatcattgtcgttcaaggtgcgtaatattagtaagaagtatttatcagcttaacgtgataacaataatagtaatatgaaatatttattaaattttttataattaatctctgctagaaaatttgattaatcatttttagtagaatttgtttttctcaactaggttttaaacacca

SEQ ID NO: 1897 - DNA, 597 bp, Artificial
  Mutations within GlyA3B4 introduced by GmGlyA3B4_T02TALE nuclease
gttcatgtacggttgcagatataaacgaagcatagcttatgtatgaggtgtaacaaaattggaaacaatagccatgcaaggtgaagaatgtcaccaactcagaaacccttcttcattgacgtgtccctcactcactctcctctcttcactataaatcgccactcttcgtgttctccacttcaccaactccttcaaacttattaacactttccttagttcaatatggggaagcccttcttcactctctctctttcttccctttgcttgctactcttgtctattacctccagcaagttcaacgagtgccaactcaacaacctcaacgcgttggaacccgaccaccgcgttgagtccgaaggtggtcttattgaaacatggaactctcaacaccctgagctgcaatgcgccggtgtcactgtttccaaacgcaccctcaaccgcaacggcctccacttgccatcttactcaccttatccccaaatgatcattgtcgttcaaggtgcgtaatattagtaagaagtatttatcagcttaacgtgataacaataatagtaatatgaaatatttattaaattttttataattaatctctgctag

SEQ ID NO: 1898 - DNA, 655 bp, Artificial
  Mutations within GlyA3B4 introduced by GmGlyA3B4_T02TALE nuclease
gttcatgtacggttgcagatataaacgaagcatagcttatgtatgaggtgtaacaaaattggaaacaatagccatgcaaggtgaagaatgtcaccaactcagaaacccttcttcattgacgtgtccctcactcactctcctctcttcactataaatcgccactcttcgtgttctccacttcaccaactccttcaaacttattaacactttccttagttcaatatggggaagcccttcttcactctctctctttcttccctttgcttgctactcttgtcgagtgcatctattacctccagcaagttcaacgagtgccaactcaacaacctcaacgcgttggaacccgaccaccgcgttgagtccgaaggtggtcttattgaaacatggaactctcaacaccctgagctgcaatgcgccggtgtcactgtttccaaacgcaccctcaaccgcaacggcctccacttgccatcttactcaccttatccccaaatgatcattgtcgttcaaggtgcgtaatattagtaagaagtatttatcagcttaacgtgataacaataatagtaatatagaaatatttattaaatttttataattaatctctgctagaaaatttgattaatcattttagtagaatttgttttctcaactaggtttt

SEQ ID NO: 1899 - DNA, 660 bp, Artificial; identical to SEQ ID NO: 1796
  Mutations within GlyA3B4 introduced by GmGlyA3B4_T02TALE nuclease

SEQ ID NO: 1900 - DNA, 600 bp, Artificial
  Mutations within GlyA3B4 introduced by GmGlyA3B4_T02TALE nuclease
gttcatgtacggttgcagatataaacgaagcatagcttatgtatgaggtgtaacaaaattggaaacaatagccatgcaaggtgaagaatgtcaccaactcagaaacccttcttcattgacgtgtccctcactcactctcctctcttcactataaatcgccactcttcgtgttctccacttcaccaactccttcaaacttattaacactttccttagttcaatatggggaagcccttcttcactctctctctttcttccctttgcttgctactcttgtcgagtgccaactcaacaacctcaacgcgttggaacccgaccaccgcgttgagtccgaaggtggtcttattgaaacatggaactctcaacaccctgagctgcaatgcgccggtgtcactgtttccaaacgcaccctcaaccgcaacggcctccacttgccatcttactcaccttatcccaaatgatcattgtcgttcaaggtgcgtaatattagtaagaagtatttatcagcttaacgtgataacaataatagtaatatgaaatatttattaaattttttataattaatctctgctagaaaatttgattaatcatttttagtag

SEQ ID NO: 1901 - DNA, 649 bp, Artificial
  Mutations within GlyA3B4 introduced by GmGlyA3B4_T02TALE nuclease
gttcatgtacggttgcagatataaacgaagcatagcttatgtatgaggtgtaacaaaattggaaacaatagccatgcaaggtgaagaatgtcaccaactcagaaacccttcttcattgacgtgtccctcactcactctcctctcttcactataaatcgccactcttcgtgttctccacttcaccaactccttcaaacttattaacactttccttagttcaatatggggaagcccttcttcactctctctctttcttccctttgcttgctactcttgtcgagtgcatgctattacctccagcaagttcaacgagtgccaactcaacaacctcaacgcgttggaacccgaccaccgcgttgagtccgaaggtggtcttattgaaacatggaactctcaacaccctgagctgcaatgcgccggtgtcactgtttccaaacgcaccctcaaccgcaacggcctccacttgccatcttactcaccttatccccaaatgatcattgtcgttcaaggtgcgtaatattagtaagagtatttatcagcttaacgtgataacaatatagtaatatgaaatatttattaaatttttataattaatctctgctagaaaatttgattaatcattttagtagaatttgttttctcaactagg

SEQ ID NO: 1902 - DNA, 457 bp, Artificial; identical to SEQ ID NO: 1695
  Mutations within GlyA3B4 introduced by GmGlyA3B4_T02TALE nuclease

SEQ ID NO: 1903 - DNA, 657 bp, Artificial
  Mutations within GlyA3B4 introduced by GmGlyA3B4_T02TALE nuclease
gttcatgtacggttgcagatataaacgaagcatagcttatgtatgaggtgtaacaaaattggaaacaatagccatgcaaggtgaagaatgtcaccaactcagaaacccttcttcattgacgtgtccctcactcactctcctctcttcactataaatcgccactcttcgtgttctccacttcaccaactccttcaaacttattaacactttccttagttcaatatggggaagcccttcttcactctctctctttcttccctttgcttgctactcttgtcgagtgcatgttacctccagcaagttcaacgagtgccaactcaacaacctcaacgcgttggaacccgaccaccgcgttgagtccgaaggtggtcttattgaaacatggaactctcaacaccctgagctgcaatgcgccggtgtcactgtttccaaacgcaccctcaaccgcaacggcctccacttgccatcttactcaccttatccccaaatgatcattgtcgttcaaggtgcgtaatattagtaagaagtatttatcagcttaacgtgataacaataatagtaatatgaaatatttattaaatttttataattaatctctgctagaaaatttgattaatcattttagtagaatttgttttctcaactaggttttaaaca

SEQ ID NO: 1904 - DNA, 584 bp, Artificial
  Mutations within GlyA3B4 introduced by GmGlyA3B4_T02TALE nuclease
gttcatgtacggttgcagatataaacgaagcatagcttatgtatgaggtgtaacaaaattggaaacaatagccatgcaaggtgaagaatgtcaccaactcagaaacccttcttcattgacgtgtccctcactcactctcctctcttcactataaatcgccactcttcgtgttctccacttcaccaactccttcaaacttattaacactttccttagttcaaccggcgcattgcagcaagttcaacgagtgccaactcaacaacctcaacgcgttggaacccgaccaccgcgttgagtccgaaggtggtcttattgaaacatggaactctcaacaccctgagctgcaatgcgccggtgtcactgtttccaaacgcaccctcaaccgcaacggcctccacttgccatcttactcaccttatccccaaatgatcattgtcgttcaaggtgcgtaatattagtaagaagtatttatcagcttaacgtgataacaataatagtaatatgaaatatttattaaattttttataattaatctctgctagaaaatttgattaatcatttttagtagaatttgtttttctcaa

SEQ ID NO: 1905 - DNA, 655 bp, Artificial
  Mutations within GlyA3B4 introduced by GmGlyA3B4_T02TALE nuclease
  misc_feature (530): n is a or c or t or g
gttcatgtacggttgcagatataaacgaagcatagcttatgtatgaggtgtaacaaaattggaaacaatagccatgcaaggtgaagaatgtcaccaactcagaaacccttcttcattgacgtgtccctcactcactctcctctcttcactataaatcgccactcttcgtgttctccacttcaccaactccttcaaacttattaacactttccttagttcaatatggggaagcccttcttcactctctctctttcttccctttgcttgctactcttgtcgagtgcatgctattacctccagcaagttcaacgagtgccaactcaacaacctcaacgcgttggaacccgaccaccgcgttgagtccgaaggtggtcttattgaaacatggaactctcaacaccctgagctgcaatgcgccggtgtcactgtttccaaacgcaccctcaaccgcaacggcctccacttgccatcttactcaccttatccccaaatgatcattgtcgttcaaggtgcgtaatattagtaagagnatttatcagcttaacgtgataacaataatagtaatatgaaatatttattaaatttttataattaatctctgctagaaaatttgattaatcattttagtagaatttgttttctcaactaggttttt

SEQ ID NO: 1906 - DNA, 571 bp, Artificial
  Mutations within GlyA3B4 introduced by GmGlyA3B4_T02TALE nuclease
gttcatgtacggttgcagatataaacgaagcatagcttatgtatgaggtgtaacaaaattggaaacaatagccatgcaaggtgaagaatgtcaccaactcagaaacccttcttcattgacgtgtccctcactcactctcctctcttcactataaatcgccactcttcgtgttctccacttcaccaactccttcaaacttattacctccagcaagttcaacgagtgccaactcaacaacctcaacgcgttggaacccgaccaccgcgttgagtccgaaggtggtcttattgaaacatggaactctcaacaccctgagctgcaatgcgccggtgtcactgtttccaaacgcaccctcaaccgcaacggcctccacttgccatcttactcaccttatccccaaatgatcattgtcgttcaaggtgcgtaatattagtaagaagtatttatcagcttaacgtgataacaataatagtaatatgaaatatttattaaattttttataattaatctctgctagaaaattgattaatcattttagtagaatttgtttttctcaactaggttttaaaca

SEQ ID NO: 1907 - DNA, 659 bp, Artificial
  Mutations within GlyA3B4 introduced by GmGlyA3B4_T02TALE nuclease
gttcatgtacggttgcagatataaacgaagcatagcttatgtatgaggtgtaacaaaattggaaacaatagccatgcaaggtgaagaatgtcaccaactcagaaacccttcttcattgacgtgtccctcactcactctcctctcttcactataaatcgccactcttcgtgttctccacttcaccaactccttcaaacttattaacactttccttagttcaatatggggaagcccttcttcactctctctctttcttccctttgcttgctactcttgtcgagtgcatgctattacctccagcaagttcaacgagtgccaactcaacaacctcaacgcgttggaacccgaccaccgcgttgagtccgaaggtggtcttattgaaacatggaactctcaacaccctgagctgcaatgcgccggtgtcactgtttccaaacgcaccctcaaccgcaacggcctccacttgccatcttactcaccttatccccaaatgatcattgtcgttcaaggtgcgtaatattagtaagagtatttatcagcttaacgtgataacaatatagtaatatgaaatatttattaaatttttataattaatctctgctagaaaatttgattaatcattttagtagaatttgtttttctcaactaggtttttaaaa

SEQ ID NO: 1908 - DNA, 578 bp, Artificial
  Mutations within GlyA3B4 introduced by GmGlyA3B4_T02TALE nuclease
gttcatgtacggttgcagatataaacgaagcatagcttatgtatgaggtgtaacaaaattggaaacaatagccatgcaaggtgaagaatgtcaccaactcagaaacccttcttcattgacgtgtccctcactcactctcctctcttcactataaatcgccactcttcgtgttctccacttcaccaactccttcaaacttattaacactttccttagttcaatatggggaagcccttcttcactctctctctttcttccctttgcttgctactcccgaccaccgcgttgagtccgaaggtggtcttattgaaacatggaactctcaacaccctgagctgcaatgcgccggtgtcactgtttccaaacgcaccctcaaccgcaacggcctccacttgccatcttactcaccttatccccaaatgatcattgtcgttcaaggtgcgtaatattagtaagaagtatttatcagcttaacgtgataacaataatagtaatatgaaatatttattaaattttttataattaatctctgctagaaaatttgattaatcatttttagtagaatttgtttttctcaa

SEQ ID NO: 1909 - DNA, 432 bp, Artificial
  Mutations within GlyA3B4 introduced by GmGlyA3B4_T02TALE nuclease
gttcatgtacggttgcagatataaacgaagcatagcttatgtatgaggtgtaacaaaattggaaacaatagccatgcaaggtgaagaatgtcaccaactcagaaacccttcttcaccgcgttgagtccgaaggtggtcttattgaaacatggaactctcaacaccctgagctgcaatgcgccggtgtcactgtttccaaacgcaccctcaaccgcaacggcctccacttgcccatcttactcaccttatccccaaatgatcattgtcgttcaaggtgcgtaatattagtaagaagtatttatcagcttaacgtgataacaataatagtaatatgaaatatttattaaattttttataattaatctctgctagaaaatttgattaatcatttttagtagaattttgtttttctcaactaggttttaaacacca

SEQ ID NO: 1910 - DNA, 638 bp, Artificial
  Mutations within GlyA3B4 introduced by GmGlyA3B4_T02TALE nuclease
gttcatgtacggttgcagatataaacgaagcatagcttatgtatgaggtgtaacaaaattggaaacaatagccatgcaaggtgaagaatgtcaccaactcagaaacccttcttcattgacgtgtccctcactcactctcctctcttcactataaatcgccactcttcgtgttctccacttcaccaactccttcaaacttattaacactttccttagttcaatatggggaagcccttcttcactctctctctttcttccctttgcttgctactcttgtcgagtgcatttgctattacctccagcaagttcaacgagtgccaactcaacaacctcaacgcgttggaacccgaccaccgcgttgagtccgaaggtggtcttattgaaacatggaactctcaacaccctgagctgcaatgcgccggtgtcactgtttccaaacgcaccctcaaccgcaacggcctccacttgccatcttactcaccttatccccaaatgatcattgtcgttcaaggtgcgtaatattagtaagagtatttatcagcttaacgtgataacaataatagtaatatgaaatatttattaaatttttataattaatctctgctagaaaatttgattaatcattttagtagaatttg

SEQ ID NO: 1911 - DNA, 646 bp, Artificial
  Mutations within GlyA3B4 introduced by GmGlyA3B4_T02TALE nuclease
gttcatgtacggttgcagatataaacgaagcatagcttatgtatgaggtgtaacaaaattggaaacaatagccatgcaaggtgaagaatgtcaccaactcagaaacccttcttcattgacgtgtccctcactcactctcctctcttcactataaatcgccactcttcgtgttctccacttcaccaactccttcaaacttattaacactttccttagttcaatatggggaagcccttcttcactctctctctttcttccctttgcttgctactcttgtcgagtgcattacctccagcaagttcaacgagtgccaactcaacaacctcaacgcgttggaacccgaccaccgcgttgagtccgaaggtggtcttattgaaacatggaactctcaacaccctgagctgcaatgcgccggtgtcactgtttccaaacgcaccctcaaccgcaacggcctccacttgccatcttactcaccttatccccaaatgatcattgtcgttcaaggtgcgtaatattagtaagaagtatttatcagcttaacgtgataacaataatagtaatatgaaatatttattaaatttttataattaatctctgctagaaaatttgattaatcattttagtagaatttgttttctcaactagg

SEQ ID NO: 1912 - DNA, 665 bp, Artificial
  Mutations within GlyA3B4 introduced by GmGlyA3B4_T02TALE nuclease
gttcatgtacggttgcagatataaacgaagcatagcttatgtatgaggtgtaacaaaattggaaacaatagccatgcaaggtgaagaatgtcaccaactcagaaacccttcttcattgacgtgtccctcactcactctcctctcttcactataaatcgccactcttcgtgttctccacttcaccaactccttcaaacttattaacactttccttagttcaatatggggaagcccttcttcactctctctctttcttccctttgcttgctactcttgtcgagtgcatgctattacctccagcaagttcaacgagtgccaactcaacaacctcaacgcgttggaacccgaccaccgcgttgagtccgaaggtggtcttattgaaacatggaactctcaacaccctgagctgcaatgcgccggtgtcactgtttccaaacgcaccctcaaccgcaacggcctccacttgccatcttactcaccttatccccaaatgatcattgtcgttcaaggtgcgtaatattagtaagagtatttatcagcttaacgtgataacaatatagtaatatgaaatatttattaaatttttataattaatctctgctagaaaatttgattaatcattttagtagaatttgttttctcaactaggtttttaaaacaccaca

SEQ ID NO: 1913 - DNA, 637 bp, Artificial
  Mutations within GlyA3B4 introduced by GmGlyA3B4_T02TALE nuclease
gttcatgtacggttgcagatataaacgaagcatagcttatgtatgaggtgtaacaaaattggaaacaatagccatgcaaggtgaagaatgtcaccaactcagaaacccttcttcattgacgtgtccctcactcactctcctctcttcactataaatcgccactcttcgtgttctccacttcaccaactccttcaaacttattaacactttccttagttcaatatggggaagcccttcttcactctctctctttcttccctttgcttgctactcttgtcgagtgcattgctattacctccagcaagttcaacgagtgccaactcaacaacctcaacgcgttggaacccgaccaccgcgttgagtccgaaggtggtcttattgaaacatggaactctcaacaccctgagctgcaatgcgccggtgtcactgtttccaaacgcaccctcaaccgcaacggcctccacttgccatcttactcaccttatccccaaatgatcattgtcgttcaaggtgcgtaatattagtaagagtatttatcagcttaacgtgataacaataatagtaatatgaaatatttattaaatttttataattaatctctgctagaaaatttgattaatcattttagtagaatttg

SEQ ID NO: 1914 - DNA, 500 bp, Artificial
  Mutations within GlyA3B4 introduced by GmGlyA3B4_T02TALE nuclease
gttcatgtacggttgcagatataaacgaagcatagcttatgtatgaggtgtaacaaaattggaaacaatagccatgcaaggtgaagaatgtcaccaactcagaaacccttcttcattgacgtgtccctcactcactctcctctcttcactataaatcgccactcttcgtgttctattacctccagcaagttcaacgagtgccaactcaacaacctcaacgcgttggaacccgaccaccgcgttgagtccgaaggtggtcttattgaaacatggaactctcaacaccctgagctgcaatgcgccggtgtcactgtttccaaacgcaccctcaaccgcaacggcctccacttgccatcttactcaccttatccccaaatgatcattgtcgttcaaggtgcgtaatattagtaagaagtatttatcagcttaacgtgataacaataatagtaatatgaaatatttattaaattttttataattaatctctgctagaaaatttg

SEQ ID NO: 1915 - DNA, 644 bp, Artificial
  Mutations within GlyA3B4 introduced by GmGlyA3B4_T02TALE nuclease
gttcatgtacggttgcagatataaacgaagcatagcttatgtatgaggtgtaacaaaattggaaacaatagccatgcaaggtgaagaatgtcaccaactcagaaacccttcttcattgacgtgtccctcactcactctcctctcttcactataaatcgccactcttcgtgttctccacttcaccaactccttcaaacttattaacactttccttagttcaatatggggaagcccttcttcactctctctctttcttccctttgctattacctccagcaagttcaacgagtgccaactcaacaacctcaacgcgttggaacccgaccaccgcgttgagtccgaaggtggtcttattgaaacatggaactctcaacaccctgagctgcaatgcgccggtgtcactgtttccaaacgcaccctcaaccgcaacggcctccacttgccatcttactcaccttatccccaaatgatcattgtcgttcaaggtgcgtaatattagtaagaagtatttatcagcttaacgtgataacaataatagtaatatgaaatatttattaaattttttataattaatctctgctagaaaatttgattaatcatttttagtagaatttgttttttctcaactaggttttaaaacacca

SEQ ID NO: 1916 - DNA, 583 bp, Artificial
  Mutations within GlyA3B4 introduced by GmGlyA3B4_T02TALE nuclease
gttcatgtacggttgcagatataaacgaagcatagcttatgtatgaggtgtaacaaaattggaaacaatagccatgcaaggtgaagaatgtcaccaactcagaaacccttcttcattgacgtgtccctcactcactctcctctcttcactataaatcgccactcttcgtgttctccacttcaccaactccttcaaacttattaacactttccttagttcaaccggcgcattgcagcaagttcaacgagtgccaactcaacaacctcaacgcgttggaacccgaccaccgcgttgagtccgaaggtggtcttattgaaacatggaactctcaacaccctgagctgcaatgcgccggtgtcactgtttccaaacgcaccctcaaccgcaacggcctccacttgccatcttactcaccttatccccaaatgatcattgtcgttcaaggtgcgtaatattagtaagaagtatttatcagcttaacgtgataacaataatagtaatatgaaatatttattaaatttttataattaatctctgctagaaaatttgattaatcatttttagtagaatttgtttttctcaa

SEQ ID NO: 1917 - DNA, 643 bp, Artificial
  Mutations within GlyA3B4 introduced by GmGlyA3B4_T02TALE nuclease
gttcatgtacggttgcagatataaacgaagcatagcttatgtatgaggtgtaacaaaattggaaacaatagccatgcaaggtgaagaatgtcaccaactcagaaacccttcttcattgacgtgtccctcactcactctcctctcttcactataaatcgccactcttcgtgttctccacttcaccaactccttcaaacttattaacactttccttagttcaatatggggaagcccttcttcactctctctctttcttccctttgcttgctactcttgtctacctccagcaagttcaacgagtgccaactcaacaacctcaacgcgttggaacccgaccaccgcgttgagtccgaaggtggtcttattgaaacatggaactctcaacaccctgagctgcaatgcgccggtgtcactgtttccaaacgcaccctcaaccgcaacggcctccacttgccatcttactcaccttatccccaaatgatcattgtcgttcaaggtgcgtaaatattagtaagaagtatttatcagcttaacgtgataacaataatagtaatatgaaatatttattaaattttttataattaatctctgctagaaaatttgattaatcatttttagtagaatttgttttttctcaactagg

SEQ ID NO: 1918 - DNA, 651 bp, Artificial
  Mutations within GlyA3B4 introduced by GmGlyA3B4_T02TALE nuclease
gttcatgtacggttgcagatataaacgaagcatagcttatgtatgaggtgtaacaaaattggaaacaatagccatgcaaggtgaagaatgtcaccaactcagaaacccttcttcattgacgtgtccctcactcactctcctctcttcactataaatcgccactcttcgtgttctccacttcaccaactccttcaaacttattaacactttccttagttcaatatggggaagcccttcttcactctctctctttcttccctttgcttgctactcttgtcgagtgcatctattacctccagcaagttcaacgagtgccaactcaacaacctcaacgcgttggaacccgaccaccgcgttgagtccgaaggtggtcttattgaaacatggaactctcaacaccctgagctgcaatgcgccggtgtcactgtttccaaacgcaccctcaaccgcaacggcctccacttgccatcttactcaccttatccccaaatgatcattgtcgttcaaggtgcgtaatattagtaagaagtatttatcagcttaacgtgataacaataatagtaatatgaaatatttattaaatttttataattaatctctgctagaaaatttgattaatcattttagtagaatttgtttttctcaactagg

SEQ ID NO: 1919 - DNA, 486 bp, Artificial
  Mutations within GlyA3B4 introduced by GmGlyA3B4_T02TALE nuclease
gttcatgtacggttgcagatataaacgaagcatagcttatgtatgaggtgtaacaaaattggaaacaatagccatgcaaggtgaagaatgtcaccaactcagaaacccttcttcattgacgtgtccctcactcactctcctctcttcactataaatcgccactcttcgtgttctccacttcaccaactccttcaaacttattaacactttccttagttcaacgagtgccaactcaacaacctcaacgcgttggaacccgaccaccgcgttgagtccgaaggtggtcttattgaaacatggaactctcaacaccctgagctgcaatgcgccggtgtcactgtttccaaacgcaccctcaaccgcaacggcctccacttgccatcttactcaccttatccccaaaatgatcattgtcgttcaaggtgcgtaatattagtaagaagtatttatcagcttaacgtgataacaataatagtaatatgaaat

SEQ ID NO: 1920 - DNA, 649 bp, Artificial
  Mutations within GlyA3B4 introduced by GmGlyA3B4_T02TALE nuclease
gttcatgtacggttgcagatataaacgaagcatagcttatgtatgaggtgtaacaaaattggaaacaatagccatgcaaggtgaagaatgtcaccaactcagaaacccttcttcattgacgtgtccctcactcactctcctctcttcactataaatcgccactcttcgtgttctccacttcaccaactccttcaaacttattaacactttccttagttcaatatggggaagcccttcttcactctctctctttcttccctttgcttgctactcttgtcgagtgcattattacctccagcaagttcaacgagtgccaactcaacaacctcaacgcgttggaacccgaccaccgcgttgagtccgaaggtggtcttattgaaacatggaactctcaacaccctgagctgcaatgcgccggtgtcactgtttccaaacgcaccctcaaccgcaacggcctccacttgccatcttactcaccttatccccaaatgatcattgtcgttcaaggtgcgtaatattagtaagaagtatttatcagcttaacgtgataacaataatagtaatatgaaatatttattaaatttttataattaatctctgctagaaaatttgattaatcattttagtagaatttgttttctcaactagg

SEQ ID NO: 1921 - DNA, 664 bp, Artificial
  Mutations within GlyA3B4 introduced by GmGlyA3B4_T02TALE nuclease
gttcatgtacggttgcagatataaacgaagcatagcttatgtatgaggtgtaacaaaattggaaacaatagccatgcaaggtgaagaatgtcaccaactcagaaacccttcttcattgacgtgtccctcactcactctcctctcttcactataaatcgccactcttcgtgttctccacttcaccaactccttcaaacttattaacactttccttagttcaatatggggaagcccttcttcactctctctctttcttccctttgcttgctactcttgtcgagtgcatatattacctccagcaagttcaacgagtgccaactcaacaacctcaacgcgttggaacccgaccaccgcgttgagtccgaaggtggtcttattgaaacatggaactctcaacaccctgagctgcaatgcgccggtgtcactgtttccaaagcgcaccctcaaccgcaacggcctccacttgccatcttactcaccttatccccaaatgatcattgtcgttcaaggtgcgtaatattagtaagaagtatttatcagcttaacgtgataacaataatagtaatatgaaatatttattaaatttttataattaatctctgctagaaaatttgattaatcattttagtagaatttgttttctcaactaggttttaaaacacca

SEQ ID NO: 1922 - DNA, 578 bp, Artificial; identical to SEQ ID NO: 1908
  Mutations within GlyA3B4 introduced by GmGlyA3B4_T02TALE nuclease

SEQ ID NO: 1923 - DNA, 602 bp, Artificial
  Mutations within GlyA3B4 introduced by GmGlyA3B4_T02TALE nuclease
  misc_feature (536): n is a or c or t or g
gttcatgtacggttgcagatataaacgaagcatagcttatgtatgaggtgtaacaaaattggaaacaatagccatgcaaggtgaagaatgtcaccaactcagaaacccttcttcattgacgtgtccctcactcactctcctctcttcactataaatcgccactcttcgtgttctccacttcaccaactccttcaaacttattaacactttccttagttcaatatggggaagcccttcttcaacgagtgccaactcaacaacctcaacgcgttggaacccgaccaccgcgttgagtccgaaggtggtcttattgaaacatggaactctcaacaccctgagctgcaatgcgccggtgtcactgtttccaaacgcaccctcaaccgcaacggcctccacttgccatcttactcaccttatccccaacatgatcattgtcgttcaaggtgcgtaatattagtaagaagtatttatcagcttaacgtgataacaataatagtaatatgaaatatttattaaattttttataattaatctcngctagaaaatttgattaatcatttttagtagaatttgtttttctcaactaggttttaaacaccaca

SEQ ID NO: 1924 - DNA, 528 bp, Artificial
  Mutations within GlyA3B4 introduced by GmGlyA3B4_T02TALE nuclease
gttcatgtacggttgcagatataaacgaagcatagcttatgtatgaggtgtaacaaaattggaaacaatagccatgcaaggtgaagaatgtcaccaactcagaaacccttcttcattgacgtgtccctcactcactctcctctcttcactacaaatcaccactccttcaacgagtgccaactcaacaacctcaacgcgttggaacccgaccaccgcgttgagtccgaaggtggtcttattgaaacatggaactctcaacaccctgagctgcaatgcgccggtgtcactgtttccaaacgcaccctcaaccgcaacggcctccacttgccatcttactcaccttatccccaaatgatcattgtcgttcaaggtgcgtaatattagtaagaagtattttatcagcttaacgtgataacaataatagtaatatgaaaatatttattaaattttttataattaatctctgctagaaaatttgattaatcatttttagtagaatttgtttttctcaactaggtttaaacacca

SEQ ID NO: 1925 - DNA, 663 bp, Artificial
  Mutations within GlyA3B4 introduced by GmGlyA3B4_T02TALE nuclease
gttcatgtacggttgcagatataaacgaagcatagcttatgtatgaggtgtaacaaaattggaaacaatagccatgcaaggtgaagaatgtcaccaactcagaaacccttcttcattgacgtgtccctcactcactctcctctcttcactataaatcgccactcttcgtgttctccacttcaccaactccttcaaacttattaacactttccttagttcaatatggggaagcccttcttcactctctctctttcttccctttgcttgctactcttgtcgagtgcatgcattacctccagcaagttcaacgagtgccaactcaacaacctcaacgcgttggaacccgaccaccgcgttgagtccgaaggtggtcttattgaaacatggaactctcaacaccctgagctgcaatgcgccggtgtcactgtttccaaacgcaccctcaaccgcaacggcctccacttgccatcttactcaccttatccccaaatgatcattgtcgttcaaggtgcgtaatattagtaagaagtatttatcagcttaacgtgataacaataatagtaatatgaaatatttattaaatttttataattaatctctgctagaaaatttgattaatcattttagtagaatttgttttctcaactaggttttaaaacacca

SEQ ID NO: 1926 - DNA, 650 bp, Artificial
  Mutations within GlyA3B4 introduced by GmGlyA3B4_T02TALE nuclease
gttcatgtacggttgcagatataaacgaagcatagcttatgtatgaggtgtaacaaaattggaaacaatagccatgcaaggtgaagaatgtcaccaactcagaaacccttcttcattgacgtgtccctcactcactctcctctcttcactataaatcgccactcttcgtgttctccacttcaccaactccttcaaacttattaacactttccttagttcaatatggggaagcccttcttcactctctctctttcttccctttgcttgctactcttgtccagcaagttcaacgagtgccaactcaacaacctcaacgcgttggaacccgaccaccgcgttgagtccgaaggtggtcttattgaaacatggaactctcaacaccctgagctgcaatgcgccggtgtcactgtttccaaacgcaccctcaaccgcaacggcctccacttgccatcttactcaccttatcccccaaatgatcattgtcgttcaaggtgcgtaatattagtaagaagtatttatcagcttaacgtgataacaataatagtaatatgaaatatttattaaattttttataattaatctctgctagaaaatttgattaatcatttttagtagaatttgttttttctcaactaggttttaaaacacca

SEQ ID NO: 1927 - DNA, 652 bp, Artificial; identical to SEQ ID NO: 1761
  Mutations within GlyA3B4 introduced by GmGlyA3B4_T02TALE nuclease

SEQ ID NO: 1928 - DNA, 648 bp, Artificial
  Mutations within GlyA3B4 introduced by GmGlyA3B4_T02TALE nuclease
gttcatgtacggttgcagatataaacgaagcatagcttatgtatgaggtgtaacaaaattggaaacaatagccatgcaaggtgaagaatgtcaccaactcagaaacccttcttcattgacgtgtccctcactcactctcctctcttcactataaatcgccactcttcgtgttctccacttcaccaactccttcaaacttattaacactttccttagttcaatatggggaagcccttcttcactctctctctttcttccctttgcttgctattacctccagcaagttcaacgagtgccaactcaacaacctcaacgcgttggaacccgaccaccgcgttgagtccgaaggtggtcttattgaaacatggaactctcaacaccctgagctgcaatgcgccggtgtcactgtttccaaacgcaccctcaaccgcaacggcctccacttgccatcttactcaccttatccccaaatgatcattgtcgttcaaggtgcgtaatattagtaagaagtatttatcagcttaacgtgataacaataatagtaatatgaaatatttattaaattttttataattaatctctgctagaaaatttgattaatcatttttagtagaatttgttttttctcaactaggttttaaaacacca

SEQ ID NO: 1929 - DNA, 661 bp, Artificial; identical to SEQ ID NO: 1694
  Mutations within GlyA3B4 introduced by GmGlyA3B4_T02TALE nuclease

SEQ ID NO: 1930 - DNA, 601 bp, Artificial
  Mutations within GlyA3B4 introduced by GmGlyA3B4_T02TALE nuclease
gttcatgtacggttgcagatataaacgaagcatagcttatgtatgaggtgtaacaaaattggaaacaatagccatgcaaggtgaagaatgtcaccaactcagaaacccttcttcattgacgtgtccctcactcactctcctctcttcactataaatcgccactcttcgtgttctccacttcaccaactccttcaaacttattaacactttccttagttcaatatggggaagcccttcttcactctctctctttcttccctttgcttgctactcttgtcgagtgccaactcaacaacctcaacgcgttggaacccgaccaccgcgttgagtccgaaggtggtcttattgaaacatggaactctcaacaccctgagctgcaatgcgccggtgtcactgtttccaaacgcaccctcaaccgcaacggcctccacttgccatcttactcaccttatccccaaatgatcattgtcgttcaaggtgcgtaatattagtaagaagtatttatcagcttaacgtgataacaataatagtaatatgaaatatttattaaattttttataattaatctctgctagaaaatttgattaatcatttttagtag

SEQ ID NO: 1931 - DNA, 662 bp, Artificial
  Mutations within GlyA3B4 introduced by GmGlyA3B4_T02TALE nuclease
gttcatgtacggttgcagatataaacgaagcatagcttatgtatgaggtgtaacaaaattggaaacaatagccatgcaaggtgaagaatgtcaccaactcagaaacccttcttcattgacgtgtccctcactcactctcctctcttcactataaatcgccactcttcgtgttctccacttcaccaactccttcaaacttattaacactttccttagttcaatatggggaagcccttcttcactctctctctttcttccctttgcttgctactcttgtcgagtgctattacctccagcaagttcaacgagtgccaactcaacaacctcaacgcgttggaacccgaccaccgcgttgagtccgaaggtggtcttattgaaacatggaactctcaacaccctgagctgcaatgcgccggtgtcactgtttccaaacgcaccctcaaccgcaacggcctccacttgccatcttactcaccttatccccaaatgatcattgtcgttcaaggtgcgtaatattagtaagaagtatttatcagcttaacgtgataacaataatagtaatatgaaatatttattaaatttttataattaatctctgctagaaaatttgattaatcattttagtagaatttgtttttctcaactaggtttttaaaacacca

SEQ ID NO: 1932 - DNA, 658 bp, Artificial
  Mutations within GlyA3B4 introduced by GmGlyA3B4_T02TALE nuclease
gttcatgtacggttgcagatataaacgaagcatagcttatgtatgaggtgtaacaaaattggaaacaatagccatgcaaggtgaagaatgtcaccaactcagaaacccttcttcattgacgtgtccctcactcactctcctctcttcactataaatcgccactcttcgtgttctccacttcaccaactccttcaaacttattaacactttccttagttcaatatggggaagcccttcttcactctctctctttcttccctttgcttgctactcttgtcgagtgctttgctattacctccagcaagttcaacgagtgccaactcaacaacctcaacgcgttggaacccgaccaccgcgttgagtccgaaggtggtcttattgaaacatggaactctcaacaccctgagctgcaatgcgccggtgtcactgtttccaaacgcaccctcaaccgcaacggcctccacttgccatcttactcaccttatccccaaatgatcattgtcgttcaaggtgcgtaatattagtaagagtatttatcagcttaacgtgataacaataatagtaatatgaaaatatttattaaatttttataattaatctctgctagaaaatttgattaatcattttagtagaatttgtttttctcaactaggttttt

SEQ ID NO: 1933 - DNA, 662 bp, Artificial
  Mutations within GlyA3B4 introduced by GmGlyA3B4_T02TALE nuclease
gttcatgtacggttgcagatataaacgaagcatagcttatgtatgaggtgtaacaaaattggaaacaatagccatgcaaggtgaagaatgtcaccaactcagaaaccccttcttcattgacgtgtccctcactcactctcctctcttcactataaatcgccactcttcgtgttctccacttcaccaactccttcaaacttattaacactttccttagttcaatatggggaagcccttcttcactctctctctttcttccctttgcttgctactcttgtcgagtgctattacctccagcaagttcaacgagtgccaactcaacaacctcaacgcgttggaacccgaccaccgcgttgagtccgaaggtggtcttattgaaacatggaactctcaacaccctgagctgcaatgcgccggtgtcactgtttccaaacgcaccctcaaccgcaacggcctccacttgccatcttactcaccttatccccaaatgatcattgtcgttcaaggtgcgtaatattagtaagaagtatttatcagcttaacgtgataacaatatagtaatatgaaatatttattaaatttttataattaatctctgctagaaaatttgattaatcattttagtagaatttgttttctcaactaggttttaaaacaccaca

SEQ ID NO: 1934 - DNA, 616 bp, Artificial
  Mutations within GlyA3B4 introduced by GmGlyA3B4_T02TALE nuclease
gttcatgtacggttgcagatataaacgaagcatagcttatgtatgaggtgtaacaaaattggaaacaatagccatgcaaggtgaagaatgtcaccaactcagaaacccttcttcattgacgtgtccctcactcactctcctctcttcactataaatcgccactcttcgtgttctccacttcaccaactccttcaaacttattaacactttccttagttcaatatggggaagcccttcttcactctctctctttcttccctttgcttgctattacctccagcaagttcaacgagtgccaactcaacaacctcaacgcgttggaacccgaccaccgcgttgagtccgaaggtggtcttattgaaacatggaactctcaacacccctgagctgcaatgcgccggtgtcactgtttccaaacgcaccctcaaccgcaacggcctccacttgccatcttactcaccttatccccaaatgatcattgtcgttcaaggtgcgtaatattagtaagaagtatttatcagcttaacgtgataacaataatagtaatatgaaatatttattaaattttttataattaatctctgctagaaaatttgattaatcatttttagtagaa

SEQ ID NO: 1935 - DNA, 651 bp, Artificial
  Mutations within GlyA3B4 introduced by GmGlyA3B4_T02TALE nuclease
gttcatgtacggttgcagatataaacgaagcatagcttatgtatgaggtgtaacaaaattggaaacaatagccatgcaaggtgaagaatgtcaccaactcagaaacccttcttcattgacgtgtccctcactcactctcctctcttcactataaatcgccactcttcgtgttctccacttcaccaactccttcaaacttattaacactttccttagttcaatatggggaagcccttcttcactctctctctttcttccctttgcttttgctattacctccagcaagttcaacgagtgccaactcaacaacctcaacgcgttggaacccgaccaccgcgttgagtccgaaggtggtcttattgaaacatggaactctcaacaccctgagctgcaatgcgccggtgtcactgtttccaaacgcaccctcaaccgcaacggcctccacttgccatcttactcaccttatccccaaatgatcattgtcgttcaaggtgcgtaatattagtaagaagtatttatcagcttaacgtgataacaataatagtaatatgaaatatttattaaattttttataattaatctctgctagaaaatttgattaatcatttttagtagaatttgttttttctcaactaggttttaaacaccaca

SEQ ID NO: 1936 - DNA, 629 bp, Artificial
  Mutations within GlyA3B4 introduced by GmGlyA3B4_T02TALE nuclease
gttcatgtacggttgcagatataaacgaagcatagcttatgtatgaggtgtaacaaaattggaaacaatagccatgcaaggtgaagaatgtcaccaactcagaaacccttcttcattgacgtgtccctcactcactctcctctcttcactataaatcgccactcttcgtgttctccacttcaccaactccttcaaacttattaacactttccttagttcaatatggggaagcccttcttcactctctctctttcttccctttgcttgctactcttgtcgagtgcatgtccagcaagttcaacgagtgccaactcaacaacctcaacgcgttggaacccgaccaccgcgttgagtccgaaggtggtcttattgaaacatggaactctcaacaccctgagctgcaatgcgccggtgtcactgtttccaaacgcaccctcaaccgcaacggcctccacttgccatcttactcaccttatccccaaatgatcattgtcgttcaaggtgcgtaatattagtaagaagtatttatcagcttaacgtgataacaataatagtaatatgaaatatttattaaatttttataattaatctctgctagaaaatttgattaatcattttagtagaatttg

SEQ ID NO: 1937 - DNA, 656 bp, Artificial
  Mutations within GlyA3B4 introduced by GmGlyA3B4_T02TALE nuclease
gttcatgtacggttgcagatataaacgaagcatagcttatgtatgaggtgtaacaaaattggaaacaatagccatgcaaggtgaagaatgtcaccaactcagaaacccttcttcattgacgtgtccctcactcactctcctctcttcactataaatcgccactcttcgtgttctccacttcaccaactccttcaaacttattaacactttccttagttcaatatggggaagcccttcttcactctctctctttcttccctttgcttgctactcttgtcgagtgcatgctccagcaagttcaacgagtgccaactcaacaacctcaacgcgttggaacccgaccaccgcgttgagtccgaaggtggtcttattgaaacatggaactctcaacaccctgagctgcaatgcgccggtgtcactgtttccaaacgcaccctcaaccgcaacggcctccacttgccatcttactcaccttatccccaaatgatcattgtcgttcaaggtgcgtaatattagtaagaagtatttatcagcttaacgtgataacaataatagtaatatgaaatatttattaaatttttataattaatctctgctagaaaatttgattaatcattttagtagaatttgttttctcaactaggttttaaaacacc

SEQ ID NO: 1938 - DNA, 602 bp, Artificial
  Mutations within GlyA3B4 introduced by GmGlyA3B4_T02TALE nuclease
gttcatgtacggttgcagatataaacgaagcatagcttatgtatgaggtgtaacaaaattggaaacaatagccatgcaaggtgaagaatgtcaccaactcagaaacccttcttcattgacgtgtccctcactcactctcctctcttcactataaatcgccactcttcgtgttctccacttcaccaactccttcaaacttattaacactttccttagttcaatatggggaagcccttcttcactctctctctttcttccctttgcttgctactcttgtcgagtgccaactcaacaacctcaacgcgttggaacccgaccaccgcgttgagtccgaaggtggtcttattgaaacatggaactctcaacaccctgagctgcaatgcgccggtgtcactgtttccaaacgcaccctcaaccgcaacggcctccacttgccatcttactcaccttatccccaaatgatcattgtcgttcaaggtgcgtaatattagtaagaagtatttatcagcttaacgtgataacaataatagtaatatgaaatatttattaattttttataattaatctctgctagaaaatttgattaatcatttttagtagaa

SEQ ID NO: 1939 - DNA, 659 bp, Artificial
  Mutations within GlyA3B4 introduced by GmGlyA3B4_T02TALE nuclease
gttcatgtacggttgcagatataaacgaagcatagcttatgtatgaggtgtaacaaaattggaaacaatagccatgcaaggtgaagaatgtcaccaactcagaaacccttcttcattgacgtgtccctcactcactctcctctcttcactataaatcgccactcttcgtgttctccacttcaccaactccttcaaacttattaacactttccttagttcaatatggggaagcccttcttcactctctctctttcttccctttgcttgctactcttgtcgagtgcatacctccagcaagttcaacgagtgccaactcaacaacctcaacgcgttggaacccgaccaccgcgttgagtccgaaggtggtcttattgaaacatggaactctcaacaccctgagctgcaatgcgccggtgtcactgtttccaaacgcaccctcaaccgcaacggcctccacttgccatcttactcaccttatccccaaatgatcattgtcgttcaaggtgcgtaatattagtaagaagtatttatcagcttaacgtgataacaataatagtaatatgaaatatttattaaatttttataattaatctctgctagaaaatttgattaatcattttagtagaatttgtttttctcaactaggttttaaaacacca

SEQ ID NO: 1940 - DNA, 548 bp, Artificial
  Mutations within GlyA3B4 introduced by GmGlyA3B4_T02TALE nuclease
gttcatgtacggttgcagatataaacgaagcatagcttatgtatgaggtgtaacaaaattggaaacaatagccatgcaaggtgaagaatgtcaccaactcagaaacccttcttcattgacgtgtccctcactcactctcctctcttcactataaatcgccactcttcgtgttctccacttcaccaactccttcaaacttattaacactttccttagttcaatatggggaagcccttcttctccagcaagttcaacgagtgccaactcaacaacctcaacgcgttggaacccgaccaccgcgttgagtccgaaggtggtcttattgaacatggaactctcaacaccctgagctacaatgcgccggtgtcactgtttccaaacgcaccctcaaccgcaacggcctccacttgccatcttactcaccttatccccaaatgatcattgtcgttcaaggtgcgtaatattagtcaagaagtatttatcagcttaacgtgatacaataatagtaatatgaatatttattaatttttataattaatctctgctag

SEQ ID NO: 1941 - DNA, 565 bp, Artificial
  Mutations within GlyA3B4 introduced by GmGlyA3B4_T02TALE nuclease
gttcatgtacggttgcagatataaacgaagcatagcttatgtatgaggtgtaacaaaattggaaacaatagccatgcaaggtgaagaatgtcaccaactcagaaacccttcttcattgacgtgtccctcactcactctcctctcttcactataaatcgccactcttcgtgttctccacttcaccaactccttcaaacttattaacactttccttagttcaacgagtgccaactcaacaacctcaacgcgttggaacccgaccaccgcgttgagtccgaaggtggtcttattgaaacatggaactctcaacaccctgagctgcaatgcgccggtgtcactgtttccaaacgcaccctcaaccgcaacggcctccacttgccatcttactcaccttatccccaaatgatcattgtcgttcaaggtgcgtaatattagtaagaagtatttatcagcttaacgtgataacaataatagtaatatgaaatatttattaaattttttatattaatctctgctagaaaatttgattaatcatttttagtagaatttgtttttctcaactagg

SEQ ID NO: 1942 - DNA, 657 bp, Artificial
  Mutations within GlyA3B4 introduced by GmGlyA3B4_T02TALE nuclease
gttcatgtacggttgcagatataaacgaagcatagcttatgtatgaggtgtaacaaaattggaaacaatagccatgcaaggtgaagaatgtcaccaactcagaaacccttcttcattgacgtgtccctcactcactctcctctcttcactataaatcgccactcttcgtgttctccacttcaccaactccttcaaacttattaacactttccttagttcaatatggggaagcccttcttcactctctctctttcttccctttgcttgctactcttgtcgagtgcatctattacctccagcaagttcaacgagtgccaactcaacaacctcaacgcgttggaacccgaccaccgcgttgagtccgaaggtggtcttattgaaacatggaactctcaacaccctgagctgcaatgcgccggtgtcactgtttccaaacgcaccctcaaccgcaacggcctccacttgccatcttactcaccttatccccaaatgatcattgtcgttcaaggtgcgtaatattagtaagaagtatttatcagcttaacgtgatacaatatagtaatatgaaatatttattaaatttttataattaatctctgctagaaaatttgattaatcattttagtagaatttgttttctcaactaggtttttaaaa

SEQ ID NO: 1943 - DNA, 655 bp, Artificial
  Mutations within GlyA3B4 introduced by GmGlyA3B4_T02TALE nuclease
gttcatgtacggttgcagatataaacgaagcatagcttatgtatgaggtgtaacaaaattggaaacaatagccatgcaaggtgaagaatgtcaccaactcagaaacccttcttcattgacgtgtccctcactcactctcctctcttcactataaatcgccactcttcgtgttctccacttcaccaactccttcaaacttattaacactttccttagttcaatatggggaagcccttcttcactctctctctttcttccctttgcttgctactcttgtcgagtgcatttacctccagcaagttcaacgagtgccaactcaacaacctcaacgcgttggaacccgaccaccgcgttgagtccgaaggtggtcttattgaaacatggaactctcaacaccctgagctgcaatgcgccggtgtcactgtttccaaacgcaccctcaaccgcaacggcctccacttgccatcttactcaccttatccccaaatgatcattgtcgttcaaggtgcgtaatattagtaagaagtatttatcagcttaacgtgataacaataatagtaatatgaaatatttattaaatttttataattaatctctgctagaaaatttgattaatcattttagtagaatttgttttctcaactaggttttaaaa

SEQ ID NO: 1944 - DNA, 537 bp, Artificial
  Mutations within GlyA3B4 introduced by GmGlyA3B4_T02TALE nuclease
gttcatgtacggttgcagatataaacgaagcatagcttatgtatgaggtgtaacaaaattggaaacaatagccatgcaaggtgaagaatgtcaccaactcagaaacccttcttcattgacgtgtccctcactcactctcctctcttcactataaatcgccactcttcgtgttctccacttcaccaactccttcaaacttatcaacgagtgccaactcaacaacctcaacgcgttggaacccgaccaccgcgttgagtccgaaggtggtcttattgaaacatggaactctcaacaccctgagctgcaatgcgccggtgtcactgtttccaaacgcaccctcaaccgcaacggcctccacttgccatcttactcaccttatccccaaatgatcattgtcgttcaaggtgcgtaatattagtaagaagtatttatcagcttaacgtgataacaataatagtaatatgaaatatttattaaattttttataattaatctctgctagaaattgattaatcattttagtagaatttgtttttc

SEQ ID NO: 1945 - DNA, 664 bp, Artificial
  Mutations within GlyA3B4 introduced by GmGlyA3B4_T02TALE nuclease
gttcatgtacggttgcagatataaacgaagcatagcttatgtatgaggtgtaacaaaattggaaacaatagccatgcaaggtgaagaatgtcaccaactcagaaacccttcttcattgacgtgtccctcactcactctcctctcttcactataaatcgccactcttcgtgttctccacttcaccaactccttcaaacttattaacactttccttagttcaatatggggaagcccttcttcactctctctctttcttccctttgcttgctactcttgtcgagtgcatgcttacctccagcaagttcaacgagtgccaactcaacaacctcaacgcgttggaacccgaccaccgcgttgagtccgaaggtggtcttattgaaacatggaactctcaacaccctgagctgcaatgcgccggtgtcactgtttccaaacgcaccctcaaccgcaacggcctccacttgccatcttactcaccttatccccaaatgatcattgtcgttcaaggtgcgtaatattagtaagaagtatttatcagcttaacgtgataacaataatagtaatatgaaatatttattaaatttttataattaatctctgctagaaaatttgattaatcattttagtagaatttgttttctcaactaggttttaaaacagcaca

SEQ ID NO: 1946 - DNA, 650 bp, Artificial
  Mutations within GlyA3B4 introduced by GmGlyA3B4_T02TALE nuclease
gttcatgtacggttgcagatataaacgaagcatagcttatgtatgaggtgtaacaaaattggaaacaatagccatgcaaggtgaagaatgtcaccaactcagaaacccttcttcattgacgtgtccctcactcactctcctctcttcactataaatcgccactcttcgtgttctccacttcaccaactccttcaaacttattaacactttccttagttcaatatggggaagcccttcttcactctctctctttcttccctttgcttgctactcttgtcgagtgcatagttcaacgagtgccaactcaacaacctcaacgcgttggaacccgaccaccgcgttgagtccgaaggtggtcttattgaaacatggaactctcaacaccctgagctgcaatgcgccggtgtcactgtttccaaacgcaccctcaaccgcaacggcctccacttgccatcttactcaccttatccccaaatgatcattgtcgttcaaggtgcgtaaatattagtaagaagtatttatcagcttaacgtgataacaataatagtaatatgaaatatttattaaattttttataattaatctctgctagaaaatttgattaatctttttagtagaattgtttttctcaactaggtttaaacaccaca

SEQ ID NO: 1947 - DNA, 675 bp, Artificial
  Mutations within GlyA3B4 introduced by GmGlyA3B4_T02TALE nuclease
gttcatgtacggttgcagatataaacgaagcatagcttatgtatgaggtgtaacaaaattggaaacaatagccatgcaaggtgaagaatgtcaccaactcagaaacccttcttcattgacgtgtccctcactcactctcctctcttcactataaatcgccactcttcgtgttctccacttcaccaactccttcaaacttattaacactttccttagttcaatatggggaagcccttcttcactctctctctttcttccctttgcttgctactcttgtcgagtgcaatcgatgcaactgcacgcaacctcaacacctgtgaaccgcacatcgaccgatgacagccgcaggttggtcattcatgaaagtgctatcgtaatcgtaacatcgaaacctcatccccaatgacgcccttggcaaagtgcctggcccaaggttggcgcctggtcagtcatgcttttgttccccaaaaaccggccaccccctcaaaccgcaaacggccctccacttgccatcttactcaccttatccccaaatgatcattgtcgttcaaggtgcgtaatatagtaagaagtatttatcagcttaacgtgataacaataatagtaatatgaaatatttattaaattttttataattaatctctgctagaaaatttgattaatcatttttagtag

SEQ ID NO: 1948 - DNA, 633 bp, Artificial
  Mutations within GlyA3B4 introduced by GmGlyA3B4_T02TALE nuclease
gttcatgtacggttgcagatataaacgaagcatagcttatgtatgaggtgtaacaaaattggaaacaatagccatgcaaggtgaagaatgtcaccaactcagaaacccttcttcattgacgtgtccctcactcactctcctctcttcactataaatcgccactcttcgtgttctccacttcaccaactccttcaaacttattaacactttccttagttcaatatggggaagcccttcttcactctctctctttcttccctttgcttgctactcttgtcgagtgcatattacctccagcaagttcaacgagtgccaactcaacaacctcaacgcgttggaacccgaccaccgcgttgagtccgaaggtggtcttattgaaacatggaactctcaacaccctgagctgcaatgcgccggtgtcactgtttccaaacgcaccctcaaccgcaacggcctccacttgccatcttactcaccttatccccaaatgatcattgtcgttcaaggtgcgtaatattagtaagaagtatttatcagcttaacgtgataacaatatagtaatatgaaatatttattaaatttttataattaatctctgctagaaaatttgattaatcattttagtagaatttg

SEQ ID NO: 1949 - DNA, 652 bp, Artificial
  Mutations within GlyA3B4 introduced by GmGlyA3B4_T02TALE nuclease
gttcatgtacggttgcagatataaacgaagcatagcttatgtatgaggtgtaacaaaattggaaacaatagccatgcaaggtgaagaatgtcaccaactcagaaacccttcttcattgacgtgtccctcactcactctcctctcttcactataaatcgccactcttcgtgttctccacttcaccaactccttcaaacttattaacactttccttagttcaatatggggaagcccttcttcactctctctctttcttccctttgcttgctactcttgtcgagtgcatctattacctccagcaagttcaacgagtgccaactcaacaacctcaacgcgttggaacccgaccaccgcgttgagtccgaaggtggtcttattgaaacatggaactctcaacaccctgagctgcaatgcgccggtgtcactgtttccaaacgcacccctcaaccgcaacggcctccacttgccatcttactcaccttatccccaaatgatcattgtcgttcaaggtgcgtaatattagtaagaagtatttatcagcttaacgtgataacaataatagtaatatgaaatatttattaaatttttataattaatctctgctagaaaatttgattaatcattttagtagaatttgtttttctcaactagg

SEQ ID NO: 1950 - DNA, 649 bp, Artificial; identical to SEQ ID NO: 1901
  Mutations within GlyA3B4 introduced by GmGlyA3B4_T02TALE nuclease

SEQ ID NO: 1951 - DNA, 631 bp, Artificial
  Mutations within GlyA3B4 introduced by GmGlyA3B4_T02TALE nuclease
  misc_feature (529): n is a or c or t or g
gttcatgtacggttgcagatataaacgaagcatagcttatgtatgaggtgtaacaaaattggaaacaatagccatgcaaggtgaagaatgtcaccaactcagaaacccttcttcattgacgtgtccctcactcactctcctctcttcactataaatcgccactcttcgtgttctccacttcaccaactccttcaaacttattaacactttccttagttcaatatggggaagcccttcttcactctctctctttcttccctttgcttgctactcttgtcgagctttgctattacctccagcaagttcaacgagtgccaactcaacaacctcaacgcgttggaacccgaccaccgcgttgagtccgaaggtggtcttattgaaacatggaactctcaacaccctgagctgcaatgcgccggtgtcactgtttccaaacgcaccctcaaccgcaacggcctccacttgccatcttactcaccttatccccaaatgatcattgtcgttcaaggtgcgtaatattagtaagagnatttatcagcttaacgtgataacaataatagtaatatgaaatatttattaaatttttataattaatctctgctagaaaatttgattaatcattttagtagaa

SEQ ID NO: 1952 - DNA, 506 bp, Artificial
  Mutations within GlyA3B4 introduced by GmGlyA3B4_T02TALE nuclease
gttcatgtacggttgcagatataaacgaagcatagcttatgtatgaggtgtaacaaaattggaaacaatagccatgcaaggtgaagaatgtcaccaactcagaaacccttcttcattgacgtgtcctattacctccagcaagttcaacgagtgccaactcaacaacctcaacgcgttggaacccgaccaccgcgttgagtccgaaggtggtcttattgaaacatggaactctcaacaccctgagctgcaatgcgccggtgtcactgtttccaaacgcaccctcaaccgcaacggcctccacttgccatcttactcaccttatccccaaatgatcattgtcgttcaaggtgcgtaatattagtaagaagtatttatcagcttaacgtgataacaataatagtaatatgaaatatttattaaattttttataattaatctctgctagaaaatttgattaatcatttttagtagaatttgtttttctcaactaggttttaaacaccaca

SEQ ID NO: 1953 - DNA, 646 bp, Artificial; identical to SEQ ID NO: 1911
  Mutations within GlyA3B4 introduced by GmGlyA3B4_T02TALE nuclease

SEQ ID NO: 1954 - DNA, 656 bp, Artificial
  Mutations within GlyA3B4 introduced by GmGlyA3B4_T02TALE nuclease
gttcatgtacggttgcagatataaacgaagcatagcttatgtatgaggtgtaacaaaattggaaacaatagccatgcaaggtgaagaatgtcaccaactcagaaacccttcttcattgacgtgtccctcactcactctcctctcttcactataaatcgccactcttcgtgttctccacttcaccaactccttcaaacttattaacactttccttagttcaatatggggaagcccttcttcactctctctctttcttccctttgcttgctactcttgtcgagtgcattgctattacctccagcaagttcaacgagtgccaactcaacaacctcaacgcgttggaacccgaccaccgcgttgagtccgaaggtggtcttattgaaacatggaactctcaacaccctgagctgcaatgcgccggtgtcactgtttccaaacgcaccctcaaccgcaacggcctccacttgccatcttactcaccttatccccaaatgatcattgtcgttcaaggtgcgtaatattagtaagaagtatttatcagcttaacgtgataacaataatagtaatatgaaatatttattaaatttttataattaatctctgctagaaaatttgattaatcattttagtagaatttgttttctcaactaggtttt

SEQ ID NO: 1955 - DNA, 501 bp, Artificial
  Mutations within GlyA3B4 introduced by GmGlyA3B4_T02TALE nuclease
gttcatgtacggttgcagatataaacgaagcatagcttatgtatgaggtgtaacaaaattggaaacaatagccatgcaaggtgaagaatgtcaccaactcagaaacccttcttcattgacgtgtccctcactcactctcctctcttcactataaatcgccactcttcgtgttctccacttcaccaactccttcaaacttattacctccagcaagttcaacgagtgccaactcaacaacctcaacgcgttggaacccgaccaccgcgttgagtccgaaggtggtcttattgaaacatggaactctcaacaccctgagctgcaatgcgccggtgtcactgtttccaaacgcaccctcaaccgcaacggcctccacttgccatcttactcaccttatccccaaatgatcattgtcgttcaaggtgcgtatattagtaagaagtatttattcagcttaacgtgataacaataatagtaatatgaaatatttattaaattttttat

SEQ ID NO: 1956 - DNA, 659 bp, Artificial; identical to SEQ ID NO: 1853
  Mutations within GlyA3B4 introduced by GmGlyA3B4_T02TALE nuclease

SEQ ID NO: 1957 - DNA, 444 bp, Artificial
  Mutations within GlyA3B4 introduced by GmGlyA3B4_T02TALE nuclease
gttcatgtacggttgcagatataaacgaagcatagcttatgtatgaggtgtaacaaaattggaaacaatacctccagcaagttcaacgagtgccaactcaacaacctcaacgcgttggaacccgaccaccgcgttgagtccgaaggtggtcttattgaaacatggaactctcaacaccctgagctgcaatgcgccggtgtcactgtttccaaacgcaccctcaaccgcaacggcctccacttgccatcttactcaccttatccccaaatgatcattgtcgttcaaggtgcgtaatattagtaagaagtatttatcagcttaacgtgataacaataatagtaatatgaaatatttattaaattttttataattaatctctgctagaaaatttgattaatcatttttagtagaattttgtttttctcaactaggttttaaacacca

SEQ ID NO: 1958 - DNA, 662 bp, Artificial
  Mutations within GlyA3B4 introduced by GmGlyA3B4_T02TALE nuclease
gttcatgtacggttgcagatataaacgaagcatagcttatgtatgaggtgtaacaaaattggaaacaatagccatgcaaggtgaagaatgtcaccaactcagaaacccttcttcattgacgtgtccctcactcactctcctctcttcactataaatcgccactcttcgtgttctccacttcaccaactccttcaaacttattaacactttccttagttcaatatggggaagcccttcttcactctctctctttcttccctttgcttgctactcttgtcgagtgcatgcttacctccagcaagttcaacgagtgccaactcaacaacctcaacgcgttggaacccgaccaccgcgttgagtccgaaggtggtcttattgaaacatggaactctcaacaccctgagctgcaatgcgccggtgtcactgtttccaaacgcaccctcaaccgcaacggcctccacttgccatcttactcaccttatccccaaatgatcattgtcgttcaaggtgcgtaatattagtaagaagtatttatcagcttaacgtgataacaataatagtaatatgaaatatttattaaatttttataattaatctctgctagaaaatttgattaatcattttagtagaatttgttttctcaactaggttttaaaacacca

SEQ ID NO: 1959 - DNA, 619 bp, Artificial
  Mutations within GlyA3B4 introduced by GmGlyA3B4_T02TALE nuclease
  misc_feature (528): n is a or c or t or g
gttcatgtacggttgcagatataaacgaagcatagcttatgtatgaggtgtaacaaaattggaaacaatagccatgcaaggtgaagaatgtcaccaactcagaaacccttcttcattgacgtgtccctcactcactctcctctcttcactataaatcgccactcttcgtgttctccacttcaccaactccttcaaacttattaacactttccttagttcaatatggggaagcccttcttcactctctctctttcttccctttgcttgctactcttgtcgacttgctattacctccagcaagttcaacgagtgccaactcaacaacctcaacgcgttggaacccgaccaccgcgttgagtccgaaggtggtcttattgaaacatggaactctcaacaccctgagctgcaatgcgccggtgtcactgtttccaaacgcaccctcaaccgcaacggcctccacttgccatcttactcaccttatccccaaatgatcattgtcgttcaaggtgcgtaatattagtaagaagnatttatcagcttaacgtgataacaataatagtaatatgaaatatttattaaatttttataattaatctctgctagaaaatttgattaatca

SEQ ID NO: 1960 - DNA, 608 bp, Artificial
  Mutations within GlyA3B4 introduced by GmGlyA3B4_T02TALE nuclease
gttcatgtacggttgcagatataaacgaagcatagcttatgtatgaggtgtaacaaaattggaaacaatagccatgcaaggtgaagaatgtcaccaactcagaaacccttcttcattgacgtgtccctcactcactctcctctcttcactataaatcgccactcttcgtgttctccacttcaccaactccttcaaacttattaacactttccttagttcaatatggggaagcccttcttcactctctctcttacctccagcaagttcaacgagtgccaactcaacaacctcaacgcgttggaacccgaccaccgcgttgagtccgaaggtggtcttattgaaacatggaactctcaacaccctgagctgcaatgcgccggtgtcactgtttccaaacgcaccctcaaccgcaacggcctccacttgccatcttactcaccttatccccaaatgatcattgtcgttcaaggtgcgtaatattagtaagaagtatttatcagcttaacgtgataacaataatagtaatatgaaatatttattaatttttataattaatctctgctagaaaatttgattaatcatttttagtagaatttgtttttctcaac

SEQ ID NO: 1961 - DNA, 459 bp, Artificial
  Mutations within GlyA3B4 introduced by GmGlyA3B4_T02TALE nuclease
gttcatgtacggttgcagatataaacgaagcatagcttatgtatgaggtgtaacaaaattggaaacaatagccatgcaaggtgaagaatgtcaccaactcagaaacccttcttcattgacgtgtccctcactcactctcctctcttcactataaatcgccactcttcgtgttctccacttcaccaactccttcaaacttattaacactttccttagttcaatatggggaagcccttcttcactctcaacaccctgagctgcaatgcgccggtgtcactgtttccaaacgcaccctcaaccgcaacggcctccacttgccatcttactcaccttatccccaaatgatcattgtcgttcaaggtgcgtaatattagtaagaagtatttatcagcttaacgtgataacaataatagtaatatgaaatatttattaaaattttttataattaatctctgctag

SEQ ID NO: 1962 - DNA, 646 bp, Artificial; identical to SEQ ID NO: 706
  Mutations within GlyA3B4 introduced by GmGlyA3B4_T02TALE nuclease

SEQ ID NO: 1963 - DNA, 471 bp, Artificial; identical to SEQ ID NO: 1723
  Mutations within GlyA3B4 introduced by GmGlyA3B4_T02TALE nuclease

SEQ ID NO: 1964 - DNA, 504 bp, Artificial; identical to SEQ ID NO: 1778
  Mutations within GlyA3B4 introduced by GmGlyA3B4_T02TALE nuclease

SEQ ID NO: 1965 - DNA, 609 bp, Artificial
  Mutations within GlyA3B4 introduced by GmGlyA3B4_T02TALE nuclease
gttcatgtacggttgcagatataaacgaagcatagcttatgtatgaggtgtaacaaaattggaaacaatagccatgcaaggtgaagaatgtcaccaactcagaaacccttcttcattgacgtgtccctcactcactctcctctcttcactataaatcgccactcttcgtgttctccacttcaccaactccttcaaacttattaacactttccttagttcaatatggggaagcccttcttcactctctctctttcttccctttgcttgctactcttgccaactcaacaacctcaacgcgttggaacccgaccaccgcgttgagtccgaaggtggtcttattgaaacatggaactctcaacaccctgagctgcaatgcgccggtgtcactgtttccaaacgcaccctcaaccgcaacggcctccacttgccatcttactcaccttatccccaaatgatcattgtcgttcaaggtgcgtaatattagtaagaagtatttatcagcttaacgtgataacaataatagtaatatgaaatatttattaatttttataattaatctctgctagaaaatttgattaatcatttttagtagaatttgtttttctcaac

SEQ ID NO: 1966 - DNA, 660 bp, Artificial; identical to SEQ ID NO: 1717
  Mutations within GlyA3B4 introduced by GmGlyA3B4_T02TALE nuclease

SEQ ID NO: 1967 - DNA, 504 bp, Artificial
  Mutations within GlyA3B4 introduced by GmGlyA3B4_T02TALE nuclease
gttcatgtacggttgcagatataaacgaagcatagcttatgtatgaggtgtaacaaaattggaaacaatagccatgcaaggtgaagaatgtcaccaactcagaaacccttcttcattgacgtgtccctcactcactctcctctcttcactataaatcgccactcttcgtgttctccacttcaccaacctccagcaagttcaacgagtgccaactcaacaacctcaacgcgttggaacccgaccaccgcgttgagtccgaaggtggtcttattgaaacatggaactctcaacaccctgagctgcaatgcgccggtgtcactgtttccaaacgcaccctcaaccgcaacggcctccacttgccatcttactcaccttatccccaaatgatcattgtcgttcaaggtgcgtaatattagtaagaagtatttatcagcttaacgtgataacaataatagtaatatgaaatatttattaaattttttataattaatctctgctagaaaa

SEQ ID NO: 1968 - DNA, 622 bp, Artificial
  Mutations within GlyA3B4 introduced by GmGlyA3B4_T02TALE nuclease
gttcatgtacggttgcagatataaacgaagcatagcttatgtatgaggtgtaacaaaattggaaacaatagccatgcaaggtgaagaatgtcaccaactcagaaacccttcttcattgacgtgtccctcactcactctcctctcttcactataaatcgccactcttcgtgttctccacttcaccaactccttcaaacttattaacactttccttagttcaatatggggaagcccttcttcactctctctctttcttccctttgcttgctactcttgtcgagtgccaactcaacaacctcaacgcgttggaacccgaccaccgcgttgagtccgaaggtggtcttattgaaacatggaactctcaacaccctgagctgcaatgcgccggtgtcactgtttccaaacgcaccctcaaccgcaacggcctccacttgccatcttactcaccttatccccaaatgatcattgtcgttcaaggtgcgtaatattagtaagaagtatttatcagcttaacgtgataacaataatagtaatatgaaatatttattaaattttttataattaatctctgctagaaaatttgattaatcatttttagtagaatttgtttttctcaactagg

SEQ ID NO: 1969 - DNA, 656 bp, Artificial
  Mutations within GlyA3B4 introduced by GmGlyA3B4_T02TALE nuclease
gttcatgtacggttgcagatataaacgaagcatagcttatgtatgaggtgtaacaaaattggaaacaatagccatgcaaggtgaagaatgtcaccaactcagaaacccttcttcattgacgtgtccctcactcactctcctctcttcactataaatcgccactcttcgtgttctccacttcaccaactccttcaaacttattaacactttccttagttcaatatggggaagcccttcttcactctctctctttcttccctttgcttgctactcttgtcgagtgcatgctattacctccagcaagttcaacgagtgccaactcaacaacctcaacgcgttggaacccgaccaccgcgttgagtccgaaggtggtcttattgaaacatggaactctcaacaccctgagctgcaatgcgccggtgtcactgtttccaaacgcaccctcaaccgcaacggcctccacttgccatcttactcaccttatccccaaatgatcattgtcgttcaaggtgcgtaatattagtaagagtatttatcagcttaacgtgataacaataatagtaatatgaaatatttattaaatttttataattaatctctgctagaaaatttgattaatcattttagtagaatttgtttttctcaactaggttttt

SEQ ID NO: 1970 - DNA, 636 bp, Artificial
  Mutations within GlyA3B4 introduced by GmGlyA3B4_T02TALE nuclease
gttcatgtacggttgcagatataaacgaagcatagcttatgtatgaggtgtaacaaaattggaaacaatagccatgcaaggtgaagaatgtcaccaactcagaaacccttcttcattgacgtgtccctcactcactctcctctcttcactataaatcgccactcttcgtgttctccacttcaccaactccttcaaacttattaacactttccttagttcaatatggggaagcccttcttcactctctctctttcttccctttgcttgctactcttgtcgagtgcaacgagtgccaactcaacaacctcaacgcgttggaacccgaccaccgcgttgagtccgaaggtggtcttattgaaacatggaactctcaacaccctgagctgcaatgcgccggtgtcactgtttccaaacgcaccctcaaccgcaacggcctccacttgccatcttactcaccttatccccaaatgatcattgtcgttcaaggtgcgtaatattagtaagaagtatttatcagcttaacgtgataacaataatagtaatatgaaatatttattaaattttttataattaatctctgctagaaaatttgattaatcatttttagtagaatttgttttttctcaactaggtttt

SEQ ID NO: 1971 - DNA, 574 bp, Artificial
  Mutations within GlyA3B4 introduced by GmGlyA3B4_T02TALE nuclease
gttcatgtacggttgcagatataaacgaagcatagcttatgtatgaggtgtaacaaaattggaaacaatagccatgcaaggtgaagaatgtcaccaactcagaaacccttcttcattgacgtgtccctcactcactctcctctcttcactataaatcgccactcttcgtgttctccacttcaccaactccttcaaacttattaacactttccttagttcaatatggggaagcccttcttcactctctctctttcttccctttgcttgctactcttgtcgagtgccaactcaacaacctcaacgcgttggaacccgaccaccgcgttgagtccgaaggtggtcttattgaaacatggaactctcaacaccctgagctgcaatgcgccggtgtcactgtttccaaacgcaccctcaaccgcaacggcctccacttgccatcttactcaccttatccccaaatgatcattgtcgttcaaggtgcgtaatattagtaagaagtatttatcagcttaacgtgataacaataatagtaatatgaaatatttattaaatttttataattaatctctgctag

SEQ ID NO: 1972 - DNA, 594 bp, Artificial
  Mutations within GlyA3B4 introduced by GmGlyA3B4_T02TALE nuclease
gttcatgtacggttgcagatataaacgaagcatagcttatgtatgaggtgtaacaaaattggaaacaatagccatgcaaggtgaagaatgtcaccaactcagaaacccttcttcattgacgtgtccctcactcactctcctctcttcactataaatcgccactcttcgtgttctccacttcaccaactccttcaaacttattaacactttccttagttcaatatggggaagcccttcttcactctctctctttcttccctttgcttgctactcttgtcgagtgcatccagcaagttcaacgagtgccaactcaacaacctcaacgcgttggaacccgaccaccgcgttgagtccgaaggtggtcttattgaaacatggaactctcaacaccctgagctgcaatgcgccggtgtcactgtttccaaacgcaccctcaaccgcaacggcctccacttgccatcttactcaccttatccccaaatgatcattgtcgttcaaggtgcgtaatattagtaagaagtatttatcagcttaacgtgataacaataatagtaatatgaaatatttattaaatttttataattaatctctgct

SEQ ID NO: 1973 - DNA, 585 bp, Artificial
  Mutations within GlyA3B4 introduced by GmGlyA3B4_T02TALE nuclease
gttcatgtacggttgcagatataaacgaagcatagcttatgtatgaggtgtaacaaaattggaaacaatagccatgcaaggtgaagaatgtcaccaactcagaaacccttcttcattgacgtgtccctcactcactctcctctcttcactataaatcgccactcttcgtgttctccacttcaccaactccttcaaacttattaacactttccttagttcaatatggggaagcccttcttcactctctctctttcttccctttgcttgctactcttgtcgagtgcattagcaagttcaacgagtgccaactcaacaacctcaacgcgttggaacccgaccaccgcgttgagtccgaaggtggtcttattgaaacatggaactctcaacaccctgagctgcaatgcgccggtgtcactgtttccaaacgcaccctcaaccgcaacggcctccacttgccatcttactcaccttatccccaaatgatcattgtcgttcaaggtgcgtaaatattagtaagaagtatttatcagcttaacgtgataacaataatagtaatatgaaatatttattaaattttttataatt

SEQ ID NO: 1974 - DNA, 607 bp, Artificial
  Mutations within GlyA3B4 introduced by GmGlyA3B4_T02TALE nuclease
gttcatgtacggttgcagatataaacgaagcatagcttatgtatgaggtgtaacaaaattggaaacaatagccatgcaaggtgaagaatgtcaccaactcagaaacccttcttcattgacgtgtccctcactcactctcctctcttcactataaatcgccactcttcgtgttctccacttcaccaactccttcaaacttattaacactttccttagttcaatatggggaagcccttcttcactctctctctttcaacgagtgccaactcaacaacctcaacgcgttggaacccgaccaccgcgttgagtccgaaggtggtcttattgaaacatggaactctcaacaccctgagctgcaatgcgccggtgtcactgtttccaaacgcaccctcaaccgcaacggcctccacttgccatcttactcaccttatccccaaatgatcattgtcgttcaaggtgcgtaatattagtaagaagtatttatcagcttaacgtgataacaataatagtaatatgaatatttattaatttttataattaatctctgctagaaaatttgattaatcatttttagtagaatttgtttttctcaactaggtttttaaaa

SEQ ID NO: 1975 - DNA, 664 bp, Artificial
  Mutations within GlyA3B4 introduced by GmGlyA3B4_T02TALE nuclease
  misc_feature (529): n is a or c or t or g
gttcatgtacggttgcagatataaacgaagcatagcttatgtatgaggtgtaacaaaattggaaacaatagccatgcaaggtgaagaatgtcaccaactcagaaacccttcttcattgacgtgtccctcactcactctcctctcttcactataaatcgccactcttcgtgttctccacttcaccaactccttcaaacttattaacactttccttagttcaatatggggaagcccttcttcactctctctctttcttccctttgcttgctactcttgtcgagtgcagctattacctccagcaagttcaacgagtgccaactcaacaacctcaacgcgttggaacccgaccaccgcgttgagtccgaaggtggtcttattgaaacatggaactctcaacaccctgagctgcaatgcgccggtgtcactgtttccaaacgcaccctcaaccgcaacggcctccacttgccatcttactcaccttatccccaaatgatcattgtcgttcaaggtgcgtaatattagtaagagnatttatcagcttaacgtgataacaatatagtaatatgaaatatttattaaatttttataattaatctctgctagaaaatttgattaatcattttagtagaatttgttttctcaactaggtttttaaaacaccaca

SEQ ID NO: 1976 - DNA, 535 bp, Artificial
  Mutations within GlyA3B4 introduced by GmGlyA3B4_T02TALE nuclease
gttcatgtacggttgcagatataaacgaagcatagcttatgtatgaggtgtaacaaaattggaaacaatagccatgcaaggtgaagaatgtcaccaactcagaaacccttcttcattgacgtgtccctcactcactctcctctcttcactataaatcgccactcttcgtgttctccacttcaccaactccttcaaacttattaacactttccttagttcaataagcccttcttcactcaccgcgttgagtccgaaggtggtcttattgaaacatggaactctcaacaccctgagctgcaatgcgccggtgtcactgtttccaaacgcaccctcaaccgcaacggcctccacttgccatcttactcaccttatccccaaatgatcattgtcgttcaaggtgcgtaatattagtaagaagtatttatcagcttaacgtgataacaataatagtaatatgaaatatttattaaattttttataattaatctctgctagaaaatttgattaatcatttttagtagaatttgtttttctc

SEQ ID NO: 1977 - DNA, 651 bp, Artificial
  Mutations within GlyA3B4 introduced by GmGlyA3B4_T02TALE nuclease
gttcatgtacggttgcagatataaacgaagcatagcttatgtatgaggtgtaacaaaattggaaacaatagccatgcaaggtgaagaatgtcaccaactcagaaacccttcttcattgacgtgtccctcactcactctcctctcttcactataaatcgccactcttcgtgttctccacttcaccaactccttcaaacttattaacactttccttagttcaatatggggaagcccttcttcactctctctctttcttccctttactttgctattacctccagcaagttcaacgagtgccaactcaacaacctcaacgcgttggaacccgaccaccgcgttgagtccgaaggtggtcttattgaaacatggaactctcaacaccctgagctgcaatgcgccggtgtcactgtttccaaacgcaccctcaaccgcaacggcctccacttgccatcttactcaccttatcccccaaatgatcattgtcgttcaaggtgcgtaatattagtaagaagtatttatcagcttaacgtgataacaataatagtaatatgaaatatttattaaattttttataattaatctctgctagaaaatttgattaatcatttttagtagaatttgttttttctcaactaggttttaaacaccaca

SEQ ID NO: 1978 - DNA, 598 bp, Artificial
  Mutations within GlyA3B4 introduced by GmGlyA3B4_T02TALE nuclease
gttcatgtacggttgcagatataaacgaagcatagcttatgtatgaggtgtaacaaaattggaaacaatagccatgcaaggtgaagaatgtcaccaactcagaaacccttcttcattgacgtgtccctcactcactctcctctcttcactataaatcgccactcttcgtgttctccacttcaccaactccttcaaacttattaacactttccttagttcaatatggggaagcccttcttcactctctctctttctttccagcaagttcaacgagtgccaactcaacaacctcaacgcgttggaacccgaccaccgcgttgagtccgaaggtggtcttattgaaacatggaactctcaacaccctgagctgcaatgcgccggtgtcactgtttccaaacgcaccctcaaccgcaacggcctccacttgccatcttactcaccttatccccaaatgatcattgtcgttcaaggtgcgtaatattagtaagaagtatttatcagcttaacgtgataacaataatagtaatatgaaatatttattaatttttataattaatctctgctagaaaatttgattaatcatttttagtagaatttg

SEQ ID NO: 1979 - DNA, 502 bp, Artificial
  Mutations within GlyA3B4 introduced by GmGlyA3B4_T02TALE nuclease
gttcatgtacggttgcagatataaacgaagcatagcttatgtatgaggtgtaacaaaattggaaacaatagccatgcaaggtgaagaatgtcaccaactcagaaacccttcttcattgacgtgtccctcactcactctcctctcttcactataaatcgccactcttcgtgttctccacttcaccaactccttcaaacttattaacactttccttagttcaacgagtgccaactcaacaacctcaacgcgttggaacccgaccaccgcgttgagtccgaaggtggtcttattgaaacatggaactctcaacaccctgagctgcaatgcgccggtgtcactgtttccaaacgcaccctcaaccgcaacggcctccacttgccatcttactcaccttatccccaaaatgatcattgtcgttcaaggtgcgtaatattagtaagaagtatttatcagcttaacgtgataacaataatagtaatatgaaatatttattaaatttttt

SEQ ID NO: 1980 - DNA, 665 bp, Artificial
  Mutations within GlyA3B4 introduced by GmGlyA3B4_T02TALE nuclease
gttcatgtacggttgcagatataaacgaagcatagcttatgtatgaggtgtaacaaaattggaaacaatagccatgcaaggtgaagaatgtcaccaactcagaaacccttcttcattgacgtgtccctcactcactctcctctcttcactataaatcgccactcttcgtgttctccacttcaccaactccttcaaacttattaacactttccttagttcaatatggggaagcccttcttcactctctctctttcttccctttgcttgctactcttgtcgagctttgctattacctccagcaagttcaacgagtgccaactcaacaacctcaacgcgttggaacccgaccaccgcgttgagtccgaaggtggtcttattgaaacatggaactctcaacaccctgagctgcaatgcgccggtgtcactgtttccaaacgcaccctcaaccgcaacggcctccacttgccatcttactcaccttatccccaaatgatcattgtcgttcaaggtgcgtaatattagtaagagtatttatcagcttaacgtgataacaataatagtaatatgaaatatttattaaatttttataattaatctctgctagaaaatttgattaatcattttagtagaatttgttttctcaactaggtttttaaaacaccaca

SEQ ID NO: 1981 - DNA, 661 bp, Artificial
  Mutations within GlyA3B4 introduced by GmGlyA3B4_T02TALE nuclease
gttcatgtacggttgcagatataaacgaagcatagcttatgtatgaggtgtaacaaaattggaaacaatagccatgcaaggtgaagaatgtcaccaactcagaaacccttcttcattgacgtgtccctcactcactctcctctcttcactataaatcgccactcttcgtgttctccacttcaccaactccttcaaacttattaacactttccttagttcaatatggggaagcccttcttcactctctctctttcttccctttgcttgctactcttgtcgagtgctattacctccagcaagttcaacgagtgccaactcaacaacctcaacgcgttggaacccgaccaccgcgttgagtccgaaggtggtcttattgaaacatggaactctcaacaccctgagctgcaatgcgccggtgtcactgtttccaaacgcaccctcaaccgcaacggcctccacttgccatcttactcaccttatccccaaatgatcattgtcgttcaaggtgcgtaatattagtaagaagtatttatcagcttaacgtgataacaatatagtaatatgaaatatttattaaatttttataattaatctctgctagaaaatttgattaatcattttagtagaatttgtttttctcaactaggtttttaaaacacca

SEQ ID NO: 1982 - DNA, 650 bp, Artificial
  Mutations within GlyA3B4 introduced by GmGlyA3B4_T02TALE nuclease
gttcatgtacggttgcagatataaacgaagcatagcttatgtatgaggtgtaacaaaattggaaacaatagccatgcaaggtgaagaatgtcaccaactcagaaacccttcttcattgacgtgtccctcactcactctcctctcttcactataaatcgccactcttcgtgttctccacttcaccaactccttcaaacttattaacactttccttagttcaatatggggaagcccttcttcactctctctctttcttccctttgcttgctactcttgtcgagtgcatgggggtcaagccgtgggcctggcacagcaccggcaacagccgctggaccgtctccagcgctattacctccagcaagttcaacgagtgccaactcaacaacctcaacgcgttggaacccgaccaccgcgttgagtccgaaggtggtcttattgaaacatggaactctcaacaccctgagctgcaatgcgccggtgtcactgtttccaaacgcaccctcaaccgcaacggcctccacttgccatcttactcaccttatccccaaatgatcattgtcgttcaaggtgcgtaatattagtaagaagtatttatcagcttaacgtgataacaataatagtaatatgaaatatttattaaaattttttat

SEQ ID NO: 1983 - DNA, 659 bp, Artificial
  Mutations within GlyA3B4 introduced by GmGlyA3B4_T02TALE nuclease
gttcatgtacggttgcagatataaacgaagcatagcttatgtatgaggtgtaacaaaattggaaacaatagccatgcaaggtgaagaatgtcaccaactcagaaacccttcttcattgacgtgtccctcactcactctcctctcttcactataaatcgccactcttcgtgttctccacttcaccaactccttcaaacttattaacactttccttagttcaatatggagcaatgcccttctcactctctctctttcttccctttgcttgctactcttgtcgagtgcattattacctccagcaagttcaacgagtgccaactcaacaacctcaacgcgttggaacccgaccaccgcgttgagtccgaaggtggtcttattgaaacatggaactctcaacaccctgagctgcaatgcgccggtgtcactgtttccaaacgcaccctcaaccgcaacggcctccacttgccatcttactcaccttatccccaaatgatcattgtcgttcaaggtgcgtaatattagtaagaagtatttatcagcttaacgtgataacaatatagtaatatgaaatatttattaaatttttataattaatctctgctagaaaatttgattaatcatttttagtagaatttgtttttctcaactaggtttttaaa

SEQ ID NO: 1984 - DNA, 387 bp, Artificial
  Mutations within GlyA3B4 introduced by GmGlyA3B4_T02TALE nuclease
gttcatgtacggttgcagatataaacgaagcatagcttatgtatgaggtgtaacaaaattggaaacaatagccatgcaaggtgaagaatgtcaccaactcagaaacccttcttcaccgcgttgagtccgaaggtggtcttattgaaacatggaactctcaacaccctgagctgcaatgcgccggtgtcactgtttccaaacgcaccctcaaccgcaacggcctccacttgccatcttactcaccttatccccaaatgatcattgtcgttcaaggtgcgtaatattagtaagaagtatttatcagcttaacgtgataacaataatagtaatatgaaatatttattaaattttttataattaatctctgctagaaaatttgattaatca

SEQ ID NO: 1985 - DNA, 654 bp, Artificial
  Mutations within GlyA3B4 introduced by GmGlyA3B4_T02TALE nuclease
gttcatgtacggttgcagatataaacgaagcatagcttatgtatgaggtgtaacaaaattggaaacaatagccatgcaaggtgaagaatgtcaccaactcagaaacccttcttcattgacgtgtccctcactcactctcctctcttcactataaatcgccactcttcgtgttctccacttcaccaactccttcaaacttattaacactttccttagttcaatatggggaagcccttcttcactctctctctttcttccctttgcttgctactcttgtcgagtgcatgctattacctccagcaagttcaacgagtgccaactcaacaacctcaacgcgttggaacccgaccaccgcgttgagtccgaaggtggtcttattgaaacatggaactctcaacaccctgagctgcaatgcgccggtgtcactgtttccaaacgcaccctcaaccgcaacggcctccacttgccatcttactcaccttatccccaaatgatcattgtcgttcaaggtgcgtaatattagtaagagtatttatcagcttaacgtgataacaatatagtaatatgaaatatttattaaatttttataattaatctctgctagaaaatttgattaatcattttagtagaatttgtttttctcaactaggtttt

SEQ ID NO: 1986 - DNA, 666 bp, Artificial
  Mutations within GlyA3B4 introduced by GmGlyA3B4_T02TALE nuclease
gttcatgtacggttgcagatataaacgaagcatagcttatgtatgaggtgtaacaaaattggaaacaatagccatgcaaggtgaagaatgtcaccaactcagaaacccttcttcattgacgtgtccctcactcactctcctctcttcactataaatcgccactcttcgtgttctccacttcaccaactccttcaaacttattaacactttccttagttcaatatggggaagcccttcttcactctctctctttcttccctttgcttgctactcttgtcgagtgcatgctattacctccagcaagttcaacgagtgccaactcaacaacctcaacgcgttggaacccgaccaccgcgttgagtccgaaggtggtcttattgaaacatggaactctcaacaccctgagctgcaatgcgccggtgtcactgtttccaaacgcaccctcaaccgcaacggcctccacttgccatcttactcaccttatccccaaatgatcattgtcgttcaaggtgcgtaatattagtaagaagtatttatcagcttaacgtgataacaataatagtaatatgaaatatttattaaatttttataattaatctctgctagaaaatttgattaatcattttagtagaatttgttttctcaactaggttttaaaacaccaca

SEQ ID NO: 1987 - DNA, 645 bp, Artificial
  Mutations within GlyA3B4 introduced by GmGlyA3B4_T02TALE nuclease
gttcatgtacggttgcagatataaacgaagcatagcttatgtatgaggtgtaacaaaattggaaacaatagccatgcaaggtgaagaatgtcaccaactcagaaacccttcttcattgacgtgtccctcactcactctcctctcttcactataaatcgccactcttcgtgttctccacttcaccaactccttcaaacttattaacactttccttagttcaatatggggaagcccttcttcactctctctctttcttccctttgcttgctactcttgtcgagtacctccagcaagttcaacgagtgccaactcaacaacctcaacgcgttggaacccgaccaccgcgttgagtccgaaggtggtcttattgaaacatggaactctcaacaccctgagctgcaatgcgccggtgtcactgtttccaaacgcaccctcaaccgcaacggcctccacttgccatcttactcaccttatcccccaaatgatcattgtcgttcaaggtgcgtaaatattagtaagaagtatttatcagcttaacgtgataacaataatagtaatatgaaatatttattaaattttttataattaatctctgctagaaaatttgattaatctttttagtagaattgttttttctcaactagg

SEQ ID NO: 1988 - DNA, 635 bp, Artificial
  Mutations within GlyA3B4 introduced by GmGlyA3B4_T02TALE nuclease
gttcatgtacggttgcagatataaacgaagcatagcttatgtatgaggtgtaacaaaattggaaacaatagccatgcaaggtgaagaatgtcaccaactcagaaacccttcttcattgacgtgtccctcactcactctcctctcttcactataaatcgccactcttcgtgttctccacttcaccaactccttcaaacttattaacactttccttagttcaatatggggaagcccttcttcactctctctctttcttccttttgcttgctactcttgtcgagtgcactattacctccagcaagttcaacgagtgccaactcaacaacctcaacgcgttggaacccgaccaccgcgttgagtccgaaggtggtcttattgaaacatggaactctcaacaccctgagctgcaatgcgccggtgtcactgtttccaaacgcaccctcaaccgcaacggcctccacttgccatcttactcaccttatccccaaatgatcattgtcgttcaaggtgcgtaatattagtaagaagtatttatcagcttaacgtgataacaataatagtaatatgaaatatttattaaatttttataattaatctctgctagaaaatttgattaatcattttagtagaatttg

SEQ ID NO: 1989 - DNA, 614 bp, Artificial
  Mutations within GlyA3B4 introduced by GmGlyA3B4_T02TALE nuclease
gttcatgtacggttgcagatataaacgaagcatagcttatgtatgaggtgtaacaaaattggaaacaatagccatgcaaggtgaagaatgtcaccaactcagaaacccttcttcattgacgtgtccctcactcactctcctctcttcactataaatcgccactcttcgtgttctccacttcaccaactccttcaaacttattaacactttccttagttcaatatggggaagcccttcttcactctctctcttactattacctccagcaagttcaacgagtgccaactcaacaacctcaacgcgttggaacccgaccaccgcgttgagtccgaaggtggtcttattgaaacatggaactctcaacaccctgagctgcaatgcgccggtgtcactgtttccaaacgcaccctcaaccgcaacggcctccacttgccatcttactcaccttatccccaaatgatcattgtcgttcaaggtgcgtaatattagtaagaagtatttatcagcttaacgtgataacaataatagtaatatgaaatatttattaattttttataattaatctctgctagaaaatttgattaatcatttttagtagaatttgtttttctcaa

SEQ ID NO: 1990 - DNA, 452 bp, Artificial
  Mutations within GlyA3B4 introduced by GmGlyA3B4_T02TALE nuclease
gttcatgtacggttgcagatataaacgaagcatagcttatgtatgaggtgtaacaaaattggaaacaatagccatgctattacctccagcaagttcaacgagtgccaactcaacaacctcaacgcgttggaacccgaccaccgcgttgagtccgaaggtggtcttattgaaacatggaactctcaacaccctgagctgcaatgcgccggtgtcactgtttccaaacgcaccctcaaccgcaacggcctccacttgccatcttactcaccttatccccaaatgatcattgtcgttcaaggtgcgtaatattagtaagaagtatttatcagcttaacgtgataacaataatagtaatatgaaatatttattaaattttttataattaatctctgctagaaaatttgattaatcatttttagtagaatttgtttttctcaactaggttttaaaca

SEQ ID NO: 1991 - DNA, 659 bp, Artificial
  Mutations within GlyA3B4 introduced by GmGlyA3B4_T02TALE nuclease
gttcatgtacggttgcagatataaacgaagcatagcttatgtatgaggtgtaacaaaattggaaacaatagccatgcaaggtgaagaatgtcaccaactcagaaacccttcttcattgacgtgtccctcactcactctcctctcttcactataaatcgccactcttcgtgttctccacttcaccaactccttcaaacttattaacactttccttagttcaatatggggaagcccttcttcactctctctctttcttccctttgcttgctactcttgtcgactattacctccagcaagttcaacgagtgccaactcaacaacctcaacgcgttggaacccgaccaccgcgttgagtccgaaggtggtcttattgaaacatggaactctcaacaccctgagctgcaatgcgccggtgtcactgtttccaaacgcaccctcaaccgcaacggcctccacttgccatcttactcaccttatccccaaatgatcattgtcgttcaaggtgcgtaatattagtaagaagtatttatcagcattaacgtgataacaataatagtaatatgaaatatttattaaatttttataattaatctctgctagaaaatttgattaatcattttagtagaatttgttttctcaactaggtttttaaaacacca

SEQ ID NO: 1992 - DNA, 635 bp, Artificial
  Mutations within GlyA3B4 introduced by GmGlyA3B4_T02TALE nuclease
gttcatgtacggttgcagatataaacgaagcatagcttatgtatgaggtgtaacaaaattggaaacaatagccatgcaaggtgaagaatgtcaccaactcagaaacccttcttcattgacgtgtccctcactcactctcctctcttcactataaatcgccactcttcgtgttctccacttcaccaactccttcaaacttattaacactttccttagttcaatatggggaagcccttcttcactctctctctttcttccctttgcttgctactcttgtcgagtgcactattacctccagcaagttcaacgagtgccaactcaacaacctcaacgcgttggaacccgaccaccgcgttgagtccgaaggtggtcttattgaaacatggaactctcaacaccctgagctgcaatgcgccggtgtcactgtttccaaacgcaccctcaaccgcaacggcctccacttgccatcttactcaccttatccccaaatgatcattgtcgttcaaggtgcgtaatattagtaagaagtatttatcagcttaacgtgataacaataatagtaatatgaaatatttattaaatttttataattaatctctgctagaaaatttgattaatcattttagtagaatttg

SEQ ID NO: 1993 - DNA, 650 bp, Artificial; identical to SEQ ID NO: 1234
  Mutations within GlyA3B4 introduced by GmGlyA3B4_T02TALE nuclease

SEQ ID NO: 1994 - DNA, 666 bp, Artificial
  Mutations within GlyA3B4 introduced by GmGlyA3B4_T02TALE nuclease
gttcatgtacggttgcagatataaacgaagcatagcttatgtatgaggtgtaacaaaattggaaacaatagccatgcaaggtgaagaatgtcaccaactcagaaacccttcttcattgacgtgtccctcactcactctcctctcttcactataaatcgccactcttcgtgttctccacttcaccaactccttcaaacttattaacactttccttagttcaatatggggaagcccttcttcactctctctctttcttccctttgcttgctactcttgtcgagtgcattgctattacctccagcaagttcaacgagtgccaactcaacaacctcaacgcgttggaacccgaccaccgcgttgagtccgaaggtggtcttattgaaacatggaactctcaacaccctgagctgcaatgcgccggtgtcactgtttccaaacgcaccctcaaccgcaacggcctccacttgccatcttactcaccttatccccaaatgatcattgtcgttcaaggtgcgtaatattagtaagagtatttatcagcttaacgtgataacaataatagtaatatgaaatatttattaaatttttataattaatctctgctagaaaatttgattaatcattttagtagaatttgttttctcaactaggttttaaaacaccaca

SEQ ID NO: 1995 - DNA, 649 bp, Artificial
  Mutations within GlyA3B4 introduced by GmGlyA3B4_T02TALE nuclease
gttcatgtacggttgcagatataaacgaagcatagcttatgtatgaggtgtaacaaaattggaaacaatagccatgcaaggtgaagaatgtcaccaactcagaaacccttcttcattgacgtgtccctcactcactctcctctcttcactataaatcgccactcttcgtgttctccacttcatcaactccttcaaacttattaacactttccttagttcaatatggggaagcccttcttcactctctctctttcttccctttgcttgctactcttgtcgagtgcatctattacctccagcaagttcaacgagtgccaactcaacaacctcaacgcgttggaacccgaccaccgcgttgagtccgaaggtggtcttattgaaacatggaactctcaacaccctgagctgcaatgcgccggtgtcactgtttccaaacgcaccctcaaccgcaacggcctccacttgccatcttactcaccttatccccaaatgatcattgtcgttcaaggtgcgtaatattagtaagaagtatttatcagcttaacgtgatacaataatagtaatatgaaatatttattaaatttttataattaatctctgctagaaaatttgattaatcattttagtagaatttgttttctcaactagg

SEQ ID NO: 1996 - DNA, 503 bp, Artificial
  Mutations within GlyA3B4 introduced by GmGlyA3B4_T02TALE nuclease
gttcatgtacggttgcagatataaacgaagcatagcttatgtatgaggtgtaacaaaattggaaacaatagccatgcaaggtgaagaatgtcaccaactcagaaacccttcttcattgacgtgtccctcactcactctcctctcttcactataaatcgccactcttcgtgttctccacttcaccaactccttcaaacttattaacactttccttagttcaacgagtgccaactcaacaacctcaacgcgttggaacccgaccaccgcgttgagtccgaaggtggtcttattgaaacatggaactctcaacaccctgagctgcaatgcgccggtgtcactgtttccaaacgcaccctcaaccgcaacggcctccacttgccatcttactcaccttatccccaaatgatcattgtcgttcaaggtgcgtaatattagtaagaagtatttatcagcttaacgtgataacaataatagtaatatgaaatatttattaaattttttat

SEQ ID NO: 1997 - DNA, 653 bp, Artificial
  Mutations within GlyA3B4 introduced by GmGlyA3B4_T02TALE nuclease
gttcatgtacggttgcagatataaacgaagcatagcttatgtatgaggtgtaacaaaattggaaacaatagccatgcaaggtgaagaatgtcaccaactcagaaacccttcttcattgacgtgtccctcactcactctcctctcttcactataaatcgccactcttcgtgttctccacttcaccaactccttcaaacttattaacactttccttagttcaatatggggaagcccttcttcactctctctctttcttccctttgcttgctactcttgtcgagtgcatacctccagcaagttcaacgagtgccaactcaacaacctcaacgcgttggaacccgaccaccgcgttgagtccgaaggtggtcttattgaaacatggaactctcaacaccctgagctgcaatgcgccggtgtcactgtttccaaacgcaccctcaaccgcaacggcctccacttgccatcttactcaccttatccccaaatgatcattgtcgttcaaggtgcgtaatattagtaagaagtatttatcagcttaacgtgataacaatatagtaatatgaaatatttattaaatttttataattaatctctgctagaaaatttgattaatcattttagtagaatttgttttctcaactaggtttttaaaa

SEQ ID NO: 1998 - DNA, 636 bp, Artificial; identical to SEQ ID NO: 1885
  Mutations within GlyA3B4 introduced by GmGlyA3B4_T02TALE nuclease

SEQ ID NO: 1999 - DNA, 668 bp, Artificial
  Mutations within GlyA3B4 introduced by GmGlyA3B4_T02TALE nuclease
gttcatgtacggttgcagatataaacgaagcatagcttatgtatgaggtgtaacaaaattggaaacaatagccatgcaaggtgaagaatgtcaccaactcagaaacccttcttcattgacgtgtccctcactcactctcctctcttcactataaatcgccactcttcgtgttctccacttcaccaactccttcaaacttattaacactttccttagttcaatatggggaagcccttcttcactctctctctttcttccctttgcttgctactcttgtcgagtgcatttgctattacctccagcaagttcaacgagtgccaactcaacaacctcaacgcgttggaacccgaccaccgcgttgagtccgaaggtggtcttattgaaacatggaactctcaacaccctgagctgcaatgcgccggtgtcactgtttccaaacgcaccctcaaccgcaacggcctccacttgccatcttactcaccttatccccaaatgatcattgtcgttcaaggtgcgtaatattagtaagagtatttatcagcttaacgtgataacaataatagtaatatgaaatatttattaaatttttataattaatctctgctagaaaatttgattaatcattttagtagaatttgttttctcaactaggtttttaaaacaccaca

SEQ ID NO: 2000 - DNA, 655 bp, Artificial
  Mutations within GlyA3B4 introduced by GmGlyA3B4_T02TALE nuclease
gttcatgtacggttgcagatataaacgaagcatagcttatgtatgaggtgtaacaaaattggaaacaatagccatgcaaggtgaagaatgtcaccaactcagaaacccttcttcattgacgtgtccctcactcactctcctctcttcactataaatcgccactcttcgtgttctccacttcaccaactccttcaaacttattaacactttccttagttcaatatggggaagcccttcttcactctctctctttcttccctttgcttgctactcttgtcgagtgcatgctattacctccagcaagttcaacgagtgccaactcaacaacctcaacgcgttggaacccgaccaccgcgttgagtccgaaggtggtcttattgaaacatggaactctcaacaccctgagctgcaatgcgccggtgtcactgtttccaaacgcaccctcaaccgcaacggcctccacttgccatcttactcaccttatccccaaatgatcattgtcgttcaaggtgcgtaatattagtaagagtatttatcagcttaacgtgataacaataatagtaatatgaaatatttattaaatttttataattaatctctgctagaaaatttgattaatcattttagtagaatttgttttctcaactaggttttt

SEQ ID NO: 2001 - DNA, 659 bp, Artificial; identical to SEQ ID NO: 1939
  Mutations within GlyA3B4 introduced by GmGlyA3B4_T02TALE nuclease

SEQ ID NO: 2002 - DNA, 612 bp, Artificial
  Mutations within GlyA3B4 introduced by GmGlyA3B4_T02TALE nuclease
gttcatgtacggttgcagatataaacgaagcatagcttatgtatgaggtgtaacaaaattggaaacaatagccatgcaaggtgaagaatgtcaccaactcagaaacccttcttcattgacgtgtccctcactcactctcctctcttcactataaatcgccactcttcgtgttctccacttcaccaactccttcaaacttattaacactttccttagttcaatatggggaagcccttcttcactctctctattacctccagcaagttcaacgagtgccaactcaacaacctcaacgcgttggaacccgaccaccgcgttgagtccgaaggtggtcttattgaaacatggaactctcaacaccctgagctgcaatgcgccggtgtcactgtttccaaacgcaccctcaaccgcaacggcctccacttgccatcttactcaccttatccccaaatgatcattgtcgttcaaggtgcgtaatattagtaagaagtatttatcagcttaacgtgataacaataatagtaatatgaaatatttattaatttttataattaatctctgctagaaaatttgattaatcatttttagtagaatttgtttttctcaactagg

SEQ ID NO: 2003 - DNA, 535 bp, Artificial
  Mutations within GlyA3B4 introduced by GmGlyA3B4_T02TALE nuclease
gttcatgtacggttgcagatataaacgaagcatagcttatgtatgaggtgtaacaaaattggaaacaatagccatgcaaggtgaagaatgtcaccaactcagaaacccttcttcattgacgtgtccctcactcactctcctctcttcactataaatcgccactcttcgtgttctccacttcaccaactccttcaaacttattaacactttccttagttcaacgagtgccaactcaacaacctcaacgcgttggaacccgaccaccgcgttgagtccgaaggtggtcttattgaaacatggaactctcaacaccctgagctgcaatgcgccggtgtcactgtttccaaacgcaccctcaaccgcaacggcctccacttgccatcttactcaccttatccccaaatgatcattgtcgttcaaggtgcgtaatattagtaagaagtatttatcagcttaacgtgataacaataatagtaatatgaaatatttattaaattttttataattaatctctgctagaaaatttgattaatca

SEQ ID NO: 2004 - DNA, 663 bp, Artificial; identical to SEQ ID NO: 1819
  Mutations within GlyA3B4 introduced by GmGlyA3B4_T02TALE nuclease

SEQ ID NO: 2005 - DNA, 564 bp, Artificial
  Mutations within GlyA3B4 introduced by GmGlyA3B4_T02TALE nuclease
gttcatgtacggttgcagatataaacgaagcatagcttatgtatgaggtgtaacaaaattggaaacaatagccatgcaaggtgaagaatgtcaccaactcagaaacccttcttcattgacgtgtccctcactcactctcctctcttcactataaatcgccactcttcgtgttctccacttcaccaactccttcaaacttattaacactttccttagttcaatatggggaagcccttcttcactctctctctttcttctcttcactataaatccgaaggtggtcttattgaaacatggaactctcaacaccctgagctgcaatgcgccggtgtcactgtttccaaacgcaccctcaaccgcaacggcctccacttgccatcttactcaccttatccccaaaatgatcattgtcgttcaaggtgcgtaatattagtaagaagtatttatcagcttaacgtgataacaataatagtaatatgaaatatttattaaattttttataattaatctctgctagaaaatttgattaatcatttttagtagaatttgtttttctcaactagg

SEQ ID NO: 2006 - DNA, 599 bp, Artificial
  Mutations within GlyA3B4 introduced by GmGlyA3B4_T02TALE nuclease
gttcatgtacggttgcagatataaacgaagcatagcttatgtatgaggtgtaacaaaattggaaacaatagccatgcaaggtgaagaatgtcaccaactcagaaacccttcttcattgacgtgtccctcactcactctcctctcttcactataaatcgccactcttcgtgttctccacttcaccaactccttcaaacttattaacactttccttagttcaatatggggaagcccttcttcactctctctctttcttccctttgcttgctactcttgtcgagttacctccagcaagttcaacgagtgccaactcaacaacctcaacgcgttggaacccgaccaccgcgttgagtccgaaggtggtcttattgaaacatggaactctcaacaccctgagctgcaatgcgccggtgtcactgtttccaaacgcaccctcaaccgcaacggcctccacttgccatcttactcaccttatcccccaaatgatcattgtcgttcaaggtgcgtaaatattagtaagaagtatttatcagcttaacgtgataacaataatagtaatatgaaatatttattaaattttttataattaatctctgcta

SEQ ID NO: 2007 - DNA, 665 bp, Artificial
  Mutations within GlyA3B4 introduced by GmGlyA3B4_T02TALE nuclease
gttcatgtacggttgcagatataaacgaagcatagcttatgtatgaggtgtaacaaaattggaaacaatagccatgcaaggtgaagaatgtcaccaactcagaaacccttcttcattgacgtgtccctcactcactctcctctcttcactataaatcgccactcttcgtgttctccacttcaccaactccttcaaacttattaacactttccttagttcaatatggggaagcccttcttcactctctctctttcttccctttgcttgctactcttgtcgagtgcatgctattacctccagcaagttcaacgagtgccaactcaacaacctcaacgcgttggaacccgaccaccgcgttgagtccgaaggtggtcttattgaaacatggaactctcaacaccctgagctgcaatgcgccggtgtcactgtttccaaacgcaccctcaaccgcaacggcctccacttgccatcttactcaccttatccccaaatgatcattgtcgttcaaggtgcgtaatattagtaagagtatttatcagcttaacgtgataacaataatagtaatatgaaatatttattaaatttttataattaatctctgctagaaaatttgattaatcattttagtagaatttgttttctcaactaggttttaaaacaccaca

SEQ ID NO: 2008 - DNA, 667 bp, Artificial; identical to SEQ ID NO: 1838
  Mutations within GlyA3B4 introduced by GmGlyA3B4_T02TALE nuclease

SEQ ID NO: 2009 - DNA, 641 bp, Artificial
  Mutations within GlyA3B4 introduced by GmGlyA3B4_T02TALE nuclease
gttcatgtacggttgcagatataaacgaagcatagcttatgtatgaggtgtaacaaaattggaaacaatagccatgcaaggtgaagaatgtcaccaactcagaaacccttcttcattgacgtgtccctcactcactctcctctcttcactataaatcgccactcttcgtgttctccacttcaccaactccttcaaacttattaacactttccttagttcaatatggggaagcccttcttcactctctctctttcttccctttgcttgctactcttgctattacctccagcaagttcaacgagtgccaactcaacaacctcaacgcgttggaacccgaccaccgcgttgagtccgaaggtggtcttattgaaacatggaactctcaacaccctgagctgcaatgcgccggtgtcactgtttccaaacgcaccctcaaccgcaacggcctccacttgccatcttactcaccttatccccaaatgatcattgtcgttcaaggtgcgtaatattagtaagaagtatttatcagcttaacgtgataacaataatagtaatatgaaatatttattaaatttttataattaatctctgctagaaaatttgattaatcatttttagtagaatttgttttttctcaacta

SEQ ID NO: 2010 - DNA, 632 bp, Artificial; identical to SEQ ID NO: 1756
  Mutations within GlyA3B4 introduced by GmGlyA3B4_T02TALE nuclease

SEQ ID NO: 2011 - DNA, 636 bp, Artificial; identical to SEQ ID NO: 1885
  Mutations within GlyA3B4 introduced by GmGlyA3B4_T02TALE nuclease

SEQ ID NO: 2012 - DNA, 431 bp, Artificial
  Mutations within GlyA3B4 introduced by GmGlyA3B4_T02TALE nuclease
gttcatgtacggttgcagatataaacgaagcatagcttatgtatgaggtgtaacaaaattggaaacaatagccatgcaaggtgaagaatgtcaccaactcagaaacccttcttcaccgcgttgagtccgaaggtggtcttattgaaacatggaactctcaacaccctgagctgcaatgcgccggtgtcactgtttccaaacgcaccctcaaccgcaacggcctccacttgccatcttactcaccttatccccaaatgatcattgtcgttcaaggtgcgtaatattagtaagaagtatttatcagcttaacgtgataacaataatagtaatatgaaatatttattaaattttttataattaatctctgctagaaaatttgattaatcatttttagtagaattttgtttttctcaactaggttttaaacacca

SEQ ID NO: 2013 - DNA, 658 bp, Artificial
  Mutations within GlyA3B4 introduced by GmGlyA3B4_T02TALE nuclease
gttcatgtacggttgcagatataaacgaagcatagcttatgtatgaggtgtaacaaaattggaaacaatagccatgcaaggtgaagaatgtcaccaactcagaaacccttcttcattgacgtgtccctcactcactctcctctcttcactataaatcgccactcttcgtgttctccacttcaccaactccttcaaacttattaacactttccttagttcaatatggggaagcccttcttcactctctctctttcttccctttgcttgctactcttgtcgagtgcattacctccagcaagttcaacgagtgccaactcaacaacctcaacgcgttggaacccgaccaccgcgttgagtccgaaggtggtcttattgaaacatggaactctcaacaccctgagctgcaatgcgccggtgtcactgtttccaaacgcaccctcaaccgcaacggcctccacttgccatcttactcaccttatccccaaatgatcattgtcgttcaaggtgcgtaatattagtaagaagtatttatcagcttaacgtgataacaatatagtaatatgaaatatttattaaatttttataattaatctctgctagaaaatttgattaatcattttagtagaatttgttttctcaactaggttttaaaacacca

SEQ ID NO: 2014 - DNA, 504 bp, Artificial; identical to SEQ ID NO: 1778
  Mutations within GlyA3B4 introduced by GmGlyA3B4_T02TALE nuclease

SEQ ID NO: 2015 - DNA, 664 bp, Artificial
  Mutations within GlyA3B4 introduced by GmGlyA3B4_T02TALE nuclease
gttcatgtacggttgcagatataaacgaagcatagcttatgtatgaggtgtaacaaaattggaaacaatagccatgcaaggtgaagaatgtcaccaactcagaaacccttcttcattgacgtgtccctcactcactctcctctcttcactataaatcgccactcttcgtgttctccacttcaccaactccttcaaacttattaacactttccttagttcaatatggggaagcccttcttcactctctctctttcttccctttgcttgctactcttgtcgagtgcatgctattacctccagcaagttcaacgagtgccaactcaacaacctcaacgcgttggaacccgaccaccgcgttgagtccgaaggtggtcttattgaaacatggaactctcaacaccctgagctgcaatgcgccggtgtcactgtttccaaacgcaccctcaaccgcaacggcctccacttgccatcttactcaccttatccccaaatgatcattgtcgttcaaggtgcgtaatattagtaagaagtatttatcagcttaacgtgataacaataatagtaatatgaaatatttattaaatttttataattaatctctgctagaaaatttgattaatcattttagtagaatttgtttttctcaactaggttttaaacacca

SEQ ID NO: 2016 - DNA, 427 bp, Artificial
  Mutations within GlyA3B4 introduced by GmGlyA3B4_T02TALE nuclease
gttcatgtacggttgcagatataaacgaagcatagcttatgtatgaggtgtaacaaaattggaaacaatagccatgcaaggtgaagaatgtcaccaactcagaaacccttcttcaccgcgttgagtccgaaggtggtcttattgaaacatggaactctcaacaccctgagctgcaatgcgccggtgtcactgtttccaaacgcaccctcaaccgcaacggcctccacttgcccatcttactcaccttatccccaaatgatcattgtcgttcaaggtgcgtaatattagtaagaagtatttatcagcttaacgtgataacaataatagtaatatgaaatatttattaaattttttataattaatctctgctagaaaatttgattaatcatttttagtagaattttgtttttctcaactaggttttaaa

SEQ ID NO: 2017 - DNA, 614 bp, Artificial
  Mutations within GlyA3B4 introduced by GmGlyA3B4_T02TALE nuclease
gttcatgtacggttgcagatataaacgaagcatagcttatgtatgaggtgtaacaaaattggaaacaatagccatgcaaggtgaagaatgtcaccaactcagaaacccttcttcattgacgtgtccctcactcactctcctctcttcactataaatcgccactcttcgtgttctccacttcaccaactccttcaaacttattaacactttccttagttcaatatggggaagcccttcttcactctctctctttcttccctttgcttgctactcttgtcgagtgccaactcaacaacctcaacgcgttggaacccgaccaccgcgttgagtccgaaggtggtcttattgaaacatggaactctcaacaccctgagctgcaatgcgccggtgtcactgtttccaaacgcaccctcaaccgcaacggcctccacttgccatcttactcaccttatccccaaatgatcattgtcgttcaaggtgcgtaatattagtaagaagtatttatcagcttaacgtgataacaataatagtaatatgaaatatttattaaatttttataattaatctctgctagaaaatttgattaatcatttttagtagaatttgtttttctc

SEQ ID NO: 2018 - DNA, 646 bp, Artificial
  Mutations within GlyA3B4 introduced by GmGlyA3B4_T02TALE nuclease
gttcatgtacggttgcagatataaacgaagcatagcttatgtatgaggtgtaacaaaattggaaacaatagccatgcaaggtgaagaatgtcaccaactcagaaacccttcttcattgacgtgtccctcactcactctcctctcttcactataaatcgccactcttcgtgttctccacttcaccaactccttcaaacttattaacactttccttagttcaatatggggaagcccttcttcactctctctctttcttccctttgcttgctactcttgtcgagtacctccagcaagttcaacgagtgccaactcaacaacctcaacgcgttggaacccgaccaccgcgttgagtccgaaggtggtcttattgaaacatggaactctcaacaccctgagctgcaatgcgccggtgtcactgtttccaaacgcaccctcaaccgcaacggcctccacttgccatcttactcaccttatccccaaatgatcattgtcgttcaaggtgcgtaatattagtaagaagtatttatcagcttaacgtgataacaataatagtaatatgaaatatttattaaattttttataattaatctctgctagaaaatttgattaatctttttagtagaattgttttttctcaactaggttt

SEQ ID NO: 2019 - DNA, 447 bp, Artificial
  Mutations within GlyA3B4 introduced by GmGlyA3B4_T02TALE nuclease
gttcatgtacggttgcagatataaacgaagcatagcttatgtatgaggtgtaacaaaattggaaacaatagccatgctattacctccagcaagttcaacgagtgccaactcaacaacctcaacgcgttggaacccgaccaccgcgttgagtccgaaggtggtcttattgaaacatggaactctcaacaccctgagctgcaatgcgccggtgtcactgtttccaaacgcaccctcaaccgcaacggcctccacttgccatcttactcaccttatccccaaatgatcattgtcgttcaaggtgcgtaatattagtaagaagtatttatcagcttaacgtgataacaataatagtaatatgaaatatttattaaattttttataattaatctctgctagaaaatttgattaatcatttttagtagaatttgtttttctcaactaggtttt

SEQ ID NO: 2020 - DNA, 666 bp, Artificial
  Mutations within GlyA3B4 introduced by GmGlyA3B4_T02TALE nuclease
  misc_feature (530): n is a or c or t or g
gttcatgtacggttgcagatataaacgaagcatagcttatgtatgaggtgtaacaaaattggaaacaatagccatgcaaggtgaagaatgtcaccaactcagaaacccttcttcattgacgtgtccctcactcactctcctctcttcactataaatcgccactcttcgtgttctccacttcaccaactccttcaaacttattaacactttccttagttcaatatggggaagcccttcttcactctctctctttcttccctttgcttgctactcttgtcgagtgcatgttattacctccagcaagttcaacgagtgccaactcaacaacctcaacgcgttggaacccgaccaccgcgttgagtccgaaggtggtcttattgaaacatggaactctcaacaccctgagctgcaatgcgccggtgtcactgtttccaaacgcaccctcaaccgcaacggcctccacttgccatcttactcaccttatccccaaatgatcattgtcgttcaaggtgcgtaatattagtaagagnatttatcagcttaacgtgataacaataatagtaatatgaaatatttattaaatttttataattaatctctgctagaaaatttgattaatcattttagtagaatttgttttctcaactaggtttttaaaacaccaca

SEQ ID NO: 2021 - DNA, 661 bp, Artificial; identical to SEQ ID NO: 1694
  Mutations within GlyA3B4 introduced by GmGlyA3B4_T02TALE nuclease

SEQ ID NO: 2022 - DNA, 632 bp, Artificial
  Mutations within GlyA3B4 introduced by GmGlyA3B4_T02TALE nuclease
gttcatgtacggttgcagatataaacgaagcatagcttatgtatgaggtgtaacaaaattggaaacaatagccatgcaaggtgaagaatgtcaccaactcagaaacccttcttcattgacgtgtccctcactcactctcctctcttcactataaatcgccactcttcgtgttctccacttcaccaactccttcaaacttattaacactttccttagttcaatatggggaagcccttcttcactctctctctttcttccctttgcttgctactcttgtcgcatctattacctccagcaagttcaacgagtgccaactcaacaacctcaacgcgttggaacccgaccaccgcgttgagtccgaaggtggtcttattgaaacatggaactctcaacaccctgagctgcaatgcgccggtgtcactgtttccaaacgcaccctcaaccgcaacggcctccacttgccatcttactcaccttatccccaaatgatcattgtcgttcaaggtgcgtaatattagtaagaagtatttatcagcttaacgtgataacaataatagtaatatgaaatatttattaaatttttataattaatctctgctagaaaatttgattaatcattttagtagaatttg

SEQ ID NO: 2023 - DNA, 635 bp, Artificial; identical to SEQ ID NO: 1775
  Mutations within GlyA3B4 introduced by GmGlyA3B4_T02TALE nuclease

SEQ ID NO: 2024 - DNA, 660 bp, Artificial
  Mutations within GlyA3B4 introduced by GmGlyA3B4_T02TALE nuclease
  misc_feature (288): n is a or c or t or g
gttcatgtacggttgcagatataaacgaagcatagcttatgtatgaggtgtaacaaaattggaaacaatagccatgcaaggtgaagaatgtcaccaactcagaaacccttcttcattgacgtgtccctcactcactctcctctcttcactataaatcgccactcttcgtgttctccacttcaccaactccttcaaacttattaacactttccttagttcaatatggggaagcccttcttcactctctctctttcttccctttgcttgctactcttgtcgagtgctatnctcctcagcaagttcaacgagtgccaactcaacaacctcaacgcgttggaacccgaccaccgcgttgagtccgaaggtggtcttattgaaacatggaactctcaacaccctgagctgcaatgcgccggtgtcactgtttccaaacgcaccctcaaccgcaacggcctccacttgccatcttactcaccttatccccaaatgatcattgtcgttcaaggtgcgtaatattagtaagaagtatttatcagcttaacgtgataacaataatagtaatatgaaatatttattaaatttttataattaatctctgctagaaaatttgattaatcattttagtagaatttgttttctcaactaggttttaaaacacca

SEQ ID NO: 2025 - DNA, 471 bp, Artificial; identical to SEQ ID NO: 1723
  Mutations within GlyA3B4 introduced by GmGlyA3B4_T02TALE nuclease

SEQ ID NO: 2026 - DNA, 420 bp, Artificial
  Mutations within GlyA3B4 introduced by GmGlyA3B4_T02TALE nuclease
gttcatgtacggttgcagatataaacgaagcatagcttatgtatgaggtgtaacaaaattggaaacaatagccatgcaaggtgaagaatgtcaccaactcagaaacccttcttcaccgcgttgagtccgaaggtggtcttattgaaacatggaactctcaacaccctgagctgcaatgcgccggtgtcactgtttccaaacgcacccctcaaccgcaacggcctccacttgccatcttactcaccttatccccaaatgatcattgtcgttcaaggtgcgtaatattagtaagaagtatttatcagcttaacgtgataacaataatagtaatatgaaatatttattaaattttttataattaatctctgctagaaaatttgattaatcatttttagtagaattttgtttttctcaactagg

SEQ ID NO: 2027 - DNA, 643 bp, Artificial
  Mutations within GlyA3B4 introduced by GmGlyA3B4_T02TALE nuclease
gttcatgtacggttgcagatataaacgaagcatagcttatgtatgaggtgtaacaaaattggaaacaatagccatgcaaggtgaagaatgtcaccaactcagaaacccttcttcattgacgtgtccctcactcactctcctctcttcactataaatcgccactcttcgtgttctccacttcaccaactccttcaaacttattaacactttccttagttcaatatggggaagcccttcttcactctctctctttcttccctttgctattacctccagcaagttcaacgagtgccaactcaacaacctcaacgcgttggaacccgaccaccgcgttgagtccgaaggtggtcttattgaaacatggaactctcaacaccctgagctgcaatgcgccggtgtcactgtttccaaacgcaccctcaaccgcaacggcctccacttgccatcttactcaccttactcccccaaatgatcattgtcgttcaaggtgcgtaatattagtaagaagtatttatcagcttaacgtgataacaataatagtaatatgaaatatttataaatttttataattaatctctgctagaaaatttgattaatcatttttagtagaatttgttttttctcaactaggttttaaacacca

SEQ ID NO: 2028 - DNA, 519 bp, Artificial
  Mutations within GlyA3B4 introduced by GmGlyA3B4_T02TALE nuclease
gttcatgtacggttgcagatataaacgaagcatagcttatgtatgaggtgtaacaaaattggaaacaatagccatgcaaggtgaagaatgtcaccaactcagaaacccttcttcattgacgtgtccctcactcactctcctctcttcactataaatcgccactcttcgtgttctccacttcaccaactccttcaaacttattaacactttccttagttcaatatggggaagccgaccaccgcaacgcgttggaacccgaccaccgcgttgagtccgaaggtggtcttattgaaacatggaactctcaacaccctgagctgcaatgcgccggtgtcactgtttccaaacgcaccctcaaccgcaacggcctccacttgccatcttactcaccttatccccaaaatgatcattgtcgttcaaggtgcgtaatattagtaagaagtatttatcagcttaacgtgataacaataatagtaatatgaaatatttattaaattttttataattaatctctgctag

SEQ ID NO: 2029 - DNA, 641 bp, Artificial
  Mutations within GlyA3B4 introduced by GmGlyA3B4_T02TALE nuclease
gttcatgtacggttgcagatataaacgaagcatagcttatgtatgaggtgtaacaaaattggaaacaatagccatgcaaggtgaagaatgtcaccaactcagaaacccttcttcattgacgtgtccctcactcactctcctctcttcactataaatcgccactcttcgtgttctccacttcaccaactccttcaaacttattaacactttccttagttcaatatggggaagcccttcttcactctctctctttcttccctttgctattacctccagcaagttcaacgagtgccaactcaacaacctcaacgcgttggaacccgaccaccgcgttgagtccgaaggtggtcttattgaaacatggaactctcaacaccctgagctgcaatgcgccggtgtcactgtttccaaacgcaccctcaaccgcaacggcctccacttgccatcttactcaccttatccccaaatgatcattgtcgttcaaggtgcgtaatattagtaagaagtatttatcagctttaacgtgataacaataatagtaatatgaaatatttattaaattttttataattaatctctgctagaaaatttgattaatcatttttagtagaatttgttttttctcaactaggttttaaaac

SEQ ID NO: 2030 - DNA, 633 bp, Artificial
  Mutations within GlyA3B4 introduced by GmGlyA3B4_T02TALE nuclease
gttcatgtacggttgcagatataaacgaagcatagcttatgtatgaggtgtaacaaaattggaaacaatagccatgcaaggtgaagaatgtcaccaactcagaaacccttcttcattgacgtgtccctcactcactctcctctcttcactataaatcgccactcttcgtgttctccacttcaccaactccttcaaacttattaacactttccttagttcaatatggggaagcccttcttcactctctctctttcttccctttgcttgctactcttgtcgagtgctattacctccagcaagttcaacgagtgccaactcaacaacctcaacgcgttggaacccgaccaccgcgttgagtccgaaggtggtcttattgaaacatggaactctcaacaccctgagctgcaatgcgccggtgtcactgtttccaaacgcaccctcaaccgcaacggcctccacttgccatcttactcaccttatccccaaatgatcattgtcgttcaaggtgcgtaatattagtaagaagtatttatcagcttaacgtgataacaataatagtaatatgaaatatttattaaatttttataattaatctctgctagaaaatttgattaatcattttagtagaatttg

SEQ ID NO: 2031 - DNA, 469 bp, Artificial
  Mutations within GlyA3B4 introduced by GmGlyA3B4_T02TALE nuclease
gttcatgtacggttgcagatataaacgaagcatagcttatgtatgaggtgtaacaaaattggaaacaatagccatgcaaggtgaagaatgccaccgccattgctattacctccagcaagttcaacgagtgccaactcaacaacctcaacgcgttggaacccgaccaccgcgttgagtccgaaggtggtcttattgaaacatggaactctcaacaccctgagctgcaatgcgccggtgtcactgtttccaaacgcaccctcaaccgcaacggcctccacttgccatcttactcaccttatccccaaatgatcattgtcgttcaaggtgcgtaatattagtaagaagtatttatcagcttaacgtgataacaataatagtaatatgaaatatttattaaattttttataattaatctctgctagaaaatttgattaatcatttttagtagaatttgtttttctcaactagg

SEQ ID NO: 2032 - DNA, 637 bp, Artificial
  Mutations within GlyA3B4 introduced by GmGlyA3B4_T02TALE nuclease
  misc_feature (531): n is a or c or t or g
gttcatgtacggttgcagatataaacgaagcatagcttatgtatgaggtgtaacaaaattggaaacaatagccatgcaaggtgaagaatgtcaccaactcagaaacccttcttcattgacgtgtccctcactcactctcctctcttcactataaatcgccactcttcgtgttctccacttcaccaactccttcaaacttattaacactttccttagttcaatatggggaagcccttcttcactctctctctttcttccctttgcttgctactcttgtcgagtgcatgctattacctccagcaagttcaacgagtgccaactcaacaacctcaacgcgttggaacccgaccaccgcgttgagtccgaaggtggtcttattgaaacatggaactctcaacaccctgagctgcaatgcgccggtgtcactgtttccaaacgcaccctcaaccgcaacggcctccacttgccatcttactcaccttatccccaaatgatcattgtcgttcaaggtgcgtaatattagtaagaagnatttatcagcttaacgtgataacaataatagtaatatgaaatatttattaaatttttataattaatctctgctagaaaatttgattaatcattttagtagaatttg

SEQ ID NO: 2033 - DNA, 647 bp, Artificial
  Mutations within GlyA3B4 introduced by GmGlyA3B4_T02TALE nuclease
gttcatgtacggttgcagatataaacgaagcatagcttatgtatgaggtgtaacaaaattggaaacaatagccatgcaaggtgaagaatgtcaccaactcagaaacccttcttcattgacgtgtccctcactcactctcctctcttcactataaatcgccactcttcgtgttctccacttcaccaactccttcaaacttattaacactttccttagttcaatatggggaagcccttcttcactctctctctttcttcccttgctattacctccagcaagttcaacgagtgccaactcaacaacctcaacgcgttggaacccgaccaccgcgttgagtccgaaggtggtcttattgaaacatggaactctcaacaccctgagctgcaatgcgccggtgtcactgtttccaaacgcaccctcaaccgcaacggcctccacttgccatcttactcaccttatcccccaaatgatcattgtcgttcaaggtgcgtaatattagtaagaagtatttatcagcttaacgtgataacaataatagtaatatgaaatatttattaaattttttataattaattctctgcttagaaaatttgattaatcatttttagtagaatttgttttttctcaactaggttttaaacaccaca

SEQ ID NO: 2034 - DNA, 652 bp, Artificial
  Mutations within GlyA3B4 introduced by GmGlyA3B4_T02TALE nuclease
gttcatgtacggttgcagatataaacgaagcatagcttatgtatgaggtgtaacaaaattggaaacaatagccatgcaaggtgaagaatgtcaccaactcagaaacccttcttcattgacgtgtccctcactcactctcctctcttcactataaatcgccactcttcgtgttctccacttcaccaactccttcaaacttattaacactttccttagttcaatatggggaagcccttcttcactctctctctttcttccctttgcttgctactcttgtcgagtgcttgctattacctccagcaagttcaacgagtgccaactcaacaacctcaacgcgttggaacccgaccaccgcgttgagtccgaaggtggtcttattgaaacatggaactctcaacaccctgagctgcaatgcgccggtgtcactgtttccaaacgcaccctcaaccgcaacggcctccacttgccatcttactcaccttatccccaaatgatcattgtcgttcaaggtgcgtaatattagtaagaagtatttatcagcttaacgtgataacaataatagtaatatgaaatatttattaaatttttataattaatctctgctagaaaatttgattaatcattttagtagaatttgtttttctcaactagg

SEQ ID NO: 2035 - DNA, 661 bp, Artificial
  Mutations within GlyA3B4 introduced by GmGlyA3B4_T02TALE nuclease
gttcatgtacggttgcagatataaacgaagcatagcttatgtatgaggtgtaacaaaattggaaacaatagccatgcaaggtgaagaatgtcaccaactcagaaacccttcttcattgacgtgtccctcactcactctcctctcttcactataaatcgccactcttcgtgttctccacttcaccaactccttcaaacttattaacactttccttagttcaatatggggaagcccttcttcactctctctctttcttccctttgcttgctactcttgtcgagtgcattacctccagcaagttcaacgagtgccaactcaacaacctcaacgcgttggaacccgaccaccgcgttgagtccgaaggtggtcttattgaaacatggaactctcaacaccctgagctgcaatgcgccggtgtcactgtttccaaacgcaccctcaaccgcaacggcctccacttgccatcttactcaccttatccccaaatgatcattgtcgttcaaggtgcgtaatattagtaagaagtatttatcagcttaacgtgataacaataatagtaatatgaaatatttattaaatttttataattaatctctgctagaaaatttgattaatcattttagtagaatttgtttttctcaactaggtttttaaaacacca

SEQ ID NO: 2036 - DNA, 652 bp, Artificial
  Mutations within GlyA3B4 introduced by GmGlyA3B4_T02TALE nuclease
gttcatgtacggttgcagatataaacgaagcatagcttatgtatgaggtgtaacaaaattggaaacaatagccatgcaaggtgaagaatgtcaccaactcagaaacccttcttcattgacgtgtccctcactcactctcctctcttcactataaatcgccactcttcgtgttctccacttcaccaactccttcaaacttattaacactttccttagttcaatatggggaagcccttcttcactctctctctttcttccctttgcttgctactcttgtcgagttttttgctattacctccagcaagttcaacgagtgccaactcaacaacctcaacgcgttggaacccgaccaccgcgttgagtccgaaggtggtcttattgaaacatggaactctcaacaccctgagctgcaatgcgccggtgtcactgtttccaaacgcaccctcaaccgcaacggcctccacttgccatcttactcaccttatccccaaatgatcattgtcgttcaaggtgcgtaatattagtaagaagtatttatcagcttaacgtgataacaataatagtaatatgaaatatttattaaatttttataattaatctctgctagaaaatttgattaatcattttagtagaatttgttttctcaactagg

SEQ ID NO: 2037 - DNA, 525 bp, Artificial
  Mutations within GlyA3B4 introduced by GmGlyA3B4_T02TALE nuclease
gttcatgtacggttgcagatataaacgaagcatagcttatgtatgaggtgtaacaaaattggaaacaatagccatgcaaggtgaagaatgtcaccaactcagaaacccttcttcattgacgtgtcctattacctccagcaagttcaacgagtgccaactcaacaacctcaacgcgttggaacccgaccaccgcgttgagtccgaaggtggtcttattgaaacatggaactctcaacaccctgagctgcaatgcgccggtgtcactgtttccaaacgcaccctcaaccgcaacggcctccacttgccatcttactcaccttatccccaaatgatcattgtcgttcaaggtgcgtaatattagtaagaagtatttatcagcttaacgtgataacaataatagtaatatgaaatatttattaaattttttataattaatctctgctagaaaatttgattaatcatttttagtagaatttgtttttctcaactaggttttaaacaccacactgaactccaaggcacaca

SEQ ID NO: 2038 - DNA, 656 bp, Artificial
  Mutations within GlyA3B4 introduced by GmGlyA3B4_T02TALE nuclease
gttcatgtacggttgcagatataaacgaagcatagcttatgtatgaggtgtaacaaaattggaaacaatagccatgcaaggtgaagaatgtcaccaactcagaaacccttcttcattgacgtgtccctcactcactctcctctcttcactataaatcgccactcttcgtgttctccacttcaccaactccttcaaacttattaacactttccttagttcaatatggggaagcccttcttcactctctctctttcttccctttgcttgctactctttgctattacctccagcaagttcaacgagtgccaactcaacaacctcaacgcgttggaacccgaccaccgcgttgagtccgaaggtggtcttattgaaacatggaactctcaacaccctgagctgcaatgcgccggtgtcactgtttccaaacgcaccctcaaccgcaacggcctccacttgccatcttactcaccttatccccaaatgatcattgtcgttcaaggtgcgtaaatattagtaagaagtatttatcagcttaacgtgataacaataatagtaatatgaaatatttattaaattttttataattaatctctgctagaaaatttgattaatctttttagtagaattgtttttctcaactaggtttaaacaccaca

SEQ ID NO: 2039 - DNA, 645 bp, Artificial; identical to SEQ ID NO: 732
  Mutations within GlyA3B4 introduced by GmGlyA3B4_T02TALE nuclease

SEQ ID NO: 2040 - DNA, 639 bp, Artificial; identical to SEQ ID NO: 1826
  Mutations within GlyA3B4 introduced by GmGlyA3B4_T02TALE nuclease

SEQ ID NO: 2041 - DNA, 527 bp, Artificial
  Mutations within GlyA3B4 introduced by GmGlyA3B4_T02TALE nuclease
gttcatgtacggttgcagatataaacgaagcatagcttatgtatgaggtgtaacaaaattggaaacaatagccatgcaaggtgaagaatgtcaccaactcagaaacccttcttcattgacgtgtccctcactcactctcctctcttcactataaatcgccactcttcgtgttctccacttcaccaactccttcaaacttattaacactttgctattacctccagcaagttcaacgagtgccaactcaacaacctcaacgcgttggaacccgaccaccgcgttgagtccgaaggtggtcttattgaaacatggaactctcaacaccctgagctgcaatgcgccggtgtcactgtttccaaacgcaccctcaaccgcaacggcctccacttgccatcttactcacccttatcccccaaatgatcattgtcgttcaaggtgcgtaatattagtaagaagtatttatcagcttaacgtgataacaataatagtaatatgaaatatttattaaattttttataattaatctc

SEQ ID NO: 2042 - DNA, 640 bp, Artificial
  Mutations within GlyA3B4 introduced by GmGlyA3B4_T02TALE nuclease
gttcatgtacggttgcagatataaacgaagcatagcttatgtatgaggtgtaacaaaattggaaacaatagccatgcaaggtgaagaatgtcaccaactcagaaacccttcttcattgacgtgtccctcactcactctcctctcttcactataaatcgccactcttcgtgttctccacttcaccaactccttcaaacttattaacactttccttagttcaatatggggaagcccttcttcactctctctctttcttccctttgcttgctattacctccagcaagttcaacgagtgccaactcaacaacctcaacgcgttggaacccgaccaccgcgttgagtccgaaggtggtcttattgaaacatggaactctcaacacccctgagctgcaatgcgccggtgtcactgtttccaaacgcaccctcaaccgcaacggcctccacttgccatcttactcaccttatccccaaatgatcattgtcgttcaaggtgcgtaatattagtaagaagtatttatcagcttaacgtgataacaataatagtaatatgaaatatttattaaattttttataattaatctctgctagaaaatttgattaatcatttttagtagaatttgttttttctcaactaggtttt

SEQ ID NO: 2043 - DNA, 660 bp, Artificial; identical to SEQ ID NO: 1717
  Mutations within GlyA3B4 introduced by GmGlyA3B4_T02TALE nuclease

SEQ ID NO: 2044 - DNA, 650 bp, Artificial; identical to SEQ ID NO: 1234
  Mutations within GlyA3B4 introduced by GmGlyA3B4_T02TALE nuclease

SEQ ID NO: 2045 - DNA, 663 bp, Artificial
  Mutations within GlyA3B4 introduced by GmGlyA3B4_T02TALE nuclease
gttcatgtacggttgcagatataaacgaagcatagcttatgtatgaggtgtaacaaaattggaaacaatagccatgcaaggtgaagaatgtcaccaactcagaaacccttcttcattgacgtgtccctcactcactctcctctcttcactataaatcgccactcttcgtgttctccacttcaccaactccttcaaacttattaacactttccttagttcaatatggggaagcccttcttcactctctctctttcttccctttgcttgctactcttgtcgagtgcatctattacctccagcaagttcaacgagtgccaactcaacaacctcaacgcgttggaacccgaccaccgcgttgagtccgaaggtggtcttattgaaacatggaactctcaacaccctgagctgcaatgcgccggtgtcactgtttccaaacgcaccctcaaccgcaacggcctccacttgccatcttactcaccttatccccaaatgatcattgtcgttcaaggtgcgtaatattagtaagaagtatttatcagcttaacgtgataacaataatagtaatatgaaatatttattaaatttttataattaatctctgctagaaaatttgattaatcattttagtagaatttgttttctcaactaggttttaaaacacca

SEQ ID NO: 2046 - DNA, 581 bp, Artificial
  Mutations within GlyA3B4 introduced by GmGlyA3B4_T02TALE nuclease
gttcatgtacggttgcagatataaacgaagcatagcttatgtatgaggtgtaacaaaattggaaacaatagccatgcaaggtgaagaatgtcaccaactcagaaacccttcttcattgacgtgtccctcactcactctcctctcttcactataaatcgccactcttcgtgttctccacttcaccaactccttcaaacttattaacactttccttagttcaatatggggaagcccttcttcacattacctccagcaagttcaacgagtgccaactcaacaacctcaacgcgttggaacccgaccaccgcgttgagtccgaaggtggtcttattgaaacatggaactctcaacaccctgagctgcaatgcgccggtgtcactgtttccaaacgcaccctcaaccgcaacggcctccacttgccatcttactcaccttatccccaaatgatcattgtcgttcaaggtgcgtaatattagtaagaagtatttatcagcttaacgtgataacaataatagtaatatgaaatatttattaatttttataattaatctctgctagaaaatttgattaatcatttttag

SEQ ID NO: 2047 - DNA, 663 bp, Artificial
  Mutations within GlyA3B4 introduced by GmGlyA3B4_T02TALE nuclease
gttcatgtacggttgcagatataaacgaagcatagcttatgtatgaggtgtaacaaaattggaaacaatagccatgcaaggtgaagaatgtcaccaactcagaaacccttcttcattgacgtgtccctcactcactctcctctcttcactataaatcgccactcttcgtgttctccacttcaccaactccttcaaacttattaacactttccttagttcaatatggggaagcccttcttcactctctctctttcttccctttgcttgctactcttgtcgagtgcatgctttacctccagcaagttcaacgagtgccaactcaacaacctcaacgcgttggaacccgaccaccgcgttgagtccgaaggtggtcttattgaaacatggaactctcaacaccctgagctgcaatgcgccggtgtcactgtttccaaacgcaccctcaaccgcaacggcctccacttgccatcttactcaccttatccccaaatgatcattgtcgttcaaggtgcgtaatattagtaagaagtatttatcagcttaacgtgataacaataatagtaatatgaaatatttattaaatttttataattaatctctgctagaaaatttgattaatcattttagtagaatttgttttctcaactaggttttaaaacacca

SEQ ID NO: 2048 - DNA, 660 bp, Artificial; identical to SEQ ID NO: 1763
  Mutations within GlyA3B4 introduced by GmGlyA3B4_T02TALE nuclease

SEQ ID NO: 2049 - DNA, 505 bp, Artificial
  Mutations within GlyA3B4 introduced by GmGlyA3B4_T02TALE nuclease
gttcatgtacggttgcagatataaacgaagcatagcttatgtatgaggtgtaacaaaattggaaacaatagccatgcaaggtgaagaatgtcaccaactcagaaacccttcttcattgacgtgtcctattacctccagcaagttcaacgagtgccaactcaacaacctcaacgcgttggaacccgaccaccgcgttgagtccgaaggtggtcttattgaaacatggaactctcaacaccctgagctgcaatgcgccggtgtcactgtttccaaacgcaccctcaaccgcaacggcctccacttgccatcttactcaccttatccccaaatgatcattgtcgttcaaggtgcgtaatattagtaagaagtatttatcagcttaacgtgataacaataatagtaatatgaaatatttattaaattttttataattaatctctgctagaaaatttgattaatcatttttagtagaatttgtttttctcaactaggttttaaacaccac

SEQ ID NO: 2050 - DNA, 632 bp, Artificial; identical to SEQ ID NO: 1756
  Mutations within GlyA3B4 introduced by GmGlyA3B4_T02TALE nuclease

SEQ ID NO: 2051 - DNA, 666 bp, Artificial
  Mutations within GlyA3B4 introduced by GmGlyA3B4_T02TALE nuclease
gttcatgtacggttgcagatataaacgaagcatagcttatgtatgaggtgtaacaaaattggaaacaatagccatgcaaggtgaagaatgtcaccaactcagaaacccttcttcattgacgtgtccctcactcactctcctctcttcactataaatcgccactcttcgtgttctccacttcaccaactccttcaaacttattaacactttccttagttcaatatggggaagcccttcttcactctctctctttcttccctttgcttgctactcttgtcgagtgctttgctattacctccagcaagttcaacgagtgccaactcaacaacctcaacgcgttggaacccgaccaccgcgttgagtccgaaggtggtcttattgaaacatggaactctcaacaccctgagctgcaatgcgccggtgtcactgtttccaaacgcaccctcaaccgcaacggcctccacttgccatcttactcaccttatccccaaatgatcattgtcgttcaaggtgcgtaatattagtaagaagtatttatcagcttaacgtgataacaataatagtaatatgaaatatttattaaatttttataattaatctctgctagaaaatttgattaatcattttagtagaatttgtttttctcaactaggttttaaaacacca

SEQ ID NO: 2052 - DNA, 725 bp, Artificial
  Mutations within GlyA3B4 introduced by GmGlyA3B4_T02TALE nuclease
  misc_feature (620): n is a or c or t or g
gttcatgtacggttgcagatataaacgaagcatagcttatgtatgaggtgtaacaaaattggaaacaatagccatgcaaggtgaagaatgtcaccaactcagaaacccttcttcattgacgtgtccctcactcactctcctctcttcactataaatcgccactcttcgtgttctccacttcaccaactccttcaaacttattaacactttccttagttcaatatggggaagcccttcttcactctctctctttcttccctttgcttgctactcttgtcgagtgcatgcttgacccccagcaggtggtggccatcgccagcaatggcggtggcaagcaggcgctggagacggtccagcggctgttgccggtgctgtgccaggcccactgctattacctccagcaagttcaacgagtgccaactcaacaacctcaacgcgttggaacccgaccaccgcgttgagtccgaaggtggtcttattgaaacatggaactctcaacaccctgagctgcaatgcgccggtgtcactgtttccaaacgcaccctcaaccgcaacggcctccacttgccatcttactcaccttatccccaaatgatcattgtcgttcaaggtgcgtaatnttagtaagaagtatttatcagcttaacgtgataacaataatagtaatatgaaatattttattaaattttttataattaatctctgctagaaaatttgattaatca

SEQ ID NO: 2053 - DNA, 569 bp, Artificial
  Mutations within GlyA3B4 introduced by GmGlyA3B4_T02TALE nuclease
gttcatgtacggttgcagatataaacgaagcatagcttatgtatgaggtgtaacaaaattggaaacaatagccatgcaaggtgaagaatgtcaccaactcagaaacccttcttcattgacgtgtccctcactcactctcctctcttcactataaatcgccactcttcgtgttctccacttcaccaactccttcaaacttattacctccagcaagttcaacgagtgccaactcaacaacctcaacgcgttggaacccgaccaccgcgttgagtccgaaggtggtcttattgaaacatggaactctcaacaccctgagctgcaatgcgccggtgtcactgtttccaaacgcaccctcaaccgcaacggcctccacttgccatcttactcaccttatccccaaatgatcattgtcgttcaaggtgcgtaatattagtaagaagtatttatcagcttaacgtgataacaataatagtaatatgaaatatttattaaattttttataattaatctctgctagaaaatttgattaaatcatttttagtagaatttgtttttctcaactaggtttt

SEQ ID NO: 2054 - DNA, 524 bp, Artificial
  Mutations within GlyA3B4 introduced by GmGlyA3B4_T02TALE nuclease
gttcatgtacggttgcagatataaacgaagcatagcttatgtatgaggtgtaacaaaattggaaacaatagccatgcaaggtgaagaatgtcaccaactcagaaacccttcttcattgacgtgtccctcactcactctcctctcttcactataaatcgccactcttcgtgttctccacttcaccaactcaacaacctcaacgcgttggaacccgaccaccgcgttgagtccgaaggtggtcttattgaaacatggaactctcaacaccctgagctgcaatgcgccggtgtcactgtttccaaacgcaccctcaaccgcaacggcctccacttgccatcttactcaccttatccccaaatgatcattgtcgttcaaggtgcgtaatattagtaagaagtattttatcagcttaacgtgataacaataatagtaatatgaaaatatttattaaattttttataattaatctctgctagaaaatttgattaatcattttttagtagaatttgtttttctcaactagg

SEQ ID NO: 2055 - DNA, 580 bp, Artificial
  Mutations within GlyA3B4 introduced by GmGlyA3B4_T02TALE nuclease
gttcatgtacggttgcagatataaacgaagcatagcttatgtatgaggtgtaacaaaattggaaacaatagccatgcaaggtgaagaatgtcaccaactcagaaacccttcttcattgacgtgtccctcactcactctcctctcttcactataaatcgccactcttcgtgttctccacttcaccaactccttcaaacttattaacactttccttagttcaatatggggaagcccttcttcactccagcaagttcaacgagtgccaactcaacaacctcaacgcgttggaacccgaccaccgcgttgagtccgaaggtggtcttattgaaacatggaactctcaacaccctgagctgcaatgcgccggtgtcactgtttccaaacgcaccctcaaccgcaacggcctccacttgccatcttactcaccttatccccaaaatgatcattgtcgttcaaggtgcgtaatattagtaagaagtatttatcagcttaacgtgataacaataatagtaatatgaaatatttattaaattttttatattaatctctgctagaaaatttgattaatcatttttagtag

SEQ ID NO: 2056 - DNA, 633 bp, Artificial
  Mutations within GlyA3B4 introduced by GmGlyA3B4_T02TALE nuclease
gttcatgtacggttgcagatataaacgaagcatagcttatgtatgaggtgtaacaaaattggaaacaatagccatgcaaggtgaagaatgtcaccaactcagaaacccttcttcattgacgtgtccctcactcactctcctctcttcactataaatcgccactcttcgtgttctccacttcaccaactccttcaaacttattaacactttccttagttcaatatggggaagcccttcttcactctctctctttcttccctttgcttgctactcttgtcgagtggccaactcaacaacctcaacgcgttggaacccgaccaccgcgttgagtccgaaggtggtcttattgaaacatggaactctcaacaccctgagctgcaatgcgccggtgtcactgtttccaaacgcaccctcaaccgcaacggcctccacttgccatcttactcaccttatccccaaatgatcattgtcgttcaaggtgcgtaatattagtaagaagtatttatcagcttaacgtgataacaataatagtaatatgaaatatttattaaattttttataattaatctctgctagaaaatttgattaatcatttttagtagaatttgtttttctcaactaggtttttaaaca

SEQ ID NO: 2057 - DNA, 607 bp, Artificial
  Mutations within GlyA3B4 introduced by GmGlyA3B4_T02TALE nuclease
gttcatgtacggttgcagatataaacgaagcatagcttatgtatgaggtgtaacaaaattggaaacaatagccatgcaaggtgaagaatgtcaccaactcagaaacccttcttcattgacgtgtccctcactcactctcctctcttcactataaatcgccactcttcgtgttctccacttcaccaactccttcaaacttattaacactttccttagttcaatatggggaagcccttcttcactctctctctttcttccctttgcttgctactctattacctccagcaagttcaacgagtgccaactcaacaacctcaacgcgttggaacccgaccaccgcgttgagtccgaaggtggtcttattgaaacatggaactctcaacaccctgagctgcaatgcgccggtgtcactgtttccaaacgcaccctcaaccgcaacggcctccacttgccatcttactcaccttatccccaaatgatcattgtcgttcaaggtgcgtaatattagtaagaagtatttatcagcttaacgtgataacaataatagtaatatgaaatatttattaaattttttataattaatctctgctagaaaatttgattaatc

SEQ ID NO: 2058 - DNA, 664 bp, Artificial
  Mutations within GlyA3B4 introduced by GmGlyA3B4_T02TALE nuclease
gttcatgtacggttgcagatataaacgaagcatagcttatgtatgaggtgtaacaaaattggaaacaatagccatgcaaggtgaagaatgtcaccaactcagaaacccttcttcattgacgtgtccctcactcactctcctctcttcactataaatcgccactcttcgtgttctccacttcaccaactccttcaaacttattaacactttccttagttcaatatggggaagcccttcttcactctctctctttcttccctttgcttgctactcttgtcgagtgcactattacctccagcaagttcaacgagtgccaactcaacaacctcaacgcgttggaacccgaccaccgcgttgagtccgaaggtggtcttattgaaacatggaactctcaacaccctgagctgcaatgcgccggtgtcactgtttccaaacgcaccctcaaccgcaacggcctccacttgccatcttactcaccttatccccaaatgatcattgtcgttcaaggtgcgtaatattagtaagaagtatttatcagcttaacgtgataacaataatagtaatatgaaatatttattaaatttttataattaatctctgctagaaaatttgattaatcattttagtagaatttgtttttctcaactaggtttttaaaacacca

SEQ ID NO: 2059 - DNA, 654 bp, Artificial
  Mutations within GlyA3B4 introduced by GmGlyA3B4_T02TALE nuclease
gttcatgtacggttgcagatataaacgaagcatagcttatgtatgaggtgtaacaaaattggaaacaatagccatgcaaggtgaagaatgtcaccaactcagaaacccttcttcattgacgtgtccctcactcactctcctctcttcactataaatcgccactcttcgtgttctccacttcaccaactccttcaaacttattaacactttccttagttcaatatggggaagcccttcttcactctctctctttcttccctttgcttgctactcttgtctacctccagcaagttcaacgagtgccaactcaacaacctcaacgcgttggaacccgaccaccgcgttgagtccgaaggtggtcttattgaaacatggaactctcaacaccctgagctgcaatgcgccggtgtcactgtttccaaacgcaccctcaaccgcaacggcctccacttgccatcttactcaccttatccccaaatgatcattgtcgttcaaggtgcgtaatattagtaagaagtatttatcagcttaacgtgataacaataatagtaatatgaaatatttattaaattttttataattaatctctgctagaaaatttgattaatctttttagtagaattgttttttctcaactaggtttaaaacaccaca

SEQ ID NO: 2060 - DNA, 583 bp, Artificial
  Mutations within GlyA3B4 introduced by GmGlyA3B4_T02TALE nuclease
gttcatgtacggttgcagatataaacgaagcatagcttatgtatgaggtgtaacaaaattggaaacaatagccatgcaaggtgaagaatgtcaccaactcagaaacccttcttcattgacgtgtccctcactcactctcctctcttcactataaatcgccactcttcgtgttctccacttcaccaactccttcaaacttattaacactttccttagttcaatatggggaagcccttcttcactctctgccaactcaacaacctcaacgcgttggaacccgaccaccgcgttgagtccgaaggtggtcttattgaaacatggaactctcaacaccctgagctgcaatgcgccggtgtcactgtttccaaacgcaccctcaaccgcaacggcctccacttgccatcttactcaccttatcccccaaatgatcattgtcgttcaaggtgcgtaatattagtaagaagtatttatcagcttaacgtgataacaataatagtaatatgaaatatttattaaattttttataattaatctctgctagaaaatttgattaatcatttttagtagaatttgtttttctcaa

SEQ ID NO: 2061 - DNA, 673 bp, Artificial
  Mutations within GlyA3B4 introduced by GmGlyA3B4_T02TALE nuclease
gttcatgtacggttgcagatataaacgaagcatagcttatgtatgaggtgtaacaaaattggaaacaatagccatgcaaggtgaagaatgtcaccaactcagaaacccttcttcattgacgtgtccctcactcactctcctctcttcactataaatcgccactcttcgtgttctccacttcaccaactccttcaaacttattaacactttccttagttcaatatggggaagcccttcttcactctctctctttcttccctttgcttgctactcttgtcgagtgcacactgcctccactgcggtcacgccgccacgttttgcaatcttgagaagttggcctgtgtccaactgtaacggtggacctctcaactctcccgctttgctattacctccagcaagttcaacgagtgccaactcaacaacctcaacgcgttggaacccgaccaccgcgttgagtccgaaggtggtcttattgaaacatggaactctcaacaccctgagctgcaatgcgccggtgtcactgtttccaaacgcaccctcaaccgcaacggcctccacttgccatcttactcaccttatccccaaatgatcattgtcgttcaaggtgcgtaatattagtaagaagtatttatcagcttaacgtgataacaataatagtaatatgaaaatattt

SEQ ID NO: 2062 - DNA, 660 bp, Artificial
  Mutations within GlyA3B4 introduced by GmGlyA3B4_T02TALE nuclease
gttcatgtacggttgcagatataaacgaagcatagcttatgtatgaggtgtaacaaaattggaaacaatagccatgcaaggtgaagaatgtcaccaactcagaaacccttcttcattgacgtgtccctcactcactctcctctcttcactataaatcgccactcttcgtgttctccacttcaccaactccttcaaacttattaacactttccttagttcaatatggggaagcccttcttcactctctctctttcttccctttgcttgctactcttgtcgagtgcattattacctccagcaagttcaacgagtgccaactcaacaacctcaacgcgttggaacccgaccaccgcgttgagtccgaaggtggtcttattgaaacatggaactctcaacaccctgagctgcaatgcgccggtgtcactgtttccaaacgcaccctcaaccgcaacggcctccacttgccatcttactcaccttatccccaaatgatcattgtcgttcaaggtgcgtaatattagtaagaagtatttatcagcttaacgtgataacaatatagtaatatgaaatatttattaaatttttataattaatctctgctagaaaatttgattaatcattttagtagaatttgttttctcaactaggttttaaacacca

SEQ ID NO: 2063 - DNA, 504 bp, Artificial; identical to SEQ ID NO: 1778
  Mutations within GlyA3B4 introduced by GmGlyA3B4_T02TALE nuclease

SEQ ID NO: 2064 - DNA, 644 bp, Artificial
  Mutations within GlyA3B4 introduced by GmGlyA3B4_T02TALE nuclease
gttcatgtacggttgcagatataaacgaagcatagcttatgtatgaggtgtaacaaaattggaaacaatagccatgcaaggtgaagaatgtcaccaactcagaaacccttcttcattgacgtgtccctcactcactctcctctcttcactataaatcgccactcttcgtgttctccacttcaccaactccttcaaacttattaacactttccttagttcaatatggggaagcccttcttcactctctctctttcttccctttgcttgctactcttgtcgagtgcctccagcaagttcaacgagtgccaactcaacaacctcaacgcgttggaacccgaccaccgcgttgagtccgaaggtggtcttattgaaacatggaactctcaacaccctgagctgcaatgcgccggtgtcactgtttccaaacgcaccctcaaccgcaacggcctccacttgccatcttactcaccttatccccaaatgatcattgtcgttcaaggtgcgtaatattagtaagaagtatttatcagcttaacgtgataacaataatagtaatatgaaatatttattaaatttttataattaatctctgctagaaaatttgattaatctttttagtagaattgtttttctcaactaggttt

SEQ ID NO: 2065 - DNA, 589 bp, Artificial
  Mutations within GlyA3B4 introduced by GmGlyA3B4_T02TALE nuclease
gttcatgtacggttgcagatataaacgaagcatagcttatgtatgaggtgtaacaaaattggaaacaatagccatgcaagatgaagaatgtcaccaactcagaaacccttcttcattgacgtgtccctcactcactctcctctcttcactataaatcgccactcttcgtgttctccacttcaccaactccttcaaacttattaacactttccttagttcaatatggggaagcccttcttcactctctctctttcttccctttgcttgctattacctccagcaagttcaacgagtgccaactcaacaacctcaacgcgttggaacccgaccaccgcgttgagtccgaaggtggtcttattgaaacatggaactctcaacaccctgagctgcaatgcgccggtgtcactgtttccaaacgcaccctcaaccgcaacggcctccacttgccatcttactcaccttatcccccaaatgatcattgtcgttcaaggtgcgtaaatattagtaagaagtatttatcagcttaacgtgataacaataatagtaatatgaaatatttattaaattttttataattaatctctgctag

SEQ ID NO: 2066 - DNA, 471 bp, Artificial; identical to SEQ ID NO: 1723
  Mutations within GlyA3B4 introduced by GmGlyA3B4_T02TALE nuclease

SEQ ID NO: 2067 - DNA, 517 bp, Artificial
  Mutations within GlyA3B4 introduced by GmGlyA3B4_T02TALE nuclease
gttcatgtacggttgcagatataaacgaagcatagcttatgtatgaggtgtaacaaaattggaaacaatagccatgcaaggtgaagaatgtcaccaactcagaaacccttcttcattgacgtgtccctcactcactctcctctcttcactataaatcgccactcttcgtgttctccacttcaccaactccttcaaacttattaacactttccttagttcaatatggggaagcccttcttcactctctctctttcttccctttgctattacctccagcaagttcaacgagtgccaactcaacaacctcaacgcgttggaacccgaccaccgcgttgagtccgaaggtggtcttattgaaacatggaactctcaacaccctgagctgcaatgcgccggtgtcactgtttccaaacgcaccctcaaccgcaacggcctccacttgccatcttactcaccttatccccaaatgatcattgtcgttcaaggtgcgtaatattagtaagaagtatttatcagc

SEQ ID NO: 2068 - DNA, 431 bp, Artificial; identical to SEQ ID NO: 2012
  Mutations within GlyA3B4 introduced by GmGlyA3B4_T02TALE nuclease

SEQ ID NO: 2069 - DNA, 636 bp, Artificial; identical to SEQ ID NO: 1885
  Mutations within GlyA3B4 introduced by GmGlyA3B4_T02TALE nuclease

SEQ ID NO: 2070 - DNA, 524 bp, Artificial; identical to SEQ ID NO: 1788
  Mutations within GlyA3B4 introduced by GmGlyA3B4_T02TALE nuclease

SEQ ID NO: 2071 - DNA, 658 bp, Artificial
  Mutations within GlyA3B4 introduced by GmGlyA3B4_T02TALE nuclease
gttcatgtacggttgcagatataaacgaagcatagcttatgtatgaggtgtaacaaaattggaaacaatagccatgcaaggtgaagaatgtcaccaactcagaaacccttcttcattgacgtgtccctcactcactctcctctcttcactataaatcgccactcttcgtgttctccacttcaccaactccttcaaacttattaacactttccttagttcaatatggggaagcccttcttcactctctctctttcttccctttgcttgctactcttgtcgagctattacctccagcaagttcaacgagtgccaactcaacaacctcaacgcgttggaacccgaccaccgcgttgagtccgaaggtggtcttattgaaacatggaactctcaacaccctgagctgcaatgcgccggtgtcactgtttccaaacgcaccctcaaccgcaacggcctccacttgccatcttactcaccttatccccaaatgatcattgtcgttcaaggtgcgtaatattagtaagaagtatttatcagcttaacgtgataacaataatagtaatatgaaatatttattaaatttttataattaatctctgctagaaaatttgattaatcattttagtagaatttgttttctcaactaggttttaaaacacca

SEQ ID NO: 2072 - DNA, 659 bp, Artificial; identical to SEQ ID NO: 1853
  Mutations within GlyA3B4 introduced by GmGlyA3B4_T02TALE nuclease

SEQ ID NO: 2073 - DNA, 647 bp, Artificial; identical to SEQ ID NO: 1892
  Mutations within GlyA3B4 introduced by GmGlyA3B4_T02TALE nuclease

SEQ ID NO: 2074 - DNA, 659 bp, Artificial
  Mutations within GlyA3B4 introduced by GmGlyA3B4_T02TALE nuclease
gttcatgtacggttgcagatataaacgaagcatagcttatgtatgaggtgtaacaaaattggaaacaatagccatgcaaggtgaagaatgtcaccaactcagaaacccttcttcattgacgtgtccctcactcactctcctctcttcactataaatcgccactcttcgtgttctccacttcaccaactccttcaaacttattaacactttccttagttcaatatggggaagcccttcttcactctctctctttcttccctttgcttgctactcttgtcgagtgctattacctccagcaagttcaacgagtgccaactcaacaacctcaacgcgttggaacccgaccaccgcgttgagtccgaaggtggtcttattgaaacatggaactctcaacacctgagctgcaatgcgccggtgtcactgtttccaaacgcaccctcaaccgcaacggcctccacttgccatcttactcaccttatccccaaatgatcattgtcgttcaaggtgcgtaatattagtaagaagtatttatcagcttaacgtgataacaataatagtaatatgaaatatttattaaatttttataattaatctctgctagaaaatttgattaatcattttagtagaatttgttttctcaactaggttttaaaacacca

SEQ ID NO: 2075 - DNA, 471 bp, Artificial
  Mutations within GlyA3B4 introduced by GmGlyA3B4_T02TALE nuclease
gttcatgtacggttgcagatataaacgaagcatagcttatgtatgaggtgtaacaaaattggaaacaatagccatgcaaggtgaagaatgtcaccaactcagaaacccttcttcattgacgtgtccctcactcactctcctctcttcactataaatcgccactcttcgtgttctccacttcaccaactccttcaaacttattaacactttccttagttcaatatggggaagcccttcttcactctccctcaaccgcaacggcctccacttgccatcttactcaccttatcccaacatgatcattgtcgttcaaggtgcgtaatattagtaagaagtatttatcagcttaacgtgataacaataatagtaatatgaaatatttattaaattttttataattaatctctgctagaaaatttgattaatcatttttagtagaatttgtttttctcaactaggttttaaacacca

SEQ ID NO: 2076 - DNA, 659 bp, Artificial; identical to SEQ ID NO: 1853
  Mutations within GlyA3B4 introduced by GmGlyA3B4_T02TALE nuclease

SEQ ID NO: 2077 - DNA, 651 bp, Artificial
  Mutations within GlyA3B4 introduced by GmGlyA3B4_T02TALE nuclease
gttcatgtacggttgcagatataaacgaagcatagcttatgtatgaggtgtaacaaaattggaaacaatagccatgcaaggtgaagaatgtcaccaactcagaaacccttcttcattgacgtgtccctcactcactctcctctcttcactataaatcgccactcttcgtgttctccacttcaccaactccttcaaacttattaacactttccttagttcaatatggggaagcccttcttcactctctctctttcttccctttgcttgctactcttgtcgagtgcatgctattacctccagcaagttcaacgagtgccaactcaacaacctcaacgcgttggaacccgaccaccgcgttgagtccgaaggtggtcttattgaaacatggaactctcaacaccctgagctgcaatgcgccggtgtcactgtttccaaacgcaccctcaaccgcaacggcctccacttgccatcttactcaccttatccccaaatgatcattgtcgttcaaggtgcgtaatattagtaagagtatttatcagcttaacgtgataacaataatagtaatatgaaatatttattaaatttttataattaatctctgctagaaaatttgattaatcattttagtagaatttgtttttctcaactagg

SEQ ID NO: 2078 - DNA, 634 bp, Artificial; identical to SEQ ID NO: 1893
  Mutations within GlyA3B4 introduced by GmGlyA3B4_T02TALE nuclease

SEQ ID NO: 2079 - DNA, 646 bp, Artificial
  Mutations within GlyA3B4 introduced by GmGlyA3B4_T02TALE nuclease
gttcatgtacggttgcagatataaacgaagcatagcttatgtatgaggtgtaacaaaattggaaacaatagccatgcaaggtgaagaatgtcaccaactcagaaacccttcttcattgacgtgtccctcactcactctcctctcttcactataaatcgccactcttcgtgttctccacttcaccaactccttcaaacttattaacactttccttagttcaatatggggaagcccttcttcactctctctctttcttccctttgcttgctactcttgtcgagttcaacgagtgccaactcaacaacctcaacgcgttggaacccgaccaccgcgttgagtccgaaggtggtcttattgaaacatggaactctcaacaccctgagctgcaatgcgccggtgtcactgtttccaaacgcaccctcaaccgcaacggcctccacttgccatcttactcaccttatccccaaatgatcattgtcgttcaaggtgcgtaatattagtaagaagtatttatcagcttaacgtgataacaataatagtaatatgaaatatttattaaattttttataattaatctctgctagaaaatttgattaatcatttttagtagaatttgttttttctcaactaggttttaaacaccaca

SEQ ID NO: 2080 - DNA, 667 bp, Artificial
  Mutations within GlyA3B4 introduced by GmGlyA3B4_T02TALE nuclease
gttcatgtacggttgcagatataaacgaagcatagcttatgtatgaggtgtaacaaaattggaaacaatagccatgcaaggtgaagaatgtcaccaactcagaaacccttcttcattgacgtgtccctcactcactctcctctcttcactataaatcgccactcttcgtgttctccacttcaccaactccttcaaacttattaacactttccttagttcaatatggggaagcccttcttcactctctctctttcttccctttgcttgctactcttgtcgagtgcattgctattacctccagcaagttcaacgagtgccaactcaacaacctcaacgcgttggaacccgaccaccgcgttgagtccgaaggtggtcttattgaaacatggaactctcaacaccctgagctgcaatgcgccggtgtcactgtttccaaacgcaccctcaaccgcaacggcctccacttgccatcttactcaccttatccccaaatgatcattgtcgttcaaggtgcgtaatattagtaagaagtatttatcagcttaacgtgataacaataatagtaatatgaaatatttattaaatttttataattaatctctgctagaaaatttgattaatcattttagtagaatttgtttttctcaactaggtttttaaaacacca

SEQ ID NO: 2081 - DNA, 649 bp, Artificial; identical to SEQ ID NO: 1920
  Mutations within GlyA3B4 introduced by GmGlyA3B4_T02TALE nuclease

SEQ ID NO: 2082 - DNA, 660 bp, Artificial
  Mutations within GlyA3B4 introduced by GmGlyA3B4_T02TALE nuclease
gttcatgtacggttgcagatataaacgaagcatagcttatgtatgaggtgtaacaaaattggaaacaatagccatgcaaggtgaagaatgtcaccaactcagaaacccttcttcattgacgtgtccctcactcactctcctctcttcactataaatcgccactcttcgtgttctccacttcaccaactccttcaaacttattaacactttccttagttcaatatggggaagcccttcttcactctctctctttcttccctttgcttgctactcttgtcgagtgctttacctccagcaagttcaacgagtgccaactcaacaacctcaacgcgttggaacccgaccaccgcgttgagtccgaaggtggtcttattgaaacatggaactctcaacaccctgagctgcaatgcgccggtgtcactgtttccaaacgcaccctcaaccgcaacggcctccacttgccatcttactcaccttatccccaaatgatcattgtcgttcaaggtgcgtaatattagtaagaagtatttatcagcttaacgtgataacaataatagtaatatgaaatatttattaaatttttataattaatctctgctagaaaatttgattaatcattttagtagaatttgttttctcaactaggtttttaaaacacca

SEQ ID NO: 2083 - DNA, 665 bp, Artificial
  Mutations within GlyA3B4 introduced by GmGlyA3B4_T02TALE nuclease
gttcatgtacggttgcagatataaacgaagcatagcttatgtatgaggtgtaacaaaattggaaacaatagccatgcaaggtgaagaatgtcaccaactcagaaacccttcttcattgacgtgtccctcactcactctcctctcttcactataaatcgccactcttcgtgttctccacttcaccaactccttcaaacttattaacactttccttagttcaatatggggaagcccttcttcactctctctctttcttccctttgcttgctactcttgtcgagtgcatctattacctccagcaagttcaacgagtgccaactcaacaacctcaacgcgttggaacccgaccaccgcgttgagtccgaaggtggtcttattgaaacatggaactctcaacaccctgagctgcaatgcgccggtgtcactgtttccaaacgcaccctcaaccgcaacggcctccacttgccatcttactcaccttatccccaaatgatcattgtcgttcaaggtgcgtaatattagtaagaagtatttatcagcttaacgtgataacaataatagtaatatgaaatatttattaaatttttataattaatctctgctagaaaatttgattaatcattttagtagaatttgtttttctcaactaggtttttaaaacacca

SEQ ID NO: 2084 - DNA, 615 bp, Artificial
  Mutations within GlyA3B4 introduced by GmGlyA3B4_T02TALE nuclease
gttcatgtacggttgcagatataaacgaagcatagcttatgtatgaggtgtaacaaaattggaaacaatagccatgcaaggtgaagaatgtcaccaactcagaaacccttcttcattgacgtgtccctcactcactctcctctcttcactataaatcgccactcttcgtgttctccacttcaccaactccttcaaacttattaacactttccttagttcaatatggggaagcccttcttcactctctctctttcttccctttgtttcacctatcccacggctattacctccagcaagttcaacgagtgccaactcaacaacctcaacgcgttggaacccgaccaccgcgttgagtccgaaggtggtcttattgaaacatggaactctcaacaccctgagctgcaatgcgccggtgtcactgtttccaaacgcaccctcaaccgcaacggcctccacttgccatcttactcaccttatccccaaatgatcattgtcgttcaaggtgcgtaatattagtaagaagtatttatcagcttaacgtgataacaataatagtaatatgaaatatttattaaattttttataattaatctctgctagaaaatttgattaatc

SEQ ID NO: 2085 - DNA, 602 bp, Artificial
  Mutations within GlyA3B4 introduced by GmGlyA3B4_T02TALE nuclease
gttcatgtacggttgcagatataaacgaagcatagcttatgtatgaggtgtaacaaaattggaaacaatagccatgcaaggtgaagaatgtcaccaactcagaaacccttcttcattgacgtgtccctcactcactctcctctcttcactataaatcgccactcttcgtgttctccacttcaccaactccttcaaacttattaacactttccttagttcaatatggggaagcccttcttcactctctctcttactattacctccagcaagttcaacgagtgccaactcaacaacctcaacgcgttggaacccgaccaccgcgttgagtccgaaggtggtcttattgaaacatggaactctcaacaccctgagctgcaatgcgccggtgtcactgtttccaaaacgcaccctcaaccgcaacggcctccacttgccatcttactcaccttatccccaaatgatcattgtcgttcaaggtgcgtaatattagtaagaagtatttatcagcttaacgtgataacaataatagtaatatgaaatatttattaaattttttataattaatctctgctagaaaatttgattaatcatttttagtagaa

SEQ ID NO: 2086 - DNA, 661 bp, Artificial; identical to SEQ ID NO: 1729
  Mutations within GlyA3B4 introduced by GmGlyA3B4_T02TALE nuclease

SEQ ID NO: 2087 - DNA, 599 bp, Artificial
  Mutations within GlyA3B4 introduced by GmGlyA3B4_T02TALE nuclease
gttcatgtacggttgcagatataaacgaagcatagcttatgtatgaggtgtaacaaaattggaaacaatagccatgcaaggtgaagaatgtcaccaactcagaaacccttcttcattgacgtgtccctcactcactctcctctcttcactataaatcgccactcttcgtgttctccacttcaccaactccttcaaacttattaacactttccttagttcaatatggggaagcccttcttcactctctctctttcttccctttgcttgctactcttgtcgagtgccaactcaacaacctcaacgcgttggaacccgaccaccgcgttgagtccgaaggtggtcttattgaaacatggaactctcaacaccctgagctgcaatgcgccggtgtcactgtttccaaacgcaccctcaaccgcaacggcctccacttgccatcttactcaccttatccccaaatgatcattgtcgttcaaggtgcgtaatattagtaagaagtatttatcagcttaacgtgataacaataatagtaatatgaaatatttattaatttttataattaatctctgctagaaaatttgattaatcatttttagtag

SEQ ID NO: 2088 - DNA, 642 bp, Artificial
  Mutations within GlyA3B4 introduced by GmGlyA3B4_T02TALE nuclease
gttcatgtacggttgcagatataaacgaagcatagcttatgtatgaggtgtaacaaaattggaaacaatagccatgcaaggtgaagaatgtcaccaactcagaaacccttcttcattgacgtgtccctcactcactctcctctcttcactataaatcgccactcttcgtgttctccacttcaccaactccttcaaacttattaacactttcccttagttcaatatggggaagcccttcttcactctctctctttcttccctttgcttgctattacctccagcaagttcaacgagtgccaactcaacaacctcaacgcgttggaacccgaccaccgcgttgagtccgaaggtggtcttattgaaacatggaactctcaacaccctgagctgcaatgcgccggtgtcactgtttccaaacgcaccctcaaccgcaacggcctccacttgccatcttactcaccttatccccaaatgatcattgtcgttcaaggtgcgtaatattagtaagaagtatttatcagctttaacgtgataacaataatagtaatatgaaatatttattaaattttttataaattaatctctgctagaaaatttgattaatcatttttagtagaatttgttttttctcaactaggtttt

SEQ ID NO: 2089 - DNA, 500 bp, Artificial; identical to SEQ ID NO: 1735
  Mutations within GlyA3B4 introduced by GmGlyA3B4_T02TALE nuclease

SEQ ID NO: 2090 - DNA, 667 bp, Artificial; identical to SEQ ID NO: 1838
  Mutations within GlyA3B4 introduced by GmGlyA3B4_T02TALE nuclease

SEQ ID NO: 2091 - DNA, 656 bp, Artificial
  Mutations within GlyA3B4 introduced by GmGlyA3B4_T02TALE nuclease
gttcatgtacggttgcagatataaacgaagcatagcttatgtatgaggtgtaacaaaattggaaacaatagccatgcaaggtgaagaatgtcaccaactcagaaacccttcttcattgacgtgtccctcactcactctcctctcttcactataaatcgccactcttcgtgttctccacttcaccaactccttcaaacttattaacactttccttagttcaatatggggaagcccttcttcactctctctctttcttccctttgcttgctactcttgtcgagtgcatgctattacctccagcaagttcaacgagtgccaactcaacaacctcaacgcgttggaacccgaccaccgcgttgagtccgaaggtggtcttattgaaacatggaactctcaacaccctgagctgcaatgcgccggtgtcactgtttccaaacgcaccctcaaccgcaacggcctccacttgccatcttactcaccttatccccaaatgatcattgtcgttcaaggtgcgtaatattagtaagaagtatttatcagcttaacgtgataacaataatagtaatatgaaatatttattaaatttttataattaatctctgctagaaaatttgattaatcattttagtagaatttgttttctcaactaggttttt

SEQ ID NO: 2092 - DNA, 663 bp, Artificial
  Mutations within GlyA3B4 introduced by GmGlyA3B4_T02TALE nuclease
gttcatgtacggttgcagatataaacgaagcatagcttatgtatgaggtgtaacaaaattggaaacaatagccatgcaaggtgaagaatgtcaccaactcagaaacccttcttcattgacgtgtccctcactcactctcctctcttcactataaatcgccactcttcgtgttctccacttcaccaactccttcaaacttattaacactttccttagttcaatatggggaagcccttcttcactctctctctttcttccctttgcttgctactcttgtcgagtgcattattacctccagcaagttcaacgagtgccaactcaacaacctcaacgcgttggaacccgaccaccgcgttgagtccgaaggtggtcttattgaaacatggaactctcaacaccctgagctgcaatgcgccggtgtcactgtttccaaacgcaccctcaaccgcaacggcctccacttgccatcttactcaccttatccccaaatgatcattgtcgttcaaggtgcgtaatattagtaagaagtatttatcagcttaacgtgataacaataatagtaatatgaaatatttattaaatttttataattaatctctgctagaaaatttgattaatcattttagtagaatttgtttttctcaactaggttttaaaacacca

SEQ ID NO: 2093 - DNA, 642 bp, Artificial
  Mutations within GlyA3B4 introduced by GmGlyA3B4_T02TALE nuclease
gttcatgtacggttgcagatataaacgaagcatagcttatgtatgaggtgtaacaaaattggaaacaatagccatgcaaggtgaagaatgtcaccaactcagaaacccttcttcattgacgtgtccctcactcactctcctctcttcactataaatcgccactcttcgtgttctccacttcaccaactccttcaaacttattaacactttccttagttcaatatggggaagcccttcttcactctctctctttcttccctttgcttgctactcttgtcgagtgcaacgagtgccaactcaacaacctcaacgcgttggaacccgaccaccgcgttgagtccgaaggtggtcttattgaaacatggaactctcaacaccctgagctgcaatgcgccggtgtcactgtttccaaacgcaccctcaaccgcaacggcctccacttgccatcttactcaccttatccccaaatgatcattgtcgttcaaggtgcgtaatattagtaagaagtatttatcagcttaacgtgataacaataatagtaatatgaaatatttattaaattttttataattaatctctgctagaaaatttgattaatcatttttagtagaatttgttttttctcaactaggttttaaaaca

SEQ ID NO: 2094 - DNA, 631 bp, Artificial
  Mutations within GlyA3B4 introduced by GmGlyA3B4_T02TALE nuclease
gttcatgtacggttgcagatataaacgaagcatagcttatgtatgaggtgtaacaaaattggaaacaatagccatgcaaggtgaagaatgtcaccaactcagaaacccttcttcattgacgtgtccctcactcactctcctctcttcactataaatcgccactcttcgtgttctccacttcaccaactccttcaaacttattaacactttccttagttcaatatggggaagcccttcttcactctctctctttcttccctttgcttgctactcttgtcgagtgccaactcaacaacctcaacgcgttggaacccgaccaccgcgttgagtccgaaggtggtcttattgaaacatggaactctcaacaccctgagttgcaatgcgccggtgtcactgtttccaaacgcaccctcaaccgcaacggcctccacttgccatcttactcaccttatccccaaatgatcattgtcgttcaaggtgcgtaatattagtaagaagtatttatcagcttaacgtgataacaataatagtaatatgaaatatttattaattttttataattaatctctgctagaaaatttgattaatcatttttagtagaatttgtttttctcaactaggtttttaaaca

SEQ ID NO: 2095 - DNA, 657 bp, Artificial
  Mutations within GlyA3B4 introduced by GmGlyA3B4_T02TALE nuclease
gttcatgtacggttgcagatataaacgaagcatagcttatgtatgaggtgtaacaaaattggaaacaatagccatgcaaggtgaagaatgtcaccaactcagaaacccttcttcattgacgtgtccctcactcactctcctctcttcactataaatcgccactcttcgtgttctccacttcaccaactccttcaaacttattaacactttccttagttcaatatggggaagcccttcttcactctctctctttcttccctttgcttgctactcttgtcgagtgcctccagcaagttcaacgagtgccaactcaacaacctcaacgcgttggaacccgaccaccgcgttgagtccgaaggtggtcttattgaaacatggaactctcaacaccctgagctgcaatgcgccggtgtcactgtttccaaacgcaccctcaaccgcaacggcctccacttgccatcttactcaccttatccccaaatgatcattgtcgttcaaggtgcgtaaatattagtaagaagtatttatcagcttaacgtgataacaataatagtaatatgaaatatttattaaattttttataattaatctctgctagaaaatttgattaatctttttagtagaattgtttttctcaactaggtttaaaacaccaca

SEQ ID NO: 2096 - DNA, 667 bp, Artificial
  Mutations within GlyA3B4 introduced by GmGlyA3B4_T02TALE nuclease
  misc_feature (532): n is a or c or t or g
gttcatgtacggttgcagatataaacgaagcatagcttatgtatgaggtgtaacaaaattggaaacaatagccatgcaaggtgaagaatgtcaccaactcagaaaccccttcttcattgacgtgtccctcactcactctcctctcttcactataaatcgccactcttcgtgttctccacttcaccaactccttcaaacttattaacactttccttagttcaatatggggaagcccttcttcactctctctctttcttccctttgcttgctactcttgtcgagtgcatgctattacctccagcaagttcaacgagtgccaactcaacaacctcaacgcgttggaacccgaccaccgcgttgagtccgaaggtggtcttattgaaacatggaactctcaacaccctgagctgcaatgcgccggtgtcactgtttccaaacgcaccctcaaccgcaacggcctccacttgccatcttactcaccttatccccaaatgatcattgtcgttcaaggtgcgtaatattagtaagaagnatttatcagcttaacgtgataacaataatagtaatatgaaatatttattaaatttttataattaatctctgctagaaaatttgattaatcattttagtagaatttgtttttctcaactaggtttttaaaacacca

SEQ ID NO: 2097 - DNA, 534 bp, Artificial
  Mutations within GlyA3B4 introduced by GmGlyA3B4_T02TALE nuclease
gttcatgtacggttgcagatataaacgaagcatagcttatgtatgaggtgtaacaaaattggaaacaatagccatgcaaggtgaagaatgtcaccaactcagaaacccttcttcattgacgtgtccctcactcactctcctctcttcactataaatcgccactcttcgtgttctccacttcaccaactccttcaaacttattaacactttccttagttcaatatggggaacccgaccaccgcgttgagtccgaaggtggtcttattgaaacatggaactctcaacaccctgagctgcaatgcgccggtgtcactgtttccaaacgcaccctcaaccgcaacggcctccacttgccatcttactcaccttatccccaaatgatcattgtcgttcaaggtgcgtaatattagtaagaagtatttatcagcttaacgtgataacaataatagtaatatgaaatatttattaaattttttataattaatctctgctagaaaatttgattaatcatttttagtagaatttgtttttctc

SEQ ID NO: 2098 - DNA, 399 bp, Artificial; identical to SEQ ID NO: 1797
  Mutations within GlyA3B4 introduced by GmGlyA3B4_T02TALE nuclease

SEQ ID NO: 2099 - DNA, 406 bp, Artificial
  Mutations within GlyA3B4 introduced by GmGlyA3B4_T02TALE nuclease
gttcatgtacggttgcagatataaacgaagcatagcttatgttatgaggtgtaacaaaattggaaacaatagccatgcaaggtgaagaatgtcaccaactcagaaacccttcttcattgacgtgtccctcactcactctcctctcttcactataaatcgccactcttcgtgttctccacttcaccaactccttcaaacttattaacactttccttagttcaatatggggaagcccttcttcactctctctctttcttccctttattacctccagcaagttcaacgagtgccaactcaacaacctcaacgcgttggaacccgaccaccgcgttgagtccgaaggtggtcttattgaacatggaactctcaacaccctgagctgcaatgcgccggtgtcactgtttcc

SEQ ID NO: 2100 - DNA, 616 bp, Artificial
  Mutations within GlyA3B4 introduced by GmGlyA3B4_T02TALE nuclease
gttcatgtacggttgcagatataaacgaagcatagcttatgtatgaggtgtaacaaaattggaaacaatagccatgcaaggtgaagaatgtcaccaactcagaaacccttcttcattgacgtgtccctcactcactctcctctcttcactataaatcgccactcttcgtgttctccacttcaccaactccttcaaacttattaacactttccttagttcaatatggggaagcccttcttcactctctctctttcttccctttgcttgctactcaacgagtgccaactcaacaacctcaacgcgttggaacccgaccaccgcgttgagtccgaaggtggtcttattgaaacatggaactctcaacaccctgagctgcaatgcgccggtgtcactgtttccaaacgcaccctcaaccgcaacggcctccacttgccatcttactcaccttatccccaaatgatcattgtcgttcaaggtgcgtaatattagtaagaagtatttatcagcttaacgtgataacaataatagtaatatgaaatatttattaaatttttataattaatctctgctagaaaatttgattaatcatttttagtagaatttgtttttctcaact

SEQ ID NO: 2101 - DNA, 577 bp, Artificial
  Mutations within GlyA3B4 introduced by GmGlyA3B4_T02TALE nuclease
gttcatgtacggttgcagatataaacgaagcatagcttatgtatgaggtgtaacaaaattggaaacaatagccatgcaaggtgaagaatgtcaccaactcagaaacccttcttcattgacgtgtccctcactcactctcctctcttcactataaatcgccactcttcgtgttctccacttcaccaactccttcaaacttattaacactttccttagttcaatatggggaagcccttctccagcaagttcaacgagtgccaactcaacaacctcaacgcgttggaacccgaccaccgcgttgagtccgaaggtggtcttattgaaacatggaactctcaacaccctgagctgcaatgcgccggtgtcactgtttccaaacgcaccctcaaccgcaacggcctccacttgccatcttactcacccttatccccaaaatgatcattgtcgttcaaggtgcgtaatattagtaagaagtatttatcagcttaacgtgataacaatatagtaatatgaaatatttattaaattttttataattaatctctgctagaaatttgattaatcatttttagtagaa

SEQ ID NO: 2102 - DNA, 622 bp, Artificial
  Mutations within GlyA3B4 introduced by GmGlyA3B4_T02TALE nuclease
gttcatgtacggttgcagatataaacgaagcatagcttatgtatgaggtgtaacaaaattggaaacaatagccatgcaaggtgaagaatgtcaccaactcagaaacccttcttcattgacgtgtccctcactcactctcctctcttcactataaatcgccactcttcgtgttctccacttcaccaactccttcaaacttattaacactttccttagttcaatatggggaagcccttcttcactctctctctttcttccctttgcttgctactcttgtcgagtgcatattacctccagcaagttcaacgagtgccaactcaacaacctcaacgcgttggaacccgaccaccgcgttgagtccgaaggtggtcttattgaaacatggaactctcaacaccctgagctgcaatgcgccggtgtcactgtttccaaacgcacccctcaaccgcaacggcctccacttgccatcttactcaccttatcccccaaatgatcattgtcgttcaaggtgcgtaatattagtaagaagtatttatcagcttaacgtgataacaataatagtaatatgaaatatttattaaatttttataatttaatctctgctagaaaatttgattaatca

SEQ ID NO: 2103 - DNA, 575 bp, Artificial
  Mutations within GlyA3B4 introduced by GmGlyA3B4_T02TALE nuclease
  misc_feature (528): n is a or c or t or g
gttcatgtacggttgcagatataaacgaagcatagcttatgtatgaggtgtaacaaaattggaaacaatagccatgcaaggtgaagaatgtcaccaactcagaaacccttcttcattgacgtgtccctcactcactctcctctcttcactataaatcgccactcttcgtgttctccacttcaccaactccttcaaacttattaacactttccttagttcaatatggggaagcccttcttcactctctctctttcttccctttgcttgctactcttgtcgagtgcgctattacctccagcaagttcaacgagtgccaactcaacaacctcaacgcgttggaacccgaccaccgcgttgagtccgaaggtggtcttattgaaacatggaactctcaacaccctgagctgcaatgcgccggtgtcactgtttccaaacgcaccctcaaccgcaacggcctccacttgccatcttactcaccttatccccaaatgatcattgtcgttcaaggtgcgtaatattagtaagagnatttatcagcttaacgtgataacaataatagtaatatgaaatattta

SEQ ID NO: 2104 - DNA, 653 bp, Artificial
  Mutations within GlyA3B4 introduced by GmGlyA3B4_T02TALE nuclease
gttcatgtacggttgcagatataaacgaagcatagcttatgtatgaggtgtaacaaaattggaaacaatagccatgcaaggtgaagaatgtcaccaactcagaaacccttcttcattgacgtgtccctcactcactctcctctcttcactataaatcgccactcttcgtgttctccacttcaccaactccttcaaacttattaacactttccttagttcaatatggggaagcccttcttcactctctctctttcttccctttgcttgctactcttgtcgagtctccagcaagttcaacgagtgccaactcaacaacctcaacgcgttggaacccgaccaccgcgttgagtccgaaggtggtcttattgaaacatggaactctcaacaccctgagctgcaatgcgccggtgtcactgtttccaaacgcaccctcaaccgcaacggcctccacttgccatcttactcaccttatccccaaatgatcattgtcgttcaaggtgcgtaatattagtaagaagtatttatcagcttaacgtgataacaataatagtaatatgaaatatttattaaattttttataattaatctctgctagaaaatttgattaatctttttagtagaattgtttttctcaactaggtttaaacaccaca

SEQ ID NO: 2105 - DNA, 651 bp, Artificial; identical to SEQ ID NO: 2077
  Mutations within GlyA3B4 introduced by GmGlyA3B4_T02TALE nuclease

SEQ ID NO: 2106 - DNA, 667 bp, Artificial
  Mutations within GlyA3B4 introduced by GmGlyA3B4_T02TALE nuclease
  misc_feature (530): n is a or c or t or g
gttcatgtacggttgcagatataaacgaagcatagcttatgtatgaggtgtaacaaaattggaaacaatagccatgcaaggtgaagaatgtcaccaactcagaaacccttcttcattgacgtgtccctcactcactctcctctcttcactataaatcgccactcttcgtgttctccacttcaccaactccttcaaacttattaacactttccttagttcaatatggggaagcccttcttcactctctctctttcttccctttgcttgctactcttgtcgagtgcatgtattacctccagcaagttcaacgagtgccaactcaacaacctcaacgcgttggaacccgaccaccgcgttgagtccgaaggtggtcttattgaaacatggaactctcaacaccctgagctgcaatgcgccggtgtcactgtttccaaacgcaccctcaaccgcaacggcctccacttgccatcttactcaccttatccccaaatgatcattgtcgttcaaggtgcgtaatattagtaagaagnatttatcagcttaacgtgataacaataatagtaatatgaaatatttattaaatttttataattaatctctgctagaaaatttgattaatcattttagtagaatttgtttttctcaactaggtttttaaaacaccaca

SEQ ID NO: 2107 - DNA, 667 bp, Artificial
  Mutations within GlyA3B4 introduced by GmGlyA3B4_T02TALE nuclease
gttcatgtacggttgcagatataaacgaagcatagcttatgtatgaggtgtaacaaaattggaaacaatagccatgcaaggtgaagaatgtcaccaactcagaaacccttcttcattgacgtgtccctcactcactctcctctcttcactataaatcgccactcttcgtgttctccacttcaccaactccttcaaacttattaacactttccttagttcaatatggggaagcccttcttcactctctctctttcttccctttgcttgctactcttgtcgagtgctgctattacctccagcaagttcaacgagtgccaactcaacaacctcaacgcgttggaacccgaccaccgcgttgagtccgaaggtggtcttattgaaacatggaactctcaacaccctgagctgcaatgcgccggtgtcactgtttccaaacgcaccctcaaccgcaacggcctccacttgccatcttactcaccttatccccaaatgatcattgtcgttcaaggtgcgtaatattagtaagaagtatttatcagcttaacgtgataacaataatagtaatatgaaaatatttattaaaatttttataattaatctctgctagaaaatttgattaatcattttagtagaatttgtttttctcaactaggtttttaaaacacca

SEQ ID NO: 2108 - DNA, 618 bp, Artificial
  Mutations within GlyA3B4 introduced by GmGlyA3B4_T02TALE nuclease
gttcatgtacggttgcagatataaacgaagcatagcttatgtatgaggtgtaacaaaattggaaacaatagccatgcaaggtgaagaatgtcaccaactcagaaacccttcttcattgacgtgtccctcactcactctcctctcttcactataaatcgccactcttcgtgttctccacttcaccaactccttcaaacttattaacactttccttagttcaatatggggaagcccttcttcactctctctctttcttccctttgcttgctactcttgtcgagtgccaactcaacaacctcaacgcgttggaacccgaccaccgcgttgagtccgaaggtggtcttattgaaacatggaactctcaacaccctgagctgcaatgcgccggtgtcactgtttccaaacgcaccctcaaccgcaacggcctccacttgccatcttactcaccttatccccaaatgatcattgtcgttcaaggtgcgtaatattagtaagaagtatttatcagcttaacgtgataacaataatagtaatatgaaatatttattaatttttataattaatctctgctagaaaatttgattaatcatttttagtagaatttgtttttctcaacta

SEQ ID NO: 2109 - DNA, 634 bp, Artificial
  Mutations within GlyA3B4 introduced by GmGlyA3B4_T02TALE nuclease
gttcatgtacggttgcagatataaacgaagcatagcttatgtatgaggtgtaacaaaattggaaacaatagccatgcaaggtgaagaatgtcaccaactcagaaacccttcttcattgacgtgtccctcactcactctcctctcttcactataaatcgccactcttcgtgttctccacttcaccaactccttcaaacttattaacactttccttagttcaatatggggaagcccttcttcactctctctctttcttccctttgcttgctactcttgtcgagtgccaactcaacaacctcaacgcgttggaacccgaccaccgcgttgagtccgaaggtggtcttattgaaacatggaactctcaacaccctgagctgcaatgcgccggtgtcactgtttccaaaacgcaccctcaaccgcaacggcctccacttgccatcttactcaccttatccccaaatgatcattgtcgttcaaggtgcgtaatattagtaagaagtatttatcagcttaacgtgataacaataatagtaatatgaaatatttattaaattttttataattaatctctgctagaaaatttgattaatcatttttagtagaatttgtttttctcaactaggtttttaaaaca

SEQ ID NO: 2110 - DNA, 651 bp, Artificial; identical to SEQ ID NO: 2077
  Mutations within GlyA3B4 introduced by GmGlyA3B4_T02TALE nuclease

SEQ ID NO: 2111 - DNA, 668 bp, Artificial
  Mutations within GlyA3B4 introduced by GmGlyA3B4_T02TALE nuclease
gttcatgtacggttgcagatataaacgaagcatagcttatgtatgaggtgtaacaaaattggaaacaatagccatgctaaggtgaagaatgtcaaccaactcagaaacccttcttcattgacgtgtccctcaactcactctccatctcttcactataaatcgccaactcttcgtgttctccacttcaccaactccttcaaacttattaacactttccttagttcaatatggggaagcccttcttcactctctctctttcttccctttgcttgctactcttgtcgagtgcatattacctccagcaagttcaacgagtgccaactcaacaacctcaacgcgttggaacccgaccaccgcgttgagtccgaaggtggtcttattgaaacatggaactctcaacaccctgagctgcaatgcgccggtgtcactgtttccaaatcgcaccctcaaccgcaacggcctccacttgccatcttactcaccttatccccaaatgatcattgtcgttcaaggtgcgtaatattagtaagaagtatttatcagcttaacgtgataacaatatagtaatatgaaatatttattaaatttttataattaatctctgctagaaaatttgattaatcattttagtagaatttgtttttctcaactaggtttttaaaacacca

SEQ ID NO: 2112 - DNA, 622 bp, Artificial
  Mutations within GlyA3B4 introduced by GmGlyA3B4_T02TALE nuclease
gttcatgtacggttgcagatataaacgaagcatagcttatgtatgaggtgtaacaaaattggaaacaatagccatgcaaggtgaagaatgtcaccaactcagaaacccttcttcattgacgtgtccctcactcactctcctctcttcactataaatcgccactcttcgtgttctccacttcaccaactccttcaaacttattaacactttccttagttcaatatggggaagcccttcttcactctctctctttcttccctttgcttgctactcttgtcgagtgcctgcaagttcaacgagtgccaactcaacaacctcaacgcgttggaacccgaccaccgcgttgagtccgaaggtggtcttattgaaacatggaactctcaacaccctgagctgcaatgcgccggtgtcactgtttccaaacgcaccctcaaccgcaacggcctccacttgccatcttactcaccttatcccccaaatgatcattgtcgttcaaggtgcgtaatattagtaagaagtatttatcagcttaacgtgataacaataatagtaatatgaaatatttattaaatttttataattaatctctgctagaaaatttgattaatcatttttagtagaa

SEQ ID NO: 2113 - DNA, 666 bp, Artificial
  Mutations within GlyA3B4 introduced by GmGlyA3B4_T02TALE nuclease
gttcatgtacggttgcagatataaacgaagcatagcttatgtatgaggtgtaacaaaattggaaacaatagccatgcaaggtgaagaatgtcaccaactcagaaacccttcttcattgacgtgtccctcactcactctcctctcttcactataaatcgccactcttcgtgttctccacttcaccaactccttcaaacttattaacactttccttagttcaatatggggaagcccttcttcactctctctctttcttccctttgcttgctactcttgtcgagtgcatttctattacctccagcaagttcaacgagtgccaactcaacaacctcaacgcgttggaacccgaccaccgcgttgagtccgaaggtggtcttattgaaacatggaactctcaacaccctgagctgcaatgcgccggtgtcactgtttccaaacgcacccctcaaccgcaacggcctccacttgccatcttactcaccttatccccaaatgatcattgtcgttcaaggtgcgtaatattagtaagaagtatttatcagcttaacgtgataacaatatagtaatatgaaatatttattaaatttttataattaatctctgctagaaaatttgattaatcattttagtagaatttgttttctcaactaggtttttaaaacacca

SEQ ID NO: 2114 - DNA, 654 bp, Artificial
  Mutations within GlyA3B4 introduced by GmGlyA3B4_T02TALE nuclease
gttcatgtacggttgcagatataaacgaagcatagcttatgtatgaggtgtaacaaaattggaaacaatagccatgcaaggtgaagaatgtcaccaactcagaaacccttcttcattgacgtgtccctcactcactctcctctcttcactataaatcgccactcttcgtgttctccacttcaccaactccttcaaacttattaacactttccttagttcaatatggggaagcccttcttcactctctctctttcttccctttgcttgctactcttgtcgagtgctttacctccagcaagttcaacgagtgccaactcaacaacctcaacgcgttggaacccgaccaccgcgttgagtccgaaggtggtcttattgaaacatggaactctcaacaccctgagctgcaatgcgccggtgtcactgtttccaaacgcaccctcaaccgcaacggcctccacttgccatcttactcaccttatccccaaatgatcattgtcgttcaaggtgcgtaatattagtaagaagtatttatcagcttaacgtgataacaataatagtaatatgaaatatttattaaatttttataattaatctctgctagaaaatttgattaatcattttagtagaatttgttttctcaactaggttttaaaa

SEQ ID NO: 2115 - DNA, 665 bp, Artificial
  Mutations within GlyA3B4 introduced by GmGlyA3B4_T02TALE nuclease
gttcatgtacggttgcagatataaacgaagcatagcttatgtatgaggtgtaacaaaattggaaacaatagccatgcaaggtgaagaatgtcaccaactcagaaacccttcttcattgacgtgtccctcactcactctcctctcttcactataaatcgccactcttcgtgttctccacttcaccaactccttcaaacttattaacactttccttagttcaatatggggaagcccttcttcactctctctctttcttccctttgcttgctactcttgtcgagtgcatgctattacctccagcaagttcaacgagtgccaactcaacaacctcaacgcgttggaacccgaccaccgcgttgagtccgaaggtggtcttattgaaacatggaactctcaacaccctgagctgcaatgcgccggtgtcactgtttccaaacgcaccctcaaccgcaacggcctccacttgccatcttactcaccttatccccaaatgatcattgtcgttcaaggtgcgtaatattagtaagagtatttatcagcttaacgtgataacaataatagtaatatgaaatatttattaaatttttataattaatctctgctagaaaatttgattaatcattttagtagaatttgtttttctcaactaggtttttaaaacacca

SEQ ID NO: 2116 - DNA, 636 bp, Artificial; identical to SEQ ID NO: 1885
  Mutations within GlyA3B4 introduced by GmGlyA3B4_T02TALE nuclease

SEQ ID NO: 2117 - DNA, 505 bp, Artificial; identical to SEQ ID NO: 1850
  Mutations within GlyA3B4 introduced by GmGlyA3B4_T02TALE nuclease

SEQ ID NO: 2118 - DNA, 490 bp, Artificial
  Mutations within GlyA3B4 introduced by GmGlyA3B4_T02TALE nuclease
gttcatgtacggttgcagatataaacgaagcatagcttatgtatgaggtgtaacaaaattggaaacaatagccatgcaaggtgaagaatgtcaccaactcagaaacccttcttcattgacgtgtccctcaacgagtgccaactcaacaacctcaacgcgttggaacccgaccaccgcgttgagtccgaaggtggtcttattgaaacatggaactctcaacaccctgagctgcaatgcgccggtgtcactgtttccaaacgcaccctcaaccgcaacggcctccacttgccatcttactcaccttatccccaaatgatcattgtcgttcaaggtgcgtaatattagtaagaagtatttatcagcttaacgtgataacaataatagtaatatgaaatatttattaaatttttttataattaatctctgctagaaaatttgattaatcatttttagtagaatttgtttttctcaactaggtttttaaacacca

SEQ ID NO: 2119 - DNA, 426 bp, Artificial; identical to SEQ ID NO: 1684
  Mutations within GlyA3B4 introduced by GmGlyA3B4_T02TALE nuclease

SEQ ID NO: 2120 - DNA, 647 bp, Artificial
  Mutations within GlyA3B4 introduced by GmGlyA3B4_T02TALE nuclease
gttcatgtacggttgcagatataaacgaagcatagcttatgtatgaggtgtaacaaaattggaaacaatagccatgcaaggtgaagaatgtcaccaactcagaaacccttcttcattgacgtgtccctcactcactctcctctcttcactataaatcgccactcttcgtgttctccacttcaccaactccttcaaacttattaacactttccttagttcaatatggggaagcccttcttcactctctctctttcttccctttgcttgctactcttgtcgagtgcctattacctccagcaagttcaacgagtgccaactcaacaacctcaacgcgttggaacccgaccaccgcgttgagtccgaaggtggtcttattgaaacatggaactctcaacaccctgagctgcaatgcgccggtgtcactgtttccaaacgcaccctcaaccgcaacggcctccacttgccatcttactcaccttatccccaaatgatcattgtcgttcaaggtgcgtaatattagtaagaagtatttatcagcttaacgtgataacaatatagtaatatgaaatatttattaaatttttataattaatctctgctagaaaatttgattaatcattttagtagaatttgttttctcaactagg

SEQ ID NO: 2121 - DNA, 607 bp, Artificial
  Mutations within GlyA3B4 introduced by GmGlyA3B4_T02TALE nuclease
gttcatgtacggttgcagatataaacgaagcatagcttatgtatgaggtgtaacaaaattggaaacaatagccatgcaaggtgaagaatgtcaccaactcagaaacccttcttcattgacgtgtccctcactcactctcctctcttcactataaatcgccactcttcgtgttctccacttcaccaactccttcaaacttattaacactttccttagttcaatatggggaagcccttcttcactctctctctttcttccctttgcttgctactcttgtcgagtgcaagttcaacgagtgccaactcaacaacctcaacgcgttggaacccgaccaccgcgttgagtccgaaggtggtcttattgaaacatggaactctcaacaccctgagctgcaatgcgccggtgtcactgtttccaaacgcaccctcaaccgcaacggcctccacttgccatcttactcaccttctcccccaaatgatcattgtcgttcaaggtgcgtaaatattagtaagaagtatttatcagcttaacgtgataacaataatagtaatatgaaatatttattaaattttttataattaatctctgctagaaaatttgattaatc

SEQ ID NO: 2122 - DNA, 446 bp, Artificial
  Mutations within GlyA3B4 introduced by GmGlyA3B4_T02TALE nuclease
gttcatgtacggttgcagatataaacgaagcatagcttatgtatgaggtgtaacaaaattggaaacaatacctccagcaagttcaacgagtgccaactcaacaacctcaacgcgttggaacccgaccaccgcgttgagtccgaaggtggtcttattgaaacatggaactctcaacaccctgagctgcaatgcgccggtgtcactgtttccaaacgcaccctcaaccgcaacggcctccacttgcccatcttactcaccttatcccccaaatgatcattgtcgttcaaggtgcgtaatattagtaagaagtatttatcagcttaacgtgataacaataatagtaatatgaaatatttattaaattttttataattaatctctgctagaaaatttgattaatcatttttagtagaattttgtttttctcaactaggttttaaacacca

SEQ ID NO: 2123 - DNA, 600 bp, Artificial
  Mutations within GlyA3B4 introduced by GmGlyA3B4_T02TALE nuclease
gttcatgtacggttgcagatataaacgaagcatagcttatgtatgaggtgtaacaaaattggaaacaatagccatgcaaggtgaagaatgtcaccaactcagaaacccttcttcattgacgtgtccctcactcactctcctctcttcactataaatcgccactcttcgtgttctccacttcaccaactccttcaaacttattaacactttccttagttcaatatggggaagcccttcttcactctctctctttcttccctttgcttgctactcttgtcgagtgccaactcaacaacctcaacgcgttggaacccgaccaccgcgttgagtccgaaggtggtcttattgaaacatggaactctcaacaccctgagctgcaatgcgccggtgtcactgtttccaaacgcaccctcaaccgcaacggcctccacttgccatcttactcaccttatccccaaatgatcattgtcgttcaaggtgcgtaatattagtaagaagtatttatcagcttaacgtgataacaataatagtaatatgaaatatttattaaatttttataattaatctctgctagaaaatttgattaatcatttttagtag

SEQ ID NO: 2124 - DNA, 662 bp, Artificial; identical to SEQ ID NO: 1800
  Mutations within GlyA3B4 introduced by GmGlyA3B4_T02TALE nuclease

SEQ ID NO: 2125 - DNA, 644 bp, Artificial; identical to SEQ ID NO: 1915
  Mutations within GlyA3B4 introduced by GmGlyA3B4_T02TALE nuclease

SEQ ID NO: 2126 - DNA, 523 bp, Artificial
  Mutations within GlyA3B4 introduced by GmGlyA3B4_T02TALE nuclease
gttcatgtacggttgcagatataaacgaagcatagcttatgtatgaggtgtaacaaaattggaaacaatagccatgcaaggtgaagaatgtcaccaactcagaaacccttcttcattgacgtgtccctcactcactctcctctcttcactataaatcgccactcttcgtgttctccacttcaccaatatcaccaactcaacaacctcaacgcgttggaacccgaccaccgcgttgagtccgaaggtggtcttattgaaacatggaactctcaacaccctgagctgcaatgcgccggtgtcactgtttccaaacgcaccctcaaccgcaacggcctccacttgccatcttactcaccttatccccaaatgatcattgtcgttcaaggtgcgtaatattagtaagaagtatttatcagcttaacgtgataacaataatagtaatatgaaatatttattaaattttttataattaatctctgctagaaaatttgattaatcatttttagtagaatttgtttttctc

SEQ ID NO: 2127 - DNA, 524 bp, Artificial
  Mutations within GlyA3B4 introduced by GmGlyA3B4_T02TALE nuclease
gttcatgtacggttgcagatataaacgaagcatagcttatgtatgaggtgtaacaaaattggaaacaatagccatgcaaggtgaagaatgtcaccaactcagaaacccttcttcattgacgtgtccctcactcactctcctctcttcactataaatcgccactcttcgtgttctccacttcaccaactccttcaaacttattaacactttccttagttcaatatggggaagcccttcttcactctctctctttcttccctttgcttgctactcttgtcgagtgcatgctgtttccaaacgcaccctcaaccgcaacggcctccacttgccatcttactcaccttatccccaaatgatcattgtcgttcaaggtgcgtaatattagtaagaagtatttatcagcttaacgtgataacaataatagtaatatgaaatatttattaaattttttataattaatctctgctagaaaatttgattaatcatttttagtagaatttgtttttctcaactaggtttaaaca

SEQ ID NO: 2128 - DNA, 616 bp, Artificial
  Mutations within GlyA3B4 introduced by GmGlyA3B4_T02TALE nuclease
gttcatgtacggttgcagatataaacgaagcatagcttatgtatgaggtgtaacaaaattggaaacaatagccatgcaaggtgaagaatgtcaccaactcagaaacccttcttcattgacgtgtccctcactcactctcctctcttcactataaatcgccactcttcgtgttctccacttcaccaactccttcaaacttattaacactttccttagttcaatatggggaagcccttcttcactctctctctttcttccctttgcttgctactcttgtcaactcaacaacctcaacgcgttggaacccgaccaccgcgttgagtccgaaggtggtcttattgaaacatggaactctcaacaccctgagctgcaatgcgccggtgtcactgttttccaaacgcaccctcaaccgcaacggcctccacttgccatcttactcaccttatccccaaatgatcattgtcgttcaaggtgcgtaatattagtaagaagtatttatcagcttaacgtgataacaataatagtaatatgaaatatttattaaattttttataattaatctctgctagaaaatttgattaatcatttttagtagaatttgtttttctcaactagg

SEQ ID NO: 2129 - DNA, 575 bp, Artificial
  Mutations within GlyA3B4 introduced by GmGlyA3B4_T02TALE nuclease
gttcatgtacggttgcagatataaacgaagcatagcttatgtatgaggtgtaacaaaattggaaacaatagccatgcaaggtgaagaatgtcaccaactcagaaacccttcttcattgacgtgtccctcactcactctcctctcttcactataaatcgccactcttcgtgttctccacttcaccaactccttcaaacttattaacactttccttagttcaatatggggaagcccttcttcactctctctctttcaacgagtgccaactcaacaacctcaacgcgttggaacccgaccaccgcgttgagtccgaaggtggtcttattgaaacatggaactctcaacaccctgagctgcaatgcgccggtgtcactgtttccaaacgcaccctcaaccgcaacggcctccacttgccatcttactcaccttatccccaaatgatcattgtcgttcaaggtgcgtaatattagtaagaagtatttatcagcttaacgtgataacaataatagtaatatgaaatatttattaatttttataattaatctctgctagaaaatttgattaatcatttttag

SEQ ID NO: 2130 - DNA, 658 bp, Artificial
  Mutations within GlyA3B4 introduced by GmGlyA3B4_T02TALE nuclease
gttcatgtacggttgcagatataaacgaagcatagcttatgtatgaggtgtaacaaaattggaaacaatagccatgcaaggtgaagaatgtcaccaactcagaaacccttcttcattgacgtgtccctcactcactctcctctcttcactataaatcgccactcttcgtgttctccacttcaccaactccttcaaacttattaacactttccttagttcaatatggggaagcccttcttcactctctctctttcttccctttgcttgctactcttgtcgagtgcatgacctccagcaagttcaacgagtgccaactcaacaacctcaacgcgttggaacccgaccaccgcgttgagtccgaaggtggtcttattgaaacatggaactctcaacaccctgagctgcaatgcgccggtgtcactgtttccaaacgcaccctcaaccgcaacggcctccacttgccatcttactcaccttatccccaaatgatcattgtcgttcaaggtgcgtaatattagtaagaagtatttatcagcttaacgtgataacaataatagtaatatgaaatatttattaaatttttataattaatctctgctagaaaatttgattaatcattttagtagaatttgttttctcaactaggttttaaaacacc

SEQ ID NO: 2131 - DNA, 657 bp, Artificial
  Mutations within GlyA3B4 introduced by GmGlyA3B4_T02TALE nuclease
gttcatgtacggttgcagatataaacgaagcatagcttatgtatgaggtgtaacaaaattggaaacaatagccatgcaaggtgaagaatgtcaccaactcagaaacccttcttcattgacgtgtccctcactcactctcctctcttcactataaatcgccactcttcgtgttctccacttcaccaactccttcaaacttattaacactttccttagttcaatatggggaagcccttcttcactctctctctttcttccctttgcttgctactcttgtcgagtgcttacctccagcaagttcaacgagtgccaactcaacaacctcaacgcgttggaacccgaccaccgcgttgagtccgaaggtggtcttattgaaacatggaactctcaacaccctgagctgcaatgcgccggtgtcactgtttccaaacgcaccctcaaccgcaacggcctccacttgccatcttactcaccttatccccaaatgatcattgtcgttcaaggtgcgtaatattagtaagaagtatttatcagcttaacgtgataacaataatagtaatatgaaatatttattaaatttttataattaatctctgctagaaaatttgattaatcattttagtagaatttgttttctcaactaggttttaaaacacc

SEQ ID NO: 2132 - DNA, 523 bp, Artificial
  Mutations within GlyA3B4 introduced by GmGlyA3B4_T02TALE nuclease
gttcatgtacggttgcagatataaacgaagcatagcttatgtatgaggtgtaacaaaattggaaacaatagccatgcaaggtgaagaatgtcaccaactcagaaacccttcttcattgacgtgtccctcactcactctcctctcttcactataaaatcgccactcttcgtgttctccacttcaccaaactccttcaaacttattaacactttccttagttcaatatggggaagcccttcttcactctctctctttcttccctttgcttgctactcttgtcgcatctattacctccagcaagttcaacgagtgccaactcaacaacctcaacgcgttggaacccgaccaccgcgttgagtccgaaggtggtcttattgaaacatggaactctcaacaccctgagctgcaatgcgccggtgtcactgtttccaacgcaccctcaaccgcaacggcctccacttgccatcttactcaccttatccccaaatgatcattgtcgttcaaggtgcgtaatattagtaag

SEQ ID NO: 2133 - DNA, 578 bp, Artificial
  Mutations within GlyA3B4 introduced by GmGlyA3B4_T02TALE nuclease
gttcatgtacggttgcagatataaacgaagcatagcttatgtatgaggtgtaacaaaattggaaacaatagccatgcaaggtgaagaatgtcaccaactcagaaacccttcttcattgacgtgtccctcactcactctcctctcttcactataaatcgccactcttcgtgttctccacttcaccaactccttcaaacttattaacactttccttagttcaatatggggaagcccttcttcactctctctctttcttccctttgcttgctactcttgtcgagtgccaactcaacaacctcaacgcgttggaacccgaccaccgcgttgagtccgaaggtggtcttattgaaacatggaactctcaacaccctgagctgcaatgcgccggtgtcactgtttccaaacgcaccctcaaccgcaacggcctccacttgccatcttactcaccttatccccaaatgatcattgtcgttcaaggtgcgtaatattagtaagaagtatttatcagcttaacgtgataacaataatagtaatatgaaatatttattaattttttataattaatctctgctagaaaa

SEQ ID NO: 2134 - DNA, 663 bp, Artificial
  Mutations within GlyA3B4 introduced by GmGlyA3B4_T02TALE nuclease
gttcatgtacggttgcagatataaacgaagcatagcttatgtatgaggtgtaacaaaattggaaacaatagccatgcaaggtgaagaatgtcaccaactcagaaacccttcttcattgacgtgtccctcactcactctcctctcttcactataaatcgccactcttcgtgttctccacttcaccaactccttcaaacttattaacactttccttagttcaatatggggaagcccttcttcactctctctctttcttccctttgcttgctactcttgtcgagtgcattacctccagcaagttcaacgagtgccaactcaacaacctcaacgcgttggaacccgaccaccgcgttgagtccgaaggtggtcttattgaaacatggaactctcaacaccctgagctgcaatgcgccggtgtcactgtttccaaacgcaccctcaaccgcaacggcctccacttgccatcttactcaccttatccccaaatgatcattgtcgttcaaggtgcgtaatattagtaagaagtatttatcagcttaacgtgataacaataatagtaatatgaaatatttattaaatttttataattaatctctgctagaaaatttgattaatcattttagtagaatttgtttttctcaactaggtttttaaaacaccaca

SEQ ID NO: 2135 - DNA, 666 bp, Artificial; identical to SEQ ID NO: 1812
  Mutations within GlyA3B4 introduced by GmGlyA3B4_T02TALE nuclease

SEQ ID NO: 2136 - DNA, 556 bp, Artificial
  Mutations within GlyA3B4 introduced by GmGlyA3B4_T02TALE nuclease
gttcatgtacggttgcagatataaacgaagcatagcttatgtatgaggtgtaacaaaattggaaacaatagccatgcaaggtgaagaatgtcaccaactcagaaacccttcttcattgacgtgtccctcactcactctcctctcttcactataaatcgccactcttcgtgttctccacttcaccaactccttcaaacttattaacactttccttagttcaacgagtgccaactcaacaacctcaacgcgttggaacccgaccaccgcgttgagtccgaaggtggtcttattgaaacatggaactctcaacaccctgagctgcaatgcgccggtgtcactgtttccaaacgcaccctcaaccgcaacggcctccacttgccatcttactcaccttatccccaaatgatcattgtcgttcaaggtgcgtaatattagtaagaagtatttatcagcttaacgtgataacaataatagtaatatgaaatatttattaaattttttataattaatctctgctagaaaatttgattaatcatttttagtagaatttgttttt

SEQ ID NO: 2137 - DNA, 632 bp, Artificial
  Mutations within GlyA3B4 introduced by GmGlyA3B4_T02TALE nuclease
gttcatgtacggttgcagatataaacgaagcatagcttatgtatgaggtgtaacaaaattggaaacaatagccatgcaaggtgaagaatgtcaccaactcagaaacccttcttcattgacgtgtccctcactcactctcctctcttcactataaatcgccactcttcgtgttctccacttcaccaactccttcaaacttattaacactttccttagttcaatatggggaagcccttcttcactctctctctttcttccctttgcttgctactcttgtcgagtgctattacctccagcaagttcaacgagtgccaactcaacaacctcaacgcgttggaacccgaccaccgcgttgagtccgaaggtggtcttattgaaacatggaactctcaacaccctgagctgcaatgcgccggtgtcactgtttccaaacgcaccctcaaccgcaacggcctccacttgccatcttactcaccttatccccaaatgatcattgtcgttcaaggtgcgtaatattagtaagaagtatttatcagcttaacgtgataacaatatagtaatatgaaatatttattaaatttttataattaatctctgctagaaaatttgattaatcattttagtagaatttg

SEQ ID NO: 2138 - DNA, 636 bp, Artificial
  Mutations within GlyA3B4 introduced by GmGlyA3B4_T02TALE nuclease
gttcatgtacggttgcagatataaacgaagcatagcttatgtatgaggtgtaacaaaattggaaacaatagccatgcaaggtgaagaatgtcaccaactcagaaacccttcttcattgacgtgtccctcactcactctcctctcttcactataaatcgccactcttcgtgttctccacttcaccaactccttcaaacttattaacactttccttagttcaatatggggaagccctttttcactctctctctttcttccctttgcttgctactcttgtcgagtgttgctattacctccagcaagttcaacgagtgccaactcaacaacctcaacgcgttggaacccgaccaccgcgttgagtccgaaggtggtcttattgaaacatggaactctcaacaccctgagctgcaatgcgccggtgtcactgtttccaaacgcaccctcaaccgcaacggcctccacttgccatcttactcaccttatccccaaatgatcattgtcgttcaaggtgcgtaatattagtaagaagtatttatcagcttaacgtgataacaataatagtaatatgaaatatttattaaatttttataattaatctctgctagaaaatttgattaatcattttagtagaatttg

SEQ ID NO: 2139 - DNA, 654 bp, Artificial
  Mutations within GlyA3B4 introduced by GmGlyA3B4_T02TALE nuclease
gttcatgtacggttgcagatataaacgaagcatagcttatgtatgaggtgtaacaaaattggaaacaatagccatgcaaggtgaagaatgtcaccaactcagaaacccttcttcattgacgtgtccctcactcactctcctctcttcactataaatcgccactcttcgtgttctccacttcaccaactccttcaaacttattaacactttccttagttcaatatggggaagccctttttcactctctctctttcttccctttgcttgctactcttgtcgagtgttgctattacctccagcaagttcaacgagtgccaactcaacaacctcaacgcgttggaacccgaccaccgcgttgagtccgaaggtggtcttattgaaacatggaactctcaacaccctgagctgcaatgcgccggtgtcactgtttccaaacgcaccctcaaccgcaacggcctccacttgccatcttactcaccttatccccaaatgatcattgtcgttcaaggtgcgtaatattagtaagaagtatttatcagcttaacgtgataacaataatagtaatatgaaatatttattaaatttttataattaatctctgctagaaaatttgattaatcattttagtagaatttgttttctcaactaggtttt

SEQ ID NO: 2140 - DNA, 660 bp, Artificial
  Mutations within GlyA3B4 introduced by GmGlyA3B4_T02TALE nuclease
gttcatgtacggttgcagatataaacgaagcatagcttatgtatgaggtgtaacaaaattggaaacaatagccatgcaaggtgaagaatgtcaccaactcagaaacccttcttcattgacgtgtccctcactcactctcctctcttcactataaatcgccactcttcgtgttctccacttcaccaactccttcaaacttattaacactttccttagttcaatatggggaagcccttcttcactctctctctttcttccctttgcttgctactcttgtcgagtgcatattacctccagcaagttcaacgagtgccaactcaacaacctcaacgcgttggaacccgaccaccgcgttgagtccgaaggtggtcttattgaaacatggaactctcaacaccctgagctgcaatgcgccggtgtcactgtttccaaacgcaccctcaaccgcaacggcctccacttgccatcttactcaccttatccccaaatgatcattgtcgttcaaggtgcgtaatattagtaagaagtatttatcagcttaacgtgataacaatatagtaatatgaaatatttattaaatttttataattaatctctgctagaaaatttgattaatcattttagtagaatttgtttttctcaactaggttttaaacacca

SEQ ID NO: 2141 - DNA, 667 bp, Artificial
  Mutations within GlyA3B4 introduced by GmGlyA3B4_T02TALE nuclease
gttcatgtacggttgcagatataaacgaagcatagcttatgtatgaggtgtaacaaaattggaaacaatagccatgcaaggtgaagaatgtcaccaactcagaaacccttcttcattgacgtgtccctcactcactctcctctcttcactataaatcgccactcttcgtgttctccacttcaccaactccttcaaacttattaacactttccttagttcaatatggggaagcccttcttcactctctctctttcttccctttgcttgctactcttgtcgagtgcatgctattacctccagcaagttcaacgagtgccaactcaacaacctcaacgcgttggaacccgaccaccgcgttgagtccgaaggtggtcttattgaaacatggaactctcaacaccctgagctgcaatgcgccggtgtcactgtttccaaacgcaccctcaaccgcaacggcctccacttgccatcttactcaccttatccccaaatgatcattgtcgttcaaggtgcgtaatattagtaagaagtatttatcagcttaacgtgataacaataatagtaatatgaaatatttattaaatttttataattaatctctgctagaaaatttgattaatcattttagtagaatttgttttctcaactaggtttttaaaacaccaca

SEQ ID NO: 2142 - DNA, 583 bp, Artificial
  Mutations within GlyA3B4 introduced by GmGlyA3B4_T02TALE nuclease
gttcatgtacggttgcagatataaacgaagcatagcttatgtatgaggtgtaacaaaattggaaacaatagccatgcaaggtgaagaatgtcaccaactcagaaacccttcttcattgacgtgtccctcactcactctcctctcttcactataaatcgccactcttcgtgttctccacttcaccaactccttcaaacttattaacactttccttagttcaatattacctctagcaagttcaacgagtgccaactcaacaacctcaacgcgttggaacccgaccaccgcgttgagtccgaaggtggtcttattgaaacatggaactctcaacaccctgagctgcaatgcgccggtgtcactgtttccaaacgcaccctcaaccgcaacggcctccacttgccatcttactcaccttatcccccaaatgatcattgtcgttcaaggtgcgtaatattagtaagaagtatttatcagcttaacgtgataacaataatagtaatatgaaatatttattaaattttttataattaatctctgctagaaaatttgattaatcatttttagtagaatttgtttttctcaa

SEQ ID NO: 2143 - DNA, 535 bp, Artificial; identical to SEQ ID NO: 1976
  Mutations within GlyA3B4 introduced by GmGlyA3B4_T02TALE nuclease

SEQ ID NO: 2144 - DNA, 428 bp, Artificial
  Mutations within GlyA3B4 introduced by GmGlyA3B4_T02TALE nuclease
gttcatgtacggttgcagatataaacgaagcatagcttatgtatgaggtgtaacaaaattggaaacaatagccatgcaaggtgaagaatgtcaccaactcagaaacccttcttcattgacgtgtccctcactcactctcctctcttcactataaatcgccactcttcgtgttctccacttcaccaactccttcaaacttattaacactttccttagttcaatatggggaagcccttcttcactctctctctttcttccctttgcttgctactcttgtcgagtgcatgctattacctccagcaagttcaacgagtgccaactcaacaacctcaacgcgttggaacccgaccaccgcgttgagtccgaaggtggtcttattgaaacatggaactctcaacaccctgagctgcaatgcgccggtgtcactg

SEQ ID NO: 2145 - DNA, 622 bp, Artificial
  Mutations within GlyA3B4 introduced by GmGlyA3B4_T02TALE nuclease
gttcatgtacggttgcagatataaacgaagcatagcttatgtatgaggtgtaacaaaattggaaacaatagccatgcaaggtgaagaatgtcaccaactcagaaacccttcttcattgacgtgtccctcactcactctcctctcttcactataaatcgccactcttcgtgttctccacttcaccaactccttcaaacttattaacactttccttagttcaatatggggaagcccttcttcactctctctctttcttccctttgcttgctactcttgtcgagtgcatgcagaactttaaaagtgctcatcattggaaaacgttcttcggggcgaaaactctcaaggatcttattgaaacatggaactctcaacaccctgagctgcaatgcgccggtgtcactgtttccaaacgcaccctcaccgcaacggctccacttgccatcttactcaccttatccccaaatgatcattgtcgttcaaggtgcgtaatattagtaagaagtatttatcagcttaacgtgataacaataatagtaatatgaaatatttattaattttttataattaatctctgctagaaaatttgattaatcatttttagtagaatttgtttttctcaact

SEQ ID NO: 2146 - DNA, 523 bp, Artificial
  Mutations within GlyA3B4 introduced by GmGlyA3B4_T02TALE nuclease
gttcatgtacggttgcagatataaacgaagcatagcttatgtatgaggtgtaacaaaattggaaacaatagccatgcaaggtgaagaatgtcaccaactcagaaacccttcttcattgacgtgtccctcactcactctcctctcttcactataaatcgccactcttcgtgttctccacttcaccaactccttcaaacttattaacactttccttagttcaacgagtgccaactcaacaacctcaacgcgttggaacccgaccaccgcgttgagtccgaaggtggtcttattgaaacatggaactctcaacaccctgagctgcaatgcgccggtgtcactgtttccaaacgcaccctcaaccgcaacggcctccacttgccatcttactcaccttatccccaaatgatcattgtcgttcaaggtgcgtaatattagtaagaagtatttatcagcttaacgtgataacaataatagtaatatgaaatatttattaaattttttataattaatctctgctagaaaa

SEQ ID NO: 2147 - DNA, 518 bp, Artificial
  Mutations within GlyA3B4 introduced by GmGlyA3B4_T02TALE nuclease
  misc_feature (477): n is a or c or t or g
gttcatgtacggttgcagatataaacgaagcatagcttatgtatgaggtgtaacaaaattggaaacaatagccatgcaaggtgaagaatgtcaccaactcagaaacccttcttcattgacgtgtccctcactcactctcctctcttcactataaatcgccactcttcgtgttctccacttcaccaactccttcaaacttattaacactttccttagttcaatatggggaagcccttcttcactctctctctttcttccctttgcttgctactcttgtcgagttttgctatgacctcccagcaatgttcgaacgagtgccaagctcacaagcctcaacgcgttggacccgaccaccgtcgttgcagtccgaaggtcggcctcttgatttgaaacccatggaactctctaaccaccctgaagcttgcaatgcgccggtgtccactgctttccaaacgcacctcgaacccgcaacgcccncttgcatctaagtgctctatctaatcccgaaatgtcatcgt

SEQ ID NO: 2148 - DNA, 580 bp, Artificial
  Mutations within GlyA3B4 introduced by GmGlyA3B4_T02TALE nuclease
gttcatgtacggttgcagatataaacgaagcatagcttatgtatgaggtgtaacaaaattggaaacaatagccatgcaaggtgaagaatgtcaccaactcagaaacccttcttcattgacgtgtccctcactcactctcctctcttcactataaatcgccactcttcgtgttctccacttcaccaactccttcaaacttattaacactttccttagttcaatatggggaagcccttcttcactctctctctttcttccctttgcttgctactcttgtctacctccagcaagttcaacgagtgccaactcaacaacctcaacgcgttggaacccgaccaccgcgttgagtccgaaggtggtcttattgaaacatggaactctcaacaccctgagctgcaatgcgccggtgtcactgtttccaaacgcaccctcaaccgcaacggcctccacttgccatcttactcaccttatccccaaatgatcattgtcgttcaaaggtgcgtaaatattagtaagaagtatttatcagcttaacgtgataacaataatagtaatatgaaatatttattaaattttttat

SEQ ID NO: 2149 - DNA, 643 bp, Artificial
  Mutations within GlyA3B4 introduced by GmGlyA3B4_T02TALE nuclease
gttcatgtacggttgcagatataaacgaagcatagcttatgtatgaggtgtaacaaaattggaaacaatagccatgcaaggtgaagaatgtcaccaactcagaaacccttcttcattgacgtgtccctcactcactctcctctcttcactataaatcgccactcttcgtgttctccacttcaccaactccttcaaacttattaacactttccttagttcaatatggggaagcccttcttcactctctctctttcttccctttgcttgctactcttgctattacctccagcaagttcaacgagtgccaactcaacaacctcaacgcgttggaacccgaccaccgcgttgagtccgaaggtggtcttattgaaacatggaactctcaacaccctgagctgcaatgcgccggtgtcactgtttccaaacgcaccctcaaccgcaacggcctccacttgccatcttactcaccttatccccaaatgatcattgtcgttcaaggtgcgtaaatattagtaagaagtatttatcagcttaacgtgataacaataatagtaatatgaaatatttattaaattttttataattaatctctgctagaaaatttgattaatctttttagtagaattgttttttctcaactagg

SEQ ID NO: 2150 - DNA, 645 bp, Artificial; identical to SEQ ID NO: 732
  Mutations within GlyA3B4 introduced by GmGlyA3B4_T02TALE nuclease

SEQ ID NO: 2151 - DNA, 663 bp, Artificial
  Mutations within GlyA3B4 introduced by GmGlyA3B4_T02TALE nuclease
gttcatgtacggttgcagatataaacgaagcatagcttatgtatgaggtgtaacaaaattggaaacaatagccatgcaaggtgaagaatgtcaccaactcagaaacccttcttcattgacgtgtccctcactcactctcctctcttcactataaatcgccactcttcgtgttctccacttcaccaactccttcaaacttattaacactttccttagttcaatatggggaagcccttcttcactctctctctttcttccctttgcttgctactcttgtcgagtgcatctattacctccagcaagttcaacgagtgccaactcaacaacctcaacgcgttggaacccgaccaccgcgttgagtccgaaggtggtcttattgaaacatggaactctcaacaccctgagctgcaatgcgccggtgtcactgtttccaaacgcaccctcaaccgcaacggcctccacttgccatcttactcaccttatcccccaaatgatcattgtcgttcaaggtgcgtaatattagtaagaagtatttatcagcttaacgtgataacaatatagtaatatgaaatatttattaaatttttataattaatctctgctagaaaatttgattaatcattttagtagaatttgttttctcaactaggttttaaaacacca

SEQ ID NO: 2152 - DNA, 652 bp, Artificial
  Mutations within GlyA3B4 introduced by GmGlyA3B4_T02TALE nuclease
gttcatgtacggttgcagatataaacgaagcatagcttatgtatgaggtgtaacaaaattggaaacaatagccatgcaaggtgaagaatgtcaccaactcagaaacccttcttcattgacgtgtccctcactcactctcctctcttcactataaatcgccactcttcgtgttctccacttcaccaactccttcaaacttattaacactttccttagttcaatatggggaagcccttcttcactctctctctttcttccctttgcttgctactcttgtcgagtgcatgttacctccagcaagttcaacgagtgccaactcaacaacctcaacgcgttggaacccgaccaccgcgttgagtccgaaggtggtcttattgaaacatggaactctcaacaccctgagctgcaatgcgccggtgtcactgtttccaaacgcaccctcaaccgcaacggcctccacttgccatcttactcaccttatccccaaatgatcattgtcgttcaaggtgcgtaatattagtaagaagtatttatcagcttaacgtgataacaataatagtaatatgaaatatttattaaatttttataattaatctctgctagaaaatttgattaatcattttagtagaatttgttttctcaactaggtttt

SEQ ID NO: 2153 - DNA, 576 bp, Artificial
  Mutations within GlyA3B4 introduced by GmGlyA3B4_T02TALE nuclease
gttcatgtacggttgcagatataaacgaagcatagcttatgtatgaggtgtaacaaaattggaaacaatagccatgcaaggtgaagaatgtcaccaactcagaaacccttcttcattgacgtgtccctcactcactctcctctcttcactataaatcgccactcttcgtgttctccacttcaccaactccttcaaacttattaacactttccttagttcaatatggggaagcccttcttcactctctctctttcttccctttgcttgctactcttgtcgaacgcggtggtcttattgaaacatggaactctcaacaccctgagctgcaatgcgccggtgtcactgtttccaaacgcaccctcaaccgcaacggcctccacttgccatcttactcaccttatccccaaatgatcattgtcgttcaaggtgcgtaatattagtaagaagtatttatcagcttaacgtgataacaataatagtaatatgaaatatttattaaattttttataattaatctctgctaagaaaatttgattaatcatttttagtagaatttgtttttctcaactaggtttt

SEQ ID NO: 2154 - DNA, 661 bp, Artificial; identical to SEQ ID NO: 2035
  Mutations within GlyA3B4 introduced by GmGlyA3B4_T02TALE nuclease

SEQ ID NO: 2155 - DNA, 638 bp, Artificial
  Mutations within GlyA3B4 introduced by GmGlyA3B4_T02TALE nuclease
gttcatgtacggttgcagatataaacgaagcatagcttatgtatgaggtgtaacaaaattggaaacaatagccatgcaaggtgaagaatgtcaccaactcagaaacccttcttcattgacgtgtccctcactcactctcctctcttcactataaatcgccactcttcgtgttctccacttcaccaactccttcaaacttattaacactttccttagttcaatatggggaagcccttcttcactctctctctttcttccctttgcttgctactcttgtcgagtgcattgctattacctccagcaagttcaacgagtgccaactcaacaacctcaacgcgttggaacccgaccaccgcgttgagtccgaaggtggtcttattgaaacatggaactctcaacaccctgagctgcaatgcgccggtgtcactgtttccaaacgcaccctcaaccgcaacggcctccacttgccatcttactcaccttatccccaaatgatcattgtcgttcaaggtgcgtaatattagtaagaagtatttatcagcttaacgtgataacaataatagtaatatgaaatatttattaaatttttataattaatctctgctagaaaatttgattaatcattttagtagaatttg

SEQ ID NO: 2156 - DNA, 649 bp, Artificial; identical to SEQ ID NO: 858
  Mutations within GlyA3B4 introduced by GmGlyA3B4_T02TALE nuclease

SEQ ID NO: 2157 - DNA, 427 bp, Artificial
  Mutations within GlyA3B4 introduced by GmGlyA3B4_T02TALE nuclease
gttcatgtacggttgcagatataaacgaagcatagcttatgtatgaggtgtaacaaaattggaaacaatagccatgcaaggtgaagaatgccaccgccattgctattacctccagcaagttcaacgagtgccaactcaacaacctcaacgcgttggaacccgaccaccgcgttgagtccgaaggtggtcttattgaaacatggaactctcaacaccctgagctgcaatgcgccggtgtcactgtttccaaacgcaccctcaaccgcaacggcctccacttgccatcttactcaccttatccccaaatgatcattgtcgttcaaggtgcgtaatattagtaagaagtatttatcagcttaacgtgataacaataatagtaatatgaaatatttattaaatttttttataattaatctctgctagaaaa

SEQ ID NO: 2158 - DNA, 636 bp, Artificial; identical to SEQ ID NO: 1885
  Mutations within GlyA3B4 introduced by GmGlyA3B4_T02TALE nuclease

SEQ ID NO: 2159 - DNA, 542 bp, Artificial
  Mutations within GlyA3B4 introduced by GmGlyA3B4_T02TALE nuclease
gttcatgtacggttgcagatataaacgaagcatagcttatgtatgaggtgtaacaaaattggaaacaatagccatgcaaggtgaagaatgtcaccaactcagaaacccttcttcattgacgtgtccctcactcactctcctctcttcactataaatcgccactcttcgtgttctccacttcaccaatatcaccaactcaacaacctcaacgcgttggaacccgaccaccgcgttgagtccgaaggtggtcttattgaaacatggaactctcaacaccctgagctgcaatgcgccggtgtcactgtttccaaacgcaccctcaaccgcaacggcctccacttgccatcttactcaccttatccccaaatgatcattgtcgttcaaggtgcgtaatattagtaagaagtatttatcagcttaacgtgataacaataatagtaatatgaaatatttattaaattttttataattaatctctgctagaaaatttgattaatcatttttagtagaatttgtttttctcaactaggttttaaacacca

SEQ ID NO: 2160 - DNA, 518 bp, Artificial
  Mutations within GlyA3B4 introduced by GmGlyA3B4_T02TALE nuclease
gttcatgtacggttgcagatataaacgaagcatagcttatgtatgaggtgtaacaaaattggaaacaatagccatgcaaggtgaagaatgtcaccaactcagaaacccttcttcattgacgtgtccctcactcactctcctctcttcactataaatcgccactcttcgtgttctccacttcaccaactccttcaacgcgttggaacccgaccaccgcgttgagtccgaaggtggtcttattgaaacatggaactctcaacaccctgagctgcaatgcgccggtgtcactgtttccaaacgcaccctcaaccgcaacggcctccacttgccatcttactcaccttatccccaaatgatcattgtcgttcaaggtgcgtaatattagtaagaagtattttatcagcttaacgtgataacaataatagtaatatgaaatatttattaaattttttataattaatctctgctagaaaatttgattaatcattttttagtagaatttgtttttctcaactagg

SEQ ID NO: 2161 - DNA, 568 bp, Artificial
  Mutations within GlyA3B4 introduced by GmGlyA3B4_T02TALE nuclease
gttcatgtacggttgcagatataaacgaagcatagcttatgtatgaggtgtaacaaaattggaaacaatagccatgcaaggtgaagaatgtcaccaactcagaaacccttcttcattgacgtgtccctcactcactctcctctcttcactataaatcgccactcttcgtgttctccacttcaccaactccttcaaacttattaacactttccagcaagttcaacgagtgccaactcaacaacctcaacgcgttggaacccgaccaccgcgttgagtccgaaggtggtcttattgaaacatggaactctcaacaccctgagctgcaatgcgccggtgtcactgtttccaaacgcaccctcaaccgcaacggcctccacttgccatcttactcaccttatccccaaaatgatcattgtcgttcaaggtgcgtaatattagtaagaagtatttatcagcttaacgtgataacaataatagtaatatgaaatatttattaaattttttataattaatctctgctagaaaatttgattaatcattttagtagaatttgtttttctcaactagg

SEQ ID NO: 2162 - DNA, 443 bp, Artificial
  Mutations within GlyA3B4 introduced by GmGlyA3B4_T02TALE nuclease
gttcatgtacggttgcagatataaacgaagcatagcttatgtatgaggtgtaacaaaattggaaacaattgctattacctccagcaagttcaacgagtgccaactcaacaacctcaacgcgttggaacccgaccaccgcgttgagtccgaaggtggtcttattgaaacatggaactctcaacaccctgagctgcaatgcgccggtgtcactgtttccaaacgcaccctcaaccgcaacggcctccacttgccatcttactcaccttatccccaaatgatcattgtcgttcaaggtgcgtaatattagtaagaagtatttatcagcttaacgtgataacaataatagtaatatgaaatatttattaaattttttataattaatctctgctagaaaatttgattaatcatttttagtagaatttgtttttctcaactaggttttt

SEQ ID NO: 2163 - DNA, 651 bp, Artificial
  Mutations within GlyA3B4 introduced by GmGlyA3B4_T02TALE nuclease
gttcatgtacggttgcagatataaacgaagcatagcttatgtatgaggtgtaacaaaattggaaacaatagccatgcaaggtgaagaatgtcaccaactcagaaacccttcttcattgacgtgtccctcactcactctcctctcttcactataaatcgccactcttcgtgttctccacttcaccaactccttcaaacttattaacactttccttagttcaatatggggaagcccttcttcactctctctctttcttccctttgcttgctactcttgtcgagtgcctccagcaagttcaacgagtgccaactcaacaacctcaacgcgttggaacccgaccaccgcgttgagtccgaaggtggtcttattgaaacatggaactctcaacaccctgagctgcaatgcgccggtgtcactgtttccaaacgcaccctcaaccgcaacggcctccacttgccatcttactcaccttatccccaaatgatcattgtcgttcaaggtgcgtaaatattagtaagaagtatttatcagcttaacgtgataacaataatagtaatatgaaatatttattaaattttttataattaatctctgctagaaaatttgattaatctttttagtagaattgtttttctcaactaggtttaaaca

SEQ ID NO: 2164 - DNA, 599 bp, Artificial
  Mutations within GlyA3B4 introduced by GmGlyA3B4_T02TALE nuclease
gttcatgtacggttgcagatataaacgaagcatagcttatgtatgaggtgtaacaaaattggaaacaatagccatgcaaggtgaagaatgtcaccaactcagaaacccttcttcattgacgtgtccctcactcactctcctctcttcactataaatcgccactcttcgtgttctccacttcaccaactccttcaaacttattaacactttccttagttcaatatggggaagcccttcttcactctctctctttcttccctttgcttgctactcttgtcgagttacctccagcaagttcaacgagtgccaactcaacaacctcaacgcgttggaacccgaccaccgcgttgagtccgaaggtggtcttattgaaacatggaactctcaacaccctgagctgcaatgcgccggtgtcactgtttccaaacgcaccctcaaccgcaacggcctccacttgccatcttactcaccttatccccaaatgatcattgtcgttcaaggtgcgtaaatattagtaagaagtatttatcagcttaacgtgataacaataatagtaatatgaaatatttattaaattttttataattaatctctgctag

SEQ ID NO: 2165 - DNA, 705 bp, Artificial
  Mutations within GlyA3B4 introduced by GmGlyA3B4_T02TALE nuclease
gttcatgtacggttgcagatataaacgaagcatagcttatgtatgaggtgtaacaaaattggaaacaatagccatgcaaggtgaagaatgtcaccaactcagaaacccttcttcattgacgtgtccctcactcactctcctctcttcactataaatcgccactcttcgtgttctccacttcaccaactccttcaaacttattaacactttccttagttcaatatggggaagcccttcttcactctctctctttcttccctttgcttgctactcttgtcgagtgcatgccgccattgctggcgatggccaccacctgctgaggggtcaagccgtgctattacctccagcaagttcaacgagtgccaactcaacaacctcaacgcgttggaaccccgaccaccgcgttgagtccgaaggtggtcttattgaaacatggaactctcaacaccctgagctgcaatgcgccggtgtcactgtttccaaacgcaccctcaaccgcaacggcctccacttgccatcttactcaccttatccccaaatgatcattgtcgttcaaggtgcgtaatattagtaagaagtatttatcagcttaacgtgataacaataatagtaatatgaaatatttattaaatttttataattaatctctgctagaaaatttgattaatcatttttagtagaatttgtttttctcaactaggtttt

SEQ ID NO: 2166 - DNA, 667 bp, Artificial
  Mutations within GlyA3B4 introduced by GmGlyA3B4_T02TALE nuclease
gttcatgtacggttgcagatataaacgaagcatagcttatgtatgaggtgtaacaaaattggaaacaatagccatgcaaggtgaagaatgtcaccaactcagaaacccttcttcattgacgtgtccctcactcactctcctctcttcactataaatcgccactcttcgtgttctccacttcaccaactccttcaaacttattaacactttccttagttcaatatggggaagcccttcttcactctctctctttcttccctttgcttgctactcttgtcgagtgcattgctattacctccagcaagttcaacgagtgccaactcaacaacctcaacgcgttggaacccgaccaccgcgttgagtccgaaggtggtcttattgaaacatggaactctcaacaccctgagctgcaatgcgccggtgtcactgtttccaaacgcaccctcaaccgcaacggcctccacttgccatcttactcaccttatccccaaatgatcattgtcgttcaaggtgcgtaatattagtaagagtatttatcagcttaacgtgataacaataatagtaatatgaaatatttattaaatttttataattaatctctgctagaaaatttgattaatcattttagtagaatttgttttctcaactaggtttttaaaacaccaca

SEQ ID NO: 2167 - DNA, 637 bp, Artificial
  Mutations within GlyA3B4 introduced by GmGlyA3B4_T02TALE nuclease
  misc_feature (532): n is a or c or t or g
gttcatgtacggttgcagatataaacgaagcatagcttatgtatgaggtgtaacaaaattggaaacaatagccatgcaaggtgaagaatgtcaccaactcagaaacccttcttcattgacgtgtccctcactcactctcctctcttcactataaatcgccactcttcgtgttctccacttcaccaactccttcaaacttattaacactttccttagttcaatatggggaagcccttcttcactctctctctttcttccctttgcttgctactcttgtcgagtgcatttgctattacctccagcaagttcaacgagtgccaactcaacaacctcaacgcgttggaacccgaccaccgcgttgagtccgaaggtggtcttattgaaacatggaactctcaacaccctgagctgcaatgcgccggtgtcactgtttccaaacgcaccctcaaccgcaacggcctccacttgccatcttactcaccttatccccaaatgatcattgtcgttcaaggtgcgtaatattagtaagagnatttatcagcttaacgtgataacaatatagtaatatgaaatatttattaaatttttataattaatctctgctagaaaatttgattaatcattttagtagaatttg

SEQ ID NO: 2168 - DNA, 665 bp, Artificial
  Mutations within GlyA3B4 introduced by GmGlyA3B4_T02TALE nuclease
gttcatgtacggttgcagatataaacgaagcatagcttatgtatgaggtgtaacaaaattggaaacaatagccatgcaaggtgaagaatgtcaccaactcagaaacccttcttcattgacgtgtccctcactcactctcctctcttcactataaatcgccactcttcgtgttctccacttcaccaactccttcaaacttattaacactttccttagttcaatatggggaagcccttcttcactctctctctttcttccctttgcttgctactcttgtcgagtgcattgctattacctccagcaagttcaacgagtgccaactcaacaacctcaacgcgttggaacccgaccaccgcgttgagtccgaaggtggtcttattgaaacatggaactctcaacaccctgagctgcaatgcgccggtgtcactgtttccaaacgcaccctcaaccgcaacggcctccacttgccatcttactcaccttatccccaaatgatcattgtcgttcaaggtgcgtaatattagtaagagtatttatcagcttaacgtgataacaataatagtaatatgaaatatttattaaatttttataattaatctctgctagaaaatttgattaatcattttagtagaatttgttttctcaactaggttttaaaaccacca

SEQ ID NO: 2169 - DNA, 650 bp, Artificial
  Mutations within GlyA3B4 introduced by GmGlyA3B4_T02TALE nuclease
gttcatgtacggttgcagatataaacgaagcatagcttatgtatgaggtgtaacaaaattggaaacaatagccatgcaaggtgaagaatgtcaccaactcagaaacccttcttcattgacgtgtccctcactcactctcctctcttcactataaatcgccactcttcgtgttctccacttcaccaactccttcaaacttattaacactttccttagttcaatatggggaagcccttcttcactctctctctttcttccctttgcttgctactcttgtcgagtgcatgctattacctccagcaagttcaacgagtgccaactcaacaacctcaacgcgttggaacccgaccaccgcgttgagtccgaaggtggtcttattgaaacatggaactctcaacaccctgagctgcaatgcgccggtgtcactgtttccaaacgcaccctcaaccgcaacggcctccacttgccatcttactcaccttatccccaaatgatcattgtcgttcaaggtgcgtaatattagtaagagtatttatcagcttaacgtgataacaatatagtaatatgaaatatttattaaatttttataattaatctctgctagaaaatttgattaatcattttagtagaatttgtttttctcaactagg

SEQ ID NO: 2170 - DNA, 626 bp, Artificial
  Mutations within GlyA3B4 introduced by GmGlyA3B4_T02TALE nuclease
gttcatgtacggttgcagatataacgaagcatagcttatgtatgaggtgtaacaaaattggaaacaatagccatgcaaggtgaagaatgtcaccaactcagaaacccttcttcattgacgtgtccctcactcactctcctctcttcactataaatcgccactcttcgtgttctccacttcaccaactccttcaaacttattaacactttccttagttcaatatggggaagcccttcttcactctctctctttcttccctttgcttgctactcttgtcgagtgcatttcctccagcaagttcaacgagtgccaactcaacaacctcaacgcgttggaacccgaccaccgcgttgagtccgaaggtggtcttattgaaacatggaactctcaacaccctgagctgcaatgcgccggtgtcactgtttccaaacgcaccctcaaccgcaacggcctccacttgccatcttactcaccttatcccccaaatgatcattgtcgttcaaggtgcgtaatattagtaagaagtatttatcagcttaacgtgataacaataatagtaatatgaaatatttattaaatttttataattaatctctgctagaaaatttgattaatctttttagtag

SEQ ID NO: 2171 - DNA, 588 bp, Artificial
  Mutations within GlyA3B4 introduced by GmGlyA3B4_T02TALE nuclease
  misc_feature (551): n is a or c or t or g
gttcatgtacggttgcagatataaacgaagcatagcttatgtatgaggtgtaacaaaattggaaacaatagccatgcaaggtgaagaatgtcaccaactcagaaacccttcttcattgacgtgtccctcactcactctcctctcttcactataaatcgccactcttcgtgttctccacttcaccaactccttcaaacttattaacactttccttagttcaatatggggaagcccttcttcactctctctctttcttccctttgcttgctactcttgtcgagtgcatgtccgaaggtggtcttattgaaacatggaactctcaacaccctgagctgcaatgcgccggtgtcactgtttccaaacgcaccctcaaccgcaacggcctccacttgccatcttactcaccttatccccaaatgcaatcattgtcgttcaggtgcgtaatattatgtaagaagatatttattcagcttaacgtgataacaataatagtaatatgaaatatttattaaatttttttataattaatctctgctagaaaatttgattancatttttagtagaatttgtttttctcaactaggtttt

SEQ ID NO: 2172 - DNA, 663 bp, Artificial; identical to SEQ ID NO: 1925
  Mutations within GlyA3B4 introduced by GmGlyA3B4_T02TALE nuclease

SEQ ID NO: 2173 - DNA, 642 bp, Artificial
  Mutations within GlyA3B4 introduced by GmGlyA3B4_T02TALE nuclease
gttcatgtacggttgcagatataaacgaagcatagcttatgtatgaggtgtaacaaaattggaaacaatagccatgcaaggtgaagaatgtcaccaactcagaaacccttcttcattgacgtgtccctcactcactctcctctcttcactataaatcgccactcttcgtgttctccacttcaccaactccttcaaacttattaacactttccttagttcaatatggggaagcccttcttcactctctctctttcttccctttgcttgctactcttgtcgagtgcattgctattacctccagcaagttcaacgagtgccaactcaacaacctcaacgcgttggaacccgaccaccgcgttgagtccgaaggtggtcttattgaaacatggaactctcaacaccctgagctgcaatgcgccggtgtcactgtttccaaacgcaccctcaaccgcaacggcctccacttgccatcttactcaccttatccccaaatgatcattgtcgttcaaggtgcgtaatattagtaagagtatttatcagcttaacgtgataacaatatagtaatatgaaatatttattaaatttttataattaatctctgctagaaaatttgattaatcattttagtagaatttgtttttc

SEQ ID NO: 2174 - DNA, 660 bp, Artificial
  Mutations within GlyA3B4 introduced by GmGlyA3B4_T02TALE nuclease
gttcatgtacggttgcagatataaacgaagcatagcttatgtatgaggtgtaacaaaattggaaacaatagccatgcaaggtgaagaatgtcaccaactcagaaacccttcttcattgacgtgtccctcactcactctcctctcttcactataaatcgccactcttcgtgttctccacttcaccaactccttcaaacttattaacactttccttagttcaatatggggaagcccttcttcactctctctctttcttccctttgtttcacctatcccacggctattacctccagcaagttcaacgagtgccaactcaacaacctcaacgcgttggaacccgaccaccgcgttgagtccgaaggtggtcttattgaaacatggaactctcaacaccctgagctgcaatgcgccggtgtcactgtttccaaacgcaccctcaaccgcaacggcctccacttgccatcttactcaccttatccccaaatgatcattgtcgttcaaggtgcgtaaatattagtaagaagtatttatcagcttaacgtgataacaataatagtaatatgaaatatttattaaattttttataattaatctctgctagaaaatttgattaatctttttagtagaattgtttttctcaactaggtttaaaacaccaca

SEQ ID NO: 2175 - DNA, 475 bp, Artificial
  Mutations within GlyA3B4 introduced by GmGlyA3B4_T02TALE nuclease
gttcatgtacggttgcagatataaacgaagcatagcttatgtatgaggtgtaacaaaattggaaacaatagccatgcaaggtgaagaatgtcaccaactcagaaacccttcttcattgacgtgccaactcaacaacctcaacgcgttggaacccgaccaccgcgttgagtccgaaggtggtcttattgaaacatggaactctcaacaccctgagctgcaatgcgccggtgtcactgtttccaaacgcaccctcaaccgcaacggcctccacttgccatcttactcaccttatccccaaatgatcattgtcgttcaaggtgcgtaatattagtaagaagtatttatcagcttaacgtgataacaataatagtaatatgaaatatttattaaattttttataattaatctctgctagaaaatttgattaatcatttttagtagaatttgtttttctcaactaggtttttaaacacca

SEQ ID NO: 2176 - DNA, 564 bp, Artificial
  Mutations within GlyA3B4 introduced by GmGlyA3B4_T02TALE nuclease
gttcatgtacggttgcagatataaacgaagcatagcttatgtatgaggtgtaacaaaattggaaacaatagccatgcaaggtgaagaatgtcaccaactcagaaacccttcttcattgacgtgtccctcactcactctcctctcttcactataaatcgccactcttcgtgttctccacttcaccaactccttcaaacttattaacactttccttagttcaacgagtgccaactcaacaacctcaacgcgttggaacccgaccaccgcgttgagtccgaaggtggtcttattgaaacatggaactctcaacaccctgagctgcaatgcgccggtgtcactgtttccaaacgcaccctcaaccgcaacggcctccacttgccatcttactcaccttatccccaaatgatcattgtcgttcaaggtgcgtaatattagtaagaagtatttatcagcttaacgtgataacaataatagtaatatgaaatatttattaaattttttatattaatctctgctagaaaatttgattaatcattttagtagaatttgtttttctcaactagg

SEQ ID NO: 2177 - DNA, 659 bp, Artificial
  Mutations within GlyA3B4 introduced by GmGlyA3B4_T02TALE nuclease
gttcatgtacggttgcagatataaacgaagcatagcttatgtatgaggtgtaacaaaattggaaacaatagccatgcaaggtgaagaatgtcaccaactcagaaaccccttcttcattgacgtgtccctcactcactctcctctcttcactataaatcgccactcttcgtgttctccacttcaccaactccttcaaacttattaacactttccttagttcaatatggggaagcccttcttcactctctctctttcttccctttgcttgctactcttgtcgagtgcatgctattacctccagcaagttcaacgagtgccaactcaacaacctcaacgcgttggaacccgaccaccgcgttgagtccgaaggtggtcttattgaaacatggaactctcaacaccctgagctgcaatgcgccggtgtcactgtttccaaacgcaccctcaaccgcaacggcctccacttgccatcttactcaccttatccccaaatgatcattgtcgttcaaggtgcgtaatattagtaagagtatttatcagcttaacgtgataacaatatagtaatatgaaatatttattaaatttttataattaatctctgctagaaaatttgattaatcattttagtagaatttgtttttctcaactaggtttttaaa

SEQ ID NO: 2178 - DNA, 608 bp, Artificial
  Mutations within GlyA3B4 introduced by GmGlyA3B4_T02TALE nuclease
gttcatgtacggttgcagatataaacgaagcatagcttatgtatgaggtgtaacaaaattggaaacaatagccatgcaaggtgaagaatgtcaccaactcagaaacccttcttcattgacgtgtccctcactcactctcctctcttcactataaatcgccactcttcgtgttctccacttcaccaactccttcaaacttattaacactttccttagttcaatatggggaagcccttcttcactctctctctttcttccctttgcttgctactcttgtcgagtgcatttgctattacctccagcaagttcaacgagtgccaactcaacaacctcaacgcgttggaacccgaccaccgcgttgagtccgaaggtggtcttattgaaacatggaactctcaacaccctgagctgcaatgcgccggtgtcactgtttccaaacgcaccctcaaccgcaacggcctccacttgccatcttactcaccttatccccaaatgatcattgtcgttcaaggtgcgtaatattagtaagagtatttatcagcttaacgtgataacaatatagtaatatgaaatatttattaaatttttataattaatctctgctaagt

SEQ ID NO: 2179 - DNA, 653 bp, Artificial
  Mutations within GlyA3B4 introduced by GmGlyA3B4_T02TALE nuclease
gttcatgtacggttgcagatataaacgaagcatagcttatgtatgaggtgtaacaaaattggaaacaatagccatgcaaggtgaagaatgtcaccaactcagaaacccttcttcattgacgtgtccctcactcactctcctctcttcactataaatcgccactcttcgtgttctccacttcaccaactccttcaaacttattaacactttccttagttcaatatggggaagcccttcttcactctctctctttcttccctttgcttgctactcttgtcgagtgcatttgctattacctccagcaagttcaacgagtgccaactcaacaacctcaacgcgttggaacccgaccaccgcgttgagtccgaaggtggtcttattgaaacatggaactctcaacaccctgagctgcaatgcgccggtgtcactgtttccaaacgcaccctcaaccgcaacggcctccacttgccatcttactcaccttatccccaaatgatcattgtcgttcaaggtgcgtaatattagtaagaagtatttatcagcttaacgtgataacaataatagtaatatgaaatatttattaaatttttataattaatctctgctagaaaatttgattaatcattttagtagaatttgttttctcaactagg

SEQ ID NO: 2180 - DNA, 572 bp, Artificial
  Mutations within GlyA3B4 introduced by GmGlyA3B4_T02TALE nuclease
gttcatgtacggttgcagatataaacgaagcatagcttatgtatgaggtgtaacaaaattggaaacaatagccatgcaaggtgaagaatgtcaccaactcagaaacccttcttcattgacgtgtccctcactcactctcctctcttcactataaatcgccactcttcgtgttctccacttcaccaactccttcaaacttattaacactttccttagttcaatatggggaagcccttcttcaacgagtgccaactcaacaacctcaacgcgttggaacccgaccaccgcgttgagtccgaaggtggtcttattgaaacatggaactctcaacaccctgagctgcaatgcgccggtgtcactgtttccaaacgcaccctcaaccgcaacggcctccacttgccatcttactcaccttatccccaaatgatcattgtcgttcaaggtgcgtaatattagtaagaagtatttatcagcttaacgtgataacaataatagtaatatgaaatatttattaaattttttataattaatctatgctagaaaatttgattaatcatttttagtagaatttg

SEQ ID NO: 2181 - DNA, 664 bp, Artificial; identical to SEQ ID NO: 1715
  Mutations within GlyA3B4 introduced by GmGlyA3B4_T02TALE nuclease

SEQ ID NO: 2182 - DNA, 565 bp, Artificial
  Mutations within GlyA3B4 introduced by GmGlyA3B4_T02TALE nuclease
gttcatgtacggttgcagatataaacgaagcatagcttatgtatgaggtgtaacaaaattggaaacaatagccatgcaaggtgaagaatgtcaccaactcagaaacccttcttcattgacgtgtccctcactcactctcctctcttcactataaatcgccactcttcgtgttctccacttcaccaactccttcaaacttattaccactccttagttcaatattacctccagcaagttcaacgagtgccaactcaacaacctcaacgcgttggaacccgaccaccgcgttgagtccgaaggtggtcttattgaaacatggaactctcaacaccctgagctgcaatgcgccggtgtcactgtttccaaacgcaccctcaaccgcaacggcctccacttgccatcttactcaccttatcccccaaatgatcattgtcgttcaaggtgcgtaatattagtaagaagtatttatcagcttaacgtgataacaataatagtaatatgaaatatttattaaattttttataattaatctctgctagaaaatttgattaatcatttttagtag

SEQ ID NO: 2183 - DNA, 581 bp, Artificial
  Mutations within GlyA3B4 introduced by GmGlyA3B4_T02TALE nuclease
gttcatgtacggttgcagatataaacgaagcatagcttatgtatgaggtgtaacaaaattggaaacaatagccatgcaaggtgaagaatgtcaccaactcagaaacccttcttcattgacgtgtccctcactcactctcctctcttcactataaatcgccactcttcgtgttctccacttcaccaactccttcaaacttattaacactttccttagttcaatatggggaagcccttcttcactctctctctttcttccctttgcttgctactcttgtcgaacgcggtggtcttattgaaacatggaactctcaacaccctgagctgcaatgcgccggtgtcactgtttccaaacgcaccctcaaccgcaacggcctccacttgccatcttactcaccttatccccaaatgatcattgtcgttcaaggtgcgtaatattagtaagaagtatttatcagcttaacgtgataacaataatagtaatatgaaatatttattaaatttttttataattaatctctgctagaaaattttgattaatcatttttagtagaatttgtttttctcaactaggttttaaac

SEQ ID NO: 2184 - DNA, 543 bp, Artificial
  Mutations within GlyA3B4 introduced by GmGlyA3B4_T02TALE nuclease
gttcatgtacggttgcagatataaacgaagcatagcttatgtatgaggtgtaacaaaattggaaacaatagccatgcaaggtgaagaatgtcaccaactcagaaacccttcttcattgacgtgtccctcactcactctcctctcttcactataaatcgccactcttcgtgttctccacttcaccaacctccagcaagttcaacgagtgccaactcaacaacctcaacgcgttggaacccgaccaccgcgttgagtccgaaggtggtcttattgaaacatggaactctcaacaccctgagctgcaatgcgccggtgtcactgtttccaaacgcaccctcaaccgcaacggcctccacttgccatcttactcaccttatccccaaatgatcattgtcgttcaaggtgcgtaatattagtaagaagtatttatcagcttaacgtgataacaataatagtaatatgaaatatttattaaattttttataattaatctctgctagaaaatttgattaatcatttttagtagaatttgtttttcatcaa

SEQ ID NO: 2185 - DNA, 664 bp, Artificial
  Mutations within GlyA3B4 introduced by GmGlyA3B4_T02TALE nuclease
gttcatgtacggttgcagatataaacgaagcatagcttatgtatgaggtgtaacaaaattggaaacaatagccatgcaaggtgaagaatgtcaccaactcagaaacccttcttcattgacgtgtccctcactcactctcctctcttcactataaatcgccactcttcgtgttctccacttcaccaactccttcaaacttattaacactttccttagttcaatatggggaagcccttcttcactctctctctttcttccctttgcttgctactcttgtcgagtgcatgtattacctccagcaagttcaacgagtgccaactcaacaacctcaacgcgttggaacccgaccaccgcgttgagtccgaaggtggtcttattgaaacatggaactctcaacaccctgagctgcaatgcgccggtgtcactgtttccaaacgcaccctcaaccgcaacggcctccacttgccatcttactcaccttatccccaaatgatcattgtcgttcaaggtgcgtaatattagtaagagtatttatcagcttaacgtgataacaataatagtaatatgaaatatttattaaatttttataattaatctctgctagaaaatttgattaatcattttagtagaatttgtttttctcaactaggtttttaaaacacca

SEQ ID NO: 2186 - DNA, 415 bp, Artificial
  Mutations within GlyA3B4 introduced by GmGlyA3B4_T02TALE nuclease
gttcatgtacggttgcagatataaacgaagcatagcttatgtatgaggtgtaacaaaattggaaacaatacctccagcaagttcaacgagtgccaactcaacaacctcaacgcgttggaacccgaccaccgcgttgagtccgaaggtggtcttattgaaacatggaactctcaacaccctgagctgcaatgcgccggtgtcactgtttccaaacgcaccctcaaccgcaacggcctccacttgcccatcttactcaccttatcccccaaaatgatcattgtcgttcaaggtgcgtaatattagtaagaagtatttatcagcttaacgtgataacaataatagtaatatgaaatatttattaaattttttataattaatctctgctagaaaatttgattaatcatttttagtagaa

SEQ ID NO: 2187 - DNA, 657 bp, Artificial
  Mutations within GlyA3B4 introduced by GmGlyA3B4_T02TALE nuclease
gttcatgtacggttgcagatataaacgaagcatagcttatgtatgaggtgtaacaaaattggaaacaatagccatgcaaggtgaagaatgtcaccaactcagaaacccttcttcattgacgtgtccctcactcactctcctctcttcactataaatcgccactcttcgtgttctccacttcaccaactccttcaaacttattaacactttccttagttcaatatggggaagcccttcttcactctctctctttcttccctttgcttgctactcttgtcgactattacctccagcaagttcaacgagtgccaactcaacaacctcaacgcgttggaacccgaccaccgcgttgagtccgaaggtggtcttattgaaacatggaactctcaacaccctgagctgcaatgcgccggtgtcactgtttccaaacgcaccctcaaccgcaacggcctccacttgccatcttactcaccttatccccaaatgatcattgtcgttcaaggtgcgtaatattagtaagaagtatttatcagcttaacgtgataacaataatagtaatatgaaatatttattaaatttttataattaatctctgctagaaaatttgattaatcattttagtagaatttgttttctcaactaggttttaaaacacca

SEQ ID NO: 2188 - DNA, 595 bp, Artificial
  Mutations within GlyA3B4 introduced by GmGlyA3B4_T02TALE nuclease
gttcatgtacggttgcagatataaacgaagcatagcttatgtatgaggtgtaacaaaattggaaacaatagccatgcaaggtgaagaatgtcaccaactcagaaacccttcttcattgacgtgtccctcactcactctcctctcttcactataaatcgccactcttcgtgttctccacttcaccaactccttcaaacttattaacactttccttagttcaatatggggaagcccttcttcactctctctctttcttccctttgcttgctactcttgtctacctccagcaagttcaacgagtgccaactcaacaacctcaacgcgttggaacccgaccaccgcgttgagtccgaaggtggtcttattgaaacatggaactctcaacaccctgagctgcaatgcgccggtgtcactgtttccaaacgcaccctcaaccgcaacggcctccacttgccatcttactcaccttatccccaaatgatcattgtcgttcaaggtgcgtaaatattagtaagaagtatttatcagcttaacgtgataacaataatagtaatatgaaatatttattaaattttttataattaatctctgctag

SEQ ID NO: 2189 - DNA, 557 bp, Artificial
  Mutations within GlyA3B4 introduced by GmGlyA3B4_T02TALE nuclease
gttcatgtacggttgcagatataaacgaagcatagcttatgtatgaggtgtaacaaaattggaaacaatagccatgcaaggtgaagaatgtcaccaactcagaaacccttcttcattgacgtgtccctcactcactctcctctcttcactataaatcgccactcttcgtgttctccacttcaccaacctccagcaagttcaacgagtgccaactcaacaacctcaacgcgttggaacccgaccaccgcgttgagtccgaaggtggtcttattgaaacatggaactctcaacaccctgagctgcaatgcgccggtgtcactgtttccaaacgcaccctcaaccgcaacggcctccacttgccatcttactcaccttatcccccaaatgatcattgtcgttcaaggtgcgtaatattagtaagaagtatttatcagcttaacgtgataacaataatagtaatatgaaatatttattaaattttttataattaatctctgctagaaaatttgattaatcattttagtagaatttgtttttctcaactaggtttttaaaca

SEQ ID NO: 2190 - DNA, 658 bp, Artificial
  Mutations within GlyA3B4 introduced by GmGlyA3B4_T02TALE nuclease
gttcatgtacggttgcagatataaacgaagcatagcttatgtatgaggtgtaacaaaattggaaacaatagccatgcaaggtgaagaatgtcaccaactcagaaacccttcttcattgacgtgtccctcactcactctcctctcttcactataaatcgccactcttcgtgttctccacttcaccaactccttcaaacttattaacactttccttagttcaatatggggaagcccttcttcactctctctctttcttccctttgcttgctactctttgctattacctccagcaagttcaacgagtgccaactcaacaacctcaacgcgttggaacccgaccaccgcgttgagtccgaaggtggtcttattgaaacatggaactctcaacaccctgagctgcaatgcgccggtgtcactgtttccaaacgcaccctcaaccgcaacggcctccacttgccatcttactcaccttatcccccaaatgatcattgtcgttcaaggtgcgtaaatattagtaagaagtatttatcagcttaacgtgataacaataatagtaatatgaaatatttattaaattttttataattaatctctgctagaaaatttgattaatctttttagtagaattgtttttctcaactaggtttaaaacaccaca

SEQ ID NO: 2191 - DNA, 663 bp, Artificial
  Mutations within GlyA3B4 introduced by GmGlyA3B4_T02TALE nuclease
gttcatgtacggttgcagatataaacgaagcatagcttatgtatgaggtgtaacaaaattggaaacaatagccatgcaaggtgaagaatgtcaccaactcagaaacccttcttcattgacgtgtccctcactcactctcctctcttcactataaatcgccactcttcgtgttctccacttcaccaactccttcaaacttattaacactttccttagttcaatatggggaagcccttcttcactctctctctttcttccctttgcttgctactcttgtcgagtgcattattacctccagcaagttcaacgagtgccaactcaacaacctcaacgcgttggaacccgaccaccgcgttgagtccgaaggtggtcttattgaaacatggaactctcaacaccctgagctgcaatgcgccggtgtcactgtttccaaacgcaccctcaaccgcaacggcctccacttgccatcttactcaccttatccccaaatgatcattgtcgttcaaggtgcgtaatattagtaagaagtatttatcagcttaacgtgataacaataatagtaatatgaaatatttattaaatttttataattaatctctgctagaaaatttgattaatcattttagtagaatttgttttctcaactaggtttttaaaacacca

SEQ ID NO: 2192 - DNA, 662 bp, Artificial
  Mutations within GlyA3B4 introduced by GmGlyA3B4_T02TALE nuclease
gttcatgtacggttgcagatataaacgaagcatagcttatgtatgaggtgtaacaaaattggaaacaatagccatgcaaggtgaagaatgtcaccaactcagaaacccttcttcattgacgtgtccctcactcactctcctctcttcactataaatcgccactcttcgtgttctccacttcaccaactccttcaaacttattaacactttccttagttcaatatggggaagcccttcttcactctctctctttcttccctttgcttgctactcttgtcgagtgcattattacctccagcaagttcaacgagtgccaactcaacaacctcaacgcgttggaacccgaccaccgcgttgagtccgaaggtggtcttattgaaacatggaactctcaacaccctgagctgcaatgcgccggtgtcactgtttccaaacgcaccctcaaccgcaacggcctccacttgccatcttactcaccttatccccaaatgatcattgtcgttcaaggtgcgtaatattagtaagaagtatttatcagcttaacgtgataacaataatagtaatatgaaatatttattaaatttttataattaatctctgctagaaaatttgattaatcattttagtagaatttgttttctcaactaggttttaaaacacca

SEQ ID NO: 2193 - DNA, 581 bp, Artificial
  Mutations within GlyA3B4 introduced by GmGlyA3B4_T02TALE nuclease
gttcatgtacggttgcagatataaacgaagcatagcttatgtatgaggtgtaacaaaattggaaacaatagccatgcaaggtgaagaatgtcaccaactcagaaacccttcttcattgacgtgtccctcactcactctcctctcttcactataaatcgccactcttcgtgttctccacttcaccaactccttcaaacttattaccactccttagttcaatattacctccagcaagttcaacgagtgccaactcaacaacctcaacgcgttggaacccgaccaccgcgttgagtccgaaggtggtcttattgaaacatggaactctcaacaccctgagctgcaatgcgccggtgtcactgtttccaaacgcaccctcaaccgcaacggcctccacttgccatcttactcaccttatcccccaaatgatcattgtcgttcaaggtgcgtaatattagtaagaagtatttatcagcttaacgtgataacaataatagtaatatgaaatatttattaaattttttataattaatctctgctagaaaatttgattaatcatttttagtagaatttgtttttctcaa

SEQ ID NO: 2194 - DNA, 661 bp, Artificial; identical to SEQ ID NO: 1694
  Mutations within GlyA3B4 introduced by GmGlyA3B4_T02TALE nuclease

SEQ ID NO: 2195 - DNA, 655 bp, Artificial
  Mutations within GlyA3B4 introduced by GmGlyA3B4_T02TALE nuclease
gttcatgtacggttgcagatataaacgaagcatagcttatgtatgaggtgtaacaaaattggaaacaatagccatgcaaggtgaagaatgtcaccaactcagaaacccttcttcattgacgtgtccctcactcactctcctctcttcactataaatcgccactcttcgtgttctccacttcaccaactccttcaaacttattaacactttccttagttcaatatggggaagcccttcttcactctctctctttcttccctttgcttgctactcttgtcgagtgcattgctattacctccagcaagttcaacgagtgccaactcaacaacctcaacgcgttggaacccgaccaccgcgttgagtccgaaggtggtcttattgaaacatggaactctcaacaccctgagctgcaatgcgccggtgtcactgtttccaaacgcaccctcaaccgcaacggcctccacttgccatcttactcaccttatccccaaatgatcattgtcgttcaaggtgcgtaatattagtaagagtatttatcagcttaacgtgataacaataatagtaatatgaaatatttattaaatttttataattaatctctgctagaaaatttgattaatcattttagtagaatttgttttctcaactaggtttt

SEQ ID NO: 2196 - DNA, 662 bp, Artificial
  Mutations within GlyA3B4 introduced by GmGlyA3B4_T02TALE nuclease
gttcatgtacggttgcagatataaacgaagcatagcttatgtatgaggtgtaacaaaattggaaacaatagccatgcaaggtgaagaatgtcaccaactcagaaacccttcttcattgacgtgtccctcactcactctcctctcttcactataaatcgccactcttcgtgttctccacttcaccaactccttcaaacttattaacactttccttagttcaatatggggaagcccttcttcactctctctctttcttccctttgcttgctactcttgtcgagtgcatgctattacctccagcaagttcaacgagtgccaactcaacaacctcaacgcgttggaacccgaccaccgcgttgagtccgaaggtggtcttattgaaacatggaactctcaacaccctgagctgcaatgcgccggtgtcactgtttccaaacgcaccctcaaccgcaacggcctccacttgccatcttactcaccttatccccaaatgatcattgtcgttcaaggtgcgtaatattagtaagagtatttatcagcttaacgtgataacaataatagtaatatgaaatatttattaaatttttataattaatctctgctagaaaatttgattaatcattttagtagaatttgttttctcaactaggttttaaacacca

SEQ ID NO: 2197 - DNA, 648 bp, Artificial
  Mutations within GlyA3B4 introduced by GmGlyA3B4_T02TALE nuclease
gttcatgtacggttgcagatataaacgaagcatagcttatgtatgaggtgtaacaaaattggaaacaatagccatgcaaggtgaagaatgtcaccaactcagaaacccttcttcattgacgtgtccctcactcactctcctctcttcactataaatcgccactcttcgtgttctccacttcaccaactccttcaaacttattaacactttccttagttcaatatggggaagcccttcttcactctctctctttcttccctttgcttgctactcttgtcgagtgcattacctccagcaagttcaacgagtgccaactcaacaacctcaacgcgttggaacccgaccaccgcgttgagtccgaaggtggtcttattgaaacatggaactctcaacaccctgagctgcaatgcgccggtgtcactgtttccaaacgcaccctcaaccgcaacggcctccacttgccatcttactcaccttatccccaaatgatcattgtcgttcaaggtgcgtaatattagtaagaagtatttatcagcttaacgtgataacaataatagtaatatgaaatatttattaaatttttataattaatctctgctagaaaatttgattaatcatttttagtagaatttgtttttctcaactagg

SEQ ID NO: 2198 - DNA, 663 bp, Artificial
  Mutations within GlyA3B4 introduced by GmGlyA3B4_T02TALE nuclease
gttcatgtacggttgcagatataaacgaagcatagcttatgtatgaggtgtaacaaaattggaaacaatagccatgcaaggtgaagaatgtcaccaactcagaaacccttcttcattgacgtgtccctcactcactctcctctcttcactataaatcgccactcttcgtgttctccacttcaccaactccttcaaacttattaacactttccttagttcaatatggggaagcccttcttcactctctctctttcttccctttgcttgctactcttgtcgagtgcatgcttacctccagcaagttcaacgagtgccaactcaacaacctcaacgcgttggaacccgaccaccgcgttgagtccgaaggtggtcttattgaaacatggaactctcaacaccctgagctgcaatgcgccggtgtcactgtttccaaacgcaccctcaaccgcaacggcctccacttgccatcttactcaccttatccccaaatgatcattgtcgttcaaggtgcgtaatattagtaagaagtatttatcagcttaacgtgataacaataatagtaatatgaaatatttattaaatttttataattaatctctgctagaaaatttgattaatcattttagtagaatttgtttttctcaactaggttttaaaacacca

SEQ ID NO: 2199 - DNA, 656 bp, Artificial
  Mutations within GlyA3B4 introduced by GmGlyA3B4_T02TALE nuclease
gttcatgtacggttgcagatataaacgaagcatagcttatgtatgaggtgtaacaaaattggaaacaatagccatgcaaggtgaagaatgtcaccaactcagaaacccttcttcattgacgtgtccctcactcactctcctctcttcactataaatcgccactcttcgtgttctccacttcaccaactccttcaaacttattaacactttccttagttcaatatggggaagcccttcttcactctctctctttcttccctttgcttgctactcttgtcgagtgcatgttacctccagcaagttcaacgagtgccaactcaacaacctcaacgcgttggaacccgaccaccgcgttgagtccgaaggtggtcttattgaaacatggaactctcaacaccctgagctgcaatgcgccggtgtcactgtttccaaacgcaccctcaaccgcaacggcctccacttgccatcttactcaccttatccccaaatgatcattgtcgttcaaggtgcgtaatattagtaagaagtatttatcagcttaacgtgataacaataatagtaatatgaaatatttattaaatttttataattaatctctgctagaaaatttgattaatcattttagtagaatttgttttctcaactaggttttaaaa

SEQ ID NO: 2200 - DNA, 655 bp, Artificial
  Mutations within GlyA3B4 introduced by GmGlyA3B4_T02TALE nuclease
gttcatgtacggttgcagatataaacgaagcatagcttatgtatgaggtgtaacaaaattggaaacaatagccatgcaaggtgaagaatgtcaccaactcagaaacccttcttcattgacgtgtccctcactcactctcctctcttcactataaatcgccactcttcgtgttctccacttcaccaactccttcaaacttattaacactttccttagttcaatatggggaagcccttcttcactctctctctttcttccctttgcttgctactcttgtcgagtgcatgctattacctccagcaagttcaacgagtgccaactcaacaacctcaacgcgttggaacccgaccaccgcgttgagtccgaaggtggtcttattgaaacatggaactctcaacaccctgagctgcaatgcgccggtgtcactgtttccaaacgcaccctcaaccgcaacggcctccacttgccatcttactcaccttatccccaaatgatcattgtcgttcaaggtgcgtaatattagtaagagtatttatcagcttaacgtgataacaatatagtaatatgaaatatttattaaatttttataattaatctctgctagaaaatttgattaatcattttagtagaatttgtttttctcaactaggttttt

SEQ ID NO: 2201 - DNA, 658 bp, Artificial
  Mutations within GlyA3B4 introduced by GmGlyA3B4_T02TALE nuclease
gttcatgtacggttgcagatataaacgaagcatagcttatgtatgaggtgtaacaaaattggaaacaatagccatgcaaggtgaagaatgtcaccaactcagaaacccttcttcattgacgtgtccctcactcactctcctctcttcactataaatcgccactcttcgtgttctccacttcaccaactccttcaaacttattaacactttccttagttcaatatggggaagcccttcttcactctctctctttcttccctttgcttgctactcttgtcgagtgcatgctattacctccagcaagttcaacgagtgccaactcaacaacctcaacgcgttggaacccgaccaccgcgttgagtccgaaggtggtcttattgaaacatggaactctcaacaccctgagctgcaatgcgccggtgtcactgtttccaaacgcaccctcaaccgcaacggcctccacttgccatcttactcaccttatccccaaatgatcattgtcgttcaaggtgcgtaatattagtaagagtatttatcagcttaacgtgataacaataatagtaatatgaaatatttattaaatttttataattaatctctgctagaaaatttgattaatcattttagtagaatttgttttctcaactaggttttaaaa

SEQ ID NO: 2202 - DNA, 443 bp, Artificial
  Mutations within GlyA3B4 introduced by GmGlyA3B4_T02TALE nuclease
gttcatgtacggttgcagatataaacgaagcatagcttatgtatgaggtgtaacaaaattggaaacaatagccatgcaaggtgaagaatgtcaccaactcaggatgctatcaacaacctcaacgcgttggaacccgaccaccgcgttgagtccgaaggtggtcttattgaaacatggaactctcaacaccctgagctgcaatgcgccggtgtcactgtttccaaacgcaccctcaaccgcaacggcctccacttgccatcttactcaccttatccccaaatgatcattgtcgttcaaggtgcgtaatattagtaagaagtatttatcagcttaacgtgataacaataatagtaatatgaaatatttattaaattttttataattaatctctgctagaaaatttgattaatcatttttagtagaatttgtttttctcaactagg

SEQ ID NO: 2203 - DNA, 662 bp, Artificial
  Mutations within GlyA3B4 introduced by GmGlyA3B4_T02TALE nuclease
gttcatgtacggttgcagatataaacgaagcatagcttatgtatgaggtgtaacaaaattggaaacaatagccatgcaaggtgaagaatgtcaccaactcagaaacccttcttcattgacgtgtccctcactcactctcctctcttcactataaatcgccactcttcgtgttctccacttcaccaactccttcaaacttattaacactttccttagttcaatatggggaagcccttcttcactctctctctttcttccctttgcttgctactcttgtcgagtgcatctattacctccagcaagttcaacgagtgccaactcaacaacctcaacgcgttggaacccgaccaccgcgttgagtccgaaggtggtcttattgaaacatggaactctcaacaccctgagctgcaatgcgccggtgtcactgtttccaaacgcaccctcaaccgcaacggcctccacttgccatcttactcaccttatccccaaatgatcattgtcgttcaaggtgcgtaatattagtaagaagtatttatcagcttaacgtgataacaataatagtaatatgaaatatttattaaatttttataattaatctctgctagaaaatttgattaatcattttagtagaatttgttttctcaactaggttttaaacacca

SEQ ID NO: 2204 - DNA, 654 bp, Artificial
  Mutations within GlyA3B4 introduced by GmGlyA3B4_T02TALE nuclease
gttcatgtacggttgcagatataaacgaagcatagcttatgtatgaggtgtaacaaaattggaaacaatagccatgcaaggtgaagaatgtcaccaactcagaaacccttcttcattgacgtgtccctcactcactctcctctcttcactataaatcgccactcttcgtgttctccacttcaccaactccttcaaacttattaacactttccttagttcaatatggggaagcccttcttcactctctctctttcttccctttgcttgctactcttgtcgagtgcatgctattacctccagcaagttcaacgagtgccaactcaacaacctcaacgcgttggaacccgaccaccgcgttgagtccgaaggtggtcttattgaaacatggaactctcaacaccctgagctgcaatgcgccggtgtcactgtttccaaacgcaccctcaaccgcaacggcctccacttgccatcttactcaccttatccccaaatgatcattgtcgttcaaggtgcgtaatattagtaagagtatttatcagcttaacgtgataacaatatagtaatatgaaatatttattaaatttttataattaatctctgctagaaaatttgattaatcattttagtagaatttgttttctcaactaggttttt

SEQ ID NO: 2205 - DNA, 663 bp, Artificial; identical to SEQ ID NO: 2045
  Mutations within GlyA3B4 introduced by GmGlyA3B4_T02TALE nuclease

SEQ ID NO: 2206 - DNA, 677 bp, Artificial
  Mutations within GlyA3B4 introduced by GmGlyA3B4_T02TALE nuclease
gttcatgtacggttgcagatataaacgaagcatagcttatgtatgaggtgtaacaaaattggaaacaatagccatgcaaggtgaagaatgtcaccaactcagaaacccttcttcattgacgtgtccctcactcactctcctctcttcactataaatcgccactcttcgtgttctccacttcaccaactccttcaaacttattaacactttccttagttcaatatggggaagcccttcttcactctctctctttcttccctttgcttgctactcttgtcgagtgcattgccggtgctgtgccaggccccacggcttgaccccggagcaggtggtggccatcgccagcaatggcggtggcaagcaggcgctggagacggtccagctttgctattacctccagcaagttcaacgagtgccaactcaacaacctcaacgcgttggaacccgaccaccgcgttgagtccgaaggtggtcttattgaaacatggaactctcaacaccctgagctgcaatgcgccggtgtcactgtttccaaacgcaccctcaaccgcaacggcctccacttgccatcttactcaccttatccccaaatgatcattgtcgttcaaggtgcgtaatattagtaagaagtatttatcgcttaacgtgataacaataatagtaatatgaaaatattt

SEQ ID NO: 2207 - DNA, 654 bp, Artificial
  Mutations within GlyA3B4 introduced by GmGlyA3B4_T02TALE nuclease
gttcatgtacggttgcagatataaacgaagcatagcttatgtatgaggtgtaacaaaattggaaacaatagccatgcaaggtgaagaatgtcaccaactcagaaacccttcttcattgacgtgtccctcactcactctcctctcttcactataaatcgccactcttcgtgttctccacttcaccaactccttcaaacttattaacactttccttagttcaatatggggaagcccttcttcactctctctctttcttccctttgcttgctactcttgtcccagcaagttcaacgagtgccaactcaacaacctcaacgcgttggaacccgaccaccgcgttgagtccgaaggtggtcttattgaaacatggaactctcaacaccctgagctgcaatgcgccggtgtcactgtttccaaacgcaccctcaaccgcaacggcctccacttgccatcttactcaccttatcccccaaatgatcattgtcgttcaaggtgcgtaatattagtaagaagtatttatcagcttaacgtgataacaataatagtaatatgaaatatttattaaattttttataaattaatctctgctagaaaatttgattaatcatttttagtagaatttgttttttctcaactaggttttaaaacaccaca

SEQ ID NO: 2208 - DNA, 667 bp, Artificial
  Mutations within GlyA3B4 introduced by GmGlyA3B4_T02TALE nuclease
gttcatgtacggttgcagatataaacgaagcatagcttatgtatgaggtgtaacaaaattggaaacaatagccatgcaaggtgaagaatgtcaccaactcagaaacccttcttcattgacgtgtccctcactcactctcctctcttcactataaatcgccactcttcgtgttctccacttcaccaactccttcaaacttattaacactttccttagttcaatatggggaagcccttcttcactctctctctttcttccctttgcttgctactcttgtcgagtgcatttattacctccagcaagttcaacgagtgccaactcaacaacctcaacgcgttggaacccgaccaccgcgttgagtccgaaggtggtcttattgaaacatggaactctcaacaccctgagctgcaatgcgccggtgtcactgtttccaaacgcaccctcaaccgcaacggcctccacttgccatcttactcaccttatccccaaatgatcattgtcgttcaaggtgcgtaatattagtaagaagtatttatcagcttaacgtgataacaataatagtaatatgaaatatttattaaatttttataattaatctctgctagaaaatttgattaatcattttagtagaatttgtttttctcaactaggtttttaaaacaccaca

SEQ ID NO: 2209 - DNA, 662 bp, Artificial
  Mutations within GlyA3B4 introduced by GmGlyA3B4_T02TALE nuclease
gttcatgtacggttgcagatataaacgaagcatagcttatgtatgaggtgtaacaaaattggaaacaatagccatgcaaggtgaagaatgtcaccaactcagaaaccccttcttcattgacgtgtccctcactcactctcctctcttcactataaatcgccactcttcgtgttctccacttcaccaactccttcaaacttattaacactttccttagttcaatatggggaagcccttcttcactctctctctttcttccctttgcttgctactcttgtcgagtgcatattacctccagcaagttcaacgagtgccaactcaacaacctcaacgcgttggaacccgaccaccgcgttgagtccgaaggtggtcttattgaaacatggaactctcaacaccctgagctgcaatgcgccggtgtcactgtttccaaacgcaccctcaaccgcaacggcctccacttgccatcttactcaccttatccccaaatgatcattgtcgttcaaggtgcgtaatattagtaagaagtatttatcagcttaacgtgataacaataatagtaatatgaaatatttattaaatttttataattaatctctgctagaaaatttgattaatcattttagtagaatttgttttctcaactaggttttaaaacacca

SEQ ID NO: 2210 - DNA, 664 bp, Artificial
  Mutations within GlyA3B4 introduced by GmGlyA3B4_T02TALE nuclease
gttcatgtacggttgcagatataaacgaagcatagcttatgtatgaggtgtaacaaaattggaaacaatagccatgcaaggtgaagaatgtcaccaactcagaaacccttcttcattgacgtgtccctcactcactctcctctcttcactataaatcgccactcttcgtgttctccacttcaccaactccttcaaacttattaacactttccttagttcaatatggggaagcccttcttcactctctctctttcttccctttgcttgctactcttgtcgagtgcctattacctccagcaagttcaacgagtgccaactcaacaacctcaacgcgttggaacccgaccaccgcgttgagtccgaaggtggtcttattgaaacatggaactctcaacaccctgagctgcaatgcgccggtgtcactgtttccaaacgcaccctcaaccgcaacggcctccacttgccatcttactcaccttatccccaaatgatcattgtcgttcaaggtgcgtaatattagtaagaagtatttatcagcttaacgtgataacaataatagtaatatgaaatatttattaaatttttataattaatctctgctagaaaatttgattaatcattttagtagaatttgttttctcaactaggtttttaaaacaccaca

SEQ ID NO: 2211 - DNA, 670 bp, Artificial
  Mutations within GlyA3B4 introduced by GmGlyA3B4_T02TALE nuclease
  misc_feature (532): n is a or c or t or g
gttcatgtacggttgcagatataaacgaagcatagcttatgtatgaggtgtaacaaaattggaaacaatagccatgcaaggtgaagaatgtcaccaactcagaaacccttcttcattgacgtgtccctcactcactctcctctcttcactataaatcgccactcttcgtgttctccacttcaccaactccttcaaacttattaacactttccttagttcaatatggggaagcccttcttcactctctctctttcttccctttgcttgctactcttgtcgagtgcattgctattacctccagcaagttcaacgagtgccaactcaacaacctcaacgcgttggaacccgaccaccgcgttgagtccgaaggtggtcttattgaaacatggaactctcaacaccctgagctgcaatgcgccggtgtcactgtttccaaacgcaccctcaaccgcaacggcctccacttgccatcttactcaccttatccccaaatgatcattgtcgttcaaggtgcgtaatattagtaagaagnatttatcagcttaacgtgataacaataatagtaatatgaaaatatttattaaatttttataattaatctctgctagaaaatttgattaatcattttagtagaatttgtttttctcaactaggtttttaaaacaccaca

SEQ ID NO: 2212 - DNA, 419 bp, Artificial
  Mutations within GlyA3B4 introduced by GmGlyA3B4_T02TALE nuclease
gttcatgtacggttgcagatataaacgaagcatagcttatgtatgaggtgtaacaaaattggaaacaatagccatgcaaggtgaagaatgtcaccaactcagaaacccttcttcattgacgtgtccctcactcactctcctctcttcactataaatcgccactcttcgtgttctccacttcaccaactccttcaaacttattaacactttccttagttcaatatggggaagcccttcttcactctctctctttcttccctttgcttgctactcttgtcgagtgcatatcagcttaacgtgataacaataatagtaatatgaaatatttattaaattttttataattaatctctgctagaaaattttgattaatcatttttagtagaatttgttttttctcaactaggttttaaacacca

SEQ ID NO: 2213 - DNA, 563 bp, Artificial
  Mutations within GlyA3B4 introduced by GmGlyA3B4_T02TALE nuclease
gttcatgtacggttgcagatataaacgaagcatagcttatgtatgaggtgtaacaaaattggaaacaatagccatgcaaggtgaagaatgtcaccaactcagaaacccttcttcattgacgtgtccctcactcactctcctctcttcactataaatcgccactcttcgtgttctccacttcaccaactccttcaaacttattaacactttccttagttcaatatggggaagcccttcttcactctctctctttcttccctttgcttgctactcttgtcgacgcgttggaacccgaccaccgcgttgagtccgaaggtggtcttattgaaacatggaactctcaacaccctgagctgcaatgcgccggtgtcactgtttccaaacgcaccctcaaccgcaacggcctccacttgccatcttactcaccttatccccaaatgatcattgtcgttcaaggtgcgtaatattagtaagaagtatttatcagcttaacgtgataacaataatagtaatatgaaatatttattaatttttataattaatctctgctagaaaatttgatt

SEQ ID NO: 2214 - DNA, 655 bp, Artificial; identical to SEQ ID NO: 2000
  Mutations within GlyA3B4 introduced by GmGlyA3B4_T02TALE nuclease

SEQ ID NO: 2215 - DNA, 613 bp, Artificial
  Mutations within GlyA3B4 introduced by GmGlyA3B4_T02TALE nuclease
gttcatgtacggttgcagatataaacgaagcatagcttatgtatgaggtgtaacaaaattggaaacaatagccatgcaaggtgaagaatgtcaccaactcagaaacccttcttcattgacgtgtccctcactcactctcctctcttcactataaatcgccactcttcgtgttctccacttcaccaactccttcaaacttattaacactttccttagttcaatatggggaagcccttcttcactctctctctttcaacggagtcagccaactcaacaacctcaacgcgttggaacccgaccaccgcgttgagtccgaaggtggtcttattgaaacatggaactctcaacaccctgagctgcaatgcgccggtgtcactgtttccaaacgcaccctcaaccgcaacggcctccacttgccatcttactcaccttatccccaaatgatcattgtcgttcaaggtgcgtaatattagtaagaagtatttatcagcttaacgtgataacaataatagtaatatgaaatatttattaatttttataattaatctctgctagaaaatttgattaatcatttttagtagaatttgtttttctcaactaggtttttaaaaca

SEQ ID NO: 2216 - DNA, 662 bp, Artificial; identical to SEQ ID NO: 2192
  Mutations within GlyA3B4 introduced by GmGlyA3B4_T02TALE nuclease

SEQ ID NO: 2217 - DNA, 718 bp, Artificial
  Mutations within GlyA3B4 introduced by GmGlyA3B4_T02TALE nuclease
gttcatgtacggttgcagatataaacgaagcatagcttatgtatgaggtgtaacaaaaattggaaacaatagccatgcaaggtgaagaatgtcaccaactcagaaacccttcttcattgacgtgtccctcactcactctcctctcttcactataaatcgccactcttcgtgttctccacttcaccaactccttcaaacttattaacactttccttagttcaatatggggaagcccttcttcactctctctctttcttccctttgcttgctactcttgtcgagtgcatggggtcaagccgtgggcctggcacagcaccggcaacagccgctggaccgtctccagcgcctgcttgccaccgctattacctccagcaagttcaacgagtgccaactcaacaacctcaacgcgttggaacccgaccaccgcgttgagtccgaaggtggtcttattgaaacatggaactctcaacaccctgagctgcaatgcgccggtgtcactgtttccaaacgcacctcaaccgcaacggcctccacttgccatcttactcaccttatccccaaatgatcattgtcgttcaaggtgcgtaatattagtaagaagtatttatcagcttaacgtgataacaataatagtaatatgaaatatttattaaattttttataattaatctctgctagaaaatttgattaatcatttttagtagaatttgtttttctc

SEQ ID NO: 2218 - DNA, 667 bp, Artificial
  Mutations within GlyA3B4 introduced by GmGlyA3B4_T02TALE nuclease
gttcatgtacggttgcagatataaacgaagcatagcttatgtatgaggtgtaacaaaattggaaacaatagccatgcaaggtgaagaatgtcaccaactcagaaacccttcttcattgacgtgtccctcactcactctcctctcttcactataaatcgccactcttcgtgttctccacttcaccaactccttcaaacttattaacactttccttagttcaatatggggaagcccttcttcactctctctctttcttccctttgcttgctactcttgtcgagtgctgctattacctccagcaagttcaacgagtgccaactcaacaacctcaacgcgttggaacccgaccaccgcgttgagtccgaaggtggtcttattgaaacatggaactctcaacaccctgagctgcaatgcgccggtgtcactgtttccaaacgcaccctcaaccgcaacggcctccacttgccatcttactcaccttatccccaaatgatcattgtcgttcaaggtgcgtaatattagtaagagtatttatcagcttaacgtgataacaataatagtaatatgaaaatatttattaaatttttataattaatctctgctagaaaatttgattaatcattttagtagaatttgtttttctcaactaggtttttaaaacaccaca

SEQ ID NO: 2219 - DNA, 653 bp, Artificial
  Mutations within GlyA3B4 introduced by GmGlyA3B4_T02TALE nuclease
gttcatgtacggttgcagatataaacgaagcatagcttatgtatgaggtgtaacaaaattggaaacaatagccatgcaaggtgaagaatgtcaccaactcagaaacccttcttcattgacgtgtccctcactcactctcctctcttcactataaatcgccactcttcgtgttctccacttcaccaactccttcaaacttattaacactttccttagttcaatatggggaagcccttcttcactctctctctttcttccctttgcttgctactcttgtcgagtgcatccagcaagttcaacgagtgccaactcaacaacctcaacgcgttggaacccgaccaccgcgttgagtccgaaggtggtcttattgaaacatggaactctcaacaccctgagctgcaatgcgccggtgtcactgtttccaaacgcaccctcaaccgcaacggcctccacttgccatcttactcaccttatccccaaatgatcattgtcgttcaaggtgcgtaatattagtaagaagtatttatcagcttaacgtgataacaataatagtaatatgaaatatttattaaatttttataattaatctctgctagaaaatttgattaatctttttagtagaattgtttttctcaactaggtttaaacaccac

SEQ ID NO: 2220 - DNA, 635 bp, Artificial
  Mutations within GlyA3B4 introduced by GmGlyA3B4_T02TALE nuclease
gttcatgtacggttgcagatataaacgaagcatagcttatgtatgaggtgtaacaaaattggaaacaatagccatgcaaggtgaagaatgtcaccaactcagaaacccttcttcattgacgtgtccctcactcactctcctctcttcactataaatcgccactcttcgtgttctccacttcaccaaactccttcaaacttattaacactttccttagttcaatatggggaagcccttcttcactctctctctttcttccctttgcttccagcaagttcaacgagtgccaactcaacaacctcaacgcgttggaacccgaccaccgcgttgagtccgaaggtggtcttattgaaacatggaactctcaacaccctgagctgcaatgcgccggtgtcactgtttccaaacgcaccctcaaccgcaacggcctccacttgccatcttactcaccttatccccaaatgatcattgtcgttcaaggtgcgtaatattagtaagaagtatttatcagcttaacgtgataacaataatagtaatatgaaatatttattaaattttttataattaatctctgctagaaaatttgattaatcatttttagtagaatttgtttttctcaactaggtttttaaaca

SEQ ID NO: 2221 - DNA, 584 bp, Artificial
  Mutations within GlyA3B4 introduced by GmGlyA3B4_T02TALE nuclease
gttcatgtacggttgcagatataaacgaagcatagcttatgtatgaggtgtaacaaaattggaaacaatagccatgcaaggtgaagaatgtcaccaactcagaaacccttcttcattgacgtgtccctcactcactctcctctcttcactataaatcgccactcttcgtgttctccacttcaccaactccttcaaacttattaccactccttagttcaatattacctccagcaagttcaacgagtgccaactcaacaacctcaacgcgttggaacccgaccaccgcgttgagtccgaaggtggtcttattgaaacatggaactctcaacaccctgagctgcaatgcgccggtgtcactgtttccaaacgcaccctcaaccgcaacggcctccacttgccatcttactcacccttatccccaaatgatcattgtcgttcaaggtgcgtaatattagtaagaagtatttatcagcttaacgtgataacaataatagtaatatgaaatatttattaaattttttataattaatctctgctagaaaatttgattaatcatttttagtagaatttgtttttctcaacta

SEQ ID NO: 2222 - DNA, 650 bp, Artificial
  Mutations within GlyA3B4 introduced by GmGlyA3B4_T02TALE nuclease
gttcatgtacggttgcagatataaacgaagcatagcttatgtatgaggtgtaacaaaattggaaacaatagccatgcaaggtgaagaatgtcaccaactcagaaacccttcttcattgacgtgtccctcactcactctcctctcttcactataaatcgccactcttcgtgttctccacttcaccaactccttcaaacttattaacactttccttagttcaatatggggaagcccttcttcactctctctctttcttccctttgcttgctactcttgtcgagtgcatattacctccagcaagttcaacgagtgccaactcacaacctcaacgcgttggaacccgaccaccgcgttgagtccgaaggtggtcttattgaaacatggaactctcaacaccctgagctgcaatgcgccggtgtcactgtttccaaacgcaccctcaaccgcaacggcctccacttgccatcttactcaccttatccccaaatgatcattgtcgttcaaggtgcgtaatattagtaagaagtatttatcagcttaacgtgataacaatatagtaatatgaaatatttattaaatttttataattaatctctgctagaaaatttgattaatcattttagtagaatttgttttctcaactaggtttt

SEQ ID NO: 2223 - DNA, 501 bp, Artificial
  Mutations within GlyA3B4 introduced by GmGlyA3B4_T02TALE nuclease
gttcatgtacggttgcagatataaacgaagcatagcttatgtatgaggtgtaacaaaattggaaacaatagccatgcaaggtgaagaatgtcaccaactcagaaacccttcttcattgacgtgtccctcactcactctcctccagcaagttcaacgagtgccaactcaacaacctcaacgcgttggaacccgaccaccgcgttgagtccgaaggtggtcttattgaaacatggaactctcaacaccctgagctgcaatgcgccggtgtcactgtttccaaacgcaccctcaaccgcaacggcctccacttgccatcttactcaccttatccccaaatgatcattgtcgttcaaggtgcgtaatattagtaagaagtatttatcagcttaacgtgataacaataatagtaatatgaaatatttattaaaattttttataattaatctctgctagaaaatttgattaatcattttttagtagaatttgtttttctcaactagg

SEQ ID NO: 2224 - DNA, 662 bp, Artificial; identical to SEQ ID NO: 2196
  Mutations within GlyA3B4 introduced by GmGlyA3B4_T02TALE nuclease

SEQ ID NO: 2225 - DNA, 654 bp, Artificial
  Mutations within GlyA3B4 introduced by GmGlyA3B4_T02TALE nuclease
gttcatgtacggttgcagatataaacgaagcatagcttatgtatgaggtgtaacaaaattggaaacaatagccatgcaaggtgaagaatgtcaccaactcagaaacccttcttcattgacgtgtccctcactcactctcctctcttcactataaatcgccactcttcgtgttctccacttcaccaactccttcaaacttattaacactttccttagttcaatatggggaagcccttcttcactctctctctttcttccctttgcttgctactcttgtcgagtgcatgctattacctccagcaagttcaacgagtgccaactcaacaacctcaacgcgttggaacccgaccaccgcgttgagtccgaaggtggtcttattgaaacatggaactctcaacaccctgagctgcaatgcgccggtgtcactgtttccaaacgcaccctcaaccgcaacggcctccacttgccatcttactcaccttatccccaaatgatcattgtcgttcaaggtgcgtaatattagtaagagtatttatcagcttaacgtgataacaataatagtaatatgaaatatttattaaatttttataattaatctctgctagaaaatttgattaatcattttagtagaatttgttttctcaactaggtttt

SEQ ID NO: 2226 - DNA, 666 bp, Artificial
  Mutations within GlyA3B4 introduced by GmGlyA3B4_T02TALE nuclease
gttcatgtacggttgcagatataaacgaagcatagcttatgtatgaggtgtaacaaaattggaaacaatagccatgcaaggtgaagaatgtcaccaactcagaaacccttcttcattgacgtgtccctcactcactctcctctcttcactataaatcgccactcttcatgttctccacttcaccaactccttcaaacttattaacactttccttagttcaatatggggaagcccttcttcactctctctctttcttccctttgcttgctactcttgtcgagtgcatttgctattacctccagcaagttcaacgagtgccaactcaacaacctcaacgcgttggaacccgaccaccgcgttgagtccgaaggtggtcttattgaaacatggaactctcaacaccctgagctgcaatgcgccggtgtcactgtttccaaacgcaccctcaaccgcaacggcctccacttgccatcttactcaccttatccccaaatgatcattgtcgttcaaggtgcgtaatattagtaagagtatttatcagcttaacgtgataacaatatagtaatatgaaatatttattaaatttttataattaatctctgctagaaaatttgattaatcattttagtagaatttgtttttctcaactaggttttaaacaccaca

SEQ ID NO: 2227 - DNA, 662 bp, Artificial; identical to SEQ ID NO: 2192
  Mutations within GlyA3B4 introduced by GmGlyA3B4_T02TALE nuclease

SEQ ID NO: 2228 - DNA, 660 bp, Artificial
  Mutations within GlyA3B4 introduced by GmGlyA3B4_T02TALE nuclease
gttcatgtacggttgcagatataaacgaagcatagcttatgtatgaggtgtaacaaaattggaaacaatagccatgcaaggtgaagaatgtcaccaactcagaaacccttcttcattgacgtgtccctcactcactctcctctcttcactataaatcgccactcttcgtgttctccacttcaccaactccttcaaacttattaacactttccttagttcaatatggggaagcccttcttcactctctctctttcttccctttgcttgctactcttgtcgagtgcatattacctccagcaagttcaacgagtgccaactcaacaacctcaacgcgttggaacccgaccaccgcgttgagtccgaaggtggtcttattgaaacatggaactctcaacaccctgagctgcaatgcgccggtgtcactgtttccaaacgcaccctcaaccgcaacggcctccacttgccatcttactcaccttatccccaaatgatcattgtcgttcaaggtgcgtaatattagtaagaagtatttatcagcttaacgtgatacaataatagtaatatgaaatatttattaaatttttataattaatctctgctagaaaatttgattaatcattttagtagaatttgttttctcaactaggttttaaaacacca

SEQ ID NO: 2229 - DNA, 661 bp, Artificial; identical to SEQ ID NO: 1694
  Mutations within GlyA3B4 introduced by GmGlyA3B4_T02TALE nuclease

SEQ ID NO: 2230 - DNA, 634 bp, Artificial
  Mutations within GlyA3B4 introduced by GmGlyA3B4_T02TALE nuclease
gttcatgtacggttgcagatataaacgaagcatagcttatgtatgaggtgtaacaaaaattggaaacaatagccatgcaaggtgaagaatgtcaccaactcagaaacccttcttcattgacgtgtccctcactcactctcctctcttcactataaatcgccactcttcgtgttctccacttcaccaactccttcaaacttattaacactttccttagttcaatatggggaagcccttcttcactctctctctttcttccctttgcttgctactcttgtcgagtgcatttacctccagcaagttcaacgagtgccaactcaacaacctcaacgcgttggaacccgaccaccgcgttgagtccgaaggtggtcttattgaaacatggaactctcaacaccctgagctgcaatgcgccggtgtcactgtttccaaacgcaccctcaaccgcaacggcctccacttgccatcttactcaccttatccccaaatgatcattgtcgttcaaggtgcgtaatattagtaagaagtatttatcagcttaacgtgataacaataatagtaatatgaaatatttattaaatttttataattaatctctgctagaaaatttgattaatcattttagtagaatttg

SEQ ID NO: 2231 - DNA, 516 bp, Artificial
  Mutations within GlyA3B4 introduced by GmGlyA3B4_T02TALE nuclease
gttcatgtacggttgcagatataaacgaagcatagcttatgtatgaggtgtaacaaaattggaaacaatagccatgcaaggtgaagaatgtcaccaactcagaaacccttcttcattgacgtgtccctcactcactctcctctcttcactataaatcgccactcttcgtgttctccacttcaccaactccttcaaacttattaacaacctcaacgcgttggaacccgaccaccgcgttgagtccgaaggtggtcttattgaaacatggaactctcaacaccctgagctgcaatgcgccggtgtcactgtttccaaacgcaccctcaaccgcaacggcctccacttgccatcttactcaccttatccccaaatgatcatctcgttctcaaggtgcgtaatattagtaagaagtatttatcagcttaacgtgataacaataatagtaatatgaaatatttattaaattttttataattaatctctgctagaaaatttgattaatcatttttagtagaa

SEQ ID NO: 2232 - DNA, 631 bp, Artificial
  Mutations within GlyA3B4 introduced by GmGlyA3B4_T02TALE nuclease
gttcatgtacggttgcagatataaacgaagcatagcttatgtatgaggtgtaacaaaattggaaacaatagccatgcaaggtgaagaatgtcaccaactcagaaacccttcttcattgacgtgtccctcactcactctcctctcttcactataaatcgccactcttcgtgttctccacttcaccaactccttcaaacttattaacactttccttagttcaatatggggaagcccttcttcactctctctctttcttccctttgcttgctactcttgtcgagtgcatacctccagcaagttcaacgagtgccaactcaacaacctcaacgcgttggaacccgaccaccgcgttgagtccgaaggtggtcttattgaaacatggaactctcaacaccctgagctgcaatgcgccggtgtcactgtttccaaacgcaccctcaaccgcaacggcctccacttgccatcttactcaccttatccccaaatgatcattgtcgttcaaggtgcgtaatattagtaagaagtatttatcagcttaacgtgataacaataatagtaatatgaaatatttattaaatttttataattaatctctgctagaaaatttgattaatcattttagtagaatttg

SEQ ID NO: 2233 - DNA, 666 bp, Artificial
  Mutations within GlyA3B4 introduced by GmGlyA3B4_T02TALE nuclease
gttcatgtacggttgcagatataaacgaagcatagcttatgtatgaggtgtaacaaaattggaaacaatagccatgcaaggtgaagaatgtcaccaactcagaaacccttcttcattgacgtgtccctcactcactctcctctcttcactataaatcgccactcttcgtgttctccacttcaccaaactccttcaaacttattaacactttccttagttcaatatggggaagcccttcttcactctctctctttcttccctttgcttgctactcttgtcgagtgcatctattacctccagcaagttcaacgagtgccaactcaacaacctcaacgcgttggaacccgaccaccgcgttgagtccgaaggtggtcttattgaaacatggaactctcaacaccctgagctgcaatgcgccggtgtcactgtttccaaacgcaccctcaaccgcaacggcctccacttgccatcttactcaccttatccccaaatgatcattgtcgttcaaggtgcgtaatattagtaagaagtatttatcagcttaacgtgataacaataatagtaatatgaaatatttattaaatttttataattaatctctgctagaaaatttgattaatcattttagtagaatttgtttttctcaactaggtttttaaaacacca

SEQ ID NO: 2234 - DNA, 631 bp, Artificial; identical to SEQ ID NO: 2232
  Mutations within GlyA3B4 introduced by GmGlyA3B4_T02TALE nuclease

SEQ ID NO: 2235 - DNA, 530 bp, Artificial
  Mutations within GlyA3B4 introduced by GmGlyA3B4_T02TALE nuclease
gttcatgtacggttgcagatataaacgaagcatagcttatgtatgaggtgtaacaaaattggaaacaatagccatgcaaggtgaagaatgtcaccaactcagaaacccttcttcattgacgtgtccctcactcactctcctctcttcactataaatcgccactcttcgtgttctccacttcaccaactccttcaaacttattaacaacctcaacgcgttggaacccgaccaccgcgttgagtccgaaggtggtcttattgaaacatggaactctcaacaccctgagctgcaatgcgccggtgtcactgtttccaaacgcaccctcaaccgcaacggcctccacttgccatcttactcaccttatccccaaatgatcatgctcgttctcaaggtgcgtaatattagtaagaagtatttatcagcttaacgtgataacaataatagtaatatgaaatatttattaaattttttataattaatctctgctagaaaatttgattaatcatttttagtagaatttgttttttctc

SEQ ID NO: 2236 - DNA, 653 bp, Artificial
  Mutations within GlyA3B4 introduced by GmGlyA3B4_T02TALE nuclease
gttcatgtacggttgcagatataaacgaagcatagcttatgtatgaggtgtaacaaaattggaaacaatagccatgcaaggtgaagaatgtcaccaactcagaaacccttcttcattgacgtgtccctcactcactctcctctcttcactataaatcgccactcttcgtgttctccacttcaccaactccttcaaacttattaacactttccttagttcaatatggggaagcccttcttcactctctctctttcttccctttgcttgctactcttgtcgagtgattacctccagcaagttcaacgagtgccaactcaacaacctcaacgcgttggaacccgaccaccgcgttgagtccgaaggtggtcttattgaaacatggaactctcaacaccctgagctgcaatgcgccggtgtcactgtttccaaacgcaccctcaaccgcaacggcctccacttgccatcttactcaccttatccccaaatgatcattgtcgttcaaggtgcgtaatattagtaagaagtatttatcagcttaacgtgataacaataatagtaatatgaaatatttattaaatttttataattaatctctgctagaaaatttgattaatcattttagtagaatttgttttctcaactaggttttaaaa

SEQ ID NO: 2237 - DNA, 667 bp, Artificial
  Mutations within GlyA3B4 introduced by GmGlyA3B4_T02TALE nuclease
  misc_feature (531): n is a or c or t or g
gttcatgtacggttgcagatataaacgaagcatagcttatgtatgaggtgtaacaaaattggaaacaatagccatgcaaggtgaagaatgtcaccaactcagaaacccttcttcattgacgtgtccctcactcactctcctctcttcactataaatcgccactcttcgtgttctccacttcaccaactccttcaaacttattaacactttccttagttcaatatggggaagcccttcttcactctctctctttcttccctttgcttgctactcttgtcgagtgcatgctattacctccagcaagttcaacgagtgccaactcaacaacctcaacgcgttggaacccgaccaccgcgttgagtccgaaggtggtcttattgaaacatggaactctcaacaccctgagctgcaatgcgccggtgtcactgtttccaaacgcaccctcaaccgcaacggcctccacttgccatcttactcaccttatccccaaatgatcattgtcgttcaaggtgcgtaatattagtaagaagnatttatcagcttaacgtgataacaataatagtaatatgaaaatatttattaaatttttataattaatctctgctagaaaatttgattaatcattttagtagaatttgtttttctcaactaggtttttaaaacacca

SEQ ID NO: 2238 - DNA, 645 bp, Artificial
  Mutations within GlyA3B4 introduced by GmGlyA3B4_T02TALE nuclease
  misc_feature (543): n is a or c or t or g
gttcatgtacggttgcagatataaacgaagcatagcttatgtatgaggtgtaacaaaattggaaacaatagccatgcaaggtgaagaatgtcaccaactcagaaacccttcttcattgacgtgtccctcactcactctcctctcttcactataaatcgccactcttcgtgttctccacttcaccaactccttcaaacttattaacactttccttagttcaatatggggaagcccttcttcactctctctctttcttccctttgctattacctccagcaagttcaacgagtgccaactcaacaacctcaacgcgttggaacccgaccaccgcgttgagtccgaaggtggtcttattgaaacatggaactctcaacaccctgagctgcaatgcgccggtgtcactgtttccaaacgcaccctcaaccgcaacggcctccacttgccatcttactcaccttatccccaaatgatcattgtcgttcaaggtgcgtaatattagtaagaagtatttatcagcttaacgtgataacaataatagtaatntgaaatatttattaaattttttataattaatctctgctagaaaatttgattaatcatttttagtagaatttgttttttctcaactaggttttaaacaccaca

SEQ ID NO: 2239 - DNA, 626 bp, Artificial
  Mutations within GlyA3B4 introduced by GmGlyA3B4_T02TALE nuclease
gttcatgtacggttgcagatataaacgaagcatagcttatgtatgaggtgtaacaaaattggaaacaatagccatgcaaggtgaagaatgtcaccaactcagaaacccttcttcattgacgtgtccctcactcactctcctctcttcactataaatcgccactcttcgtgttctccacttcaccaactccttcaaacttattaacactttccttagttcaatatggggaagcccttcttcactctctctctttcttccctttgcttgctactcttgtcgagtgccaactcaacaacctcaacgcgttggaacccgaccaccgcgttgagtccgaaggtggtcttattgaaacatggaactctcaacaccctgagctgcaatgcgccggtgtcactgtttccaaacgcaccctcaaccgcaacggcctccacttgccatcttactcaccttatccccaaatgatcattgtcgttcaaggtgcgtaatattagtaagaagtatttatcagcttaacgtgataacaataatagtaatatgaaatatttattaaattttttataattaatctctgctagaaaatttgattaatcatttttagtagaatttgtttttctcaactaggtttt

SEQ ID NO: 2240 - DNA, 427 bp, Artificial
  Mutations within GlyA3B4 introduced by GmGlyA3B4_T02TALE nuclease
gttcatgtacggttgcagatataaacgaagcatagcttatgtatgaggtgtaacaaaattggaaacaatagccatgcaaggtgaagaatgtcaccaactcagaaacccttcttcattgacgtgtccctcactcactctcctctcttcactataaatcgccactcttcgtgttctccacttcaccaactccttcaaacgcaccctcaaccgcaacggcctccacttgccatcttactcaccttatccccaaatgatcattgtcgttcaaggtgcgtaatattagtaagaagtatttatcagcttaacgtgataacaataatagtaatatgaaatatttattaaattttttataattaatctctgctagaaaatttgattaatcattttttagtagaatttgtttttctcaactaggttttaaacacca

SEQ ID NO: 2241 - DNA, 663 bp, Artificial
  Mutations within GlyA3B4 introduced by GmGlyA3B4_T02TALE nuclease
gttcatgtacggttgcagatataaacgaagcatagcttatgtatgaggtgtaacaaaattggaaacaatagccatgcaaggtgaagaatgtcaccaactcagaaacccttcttcattgacgtgtccctcactcactctcctctcttcactataaatcgccactcttcgtgttctccacttcaccaactccttcaaacttattaacactttccttagttcaatatggggaagcccttcttcactctctctctttcttccctttgcttgctactcttgtcgagtgcatgctattacctccagcaagttcaacgagtgccaactcaacaacctcaacgcgttggaacccgaccaccgcgttgagtccgaaggtggtcttattgaaacatggaactctcaacaccctgagctgcaatgcgccggtgtcactgtttccaaacgcaccctcaaccgcaacggcctccacttgccatcttactcaccttatccccaaatgatcattgtcgttcaaggtgcgtaatattagtaagagtatttatcagcttaacgtgataacaataatagtaatatgaaatatttattaaatttttataattaatctctgctagaaaatttgattaatcattttagtagaatttgttttctcaactaggttttaaaacacca

SEQ ID NO: 2242 - DNA, 618 bp, Artificial
  Mutations within GlyA3B4 introduced by GmGlyA3B4_T02TALE nuclease
gttcatgtacggttgcagatataaacgaagcatagcttatgtatgaggtgtaacaaaattggaaacaatagccatgcaaggtgaagaatgtcaccaactcagaaacccttcttcattgacgtgtccctcactcactctcctctcttcactataaatcgccactcttcgtgttctccacttcaccaactccttcaaacttattaacactttccttagttcaatatggggaagcccttcttcactctctctctttcttccctttgcttgctactcttgtcgagttgctattacctccagcaagttcaacgagtgccaactcaacaacctcaacgcgttggaacccgaccaccgcgttgagtccgaaggtggtcttattgaaacatggaactctcaacaccctgagctgcaatgcgccggtgtcactgtttccaaacgcaccctcaaccgcaacggcctccacttgccatcttactcaccttatccccaaatgatcattgtcgttcaaggtgcgtaatattagtaagaagtatttatcagcttaacgtgataacaatatagtaatatgaaatatttattaaatttttataattaatctctgctagaaaatttgattaatca

SEQ ID NO: 2243 - DNA, 423 bp, Artificial
  Mutations within GlyA3B4 introduced by GmGlyA3B4_T02TALE nuclease
gttcatgtacggttgcagatataaacgaagcatagcttatgtatgaggtgtaacaaaattggaaacaatagccatgcaaggtgaagaatgtcaccaactcagaaacccttcttcattgacgtgtccctcactcactctcctctcttcactataaatcgccactcttcgtgttctccacttcaccaactccttcaaacgcaccctcaaccgcaacggcctccacttgccatcttactcaccttatccccaaatgatcattgtcgttcaaggtgcgtaatattagtaagaagtatttatcagcttaacgtgataacaataatagtaatatgaaatatttattaaattttttataattaatctctgctagaaatttgattaatcattttttagtagaatttgtttttctcaactaggttttaaaca

SEQ ID NO: 2244 - DNA, 630 bp, Artificial
  Mutations within GlyA3B4 introduced by GmGlyA3B4_T02TALE nuclease
gttcatgtacggttgcagatataaacgaagcatagcttatgtatgaggtgtaacaaaattggaaacaatagccatgcaaggtgaagaatgtcaccaactcagaaacccttcttcattgacgtgtccctcactcactctcctctcttcactataaatcgccactcttcgtgttctccacttcaccaactccttcaaacttattaacactttccttagttcaatatggggaagcccttcttcactctctctctttcttccctttgcttgctactcttgtcgagttgctatacctcagcagttcaacgagtgccaactcacaacctcatcgacgtggaacccagaccactgcagttgcagtcccgaacggtggttcttattgcaaacgatggaactctttcaaacagccctgagcactgcaatgcgccaggtgtcactggtttccaaacgcacccttcaaccgcaacgcctccacttgccatcttatctcaccttatccccaaatgatccattgtcgttcaatggtgtcggtaatattaagtaagaagatattattcagcttaacgtgataacaataatagtaatatgaaatatttattaaatttttataattaatctctgctagaaaatttg

SEQ ID NO: 2245 - DNA, 647 bp, Artificial
  Mutations within GlyA3B4 introduced by GmGlyA3B4_T02TALE nuclease
gttcatgtacggttgcagatataaacgaagcatagcttatgtatgaggtgtaacaaaattggaaacaatagccatgcaaggtgaagaatgtcaccaactcagaaacccttcttcattgacgtgtccctcactcactctcctctcttcactataaatcgccactcttcgtgttctccacttcaccaactccttcaaacttattaacactttccttagttcaatatggggaagcccttcttcactctctctctttcttccctttgcttgctactcttgtcgagtgcatgtacctccagcaagttcaacgagtgccaactcaacaacctcaacgcgttggaacccgaccaccgcgttgagtccgaaggtggtcttattgaaacatggaactctcaacaccctgagctgcaatgcgccggtgtcactgtttccaaacgcaccctcaaccgcaacggcctccacttgccatcttactcaccttatccccaaatgatcattgtcgttcaaggtgcgtaatattagtaagaagtatttatcagcttaacgtgataacaataatagtaatatgaaatatttattaaatttttataattaatctctgctagaaaatttgattaatcattttagtagaatttgttttctcaactagg

SEQ ID NO: 2246 - DNA, 656 bp, Artificial
  Mutations within GlyA3B4 introduced by GmGlyA3B4_T02TALE nuclease
gttcatgtacggttgcagatataaacgaagcatagcttatgtatgaggtgtaacaaaattggaaacaatagccatgcaaggtgaagaatgtcaccaactcagaaacccttcttcattgacgtgtccctcactcactctcctctcttcactataaatcgccactcttcgtgttctccacttcaccaactccttcaaacttattaacactttccttagttcaatatggggaagcccttcttcactctctctctttcttccctttgcttgctactcttgtcgagtgcttattacctccagcaagttcaacgagtgccaactcaacaacctcaacgcgttggaacccgaccaccgcgttgagtccgaaggtggtcttattgaaacatggaactctcaacaccctgagctgcaatgcgccggtgtcactgtttccaaacgcaccctcaaccgcaacggcctccacttgccatcttactcaccttatccccaaatgatcattgtcgttcaaggtgcgtaatattagtaagaagtatttatcagcttaacgtgataacaataatagtaatatgaaatatttattaaatttttataattaatctctgctagaaaatttgattaatcattttagtagaatttgttttctcaactaggttttaaaa

SEQ ID NO: 2247 - DNA, 648 bp, Artificial
  Mutations within GlyA3B4 introduced by GmGlyA3B4_T02TALE nuclease
gttcatgtacggttgcagatataaacgaagcatagcttatgtatgaggtgtaacaaaattggaaacaatagccatgcaaggtgaagaatgtcaccaactcagaaacccttcttcattgacgtgtccctcactcactctcctctcttcactataaatcgccactcttcgtgttctccacttcaccaactccttcaaacttattaacactttccttagttcaatatggggaagcccttcttcactctctctctttcttccctttgcttgctactcttgtcgagtgcaacgagtgccaactcaacaacctcaacgcgttggaacccgaccaccgcgttgagtccgaaggtggtcttattgaaacatggaactctcaacaccctgagctgcaatgcgccggtgtcactgtttccaaacgcaccctcaaccgcaacggcctccacttgccatcttactcaccttatccccaaatgatcattgtcgttcaaggtgcgtaatattagtaagaagtatttatcagcttaacgtgataacaataatagtaatatgaaatatttattaaattttttataaattaatctctgctagaaaatttgattaatcatttttagtagaatttgttttttctcaactaggttttaaaacaccaca

SEQ ID NO: 2248 - DNA, 527 bp, Artificial
  Mutations within GlyA3B4 introduced by GmGlyA3B4_T02TALE nuclease
gttcatgtacggttgcagatataaacgaagcatagcttatgtatgaggtgtaacaaaattggaaacaatagccatgcaaggtgaagaatgtcaccaactcagaaacccttcttcattgacgtgtccctcactcactctcctctcttcactataaatcgccactcttcgtgttctccacttcaccaactccttcaacgcgttggaacccgaccaccgcgttgagtccgaaggtggtcttattgaaacatggaactctcaacaccctgagctgcaatgcgccggtgtcactgtttccaaacgcaccctcaaccgcaacggcctccacttgccatcttactcaccttatccccaaatgatcattgtcgttcaaggtgcgtaatattagtaagaagtattttatcagcttaacgtgataacaataatagtaatatgaaatatttattaaattttttataattaatctctgctagaaaatttgattaatcatttttagtagaatttgtttttctcaactaggtttaaacacc

SEQ ID NO: 2249 - DNA, 760 bp, Artificial
  Mutations within GlyA3B4 introduced by GmGlyA3B4_T02TALE nuclease
gttcatgtacggttgcagatataaacgaagcatagcttatgtatgaggtgtaacaaaattggaaacaatagccatgcaaggtgaagaatgtcaccaactcagaaacccttcttcattgacgtgtccctcactcactctcctctcttcactataaatcgccactcttcgtgttctccacttcaccaactccttcaaacttattaacactttccttagttcaatatggggaagcccttcttcactctctctctttcttccctttgcttgctactcttgtcgagtgcatgcttgaccccggagcaggtggtggccatcgccagccacgatggcggcaagcaggcgctggagacggtccagcggctgttgccggtgctgtgccattgctattacctccagcaagttcaacgagtgccaactcaacacctcaacgcgttggaacccgaccaccgcgttgagtccgaaggtggtcttattgaaacatggaactctcaacaccctgagctgcaatgcgccggtgtcactgtttccaaacgcaccctcaaccgcaacggcctccacttgccatcttactcaccttatccccaaatgatcattgtcgttcaaggtgcgtaatattagtaagaagtatttatcgcttaacgtgataacaataatagtaatatgaaaatatttattaaattttttataattaatctctgctagaaaatttgataatcaatttttagtagaatttgtttttctcaactaggtttaaacacca

SEQ ID NO: 2250 - DNA, 638 bp, Artificial
  Mutations within GlyA3B4 introduced by GmGlyA3B4_T02TALE nuclease
gttcatgtacggttgcagatataaacgaagcatagcttatgtatgaggtgtaacaaaattggaaacaatagccatgcaaggtgaagaatgtcaccaactcagaaacccttcttcattgacgtgtccctcactcactctcctctcttcactataaatcgccactcttcgtgttctccacttcaccaactccttcaaacttattaacactttccttagttcaatatggggaagcccttcttcactctctctctttcttccctttgcttgctactcttgtcgagtgtcaactcaacaacctcaacgcgttggaacccgaccaccgcgttgagtccgaaggtggtcttattgaaacatggaactctcaacaccctgagctgcaatgcgccggtgtcactgtttccaaacgcaccctcaaccgcaacggcctccacttgccatcttactcaccttatccccaaatgatcattgtcgttcaaggtgcgtaatattagtaagaagtatttatcagcttaacgtgataacaataatagtaatatgaaatatttattaaattttttataaattaatctctgctagaaaatttgattaatcatttttagtagaatttgttttttctcaactaggtttaaaacaccaca

SEQ ID NO: 2251 - DNA, 660 bp, Artificial
  Mutations within GlyA3B4 introduced by GmGlyA3B4_T02TALE nuclease
gttcatgtacggttgcagatataaacgaagcatagcttatgtatgaggtgtaacaaaattggaaacaatagccatgcaaggtgaagaatgtcaccaactcagaaacccttcttcattgacgtgtccctcactcactctcctctcttcactataaatcgccactcttcgtgttctccacttcaccaactccttcaaacttattaacactttccttagttcaatatggggaagcccttcttcactctctctctttcttccctttgcttgctactcttgtcgagtgcatgaacctccagcaagttcaacgagtgccaactcaacaacctcaacgcgttggaacccgaccaccgcgttgagtccgaaggtggtcttattgaaacatggaactctcaacaccctgagctgcaatgcgccggtgtcactgtttccaaacgcaccctcaaccgcaacggcctccacttgccatcttactcaccttatccccaaatgatcattgtcgttcaaggtgcgtaatattagtaagaagtatttatcagcttaacgtgataacaataatagtaatatgaaatatttattaaatttttataattaatctctgctagaaaatttgattaatcattttagtagaatttgttttctcaactaggttttaaaacacca

SEQ ID NO: 2252 - DNA, 540 bp, Artificial
  Mutations within GlyA3B4 introduced by GmGlyA3B4_T02TALE nuclease
gttcatgtacggttgcagatataaacgaagcatagcttatgtatgaggtgtaacaaaattggaaacaatagccatgcaaggtgaagaatgtcaccaactcagaaacccttcttcattgacgtgtccctcactcactctcctctcttcactataaatcgccactcttcgtgttctccacttcaccaactccttcaaacttattaacactttccttagttcaatatggggaagcccttcttcactctctctctttcttccctttgcttgctactcttgtcgagtgcaatgcgccggtgtcactgtttccaaacgcaccctcaaccgcaacggcctccacttgccatcttactcaccttatccccaaatgatcattgtcgttcaaggtgcgtaatattagtaagaagtatttatcagcttaacgtgataacaataatagtaatatgaaatatttattaaattttttataattaatctctgctagaaaatttgattaatcatttttagtagaatttgtttttctcaactaggtttttaaacacc

SEQ ID NO: 2253 - DNA, 655 bp, Artificial
  Mutations within GlyA3B4 introduced by GmGlyA3B4_T02TALE nuclease
gttcatgtacggttgcagatataaacgaagcatagcttatgtatgaggtgtaacaaaattggaaacaatagccatgcaaggtgaagaatgtcaccaactcagaaaccccttcttcattgacgtgtccctcactcactctcctctcttcactataaatcgccactcttcgtgttctccacttcaccaactccttcaaacttattaacactttccttagttcaatatggggaagcccttcttcactctctctctttcttccctttgcttgctactcttgtcgagtgcatctattacctccagcaagttcaacgagtgccaactcaacaacctcaacgcgttggaacccgaccaccgcgttgagtccgaaggtggtcttattgaaacatggaactctcaacaccctgagctgcaatgcgccggtgtcactgtttccaaacgcaccctcaaccgcaacggcctccacttgccatcttactcaccttatccccaaatgatcattgtcgttcaaggtgcgtaatattagtaagaagtatttatcagcttaacgtgataacaataatagtaatatgaaatatttattaaatttttataattaatctctgctagaaaatttgattaatcattttagtagaatttgttttctcaactaggtttt

SEQ ID NO: 2254 - DNA, 650 bp, Artificial
  Mutations within GlyA3B4 introduced by GmGlyA3B4_T02TALE nuclease
gttcatgtacggttgcagatataaacgaagcatagcttatgtatgaggtgtaacaaaattggaaacaatagccatgcaaggtgaagaatgtcaccaactcagaaacccttcttcattgacgtgtccctcactcactctcctctcttcactataaatcgccactcttcgtgttctccacttcaccaactccttcaaacttattaacactttccttagttcaatatggggaagcccttcttcactctctctctttcttccctttgcttgctactcttgtcgagtgcatgctttacctccagcaagttcaacgagtgccaactcaacaacctcaacgcgttggaacccgaccaccgcgttgagtccgaaggtggtcttattgaaacatggaactctcaacaccctgagctgcaatgcgccggtgtcactgtttccaaacgcaccctcaaccgcaacggcctccacttgccatcttactcaccttatccccaaatgatcattgtcgttcaaggtgcgtaatattagtaagaagtatttatcagcttaacgtgataacaataatagtaatatgaaatatttattaaatttttataattaatctctgctagaaaatttgattaatcattttagtagaatttgttttctcaactagg

SEQ ID NO: 2255 - DNA, 657 bp, Artificial
  Mutations within GlyA3B4 introduced by GmGlyA3B4_T02TALE nuclease
gttcatgtacggttgcagatataaacgaagcatagcttatgtatgaggtgtaacaaaattggaaacaatagccatgcaaggtgaagaatgtcaccaactcagaaacccttcttcattgacgtgtccctcactcactctcctctcttcactataaatcgccactcttcgtgttctccacttcaccaactccttcaaacttattaacactttccttagttcaatatggggaagcccttcttcactctctctctttcttccctttgcttgctactcttgtcgagtgcatacctccagcaagttcaacgagtgccaactcaacaacctcaacgcgttggaacccgaccaccgcgttgagtccgaaggtggtcttattgaaacatggaactctcaacaccctgagctgcaatgcgccggtgtcactgtttccaaacgcaccctcaaccgcaacggcctccacttgccatcttactcaccttatccccaaatgatcattgtcgttcaaggtgcgtaatattagtaagaagtatttatcagcttaacgtgataacaatatagtaatatgaaatatttattaaatttttataattaatctctgctagaaaatttgattaatcattttagtagaatttgttttctcaactaggttttaaaacacca

SEQ ID NO: 2256 - DNA, 582 bp, Artificial; identical to SEQ ID NO: 1832
  Mutations within GlyA3B4 introduced by GmGlyA3B4_T02TALE nuclease

SEQ ID NO: 2257 - DNA, 659 bp, Artificial; identical to SEQ ID NO: 1853
  Mutations within GlyA3B4 introduced by GmGlyA3B4_T02TALE nuclease

SEQ ID NO: 2258 - DNA, 662 bp, Artificial; identical to SEQ ID NO: 2192
  Mutations within GlyA3B4 introduced by GmGlyA3B4_T02TALE nuclease

SEQ ID NO: 2259 - DNA, 398 bp, Artificial
  Mutations within GlyA3B4 introduced by GmGlyA3B4_T02TALE nuclease
gttcatgtacggttgcagatataaacgaagcatagcttatgtatgaggtgtaacaaaattggaaacaatagccatgcaaggtgaagaatgtcaccaactcagaaacccttcttcattgacgtgtccctcactcactctcctctcttcactataaatcgccactcttcgtgttctccacttcaccaactccttcaaacttattaacactttccttagttcaatatggggaagcccttcttcactctctctctttcttccctttgctattacctccagcaagttcaacgagtgccaactcaacaacctcaacgcgttggaacccgaccaccgcgttgagtccgaaggtggtcttattgaaacatggaactctcaacaccctgagctgcaatgcgccggtg

SEQ ID NO: 2260 - DNA, 427 bp, Artificial
  Mutations within GlyA3B4 introduced by GmGlyA3B4_T02TALE nuclease
gttcatgtacggttgcagatataaacgaagcatagcttatgtatgaggtgtaacaaaattggaaacaatagccatgcaaggtgaagaatgtcaccaactcagaaacccttcttcaccgcgttgagtccgaaggtggtcttattgaaacatggaactctcaacaccctgagctgcaatgcgccggtgtcactgtttccaaacgcacccctcaaccgcaacggcctccacttgccatcttactcaccttatccccaaatgatcattgtcgttcaaggtgcgtaatattagtaagaagtatttatcagcttaacgtgataacaataatagtaatatgaaatatttattaaattttttataattaatctctgctagaaaatttgattaatcatttttagtagaattttgtttttctcaactaggttttaaa

SEQ ID NO: 2261 - DNA, 658 bp, Artificial
  Mutations within GlyA3B4 introduced by GmGlyA3B4_T02TALE nuclease
gttcatgtacggttgcagatataaacgaagcatagcttatgtatgaggtgtaacaaaattggaaacaatagccatgcaaggtgaagaatgtcaccaactcagaaacccttcttcattgacgtgtccctcactcactctcctctcttcactataaatcgccactcttcgtgttctccacttcaccaactccttcaaacttattaacactttccttagttcaatatggggaagcccttcttcactctctctctttcttccctttgcttgctactcttgtcgagtgcttacctccagcaagttcaacgagtgccaactcaacaacctcaacgcgttggaacccgaccaccgcgttgagtccgaaggtggtcttattgaaacatggaactctcaacaccctgagctgcaatgcgccggtgtcactgtttccaaacgcaccctcaaccgcaacggcctccacttgccatcttactcaccttatccccaaatgatcattgtcgttcaaggtgcgtaatattagtaagaagtatttatcagcttaacgtgataacaataatagtaatatgaaatatttattaaatttttataattaatctctgctagaaaatttgattaatcattttagtagaatttgttttctcaactaggttttaaaacacca

SEQ ID NO: 2262 - DNA, 576 bp, Artificial
  Mutations within GlyA3B4 introduced by GmGlyA3B4_T02TALE nuclease
gttcatgtacggttgcagatataaacgaagcatagcttatgtatgaggtgtaacaaaattggaaacaatagccatgcaaggtgaagaatgtcaccaactcagaaacccttcttcattgacgtgtccctcactcactctcctctcttcactataaatcgccactcttcgtgttctccacttcaccaactccttcagcaagttcaacgagtgccaactcaacaacctcaacgcgttggaacccgaccaccgcgttgagtccgaaggtggtcttattgaaacatggaactctcaacaccctgagctgcaatgcgccggtgtcactgtttccaaacgcaccctcaaccgcaacggcctccacttgccatcttactcaccttatcccccaaatgatcattgtcgttcaaggtgcgtaatattagtaagaagtatttatcagcttaacgtgataacaataatagtaatatgaaatatttattaaattttttataattaatctctgctagaaaatttgattaatcatttttagtagaatttgtttttctcaactaggtttttaaacaccacactgagacccaa

SEQ ID NO: 2263 - DNA, 598 bp, Artificial
  Mutations within GlyA3B4 introduced by GmGlyA3B4_T02TALE nuclease
gttcatgtacggttgcagatataaacgaagcatagcttatgtatgaggtgtaacaaaattggaaacaatagccatgcaaggtgaagaatgtcaccaactcagaaacccttcttcattgacgtgtccctcactcactctcctctcttcactataaatcgccactcttcgtgttctccacttcaccaactccttcaaacttattaacactttccttagttcaatatggggaagcccttcaaaactctctctctttcaacgagtgccaactcaacaacctcaacgcgttggaacccgaccaccgcgttgagtccgaaggtggtcttattgaaacatggaactctcaacaccctgagctgcaatgcgccggtgtcactgtttccaaacgcaccctcaaccgcaacggcctccacttgccatcttactcaccttatccccaaaatgatcattgtcgttcaaggtgcgtaatattagtaagaagtatttatcagcttaacgtgataacaataatagtaatatgaaatatttattaaattttttataattaatctctgctagaaaatttgattaatcatttttagtagaatttgtttttctcaac

SEQ ID NO: 2264 - DNA, 674 bp, Artificial
  Mutations within GlyA3B4 introduced by GmGlyA3B4_T02TALE nuclease
gttcatgtacggttgcagatataaacgaagcatagcttatgtatgaggtgtaacaaaattggaaacaatagccatgcaaggtgaagaatgtcaccaactcagaaacccttcttcattgacgtgtccctcactcactctcctctcttcactataaatcgccactcttcgtgttctccacttcaccaactccttcaaacttattaacactttccttagttcaatatggggaagcccttcttcactctctctctttcttccctttgcttgctactcttgtcgagtgcattgcttataatcctccacgcaagttcaaatcagagtgccacctacaatcaacctcaaccagcgttggaacccgaccaccgcgttgagtccgaaggtggtcttattgaaacatggaactctcaacaccctgagctgcaatgcgccggtgtcactgtttccaaacgcaccctcaaccgcaacggcctccacttgccatcttactcaccttatccccaaatgatcattgtcgttcaaggtgcgtaatattagtaagaagtatttatcagcttaacgtgataacaatatagtaatatgaaatatttattaaatttttataattaatctctgctagaaaatttgattaatcattttagtagaatttgtttttctcaactaggttttaaacacca

SEQ ID NO: 2265 - DNA, 503 bp, Artificial
  Mutations within GlyA3B4 introduced by GmGlyA3B4_T02TALE nuclease
gttcatgtacggttgcagatataaacgaagcatagcttatgtatgaggtgtaacaaaattggaaacaatagccatgcaaggtgaagaatgtcaccaactcagaaacccttcttcattgacgtgtccctcactcactctcctctcttcactataaatcgccactcttcgtgttctccacttcaccaactccttcaaacttattaacactttccttagttcaatatggggaagcccttcttcactctctctctttcttccctttgcttgctactcttgtcgagtgcattctcaacaccctgagctgcaatgcgccggtgtcactgtttccaaacgcaccctcaaccgcaacggcctccacttgccatcttactcaccttatcccccaaatgatcattgtcgttcaaggtgcgtaatattagtaagaagtatttatcagcttaacgtgataacaataatagtaatatgaaatatttattaaattttttataattaatctctgctag

SEQ ID NO: 2266 - DNA, 586 bp, Artificial
  Mutations within GlyA3B4 introduced by GmGlyA3B4_T02TALE nuclease
gttcatgtacggttgcagatataaacgaagcatagcttatgtatgaggtgtaacaaaattggaaacaatagccatgcaaggtgaagaatgtcaccaactcagaaacccttcttcattgacgtgtccctcactcactctcctctcttcactataaatcgccactcttcgtgttctccacttcaccaactccttcaaacttattaacactttccttagttcaatatggggaagcccttcttcactctcaacaacctcaacgcgttggaacccgaccaccgcgttgagtccgaaggtggtcttattgaaacatggaactctcaacaccctgagctgcaatgcgccggtgtcactgtttccaaacgcaccctcaaccgcaacggcctccacttgccatcttactcaccttatccccaaatgatcattgtcgttcaaggtgcgtaatattagtaagaagtatttatcagcttaacgtgataacaataatagtaatatgaaatatttattaaatttttttataattaatctctgctagaaaatttgattaatcatttttagtagaatttgtttttctcaactaggttttaaa

SEQ ID NO: 2267 - DNA, 652 bp, Artificial
  Mutations within GlyA3B4 introduced by GmGlyA3B4_T02TALE nuclease
gttcatgtacggttgcagatataaacgaagcatagcttatgtatgaggtgtaacaaaattggaaacaatagccatgcaaggtgaagaatgtcaccaactcagaaacccttcttcattgacgtgtccctcactcactctcctctcttcactataaatcgccactcttcgtgttctccacttcaccaactccttcaaacttattaacactttccttagttcaatatggggaagcccttcttcactctctctctttcttccctttgcttgctactcttgtcgagtgcatgcttacctccagcaagttcaacgagtgccaactcaacaacctcaacgcgttggaacccgaccaccgcgttgagtccgaaggtggtcttattgaaacatggaactctcaacaccctgagctgcaatgcgccggtgtcactgtttccaaacgcaccctcaaccgcaacggcctccacttgccatcttactcaccttatccccaaatgatcattgtcgttcaaggtgcgtaatattagtaagaagtatttatcagcttaacgtgataacaatatagtaatatgaaatatttattaaatttttataattaatctctgctagaaaatttgattaatcattttagtagaatttgttttctcaactaggtttt

SEQ ID NO: 2268 - DNA, 566 bp, Artificial; identical to SEQ ID NO: 1766
  Mutations within GlyA3B4 introduced by GmGlyA3B4_T02TALE nuclease

SEQ ID NO: 2269 - DNA, 693 bp, Artificial
  Mutations within GlyA3B4 introduced by GmGlyA3B4_T02TALE nuclease
gttcatgtacggttgcagatataaacgaagcatagcttatgtatgaggtgtaacaaaattggaaacaatagccatgcaaggtgaagaatgtcaccaactcagaaacccttcttcattgacgtgtccctcactcactctcctctcttcactataaatcgccactcttcgtgttctccacttcaccaactccttcaaacttattaacactttccttagttcaatatggggaagcccttcttcactctctctctttcttccctttgcttgctactcttgtcgagtgcatgcgcctgcttgccaccattattgctggcgatggccaccacctgctgctattacctccagcaagttcaacgagtgccaactcaacaacctcaacgcgttggaaccccgaccaccgcgttgagtccgaaggtggtcttattgaaacatggaactctcaacaccctgagctgcaatgcgccggtgtcactgtttccaaacgcaccctcaaccgcaacggcctccacttgccatcttactcaccttatccccaaatgatcattgtcgttcaggtgcgtaatattagtaagaagtatttatcagcttaacgtgataacaataatagtaatatgaaatatttattaaatttttataattaatctctgctagaaaatttgattaatcatttttagtagaatttgtttttctcaa

SEQ ID NO: 2270 - DNA, 655 bp, Artificial
  Mutations within GlyA3B4 introduced by GmGlyA3B4_T02TALE nuclease
gttcatgtacggttgcagatataaacgaagcatagcttatgtatgaggtgtaacaaaattggaaacaatagccatgcaaggtgaagaatgtcaccaactcagaaacccttcttcattgacgtgtccctcactcactctcctctcttcactataaatcgccactcttcgtgttctccacttcaccaactccttcaaacttattaacactttccttagttcaatatggggaagcccttcttcactctctctctttcttccctttgcttgctactcttgtcgagtgcatattacctccagcaagttcaacgagtgccaactcaacaacctcaacgcgttggaacccgaccaccgcgttgagtccgaaggtggtcttattgaaacatggaactctcaacaccctgagctgcaatgcgccggtgtcactgtttccaaacgcaccctcaaccgcaacggcctccacttgccatcttactcaccttatccccaaatgatcattgtcgttcaaggtgcgtaatattagtaagaagtatttatcagcttaacgtgataacaatatagtaatatgaaatatttattaaatttttataattaatctctgctagaaaatttgattaatcattttagtagaatttgtttttctcaactaggttttaaa

SEQ ID NO: 2271 - DNA, 694 bp, Artificial
  Mutations within GlyA3B4 introduced by GmGlyA3B4_T02TALE nuclease
gttcatgtacggttgcagatataaacgaagcatagcttatgtatgaggtgtaacaaaattggaaacaatagccatgcaaggtgaagaatgtcaccaactcagaaacccttcttcattgacgtgtccctcactcactctcctctcttcactataaatcgccactcttcgtgttctccacttcaccaactccttcaaacttattaacactttccttagttcaatatggggaagcccttcttcactctctctctttcttccctttgcttgctactcttgtcgagtgcatgcttgaccccccagcaggtggtggccatcgccagcaataatggtggcaagcaggcgctggagagctattacctccagcaagttcaacgagtgccactcaacaacctcaacgcgttggaacccgaccaccgcgttgagtccgaaggtggtcttattgaaacatggaactctcaacaccctgagctgcaatgcgccggtgtcactgtttccaaacgcaccctcaaccgcaacggcctccacttgccatcttactcacctttatccccaaatgatcattgtcgttcaaggtgcgtaatattagtaagaagtatttatcagcttaacgtgataacaataatagtaatatgaaatatttattaaattttttataattaaatctctgctagaaaaatttgattaatcatttttt

SEQ ID NO: 2272 - DNA, 666 bp, Artificial
  Mutations within GlyA3B4 introduced by GmGlyA3B4_T02TALE nuclease
  misc_feature (530): n is a or c or t or g
gttcatgtacggttgcagatataaacgaagcatagcttatgtatgaggtgtaacaaaattggaaacaatagccatgcaaggtgaagaatgtcaccaactcagaaacccttcttcattgacgtgtccctcactcactctcctctcttcactataaatcgccactcttcgtgttctccacttcaccaactccttcaaacttattaacactttccttagttcaatatggggaagcccttcttcactctctctctttcttccctttgcttgctactcttgtcgagtgcatgctattacctccagcaagttcaacgagtgccaactcaacaacctcaacgcgttggaacccgaccaccgcgttgagtccgaaggtggtcttattgaaacatggaactctcaacaccctgagctgcaatgcgccggtgtcactgtttccaaacgcaccctcaaccgcaacggcctccacttgccatcttactcaccttatccccaaatgatcattgtcgttcaaggtgcgtaatattagtaagagnatttatcagcttaacgtgataacaatatagtaatatgaaatatttattaaatttttataattaatctctgctagaaaatttgattaatcattttagtagaatttgtttttctcaactaggtttttaaaacaccaca

SEQ ID NO: 2273 - DNA, 655 bp, Artificial
  Mutations within GlyA3B4 introduced by GmGlyA3B4_T02TALE nuclease
gttcatgtacggttgcagatataaacgaagcatagcttatgtatgaggtgtaacaaaattggaaacaatagccatgcaaggtgaagaatgtcaccaactcagaaacccttcttcattgacgtgtccctcactcactctcctctcttcactataaatcgccactcttcgtgttctccacttcaccaactccttcaaacttattaacactttccttagttcaatatggggaagcccttcttcactctctctctttcttccctttgcttgctactcttgtcgagtacctccagcaagttcaacgagtgccaactcaacaacctcaacgcgttggaacccgaccaccgcgttgagtccgaaggtggtcttattgaaacatggaactctcaacaccctgagctgcaatgcgccggtgtcactgtttccaaacgcaccctcaaccgcaacggcctccacttgccatcttactcaccttatccccaaatgatcattgtcgttcaaggtgcgtaaatattagtaagaagtatttatcagcttaacgtgataacaataatagtaatatgaaatatttattaaattttttataattaatctctgctagaaaatttgattaatcatttttagtagaattgttttttctcaactaggttttaaaaca

SEQ ID NO: 2274 - DNA, 662 bp, Artificial
  Mutations within GlyA3B4 introduced by GmGlyA3B4_T02TALE nuclease
gttcatgtacggttgcagatataaacgaagcatagcttatgtatgaggtgtaacaaaattggaaacaatagccatgcaaggtgaagaatgtcaccaactcagaaacccttcttcattgacgtgtccctcactcactctcctctcttcactataaatcgccactcttcgtgttctccacttcaccaactccttcaaacttattaacactttccttagttcaatatggggaagcccttcttcactctctctctttcttccctttgcttgctactcttgtcgagtgcatgctattacctccagcaagttcaacgagtgccaactcaacaacctcaacgcgttggaacccgaccaccgcgttgagtccgaaggtggtcttattgaaacatggaactctcaacaccctgagctgcaatgcgccggtgtcactgtttccaaacgcaccctcaaccgcaacggcctccacttgccatcttactcaccttatccccaaatgatcattgtcgttcaaggtgcgtaatattagtaagagtatttatcagcttaacgtgataacaatatagtaatatgaaatatttattaaatttttataattaatctctgctagaaaatttgattaatcattttagtagaatttgttttctcaactaggttttaaaacacca

SEQ ID NO: 2275 - DNA, 631 bp, Artificial
  Mutations within GlyA3B4 introduced by GmGlyA3B4_T02TALE nuclease
  misc_feature (530): n is a or c or t or g
gttcatgtacggttgcagatataaacgaagcatagcttatgtatgaggtgtaacaaaattggaaacaatagccatgcaaggtgaagaatgtcaccaactcagaaacccttcttcattgacgtgtccctcactcactctcctctcttcactataaatcgccactcttcgtgttctccacttcaccaactccttcaaacttattaacactttccttagttcaatatggggaagcccttcttcactctctctctttcttccctttgcttgctactcttgtcgagtgcatgctattacctccagcaagttcaacgagtgccaactcaacaacctcaacgcgttggaacccgaccaccgcgttgagtccgaaggtggtcttattgaaacatggaactctcaacaccctgagctgcaatgcgccggtgtcactgtttccaaacgcaccctcaaccgcaacggcctccacttgccatcttactcaccttatccccaaatgatcattgtcgttcaaggtgcgtaatattagtaagagnatttatcagcttaacgtgataacaatatagtaatatgaaatatttattaaatttttataattaatctctgctagaaaatttgattaatcattttagtagaa

SEQ ID NO: 2276 - DNA, 650 bp, Artificial
  Mutations within GlyA3B4 introduced by GmGlyA3B4_T02TALE nuclease
gttcatgtacggttgcagatataaacgaagcatagcttatgtatgaggtgtaacaaaattggaaacaatagccatgcaaggtgaagaatgtcaccaactcagaaacccttcttcattgacgtgtccctcactcactctcctctcttcactataaatcgccactcttcgtgttctccacttcaccaactccttcaaacttattaacactttccttagttcaatatggggaagcccttcttcactctctctctttcttccctttgcttgctattacctccagcaagttcaacgagtgccaactcaacaacctcaacgcgttggaacccgaccaccgcgttgagtccgaaggtggtcttattgaaacatggaactcttaacaccctgagctgcaatgcgccggtgtcactgtttccaaacgcaccctcaaccgcaacggcctccacttgccatcttactcaccttatcccccaaatgatcattgtcgttcaaggtgcgtaatattagtaagaagtatttatcagcttaacgtgataacaataatagtaatatgaaatatttattaaattttttataattaatctctgctagaaaatttgattaatcatttttagtagaatttgttttttctcaactaggttttaaaacaccac

SEQ ID NO: 2277 - DNA, 643 bp, Artificial
  Mutations within GlyA3B4 introduced by GmGlyA3B4_T02TALE nuclease
gttcatgtacggttgcagatataaacgaagcatagcttatgtatgaggtgtaacaaaattggaaacaatagccatgcaaggtgaagaatgtcaccaactcagaaacccttcttcattgacgtgtccctcactcactctcctctcttcactataaatcgccactcttcgtgttctccacttcaccaactccttcaaacttattaacactttccttagttcaatatggggaagcccttcttcactctctctctttcttccctttgcttgctactcttgttattacctccagcaagttcaacgagtgccaactcaacaacctcaacgcgttggaacccgaccaccgcgttgagtccgaaggtggtcttattgaaacatggaactctcaacaccctgagctgcaatgcgccggtgtcactgtttccaaacgcaccctcaaccgcaacggcctccacttgccatcttactcaccttatccccaaatgatcattgtcgttcaaggtgcgtaaatattagtaagaagtatttatcagcttaacgtgataacaataatagtaatatgaaatatttattaaattttttataattaatctctgctagaaaatttgattaatctttttagtagaattgttttttctcaactagg

SEQ ID NO: 2278 - DNA, 653 bp, Artificial
  Mutations within GlyA3B4 introduced by GmGlyA3B4_T02TALE nuclease
gttcatgtacggttgcagatataaacgaagcatagcttatgtatgaggtgtaacaaaattggaaacaatagccatgcaaggtgaagaatgtcaccaactcagaaacccttcttcattgacgtgtccctcactcactctcctctcttcactataaatcgccactcttcgtgttctccacttcaccaactccttcaaacttattaacactttccttagttcaatatggggaagcccttcttcactctctctctttcttccctttgcttgctactcttgtcgagtgcattattacctccagcaagttcaacgagtgccaactcaacaacctcaacgcgttggaacccgaccaccgcgttgagtccgaaggtggtcttattgaaacatggaactctcaacaccctgagctgcaatgcgccggtgtcactgtttccaaacgcaccctcaaccgcaacggcctccacttgccatcttactcaccttatccccaaatgatcattgtcgttcaaggtgcgtaatattagtaagaagtatttatcagcttaacgtgataacaataatagtaatatgaaatatttattaaatttttataattaatctctgctagaaaatttgattaatcattttagtagaatttgttttctcaactaggtttt

SEQ ID NO: 2279 - DNA, 462 bp, Artificial
  Mutations within GlyA3B4 introduced by GmGlyA3B4_T02TALE nuclease
gttcatgtacggttgcagatataaacgaagcatagcttatgtatgaggtgtaacaaaattggaaacaatagccatgcaaggtgaagaatgtcaccaactcagaaacccttcttcattgacgtgccaactcaacaacctcaacgcgttggaacccgaccaccgcgttgagtccgaaggtggtcttattgaaacatggaactctcaacaccctgagctgcaatgcgccggtgtcactgtttccaaacgcaccctcaaccgcaacggcctccacttgccatcttactcaccttatccccaaatgatcattgtcgttcaaggtgcgtaatattagtaagaagtatttatcagcttaacgtgataacaataatagtaatatgaaatatttattaaattttttataattaatctctgctagaaaatttgattaatcatttttagtagaatttgtttttctcaactagg

SEQ ID NO: 2280 - DNA, 520 bp, Artificial
  Mutations within GlyA3B4 introduced by GmGlyA3B4_T02TALE nuclease
gttcatgtacggttgcagatataaacgaagcatagcttatgtatgaggtgtaacaaaattggaaacaatagccatgcaaggtgaagaatgtcaccaactcagaaacccttcttcattgacgtgtccctcactcactctcctctcttcactataaatcgccactcttcgtgttctccacttcaccaactccttcaaacttattaacactttccttagttcaatatggaacccgaccaccgcgttgagtccgaaggtggtcttattgaaacatggaactctcaacaccctgagctgcaatgcgccggtgtcactgtttccaaacgcaccctcaaccgcaacggcctccacttgccatcttactcaccttatccccaaatgatcattgtcgttcaaggtgcgtaatattagtaagaagtatttatcagcttaacgtgataacaataatagtaatatgaaatatttattaaattttttataattaatctctgctagaaaatttgattaatcatttttagtagaa

SEQ ID NO: 2281 - DNA, 666 bp, Artificial; identical to SEQ ID NO: 1780
  Mutations within GlyA3B4 introduced by GmGlyA3B4_T02TALE nuclease

SEQ ID NO: 2282 - DNA, 582 bp, Artificial
  Mutations within GlyA3B4 introduced by GmGlyA3B4_T02TALE nuclease
gttcatgtacggttgcagatataaacgaagcatagcttatgtatgaggtgtaacaaaattggaaacaatagccatgcaaggtgaagaatgtcaccaactcagaaacccttcttcattgacgtgtccctcactcactctcctctcttcactataaatcgccactcttcgtgttctccacttcaccaactccttcaaacttattaacactttccttagttcaatatggggaagcccttcttcactctctgccaactcaacaacctcaacgcgttggaacccgaccaccgcgttgagtccgaaggtggtcttattgaaacatggaactctcaacaccctgagctgcaatgcgccggtgtcactgtttccaaacgcaccctcaaccgcaacggcctccacttgccatcttactcaccttatccccaaatgatcattgtcgttcaaggtgcgtaatattagtaagaagtatttatcagcttaacgtgataacaataatagtaatatgaaatatttattaaattttttataattaatctctgctagaaaatttgattaatcatttttagtagaatttgtttttctcaa

SEQ ID NO: 2283 - DNA, 661 bp, Artificial
  Mutations within GlyA3B4 introduced by GmGlyA3B4_T02TALE nuclease
gttcatgtacggttgcagatataaacgaagcatagcttatgtatgaggtgtaacaaaattggaaacaatagccatgcaaggtgaagaatgtcaccaactcagaaacccttcttcattgacgtgtccctcactcactctcctctcttcactataaatcgccactcttcgtgttctccacttcaccaactccttcaaacttattaacactttccttagttcaatatggggaagcccttcttcactctctctctttcttccctttgcttgctactcttgtcgagtgcatattacctccagcaagttcaacgagtgccaactcaacaacctcaacgcgttggaacccgaccaccgcgttgagtccgaaggtggtcttattgaaacatggaactctcaacaccctgagctgcaatgcgccggtgtcactgtttccaaacgcaccctcaaccgcaacggcctccacttgccatcttactcaccttatccccaaatgatcattgtcgttcaaggtgcgtaatattagtaagaagtatttatcagcttaacgtgataacaataatagtaatatgaaatatttattaaatttttataattaatctctgctagaaaatttgattaatcattttagtagaatttgtttttctcaactaggttttaaacacca

SEQ ID NO: 2284 - DNA, 653 bp, Artificial
  Mutations within GlyA3B4 introduced by GmGlyA3B4_T02TALE nuclease
gttcatgtacggttgcagatataaacgaagcatagcttatgtatgaggtgtaacaaaattggaaacaatagccatgcaaggtgaagaatgtcaccaactcagaaacccttcttcattgacgtgtccctcactcactctcctctcttcactataaatcgccactcttcgtgttctccacttcaccaactccttcaaacttattaacactttccttagttcaatatggggaagcccttcttcactctctctctttcttccctttgcttgctactcttgtcgagtgcatctattacctccagcaagttcaacgagtgccaactcaacaacctcaacgcgttggaacccgaccaccgcgttgagtccgaaggtggtcttattgaaacatggaactctcaacaccctgagctgcaatgcgccggtgtcactgtttccaaacgcaccctcaaccgcaacggcctccacttgccatcttactcaccttatccccaaatgatcattgtcgttcaaggtgcgtaatattagtaagaagtatttatcagcttaacgtgataacaatatagtaatatgaaatatttattaaatttttataattaatctctgctagaaaatttgattaatcattttagtagaatttgttttctcaactaggtttt

SEQ ID NO: 2285 - DNA, 646 bp, Artificial
  Mutations within GlyA3B4 introduced by GmGlyA3B4_T02TALE nuclease
gttcatgtacggttgcagatataaacgaagcatagcttatgtatgaggtgtaacaaaattggaaacaatagccatgcaaggtgaagaatgtcaccaactcagaaacccttcttcattgacgtgtccctcactcactctcctctcttcactataaatcgccactcttcgtgttctccacttcaccaactccttcaaacttattaacactttccttagttcaatatggggaagcccttcttcactctctctctttcttccctttgcttgctactcttgtcgagcctattacctccagcaagttcaacgagtgccaactcaacaacctcaacgcgttggaacccgaccaccgcgttgagtccgaaggtggtcttattgaaacatggaactctcaacaccctgagctgcaatgcgccggtgtcactgtttccaaacgcaccctcaaccgcaacggcctccacttgccatcttactcaccttatccccaaatgatcattgtcgttcaaggtgcgtaatattagtaagaagtatttatcagcttaacgtgataacaatatagtaatatgaaatatttattaaatttttataattaatctctgctagaaaatttgattaatcattttagtagaatttgtttttctcaactagg

SEQ ID NO: 2286 - DNA, 582 bp, Artificial
  Mutations within GlyA3B4 introduced by GmGlyA3B4_T02TALE nuclease
gttcatgtacggttgcagatataaacgaagcatagcttatgtatgaggtgtaacaaaattggaaacaatagccatgcaaggtgaagaatgtcaccaactcagaaacccttcttcattgacgtgtccctcactcactctcctctcttcactataaatcgccactcttcgtgttctccacttcaccaactccttcaaacttattaacactttccttagttcaatattacctccagcaagttcaacgagtgccaactcaacaacctcaacgcgttggaacccgaccaccgcgttgagtccgaaggtggtcttattgaaacatggaactctcaacaccctgagctgcaatgcgccggtgtcactgtttccaaacgcaccctcaaccgcaacggcctccacttgccatcttactcaccttatcccccaaatgatcattgtcgttcaaggtgcgtaatattagtaagaagtatttatcagcttaacgtgataacaataatagtaatatgaaatatttattaaatttttataattaatctctgctagaaaatttgattaatcatttttagtagaatttgtttttctcaa

SEQ ID NO: 2287 - DNA, 601 bp, Artificial; identical to SEQ ID NO: 1930
  Mutations within GlyA3B4 introduced by GmGlyA3B4_T02TALE nuclease

SEQ ID NO: 2288 - DNA, 661 bp, Artificial; identical to SEQ ID NO: 2035
  Mutations within GlyA3B4 introduced by GmGlyA3B4_T02TALE nuclease

SEQ ID NO: 2289 - DNA, 666 bp, Artificial
  Mutations within GlyA3B4 introduced by GmGlyA3B4_T02TALE nuclease
gttcatgtacggttgcagatataaacgaagcatagcttatgtatgaggtgtaacaaaattggaaacaatagccatgcaaggtgaagaatgtcaccaactcagaaacccttcttcattgacgtgtccctcactcactctcctctcttcactataaatcgccactcttcgtgttctccacttcaccaactccttcaaacttattaacactttccttagttcaatatggggaagcccttcttcactctctctctttcttccctttgcttgctactcttgtcgagtgcatgctattacctccagcaagttcaacgagtgccaactcaacaacctcaacgcgttggaacccgaccaccgcgttgagtccgaaggtggtcttattgaaacatggaactctcaacaccctgagctgcaatgcgccggtgtcactgtttccaaacgcaccctcaaccgcaacggcctccacttgccatcttactcaccttatccccaaatgatcattgtcgttcaaggtgcgtaatattagtaagaagtatttatcagcttaacgtgataacaatatagtaatatgaaatatttattaaatttttataattaatctctgctagaaaatttgattaatcattttagtagaatttgttttctcaactaggtttttaaaacaccaca

SEQ ID NO: 2290 - DNA, 464 bp, Artificial
  Mutations within GlyA3B4 introduced by GmGlyA3B4_T02TALE nuclease
gttcatgtacggttgcagatataaacgaagcatagcttatgtatgaggtgtaacaaaattggaaacaatagccatgcaaggtgaagaatgtcaccaactcagaaacccttcttcattgacgtgtccctcactcactctcctctcttcactataaatcgccactcttcgtgttctccacttcaccaactccttcaaacttattaacactttccttagttcaatatggggaagcccttcttcactctctctctttcttccctttgcttgctattacctccagcaagttcaacgagtgccaactcaacaacctcaacgcgttggaacccgaccaccgcgttgagtccgaaggtggtcttattgaaacatggaactctcaacacccctgagctgcaatgcgccggtgtcactgtttccaaacgcaccctcaaccgcaacggcctccacttgccatcttactcacctta

SEQ ID NO: 2291 - DNA, 632 bp, Artificial; identical to SEQ ID NO: 1756
  Mutations within GlyA3B4 introduced by GmGlyA3B4_T02TALE nuclease

SEQ ID NO: 2292 - DNA, 631 bp, Artificial
  Mutations within GlyA3B4 introduced by GmGlyA3B4_T02TALE nuclease
gttcatgtacggttgcagatataaacgaagcatagcttatgtatgaggtgtaacaaaattggaaacaatagccatgcaaggtgaagaatgtcaccaactcagaaacccttcttcattgacgtgtccctcactcactctcctctcttcactataaatcgccactcttcgtgttctccacttcaccaactccttcaaacttattaacactttccttagttcaatatggggaagcccttcttcactctctctctttcttccctttgcttgctactcttgtcgagtgcattacctccagcaagttcaacgagtgccaactcaacaacctcaacgcgttggaacccgaccaccgcgttgagtccgaaggtggtcttattgaaacatggaactctcaacaccctgagctgcaatgcgccggtgtcactgtttccaaacgcaccctcaaccgcaacggcctccacttgccatcttactcaccttatccccaaatgatcattgtcgttcaaggtgcgtaatattagtaagaagtatttatcagcttaacgtgataacaatatagtaatatgaaatatttattaaatttttataattaatctctgctagaaaatttgattaatcattttagtagaatttg

SEQ ID NO: 2293 - DNA, 630 bp, Artificial
  Mutations within GlyA3B4 introduced by GmGlyA3B4_T02TALE nuclease
gttcatgtacggttgcagatataaacgaagcatagcttatgtatgaggtgtaacaaaattggaaacaatagccatgcaaggtgaagaatgtcaccaactcagaaacccttcttcattgacgtgtccctcactcactctcctctcttcactataaatcgccactcttcgtgttctccacttcaccaactccttcaaacttattaacactttccttagttcaatatggggaagcccttcttcactctctctctttcttccctttgcttgctactcttgtcgagtgcatgctattacctccagcaagttcaacgagtgccaactcaacaacctcaacgcgttggaacccgaccaccgcgttgagtccgaaggtggtcttattgaaacatggaactctcaacaccctgagctgcaatgcgccggtgtcactgtttccaaacgcaccctcaaccgcaacggcctccacttgccatcttactcaccttatccccaaatgatcattgtcgttcaaggtgcgtaatattagtaagaagtatttatcagcttaatcgtgataacaataatagtaatatgaaatatttaattaaatttttataatttaactctgctagaaaatttgattaatcattttag

SEQ ID NO: 2294 - DNA, 660 bp, Artificial; identical to SEQ ID NO: 1763
  Mutations within GlyA3B4 introduced by GmGlyA3B4_T02TALE nuclease

SEQ ID NO: 2295 - DNA, 632 bp, Artificial
  Mutations within GlyA3B4 introduced by GmGlyA3B4_T02TALE nuclease
gttcatgtacggttgcagatataaacgaagcatagcttatgtatgaggtgtaacaaaattggaaacaatagccatgcaaggtgaagaatgtcaccaactcagaaacccttcttcattgacgtgtccctcactcactctcctctcttcactataaatcgccactcttcgtgttctccacttcaccaactccttcaaacttattaacactttccttagttcaatatggggaagcccttcttcactctctctctttcttccctttgcttgctactcttgtcgagtgccaactcaacaacctcaacgcgttggaacccgaccaccgcgttgagtccgaaggtggtcttattgaaacatggaactctcaacaccctgagctgcaatgcgccggtgtcactgtttccaaacgcaccctcaaccgcaacggcctccacttgccatcttactcaccttatccccaaatgatcattgtcgttcaaggtgcgtaatattagtaagaagtatttatcagcttaacgtgataacaataatagtaatatgaaatatttattaaattttttataattaatctctgctagaaaatttgattaatcatttttagtagaatttgtttttctcaactaggtttttaaaca

SEQ ID NO: 2296 - DNA, 569 bp, Artificial
  Mutations within GlyA3B4 introduced by GmGlyA3B4_T02TALE nuclease
gttcatgtacggttgcagatataaacgaagcatagcttatgtatgaggtgtaacaaaattggaaacaatagccatgcaaggtgaagaatgtcaccaactcagaaacccttcttcattgacgtgtccctcactcactctcctctcttcactataaatcgccactcttcgtgttctccacttcaccaactccttcaaacttattaacactttccttagttcaatatggggaagcccttcttcactctctctctttctttccttagttcaatatggaacccgaccaccgcgttgagtccgaaggtggtcttattgaaacatggaactctcaacaccctgagctgcaatgcgccggtgtcactgtttccaaacgcaccctcaaccgcaacggcctccacttgccatcttactcaccttatcccccaaatgatcattgtcgttcaaggtgcgtaatattagtaagaagtatttatcagcttaaacgtgataacaataatagtaatatgaaatatttattaaattttttataattaatctctgctagaaaatttgattaatcatttttagtagaa

SEQ ID NO: 2297 - DNA, 668 bp, Artificial
  Mutations within GlyA3B4 introduced by GmGlyA3B4_T02TALE nuclease
gttcatgtacggttgcagatataaacgaagcatagcttatgtatgaggtgtaacaaaattggaaacaatagccatgcaaggtgaagaatgtcaccaactcagaaaccccttcttcattgacgtgtccctcactcactctcctctcttcactataaatcgccactcttcgtgttctccacttcaccaactccttcaaacttattaacactttccttagttcaatatggggaagcccttcttcactctctctctttcttccctttgcttgctactcttgtcgagtgcatgctattacctccagcaagttcaacgagtgccaactcaacaacctcaacgcgttggaacccgaccaccgcgttgagtccgaaggtggtcttattgaaacatggaactctcaacaccctgagctgcaatgcgccggtgtcactgtttccaaacgcaccctcaaccgcaacggcctccacttgccatcttactcaccttatccccaaatgatcattgtcgttcaaggtgcgtaatattagtaagagtatttatcagcttaacgtgataacaataatagtaatatgaaatatttattaaatttttataattaatctctgctagaaaatttgattaatcattttagtagaatttgtttttctcaactaggtttttaaaacaccaca

SEQ ID NO: 2298 - DNA, 531 bp, Artificial
  Mutations within GlyA3B4 introduced by GmGlyA3B4_T02TALE nuclease
gttcatgtacggttgcagatataaacgaagcatagcttatgtatgaggtgtaacaaaattggaaacaatagccatgcaaggtgaagaatgtcaccaactcagaaacccttcttcattgacgtgtccctcactcactctcctctcttcactataaatcgccactcttcgtgttctccacttcaccaactcaacaacctcaacgcgttggaacccgaccaccgcgttgagtccgaaggtggtcttattgaaacatggaactctcaacaccctgagctgcaatgcgccggtgtcactgtttccaaacgcaccctcaaccgcaacggcctccacttgccatcttactcaccttatccccaaatgatcattgtcgttcaaggtgcgtaatattagtaagaagtattttatcagcttaacgtgataacaataatagtaatatgaaaatatttattaaattttttataattaatctctgctagaaaatttgattaatcatttttagtagaatttgtttttctcaactaggttttaaac

SEQ ID NO: 2299 - DNA, 639 bp, Artificial
  Mutations within GlyA3B4 introduced by GmGlyA3B4_T02TALE nuclease
gttcatgtacggttgcagatataaacgaagcatagcttatgtatgaggtgtaacaaaattggaaacaatagccatgcaaggtgaagaatgtcaccaactcagaaaccccttcttcattgacgtgtccctcactcactctcctctcttcactataaatcgccactcttcgtgttctccacttcaccaactccttcaaacttattaacactttccttagttcaatatggggaagcccttcttcactctctctctttcttccctttgcttgctactcttgtcgagtgcatttctattacctccagcaagttcaacgagtgccaactcaacaacctcaacgcgttggaacccgaccaccgcgttgagtccgaaggtggtcttattgaaacatggaactctcaacaccctgagctgcaatgcgccggtgtcactgtttccaaacgcaccctcaaccgcaacggcctccacttgccatcttactcaccttatccccaaatgatcattgtcgttcaaggtgcgtaatattagtaagaagtatttatcagcttaacgtgataacaataatagtaatatgaaatatttattaaatttttataattaatctctgctagaaaatttgattaatcattttagtagaatttg

SEQ ID NO: 2300 - DNA, 661 bp, Artificial
  Mutations within GlyA3B4 introduced by GmGlyA3B4_T02TALE nuclease
gttcatgtacggttgcagatataaacgaagcatagcttatgtatgaggtgtaacaaaattggaaacaatagccatgcaaggtgaagaatgtcaccaactcagaaacccttcttcattgacgtgtccctcactcactctcctctcttcactataaatcgccactcttcgtgttctccacttcaccaactccttcaaacttattaacactttccttagttcaatatggggaagcccttcttcactctctctctttcttccctttgcttgctactcttgtcgagtgcatgttacctccagcaagttcaacgagtgccaactcaacaacctcaacgcgttggaacccgaccaccgcgttgagtccgaaggtggtcttattgaaacatggaactctcaacaccctgagctgcaatgcgccggtgtcactgtttccaaacgcaccctcaaccgcaacggcctccacttgccatcttactcaccttatccccaaatgatcattgtcgttcaaggtgcgtaatattagtaagaagtatttatcagcttaacgtgataacaataatagtaatatgaaatatttattaaatttttataattaatctctgctagaaaatttgattaatcattttagtagaatttgttttctcaactaggttttaaaacacca

SEQ ID NO: 2301 - DNA, 660 bp, Artificial; identical to SEQ ID NO: 1796
  Mutations within GlyA3B4 introduced by GmGlyA3B4_T02TALE nuclease

SEQ ID NO: 2302 - DNA, 664 bp, Artificial
  Mutations within GlyA3B4 introduced by GmGlyA3B4_T02TALE nuclease
  misc_feature (530): n is a or c or t or g
gttcatgtacggttgcagatataaacgaagcatagcttatgtatgaggtgtaacaaaattggaaacaatagccatgcaaggtgaagaatgtcaccaactcagaaacccttcttcattgacgtgtccctcactcactctcctctcttcactataaatcgccactcttcgtgttctccacttcaccaactccttcaaacttattaacactttccttagttcaatatggggaagcccttcttcactctctctctttcttccctttgcttgctactcttgtcgagtgcatgctattacctccagcaagttcaacgagtgccaactcaacaacctcaacgcgttggaacccgaccaccgcgttgagtccgaaggtggtcttattgaaacatggaactctcaacaccctgagctgcaatgcgccggtgtcactgtttccaaacgcaccctcaaccgcaacggcctccacttgccatcttactcaccttatccccaaatgatcattgtcgttcaaggtgcgtaatattagtaagagnatttatcagcttaacgtgataacaataatagtaatatgaaatatttattaaatttttataattaatctctgctagaaaatttgattaatcattttagtagaatttgtttttctcaactaggttttaaaacacca

SEQ ID NO: 2303 - DNA, 637 bp, Artificial
  Mutations within GlyA3B4 introduced by GmGlyA3B4_T02TALE nuclease
gttcatgtacggttgcagatataaacgaagcatagcttatgtatgaggtgtaacaaaattggaaacaatagccatgcaaggtgaagaatgtcaccaactcagaaacccttcttcattgacgtgtccctcactcactctcctctcttcactataaatcgccactcttcgtgttctccacttcaccaactccttcaaacttattaacactttccttagttcaatatggggaagcccttcttcactctctctctttcttccctttgcttgctactcttgtcgagtgcatgagacggtccagcggctgttgccggtgctgtgccaggcccacggctattacctccagcaagttcaacgagtgccaactcaacaacctcaacgcgttggaaccccgaccaccgcgttgagtccgaaggtggtcttattgaaacatggaactctcaacaccctgagctgcaatgcgccggtgtcactgtttccaaacgcaccctcaaccgcaacggcctccacttgccatcttactcaccttatccccaaatgatcattgtcgttcaaggtgcgtaatattagtaagaagtatttatcagcttaacgtgataacaataatagtaatatgaaatatttattaaatttttataat

SEQ ID NO: 2304 - DNA, 599 bp, Artificial; identical to SEQ ID NO: 2087
  Mutations within GlyA3B4 introduced by GmGlyA3B4_T02TALE nuclease

SEQ ID NO: 2305 - DNA, 565 bp, Artificial
  Mutations within GlyA3B4 introduced by GmGlyA3B4_T02TALE nuclease
gttcatgtacggttgcagatataaacgaagcatagcttatgtatgaggtgtaacaaaattggaaacaatagccatgcaaggtgaagaatgtcaccaactcagaaacccttcttcattgacgtgtccctcactcactctcctctcttcactataaatcgccactcttcgtgttctccacttcaccaactccttcaaacttattaacactttccttagttcaacgagtgccaactcaacaacctcaacgcgttggaacccgaccaccgcgttgagtccgaaggtggtcttattgaaacatggaactctcaacaccctgagctgcaatgcgccggtgtcactgtttccaaacgcaccctcaaccgcaacggcctccacttgccatcttactcaccttatccccaaaatgatcattgtcgttcaaggtgcgtaatattagtaagaagtatttatcagcttaacgtgataacaataatagtaatatgaaatatttattaaattttttataattaatctctgctagaaaatttgattaatcatttttagtagaatttgtttttctcaacta

SEQ ID NO: 2306 - DNA, 647 bp, Artificial
  Mutations within GlyA3B4 introduced by GmGlyA3B4_T02TALE nuclease
gttcatgtacggttgcagatataaacgaagcatagcttatgtatgaggtgtaacaaaattggaaacaatagccatgcaaggtgaagaatgtcaccaactcagaaacccttcttcattgacgtgtccctcactcactctcctctcttcactataaatcgccactcttcgtgttctccacttcaccaactccttcaaacttattaacactttccttagttcaatatggggaagcccttcttcactctctctctttcttccctttgcttgctactcttgtcgagtgattacctccagcaagttcaacgagtgccaactcaacaacctcaacgcgttggaacccgaccaccgcgttgagtccgaaggtggtcttattgaaacatggaactctcaacaccctgagctgcaatgcgccggtgtcactgtttccaaacgcaccctcaaccgcaacggcctccacttgccatcttactcaccttatccccaaatgatcattgtcgttcaaggtgcgtaatattagtaagaagtatttatcagcttaacgtgataacaataatagtaatatgaaaatatttattaaatttttataattaatctctgctagaaaatttgattaatcattttagtagaatttgtttttctcaactagg

SEQ ID NO: 2307 - DNA, 688 bp, Artificial
  Mutations within GlyA3B4 introduced by GmGlyA3B4_T02TALE nuclease
gttcatgtacggttgcagatataaacgaagcatagcttatgtatgaggtgtaacaaaattggaaacaatagccatgcaaggtgaagaatgtcaccaactcagaaacccttcttcattgacgtgtccctcactcactctcctctcttcactataaatcgccactcttcgtgttctccacttcaccaactccttcaaacttattaacactttccttagttcaatatggggaagcccttcttcactctctctctttcttccctttgcttgctactcttgtcgagtgcagctattacctccagcaagttcaacgagtgccaactcaacaacctcaacgcgttggaacccgaccaccgcgttgagtccgaaggtggtcttattgaaacatggaactctcaacaccctgagctgcaatgcgccggtgtcactgtttccaaacgcaccctcaaccgcaacggcctccacttgccatcttactcaccttatccccaaatgatcattgtcgttcaaggtgcgtaatattagtaagagtatttatcagcttaacgtgataacaatatagtaatatgaaatatttattaaatttttataattaatctctgctagaaaatttgattaatcattttagtagaatttgttttctcaactaggttttaacaccacacttgagactccaaggcacacaggggaa

SEQ ID NO: 2308 - DNA, 667 bp, Artificial; identical to SEQ ID NO: 1889
  Mutations within GlyA3B4 introduced by GmGlyA3B4_T02TALE nuclease

SEQ ID NO: 2309 - DNA, 666 bp, Artificial
  Mutations within GlyA3B4 introduced by GmGlyA3B4_T02TALE nuclease
gttcatgtacggttgcagatataaacgaagcatagcttatgtatgaggtgtaacaaaattggaaacaatagccatgcaaggtgaagaatgtcaccaactcagaaacccttcttcattgacgtgtccctcactcactctcctctcttcactataaatcgccactcttcgtgttctccacttcaccaactccttcaaacttattaacactttccttagttcaatatggggaagcccttcttcactctctctctttcttccctttgcttgctactcttgtcgagtgcatgctattacctccagcaagttcaacgagtgccaactcaacaacctcaacgcgttggaacccgaccaccgcgttgagtccgaaggtggtcttattgaaacatggaactctcaacaccctgagctgcaatgcgccggtgtcactgtttccaaacgcaccctcaaccgcaacggcctccacttgccatcttactcaccttatccccaaatgatcattgtcgttcaaggtgcgtaatattagtaagagtatttatcagcttaacgtgataacaataatagtaatatgaaaatatttattaaatttttataattaatctctgctagaaaatttgattaatcattttagtagaatttgtttttctcaactaggtttttaaaacacca

SEQ ID NO: 2310 - DNA, 662 bp, Artificial; identical to SEQ ID NO: 2209
  Mutations within GlyA3B4 introduced by GmGlyA3B4_T02TALE nuclease

SEQ ID NO: 2311 - DNA, 668 bp, Artificial
  Mutations within GlyA3B4 introduced by GmGlyA3B4_T02TALE nuclease
gttcatgtacggttgcagatataaacgaagcatagcttatgtatgaggtgtaacaaaattggaaacaatagccatgcaaggtgaagaatgtcaccaactcagaaaccccttcttcattgacgtgtccctcactcactctcctctcttcactataaatcgccactcttcgtgttctccacttcaccaactccttcaaacttattaacactttccttagttcaatatggggaagcccttcttcactctctctctttcttccctttgcttgctactcttgtcgagtgcatcgctattacctccagcaagttcaacgagtgccaactcaacaacctcaacgcgttggaacccgaccaccgcgttgagtccgaaggtggtcttattgaaacatggaactctcaacaccctgagctgcaatgcgccggtgtcactgtttccaaacgcaccctcaaccgcaacggcctccacttgccatcttactcaccttatccccaaatgatcattgtcgttcaaggtgcgtaatattagtaagagtatttatcagcttaacgtgataacaatatagtaatatgaaatatttattaaatttttataattaatctctgctagaaaatttgattaatcattttagtagaatttgtttttctcaactaggtttttaaaacaccaca

SEQ ID NO: 2312 - DNA, 659 bp, Artificial
  Mutations within GlyA3B4 introduced by GmGlyA3B4_T02TALE nuclease
gttcatgtacggttgcagatataaacgaagcatagcttatgtatgaggtgtaacaaaattggaaacaatagccatgcaaggtgaagaatgtcaccaactcagaaacccttcttcattgacgtgtccctcactcactctcctctcttcactataaatcgccactcttcgtgttctccacttcaccaactccttcaaacttattaacactttccttagttcaatatggggaagcccttcttcactctctctctttcttccctttgcttgctactcttgtcgagtgcatgcttcagcaagttcaacgagtgccaactcaacaacctcaacgcgttggaacccgaccaccgcgttgagtccgaaggtggtcttattgaaacatggaactctcaacaccctgagctgcaatgcgccggtgtcactgtttccaaaacgcaccctcaaccgcaacggcctccacttgccatcttactcaccttatccccaaatgatcattgtcgttcaaggtgcgtaatattagtaagaagtatttatcagcttaacgtgataacaataatagtaatatgaaatatttattaaatttttataattaatctctgctagaaaatttgattaatcattttagtagaatttgtttttctcaactaggttttaaaacacca

SEQ ID NO: 2313 - DNA, 653 bp, Artificial
  Mutations within GlyA3B4 introduced by GmGlyA3B4_T02TALE nuclease
gttcatgtacggttgcagatataaacgaagcatagcttatgtatgaggtgtaacaaaattggaaacaatagccatgcaaggtgaagaatgtcaccaactcagaaacccttcttcattgacgtgtccctcactcactctcctctcttcactataaatcgccactcttcgtgttctccacttcaccaactccttcaaacttattaacactttccttagttcaatatggggaagcccttcttcactctctctctttcttccctttgcttgctactcttgtcgagtgcattgctattacctccagcaagttcaacgagtgccaactcaacaacctcaacgcgttggaacccgaccaccgcgttgagtccgaaggtggtcttattgaaacatggaactctcaacaccctgagctgcaatgcgccggtgtcactgtttccaaacgcaccctcaaccgcaacggcctccacttgccatcttactcaccttatccccaaatgatcattgtcgttcaaggtgcgtaatattagtaagagtatttatcagcttaacgtgataacaataatagtaatatgaaatatttattaaaatttttataattaatctctgctagaaaatttgattaatcattttagtagaatttgtttttctcaactagg

SEQ ID NO: 2314 - DNA, 680 bp, Artificial
  Mutations within GlyA3B4 introduced by GmGlyA3B4_T02TALE nuclease
gttcatgtacggttgcagatataaacgaagcatagcttatgtatgaggtgtaacaaaattggaaacaatagccatgcaaggtgaagaatgtcaccaactcagaaacccttcttcattgacgtgtccctcactcactctcctctcttcactataaatcgccactcttcgtgttctccacttcaccaactccttcaaacttattaacactttccttagttcaatatggggaagcccttcttcactctctctctttcttccctttgcttgctactcttgtcgagtgcatgcttattatatcctcccatcgcaagttccaaatcagagtgccaacctacaacaacctcaaccagcgttggaacccgaccaccgcgttgagtccgaaggtggtcttattgaaacatggaactctcaacaccctgagctgcaatgcgccggtgtcactgtttccaaacgcaccctcaaccgcaacggcctccacttgccatcttactcaccttatccccaaatgatcattgtcgttcaaggtgcgtaatattagtaagaagtatttatcagcttaacgtgataacaataatagtaatatgaaaatatttattaaatttttataattaatctctgctagaaaatttgattaatcattttagtagaatttgtttttctcaactaggttttaaacacca

SEQ ID NO: 2315 - DNA, 665 bp, Artificial
  Mutations within GlyA3B4 introduced by GmGlyA3B4_T02TALE nuclease
gttcatgtacggttgcagatataaacgaagcatagcttatgtatgaggtgtaacaaaattggaaacaatagccatgcaaggtgaagaatgtcaccaactcagaaacccttcttcattgacgtgtccctcactcactctcctctcttcactataaatcgccactcttcgtgttctccacttcaccaactccttcaaacttattaacactttccttagttcaatatggggaagcccttcttcactctctctctttcttccctttgcttgctactcttgtcgagtgcatgcattacctccagcaagttcaacgagtgccaactcaacaacctcaacgcgttggaacccgaccaccgcgttgagtccgaaggtggtcttattgaaacatggaactctcaacaccctgagctgcaatgcgccggtgtcactgtttccaaacgcaccctcaaccgcaacggcctccacttgccatcttactcaccttatcccccaaatgatcattgtcgttcaaggtgcgtaatattagtaagaagtatttatcagcttaacgtgataacaataatagtaatatgaaatatttattaaatttttataattaatctctgctagaaaatttgattaatcattttagtagaatttgttttctcaactaggtttttaaaacacca

SEQ ID NO: 2316 - DNA, 660 bp, Artificial; identical to SEQ ID NO: 1783
  Mutations within GlyA3B4 introduced by GmGlyA3B4_T02TALE nuclease

SEQ ID NO: 2317 - DNA, 621 bp, Artificial
  Mutations within GlyA3B4 introduced by GmGlyA3B4_T02TALE nuclease
gttcatgtacggttgcagatataaacgaagcatagcttatgtatgaggtgtaacaaaattggaaacaatagccatgcaaggtgaagaatgtcaccaactcagaaacccttcttcattgacgtgtccctcactcactctcctctcttcactataaatcgccactcttcgtgttctccacttcaccaactccttcaaacttattaacactttccttagttcaatatggggaagcccttcttcactctctctctttctccagcaagttcaacgagtgccaactcaacaacctcaacgcgttggaacccgaccaccgcgttgagtccgaaggtggtcttattgaaacatggaactctcaacaccctgagctgcaatgcgccggtgtcactgtttccaaacgcaccctcaaccgcaacggcctccacttgccatcttactcaccttatccccaaatgatcattgtcgttcaaggtgcgtaatattagtaagaagtatttatcagcttaacgtgataacaataatagtaatatgaaatatttattaatttttataattaatctctgctagaaaatttgattaatcatttttagtagaatttgtttttctcaactaggttttaaaaca

SEQ ID NO: 2318 - DNA, 551 bp, Artificial
  Mutations within GlyA3B4 introduced by GmGlyA3B4_T02TALE nuclease
gttcatgtacggttgcagatataaacgaagcatagcttatgtatgaggtgtaacaaaattggaaacaatagccatgcaaggtgaagaatgtcaccaactcagaaacccttcttcattgacgtgtccctcactcactctcctctcttcactataaatcgccactcttcgtgttctccacttcaccaactccttcaaacttattaacactttccttagttcaatatggggaagcccttcttcactctctctctttcttccctttgcttgctactcttgtcgacgcgttggaacccgaccaccgcgttgagtccgaaggtggtcttattgaaacatggaactctcaacaccctgagctgcaatgcgccggtgtcactgtttccaaacgcaccctcaaccgcaacggcctccacttgccatcttactcaccttatccccaaatgatcattgtcgttcaaggtgcgtaatattagtaagaagtatttatcagcttaacgtgatacaataatagtaatatgaaatatttattaatttttataattaatctctgctag

SEQ ID NO: 2319 - DNA, 664 bp, Artificial
  Mutations within GlyA3B4 introduced by GmGlyA3B4_T02TALE nuclease
gttcatgtacggttgcagatataaacgaagcatagcttatgtatgaggtgtaacaaaattggaaacaatagccatgcaaggtgaagaatgtcaccaactcagaaacccttcttcattgacgtgtccctcactcactctcctctcttcactataaatcgccactcttcgtgttctccacttcaccaactccttcaaacttattaacactttccttagttcaatatggggaagcccttcttcactctctctctttcttccctttgcttgctactcttgtcgagtgcattacctccagcaagttcaacgagtgccaactcaacaacctcaacgcgttggaacccgaccaccgcgttgagtccgaaggtggtcttattgaaacatggaactctcaacaccctgagctgcaatgcgccggtgtcactgtttccaaacgcaccctcaaccgcaacggcctccacttgccatcttactcaccttatccccaaatgatcattgtcgttcaaggtgcgtaatattagtaagaagtatttatcagcttaacgtgataacaataatagtaatatgaaatatttattaaatttttataaattaatctctgctagaaaatttgattaatcattttagtagaatttgttttctcaactaggtttttaaaacaccacac

SEQ ID NO: 2320 - DNA, 653 bp, Artificial
  Mutations within GlyA3B4 introduced by GmGlyA3B4_T02TALE nuclease
gttcatgtacggttgcagatataaacgaagcatagcttatgtatgaggtgtaacaaaattggaaacaatagccatgcaaggtgaagaatgtcaccaactcagaaacccttcttcattgacgtgtccctcactcactctcctctcttcactataaatcgccactcttcgtgttctccacttcaccaactccttcaaacttattaacactttccttagttcaatatggggaagcccttcttcactctctctctttcttccctttgcttgctactcttgtcgagtgcatgattacctccagcaagttcaacgagtgccaactcaacaacctcaacgcgttggaacccgaccaccgcgttgagtccgaaggtggtcttattgaaacatggaactctcaacaccctgagctgcaatgcgccggtgtcactgtttccaaacgcaccctcaaccgcaacggcctccacttgccatcttactcaccttatccccaaatgatcattgtcgttcaaggtgcgtaatattagtaagaagtatttatcagcttaacgtgataacaataatagtaatatgaaatatttattaaatttttataattaatctctgctagaaaatttgattaatcattttagtagaatttgttttctcaactaggtttt

SEQ ID NO: 2321 - DNA, 522 bp, Artificial
  Mutations within GlyA3B4 introduced by GmGlyA3B4_T02TALE nuclease
gttcatgtacggttgcagatataaacgaagcatagcttatgtatgaggtgtaacaaaattggaaacaatagccatgcaaggtgaagaatgtcaccaactcagaaacccttcttcattgacgtgtccctcactcactctcctctcttcactataaatcgccactcttcgtgttctccacttcaccaactcaacaacctcaacgcgttggaacccgaccaccgcgttgagtccgaaggtggtcttattgaaacatggaactctcaacaccctgagctgcaatgcgccggtgtcactgtttccaaacgcaccctcaaccgcaacggcctccacttgccatcttactcaccttatccccaaatgatcattgtcgttcaaggtgcgtaatattagtaagaagtattttatcagcttaacgtgataacaataatagtaatatgaaatatttattaaattttttataattaatctctgctagaaaatttgattaatcatttttagtagaatttgtttttctcaactagg

SEQ ID NO: 2322 - DNA, 661 bp, Artificial
  Mutations within GlyA3B4 introduced by GmGlyA3B4_T02TALE nuclease
gttcatgtacggttgcagatataaacgaagcatagcttatgtatgaggtgtaacaaaattggaaacaatagccatgcaaggtgaagaatgtcaccaactcagaaacccttcttcattgacgtgtccctcactcactctcctctcttcactataaatcgccactcttcgtgttctccacttcaccaactccttcaaacttattaacactttccttagttcaatatggggaagcccttcttcactctctctctttcttccctttgcttgctactcttgtcgagtgcatgtacctccagcaagttcaacgagtgccaactcaacaacctcaacgcgttggaacccgaccaccgcgttgagtccgaaggtggtcttattgaaacatggaactctcaacaccctgagctgcaatgcgccggtgtcactgtttccaaacgcaccctcaaccgcaacggcctccacttgccatcttactcaccttatccccaaatgatcattgtcgttcaaggtgcgtaatattagtaagaagtatttatcagcttaacgtgataacaataatagtaatatgaaatatttattaaatttttataattaatctctgctagaaaatttgattaatcattttagtagaatttgtttttctcaactaggttttaaaacacca

SEQ ID NO: 2323 - DNA, 655 bp, Artificial
  Mutations within GlyA3B4 introduced by GmGlyA3B4_T02TALE nuclease
gttcatgtacggttgcagatataaacgaagcatagcttatgtatgaggtgtaacaaaattggaaacaatagccatgcaaggtgaagaatgtcaccaactcagaaacccttcttcattgacgtgtccctcactcactctcctctcttcactataaatcgccactcttcgtgttctccacttcaccaactccttcaaacttattaacactttccttagttcaatatggggaagcccttcttcactctctctctttcttccctttgcttgctactcttgtcgagtgcatgcttttgaaacgagtgccaactcaacaacctcaacgcgttggaacccgaccaccgcgttgagtccgaaggtggtcttattgaaacatggaactctcaacaccctgagctgcaatgcgccggtgtcactgtttccaaacgcaccctcaaccgcaacggcctccacttgccatcttactcaccttatccccaaatgatcattgtcgttcaaggtgcgtaatattagtaagaagtatttatcagcttaacgtgataacaataatagtaatatgaaatatttattaaatttttataattaatctctgctatgaaaatttgattaatcatttttagtagaatttgttttttctcaactaggttttaaaacacca

SEQ ID NO: 2324 - DNA, 608 bp, Artificial
  Mutations within GlyA3B4 introduced by GmGlyA3B4_T02TALE nuclease
gttcatgtacggttgcagatataaacgaagcatagcttatgtatgaggtgtaacaaaattggaaacaatagccatgcaaggtgaagaatgtcaccaactcagaaacccttcttcattgacgtgtccctcactcactctcctctcttcactataaatcgccactcttcgtgttctccacttcaccaactccttcaaacttattaacactttccttagttcaatatggggaagcccttcttcactctctctctttctccagcaagttcaacgagtgccaactcaacaacctcaacgcgttggaaccgaccaccgcgttgagtccgaaggtggtcttattgaaacatggaactctcaacaccctgagctgcaatgcgccggtgtcactgtttccaaacgcaccctcaaccgcaacggcctccacttgccatcttactcaccttatccccaaatgatcattgtcgttcaaggtgcgtaatattagtaagaagtatttatcagcttaacgtgataacaataatagtaatatgaaatatttattaatttttataattaatctctgctagaaaatttgattaatcatttttagtagaatttgtttttctcaacta

SEQ ID NO: 2325 - DNA, 668 bp, Artificial
  Mutations within GlyA3B4 introduced by GmGlyA3B4_T02TALE nuclease
gttcatgtacggttgcagatataaacgaagcatagcttatgtatgaggtgtaacaaaattggaaacaatagccatgcaaggtgaagaatgtcaccaactcagaaacccttcttcattgacgtgtccctcactcactctcctctcttcactataaatcgccactcttcgtgttctccacttcaccaactccttcaaacttattaacactttccttagttcaatatggggaagcccttcttcactctctctctttcttccctttgcttgctactcttgtcgagtgcatgctattacctccagcaagttcaacgagtgccaactcaacaacctcaacgcgttggaacccgaccaccgcgttgagtccgaaggtggtcttattgaaacatggaactctcaacaccctgagctgcaatgcgccggtgtcactgtttccaaacgcaccctcaaccgcaacggcctccacttgccatcttactcaccttatccccaaatgatcattgtcgttcaaggtgcgtaatattagtaagaagtatttatcagcttaacgtgataacaataatagtaatatgaaatatttattaaatttttataattaatctctgctagaaaatttgattaatcattttagtagaatttgtttttctcaactaggtttttaaaacaccaca

SEQ ID NO: 2326 - DNA, 616 bp, Artificial
  Mutations within GlyA3B4 introduced by GmGlyA3B4_T02TALE nuclease
gttcatgtacggttgcagatataaacgaagcatagcttatgtatgaggtgtaacaaaattggaaacaatagccatgcaaggtgaagaatgtcaccaactcagaaacccttcttcattgacgtgtccctcactcactctcctctcttcactataaatcgccactcttcgtgttctccacttcaccaactccttcaaacttattaacactttccttagttcaatatggggaagcccttcttcactctctctctttcttccctttgcttgctactcttgtcgagtgcattacctccagcaagttcaacgagtgccaactcaacaacctcaacgcgttggaacccgaccaccgcgttgagtccgaaggtggtcttattgaaacatggaactctcaacaccctgagctgcaatgcgccggtgtcactgtttccaaacgcaccctcaaccgcaacggcctccacttgccatcttactcaccttatccccaaatgatcattgtcgttcaaggtgcgtaatattagtaagaagtatttatcagcttaacgtgataacaatatagtaatatgaaatatttattaaatttttataattaatctctgctagaaaatttgattaatca

SEQ ID NO: 2327 - DNA, 663 bp, Artificial
  Mutations within GlyA3B4 introduced by GmGlyA3B4_T02TALE nuclease
gttcatgtacggttgcagatataaacgaagcatagcttatgtatgaggtgtaacaaaattggaaacaatagccatgcaaggtgaagaatgtcaccaactcagaaacccttcttcattgacgtgtccctcactcactctcctctcttcactataaatcgccactcttcgtgttctccacttcaccaactccttcaaacttattaacactttccttagttcaatatggggaagcccttcttcactctctctctttcttccctttgcttgctactcttgtcgagtgcatctattacctccagcaagttcaacgagtgccaactcaacaacctcaacgcgttggaacccgaccaccgcgttgagtccgaaggtggtcttattgaaacatggaactctcaacaccctgagctgcaatgcgccggtgtcactgtttccaaacgcaccctcaaccgcaacggcctccacttgccatcttactcaccttatccccaaatgatcattgtcgttcaaggtgcgtaatattagtaagaagtatttatcagcttaacgtgataacaatatagtaatatgaaatatttattaaatttttataattaatctctgctagaaaatttgattaatcattttagtagaatttgtttttctcaactaggttttaaaacacca

SEQ ID NO: 2328 - DNA, 634 bp, Artificial
  Mutations within GlyA3B4 introduced by GmGlyA3B4_T02TALE nuclease
gttcatgtacggttgcagatataaacgaagcatagcttatgtatgaggtgtaacaaaattggaaacaatagccatgcaaggtgaagaatgtcaccaactcagaaacccttcttcattgacgtgtccctcactcactctcctctcttcactataaatcgccactcttcgtgttctccacttcaccaactccttcaaacttattaacactttccttagttcaatatggggaagcccttcttcactctctctctttcttccctttgcttgctactcttgtcgagtgcctattacctccagcaagttcaacgagtgccaactcaacaacctcaacgcgttggaacccgaccaccgcgttgagtccgaaggtggtcttattgaaacatggaactctcaacaccctgagctgcaatgcgccggtgtcactgtttccaaacgcaccctcaaccgcaacggcctccacttgccatcttactcaccttatccccaaatgatcattgtcgttcaaggtgcgtaatattagtaagaagtatttatcagcttaacgtgataacaataatagtaatatgaaatatttattaaatttttataattaatctctgctagaaaatttgattaatcattttagtagaatttg

SEQ ID NO: 2329 - DNA, 654 bp, Artificial
  Mutations within GlyA3B4 introduced by GmGlyA3B4_T02TALE nuclease
gttcatgtacggttgcagatataaacgaagcatagcttatgtatgaggtgtaacaaaattggaaacaatagccatgcaaggtgaagaatgtcaccaactcagaaacccttcttcattgacgtgtccctcactcactctcctctcttcactataaatcgccactcttcgtgttctccacttcaccaactccttcaaacttattaacactttccttagttcaatatggggaagcccttcttcactctctctctttcttccctttgcttgctactcttgtcgagtgcatctattacctccagcaagttcaacgagtgccaactcaacaacctcaacgcgttggaacccgaccaccgcgttgagtccgaaggtggtcttattgaaacatggaactctcaacaccctgagctgcaatgcgccggtgtcactgtttccaaacgcaccctcaaccgcaacggcctccacttgccatcttactcaccttatcccccaaatgatcattgtcgttcaaggtgcgtaatattagtaagaagtatttatcagcttaacgtgataacaatatagtaatatgaaatatttattaaatttttataattaatctctgctagaaaatttgattaatcattttagtagaatttgttttctcaactaggtttt

SEQ ID NO: 2330 - DNA, 656 bp, Artificial
  Mutations within GlyA3B4 introduced by GmGlyA3B4_T02TALE nuclease
  misc_feature (528): n is a or c or t or g
gttcatgtacggttgcagatataaacgaagcatagcttatgtatgaggtgtaacaaaattggaaacaatagccatgcaaggtgaagaatgtcaccaactcagaaacccttcttcattgacgtgtccctcactcactctcctctcttcactataaatcgccactcttcgtgttctccacttcaccaactccttcaaacttattaacactttccttagttcaatatggggaagcccttcttcactctctctctttcttccctttgcttgctactcttgtcgagtgcagtattacctccagcaagttcaacgagtgccaactcaacaacctcaacgcgttggaacccgaccaccgcgttgagtccgaaggtggtcttattgaaacatggaactctcaacaccctgagctgcaatgcgccggtgtcactgtttccaaacgcaccctcaaccgcaacggcctccacttgccatcttactcaccttatccccaaatgatcattgtcgttcaaggtgcgtaatattagtaagagnatttatcagcttaacgtgataacaatatagtaatatgaaatatttattaaatttttataattaatctctgctagaaaatttgattaatcattttagtagaatttgttttctcaactaggtttttaaaa

SEQ ID NO: 2331 - DNA, 663 bp, Artificial; identical to SEQ ID NO: 2045
  Mutations within GlyA3B4 introduced by GmGlyA3B4_T02TALE nuclease

SEQ ID NO: 2332 - DNA, 534 bp, Artificial
  Mutations within GlyA3B4 introduced by GmGlyA3B4_T02TALE nuclease
gttcatgtacggttgcagatataaacgaagcatagcttatgtatgaggtgtaacaaaattggaaacaatagccatgcaaggtgaagaatgtcaccaactcagaaacccttcttcattgacgtgtccctcactcactctcctctcttcactataaatcgccactcttcgtgttctccacttcaccaactccttcaaacttattaccactttccttagttcaatatggggaacccgaccaccgcgttgagtccgaaggtggtcttattgaaacatggaactctcaacaccctgagctgcaatgcgccggtgtcactgtttccaaacgcaccctcaaccgcaacggcctccacttgccatcttactcaccttatccccaaatgatcattgtcgttcaaggtgcgtaatattagtaagaagtatttatcagcttaacgtgataacaataatagtaatatgaaatatttattaaattttttataattaatctctgctagaaaatttgattaatcatttttagtagaatttgtttttctc

SEQ ID NO: 2333 - DNA, 650 bp, Artificial; identical to SEQ ID NO: 1234
  Mutations within GlyA3B4 introduced by GmGlyA3B4_T02TALE nuclease

SEQ ID NO: 2334 - DNA, 653 bp, Artificial
  Mutations within GlyA3B4 introduced by GmGlyA3B4_T02TALE nuclease
  misc_feature (532): n is a or c or t or g
gttcatgtacggttgcagatataaacgaagcatagcttatgtatgaggtgtaacaaaattggaaacaatagccatgcaaggtgaagaatgtcaccaactcagaaacccttcttcattgacgtgtccctcactcactctcctctcttcactataaatcgccactcttcgtgttctccacttcaccaactccttcaaacttattaacactttccttagttcaatatggggaagcccttcttcactctctctctttcttccctttgcttgctactcttgtcgagtgcatttgctattacctccagcaagttcaacgagtgccaactcaacaacctcaacgcgttggaacccgaccaccgcgttgagtccgaaggtggtcttattgaaacatggaactctcaacaccctgagctgcaatgcgccggtgtcactgtttccaaacgcaccctcaaccgcaacggcctccacttgccatcttactcaccttatccccaaatgatcattgtcgttcaaggtgcgtaatattagtaagagnatttatcagcttaacgtgataacaataatagtaatatgaaatatttattaaatttttataattaatctctgctagaaaatttgattaatcattttagtagaatttgtttttctcaactagg

SEQ ID NO: 2335 - DNA, 637 bp, Artificial
  Mutations within GlyA3B4 introduced by GmGlyA3B4_T02TALE nuclease
  misc_feature (531): n is a or c or t or g
gttcatgtacggttgcagatataaacgaagcatagcttatgtatgaggtgtaacaaaattggaaacaatagccatgcaaggtgaagaatgtcaccaactcagaaacccttcttcattgacgtgtccctcactcactctcctctcttcactataaatcgccactcttcgtgttctccacttcaccaactccttcaaacttattaacactttccttagttcaatatggggaagcccttcttcactctctctctttcttccctttgcttgctactcttgtcgagtgcattgctattacctccagcaagttcaacgagtgccaactcaacaacctcaacgcgttggaacccgaccaccgcgttgagtccgaaggtggtcttattgaaacatggaactctcaacaccctgagctgcaatgcgccggtgtcactgtttccaaacgcaccctcaaccgcaacggcctccacttgccatcttactcaccttatccccaaatgatcattgtcgttcaaggtgcgtaatattagtaagagnatttatcagcttaacgtgataacaatatagtaatatgaaatatttattaaatttttcataattaatctctgctagaaaatttgattaatcattttagtagaatttg

SEQ ID NO: 2336 - DNA, 632 bp, Artificial; identical to SEQ ID NO: 1756
  Mutations within GlyA3B4 introduced by GmGlyA3B4_T02TALE nuclease

SEQ ID NO: 2337 - DNA, 662 bp, Artificial
  Mutations within GlyA3B4 introduced by GmGlyA3B4_T02TALE nuclease
gttcatgtacggttgcagatataaacgaagcatagcttatgtatgaggtgtaacaaaattggaaacaatagccatgcaaggtgaagaatgtcaccaactcagaaacccttcttcattgacgtgtccctcactcactctcctctcttcactataaatcgccactcttcgtgttctccacttcaccaactccttcaaacttattaacactttccttagttcaatatggggaagcccttcttcactctctctctttcttccctttgcttgctactcttgtcgagtgcatgtacctccagcaagttcaacgagtgccaactcaacaacctcaacgcgttggaacccgaccaccgcgttgagtccgaaggtggtcttattgaaacatggaactctcaacaccctgagctgcaatgcgccggtgtcactgtttccaaacgcaccctcaaccgcaacggcctccacttgccatcttactcaccttatccccaaatgatcattgtcgttcaaggtgcgtaatattagtaagaagtatttatcagcttaacgtgataacaataatagtaatatgaaatatttattaaatttttataattaatctctgctagaaaatttgattaatcattttagtagaatttgttttctcaactaggttttaaaacaccaca

SEQ ID NO: 2338 - DNA, 618 bp, Artificial
  Mutations within GlyA3B4 introduced by GmGlyA3B4_T02TALE nuclease
gttcatgtacggttgcagatataaacgaagcatagcttatgtatgaggtgtaacaaaattggaaacaatagccatgcaaggtgaagaatgtcaccaactcagaaacccttcttcattgacgtgtccctcactcactctcctctcttcactataaatcgccactcttcgtgttctccacttcaccaactccttcaaacttattaacactttccttagttcaatatggggaagcccttcttcaccaactcctccagcaagttcaacgagtgccaactcaacaacctcaacgcgttggaacccgaccaccgcgttgagtccgaaggtggtcttattgaaacatggaactctcaacaccctgagctgcaatgcgccggtgtcactgtttccaaacgcaccctcaaccgcaacggcctccacttgccatcttactcaccttatccccaaatgatcattgtcgttcaaggtgcgtaatattagtaagaagtatttatcagcttaacgtgataacaataatagtaatatgaaatatttattaattttttataattaatctctgctagaaaatttgattaatcatttttagtagaatttgtttttctcaactaggtttttaaaaca

SEQ ID NO: 2339 - DNA, 664 bp, Artificial
  Mutations within GlyA3B4 introduced by GmGlyA3B4_T02TALE nuclease
gttcatgtacggttgcagatataaacgaagcatagcttatgtatgaggtgtaacaaaattggaaacaatagccatgcaaggtgaagaatgtcaccaactcagaaacccttcttcattgacgtgtccctcactcactctcctctcttcactataaatcgccactcttcgtgttctccacttcaccaactccttcaaacttattaacactttccttagttcaatatggggaagcccttcttcactctctctctttcttccctttgcttgctactcttgtcgagtgcatgctattacctccagcaagttcaacgagtgccaactcaacaacctcaacgcgttggaacccgaccaccgcgttgagtccgaaggtggtcttattgaaacatggaactctcaacaccctgagctgcaatgcgccggtgtcactgtttccaaacgcaccctcaaccgcaacggcctccacttgccatcttactcaccttatccccaaatgatcattgtcgttcaaggtgcgtaatattagtaagagtatttatcagcttaacgtgataacaataatagtaatatgaaatatttattaaatttttataattaatctctgctagaaaatttgattaatcattttagtagaatttgttttctcaactaggtttttaaaacacca

SEQ ID NO: 2340 - DNA, 664 bp, Artificial
  Mutations within GlyA3B4 introduced by GmGlyA3B4_T02TALE nuclease
gttcatgtacggttgcagatataaacgaagcatagcttatgtatgaggtgtaacaaaattggaaacaatagccatgcaaggtgaagaatgtcaccaactcagaaacccttcttcattgacgtgtccctcactcactctcctctcttcactataaatcgccactcttcgtgttctccacttcaccaactccttcaaacttattaacactttccttagttcaatatggggaagcccttcttcactctctctctttcttccctttgcttgctactcttgtcgagtgcagctattacctccagcaagttcaacgagtgccaactcaacaacctcaacgcgttggaacccgaccaccgcgttgagtccgaaggtggtcttattgaaacatggaactctcaacaccctgagctgcaatgcgccggtgtcactgtttccaaacgcaccctcaaccgcaacggcctccacttgccatcttactcaccttatccccaaatgatcattgtcgttcaaggtgcgtaatattagtaagagtatttatcagcttaacgtgataacaataatagtaatatgaaatatttattaaatttttataattaatctctgctagaaaatttgattaatcattttagtagaatttgtttttctcaactaggtttttaaaacacca

SEQ ID NO: 2341 - DNA, 552 bp, Artificial
  Mutations within GlyA3B4 introduced by GmGlyA3B4_T02TALE nuclease
gttcatgtacggttgcagatataaacgaagcatagcttatgtatgaggtgtaacaaaattggaaacaatagccatgcaaggtgaagaatgtcaccaactcagaaacccttcttcattgacgtgtccctcactcactctcctctcttcactataaatcgccactcttcgtgttctccacttcaccaacctccagcaagttcaacgagtgccaactcaacaacctcaacgcgttggaacccgaccaccgcgttgagtccgaaggtggtcttattgaaacatggaactctcaacaccctgagctgcaatgcgccggtgtcactgtttccaaacgcaccctcaaccgcaacggcctccacttgccatcttactcaccttatcccccaaatgatcattgtcgttcaaggtgcgtaatattagtaagaagtatttatcagcttaacgtgataacaataatagtaatatgaaatatttattaaattttttataattaatctctgctagaaatttgattaatcatttttagtagaatttgtttttctcaactaggttttt

SEQ ID NO: 2342 - DNA, 635 bp, Artificial; identical to SEQ ID NO: 583
  Mutations within GlyA3B4 introduced by GmGlyA3B4_T02TALE nuclease

SEQ ID NO: 2343 - DNA, 637 bp, Artificial
  Mutations within GlyA3B4 introduced by GmGlyA3B4_T02TALE nuclease
gttcatgtacggttgcagatataaacgaagcatagcttatgtatgaggtgtaacaaaattggaaacaatagccatgcaaggtgaagaatgtcaccaactcagaaacccttcttcattgacgtgtccctcactcactctcctctcttcactataaatcgccactcttcgtgttctccacttcaccaactccttcaaacttattaacactttccttagttcaatatggggaagcccttcttcactctctctctttcttccctttgcttgctactcttgtcgagtgcatgctattacctccagcaagttcaacgagtgccaactcaacaacctcaacgcgttggaacccgaccaccgcgttgagtccgaaggtggtcttattgaaacatggaactctcaacaccctgagctgcaatgcgccggtgtcactgtttccaaacgcaccctcaaccgcaacggcctccacttgccatcttactcaccttatccccaaatgatcattgtcgttcaaggtgcgtaatattagtaagaagtatttatcagcttaacgtgataacaataatagtaatatgaaatatttattaaatttttataattaatctctgctagaaaatttgattaatcattttagtagaatttg

SEQ ID NO: 2344 - DNA, 658 bp, Artificial
  Mutations within GlyA3B4 introduced by GmGlyA3B4_T02TALE nuclease
gttcatgtacggttgcagatataaacgaagcatagcttatgtatgaggtgtaacaaaattggaaacaatagccatgcaaggtgaagaatgtcaccaactcagaaacccttcttcattgacgtgtccctcactcactctcctctcttcactataaatcgccactcttcgtgttctccacttcaccaactccttcaaacttattaacactttccttagttcaatatggggaagcccttcttcactctctctctttcttccctttgcttgctactcttgtcgagtgcatacctccagcaagttcaacgagtgccaactcaacaacctcaacgcgttggaacccgaccaccgcgttgagtccgaaggtggtcttattgaaacatggaactctcaacaccctgagctgcaatgcgccggtgtcactgtttccaaacgcaccctcaaccgcaacggcctccacttgccatcttactcaccttatccccaaatgatcattgtcgttcaaggtgcgtaatattagtaagaagtatttatcagcttaacgtgataacaataatagtaatatgaaatatttattaaatttttataattaatctctgctagaaaatttgattaatcattttagtagaatttgttttctcaactaggttttaaaacacca

SEQ ID NO: 2345 - DNA, 668 bp, Artificial; identical to SEQ ID NO: 2325
  Mutations within GlyA3B4 introduced by GmGlyA3B4_T02TALE nuclease

SEQ ID NO: 2346 - DNA, 663 bp, Artificial
  Mutations within GlyA3B4 introduced by GmGlyA3B4_T02TALE nuclease
gttcatgtacggttgcagatataaacgaagcatagcttatgtatgaggtgtaacaaaattggaaacaatagccatgcaaggtgaagaatgtcaccaactcagaaacccttcttcattgacgtgtccctcactcactctcctctcttcactataaatcgccactcttcgtgttctccacttcaccaactccttcaaacttattaacactttccttagttcaatatggggaagcccttcttcactctctctctttcttccctttgcttgctactcttgtcgagtgcattttgtacctccagcaagttcaacgagtgccaactcaacaacctcaacgcgttggaacccgaccaccgcgttgagtccgaaggtggtcttattgaaacatggaactctcaacaccctgagctgcaatgcgccggtgtcactgtttccaaacgcaccctcaaccgcaacggcctccacttgccatcttactcaccttatccccaaatgatcattgtcgttcaaggtgcgtaatattagtaagaagtatttatcagcttaacgtgataacaataatagtaatatgaaatatttattaaatttttataattaatctctgctagaaaatttgattaatcattttagtagaatttgttttctcaactaggttttaaaacacca

SEQ ID NO: 2347 - DNA, 637 bp, Artificial
  Mutations within GlyA3B4 introduced by GmGlyA3B4_T02TALE nuclease
gttcatgtacggttgcagatataaacgaagcatagcttatgtatgaggtgtaacaaaattggaaacaatagccatgcaaggtgaagaatgtcaccaactcagaaacccttcttcattgacgtgtccctcactcactctcctctcttcactataaatcgccactcttcgtgttctccacttcaccaactccttcaaacttattaacactttccttagttcaatatggggaagcccttcttcactctctctctttcttccctttgcttattacctccagcaagttcaacgagtgccaactcaacaacctcaacgcgttggaacccgaccaccgcgttgagtccgaaggtggtcttattgaaacatggaactctcaacacccctgagctgcaatgcgccggtgtcactgtttccaaacgcaccctcaaccgcaacggcctccacttgccatcttactcaccttatccccaaatgatcattgtcgttcaaggtgcgtaatattagtaagaagtatttatcagcttaacgtgataacaataatagtaatatgaaatatttattaaattttttataattaatctctgctagaaaatttgattaatcatttttagtagaatttgttttttctcaactaggtttt

SEQ ID NO: 2348 - DNA, 651 bp, Artificial; identical to SEQ ID NO: 1918
  Mutations within GlyA3B4 introduced by GmGlyA3B4_T02TALE nuclease

SEQ ID NO: 2349 - DNA, 655 bp, Artificial
  Mutations within GlyA3B4 introduced by GmGlyA3B4_T02TALE nuclease
gttcatgtacggttgcagatataaacgaagcatagcttatgtatgaggtgtaacaaaattggaaacaatagccatgcaaggtgaagaatgtcaccaactcagaaacccttcttcattgacgtgtccctcactcactctcctctcttcactataaatcgccactcttcgtgttctccacttcaccaactccttcaaacttattaacactttccttagttcaatatggggaagcccttcttcactctctctctttcttccctttgcttgctactcttgtcgagtgcattacctccagcaagttcaacgagtgccaactcaacaacctcaacgcgttggaacccgaccaccgcgttgagtccgaaggtggtcttattgaaacatggaactctcaacaccctgagctgcaatgcgccggtgtcactgtttccaaacgcaccctcaaccgcaacggcctccacttgccatcttactcaccttatccccaaatgatcattgtcgttcaaggtgcgtaatattagtaagaagtatttatcagcttaacgtgataacaataatagtaatatgaaatatttattaaatttttataattaatctctgctagaaaatttgattaatcattttagtagaatttgtttttctcaactaggttttaaaa

SEQ ID NO: 2350 - DNA, 660 bp, Artificial
  Mutations within GlyA3B4 introduced by GmGlyA3B4_T02TALE nuclease
gttcatgtacggttgcagatataaacgaagcatagcttatgtatgaggtgtaacaaaattggaaacaatagccatgcaaggtgaagaatgtcaccaactcagaaacccttcttcattgacgtgtccctcactcactctcctctcttcactataaatcgccactcttcgtgttctccacttcaccaactccttcaaacttattaacactttccttagttcaatatggggaagcccttcttcactctctctctttcttccctttgcttgctactcttgtcgagtgcaattacctccagcaagttcaacgagtgccaactcaacaacctcaacgcgttggaacccgaccaccgcgttgagtccgaaggtggtcttattgaaacatggaactctcaacaccctgagctgcaatgcgccggtgtcactgtttccaaacgcaccctcaaccgcaacggcctccacttgccatcttactcaccttatccccaaatgatcattgtcgttcaaggtgcgtaatattagtaagaagtatttatcagcttaacgtgataacaataatagtaatatgaaatatttattaaatttttataattaatctctgctagaaaatttgattaatcattttagtagaatttgttttctcaatctaggttttaaaacacc

SEQ ID NO: 2351 - DNA, 651 bp, Artificial
  Mutations within GlyA3B4 introduced by GmGlyA3B4_T02TALE nuclease
gttcatgtacggttgcagatataaacgaagcatagcttatgtatgaggtgtaacaaaattggaaacaatagccatgcaaggtgaagaatgtcaccaactcagaaacccttcttcattgacgtgtccctcactcactctcctctcttcactataaatcgccactcttcgtgttctccacttcaccaactccttcaaacttattaacactttccttagttcaatatggggaagcccttcttcactctctctctttcttccctttgcttgctactcttgtcgagtgcatgcttttttcccccacttttttccttcttatcatcttcttatttactaccatacaaagctattacctccagcaagttcaacgagtgccaactcaacaacctcaacgcgttggaacccgaccaccgcgttgagtccgaaggtggtcttattgaaacatggaactctcaacaccctgagctgcaatgcgccggtgtcactgtttccaaacgcaccctcaaccgcaacggcctccacttgccatcttactcaccttatccccaaatgatcattgtcgttcaaggtgcgtaatattagtaagaagtatttatcagcttaacgtgataacaataatagtaatatgaaatatttattaaattttttataatt

SEQ ID NO: 2352 - DNA, 661 bp, Artificial
  Mutations within GlyA3B4 introduced by GmGlyA3B4_T02TALE nuclease
gttcatgtacggttgcagatataaacgaagcatagcttatgtatgaggtgtaacaaaattggaaacaatagccatgcaaggtgaagaatgtcaccaactcagaaacccttcttcattgacgtgtccctcactcactctcctctcttcactataaatcgccactcttcgtgttctccacttcaccaactccttcaaacttattaacactttccttagttcaatatggggaagcccttcttcactctctctctttcttccctttgcttgctactcttgtcgacttgctattacctccagcaagttcaacgagtgccaactcaacaacctcaacgcgttggaacccgaccaccgcgttgagtccgaaggtggtcttattgaaacatggaactctcaacaccctgagctgcaatgcgccggtgtcactgtttccaaacgcaccctcaaccgcaacggcctccacttgccatcttactcaccttatccccaaatgatcattgtcgttcaaggtgcgtaatattagtaagagtatttatcagcttaacgtgataacaatatagtaatatgaaatatttattaaatttttataattaatctctgctagaaaatttgattaatcattttagtagaatttgtttttctcaactaggtttttaaacaccaa

SEQ ID NO: 2353 - DNA, 649 bp, Artificial
  Mutations within GlyA3B4 introduced by GmGlyA3B4_T02TALE nuclease
gttcatgtacggttgcagatataaacgaagcatagcttatgtatgaggtgtaacaaaattggaaacaatagccatgcaaggtgaagaatgtcaccaactcagaaacccttcttcattgacgtgtccctcactcactctcctctcttcactataaatcgccactcttcgtgttctccacttcaccaactccttcaaacttattaacactttccttagttcaatatggggaagcccttcttcactctctctctttcttccctttgcttgctactcttgttgtgctattacctccagcaagttcaacgagtgccaactcaacaacctcaacgcgttggaacccgaccaccgcgttgagtccgaaggtggtcttattgaaacatggaactctcaacaccctgagctgcaatgcgccggtgtcactgtttccaaacgcaccctcaaccgcaacggcctccacttgccatcttactcaccttatccccaaatgatcattgtcgttcaaggtgcgtaatattagtaagaagtatttatcagcttaacgtgataacaatatagtaatatgaaatatttattaaatttttataattaatctctgctagaaaatttgattaatcattttagtagaatttgttttctcaactaggttttt

SEQ ID NO: 2354 - DNA, 634 bp, Artificial
  Mutations within GlyA3B4 introduced by GmGlyA3B4_T02TALE nuclease
gttcatgtacggttgcagatataaacgaagcatagcttatgtatgaggtgtaacaaaattggaaacaatagccatgcaaggtgaagaatgtcaccaactcagaaaccccttcttcattgacgtgtccctcactcactctcctctcttcactataaatcgccactcttcgtgttctccacttcaccaactccttcaaacttattaacactttccttagttcaatatggggaagcccttcttcactctctctctttcttccctttgcttgctactcttgtcgagtgcatgctattacctccagcaagttcaacgagtgccaactcaacaacctcaacgcgttggaacccgaccaccgcgttgagtccgaaggtggtcttattgaaacatggaactctcaacaccctgagctgcaatgcgccggtgtcactgtttccaaacgcaccctcaaccgcaacggcctccacttgccatcttactcaccttatccccaaatgatcattgtcgttcaaggtgcgtaatattagtaagagtatttatcagcttaacgtgataacaataatagtaatatgaaatatttattaaatttttataattaatctctgccagaaaatttgattaatcatttttagtagaa

SEQ ID NO: 2355 - DNA, 555 bp, Artificial
  Mutations within GlyA3B4 introduced by GmGlyA3B4_T02TALE nuclease
gttcatgtacggttgcagatataaacgaagcatagcttatgtatgaggtgtaacaaaattggaaacaatagccatgcaaggtgaagaatgtcaccaactcagaaacccttcttcattgacgtgtccctcactcactctcctctcttcactataaatcgccactcttcgtgttctccacttcaccaactccttcaaacttattaacactttccttagttcaatatggggaagcccttcttcactctctctctttcttccctttgcttgctactcaacaacctcaacgcgttggaacccgaccaccgcgttgagtccgaaggtggtcttattgaaacatggaactctcaacaccctgagctgcaatgcgccggtgtcactgtttccaaacgcaccctcaaccgcaacggcctccacttgccatcttactcaccttatccccaaatgatcattgtcgttcaaggtgcgtaatattagtaagaagtatttatcagcttaacgtgataacaataatagtaatatgaatatttattaatttttataattaatctctgctag

SEQ ID NO: 2356 - DNA, 728 bp, Artificial
  Mutations within GlyA3B4 introduced by GmGlyA3B4_T02TALE nuclease
gttcatgtacggttgcagatataaacgaagcatagcttatgtatgaggtgtaacaaaattggaaacaatagccatgcaaggtgaagaatgtcaccaactcagaaacccttcttcattgacgtgtccctcactcactctcctctcttcactataaatcgccactcttcgtgttctccacttcaccaactccttcaaacttattaacactttccttagttcaatatggggaagcccttcttcactctctctctttcttccctttgcttgctactcttgtcgagtgcataatggtgaagtccgagctcaacaacctgctgggggtcaagttgagcggggcacccgtcagtgcattgcgcaatgcatgcactgcctcaacgagtgccaactcaacaacctcaacgcgttggaacccgaccaccgcgttgagtccgaaggtggtcttattgaaacatggaactctcaacaccctgagctgcaatgcgccggtgtcactgtttccaaacgcaccctcaaccgcaacggcctccacttgccatcttactcacctttatccccaaatgatcattgtcgttcaaggtgcgtaatattagtaagaagtatttatcagcttaacgtgataacaataatagtaatatgaaaatatttattaaaattttttataattaatctctgctagaaaaatttgattaatcatttttagtagaatttgtttttctcaactaggtttt

SEQ ID NO: 2357 - DNA, 567 bp, Artificial
  Mutations within GlyA3B4 introduced by GmGlyA3B4_T02TALE nuclease
gttcatgtacggttgcagatataaacgaagcatagcttatgtatgaggtgtaacaaaattggaaacaatagccatgcaaggtgaagaatgtcaccaactcagaaacccttcttcattgacgtgtccctcactcactctcctctcttcactataaatcgccactcttcgtgttctccacttcaccaactccttcaaacttattaacactttccttatcaacgagtgccaactcaacaacctcaacgcgttggaacccgaccaccgcgttgagtccgaaggtggtcttattgaaacatggaactctcaacaccctgagctgcaatgcgccggtgtcactgtttccaaacgcaccctcaaccgcaacggcctccacttgccatcttactcaccttatccccaaatgatcattgtcgttcaaggtgcgtaatattagtaagaagtatttatcagcttaacgtgataacaataatagtaatatgaaatatttattaaattttttatattaatctctgctagaaaatttgattaatcattttagtagaatttgtttttctcaactaggttttt

SEQ ID NO: 2358 - DNA, 658 bp, Artificial
  Mutations within GlyA3B4 introduced by GmGlyA3B4_T02TALE nuclease
gttcatgtacggttgcagatataaacgaagcatagcttatgtatgaggtgtaacaaaattggaaacaatagccatgcaaggtgaagaatgtcaccaactcagaaacccttcttcattgacgtgtccctcactcactctcctctcttcactataaatcgccactcttcgtgttctccacttcaccaactccttcaaacttattaacactttccttagttcaatatggggaagcccttcttcactctctctctttcttccctttgcttgctactcttgtcgagtgcattacctccagcaagttcaacgagtgccaactcaacaacctcaacgcgttggaacccgaccaccgcgttgagtccgaaggtggtcttattgaaacatggaactctcaacaccctgagctgcaatgcgccggtgtcactgtttccaaacgcaccctcaaccgcaacggcctccacttgccatcttactcaccttatcccaatgatcattgtcgttcaaggtgcgtaatattagtaagaagtatttatcagcttaacgtgataacaataatagtaatatgaaatatttattaaatttttataattaatctctgctagaaaatttgattaatcattttagtagaatttgtttttctcaactaggttttaaaacacca

SEQ ID NO: 2359 - DNA, 567 bp, Artificial
  Mutations within GlyA3B4 introduced by GmGlyA3B4_T02TALE nuclease
gttcatgtacggttgcagatataaacgaagcatagcttatgtatgaggtgtaacaaaattggaaacaatagccatgcaaggtgaagaatgtcaccaactcagaaacccttcttcattgacgtgtccctcactcactctcctctcttcactataaatcgccactcttcgtgttctccacttcaccaactccttcaaacttattaacactttccttagttcaatatggggaagcccttcttcaacgcgttggaacccgaccaccgcgttgagtccgaaggtggtcttattgaaacatggaactctcaacaccctgagctgcaatgcgccggtgtcactgtttccaaacgcaccctcaaccgcaacggcctccacttgccatcttactcaccttatccccaaatgatcattgtcgttcaaggtgcgtaatattagtaagaagtatttatcagcttaacgtgataacaataatagtaatatgaaatatttattaaattttttataattaatctctgctagaaaatttgattaaatcattttagtagaatttgtttttctcaactaggtttt

SEQ ID NO: 2360 - DNA, 663 bp, Artificial; identical to SEQ ID NO: 2191
  Mutations within GlyA3B4 introduced by GmGlyA3B4_T02TALE nuclease

SEQ ID NO: 2361 - DNA, 660 bp, Artificial
  Mutations within GlyA3B4 introduced by GmGlyA3B4_T02TALE nuclease
gttcatgtacggttgcagatataaacgaagcatagcttatgtatgaggtgtaacaaaattggaaacaatagccatgcaaggtgaagaatgtcaccaactcagaaacccttcttcattgacgtgtccctcactcactctcctctcttcactataaatcgccactcttcgtgttctccacttcaccaactccttcaaacttattaacactttccttagttcaatatggggaagcccttcttcactctctctctttcttccctttgcttgctactcttgtcgagtgcatggctattacctccagcaagttcaacgagtgccaactcaacaacctcaacgcgttggaacccgaccaccgcgttgagtccgaaggtggtcttattgaaacatggaactctcaacaccctgagctgcaatgcgccggtgtcactgtttccaaacgcaccctcaaccgcaacggcctccacttgccatcttactcaccttatccccaaatgatcattgtcgttcaaggtgcgtaatattagtaagagtatttatcagcttaacgtgataacaataatagtaatatgaaatatttattaaatttttataattaatctctgctagaaaatttgattaatcattttagtagaatttgttttctcaactaggtttttaaaa

SEQ ID NO: 2362 - DNA, 508 bp, Artificial
  Mutations within GlyA3B4 introduced by GmGlyA3B4_T02TALE nuclease
gttcatgtacggttgcagatataaacgaagcatagcttatgtatgaggtgtaacaaaattggaaacaatagccatgcaaggtgaagaatgtcaccaactcagaaacccttcttcattgacgtgtccctcactcactctttgctattacctccagcaagttcaacgagtgccaactcaacaacctcaacgcgttggaacccgaccaccgcgttgagtccgaaggtggtcttattgaaacatggaactctcaacaccctgagctgcaatgcgccggtgtcactgtttccaaacgcaccctcaaccgcaacggcctccacttgccatcttactcaccttatccccaaatgatcattgtcgttcaaggtgcgtaatattagtaagaagtatttatcagcttaacgtgataacaataatagtaatatgaaatatttattaaattttttataattaatctctgctagaaaatttgattaatcatttttagtagaatttgtttttctcaactagg

SEQ ID NO: 2363 - DNA, 387 bp, Artificial
  Mutations within GlyA3B4 introduced by GmGlyA3B4_T02TALE nuclease
gttcatgtacggttgcagatataaacgaagcatagtcttatgtatgaggtgtaacaaaattggaaaccaatagccatgcaaggtgaagaatgtcaccaactcagaaacccttcttcattgacgttgtccctcactcactctcctctcttcactataaatcgccactcttcgtgttcttccacttcaccaactccttcaaacttattaacactttccttagttcaatatggggaagcccttcttcactctcaacaccctgagctgcaatgcgccggtgtcactgtttccaaacgcaccctcaaccgcaacggcctccacttgccatcttactcaccttatccccaaatgatcattgtcgttcaaggtgcgtaatattagtaagaagta

SEQ ID NO: 2364 - DNA, 664 bp, Artificial
  Mutations within GlyA3B4 introduced by GmGlyA3B4_T02TALE nuclease
gttcatgtacggttgcagatataaacgaagcatagcttatgtatgaggtgtaacaaaattggaaacaatagccatgcaaggtgaagaatgtcaccaactcagaaaccccttcttcattgacgtgtccctcactcactctcctctcttcactataaatcgccactcttcgtgttctccacttcaccaactccttcaaacttattaacactttccttagttcaatatggggaagcccttcttcactctctctctttcttccctttgcttgctactcttgtcgagtgcatctattacctccagcaagttcaacgagtgccaactcaacaacctcaacgcgttggaacccgaccaccgcgttgagtccgaaggtggtcttattgaaacatggaactctcaacaccctgagctgcaatgcgccggtgtcactgtttccaaacgcaccctcaaccgcaacggcctccacttgccatcttactcaccttatccccaaatgatcattgtcgttcaaggtgcgtaatattagtaagaagtatttatcagcttaacgtgataacaataatagtaatatgaaatatttattaaatttttataattaatctctgctagaaaatttgattaatcattttagtagaatttgttttctcaactaggttttaaaacacca

SEQ ID NO: 2365 - DNA, 632 bp, Artificial; identical to SEQ ID NO: 1756
  Mutations within GlyA3B4 introduced by GmGlyA3B4_T02TALE nuclease

SEQ ID NO: 2366 - DNA, 651 bp, Artificial
  Mutations within GlyA3B4 introduced by GmGlyA3B4_T02TALE nuclease
gttcatgtacggttgcagatataaacgaagcatagcttatgtatgaggtgtaacaaaattggaaacaatagccatgcaaggtgaagaatgtcaccaactcagaaacccttcttcattgacgtgtccctcactcactctcctctcttcactataaatcgccactcttcgtgttctccacttcaccaactccttcaaacttattaacactttccttagttcaatatggggaagcccttcttcactctctctctttcttccctttgcttgctactcttgtcgagtgcatgcgctggagacggtccagcggctgttgccggtgctgtgccaggcccacggcttgaccccggagcaggtggtgtgctattacctccagcaagttcaacgagtgccaactcaacaacctcaacgcgttggaacccgaccaccgcgttgagtccgaaggtggtcttattgaaacatggaactctcaacaccctgagctgcaatgcgccggtgtcactgtttccaaacgcaccctcaaccgcaacggcctccacttgccatcttactcaccttatccccaaatgatcattgtcgttcaaggtgcgtaatattagtaagaagtatttatcgcttaacgtgataacaataatagtaatatgaaaatattta

SEQ ID NO: 2367 - DNA, 614 bp, Artificial
  Mutations within GlyA3B4 introduced by GmGlyA3B4_T02TALE nuclease
gttcatgtacggttgcagatataaacgaagcatagcttatgtatgaggtgtaacaaaattggaaacaatagccatgcaaggtgaagaatgtcaccaactcagaaacccttcttcattgacgtgtccctcactcactctcctctcttcactataaatcgccactcttcgtgttctccacttcaccaactccttcaaacttattaacactttccttagttcaatatggggaagcccttcttcactctctctctttcttccctttgcttgctactcaacaacctcaacgcgttggaacccgaccaccgcgttgagtccgaaggtggtcttattgaaacatggaactctcaacaccctgagctgcaatgcgccggtgtcactgtttccaaacgcaccctcaaccgcaacggcctccacttgccatcttactcaccttatccccaaatgatcattgtcgttcaaggtgcgtaatattagtaagaagtatttatcagcttaacgtgataacaataatagtaatatgaaatatttattaatttttataattaatctctgctagaaaatttgattaatcatttttagtagaatttgtttttctcaactaggtttttaaaaca

SEQ ID NO: 2368 - DNA, 575 bp, Artificial
  Mutations within GlyA3B4 introduced by GmGlyA3B4_T02TALE nuclease
gttcatgtacggttgcagatataaacgaagcatagcttatgtatgaggtgtaacaaaattggaaacaatagccatgcaaggtgaagaatgtcaccaactcagaaacccttcttcattgacgtgtccctcactcactctcctctcttcactataaatcgccactcttcgtgttctccacttcaccaactccttcaaacttattaacactttacctccagcaagttcaacgagtgccaactcaacaacctcaacgcgttggaacccgaccaccgcgttgagtccgaaggtggtcttattgaaacatggaactctcaacaccctgagctgcaatgcgccggtgtcactgtttccaaacgcaccctcaaccgcaacggcctccacttgccatcttactcaccttatccccaaaatgatcattgtcgttcaaggtgcgtaatattagtaagaagtatttatcagcttaacgtgataacaataatagtaatatgaaatatttattaaattttttatattaatctctgctagaaaatttgataatcattttagtagaatttgtttttctcaactaggttttt

SEQ ID NO: 2369 - DNA, 612 bp, Artificial
  Mutations within GlyA3B4 introduced by GmGlyA3B4_T02TALE nuclease
gttcatgtacggttgcagatataaacgaagcatagcttatgtatgaggtgtaacaaaattggaaacaatagccatgcaaggtgaagaatgtcaccaactcagaaacccttcttcattgacgtgtccctcactcactctcctctcttcactataaatcgccactcttcgtgttctccacttcaccaactccttcaaacttattaacactttccttagttcaatatggggaagcccttcttcactctctctctttcttccctttgcttgctactcttgtcgagtgcatgttcaacgagtgccaactcaacaacctcaacgcgttggaacccgaccaccgcgttgagtccgaaggtggtcttattgaaacatggaactctcaacaccctgagctgcaatgcgccggtgtcactgtttccaaacgcaccctcaaccgcaacggcctccacttgccatcttactcaccttatccccaaatgatcattgtcgttcaaggtgcgtaaatattagtaagaagtatttatcagcttaacgtgataacaataatagtaatatgaaatatttattaaattttttataattaatctctgctagaaaatttgattaatcttttta

SEQ ID NO: 2370 - DNA, 658 bp, Artificial
  Mutations within GlyA3B4 introduced by GmGlyA3B4_T02TALE nuclease
gttcatgtacggttgcagatataaacgaagcatagcttatgtatgaggtgtaacaaaattggaaacaatagccatgcaaggtgaagaatgtcaccaactcagaaacccttcttcattgacgtgtccctcactcactctcctctcttcactataaatcgccactcttcgtgttctccacttcaccaactccttcaaacttattaacactttccttagttcaatatggggaagcccttcttcactctctctctttcttccctttgcttgctactcttgtcgagtgctacctccagcaagttcaacgagtgccaactcaacaacctcaacgcgttggaacccgaccaccgcgttgagtccgaaggtggtcttattgaaacatggaactctcaacaccctgagctgcaatgcgccggtgtcactgtttccaaacgcaccctcaaccgcaacggcctccacttgccatcttactcaccttatccccaaatgatcattgtcgttcaaggtgcgtaatattagtaagaagtatttatcagcttaacgtgataacaataatagtaatatgaaatatttattaaatttttataattaatctctgctagaaaatttgattaatcattttagtagaatttgttttctcaactaggtttttaaaacacca

SEQ ID NO: 2371 - DNA, 656 bp, Artificial
  Mutations within GlyA3B4 introduced by GmGlyA3B4_T02TALE nuclease
gttcatgtacggttgcagatataaacgaagcatagcttatgtatgaggtgtaacaaaattggaaacaatagccatgcaaggtgaagaatgtcaccaactcagaaacccttcttcattgacgtgtccctcactcactctcctctcttcactataaatcgccactcttcgtgttctccacttcaccaactccttcaaacttattaacactttccttagttcaatatggggaagcccttcttcactctctctctttcttccctttgcttgctactcttgtcgagtgtacctccagcaagttcaacgagtgccaactcaacaacctcaacgcgttggaacccgaccaccgcgttgagtccgaaggtggtcttattgaaacatggaactctcaacaccctgagctgcaatgcgccggtgtcactgtttccaaacgcaccctcaaccgcaacggcctccacttgccatcttactcaccttatccccaaatgatcattgtcgttcaaggtgcgtaatattagtaagaagtatttatcagcttaacgtgataacaataatagtaatatgaaatatttattaaatttttataattaatctctgctagaaaatttgattaatcattttagtagaatttgttttctcaactaggttttaaaacacca

SEQ ID NO: 2372 - DNA, 666 bp, Artificial; identical to SEQ ID NO: 1986
  Mutations within GlyA3B4 introduced by GmGlyA3B4_T02TALE nuclease

SEQ ID NO: 2373 - DNA, 649 bp, Artificial; identical to SEQ ID NO: 858
  Mutations within GlyA3B4 introduced by GmGlyA3B4_T02TALE nuclease

SEQ ID NO: 2374 - DNA, 660 bp, Artificial; identical to SEQ ID NO: 1763
  Mutations within GlyA3B4 introduced by GmGlyA3B4_T02TALE nuclease

SEQ ID NO: 2375 - DNA, 650 bp, Artificial
  Mutations within GlyA3B4 introduced by GmGlyA3B4_T02TALE nuclease
gttcatgtacggttgcagatataaacgaagcatagcttatgtatgaggtgtaacaaaattggaaacaatagccatgcaaggtgaagaatgtcaccaactcagaaacccttcttcattgacgtgtccctcactcactctcctctcttcactataaatcgccactcttcgtgttctccacttcaccaactccttcaaacttattaacactttccttagttcaatatggggaagcccttcttcactctctctctttcttccctttgcttgctactcttgtcgagtgcacttacttacctcagcaagttcaacgagtgccaactcaacaacctcaacgcgttggaacccgaccaccgcgttgagtccgaaggtggtcttattgaaacatggaactctcaacaccctgagctgcaatgcgccggtgtcactgtttccaaacgcaccctcaaccgcaacggcctccacttgccatcttactcaccttatccccaaatgatcattgtcgttcaaggtgcgtaatattagtaagaagtatttatcagcttaacgtgataacaataatagtaatatgaaatatttattaaatttttataattaatctctgctagaaaatttgattaatcattttagtagaatttgttttctcaactagg

SEQ ID NO: 2376 - DNA, 662 bp, Artificial
  Mutations within GlyA3B4 introduced by GmGlyA3B4_T02TALE nuclease
gttcatgtacggttgcagatataaacgaagcatagcttatgtatgaggtgtaacaaaattggaaacaatagccatgcaaggtgaagaatgtcaccaactcagaaacccttcttcattgacgtgtccctcactcactctcctctcttcactataaatcgccactcttcgtgttctccacttcaccaactccttcaaacttattaacactttccttagttcaatatggggaagcccttcttcactctctctctttcttccctttgcttgctactcttgtcgagtgcatattacctccagcaagttcaacgagtgccaactcaacaacctcaacgcgttggaacccgaccaccgcgttgagtccgaaggtggtcttattgaaacatggaactctcaacaccctgagctgcaatgcgccggtgtcactgtttccaaacgcaccctcaaccgcaacggcctccacttgccatcttactcaccttatccccaaatgatcattgtcgttcaaggtgcgtaatattagtaagaagtatttatcagcttaacgtgataacaataatagtaatatgaaatatttattaaatttttataattaatctctgctagaaaatttgattaatcattttagtagaatttgtttttctcaactaggttttaaaacacca

SEQ ID NO: 2377 - DNA, 578 bp, Artificial; identical to SEQ ID NO: 2133
  Mutations within GlyA3B4 introduced by GmGlyA3B4_T02TALE nuclease

SEQ ID NO: 2378 - DNA, 532 bp, Artificial
  Mutations within GlyA3B4 introduced by GmGlyA3B4_T02TALE nuclease
gttcatgtacggttgcagatataaacgaagcatagcttatgtatgaggtgtaacaaaattggaaacaatagccatgcaaggtgaagaatgtcaccaactcagaaacccttcttcattgacgtgtccctcactcactctcctctcttcactataaatcgccactcttcgtgttctccacttcaccaactccttcaaacttattaacactttccttagttcaatatggggaagcccttcttcaacgcgttggaacccgaccaccgcgttgagtccgaaggtggtcttattgaaacatggaactctcaacaccctgagctgcaatgcgccggtgtcactgtttccaaacgcaccctcaaccgcaacggcctccacttgccatcttactcaccttatccccaaatgatcattgtcgttcaaggtgcgtaatattagtaagaagtatttatcagcttaacgtgataacaataatagtaatatgaaatatttattaaattttttataattaatctctgctagaaaatttgattaatca

SEQ ID NO: 2379 - DNA, 666 bp, Artificial
  Mutations within GlyA3B4 introduced by GmGlyA3B4_T02TALE nuclease
gttcatgtacggttgcagatataaacgaagcatagcttatgtatgaggtgtaacaaaattggaaacaatagccatgcaaggtgaagaatgtcaccaactcagaaacccttcttcattgacgtgtccctcactcactctcctctcttcactataaatcgccactcttcgtgttctccacttcaccaactccttcaaacttattaacactttccttagttcaatatggggaagcccttcttcactctctctctttcttccctttgcttgctactcttgtcgagtgcattgctattacctccagcaagttcaacgagtgccaactcaacaacctcaacgcgttggaacccgaccaccgcgttgagtccgaaggtggtcttattgaaacatggaactctcaacaccctgagctgcaatgcgccggtgtcactgtttccaaacgcaccctcaaccgcaacggcctccacttgccatcttactcaccttatccccaaatgatcattgtcgttcaaggtgcgtaatattagtaagaagtatttatcagcttaacgtgataacaataatagtaatatgaaatatttattaaatttttataattaatctctgctagaaaatttgattaatcattttagtagaatttgtttttctcaactaggttttaaaacacca

SEQ ID NO: 2380 - DNA, 655 bp, Artificial
  Mutations within GlyA3B4 introduced by GmGlyA3B4_T02TALE nuclease
  misc_feature (530): n is a or c or t or g
gttcatgtacggttgcagatataaacgaagcatagcttatgtatgaggtgtaacaaaattggaaacaatagccatgcaaggtgaagaatgtcaccaactcagaaacccttcttcattgacgtgtccctcactcactctcctctcttcactataaatcgccactcttcgtgttctccacttcaccaactccttcaaacttattaacactttccttagttcaatatggggaagcccttcttcactctctctctttcttccctttgcttgctactcttgtcgagtgctgctattacctccagcaagttcaacgagtgccaactcaacaacctcaacgcgttggaacccgaccaccgcgttgagtccgaaggtggtcttattgaaacatggaactctcaacaccctgagctgcaatgcgccggtgtcactgtttccaaacgcaccctcaaccgcaacggcctccacttgccatcttactcaccttatccccaaatgatcattgtcgttcaaggtgcgtaatattagtaagaagnatttatcagcttaacgtgataacaataatagtaatatgaaatatttattaaatttttataattaatctctgctagaaaatttgattaatcattttagtagaatttgttttctcaactaggttttt

SEQ ID NO: 2381 - DNA, 655 bp, Artificial; identical to SEQ ID NO: 1786
  Mutations within GlyA3B4 introduced by GmGlyA3B4_T02TALE nuclease

SEQ ID NO: 2382 - DNA, 661 bp, Artificial
  Mutations within GlyA3B4 introduced by GmGlyA3B4_T02TALE nuclease
gttcatgtacggttgcagatataaacgaagcatagcttatgtatgaggtgtaacaaaattggaaacaatagccatgcaaggtgaagaatgtcaccaactcagaaacccttcttcattgacgtgtccctcactcactctcctctcttcactataaatcgccactcttcgtgttctccacttcaccaactccttcaaacttattaacactttccttagttcaatatggggaagcccttcttcactctctctctttcttccctttgcttgctactcttgtcgagtgcattattacctccagcaagttcaacgagtgccaactcaacaacctcaacgcgttggaacccgaccaccgcgttgagtccgaaggtggtcttattgaaacatggaactctcaacaccctgagctgcaatgcgccggtgtcactgtttccaaacgcaccctcaaccgcaacggcctccacttgccatcttactcaccttatccccaaatgatcattgtcgttcaaggtgcgtaatattagtaagaagtatttatcagcttaacgtgataacaatatagtaatatgaaatatttattaaatttttataattaatctctgctagaaaatttgattaatcattttagtagaatttgttttctcaactaggttttaaaacacca

SEQ ID NO: 2383 - DNA, 652 bp, Artificial
  Mutations within GlyA3B4 introduced by GmGlyA3B4_T02TALE nuclease
gttcatgtacggttgcagatataaacgaagcatagcttatgtatgaggtgtaacaaaattggaaacaatagccatgcaaggtgaagaatgtcaccaactcagaaacccttcttcattgacgtgtccctcactcactctcctctcttcactataaatcgccactcttcgtgttctccacttcaccaactccttcaaacttattaacactttccttagttcaatatggggaagcccttcttcactctctctctttcttccctttgcttgctactcttgtcgagtgcctattacctccagcaagttcaacgagtgccaactcaacaacctcaacgcgttggaacccgaccaccgcgttgagtccgaaggtggtcttattgaaacatggaactctcaacaccctgagctgcaatgcgccggtgtcactgtttccaaacgcaccctcaaccgcaacggcctccacttgccatcttactcaccttatccccaaatgatcattgtcgttcaaggtgcgtaatattagtaagaagtatttatcagcttaacgtgataacaataatagtaatatgaaatatttattaaatttttataattaatctctgctagaaaatttgattaatcattttagtagaatttgttttctcaactaggtttt

SEQ ID NO: 2384 - DNA, 659 bp, Artificial; identical to SEQ ID NO: 1853
  Mutations within GlyA3B4 introduced by GmGlyA3B4_T02TALE nuclease

SEQ ID NO: 2385 - DNA, 650 bp, Artificial; identical to SEQ ID NO: 2169
  Mutations within GlyA3B4 introduced by GmGlyA3B4_T02TALE nuclease

SEQ ID NO: 2386 - DNA, 665 bp, Artificial
  Mutations within GlyA3B4 introduced by GmGlyA3B4_T02TALE nuclease
  misc_feature (530): n is a or c or t or g
gttcatgtacggttgcagatataaacgaagcatagcttatgtatgaggtgtaacaaaattggaaacaatagccatgcaaggtgaagaatgtcaccaactcagaaacccttcttcattgacgtgtccctcactcactctcctctcttcactataaatcgccactcttcgtgttctccacttcaccaactccttcaaacttattaacactttccttagttcaatatggggaagcccttcttcactctctctctttcttccctttgcttgctactcttgtcgagtgcatgctattacctccagcaagttcaacgagtgccaactcaacaacctcaacgcgttggaacccgaccaccgcgttgagtccgaaggtggtcttattgaaacatggaactctcaacaccctgagctgcaatgcgccggtgtcactgtttccaaacgcaccctcaaccgcaacggcctccacttgccatcttactcaccttatccccaaatgatcattgtcgttcaaggtgcgtaatattagtaagagnatttatcagcttaacgtgataacaatatagtaatatgaaatatttattaaatttttataattaatctctgctagaaaatttgattaatcattttagtagaatttgttttctcaactaggtttttaaaacaccaca

SEQ ID NO: 2387 - DNA, 668 bp, Artificial
  Mutations within GlyA3B4 introduced by GmGlyA3B4_T02TALE nuclease
gttcatgtacggttgcagatataaacgaagcatagcttatgtatgaggtgtaacaaaattggaaacaatagccatgcaaggtgaagaatgtcaccaactcagaaacccttcttcattgacgtgtccctcactcactctcctctcttcactataaatcgccactcttcgtgttctccacttcaccaactccttcaaacttattaacactttccttagttcaatatggggaagcccttcttcactctctctctttcttccctttgcttgctactcttgtcgagtgcatttgctattacctccagcaagttcaacgagtgccaactcaacaacctcaacgcgttggaacccgaccaccgcgttgagtccgaaggtggtcttattgaaacatggaactctcaacaccctgagctgcaatgcgccggtgtcactgtttccaaacgcaccctcaaccgcaacggcctccacttgccatcttactcaccttatccccaaatgatcattgtcgttcaaggtgcgtaatattagtaagagtatttatcagcttaacgtgatacaataatagtaatatgaaatatttattaaatttttataattaatctctgctagaaaatttgattaatcattttagtagaatttgtttttctcaactaggtttttaaaacaccaca

SEQ ID NO: 2388 - DNA, 656 bp, Artificial
  Mutations within GlyA3B4 introduced by GmGlyA3B4_T02TALE nuclease
gttcatgtacggttgcagatataaacgaagcatagcttatgtatgaggtgtaacaaaattggaaacaatagccatgcaaggtgaagaatgtcaccaactcagaaacccttcttcattgacgtgtccctcactcactctcctctcttcactataaatcgccactcttcgtgttctccacttcaccaactccttcaaacttattaacactttccttagttcaatatggggaagcccttcttcactctctctctttcttccctttgcttgctactcttgtcgagtgcattattacctccagcaagttcaacgagtgccaactcaacaacctcaacgcgttggaacccgaccaccgcgttgagtccgaaggtggtcttattgaaacatggaactctcaacaccctgagctgcaatgtgccggtgtcactgtttccaaacgcaccctcaaccgcaacggcctccacttgccatcttactcaccttatccccaaatgatcattgtcgttcaaggtgcgtaatattagtaagaagtatttatcagcttaacgtgataacaataatagtaatatgaaatatttattaaatttttataattaatctctgctagaaaatttgattaatcatttttagtagaatttgtttttctcaactaggttttt

SEQ ID NO: 2389 - DNA, 634 bp, Artificial
  Mutations within GlyA3B4 introduced by GmGlyA3B4_T02TALE nuclease
gttcatgtacggttgcagatataaacgaagcatagcttatgtatgaggtgtaacaaaattggaaacaatagccatgcaaggtgaagaatgtcaccaactcagaaaccccttcttcattgacgtgtccctcactcactctcctctcttcactataaatcgccactcttcgtgttctccacttcaccaactccttcaaacttattaacactttccttagttcaatatggggaagcccttcttcactctctctctttcttccctttgcttgctactcttgtcgagtgctattacctccagcaagttcaacgagtgccaactcaacaacctcaacgcgttggaacccgaccaccgcgttgagtccgaaggtggtcttattgaaacatggaactctcaacaccctgagctgcaatgcgccggtgtcactgtttccaaacgcaccctcaaccgcaacggcctccacttgccatcttactcaccttatccccaaatgatcattgtcgttcaaggtgcgtaatattagtaagaagtatttatcagcttaacgtgataacaataatagtaatatgaaatatttattaaatttttataattaatctctgctagaaaatttgattaatcattttagtagaatttg

SEQ ID NO: 2390 - DNA, 660 bp, Artificial; identical to SEQ ID NO: 1717
  Mutations within GlyA3B4 introduced by GmGlyA3B4_T02TALE nuclease

SEQ ID NO: 2391 - DNA, 571 bp, Artificial; identical to SEQ ID NO: 1906
  Mutations within GlyA3B4 introduced by GmGlyA3B4_T02TALE nuclease

SEQ ID NO: 2392 - DNA, 635 bp, Artificial
  Mutations within GlyA3B4 introduced by GmGlyA3B4_T02TALE nuclease
gttcatgtacggttgcagatataaacgaagcatagcttatgtatgaggtgtaacaaaattggaaacaatagccatgcaaggtgaagaatgtcaccaactcagaaacccttcttcattgacgtgtccctcactcactctcctctcttcactataaatcgccactcttcgtgttctccacttcaccaactccttcaaacttattaacactttccttagttcaatatggggaagcccttcttcactctctctctttcttccctttgcttgctactcttgtcgagtgcgctattacctccagcaagttcaacgagtgccaactcaacaacctcaacgcgttggaacccgaccaccgcgttgagtccgaaggtggtcttattgaaacatggaactctcaacaccctgagctgcaatgcgccggtgtcactgtttccaaacgcaccctcaaccgcaacggcctccacttgccatcttactcaccttatccccaaatgatcattgtcgttcaaggtgcgtaatattagtaagaagtatttatcagcttaacgtgataacaataatagtaatatgaaatatttattaaatttttataattaatctctgctagaaaatttgattaatcattttagtagaatttg

SEQ ID NO: 2393 - DNA, 619 bp, Artificial
  Mutations within GlyA3B4 introduced by GmGlyA3B4_T02TALE nuclease
gttcatgtacggttgcagatataaacgaagcatagcttatgtatgaggtgtaacaaaattggaaacaatagccatgcaaggtgaagaatgtcaccaactcagaaacccttcttcattgacgtgtccctcactcactctcctctcttcactataaatcgccactcttcgtgttctccacttcaccaactccttcaaacttattaacactttccttagttcaatatggggaagcccttcttcactctctctctttcttccctttgcttgctactcttgtcgagtgccaactcaacaacctcaacgcgttggaacccgaccaccgcgttgagtccgaaggtggtcttattgaaacatggaactctcaacaccctgagctgcaatgcgccggtgtcactgtttccaaacgcaccctcaaccgcaacggcctccacttgccatcttactcaccttatccccaaatgatcattgtcgttcaaggtgcgtaatattagtaagaagtatttatcagcttaacgtgataacaataatagtaatatgaaatatttattaaattttttataattaatctctgctagaaaatttgattaatcatttttagtagaatttgtttttctcaact

SEQ ID NO: 2394 - DNA, 631 bp, Artificial
  Mutations within GlyA3B4 introduced by GmGlyA3B4_T02TALE nuclease
  misc_feature (530): n is a or c or t or g
gttcatgtacggttgcagatataaacgaagcatagcttatgtatgaggtgtaacaaaattggaaacaatagccatgcaaggtgaagaatgtcaccaactcagaaacccttcttcattgacgtgtccctcactcactctcctctcttcactataaatcgccactcttcgtgttctccacttcaccaactccttcaaacttattaacactttccttagttcaatatggggaagcccttcttcactctctctctttcttccctttgcttgctactcttgtcgagtgcatgctattacctccagcaagttcaacgagtgccaactcaacaacctcaacgcgttggaacccgaccaccgcgttgagtccgaaggtggtcttattgaaacatggaactctcaacaccctgagctgcaatgcgccggtgtcactgtttccaaacgcaccctcaaccgcaacggcctccacttgccatcttactcaccttatccccaaatgatcattgtcgttcaaggtgcgtaatattagtaagagnatttatcagcttaacgtgatacaataatagtaatatgaaatatttattaaatttttataattaatctctgctagaaaatttgattaatcattttagtagaa

SEQ ID NO: 2395 - DNA, 670 bp, Artificial
  Mutations within GlyA3B4 introduced by GmGlyA3B4_T02TALE nuclease
gttcatgtacggttgcagatataaacgaagcatagcttatgtatgaggtgtaacaaaattggaaacaatagccatgcaaggtgaagaatgtcaccaactcagaaacccttcttcattgacgtgtccctcactcactctcctctcttcactataaatcgccactcttcgtgttctccacttcaccaactccttcaaacttattaacactttccttagttcaatatggggaagcccttccttcactctctctctttcttccctttgcttgctactcttgtcgagtgcatgctattacctccagcaagttcaacgagtgccaactcaacaacctcaacgcgttggaacccgaccaccgcgttgagtccgaaggtggtcttattgaaacatggaactctcaacaccctgagctgcaatgcgccggtgtcactgtttccaaacgcaccctcaaccgcaacggcctccacttgccatcttactcaccttatccccaaatgatcattgtcgttcaaggtgcgtaatattagtaagaagtatttatcagcttaacgtgataacaataatagtaatatgaaaatatttattaaatttttataattaatctctgctagaaaatttgattaatcattttagtagaatttgtttttctcaactaggtttttaaaacaccaca

SEQ ID NO: 2396 - DNA, 648 bp, Artificial
  Mutations within GlyA3B4 introduced by GmGlyA3B4_T02TALE nuclease
gttcatgtacggttgcagatataaacgaagcatagcttatgtatgaggtgtaacaaaattggaaacaatagccatgcaaggtgaagaatgtcaccaactcagaaaccccttcttcattgacgtgtccctcactcactctcctctcttcactataaatcgccactcttcgtgttctccacttcaccaactccttcaaacttattaacactttccttagttcaatatggggaagcccttcttcactctctctctttcttccctttgcttgctactcttgtcgagtgacctccagcaagttcaacgagtgccaactcaacaacctcaacgcgttggaacccgaccaccgcgttgagtccgaaggtggtcttattgaaacatggaactctcaacaccctgagctgcaatgcgccggtgtcactgtttccaaacgcaccctcaaccgcaacggcctccacttgccatcttactcaccttatccccaaatgatcattgtcgttcaaggtgcgtaatattagtcaagaagtatttatcagcttaacgtgataacaataatagtaatatgaaatatttattaaattttttataattaatctctgctagaaaatttgattaatcatttttagtagaatttgttttttctcaactagg

SEQ ID NO: 2397 - DNA, 640 bp, Artificial
  Mutations within GlyA3B4 introduced by GmGlyA3B4_T02TALE nuclease
gttcatgtacggttgcagatataaacgaagcatagcttatgtatgaggtgtaacaaaattggaaacaatagccatgcaaggtgaagaatgtcaccaactcagaaacccttcttcattgacgtgtccctcactcactctcctctcttcactataaatcgccactcttcgtgttctccacttcaccaactccttcaaacttattaacactttccttagttcaatatggggaagcccttcttcactctctctctttcttccctttgcttgctactcttgtcgagtgcaacgagtgccaactcaacaacctcaacgcgttggaacccgaccaccgcgttgagtccgaaggtggtcttattgaaacatggaactctcaacaccctgagctgcaatgcgccggtgtcactgttttccaaacgcaccctcaaccgcaacggcctccacttgccatcttactcaccttatcccccaaatgatcattgtcgttcaaggtgcgtaatattagtaagaagtatttatcagctttaacgtgataacaataatagtaatatgaaatatttattaaattttttataaattaatctctgctagaaaatttgattaatcatttttagtagaatttgttttttctcaactaggtttt

SEQ ID NO: 2398 - DNA, 604 bp, Artificial
  Mutations within GlyA3B4 introduced by GmGlyA3B4_T02TALE nuclease
gttcatgtacggttgcagatataaacgaagcatagcttatgtatgaggtgtaacaaaattggaaacaatagccatgcaaggtgaagaatgtcaccaactcagaaacccttcttcattgacgtgtccctcactcactctcctctcttcactataaatcgccactcttcgtgttctccacttcaccaactccttcaaacttattaacactttccttagttcaatatggggaagcccttctccagcaagttcaacgagtgccaactcaacaacctcaacgcgttggaacccgaccaccgcgttgagtccgaaggtggtcttattgaacatggaactctcaacaccctgagctgcaatgcgccggtgtcactgtttccaaacgcaccctcaaccgcaacggcctccacttgccatcttactcaccttatccccaaatgatcattgtcgttcaaggtgcgtaatattagtaagaagtatttatcagcttaacgtgataacaataatagtaatatgaaatatttattaaattttttataattaatctctgctagaaaatttgattaatcatttttagtagaatttgtttttctcaactaggtttttaaaa

SEQ ID NO: 2399 - DNA, 665 bp, Artificial
  Mutations within GlyA3B4 introduced by GmGlyA3B4_T02TALE nuclease
  misc_feature (531): n is a or c or t or g
gttcatgtacggttgcagatataaacgaagcatagcttatgtatgaggtgtaacaaaattggaaacaatagccatgcaaggtgaagaatgtcaccaactcagaaacccttcttcattgacgtgtccctcactcactctcctctcttcactataaatcgccactcttcgtgttctccacttcaccaactccttcaaacttattaacactttccttagttcaatatggggaagcccttcttcactctctctctttcttccctttgcttgctactcttgtcgagtgctttgctattacctccagcaagttcaacgagtgccaactcaacaacctcaacgcgttggaacccgaccaccgcgttgagtccgaaggtggtcttattgaaacatggaactctcaacaccctgagctgcaatgcgccggtgtcactgtttccaaacgcaccctcaaccgcaacggcctccacttgccatcttactcaccttatccccaaatgatcattgtcgttcaaggtgcgtaatattagtaagagnatttatcagcttaacgtgataacaatatagtaatatgaaatatttattaaatttttataattaatctctgctagaaaatttgattaatcatttttagtagaatttgtttttctcaactaggtttttaaaacacc

SEQ ID NO: 2400 - DNA, 566 bp, Artificial
  Mutations within GlyA3B4 introduced by GmGlyA3B4_T02TALE nuclease
gttcatgtacggttgcagatataaacgaagcatagcttatgtatgaggtgtaacaaaattggaaacaatagccatgcaaggtgaagaatgtcaccaactcagaaacccttcttcattgacgtgtccctcactcactctcctctcttcactataaatcgccactcttcgtgttctccacttcaccaactccttcaaacttattaacactccagcaagttcaacgagtgccaactcaacaacctcaacgcgttggaacccgaccaccgcgttgagtccgaaggtggtcttattgaaacatggaactctcaacaccctgagctgcaatgcgccggtgtcactgtttccaaacgcaccctcaaccgcaacggcctccacttgccatcttactcaccttatccccaaaatgatcattgtcgttcaaggtgcgtaatattagtaagaagtatttatcagcttaacgtgataacaataatagtaatatgaaatatttattaaattttttatattaatctctgctagaaaatttgattaatcatttttagtagaatttgtttttctcaactagg

SEQ ID NO: 2401 - DNA, 595 bp, Artificial
  Mutations within GlyA3B4 introduced by GmGlyA3B4_T02TALE nuclease
gttcatgtacggttgcagatataaacgaagcatagcttatgtatgaggtgtaacaaaattggaaacaatagccatgcaaggtgaagaatgtcaccaactcagaaacccttcttcattgacgtgtccctcactcactctcctctcttcactataaatcgccactcttcgtgttctccacttcaccaactccttcaaacttattaacactttccttagttcaatatggggaagcccttcttcactctctctctttcttccctttgcttgctactcttgtcgagcctccagcaagttcaacgagtgccaactcaacaacctcaacgcgttggaacccgaccaccgcgttgagtccgaaggtggtcttattgaaacatggaactctcaacaccctgagctgcaatgcgccggtgtcactgtttccaaacgcaccctcaaccgcaacggcctccacttgccatcttactcaccttatccccaaatgatcattgtcgttcaaggtgcgtaaatattagtaagaagtatttatcagcttaacgtgataacaataatagtaatatgaaatatttattaaatttttataattaatctctgctag

SEQ ID NO: 2402 - DNA, 666 bp, Artificial; identical to SEQ ID NO: 2309
  Mutations within GlyA3B4 introduced by GmGlyA3B4_T02TALE nuclease

SEQ ID NO: 2403 - DNA, 601 bp, Artificial
  Mutations within GlyA3B4 introduced by GmGlyA3B4_T02TALE nuclease
gttcatgtacggttgcagatataaacgaagcatagcttatgtatgaggtgtaacaaaattggaaacaatgccatgcaaggtgaagaatgtcaccaactcagaaacccttcttcattgacgtgtccctcactcactctcctctcttcactataaatcgccactcttcgtgttctccacttcaccaactccttcaaacttattaacactttccttagttcaatatggggaagcccttcttcactctctctctttcttccctttgcttgctactcttgtcgagtgcaaactcaacaacctcaacgcgttggaacccgaccaccgcgttgagtccgaaggtggtcttattgaaacatggaactctcaacaccctgagctgcaatgcgccggtgtcactgtttccaaaacgcaccctcaaccgcaacggcctccacttgccatcttactcaccttatccccaaatgatcattgtcgttcaaggtgcgtaatattagtaagaagtatttatcagcttaacgtgataacaataatagtaatatgaaatatttattaaattttttataattaatctctgctagaaaatttgattaatcatttttagtag

SEQ ID NO: 2404 - DNA, 632 bp, Artificial; identical to SEQ ID NO: 1756
  Mutations within GlyA3B4 introduced by GmGlyA3B4_T02TALE nuclease

SEQ ID NO: 2405 - DNA, 655 bp, Artificial
  Mutations within GlyA3B4 introduced by GmGlyA3B4_T02TALE nuclease
gttcatgtacggttgcagatataaacgaagcatagcttatgtatgaggtgtaacaaaattggaaacaatagccatgcaaggtgaagaatgtcaccaactcagaaacccttcttcattgacgtgtccctcactcactctcctctcttcactataaatcgccactcttcgtgttctccacttcaccaactccttcaaacttattaacactttccttagttcaatatggggaagcccttcttcactctctctctttcttccctttgcttgctactcttgtcgagtgcattattacttcctcagcaagttcaacgagtgccaactcaacaacctcaacgcgttggaacccgaccaccgcgttgagtccgaaggtggtcttattgaaacatggaactctcaacaccctgagctgcaatgcgccggtgtcactgtttccaaacgcaccctcaaccgcaacggcctccacttgccatcttactcaccttatccccaaatgatcattgtcgttcaaggtgcgtaatattagtaagaagtatttatcagcttaacgtgataacaataatagtaatatgaaatatttattaaatttttataattaatctctgctagaaaatttgattaatcattttagtagaatttgttttctcaactaggtttt

SEQ ID NO: 2406 - DNA, 634 bp, Artificial
  Mutations within GlyA3B4 introduced by GmGlyA3B4_T02TALE nuclease
gttcatgtacggttgcagatataaacgaagcatagcttatgtatgaggtgtaacaaaattggaaacaatagccatgcaagatgaagaatgtcaccaactcagaaacccttcttcattgacgtgtccctcactcactctcctctcttcactataaatcgccactcttcgtgttctccacttcaccaactccttcaaacttattaacactttccttagttcaatatggggaagcccttcttcactctctctctttcttccctttgcttgctattacctccagcaagttcaacgagtgccaactcaacaacctcaacgcgttggaacccgaccaccgcgttgagtccgaaggtggtcttattgaaacatggaactctcaacaccctgagctgcaatgcgccggtgtcactgtttccaaacgcaccctcaaccgcaacggcctccacttgccatcttactcaccttatcccccaaatgatcattgtcgttcaaggtgcgtaatattagtaagaagtatttatcagcttaacgtgataacaataatagtaatatgaaatatttattaaattttttataattaatctctgctagaaaatttgattaatctttttagtagaattgttttttctcaactagg

SEQ ID NO: 2407 - DNA, 635 bp, Artificial
  Mutations within GlyA3B4 introduced by GmGlyA3B4_T02TALE nuclease
gttcatgtacggttgcagatataaacgaagcatagcttatgtatgaggtgtaacaaaattggaaacaatagccatgcaaggtgaagaatgtcaccaactcagaaaccccttcttcattgacgtgtccctcactcactctcctctcttcactataaatcgccactcttcgtgttctccacttcaccaactccttcaaacttattaacactttccttagttcaatatggggaagcccttcttcactctctctctttcttccctttgcttgctactcttgtcgagtgcatattacctccagcaagttcaacgagtgccaactcaacaacctcaacgcgttggaacccgaccaccgcgttgagtccgaaggtggtcttattgaaacatggaactctcaacaccctgagctgcaatgcgccggtgtcactgtttccaaacgcaccctcaaccgcaacggcctccacttgccatcttactcaccttatccccaaatgatcattgtcgttcaaggtgcgtaatattagtaagaagtatttatcagcttaacgtgataacaataatagtaatatgaaatatttattaaatttttataattaatctctgctagaaaatttgattaatcattttagtagaatttg

SEQ ID NO: 2408 - DNA, 602 bp, Artificial; identical to SEQ ID NO: 1938
  Mutations within GlyA3B4 introduced by GmGlyA3B4_T02TALE nuclease

SEQ ID NO: 2409 - DNA, 646 bp, Artificial; identical to SEQ ID NO: 564
  Mutations within GlyA3B4 introduced by GmGlyA3B4_T02TALE nuclease

SEQ ID NO: 2410 - DNA, 658 bp, Artificial
  Mutations within GlyA3B4 introduced by GmGlyA3B4_T02TALE nuclease
  misc_feature (287): n is a or c or t or g
gttcatgtacggttgcagatataaacgaagcatagcttatgtatgaggtgtaacaaaattggaaacaatagccatgcaaggtgaagaatgtcaccaactcagaaacccttcttcattgacgtgtccctcactcactctcctctcttcactataaatcgccactcttcgtgttctccacttcaccaactccttcaaacttattaacactttccttagttcaatatggggaagcccttcttcactctctctctttcttccctttgcttgctactcttgtcgagtgcttnctccagcaagttcaacgagtgccaactcaacaacctcaacgcgttggaacccgaccaccgcgttgagtccgaaggtggtcttattgaaacatggaactctcaacaccctgagctgcaatgcgccggtgtcactgtttccaaacgcaccctcaaccgcaacggcctccacttgccatcttactcaccttatccccaaatgatcattgtcgttcaaggtgcgtaatattagtaagaagtatttatcagcttaacgtgataacaataatagtaatatgaaatatttattaaatttttataattaatctctgctagaaaatttgattaatcattttagtagaatttgttttctcaactaggtttttaaaacacca

SEQ ID NO: 2411 - DNA, 636 bp, Artificial
  Mutations within GlyA3B4 introduced by GmGlyA3B4_T02TALE nuclease
gttcatgtacggttgcagatataaacgaagcatagcttatgtatgaggtgtaacaaaattggaaacaatagccatgcaaggtgaagaatgtcaccaactcagaaacccttcttcattgacgtgtccctcactcactctcctctcttcactataaatcgccactcttcgtgttctccacttcaccaactccttcaaacttattaacactttccttagttcaatatggggaagcccttcttcactctctctctttcttccctttgcttgctactcttgtcgagtgcttgctattacctccagcaagttcaacgagtgccaactcaacaacctcaacgcgttggaacccgaccaccgcgttgagtccgaaggtggtcttattgaaacatggaactctcaacaccctgagctgcaatgcgccggtgtcactgtttccaaacgcaccctcaaccgcaacggcctccacttgccatcttactcaccttatccccaaatgatcattgtcgttcaaggtgcgtaatattagtaagagtatttatcagcttaacgtgataacaataatagtaatatgaaatatttattaaatttttataattaatctctgctagaaaatttgattaatcattttagtagaatttg

SEQ ID NO: 2412 - DNA, 594 bp, Artificial
  Mutations within GlyA3B4 introduced by GmGlyA3B4_T02TALE nuclease
gttcatgtacggttgcagatataaacgaagcatagcttatgtatgaggtgtaacaaaattggaaacaatagccatgcaaggtgaagaatgtcaccaactcagaaacccttcttcattgacgtgtccctcactcactctcctctcttcactataaatcgccactcttcgtgttctccacttcaccaactccttcaaacttattaacactttccttagttcaatatggggaagcccttcttcactctctctctttcttccctttgcttgctactcttgtcgagtgcatgcttttgaaacgagtgccaactcaacaacctcaacgcgttggaacccgaccaccgcgttgagtccgaaggtggtcttattgaaacatggaactctcaacaccctgagctgcaatgcgccggtgtcactgtttccaaacgcaccctcaaccgcaacggcctccacttgccatcttactcaccttatccccaaatgatcattgtcgttcaaggtgcgtaaatattagtaagaagtatttatcagcttaacgtgataacaataatagtaatatgaaatatttattaaatttttataattaatctctgctag

SEQ ID NO: 2413 - DNA, 636 bp, Artificial; identical to SEQ ID NO: 1845
  Mutations within GlyA3B4 introduced by GmGlyA3B4_T02TALE nuclease

SEQ ID NO: 2414 - DNA, 628 bp, Artificial
  Mutations within GlyA3B4 introduced by GmGlyA3B4_T02TALE nuclease
gttcatgtacggttgcagatataaacgaagcatagcttatgtatgaggtgtaacaaaattggaaacaatagccatgcaaggtgaagaatgtcaccaactcagaaacccttcttcattgacgtgtccctcactcactctcctctcttcactataaatcgccactcttcgtgttctccacttcaccaactccttcaaacttattaacactttccttagttcaatatggggaagcccttcttcactctctctctttcactccagcaagttcaacgagtgccaactcaacaacctcaacgcgttggaacccgaccaccgcgttgagtccgaaggtggtctttattgaaacatggaactctcaacaccctgagctgcaatgcgccggtgtcactgttttccaaacgcaccctcaaccgcaacggcctccacttgccatcttactcaccttatccccaaatgatcattgtcgttcaaggtgcgtaatattagtaagaagtatttatcagcttaacgtgataacaataatagtaatatgaaatatttattaattttttataattaatctctgctagaaaatttgattaatcatttttagtagaaatttgtttttctcaactaggtttttaaaaca

SEQ ID NO: 2415 - DNA, 646 bp, Artificial
  Mutations within GlyA3B4 introduced by GmGlyA3B4_T02TALE nuclease
gttcatgtacggttgcagatataaacgaagcatagcttatgtatgaggtgtaacaaaattggaaacaatagccatgcaaggtgaagaatgtcaccaactcagaaacccttcttcattgacgtgtccctcactcactctcctctcttcactataaatcgccactcttcgtgttctccacttcaccaactccttcaaacttattaacactttccttagttcaatatggggaagcccttcttcactctctctctttcttccctttgcttgctactcttgtcgagtgctattacctccagcaagttcaacgagtgccaactcaacaacctcaacgcgttggaacccgaccaccgcgttgagtccgaaggtggtcttattgaaacatggaactctcaacaccctgagctgcaatgcgccggtgtcactgtttccaaacgcaccctcaaccgcaacggcctccacttgccatcttactcaccttatccccaaatgatcattgtcgttcaaggtgcgtaatattagtaagaagtatttatcagcttaacgtgataacaatatagtaatatgaaatatttattaaatttttataattaatctctgctagaaaatttgattaatcattttagtagaatttgttttctcaactagg

SEQ ID NO: 2416 - DNA, 618 bp, Artificial
  Mutations within GlyA3B4 introduced by GmGlyA3B4_T02TALE nuclease
gttcatgtacggttgcagatataaacgaagcatagcttatgtatgaggtgtaacaaaattggaaacaatagccatgcaaggtgaagaatgtcaccaactcagaaacccttcttcattgacgtgtccctcactcactctcctctcttcactataaatcgccactcttcgtgttctccacttcaccaactccttcaaacttattaacactttccttagttcaatatggggaagcccttcttcactctctctctttcttccctttgcttgctactcttgtcgagtgctattacctccagcaagttcaacgagtgccaactcaacaacctcaacgcgttggaacccgaccaccgcgttgagtccgaaggtggtcttattgaaacatggaactctcaacaccctgagctgcaatgcgccggtgtcactgtttccaaacgcaccctcaaccgcaacggcctccacttgccatcttactcaccttatccccaaatgatcattgtcgttcaaggtgcgtaatattagtaagaagtatttatcagcttaacgtgataacaataatagtaatatgaaatatttattaaatttttataattaatctctgctagaaaatttgattaatca

SEQ ID NO: 2417 - DNA, 609 bp, Artificial
  Mutations within GlyA3B4 introduced by GmGlyA3B4_T02TALE nuclease
gttcatgtacggttgcagatataaacgaagcatagcttatgtatgaggtgtaacaaaattggaaacaatagccatgcaaggtgaagaatgtcaccaactcagaaacccttcttcattgacgtgtccctcactcactctcctctcttcactataaatcgccactcttcgtgttctccacttcaccaactccttcaaacttattaacactttccttagttcaatatggggaagcccttcttcactctctctctttcttccctttgcttgctactcttgtattacctccagcaagttcaacgagtgccaactcaacaacctcaacgcgttggaacccgaccaccgcgttgagtccgaaggtggtcttattgaaacatggaactctcaacaccctgagctgcaatgcgccggtgtcactgtttccaaacgcaccctcaaccgcaacggcctccacttgccatcttactcaccttatccccaaatgatcattgtcgttcaaggtgcgtaatattagtaagaagtatttatcagcttaacgtgataacaataatagtaatatgaaatatttattaaatttttataattaatctctgctagaaaatttgattaatc

SEQ ID NO: 2418 - DNA, 630 bp, Artificial
  Mutations within GlyA3B4 introduced by GmGlyA3B4_T02TALE nuclease
gttcatgtacggttgcagatataaacgaagcatagcttatgtatgaggtgtaacaaaattggaaacaatagccatgcaaggtgaagaatgtcaccaactcagaaacccttcttcattgacgtgtccctcactcactctcctctcttcactataaatcgccactcttcgtgttctccacttcaccaactccttcaaacttattaacactttccttagttcaatatggggaagcccttcttcactctctctctttcttccctttgcttgctactcttgtcgagtgcatacctccagcaagttcaacgagtgccaactcaacaacctcaacgcgttggaacccgaccaccgcgttgagtccgaaggtggtcttattgaaacatggaactctcaacaccctgagctgcaatgcgccggtgtcactgtttccaaacgcaccctcaaccgcaacggcctccacttgccatcttactcaccttatccccaaatgatcattgtcgttcaaggtgcgtaatattagtaagaagtatttatcagcttaacgtgataacaatatagtaatatgaaatatttattaaatttttataattaatctctgctagaaaatttgattaatcattttagtagaatttg

SEQ ID NO: 2419 - DNA, 546 bp, Artificial
  Mutations within GlyA3B4 introduced by GmGlyA3B4_T02TALE nuclease
gttcatgtacggttgcagatataaacgaagcatagcttatgtatgaggtgtaacaaaattggaaacaatagccatgcaaggtgaagaatgtcaccaactcagaaacccttcttcattgacgtgtccctcactcactctctctctttcttcccttcttcactctctctctttcttcccctttgctttgctattacctccagcaagttcaacgagtgccaactcaacaacctcaacgcgttggaacccgaccaccgcgttgagtccgaaggtggtcttattgaaacatggaactctcaacaccctgagctgcaatgcgccggtgtcactgtttccaaacgcaccctcaaccgcaacggcctccacttgccatcttactcaccttatcccccaaatgattattgtcgttcaaggtgcgtaatattagtaagaagtatttatcagcttaacgtgataacaataatagtaatatgaaatatttattaaattttttataattaatctctgctagaaaatttgattaatcatttttagtagaatttgtttttc

SEQ ID NO: 2420 - DNA, 609 bp, Artificial
  Mutations within GlyA3B4 introduced by GmGlyA3B4_T02TALE nuclease
gttcatgtacggttgcagatataaacgaagcatagcttatgtatgaggtgtaacaaaattggaaacaatagccatgcaaggtgaagaatgtcaccaactcagaaacccttcttcattgacgtgtccctcactcactctcctctcttcactataaatcgccactcttcgtgttctccacttcaccaactccttcaaacttattgtcactttccttagttcaatatggggaagcccttcttcactctctctctttcttccctttgcaagttcaacgagtgccaactcaacaacctcaacgcgttggaacccgaccaccgcgttgagtccgaaggtggtcttattgaaacatggaactctcaacaccctgagctgcaatgcgccggtgtcactgtttccaaacgcaccctcaaccgcaacggcctccacttgccatcttactcaccttatccccaaatgatcattgtcgttcaaggtgcgtaatattagtaagaagtatttatcagcttaacgtgataacaataatagtaatatgaaatatttattaattttttataattaatctctgctagaaaatttgattaatcatttttagtagaatttgtttttctc

SEQ ID NO: 2421 - DNA, 653 bp, Artificial
  Mutations within GlyA3B4 introduced by GmGlyA3B4_T02TALE nuclease
gttcatgtacggttgcagatataaacgaagcatagcttatgtatgaggtgtaacaaaattggaaacaatagccatgcaaggtgaagaatgtcaccaactcagaaacccttcttcattgacgtgtccctcactcactctcctctcttcactataaatcgccactcttcgtgttctccacttcaccaactccttcaaacttattaacactttccttagttcaatatggggaagcccttcttcactctctctctttcttccctttgcttgctactcttgtcgagtgcattacctccagcaagttcaacgagtgccaactcaacaacctcaacgcgttggaacccgaccaccgcgttgagtccgaaggtggtcttattgaaacatggaactctcaacaccctgagctgcaatgcgccggtgtcactgtttccaaacgcaccctcaaccgcaacggcctccacttgccatcttactcaccttatccccaaatgatcattgtcgttcaaggtgcgtaatattagtaagaagtatttatcagcttaacgtgataacaatatagtaatatgaaatatttattaaatttttataattaatctctgctagaaaatttgattaatcattttagtagaatttgttttctcaactaggttttaaaa

SEQ ID NO: 2422 - DNA, 503 bp, Artificial; identical to SEQ ID NO: 1883
  Mutations within GlyA3B4 introduced by GmGlyA3B4_T02TALE nuclease

SEQ ID NO: 2423 - DNA, 663 bp, Artificial
  Mutations within GlyA3B4 introduced by GmGlyA3B4_T02TALE nuclease
gttcatgtacggttgcagatataaacgaagcatagcttatgtatgaggtgtaacaaaattggaaacaatagccatgcaaggtgaagaatgtcaccaactcagaaacccttcttcattgacgtgtccctcactcactctcctctcttcactataaatcgccactcttcgtgttctccacttcaccaactccttcaaacttattaacactttccttagttcaatatggggaagcccttcttcactctctctctttcttccctttgcttgctactcttgtcgagtgcactattacctccagcaagttcaacgagtgccaactcaacaacctcaacgcgttggaacccgaccaccgcgttgagtccgaaggtggtcttattgaaacatggaactctcaacaccctgagctgcaatgcgccggtgtcactgtttccaaacgcaccctcaaccgcaacggcctccacttgccatcttactcaccttatccccaaatgatcattgtcgttcaaggtgcgtaatattagtaagaagtatttatcagcttaacgtgataacaataatagtaatatgaaatatttattaaatttttataattaatctctgctagaaaatttgattaatcattttagtagaatttgtttttctcaactaggttttaaaacacca

SEQ ID NO: 2424 - DNA, 634 bp, Artificial
  Mutations within GlyA3B4 introduced by GmGlyA3B4_T02TALE nuclease
gttcatgtacggttgcagatataaacgaagcatagcttatgtatgaggtgtaacaaaattggaaacaatagccatgcaaggtgaagaatgtcaccaactcagaaacccttcttcattgacgtgtccctcactcactctcctctcttcactataaatcgccactcttcgtgttctccacttcaccaactccttcaaacttattaacactttccttagttcaatatggggaagcccttcttcactctctctctttcttccctttgctttgctattacctccagcaagttcaacgagtgccaactcaacaacctcaacgcgttggaacccgaccaccgcgttgagtccgaaggtggtcttattgaaacatggaactctcaacaccctgagctgcaatgcgccggtgtcactgtttccaaacgcaccctcaaccgcaacggcctccacttgccatcttactcaccttatccccaaatgatcattgtcgttcaaggtgcgtaatattagtaagaagtatttatcagcttaacgtgataacaataatagtaatatgaaatatttattaaattttttataattaatctctgctagaaaatttgattaatcatttttagtagaatttgttttttctcaacta

SEQ ID NO: 2425 - DNA, 659 bp, Artificial; identical to SEQ ID NO: 1853
  Mutations within GlyA3B4 introduced by GmGlyA3B4_T02TALE nuclease

SEQ ID NO: 2426 - DNA, 519 bp, Artificial
  Mutations within GlyA3B4 introduced by GmGlyA3B4_T02TALE nuclease
gttcatgtacggttgcagatataaacgaagcatagcttatgtatgaggtgtaacaaaattggaaacaatagccatgcaaggtgaagaatgtcaccaactcagaaacccttcttcattgacgtgtccctcactcactctcctctcttcactataaatcgccactcttcgtgttctccacttcaacaacctcaacgcgttggaacccgaccaccgcgttgagtccgaaggtggtcttattgaaacatggaactctcaacaccctgagctgcaatgcgccggtgtcactgtttccaaacgcaccctcaaccgcaacggcctccacttgccatcttactcaccttatccccaaatgatcattgtcgttcaaggtgcgtaatattagtaagaagtattttatcagcttaacgtgataacaataatagtaatatgaaatatttattaaattttttataattaatctctgctagaaaatttgattaatcattttttagtagaatttgtttttctcaactaggtttt

SEQ ID NO: 2427 - DNA, 664 bp, Artificial
  Mutations within GlyA3B4 introduced by GmGlyA3B4_T02TALE nuclease
gttcatgtacggttgcagatataaacgaagcatagcttatgtatgaggtgtaacaaaattggaaacaatagccatgcaaggtgaagaatgtcaccaactcagaaacccttcttcattgacgtgtccctcactcactctcctctcttcactataaatcgccactcttcgtgttctccacttcaccaactccttcaaacttattaacactttccttagttcaatatggggaagcccttcttcactctctctctttcttccctttgcttgctactcttgtcgagtgcatctattacctccagcaagttcaacgagtgccaactcaacaacctcaacgcgttggaacccgaccaccgcgttgagtccgaaggtggtcttattgaaacatggaactctcaacaccctgagctgcaatgcgccggtgtcactgtttccaaacgcaccctcaaccgcaacggcctccacttgccatcttactcaccttatccccaaatgatcattgtcgttcaaggtgcgtaatattagtaagaagtatttatcagcttaacgtgataacaataatagtaatatgaaatatttattaaatttttataattaatctctgctagaaaatttgattaatcattttagtagaatttgttttctcaactaggtttttaaaacacca

SEQ ID NO: 2428 - DNA, 646 bp, Artificial; identical to SEQ ID NO: 1911
  Mutations within GlyA3B4 introduced by GmGlyA3B4_T02TALE nuclease

SEQ ID NO: 2429 - DNA, 512 bp, Artificial
  Mutations within GlyA3B4 introduced by GmGlyA3B4_T02TALE nuclease
gttcatgtacggttgcagatataaacgaagcatagcttatgtatgaggtgtaacaaaattggaaacaatagccatgcaaggtgaagaatgtcaccaactcagaaacccttcttcattgacgtgtccctcactcactctcctctcttcactataaatcgccactcttcgtgttctccacttcaacaaccacaacgcgtggaccgaccaccgcgttgagtccgaaggtggtcttattgaaacatggaactctcaacaccctgagctgcaatgcgccggtgtcactgtttccaaacgcaccctcaaccgcaacggcctccacttgccatcttactcaccttatccccaaatgatcattgtcgttcaaggtgcgtaatattagtaagaagtatttatcagcttaacgtgataacaataatagtaatatgaaaatatttattaaattttttataattaatctctgctagaaaatttgattaatcattttttagtagaatttgtttttctcaactagg

SEQ ID NO: 2430 - DNA, 663 bp, Artificial; identical to SEQ ID NO: 2045
  Mutations within GlyA3B4 introduced by GmGlyA3B4_T02TALE nuclease

SEQ ID NO: 2431 - DNA, 635 bp, Artificial
  Mutations within GlyA3B4 introduced by GmGlyA3B4_T02TALE nuclease
gttcatgtacggttgcagatataaacgaagcatagcttatgtatgaggtgtaacaaaattggaaacaatagccatgcaaggtgaagaatgtcaccaactcagaaacccttcttcattgacgtgtccctcactcactctcctctcttcactataaatcgccactcttcgtgttctccacttcaccaactccttcaaacttattaacactttccttagttcaatatggggaagcccttcttcactctctctctttcttccctttgcttgctactcttgtcgagtgctgctattacctccagcaagttcaacgagtgccaactcaacaacctcaacgcgttggaacccgaccaccgcgttgagtccgaaggtggtcttattgaaacatggaactctcaacaccctgagctgcaatgcgccggtgtcactgtttccaaacgcaccctcaaccgcaacggcctccacttgccatcttactcaccttatccccaaatgatcattgtcgttcaaggtgcgtaatattagtaagagtatttatcagcttaacgtgataacaataatagtaatatgaaatatttattaaatttttataattaatctctgctagaaaatttgattaatcattttagtagaatttg

SEQ ID NO: 2432 - DNA, 664 bp, Artificial
  Mutations within GlyA3B4 introduced by GmGlyA3B4_T02TALE nuclease
  misc_feature (531): n is a or c or t or g
gttcatgtacggttgcagatataaacgaagcatagcttatgtatgaggtgtaacaaaattggaaacaatagccatgcaaggtgaagaatgtcaccaactcagaaacccttcttcattgacgtgtccctcactcactctcctctcttcactataaatcgccactcttcgtgttctccacttcaccaactccttcaaacttattaacactttccttagttcaatatggggaagcccttcttcactctctctctttcttccctttgcttgctactcttgtcgagtgcattgctattacctccagcaagttcaacgagtgccaactcaacaacctcaacgcgttggaacccgaccaccgcgttgagtccgaaggtggtcttattgaaacatggaactctcaacaccctgagctgcaatgcgccggtgtcactgtttccaaacgcaccctcaaccgcaacggcctccacttgccatcttactcaccttatccccaaatgatcattgtcgttcaaggtgcgtaatattagtaagagnatttatcagcttaacgtgataacaatatagtaatatgaaatatttattaaatttttataattaatctctgctagaaaatttgattaatcattttagtagaatttgtttttctcaactaggtttttaaacacca

SEQ ID NO: 2433 - DNA, 666 bp, Artificial
  Mutations within GlyA3B4 introduced by GmGlyA3B4_T02TALE nuclease
  misc_feature (531): n is a or c or t or g
gttcatgtacggttgcagatataaacgaagcatagcttatgtatgaggtgtaacaaaattggaaacaatagccatgcaaggtgaagaatgtcaccaactcagaaacccttcttcattgacgtgtccctcactcactctcctctcttcactataaatcgccactcttcgtgttctccacttcaccaactccttcaaacttattaacactttccttagttcaatatggggaagcccttcttcactctctctctttcttccctttgcttgctactcttgtcgagtgcattgctattacctccagcaagttcaacgagtgccaactcaacaacctcaacgcgttggaacccgaccaccgcgttgagtccgaaggtggtcttattgaaacatggaactctcaacaccctgagctgcaatgcgccggtgtcactgtttccaaacgcaccctcaaccgcaacggcctccacttgccatcttactcaccttatccccaaatgatcattgtcgttcaaggtgcgtaatattagtaagagnatttatcagcttaacgtgataacaatatagtaatatgaaatatttattaaatttttataattaatctctgctagaaaatttgattaatcattttagtagaatttgtttttctcaactaggtttttaaacaccaca

SEQ ID NO: 2434 - DNA, 635 bp, Artificial
  Mutations within GlyA3B4 introduced by GmGlyA3B4_T02TALE nuclease
gttcatgtacggttgcagatataaacgaagcatagcttatgtatgaggtgtaacaaaattggaaacaatagccatgcaaggtgaagaatgtcaccaactcagaaacccttcttcattgacgtgtccctcactcactctcctctcttcactataaatcgccactcttcgtgttctccacttcaccaactccttcaaacttattaacactttccttagttcaatatggggaagcccttcttcactctctctctttcttccctttgcttgctactcttgtcgagtgcattattacctccagcaagttcaacgagtgccaactcaacaacctcaacgcgttggaacccgaccaccgcgttgagtccgaaggtggtcttattgaaacatggaactctcaacaccctgagctgcaatgcgccggtgtcactgtttccaaacgcaccctcaaccgcaacggcctccacttgccatcttactcaccttatccccaaatgatcattgtcgttcaaggtgcgtaatattagtaagaagtatttatcagcttaacgtgataacaataatagtaatatgaaatatttattaaatttttataattaatctctgctagaaaatttgattaatcattttagtagaatttg

SEQ ID NO: 2435 - DNA, 527 bp, Artificial
  Mutations within GlyA3B4 introduced by GmGlyA3B4_T02TALE nuclease
gttcatgtacggttgcagatataaacgaagcatagcttatgtatgaggtgtaacaaaattggaaacaatagccatgcaaggtgaagaatgtcaccaactcagaaacccttcttcattgacgtgtccctcactcactctcctctcttcactataaatcgccactcttcgtgttctccacttcaacaacctcaacgcgttggaacccgaccaccgcgttgagtccgaaggtggtcttattgaaacatggaactctcaacaccctgagctgcaatgcgccggtgtcactgtttccaaacgcaccctcaaccgcaacggcctccacttgccatcttactcaccttatccccaaatgatcattgtcgttcaaggtgcgtaatattagtaagaagtattttatcagcttaacgtgataacaataatagtaatatgaaatatttattaaattttttataattaatctctgctagaaaatttgattaatcattttttagtagaatttgtttttctcaactaggttttaaacacca

SEQ ID NO: 2436 - DNA, 692 bp, Artificial
  Mutations within GlyA3B4 introduced by GmGlyA3B4_T02TALE nuclease
gttcatgtacggttgcagatataaacgaagcatagcttatgtatgaggtgtaacaaaattggaaacaatagccatgcaaggtgaagaatgtcaccaactcagaaacccttcttcattgacgtgtccctcactcactctcctctcttcactataaatcgccactcttcgtgttctccacttcaccaactccttcaaacttattaacactttccttagttcaatatggggaagcccttcttcactctctctctttcttccctttgcttgctactcttgtcgagtgcatggtccagcggctgttgccggtgctgtgccaggcccacggcttgctattacctccagcaagttcaacgagtgccaactcaacaacctcaacgcgttggaacccgaccaccgcgttgagtccgaaggtggtcttattgaaacatggaactctcaacaccctgagctgcaatgcgccggtgtcactgtttccaaacgcaccctcaaccgcaacggcctccacttgccatcttactcaccttatccccaaatgatcattgtcgttcaaggtgcgtaatattagtaagaagtatttatcagcttaacgtgataacaataatagtaatatgaaatatttattaaaattttttataattaatctctgctagaaaatttgattaatcatttttagtagaatttgtttttctcaa

SEQ ID NO: 2437 - DNA, 617 bp, Artificial
  Mutations within GlyA3B4 introduced by GmGlyA3B4_T02TALE nuclease
gttcatgtacggttgcagatataaacgaagcatagcttatgtatgaggtgtaacaaaattggaaacaatagccatgcaaggtgaagaatgtcaccaactcagaaacccttcttcattgacgtgtccctcactcactctcctctcttcactataaatcgccactcttcgtgttctccacttcaccaactccttcaaacttattaacactttccttagttcaatatggggaagcccttcttcactctctctctttcttccctttgcttgctactcttgtcgagtgccaactcaacaacctcaacgcgttggaacccgaccaccgcgttgagtccgaaggtggtcttattgaaacatggaactctcaacaccctgagctgcaatgcgccggtgtcactgtttccaaacgcaccctcaaccgcaacggcctccacttgccatcttactcaccttatccccaaatgatcattgtcgttcaaggtgcgtaatattagtaagaagtatttatcagcttaacgtgataacaataatagtaatatgaaatatttattaattttttataattaatctctgctagaaaatttgattaatcatttttagtagaatttgtttttctcaac

SEQ ID NO: 2438 - DNA, 661 bp, Artificial; identical to SEQ ID NO: 1694
  Mutations within GlyA3B4 introduced by GmGlyA3B4_T02TALE nuclease

SEQ ID NO: 2439 - DNA, 661 bp, Artificial
  Mutations within GlyA3B4 introduced by GmGlyA3B4_T02TALE nuclease
  misc_feature (533): n is a or c or t or g
gttcatgtacggttgcagatataaacgaagcatagcttatgtatgaggtgtaacaaaattggaaacaatagccatgcaaggtgaagaatgtcaccaactcagaaacccttcttcattgacgtgtccctcactcactctcctctcttcactataaatcgccactcttcgtgttctccacttcaccaactccttcaaacttattaacactttccttagttcaatatggggaagcccttcttcactctctctctttcttccctttgcttgctactcttgtcgagtgcatttgctattacctccagcaagttcaacgagtgccaactcaacaacctcaacgcgttggaacccgaccaccgcgttgagtccgaaggtggtcttattgaaacatggaactctcaacaccctgagctgcaatgcgccggtgtcactgtttccaaacgcaccctcaaccgcaacggcctccacttgccatcttactcaccttatccccaaatgatcattgtcgttcaaggtgcgtaatattagtaagaagnatttatcagcttaacgtgataacaataatagtaatatgaaatatttattaaatttttataattaatctctgctagaaaatttgattaatcattttagtagaatttgtttttctcaactaggttttaaa

SEQ ID NO: 2440 - DNA, 667 bp, Artificial; identical to SEQ ID NO: 1838
  Mutations within GlyA3B4 introduced by GmGlyA3B4_T02TALE nuclease

SEQ ID NO: 2441 - DNA, 517 bp, Artificial
  Mutations within GlyA3B4 introduced by GmGlyA3B4_T02TALE nuclease
gttcatgtacggttgcagatataaacgaagcatagcttatgtatgaggtgtaacaaaattggaaacaatagccatgcaaggtgaagaatgtcaccaactcagaaacccttcttcattgacgtgtccctcactcactctcctctcttcactataaatcgccactcttcgtgttctccacttcaccaactccttcaacgcgttggaacccgaccaccgcgttgagtccgaaggtggtcttattgaaacatggaactctcaacaccctgagctgcaatgcgccggtgtcactgtttccaaacgcaccctcaaccgcaacggcctccacttgccatcttactcaccttatccccaaatgatcattgtcgttcaaggtgcgtaatattagtaagaagtattttatcagcttaacgtgataacaataatagtaatatgaaatatttattaaattttttataattaatctctgctagaaaatttgattaatcatttttagtagaatttgtttttctcaactagg

SEQ ID NO: 2442 - DNA, 656 bp, Artificial
  Mutations within GlyA3B4 introduced by GmGlyA3B4_T02TALE nuclease
gttcatgtacggttgcagatataaacgaagcatagcttatgtatgaggtgtaacaaaattggaaacaatagccatgcaaggtgaagaatgtcaccaactcagaaacccttcttcattgacgtgtccctcactcactctcctctcttcactataaatcgccactcttcgtgttctccacttcaccaactccttcaaacttattaacactttccttagttcaatatggggaagcccttcttcactctctctctttcttccctttgcttgctactcttgtcgagtgcatccagcaagttcaacgagtgccaactcacaacctcaacgcgttggaacccgaccaccgcgttgagtccgaaggtggtcttattgaaacatggaactctcaacaccctgagctgcaatgcgccggtgtcactgtttccaaacgcaccctcaaccgcaacggcctccacttgccatcttactcaccttatccccaaatgatcattgtcgttcaaggtgcgtaaatattagtaagaagtatttatcagcttaacgtgataacaataatagtaatatgaaatatttattaaattttttataattaatctctgctagaaaatttgattaatctttttagtagaattgtttttctcaactaggtttaaaacaccaca

SEQ ID NO: 2443 - DNA, 655 bp, Artificial
  Mutations within GlyA3B4 introduced by GmGlyA3B4_T02TALE nuclease
gttcatgtacggttgcagatataaacgaagcatagcttatgtatgaggtgtaacaaaattggaaacaatagccatgcaaggtgaagaatgtcaccaactcagaaacccttcttcattgacgtgtccctcactcactctcctctcttcactataaatcgccactcttcgtgttctccacttcaccaactccttcaaacttattaacactttccttagttcaatatggggaagcccttcttcactctctctctttcttccctttgcttgctactcttgtattacctccagcaagttcaacgagtgccaactcaacaacctcaacgcgttggaacccgaccaccgcgttgagtccgaaggtggtcttattgaaacatggaactctcaacaccctgagctgcaatgcgccggtgtcactgtttccaaacgcaccctcaaccgcaacggcctccacttgccatcttactcaccttatccccaaatgatcattgtcgttcaaggtgcgtaatattagtaagaagtatttatcagcttaacgtgataacaataatagtaatatgaaatatttattaaattttttataattaatctctgctagaaaatttgattaatctttttagtagaattgttttttctcaactaggtttaaaacaccaca

SEQ ID NO: 2444 - DNA, 634 bp, Artificial; identical to SEQ ID NO: 1893
  Mutations within GlyA3B4 introduced by GmGlyA3B4_T02TALE nuclease

SEQ ID NO: 2445 - DNA, 666 bp, Artificial
  Mutations within GlyA3B4 introduced by GmGlyA3B4_T02TALE nuclease
gttcatgtacggttgcagatataaacgaagcatagcttatgtatgaggtgtaacaaaattggaaacaatagccatgcaaggtgaagaatgtcaccaactcagaaacccttcttcattgacgtgtccctcactcactctcctctcttcactataaatcgccactcttcgtgttctccacttcaccaactccttcaaacttattaacactttccttagttcaatatggggaagcccttcttcactctctctctttcttccctttgcttgctactcttgtcgagtgcatttctattacctccagcaagttcaacgagtgccaactcaacaacctcaacgcgttggaacccgaccaccgcgttgagtccgaaggtggtcttattgaaacatggaactctcaacaccctgagctgcaatgcgccggtgtcactgtttccaaacgcaccctcaaccgcaacggcctccacttgccatcttactcaccttatccccaaatgatcattgtcgttcaaggtgcgtaatattagtaagaagtatttatcagcttaacgtgataacaataatagtaatatgaaatatttattaaatttttataattaatctctgctagaaaatttgattaatcattttagtagaatttgttttctcaactaggtttttaaaacacca

SEQ ID NO: 2446 - DNA, 663 bp, Artificial
  Mutations within GlyA3B4 introduced by GmGlyA3B4_T02TALE nuclease
gttcatgtacggttgcagatataaacgaagcatagcttatgtatgaggtgtaacaaaattggaaacaatagccatgcaaggtgaagaatgtcaccaactcagaaaccccttcttcattgacgtgtccctcactcactctcctctcttcactataaatcgccactcttcgtgttctccacttcaccaactccttcaaacttattaacactttccttagttcaatatggggaagcccttcttcactctctctctttcttccctttgcttgctactcttgtcgagtgcatgctattacctccagcaagttcaacgagtgccaactcaacaacctcaacgcgttggaacccgaccaccgcgttgagtccgaaggtggtcttattgaaacatggaactctcaacaccctgagctgcaatgcgccggtgtcactgtttccaaacgcaccctcaaccgcaacggcctccacttgccatcttactcaccttatccccaaatgatcattgtcgttcaaggtgcgtaatattagtaagagtatttatcagcttaacgtgataacaataatagtaatatgaaatatttattaaatttttataattaatctctgctagaaaatttgattaatcattttagtagaatttgttttctcaactaggttttaaacacca

SEQ ID NO: 2447 - DNA, 664 bp, Artificial
  Mutations within GlyA3B4 introduced by GmGlyA3B4_T02TALE nuclease
gttcatgtacggttgcagatataaacgaagcatagcttatgtatgaggtgtaacaaaattggaaacaatagccatgcaaggtgaagaatgtcaccaactcagaaacccttcttcattgacgtgtccctcactcactctcctctcttcactataaatcgccactcttcgtgttctccacttcaccaactccttcaaacttattaacactttccttagttcaatatggggaagcccttcttcactctctctctttcttccctttgcttgctactcttgtcgagtgttgctattacctccagcaagttcaacgagtgccaactcaacaacctcaacgcgttggaacccgaccaccgcgttgagtccgaaggtggtcttattgaaacatggaactctcaacaccctgagctgcaatgcgccggtgtcactgtttccaaacgcaccctcaaccgcaacggcctccacttgccatcttactcaccttatccccaaatgatcattgtcgttcaaggtgcgtaatattagtaagagtatttatcagcttaacgtgataacaataatagtaatatgaaatatttattaaatttttataattaatctctgctagaaaatttgattaatcattttagtagaatttgtttttctcaactaggtttttaaaacacca

SEQ ID NO: 2448 - DNA, 638 bp, Artificial
  Mutations within GlyA3B4 introduced by GmGlyA3B4_T02TALE nuclease
gttcatgtacggttgcagatataaacgaagcatagcttatgtatgaggtgtaacaaaattggaaacaatagccatgcaaggtgaagaatgtcaccaactcagaaacccttcttcattgacgtgtccctcactcactctcctctcttcactataaatcgccactcttcgtgttctccacttcaccaactccttcaaacttattaacactttccttagttcaatatggggaagcccttcttcactctctctctttcttccctttgctattacctccagcaagttcaacgagtgccaactcaacaacctcaacgcgttggaacccgaccaccgcgttgagtccgaaggtggtcttattgaaacatggaactctcaacacccctgagctgcaatgcgccggtgtcactgtttccaaacgcaccctcaaccgcaacggcctccacttgccatcttactcaccttatcccccaaatgatcattgtcgttcaaggtgcgtaatattagtaagaagtatttatcagcttaacgtgataacaataatagtaatatgaaatatttattaaattttttataattaatctcttgctagaaaatttgattaatcatttttagtagaatttgttttttctcaactaggtttt

SEQ ID NO: 2449 - DNA, 661 bp, Artificial
  Mutations within GlyA3B4 introduced by GmGlyA3B4_T02TALE nuclease
gttcatgtacggttgcagatataaacgaagcatagcttatgtatgaggtgtaacaaaattggaaacaatagccatgcaaggtgaagaatgtcaccaactcagaaacccttcttcattgacgtgtccctcactcactctcctctcttcactataaatcgccactcttcgtgttctccacttcaccaactccttcaaacttattaacactttccttagttcaatatggggaagcccttcttcactctctctctttcttccctttgcttgctactcttgtcgagtgcatgtacctccagcaagttcaacgagtgccaactcaacaacctcaacgcgttggaacccgaccaccgcgttgagtccgaaggtggtcttattgaaacatggaactctcaacaccctgagctgcaatgcgccggtgtcactgtttccaaacgcaccctcaaccgcaacggcctccacttgccatcttactcaccttatccccaaatgatcattgtcgttcaaggtgcgtaatattagtaagaagtatttatcagcttaacgtgataacaataatagtaatatgaaatatttattaaatttttataattaatctctgctagaaaatttgattaatcattttagtagaatttgttttctcaactaggtttttaaaacacca

SEQ ID NO: 2450 - DNA, 663 bp, Artificial
  Mutations within GlyA3B4 introduced by GmGlyA3B4_T02TALE nuclease
  misc_feature (529): n is a or c or t or g
gttcatgtacggttgcagatataaacgaagcatagcttatgtatgaggtgtaacaaaattggaaacaatagccatgcaaggtgaagaatgtcaccaactcagaaacccttcttcattgacgtgtccctcactcactctcctctcttcactataaatcgccactcttcgtgttctccacttcaccaactccttcaaacttattaacactttccttagttcaatatggggaagcccttcttcactctctctctttcttccctttgcttgctactcttgtcgagtgcgctattacctccagcaagttcaacgagtgccaactcaacaacctcaacgcgttggaacccgaccaccgcgttgagtccgaaggtggtcttattgaaacatggaactctcaacaccctgagctgcaatgcgccggtgtcactgtttccaaacgcaccctcaaccgcaacggcctccacttgccatcttactcaccttatccccaaatgatcattgtcgttcaaggtgcgtaatattagtaagaagnatttatcagcttaacgtgataacaatatagtaatatgaaatatttattaaatttttataattaatctctgctagaaaatttgattaatcattttagtagaatttgttttctcaactaggttttaaaacaccaca

SEQ ID NO: 2451 - DNA, 665 bp, Artificial
  Mutations within GlyA3B4 introduced by GmGlyA3B4_T02TALE nuclease
  misc_feature (532): n is a or c or t or g
gttcatgtacggttgcagatataaacgaagcatagcttatgtatgaggtgtaacaaaattggaaacaatagccatgcaaggtgaagaatgtcaccaactcagaaacccttcttcattgacgtgtccctcactcactctcctctcttcactataaatcgccactcttcgtgttctccacttcaccaactccttcaaacttattaacactttccttagttcaatatggggaagcccttcttcactctctctctttcttccctttgcttgctactcttgtcgagtgcatttgctattacctccagcaagttcaacgagtgccaactcaacaacctcaacgcgttggaacccgaccaccgcgttgagtccgaaggtggtcttattgaaacatggaactctcaacaccctgagctgcaatgcgccggtgtcactgtttccaaacgcaccctcaaccgcaacggcctccacttgccatcttactcaccttatccccaaatgatcattgtcgttcaaggtgcgtaatattagtaagagnatttatcagcttaacgtgataacaatatagtaatatgaaatatttattaaatttttataattaatctctgctagaaaatttgattaatcattttagtagaatttgtttttctcaactaggtttttaaacacca

SEQ ID NO: 2452 - DNA, 650 bp, Artificial
  Mutations within GlyA3B4 introduced by GmGlyA3B4_T02TALE nuclease
gttcatgtacggttgcagatataaacgaagcatagcttatgtatgaggtgtaacaaaattggaaacaatagccatgcaaggtgaagaatgtcaccaactcagaaacccttcttcattgacgtgtccctcactcactctcctctcttcactataaatcgccactcttcgtgttctccacttcaccaactccttcaaacttattaacactttccttagttcaatatggggaagcccttcttcactctctctctttcttccctttgcttgctactcttgtcgagtgcatctattacctccagcaagttcaacgagtgccaactcaacaacctcaacgcgttggaacccgaccaccgcgttgagtccgaaggtggtcttattgaaacatggaactctcaacaccctgagctgcaatgcgccggtgtcactgtttccaaacgcaccctcaaccgcaacggcctccacttgccatcttactcaccttatccccaaatgatcattgtcgttcaaggtgcgtaatattagtaagaagtatttatcagcttaacgtgataacaataatagtaatatgaaatatttattaaatttttataattaatctctgctagaaaatttgattaatcattttagtagaatttgttttctcaactagg

SEQ ID NO: 2453 - DNA, 666 bp, Artificial; identical to SEQ ID NO: 1758
  Mutations within GlyA3B4 introduced by GmGlyA3B4_T02TALE nuclease

SEQ ID NO: 2454 - DNA, 637 bp, Artificial; identical to SEQ ID NO: 2167
  Mutations within GlyA3B4 introduced by GmGlyA3B4_T02TALE nuclease
  misc_feature (532): n is a or c or t or g

SEQ ID NO: 2455 - DNA, 653 bp, Artificial
  Mutations within GlyA3B4 introduced by GmGlyA3B4_T02TALE nuclease
gttcatgtacggttgcagatataaacgaagcatagcttatgtatgaggtgtaacaaaattggaaacaatagccatgcaaggtgaagaatgtcaccaactcagaaaccccttcttcattgacgtgtccctcactcactctcctctcttcactataaatcgccactcttcgtgttctccacttcaccaactccttcaaacttattaacactttccttagttcaatatggggaagcccttcttcactctctctctttcttccctttgcttgctactcttgtcgagtgcctattacctccagcaagttcaacgagtgccaactcaacaacctcaacgcgttggaacccgaccaccgcgttgagtccgaaggtggtcttattgaaacatggaactctcaacaccctgagctgcaatgcgccggtgtcactgtttccaaacgcaccctcaaccgcaacggcctccacttgccatcttactcaccttatccccaaatgatcattgtcgttcaaggtgcgtaatattagtaagaagtatttatcagcttaacgtgataacaataatagtaatatgaaatatttattaaatttttataattaatctctgctagaaaatttgattaatcattttagtagaatttgttttctcaactaggtttt

SEQ ID NO: 2456 - DNA, 646 bp, Artificial
  Mutations within GlyA3B4 introduced by GmGlyA3B4_T02TALE nuclease
gttcatgtacggttgcagatataaacgaagcatagcttatgtatgaggtgtaacaaaattggaaacaatagccatgcaaggtgaagaatgtcaccaactcagaaacccttcttcattgacgtgtccctcactcactctcctctcttcactataaatcgccactcttcgtgttctccacttcaccaactccttcaaacttattaacactttccttagttcaatatggggaagcccttcttcactctctctctttcttccctttgctattacctccagcaagttcaacgagtgccaactcaacaacctcaacgcgttggaacccgaccaccgcgttgagtccgaaggtggtcttattgaaacatggaactctcaacaccctgagctgcaatgcgccggtgtcactgtttccaaacgcaccctcaaccgcaacggcctccacttgccatcttactcaccttatccccaaatgatcattgtcgttcaaggtgcgtaatattagtaagaagtatttatcagcttaacgtgataacaataatagtaatatgaaatatttattaaattttttataaattaatctctgctagaaaatttgattaatcatttttagtagaatttgttttttctcaactaggttttaaacaccaca

SEQ ID NO: 2457 - DNA, 658 bp, Artificial; identical to SEQ ID NO: 2344
  Mutations within GlyA3B4 introduced by GmGlyA3B4_T02TALE nuclease

SEQ ID NO: 2458 - DNA, 658 bp, Artificial
  Mutations within GlyA3B4 introduced by GmGlyA3B4_T02TALE nuclease
gttcatgtacggttgcagatataaacgaagcatagcttatgtatgaggtgtaacaaaattggaaacaatagccatgcaaggtgaagaatgtcaccaactcagaaacccttcttcattgacgtgtccctcactcactctcctctcttcactataaatcgccactcttcgtgttctccacttcaccaactccttcaaacttattaacactttccttagttcaatatggggaagcccttcttcactctctctctttcttccctttgcttgctactcttgtcgctattacctccagcaagttcaacgagtgccaactcaacaacctcaacgcgttggaacccgaccaccgcgttgagtccgaaggtggtcttattgaaacatggaactctcaacaccctgagctgcaatgcgccggtgtcactgtttccaaacgcaccctcaaccgcaacggcctccacttgccatcttactcaccttatccccaaatgatcattgtcgttcaaggtgcgtaatattagtaagaagtatttatcagcttaacgtgataacaataatagtaatatgaaatatttattaaatttttataattaatctctgctagaaaatttgattaatcattttagtagaatttgtttttctcaactaggtttttaaaacacca

SEQ ID NO: 2459 - DNA, 654 bp, Artificial
  Mutations within GlyA3B4 introduced by GmGlyA3B4_T02TALE nuclease
gttcatgtacggttgcagatataaacgaagcatagcttatgtatgaggtgtaacaaaaattggaaacaatagccatgcaaggtgaagaatgtcaccaactcagaaaccccttcttcattgacgtgtccctcactcactctcctctcttcactataaatcgccactcttcgtgttctccacttcaccaactccttcaaacttattaacactttccttagttcaatatggggaagcccttcttcactctctctctttcttccctttgcttgctactcttgtcgagtgcatctatttacctccagcaagttcaacgagtgccaactcaacaacctcaacgcgtttggaacccgaccaccgcgttgagtccgaaggtggtcttattgaaactggaactctcaacaccctgagctgccaatgcgccggtgtcactgtttccaaacgcaccctcaaccgcaacggcctccacttgccatcttactcaccttatcccccaaatgatcattgtcgttcaaggtgcgtaatattagtaagaagtatttatcagcttaacgtgataacaatatagtaatatgaaatatttattaaatttttataattaatctctgctagaaaatttgattaatcattttagtagaatttgttttctcaactagg

SEQ ID NO: 2460 - DNA, 623 bp, Artificial
  Mutations within GlyA3B4 introduced by GmGlyA3B4_T02TALE nuclease
gttcatgtacggttgcagatataaacgaagcatagcttatgtatgaggtgtaacaaaattggaaacaatagccatgcaaggtgaagaatgtcaccaactcagaaacccttcttcattgacgtgtccctcactcactctcctctcttcactataaatcgccactcttcgtgttctccacttcaccaactccttcaaacttattaacactttccttagttcaatatggggaagcccttcttcactctctctctttcttccctttgcttgctactcttgtcgagtgcatccagcggctgttgccggtgctgtgccaggcccacggcttgaccccccagcaggtggtggccatcgccagcaataatggtggcaagcaggcgctgctattacctccagcaagttcaacgagtgccaactcaacaacctcacgcgttggaacccgaccaccgcgttgagtccgaaggtggtcttattgaaacatggaactctcaacaccctgagctgcaatgcgccggtgtcactgtttccaaacgcaccctcaaccgcaacggcctccacttgccatcttactcaccttatccccaaatgatcattgtcgttcaaggtgcgtaatattagtaagaagt

SEQ ID NO: 2461 - DNA, 417 bp, Artificial; identical to SEQ ID NO: 1677
  Mutations within GlyA3B4 introduced by GmGlyA3B4_T02TALE nuclease

SEQ ID NO: 2462 - DNA, 656 bp, Artificial
  Mutations within GlyA3B4 introduced by GmGlyA3B4_T02TALE nuclease
gttcatgtacggttgcagatataaacgaagcatagcttatgtatgaggtgtaacaaaattggaaacaatagccatgcaaggtgaagaatgtcaccaactcagaaacccttcttcattgacgtgtccctcactcactctcctctcttcactataaatcgccactcttcgtgttctccacttcaccaactccttcaaacttattaacactttccttagttcaatatggggaagcccttcttcactctctctctttcttccctttgcttgctactcttgtcgagtgcttgctattacctccagcaagttcaacgagtgccaactcaacaacctcaacgcgttggaacccgaccaccgcgttgagtccgaaggtggtcttattgaaacatggaactctcaacaccctgagctgcaatgcgccggtgtcactgtttccaaacgcaccctcaaccgcaacggcctccacttgccatcttactcaccttatccccaaatgatcattgtcgttcaaggtgcgtaatattagtaagagtatttatcagcttaacgtgataacaataatagtaatatgaaatatttattaaatttttataattaatctctgctagaaaatttgattaatcattttagtagaatttgtttttctcaactaggttttt

SEQ ID NO: 2463 - DNA, 651 bp, Artificial
  Mutations within GlyA3B4 introduced by GmGlyA3B4_T02TALE nuclease
gttcatgtacggttgcagatataaacgaagcatagcttatgtatgaggtgtaacaaaattggaaacaatagccatgcaaggtgaagaatgtcaccaactcagaaacccttcttcattgacgtgtccctcactcactctcctctcttcactataaatcgccactcttcgtgttctccacttcaccaactccttcaaacttattaacactttccttagttcaatatggggaagcccttcttcactctctctctttcttccctttgcttgctactcttgtcgagttttttgctattacctccagcaagttcaacgagtgccaactcaacaacctcaacgcgttggaacccgaccaccgcgttgagtccgaaggtggtcttattgaaacatggaactctcaacaccctgagctgcaatgcgccggtgtcactgtttccaaacgcaccctcaaccgcaacggcctccacttgccatcttactcaccttatccccaaatgatcattgtcgttcaaggtgcgtaatattagtaagaagtatttatcagcttaacgtgataacaatatagtaatatgaaatatttattaaatttttataattaatctctgctagaaaatttgattaatcattttagtagaatttgttttctcaactagg

SEQ ID NO: 2464 - DNA, 519 bp, Artificial
  Mutations within GlyA3B4 introduced by GmGlyA3B4_T02TALE nuclease
gttcatgtacggttgcagatataaacgaagcatagcttatgtatgaggtgtaacaaaattggaaacaatagccatgcaaggtgaagaatgtcaccaactcagaaacccttcttcattgacgtgtccctcactcactctcctctcttcactacaaatcaccactccttcaacgagtgccaactcaacaacctcaacgcgttggaacccgaccaccgcgttgagtccgaaggtggtcttattgaaacatggaactctcaacaccctgagctgcaatgcgccggtgtcactgtttccaaacgcaccctcaaccgcaacggcctccacttgccatcttactcaccttatccccaaatgatcattgtcgttcaaggtgcgtaatattagtaagaagtattttatcagcttaacgtgataacaataatagtaatatgaaatattttattaaattttttataattaatctctgctagaaaatttgattaatcattttttagtagaatttgttttttctcaactagg

SEQ ID NO: 2465 - DNA, 652 bp, Artificial
  Mutations within GlyA3B4 introduced by GmGlyA3B4_T02TALE nuclease
gttcatgtacggttgcagatataaacgaagcatagcttatgtatgaggtgtaacaaaattggaaacaatagccatgcaaggtgaagaatgtcaccaactcagaaacccttcttcattgacgtgtccctcactcactctcctctcttcactataaatcgccactcttcgtgttctccacttcaccaactccttcaaacttattaacactttccttagttcaatatggggaagcccttcttcactctctctctttcttccctttgcttgctactcttgtcgagtgcatacctccagcaagttcaacgagtgccaactcaacaacctcaacgcgttggaacccgaccaccgcgttgagtccgaaggtggtcttattgaaacatggaactctcaacaccctgagctgcaatgcgccggtgtcactgtttccaaacgcaccctcaaccgcaacggcctccacttgccatcttactcaccttatccccaaatgatcattgtcgttcaaggtgcgtaatattagtaagaagtatttatcagcttaacgtgataacaatatagtaatatgaaatatttattaaatttttataattaatctctgctagaaaatttgattaatcattttagtagaatttgttttctcaactaggttttaaaa

SEQ ID NO: 2466 - DNA, 471 bp, Artificial; identical to SEQ ID NO: 1723
  Mutations within GlyA3B4 introduced by GmGlyA3B4_T02TALE nuclease

SEQ ID NO: 2467 - DNA, 633 bp, Artificial
  Mutations within GlyA3B4 introduced by GmGlyA3B4_T02TALE nuclease
gttcatgtacggttgcagatataaacgaagcatagcttatgtatgaggtgtaacaaaattggaaacaatagccatgcaaggtgaagaatgtcaccaactcagaaacccttcttcattgacgtgtccctcactcactctcctctcttcactataaatcgccactcttcgtgttctccacttcaccaactccttcaaacttattaacactttccttagttcaatatggggaagcccttcttcactctctctctttcttccctttgcttgctactcttgtcgagttgctattacctccagcaagttcaacgagtgccaactcaacaacctcaacgcgttggaacccgaccaccgcgttgagtccgaaggtggtcttattgaaacatggaactctcaacaccctgagctgcaatgcgccggtgtcactgtttccaaacgcaccctcaaccgcaacggcctccacttgccatcttactcaccttatccccaaatgatcattgtcgttcaaggtgcgtaatattagtaagaagtatttatcagcttaacgtgataacaatatagtaatatgaaatatttattaaatttttataattaatctctgctagaaaatttgattaatcattttagtagaatttg

SEQ ID NO: 2468 - DNA, 651 bp, Artificial
  Mutations within GlyA3B4 introduced by GmGlyA3B4_T02TALE nuclease
gttcatgtacggttgcagatataaacgaagcatagcttatgtatgaggtgtaacaaaattggaaacaatagccatgcaaggtgaagaatgtcaccaactcagaaacccttcttcattgacgtgtccctcactcactctcctctcttcactataaatcgccactcttcgtgttctccacttcaccaactccttcaaacttattaacactttccttagttcaatatggggaagcccttcttcactctctctctttcttccctttgcttgctattacctccagcaagttcaacgagtgccaactcaacaacctcaacgcgttggaacccgaccaccgcgttgagtccgaaggtggtcttattgaaacatggaactctcaacacccctgagctgcaatgcgccggtgtcactgtttccaaacgcaccctcaaccgcaacggcctccacttgccatcttactcaccttatccccaaatgatcattgtcgttcaaggtgcgtaatattagtaagaagtatttatcagcttaacgtgataacaataatagtaatatgaaatatttattaaattttttataattaatctctgctagaaaatttgattaatcatttttagtagaatttgttttttctcaactaggttttaaaacaccaca

SEQ ID NO: 2469 - DNA, 668 bp, Artificial
  Mutations within GlyA3B4 introduced by GmGlyA3B4_T02TALE nuclease
gttcatgtacggttgcagatataaacgaagcatagcttatgtatgaggtgtaacaaaattggaaacaatagccatgcaaggtgaagaatgtcaccaactcagaaacccttcttcattgacgtgtccctcactcactctcctctcttcactataaatcgccactcttcgtgttctccacttcaccaactccttcaaacttattaacactttccttagttcaatatggggaagcccttcttcactctctctctttcttccctttgcttgctactcttgtcgagtgctttgctattacctccagcaagttcaacgagtgccaactcaacaacctcaacgcgttggaacccgaccaccgcgttgagtccgaaggtggtcttattgaaacatggaactctcaacaccctgagctgcaatgcgccggtgtcactgtttccaaacgcaccctcaaccgcaacggcctccacttgccatcttactcaccttatccccaaatgatcattgtcgttcaaggtgcgtaatattagtaagagtatttatcagcttaacgtgataacaataatagtaatatgaaatatttattaaatttttataattaatctctgctagaaaatttgattaatcattttagtagaatttgtttttctcaactaggtttttaaaacaccaca

SEQ ID NO: 2470 - DNA, 654 bp, Artificial
  Mutations within GlyA3B4 introduced by GmGlyA3B4_T02TALE nuclease
gttcatgtacggttgcagatataaacgaagcatagcttatgtatgaggtgtaacaaaattggaaacaatagccatgcaaggtgaagaatgtcaccaactcagaaacccttcttcattgacgtgtccctcactcactctcctctcttcactataaatcgccactcttcgtgttctccacttcaccaactccttcaaacttattaacactttccttagttcaatatggggaagcccttcttcactctctctctttcttccctttgcttgctactcttgtcgagtgcatgctattacctccagcaagttcaacgagtgccaactcaacaacctcaacgcgttggaacccgaccaccgcgttgagtccgaaggtggtcttattgaaacatggaactctcaacaccctgagctgcaatgcgccggtgtcactgtttccaaacgcaccctcaccgcaacggcctccacttgccatcttactcaccttatccccaaatgatcattgtcgttcaaggtgcgtaatattagtaagagtatttatcagcttaacgtgataacaataatagtaatatgaaatatttattaaatttttataattaatctctgctagaaaatttgattaatcattttagtagaatttgtttttctcaactaggtttt

SEQ ID NO: 2471 - DNA, 666 bp, Artificial; identical to SEQ ID NO: 1758
  Mutations within GlyA3B4 introduced by GmGlyA3B4_T02TALE nuclease

SEQ ID NO: 2472 - DNA, 631 bp, Artificial; identical to SEQ ID NO: 2292
  Mutations within GlyA3B4 introduced by GmGlyA3B4_T02TALE nuclease

SEQ ID NO: 2473 - DNA, 660 bp, Artificial; identical to SEQ ID NO: 1717
  Mutations within GlyA3B4 introduced by GmGlyA3B4_T02TALE nuclease

SEQ ID NO: 2474 - DNA, 665 bp, Artificial
  Mutations within GlyA3B4 introduced by GmGlyA3B4_T02TALE nuclease
gttcatgtacggttgcagatataaacgaagcatagcttatgtatgaggtgtaacaaaattggaaacaatagccatgcaaggtgaagaatgtcaccaactcagaaacccttcttcattgacgtgtccctcactcactctcctctcttcactataaatcgccactcttcgtgttctccacttcaccaactccttcaaacttattaacactttccttagttcaatatggggaagcccttcttcactctctctctttcttccctttgcttgctactcttgtcgagtgttgctattacctccagcaagttcaacgagtgccaactcaacaacctcaacgcgttggaacccgaccaccgcgttgagtccgaaggtggtcttattgaaacatggaactctcaacaccctgagctgcaatgcgccggtgtcactgtttccaaacgcaccctcaaccgcaacggcctccacttgccatcttactcaccttatccccaaatgatcattgtcgttcaaggtgcgtaatattagtaagagtatttatcagcttaacgtgataacaatatagtaatatgaaatatttattaaatttttataattaatctctgctagaaaatttgattaatcattttagtagaatttgtttttctcaactaggtttttaaaacaccaca

SEQ ID NO: 2475 - DNA, 600 bp, Artificial
  Mutations within GlyA3B4 introduced by GmGlyA3B4_T02TALE nuclease
gttcatgtacggttgcagatataaacgaagcatagcttatgtatgaggtgtaacaaaaattggaaacaatagccatgcaaggtgaagaatgtcaccaactcagaaacccttcttcattgacgtgtccctcactcactctcctctcttcactataaatcgccactcttcgtgttctccacttcaccaactccttcaaacttattaacactttccttagttcaatatggggaagcccttcttcactctctctctttcttccctttgcttgctactcttgtcgagaacctccagcaagttcaacgagtgccaactcaacaacctcaacgcgttggaacccgaccaccgcgttgagtccgaaggtggtcttattgaaacatggaactctcaacaccctgagctgcaatgcgccggtgtcactgtttccaaacgcaccctcaaccgcaacggcctccacttgccatcttactcaccttatcccccaaatgatcattgtcgttcaaggtgcgtaaatattagtaagaagtatttatcagcttaacgtgataacaataatagtaatatgaaatatttattaaattttttataattaatctctgctag

SEQ ID NO: 2476 - DNA, 607 bp, Artificial
  Mutations within GlyA3B4 introduced by GmGlyA3B4_T02TALE nuclease
gttcatgtacggttgcagatataaacgaagcatagcttatgtatgaggtgtaacaaaattggaaacaatagccatgcaaggtgaagaatgtcaccaactcagaaacccttcttcattgacgtgtccctcactcactctcctctcttcactataaatcgccactcttcgtgttctccacttcaccaactccttcaaacttattaacactttccttagttcaatatggggaagcccttcttcactctctctctttctccagcaagttcaacgagtgccaactcaacaacctcaacgcgttggaacccgaccaccgcgttgagtccgaaggtggtcttattgaaacatggaactctcaacaccctgagctgcaatgcgccggtgtcactgtttccaaacgcaccctcaaccgcaacggcctccacttgccatcttactcaccttatccccaaatgatcattgtcgttcaaggtgcgtaatattagtaagaagtatttatcagcttaacgtgataacaataatagtaatatgaaatatttattaatttttataattaatctctgctagaaaatttgattaatcatttttagtagaatttgtttttctcaac

SEQ ID NO: 2477 - DNA, 648 bp, Artificial
  Mutations within GlyA3B4 introduced by GmGlyA3B4_T02TALE nuclease
  misc_feature (530): n is a or c or t or g
gttcatgtacggttgcagatataaacgaagcatagcttatgtatgaggtgtaacaaaattggaaacaatagccatgcaaggtgaagaatgtcaccaactcagaaacccttcttcattgacgtgtccctcactcactctcctctcttcactataaatcgccactcttcgtgttctccacttcaccaactccttcaaacttattaacactttccttagttcaatatggggaagcccttcttcactctctctctttcttccctttgcttgctactcttgtcgagtgcatgctattacctccagcaagttcaacgagtgccaactcaacaacctcaacgcgttggaacccgaccaccgcgttgagtccgaaggtggtcttattgaaacatggaactctcaacaccctgagctgcaatgcgccggtgtcactgtttccaaacgcaccctcaaccgcaacggcctccacttgccatcttactcaccttatccccaaatgatcattgtcgttcaaggtgcgtaatattagtaagagnatttatcagcttaacgtgataacaataatagtaatatgaaatatttattaaatttttataattaatctctgctagaaaatttgattaatcattttagtagaatttgttttctcaacta

SEQ ID NO: 2478 - DNA, 635 bp, Artificial
  Mutations within GlyA3B4 introduced by GmGlyA3B4_T02TALE nuclease
gttcatgtacggttgcagatataaacgaagcatagcttatgtatgaggtgtaacaaaattggaaacaatagccatgcaaggtgaagaatgtcaccaactcagaaacccttcttcattgacgtgtccctcactcactctcctctcttcactataaatcgccactcttcgtgttctccacttcaccaactccttcaaacttattaacactttccttagttcaatatggggaagcccttcttcactctctctctttcttccctttgcttgctactcttgtcgagtttgctattacctccagcaagttcaacgagtgccaactcaacaacctcaacgcgttggaacccgaccaccgcgttgagtccgaaggtggtcttattgaaacatggaactctcaacaccctgagctgcaatgcgccggtgtcactgtttccaaacgcaccctcaaccgcaacggcctccacttgccatcttactcaccttatccccaaatgatcattgtcgttcaaggtgcgtaatattagtaagaagtatttatcagcttaacgtgataacaataatagtaatatgaaatatttattaaatttttataattaatctctgctagaaaatttgattaatcattttagtagaatttg

SEQ ID NO: 2479 - DNA, 651 bp, Artificial
  Mutations within GlyA3B4 introduced by GmGlyA3B4_T02TALE nuclease
gttcatgtacggttgcagatataaacgaagcatagcttatgtatgaggtgtaacaaaattggaaacaatagccatgcaaggtgaagaatgtcaccaactcagaaacccttcttcattgacgtgtccctcactcactctcctctcttcactataaatcgccactcttcgtgttctccacttcaccaactccttcaaacttattaacactttccttagttcaatatggggaagcccttcttcactctctctctttcttccctttgcttgctattacctccagcaagttcaacgagtgccaactcaacaacctcaacgcgttggaacccgaccaccgcgttgagtccgaaggtggtcttattgaaacatggaactctcaacaccctgagctgcaatgcgccggtgtcactgtttccaaacgcaccctcaaccgcaacggcctccacttgccatcttactcaccttatccccaaatgatcattgtcgttcaaggtgcgtaaatattagtaagaagtatttatcagcttaacgtgataacaataatagtaatatgaaatatttattaaattttttataattaatctctgctagaaaatttgattaatcatttttagtagaatttgttttttctcaactaggttttaaaacaccaca

SEQ ID NO: 2480 - DNA, 663 bp, Artificial
  Mutations within GlyA3B4 introduced by GmGlyA3B4_T02TALE nuclease
gttcatgtacggttgcagatataaacgaagcatagcttatgtatgaggtgtaacaaaaattggaaacaatagccatgcaaggtgaagaatgtcaccaactcagaaacccttcttcattgacgtgtccctcactcactctcctctcttcactataaatcgccactcttcgtgttctccacttcaccaactccttcaaacttattaacactttccttagttcaatatggggaagcccttcttcactctctctctttcttccctttgcttgctactcttgtcgagtgcattgattacctccagcaagttcaacgagtgccaactcaacaacctcaacgcgttggaacccgaccaccgcgttgagtccgaaggtggtcttattgaaacatggaactctcaacaccctgagctgcaatgcgccggtgtcactgtttccaaacgcaccctcaaccgcaacggcctccacttgccatcttactcaccttatccccaaatgatcattgtcgttcaaggtgcgtaatattagtaagaagtatttatcagcttaacgtgataacaataatagtaatatgaaatatttattaaatttttataattaatctctgctagaaaatttgattaatcattttagtagaatttgttttctcaactaggttttaaacacca

SEQ ID NO: 2481 - DNA, 641 bp, Artificial
  Mutations within GlyA3B4 introduced by GmGlyA3B4_T02TALE nuclease
gttcatgtacggttgcagatataaacgaagcatagcttatgtatgaggtgtaacaaaattggaaacaatagccatgcaaggtgaagaatgtcaccaactcagaaacccttcttcattgacgtgtccctcactcactctcctctcttcactataaatcgccactcttcgtgttctccacttcaccaactccttcaaacttattaacactttccttagttcaatatggggaagcccttcttcactctctctctttcttccctttgcttgctattacctccagcaagttcaacgagtgccaactcaacaacctcaacgcgttggaacccgaccaccgcgttgagtccgaaggtggtcttattgaaacatggaactctcaacaccctgagctgcaatgcgccggtgtcactgtttccaaacgcaccctcaaccgcaacggcctccacttgccatcttactcaccttatccccaaatgatcattgtcgttcaaggtgcgtaatattagtaagaagtatttatcagcttaacgtgataacaataatagtaatatgaaatattttattaaattttttataaattaatctctgctagaaaatttgattaatcatttttagtagaatttgttttttctcaactaggtttt

SEQ ID NO: 2482 - DNA, 635 bp, Artificial; identical to SEQ ID NO: 2434
  Mutations within GlyA3B4 introduced by GmGlyA3B4_T02TALE nuclease

SEQ ID NO: 2483 - DNA, 652 bp, Artificial; identical to SEQ ID NO: 1761
  Mutations within GlyA3B4 introduced by GmGlyA3B4_T02TALE nuclease

SEQ ID NO: 2484 - DNA, 659 bp, Artificial
  Mutations within GlyA3B4 introduced by GmGlyA3B4_T02TALE nuclease
  misc_feature (530): n is a or c or t or g
gttcatgtacggttgcagatataaacgaagcatagcttatgtatgaggtgtaacaaaattggaaacaatagccatgcaaggtgaagaatgtcaccaactcagaaacccttcttcattgacgtgtccctcactcactctcctctcttcactataaatcgccactcttcgtgttctccacttcaccaactccttcaaacttattaacactttccttagttcaatatggggaagcccttcttcactctctctctttcttccctttgcttgctactcttgtcgagtgcatgctattacctccagcaagttcaacgagtgccaactcaacaacctcaacgcgttggaacccgaccaccgcgttgagtccgaaggtggtcttattgaaacatggaactctcaacaccctgagctgcaatgcgccggtgtcactgtttccaaacgcaccctcaaccgcaacggcctccacttgccatcttactcaccttatccccaaatgatcattgtcgttcaaggtgcgtaatattagtaagagnatttatcagcttaacgtgataacaataatagtaatatgaaatatttattaaatttttataattaatctctgctagaaaatttgattaatcattttagtagaatttgttttctcaactaggtttttaaaa

SEQ ID NO: 2485 - DNA, 665 bp, Artificial; identical to SEQ ID NO: 2115
  Mutations within GlyA3B4 introduced by GmGlyA3B4_T02TALE nuclease

SEQ ID NO: 2486 - DNA, 575 bp, Artificial
  Mutations within GlyA3B4 introduced by GmGlyA3B4_T02TALE nuclease
gttcatgtacggttgcagatataaacgaagcatagcttatgtatgaggtgtaacaaaattggaaacaatagccatgcaaggtgaagaatgtcaccaactcagaaacccttcttcattgacgtgtccctcactcactctcctctcttcactataaatcgccactcttcgtgttctccacttcaccaactccttcaaacttattaacactttgctattacctccagcaagttcaacgagtgccaactcaacaacctcaacgcgttggaacccgaccaccgcgttgagtccgaaggtggtcttattgaaacatggaactctcaacaccctgagctgcaatgcgccggtgtcactgtttccaaacgcaccctcaaccgcaacggcctccacttgccatcttactcacccttatccccaaatgatcattgtcgttcaaggtgcgtaatattagtaagaagtatttatcagcttaacgtgataacaataatagtaatatgaaatatttattaaattttttataattaatctcttgctagaaaatttgattaatcatttttagtagaatttgtttttctcaa

SEQ ID NO: 2487 - DNA, 699 bp, Artificial
  Mutations within GlyA3B4 introduced by GmGlyA3B4_T02TALE nuclease
gttcatgtacggttgcagatataaacgaagcatagcttatgtatgaggtgtaacaaaattggaaacaatagccatgcaaggtgaagaatgtcaccaactcagaaacccttcttcattgacgtgtccctcactcactctcctctcttcactataaatcgccactcttcgtgttctccacttcaccaactccttcaaacttattaacactttccttagttcaatatggggaagcccttcttcactctctctctttcttccctttgcttgctactcttgtcgagtgcatccaacaattatctcccatacccgttgcacacttgagtttgttaatggtcagctattacctccagcaagttcaacgagtgccaactcaacaacctcaacgcgttggaaccccgaccaccgcgttgagtccgaaggtggtcttattgaaacatggaactctcaacaccctgagctgcaatgcgccggtgtcactgtttccaaacgcaccctcaaccgcaacggcctccacttgccatcttactcaccttatccccaaatgatcattgtcgttcaaggtgcgtaatattagtaagaagtatttatcagcttaacgtgataacaataatagtaatatgaaatatttattaaatttttataattaatctctgctagaaaatttgattaatcatttttagtagaatttgtttttctcaa

SEQ ID NO: 2488 - DNA, 650 bp, Artificial
  Mutations within GlyA3B4 introduced by GmGlyA3B4_T02TALE nuclease
  misc_feature (530): n is a or c or t or g
gttcatgtacggttgcagatataaacgaagcatagcttatgtatgaggtgtaacaaaattggaaacaatagccatgcaaggtgaagaatgtcaccaactcagaaacccttcttcattgacgtgtccctcactcactctcctctcttcactataaatcgccactcttcgtgttctccacttcaccaactccttcaaacttattaacactttccttagttcaatatggggaagcccttcttcactctctctctttcttccctttgcttgctactcttgtcgagtgcatgctattacctccagcaagttcaacgagtgccaactcaacaacctcaacgcgttggaacccgaccaccgcgttgagtccgaaggtggtcttattgaaacatggaactctcaacaccctgagctgcaatgcgccggtgtcactgtttccaaacgcaccctcaaccgcaacggcctccacttgccatcttactcaccttatccccaaatgatcattgtcgttcaaggtgcgtaatattagtaagagnatttatcagcttaacgtgataacaataatagtaatatgaaatatttattaaatttttataattaatctctgctagaaaatttgattaatcattttagtagaatttgttttctcaactagg

SEQ ID NO: 2489 - DNA, 600 bp, Artificial
  Mutations within GlyA3B4 introduced by GmGlyA3B4_T02TALE nuclease
gttcatgtacggttgcagatataaacgaagcatagcttatgtatgaggtgtaacaaaattggaaacaatagccatgcaaggtgaagaatgtcaccaactcagaaacccttcttcattgacgtgtccctcactcactctcctctcttcactataaatcgccactcttcgtgttctccacttcaccaactccttcaaacttattaacactttccttagttcaatatggggaagcccttcttcactctctctctttcttccctttgcttgctactcttgtcgagtttacctccagcaagttcaacgagtgccaactcaacaacctcaacgcgttggaacccgaccaccgcgttgagtccgaaggtggtcttattgaaacatggaactctcaacaccctgagctgcaatgcgccggtgtcactgtttccaaacgcaccctcaaccgcaacggcctccacttgccatcttactcaccttatccccaaatgatcattgtcgttcaaggtgcgtaaatattagtaagaagtatttatcagcttaacgtgataacaataatagtaatatgaaatatttattaaattttttataattaatctctgctag

SEQ ID NO: 2490 - DNA, 651 bp, Artificial
  Mutations within GlyA3B4 introduced by GmGlyA3B4_T02TALE nuclease
gttcatgtacggttgcagatataaacgaagcatagcttatgtatgaggtgtaacaaaattggaaacaatagccatgcaaggtgaagaatgtcaccaactcagaaaccccttcttcattgacgtgtccctcactcactctcctctcttcactataaatcgccactcttcgtgttctccacttcaccaactccttcaaacttattaacactttccttagttcaatatggggaagcccttcttcactctctctctttcttccctttgcttgctactcttgtcgagtgcatgctattacctccagcaagttcaacgagtgccaactcaacaacctcaacgcgttggaacccgaccaccgcgttgagtccgaaggtggtcttattgaaacatggaactctcaacaccctgagctgcaatgcgccggtgtcactgtttccaaacgcaccctcaaccgcaacggcctccacttgccatcttactcaccttatccccaaatgatcattgtcgttcaaggtgcgtaatattagtaagagtatttatcagcttaacgtgataacaataatagtaatatgaaatatttattaaatttttataattaatctctgctagaaaatttgattaatcattttagtagaatttgttttctcaactagg

SEQ ID NO: 2491 - DNA, 654 bp, Artificial
  Mutations within GlyA3B4 introduced by GmGlyA3B4_T02TALE nuclease
gttcatgtacggttgcagatataaacgaagcatagcttatgtatgaggtgtaacaaaattggaaacaatagccatgcaaggtgaagaatgtcaccaactcagaaacccttcttcattgacgtgtccctcactcactctcctctcttcactataaatcgccactcttcgtgttctccacttcaccaactccttcaaacttattaacactttccttagttcaatatggggaagcccttcttcactctctctctttcttccctttgcttgctactcttgtcgagtgcatacctccagcaagttcaacgagtgccaactcaacaacctcaacgcgttggaacccgaccaccgcgttgagtccgaaggtggtcttattgaaacatggaactctcaacaccctgagctgcaatgcgccggtgtcactgtttccaaacgcaccctcaaccgcaacggcctccacttgccatcttactcaccttatccccaaatgatcattgtcgttcaaggtgcgtaatattagtaagaagtatttatcagcttaacgtgataacaataatagtaatatgaaatatttattaaatttttataattaatctctgctagaaaatttgattaatcattttagtagaatttgtttttctcaactaggttttaaaa

SEQ ID NO: 2492 - DNA, 635 bp, Artificial
  Mutations within GlyA3B4 introduced by GmGlyA3B4_T02TALE nuclease
gttcatgtacggttgcagatataaacgaagcatagcttatgtatgaggtgtaacaaaattggaaacaatagccatgcaaggtgaagaatgtcaccaactcagaaacccttcttcattgacgtgtccctcactcactctcctctcttcactataaatcgccactcttcgtgttctccacttcaccaactccttcaaacttattaacactttccttagttcaatatgggggaagcccttcttcactctctctctttcttccctttgcttgctactcttgtcgagtgcatttacctccagcaagttcacgagtgccaactcaacaacctcaacgcgttggaacccgaccaccgcgttgagtccgaaggtggtcttattgaaacatggaactctcaacaccctgagctgcaatgcgccggtgtcactgtttccaaacgcacccctcaaccgcaacggcctccacttgccaatcttactcaccttatcccccaaatgatcattgtcgttcaaggtgcgtaatattagtaagaagtatttatcagcttaacgtgataacaatatagtaatatgaaatatttattaaatttttataattaatctctgctagaaaatttgattaatcattttagtagaatttg

SEQ ID NO: 2493 - DNA, 579 bp, Artificial
  Mutations within GlyA3B4 introduced by GmGlyA3B4_T02TALE nuclease
gttcatgtacggttgcagatataaacgaagcatagcttatgtatgaggtgtaacaaaattggaaacaatagccatgcaaggtgaagaatgtcaccaactcagaaacccttcttcattgacgtgtccctcactcactctcctctcttcactataaatcgccactcttcgtgttctccacttcaccaactccttcaaacttattaacactttccttagttcaatatggggaagcccttcttcactctctctctttcttccctttgcttgctaactcaacaacctcaacgcgttggaacccgaccaccgcgttgagtccgaaggtggtcttattgaaacatggaactctcaacaccctgagctgcaatgcgccggtgtcactgtttccaaacgcaccctcaaccgcaacggcctccacttgccatcttactcaccttatccccaaatgatcattgtcgttcaaggtgcgtaatattagtaagaagtatttatcagcttaacgtgataacaataatagtaatatgaatatttattaatttttataattaatctctgctagaaaatttgattaatcatttttag

SEQ ID NO: 2494 - DNA, 630 bp, Artificial
  Mutations within GlyA3B4 introduced by GmGlyA3B4_T02TALE nuclease
gttcatgtacggttgcagatataaacgaagcatagcttatgtatgaggtgtaacaaaattggaaacaatagccatgcaaggtgaagaatgtcaccaactcagaaacccttcttcattgacgtgtccctcactcactctcctctcttcactataaatcgccactcttcgtgttctccacttcaccaactccttcaaacttattaacactttccttagttcaatatggggaagcccttcttcactctctctctttcttccctttgcttgctactcaacgagtgccaactcaacaacctcaacgcgttggaacccgaccaccgcgttgagtccgaaggtggtcttattgaaacatggaactctcaacaccctgagctgcaatgcgccggtgtcactgtttccaaacgcaccctcaaccgcaacggcctccacttgccatcttactcaccttatccccaaatgatcattgtcgttcaaggtgcgtaatattagtaagaagtatttatcagcttaacgtgataacaataatagtaatatgaaatatttattaaattttttataattaatctctgctagaaaatttgattaatcatttttagtagaatttgtttttctcaactaggtttttaaaca

SEQ ID NO: 2495 - DNA, 644 bp, Artificial
  Mutations within GlyA3B4 introduced by GmGlyA3B4_T02TALE nuclease
gttcatgtacggttgcagatataaacgaagcatagcttatgtatgaggtgtaacaaaattggaaacaatagccatgcaaggtgaagaatgtcaccaactcagaaacccttcttcattgacgtgtccctcactcactctcctctcttcactataaatcgccactcttcgtgttctccacttcaccaactccttcaaacttattaacactttccttagttcaatatggggaagcccttcttcactctctctctttcttccctttgcttgctactcttgtcgagtgctacctccagcaagttcaacgagtgccaactcaacaacctcaacgcgttggaacccgaccaccgcgttgagtccgaaggtggtcttattgaaacatggaactctcaacaccctgagctgcaatgcgccggtgtcactgtttccaaacgcaccctcaaccgcaacggcctccacttgccatcttactcaccttatccccaaatgatcattgtcgttcaaggtgcgtaatattagtaagaagtatttatcagcttaacgtgataacaataatagtaatatgaaatatttattaaatttttataattaatctctgctagaaaatttgattaatcattttagtagaatttgttttctcaactagg

SEQ ID NO: 2496 - DNA, 608 bp, Artificial
  Mutations within GlyA3B4 introduced by GmGlyA3B4_T02TALE nuclease
gttcatgtacggttgcagatataaacgaagcatagcttatgtatgaggtgtaacaaaattggaaacaatagccatgcaaggtgaagaatgtcaccaactcagaaacccttcttcattgacgtgtccctcactcactctcctctcttcactataaatcgccactcttcgtgttctccacttcaccaactccttcaaacttattaacactttccttagttcaatatggggaagcccttcttcactctctctctttcttccctttgcttgctactcttgtcgagtgcaacgagtgccactcaacacctcacgcgttggaacccgaccaccgcgttgagtccgaaggtggtcttattgaaacatggaactctcaacaccctgagctgcaatgcgccggtgtcactgtttccaacgcaccctcaaccgcaacggcctccacttgccatcttactcaccttatccccaaatgatcattgtcgttcaggtgcgtaatattagtaagaagtatttatcagcttaacgtgataacaataatagtaatatgaaatatttattaaattttttataattaattctctgctagaaaatttgattaatcatttttagtagaa

SEQ ID NO: 2497 - DNA, 582 bp, Artificial
  Mutations within GlyA3B4 introduced by GmGlyA3B4_T02TALE nuclease
gttcatgtacggttgcagatataaacgaagcatagcttatgtatgaggtgtaacaaaattggaaacaatagccatgcaaggtgaagaatgtcaccaactcagaaacccttcttcattgacgtgtccctcactcactctcctctcttcactataaatcgccactcttcgtgttctccacttcaccaactccttcaaacttattaacactttccttagttcaatattacctccagcaagttcaacgagtgccaactcaacaacctcaacgcgttggaaccgaccaccgcgttgagtccgaaggtggtcttattgaaacatggaactctcaacaccctgagctgcaatgcgccggtgtcactgtttccaaacgcaccctcaaccgcaacggcctccacttgccatcttactcaccttatcccccaaatgatcattgtcgttcaaggtgcgtaatattagtaagaagtatttatcagcttaacgtgataacaataatagtaatatgaaatatttattaaattttttataattaatctctgctagaaaatttgattaatcatttttagtagaatttgtttttctcaa

SEQ ID NO: 2498 - DNA, 646 bp, Artificial
  Mutations within GlyA3B4 introduced by GmGlyA3B4_T02TALE nuclease
gttcatgtacggttgcagatataaacgaagcatagcttatgtatgaggtgtaacaaaattggaaacaatagccatgcaaggtgaagaatgtcaccaactcagaaacccttcttcattgacgtgtccctcactcactctcctctcttcactataaatcgccactcttcgtgttctccacttcaccaactccttcaaacttattaacactttccttagttcaatatggggaagcccttcttcactctctctctttcttccctttgcttgctactcttgtcgagtgcatgcttccagcaagttcaacgagtgccaactcaacaacctcaacgcgttggaacccgaccaccgcgttgagtccgaaggtggtcttattgaaacatggaactctcaacaccctgagctgcaatgcgccggtgtcactgtttccaaacgcaccctcaaccgcaacggcctccacttgccatcttactcaccttatccccaaatgatcattgtcgttcaaggtgcgtaatattagtaagaagtatttatcagcttaacgtgataacaataatagtaatatgaaatatttattaaatttttataattaatctctgctagaaaatttgattaatcattttagtagaatttgtttttctcaactagg

SEQ ID NO: 2499 - DNA, 579 bp, Artificial
  Mutations within GlyA3B4 introduced by GmGlyA3B4_T02TALE nuclease
gttcatgtacggttgcagatataaacgaagcatagcttatgtatgaggtgtaacaaaattggaaacaatagccatgcaaggtgaagaatgtcaccaactcagaaacccttcttcattgacgtgtccctcactcactctcctctcttcactataaatcgccactcttcgtgttctccacttcaccaactccttcaaacttattaacactttccttagttcaatatggggaagcccttcttcactctctctctttcttccctttgcttgctactcttgtcgagtgccaactcaacaacctcaacgcgttggaacccgaccaccgcgttgagtccgaaggtggtcttattgaaacatggaactctcaacaccctgagctgcaatgcgccggtgtcactgtttccaaaacgcaccctcaaccgcaacggcctccacttgccatcttactcaccttatccccaaatgatcattgtcgttcaaggtgcgtaatattagtaagaagtatttatcagcttaacgtgataacaataatagtaatatgaaatatttattaaatttttataattaatctctgctagaaaa

SEQ ID NO: 2500 - DNA, 561 bp, Artificial
  Mutations within GlyA3B4 introduced by GmGlyA3B4_T02TALE nuclease
gttcatgtacggttgcagatataaacgaagcatagcttatgtatgaggtgtaacaaaattggaaacaatagccatgcaaggtgaagaatgtcaccaactcagaaacccttcttcattgacgtgtccctcactcactctcctctcttcactataaatcgccactcttcgtgttctccacttcaccaactccttcaaacttattaacactttccttagttcaatatggggaagcccttcttcactctctctctttcttccctttgcttgctactcttgtcgagtgcattctcaacaccctgagctgcaatgcgccggtgtcactgtttccaaacgcaccctcaaccgcaacggcctccacttgccatcttactcaccttatcccccaaatgatcattgtcgttcaaggtgcgtaatattagtaagaagtatttatcagcttaacgtgataacaataatagtaatatgaaatatttattaaattttttataattaatctctgctagaaaatttgattaatcatttttagtagaatttgtttttctcaactaaggtttttaaaca

SEQ ID NO: 2501 - DNA, 651 bp, Artificial
  Mutations within GlyA3B4 introduced by GmGlyA3B4_T02TALE nuclease
gttcatgtacggttgcagatataaacgaagcatagcttatgtatgaggtgtaacaaaattggaaacaatagccatgcaaggtgaagaatgtcaccaactcagaaacccttcttcattgacgtgtccctcactcactctcctctcttcactataaatcgccactcttcgtgttctccacttcaccaactccttcaaacttattaacactttccttagttcaatatggggaagcccttcttcactctctctctttcttccctttgcttgctactcttgtcgagtgctattacctccagcaagttcaacgagtgccaactcaacaacctcaacgcgttggaacccgaccaccgcgttgagtccgaaggtggtcttattgaaacatggaactctcaacaccctgagctgcaatgcgccggtgtcactgtttccaaacgcaccctcaaccgcaacggcctccacttgccatcttactcaccttatccccaaatgatcattgtcgttcaaggtgcgtaatattagtaagaagtatttatcagcttaacgtgataacaatatagtaatatgaaatatttattaaatttttataattaatctctgctagaaaatttgattaatcattttagtagaatttgttttctcaactaggttttt

SEQ ID NO: 2502 - DNA, 663 bp, Artificial; identical to SEQ ID NO: 2045
  Mutations within GlyA3B4 introduced by GmGlyA3B4_T02TALE nuclease

SEQ ID NO: 2503 - DNA, 660 bp, Artificial; identical to SEQ ID NO: 1717
  Mutations within GlyA3B4 introduced by GmGlyA3B4_T02TALE nuclease

SEQ ID NO: 2504 - DNA, 576 bp, Artificial
  Mutations within GlyA3B4 introduced by GmGlyA3B4_T02TALE nuclease
gttcatgtacggttgcagatataaacgaagcatagcttatgtatgaggtgtaacaaaattggaaacaatagccatgcaaggtgaagaatgtcaccaactcagaaacccttcttcattgacgtgtccctcactcactctcctctcttcactataaatcgccactcttcgtgttctccacttcaccaactccttcaaacttattaacactttccttagttcaatatggggaagcccttcttcactctctctctttcttccctttgcttgctactcttgtcgagtgccaactcaacaacctcaacgcgttggaacccgaccaccgcgttgagtccgaaggtggtcttattgaaacatggaactctcaacaccctgagctgcaatgcgccggtgtcactgtttccaaaacgcaccctcaaccgcaacggcctccacttgccatcttactcaccttatccccaaatgatcattgtcgttcaaggtgcgtaatattagtaagaagtatttatcagcttaacgtgataacaataatagtaatatgaaatatttattaaattttttataattaatctctgctag

SEQ ID NO: 2505 - DNA, 743 bp, Artificial
  Mutations within GlyA3B4 introduced by GmGlyA3B4_T02TALE nuclease
gttcatgtacggttgcagatataaacgaagcatagcttatgtatgaggtgtaacaaaattggaaacaatagccatgcaaggtgaagaatgtcaccaactcagaaacccttcttcattgacgtgtccctcactcactctcctctcttcactataaatcgccactcttcgtgttctccacttcaccaactccttcaaacttattaacactttccttagttcaatatggggaagcccttcttcactctctctctttcttccctttgcttgctactcttgtcgagtgcatgcctgcttgccgccatcgtggctggcgatggccaccacctgctccgggtcaagccgtgggcctggcacagcaccgtctccagcgcctgcttgccaccattattgctggcgatggccaccacctgctggggggctttgctattacctccagcaagttcaacgagtgccaactcaacaacctcaacgcgttggaacccgaccaccgcgttgagtccgaaggtggtcttattgaaacatggaactctcaacaccctgagctgcaatgcgccggtgtcactgtttccaaacgcaccctcaaccgcaacggcctccacttgccatcttactcaccttatccccaaatgatcattgtcgttcaaggtgcgtaatattagtaagaagtatttatcagcttaacgtgataacaataatagtaatatgaaatatttattaaattttttataattaatctctgctag

SEQ ID NO: 2506 - DNA, 664 bp, Artificial
  Mutations within GlyA3B4 introduced by GmGlyA3B4_T02TALE nuclease
gttcatgtacggttgcagatataaacgaagcatagcttatgtatgaggtgtaacaaaattggaaacaatagccatgcaaggtgaagaatgtcaccaactcagaaacccttcttcattgacgtgtccctcactcactctcctctcttcactataaatcgccactcttcgtgttctccacttcaccaactccttcaaacttattaacactttccttagttcaatatggggaagcccttcttcactctctctctttcttccctttgcttgctactcttgtcgagtgcatgttacctccagcaagttcaacgagtgccaactcaacaacctcaacgcgttggaacccgaccaccgcgttgagtccgaaggtggtcttattgaaacatggaactctcaacaccctgagctgcaatgcgccggtgtcactgtttccaaacgcaccctcaaccgcaacggcctccacttgccatcttactcaccttatccccaaatgatcattgtcgttcaaggtgcgtaatattagtaagaagtatttatcagcttaacgtgataacaataatagtaatatgaaatatttattaaatttttataattaatctctgctagaaaatttgattaatcatttttagtagaatttgtttttctcaactaggtttttaaaacacca

SEQ ID NO: 2507 - DNA, 666 bp, Artificial; identical to SEQ ID NO: 2309
  Mutations within GlyA3B4 introduced by GmGlyA3B4_T02TALE nuclease

SEQ ID NO: 2508 - DNA, 664 bp, Artificial
  Mutations within GlyA3B4 introduced by GmGlyA3B4_T02TALE nuclease
  misc_feature (596): n is a or c or t or g
gttcatgtacggttgcagatataaacgaagcatagcttatgtatgaggtgtaacaaaattggaaacaatagccatgcaaggtgaagaatgtcaccaactcagaaaccccttcttcattgacgtgtccctcactcactctcctctcttcactataaatcgccactcttcgtgttctccacttcaccaactccttcaaacttattaacactttccttagttcaatatggggaagcccttcttcactctctctctttcttccctttgcttgctactcttgtcgagtgcatattacctccagcaagcttcaacgagtgccaactcaacaacctcaacgcgttggaacccgaccaccgcagttgagtcccgaacggtggttcttattgaaaacgatgggaacttctcaacaccctgagctgcaatgcgccgggtcctgtttcaaacgcacccttcaaaccgcaaccagccagcctgccatccttgcatcctactcacctttactcccccaaatgaatccaattgtccgttcaaatggtcgtcaggtaatcatttagttaagaagtatttatcagcttaacgtgataacaatatagtaatangaaatatttattaaatttttataaatttaatctctgctagaaaatttgattaatcatttttagtagaa

SEQ ID NO: 2509 - DNA, 654 bp, Artificial; identical to SEQ ID NO: 2225
  Mutations within GlyA3B4 introduced by GmGlyA3B4_T02TALE nuclease

SEQ ID NO: 2510 - DNA, 660 bp, Artificial
  Mutations within GlyA3B4 introduced by GmGlyA3B4_T02TALE nuclease
  misc_feature (529): n is a or c or t or g
gttcatgtacggttgcagatataaacgaagcatagcttatgtatgaggtgtaacaaaattggaaacaatagccatgcaaggtgaagaatgtcaccaactcagaaacccttcttcattgacgtgtccctcactcactctcctctcttcactataaatcgccactcttcgtgttctccacttcaccaactccttcaaacttattaacactttccttagttcaatatggggaagcccttcttcactctctctctttcttccctttgcttgctactcttgtcgagtgcatgtattacctccagcaagttcaacgagtgccaactcaacaacctcaacgcgttggaacccgaccaccgcgttgagtccgaaggtggtcttattgaaacatggaactctcaacaccctgagctgcaatgcgccggtgtcactgtttccaaacgcaccctcaaccgcaacggcctccacttgccatcttactcaccttatccccaaatgatcattgtcgttcaaggtgcgtaatattagtaagagnatttatcagcttaacgtgataacaatatagtaatatgaaatatttattaaatttttataattaatctctgctagaaaatttgattaatcattttagtagaatttgtttttctcaactaggttttaaacacc

SEQ ID NO: 2511 - DNA, 458 bp, Artificial
  Mutations within GlyA3B4 introduced by GmGlyA3B4_T02TALE nuclease
gttcatgtacggttgcagatataaacgaagcatagcttatgtatgaggtgtaacaaaattggaaacaatagccatgcaaggtgaagaatgtcaccaactcaggatgctatcaacaacctcaacgcgttggaacccgaccaccgcgttgagtccgaaggtggtcttattgaaacatggaactctcaacaccctgagctgcaatgcgccggtgtcactgtttccaaacgcaccctcaaccgcaacggcctccacttgccatcttactcaccttatccccaaatgatcattgtcgttcaaggtgcgtaatattagtaagaagtatttatcagcttaacgtgataacaataatagtaatatgaaatatttattaaattttttataattaatctctgctagaaaatttgattaatcatttttagtagaatttgtttttctcaactaggtttttaaacaccaca

SEQ ID NO: 2512 - DNA, 636 bp, Artificial; identical to SEQ ID NO: 1885
  Mutations within GlyA3B4 introduced by GmGlyA3B4_T02TALE nuclease

SEQ ID NO: 2513 - DNA, 652 bp, Artificial
  Mutations within GlyA3B4 introduced by GmGlyA3B4_T02TALE nuclease
gttcatgtacggttgcagatataaacgaagcatagcttatgtatgaggtgtaacaaaattggaaacaatagccatgcaaggtgaagaatgtcaccaactcagaaacccttcttcattgacgtgtccctcactcactctcctctcttcactataaatcgccactcttcgtgttctccacttcaccaactccttcaaacttattaacactttccttagttcaatatggggaagcccttcttcactctctctctttcttcccttcttcactattacctccagcaagttcaacgagtgccaactcaacaacctcaacgcgttggaacccgaccaccgcgttgagtccgaaggtggtcttattgaaacatggaactctcaacaccctgagctgcaatgcgccggtgtcactgtttccaaacgcaccctcaaccgcaacggcctccacttgccatcttactcaccttatcccccaaatgatcattgtcgttcaaggtgcgtaaatattagtaagaagtatttatcagcttaacgtgataacaataatagtaatatgaaatatttattaaattttttataaattaatctctgctagaaaatttgattaatcatttttagtagaatttgttttttctcaactaggttttaaaacaccaca

SEQ ID NO: 2514 - DNA, 647 bp, Artificial
  Mutations within GlyA3B4 introduced by GmGlyA3B4_T02TALE nuclease
gttcatgtacggttgcagatataaacgaagcatagcttatgtatgaggtgtaacaaaattggaaacaatagccatgcaaggtgaagaatgtcaccaactcagaaacccttcttcattgacgtgtccctcactcactctcctctcttcactataaatcgccactcttcgtgttctccacttcaccaactccttcaaacttattaacactttccttagttcaatatggggaagcccttcttcactctctctctttcttccctttgcttgctactcttgtcgagtgctattacctccagcaagttcaacgagtgccaactcaacaacctcaacgcgttggaacccgaccaccgcgttgagtccgaaggtggtcttattgaaacatggaactctcaacaccctgagctgcaatgcgccggtgtcactgtttccaaacgcaccctcaaccgcaacggcctccacttgccatcttactcaccttatccccaaatgatcattgtcgttcaaggtgcgtaatattagtaagaagtatttatcagcttaacgtgataacaataatagtaatatgaaatatttattaaatttttataattaatctctgctagaaaatttgattaatcattttagtagaatttgttttctcaactagg

SEQ ID NO: 2515 - DNA, 553 bp, Artificial
  Mutations within GlyA3B4 introduced by GmGlyA3B4_T02TALE nuclease
gttcatgtacggttgcagatataaacgaagcatagcttatgtatgaggtgtaacaaaattggaaacaatagccatgcaaggtgaagaatgtcaccaactcagaaacccttcttcattgacgtgtccctcactcactctcctctcttcactataaatcgccactcttcgtgttctccacttcaccaactccttcaaacttattaacactttccttagttcaatatggggaagcccttcttcactctctctctttcaacgagtgccaactcaacaacctcaacgcgttggaacccgaccaccgcgttgagtccgaaggtggtcttattgaaacatggaactctcaacaccctgagctgcaatgcgccggtgtcactgtttccaaacgcaccctcaaccgcaacggcctccacttgccatcttactcaccttatccccaaatgatcattgtcgttcaaggtgcgtaatattagtaagaagtatttatcagcttaacgtgataacaataatagtaatatgaaatatttattaattttttataattaatctctgctag

SEQ ID NO: 2516 - DNA, 620 bp, Artificial
  Mutations within GlyA3B4 introduced by GmGlyA3B4_T02TALE nuclease
  misc_feature (555): n is a or c or t or g
gttcatgtacggttgcagatataaacgaagcatagcttatgtatgaggtgtaacaaaattggaaacaatagccatgcaaggtgaagaatgtcaccaactcagaaacccttcttcattgacgtgtccctcactcactctcctctcttcactataaatcgccactcttcgtgttctccacttcaccaactccttcaaacttattaacactttccttagttcaatatggggaagcccttcttcactctctctctttcttccctttgcttgctactcttgttacctccagcaagttcaacgagtgccaactcaacaacctcaacgcgttggaacccgaccaccgcgttgagtccgaaggtggtcttattgaaacatggaactctcaacaccctgagctgcaatgcgccggtgtcactgtttccaaacgcaccctcaaccgcaacggcctccacttgccatcttactcaccttatcccccaaatgatcattgtcgttcaaggtgcgtaaatattagtaagaagtatttatcagcttaacgtgataacaataatagtaatntgaaatatttattaaattttttataattaatctctgctagaaaatttgattaatctttttagtag

SEQ ID NO: 2517 - DNA, 609 bp, Artificial
  Mutations within GlyA3B4 introduced by GmGlyA3B4_T02TALE nuclease
gttcatgtacggttgcagatataaacgaagcatagcttatgtatgaggtgtaacaaaattggaaacaatagccatgcaaggtgaagaatgtcaccaactcagaaacccttcttcattgacgtgtccctcactcactctcctctcttcactataaatcgccactcttcgtgttctccacttcaccaactccttcaaacttattaacactttccttagttcaatatggggaagcccttcttcactctctctcttacctccagcaagttcaacgagtgccaactcaacaacctcaacgcgttggaacccgaccaccgcgttgagtccgaaggtggtcttattgaaacatggaactctcaacaccctgagctgcaatgcgccggtgtcactgtttccaaacgcaccctcaaccgcaacggcctccacttgccatcttactcaccttatccccaaatgatcattgtcgttcaaggtgcgtaatattagtaagaagtatttatcagcttaacgtgataacaataatagtaatatgaaatatttattaattttttataattaatctctgctagaaaatttgattaatcatttttagtagaatttgtttttctcaac

SEQ ID NO: 2518 - DNA, 604 bp, Artificial
  Mutations within GlyA3B4 introduced by GmGlyA3B4_T02TALE nuclease
  misc_feature (533): n is a or c or t or g
gttcatgtacggttgcagatataaacgaagcatagcttatgtatgaggtgtaacaaaattggaaacaatagccatgcaaggtgaagaatgtcaccaactcagaaacccttcttcattgacgtgtccctcactcactctcctctcttcactataaatcgccactcttcgtgttctccacttcaccaactccttcaaacttattaacactttccttagttcaatatggggaagcccttcttcactctctctctttcttccctttgcttgctactcttgtcgagtgcatggagacggtccagcggctgttgccggtgctgtgccaggcccacggcttgaccccggagcaggtggtggccatcgccagccacgataccctgagctgcaatgcgccggtgtcactgtttccaaacgcacccctcaaccgcaacggcctccacttgccatcttactcaccttatccccaaatgatcattgtcgttcaaggtgcgtaatattagtaagaagtattatcagcttaacgtgataacaataanagtaatatgaaatatttattaaattttttataattaatctctgctagaaaatttgattaatcatttttagt

SEQ ID NO: 2519 - DNA, 610 bp, Artificial
  Mutations within GlyA3B4 introduced by GmGlyA3B4_T02TALE nuclease
gttcatgtacggttgcagatataaacgaagcatagcttatgtatgaggtgtaacaaaattggaaacaatagccatgcaaggtgaagaatgtcaccaactcagaaacccttcttcattgacgtgtccctcactcactctcctctcttcactataaatcgccactcttcgtgttctccacttcaccaactccttcaaacttattaacactttccttagttcaatatggggaagcccttcttcactctctctctttcttccctttgcttgctactcttgtcgggttccagcaagttcaacgagtgccaactcaacaacctcaacgcgttggaacccgaccaccgcgttgagtccgaaggtggtcttattgaaacatggaactctcaacaccctgagctgcaatgcgccggtgtcactgtttccaaacgcaccctcaaccgcaacggcctccacttgccatcttactcaccttatcccccaaatgatcattgtcgttcaaggtgcgtaatattagtaagaagtatttatcagcttaacgtgataacaataatagtaatatgaaatatttattaaattttttataattaatctctgctagaaaatttgattaatc

SEQ ID NO: 2520 - DNA, 585 bp, Artificial
  Mutations within GlyA3B4 introduced by GmGlyA3B4_T02TALE nuclease
gttcatgtacggttgcagatataaacgaagcatagcttatgtatgaggtgtaacaaaattggaaacaatagccatgcaaggtgaagaatgtcaccaactcagaaacccttcttcattgacgtgtccctcactcactctcctctcttcactataaatcgccactcttcgtgttctccacttcaccaactccttcaaacttattaacactttccttagttcaaccggcgcattgcagcaagttcaacgagtgccaactcaacaacctcaacgcgttggaacccgaccaccgcgttgagtccgaaggtggtcttattgaaacatggaactctcaacaccctgagctgcaatgcgccggtgtcactgtttccaaacgcaccctcaaccgcaacggcctccacttgccatcttactcaccttatcccccaaatgatcattgtcgttcaaggtgcgtaatattagtaagaagtatttatcagcttaacgtgataacaataatagtaatatgaaatatttattaaattttttataattaatctctgctagaaaatttgattaatcatttttagtagaatttgtttttctcaa

SEQ ID NO: 2521 - DNA, 612 bp, Artificial
  Mutations within GlyA3B4 introduced by GmGlyA3B4_T02TALE nuclease
gttcatgtacggttgcagatataaacgaagcatagcttatgtatgaggtgtaacaaaattggaaacaatagccatgcaaggtgaagaatgtcaccaactcagaaacccttcttcattgacgtgtccctcactcactctcctctcttcactataaatcgccactcttcgtgttctccacttcaccaactccttcaaacttattaacactttccttagttcaatatggggaagcccttcttcactctctctctttcttccctttgcttgctactcttgtcgagtgcatgattatttgctattatgctgttccggggctgttcgtgtccggtgcagattattttgctattacctccagcaagttcaacgagtgccaactcaacaacctcaacgcgttggaacccgaccaccgcgttgagtccgaaggtggtcttattgaaaacatggaactctcaacaccctgagctgcaatgcgccggtgtcactgtttccaaacgcaccctcaaccgcaacggcctccacttgccatcttactcaccttatccccaaatgatcattgtcgttcaaggtgcgtaatattagtaagaagtatttatcagcttaacgtgataacaa

SEQ ID NO: 2522 - DNA, 633 bp, Artificial; identical to SEQ ID NO: 2030
  Mutations within GlyA3B4 introduced by GmGlyA3B4_T02TALE nuclease

SEQ ID NO: 2523 - DNA, 613 bp, Artificial
  Mutations within GlyA3B4 introduced by GmGlyA3B4_T02TALE nuclease
gttcatgtacggttgcagatataaacgaagcatagcttatgtatgaggtgtaacaaaattggaaacaatagccatgcaaggtgaagaatgtcaccaactcagaaacccttcttcattgacgtgtccctcactcactctcctctcttcactataaatcgccactcttcgtgttctccacttcaccaactccttcaaacttattaacactttccttagttcaatatggggaagcccttcttcactccagcaagttcaacgagtgccaactcaacaacctcaacgcgttggaacccgaccaccgcgttgagtccgaaggtggtcttattgaaacatggaactctcaacaccctgagctgcaatgcgccggtgtcactgtttccaaacgcaccctcaaccgcaacggcctccacttgccatcttactcaccttatccccaaaatgatcattgtcgttcaaggtgcgtaatattagtaagaagtatttatcagcttaacgtgataacaataatagtaatatgaaatatttattaaattttttataattaatctctgctagaaaatttgattaatcatttttagtagaatttgtttttctcaactaggtttttaaaaca

SEQ ID NO: 2524 - DNA, 655 bp, Artificial; identical to SEQ ID NO: 2200
  Mutations within GlyA3B4 introduced by GmGlyA3B4_T02TALE nuclease

SEQ ID NO: 2525 - DNA, 599 bp, Artificial
  Mutations within GlyA3B4 introduced by GmGlyA3B4_T02TALE nuclease
gttcatgtacggttgcagatataaacgaagcatagcttatgtatgaggtgtaacaaaattggaaacaatagccatgcaaggtgaagaatgtcaccaactcagaaacccttcttcattgacgtgtccctcactcactctcctctcttcactataaatcgccactcttcgtgttctccacttcaccaactccttcaaacttattaacactttccttagttcaatatggggaagcccttcttcactctctctctttcttccctttgcttgctactcttgtctattacctccagcaagttcaacgagtgccaactcaacaacctcaacgcgttggaacccgaccaccgcgttgagtccgaaggtggtcttattgaaacatggaactctcaacaccctgagctgcaatgcgccggtgtcactgtttccaaacgcaccctcaaccgcaacggcctccacttgccatcttactcaccttatcccccaaatgatcattgtcgttcaaggtgcgtaaatattagtaagaagtatttatcagcttaacgtgataacaataatagtaatatgaaatatttattaaattttttataattaatctctgctag

SEQ ID NO: 2526 - DNA, 668 bp, Artificial
  Mutations within GlyA3B4 introduced by GmGlyA3B4_T02TALE nuclease
gttcatgtacggttgcagatataaacgaagcatagcttatgtatgaggtgtaacaaaattggaaacaatagccatgcaaggtgaagaatgtcaccaactcagaaacccttcttcattgacgtgtccctcactcactctcctctcttcactataaatcgccactcttcgtgttctccacttcaccaactccttcaaacttattaacactttccttagttcaatatggggaagcccttcttcactctctctctttcttccctttgcttgctactcttgtcgagtgcatgctattacctccagcaagttcaacgagtgccaactcaacaacctcaacgcgttggaacccgaccaccgcgttgagtccgaaggtggtcttattgaaacatggaactctcaacaccctgagctgcaatgcgccggtgtcactgtttccaaacgcaccctcaaccgcaacggcctccacttgccatcttactcaccttatccccaaatgatcattgtcgttcaaggtgcgtaatattagtaagaagtatttatcagcttaacgtgataacaataatagtaatatgaaaatatttattaaatttttataattaatctctgctagaaaatttgattaatcattttagtagaatttgtttttctcaactaggttttaaaacaccaca

SEQ ID NO: 2527 - DNA, 660 bp, Artificial; identical to SEQ ID NO: 1717
  Mutations within GlyA3B4 introduced by GmGlyA3B4_T02TALE nuclease

SEQ ID NO: 2528 - DNA, 622 bp, Artificial
  Mutations within GlyA3B4 introduced by GmGlyA3B4_T02TALE nuclease
gttcatgtacggttgcagatataaacgaagcatagcttatgtatgaggtgtaacaaaattggaaacaatagccatgcaaggtgaagaatgtcaccaactcagaaacccttcttcattgacgtgtccctcactcactctcctctcttcactataaatcgccactcttcgtgttctccacttcaccaactccttcaaacttattaacactttccttagttcaatatggggaagcccttcttcactctctctctttcactccagcaagttcaacgagtgccaactcaacaacctcaacgcgttggaacccgaccaccgcgttgagtccgaaggtggtcttattgaaacatggaactctcaacaccctgagctgcaatgcgccggtgtcactgtttccaaacgcaccctcaaccgcaacggcctccacttgccatcttactcaccttatccccaaatgatcattgtcgttcaaggtgcgtaatattagtaagaagtatttatcagcttaacgtgataacaataatagtaatatgaaatatttattaatttttataattaatctctgctagaaaatttgattaatcatttttagtagaatttgtttttctcaactaggttttaaaca

SEQ ID NO: 2529 - DNA, 655 bp, Artificial
  Mutations within GlyA3B4 introduced by GmGlyA3B4_T02TALE nuclease
gttcatgtacggttgcagatataaacgaagcatagcttatgtatgaggtgtaacaaaattggaaacaatagccatgcaaggtgaagaatgtcaccaactcagaaacccttcttcattgacgtgtccctcactcactctcctctcttcactataaatcgccactcttcgtgttctccacttcaccaactccttcaaacttattaacactttccttagttcaatatggggaagcccttcttcactctctctctttcttccctttgcttgctactcttgtcgagtgcctgcaagttcaacgagtgccaactcaacaacctcaacgcgttggaacccgaccaccgcgttgagtccgaaggtggtcttattgaaacatggaactctcaacaccctgagctgcaatgcgccggtgtcactgtttccaaacgcaccctcaaccgcaacggcctccacttgccatcttactcaccttatccccaaatgatcattgtcgttcaaggtgcgtaaatattagtaagaagtatttatcagcttaacgtgataacaataatagtaatatgaaatatttattaaatttttataattaatctctgctagaaaatttgattaatctttttagtagaaattgttttttctcaactaggtttaaaacaccaca

SEQ ID NO: 2530 - DNA, 571 bp, Artificial
  Mutations within GlyA3B4 introduced by GmGlyA3B4_T02TALE nuclease
gttcatgtacggttgcagatataaacgaagcatagcttatgtatgaggtgtaacaaaattggaaacaatagccatgcaaggtgaagaatgtcaccaactcagaaaccccttcttcattgacgtgtccctcactcactctcctctcttcactataaatcgccactcttcgtgttctccacttcaccaactccttcaaacttattaacactttccttagttcaatatggggaagcccttcttcactctctctctttcttccctttgcgggtccgaaggtggtcttattgaaacatggaactctcaacaccctgagctgcaatgcgccggtgtcactgtttccaaacgcaccctcaaccgcaacggcctccacttgccatcttactcaccttatccccaaatgatcattgtcgttcaaggtgcgtaatattagtaagaagtatttatcagcttaacgtgataacaataatagtaatatgaaatatttattaaattttttataattaatctctgctagaaaatttgattaaatcatttttagtagaatttgtttttctcaactaggttttaaaca

SEQ ID NO: 2531 - DNA, 588 bp, Artificial
  Mutations within GlyA3B4 introduced by GmGlyA3B4_T02TALE nuclease
gttcatgtacggttgcagatataaacgaagcatagcttatgtatgaggtgtaacaaaattggaaacaatagccatgcaaggtgaagaatgtcaccaactcagaaaccccttcttcattgacgtgtccctcactcactctcctctcttcactataaatcgccactcttcgtgttctccacttcaccaactccttcaaacttattaacactttccttagttcaatatggggaagcccttcttcactctctctctttcttccctttgcttgctactcaacgagtgccaactcaacaacctcaacgcgttggaacccgaccaccgcgttgagtccgaaggtggtcttattgaaacatggaactctcaacaccctgagctgcaatgcgccggtgtcactgtttccaaacgcaccctcaaccgcaacggcctccacttgccatcttactcaccttatccccaaatgatcattgtcgttcaaggtgcgtaatattagtaagaagtatttatcagcttaacgtgataacaataatagtaatatgaaatatttattaaatttttataattaatctctgctagaaaatttgattaatc

SEQ ID NO: 2532 - DNA, 634 bp, Artificial
  Mutations within GlyA3B4 introduced by GmGlyA3B4_T02TALE nuclease
gttcatgtacggttgcagatataaacgaagcatagcttatgtatgaggtgtaacaaaattggaaacaatagccatgcaaggtgaagaatgtcaccaactcagaaacccttcttcattgacgtgtccctcactcactctcctctcttcactataaatcgccactcttcgtgttctccacttcaccaactccttcaaacttattaacactttccttagttcaatatggggaagcccttcttcactctctctctttcttccctttgcttgctactcttgtcgagttgctattacctccagcaagttcaacgagtgccaactcaacaacctcaacgcgttggaacccgaccaccgcgttgagtccgaaggtggtcttattgaaacatggaactctcaacaccctgagctgcaatgcgccggtgtcactgtttccaaacgcaccctcaaccgcaacggcctccacttgccatcttactcaccttatccccaaatgatcattgtcgttcaaggtgcgtaatattagtaagaagtatttatcagcttaacgtgataacaataatagtaatatgaaatatttattaaatttttataattaatctctgctagaaaatttgattaatcattttagtagaatttg

SEQ ID NO: 2533 - DNA, 668 bp, Artificial
  Mutations within GlyA3B4 introduced by GmGlyA3B4_T02TALE nuclease
gttcatgtacggttgcagatataaacgaagcatagcttatgtatgaggtgtaacaaaattggaaacaatagccatgcaaggtgaagaatgtcaccaactcagaaacccttcttcattgacgtgtccctcactcactctcctctcttcactataaatcgccactcttcgtgttctccacttcaccaactccttcaaacttattaacactttccttagttcaatatggggaagcccttcttcactctctctctttcttccctttgcttgctactcttgtcgagtgcatggctattacctccagcaagttcaacgagtgccaactcaacaacctcaacgcgttggaacccgaccaccgcgttgagtccgaaggtggtcttattgaaacatggaactctcaacaccctgagctgcaatgcgccggtgtcactgtttccaaacgcaccctcaaccgcaacggcctccacttgccatcttactcaccttatccccaaatgatcattgtcgttcaaggtgcgtaatattagtaagagtatttatcagcttaacgtgataacaataatagtaatatgaaatatttattaaatttttataattaatctctgctagaaaatttgattaatcattttagtagaatttgtttttctcaactaggtttttaaaacaccaca

SEQ ID NO: 2534 - DNA, 663 bp, Artificial
  Mutations within GlyA3B4 introduced by GmGlyA3B4_T02TALE nuclease
gttcatgtacggttgcagatataaacgaagcatagcttatgtatgaggtgtaacaaaattggaaacaatagccatgcaaggtgaagaatgtcaccaactcagaaaccccttcttcattgacgtgtccctcactcactctcctctcttcactataaatcgccactcttcgtgttctccacttcaccaactccttcaaacttattaacactttccttagttcaatatggggaagcccttcttcactctctctctttcttccctttgcttgctactcttgtcgagtgcattattacctccagcaagttcaacgagtgccaactcaacaacctcaacgcgttggaacccgaccaccgcgttgagtccgaaggtggtcttattgaaacatggaactctcaacaccctgagctgcaatgcgccggtgtcactgtttccaaacgcaccctcaaccgcaacggcctccacttgccatcttactcaccttatccccaaatgatcattgtcgttcaaggtgcgtaatattagtaagaagtatttatcagcttaacgtgataacaataatagtaatatgaaatatttattaaatttttataattaatctctgctagaaaatttgattaatcattttagtagaatttgttttctcaactaggttttaaaacacca

SEQ ID NO: 2535 - DNA, 657 bp, Artificial
  Mutations within GlyA3B4 introduced by GmGlyA3B4_T02TALE nuclease
gttcatgtacggttgcagatataaacgaagcatagcttatgtatgaggtgtaacaaaattggaaacaatagccatgcaaggtgaagaatgtcaccaactcagaaaccccttcttcattgacgtgtccctcactcactctcctctcttcactataaatcgccactcttcgtgttctccacttcaccaactccttcaaacttattaacactttccttagttcaatatggggaagcccttcttcactctctctctttcttccctttgcttgctactcttgtcgagtgcattattacctccagcaagttcaacgagtgccaactcaacaacctcaacgcgttggaacccgaccaccgcgttgagtccgaaggtggtcttattgaaacatggaactctcaacaccctgagctgcaatgcgccggtgtcactgtttccaaacgcaccctcaaccgcaacggcctccacttgccatcttactcaccttatccccaaatgatcattgtcgttcaaggtgcgtaatattagtaagaagtatttatcagcttaacgtgataacaatatagtaatatgaaatatttattaaatttttataattaatctctgctagaaaatttgattaatcattttagtagaatttgttttctcaactaggttttaaaa

SEQ ID NO: 2536 - DNA, 656 bp, Artificial
  Mutations within GlyA3B4 introduced by GmGlyA3B4_T02TALE nuclease
gttcatgtacggttgcagatataaacgaagcatagcttatgtatgaggtgtaacaaaattggaaacaatagccatgcaaggtgaagaatgtcaccaactcagaaaccccttcttcattgacgtgtccctcactcactctcctctcttcactataaatcgccactcttcgtgttctccacttcaccaactccttcaaacttattaacactttccttagttcaatatggggaagcccttcttcactctctctctttcttccctttgcttgctactcttgtcgagtgcattgctattacctccagcaagttcaacgagtgccaactcaacaacctcaacgcgttggaacccgaccaccgcgttgagtccgaaggtggtcttattgaaacatggaactctcaacaccctgagctgcaatgcgccggtgtcactgtttccaaacgcaccctcaaccgcaacggcctccacttgccatcttactcaccttatccccaaatgatcattgtcgttcaaggtgcgtaatattagtaagagtatttatcagcttaacgtgataacaataatagtaatatgaaatatttattaaatttttataattaatctctgctagaaaatttgattaatcattttagtagaatttgttttctcaactaggtttt

SEQ ID NO: 2537 - DNA, 663 bp, Artificial
  Mutations within GlyA3B4 introduced by GmGlyA3B4_T02TALE nuclease
gttcatgtacggttgcagatataaacgaagcatagcttatgtatgaggtgtaacaaaattggaaacaatagccatgcaaggtgaagaatgtcaccaactcagaaaccccttcttcattgacgtgtccctcactcactctcctctcttcactataaatcgccactcttcgtgttctccacttcaccaactccttcaaacttattaacactttccttagttcaatatggggaagcccttcttcactctctctctttcttccctttgcttgctactcttgtcgagtgcatattacctccagcaagttcaacgagtgccaactcaacaacctcaacgcgttggaacccgaccaccgcgttgagtccgaaggtggtcttattgaaacatggaactctcaacaccctgagctgcaatgcgccggtgtcactgtttccaaacgcaccctcaaccgcaacggcctccacttgccatcttactcaccttatccccaaatgatcattgtcgttcaaggtgcgtaatattagtaagaagtatttatcagcttaacgtgataacaataatagtaatatgaaatatttattaaatttttataattaatctctgctagaaaatttgattaatcattttagtagaatttgttttctcaactaggtttttaaaacacca

SEQ ID NO: 2538 - DNA, 657 bp, Artificial
  Mutations within GlyA3B4 introduced by GmGlyA3B4_T02TALE nuclease
gttcatgtacggttgcagatataaacgaagcatagcttatgtatgaggtgtaacaaaattggaaacaatagccatgcaaggtgaagaatgtcaccaactcagaaacccttcttcattgacgtgtccctcactcactctcctctcttcactataaatcgccactcttcgtgttctccacttcaccaactccttcaaacttattaacactttccttagttcaatatggggaagcccttcttcactctctctctttcttccctttgcttgctactcttgtcgagtgcatgtccagcaagttcaacgagtgccaactcaacaacctcaacgcgttggaacccgaccaccgcgttgagtccgaaggtggtcttattgaaacatggaactctcaacaccctgagctgcaatgcgccggtgtcactgtttccaaacgcaccctcaaccgcaacggcctccacttgccatcttactcaccttatccccaaatgatcattgtcgttcaaggtgcgtaatattagtaagaagtatttatcagcttaacgtgataacaataatagtaatatgaaatatttattaaatttttataattaatctctgctagaaaatttgattaatcattttagtagaatttgtttttctcaactaggttttaaaacacca

SEQ ID NO: 2539 - DNA, 662 bp, Artificial
  Mutations within GlyA3B4 introduced by GmGlyA3B4_T02TALE nuclease
gttcatgtacggttgcagatataaacgaagcatagcttatgtatgaggtgtaacaaaattggaaacaatagccatgcaaggtgaagaatgtcaccaactcagaaacccttcttcattgacgtgtccctcactcactctcctctcttcactataaatcgccactcttcgtgttctccacttcaccaactccttcaaacttattaacactttccttagttcaatatggggaagcccttcttcactctctctctttcttccctttgcttgctactcttgtcgagtattacctccagcaagttcaacgagtgccaactcaacaacctcaacgcgttggaacccgaccaccgcgttgagtccgaaggtggtcttattgaaacatggaactctcaacaccctgagctgcaatgcgccggtgtcactgtttccaaacgcaccctcaaccgcaacggcctccacttgccatcttactcaccttatccccaaatgatcattgtcgttcaaggtgcgtaatattagtaagaagtatttatcagcttaacgtgataacaataatagtaatatgaaaatatttattaaaatttttataattaatctctgctagaaaatttgattaatcatttttagtagaatttgtttttctcaactaggtttttaaaacacca

SEQ ID NO: 2540 - DNA, 662 bp, Artificial
  Mutations within GlyA3B4 introduced by GmGlyA3B4_T02TALE nuclease
gttcatgtacggttgcagatataaacgaagcatagcttatgtatgaggtgtaacaaaattggaaacaatagccatgcaaggtgaagaatgtcaccaactcagaaacccttcttcattgacgtgtcccttactcactctcctctcttcactataaatcgccactcttcgtgttctccacttcaccaactccttcaaacttattaacactttccttagttcaatatggggaagcccttcttcactctctctctttcttccctttgcttgctactcttgtcgagtgcagagcagacaagcccgtcagggcgcgtcagcgggtgttggcgggtgtcggggctggcttaactatgcggcatcagagcagattgtactgagagtgcaccatatgctattacctccagcaagttcaacgagtgccaactcaacaacctcaacgcgttggaacccgaccaccgcgttgagtccgaaggtggtcttattgaaacatggaactctcaacaccctgagctgcaatgcgccggtgtcactgtttccaaacgcaccctcaaccgcaacggcctccacttgccatcttactcaccttatccccaaatgatcattgtcgttcaaggtgcgtaatattagtaagaagtatttcatcagcttaacgtgataacaataat

SEQ ID NO: 2541 - DNA, 635 bp, Artificial
  Mutations within GlyA3B4 introduced by GmGlyA3B4_T02TALE nuclease
gttcatgtacggttgcagatataaacgaagcatagcttatgtatgaggtgtaacaaaattggaaacaatagccatgcaaggtgaagaatgtcaccaactcagaaacccttcttcattgacgtgtccctcactcactctcctctcttcactataaatcgccactcttcgtgttctccacttcaccaactccttcaaacttattaacactttccttagttcaatatggggaagcccttcttcactctctctctttcttccctttgcttgctactcttgtcgagtagagtgagtgagaaagggggatggcaccaccaatattgctggcgatggccaccaatagttccatcacgttaagggattttgctattacctccagcaagttcaacgagtgccaactcaacaacctcaacgcgttggaacccgaccaccgcgttgagtccgaaggtggtcttattgaaacatggaactctcaacaccctgagctgcaatgcgccggtgtcactgtttccaaacgcaccctcaaccgcaacggcctccacttgccatcttactcaccttatccccaaatgatcattgtcgttcaaggtgcgtaatattagtaagaagtatttatcagcttaacgtgataacaataa

SEQ ID NO: 2542 - DNA, 637 bp, Artificial
  Mutations within GlyA3B4 introduced by GmGlyA3B4_T02TALE nuclease
gttcatgtacggttgcagatataaacgaagcatagcttatgtatgaggtgtaacaaaattggaaacaatagccatgcaaggtgaagaatgtcaccaactcagaaacccttcttcattgacgtgtccctcactcactctcctctcttcactataaatcgccactcttcgtgttctccacttcaccaactccttcaaacttattaacactttccttagttcaatatggggaagcccttcttcactctctctctttcttccctttgcttgctactcttgtcgagtgcattctattacctccagcaagttcaacgagtgccaactcaacaacctcaacgcgttggaacccgaccaccgcgttgagtccgaaggtggtcttattgaaacatggaactctcaacaccctgagctgcaatgcgccggtgtcactgtttccaaacgcaccctcaaccgcaacggcctccacttgccatcttactcaccttatccccaaatgatcattgtcgttcaaggtgcgtaatattagtaagaagtatttatcagcttaacgtgataacaataatagtaatatgaaatatttattaaatttttataattaatctctgctagaaaatttgattaatcattttagtagaatttg

SEQ ID NO: 2543 - DNA, 652 bp, Artificial
  Mutations within GlyA3B4 introduced by GmGlyA3B4_T02TALE nuclease
gttcatgtacggttgcagatataaacgaagcatagcttatgtatgaggtgtaacaaaattggaaacaatagccatgcaaggtgaagaatgtcaccaactcagaaacccttcttcattgacgtgtccctcactcactctcctctcttcactataaatcgccactcttcgtgttctccacttcaccaactccttcaaacttattaacactttccttagttcaatatggggaagcccttcttcactctctctctttcttccctttgcttgctactcttgtcgactattacctccagcaagttcaacgagtgccaactcaacaacctcaacgcgttggaacccgaccaccgcgttgagtccgaaggtggtcttattgaaacatggaactctcaacaccctgagctgcaatgcgccggtgtcactgtttccaaacgcaccctcaaccgcaacggcctccacttgccatcttactcaccttatccccaaatgatcattgtcgttcaaggtgcgtaatattagtaagaagtatttatcagcttaacgtgataacaataatagtaatatgaaatatttattaaatttttataattaatctctgctagaaaatttgattaatcattttagtagaatttgttttctcaactaggttttaaaa

SEQ ID NO: 2544 - DNA, 668 bp, Artificial
  Mutations within GlyA3B4 introduced by GmGlyA3B4_T02TALE nuclease
gttcatgtacggttgcagatataaacgaagcatagcttatgtatgaggtgtaacaaaattggaaacaatagccatgcaaggtgaagaatgtcaccaactcagaaacccttcttcattgacgtgtccctcactcactctcctctcttcactataaatcgccactcttcgtgttctccacttcaccaactccttcaaacttattaacactttccttagttcaatatggggaagcccttcttcactctctctctttcttccctttgcttgctactcttgtcgagtgcttgctattacctccagcaagttcaacgagtgccaactcaacaacctcaacgcgttggaacccgaccaccgcgttgagtccgaaggtggtcttattgaaacatggaactctcaacaccctgagctgcaatgcgccggtgtcactgtttccaaacgcaccctcaaccgcaacggcctccacttgccatcttactcaccttatccccaaatgatcattgtcgttcaaggtgcgtaatattagtaagagtatttatcagcttaacgtgataacaataatagtaatatgaaaatatttattaaatttttataattaatctctgctagaaaatttgattaatcattttagtagaatttgtttttctcaactaggtttttaaaacaccaca

SEQ ID NO: 2545 - DNA, 663 bp, Artificial; identical to SEQ ID NO: 2045
  Mutations within GlyA3B4 introduced by GmGlyA3B4_T02TALE nuclease

SEQ ID NO: 2546 - DNA, 658 bp, Artificial
  Mutations within GlyA3B4 introduced by GmGlyA3B4_T02TALE nuclease
gttcatgtacggttgcagatataaacgaagcatagcttatgtatgaggtgtaacaaaattggaaacaatagccatgcaaggtgaagaatgtcaccaactcagaaacccttcttcattgacgtgtccctcactcactctcctctcttcactataaatcgccactcttcgtgttctccacttcaccaactccttcaaacttattaacactttccttagttcaatatggggaagcccttcttcactctctctctttcttccctttgcttgctactcttgtcgactattacctccagcaagttcaacgagtgccaactcaacaacctcaacgcgttggaacccgaccaccgcgttgagtccgaaggtggtcttattgaaacatggaactctcaacaccctgagctgcaatgcgccggtgtcactgtttccaaacgcaccctcaaccgcaacggcctccacttgccatcttactcaccttatccccaaatgatcattgtcgttcaaggtgcgtaatattagtaagaagtatttatcagcttaacgtgataacaataatagtaatatgaaatatttattaaatttttataattaatctctgctagaaaatttgattaatcattttagtagaatttgttttctcaactaggtttttaaaacacca

SEQ ID NO: 2547 - DNA, 636 bp, Artificial; identical to SEQ ID NO: 1885
  Mutations within GlyA3B4 introduced by GmGlyA3B4_T02TALE nuclease

SEQ ID NO: 2548 - DNA, 636 bp, Artificial; identical to SEQ ID NO: 1885
  Mutations within GlyA3B4 introduced by GmGlyA3B4_T02TALE nuclease

SEQ ID NO: 2549 - DNA, 661 bp, Artificial; identical to SEQ ID NO: 1694
  Mutations within GlyA3B4 introduced by GmGlyA3B4_T02TALE nuclease

SEQ ID NO: 2550 - DNA, 666 bp, Artificial
  Mutations within GlyA3B4 introduced by GmGlyA3B4_T02TALE nuclease
gttcatgtacggttgcagatataaacgaagcatagcttatgtatgaggtgtaacaaaattggaaacaatagccatgcaaggtgaagaatgtcaccaactcagaaacccttcttcattgacgtgtccctcactcactctcctctcttcactataaatcgccactcttcgtgttctccacttcaccaactccttcaaacttattaacactttccttagttcaatatggggaagcccttcttcactctctctctttcttccctttgcttgctactcttgtcgagtgcatggctattacctccagcaagttcaacgagtgccaactcaacaacctcaacgcgttggaacccgaccaccgcgttgagtccgaaggtggtcttattgaaacatggaactctcaacaccctgagctgcaatgcgccggtgtcactgtttccaaacgcaccctcaaccgcaacggcctccacttgccatcttactcaccttatccccaaatgatcattgtcgttcaaggtgcgtaatattagtaagagtatttatcagcttaacgtgataacaataatagtaatatgaaatatttattaaatttttataattaatctctgctagaaaatttgattaatcattttagtagaatttgtttttctcaactaggtttttaaaacacca

SEQ ID NO: 2551 - DNA, 662 bp, Artificial; identical to SEQ ID NO: 1702
  Mutations within GlyA3B4 introduced by GmGlyA3B4_T02TALE nuclease

SEQ ID NO: 2552 - DNA, 650 bp, Artificial
  Mutations within GlyA3B4 introduced by GmGlyA3B4_T02TALE nuclease
  misc_feature (552): n is a or c or t or g
gttcatgtacggttgcagatataaacgaagcatagcttatgtatgaggtgtaacaaaattggaaacaatagccatgcaaggtgaagaatgtcaccaactcagaaacccttcttcattgacgtgtccctcactcactctcctctcttcactataaatcgccactcttcgtgttctccacttcaccaactccttcaaacttattaacactttccttagttcaatatggggaagcccttcttcactctctctctttcttccctttgcttgctactcttgttacctccagcaagttcaacgagtgccaactcaacaacctcaacgcgttggaacccgaccaccgcgttgagtccgaaggtggtcttattgaaacatggaactctcaacaccctgagctgcaatgcgccggtgtcactgtttccaaacgcaccctcaaccgcaacggcctccacttgccatcttactcaccttatccccaaatgatcttgtcgttcaaggtgcgtaatattagtaagaagtatttatcagcttaacgtgataacaataatagtaatntgaaatatttattaaattttttataattaatctctgctagaaaatttgattaatctttttagtagaattgtttttctcaactaggtttaaacaccaca

SEQ ID NO: 2553 - DNA, 660 bp, Artificial
  Mutations within GlyA3B4 introduced by GmGlyA3B4_T02TALE nuclease
gttcatgtacggttgcagatataaacgaagcatagcttatgtatgaggtgtaacaaaattggaaacaatagccatgcaaggtgaagaatgtcaccaactcagaaacccttcttcattgacgtgtccctcactcactctcctctcttcactataaatcgccactcttcgtgttctccacttcaccaactccttcaaacttattaacactttccttagttcaatatggggaagcccttcttcactctctctctttcttccctttgcttgctactcttgtcgagtgcattacctccagcaagttcaacgagtgccaactcaacaacctcaacgcgttggaacccgaccaccgcgttgagtccgaaggtggtcttattgaaacatggaactctcaacaccctgagctgcaatgcgccggtgtcactgtttccaaacgcaccctcaaccgcaacggcctccacttgccatcttactcaccttatccccaaatgatcattgtcgttcaaggtgcgtaatattagtaagaagtatttatcagcttaacgtgataacaataatagtaatatgaaatatttattaaatttttataattaatctctgctagaaaatttgattaatcattttagtagaatttgtttttctcaactaggttttaaaacacca

SEQ ID NO: 2554 - DNA, 652 bp, Artificial
  Mutations within GlyA3B4 introduced by GmGlyA3B4_T02TALE nuclease
gttcatgtacggttgcagatataaacgaagcatagcttatgtatgaggtgtaacaaaattggaaacaatagccatgcaaggtgaagaatgtcaccaactcagaaaccccttcttcattgacgtgtccctcactcactctcctctcttcactataaatcgccactcttcgtgttctccacttcaccaactccttcaaacttattaacactttccttagttcaatatggggaagcccttcttcactctctctctttcttccctttgcttgctactcttgtcgagtgctttctattacctccagcaagttcaacgagtgccaactcaacaacctcaacgcgttggaacccgaccaccgcgttgagtccgaaggtggtcttattgaaacatggaactctcaacaccctgagctgcaatgcgccggtgtcactgtttccaaacgcaccctcaaccgcaacggcctccacttgccatcttactcaccttatccccaaatgatcattgtcgttcaaggtgcgtaatattagtaagaagtatttatcagcttaacgtgataacaataatagtaatatgaaatatttattaaatttttataattaatctctgctagaaaatttgattaatcattttagtagaatttgttttctcaactagg

SEQ ID NO: 2555 - DNA, 672 bp, Artificial
  Mutations within GlyA3B4 introduced by GmGlyA3B4_T02TALE nuclease
gttcatgtacggttgcagatataaacgaagcatagcttatgtatgaggtgtaacaaaattggaaacaatagccatgcaaggtgaagaatgtcaccaactcagaaacccttcttcattgacgtgtccctcactcactctcctctcttcactataaatcgccactcttcgtgttctccacttcaccaactccttcaaacttattaacactttccttagttcaatatggggaagcccttcttcactctctctctttcttccctttgcttgctactcttgtcgagtgcattttttgctattacctccagcaagttcaacgagtgccaactcaacaacctcaacgcgttggaacccgaccaccgcgttgagtccgaaggtggtcttattgaaacatggaactctcaacaccctgagctgcaatgcgccggtgtcactgtttccaaacgcaccctcaaccgcaacggcctccacttgccatcttactcaccttatccccaaatgatcattgtcgttcaaggtgcgtaatattagtaagagtatttatcagcttaacgtgataacaataatagtaatatgaaatatttattaaatttttataattaatctctgctagaaaatttgattaatcattttagtagaatttgtttttctcaactaggtttttaaaacaccaca

SEQ ID NO: 2556 - DNA, 536 bp, Artificial
  Mutations within GlyA3B4 introduced by GmGlyA3B4_T02TALE nuclease
gttcatgtacggttgcagatataaacgaagcatagcttatgtatgaggtgtaacaaaattggaaacaatagccatgcaaggtgaagaatgtcaccaactcagaaacccttcttcattgacgtgtccctcactcactctcctctcttcactataaatcgccactcttcgtgttctccacttcaccaactccttcaaacttattaacactttccttagttcaataagcccttcttcactcaccgcgttgagtccgaaggtggtcttattgaaacatggaactctcaacaccctgagctgcaatgcgccggtgtcactgtttccaaacgcaccctcaaccgcaacggcctccacttgccatcttactcaccttatccccaaatgatcattgtcgttcaaggtgcgtaatattagtaagaagtatttatcagcttaacgtgataacaataatagtaatatgaaatatttattaaattttttataattaatctctgctagaaaatttgattaatcatttttagtagaatttgttttttctc

SEQ ID NO: 2557 - DNA, 632 bp, Artificial; identical to SEQ ID NO: 1881
  Mutations within GlyA3B4 introduced by GmGlyA3B4_T02TALE nuclease

SEQ ID NO: 2558 - DNA, 632 bp, Artificial; identical to SEQ ID NO: 2137
  Mutations within GlyA3B4 introduced by GmGlyA3B4_T02TALE nuclease

SEQ ID NO: 2559 - DNA, 663 bp, Artificial
  Mutations within GlyA3B4 introduced by GmGlyA3B4_T02TALE nuclease
gttcatgtacggttgcagatataaacgaagcatagcttatgtatgaggtgtaacaaaattggaaacaatagccatgcaaggtgaagaatgtcaccaactcagaaacccttcttcattgacgtgtccctcactcactctcctctcttcactataaatcgccactcttcgtgttctccacttcaccaactccttcaaacttattaacactttccttagttcaatatggggaagcccttcttcactctctctctttcttccctttgcttgctactcttgtcgagtgcatattacctccagcaagttcaacgagtgccaactcaacaacctcaacgcgttggaacccgaccaccgcgttgagtccgaaggtggtcttattgaaacatggaactctcaacaccctgagctgcaatgcgccggtgtcactgtttccaaacgcaccctcaaccgcaacggcctccacttgccatcttactcaccttatccccaaatgatcattgtcgttcaaggtgcgtaatattagtaagaagtatttatcagcttaacgtgataacaataatagtaatatgaaatatttattaaatttttataattaatctctgctagaaaatttgattaatcattttagtagaatttgtttttctcaactaggtttttaaaacacca

SEQ ID NO: 2560 - DNA, 651 bp, Artificial; identical to SEQ ID NO: 2077
  Mutations within GlyA3B4 introduced by GmGlyA3B4_T02TALE nuclease

SEQ ID NO: 2561 - DNA, 658 bp, Artificial; identical to SEQ ID NO: 2344
  Mutations within GlyA3B4 introduced by GmGlyA3B4_T02TALE nuclease

SEQ ID NO: 2562 - DNA, 640 bp, Artificial
  Mutations within GlyA3B4 introduced by GmGlyA3B4_T02TALE nuclease
  misc_feature (278); (533): n is a or c or t or g
gttcatgtacggttgcagatataaacgaagcatagcttatgtatgaggtgtaacaaaattggaaacaatagccatgcaaggtgaagaatgtcaccaactcagaaacccttcttcattgacgtgtccctcactcactctcctctcttcactataaatcgccactcttcgtgttctccacttcaccaactccttcaaacttattaacactttccttagttcaatatggggaagcccttcttcactctctctctttcttccctttgcttgctactcttgcncgtggtgctttgctattacctccagcaagttcaacgagtgccaactcaacaacctcaacgcgttggaacccgaccaccgcgttgagtccgaaggtggtcttattgaaacatggaactctcaacaccctgagctgcaatgcgccggtgtcactgtttccaaacgcaccctcaaccgcaacggcctccacttgccatcttactcaccttatccccaaatgatcattgtcgttcaaggtgcgtaatattagtaagagnatttatcagcttaacgtgataacaataatagtaatatgaaaatatttattaaatttttataattaatctctgctagaaaatttgattaatcattttagtagaatttg

SEQ ID NO: 2563 - DNA, 642 bp, Artificial
  Mutations within GlyA3B4 introduced by GmGlyA3B4_T02TALE nuclease
  misc_feature (533): n is a or c or t or g
gttcatgtacggttgcagatataaacgaagcatagcttatgtatgaggtgtaacaaaattggaaacaatagccatgcaaggtgaagaatgtcaccaactcagaaacccttcttcattgacgtgtccctcactcactctcctctcttcactataaatcgccactcttcgtgttctccacttcaccaactccttcaaacttattaacactttccttagttcaatatggggaagcccttcttcactctctctctttcttccctttgcttgctactcttgtcgagtgcatttgctattacctccagcaagttcaacgagtgccaactcaacaacctcaacgcgttggaacccgaccaccgcgttgagtccgaaggtggtcttattgaaacatggaactctcaacaccctgagctgcaatgcgccggtgtcactgtttccaaacgcaccctcaaccgcaacggcctccacttgccatcttactcaccttatccccaaatgatcattgtcgttcaaggtgcgtaatattagtaagaagnatttatcagcttaacgtgataacaataatagtaatatgaaatatttattaaatttttataattaatctctgctagaaaatttgaattaatcatttttatgtagaatttt

SEQ ID NO: 2564 - DNA, 651 bp, Artificial; identical to SEQ ID NO: 2077
  Mutations within GlyA3B4 introduced by GmGlyA3B4_T02TALE nuclease

SEQ ID NO: 2565 - DNA, 584 bp, Artificial
  Mutations within GlyA3B4 introduced by GmGlyA3B4_T02TALE nuclease
gttcatgtacggttgcagatataaacgaagcatagcttatgtatgaggtgtaacaaaattggaaacaatagccatgcaaggtgaagaatgtcaccaactcagaaaccccttcttcattgacgtgtccctcactcactctcctctcttcactataaatcgccactcttcgtgttctccacttcaccaactccttcaaacttattaacactttccttagttcaatatgggggaagcccttcttcactctctctctttcttccctttgcttgctactcttgtcgagtgcatccgaaggtggtcttattgaaacatggaactctcaacaccctgagctgcaatgcgccggtgtcactgtttccaaacgcaccctcaaccgcaacggcctccacttgccatcttactcaccttatccccaaatgatcattgtcgttcaaggtgcgtaatattagtaagaagtatttatcagcttaacgtgataacaataatagtaatatgaaatatttattaaattttttataattaatctctgctagaaaatttgattaatcatttttagtagaatttgtttttctcaactaggtttt

SEQ ID NO: 2566 - DNA, 663 bp, Artificial
  Mutations within GlyA3B4 introduced by GmGlyA3B4_T02TALE nuclease
gttcatgtacggttgcagatataaacgaagcatagcttatgtatgaggtgtaacaaaattggaaacaatagccatgcaaggtgaagaatgtcaccaactcagaaacccttcttcattgacgtgtccctcactcactctcctctcttcactataaatcgccactcttcgtgttctccacttcaccaactccttcaaacttattaacactttccttagttcaatatggggaagcccttcttcactctctctctttcttccctttgcttgctactcttgtcgagtgcatattacctccagcaagttcaacgagtgccaactcaacaacctcaacgcgttggaacccgaccaccgcgttgagtccgaaggtggtcttattgaaacatggaactctcaacaccctgagctgcaatgcgccggtgtcactgtttccaaacgcaccctcaaccgcaacggcctccacttgccatcttactcaccttatccccaaatgatcattgtcgttcaaggtgcgtaatattagtaagaagtatttatcagcttaacgtgataacaataatagtaatatgaaatatttattaaatttttataattaatctctgctagaaaatttgattaatcattttagtagaatttgttttctcaactaggttttaaaacaccaca

SEQ ID NO: 2567 - DNA, 665 bp, Artificial
  Mutations within GlyA3B4 introduced by GmGlyA3B4_T02TALE nuclease
gttcatgtacggttgcagatataaacgaagcatagcttatgtatgaggtgtaacaaaattggaaacaatagccatgcaaggtgaagaatgtcaccaactcagaaacccttcttcattgacgtgtccctcactcactctcctctcttcactataaatcgccactcttcgtgttctccacttcaccaactccttcaaacttattaacactttccttagttcaatatggggaagcccttcttcactctctctctttcttccctttgcttgctactcttgtcgagtgcatgctattacctccagcaagttcaacgagtgccaactcaacaacctcaacgcgttggaacccgaccaccgcgttgagtccgaaggtggtcttattgaaacatggaactctcaacaccctgagctgcaatgcgccggtgtcactgtttccaaacgcaccctcaaccgcaacggcctccacttgccatcttactcaccttatccccaaatgatcattgtcgttcaaggtgcgtaatattagtaagaagtatttatcagcttaacgtgataacaataatagtaatatgaaatatttattaaatttttataattaatctctgctagaaaatttgattaatcattttagtagaatttgtttttctcaactaggttttaaaacacca

SEQ ID NO: 2568 - DNA, 663 bp, Artificial
  Mutations within GlyA3B4 introduced by GmGlyA3B4_T02TALE nuclease
gttcatgtacggttgcagatataaacgaagcatagcttatgtatgaggtgtaacaaaattggaaacaatagccatgcaaggtgaagaatgtcaccaactcagaaacccttcttcattgacgtgtccctcactcactctcctctcttcactataaatcgccactcttcgtgttctccacttcaccaactccttcaaacttattaacactttccttagttcaatatggggaagcccttcttcactctctctctttcttccctttgcttgctactcttgtcgagtgtgctattacctccagcaagttcaacgagtgccaactcaacaacctcaacgcgttggaacccgaccaccgcgttgagtccgaaggtggtcttattgaaacatggaactctcaacaccctgagctgcaatgcgccggtgtcactgtttccaaacgcaccctcaaccgcaacggcctccacttgccatcttactcaccttatccccaaatgatcattgtcgttcaaggtgcgtaatattagtaagaagtatttatcagcttaacgtgataacaataatagtaatatgaaatatttattaaatttttataattaatctctgctagaaaatttgattaatcattttagtagaatttgtttttctcaactaggttttaaaacacca

SEQ ID NO: 2569 - DNA, 597 bp, Artificial
  Mutations within GlyA3B4 introduced by GmGlyA3B4_T02TALE nuclease
gttcatgtacggttgcagatataaacgaagcatagcttatgtatgaggtgtaacaaaattggaaacaatagccatgcaaggtgaagaatgtcaccaactcagaaacccttcttcattgacgtgtccctcactcactctcctctcttcactataaatcgccactcttcgtgttctccacttcaccaactccttcaaacttattaacactttccttagttcaatatggggaagcccttcttcactctctctctttcttccctttgcttgctactctttgctattacctccagcaagttcaacgagtgccaactcaacaacctcaacgcgttggaacccgaccaccgcgttgagtccgaaggtggtcttattgaaacatggaactctcaacaccctgagctgcaatgcgccggtgtcactgtttccaaacgcaccctcaaccgcaacggcctccacttgccatcttactcaccttatccccaaatgatcattgtcgttcaaggtgcgtaatattagtaagaagtatttatcagcttaacgtgataacaataatagtaatatgaaatatttattaaattttttataattaatctctgctag

SEQ ID NO: 2570 - DNA, 673 bp, Artificial
  Mutations within GlyA3B4 introduced by GmGlyA3B4_T02TALE nuclease
gttcatgtacggttgcagatataaacgaagcatagcttatgtatgaggtgtaacaaaattggaaacaatagccatgcaaggtgaagaatgtcaccaactcagaaacccttcttcattgacgtgtccctcactcactctcctctcttcactataaatcgccactcttcgtgttctccacttcaccaactccttcaaacttattaacactttccttagttcaatatggggaagcccttcttcactctctctctttcttccctttgcttgctactcttgtcgagtgcatgccttttttgctattacctccagcaagttcaacgagtgccaactcaacaacctcaacgcgttggaacccgaccaccgcgttgagtccgaaggtggtcttattgaaacatggaactctcaacaccctgagctgcaatgcgccggtgtcactgtttccaaacgcaccctcaaccgcaacggcctccacttgccatcttactcaccttatccccaaatgatcattgtcgttcaaggtgcgtaatattagtaagagtatttatcagcttaacgtgataacaataatagtaatatgaaatatttattaaatttttataattaatctctgctagaaaatttgattaatcattttagtagaatttgtttttctcaactaggttttaaaacacca

SEQ ID NO: 2571 - DNA, 572 bp, Artificial
  Mutations within GlyA3B4 introduced by GmGlyA3B4_T02TALE nuclease
gttcatgtacggttgcagatataaacgaagcatagcttatgtatgaggtgtaacaaaattggaaacaatagccatgcaaggtgaagaatgtcaccaactcagaaacccttcttcattgacgtgtccctcactcactctcctctcttcactataaatcgccactcttcgtgttctccacttcaccaactccttcaaacttattaacactttccttagttcaatatggggaagcccttcttcactctctctctttcttccctttgcttgctactcttgtcgagtgcatgctggcgatggccaccacctgctggggggtcaagccgtgggcctggcacagcaccggcaacagccgctggaccgtcactgtttccaaacgcaccctcaaccgcaacggcctccacttgccatcttactcaccttatccccaaatgatcattgtcgttcaaggtgcgtaatattagtaagaagtatttatcagcttaaacgtgataacaataatagtaatatgaaatatttattaaattttttataattaatctctgctagaaaatttgattaatcatttttagtag

SEQ ID NO: 2572 - DNA, 662 bp, Artificial
  Mutations within GlyA3B4 introduced by GmGlyA3B4_T02TALE nuclease
gttcatgtacggttgcagatataaacgaagcatagcttatgtatgaggtgtaacaaaattggaaacaatagccatgcaaggtgaagaatgtcaccaactcagaaacccttcttcattgacgtgtccctcactcactctcctctcttcactataaatcgccactcttcgtgttctccacttcaccaactccttcaaacttattaacactttccttagttcaatatggggaagcccttcttcactctctctctttcttccctttgcttgctactcttgtcgagtgcatgctattacctccagcaagttcaacgagtgccaactcaacaacctcaacgcgttggaacccgaccaccgcgttgagtccgaaggtggtcttattgaaacatggaactctcaacaccctgagctgcaatgcgccggtgtcactgtttccaaacgcaccctcaaccgcaacggcctccacttgccatcttactcaccttatccccaaatgatcattgtcgttcaaggtgcgtaatattagtaagagtatttatcagcttaacgtgataacaataatagtaatatgaaatatttattaaatttttataattaatctctgctagaaaatttgattaatcattttagtagaatttgttttctcaactaggttttaaaacacc

SEQ ID NO: 2573 - DNA, 665 bp, Artificial; identical to SEQ ID NO: 2115
  Mutations within GlyA3B4 introduced by GmGlyA3B4_T02TALE nuclease

SEQ ID NO: 2574 - DNA, 673 bp, Artificial
  Mutations within GlyA3B4 introduced by GmGlyA3B4_T02TALE nuclease
gttcatgtacggttgcagatataaacgaagcatagcttatgtatgaggtgtaacaaaattggaaacaatagccatgcaaggtgaagaatgtcaccaactcagaaacccttcttcattgacgtgtccctcactcactctcctctcttcactataaatcgccactcttcgtgttctccacttcaccaactccttcaaacttattaacactttccttagttcaatatggggaagcccttcttcactctctctctttcttccctttgcttgctactcttgtcgagtgcattatcctccagccaagttcaaacgatgatgccaatccatctacaaccactcaacgcgttggaaacccgaccaccgcgttgagtccgaaggtggtcttattgaaacatggaactctcaacaccctgagctgcaatgcgccggtgtcactgtttccaaacgcaccctcaaccgcaacggcctccacttgccatcttactcaccttatcccccaaatgatcattgtcgttcaaggtgcgtaatattagtaagaagtatttatcagcttaacgtgataacaataatagtaatatgaaatatttattaaatttttataattaatctctgctagaaaatttgattaatcatttttagtagaatttgtttttctcaactaggttttaaaacacca

SEQ ID NO: 2575 - DNA, 595 bp, Artificial; identical to SEQ ID NO: 2401
  Mutations within GlyA3B4 introduced by GmGlyA3B4_T02TALE nuclease

SEQ ID NO: 2576 - DNA, 550 bp, Artificial
  Mutations within GlyA3B4 introduced by GmGlyA3B4_T02TALE nuclease
  misc_feature (508): n is a or c or t or g
gttcatgtacggttgcagatataaacgaagcatagcttatgtatgaggtgtaacaaaattggaaacaatagccatgcaaggtgaagaatgtcaccaactcagaaacccttcttcattgacgtgtccctcactcactctcctctcttcactataaatcgccactcttcgtgttctccacttcaccaactccttcaaacttattaacactttccttagttcaatatggggaagcccttctccagcaagttcaacgagtgccaactcaacaacctcaacgcgttggaacccgaccaccgcgttgagtccgaaggtggtcttattgaaacatggaactctcaacaccctgagctgcaatgcgccggtgtcactgtttccaaacgcaccctcaaccgcaacggcctccacttgccatcttactcaccttatccccaaatgatcattgtcgttcaaggtgcgtaatattagtaagaagtatttatcagcttaacgtgataacaataatagtaanatgaatatttaattaaattttttataatttaatctctgctag

SEQ ID NO: 2577 - DNA, 515 bp, Artificial; identical to SEQ ID NO: 1847
  Mutations within GlyA3B4 introduced by GmGlyA3B4_T02TALE nuclease

SEQ ID NO: 2578 - DNA, 652 bp, Artificial
  Mutations within GlyA3B4 introduced by GmGlyA3B4_T02TALE nuclease
gttcatgtacggttgcagatataaacgaagcatagcttatgtatgaggtgtaacaaaattggaaacaatagccatgcaaggtgaagaatgtcaccaactcagaaacccttcttcattgacgtgtccctcactcactctcctctcttcactataaatcgccactcttcgtgttctccacttcaccaactccttcaaacttattaacactttccttagttcaatatggggaagcccttcttcactctctctctttcttccctttgcttgctactcttgtcgagtgcatcattacctccagcaagttcaacgagtgccaactcaacaacctcaacgcgttggaacccgaccaccgcgttgagtccgaaggtggtcttattgaaacatggaactctcaacaccctgagctgcaatgcgccggtgtcactgtttccaaacgcaccctcaaccgcaacggcctccacttgccatcttactcaccttatccccaaatgatcattgtcgttcaaggtgcgtaatattagtaagaagtatttatcagcttaacgtgataacaatatagtaatatgaaatatttattaaatttttataattaatctctgctagaaaatttgattaatcattttagtagaatttgttttctcaactaggtttt

SEQ ID NO: 2579 - DNA, 735 bp, Artificial
  Mutations within GlyA3B4 introduced by GmGlyA3B4_T02TALE nuclease
  misc_feature (624); (666): n is a or c or t or g
gttcatgtacggttgcagatataaacgaagcatagcttatgtatgaggtgtaacaaaattggaaacaatagccatgcaaggtgaagaatgtcaccaactcagaaacccttcttcattgacgtgtccctcactcactctcctctcttcactataaatcgccactcttcgtgttctccacttcaccaactccttcaaacttattaacactttccttagttcaatatggggaagcccttcttcactctctctctttcttccctttgcttgctactcttgtcgagtgcatgacggtccagcggctgttgccggtgctgtgccaggcccacggcttgaccccggagcaggtggtggccatcgccagccacgatggcggcaagcaggcgctggagacggttttacctccagcaagttcaacgagtgccaactcaacaacctcaacgcgttggaacccgaccaccgcgttgagtccgaaggtggtcttattgaaacatggaactctcaacaccctgagctgcaatgcgccggtgtcactgtttccaaacgcaccctcaaccgcaacggcctccacttgccatcttactcaccttatccccaaatgatcattgtcgttcaaggtgcgtaatnttagtaagaagtatttatcagcttaacgtgataacaataatngtaatatgaaatatttattaaattttttataattaatctctgctagaaaatttgattaatcattttagt

SEQ ID NO: 2580 - DNA, 653 bp, Artificial; identical to SEQ ID NO: 1097
  Mutations within GlyA3B4 introduced by GmGlyA3B4_T02TALE nuclease

SEQ ID NO: 2581 - DNA, 654 bp, Artificial
  Mutations within GlyA3B4 introduced by GmGlyA3B4_T02TALE nuclease
gttcatgtacggttgcagatataaacgaagcatagcttatgtatgaggtgtaacaaaattggaaacaatagccatgcaaggtgaagaatgtcaccaactcagaaacccttcttcattgacgtgtccctcactcactctcctctcttcactataaatcgccactcttcgtgttctccacttcaccaactccttcaaacttattaacactttccttagttcaatatggggaagcccttcttcactctctctctttcttccctttgcttgctactcttgtcgagtgcattgctattacctccagcaagttcaacgagtgccaactcaacaacctcaacgcgttggaacccgaccaccgcgttgagtccgaaggtggtcttattgaaacatggaactctcaacaccctgagctgcaatgcgccggtgtcactgtttccaaacgcaccctcaaccgcaacggcctccacttgccatcttactcaccttatccccaaatgatcattgtcgttcaaggtgcgtaatattagtaagaagtatttatcagcttaacgtgataacaataatagtaatatgaaaatatttattaaatttttataattaatctctgctagaaaatttgattaatcattttagtagaatttgtttttctcaactagg

SEQ ID NO: 2582 - DNA, 663 bp, Artificial
  Mutations within GlyA3B4 introduced by GmGlyA3B4_T02TALE nuclease
  misc_feature (530): n is a or c or t or g
gttcatgtacggttgcagatataaacgaagcatagcttatgtatgaggtgtaacaaaattggaaacaatagccatgcaaggtgaagaatgtcaccaactcagaaacccttcttcattgacgtgtccctcactcactctcctctcttcactataaatcgccactcttcgtgttctccacttcaccaactccttcaaacttattaacactttccttagttcaatatggggaagcccttcttcactctctctctttcttccctttgcttgctactcttgtcgagtgcatgctattacctccagcaagttcaacgagtgccaactcaacaacctcaacgcgttggaacccgaccaccgcgttgagtccgaaggtggtcttattgaaacatggaactctcaacaccctgagctgcaatgcgccggtgtcactgtttccaaacgcaccctcaaccgcaacggcctccacttgccatcttactcaccttatccccaaatgatcattgtcgttcaaggtgcgtaatattagtaagagnatttatcagcttaacgtgataacaatatagtaatatgaaatatttattaaatttttataattaatctctgctagaaaatttgattaatcattttagtagaatttgttttctcaactaggttttaaacaccaca

SEQ ID NO: 2583 - DNA, 603 bp, Artificial
  Mutations within GlyA3B4 introduced by GmGlyA3B4_T02TALE nuclease
gttcatgtacggttgcagatataaacgaagcatagcttatgtatgaggtgtaacaaaattggaaacaatagccatgcaaggtgaagaatgtcaccaactcagaaacccttcttcattgacgtgtccctcactcactctcctctcttcactataaatcgccactcttcgtgttctccacttcaccaactccttcaaacttattaacactttccttagttcaatatggggaagcccttcttcactctctctctttcttccctttgcttgctactcttgtcgagtgcatttcctccagcaagttcaacgagtgccaactcaacaacctcaacgcgttggaacccgaccaccgcgttgagtccgaaggtggtcttattgaaacatggaactctcaacaccctgagctgcaatgcgccggtgtcactgtttccaaacgcaccctcaaccgcaacggcctccacttgccatcttactcaccttatccccaaatgatcattgtcgttcaaggtgcgtaaatattagtaagaagtatttatcagcttaacgtgataacaataatagtaatatgaaatatttattaaattttttataattaatctctgctag

SEQ ID NO: 2584 - DNA, 656 bp, Artificial
  Mutations within GlyA3B4 introduced by GmGlyA3B4_T02TALE nuclease
gttcatgtacggttgcagatataaacgaagcatagcttatgtatgaggtgtaacaaaattggaaacaatagccatgcaaggtgaagaatgtcaccaactcagaaacccttcttcattgacgtgtccctcactcactctcctctcttcactataaatcgccactcttcgtgttctccacttcaccaactccttcaaacttattaacactttccttagttcaatatggggaagcccttcttcactctctctctttcttccctttgcttgctactcttgtcgagtgcgctattacctccagcaagttcaacgagtgccaactcaacaacctcaacgcgttggaacccgaccaccgcgttgagtccgaaggtggtcttattgaaacatggaactctcaacaccctgagctgcaatgcgccggtgtcactgtttccaaacgcaccctcaaccgcaacggcctccacttgccatcttactcaccttatccccaaatgatcattgtcgttcaaggtgcgtaatattagtaagagtatttatcagcttaacgtgataacaataatagtaatatgaaatatttattaaatttttataattaatctctgctagaaaatttgattaatcattttagtagaatttgttttctcaactaggttttaaaa

SEQ ID NO: 2585 - DNA, 654 bp, Artificial
  Mutations within GlyA3B4 introduced by GmGlyA3B4_T02TALE nuclease
gttcatgtacggttgcagatataaacgaagcatagcttatgtatgaggtgtaacaaaattggaaacaatagccatgcaaggtgaagaatgtcaccaactcagaaacccttcttcattgacgtgtccctcactcactctcctctcttcactataaatcgccactcttcgtgttctccacttcaccaactccttcaaacttattaacactttccttagttcaatatggggaagcccttcttcactctctctctttcttccctttgcttgctactcttgtcgagtgcattacctccagcaagttcaacgagtgccaactcaacaacctcaacgcgttggaacccgaccaccgcgttgagtccgaaggtggtcttattgaaacatggaactctcaacaccctgagctgcaatgcgccggtgtcactgtttccaaacgcaccctcaaccgcaacggcctccacttgccatcttactcaccttatccccaaatgatcattgtcgttcaaggtgcgtaatattagtaagaagtatttatcagcttaacgtgataacaataatagtaatatgaaatatttattaaatttttataattaatctctgctagaaaatttgattaatcattttagtagaatttgttttctcaactaggttttaaaa

SEQ ID NO: 2586 - DNA, 661 bp, Artificial
  Mutations within GlyA3B4 introduced by GmGlyA3B4_T02TALE nuclease
gttcatgtacggttgcagatataaacgaagcatagcttatgtatgaggtgtaacaaaattggaaacaatagccatgcaaggtgaagaatgtcaccaactcagaaacccttcttcattgacgtgtccctcactcactctcctctcttcactataaatcgccactcttcgtgttctccacttcaccaactccttcaaacttattaacactttccttagttcaatatggggaagcccttcttcactctctctctttcttccctttgcttgctactcttgtcgagtgcatgtattacctccagcaagttcaacgagtgccaactcaacaacctcaacgcgttggaacccgaccaccgcgttgagtccgaaggtggtcttattgaaacatggaactctcaacaccctgagctgcaatgcgccggtgtcactgtttccaaacgcaccctcaaccgcaacggcctccacttgccatcttactcaccttatccccaaatgatcattgtcgttcaaggtgcgtaatattagtaagagtatttatcagcttaacgtgataacaatatagtaatatgaaatatttattaaatttttataattaatctctgctagaaaatttgattaatcattttagtagaatttgtttttctcaacaggttttaaaacacca

SEQ ID NO: 2587 - DNA, 636 bp, Artificial; identical to SEQ ID NO: 1970
  Mutations within GlyA3B4 introduced by GmGlyA3B4_T02TALE nuclease

SEQ ID NO: 2588 - DNA, 650 bp, Artificial
  Mutations within GlyA3B4 introduced by GmGlyA3B4_T02TALE nuclease
gttcatgtacggttgcagatataaacgaagcatagcttatgtatgaggtgtaacaaaattggaaacaatagccatgcaaggtgaagaatgtcaccaactcagaaacccttcttcattgacgtgtccctcactcactctcctctcttcactataaatcgccactcttcgtgttctccacttcaccaactccttcaaacttattaacactttccttagttcaatatggggaagcccttcttcactctctctctttcttccctttgcttgctactcttgtcgagtgcatgctattacctccagcaagttcaacgagtgccaactcaacaacctcaacgcgttggaacccgaccaccgcgttgagtccgaaggtggtcttattgaaacatggaactctcaacaccctgagctgcaatgcgccggtgtcactgtttccaaacgcaccctcaaccgcaacggcctccacttgccatcttactcaccttatccccaaatgatcattgtcgttcaaggtgcgtaatattagtaagagtatttatcagcttaacgtgataacaataatagtaatatgaaatatttattaaatttttataattaatctctgctagaaaatttgattaatcattttagtagaatttgttttctcaactagg

SEQ ID NO: 2589 - DNA, 615 bp, Artificial
  Mutations within GlyA3B4 introduced by GmGlyA3B4_T02TALE nuclease
gttcatgtacggttgcagatataaacgaagcatagcttatgtatgaggtgtaacaaaattggaaacaatagccatgcaaggtgaagaatgtcaccaactcagaaacccttcttcattgacgtgtccctcactcactctcctctcttcactataaatcgccactcttcgtgttctccacttcaccaactccttcaaacttattaacactttccttagttcaatatggggaagcccttcttcactctctctctttcttccctttgcttgctactcttgtcgagtgcatacctccagcaagttcaacgagtgccaactcaacaacctcaacgcgttggaacccgaccaccgcgttgagtccgaaggtggtcttattgaaacatggaactctcaacaccctgagctgcaatgcgccggtgtcactgtttccaaacgcaccctcaaccgcaacggcctccacttgccatcttactcaccttatccccaaatgatcattgtcgttcaaggtgcgtaatattagtaagaagtatttatcagcttaacgtgataacaatatagtaatatgaaatatttattaaatttttataattaatctctgctagaaaatttgattaatca

SEQ ID NO: 2590 - DNA, 662 bp, Artificial; identical to SEQ ID NO: 2376
  Mutations within GlyA3B4 introduced by GmGlyA3B4_T02TALE nuclease

SEQ ID NO: 2591 - DNA, 661 bp, Artificial; identical to SEQ ID NO: 1694
  Mutations within GlyA3B4 introduced by GmGlyA3B4_T02TALE nuclease

SEQ ID NO: 2592 - DNA, 670 bp, Artificial
  Mutations within GlyA3B4 introduced by GmGlyA3B4_T02TALE nuclease
gttcatgtacggttgcagatataaacgaagcatagcttatgtatgaggtgtaacaaaattggaaacaatagccatgcaaggtgaagaatgtcaccaactcagaaacccttcttcattgacgtgtccctcactcactctcctctcttcactataaatcgccactcttcgtgttctccacttcaccaactccttcaaacttattaacactttccttagttcaatatggggaagcccttcttcactctctctctttcttccctttgcttgctactcttgtcgagtgcattgctattacctccagcaagttcaacgagtgccaactcaacaacctcaacgcgttggaacccgaccaccgcgttgagtccgaaggtggtcttattgaaacatggaactctcaacaccctgagctgcaatgcgccggtgtcactgtttccaaacgcaccctcaaccgcaacggcctccacttgccatcttactcaccttatccccaaatgatcattgtcgttcaaggtgcgtaatattagtaagaagtatttatcagcttaacgtgataacaataatagtaatatgaaaatatttattaaatttttataattaatctctgctagaaaatttgattaatcattttagtagaatttgtttttctcaactaggtttttaaaacaccaca

SEQ ID NO: 2593 - DNA, 482 bp, Artificial
  Mutations within GlyA3B4 introduced by GmGlyA3B4_T02TALE nuclease
gttcatgtacggttgcagatataaacgaagcatagcttatgtatgaggtgtaacaaaattggaaacaatagccatgcaaggtgaagaatgtcaccaactcagaaacccttcttcattgacgtgtccctcaacgagtgccaactcaacaacctcaacgcgttggaacccgaccaccgcgttgagtccgaaggtggtcttattgaaacatggaactctcaacaccctgagctgcaatgcgccggtgtcactgtttccaaacgcaccctcaaccgcaacggcctccacttgccatcttactcaccttatccccaaatgatcattgtcgttcaaggtgcgtaatattagtaagaagtatttatcagcttaacgtgataacaataatagtaatatgaaatatttattaaattttttataattaatctctgctagaaaaatttgattaatcatttttagtagaatttgtttttctcaactaggttttt

SEQ ID NO: 2594 - DNA, 636 bp, Artificial
  Mutations within GlyA3B4 introduced by GmGlyA3B4_T02TALE nuclease
  misc_feature (531): n is a or c or t or g
gttcatgtacggttgcagatataaacgaagcatagcttatgtatgaggtgtaacaaaattggaaacaatagccatgcaaggtgaagaatgtcaccaactcagaaacccttcttcattgacgtgtccctcactcactctcctctcttcactataaatcgccactcttcgtgttctccacttcaccaactccttcaaacttattaacactttccttagttcaatatggggaagcccttcttcactctctctctttcttccctttgcttgctactcttgtcgagtgcatgctattacctccagcaagttcaacgagtgccaactcaacaacctcaacgcgttggaacccgaccaccgcgttgagtccgaaggtggtcttattgaaacatggaactctcaacaccctgagctgcaatgcgccggtgtcactgtttccaaacgcaccctcaaccgcaacggcctccacttgccatcttactcaccttatccccaaatgatcattgtcgttcaaggtgcgtaatattagtaagaagnatttatcagcttaacgtgataacaatatagtaatatgaaatatttattaaatttttataattaatctctgctagaaaatttgattaatcattttagtagaatttg

SEQ ID NO: 2595 - DNA, 756 bp, Artificial
  Mutations within GlyA3B4 introduced by GmGlyA3B4_T02TALE nuclease
gttcatgtacggttgcagatataaacgaagcatagcttatgtatgaggtgtaacaaaattggaaacaatagccatgcaaggtgaagaatgtcaccaactcagaaacccttcttcattgacgtgtccctcactcactctcctctcttcactataaatcgccactcttcgtgttctccacttcaccaactccttcaaacttattaacactttccttagttcaatatggggaagcccttcttcactctctctctttcttccctttgcttgctactcttgtcgagtgcatgcagattatttggattgagagtgaatatgagactctaattggataccgaggggaatttatggaacgtcagtggagcattttttgacaagaaatatttgctagctgatagtgaccttaggcgacttttttgctatttacctccagcaagttcaacgagtgccaactcaacaacctcaacgcgttgaacccgaccaccgcgttgagtcccgaaggtggtcttattgaaacatggaactctcaacaccctgagctgcaatgcgccggtgtcactgtttccaaacgcaccctcaaccgcaacggcctccacttgccatcttactcaccttatcccaaaatgatcattgtcgttcaaggtgcgtaatatagtaagaagtatttcatcagcttaacgtgataacaaataatagtaatatgaaaatattttattaaattttttataattaatctctgctagaaaatttgattaatca

SEQ ID NO: 2596 - DNA, 659 bp, Artificial; identical to SEQ ID NO: 1853
  Mutations within GlyA3B4 introduced by GmGlyA3B4_T02TALE nuclease

SEQ ID NO: 2597 - DNA, 396 bp, Artificial
  Mutations within GlyA3B4 introduced by GmGlyA3B4_T02TALE nuclease
gttcatgtacggttgcagatataaacgaagcatagcttatgtatgaggtgtaacaaaattggaaacaatagccatgcaaggtgaagaatgtcaccaactcagaaacccttcttcattgacgtgtccctcactcactctcctctcttcactataaatcgccactcttcgtgttctccacttcaccaactccttcaaacttattaacactttccttagttcaatatggggaagcccttcttcactctctctctttcttccctttgcttgctactcttgtcgagttgctattacctccagcaagttcaacgagtgccaactcaacaacctcaacgcgttggaacccgaccaccgcgttgagtcccgaaggtggtcttattgaaacatggaactctcaac

SEQ ID NO: 2598 - DNA, 485 bp, Artificial
  Mutations within GlyA3B4 introduced by GmGlyA3B4_T02TALE nuclease
gttcatgtacggttgcagatataaacgaagcatagcttatgtatgaggtgtaacaaaattggaaacaatagccatgcaaggtgaagaatgtcaccaactcagaaacccttcttcattgacgtgtccctcactcactctcctctcttcactataaatcgccactcttcgtgttctccacttcaccaactccttcaaacttattaacactttccttagttcaacgagtgccaactcaacaacctcaacgcgttggaacccgaccaccgcgttgagtccgaaggtggtcttattgaaacatggaactctcaacaccctgagctgcaatgcgccggtgtcactgtttccaaacgcaccctcaaccgcaacggcctccacttgccatcttactcaccttatccccaaatgatcattgtcgttcaaggtgcgtaatattagtaagaagtatttatcagcttaacgtgataacaataatagtaatatgaaat

SEQ ID NO: 2599 - DNA, 657 bp, Artificial
  Mutations within GlyA3B4 introduced by GmGlyA3B4_T02TALE nuclease
gttcatgtacggttgcagatataaacgaagcatagcttatgtatgaggtgtaacaaaattggaaacaatagccatgcaaggtgaagaatgtcaccaactcagaaacccttcttcattgacgtgtccctcactcactctcctctcttcactataaatcgccactcttcgtgttctccacttcaccaactccttcaaacttattaacactttccttagttcaatatggggaagcccttcttcactctctctctttcttcttcactctctctctttcaaacttattacctccagcaagttcaacgagtgccaactcaacaacctcaacgcgttggaacccgaccaccgcgttgagtccgaaggtggtcttattgaaacatggaactctcaacaccctgagctgcaatgcgccggtgtcactgtttccaaacgcaccctcaaccgcaacggcctccacttgccatcttactcaccttatccccaaatgatcattgtcgttcaaggtgcgtaatattagtaagaagtatttatcagcttaacgtgataacaatatagtaatatgaaaatatttattaaatttttataaattaatctctgctagaaaatttgattaatcattttagtagaatttgttttctcaactaggtttttaaaacacca

SEQ ID NO: 2600 - DNA, 633 bp, Artificial
  Mutations within GlyA3B4 introduced by GmGlyA3B4_T02TALE nuclease
  misc_feature (289): n is a or c or t or g
gttcatgtacggttgcagatataaacgaagcatagcttatgtatgaggtgtaacaaaattggaaacaatagccatgcaaggtgaagaatgtcaccaactcagaaacccttcttcattgacgtgtccctcactcactctcctctcttcactataaatcgccactcttcgtgttctccacttcaccaactccttcaaacttattaacactttccttagttcaatatggggaagcccttcttcactctctctctttcttccctttgcttgctactcttgtcgagtgcatatncctccagcaagttcaacgagtgccaactcaacaacctcaacgcgttggaacccgaccaccgcgttgagtccgaaggtggtcttattgaaacatggaactctcaacaccctgagctgcaatgcgccggtgtcactgtttccaaacgcaccctcaaccgcaacggcctccacttgccatcttactcaccttatccccaaatgatcattgtcgttcaaggtgcgtaatattagtaagaagtatttatcagcttaacgtgataacaataatagtaatatgaaatatttattaaatttttataattaatctctgctagaaaatttgattaatcattttagtagaatttg

SEQ ID NO: 2601 - DNA, 653 bp, Artificial
  Mutations within GlyA3B4 introduced by GmGlyA3B4_T02TALE nuclease
gttcatgtacggttgcagatataaacgaagcatagcttatgtatgaggtgtaacaaaattggaaacaatagccatgcaaggtgaagaatgtcaccaactcagaaacccttcttcattgacgtgtccctcactcactctcctctcttcactataaatcgccactcttcgtgttctccacttcaccaactccttcaaacttattaacactttccttagttcaatatggggaagcccttcttcactctctctctttcttccctttgcttgctattacctccagcaagttcaacgagtgccaactcaacaacctcaacgcgttggaacccgaccaccgcgttgagtccgaaggtggtcttattgaaacatggaactctcaacacccctgagctgcaatgcgccggtgtcactgttttccaaaacgcaccctcaaccgcaacggcctccacttgccatcttactcaccttatccccaaatgatcattgtcgttcaaggtgcgtaatattagtaagaagtatttatcagcttaacgtgataacaataatagtaatatgaaatatttattaaattttttataattaatctctgctagaaaatttgattaatcatttttagtagaatttgttttttctcaactaggttttaaaacaccaca

SEQ ID NO: 2602 - DNA, 665 bp, Artificial; identical to SEQ ID NO: 2451
  Mutations within GlyA3B4 introduced by GmGlyA3B4_T02TALE nuclease
  misc_feature (532): n is a or c or t or g

SEQ ID NO: 2603 - DNA, 659 bp, Artificial
  Mutations within GlyA3B4 introduced by GmGlyA3B4_T02TALE nuclease
gttcatgtacggttgcagatataaacgaagcatagcttatgtatgaggtgtaacaaaattggaaacaatagccatgcaaggtgaagaatgtcaccaactcagaaaccccttcttcattgacgtgtccctcactcactctcctctcttcactataaatcgccactcttcgtgttctccacttcaccaactccttcaaacttattaacactttccttagttcaatatggggaagcccttcttcactctctctctttcttccctttgcttgctactcttgtcgagttattacctccagcaagttcaacgagtgccaactcaacaacctcaacgcgttggaacccgaccaccgcgttgagtccgaaggtggtcttattgaaacatggaactctcaacaccctgagctgcaatgcgccggtgtcactgtttccaaacgcaccctcaaccgcaacggcctccacttgccatcttactcaccttatccccaaatgatcattgtcgttcaaggtgcgtaatattagtaagaagtatttatcagcttaacgtgataacaataatagtaatatgaaatatttattaaatttttataattaatctctgctagaaaatttgattaatcattttagtagaatttgttttctcaactaggttttaaaacacca

SEQ ID NO: 2604 - DNA, 784 bp, Artificial
  Mutations within GlyA3B4 introduced by GmGlyA3B4_T02TALE nuclease
gttcatgtacggttgcagatataaacgaagcatagcttatgtatgaggtgtaacaaaattggaaacaatagccatgcaaggtgaagaatgtcaccaactcagaaacccttcttcattgacgtgtccctcactcactctcctctcttcactataaatcgccactcttcgtgttctccacttcaccaactccttcaaacttattaacactttccttagttcaatatggggaagcccttcttcactctctctctttcttccctttgcttgctactcttgtcgagtgcatttgataaccgtattaccgcctttgagtgagctgataccgctcgccgcagccgaacgaccgagcgcagcgagtcagtgagcgaggaagcggaagagcgcccaatacgcaaaccgcctctccccgcgcgttggccgattcattaatgcagctggcactattacctccagcaagttcaacgagtgccaactcaacaacctcaacgcgttggaaccgaccaccgcgttgagtccgaaggtggtcttattgaaacatggaactctcaacaccctgagctgcaatgcgccggtgtcactgtttccaaacgcaccctcaaccgcaacggcctccacttgccatcttactcaccttatccccaaatgatcattgtcgttcaaggtgcgtaatattagtaagaagtatttatcagcttaacgtgataacaataatagtaatatgaaatatttattaaaattttttataattaatctctgctagaaaatttgattaatcatttttagt

SEQ ID NO: 2605 - DNA, 646 bp, Artificial
  Mutations within GlyA3B4 introduced by GmGlyA3B4_T02TALE nuclease
gttcatgtacggttgcagatataaacgaagcatagcttatgtatgaggtgtaacaaaattggaaacaatagccatgcaaggtgaagaatgtcaccaactcagaaacccttcttcattgacgtgtccctcactcactctcctctcttcactataaatcgccactcttcgtgttctccacttcaccaactccttcaaacttattaacactttccttagttcaatatggggaagcccttcttcactctctctctttcttccctttgcttgctactctagcaagttcaacgagtgccaactcaacaacctcaacgcgttggaacccgaccaccgcgttgagtccgaaggtggtcttattgaaacatggaactctcaacaccctgagctgcaatgcgccggtgtcactgtttccaaacgcaccctcaaccgcaacggcctccacttgccatcttactcaccttatccccaaatgatcattgtcgttcaaggtgcgtaatattagtaagaagtatttatcagcttaacgtgataacaataatagtaatatgaaatatttattaaattttttataattaatctctgctagaaaatttgattaatcatttttagtagaatttgttttttctcaactaggttttaaaacaccaca

SEQ ID NO: 2606 - DNA, 654 bp, Artificial; identical to SEQ ID NO: 2585
  Mutations within GlyA3B4 introduced by GmGlyA3B4_T02TALE nuclease

SEQ ID NO: 2607 - DNA, 662 bp, Artificial
  Mutations within GlyA3B4 introduced by GmGlyA3B4_T02TALE nuclease
gttcatgtacggttgcagatataaacgaagcatagcttatgtatgaggtgtaacaaaattggaaacaatagccatgcaaggtgaagaatgtcaccaactcagaaacccttcttcattgacgtgtccctcactcactctcctctcttcactataaatcgccactcttcgtgttctccacttcaccaactccttcaaacttattaacactttccttagttcaatatggggaagcccttcttcactctctctctttcttccctttgcttgctactcttgtcgagtgcatgattacctccagcaagttcaacgagtgccaactcaacaacctcaacgcgttggaacccgaccaccgcgttgagtccgaaggtggtcttattgaaacatggaactctcaacaccctgagctgcaatgcgccggtgtcactgtttccaaacgcaccctcaaccgcaacggcctccacttgccatcttactcaccttatccccaaatgatcattgtcgttcaaggtgcgtaatattagtaagaagtatttatcagcttaacgtgataacaataatagtaatatgaaatatttattaaatttttataattaatctctgctagaaaatttgattaatcattttagtagaatttgttttctcaactaggttttaaaacacca

SEQ ID NO: 2608 - DNA, 646 bp, Artificial
  Mutations within GlyA3B4 introduced by GmGlyA3B4_T02TALE nuclease
gttcatgtacggttgcagatataaacgaagcatagcttatgtatgaggtgtaacaaaattggaaacaatagccatgcaaggtgaagaagtcaccaactcagaaacccttcttcattgacgtgtccctcactcactctcctctcttcactataaatcgccactcttcgtgttctccacttcaccaactccttcaaacttattaacactttccttagttcaatatggggaagcccttcttcactctctctctttcttccctttgcttgctactcttgtcgagtgcatttacctccagcaagttcaacgagtgccaactcaacaacctcaacgcgttggaacccgaccaccgcgttgagtccgaaggtggtcttattgaaacatggaactctcaacaccctgagctgcaatgcgccggtgtcactgtttccaaacgcaccctcaaccgcaacggcctccacttgccatcttactcaccttatccccaaatgatcattgtcgttcaaggtgcgtaatattagtaagaagtatttatcagcttaacgtgataacaataatagtaatatgaaatatttattaaatttttataattaatctctgctagaaaatttgattaatcattttagtagaatttgttttctcaactagg

SEQ ID NO: 2609 - DNA, 664 bp, Artificial
  Mutations within GlyA3B4 introduced by GmGlyA3B4_T02TALE nuclease
gttcatgtacggttgcagatataaacgaagcatagcttatgtatgaggtgtaacaaaattggaaacaatagccatgcaaggtgaagaatgtcaccaactcagaaacccttcttcattgacgtgtccctcactcactctcctctcttcactataaatcgccactcttcgtgttctccacttcaccaactccttcaaacttattaacactttccttagttcaatatggggaagcccttcttcactctctctctttcttccctttgcttgctactcttgtcgagtgcatgttattacctccagcaagttcaacgagtgccaactcaacaacctcaacgcgttggaacccgaccaccgcgttgagtccgaaggtggtcttattgaaacatggaactctcaacaccctgagctgcaatgcgccggtgtcactgtttccaaacgcaccctcaaccgcaacggcctccacttgccatcttactcaccttatccccaaatgatcattgtcgttcaaggtgcgtaatattagtaagagtatttatcagcttaacgtgataacaatatagtaatatgaaatatttattaaatttttataattaatctctgctagaaaatttgattaatcattttagtagaatttgtttttctcaactaggtttttaaaacacca

SEQ ID NO: 2610 - DNA, 661 bp, Artificial
  Mutations within GlyA3B4 introduced by GmGlyA3B4_T02TALE nuclease
gttcatgtacggttgcagatataaacgaagcatagcttatgtatgaggtgtaacaaaattggaaacaatagccatgcaaggtgaagaatgtcaccaactcagaaacccttcttcattgacgtgtccctcactcactctcctctcttcactataaatcgccactcttcgtgttctccacttcaccaactccttcaaacttattaacactttccttagttcaatatggggaagcccttcttcactctctctctttcttccctttgcttgctactcttgtcgagtgcctattacctccagcaagttcaacgagtgccaactcaacaacctcaacgcgttggaacccgaccaccgcgttgagtccgaaggtggtcttattgaaacatggaactctcaacaccctgagctgcaatgcgccggtgtcactgtttccaaacgcaccctcaaccgcaacggcctccacttgccatcttactcaccttatccccaaatgatcattgtcgttcaaggtgcgtaatattagtaagaagtatttatcagcttaacgtgataacaataatagtaatatgaaatatttattaaatttttataattaatctctgctagaaaatttgattaatcattttagtagaatttgttttctcaactaggttttaaaacacca

SEQ ID NO: 2611 - DNA, 663 bp, Artificial
  Mutations within GlyA3B4 introduced by GmGlyA3B4_T02TALE nuclease
gttcatgtacggttgcagatataaacgaagcatagcttatgtatgaggtgtaacaaaaattggaaacaatagccatgcaaggtgaagaatgtcaccaactcagaaacccttcttcattgacgtgtccctcactcactctcctctcttcactataaatcgccactcttcgtgttctccacttcaccaactccttcaaacttattaacactttccttagttcaatatggggaagcccttcttcactctctctctttcttccctttgcttgctactcttgtcgagtgcatattacctccagcaagttcaacgagtgccaactcaacaacctcaacgcgttggaacccgaccaccgcgttgagtccgaaggtggtcttattgaaacatggaactctcaacaccctgagctgcaatgcgccggtgtcactgtttccaaacgcaccctcaaccgcaacggcctccacttgccatcttactcaccttatccccaaatgatcattgtcgttcaaggtgcgtaatattagtaagaagtatttatcagcttaacgtgataacaataatagtaatatgaaatatttattaaatttttataattaatctctgctagaaaatttgattaatcattttagtagaatttgtttttctcaactaggttttaaaacacca

SEQ ID NO: 2612 - DNA, 662 bp, Artificial
  Mutations within GlyA3B4 introduced by GmGlyA3B4_T02TALE nuclease
  misc_feature (529): n is a or c or t or g
gttcatgtacggttgcagatataaacgaagcatagcttatgtatgaggtgtaacaaaattggaaacaatagccatgcaaggtgaagaatgtcaccaactcagaaacccttcttcattgacgtgtccctcactcactctcctctcttcactataaatcgccactcttcgtgttctccacttcaccaactccttcaaacttattaacactttccttagttcaatatggggaagcccttcttcactctctctctttcttccctttgcttgctactcttgtcgagtgcatgtattacctccagcaagttcaacgagtgccaactcaacaacctcaacgcgttggaacccgaccaccgcgttgagtccgaaggtggtcttattgaaacatggaactctcaacaccctgagctgcaatgcgccggtgtcactgtttccaaacgcaccctcaaccgcaacggcctccacttgccatcttactcaccttatccccaaatgatcattgtcgttcaaggtgcgtaatattagtaagagnatttatcagcttaacgtgataacaataatagtaatatgaaatatttattaaatttttataattaatctctgctagaaaatttgattaatcattttagtagaatttgtttttctcaactaggttttaaacacca

SEQ ID NO: 2613 - DNA, 633 bp, Artificial
  Mutations within GlyA3B4 introduced by GmGlyA3B4_T02TALE nuclease
gttcatgtacggttgcagatataaacgaagcatagcttatgtatgaggtgtaacaaaattggaaacaatagccatgcaaggtgaagaatgtcaccaactcagaaacccttcttcattgacgtgtccctcactcactctcctctcttcactataaatcgccactcttcgtgttctccacttcaccaactccttcaaacttattaacactttccttagttcaatatggggaagcccttcttcactctctctctttcttccctttgctattacctccagcaagttcaacgagtgccaactcaacaacctcaacgcgttggaacccgaccaccgcgttgagtccgaaggtggtcttattgaaacatggaactctcaacaccctgagctgcaatgcgccggtgtcactgtttccaaacgcaccctcaaccgcaacggcctccacttgccatcttactcaccttatcccccaaatgatcattgtcgttcaaggtgcgtaatattagtaagaagtatttatcagcttaacgtgataacaataatagtaatatgaaatatttattaaattttttataaattaatctctgctagaaaatttgattaatcatttttagtagaatttgttttttctcaactagg

SEQ ID NO: 2614 - DNA, 634 bp, Artificial
  Mutations within GlyA3B4 introduced by GmGlyA3B4_T02TALE nuclease
gttcatgtacggttgcagatataaacgaagcatagcttatgtatgaggtgtaacaaaattggaaacaatagccatgcaaggtgaagaatgtcaccaactcagaaacccttcttcattgacgtgtccctcactcactctcctctcttcactataaatcgccactcttcgtgttctccacttcaccaactccttcaaacttattaacactttccttagttcaatatggggaagcccttcttcactctctctctttcttccctttgcttgctactcttgtcgagtgcactattacctccagcaagttcaacgagtgccaactcaacaacctcaacgcgttggaacccgaccaccgcgttgagtccgaaggtggtcttattgaaacatggaactctcaacaccctgagctgcaatgcgccggtgtcactgtttccaaacgcaccctcaaccgcaacggcctccacttgccatcttactcaccttatccccaaatgatcattgtcgttcaaggtgcgtaatattagtaagaagtatttatcagcttaacgtgataacaatatagtaatatgaaatatttattaaatttttataattaatctctgctagaaaatttgattaatcattttagtagaatttg

SEQ ID NO: 2615 - DNA, 598 bp, Artificial
  Mutations within GlyA3B4 introduced by GmGlyA3B4_T02TALE nuclease
gttcatgtacggttgcagatataaacgaagcatagcttatgtatgaggtgtaacaaaattggaaacaatagccatgcaaggtgaagaatgtcaccaactcagaaacccttcttcattgacgtgtccctcactcactctcctctcttcactataaatcgccactcttcgtgttctccacttcaccaactccttcaaacttattaacactttccttagttcaatatggggaagcccttcttcactctctctctttcttccctttgcttgctactctttgctattacctccagcaagttcaacgagtgccaactcaacaacctcaacgcgttggaacccgaccaccgcgttgagtccgaaggtggtcttattgaaacatggaactctcaacaccctgagctgcaatgcgccggtgtcactgtttccaaacgcaccctcaaccgcaacggcctccacttgccatcttactcaccttatccccaaatgatcattgtcgttcaaggtgcgtaaatattagtaagaagtatttatcagcttaacgtgataacaataatagtaatatgaaatatttattaaattttttataattaatctctgctag

SEQ ID NO: 2616 - DNA, 517 bp, Artificial
  Mutations within GlyA3B4 introduced by GmGlyA3B4_T02TALE nuclease
gttcatgtacggttgcagatataaacgaagcatagcttatgtatgaggtgtaacaaaattggaaacaatagccatgcaaggtgaagaatgtcaccaactcagaaacccttcttcattgacgtgtccctcactcactctcctctcttcactataaatcgccactcttcgtgttctccacttcaccaactccttcaaacttattaacactttccttagttcaatatggggaagcccttcttcactctctctctttcttccctttgcgggtccgaaggtggtcttattgaaacatggaactctcaacaccctgagctgcaatgcgccggtgtcactgtttccaaacgcaccctcaaccgcaacggcctccacttgccatcttactcaccttatccccaaatgatcattgtcgttcaaggtgcgtaatattagtaagaagtatttatcagcttaacgtgataacaataatagtaatatgaaatatttattaaattttttataattaatctctgctagaaaa

SEQ ID NO: 2617 - DNA, 636 bp, Artificial
  Mutations within GlyA3B4 introduced by GmGlyA3B4_T02TALE nuclease
gttcatgtacggttgcagatataaacgaagcatagcttatgtatgaggtgtaacaaaattggaaacaatagccatgcaaggtgaagaatgtcaccaactcagaaacccttcttcattgacgtgtccctcactcactctcctctcttcactataaatcgccactcttcgtgttctccacttcaccaactccttcaaacttattaacactttccttagttcaatatggggaagcccttcttcactctctctctttcttccggtgctattacctccagcaagttcaacgagtgccaactcaacaacctcaacgcgttggaacccgaccaccgcgttgagtccgaaggtggtcttattgaaacatggaactctcaacaccctgagctgcaatgcgccggtgtcactgtttccaaacgcaccctcaaccgcaacggcctccacttgccatcttactcaccttatcccccaaatgatcattgtcgttcaaggtgcgtaatattagtaagaagtatttatcagctttaacgtgataacaataatagtaatatgaaatatttattaaattttttataattaatctctgctagaaaatttgattaatcatttttagtagaatttgttttttctcaactaggtttt

SEQ ID NO: 2618 - DNA, 635 bp, Artificial
  Mutations within GlyA3B4 introduced by GmGlyA3B4_T02TALE nuclease
  misc_feature (530): n is a or c or t or g
gttcatgtacggttgcagatataaacgaagcatagcttatgtatgaggtgtaacaaaattggaaacaatagccatgcaaggtgaagaatgtcaccaactcagaaacccttcttcattgacgtgtccctcactcactctcctctcttcactataaatcgccactcttcgtgttctccacttcaccaactccttcaaacttattaacactttccttagttcaatatggggaagcccttcttcactctctctctttcttccctttgcttgctactcttgtcgagtgcatgctattacctccagcaagttcaacgagtgccaactcaacaacctcaacgcgttggaacccgaccaccgcgttgagtccgaaggtggtcttattgaaacatggaactctcaacaccctgagctgcaatgcgccggtgtcactgtttccaaacgcaccctcaaccgcaacggcctccacttgccatcttactcaccttatccccaaatgatcattgtcgttcaaggtgcgtaatattagtaagagnatttatcagcttaacgtgataacaatatagtaatatgaaatatttattaaatttttataattaatctctgctagaaaatttgattaatcattttagtagaatttg

SEQ ID NO: 2619 - DNA, 640 bp, Artificial
  Mutations within GlyA3B4 introduced by GmGlyA3B4_T02TALE nuclease
gttcatgtacggttgcagatataaacgaagcatagcttatgtatgaggtgtaacaaaattggaaacaatagccatgcaaggtgaagaatgtcaccaactcagaaacccttcttcattgacgtgtccctcactcactctcctctcttcactataaatcgccactcttcgtgttctccacttcaccaactccttcaaacttattaacactttccttagttcaatatggggaagcccttcttcactctctctctttcttccctttgcttgctattacctccagcaagttcaacgagtgccaactcaacaacctcaacgcgttggaacccgaccaccgcgttgagtccgaaggtggtcttattgaaacatggaactctcaacaccctgagctgcaatgcgccggtgtcactgtttccaaacgcaccctcaaccgcaacggcctccacttgccatcttactcaccttatcccccaaatgatcattgtcgttcaaggtgcgtaatattagtaagaagtatttatcagcttaacgtgataacaataatagtaatatgaaatatttattaaattttttataattaatctctgctagaaaatttgattaatcatttttagtagaatttgttttttctcaactaggtttt

SEQ ID NO: 2620 - DNA, 643 bp, Artificial
  Mutations within GlyA3B4 introduced by GmGlyA3B4_T02TALE nuclease
gttcatgtacggttgcagatataaacgaagcatagcttatgtatgaggtgtaacaaaattggaaacaatagccatgcaaggtgaagaatgtcaccaactcagaaacccttcttcattgacgtgtccctcactcactctcctctcttcactataaatcgccactcttcgtgttctccacttcaccaactccttcaaacttattaacactttccttagttcaatatggggaagcccttcttcactctctctctttcttccctttgcttgctattacctccagcaagttcaacgagtgccaactcaacaacctcaacgcgttggaacccgaccaccgcgttgagtccgaaggtggtcttattgaaacatggaactctcaacaccctgagctgcaatgcgccggtgtcactgtttccaaacgcaccctcaaaccgcaacggcctccacttgccatcttactcaccttatccccaaatgatcattgtcgttcaaggtgcgtaaatattagtaagaagtatttatcagctttaacgtgataacaaataaatagtaatatgaaatatttattaaaattttttataaattaaatctctgctagaaaaatttgattaaatcatttttagtagaatttgttttttctcaacta

SEQ ID NO: 2621 - DNA, 651 bp, Artificial; identical to SEQ ID NO: 2077
  Mutations within GlyA3B4 introduced by GmGlyA3B4_T02TALE nuclease

SEQ ID NO: 2622 - DNA, 656 bp, Artificial
  Mutations within GlyA3B4 introduced by GmGlyA3B4_T02TALE nuclease
gttcatgtacggttgcagatataaacgaagcatagcttatgtatgaggtgtaacaaaattggaaacaatagccatgcaaggtgaagaatgtcaccaactcagaaaccccttcttcattgacgtgtccctcactcactctcctctcttcactataaatcgccactcttcgtgttctccacttcaccaactccttcaaacttattaacactttccttagttcaatatggggaagcccttcttcactctctctctttcttccctttgcttgctactcttgtcgagtgcatgctattacctccagcaagttcaacgagtgccaactcaacaacctcaacgcgttggaacccgaccaccgcgttgagtccgaaggtggtcttattgaaacatggaactctcaacaccctgagctgcaatgcgccggtgtcactgtttccaaacgcaccctcaaccgcaacggcctccacttgccatcttactcaccttatccccaaatgatcattgtcgttcaaggtgcgtaatattagtaagagtatttatcagcttaacgtgataacaataatagtaatatgaaatatttattaaatttttataattaatctctgctagaaaatttgattaatcattttagtagaatttgttttctcaactaggttttt

SEQ ID NO: 2623 - DNA, 539 bp, Artificial
  Mutations within GlyA3B4 introduced by GmGlyA3B4_T02TALE nuclease
gttcatgtacggttgcagatataaacgaagcatagcttatgtatgaggtgtaacaaaattggaaacaatagccatgcaaggtgaagaatgtcaccaacatcagaaacccttcattcctattgacgtgtcccctcactcactctcctctcttcactataaatcgccactcttcgtgttctccacttcaccaactccttcaaacttattaacactttccttagttcaatatggggaagcccttcttcacttcccttggtcttattgaaacatggaactctcaacaccctgagctgcaatgcgccggtgtcactgtttccaaacgcaccctcaaccgcaacggcctccacttgccatcttactcaccttatccccaaatgatcattgtcgttcaaggtgcgtaatattagtaagaagtatttatcagcttaacgtgataacaataatagtaatatgaaatatttattaaattttttataattaatctctgctagaaaatttgattaatcatttttagtagaatttgtttttctcaatctagg

SEQ ID NO: 2624 - DNA, 576 bp, Artificial
  Mutations within GlyA3B4 introduced by GmGlyA3B4_T02TALE nuclease
gttcatgtacggttgcagatataaacgaagcatagcttatgtatgaggtgtaacaaaattggaaacaatagccatgcaaggtgaagaatgtcaccaactcagaaacccttcttcattgacgtgtccctcactcactctcctctcttcactataaatcgccactcttcgtgttctccacttcaccaactccttcaaacttattaacactttccttagttcaatatggggaagcccttcttcactctctctctttcttccctttgcttgctactcttgtcgaacgcggtggtcttattgaaacatggaactctcaacaccctgagctgcaatgcgccggtgtcactgtttccaaacgcaccctcaaccgcaacggcctccacttgccatcttactcaccttatccccaaatgatcattgtcgttcaaggtgcgtaatattagtaagaagtatttatcagcttaacgtgataacaataatagtaatatgaaatatttattaaatttttttataattaatctctgctagaaaatttgattaatcatttttagtagaatttgtttttctcaactaggtttt

SEQ ID NO: 2625 - DNA, 595 bp, Artificial
  Mutations within GlyA3B4 introduced by GmGlyA3B4_T02TALE nuclease
gttcatgtacggttgcagatataaacgaagcatagcttatgtatgaggtgtaacaaaattggaaacaatagccatgcaaggtgaagaatgtcaccaactcagaaacccttcttcattgacgtgtccctcactcactctcctctcttcactataaatcgccactcttcgtgttctccacttcaccaactccttcaaacttattaacactttccttagttcaatatggggaagcccttcttctccagcaagttcaacgagtgccaactcaacaacctcaacgcgttggaacccgaccaccgcgttgagtccgaaggtggtcttattgaaacatggaactctcaacaccctgagctgcaatgcgccggtgtcactgtttccaaacgcaccctcaaccgcaacggcctccacttgccatcttactcaccttatccccaaaatgatcattgtcgttcaaggtgcgtaatattagtaagaagtatttatcagcttaacgtgataacaataatagtaatagaatatttattaaattttttataattaatctctgctagaaaatttgatttaaatcatttttagtagaatttgtttttctcaa

SEQ ID NO: 2626 - DNA, 661 bp, Artificial
  Mutations within GlyA3B4 introduced by GmGlyA3B4_T02TALE nuclease
gttcatgtacggttgcagatataaacgaagcatagcttatgtatgaggtgtaacaaaattggaaacaatagccatgcaaggtgaagaatgtcaccaactcagaaacccttcttcattgacgtgtccctcactcactctcctctcttcactataaatcgccactcttcgtgttctccacttcaccaactccttcaaacttattaacactttccttagttcaatatggggaagcccttcttcactctctctctttcttccctttgcttgctactcttgtcgagtgcattgctattacctccagcaagttcaacgagtgccaactcaacaacctcaacgcgttggaacccgaccaccgcgttgagtccgaaggtggtcttattgaaacatggaactctcaacaccctgagctgcaatgcgccggtgtcactgtttccaaacgcaccctcaaccgcaacggcctccacttgccatcttactcaccttatccccaaatgatcattgtcgttcaaggtgcgtaatattagtaagaagtatttatcagcttaacgtgataacaataatagtaatatgaaatatttattaaatttttataattaatctctgctagaaaatttgattaatcattttagtagaatttgttttctcaactaggtttttaaaa

SEQ ID NO: 2627 - DNA, 655 bp, Artificial
  Mutations within GlyA3B4 introduced by GmGlyA3B4_T02TALE nuclease
gttcatgtacggttgcagatataaacgaagcatagcttatgtatgaggtgtaacaaaattggaaacaatagccatgcaaggtgaagaatgtcaccaactcagaaacccttcttcattgacgtgtccctcactcactctcctctcttcactataaatcgccactcttcgtgttctccacttcaccaactccttcaaacttattaacactttccttagttcaatatggggaagcccttcttcactctctctctttcttccctttgcttgctactcttgtcgagtgctattacctccagcaagttcaacgagtgccaactcaacaacctcaacgcgttggaacccgaccaccgcgttgagtccgaaggtggtcttattgaaacatggaactctcaacaccctgagctgcaatgcgccggtgtcactgtttccaaacgcaccctcaaccgcaacggcctccacttgccatcttactcaccttatccccaaatgatcattgtcgttcaaggtgcgtaatattagtaagaagtatttatcagcttaacgtgataacaataatagtaatatgaaatatttattaaatttttataattaatctctgctagaaaatttgattaatcattttagtagaatttgttttctcaactaggttttaaaa

SEQ ID NO: 2628 - DNA, 655 bp, Artificial; identical to SEQ ID NO: 2000
  Mutations within GlyA3B4 introduced by GmGlyA3B4_T02TALE nuclease

SEQ ID NO: 2629 - DNA, 664 bp, Artificial
  Mutations within GlyA3B4 introduced by GmGlyA3B4_T02TALE nuclease
gttcatgtacggttgcagatataaacgaagcatagcttatgtatgaggtgataacaaaattggaaacaatagccatgcaaggtgaagaatgtcaccaactcagaaacccttcttcattgacgtgtccctcactcactctcctctcttcactataaatcgccactcttcgtgttctccacttcaccaactccttcaaacttattaacactttccttagttcaatatggggaagcccttcttcactctctctctttcttccctttgcttgctactcttgtcgagtgcatgcattacctccagcaagttcaacgagtgccaactcaacaacctcaacgcgttggaacccgaccaccgcgttgagtccgaaggtggtcttattgaaacatggaactctcaacaccctgagctgcaatgcgccggtgtcactgtttccaaacgcaccctcaaccgcaacggcctccacttgccatcttactcaccttatccccaaatgatcattgtcgttcaaggtgcgtaatattagtaagaagtatttatcagcttaacgtgataacaataatagtaatatgaaatatttattaaatttttataattaatctctgctagaaaatttgattaatcattttagtagaatttgttttctcaactaggttttaaaacacca

SEQ ID NO: 2630 - DNA, 654 bp, Artificial
  Mutations within GlyA3B4 introduced by GmGlyA3B4_T02TALE nuclease
gttcatgtacggttgcagatataaacgaagcatagcttatgtatgaggtgtaacaaaattggaaacaatagccatgcaaggtgaagaatgtcaccaactcagaaacccttcttcattgacgtgtccctcactcactctcctctcttcactataaatcgccactcttcgtgttctccacttcaccaactccttcaaacttattaacactttccttagttcaatatggggaagcccttcttcactctctctctttcttccctttgcttgctactattacctccagcaagttcaacgagtgccaactcaacaacctcaacgcgttggaacccgaccaccgcgttgagtccgaaggtggtcttattgaaacatggaactctcaacaccctgagctgcaatgcgccggtgtcactgtttccaaacgccaccctcaaccgcaacggcctccacttgccatcttactcaccttatccccaaatgatcattgtcgttcaaggtgcgtaatattagtaagaagtatttatcagcttaacgtgataacaataatagtaatatgaaatatttattaaattttttataattaatctctgctagaaaatttgattaatcatttttagtagaatttgttttttctcaactaggttttaaaacaccaca

SEQ ID NO: 2631 - DNA, 634 bp, Artificial
  Mutations within GlyA3B4 introduced by GmGlyA3B4_T02TALE nuclease
gttcatgtacggttgcagatataaacgaagcatagcttatgtatgaggtgtaacaaaattggaaacaatagccatgcaaggtgaagaatgtcaccaactcagaaacccttcttcattgacgtgtccctcactcactctcctctcttcactataaatcgccactcttcgtgttctccacttcaccaactccttcaaacttattaacactttccttagttcaatatggggaagcccttcttcactctctctctttcttccctttgcttgctactcttgtcgagtggctattacctccagcaagttcaacgagtgccaactcaacaacctcaacgcgttggaacccgaccaccgcgttgagtccgaaggtggtcttattgaaacatggaactctcaacaccctgagctgcaatgcgccggtgtcactgtttccaaacgcaccctcaaccgcaacggcctccacttgccatcttactcaccttatccccaaatgatcattgtcgttcaaggtgcgtaatattagtaagaagtatttatcagcttaacgtgataacaataatagtaatatgaaatatttattaaatttttataattaatctctgctagaaaatttgattaatcattttagtagaatttg

SEQ ID NO: 2632 - DNA, 635 bp, Artificial; identical to SEQ ID NO: 1775
  Mutations within GlyA3B4 introduced by GmGlyA3B4_T02TALE nuclease

SEQ ID NO: 2633 - DNA, 670 bp, Artificial
  Mutations within GlyA3B4 introduced by GmGlyA3B4_T02TALE nuclease
gttcatgtacggttgcagatataaacgaagcatagcttatgtatgaggtgtaacaaaattggaaacaatagccatgcaaggtgaagaatgtcaccaactcagaaacccttcttcattgacgtgtccctcactcactctcctctcttcactataaatcgccactcttcgtgttctccacttcaccaactccttcaaacttattaacactttccttagttcaatatggggaagcccttcttcactctctctctttcttccctttgcttgctactcttgtcgagtgcatttgctattacctccagcaagttcaacgagtgccaactcaacaacctcaacgcgttggaacccgaccaccgcgttgagtccgaaggtggtcttattgaaacatggaactctcaacaccctgagctgcaatgcgccggtgtcactgtttccaaacgcaccctcaaccgcaacggcctccacttgccatcttactcaccttatccccaaatgatcattgtcgttcaaggtgcgtaatattagtaagaagtatttatcagcttaacgtgataacaataatagtaatatgaaatatttattaaatttttataattaatctctgctagaaaatttgattaatcattttagtagaatttgtttttctcaactaggtttttaaaacaccaca

SEQ ID NO: 2634 - DNA, 657 bp, Artificial
  Mutations within GlyA3B4 introduced by GmGlyA3B4_T02TALE nuclease
gttcatgtacggttgcagatataaacgaagcatagcttatgtatgaggtgtaacaaaattggaaacaatagccatgcaaggtgaagaatgtcaccaactcagaaacccttcttcattgacgtgtccctcactcactctcctctcttcactataaatcgccactcttcgtgttctccacttcaccaactccttcaaacttattaacactttccttagttcaatatggggaagcccttcttcactctctctctttcttccttgcttgctactcttgtcgagtgcttctccagcaagttcaacgagtgccaactcaacaacctcaacgcgttggaacccgaccaccgcgttgagtccgaaggtggtcttattgaaacatggaactctcaacaccctgagctgcaatgcgccggtgtcactgtttccaaacgcaccctcaaccgcaacggcctccacttgccatcttactcaccttatcccccaaatgatcttgtcgttcaaggtgcgtaaatattagtaagaagtatttatcagcttaacgtgataacaataatagtaatatgaaatatttattaaattttttataattaatctctgctagaaaatttgattaatctttttagtagaattgttttttctcaactaggtttaaacaccaca

SEQ ID NO: 2635 - DNA, 577 bp, Artificial
  Mutations within GlyA3B4 introduced by GmGlyA3B4_T02TALE nuclease
gttcatgtacggttgcagatataaacgaagcatagcttatgtatgaggtgtaacaaaattggaaacaatagccatgcaaggtgaagaatgtcaccaactcagaaacccttcttcattgacgtgtccctcactcactctcctctcttcactataaatcgccactcttcgtgttctccacttcaccaactccttcaaacttattaacactttccttacctccagcaagttcaacgagtgccaactcaacaacctcaacgcgttggaacccgaccaccgcgttgagtccgaaggtggtcttattgaaacatggaactctcaacaccctgagctgcaatgcgccggtgtcactgtttccaaacgcaccctcaaccgcaacggcctccacttgccatcttactcaccttatccccaaatgatcattgtcgttcaaggtgcgtaatattagtaagaagtatttatcagcttaacgtgataacaataatagtaatatgaaatatttattaaatttttttataattaatctctgctagaaaatttgattaatcatttttagtagaatttgtttttctcaactagg

SEQ ID NO: 2636 - DNA, 585 bp, Artificial
  Mutations within GlyA3B4 introduced by GmGlyA3B4_T02TALE nuclease
gttcatgtacggttgcagatataaacgaagcatagcttatgtatgaggtgtaacaaaattggaaacaatagccatgcaaggtgaagaatgtcaccaactcagaaacccttcttcattgacgtgtccctcactcactctcctctcttcactataaatcgccactcttcgtgttctccacttcaccaactgcaacggcgccgtgctgtccgtggaggagctcctgatcggcggcgagatgatcattggatctagatgcattcgcgatctacacctccagcaagttcaacgagtgccaactcaacaacctcaacgcgttggaacccgaccaccgcgttgagtccgaaggtggtcttattgaaacatggaactctcaacaccctgagctgcaatgcgccggtgtcactgtttccaaacgcaccctcaaccgcaacggcctccacttgccatcttactcaccttatccccaaatgatcattgtcgttcaaggtgcgtaaatattagtaagaagtatttatcagcttaacgtgataacaataatagtaatatgaaatatttattaaattttttataattaatctctgctag

SEQ ID NO: 2637 - DNA, 617 bp, Artificial
  Mutations within GlyA3B4 introduced by GmGlyA3B4_T02TALE nuclease
gttcatgtacggttgcagatataaacgaagcatagcttatgtatgaggtgtaacaaaattggaaacaatagccatgcaaggtgaagaatgtcaccaactcagaaacccttcttcattgacgtgtccctcactcactctcctctcttcactataaatcgccactcttcgtgttctccacttcaccaactccttcaaacttattaacactttccttagttcaatatggggaagcccttcttcactctctctctttcttccctttgcttgctactcttgtcgagtgcattacctccagcaagttcaacgagtgccaactcaacaacctcaacgcgttggaacccgaccaccgcgttgagtccgaaggtggtcttattgaaacatggaactctcaacaccctgagctgcaatgcgccggtgtcactgtttccaaacgcaccctcaaccgcaacggcctccacttgccatcttactcaccttatccccaaatgatcattgtcgttcaaggtgcgtaatattagtaagaagtatttatcagcttaacgtgataacaataatagtaatatgaaatatttattaaatttttataattaatctctgctagaaaatttgattaatca

SEQ ID NO: 2638 - DNA, 635 bp, Artificial; identical to SEQ ID NO: 2618
  Mutations within GlyA3B4 introduced by GmGlyA3B4_T02TALE nuclease
  misc_feature (530): n is a or c or t or g

SEQ ID NO: 2639 - DNA, 666 bp, Artificial; identical to SEQ ID NO: 2272
  Mutations within GlyA3B4 introduced by GmGlyA3B4_T02TALE nuclease
  misc_feature (530): n is a or c or t or g

SEQ ID NO: 2640 - DNA, 662 bp, Artificial; identical to SEQ ID NO: 2192
  Mutations within GlyA3B4 introduced by GmGlyA3B4_T02TALE nuclease

SEQ ID NO: 2641 - DNA, 653 bp, Artificial
  Mutations within GlyA3B4 introduced by GmGlyA3B4_T02TALE nuclease
gttcatgtacggttgcagatataaacgaagcatagcttatgtatgaggtgtaacaaaattggaaacaatagccatgcaaggtgaagaatgtcaccaactcagaaacccttcttcattgacgtgtccctcactcactctcctctcttcactataaatcgccactcttcgtgttctccacttcaccaactccttcaaacttattaacactttccttagttcaatatggggaagcccttcttcactctctctctttctccctttgcttgctactcttgtcgagtgcactattacctccagcaagttcaacgagtgccaactcaacaacctcaacgcgttggaacccgaccaccgcgttgagtccgaaggtggtcttattgaaacatggaactctcaacaccctgagctgcaatgcgccggtgtcactgtttccaaacgcaccctcaaccgcaacggcctccacttgccatcttactcaccttatccccaaatgatcattgtcgttcaaggtgcgtaatattagtaagaagtatttatcagcttaacgtgataacaataatagtaatatgaaatatttattaaatttttataattaatctctgctagaaaatttgattaatcattttagtagaatttgttttctcaactaggttttt

SEQ ID NO: 2642 - DNA, 574 bp, Artificial
  Mutations within GlyA3B4 introduced by GmGlyA3B4_T02TALE nuclease
gttcatgtacggttgcagatataaacgaagcatagcttatgtatgaggtgtaacaaaattggaaacaatagccatgcaaggtgaagaatgtcaccaactcagaaacccttcttcattgacgtgtccctcactcactctcctctcttcactataaatcgccactcttcgtgttctccacttcaccaactccttcaaacttattaacactttccagcaagttcaacgagtgccaactcaacaacctcaacgcgttggaacccgaccaccgcgttgagtccgaaggtggtcttattgaaacatggaactctcaacaccctgagctgcaatgcgccggtgtcactgtttccaaacgcaccctcaaccgcaacggcctccacttgccatcttactcaccttatccccaaaatgatcattgtcgttcaaggtgcgtaatattagtaagaagtatttatcagcttaacgtgataacaataatagtaatatgaaatatttattaaattttttatattaatctctgctagaaattgattaatcattttagtagaatttgtttttctcaactaggttttaaaca

SEQ ID NO: 2643 - DNA, 654 bp, Artificial
  Mutations within GlyA3B4 introduced by GmGlyA3B4_T02TALE nuclease
gttcatgtacggttgcagatataaacgaagcatagcttatgtatgaggtgtaacaaaattggaaacaatagccatgcaaggtgaagaatgtcaccaactcagaaacccttcttcattgacgtgtccctcactcactctcctctcttcactataaatcgccactcttcgtgttctccacttcaccaactccttcaaacttattaacactttccttagttcaatatggggaagcccttcttcactctctctctttcttccctttgcttgctactcttgtcgagtgcagctattacctccagcaagttcaacgagtgccaactcaacaacctcaacgcgttggaacccgaccaccgcgttgagtccgaaggtggtcttattgaaacatggaactctcaacaccctgagctgcaatgcgccggtgtcactgtttccaaacgcaccctcaaccgcaacggcctccacttgccatcttactcaccttatccccaaatgatcattgtcgttcaaggtgcgtaatattagtaagagtatttatcagcttaacgtgataacaatatagtaatatgaaatatttattaaatttttataattaatctctgctagaaaatttgattaatcattttagtagaatttgttttctcaactaggttttaa

SEQ ID NO: 2644 - DNA, 571 bp, Artificial
  Mutations within GlyA3B4 introduced by GmGlyA3B4_T02TALE nuclease
gttcatgtacggttgcagatataaacgaagcatagcttatgtatgaggtgtaacaaaattggaaacaatagccatgcaaggtgaagaatgtcaccaactcagaaacccttcttcattgacgtgtccctcactcactctcctctcttcactataaatcgccactcttcgtgttctccacttcaccaactccttcaaacttattaacactttccttagttcaatatggggaagcccttcttcactctctctctttctttccttagttcaatatggaacccgaccaccgcgttgagtccgaaggtggtcttattgaaacatggaactctcaacaccctgagctgcaatgcgccggtgtcactgtttccaaacgcaccctcaaccgcaacggcctccacttgccatcttactcaccttatccccaaatgatcattgtcgttcaaggtgcgtaatattagtaagaagtatttatcagcttaacgtgataacaataatagtaatatgaaatatttattaaattttttataattaatctctgctagaaaatttgattaatcatttttagtagaatttg

SEQ ID NO: 2645 - DNA, 655 bp, Artificial
  Mutations within GlyA3B4 introduced by GmGlyA3B4_T02TALE nuclease
gttcatgtacggttgcagatataaacgaagcatagcttatgtatgaggtgtaacaaaattggaaacaatagccatgcaaggtgaagaatgtcaccaactcagaaacccttcttcattgacgtgtccctcactcactctcctctcttcactataaatcgccactcttcgtgttctccacttcaccaactccttcaaacttattaacactttccttagttcaatatggggaagcccttcttcactctctctctttcttccctttgcttgctactcttgtcgagtgcatattacctccagcaagttcaacgagtgccaactcaacaacctcaacgcgttggaacccgaccaccgcgttgagtccgaaggtggtcttattgaaacatggaactctcaacaccctgagctgcaatgcgccggtgtcactgtttccaaacgcaccctcaaccgcaacggcctccacttgccatcttactcaccttatccccaaatgatcattgtcgttcaaggtgcgtaatattagtaagaagtatttatcagcttaacgtgataacaatatagtaatatgaaatatttattaaatttttataattaatctctgctagaaaatttgattaatcattttagtagaatttgttttctcaactaggttttaaaa

SEQ ID NO: 2646 - DNA, 632 bp, Artificial; identical to SEQ ID NO: 2295
  Mutations within GlyA3B4 introduced by GmGlyA3B4_T02TALE nuclease

SEQ ID NO: 2647 - DNA, 636 bp, Artificial; identical to SEQ ID NO: 1885
  Mutations within GlyA3B4 introduced by GmGlyA3B4_T02TALE nuclease

SEQ ID NO: 2648 - DNA, 662 bp, Artificial
  Mutations within GlyA3B4 introduced by GmGlyA3B4_T02TALE nuclease
gttcatgtacggttgcagatataaacgaagcatagcttatgtatgaggtgtaacaaaattggaaacaatagccatgcaaggtgaagaatgtcaccaactcagaaacccttcttcattgacgtgtccctcactcactctcctctcttcactataaatcgccactcttcgtgttctccacttcaccaactccttcaaacttattaacactttccttagttcaatatggggaagcccttcttcactctctctctttcttccctttgcttgctactcttgtcgagtgcatatattacctccagcaagttcaacgagtgccaactcaacaacctcaacgcgttggaacccgaccaccgcgttgagtccgaaggtggtcttattgaaacatggaactctcaacaccctgagctgcaatgcgccggtgtcactgtttccaaacgcaccctcaaccgcaacggcctccacttgccatcttactcaccttatccccaaatgatcattgtcgttcaaggtgcgtaatattagtaagaagtatttatcagcttaacgtgataacaatatagtaatatgaaatatttattaaatttttataattaatctctgctagaaaatttgattaatcattttagtagaatttgttttctcaactaggttttaaaacacca

SEQ ID NO: 2649 - DNA, 597 bp, Artificial
  Mutations within GlyA3B4 introduced by GmGlyA3B4_T02TALE nuclease
gttcatgtacggttgcagatataaacgaagcatagcttatgtatgaggtgtaacaaaattggaaacaatagccatgcaaggtgaagaatgtcaccaactcagaaacccttcttcattgacgtgtccctcactcactctcctctcttcactataaatcgccactcttcgtgttctccacttcaccaactccttcaaacttattaacactttccttagttcaatatggggaagcccttcttcactccagcaagttcaacgagtgccaactcaacaacctcaacgcgttggaacccgaccaccgcgttgagtccgaaggtggtcttattgaaacatggaactctcaacaccctgagctgcaatgcgccggtgtcactgtttccaaacgcaccctcaaccgcaacggcctccacttgccatcttactcaccttatccccaaaatgatcattgtcgttcaaggtgcgtaatattagtaagaagtatttatcagcttaacgtgataacaataatagtaatatgaaatatttattaaattttttataattaatctctgctagaaaatttgattaatcatttttagtagaatttgtttttctcaa

SEQ ID NO: 2650 - DNA, 627 bp, Artificial
  Mutations within GlyA3B4 introduced by GmGlyA3B4_T02TALE nuclease
gttcatgtacggttgcagatataaacgaagcatagcttatgtatgaggtgtaacaaaaattggaaacaatagccatgcaaggtgaagaatgtcaccaactcagaaacccttcttcattgacgtgtccctcactcactctcctctcttcactataaatcgccactcttcgtgttctccacttcaccaactccttcaaacttattaacactttccttagttcaatatggggaagcccttcttcactctctctctttcttccctttgcttgctactcttgtcgagtgcatgttattacctccagcaagttcaacgagtgccaactcaacaacctcaacgcgttggaacccgaccaccgcgttgagtccgaaggtggtcttattgaaacatggaactctcaacaccctgagctgcaatgcgccggtgtcactgtttccaaacgcaccctcaaccgcaacggcctccacttgccatcttactcaccttatccccaaatgatcattgtcgttcaaggtgcgtaatattagtaagagtatttatcagcttaacgtgataacaatatagtaatatgaaatatttattaaatttttataattaatctctgctagaaaatttgattaatcttttagt

SEQ ID NO: 2651 - DNA, 582 bp, Artificial; identical to SEQ ID NO: 1793
  Mutations within GlyA3B4 introduced by GmGlyA3B4_T02TALE nuclease

SEQ ID NO: 2652 - DNA, 664 bp, Artificial
  Mutations within GlyA3B4 introduced by GmGlyA3B4_T02TALE nuclease
gttcatgtacggttgcagatataaacgaagcatagcttatgtatgaggtgtaacaaaattggaaacaatagccatgcaaggtgaagaatgtcaccaactcagaaacccttcttcattgacgtgtccctcactcactctcctctcttcactataaatcgccactcttcgtgttctccacttcaccaactccttcaaacttattaacactttccttagttcaatatggggaagcccttcttcactctctctctttcttccctttgcttgctactcttgtcgagtttgctattacctccagcaagttcaacgagtgccaactcaacaacctcaacgcgttggaacccgaccaccgcgttgagtccgaaggtggtcttattgaaacatggaactctcaacaccctgagctgcaatgcgccggtgtcactgtttccaaacgcaccctcaaccgcaacggcctccacttgccatcttactcaccttatccccaaatgatcattgtcgttcaaggtgcgtaatattagtaagaagtatttatcagcttaacgtgataacaataatagtaatatgaaatatttattaaatttttataattaatctctgctagaaaatttgattaatcattttagtagaatttgtttttctcaactaggtttttaaaacacca

SEQ ID NO: 2653 - DNA, 645 bp, Artificial
  Mutations within GlyA3B4 introduced by GmGlyA3B4_T02TALE nuclease
gttcatgtacggttgcagatataaacgaagcatagcttatgtatgaggtgtaacaaaattggaaacaatagccatgcaaggtgaagaatgtcaccaactcagaaacccttcttcattgacgtgtccctcactcactctcctctcttcactataaatcgccactcttcgtgttctccacttcaccaactccttcaaacttattaacactttccttagttcaatatggggaagcccttcttcactctctctctttcttccctttgcttgctactcttgtcgagtgcatacctccagcaagttcaacgagtgccaactcaacaacctcaacgcgttggaacccgaccaccgcgttgagtccgaaggtggtcttattgaaacatggaactctcaacaccctgagctgcaatgcgccggtgtcactgtttccaaacgcaccctcaaccgcaacggcctccacttgccatcttactcaccttatccccaaatgatcattgtcgttcaaggtgcgtaatattagtaagaagtatttatcagcttaacgtgataacaataatagtaatatgaaatatttattaaatttttataattaatctctgctagaaaatttgattaatcattttagtagaatttgttttctcaactagg

SEQ ID NO: 2654 - DNA, 677 bp, Artificial
  Mutations within GlyA3B4 introduced by GmGlyA3B4_T02TALE nuclease
gttcatgtacggttgcagatataaacgaagcatagcttatgtatgaggtgtaacaaaattggaaacaatagccatgcaaggtgaagaatgtcaccaactcagaaacccttcttcattgacgtgtccctcactcactctcctctcttcactataaatcgccactcttcgtgttctccacttcaccaactccttcaaacttattaacactttccttagttcaatatggggaagcccttcttcactctctctctttcttccctttgcttgctactcttgtcgagtgcattggccaccacctgctccggggtcaagccgtgggcctggcacagcaccggcaacagcgcctgcaccgtctccagcgcctgcttgccaccaatattgctggcgatggccaccacctgctccggggtcaagccgtgggcctggcacaacgagtgccaactcaacaacctcaacgcgttggaaccgaccaccgcgttgagtccgaaggtggtcttattgaacatggaactctcaacacctgagctgcaatgcgccggtgtcactgtttccaaacgcaccctcaaccgcaacggcctccatcttgccatcttactcaccttatcccaaaatgatcattgtcgttcaaggtgcgtaatcattagtaagaagtattatcaagcttaacgtgataacaa

SEQ ID NO: 2655 - DNA, 666 bp, Artificial
  Mutations within GlyA3B4 introduced by GmGlyA3B4_T02TALE nuclease
gttcatgtacggttgcagatataaacgaagcatagcttatgtatgaggtgtaacaaaattggaaacaatagccatgcaaggtgaagaatgtcaccaactcagaaacccttcttcattgacgtgtccctcactcactctcctctcttcactataaatcgccactcttcgtgttctccacttcaccaactccttcaaacttattaacactttccttagttcaatatggggaagcccttcttcactctctctctttcttccctttgcttgctactcttgtcgagtgcatgctattacctccagcaagttcaacgagtgccaactcaacaacctcaacgcgttggaacccgaccaccgcgttgagtccgaaggtggtcttattgaaacatggaactctcaacaccctgagctgcaatgcgccggtgtcactgtttccaaacgcaccctcaaccgcaacggcctccacttgccatcttactcaccttatccccaaatgatcattgtcgttcaaggtgcgtaatattagtaagagtatttatcagcttaacgtgataacaataatagtaatatgaaatatttattaaatttttataattaatctctgctagaaaatttgattaatcattttagtagaatttgtttttctcaactaggtttttaaacaccaca

SEQ ID NO: 2656 - DNA, 662 bp, Artificial; identical to SEQ ID NO: 1800
  Mutations within GlyA3B4 introduced by GmGlyA3B4_T02TALE nuclease

SEQ ID NO: 2657 - DNA, 575 bp, Artificial
  Mutations within GlyA3B4 introduced by GmGlyA3B4_T02TALE nuclease
gttcatgtacggttgcagatataaacgaagcatagcttatgtatgaggtgtaacaaaattggaaacaatagccatgcaaggtgaagaatgtcaccaactcagaaacccttcttcattgacgtgtccctcactcactctcctctcttcactataaatcgccactcttcgtgttctccacttcaccaactccttcaaacttattaacactttccttagttcaatatggggaagcccttcttcactctctctctttcttccctttgcttgctactcttgtcgagtgccaactcaacaacctcaacgcgttggaacccgaccaccgcgttgagtccgaaggtggtcttattgaaacatggaactctcaacaccctgagctgcaatgcgccggtgtcactgtttccaaacgcaccctcaaccgcaacggcctccacttgccatcttactcaccttatccccaaatgatcattgtcgttcaaggtgcgtaatattagtaagaagtatttatcagcttaacgtgataacaataatagtaatatgaaatatttattaaattttttataattaatctctgctag

SEQ ID NO: 2658 - DNA, 667 bp, Artificial; identical to SEQ ID NO: 1838
  Mutations within GlyA3B4 introduced by GmGlyA3B4_T02TALE nuclease

SEQ ID NO: 2659 - DNA, 636 bp, Artificial; identical to SEQ ID NO: 1885
  Mutations within GlyA3B4 introduced by GmGlyA3B4_T02TALE nuclease

SEQ ID NO: 2660 - DNA, 663 bp, Artificial; identical to SEQ ID NO: 2559
  Mutations within GlyA3B4 introduced by GmGlyA3B4_T02TALE nuclease

SEQ ID NO: 2661 - DNA, 656 bp, Artificial
  Mutations within GlyA3B4 introduced by GmGlyA3B4_T02TALE nuclease
gttcatgtacggttgcagatataaacgaagcatagcttatgtatgaggtgtaacaaaattggaaacaatagccatgcaaggtgaagaatgtcaccaactcagaaacccttcttcattgacgtgtccctcactcactctcctctcttcactataaatcgccactcttcgtgttctccacttcaccaactccttcaaacttattaacactttccttagttcaatatggggaagcccttcttcactctctctctttcttccctttgcttgctactcttgtcgagtgcatattacctccagcaagttcaacgagtgccaactcaacaacctcaacgcgttggaacccgaccaccgcgttgagtccgaaggtggtcttattgaaacatggaactctcaacaccctgagctgcaatgcgccggtgtcactgtttccaaacgcaccctcaaccgcaacggcctccacttgccatcttactcaccttatccccaaatgatcattgtcgttcaaggtgcgtaatattagtaagaagtatttatcagcttaacgtgataacaataatagtaatatgaaatatttattaaatttttataattaatctctgctagaaaatttgattaatcattttagtagaatttgttttctcaactaggttttaaaa

SEQ ID NO: 2662 - DNA, 662 bp, Artificial
  Mutations within GlyA3B4 introduced by GmGlyA3B4_T02TALE nuclease
gttcatgtacggttgcagatataaacgaagcatagcttatgtatgaggtgtaacaaaattggaaacaatagccatgcaaggtgaagaatgtcaccaactcagaaacccttcttcattgacgtgtccctcactcactctcctctcttcactataaatcgccactcttcgtgttctccacttcaccaactccttcaaacttattaacactttccttagttcaatatggggaagcccttcttcactctctctctttcttccctttgcttgctactcttgtcgagtgcatttacctccagcaagttcaacgagtgccaactcaacaacctcaacgcgttggaacccgaccaccgcgttgagtccgaaggtggtcttattgaaacatggaactctcaacaccctgagctgcaatgcgccggtgtcactgtttccaaacgcaccctcaaccgcaacggcctccacttgccatcttactcaccttatccccaaatgatcattgtcgttcaaggtgcgtaatattagtaagaagtatttatcagcttaacgtgataacaataatagtaatatgaaatatttattaaatttttataattaatctctgctagaaaatttgattaatcattttagtagaatttgtttttctcaactaggtttttaaaacacca

SEQ ID NO: 2663 - DNA, 656 bp, Artificial
  Mutations within GlyA3B4 introduced by GmGlyA3B4_T02TALE nuclease
gttcatgtacggttgcagatataaacgaagcatagcttatgtatgaggtgtaacaaaattggaaacaatagccatgcaaggtgaagaatgtcaccaactcagaaacccttcttcattgacgtgtccctcactcactctcctctcttcactataaatcgccactcttcgtgttctccacttcaccaactccttcaaacttattaacactttccttagttcaatatgggggaagcccttcttcactctctctctttcttccctttgcttgctactcttgtcgagtgcatgctattacctccagcaagttcaacgagtgccaactcaacaacctcaacgcgttggaacccgaccaccgcgttgagtccgaaggtggtcttattgaaacatggaactctcaacaccctgagctgcaatgcgccggtgtcactgtttccaaacgcaccctcaaccgcaacggcctccacttgccatcttactcaccttatccccaaatgatcattgtcgttcaaggtgcgtaatattagtaagagtatttatcagcttaacgtgataacaatatagtaatatgaaatatttattaaatttttataattaatctctgctagaaaatttgattaatcattttagtagaatttgtttttctcaactaggttttt

SEQ ID NO: 2664 - DNA, 659 bp, Artificial
  Mutations within GlyA3B4 introduced by GmGlyA3B4_T02TALE nuclease
gttcatgtacggttgcagatataaacgaagcatagcttatgtatgaggtgtaacaaaattggaaacaatagccatgcaaggtgaagaatgtcaccaactcagaaacccttcttcattgacgtgtccctcactcactctcctctcttcactataaatcgccactcttcgtgttctccacttcaccaactccttcaaacttattaacactttccttagttcaatatggggaagcccttcttcactctctctctttcttccctttgcttgctactcttgtctattacctccagcaagttcaacgagtgccaactcaacaacctcaacgcgttggaacccgaccaccgcgttgagtccgaaggtggtcttattgaaacatggaactctcaacaccctgagctgcaatgcgccggtgtcactgtttccaaacgcaccctcaaccgcaacggcctccacttgccatcttactcaccttatcccccaaatgatcattgtcgttcaaggtgcgtaaatattagtaagaagtatttatcagcttaacgtgataacaataatagtaatatgaaatatttattaaattttttataattaatctctgctagaaaatttgattaatctttttagtagaattgttttttctcaactaggtttaaaacaccaca

SEQ ID NO: 2665 - DNA, 601 bp, Artificial
  Mutations within GlyA3B4 introduced by GmGlyA3B4_T02TALE nuclease
gttcatgtacggttgcagatataaacgaagcatagcttatgtatgaggtgtaacaaaattggaaacaatagccatgcaaggtgaagaatgtcaccaactcagaaacccttcttcattgacgtgtccctcactcactctcctctcttcactataaatcgccactcttcgtgttctccacttcaccaactccttcaaacttattaacactttccttagttcaatatggggaagcccttcttcactctctctccagcaagttcaacgagtgccaactcaacaacctcaacgcgttggaacccgaccaccgcgttgagtccgaaggtggtcttattgaaacatggaactctcaacaccctgagctgcaatgcgccggtgtcactgtttccaaacgcaccctcaaccgcaacggcctccacttgccatcttactcaccttatccccaaatgatcattgtcgttcaaggtgcgtaatattagtaagaagtatttatcagcttaacgtgataacaataatagtaatatgaaatatttattaattttttataattaatctctgctagaaatttgattaatcatttttagtagaatttgtttttctcaac

SEQ ID NO: 2666 - DNA, 665 bp, Artificial
  Mutations within GlyA3B4 introduced by GmGlyA3B4_T02TALE nuclease
  misc_feature (532): n is a or c or t or g
gttcatgtacggttgcagatataaacgaagcatagcttatgtatgaaggtgtaacaaaattggaaacaatagccatgcaaggtgaagaatgtcaccaactcagaaacccttcttcattgacgtgtccctcactcactctcctctcttcactataaatcgccactcttcgtgttctccacttcaccaactccttcaaacttattaacactttccttagttcaatatggggaagcccttcttcactctctctctttcttccctttgcttgctactcttgtcgagtgcttgctattacctccagcaagttcaacgagtgccaactcaacaacctcaacgcgttggaacccgaccaccgcgttgagtccgaaggtggtcttattgaaacatggaactctcaacaccctgagctgcaatgcgccggtgtcactgtttccaaacgcaccctcaaccgcaacggcctccacttgccatcttactcaccttatccccaaatgatcattgtcgttcaaggtgcgtaatattagtaagaagnatttatcagcttaacgtgataacaataatagtaatatgaaatatttattaaatttttataattaatctctgctagaaaatttgattaatcattttagtagaatttgttttctcaactaggttttaaaacacca

SEQ ID NO: 2667 - DNA, 651 bp, Artificial
  Mutations within GlyA3B4 introduced by GmGlyA3B4_T02TALE nuclease
gttcatgtacggttgcagatataaacgaagcatagcttatgtatgaggtgtaacaaaattggaaacaatagccatgcaaggtgaagaatgtcaccaactcagaaacccttcttcattgacgtgtccctcactcactctcctctcttcactataaatcgccactcttcgtgttctccacttcaccaactccttcaaacttattaacactttccttagttcaatatggggaagcccttcttcactctctctctttcttccctttgcttgctactcttgtcgagtgcactattacctccagcaagttcaacgagtgccaactcaacaacctcaacgcgttggaacccgaccaccgcgttgagtccgaaggtggtctttattgaaacatggaactctcaacaccctgagctgcaatgcgccggtgtcactgtttccaaacgcaccctcaaccgcaacggcctccacttgccatcttactcaccttatccccaaatgatcattgtcgttcaaggtgcgtaatattagtaagaagtatttatcagcttaacgtgataacaataatagtaatatgaaatatttattaaatttttataattaatctctgctagaaaatttgattaatcattttagtagaatttgtttttctcaactagg

SEQ ID NO: 2668 - DNA, 669 bp, Artificial
  Mutations within GlyA3B4 introduced by GmGlyA3B4_T02TALE nuclease
gttcatgtacggttgcagatataaacgaagcatagcttatgtatgaggtgtaacaaaattggaaacaatagccatgcaaggtgaagaatgtcaccaactcagaaacccttcttcattgacgtgtccctcactcactctcctctcttcactataaatcgccactcttcgtgttctccacttcaccaactccttcaaacttattaacactttccttagttcaatatggggaagcccttcttcactctctctctttcttccctttgcttgctactcttgtcgagtgcatacctccagcaagttcaacgagtgccaactcaacaacctcaacgcgttggaacccgaccaccgcgttgagtccgaaggtggtcttattgaaacatggaactctcaacaccctgagctgcaatgcgccggtgtcactgtttccaaaacgcaccctcaaccgcaacggcctccaacgcttgccatctttcaatctcaccttatccccaactgaattcattgtcgttcaaggtgcgtaatattagtaagaagtatttatcagcttaacgtgataacaataatagtaatatgaaatatttattaaatttttataattaatctctgctagaaaatttgattaatcattttagtagaatttgtttttctcaactaggttttaaaacacca

SEQ ID NO: 2669 - DNA, 717 bp, Artificial
  Mutations within GlyA3B4 introduced by GmGlyA3B4_T02TALE nuclease
gttcatgtacggttgcagatataaacgaagcatagcttatgtatgaggtgtaacaaaattggaaacaatagccatgcaaggtgaagaatgtcaccaactcagaaacccttcttcattgacgtgtccctcactcactctcctctcttcactataaatcgccactcttcgtgttctccacttcaccaactccttcaaacttattaacactttccttagttcaatatggggaagcccttcttcactctctctctttcttccctttgcttgctactcttgtcgagtgccctggcacagcaccggcaacagcgcctgcaccgtctccagcgcctgcttgccaccaatattgctggcgatggccaccaccttgctattacctccagcaagttcaacgagtgccactcaacacctcacgcgttggaacccgaccaccgcgttgagtccgaaggtggtcttattgaaacatggaactctcaacaccctgagctgcaatgcgccggtgtcactgtttccaaacgcaccctcaaccgcaacggcctccacttgccatcttactcaccttatccccaaatgatcattgtcgttcaaggtgcgtaatattacgtaagaagtatttatcgcttaacgtgataacaataatagtaatatgaaaatatttattaaattttttataattaatctctgctagaaaatttgattaatcatttttagtagaatttg

SEQ ID NO: 2670 - DNA, 619 bp, Artificial
  Mutations within GlyA3B4 introduced by GmGlyA3B4_T02TALE nuclease
gttcatgtacggttgcagatataaacgaagcatagcttatgtatgaggtgtaacaaaattggaaacaatagccatgcaaggtgaagaatgtcaccaactcagaaacccttcttcattgacgtgtccctcactcactctcctctcttcactataaatcgccactcttcgtgttctccacttcaccaactccttcaaacttattaacactttccttagttcaatatggggaagcccttcttcactctctctctttcttccctttgcttgctactcttgtcgagtgcctgcaagttcaacgagtgccaactcaacaacctcaacgcgttggaacccgaccaccgcgttgagtccgaaggtggtcttattgaaacatggaactctcaacaccctgagctgcaatgcgccggtgtcactgtttccaaacgcacctcaaccgcaacggcctccacttgccatcttactcaccttatcccccaaatgatcattgtcgttcaaggtgcgtaatattagtaagaagtatttatcagcttaacgtgataacaataatagtaatatgaaatatttattaaattttttataattaatctctgctagaaaatttgattaatctttttagtag

SEQ ID NO: 2671 - DNA, 654 bp, Artificial
  Mutations within GlyA3B4 introduced by GmGlyA3B4_T02TALE nuclease
gttcatgtacggttgcagatataaacgaagcatagcttatgtatgaggtgtaacaaaattggaaacaatagccatgcaaggtgaagaatgtcaccaactcagaaacccttcttcattgacgtgtccctcactcactctcctctcttcactataaatcgccactcttcgtgttctccacttcaccaactccttcaaacttattaacactttccttagttcaatatggggaagcccttcttcactctctctctttcttccctttccttcaaacttattacctccagcaagttcaacgagtgccaactcaacaacctcaacgcgttggaacccgaccaccgcgttgagtccgaaggtggtcttattgaaacatggaactctcaacaccctgagctgcaatgcgccggtgtcactgtttccaaacgcaccctcaaccgcaacggcctccacttgccatcttactcaccttatccccaaatgatcattgtcgttcaaggtgcgtaatattagtaagaagtatttatcagcttaacgtgataacaataatagtaatatgaaatatttattaaattttttataattaatctctgctagaaaatttgattaatcatttttagtagaatttgttttttctcaactaggttttaaaacaccaca

SEQ ID NO: 2672 - DNA, 664 bp, Artificial
  Mutations within GlyA3B4 introduced by GmGlyA3B4_T02TALE nuclease
  misc_feature (529): n is a or c or t or g
gttcatgtacggttgcagatataaacgaagcatagcttatgtatgaggtgtaacaaaattggaaacaatagccatgcaaggtgaagaatgtcaccaactcagaaacccttcttcattgacgtgtccctcactcactctcctctcttcactataaatcgccactcttcgtgttctccacttcaccaactccttcaaacttattaacactttccttagttcaatatggggaagcccttcttcactctctctctttcttccctttgcttgctactcttgtcgagtgcttgctattacctccagcaagttcaacgagtgccaactcaacaacctcaacgcgttggaaccgaccaccgcgttgagtccgaaggtggtcttattgaaacatggaactctcaacaccctgagctgcaatgcgccggtgtcactgtttccaaacgcaccctcaaccgcaacggcctccacttgccatcttactcaccttatccccaaatgatcattgtcgttcaaggtgcgtaatattagtaagagnatttatcagcttaacgtgataacaatatagtaatatgaaatatttattaaatttttataattaatctctgctagaaaatttgattaatcattttagtagaatttgttttctcaactaggtttttaaaacaccaca

SEQ ID NO: 2673 - DNA, 532 bp, Artificial
  Mutations within GlyA3B4 introduced by GmGlyA3B4_T02TALE nuclease
gttcatgtacggttgcagatataaacgaagcatagcttatgtatgaggtgtaacaaaattggaaacaatagccatgcaaggtgaagaatgtcaccaactcagaaacccttcttcattgacgtgtccctcactcactctcctctcttcactataaatcgccactcttcgtgttctccacttcaccagcaagttcaacgagtgccaactcaacaacctcaacgcgttggaacccgaccaccgcgttgagtccgaagtggtcttattgaaacatggaactctcaacaccctgagctgcaatgcgccggtgtcactgtttccaaacgcaccctcaaccgcaacggcctccacttgccatcttactcaccttatccccaaatgatcattgtcgttcaaggtgcgtaatattagtaagaagtatttatcagcttaacgtgataacaataatagtaatatgaaatatttattaaattttttataattaatctctgctagaaaatttgattaatcatttttagtagaatttgtttttctc

SEQ ID NO: 2674 - DNA, 646 bp, Artificial
  Mutations within GlyA3B4 introduced by GmGlyA3B4_T02TALE nuclease
  misc_feature (545): n is a or c or t or g
gttcatgtacggttgcagatataaacgaagcatagcttatgtatgaggtgtaacaaaattggaaacaatagccatgcaaggtgaagaatgtcaccaactcagaaacccttcttcattgacgtgtccctcactcactctcctctcttcactataaatcgccactcttcgtgttctccacttcaccaactccttcaaacttattaacactttccttagttcaatatggggaagcccttcttcactctctctctttcttccctttgcttgctactcttgtcgagttcaacgagtgccaactcaacaacctcaacgcgttggaacccgaccaccgcgttgagtccgaaggtggtcttattgaaacatggaactctcaacaccctgagctgcaatgcgccggtgtcactgtttccaaacgcaccctcaaccgcaacggcctccacttgccatcttactcaccttatcccccaaatgatcattgtcgttcaaggtgcgtaatattagtaagaagtatttatcagcttaacgtgataacaataatagtaatntgaaatatttattaaattttttataattaatctctgctagaaaatttgattaatctttttagtagaatttgttttttctcaactaggttttaaacaccaca

SEQ ID NO: 2675 - DNA, 661 bp, Artificial
  Mutations within GlyA3B4 introduced by GmGlyA3B4_T02TALE nuclease
gttcatgtacggttgcagatataaacgaagcatagcttatgtatgaggtgtaacaaaattggaaacaatagccatgcaaggtgaagaatgtcaccaactcagaaacccttcttcattgacgtgtccctcactcactctcctctcttcactataaatcgccactcttcgtgttctccacttcaccaactccttcaaacttattaacactttccttagttcaatatggggaagcccttcttcactctctctctttcttccctttgcttgctactcatgctttctattacctccagcaagttcaacgagtgccaactcaacaacctcaacgcgttggaacccgaccaccgcgttgagtccgaaggtggtcttattgaaacatggaactctcaacacccctgagctgcaatgcgccggtgtcactgtttccaaacgcaccctcaaccgcaacggcctccacttgccatcttactcaccttatcccccaaatgatcattgtcgttcaaggtgcgtaaatattagtaagaagtatttatcagcttaacgtgataacaataatagtaatatgaaatatttattaaattttttataattaatctctgctagaaaatttgattaatctttttagtagaattgttttttctcaactaggtttaaaacacca

SEQ ID NO: 2676 - DNA, 652 bp, Artificial
  Mutations within GlyA3B4 introduced by GmGlyA3B4_T02TALE nuclease
gttcatgtacggttgcagatataaacgaagcatagcttatgtatgaggtgtaacaaaattggaaacaatagccatgcaaggtgaagaatgtcaccaactcagaaacccttcttcattgacgtgtccctcactcactctcctctcttcactataaatcgccactcttcgtgttctccacttcaccaactccttcaaacttattaacactttccttagttcaatatggggaagcccttcttcactctctctctttcttccctttgcttgctactcttgtcgagtgcactattacctccagcaagttcaacgagtgccaactcaacaacctcaacgcgttggaacccgaccaccgcgttgagtccgaaggtggtcttattgaaacatggaactctcaacaccctgagctgcaatgcgccggtgtcactgtttccaaacgcaccctcaaccgcaacggcctccacttgccatcttactcaccttatccccaaatgatcattgtcgttcaaggtgcgtaatattagtaagaagtatttatcagcttaacgtgataacaatatagtaatatgaaatatttattaaatttttataattaatctctgctagaaaatttgattaatcattttagtagaatttgttttctcaactaggtttt

SEQ ID NO: 2677 - DNA, 502 bp, Artificial; identical to SEQ ID NO: 1979
  Mutations within GlyA3B4 introduced by GmGlyA3B4_T02TALE nuclease

SEQ ID NO: 2678 - DNA, 659 bp, Artificial
  Mutations within GlyA3B4 introduced by GmGlyA3B4_T02TALE nuclease
gttcatgtacggttgcagatataaacgaagcatagcttatgtatgaggtgtaacaaaattggaaacaatagccatgcaaggtgaagaatgtcaccaactcagaaacccttcttcattgacgtgtccctcactcactctcctctcttcactataaatcgccactcttcgtgttctccacttcaccaactccttcaaacttattaacactttccttagttcaatatggggaagcccttcttcactctctctctttcttccctttgcttgctactcttgtcgagtgcatgctattacctccagcaagttcaacgagtgccaactcaacaacctcaacgcgttggaacccgaccaccgcgttgagtccgaaggtggtcttattgaaacatggaactctcaacaccctgagctgcaatgcgccggtgtcactgtttccaaacgcaccctcaaccgcaacggcctccacttgccatcttactcaccttatccccaaatgatcattgtcgttcaaggtgcgtaatattagtaagagtatttatcagcttaacgtgataacaataatagtaatatgaaatatttattaaatttttataattaatctctgctagaaaatttgattaatcattttagtagaatttgtttttctcaactaggttttaaaa

SEQ ID NO: 2679 - DNA, 520 bp, Artificial
  Mutations within GlyA3B4 introduced by GmGlyA3B4_T02TALE nuclease
gttcatgtacggttgcagatataaacgaagcatagcttatgtatgaggtgtaacaaaattggaaacaatagccatgcaaggtgaagaatgtcaccaactcagaaacccttcttcattgacgtgtccctcactcactctcctctcttcactataaatcgccactcttcgttattacctccagcaagttcaacgagtgccaactcaacaacctcaacgcgttggaacccgaccaccgcgttgagtccgaaggtggtcttattgaaacatggaactctcaacaccctgagctgcaatgcgccggtgtcactgtttccaaacgcaccctcaaccgcaacggcctccacttgccatcttactcaccttatccccaaatgatcattgtcgttcaaggtgcgtaatattagtaagaagtattttatcagcttaacgtgataacaataatagtaatatgaaaatattttattaaattttttataattaatctctgctagaaaatttgattaatcattttttagtagaa

SEQ ID NO: 2680 - DNA, 669 bp, Artificial
  Mutations within GlyA3B4 introduced by GmGlyA3B4_T02TALE nuclease
gttcatgtacggttgcagatataaacgaagcatagcttatgtatgaggtgtaacaaaattggaaacaatagccatgcaaggtgaagaatgtcaccaactcagaaacccttcttcattgacgtgtccctcactcactctcctctcttcactataaatcgccactcttcgtgttctccacttcaccaactccttcaaacttattaacactttccttagttcaatatggggaagcccttcttcactctctctctttcttccctttgcttgctactcttgtcgagtgcatattacctccagcaagttcaacgagtgccaactcaacaacctcaacgcgttggaacccgaccaccgcgttgagtccgaaggtggtcttattgaaacatggaactctcaacaccctgagctgcaatgcgccggtgtcactgtttccaaacgcaccctcaaccgcaacggcctccacttgccatcttactcaccttatccccaaatgatcattgtcgttcaaggtgcgtaatattagtaagaagtatttatcagcttaacgtgataacaataatagtaatatgaaatatttattaaatttttataattaatctctgctagaaaatttgattaatcattttagtagaatttgttttctcaactaggtttttaaaacaccacacttga

SEQ ID NO: 2681 - DNA, 605 bp, Artificial
  Mutations within GlyA3B4 introduced by GmGlyA3B4_T02TALE nuclease
gttcatgtacggttgcagatataaacgaagcatagcttatgtatgaggtgtaacaaaattggaaacaatagccatgcaaggtgaagaatgtcaccaactcagaaacccttcttcattgacgtgtccctcactcactctcctctcttcactataaatcgccactcttcgtgttctccacttcaccaactccttcaaacttattaacactttccttagttcaatatggggaagcccttcttcactctctctcttacctccagcaagttcaacgagtgccaactcaacaacctcaacgcgttggaacccgaccaccgcgttgagtccgaaggtggtcttattgaaacatggaactctcaacaccctgagctgcaatgcgccggtgtcactgtttccaaacgcaccctcaaccgcaacggcctccacttgccatcttactcaccttatcccccaaatgatcattgtcgttcaaggtgcgtaatattagtaagaagtatttatcagcttaacgtgataacaataatagtaatatgaaatatttattaattttttataattaatctctgctagaaaatttgattaatcatttttagtagaatttgtttttc

SEQ ID NO: 2682 - DNA, 616 bp, Artificial
  Mutations within GlyA3B4 introduced by GmGlyA3B4_T02TALE nuclease
gttcatgtacggttgcagatataaacgaagcatagcttatgtatgaggtgtaacaaaattggaaacaatagccatgcaaggtgaagaatgtcaccaactcagaaacccttcttcattgacgtgtccctcactcactctcctctcttcactataaatcgccactcttcgtgttctccacttcaccaactccttcaaacttattaacactttccttagttcaatatggggaagcccttcttcactctctctctttcttacctccagcaagttcaacgagtgccaactcaacaacctcaacgcgttggaacccgaccaccgcgttgagtccgaaggtggtctattgaaacatggaactctcaacaccctgagctgcaatgcgccggtgtcactgtttccaaacgcaccctcaaccgcaacggcctccacttgccatcttactcaccttatcccccaaatgatcattgtcgttcaaggtgcgtaatatttagtaagaagtatttatcagcttaacgtgataacaataatagtaatatgaaatatttattaaattttttataattaatctctgctagaaaatttgattaatcatttttagtagaatttgtttttctcaact

SEQ ID NO: 2683 - DNA, 662 bp, Artificial; identical to SEQ ID NO: 2192
  Mutations within GlyA3B4 introduced by GmGlyA3B4_T02TALE nuclease

SEQ ID NO: 2684 - DNA, 652 bp, Artificial
  Mutations within GlyA3B4 introduced by GmGlyA3B4_T02TALE nuclease
gttcatgtacggttgcagatataaacgaagcatagcttatgtatgaggtgtaacaaaattggaaacaatagccatgcaaggtgaagaatgtcaccaactcagaaacccttcttcattgacgtgtccctcactcactctcctctcttcactataaatcgccactcttcgtgttctccacttcaccaactccttcaaacttattaacactttccttagttcaatatggggaagcccttcttcactctctctctttcttccctttgcttgctactcttgtcgagtgcatctattacctccagcaagttcaacgagtgccaactcacaacctcaacgcgttggaacccgaccaccgcgttgagtccgaaggtggtcttattgaaacatggaactctcaacaccctgagctgcaatgcgccggtgtcactgtttccaaacgcaccctcaaccgcaacggcctccacttgccatcttactcaccttatccccaaatgatcattgtcgttcaaggtgcgtaatattagtaagaagtatttatcagcttaacgtgataacaatatagtaatatgaaatatttattaaatttttataattaatctctgctagaaaatttgattaatcattttagtagaatttgttttctcaactaggtttt

SEQ ID NO: 2685 - DNA, 638 bp, Artificial
  Mutations within GlyA3B4 introduced by GmGlyA3B4_T02TALE nuclease
gttcatgtacggttgcagatataaacgaagcatagcttatgtatgaggtgtaacaaaattggaaacaatagccatgcaaggtgaagaatgtcaccaactcagaaacccttcttcattgacgtgtccctcactcactctcctctcttcactataaatcgccactcttcgtgttctccacttcaccaactccttcaaacttattaacactttccttagttcaatatggggaagcccttcttcactctctctctttcttccctttgcttgctactcttgtcgagtgcatctattacctccagcaagttcaacgagtgccaactcaacaacctcaacgcgttggaacccgaccaccgcgttgagtccgaaggtggtcttattgaaacatggaactctcaacaccctgagctgcaatgcgccggtgtcactgtttccaaacgcaccctcaaccgcaacggcctcccacttgccatcttactcaccttatcccccaaatgatcattgtcgttcaaggtgcgtaatattagtaagaagtatttatcagcttaacgtgataacaataatagtaatatgaaatatttattaaatttttataattaatctctgctagaaaatttgattaatcattttagtagaatttg

SEQ ID NO: 2686 - DNA, 630 bp, Artificial
  Mutations within GlyA3B4 introduced by GmGlyA3B4_T02TALE nuclease
gttcatgtacggttgcagatataaacgaagcatagcttatgtatgaggtgtaacaaaattggaaacaatagccatgcaaggtgaagaatgtcaccaactcagaaacccttcttcattgacgtgtccctcactcactctcctctcttcactataaatcgccactcttcgtgttctccacttcaccaactccttcaaacttattaacactttccttagttcaatatggggaagcccttcttcactctctctctttcttccctttgcttgctactcttgtcaacgagtgccaactcaacaacctcaacgcgttggaacccgaccaccgcgttgagtccgaaggtggtcttattgaaacatggaactctcaacaccctgagctgcaatgcgccggtgtcactgtttccaaacgcaccctcaaccgcaacggcctccacttgccatcttactcaccttatccccaaatgatcattgtcgttcaaggtgcgtaatattagtaagaagtatttatcagcttaacgtgataacaataatagtaatatgaaatatttattaaattttttataattaatctctgctagaaaatttgattaatcatttttagtagaatttgttttttctcaactaggtttt

SEQ ID NO: 2687 - DNA, 740 bp, Artificial
  Mutations within GlyA3B4 introduced by GmGlyA3B4_T02TALE nuclease
  misc_feature (664): n is a or c or t or g
gttcatgtacggttgcagatataaacgaagcatagcttatgtatgaggtgtaacaaaattggaaacaatagccatgcaaggtgaagaatgtcaccaactcagaaacccttcttcattgacgtgtccctcactcactctcctctcttcactataaatcgccactcttcgtgttctccacttcaccaactccttcaaacttattaacactttccttagttcaatatggggaagcccttcttcactctctctctttcttccctttgcttgctactcttgtcgagtgcatgcctgcttgccaccgccattgctggcgatggccaccacctgctgggggtcaagccgtgggcctggcacagcaccggcaacagccgctggactacctccagcaagttcaacgagtgccaactcaacaacctcaacgcgttggaacccgaccaccgcgttgagtccgaaggtggtcttattgaaacatggaactctcaacaccctgagctgcaatgcgccggtgtcactgtttccaaacgcaccctcaaccgcaacggcctccacttgccatcttactcaccttatccccaaatgatcattgtcgttcaaggtgcgtaatattagtaagaagtatttatcgcttaacgtgataacaataatagtaatatgaaaatatttnttaaattttttataattaatctctgctagaaaatttgattaatcatttttagtagaatttgtttttctcaactagg

SEQ ID NO: 2688 - DNA, 665 bp, Artificial
  Mutations within GlyA3B4 introduced by GmGlyA3B4_T02TALE nuclease
gttcatgtacggttgcagatataaacgaagcatagcttatgtatgaggtgtaacaaaattggaaacaatagccatgcaaggtgaagaatgtcaccaactcagaaacccttcttcattgacgtgtccctcactcactctcctctcttcactataaatcgccactcttcgtgttctccacttcaccaactccttcaaacttattaacactttccttagttcaatatggggaagcccttcttcactctctctctttcttccctttgcttgctactcttgtcgagtgcatgctattacctccagcaagttcaacgagtgccaactcaacaacctcaacgcgttggaacccgaccaccgcgttgagtccgaaggtggtcttattgaaacatggaactctcaacaccctgagctgcaatgcgccggtgtcactgtttccaaacgcaccctcaaccgcaacggcctccacttgccatcttactcaccttatccccaaatgatcattgtcgttcaaggtgcgtaatattagtaagagtatttatcagcttaacgtgataacaatatagtaatatgaaatatttattaaatttttataattaatctctgctagaaaatttgattaatcattttagtagaatttgtttttctcaactaggtttttaaacaccaca

SEQ ID NO: 2689 - DNA, 588 bp, Artificial
  Mutations within GlyA3B4 introduced by GmGlyA3B4_T02TALE nuclease
gttcatgtacggttgcagatataaacgaagcatagcttatgtatgaggtgtaacaaaattggaaacaatagccatgcaaggtgaagaatgtcaccaactcagaaacccttcttcattgacgtgtccctcactcactctcctctcttcactataaatcgccactcttcgtgttctccacttcaccaactccttcaaacttattaacactttccttagttcaatatggggaagcccttcttcactctctctctttcttccctttgcttgctactcttgtctattacctccagcaagttcaacgagtgccaactcaacaacctcaacgcgttggaacccgaccaccgcgttgagtccgaaggtggtcttattgaaacatggaactctcaacaccctggagctgcaatcgcgccggtgtcacttgttccaaacgcaccctcaaccgcaacggcctccacttgccatcttactcaccttatccccaaatgatcattgtcgttcaaggtgcgtaaatattagtaagaagtatttatcagcttaacgtgataacaataatagtaatatgaaatatttattaaattttttataatt

SEQ ID NO: 2690 - DNA, 663 bp, Artificial; identical to SEQ ID NO: 2092
  Mutations within GlyA3B4 introduced by GmGlyA3B4_T02TALE nuclease

SEQ ID NO: 2691 - DNA, 655 bp, Artificial
  Mutations within GlyA3B4 introduced by GmGlyA3B4_T02TALE nuclease
gttcatgtacggttgcagatataaacgaagcatagcttatgtatgaggtgtaacaaaattggaaacaatagccatgcaaggtgaagaatgtcaccaactcagaaacccttcttcattgacgtgtccctcactcactctcctctcttcactataaatcgccactcttcgtgttctccacttcaccaactccttcaaacttattaacactttccttagttcaatatggggaagcccttcttcactctctctctttcttccctttgcttgctactcttgtcgagtgcactattacctccagcaagttcaacgagtgccaactcaacaacctcaacgcgttggaacccgaccaccgcgttgagtccgaaggtggtcttattgaaacatggaactctcaacaccctgagctgcaatgcgccggtgtcactgtttccaaacgcaccctcaaccgcaacggcctccacttgccatcttactcaccttatccccaaatgatcattgtcgttcaaggtgcgtaatattagtaagaagtatttatcagcttaacgtgataacaatatagtaatatgaaatatttattaaatttttataattaatctctgctagaaaatttgattaatcattttagtagaatttgttttctcaactaggttttaaa

SEQ ID NO: 2692 - DNA, 643 bp, Artificial
  Mutations within GlyA3B4 introduced by GmGlyA3B4_T02TALE nuclease
gttcatgtacggttgcagatataaacgaagcatagcttatgtatgaggtgtaacaaaattggaaacaatagccatgcaaggtgaagaatgtcaccaactcagaaacccttcttcattgacgtgtccctcactcactctcctctcttcactataaatcgccactcttcgtgttctccacttcaccaactccttcaaacttattaacactttccttagttcaatatggggaagcccttcttcactctctctctttcttccctttgcttgctactcttgtctattacctccagcaagttcaacgagtgccaactcaacaacctcaacgcgttggaacccgaccaccgcgttgagtccgaaggtggtcttattgaaacatggaactctcaacaccctgagctgcaatgcgccggtgtcactgtttccaaacgcaccctcaaccgcaacggcctccacttgccatcttactcaccttatccccaaatgatcattgtcgttcaaggtgcgtaatattagtaagaagtatttatcagcttaacgtgataacaataatagtaatatgaaatatttattaaattttttataattaatctctgctagaaaatttgattaatctttttagtagaattgttttttctcaactagg

SEQ ID NO: 2693 - DNA, 459 bp, Artificial
  Mutations within GlyA3B4 introduced by GmGlyA3B4_T02TALE nuclease
gttcatgtacggttgcagatataaacgaagcatagcttatgtatgaggtgtaacaaaattggaaacaatagccatgcaaggtgaagaatgtcaccaactcagaaacccttcttcattgacgtgtccctcactcactctcctctcttcactataaatcgccactcttcgtgttctccacttcaccaactccttcaaacttattaacactttccttagttcaatatggggaagcccttcttcactctccctcaaccgcaacggcctccacttgccatcttactcaccttatccccaaatgatcattgtcgttcaaggtgcgtaatattagtaagaagtatttatcagcttaacgtgataacaataatagtaatatgaaatatttattaaattttttataattaatctctgctagaaaatttgattaatcatttttagtagaatttgtttttctcaactagg

SEQ ID NO: 2694 - DNA, 647 bp, Artificial
  Mutations within GlyA3B4 introduced by GmGlyA3B4_T02TALE nuclease
  misc_feature (512): n is a or c or t or g
gttcatgtacggttgcagatataaacgaagcatagcttatgtatgaggtgtaacaaaattggaaacaatagccatgcaaggtgaagaatgtcaccaactcagaaacccttcttcattgacgtgtccctcactcactctcctctcttcactataaatcgccactcttcgtgttctccacttcaccaactccttcaaacttattaacactttccttagttcaatatggggaagcccttcttcactctctctctttcttccctttgcttgctactcttgtcgagtgcattattacctccagcaagttcaacgagtgccaactcaacaacctcaacgcgttggaaacccgaccaccgcgttgagtccgaaggtggtcttattgaaacatggaactctcaacaccctgagctgcaatgcgccggtgtcactgtttccaaacgcaccctcaaccgcaacggcctccacttgccatcttactcaccttatcccccaaaatgatcattgtcgttcaaggngcgtaatattagtaagaagtatttatcagcttaacgtgataacaataatagtaatatgaaatatttattaaatttttataattaatctctgctagaaaatttgattaatcattttagtagaatttgttttctcaa

SEQ ID NO: 2695 - DNA, 590 bp, Artificial
  Mutations within GlyA3B4 introduced by GmGlyA3B4_T02TALE nuclease
gttcatgtacggttgcagatataaacgaagcatagcttatgtatgaggtgtaacaaaattggaaacaatagccatgcaaggtgaagaatgtcaccaactcagaaacccttcttcattgacgtgtccctcactcactctcctctcttcactataaatcgccactcttcgtgttctccacttcaccaactccttcaaacttattaacactttccttagttcaatatggggaagcccttcttcactctctcagtgacttgaatgtatttagaaaaataaacaaatagggttccgcgcaccttcaacgagtgccaactcaacaacctcaacgcgttggaacccgaccaccgcgttgagtccgaaggtggtcttattgaaacatggaactctcaacaccctgagctgcaatgcgccggtgtcactgtttccaaacgcaccctcaaccgcaacggcctccacttgccatcttactcaccttatcccccaaatgatcattgtcgttcaaggtgcgtaaatattagtaagaagtatttatcagcttaacgtgataacaataatagtaatatgaaatatttattaaattttttataatt

SEQ ID NO: 2696 - DNA, 615 bp, Artificial
  Mutations within GlyA3B4 introduced by GmGlyA3B4_T02TALE nuclease
gttcatgtacggttgcagatataaacgaagcatagcttatgtatgaggtgtaacaaaattggaaacaatagccatgcaaggtgaagaatgtcaccaactcagaaacccttcttcattgacgtgtccctcactcactctcctctcttcactataaatcgccactcttcgtgttctccacttcaccaactccttcaaacttattaacactttccttagttcaatatggggaagcccttcttcactctctctctttcttccctttgcttgctactcttgtcgagtgctacctccagcaagttcaacgagtgccaactcaacaacctcaacgcgttggaacccgaccaccgcgttgagtccgaaggtggtcttattgaaacatggaactctcaacaccctgagctgcaatgcgccggtgtcactgtttccaaacgcaccctcaaccgcaacggcctccacttgccatcttactcaccttatccccaaatgatcattgtcgttcaaggtgcgtaatattagtaagaagtatttatcagcttaacgtgataacaataatagtaatatgaaatatttattaaatttttataattaatctctgctagaaaatttgattaatca

SEQ ID NO: 2697 - DNA, 663 bp, Artificial
  Mutations within GlyA3B4 introduced by GmGlyA3B4_T02TALE nuclease
  misc_feature (528): n is a or c or t or g
gttcatgtacggttgcagatataaacgaagcatagcttatgtatgaggtgtaacaaaattggaaacaatagccatgcaaggtgaagaatgtcaccaactcagaaacccttcttcattgacgtgtccctcactcactctcctctcttcactataaatcgccactcttcgtgttctccacttcaccaactccttcaaacttattaacactttccttagttcaatatggggaagcccttcttcactctctctctttcttccctttgcttgctactcttgtcgagtgtgctattacctccagcaagttcaacgagtgccaactcaacaacctcaacgcgttggaacccgaccaccgcgttgagtccgaaggtggtcttattgaaacatggaactctcaacaccctgagctgcaatgcgccggtgtcactgtttccaaacgcaccctcaaccgcaacggcctccacttgccatcttactcaccttatccccaaatgattattgtcgttcaaggtgcgtaatattagtaagagnatttatcagcttaacgtgataacaataatagtaatatgaaatatttattaaatttttataattaatctctgctagaaaatttgattaatcattttagtagaatttgttttctcaactaggttttaaaacaccaca

SEQ ID NO: 2698 - DNA, 661 bp, Artificial; identical to SEQ ID NO: 2035
  Mutations within GlyA3B4 introduced by GmGlyA3B4_T02TALE nuclease

SEQ ID NO: 2699 - DNA, 659 bp, Artificial
  Mutations within GlyA3B4 introduced by GmGlyA3B4_T02TALE nuclease
gttcatgtacggttgcagatataaacgaagcatagcttatgtatgaggtgtaacaaaattggaaacaatagccatgcaaggtgaagaatgtcaccaactcagaaaccccttcttcattgacgtgtccctcactcactctcctctcttcactataaatcgccactcttcgtgttctccacttcaccaactccttcaaacttattaacactttccttagttcaatatggggaagcccttcttcactctctctctttcttccctttgcttgctactcttgtcgagtgcatgctattacctccagcaagttcaacgagtgccaactcaacaacctcaacgcgttggaacccgaccaccgcgttgagtccgaaggtggtcttattgaaacatggaactctcaacaccctgagctgcaatgcgccggtgtcactgtttccaaacgcaccctcaaccgcaacggcctccacttgccatcttactcaccttatccccaaatgatcattgtcgttcaaggtgcgtaatattagtaagagtatttatcagcttaacgtgataacaatatagtaatatgaaatatttattaaatttttataattaatctctgctagaaaatttgattaatcattttagtagaatttgttttctcaactaggtttttaaaa

SEQ ID NO: 2700 - DNA, 651 bp, Artificial
  Mutations within GlyA3B4 introduced by GmGlyA3B4_T02TALE nuclease
  misc_feature (530): n is a or c or t or g
gttcatgtacggttgcagatataaacgaagcatagcttatgtatgaggtgtaacaaaattggaaacaatagccatgcaaggtgaagaatgtcaccaactcagaaacccttcttcattgacgtgtccctcactcactctcctctcttcactataaatcgccactcttcgtgttctccacttcaccaactccttcaaacttattaacactttccttagttcaatatggggaagcccttcttcactctctctctttcttccctttgcttgctactcttgtcgagtgcatgctattacctccagcaagttcaacgagtgccaactcaacaacctcaacgcgttggaacccgaccaccgcgttgagtccgaaggtggtcttattgaaacatggaactctcaacaccctgagctgcaatgcgccggtgtcactgtttccaaacgcaccctcaaccgcaacggcctccacttgccatcttactcaccttatccccaaatgatcattgtcgttcaaggtgcgtaatattagtaagagnatttatcagcttaacgtgataacaataatagtaatatgaaatatttattaaatttttataattaatctctgctagaaaatttgattaatcattttagtagaatttgtttttctcaactagg

SEQ ID NO: 2701 - DNA, 578 bp, Artificial; identical to SEQ ID NO: 2133
  Mutations within GlyA3B4 introduced by GmGlyA3B4_T02TALE nuclease

SEQ ID NO: 2702 - DNA, 665 bp, Artificial
  Mutations within GlyA3B4 introduced by GmGlyA3B4_T02TALE nuclease
gttcatgtacggttgcagatataaacgaagcatagcttatgtatgaggtgtaacaaaattggaaacaatagccatgcaaggtgaagaatgtcaccaactcagaaacccttcttcattgacgtgtccctcactcactctcctctcttcactataaatcgccactcttcgtgttctccacttcaccaactccttcaaacttattaacactttccttagttcaatatggggaagcccttcttcactctctctctttcttccctttgcttgctactcttgtcgctattacctccagcaagttcaacgagtgccaactcaacaacctcaacgcgttggaacccgaccaccgcgttgagtccgaaggtggtcttattgaaacatggaactctcaacaccctgagctgcaatgcgccggtgtcactgtttccaaacgcaccctcaaccgcaacggcctccaacgcttgccatctttcatctcaccttatccccaactgaatcattgtcgttcaaggtgcgtaatattagtaagaagtatttatcagcttaacgtgataacaataatagtaatatgaaatatttattaaatttttataattaatctctgctagaaaatttgattaatcatttttagtagaatttgtttttctcaactaggttttaaaacacca

SEQ ID NO: 2703 - DNA, 527 bp, Artificial
  Mutations within GlyA3B4 introduced by GmGlyA3B4_T02TALE nuclease
gttcatgtacggttgcagatataaacgaagcatagcttatgtatgaggtgtaacaaaattggaaacaatacgccatgcaaggtgaagaatgtcaccaactcagaaacccttcttcattgacgtgtccctcactcactctcctctcttcactataaatcgccactcttcgtgttctccacttcaacaacctcaacgcgttggaacccgaccaccgcgttgagtccgaaggtggtcttattgaaacatggaactctcaacaccctgagctgcaatgcgccggtgtcactgtttccaaacgcaccctcaaccgcaacggcctccacttgccatcttactcaccttatccccaaatgatcattgtcgttcaaggtgcgtaatattagtaagaagtattttatcagcttaacgtgataacaataatagtaatatgaaatatttattaaattttttataattaatctctgctagaaaatttgattaatcatttttagtagaatttgtttttctcaactaggttttaaacacca

SEQ ID NO: 2704 - DNA, 642 bp, Artificial
  Mutations within GlyA3B4 introduced by GmGlyA3B4_T02TALE nuclease
gttcatgtacggttgcagatataaacgaagcatagcttatgtatgaggtgtaacaaaattggaaacaatagccatgcaaggtgaagaatgtcaccaactcagaaaccccttcttcattgacgtgtccctcactcactctcctctcttcactataaatcgccactcttcgtgttctccacttcaccaactccttcaaacttattaacactttccttagttcaatatggggaagcccttcttcactctctctctttcttccctttgcttgctactcttgtcgagtgctattacctccagcaagttcaacgagtgccaactcaacaacctcaacgcgttggaacccgaccaccgcgttgagtccgaaggtggtcttattgaaacatggaactctcaacaccctgagctgcaatgcgccggtgtcactgtttccaaacgcaccctcaaccgcaacggcctccacttgccatcttactcaccttatccccaaatgatcattgtcgttcaaggtgcgtaatattagtaagaagtatttatcagcttaacgtgataacaataatagtaatatgaaatatttattaaatttttataattaatctctgctagaaaatttgattaatcattttagtagaatttgtttttctc

SEQ ID NO: 2705 - DNA, 567 bp, Artificial
  Mutations within GlyA3B4 introduced by GmGlyA3B4_T02TALE nuclease
gttcatgtacggttgcagatataaacgaagcatagcttatgtatgaggtgtaacaaaattggaaacaatagccatgcaaggtgaagaatgtcaccaactcagaaacccttcttcattgacgtgtccctcactcactctcctctcttcactataaatcgccactcttcgtgttctccacttcaccaactccttcaaacttattaacactttccttagttcaatatggggaagcccttcttcactctctctctttcactccagcaagttcaacgagtgccaactcaacaacctcaacgcgttggaacccgaccaccgcgttgagtccgaaggtggtcttattgaaacatggaactctcaacaccctgagctgcaatgcgccggtgtcactgtttccaaaacgcaccctcaaccgcaacggcctccacttgccatcttactcaccttatccccaaatgatcattgtcgttcaaggtgcgtaatattagtaagaagtatttatcagcttaacgtgataacaataatagtaatatgaaatatttattaatttttataattaatctctgctag

SEQ ID NO: 2706 - DNA, 667 bp, Artificial
  Mutations within GlyA3B4 introduced by GmGlyA3B4_T02TALE nuclease
  misc_feature (530): n is a or c or t or g
gttcatgtacggttgcagatataaacgaagcatagcttatgtatgaggtgtaacaaaattggaaacaatagccatgcaaggtgaagaatgtcaccaactcagaaacccttcttcattgacgtgtccctcactcactctcctctcttcactataaatcgccactcttcgtgttctccacttcaccaactccttcaaacttattaacactttccttagttcaatatgggggaagcccttcttcactctctctctttcttccctttgcttgctactcttgtcgagtgcatgctattacctccagcaagttcaacgagtgccaactcaacaacctcaacgcgttggaacccgaccaccgcgttgagtccgaaggtggtcttattgaaacatggaactctcaacaccctgagctgcaatgcgccggtgtcactgtttccaaacgcaccctcaaccgcaacggcctccacttgccatcttactcaccttatccccaaatgatcatttcgttcaaggtgcgtaatattagtaagagnatttatcagcttaacgtgataacaataatagtaatatgaaatatttattaaatttttataattaatctctgctagaaaatttgattaatcattttagtagaatttgtttttctcaactaggtttttaaaacaccaca

SEQ ID NO: 2707 - DNA, 650 bp, Artificial; identical to SEQ ID NO: 2488
  Mutations within GlyA3B4 introduced by GmGlyA3B4_T02TALE nuclease
  misc_feature (530): n is a or c or t or g

SEQ ID NO: 2708 - DNA, 599 bp, Artificial
  Mutations within GlyA3B4 introduced by GmGlyA3B4_T02TALE nuclease
gttcatgtacggttgcagatataaacgaagcatagcttatgtatgaggtgtaacaaaattggaaacaatagccatgcaaggtgaagaatgtcaccaactcagaaacccttcttcattgacgtgtccctcactcactctcctctcttcactataaatcgccactcttcgtgttctccacttcaccaactccttcaaacttattaacactttccttagttcaatatggggaagcccttcttcactctctctctttcttccttgcttgctactcttgtcgagtgcttctccagcaagttcaacgagtgccaactcaacaacctcaacgcgttggaacccgaccaccgcgttgagtccgaaggtggtcttattgaaacatggaactctcaacaccctgagctgcaatgcgccggtgtcactgtttccaaacgcaccctcaaccgcaacggcctccacttgccatcttactcaccttatcccccaaatgatcattgtcgttcaaggtgcgtaaatattagtaagaagtatttatcagcttaacgtgataacaataatagtaatatgaaatatttattaaattttttataattaatctctgctag

SEQ ID NO: 2709 - DNA, 490 bp, Artificial; identical to SEQ ID NO: 2118
  Mutations within GlyA3B4 introduced by GmGlyA3B4_T02TALE nuclease

SEQ ID NO: 2710 - DNA, 661 bp, Artificial
  Mutations within GlyA3B4 introduced by GmGlyA3B4_T02TALE nuclease
gttcatgtacggttgcagatataaacgaagcatagcttatgtatgaggtgtaacaaaattggaaacaatagccatgcaaggtgaagaatgtcaccaactcagaaacccttcttcattgacgtgtccctcactcactctcctctcttcactataaatcgccactcttcgtgttctccacttcaccaactccttcaaacttattaacactttccttagttcaatatggggaagcccttcttcactctctctctttcttccctttgcttgctactcttgtcgagtgcatgtattacctccagcaagttcaacgagtgccaactcaacaacctcaacgcgttggaacccgaccaccgcgttgagtccgaaggtggtcttattgaaacatggaactctcaacaccctgagctgcaatgcgccggtgtcactgtttccaaacgcaccctcaaccgcaacggcctccacttgccatcttactcaccttatccccaaatgatcattgtcgttcaaggtgcgtaatattagtaagagtatttatcagcttaacgtgataacaataatagtaatatgaaatatttattaaatttttataattaatctctgctagaaaatttgattaatcattttagtagaatttgttttctcaactaggttttaaaacacc

SEQ ID NO: 2711 - DNA, 635 bp, Artificial
  Mutations within GlyA3B4 introduced by GmGlyA3B4_T02TALE nuclease
gttcatgtacggttgcagatataaacgaagcatagcttatgtatgaggtgtaacaaaattggaaacaatagccatgcaaggtgaagaatgtcaccaactcagaaacccttcttcattgacgtgtccctcactcactctcctctcttcactataaatcgccactcttcgtgttctccacttcaccaactccttcaaacttattaacactttccttagttcaatatggggaagcccttcttcactctctctctttcttccctttgctttgctattacctccagcaagttcaacgagtgccaactcaacaacctcaacgcgttggaacccgaccaccgcgttgagtccgaaggtggtcttattgaacatggaactctcaacaccctgagctgcaatgcgccggtgtcactgtttccaaacgcaccctcaaccgcaacggcctccacttgccatcttactcaccttatccccaaatgatcattgtcgttcaaggtgcgtaatattagtaagaagtatttatcagcttaacgtgataacaataatagtaatatgaaatatttattaaattttttataattaatctctgctagaaaatttgattaatcatttttagtagaatttgttttttctcaactagg

SEQ ID NO: 2712 - DNA, 653 bp, Artificial
  Mutations within GlyA3B4 introduced by GmGlyA3B4_T02TALE nuclease
gttcatgtacggttgcagatataaacgaagcatagcttatgtatgaggtgtaacaaaattggaaacaatagccatgcaaggtgaagaatgtcaccaactcagaaacccttcttcattgacgtgtccctcactcactctcctctcttcactataaatcgccactcttcgtgttctccacttcaccaactccttcaaacttattaacactttccttagttcaatatggggaagcccttcttcactctctctctttcttccctttgcttgctactcttgtcgagtgctttgctattacctccagcaagttcaacgagtgccaactcaacaacctcaacgcgttggaacccgaccaccgcgttgagtccgaaggtggtcttattgaaacatggaactctcaacaccctgagctgcaatgcgccggtgtcactgtttccaaacgcaccctcaaccgcaacggcctccacttgccatcttactcaccttatccccaaatgatcattgtcgttcaaggtgcgtaatattagtaagaagtatttatcagcttaacgtgataacaataatagtaatatgaaatatttattaaatttttataattaatctctgctagaaaatttgattaatcattttagtagaatttgtttttctcaactagg

SEQ ID NO: 2713 - DNA, 636 bp, Artificial; identical to SEQ ID NO: 1885
  Mutations within GlyA3B4 introduced by GmGlyA3B4_T02TALE nuclease

SEQ ID NO: 2714 - DNA, 600 bp, Artificial
  Mutations within GlyA3B4 introduced by GmGlyA3B4_T02TALE nuclease
gttcatgtacggttgcagatataaacgaagcatagcttatgtatgaggtgtaacaaaattggaaacaatagccatgcaaggtgaagaatgtcaccaactcagaaacccttcttcattgacgtgtccctcactcactctcctctcttcactataaatcgccactcttcgtgttctccacttcaccaactccttcaaacttattaacactttccttagttcaatatggggaagcccttcttcactctctctctttcttccctttgcttgctactcttgtcgagtgcaaactcaacaacctcaacgcgttggaacccgaccaccgcgttgagtccgaaggtggtcttattgaaacatggaactctcaacaccctgagctgcaatgcgccggtgtcactgtttccaaacgcaccctcaaccgcaacggcctccacttgccatcttactcaccttatcccaaatgatcattgtcgttcaaggtgcgtaatattagtaagaagtatttatcagcttaacgtgataacaataatagtaatatgaaatatttattaaattttttataattaatctctgctagaaaatttgattaatcatttttagtag

SEQ ID NO: 2715 - DNA, 678 bp, Artificial
  Mutations within GlyA3B4 introduced by GmGlyA3B4_T02TALE nuclease
gttcatgtacggttgcagatataaacgaagcatagcttatgtatgaggtgtaacaaaattggaaacaatagccatgcaaggtgaagaatgtcaccaactcagaaacccttcttcattgacgtgtccctcactcactctcctctcttcactataaatcgccactcttcgtgttctccacttcaccaactccttcaaacttattaacactttccttagttcaatatggggaagcccttcttcactctctctctttcttccctttgcttgctactcttgtcgagtgcatgcttatctatctccacgcaagttccaagtcagcgtgtcacgctacaatcaacctcaaacctcagccgcgtttgggaaaccccgacccaccgcgttgagtccgaaggtggtcttattgaaacatggaactctcaacaccctgagctgcaatgcgccggtgtcactgtttccaaacgcaccctcaaccgcaacggcctccacttgccatcttactcaccttatccccaaatgatcattgtcgttcaaggtgcgtaatattagtaagaagtatttatcagcttaacgtgataacaataatagtaatatgaaaatatttattaaatttttataattaatctctgctagaaaatttgattaatcatttttagtagaatttgttttttctcaactagg

SEQ ID NO: 2716 - DNA, 666 bp, Artificial
  Mutations within GlyA3B4 introduced by GmGlyA3B4_T02TALE nuclease
gttcatgtacggttgcagatataaacgaagcatagcttatgtatgaggtgtaacaaaattggaaacaatagccatgcaaggtgaagaatgtcaccaactcagaaaccccttcttcattgacgtgtccctcactcactctcctctcttcactataaatcgccactcttcgtgttctccacttcaccaactccttcaaacttattaacactttccttagttcaatatggggaagcccttcttcactctctctctttcttccctttgcttgctactcttgtcgagtgcatgcattacctccagcaagttcaacgagtgccaactcaacaacctcaacgcgttggaacccgaccaccgcgttgagtccgaaggtggtcttattgaaacatggaactctcaacaccctgagctgcaatgcgccggtgtcactgtttccaaacgcaccctcaaccgcaacggcctccacttgccatcttactcaccttatccccaaatgatcattgtcgttcaaggtgcgtaatattagtaagaagtatttatcagcttaacgtgataacaataatagtaatatgaaatatttattaaatttttataattaatctctgctagaaaatttgattaatcattttagtagaatttgtttttctcaactaggtttttaaaacacca

SEQ ID NO: 2717 - DNA, 667 bp, Artificial
  Mutations within GlyA3B4 introduced by GmGlyA3B4_T02TALE nuclease
gttcatgtacggttgcagatataaacgaagcatagcttatgtatgaggtgtaacaaaattggaaacaatagccatgcaaggtgaagaatgtcaccaactcagaaaccccttcttcattgacgtgtccctcactcactctcctctcttcactataaatcgccactcttcgtgttctccacttcaccaactccttcaaacttattaacactttccttagttcaatatggggaagcccttcttcactctctctctttcttccctttgcttgctactcttgtcgagtgcatgctattacctccagcaagttcaacgagtgccaactcaacaacctcaacgcgttggaacccgaccaccgcgttgagtccgaaggtggtcttattgaaacatggaactctcaacaccctgagctgcaatgcgccggtgtcactgtttccaaacgcaccctcaaccgcaacggcctccacttgccatcttactcaccttatccccaaatgatcattgtcgttcaaggtgcgtaatattagtaagagtatttatcagcttaacgtgataacaataatagtaatatgaaatatttattaaatttttataattaatctctgctagaaaatttgattaatcattttagtagaatttgttttctcaactaggtttttaaaacaccaca

SEQ ID NO: 2718 - DNA, 666 bp, Artificial
  Mutations within GlyA3B4 introduced by GmGlyA3B4_T02TALE nuclease
gttcatgtacggttgcagatataaacgaagcatagcttatgtatgaggtgtaacaaaattggaaacaatagccatgcaaggtgaagaatgtcaccaactcagaaacccttcttcattgacgtgtccctcactcactctcctctcttcactataaatcgccactcttcgtgttctccacttcaccaactccttcaaacttattaacactttccttagttcaatatggggaagcccttcttcactctctctctttcttccctttgcttgctactcttgtcgagtgcattgctattacctccagcaagttcaacgagtgccaactcaacaacctcaacgcgttggaacccgaccaccgcgttgagtccgaaggtggtcttattgaaacatggaactctcaacaccctgagctgcaatgcgccggtgtcactgtttccaaacgcaccctcaaccgcaacggcctccacttgccatcttactcaccttatccccaaatgatcattgtcgttcaaggtgcgtaatattagtaagaagtatttatcagcttaacgtgataacaataatagtaatatgaaatatttattaaatttttataattaatctctgctagaaaatttgattaatcattttagtagaatttgttttctcaactaggtttttaaaacacca

SEQ ID NO: 2719 - DNA, 468 bp, Artificial
  Mutations within GlyA3B4 introduced by GmGlyA3B4_T02TALE nuclease
gttcatgtacggttgcagatataaacgaagcatagcttatgtatgaggtgtaacaaaattggaaacaatagccatgcaaggtgaagaatgtcaccaactcagaaacccttcttcattgacgtgtccctcactcactctcctctcttcactataaatcgccactcttcgtgttctccacttcaccaactccttcaaacttattaacactttccttagttcaacgagtgccaactcaacaacctcaacgcgttggaacccgaccaccgcgttgagtccgaaggtggtcttattgaaacatggaactctcaacaccctgagctgcaatgcgccggtgtcactgtttccaaacgcaccctcaacgcaacggcctccacttgccatcttactcaccttatccccaaatgatcattgtcgttcaaggtgcgtaatattagtaagaagtatttatcagcttaacgtgataacaat

SEQ ID NO: 2720 - DNA, 669 bp, Artificial
  Mutations within GlyA3B4 introduced by GmGlyA3B4_T02TALE nuclease
gttcatgtacggttgcagatataaacgaagcatagcttatgtatgaggtgtaacaaaattggaaacaatagccatgcaaggtgaagaatgtcaccaactcagaaacccttcttcattgacgtgtccctcactcactctcctctcttcactataaatcgccactcttcgtgttctccacttcaccaactccttcaaacttattaacactttccttagttcaatatggggaagcccttcttcactctctctctttcttccctttgcttgctactcttgtcgagtgcattgctattacctccagcaagttcaacgagtgccaactcaacaacctcaacgcgttggaacccgaccaccgcgttgagtccgaaggtggtcttattgaaacatggaactctcaacaccctgagctgcaatgcgccggtgtcactgtttccaaacgcaccctcaaccgcaacggcctccacttgccatcttactcaccttatccccaaatgatcattgtcgttcaaggtgcgtaatattagtaagaagtatttatcagcttaacgtgataacaataatagtaatatgaaatatttattaaatttttataattaatctctgctagaaaatttgattaatcattttagtagaatttgtttttctcaactaggtttttaaaacaccaca

SEQ ID NO: 2721 - DNA, 656 bp, Artificial; identical to SEQ ID NO: 1969
  Mutations within GlyA3B4 introduced by GmGlyA3B4_T02TALE nuclease

SEQ ID NO: 2722 - DNA, 514 bp, Artificial
  Mutations within GlyA3B4 introduced by GmGlyA3B4_T02TALE nuclease
gttcatgtacggttgcagatataaacgaagcatagcttatgtatgaggtgtaacaaaattggaaacaatagccatgcaaggtgaagaatgtcaccaactcagaaacccttcttcattgacgtgtccctcactcactctcctctcttcactataaatcgccactcttcgtgttctccacttcaccaactccttcaaacttattaacactttccttagttcaatatggggaagcccttcttcactctcaacaccctgagctgcaatgcgccggtgtcactgtttccaaacgcaccctcaaccgcaacggcctccacttgccatcttactcaccttatccccaaatgatcattgtcgttcaaggtgcgtaatattagtaagaagtatttatcagcttaacgtgataacaataatagtaatatgaaatatttattaaattttttataattaatctctgctagaaaatttgattaatcatttttagtagaatttgtttttctcaactaggttttaaaca

SEQ ID NO: 2723 - DNA, 585 bp, Artificial; identical to SEQ ID NO: 2520
  Mutations within GlyA3B4 introduced by GmGlyA3B4_T02TALE nuclease

SEQ ID NO: 2724 - DNA, 406 bp, Artificial
  Mutations within GlyA3B4 introduced by GmGlyA3B4_T02TALE nuclease
gttcatgtacggttgcagatataaacgaagcatagcttatgtatgaggtgtaacaaaattggaaacaatagccatgcaaggtgaagaatgtcaccaactcagaaacctcttctattgacgtgtccctcactcactctcctctcttcactataaatcgccactcattcgtcgttctcctacttcaccaactccttcaaacttattaacactttccttagttcaatatggggaagcccttcttcactctctctctttcttccctttgcttgctactcttgtcgagtgcagctattacctccagcaagttcaacgagtgccaactcaacaacctcaacgcgttggaacccgcaccacccgcgttgagtccgaaggtggtcttattgaaacatggaactctcaacaccct

SEQ ID NO: 2725 - DNA, 661 bp, Artificial; identical to SEQ ID NO: 2382
  Mutations within GlyA3B4 introduced by GmGlyA3B4_T02TALE nuclease

SEQ ID NO: 2726 - DNA, 654 bp, Artificial
  Mutations within GlyA3B4 introduced by GmGlyA3B4_T02TALE nuclease
gttcatgtacggttgcagatataaacgaagcatagcttatgtatgaggtgtaacaaaattggaaacaatagccatgcaaggtgaagaatgtcaccaactcagaaacccttcttcattgacgtgtccctcactcactctcctctcttcactataaatcgccactcttcgtgttctccacttcaccaactccttcaaacttattaacactttccttagttcaatatggggaagcccttcttcactctctctctttcttccctttgcttgctactcttgtcgagtgctattacctccagcaagttcaacgagtgccaactcaacaacctcaacgcgttggaacccgaccaccgcgttgagtccgaaggtggtcttattgaaacatggaactctcaacaccctgagctgcaatgcgccggtgtcactgtttccaaacgcaccctcaaccgcaacggcctccacttgccatcttactcaccttatccccaaatgatcattgtcgttcaaggtgcgtaatattagtaagaagtatttatcagcttaacgtgataacaataatagtaatatgaaatatttattaaatttttataattaatctctgctagaaaatttgattaatcattttagtagaatttgttttctcaactaggttttaaa

SEQ ID NO: 2727 - DNA, 641 bp, Artificial
  Mutations within GlyA3B4 introduced by GmGlyA3B4_T02TALE nuclease
gttcatgtacggttgcagatataaacgaagcatagcttatgtatgaggtgtaacaaaattggaaacaatagccatgcaaggtgaagaatgtcaccaactcagaaacccttcttcattgacgtgtccctcactcactctcctctcttcactataaatcgccactcttcgtgttctccacttcaccaactccttcaaacttattaacactttccttagttcaatatggggaagcccttcttcactctctctctttcttccctttgctttgctattacctccagcaagttcaacgagtgccaactcaacaacctcaacgcgttggaacccgaccaccgcgttgagtccgaaggtggtcttattgaaacatggaactctcaacacccctgagctgcaatgcgccggtgtcactgtttccaaacgcaccctcaaccgcaacggcctccacttgccatcttactcaccttatccccaaatgatcattgtcgttcaaggtgcgtaatattagtaagaagtatttatcagcttaacgtgataacaataatagtaatatgaaatatttattaaattttttataattaatctctgctagaaaatttgattaatcatttttagtagaatttgttttttctcaactaggtttt

SEQ ID NO: 2728 - DNA, 661 bp, Artificial
  Mutations within GlyA3B4 introduced by GmGlyA3B4_T02TALE nuclease
gttcatgtacggttgcagatataaacgaagcatagcttatgtatgaggtgtaacaaaattggaaacaatagccatgcaaggtgaagaatgtcaccaactcagaaacccttcttcattgacgtgtccctcactcactctcctctcttcactataaatcgccactcttcgtgttctccacttcaccaactccttcaaacttattaacactttccttagttcaatatggggaagcccttcttcactctctctctttcttccctttgcttgctactcttgtcgagtgcatcctccagcaagttcaacgagtgccaactcaacaacctcaacgcgttggaacccgaccaccgcgttgagtccgaaggtggtcttattgaaacatggaactctcaacaccctgagctgcaatgcgccggtgtcactgtttccaaacgcaccctcaaccgcaacggcctccacttgccatcttactcaccttatccccaaatgatcattgtcgttcaaggtgcgtaaatattagtaagaagtatttatcagcttaacgtgataacaataatagtaatatgaaatatttattaaattttttataattaatctctgctagaaaatttgattaatctttttagtagaattgttttttctcaactaggtttaaaacaccaca

SEQ ID NO: 2729 - DNA, 664 bp, Artificial
  Mutations within GlyA3B4 introduced by GmGlyA3B4_T02TALE nuclease
gttcatgtacggttgcagatataaacgaagcatagcttatgtatgaggtgtaacaaaaattggaaacaatagccatgcaaggtgaagaatgtcaccaactcagaaacccttcttcattgacgtgtccctcactcactctcctctcttcactataaatcgccactcttcgtgttctccacttcaccaactccttcaaacttattaacactttccttagttcaatatggggaagcccttcttcactctctctctttcttccctttgcttgctactcttgtcgagtgcctattacctccagcaagttcaacgagtgccaactcaacaacctcaacgcgttggaacccgaccaccgcgttgagtccgaaggtggtcttattgaaacatggaactctcaacaccctgagctgcaatgcgccggtgtcactgtttccaaacgcaccctcaaccgcaacggcctccacttgccatcttactcaccttatccccaaatgatcattgtcgttcaaggtgcgtaatattagtaagaagtatttatcagcttaacgtgataacaataatagtaatatgaaatatttattaaatttttataattaatctctgctagaaaatttgattaatcattttagtagaatttgtttttctcaactaggtttttaaaacacca

SEQ ID NO: 2730 - DNA, 665 bp, Artificial; identical to SEQ ID NO: 2115
  Mutations within GlyA3B4 introduced by GmGlyA3B4_T02TALE nuclease

SEQ ID NO: 2731 - DNA, 661 bp, Artificial
  Mutations within GlyA3B4 introduced by GmGlyA3B4_T02TALE nuclease
  misc_feature (531): n is a or c or t or g
gttcatgtacggttgcagatataaacgaagcatagcttatgtatgaggtgtaacaaaattggaaacaatagccatgcaaggtgaagaatgtcaccaactcagaaacccttcttcattgacgtgtccctcactcactctcctctcttcactataaatcgccactcttcgtgttctccacttcaccaactccttcaaacttattaacactttccttagttcaatatggggaagcccttcttcactctctctctttcttccctttgcttgctactcttgtcgagtgcattgctattacctccagcaagttcaacgagtgccaactcaacaacctcaacgcgttggaacccgaccaccgcgttgagtccgaaggtggtcttattgaaacatggaactctcaacaccctgagctgcaatgcgccggtgtcactgtttccaaacgcaccctcaaccgcaacggcctccacttgccatcttactcaccttatccccaaatgatcattgtcgttcaaggtgcgtaatattagtaagagnatttatcagcttaacgtgataacaatatagtaatatgaaatatttattaaatttttataattaatctctgctagaaaatttgattaatcatttttagtagaatttgtttttctcaactaggtttttaaaa

SEQ ID NO: 2732 - DNA, 641 bp, Artificial
  Mutations within GlyA3B4 introduced by GmGlyA3B4_T02TALE nuclease
gttcatgtacggttgcagatataaacgaagcatagcttatgtatgaggtgtaacaaaattggaaacaatagccatgcaaggtgaagaatgtcaccaactcagaaacccttcttcattgacgtgtccctcactcactctcctctcttcactataaatcgccactcttcgtgttctccacttcaccaactccttcaaacttattaacactttccttagttcaatatggggaagcccttcttcactctctctctttcttccctttgcttgctactcttgtcgagtcagcaagttcaacgagtgccaactcaacaacctcaacgcgttggaacccgaccaccgcgttgagtccgaaggtggtcttattgaaacatggaactctcaacaccctgagctgcaatgcgccggtgtcactgtttccaaacgcaccctcaaccgcaacggcctccacttgccatcttactcaccttatccccaaatgatcattgtcgttcaaggtgcgtaaatattagtaagaagtatttatcagcttaacgtgataacaataatagtaatatgaaatatttattaaattttttataattaatctctgctagaaaatttgattaatctttttagtagaattgtttttctcaactaggttt

SEQ ID NO: 2733 - DNA, 657 bp, Artificial
  Mutations within GlyA3B4 introduced by GmGlyA3B4_T02TALE nuclease
gttcatgtacggttgcagatataaacgaagcatagcttatgtatgaggtgtaacaaaattggaaacaatagccatgcaaggtgaagaatgtcaccaactcagaaacccttcttcattgacgtgtccctcactcactctcctctcttcactataaatcgccactcttcgtgttctccacttcaccaactccttcaaacttattaacactttccttagttcaatatggggaagcccttcttcactctctctctttcttccctttgcttgctactcttgttacctccagcaagttcaacgagtgccaactcaacaacctcaacgcgttggaacccgaccaccgcgttgagtccgaaggtggtcttattgaaacatggaactctcaacaccctgagctgcaatgcgccggtgtcactgtttccaaacgcaccctcaaccgcaacggcctccacttgccatcttactcaccttatcccccaaatgatcattgtcgttcaaggtgcgtaatattagtaagaagtatttatcagcttaacgtgataacaataatagtaatatgaaatatttattaaattttttataattaatctctgctagaaaatttgattaatcatttttagtagaatttgttttttctcaactaggttttaaaacaccaca

SEQ ID NO: 2734 - DNA, 666 bp, Artificial
  Mutations within GlyA3B4 introduced by GmGlyA3B4_T02TALE nuclease
gttcatgtacggttgcagatataaacgaagcatagcttatgtatgaggtgtaacaaaattggaaacaatagccatgcaaggtgaagaatgtcaccaactcagaaacccttcttcattgacgtgtccctcactcactctcctctcttcactataaatcgccactcttcgtgttctccacttcaccaactccttcaaacttattaacactttccttagttcaatatggggaagcccttcttcactctctctctttcttccctttgcttgctactcttgtcgagtgcagtattacctccagcaagttcaacgagtgccaactcaacaacctcaacgcgttggaacccgaccaccgcgttgagtccgaaggtggtcttattgaaacatggaactctcaacaccctgagctgcaatgcgccggtgtcactgtttccaaacgcaccctcaaccgcaacggcctccacttgccatcttactcaccttatccccaaatgatcattgtcgttcaaggtgcgtaatattagtaagaagtatttatcagcttaacgtgataacaatatagtaatatgaaatatttattaaatttttataattaatctctgctagaaaatttgattaatcatttttagtagaatttgtttttctcaactaggtttttaaaacaccaca

SEQ ID NO: 2735 - DNA, 655 bp, Artificial
  Mutations within GlyA3B4 introduced by GmGlyA3B4_T02TALE nuclease
  misc_feature (530): n is a or c or t or g
gttcatgtacggttgcagatataaacgaagcatagcttatgtatgaggtgtaacaaaattggaaacaatagccatgcaaggtgaagaatgtcaccaactcagaaacccttcttcattgacgtgtccctcactcactctcctctcttcactataaatcgccactcttcgtgttctccacttcaccaactccttcaaacttattaacactttccttagttcaatatggggaagcccttcttcactctctctctttcttccctttgcttgctactcttgtcgagtgcatgctattacctccagcaagttcaacgagtgccaactcaacaacctcaacgcgttggaacccgaccaccgcgttgagtccgaaggtggtcttattgaaacatggaactctcaacaccctgagctgcaatgcgccggtgtcactgtttccaaacgcaccctcaaccgcaacggcctccacttgccatcttactcaccttatccccaaatgatcattgtcgttcaaggtgcgtaatattagtaagagnatttatcagcttaacgtgataacaataatagtaatatgaaatatttattaaatttttataattaatctctgctagaaaatttgattaatcattttagtagaatttgtttttctcaactaggtttt

SEQ ID NO: 2736 - DNA, 636 bp, Artificial; identical to SEQ ID NO: 1845
  Mutations within GlyA3B4 introduced by GmGlyA3B4_T02TALE nuclease

SEQ ID NO: 2737 - DNA, 471 bp, Artificial; identical to SEQ ID NO: 1723
  Mutations within GlyA3B4 introduced by GmGlyA3B4_T02TALE nuclease

SEQ ID NO: 2738 - DNA, 656 bp, Artificial
  Mutations within GlyA3B4 introduced by GmGlyA3B4_T02TALE nuclease
gttcatgtacggttgcagatataaacgaagcatagcttatgtatgaggtgtaacaaaattggaaacaatagccatgcaaggtgaagaatgtcaccaactcagaaacccttcttcattgacgtgtccctcactcactctcctctcttcactataaatcgccactcttcgtgttctccacttcaccaactccttcaaacttattaacactttccttagttcaatatggggaagcccttcttcactctctctctttcttccctttgcttgctactcttgtcgagtgcctattacctccagcaagttcaacgagtgccaactcaacaacctcaacgcgttggaacccgaccaccgcgttgagtccgaaggtggtcttattgaaacatggaactctcaacaccctgagctgcaatgcgccggtgtcactgtttccaaacgcaccctcaaccgcaacggcctccacttgccatcttactcaccttatccccaaatgatcattgtcgttcaaggtgcgtaatattagtaagaagtatttatcagcttaacgtgataacaataatagtaatatgaaatatttattaaatttttataattaatctctgctagaaaatttgattaatcattttagtagaatttgttttctcaactaggttttaaaa

SEQ ID NO: 2739 - DNA, 567 bp, Artificial
  Mutations within GlyA3B4 introduced by GmGlyA3B4_T02TALE nuclease
gttcatgtacggttgcagatataaacgaagcatagcttatgtatgaggtgtaacaaaattggaaacaatagccatgcaaggtgaagaatgtcaccaactcagaaacccttcttcattgacgtgtccctcactcactctcctctcttcactataaatcgccactcttcgtgttctccacttcaccaactccttcaaacttattaacactttccttagttcaatatggggaagcccttcttcactctctctctttcttccctttgcttgctactcttgtcgagtgcatttgctattacctccagcaagttcaacgagtgccaactcaacaacctcaacgcgttggaacccgaccaccgcgttgagtccgaaggtggtcttattgaaacatggaactctcaacaccctgagctgcaatgcgaccggcgtgtcactgtttccaaacgcacctcaaccgcaacggcctccacttgccatcttactcaccttatccacatgatcattgtcgttcaaggtgcgtaatattagtaaaagtatttatcagctaacgtgataacaataatagtaata

SEQ ID NO: 2740 - DNA, 636 bp, Artificial
  Mutations within GlyA3B4 introduced by GmGlyA3B4_T02TALE nuclease
gttcatgtacggttgcagatataaacgaagcatagcttatgtatgaggtgtaacaaaattggaaacaatagccatgcaaggtgaagaatgtcaccaactcagaaacccttcttcattgacgtgtccctcactcactctcctctcttcactataaatcgccactcttcgtgttctccacttcacgaactccttcaaacttattaacactttccttagttcaatatggggaagcccttcttcactctctctctttcttccctttgcttgctactcttgtcgagtgcattgctattacctccagcaagttcaacgagtgccaactcaacaacctcaacgcgttggaacccgaccaccgcgttgagtccgaaggtggtcttattgaaacatggaactctcaacaccctgagctgcaatgcgccggtgtcactgtttccaaacgcaccctcaaccgcaacggcctccacttgccatcttactcaccttatccccaaatgatcattgtcgttcaaggtgcgtaatattagtaagagtatttatcagcttaacgtgataacaatatagtaatatgaaatatttattaaatttttataattaatctctgctagaaaatttgattaatcattttagtagaatttg

SEQ ID NO: 2741 - DNA, 614 bp, Artificial
  Mutations within GlyA3B4 introduced by GmGlyA3B4_T02TALE nuclease
gttcatgtacggttgcagatataaacgaagcatagcttatgtatgaggtgtaacaaaattggaaacaatagccatgcaaggtgaagaatgtcaccaactcagaaacccttcttcattgacgtgtccctcactcactctcctctcttcactataaatcgccactcttcgtgttctccacttcaccaactccttcaaacttattaacactttccttagttcaatatggggaagcccttcttcactctctctctttcttccctttgcttgctactcttgtcgagtgccaactcaacaacctcaacgcgttggaacccgaccaccgcgttgagtccgaaggtggtcttattgaaacatggaactctcaacaccctgagctgcaatgcgccggtgtcactgtttccaaacgcaccctcaaccgcaacggcctccacttgccatcttactcaccttatccccaaatgatcattgtcgttcaaggtgcgtaatattagtaagaagtatttatcagcttaacgtgataacaataatagtaatatgaaatatttattaaattttttataattaatctctgctagaaaatttgattaatcatttttagtagaatttgtttttct

SEQ ID NO: 2742 - DNA, 504 bp, Artificial; identical to SEQ ID NO: 1778
  Mutations within GlyA3B4 introduced by GmGlyA3B4_T02TALE nuclease

SEQ ID NO: 2743 - DNA, 669 bp, Artificial
  Mutations within GlyA3B4 introduced by GmGlyA3B4_T02TALE nuclease
gttcatgtacggttgcagatataaacgaagcatagcttatgtatgaggtgtaacaaaattggaaacaatagccatgcaaggtgaagaatgtcaccaactcagaaacccttcttcattgacgtgtccctcactcactctcctctcttcactataaatcgccactcttcgtgttctccacttcaccaactccttcaaacttattaacactttccttagttcaatatggggaagcccttcttcactctctctctttcttccctttgcttgctactcttgtcgagtgcattgctattacctccagcaagttcaacgagtgccaactcaacaacctcaacgcgttggaacccgaccaccgcgttgagtccgaaggtggtcttattgaaacatggaactctcaacaccctgagctgcaatgcgccggtgtcactgtttccaaacgcaccctcaaccgcaacggcctccacttgccatcttactcaccttatccccaaatgatcattgtcgttcaaggtgcgtaatattagtaagagtatttatcagcttaacgtgataacaataatagtaatatgaaaatatttattaaatttttataattaatctctgctagaaaatttgattaatcattttagtagaatttgtttttctcaactaggtttttaaaacaccaca

SEQ ID NO: 2744 - DNA, 649 bp, Artificial
  Mutations within GlyA3B4 introduced by GmGlyA3B4_T02TALE nuclease
  misc_feature (530): n is a or c or t or g
gttcatgtacggttgcagatataaacgaagcatagcttatgtatgaggtgtaacaaaattggaaacaatagccatgcaaggtgaagaatgtcaccaactcagaaacccttcttcattgacgtgtccctcactcactctcctctcttcactataaatcgccactcttcgtgttctccacttcaccaactccttcaaacttattaacactttccttagttcaatatggggaagcccttcttcactctctctctttcttccctttgcttgctactcttgtcgagtgcatgctattacctccagcaagttcaacgagtgccaactcaacaacctcaacgcgttggaacccgaccaccgcgttgagtccgaaggtggtcttattgaaacatggaactctcaacaccctgagctgcaatgcgccggtgtcactgtttccaaacgcaccctcaaccgcaacggcctccacttgccatcttactcaccttatccccaaatgatcattgtcgttcaaggtgcgtaatattagtaagagnatttatcagcttaacgtgataacaatatagtaatatgaaatatttattaaatttttataattaatctctgctagaaaatttgattaatcattttagtagaatttgttttctcaactagg

SEQ ID NO: 2745 - DNA, 496 bp, Artificial
  Mutations within GlyA3B4 introduced by GmGlyA3B4_T02TALE nuclease
gttcatgtacggttgcagatataaacgaagcatagcttatgtatgaggtgtaacaaaattggaaacaatagccatgcaaggtgaagaatgtcaccaactcagaaacccttcttcattgacgtgtccctcactcactctcctctcttcactataaatcgccactcttcgtgttctccacttcaccaactccttcaacgcgttggaacccgaccaccgcgttgagtccgaaggtggtcttattgaaacatggaactctcaacaccctgagctgcaatgcgccggtgtcactgtttccaaacgcaccctcaaccgcaacggcctccacttgccatcttactcaccttatccccaaatgatcatgtcgttcaaggtgcgtaatattagtaagaagtatttatcagcttaacgtgataacaataatagtaatatgaaatatttattaaattttttataattaatctctgctagaaaatttgattaatcatttttagtagaa

SEQ ID NO: 2746 - DNA, 590 bp, Artificial
  Mutations within GlyA3B4 introduced by GmGlyA3B4_T02TALE nuclease
gttcatgtacggttgcagatataaacgaagcatagcttatgtatgaggtgtaacaaaattggaaacaatagccatgcaaggtgaagaatgtcaccaactcagaaacccttcttcattgacgtgtccctcactcactctcctctcttcactataaatcgccactcttcgtgttctccacttcaccaactccttcaaacttattaacactttccttagttcaatatggggaagcccttcttcactctctctctttcttccctttgcttgctactctctattacctccagcaagttcaacgagtgccaactcaacaacctcaacgcgttggaacccgaccaccgcgttgagtccgaaggtggtcttattgaaacatggaactctcacacctgagctgcaatgcgccggtgtcactgtttccaacgcaccctcaaccgcaacggcctccacttgccatcttactcaccttatccccaaatgatcattgtcgttcaaggtgcgtaatattagtaagaagtatttatcagcttaacgtgataacaataatagtaatatgaaatatttattaaattttttataattaatctctgcta

SEQ ID NO: 2747 - DNA, 667 bp, Artificial
  Mutations within GlyA3B4 introduced by GmGlyA3B4_T02TALE nuclease
gttcatgtacggttgcagatataaacgaagcatagcttatgtatgaggtgtaacaaaattggaaacaatagccatgcaaggtgaagaatgtcaccaactcagaaacccttcttcattgacgtgtccctcactcactctcctctcttcactataaatcgccactcttcgtgttctccacttcaccaactccttcaaacttattaacactttccttagttcaatatggggaagcccttcttcactctctctctttcttccctttgcttgctactcttgtcgagtgcattgcttatatatctcccatcgcaagttccaaagtcagacgatgtcacgctaccaatcaaacctcaaacctcaagccgcgtttgggaaaccccggaacccaccgcgttgagtccgaaggtggtcttattgaaacatggaactctcaacaccctgagctgcaatgcgccggtgtcactgtttccaaacgcaccctcaaccgcaacggcctccacttgccatcttactcaccttatccccaaatgatcattgtcgttcaaggtgcgtaatattagtaagaagtatttatcagcttaacgtgataacaataatagtaatatgaaaatatttattaaatttttataattaatctctgctagaaaatttgattaatcatttttagtag

SEQ ID NO: 2748 - DNA, 527 bp, Artificial
  Mutations within GlyA3B4 introduced by GmGlyA3B4_T02TALE nuclease
gttcatgtacggttgcagatataaacgaagcatagcttatgtatgaggtgtaacaaaattggaaacaatagccatgcaaggtgaagaatgtcaccaactcagaaacccttcttcattgacgtgtccctcactcactctcctctcttcactataaatcgccactcttcgtgttctccacttcaacaacctcaacgcgttggaacccgaccaccgcgttgagtccgaaggtggtcttattgaaacatggaactctcaacaccctgagctgcaatgcgccggtgtcactgtttccaaacgcaccctcaaccgcaacggcctccacttgccatcttactcaccttatccccaaatgatcattgtcgttcaaggtgcgtaatattagtaagaagtattttatcagcttaacgtgataacaataatagtaatatgaaatatttattaaattttttataattaatctctgctagaaaatttgattaatcatttttagtaagaatttgtttttctcaactaggttttaaacacca

SEQ ID NO: 2749 - DNA, 648 bp, Artificial
  Mutations within GlyA3B4 introduced by GmGlyA3B4_T02TALE nuclease
gttcatgtacggttgcagatataaacgaagcatagcttatgtatgaggtgtaacaaaattggaaacaatagccatgcaaggtgaagaatgtcaccaactcagaaacccttcttcattgacgtgtccctcactcactctcctctcttcactataaatcgccactcttcgtgttctccacttcaccaactccttcaaacttattaacactttccttagttcaatatggggaagcccttcttcactctctctctttcttccctttgcttgctactcttgtcgagtgcatattacctccagcaagttcaacgagtgccaactcaacaacctcaacgcgttggaacccgaccaccgcgttgagtccgaaggtggtcttattgaaacatggaactctcaacaccctgagctgcaatgcgccggtgtcactgtttccaaacgcaccctcaaccgcaacggcctccacttgccatcttactcaccttatccccaaatgatcattgtcgttcaaggtgcgtaatattagtaagaagtatttatcagcttaacgtgataacaataatagtaatatgaaatatttattaaatttttataattaatctctgctagaaaatttgattaatcattttagtagaatttgttttctcaactagg

SEQ ID NO: 2750 - DNA, 517 bp, Artificial
  Mutations within GlyA3B4 introduced by GmGlyA3B4_T02TALE nuclease
gttcatgtacggttgcagatataaacgaagcatagcttatgtatgaggtgtaacaaaattggaaacaatagccatgcaaggtgaagaatgtcaccaactcagaaacccttcttcattgacgtgtccctcactcactctcctctcttcactataaatcgccactcttcgtgttctccacttcaacaacctcaacgcgttggaacccgaccaccgcgttgagtccgaaggtggtcttattgaaacatggaactctcaacaccctgagctgcaatgcgccggtgtcactgtttccaaacgcaccctcaaccgcaacggcctccacttgccatcttactcaccttatccccaaatgatcattgtcgttcaaggtgcgtaatattagtaagaagtattttatcagcttaacgtgataacaataatagtaatatgaaaatatttattaaatttttttataattaatctctgctagaaaatttgattaatcattttttagtagaatttgtttttctcaactagg

SEQ ID NO: 2751 - DNA, 636 bp, Artificial; identical to SEQ ID NO: 1645
  Mutations within GlyA3B4 introduced by GmGlyA3B4_T02TALE nuclease

SEQ ID NO: 2752 - DNA, 649 bp, Artificial
  Mutations within GlyA3B4 introduced by GmGlyA3B4_T02TALE nuclease
gttcatgtacggttgcagatataaacgaagcatagcttatgtatgaggtgtaacaaaattggaaacaatagccatgcaaggtgaagaatgtcaccaactcagaaacccttcttcattgacgtgtccctcactcactctcctctcttcactataaatcgccactcttcgtgttctccacttcaccaactccttcaaacttattaacactttccttagttcaatatggggaagcccttcttcactctctctctttcttccctttgcttgctactcttgtcgagtgctttacctccagcaagttcaacgagtgccaactcaacaacctcaacgcgttggaacccgaccaccgcgttgagtccgaaggtggtcttattgaaacatggaactctcaacaccctgagctgcaatgcgccggtgtcactgtttccaaacgcaccctcaaccgcaacggcctccacttgccatcttactcaccttatccccaaatgatcattgtcgttcaaggtgcgtaatattagtaagaagtatttatcagcttaacgtgataacaatatagtaatatgaaatatttattaaatttttataattaatctctgctagaaaatttgattaatcattttagtagaatttgttttctcaactaggtttt

SEQ ID NO: 2753 - DNA, 667 bp, Artificial; identical to SEQ ID NO: 2237
  Mutations within GlyA3B4 introduced by GmGlyA3B4_T02TALE nuclease
  misc_feature (531): n is a or c or t or g

SEQ ID NO: 2754 - DNA, 604 bp, Artificial
  Mutations within GlyA3B4 introduced by GmGlyA3B4_T02TALE nuclease
gttcatgtacggttgcagatataaacgaagcatagcttatgtatgaggtgtaacaaaattggaaacaatagccatgcaaggtgaagaatgtcaccaactcagaaacccttcttcattgacgtgtccctcactcactctcctctcttcactataaatcgccactcttcgtgttctccacttcaccaactccttcaaacttattaacactttccttagttcaatatggggaagcccttcttcactccctctcttcactataaatcgccactcttcgtgttggaacccgaccaccgcgttgagtccgaaggtggtcttattgaaacatggaactctcaacaccctgagctgcaatgcgccggtgtcactgtttccaaacgcaccctcaaccgcaacggcctccacttgccatcttactcaccttatcccccaaatgatcattgtcgttcaaggtgcgtaatattagtaagaagtatttatcagcttaacgtgataacaataatagtaatatgaaatatttattaaattttttatattaatctctgctagaaaatttgattaatcatttttagtagaatttgtttttctcaactaggtttttaaaaca

SEQ ID NO: 2755 - DNA, 663 bp, Artificial; identical to SEQ ID NO: 2559
  Mutations within GlyA3B4 introduced by GmGlyA3B4_T02TALE nuclease

SEQ ID NO: 2756 - DNA, 650 bp, Artificial; identical to SEQ ID NO: 2452
  Mutations within GlyA3B4 introduced by GmGlyA3B4_T02TALE nuclease

SEQ ID NO: 2757 - DNA, 633 bp, Artificial
  Mutations within GlyA3B4 introduced by GmGlyA3B4_T02TALE nuclease
gttcatgtacggttgcagatataaacgaagcatagcttatgtatgaggtgtaacaaaattggaaacaatagccatgcaaggtgaagaatgtcaccaactcagaaacccttcttcattgacgtgtccctcactcactctcctctcttcactataaatcgccactcttcgtgttctccacttcaccaactccttcaaacttattaacactttccttagttcaatatggggaagcccttcttcactctctctctttcttccctttgcttgctactcttgtcgagtgcatgctattacctccagcaagttcaacgagtgccaactcaacaacctcaacgcgttggaacccgaccaccgcgttgagtccgaaggtggtcttattgaaacatggaactctcaacaccctgagctgcaatgcgccggtgtcactgtttccaaacgcaccctcaaccgcaacggcctccacttgccatcttactcaccttatccccaaatgatcattgtcgttcaaggtgcgtaatattagtaagaagtatttatcagcttaacgtgataacaataatagtaatatgaaatatttattaaatttttataattaatctctgctagaaaatttgattaatcattttagtagaa

SEQ ID NO: 2758 - DNA, 659 bp, Artificial
  Mutations within GlyA3B4 introduced by GmGlyA3B4_T02TALE nuclease
gttcatgtacggttgcagatataaacgaagcatagcttatgtatgaggtgtaacaaaattggaaacaatagccatgcaaggtgaagaatgtcaccaactcagaaacccttcttcattgacgtgtccctcactcactctcctctcttcactataaatcgccactcttcgtgttctccacttcaccaactccttcaaacttattaacactttccttagttcaatatggggaagcccttcttcactctctctctttcttccctttgcttgctactcttgtcgagtgcatttacctccagcaagttcaacgagtgccaactcaacaacctcaacgcgttggaacccgaccaccgcgttgagtccgaaggtggtcttattgaaacatggaactctcaacaccctgagctgcaatgcgccggtgtcactgtttccaaacgcaccctcaaccgcaacggcctccacttgccatcttactcaccttatccccaaatgatcattgtcgttcaaggtgcgtaatattagtaagaagtatttatcagcttaacgtgataacaatatagtaatatgaaatatttattaaatttttataattaatctctgctagaaaatttgattaatcattttagtagaatttgttttctcaactaggttttaaaacacca

SEQ ID NO: 2759 - DNA, 617 bp, Artificial
  Mutations within GlyA3B4 introduced by GmGlyA3B4_T02TALE nuclease
gttcatgtacggttgcagatataaacgaagcatagcttatgtatgaggtgtaacaaaattggaaacaatagccatgcaaggtgaagaatgtcaccaactcagaaacccttcttcattgacgtgtccctcactcactctcctctcttcactataaatcgccactcttcgtgttctccacttcaccaactccttcaaacttattaacactttccttagttcaatatggggaagcccttcttcactctctctctttcttccctttgcttgctactcttgtcgagtgccaactcaacaacctcaacgcgttggaacccgaccaccgcgttgagtccgaaggtggtcttattgaaacatggaactctcaacaccctgagctgcaatgcgccggtgtcactgtttccaaacgcaccctcaaccgcaacggcctccacttgccatcttactcaccttatccccaaatgatcattgtcgttcaaggtgcgtaatattagtaagaagtatttatcagcttaacgtgataacaataatagtaatatgaaatatttattaatttttataattaatctctgctagaaaatttgattaatcatttttagtagaatttgtttttctcaact

SEQ ID NO: 2760 - DNA, 533 bp, Artificial
  Mutations within GlyA3B4 introduced by GmGlyA3B4_T02TALE nuclease
gttcatgtacggttgcagatataaacgaagcatagcttatgtatgaggtgtaacaaaattggaaacaatagccatgcaaggtgaagaatgtcaccaactcagaaacccttcttcattgacgtgtccctcactcactctcctctcttcactataaatcgccactcttcgtgttctccacttcaccaactccttcaaacttatcaacaacctcaacgcgttggaacccgaccaccgcgttgagtccgaaggtggtcttattgaaacatggaactctcaacaccctgagctgcaatgcgccggtgtcactgtttccaaacgcaccctcaaccgcaacggcctccacttgccatcttactcaccttatccccaaatgatcattgtcgttcaaggtgcgtaatattagtaagaagtatttatcagcttaacgtgataacaataatagtaatatgaaatatttattaaattttttataattaatctctgctagaaaatttgattaatcatttttagtagaatttgttttttctcaacta

SEQ ID NO: 2761 - DNA, 659 bp, Artificial
  Mutations within GlyA3B4 introduced by GmGlyA3B4_T02TALE nuclease
gttcatgtacggttgcagatataaacgaagcatagcttatgtatgaggtgtaacaaaattggaaacaatagccatgcaaggtgaagaatgtcaccaactcagaaacccttcttcattgacgtgtccctcactcactctcctctcttcactataaatcgccactcttcgtgttctccacttcaccaactccttcaaacttattaacactttccttagttcaatatggggaagcccttcttcactctctctctttcttccctttgcttgctactcttgtcgagtgctttacctccagcaagttcaacgagtgccaactcaacaacctcaacgcgttggaacccgaccaccgcgttgagtccgaaggtggtcttattgaaacatggaactctcaacaccctgagctgcaatgcgccggtgtcactgtttccaaacgcaccctcaaccgcaacggcctccacttgccatcttactcaccttatccccaaatgatcattgtcgttcaaggtgcgtaatattagtaagaagtatttatcagcttaacgtgataacaataatagtaatatgaaatatttattaaatttttataattaatctctgctagaaaatttgattaatcattttagtagaatttgttttctcaactaggttttaaaacacca

SEQ ID NO: 2762 - DNA, 666 bp, Artificial
  Mutations within GlyA3B4 introduced by GmGlyA3B4_T02TALE nuclease
gttcatgtacggttgcagatataaacgaagcatagcttatgtatgaggtgtaacaaaattggaaacaatagccatgcaaggtgaagaatgtcaccaactcagaaacccttcttcattgacgtgtccctcactcactctcctctcttcactataaatcgccactcttcgtgttctccacttcaccaactccttcaaacttattaacactttccttagttcaatatggggaagcccttcttcactctctctctttcttccctttgcttgctactcttgtcgagtgcatgctattacctccagcaagttcaacgagtgccaactcaacaacctcaacgcgttggaacccgaccaccgcgttgagtccgaaggtggtcttattgaaacatggaactctcaacaccctgagctgcaatgcgccggtgtcactgtttccaaacgcaccctcaaccgcaacggcctccacttgccatcttactcaccttatccccaaatgatcattgtcgttcaaggtgcgtaatattagtaagagtatttatcagcttaacgtgatacaataatagtaatatgaaatatttattaaatttttataattaatctctgctagaaaatttgattaatcattttagtagaatttgtttttctcaactaggtttttaaaacaccaca

SEQ ID NO: 2763 - DNA, 639 bp, Artificial; identical to SEQ ID NO: 1826
  Mutations within GlyA3B4 introduced by GmGlyA3B4_T02TALE nuclease

SEQ ID NO: 2764 - DNA, 661 bp, Artificial; identical to SEQ ID NO: 2300
  Mutations within GlyA3B4 introduced by GmGlyA3B4_T02TALE nuclease

SEQ ID NO: 2765 - DNA, 659 bp, Artificial
  Mutations within GlyA3B4 introduced by GmGlyA3B4_T02TALE nuclease
gttcatgtacggttgcagatataaacgaagcatagcttatgtatgaggtgtaacaaaattggaaacaatagccatgcaaggtgaagaatgtcaccaactcagaaaccccttcttcattgacgtgtccctcactcactctcctctcttcactataaatcgccactcttcgtgttctccacttcaccaactccttcaaacttattaacactttccttagttcaatatggggaagcccttcttcactctctctctttcttccctttgcttgctactcttgtcgagtgcattgctattacctccagcaagttcaacgagtgccaactcaacaacctcaacgcgttggaacccgaccaccgcgttgagtccgaaggtggtcttattgaaacatggaactctcaacaccctgagctgcaatgcgccggtgtcactgtttccaaacgcaccctcaaccgcaacggcctccacttgccatcttactcaccttatccccaaatgatcatttcgttcaaggtgcgtaatattagtaagagtatttatcagcttaacgtgataacaataatagtaatatgaaaatatttattaaatttttataattaatctctgctagaaaatttgattaatcatttttagtagaatttgtttttctcaactaggttttt

SEQ ID NO: 2766 - DNA, 659 bp, Artificial
  Mutations within GlyA3B4 introduced by GmGlyA3B4_T02TALE nuclease
gttcatgtacggttgcagatataaacgaagcatagcttatgtatgaggtgtaacaaaattggaaacaatagccatgcaaggtgaagaatgtcaccaactcagaaaccccttcttcattgacgtgtccctcactcactctcctctcttcactataaatcgccactcttcgtgttctccacttcaccaactccttcaaacttattaacactttccttagttcaatatggggaagcccttcttcactctctctctttcttccctttgcttgctactcttgtcgagtgcatgctattacctccagcaagttcaacgagtgccaactcaacaacctcaacgcgttggaacccgaccaccgcgttgagtccgaaggtggtcttattgaaacatggaactctcaacaccctgagctgcaatgcgccggtgtcactgtttccaaacgcaccctcaaccgcaacggcctccacttgccatcttactcaccttatccccaaatgatcattgtcgttcaaggtgcgtaatattagtaagagtatttatcagcttaacgtgataacaataatagtaatatgaaatatttattaaatttttataattaatctctgctagaaaatttgattaatcattttagtagaatttgtttttctcaactaggttttaaa

SEQ ID NO: 2767 - DNA, 604 bp, Artificial
  Mutations within GlyA3B4 introduced by GmGlyA3B4_T02TALE nuclease
gttcatgtacggttgcagatataaacgaagcatagcttatgtatgaggtgtaacaaaattggaaacaatagccatgcaaggtgaagaatgtcaccaactcagaaacccttcttcattgacgtgtccctcactcactctcctctcttcactataaatcgccactcttcgtgttctccacttcaccaactccttcaaacttattaacactttccttagttcaatatggggaagcccttcttcactctctctctttcttccctttgcttgctactcaactcaacaacctcaacgcgttggaacccgaccaccgcgttgagtccgaaggtggtcttattgaaacatggaactctcaacaccctgagctgcaatgcgccggtgtcactgtttccaaacgcaccctcaaccgcaacggcctccacttgccatcttactcaccttatccccaaatgatcattgtcgttcaaggtgcgtaatattagtaagaagtatttatcagcttaacgtgataacaataatagtaatatgaaatatttattaatttttataattaatctctgctagaaaatttgattaatcatttttagtagaatttgtttttctcaac

SEQ ID NO: 2768 - DNA, 515 bp, Artificial
  Mutations within GlyA3B4 introduced by GmGlyA3B4_T02TALE nuclease
gttcatgtacggttgcagatataaacgaagcatagcttatgtatgaggtgtaacaaaattggaaacaatagccatgcaaggtgaagaatgtcaccaactcagaaacccttcttcattgacgtgtccctcactcactctcctctcttcactataaatcgccactcttcgtgttctccacttcaccaactccttcaaacttattaacactttccttagttcaatatggggaagcccttcttcactctcaacaccctgagctgcaatgcgccggtgtcactgtttccaaacgcaccctcaaccgcaacggcctccacttgccatcttactcaccttatccccaaatgatcattgtcgttcaaggtgcgtaatattagtaagaagtattttatcagcttaacgtgataacaataatagtaatatgaaatatttattaaattttttataattaatctctgctagaaaatttgattaatcatttttagtagaatttgtttttctcaactaggttttaaaca

SEQ ID NO: 2769 - DNA, 582 bp, Artificial; identical to SEQ ID NO: 1832
  Mutations within GlyA3B4 introduced by GmGlyA3B4_T02TALE nuclease

SEQ ID NO: 2770 - DNA, 665 bp, Artificial
  Mutations within GlyA3B4 introduced by GmGlyA3B4_T02TALE nuclease
gttcatgtacggttgcagatataaacgaagcatagcttatgtatgaggtgtaacaaaattggaaacaatagccatgcaaggtgaagaatgtcaccaactcagaaacccttcttcattgacgtgtccctcactcactctcctctcttcactataaatcgccactcttcgtgttctccacttcaccaactccttcaaacttattaacactttccttagttcaatatggggaagcccttcttcactctctctctttcttccctttgcttgctactcttgtcgagtgcatgtctattacctccagcaagttcaacgagtgccaactcaacaacctcaacgcgttggaacccgaccaccgcgttgagtccgaaggtggtcttattgaaacatggaactctcaacaccctgagctgcaatgcgccggtgtcactgtttccaaacgcaccctcaaccgcaacggcctccacttgccatcttactcaccttatccccaaatgatcattgtcgttcaaggtgcgtaatattagtaagagtatttatcagcttaacgtgataacaataatagtaatatgaaatatttattaaatttttataattaatctctgctagaaaatttgattaatcattttagtagaatttgtttttctcaactaggttttaaaacacca

SEQ ID NO: 2771 - DNA, 416 bp, Artificial
  Mutations within GlyA3B4 introduced by GmGlyA3B4_T02TALE nuclease
gttcatgtacggttgcagatataaacgaagcatagcttatgtatgaggtgtaacaaaattggaaacaatagccatgcaaggtgaagaatgtcaccaactcagaaacccttcttcattgacgtgtccctcactcactctcctctcttcactataaatcgccactcttcgtgttctccacttcaccaactccttcaaacttattaacactttccttagttcaatatggggaagcccttcttcactctctctctttcttccctttgctgctactcttgtcgagtgcatatcagcttaacgtgataacaataatagtaatatgaaatatttattaaattttttataattaatctctgctagaaaatttgattaatcatttttagtagaatttgtttttctcaactaggttttaaacacca

SEQ ID NO: 2772 - DNA, 657 bp, Artificial
  Mutations within GlyA3B4 introduced by GmGlyA3B4_T02TALE nuclease
gttcatgtacggttgcagatataaacgaagcatagcttatgtatgaggtgtaacaaaattggaaacaatagccatgcaaggtgaagaatgtcaccaactcagaaacccttcttcattgacgtgtccctcactcactctcctctcttcactataaatcgccactcttcgtgttctccacttcaccaactccttcaaacttattaacactttccttagttcaatatggggaagcccttcttcactctctctctttcttccctttgcttgctactcttgtcgagtattacctccagcaagttcaacgagtgccaactcaacaacctcaacgcgttggaacccgaccaccgcgttgagtccgaaggtggtcttattgaaacatggaactctcaacaccctgagctgcaatgcgccggtgtcactgtttccaaacgcaccctcaaccgcaacggcctccacttgccatcttactcaccttatccccaaatgatcattgtcgttcaaggtgcgtaatattagtaagaagtatttatcagcttaacgtgataacaataatagtaatatgaaatatttattaaatttttataattaatctctgctagaaaatttgattaatcattttagtagaatttgttttctcaactaggttttaaaacacca

SEQ ID NO: 2773 - DNA, 633 bp, Artificial; identical to SEQ ID NO: 2030
  Mutations within GlyA3B4 introduced by GmGlyA3B4_T02TALE nuclease

SEQ ID NO: 2774 - DNA, 639 bp, Artificial; identical to SEQ ID NO: 1826
  Mutations within GlyA3B4 introduced by GmGlyA3B4_T02TALE nuclease

SEQ ID NO: 2775 - DNA, 636 bp, Artificial
  Mutations within GlyA3B4 introduced by GmGlyA3B4_T02TALE nuclease
  misc_feature (531): n is a or c or t or g
gttcatgtacggttgcagatataaacgaagcatagcttatgtatgaggtgtaacaaaattggaaacaatagccatgcaaggtgaagaatgtcaccaactcagaaaccccttcttcattgacgtgtccctcactcactctcctctcttcactataaatcgccactcttcgtgttctccacttcaccaactccttcaaacttattaacactttccttagttcaatatggggaagcccttcttcactctctctctttcttccctttgcttgctactcttgtcgagtgcatgctattacctccagcaagttcaacgagtgccaactcaacaacctcaacgcgttggaacccgaccaccgcgttgagtccgaaggtggtcttattgaaacatggaactctcaacaccctgagctgcaatgcgccggtgtcactgtttccaaacgcaccctcaaccgcaacggcctccacttgccatcttactcaccttatccccaaatgatcattgtcgttcaaggtgcgtaatattagtaagagnatttatcagcttaacgtgatacaataatagtaatatgaaatatttattaaatttttataattaatctctgctagaaaatttgattaatcattttagtagaatttg

SEQ ID NO: 2776 - DNA, 701 bp, Artificial
  Mutations within GlyA3B4 introduced by GmGlyA3B4_T02TALE nuclease
gttcatgtacggttgcagatataaacgaagcatagcttatgtatgaggtgtaacaaaattggaaacaatagccatgcaaggtgaagaatgtcaccaactcagaaaccccttcttcattgacgtgtccctcactcactctcctctcttcactataaatcgccactcttcgtgttctccacttcaccaactccttcaaacttattaacactttccttagttcaatatggggaagcccttcttcactctctctctttcttccctttgcttgctactcttgtcgagtgcatgattatttgctattatgctgttccggggctgttcgtgtccggtgcagattatttgctattacctccagcaagttcaacgagtgccaactcaacaacctcaacgcgttggaacccgaccaccgcgttgagtccgaaggtggtcttattgaaacatggaactctcaacaccctgagctgcaatgcgccggtgtcactgtttccaaacgcaccctcaaccgcaacggcctccacttgccatcttactcaccttatccccaaatgatcattgtcgttcaaggtgcgatgaatattagtaaatgaatgtaatttaatcatgcttaatcgtgataacaataatagtaatatgaaatatttattaaattttttataatttaatctctgctagaaaatttgaattaatcatttttagtagaa

SEQ ID NO: 2777 - DNA, 653 bp, Artificial
  Mutations within GlyA3B4 introduced by GmGlyA3B4_T02TALE nuclease
gttcatgtacggttgcagatataaacgaagcatagcttatgtatgaggtgtaacaaaattggaaacaatagccatgcaaggtgaagaatgtcaccaactcagaaacccttcttcattgacgtgtccctcactcactctcctctcttcactataaatcgccactcttcgtgttctccacttcaccaactccttcaaacttattaacactttccttagttcaatatggggaagcccttcttcactctctctctttcttccctttgcttgctactcttgtcgagtgcattacctccagcaagttcaacgagtgccaactcaacaacctcaacgcgttggaacccgaccaccgcgttgagtccgaaggtggtcttattgaaacatggaactctcaacaccctgagctgcaatgcgccggtgtcactgtttccaaacgcaccctcaaccgcaacggcctccacttgccatcttactcaccttatccccaaatgatcattgtcgttcaaggtgcgtaatattagtaagaagtatttatcagcttaacgtgataacaatatagtaatatgaaatatttattaaatttttataattaatctctgctagaaaatttgattaatcattttagtagaatttgtttttctcaactaggttttaaa

SEQ ID NO: 2778 - DNA, 655 bp, Artificial; identical to SEQ ID NO: 2200
  Mutations within GlyA3B4 introduced by GmGlyA3B4_T02TALE nuclease

SEQ ID NO: 2779 - DNA, 623 bp, Artificial
  Mutations within GlyA3B4 introduced by GmGlyA3B4_T02TALE nuclease
gttcatgtacggttgcagatataaacgaagcatagcttatgtatgaggtgtaacaaaattggaaacaatagccatgcaaggtgaagaatgtcaccaactcagaaacccttcttcattgacgtgtccctcactcactctcctctcttcactataaatcgccactcttcgtgttctccacttcaccaactccttcaaacttattaacactttccttagttcaatatggggaagcccttcttcactctctctctttcttccctttgcttgctactcttgtcgagtgcaattacctccagcaagttcaacgagtgccaactcaacaacctcaacgcgttggaacccgaccaccgcgttgagtccgaaggtggtcttattgaaacatggaactctcaacaccctgagctgcaatgcgccggtgtcactgtttccaaacgcaccctcaaccgcaacggcctccacttgccatcttactcaccttatccccaaatgatcattgtcgttcaaggtgcgtaatattagtaagaagtatttatcagcttaacgtgataacaataatagtaatatgaaatatttattaaatttttataattaatctctgctagaaaatttgattaatcatttta

SEQ ID NO: 2780 - DNA, 647 bp, Artificial
  Mutations within GlyA3B4 introduced by GmGlyA3B4_T02TALE nuclease
gttcatgtacggttgcagatataaacgaagcatagcttatgtatgaggtgtaacaaaattggaaacaatagccatgcaaggtgaagaatgtcaccaactcagaaacccttcttcattgacgtgtccctcactcactctcctctcttcactataaatcgccactcttcgtgttctccacttcaccaactccttcaaacttattaacactttccttagttcaatatggggaagcccttcttcactctctctctttcttccctttgcttgctactcttgtcgagtgcatattacctccagcaagttcaacgagtgccaactcaacaacctcaacgcgttggaacccgaccaccgcgttgagtccgaaggtggtcttattgaaacatggaactctcaacaccctgagctgcaatgcgccggtgtcactgtttccaaacgcaccctcaaccgcaacggcctccacttgccatcttactcaccttatccccaaatgatcattgtcgttcaaggtgcgtaatattagtaagaagtatttatcagcttaacgtgataacaatatagtaatatgaaatatttattaaatttttataattaatctctgctagaaaatttgattaatcattttagtagaatttgttttctcaactagg

SEQ ID NO: 2781 - DNA, 613 bp, Artificial; identical to SEQ ID NO: 2523
  Mutations within GlyA3B4 introduced by GmGlyA3B4_T02TALE nuclease

SEQ ID NO: 2782 - DNA, 535 bp, Artificial; identical to SEQ ID NO: 1976
  Mutations within GlyA3B4 introduced by GmGlyA3B4_T02TALE nuclease

SEQ ID NO: 2783 - DNA, 666 bp, Artificial
  Mutations within GlyA3B4 introduced by GmGlyA3B4_T02TALE nuclease
gttcatgtacggttgcagatataaacgaagcatagcttatgtatgaggtgtaacaaaattggaaacaatagccatgcaaggtgaagaatgtcaccaactcagaaacccttcttcattgacgtgtccctcactcactctcctctcttcactataaatcgccactcttcgtgttctccacttcaccaactccttcaaacttattaacactttccttagttcaatatggggaagcccttcttcactctctctctttcttccctttgcttgctactcttgtcgagtgctgctattacctccagcaagttcaacgagtgccaactcaacaacctcaacgcgttggaacccgaccaccgcgttgagtccgaaggtggtcttattgaaacatggaactctcaacaccctgagctgcaatgcgccggtgtcactgtttccaaacgcaccctcaaccgcaacggcctccacttgccatcttactcaccttatccccaaatgatcattgtcgttcaaggtgcgtaatattagtaagaagtatttatcagcttaacgtgataacaatatagtaatatgaaatatttattaaatttttataattaatctctgctagaaaatttgattaatcattttagtagaatttgtttttctcaactaggtttttaaaacaccaca

SEQ ID NO: 2784 - DNA, 701 bp, Artificial
  Mutations within GlyA3B4 introduced by GmGlyA3B4_T02TALE nuclease
gttcatgtacggttgcagatataaacgaagcatagcttatgtatgaggtgtaacaaaattggaaacaatagccatgcaaggtgaagaatgtcaccaactcagaaaccccttcttcattgacgtgtccctcactcactctcctctcttcactataaatcgccactcttcgtgttctccacttcaccaactccttcaaacttattaacactttccttagttcaatatggggaagcccttcttcactctctctctttcttccctttgcttgctactcttgtcgagtgcatgagacggtccagcggctgttgccggtgctgtgccaggcccacggctattacctccagcaagttcaacgagtgccaactcaacaacctcaacgcgttggaacccgaccaccgcgttgagtccgaaggtggtcttattgaaacatggaactctcaacaccctgagctgcaatgcgccggtgtcactgtttccaaacgcaccctcaaccgcaacggcctccacttgccatcttactcaccttatccccaaatgatcattgtcgttcaaggtgcgtaatattagtaagaagtatttatcagcttaacgtgataacaataatagtaatatgaaatatttattaaatttttataattaatctctgctagaaaatttgattaatcatttttagtagaatttgtttttctcaactaggtttt

SEQ ID NO: 2785 - DNA, 646 bp, Artificial; identical to SEQ ID NO: 793
  Mutations within GlyA3B4 introduced by GmGlyA3B4_T02TALE nuclease

SEQ ID NO: 2786 - DNA, 661 bp, Artificial
  Mutations within GlyA3B4 introduced by GmGlyA3B4_T02TALE nuclease
gttcatgtacggttgcagatataaacgaagcatagcttatgtatgaggtgtaacaaaattggaaacaatagccatgcaaggtgaagaatgtcaccaactcagaaacccttcttcattgacgtgtccctcactcactctcctctcttcactataaatcgccactcttcgtgttctccacttcaccaactccttcaaacttattaacactttccttagttcaatatggggaagcccttcttcactctctctctttcttccctttgcttgctactcttgtcgagtgctattacctccagcaagttcaacgagtgccaactcaacaacctcaacgcgttggaacccgaccaccgcgttgagtccgaaggtggtcttattgaaacatggaactctcaacaccctgagctgcaatgcgccggtgtcactgtttccaaacgcaccctcaaccgcaacggcctccacttgccatcttactcaccttatccccaaatgatcattgtcgttcaaggtgcgtaatattagtaagaagtatttatcagcttaacgtgataacaataatagtaatatgaaatatttattaaatttttataattaatctctgctagaaaatttgattaatcattttagtagaatttgtttttctcaactaggttttaaaacacca

SEQ ID NO: 2787 - DNA, 689 bp, Artificial
  Mutations within GlyA3B4 introduced by GmGlyA3B4_T02TALE nuclease
gttcatgtacggttgcagatataaacgaagcatagcttatgtatgaggtgtaacaaaattggaaacaatagccatgcaaggtgaagaatgtcaccaactcagaaacccttcttcattgacgtgtccctcactcactctcctctcttcactataaatcgccactcttcgtgttctccacttcaccaactccttcaaacttattaacactttccttagttcaatatggggaagcccttcttcactctctctctttcttccctttgcttgctactcttgtcgagtgcatgcttggcgctggagacggtccagcggctgttgctattacctccagcaagttcaacgagtgccaactcaacaacctcaacgcgttggaacccgaccaccgcgttgagtccgaaggtggtcttattgaaacatggaactctcaacaccctgagctgcaatgcgccggtgtcactgtttccaaacgcaccctcaaccgcaacggcctccacttgccatcttactcaccttatccccaaatgatcattgtcgttcaaggtgcgtaatattagtaagaagtatttatcagcttaacgtgataacaataatagtaatatgaaatattttattaaatttttataattaatctctgctagaaaatttgattaatcatttttagtagaatttgtttttctcaactaggtttt

SEQ ID NO: 2788 - DNA, 649 bp, Artificial
  Mutations within GlyA3B4 introduced by GmGlyA3B4_T02TALE nuclease
gttcatgtacggttgcagatataaacgaagcatagcttatgtatgaggtgtaacaaaattggaaacaatagccatgcaaggtgaagaatgtcaccaactcagaaacccttcttcattgacgtgtccctcactcactctcctctcttcactataaatcgccactcttcgtgttctccacttcaccaactccttcaaacttattaacactttccttagttcaatatggggaagcccttcttcactctctctctttcttccctttgcttgctactcttgtcgagtgcaacgagtgccaactcaacaacctcaacgcgttggaacccgaccaccgcgttgagtccgaaggtggtcttattgaaacatggaactctcaacaccctgagctgcaatgcgcggtgtcactgtttccaaacgcaccctcaaccgcaacggcctccacttgccatcttactcaccttatcccccaaatgatcattgtcgttcaaggtgcgtaaatattagtaagaagtatttatcagcttaacgtgataacaataatagtaaatatgaaatatttattaaattttttataattaatctctgctagaaaatttgattaaatcatttttagtagaatttgtttttctcaactaggttttaaaacaccaca

SEQ ID NO: 2789 - DNA, 684 bp, Artificial
  Mutations within GlyA3B4 introduced by GmGlyA3B4_T02TALE nuclease
gttcatgtacggttgcagatataaacgaagcatagcttatgtatgaggtgtaacaaaattggaaacaatagccatgcaaggtgaagaatgtcaccaactcagaaacccttcttcattgacgtgtccctcactcactctcctctcttcactataaatcgccactcttcgtgttctccacttcaccaactccttcaaacttattaacactttccttagttcaatatggggaagcccttcttcactctctctctttcttccctttgcttgctactcttgtcgagtgcataccgtctccagcgcctgcttgccaccgccattgctggcgatggccaccacctgctgggggtcaagccgtgggcctggcacagcaccggcaacagccgctttgctattacctccagcaagttcaacgagtgccaactcaacaacctcaacgcgttggaacccgaccaccgcgttgagtccgaaggtggtcttattgaaacatggaactctcaacaccctgagctgcaatgcgccggtgtcactgtttccaaacgcaccctcaaccgcaacggcctccacttgccatcttactcaccttatccccaaatgatcattgtcgttcaaggtgcgtaatattagtaagaagtatttatcgcttaacgtgataacaataatagtaatatgaaaatatttattaaa

SEQ ID NO: 2790 - DNA, 649 bp, Artificial; identical to SEQ ID NO: 1901
  Mutations within GlyA3B4 introduced by GmGlyA3B4_T02TALE nuclease

SEQ ID NO: 2791 - DNA, 615 bp, Artificial
  Mutations within GlyA3B4 introduced by GmGlyA3B4_T02TALE nuclease
  misc_feature (550): n is a or c or t or g
gttcatgtacggttgcagatataaacgaagcatagcttatgtatgaggtgtaacaaaattggaaacaatagccatgcaaggtgaagaatgtcaccaactcagaaacccttcttcattgacgtgtccctcactcactctcctctcttcactataaatcgccactcttcgtgttctccacttcaccaactccttcaaacttattaacactttccttagttcaatatggggaagcccttcttcactctctctctttcttccctttgcttgctactcttgtcgagtgcaagttcaacgagtgccaactcaacaacctcaacgcgttggaacccgaccaccgcgttgagtccgaaggtggtcttattgaaacatggaactctcaacaccctgagctgcaatgcgccggtgtcactgtttccaaacgcaccctcaaccgcaacggcctccacttgccatcttactcaccttatccccaaatgatcattgtcgttcaaggtgcgtaatattagtaagaagtatttatcagcttaacgtgataacaataatagtaatntgaaatatttattaaattttttataattaatctctgctagaaaatttgattaatctttttagtag

SEQ ID NO: 2792 - DNA, 668 bp, Artificial; identical to SEQ ID NO: 2325
  Mutations within GlyA3B4 introduced by GmGlyA3B4_T02TALE nuclease

SEQ ID NO: 2793 - DNA, 610 bp, Artificial
  Mutations within GlyA3B4 introduced by GmGlyA3B4_T02TALE nuclease
gttcatgtacggttgcagatataaacgaagcatagcttatgtatgaggtgtaacaaaattggaaacaatagccatgcaaggtgaagaatgtcaccaactcagaaacccttcttcattgacgtgtccctcactcactctcctctcttcactataaatcgccactcttcgtgttctccacttcaccaactccttcaaacttattaacactttccttagttcaatatggggaagcccttcttcactctctctctttcttccctttgcttgctactcttgtccagcaagttcaacgagtgccaactcaacaacctcaacgcgttggaacccgaccaccgcgttgagtccgaaggtggtcttattgaaacatggaactctcaacaccctgagctgcaatgcgcggtgtcactgtttccaaacgcaccctcaaccgcaacggcctccacttgccatcttactcaccttatccccaaatgatcattgtcgttcaaggtgcgtaaatattagtaagaagtatttatcagcttaacgtgataacaataatagttaatatgaaatatttataaatttttataattaatctctgctagaaaatttgattaatcatttttag

SEQ ID NO: 2794 - DNA, 650 bp, Artificial; identical to SEQ ID NO: 2452
  Mutations within GlyA3B4 introduced by GmGlyA3B4_T02TALE nuclease

SEQ ID NO: 2795 - DNA, 635 bp, Artificial; identical to SEQ ID NO: 1775
  Mutations within GlyA3B4 introduced by GmGlyA3B4_T02TALE nuclease

SEQ ID NO: 2796 - DNA, 599 bp, Artificial
  Mutations within GlyA3B4 introduced by GmGlyA3B4_T02TALE nuclease
gttcatgtacggttgcagatataaacgaagcatagcttatgtatgaggtgtaacaaaattggaaacaatagccatgcaaggtgaagaatgtcaccaactcagaaacccttcttcattgacgtgtccctcactcactctcctctcttcactataaatcgccactcttcgtgttctccacttcaccaactccttcaaacttattaacactttccttagttcaatatggggaagcccttcttcactctctctctttcaacgagtgccaactcaacaacctcaacgcgttggaacccgaccaccgcgttgagtccgaaggtggtcttattgaaacatggaactctcaacaccctgagctgcaatgcgccggtgtcactgtttccaaacgcaccctcaaccgcaacggcctccacttgccatcttactcaccttatccccaaatgatcattgtcgttcaaggtgcgtaatattagtaagaagtatttatcagcttaacgtgataacaataatagtaatatgaaatatttattaatttttataattaatctctgctagaaaatttgattaatcatttttagtagaatttgtttttctcaactagg

SEQ ID NO: 2797 - DNA, 646 bp, Artificial; identical to SEQ ID NO: 2456
  Mutations within GlyA3B4 introduced by GmGlyA3B4_T02TALE nuclease

SEQ ID NO: 2798 - DNA, 656 bp, Artificial
  Mutations within GlyA3B4 introduced by GmGlyA3B4_T02TALE nuclease
  misc_feature (531): n is a or c or t or g
gttcatgtacggttgcagatataaacgaagcatagcttatgtatgaggtgtaacaaaattggaaacaatagccatgcaaggtgaagaatgtcaccaactcagaaaccccttcttcattgacgtgtccctcactcactctcctctcttcactataaatcgccactcttcgtgttctccacttcaccaactccttcaaacttattaacactttccttagttcaatatggggaagcccttcttcactctctctctttcttccctttgcttgctactcttgtcgagtgcatgctattacctccagcaagttcaacgagtgccaactcaacaacctcaacgcgttggaacccgaccaccgcgttgagtccgaaggtggtcttattgaaacatggaactctcaacaccctgagctgcaatgcgccggtgtcactgtttccaaacgcaccctcaaccgcaacggcctccacttgccatcttactcaccttatccccaaatgatcattgtcgttcaaggtgcgtaatattagtaagagnatttatcagcttaacgtgataacaatatagtaatatgaaatatttattaaatttttataattaatctctgctagaaaatttgattaatcattttagtagaatttgtttttctcaactaggttttt

SEQ ID NO: 2799 - DNA, 665 bp, Artificial; identical to SEQ ID NO: 1912
  Mutations within GlyA3B4 introduced by GmGlyA3B4_T02TALE nuclease

SEQ ID NO: 2800 - DNA, 595 bp, Artificial
  Mutations within GlyA3B4 introduced by GmGlyA3B4_T02TALE nuclease
gttcatgtacggttgcagatataaacgaagcatagcttatgtatgaggtgtaacaaaattggaaacaatagccatgcaaggtgaagaatgtcaccaactcagaaacccttcttcattgacgtgtccctcactcactctcctctcttcactataaatcgccactcttcgtgttctccacttcaccaactccttcaaacttattaacactttccttagttcaatatggggaagcccttcttcactctctctctttcaacgagtgccaactcaacaacctcaacgcgttggaacccgaccaccgcgttgagtccgaaggtggtcttattgaaacatggaactctcaacaccctgagctgcaatgcgccggtgtcactgtttccaaacgcaccctcaaccgcaacggcctccacttgccatcttactcaccttatccccaaatgatcattgtcgttcaaggtgcgtaatattagtaagaagtatttatcagcttaacgtgataacaataatagtaatatgaaatatttattaatttttataattaatctctgctagaaaatttgattaatcatttttagtagaatttgtttttctcaac

SEQ ID NO: 2801 - DNA, 659 bp, Artificial
  Mutations within GlyA3B4 introduced by GmGlyA3B4_T02TALE nuclease
gttcatgtacggttgcagatataaacgaagcatagcttatgtatgaggtgtaacaaattggaaacaatagccatgcaaggtgaagaatgtcaccaactcagaaacccttcttcattgacgtgtccctcactcactctcctctcttcactataaatcgccactcttcgtgttctccacttcaccaactccttcaaacttattaacactttccttagttcaatatggggaagcccttcttcactctctctctttcttccctttgcttgctactcttgtcgagtgcatacctccagcaagttcaacgagtgccaactcaacaacctcaacgcgttggaacccgaccaccgcgttgagtccgaaggtggtcttattgaaacatggaactctcaacaccctgagctgcaatgcgccggtgtcactgtttccaaacgcaccctcaaccgcaacggcctccacttgccatcttactcaccttatccccaaatgatcattgtcgttcaaggtgcgtaatattagtaagaagtatttatcagcttaacgtgataacaataatagtaatatgaaatatttattaaatttttataattaatctctgctagaaaatttgattaatcattttagtagaatttgtttttctcaactaggtttttaaaacacca

SEQ ID NO: 2802 - DNA, 575 bp, Artificial
  Mutations within GlyA3B4 introduced by GmGlyA3B4_T02TALE nuclease
gttcatgtacggttgcagatataaacgaagcatagcttatgtatgaggtgtaacaaaattggaaacaatagccatgcaaggtgaagaatgtcaccaactcagaaacccttcttcattgacgtgtccctcactcactctcctctcttcactataaatcgccactcttcgtgttctccacttcaccaactccttcaaacttattaacactttccttagttcaatatggggaagcccttcttcactctctctctttcttccctttgcttgctactcttgtcgagtgcatgctggcgatggccaccacctgctggggggtcaagccgtgggcctggcacagcaccggcaacagccgctggaccgtcactgtttccaaacgcaccctcaaccgcaacggcctccacttgccatcttactcaccttatccccaaatgatcattgtcgttcaaggtgcgtaatattagtaagaagtatttatcagcttaacgtgataacaataatagtaatatgaatatttattaaatttttataattaatctctgctagaaaatttgattaatcatttttagtagaatttg

SEQ ID NO: 2803 - DNA, 651 bp, Artificial
  Mutations within GlyA3B4 introduced by GmGlyA3B4_T02TALE nuclease
gttcatgtacggttgcagatataaacgaagcatagcttatgtatgaggtgtaacaaaattggaaacaatagccatgcaaggtgaagaatgtcaccaactcagaaacccttcttcattgacgtgtccctcactcactctcctctcttcactataaatcgccactcttcgtgttctccacttcaccaactccttcaaacttattaacactttccttagttcaatatggggaagcccttcttcactctctctctttcttccctttgcttgctactcttgtcgagtgcatgctattacctccagcaagttcaacgagtgccaactcaacaacctcaacgcgttggaacccgaccaccgcgttgagtccgaaggtggtcttattgaaacatggaactctcaacaccctgagctgcaatgcgccggtgtcactgtttccaaacgcaccctcaaccgcaacggcctccacttgccatcttactcaccttatccccaaatgatcattgtcgttcaaggtgcgtaatattagtaagaagtatttatcagcttaacgtgataacaataatagtaatatgaaatatttattaaatttttataattaatctctgctagaaaatttgattaatcattttagtagaatttgttttctcaactagg

SEQ ID NO: 2804 - DNA, 532 bp, Artificial
  Mutations within GlyA3B4 introduced by GmGlyA3B4_T02TALE nuclease
gttcatgtacggttgcagatataaacgaagcatagcttatgtatgaggtgtaacaaaattggaaacaatagccatgcaaggtgaagaatgtcaccaactcagaaacccttcttcattgacgtgtccctcactcactctcctctcttcactataaatcgccactcttcgtgttctccacttcaccaactccttcaaacttattaccactttccttagttcaatatggggaacccgaccaccgcgttgagtccgaaggtggtcttattgaacatggaactctcaacaccctgagctgcaatgcgccggtgtcactgtttccaacgcacctcaaccgcaacggcctccacttgccatcttactcaccttatccccaaatgatcattgtcgttcaaggtgcgtaatattagtaagaagtatttatcagcttaacgtgataacaataatagtaatatgaaatatttattaaattttttataattaatctctgctagaaaatttgattaatcatttttagtagaatttgttttttctc

SEQ ID NO: 2805 - DNA, 670 bp, Artificial
  Mutations within GlyA3B4 introduced by GmGlyA3B4_T02TALE nuclease
gttcatgtacggttgcagatataaacgaagcatagcttatgtatgaggtgtaacaaaattggaaacaatagccatgcaaggtgaagaatgtcaccaactcagaaaccccttcttcattgacgtgtccctcactcactctcctctcttcactataaatcgccactcttcgtgttctccacttcaccaactccttcaaacttattaacactttccttagttcaatatggggaagcccttcttcactctctctctttcttccctttgcttgctactcttgtcgagtgcattgctattacctccagcaagttcaacgagtgccaactcaacaacctcaacgcgttggaacccgaccaccgcgttgagtccgaaggtggtcttattgaaacatggaactctcaacaccctgagctgcaatgcgccggtgtcactgtttccaaacgcaccctcaaccgcaacggcctccacttgccatcttactcaccttatccccaaatgatcattgtcgttcaaggtgcgtaatattagtaagaagtatttatcagcttaacgtgataacaataatagtaatatgaaatatttattaaatttttataattaatctctgctagaaaatttgattaatcattttagtagaatttgtttttctcaactaggtttttaaaacaccaca

SEQ ID NO: 2806 - DNA, 536 bp, Artificial; identical to SEQ ID NO: 2556
  Mutations within GlyA3B4 introduced by GmGlyA3B4_T02TALE nuclease

SEQ ID NO: 2807 - DNA, 644 bp, Artificial
  Mutations within GlyA3B4 introduced by GmGlyA3B4_T02TALE nuclease
gttcatgtacggttgcagatataaacgaagcatagcttatgtatgaggtgtaacaaaattggaaacaatagccatgcaaggtgaagaatgtcaccaactcagaaacccttcttcattgacgtgtccctcactcactctcctctcttcactataaatcgccactcttcgtgttctccacttcaccaactccttcaaacttattaacactttccttagttcaatatggggaagcccttcttcactctctctctttcttccctttgcttgctactcttgtcgggttccctattacctccagcaagttcaacgagtgccaactcaacaacctcaacgcgttggaacccgaccaccgcgttgagtccgaaggtggtcttattgaaacatggaactctcaacaccctgagctgcaatgcgccggtgtcactgtttccaaacgcaccctcaaccgcaacggcctccacttgccatcttactcaccttatccccaaatgatcattgtcgttcaaggtgcgtaatattagtaagaagtatttatcagcttaacgtgataacaataatagtaatatgaaatatttattaaatttttataattaatctctgctagaaaatttgattaatcattttagtagaatttgttttctcaa

SEQ ID NO: 2808 - DNA, 667 bp, Artificial
  Mutations within GlyA3B4 introduced by GmGlyA3B4_T02TALE nuclease
gttcatgtacggttgcagatataaacgaagcatagcttatgtatgaggtgtaacaaaattggaaacaatagccatgcaaggtgaagaatgtcaccaactcagaaacccttcttcattgacgtgtccctcactcactctcctctcttcactataaatcgccactcttcgtgttctccacttcaccaactccttcaaacttattaacactttccttagttcaatatggggaagcccttcttcactctctctctttcttccctttgcttgctactcttgtcgagtgcatctattacctccagcaagttcaacgagtgccaactcaacaacctcaacgcgttggaacccgaccaccgcgttgagtccgaaggtggtcttattgaaacatggaactctcaacaccctgagctgcaatgcgccggtgtcactgtttccaaacgcaccctcaaccgcaacggcctccacttgccatcttactcaccttatccccaaatgatcattgtcgttcaaggtgcgtaatattagtaagaagtatttatcagcttaacgtgataacaataatagtaatatgaaaatatttattaaaatttttataattaatctctgctagaaaatttgattaatcattttagtagaatttgtttttctcaactaggtttttaaaacacca

SEQ ID NO: 2809 - DNA, 415 bp, Artificial
  Mutations within GlyA3B4 introduced by GmGlyA3B4_T02TALE nuclease
gttcatgtacggttgcagatataaacgaagcatagcttatgtatgaggtgtaacaaaattggaaacaatagccatgcaaggtgaagaatgtcaccaactcagaaacccttcttcattgacgtgtccctcactcactctcctctcttcactataaatcgccactcttcgtgttctccacttcaccaactccttcaaacttattaacactttccttagttcaatatggggaagcccttcttcactctctctctttcttccctttgcttgctactcttgtcgagtgcatatcagcttaacgtgataacaataatagtaatatgaaatatttattaaattttttataattaatctctgctagaaaatttgattaatcatttttagtagaatttgttttttctcaactaggttttaaaca

SEQ ID NO: 2810 - DNA, 522 bp, Artificial
  Mutations within GlyA3B4 introduced by GmGlyA3B4_T02TALE nuclease
gttcatgtacggttgcagatataaacgaagcatagcttatgtatgaggtgtaacaaaattggaaacaatagccatgcaaggtgaagaatgtcaccaactcagaaaccccttcttcattgacgtgtccctcactcactctcctctcttcactataaatcgccactcttcgtgttctccacttcaccaaactccttcaaacttattaacactttccttagttcaatatggggaagcccttcttcactctctctctttcttccctttgcttgctactcttgtcgagtgcatgctgtttccaaacgcaccctcaaccgcaacggcctccacttgccatcttactcaccttatccccaaatgatcattgtcgttcaaggtgcgtaatattagtaagaagtattttatcagcttaacgtgataacaataatagtaatatgaaaatattttattaaattttttataattaatctctgctagaaaatttgattaatcattttttagtagaatttgtttttctcaactagg

SEQ ID NO: 2811 - DNA, 730 bp, Artificial
  Mutations within GlyA3B4 introduced by GmGlyA3B4_T02TALE nuclease
  misc_feature (620); (663): n is a or c or t or g
gttcatgtacggttgcagatataaacgaagcatagcttatgtatgaggtgtaacaaaattggaaacaatagccatgcaaggtgaagaatgtcaccaactcagaaacccttcttcattgacgtgtccctcactcactctcctctcttcactataaatcgccactcttcgtgttctccacttcaccaactccttcaaacttattaacactttccttagttcaatatggggaagcccttcttcactctctctctttcttccctttgcttgctactcttgtcgagtgcagagcagacaagcccgtcagggcgcgtcagcgggtgttggcgggtgtcggggctggcttaactatgcggcatcagagcagattgtactgagagtgcaccatatgctattacctccagcaagttcaacgagtgccaactcaacaacctcaacgcgttggaacccgaccaccgcgttgagtccgaaggtggtcttattgaaacatggaactctcaacaccctgagctgcaatgcgccggtgtcactgtttccaaacgcaccctcaaccgcaacggcctccacttgccatcttactcaccttatccccaaatgatcattgtcgttcaaggtgcgtaatnttagtaagaagtatttcatcagcttaacgtgataacaataatngtaatatgaaatatttattaaattttttataattaatctctgctagaaaatttgattaatcattttt

SEQ ID NO: 2812 - DNA, 659 bp, Artificial
  Mutations within GlyA3B4 introduced by GmGlyA3B4_T02TALE nuclease
gttcatgtacggttgcagatataaacgaagcatagcttatgtatgaggtgtaacaaaattggaaacaatagccatgcaaggtgaagaatgtcaccaactcagaaacccttcttcattgacgtgtccctcactcactctcctctcttcactataaatcgccactcttcgtgttctccacttcaccaactccttcaaacttattaacactttccttagttcaatatggggaagcccttcttcactctctctctttcttccctttgcttgctactcttgtcgagtgcatacctccagcaagttcaacgagtgccaactcaacaacctcaacgcgttggaacccgaccaccgcgttgagtccgaaggtggtcttattgaaacatggaactctcaacaccctgagctgcaatgcgccggtgtcactgtttccaaacgcaccctcaaccgcaacggcctccacttgccatcttactcaccttatccccaaatgatcattgtcgttcaaggtgcgtaatattagtaagaagtatttatcagcttaacgtgataacaataatagtaatatgaaatatttattaaatttttataattaatctctgctagaaaatttgattaatcattttagtagaatttgttttctcaactaggtttttaaaacacca

SEQ ID NO: 2813 - DNA, 659 bp, Artificial
  Mutations within GlyA3B4 introduced by GmGlyA3B4_T02TALE nuclease
  misc_feature (561): n is a or c or t or g
gttcatgtacggttgcagatataaacgaagcatagcttatgtatgaggtgtaacaaaattggaaacaatagccatgcaaggtgaagaatgtcaccaactcagaaacccttcttcattgacgtgtccctcactcactctcctctcttcactataaatcgccactcttcgtgttctccacttcaccaactccttcaaacttattaacactttccttagttcaatatggggaagcccttcttcactctctctctttcttccctttgcttgctactcttgtttgctattacctccagcaagttcaacgagtgccaactcaacaacctcaacgcgttggaacccgaccaccgcgttgagtccgaaggtggtcttattgaaacatggaactctcaacaccctgagctgcaatgcgccggtgtcactgtttccaaacgcaccctcaaccgcaacggcctccacttgccatcttactcaccttatcccccaaatgatcattgtcgttcaaggtgcgtaatattagtaagaagtatttatcagcttaacgtgataacaataatagtaatntgaaatatttattaaatttttataattaatctctgctagaaaatttgattaatctttttagtagaattgttttttctcaactaggtttaaacaccaca

SEQ ID NO: 2814 - DNA, 631 bp, Artificial; identical to SEQ ID NO: 2232
  Mutations within GlyA3B4 introduced by GmGlyA3B4_T02TALE nuclease

SEQ ID NO: 2815 - DNA, 653 bp, Artificial
  Mutations within GlyA3B4 introduced by GmGlyA3B4_T02TALE nuclease
  misc_feature (530): n is a or c or t or g
gttcatgtacggttgcagatataaacgaagcatagcttatgtatgaggtgtaacaaaattggaaacaatagccatgcaaggtgaagaatgtcaccaactcagaaacccttcttcattgacgtgtccctcactcactctcctctcttcactataaatcgccactcttcgtgttctccacttcaccaactccttcaaacttattaacactttccttagttcaatatggggaagcccttcttcactctctctctttcttccctttgcttgctactcttgtcgagtgcatgctattacctccagcaagttcaacgagtgccaactcaacaacctcaacgcgttggaacccgaccaccgcgttgagtccgaaggtggtcttattgaaacatggaactctcaacaccctgagctgcaatgcgccggtgtcactgtttccaaacgcaccctcaaccgcaacggcctccacttgccatcttactcaccttatccccaaatgatcattgtcgttcaaggtgcgtaatattagtaagagnatttatcagcttaacgtgataacaatatagtaatatgaaatatttattaaatttttataattaatctctgctagaaaatttgattaatcattttagtagaatttgttttctcaactaggtttt

SEQ ID NO: 2816 - DNA, 636 bp, Artificial; identical to SEQ ID NO: 1885
  Mutations within GlyA3B4 introduced by GmGlyA3B4_T02TALE nuclease

SEQ ID NO: 2817 - DNA, 636 bp, Artificial
  Mutations within GlyA3B4 introduced by GmGlyA3B4_T02TALE nuclease
gttcatgtacggttgcagatataaacgaagcatagcttatgtatgaggtgtaacaaaattggaaacaatagccatgcaaggtgaagaatgtcaccaactcagaaacccttcttcattgacgtgtccctcactcactctcctctcttcactataaatcgccactcttcgtgttctccacttcaccaactccttcaaacttattaacactttccttagttcaatatggggaagcccttcttcactctctctctttcttccctttgcttgctactcttgtcgagtgcatggctattacctccagcaagttcaacgagtgccaactcaacaacctcaacgcgttggaacccgaccaccgcgttgagtccgaaggtggtcttattgaaacatggaactctcaacaccctgagctgcaatgcgccggtgtcactgtttccaaacgcaccctcaaccgcaacggcctccacttgccatcttactcaccttatccccaaatgatcattgtcgttcaaggtgcgtaatattagtaagagtatttatcagcttaacgtgataacaatatagtaatatgaaatatttattaaatttttataattaatctctgctagaaaatttgattaatcattttagtagaatttg

SEQ ID NO: 2818 - DNA, 616 bp, Artificial
  Mutations within GlyA3B4 introduced by GmGlyA3B4_T02TALE nuclease
gttcatgtacggttgcagatataaacgaagcatagcttatgtatgaggtgtaacaaaattggaaacaatagccatgcaaggtgaagaatgtcaccaactcagaaacccttcttcattgacgtgtccctcactcactctcctctcttcactataaatcgccactcttcgtgttctccacttcaccaactccttcaaacttattaacactttccttagttcaatatggggaagcccttcttcactctctctctttcttccctttgcttgctactcttgtcaactcaacaacctcaacgcgttggaacccgaccaccgcgttgagtccgaaggtggtcttattgaaacatggaactctcaacaccctgagctgcaatgcgccggtgtcactgtttccaaaacgcaccctcaaccgcaacggcctccacttgccatcttactcaccttatccccaaatgatcattgtcgttcaaggtgcgtaatattagtaagaagtatttatcagcttaacgtgataacaataatagtaatatgaaatatttattaaattttttataattaatctctgctagaaaatttgattaatcatttttagtagaatttgtttttctcaactagg

SEQ ID NO: 2819 - DNA, 648 bp, Artificial
  Mutations within GlyA3B4 introduced by GmGlyA3B4_T02TALE nuclease
gttcatgtacggttgcagatataaacgaagcatagcttatgtatgaggtgtaacaaaattggaaacaatagccatgcaaggtgaagaatgtcaccaactcagaaacccttcttcattgacgtgtccctcactcactctcctctcttcactataaatcgccactcttcgtgttctccacttcaccaactccttcaaacttattaacactttccttagttcaatatggggaagcccttcttcactctctctctttcttccctttgcttgctactcttgtcgagtgtacctccagcaagttcaacgagtgccaactcaacaacctcaacgcgttggaacccgaccaccgcgttgagtccgaaggtggtcttattgaaacatggaactctcaacaccctgagctgcaatgcgccggtgtcactgtttccaaaacgcaccctcaaccgcaacggcctccacttgccatcttactcaccttatccccaaatgatcattgtcgttcaaggtgcgtaatattagtaagaagtatttatcagcttaacgtgataacaataatagtaatatgaaaatatttattaaaatttttataattaatctctgctagaaaatttgattaatcatttttagtagaatttgtttttctcaactagg

SEQ ID NO: 2820 - DNA, 459 bp, Artificial
  Mutations within GlyA3B4 introduced by GmGlyA3B4_T02TALE nuclease
gttcatgtacggttgcagatataaacgaagcatagcttatgtatgaggtgtaacaaaattggaaacaatagccatgcaaggtgaagaatgtcaccaactcagaaacccttcttcattgacgtgtccctcactcactctcctctcttcactataaatcgccactcttcgtgttctccacttcaccaactccttcaaacttattaacactttccttagttcaacgagtgccaactcaacaacctcaacgcgttggaacccgaccaccgcgttgagtccgaaggtggtcttattgaaacatggaactctcaacaccctgagctgcaatgcgccggtgtcactgtttccaaacgcaccctcaaccgcaacggcctccacttgccatcttactcaccttatccccaaatgatcattgtcgttcaaggtgcgtaatattagtaagaagtatttatcagcttaacg

SEQ ID NO: 2821 - DNA, 669 bp, Artificial; identical to SEQ ID NO: 2720
  Mutations within GlyA3B4 introduced by GmGlyA3B4_T02TALE nuclease

SEQ ID NO: 2822 - DNA, 681 bp, Artificial
  Mutations within GlyA3B4 introduced by GmGlyA3B4_T02TALE nuclease
  misc_feature (532): n is a or c or t or g
gttcatgtacggttgcagatataaacgaagcatagcttatgtatgaggtgtaacaaaattggaaacaatagccatgcaaggtgaagaatgtcaccaactcagaaacccttcttcattgacgtgtccctcactcactctcctctcttcactataaatcgccactcttcgtgttctccacttcaccaactccttcaaacttattaacactttccttagttcaatatggggaagcccttcttcactctctctctttcttccctttgcttgctactcttgtcgagtgcatttgctattacctccagcaagttcaacgagtgccaactcaacaacctcaacgcgttggaacccgaccaccgcgttgagtccgaaggtggtcttattgaaacatggaactctcaacaccctgagctgcaatgcgccggtgtcactgtttccaaacgcaccctcaaccgcaacggcctccacttgccatcttactcaccttatccccaaatgatcattgtcgttcaaggtgcgtaatattagtaagagnatttatcagcttaacgtgataacaataatagtaatatgaaatatttattaaatttttcataattaatctctgctagaaaatttgattaatcattttagtagaatttgtttttctcaactaggtttttaaaacaccacacttgagactca

SEQ ID NO: 2823 - DNA, 665 bp, Artificial
  Mutations within GlyA3B4 introduced by GmGlyA3B4_T02TALE nuclease
gttcatgtacggttgcagatataaacgaagcatagcttatgtatgaggtgtaacaaaattggaaacaatagccatgcaaggtgaagaatgtcaccaactcagaaacccttcttcattgacgtgtccctcactcactctcctctcttcactataaatcgccactcttcgtgttctccacttcaccaactccttcaaacttattaacactttccttagttcaatatgggggaagcccttcttcactctctctctttcttccctttgcttgctactcttgtcgagtgcatgctattacctccagcaagttcaacgagtgccaactcaacaacctcaacgcgttggaacccgaccaccgcgttgagtccgaaggtggtcttattgaaacatggaactctcaacaccctgagctgcaatgcgccggtgtcactgtttccaaacgcaccctcaaccgcaacggcctccacttgccatcttactcaccttatccccaaatgatcattgtcgttcaaggtgcgtaatattagtaagagtatttatcagcttaacgtgataacaatatagtaatatgaaatatttattaaatttttataattaatctctgctagaaaatttgattaatcattttagtagaatttgtttttctcaactaggtttttaaaacacca

SEQ ID NO: 2824 - DNA, 667 bp, Artificial
  Mutations within GlyA3B4 introduced by GmGlyA3B4_T02TALE nuclease
  misc_feature (530): n is a or c or t or g
gttcatgtacggttgcagatataaacgaagcatagcttatgtatgaggtgtaacaaaattggaaacaatagccatgcaaggtgaagaatgtcaccaactcagaaacccttcttcattgacgtgtccctcactcactctcctctcttcactataaatcgccactcttcgtgttctccacttcaccaactccttcaaacttattaacactttccttagttcaatatggggaagcccttcttcactctctctctttcttccctttgcttgctactcttgtcgagtgcatgctattacctccagcaagttcaacgagtgccaactcaacaacctcaacgcgttggaacccgaccaccgcgttgagtccgaaggtggtcttattgaaacatggaactctcaacaccctgagctgcaatgcgccggtgtcactgtttccaaacgcaccctcaaccgcaacggcctccacttgccatcttactcaccttatccccaaatgatcattgtcgttcaaggtgcgtaatattagtaagagnatttatcagcttaacgtgataacaataatagtaatatgaaatatttattaaatttttataattaatctctgctagaaaatttgattaatcattttagtagaatttgtttttctcaactaggtttttaaaacaccaca

SEQ ID NO: 2825 - DNA, 664 bp, Artificial
  Mutations within GlyA3B4 introduced by GmGlyA3B4_T02TALE nuclease
gttcatgtacggttgcagatataaacgaagcatagcttatgtatgaggtgtaacaaaattggaaacaatagccatgcaaggtgaagaatgtcaccaactcagaaacccttcttcattgacgtgtccctcactcactctcctctcttcactataaatcgccactcttcgtgttctccacttcaccaactccttcaaacttattaacactttccttagttcaatatggggaagcccttcttcactctctctctttcttccctttgcttgctactcttgtcgagtgcttgctattacctccagcaagttcaacgagtgccaactcaacaacctcaacgcgttggaacccgaccaccgcgttgagtccgaaggtggtcttattgaaacatggaactctcaacaccctgagctgcaatgcgccggtgtcactgtttccaaacgcaccctcaaccgcaacggcctccacttgccatcttactcaccttatccccaaatgatcattgtcgttcaaggtgcgtaatattagtaagagtatttatcagcttaacgtgataacaataatagtaatatgaaatatttattaaatttttataattaatctctgctagaaaatttgattaatcattttagtagaatttgtttttctcaactaggttttaaaacacca

SEQ ID NO: 2826 - DNA, 628 bp, Artificial
  Mutations within GlyA3B4 introduced by GmGlyA3B4_T02TALE nuclease
gttcatgtacggttgcagatataaacgaagcatagcttatgtatgaggtgtaacaaaattggaaacaatagccatgcaaggtgaagaatgtcaccaactcagaaacccttcttcattgacgtgtccctcactcactctcctctcttcactataaatcgccactcttcgtgttctccacttcaccaactccttcaaacttattaacactttccttagttcaatatggggaagcccttcttcactctctcagtgacttgaatgtatttagaaaaataaacaaatagggttccgcgcaccttcaacgagtgccaactcaacaacctcaacgcgttggaacccgaccaccgcgttgagtccgaaggtggtcttattgaaacatggaactctcaacaccctgagctgcaatgcgccggtgtcactgtttccaaacgcaccctcaaccgcaacggcctccacttgccatcttactcaccttatccccaaatgatcattgtcgttcaaggtgcgtaatattagtaagaagtatttatcagcttaacgtgataacaataatagtaatatgaaatatttattaaattttttataattaatctctgctagaaaatttgattaatcatttttagtagaa

SEQ ID NO: 2827 - DNA, 636 bp, Artificial
  Mutations within GlyA3B4 introduced by GmGlyA3B4_T02TALE nuclease
gttcatgtacggttgcagatataaacgaagcatagcttatgtatgaggtgtaacaaaattggaaacaatagccatgcaaggtgaagaatgtcaccaactcagaaaccccttcttcattgacgtgtccctcactcactctcctctcttcactataaatcgccactcttcgtgttctccacttcaccaactccttcaaacttattaacactttccttagttcaatatggggaagcccttcttcactctctctctttcttccctttgcttgctactcttgtcgagtgcatctattacctccagcaagttcaacgagtgccaactcaacaacctcaacgcgttggaacccgaccaccgcgttgagtccgaaggtggtcttattgaaacatggaactctcaacaccctgagctgcaatgcgccggtgtcactgtttccaaacgcaccctcaaccgcaacggcctccacttgccatcttactcaccttatccccaaatgatcattgtcgttcaaggtgcgtaatattagtaagaagtattatcagcttaacgtgataacaataatagtaatatgaaatatttattaaatttttataattaatctctgctagaaaatttgattaatcattttagtagaatttg

SEQ ID NO: 2828 - DNA, 649 bp, Artificial
  Mutations within GlyA3B4 introduced by GmGlyA3B4_T02TALE nuclease
gttcatgtacggttgcagatataaacgaagcatagcttatgtatgaggtgtaacaaaattggaaacaatagccatgcaaggtgaagaatgtcaccaactcagaaacccttcttcattgacgtgtccctcactcactctcctctcttcactataaatcgccactcttcgtgttctccacttcaccaactccttcaaacttattaacactttccttagttcaatatggggaagcccttcttcactctctctctttcttccctttgcttgctactcttgtcgagtgcatacctccagcaagttcaacgagtgccaactcaacaacctcaacgcgttggaacccgaccaccgcgttgagtccgaaggtggtcttattgaaacatggaactctcaacaccctgagctgcaatgcgccggtgtcactgtttccaaacgcaccctcaaccgcaacggcctccacttgccatcttactcaccttatccccaaatgatcattgtcgttcaaggtgcgtaatattagtaagaagtatttatcagcttaacgtgataacaataatagtaatatgaaatatttattaaatttttataattaatctctgctagaaaatttgattaatcattttagtagaatttgttttctcaactaggtttt

SEQ ID NO: 2829 - DNA, 498 bp, Artificial
  Mutations within GlyA3B4 introduced by GmGlyA3B4_T02TALE nuclease
gttcatgtacggttgcagatataaacgaagcatagcttatgtatgaggtgtaacaaaattggaaacaatagccatgcaaggtgaagaatgtcaccaactcagaaacccttcttcattgacgtgtccctcactcactctcctctcttcactataaatcgccactcttcgtgttctccacttcaccaactccttcaaacttattaacactttccttagttcaatatggggaagcccttcttcactctctctctttcaacgagtgccaactcaacaacctcaacgcgttggaacccgaccaccgcgttgagtccgaaggtggtcttattgaaacatggaactctcaacaccctgagctgcaatgcgccggtgtcactgtttccaaacgcaccctcaaccgcaacggcctccacttgccatcttactcaccttatccccaaatgatcattgtcgttcaaggtgcgtaatattagtaagaagtatttatcagcttaacgtgat

SEQ ID NO: 2830 - DNA, 649 bp, Artificial
  Mutations within GlyA3B4 introduced by GmGlyA3B4_T02TALE nuclease
gttcatgtacggttgcagatataaacgaagcatagcttatgtatgaggtgtaacaaaattggaaacaatagccatgcaaggtgaagaatgtcaccaactcagaaacccttcttcattgacgtgtccctcactcactctcctctcttcactataaatcgccactcttcgtgttctccacttcaccaactccttcaaacttattaacactttccttagttcaatatggggaagcccttcttcactctctctctttcttccctttgcttgctactcttgtcgagtgcatattacctccagcaagttcaacgagtgccaactcaacaacctcaacgcgttggaacccgaccaccgcgttgagtccgaaggtggtcttattgaaacatggaactctcaacaccctgagctgcaatgcgccggtgtcactgtttccaaacgcaccctcaaccgcaacggcctccacttgccatcttactcaccttatccccaaatgatcattgtcgttcaaggtgcgtaatattagtaagaagtatttatcagcttaacgtgataacaataatagtaatatgaaatatttattaaatttttataattaatctctgctagaaaatttgattaatcattttagtagaatttgtttttctcaactagg

SEQ ID NO: 2831 - DNA, 666 bp, Artificial; identical to SEQ ID NO: 2655
  Mutations within GlyA3B4 introduced by GmGlyA3B4_T02TALE nuclease

SEQ ID NO: 2832 - DNA, 572 bp, Artificial
  Mutations within GlyA3B4 introduced by GmGlyA3B4_T02TALE nuclease
gttcatgtacggttgcagatataaacgaagcatagcttatgtatgaggtgtaacaaaattggaaacaatagccatgcaaggtgaagaatgtcaccaactcagaaacccttcttcattgacgtgtccctcactcactctcctctcttcactataaatcgccactcttcgtgttctccacttcaccaactccttcaaacttattaacactttccttagttcaatatggggaagcccttctccagcaagttcaacgagtgccaactcaacaacctcaacgcgttggaacccgaccaccgcgttgagtccgaaggtggtcttattgaaacatggaactctcaacaccctgagctgcaatgcgccggtgtcactgtttccaaacgcaccctcaaccgcaacggcctccacttgccatcttactcaccttatccccaaaatgatcattgtcgttcaaggtgcgtaatattagtaagaagtatttatcagcttaacgtgataacaataatagtaatatgaaatatttattaaattttttataattaatctctgctagaaaatttgattaatcattttta

SEQ ID NO: 2833 - DNA, 666 bp, Artificial
  Mutations within GlyA3B4 introduced by GmGlyA3B4_T02TALE nuclease
gttcatgtacggttgcagatataaacgaagcatagcttatgtatgaggtgtaacaaaattggaaacaatagccatgcaaggtgaagaatgtcaccaactcagaaacccttcttcattgacgtgtccctcactcactctcctctcttcactataaatcgccactcttcgtgttctccacttcaccaactccttcaaacttattaacactttccttagttcaatatggggaagcccttcttcactctctctctttcttccctttgcttgctactcttgtcgagtgcatgtctattacctccagcaagttcaacgagtgccaactcaacaacctcaacgcgttggaacccgaccaccgcgttgagtccgaaggtggtcttattgaaacatggaactctcaacaccctgagctgcaatgcgccggtgtcactgtttccaaacgcaccctcaaccgcaacggcctccacttgccatcttactcaccttatccccaaatgatcattgtcgttcaaggtgcgtaatattagtaagaagtatttatcagcttaacgtgataacaataatagtaatatgaaatatttattaaatttttataattaatctctgctagaaaatttgattaatcattttagtagaatttgtttttctcaactaggttttaaaacacca

SEQ ID NO: 2834 - DNA, 636 bp, Artificial
  Mutations within GlyA3B4 introduced by GmGlyA3B4_T02TALE nuclease
  misc_feature (530): n is a or c or t or g
gttcatgtacggttgcagatataaacgaagcatagcttatgtatgaggtgtaacaaaattggaaacaatagccatgcaaggtgaagaatgtcaccaactcagaaacccttcttcattgacgtgtccctcactcactctcctctcttcactataaatcgccactcttcgtgttctccacttcaccaactccttcaaacttattaacactttccttagttcaatatggggaagcccttcttcactctctctctttcttccctttgcttgctactcttgtcgagtgcatgctattacctccagcaagttcaacgagtgccaactcaacaacctcaacgcgttggaacccgaccaccgcgttgagtccgaaggtggtcttattgaaacatggaactctcaacaccctgagctgcaatgcgccggtgtcactgtttccaaacgcaccctcaaccgcaacggcctccacttgccatcttactcaccttatccccaaatgatcattgtcgttcaaggtgcgtaatattagtaagagnatttatcagcttaacgtgataacaataatagtaatatgaaatatttattaaatttttataattaatctctgctagaaaatttgattaatcattttagtagaatttg

SEQ ID NO: 2835 - DNA, 522 bp, Artificial
  Mutations within GlyA3B4 introduced by GmGlyA3B4_T02TALE nuclease
gttcatgtacggttgcagatataaacgaagcatagcttatgtatgaggtgtaacaaaattggaaacaatagccatgcaaggtgaagaatgtcaccaactcagaaacccttcttcattgacgtgtccctcactcactctcctctcttcactataaatcgccactcttcgtgttctccacttcaccaactccttcaaacttattaacactttccttagttcaacgagtgccaactcaacaacctcaacgcgttggaacccgaccaccgcgttgagtccgaaggtggtcttattgaaacatggaactctcaacaccctgagctgcaatgcgccggtgtcactgtttccaaacgcaccctcaaccgcaacggcctccacttgccatcttactcaccttatccccaaaatgatcattgtcgttcaaggtgcgtaatattagtaagaagtatttatcagcttaacgtgataacaataatagtaatatgaaatatttattaaattttttatattaatctctgctagaaa

SEQ ID NO: 2836 - DNA, 633 bp, Artificial
  Mutations within GlyA3B4 introduced by GmGlyA3B4_T02TALE nuclease
gttcatgtacggttgcagatataaacgaagcatagcttatgtatgaggtgtaacaaaattggaaacaatagccatgcaaggtgaagaatgtcaccaactcagaaacccttcttcattgacgtgtccctcactcactctcctctcttcactataaatcgccactcttcgtgttctccacttcaccaactccttcaaacttattaacactttccttagttcaatatggggaagcccttcttcactctctctctttcttccctttgcttgctactcttgtcgagtgctattaccctccagcaagttcaacgagtgccaactcaacaacctcaacgcgttggaacccgaccaccgcgttgagtccgaaggtggtcttattgaaacatggaactctcaacaccctgagctgcaatgcgccggtgtcactgtttccaaacgcaccctcaaccgcaacggcctccacttgccatcttactcaccttatccccaaatgatcattgtcgttcaaggtgcgtaatattagtaagaagtatttatcagcttaacgtgataacaatatagtaatatgaaatatttattaaatttttataattaatctctgctagaaaatttgattaatcattttagtagaatttg

SEQ ID NO: 2837 - DNA, 663 bp, Artificial; identical to SEQ ID NO: 2134
  Mutations within GlyA3B4 introduced by GmGlyA3B4_T02TALE nuclease

SEQ ID NO: 2838 - DNA, 667 bp, Artificial; identical to SEQ ID NO: 1838
  Mutations within GlyA3B4 introduced by GmGlyA3B4_T02TALE nuclease

SEQ ID NO: 2839 - DNA, 641 bp, Artificial
  Mutations within GlyA3B4 introduced by GmGlyA3B4_T02TALE nuclease
gttcatgtacggttgcagatataaacgaagcatagcttatgtatgaggtgtaacaaaattggaaacaatagccatgcaaggtgaagaatgtcaccaactcagaaacccttcttcattgacgtgtccctcactcactctcctctcttcactataaatcgccactcttcgtgttctccacttcaccaactccttcaaacttattaacactttccttagttcaatatggggaagcccttcttcactctctctctttcttccctttgcttgctactcttttgctattacctccagcaagttcaacgagtgccaactcaacaacctcaacgcgttggaacccgaccaccgcgttgagtccgaaggtggtcttattgaaacatggaactctcaacaccctgagctgcaatgcgccggtgtcactgtttccaaacgcaccctcaaccgcaacggcctccacttgccatcttactcaccttatccccaaatgatcattgtcgttcaaggtgcgtaatattagtaagaagtatttatcagcttaacgtgataacaataatagtaatatgaaatatttattaaattttttataattaatctctgctagaaaatttgattaatcatttttagtagaatttgttttttctcaa

SEQ ID NO: 2840 - DNA, 652 bp, Artificial
  Mutations within GlyA3B4 introduced by GmGlyA3B4_T02TALE nuclease
gttcatgtacggttgcagatataaacgaagcatagcttatgtatgaggtgtaacaaaattggaaacaatagccatgcaaggtgaagaatgtcaccaactcagaaacccttcttcattgacgtgtccctcactcactctcctctcttcactataaatcgccactcttcgtgttctccacttcaccaactccttcaaacttattaacactttccttagttcaatatggggaagcccttcttcactctctctctttcttccctttgcttgctactcttgtcgagtgctttgctattacctccagcaagttcaacgagtgccaactcaacaacctcaacgcgttggaacccgaccaccgcgttgagtccgaaggtggtcttattgaaacatggaactctcaacaccctgagctgcaatgcgccggtgtcactgtttccaaacgcaccctcaaccgcaacggcctccacttgccatcttactcaccttatccccaaatgatcattgtcgttcaaggtgcgtaatattagtaagagtatttatcagcttaacgtgataacaataatagtaatatgaaatatttattaaatttttataattaatctctgctagaaaatttgattaatcattttagtagaatttgtttttctcaactagg

SEQ ID NO: 2841 - DNA, 633 bp, Artificial; identical to SEQ ID NO: 2030
  Mutations within GlyA3B4 introduced by GmGlyA3B4_T02TALE nuclease

SEQ ID NO: 2842 - DNA, 655 bp, Artificial
  Mutations within GlyA3B4 introduced by GmGlyA3B4_T02TALE nuclease
gttcatgtacggttgcagatataaacgaagcatagcttatgtatgaggtgtaacaaaattggaaacaatagccatgcaaggtgaagaatgtcaccaactcagaaaccccttcttcattgacgtgtccctcactcactctcctctcttcactataaatcgccactcttcgtgttctccacttcaccaactccttcaaacttattaacactttccttagttcaatatggggaagcccttcttcactctctctctttcttccctttgcttgctactcttgtcgagtgtgctattacctccagcaagttcaacgagtgccaactcaacaacctcaacgcgttggaacccgaccaccgcgttgagtccgaaggtggtcttattgaaacatggaactctcaacaccctgagctgcaatgcgccggtgtcactgtttccaaacgcaccctcaaccgcaacggcctccacttgccatcttactcaccttatccccaaatgatcattgtcgttcaaggtgcgtaatattagtaagagtatttatcagcttaacgtgataacaataatagtaatatgaaatatttattaaatttttataattaatctctgctagaaaatttgattaatcattttagtagaatttgtttttctcaactaggttttt

SEQ ID NO: 2843 - DNA, 648 bp, Artificial
  Mutations within GlyA3B4 introduced by GmGlyA3B4_T02TALE nuclease
gttcatgtacggttgcagatataaacgaagcatagcttatgtatgaggtgtaacaaaattggaaacaatagccatgcaaggtgaagaatgtcaccaactcagaaacccttcttcattgacgtgtccctcactcactctcctctcttcactataaatcgccactcttcgtgttctccacttcaccaactccttcaaacttattaacactttccttagttcaatatggggaagcccttcttcactctctctctttcttccctttgcttgctattacctccagcaagttcaacgagtgccaactcaacaacctcaacgcgttggaacccgaccaccgcgttgagtccgaaggtggtcttattgaaacatggaactctcaacaccctgagctgcaatgcgccggtgtcactgtttccaaacgcaccctcaaccgcaacggcctccacttgccatcttactcaccttatccccaaatgatcattgtcgttcaaggtgcgtaatattagtaagaagtatttatcagctttaacgtgataacaataatagtaatatgaaatatttattaaattttttataattaatctctgctagaaaatttgattaatcatttttagtagaatttgttttttctcaactaggttttaaacacca

SEQ ID NO: 2844 - DNA, 663 bp, Artificial
  Mutations within GlyA3B4 introduced by GmGlyA3B4_T02TALE nuclease
gttcatgtacggttgcagatataaacgaagcatagcttatgtatgaggtgtaacaaaattggaaacaatagccatgcaaggtgaagaatgtcaccaactcagaaacccttcttcattgacgtgtccctcactcactctcctctcttcactataaatcgccactcttcgtgttctccacttcaccaactccttcaaacttattaacactttccttagttcaatatggggaagcccttcttcactctctctctttcttccctttgcttgctactcttgtcgagtgcattatctacctccagcaagttcaacgagtgccaactcaacaacctcaacgcgttggaacccgaccaccgcgttgagtccgaaggtggtcttattgaaacatggaactctcaacaccctgagctgcaatgcgccggtgtcactgtttccaaacgcaccctcaaccgcaacggcctccacttgccatcttactcaccttatccccaaatgatcattgtcgttcaaggtgcgtaatattagtaagaagtatttatcagcttaacgtgataacaataatagtaatatgaaatatttattaaatttttataattaatctctgctagaaaatttgattaatcattttagtagaatttgttttctcaactaggttttaaaacacca

SEQ ID NO: 2845 - DNA, 663 bp, Artificial
  Mutations within GlyA3B4 introduced by GmGlyA3B4_T02TALE nuclease
gttcatgtacggttgcagatataaacgaagcatagcttatgtatgaggtgtaacaaaattggaaacaatagccatgcaaggtgaagaatgtcaccaactcagaaacccttcttcattgacgtgtccctcactcactctcctctcttcactataaatcgccactcttcgtgttctccacttcaccaactccttcaaacttattaacactttccttagttcaatatggggaagcccttcttcactctctctctttcttccctttgcttgctactcttgtcgagtgcactattacctccagcaagttcaacgagtgccaactcaacaacctcaacgcgttggaacccgaccaccgcgttgagtccgaaggtggtcttattgaaacatggaactctcaacaccctgagctgcaatgcgccggtgtcactgtttccaaacgcaccctcaaccgcaacggcctccacttgccatcttactcaccttatccccaaatgatcattgtcgttcaaggtgcgtaatattagtaagaagtatttatcagcttaacgtgataacaataatagtaatatgaaatatttattaaatttttataattaatctctgctagaaaatttgattaatcattttagtagaatttgttttctcaactaggtttttaaaacacca

SEQ ID NO: 2846 - DNA, 661 bp, Artificial
  Mutations within GlyA3B4 introduced by GmGlyA3B4_T02TALE nuclease
gttcatgtacggttgcagatataaacgaagcatagcttatgtatgaggtgtaacaaaattggaaacaatagccatgcaaggtgaagaatgtcaccaactcagaaacccttcttcattgacgtgtccctcactcactctcctctcttcactataaatcgccactcttcgtgttctccacttcaccaactccttcaaacttattaacactttccttagttcaatatggggaagcccttcttcactctctctctttcttccctttgcttgctactcttgtcgagttgctattacctccagcaagttcaacgagtgccaactcaacaacctcaacgcgttggaacccgaccaccgcgttgagtccgaaggtggtcttattgaaacatggaactctcaacaccctgagctgcaatgcgccggtgtcactgtttccaaacgcaccctcaaccgcaacggcctccacttgccatcttactcaccttatccccaaatgatcattgtcgttcaaggtgcgtaatattagtaagaagtatttatcagcttaacgtgataacaatatagtaatatgaaatatttattaaatttttataattaatctctgctagaaaatttgattaatcattttagtagaatttgttttctcaactaggtttttaaaacacca

SEQ ID NO: 2847 - DNA, 647 bp, Artificial
  Mutations within GlyA3B4 introduced by GmGlyA3B4_T02TALE nuclease
gttcatgtacggttgcagatataaacgaagcatagcttatgtatgaggtgtaacaaaattggaaacaatagccatgcaaggtgaagaatgtcaccaactcagaaacccttcttcattgacgtgtccctcactcactctcctctcttcactataaatcgccactcttcgtgttctccacttcaccaactccttcaaacttattaacactttccttagttcaatatggggaagcccttcttcactctctctctttcttccctttgcttgctattacctccagcaagttcaacgagtgccaactcaacaacctcaacgcgttggaacccgaccaccgcgttgagtccgaaggtggtcttattgaaacatggaactctcaacaccctgagctgcaatgcgccggtgtcactgtttccaaacgcaccctcaaccgcaacggcctccacttgccatcttactcaccttatccccaaatgatcattgtcgttcaaggtgcgtaatattagtaagaagtatttatcagcttaacgtgataacaataatagtaatatgaaatatttattaaattttttataattaatctctgctagaaaatttgattaatcatttttagtagaatttgttttttctcaactaggttttaaacacca

SEQ ID NO: 2848 - DNA, 634 bp, Artificial
  Mutations within GlyA3B4 introduced by GmGlyA3B4_T02TALE nuclease
  misc_feature (529): n is a or c or t or g
gttcatgtacggttgcagatataaacgaagcatagcttatgtatgaggtgtaacaaaattggaaacaatagccatgcaaggtgaagaatgtcaccaactcagaaacccttcttcattgacgtgtccctcactcactctcctctcttcactataaatcgccactcttcgtgttctccacttcaccaactccttcaaacttattaacactttccttagttcaatatggggaagcccttcttcactctctctctttcttccctttgcttgctactcttgtcgagtgcatgctattacctccagcaagttcacgagtgccaactcaacaacctcaacgcgttggaacccgaccaccgcgttgagtccgaaggtggtcttattgaaacatggaactctcaacaccctgagctgcaatgcgccggtgtcactgtttccaaacgcaccctcaaccgcaacggcctccacttgccatcttactcaccttatccccaaatgatcattgtcgttcaaggtgcgtaatattagtaagagnatttatcagcttaacgtgataacaatatagtaatatgaaatatttattaaatttttataattaatctctgctagaaaatttgattaatcattttagtagaatttg

SEQ ID NO: 2849 - DNA, 497 bp, Artificial
  Mutations within GlyA3B4 introduced by GmGlyA3B4_T02TALE nuclease
gttcatgtacggttgcagatataaacgaagcatagcttatgtatgaggtgtaacaaaattggaaacaatagccatgcaaggtgaagaatgtcaccaactcagaaacccttcttcattgacgtgtccctcactcactctcctctcttcactataaatcgccactcttcgtgttctccacttcaccaactccttcaaacttattaacaacctcaacgcgttggaacccgaccaccgcgttgagtccgaaggtggtcttattgaaacatggaactctcaacaccctgagctgcaatgcgccggtgtcactgtttccaaacgcaccctcaaccgcaacggcctccacttgccatcttactcaccttatccccaaatgatcattgtcgttcaaggtgcgtaatattagtaagaagtatttatcagcttaacgtgataacaataatagtaatatgaaatatttattaaatttttttataattaatctctagctagaaaatttg

SEQ ID NO: 2850 - DNA, 630 bp, Artificial; identical to SEQ ID NO: 2418
  Mutations within GlyA3B4 introduced by GmGlyA3B4_T02TALE nuclease

SEQ ID NO: 2851 - DNA, 655 bp, Artificial
  Mutations within GlyA3B4 introduced by GmGlyA3B4_T02TALE nuclease
  misc_feature (531): n is a or c or t or g
gttcatgtacggttgcagatataaacgaagcatagcttatgtatgaggtgtaacaaaattggaaacaatagccatgcaaggtgaagaatgtcaccaactcagaaacccttcttcattgacgtgtccctcactcactctcctctcttcactataaatcgccactcttcgtgttctccacttcaccaactccttcaaacttattaacactttccttagttcaatatggggaagcccttcttcactctctctctttcttccctttgcttgctactcttgtcgagtgcattgctattacctccagcaagttcaacgagtgccaactcaacaacctcaacgcgttggaacccgaccaccgcgttgagtccgaaggtggtcttattgaaacatggaactctcaacaccctgagctgcaatgcgccggtgtcactgtttccaaacgcaccctcaaccgcaacggcctccacttgccatcttactcaccttatccccaaatgatcattgtcgttcaaggtgcgtaatattagtaagagnatttatcagcttaacgtgataacaatatagtaatatgaaatatttattaaatttttataattaatctctgctagaaaatttgattaatcattttagtagaatttgtttttctcaactaggtttt

SEQ ID NO: 2852 - DNA, 632 bp, Artificial
  Mutations within GlyA3B4 introduced by GmGlyA3B4_T02TALE nuclease
gttcatgtacggttgcagatataaacgaagcatagcttatgtatgaggtgtaacaaaattggaaacaatagccatgcaaggtgaagaatgtcaccaactcagaaacccttcttcattgacgtgtccctcactcactctcctctcttcactataaatcgccactcttcgtgttctccacttcaccaactccttcaaacttattaacactttccttagttcaatatggggaagcccttcttcactctctctctttcttccctttgcttgctactcttgtcgagtgcatacctccagcaagttcaacgagtgccaactcaacaacctcaacgcgttggaacccgaccaccgcgttgagtccgaaggtggtcttattgaaacatggaactctcaacaccctgagctgcaatgcgccggtgtcactgtttccaaacgcaccctcaaccgcaacggcctccacttgccatcttactcaccttatcccccaaatgatcattgtcgttcaaggtgcgtaatattagtaagaagtatttatcagcttaacgtgataacaataatagtaatatgaaatatttattaaatttttataattaatctctgctagaaaatttgattaatcattttagtagaatttg

SEQ ID NO: 2853 - DNA, 639 bp, Artificial
  Mutations within GlyA3B4 introduced by GmGlyA3B4_T02TALE nuclease
gttcatgtacggttgcagatataaacgaagcatagcttatgtatgaggtgtaacaaaattggaaacaatagccatgcaaggtgaagaatgtcaccaactcagaaacccttcttcattgacgtgtccctcactcactctcctctcttcactataaatcgccactcttcgtgttctccacttcaccaactccttcaaacttattaacactttccttagttcaatatggggaagcccttcttcactctctctctttcttccctttgcttgctactcttgtcaacgagtgccaactcaacaacctcaacgcgttggaacccgaccaccgcgttgagtccgaaggtggtcttattgaaacatggaactctcaacaccctgagctgcaatgcgccggtgtcactgtttccaaacgcaccctcaaccgcaacggcctccacttgccatcttactcaccttatccccaaatgatcattgtcgttcaaggtgcgtaatattagtaagaagtatttatcagcttaacgtgataacaataatagtaatatgaaatatttattaaattttttataattaatctctgctagaaaatttgattaatcatttttagtagaatttgttttttctcaactaggttttaaaacacca

SEQ ID NO: 2854 - DNA, 650 bp, Artificial; identical to SEQ ID NO: 2452
  Mutations within GlyA3B4 introduced by GmGlyA3B4_T02TALE nuclease

SEQ ID NO: 2855 - DNA, 645 bp, Artificial
  Mutations within GlyA3B4 introduced by GmGlyA3B4_T02TALE nuclease
gttcatgtacggttgcagatataaacgaagcatagcttatgtatgaggtgtaacaaaattggaaacaatagccatgcaaggtgaagaatgtcaccaactcagaaacccttcttcattgacgtgtccctcactcactctcctctcttcactataaatcgccactcttcgtgttctccacttcaccaactccttcaaacttattaacactttccttagttcaatatggggaagcccttcttcactctctctctttcttccctttgcttgctactcttgtcgagtgcattaccagcaagttcaacgagtgccaactcaacaacctcaacgcgttggaacccgaccaccgcgttgagtccgaaggtggtcttattgaaacatggaactctcaacaccctgagctgcaatgcgccggtgtcactgtttccaaacgcaccctcaaccgcaacggcctccacttgccatcttactcaccttatcccccaaatgatcattgtcgttcaaggtgcgtaatattagtaagaagtatttatcagcttaacgtgataacaataatagtaatatgaaatatttattaaattttttataattaatctctgctagaaaatttgattaatctttttagtagaattgtttttctcaactagg

SEQ ID NO: 2856 - DNA, 659 bp, Artificial
  Mutations within GlyA3B4 introduced by GmGlyA3B4_T02TALE nuclease
gttcatgtacggttgcagatataaacgaagcatagcttatgtatgaggtgtaacaaaattggaaacaatagccatgcaaggtgaagaatgtcaccaactcagaaacccttcttcattgacgtgtccctcactcactctcctctcttcactataaatcgccactcttcgtgttctccacttcaccaactccttcaaacttattaacactttccttagttcaatatggggaagcccttcttcactctctctctttcttccctttgcttgctactcttgtcgagtgcattacctccagcaagttcaacgagtgccaactcaacaacctcaacgcgttggaacccgaccaccgcgttgagtccgaaggtggtcttattgaaacatggaactctcaacaccctgagctgcaatgcgccggtgtcactgtttccaaacgcaccctcaaccgcaacggcctccacttgccatcttactcaccttatccccaaatgatcattgtcgttcaaggtgcgtaatattagtaagaagtatttatcagcttaacgtgataacaataatagtaatatgaaatatttattaaatttttataattaatctctgctagaaaatttgattaatcattttagtagaatttgttttctcaactaggtttttaaaacacc

SEQ ID NO: 2857 - DNA, 583 bp, Artificial
  Mutations within GlyA3B4 introduced by GmGlyA3B4_T02TALE nuclease
gttcatgtacggttgcagatataaacgaagcatagcttatgtatgaggtgtaacaaaattggaaacaatagccatgcaaggtgaagaatgtcaccaactcagaaacccttcttcattgacgtgtccctcactcactctcctctcttcactataaatcgccactcttcgtgttctccacttcaccaactccttcaaacttattaacactttccttagttcaatatggggaagcccttcttcactctctctctttcttccctttgcttgctactcttttgctattacctccagcaagttcaacgagtgccaactcaacaacctcaacgcgttggaacccgaccaccgcgttgagtccgaaggtggtcttattgaaacatggaactctcaacaccctgagctgcaatgcgccggtgtcactgtttccaaacgcaccctcaaccgcaacggcctccacttgccatcttactcaccttatccccaaatgatcattgtcgttcaaggtgcgtaaatattagtaagaagtatttatcagcttaacgtgataacaataatagtaatatgaaatatttattaaattttttat

SEQ ID NO: 2858 - DNA, 667 bp, Artificial; identical to SEQ ID NO: 2824
  Mutations within GlyA3B4 introduced by GmGlyA3B4_T02TALE nuclease
  misc_feature (530): n is a or c or t or g

SEQ ID NO: 2859 - DNA, 405 bp, Artificial
  Mutations within GlyA3B4 introduced by GmGlyA3B4_T02TALE nuclease
gttcatgtacggttgcagatataaacgaagcatagcttatgtatgaggtgtaacaaaattggaaacaatagccatgcaaggtgaagaatgtcaccaactcagaaacccttcttcattgacgtgtccctcactcactctcctccagcaagttcaacgagtgccaactcaacaacctcaacgcgttggaacccgaccaccgcgttgagtccgaaggtggtcttattgaaacatggaactctcaacaccctgagctgcaatgcgccggtgtcactgtttccaaacgcaccctcaaccgcaacggcctccacttgccatcttactcaccttatccccaaatgatcattgtcgttcaaggtgcgtaatattagtaagaagtatttatcagcttaacgtgataacaataat

SEQ ID NO: 2860 - DNA, 666 bp, Artificial
  Mutations within GlyA3B4 introduced by GmGlyA3B4_T02TALE nuclease
  misc_feature (530): n is a or c or t or g
gttcatgtacggttgcagatataaacgaagcatagcttatgtatgaggtgtaacaaaattggaaacaatagccatgcaaggtgaagaatgtcaccaactcagaaacccttcttcattgacgtgtccctcactcactctcctctcttcactataaatcgccactcttcgtgttctccacttcaccaactccttcaaacttattaacactttccttagttcaatatggggaagcccttcttcactctctctctttcttccctttgcttgctactcttgtcgagtgcatgctattacctccagcaagttcaacgagtgccaactcaacaacctcaacgcgttggaacccgaccaccgcgttgagtccgaaggtggtcttattgaaacatggaactctcaacaccctgagctgcaatgcgccggtgtcactgtttccaaacgcaccctcaaccgcaacggcctccacttgccatcttactcaccttatccccaaatgatcattgtcgttcaaggtgcgtaatattagtaagagnatttatcagcttaacgtgataacaataatagtaatatgaaatatttattaaatttttataattaatctctgctagaaaatttgattaatcattttagtagaatttgttttctcaactaggtttttaaaacaccaca

SEQ ID NO: 2861 - DNA, 588 bp, Artificial
  Mutations within GlyA3B4 introduced by GmGlyA3B4_T02TALE nuclease
gttcatgtacggttgcagatataaacgaagcatagcttatgtatgaggtgtaacaaaattggaaacaatagccatgcaaggtgaagaatgtcaccaactcagaaacccttcttcattgacgtgtccctcactcactctcctctcttcactataaatcgccactcttcgtgttctccacttcaccaactccttcaaacttattaacactttccttagttcaatatggggaagcccttcttcactctctctctttcttccctttgcttgctactcttgtcgagtttacctccagcaagttcaacgagtgccaactcaacaacctcaacgcgttggaacccgaccaccgcgttgagtccgaaggtggtcttattgaaacatggaactctcaacaccctgagctgcaatgcgccggtgtcactgtttccaaacgcaccctcaaccgcaacggcctccacttgccatcttactcaccttatcccccaaatgatcattgtcgttcaaggtgcgtaatattagtaagaagtatttatcagcttaacgtgataacaataatagtaatatgaaatatttattaaattttttataatt

SEQ ID NO: 2862 - DNA, 651 bp, Artificial
  Mutations within GlyA3B4 introduced by GmGlyA3B4_T02TALE nuclease
gttcatgtacggttgcagatataaacgaagcatagcttatgtatgaggtgtaacaaaattggaaacaatagccatgcaaggtgaagaatgtcaccaactcagaaacccttcttcattgacgtgtccctcactcactctcctctcttcactataaatcgccactcttcgtgttctccacttcaccaactccttcaaacttattaacactttccttagttcaatatggggaagcccttcttcactctctctctttcttccctttgcttgctactcttgtcgagtgcatattacctccagcaagttcaacgagtgccaactcaacaacctcaacgcgttggaacccgaccaccgcgttgagtccgaaggtggtcttattgaaacatggaactctcaacaccctgagctgcaatgcgccggtgtcactgtttccaaacgcaccctcaaccgcaacggcctccacttgccatcttactcaccttatccccaaatgatcattgtcgttcaaggtgcgtaatattagtaagaagtatttatcagcttaacgtgataacaatatagtaatatgaaatatttattaaatttttataattaatctctgctagaaaatttgattaatcattttagtagaatttgttttctcaactaggtttt

SEQ ID NO: 2863 - DNA, 619 bp, Artificial; identical to SEQ ID NO: 2393
  Mutations within GlyA3B4 introduced by GmGlyA3B4_T02TALE nuclease

SEQ ID NO: 2864 - DNA, 664 bp, Artificial
  Mutations within GlyA3B4 introduced by GmGlyA3B4_T02TALE nuclease
gttcatgtacggttgcagatataaacgaagcatagcttatgtatgaggtgtaacaaaattggaaacaatagccatgcaaggtgaagaatgtcaccaactcagaaacccttcttcattgacgtgtccctcactcactctcctctcttcactataaatcgccactcttcgtgttctccacttcaccaactccttcaaacttattaacactttccttagttcaatatggggaagcccttcttcactctctctctttcttccctttgcttgctactcttgtcgagtgcctattacctccagcaagttcaacgagtgccaactcaacaacctcaacgcgttggaacccgaccaccgcgttgagtccgaaggtggtcttattgaaacatggaactctcaacaccctgagctgcaatgcgccggtgtcactgtttccaaacgcaccctcaaccgcaacggcctccacttgccatcttactcaccttatccccaaatgatcattgtcgttcaaggtgcgtaatattagtaagaagtatttatcagcttaacgtgataacaataatagtaatatgaaaatatttattaaatttttataattaatctctgctagaaaatttgattaatcattttagtagaatttgtttttctcaactaggtttttaaaacacca

SEQ ID NO: 2865 - DNA, 661 bp, Artificial
  Mutations within GlyA3B4 introduced by GmGlyA3B4_T02TALE nuclease
gttcatgtacggttgcagatataaacgaagcatagcttatgtatgaggtgtaacaaaattggaaacaatagccatgcaaggtgaagaatgtcaccaactcagaaacccttcttcattgacgtgtccctcactcactctcctctcttcactataaatcgccactcttcgtgttctccacttcaccaactccttcaaacttattaacactttccttagttcaatatggggaagcccttcttcactctctctctttcttccctttgcttgctactcttgtcgagtgcattacctccagcaagttcaacgagtgccaactcaacaacctcaacgcgttggaacccgaccaccgcgttgagtccgaaggtggtcttattgaaacatggaactctcaacaccctgagctgcaatgcgccggtgtcactgtttccaaacgcaccctcaaccgcaacggcctccacttgccatcttactcaccttatccccaaatgatcattgtcgttcaaggtgcgtaatattagtaagaagtatttatcagcttaacgtgataacaataatagtaatatgaaatatttattaaatttttataattaatctctgctagaaaatttgattaatcattttagtagaatttgttttctcaactaggttttaaaacaccaca

SEQ ID NO: 2866 - DNA, 608 bp, Artificial
  Mutations within GlyA3B4 introduced by GmGlyA3B4_T02TALE nuclease
gttcatgtacggttgcagatataaacgaagcatagcttatgtatgaggtgtaacaaaattggaaacaatagccatgcaaggtgaagaatgtcaccaactcagaaacccttcttcattgacgtgtccctcactcactctcctctcttcactataaatcgccactcttcgtgttctccacttcaccaactccttcaaacttattaacactttccttagttcaatatggggaagcccttcttcactctctctctttcaacgagtgccaactcaacaacctcaacgcgttggaacccgaccaccgcgttgagtccgaaggtggtcttattgaaacatggaactctcaacaccctgagctgcaatgcgccggtgtcactgtttccaaacgcaccctcaaccgcaacggcctccacttgccatcttactcaccttatccccaaatgatcattgtcgttcaaggtgcgtaatattagtaagaagtatttatcagcttaacgtgataacaataatagtaatatgaaatatttattaatttttataattaatctctgctagaaaatttgattaatcatttttagtagaatttgtttttctcaactaggtttttaaaa

SEQ ID NO: 2867 - DNA, 657 bp, Artificial
  Mutations within GlyA3B4 introduced by GmGlyA3B4_T02TALE nuclease
gttcatgtacggttgcagatataaacgaagcatagcttatgtatgaggtgtaacaaaattggaaacaatagccatgcaaggtgaagaatgtcaccaactcagaaacccttcttcattgacgtgtccctcactcactctcctctcttcactataaatcgccactcttcgtgttctccacttcaccaactccttcaaacttattaacactttccttagttcaatatggggaagcccttcttcactctctctctttcttccctttgcttgctactcttgtctattacctccagcaagttcaacgagtgccaactcaacaacctcaacgcgttggaacccgaccaccgcgttgagtccgaaggtggtcttattgaaacatggaactctcaacaccctgagctgcaatgcgccggtgtcactgtttccaaacgcaccctcaaccgcaacggcctccacttgccatcttactcaccttatcccccaaatgatcattgtcgttcaaggtgcgtaaatattagtaagaagtatttatcagcttaacgtgataacaataatagtaatatgaaatatttattaaattttttataattaatctctgctagaaaatttgattaatctttttagtagaattgtttttctcaactagtttaaaacaccaca

SEQ ID NO: 2868 - DNA, 642 bp, Artificial
  Mutations within GlyA3B4 introduced by GmGlyA3B4_T02TALE nuclease
gttcatgtacggttgcagatataaacgaagcatagcttatgtatgaggtgtaacaaaattggaaacaatagccatgcaaggtgaagaatgtcaccaactcagaaacccttcttcattgacgtgtccctcactcactctcctctcttcactataaatcgccactcttcgtgttctccacttcaccaactccttcaaacttattaacactttccttagttcaatatggggaagcccttcttcactctctctctttcttccctttgcttgctactcttgttacctccagcaagttcaacgagtgccaactcaacaacctcaacgcgttggaacccgaccaccgcgttgagtccgaaggtggtcttattgaaacatggaactctcaacaccctgagctgcaatgcgccggtgtcactgtttccaaacgcaccctcaaccgcaacggcctccacttgccatcttactcaccttatccccaaatgatcattgtcgttcaaaggtgcgtaaatattagtaagaagtatttatcagcttaacgtgataacaataatagtaatatgaaatatttattaaatttttataattaatctctgctagaaaatttgattaatctttttagtagaattgtttttctcaactaggttt

SEQ ID NO: 2869 - DNA, 563 bp, Artificial
  Mutations within GlyA3B4 introduced by GmGlyA3B4_T02TALE nuclease
  misc_feature (502): n is a or c or t or g
gttcatgtacggttgcagatataaacgaagcatagcttatgtatgaggtgtaacaaaattggaaacaatagccatgcaaggtgaagaatgtcaccaactcagaaacccttcttcattgacgtgtccctcactcactctcctctcttcactataaatcgccactcttcgtgttctccacttcaccaactccttcaaacttattaacactttccttagttcaatatggggaagcccttcttcactctctctctttcttccctttgcttgctactcttgtcgtacctccagcaagttcaacgagtgccaactcaacaacctcaacgcgttggaacccgaccaccgcgttgagtccgaaggtggtcttattgaaacatggaactctcaacaccctgagctgcaatgcgccggtgtcactgtttccaaacgcaccctcaaccgcaacggcctccacttgccatcttactcaccttatccccaaatgatcattgtcgttcaaggtgcntaaatattagtaagaagtatttatcagcttaacgtgataacaataatagtaatatgaaata

SEQ ID NO: 2870 - DNA, 653 bp, Artificial
  Mutations within GlyA3B4 introduced by GmGlyA3B4_T02TALE nuclease
gttcatgtacggttgcagatataaacgaagcatagcttatgtatgaggtgtaacaaaattggaaacaatagccatgcaaggtgaagaatgtcaccaactcagaaacccttcttcattgacgtgtccctcactcactctcctctcttcactataaatcgccactcttcgtgttctccacttcaccaactccttcaaacttattaacactttccttagttcaatatggggaagcccttcttcactctctctctttcttccctttgcttgctactcttgtcgagtgctacctccagcaagttcaacgagtgccaactcaacaacctcaacgcgttggaacccgaccaccgcgttgagtccgaaggtggtcttattgaaacatggaactctcaacaccctgagctgcaatgcgccggtgtcactgtttccaaacgcaccctcaaccgcaacggcctccacttgccatcttactcaccttatccccaaatgatcattgtcgttcaaggtgcgtaatattagtaagaagtatttatcagcttaacgtgataacaatatagtaatatgaaatatttattaaatttttataattaatctctgctagaaaatttgattaatcattttagtagaatttgtttttctcaactaggaacaccaca

SEQ ID NO: 2871 - DNA, 576 bp, Artificial
  Mutations within GlyA3B4 introduced by GmGlyA3B4_T02TALE nuclease
gttcatgtacggttgcagatataaacgaagcatagcttatgtatgaggtgtaacaaaattggaaacaatagccatgcaaggtgaagaatgtcaccaactcagaaacccttcttcattgacgtgtccctcactcactctcctctcttcactataaatcgccactcttcgtgttctccacttcaccaactccttcaaacttattaacactttccttagttcaatatggggaagcccttcttcactctctctctttcttccctttgcttgctactcttgtcgagtgcaaactcaacaacctcaacgcgttggaacccgaccaccgcgttgagtcccgaaggtggtcttattgaaacatggaactctcaacaccctgagctgcaatgcgccggtgtcactgtttccaaacgcaccctcaaccgcaacggcctccacttgccatcttactcaccttatccccaaatgatcattgtcgttcaaggtgcgtaatattagtaagaagtatttatcagcttaacgtgataacaataatagtaatatgaaatatttattaaattttttataattaatctctgctag

SEQ ID NO: 2872 - DNA, 635 bp, Artificial; identical to SEQ ID NO: 2618
  Mutations within GlyA3B4 introduced by GmGlyA3B4_T02TALE nuclease
  misc_feature (530): n is a or c or t or g

SEQ ID NO: 2873 - DNA, 659 bp, Artificial; identical to SEQ ID NO: 1853
  Mutations within GlyA3B4 introduced by GmGlyA3B4_T02TALE nuclease

SEQ ID NO: 2874 - DNA, 599 bp, Artificial; identical to SEQ ID NO: 2087
  Mutations within GlyA3B4 introduced by GmGlyA3B4_T02TALE nuclease

SEQ ID NO: 2875 - DNA, 650 bp, Artificial; identical to SEQ ID NO: 1234
  Mutations within GlyA3B4 introduced by GmGlyA3B4_T02TALE nuclease

SEQ ID NO: 2876 - DNA, 556 bp, Artificial
  Mutations within GlyA3B4 introduced by GmGlyA3B4_T02TALE nuclease
  misc_feature (451): n is a or c or t or g
gttcatgtacggttgcagatataaacgaagcatagcttatgtatgaggtgtaacaaaattggaaacaatagccatgcaaggtgaagaatgtcaccaactcagaaacccttcttcattgacgtgtccctcactcactctcctctcttcactataaatcgccactcttcgtgttctccacttcaccaactccttcaaacttattaacactttccttagttcaatatggggaagcccttcttcactctctctctttcttccctttgcttgctactcttgtcgagtacctccagcaagttcaacgagtgccaactcaacaacctcaacgcgttggaacccgaccaccgcgttgagtccgaaggtggtcttattgaaacatggaactctcaacaccctgagctgcaatgcgccggtgtcactgtttccaaacgcaccctcaaccgcaacggcctcncttgccatcttactcaccttactccccaaatgatcattgtcgttcaaggtgcgtaatattagtcaagaagtatttatcagctaacgtgataacaataatagtaat

SEQ ID NO: 2877 - DNA, 521 bp, Artificial
  Mutations within GlyA3B4 introduced by GmGlyA3B4_T02TALE nuclease
gttcatgtacggttgcagatataaacgaagcatagcttatgtatgaggtgtaacaaaattggaaacaatagccatgcaaggtgaagaatgtcaccaactcagaaacccttcttcattgacgtgtccctcactcactctcctctcttcactataaatcgccactcttcgtgttctattacctccagcaagttcaacgagtgccaactcaacaacctcaacgcgttggaacccgaccaccgcgttgagtccgaaaggtggtcttattgaaacatggaactctcaacaccctgagctgcaatgcgccggtgtcactgtttccaaacgcaccctcaaccgcaacggcctccacttgccatcttactcaccttatccccaaatgatcattgtcgttcaaggtgcgtaatattagtaagaagtatttatcagcttaacgtgataacaataatagtaatatgaaatatttattaaattttttataattaatctctgctagaaaatttgattaatcatttttagtagaa

SEQ ID NO: 2878 - DNA, 602 bp, Artificial
  Mutations within GlyA3B4 introduced by GmGlyA3B4_T02TALE nuclease
gttcatgtacggttgcagatataaacgaagcatagcttatgtatgaggtgtaacaaaattggaaacaatagccatgcaaggtgaagaatgtcaccaactcagaaacccttcttcattgacgtgtccctcactcactctcctctcttcactataaatcgccactcttcgtgttctccacttcaccaactccttcaaacttattaacactttccttagttcaatatggggaagcccttcttcactctctctctttcttccctttgcttgctactcttgtttgctattacctccagcaagttcaacgagtgccaactcaacaacctcaacgcgttggaacccgaccaccgcgttgagtccgaaggtggtcttattgaaacatggaactctcaacaccctgagctgcaatgcgccggtgtcactgtttccaaacgcaccctcaaccgcaacggcctccacttgccatcttactcaccttatccccaaatgatcattgtcgttcaaaggtgcgtaaatattagtaagaagtatttatcagcttaacgtgataacaataatagtaatatgaaatatttattaaattttttataattaatctctgctag

SEQ ID NO: 2879 - DNA, 650 bp, Artificial
  Mutations within GlyA3B4 introduced by GmGlyA3B4_T02TALE nuclease
gttcatgtacggttgcagatataaacgaagcatagcttatgtatgaggtgtaacaaaattggaaacaatagccatgcaaggtgaagaatgtcaccaactcagaaacccttcttcattgacgtgtccctcactcactctcctctcttcactataaatcgccactcttcgtgttctccacttcaccaactccttcaaacttattaacactttccttagttcaatatggggaagcccttcttcactctctctctttcttccctttgcttgctactcttgtcgagtgcatgattacctccagcaagttcaacgagtgccaactcaacaacctcaacgcgttggaacccgaccaccgcgttgagtccgaaggtggtcttattgaaacatggaactctcaacaccctgagctgcaatgcgccggtgtcactgtttccaaacgcaccctcaaccgcaacggcctccacttgccatcttactcaccttatccccaaatgatcattgtcgttcaaggtgcgtaatattagtaagaagtatttatcagcttaacgtgataacaataatagtaatatgaaatatttattaaatttttataattaatctctgctagaaaatttgattaatcattttagtagaatttgtttttctcaactagg

SEQ ID NO: 2880 - DNA, 661 bp, Artificial
  Mutations within GlyA3B4 introduced by GmGlyA3B4_T02TALE nuclease
gttcatgtacggttgcagatataaacgaagcatagcttatgtatgaggtgtaacaaaattggaaacaatagccatgcaaggtgaagaatgtcaccaactcagaaacccttcttcattgacgtgtccctcactcactctcctctcttcactataaatcgccactcttcgtgttctccacttcaccaactccttcaaacttattaacacctttccttagttcaatatggggaagcccttcttcactctctctctttcttccctttgcttgctactcttgtcgagtgctattacctccagcaagttcaacgagtgccaactcaacaacctcaacgcgttggaacccgaccaccgcgttgagtccgaaggtggtcttattgaaacatggaactctcaacaccctgagctgcaatgcgccggtgtcactgtttccaaacgcaccctcaaccgcaacggcctccacttgccatcttactcaccttatccccaaatgatcattgtcgttcaaggtgcgtaatattagtaagaagtatttatcagcttaacgtgataacaataatagtaatatgaaatatttattaaatttttataattaatctctgctagaaaatttgattaatcattttagtagaatttgttttctcaactaggttttaaaacacca

SEQ ID NO: 2881 - DNA, 475 bp, Artificial; identical to SEQ ID NO: 2175
  Mutations within GlyA3B4 introduced by GmGlyA3B4_T02TALE nuclease

SEQ ID NO: 2882 - DNA, 665 bp, Artificial
  Mutations within GlyA3B4 introduced by GmGlyA3B4_T02TALE nuclease
gttcatgtacggttgcagatataaacgaagcatagcttatgtatgaggtgtaacaaaattggaaacaatagccatgcaaggtgaagaatgtcaccaactcagaaacccttcttcattgacgtgtccctcactcactctcctctcttcactataaatcgccactcttcgtgttctccacttcaccaactccttcaaacttattaacactttccttagttcaatatggggaagcccttcttcactctctctctttcttccctttgcttgctactcttgtcgagtgcttgctattacctccagcaagttcaacgagtgccaactcaacaacctcaacgcgttggaacccgaccaccgcgttgagtccgaaggtggtcttattgaaacatggaactctcaacaccctgagctgcaatgcgccggtgtcactgtttccaaacgcaccctcaaccgcaacggcctccacttgccatcttactcaccttatccccaaatgatcattgtcgttcaaggtgcgtaatattagtaagagtatttatcagcttaacgtgataacaataatagtaatatgaaatatttattaaatttttataattaatctctgctagaaaatttgattaatcattttagtagaatttgtttttctcaactaggtttttaaaacacca

SEQ ID NO: 2883 - DNA, 618 bp, Artificial
  Mutations within GlyA3B4 introduced by GmGlyA3B4_T02TALE nuclease
gttcatgtacggttgcagatataaacgaagcatagcttatgtatgaggtgtaacaaaattggaaacaatagccatgcaaggtgaagaatgtcaccaactcagaaacccttcttcattgacgtgtccctcactcactctcctctcttcactataaatcgccactcttcgtgttctccacttcaccaactccttcaaacttattaacactttccttagttcaatatggggaagcccttcttcactctctctctttcttccctttgcttgctactcttgtcgagtgcattacctccagcaagttcaacgagtgccaactcaacaacctcaacgcgttggaacccgaccaccgcgttgagtccgaaggtggtcttattgaaacatggaactctcaacaccctgagctgcaatgcgccggtgtcactgtttccaaacgcaccctcaaccgcaacggcctccacttgccatcttactcaccttatccccaaatgatcattgtcgttcaaggtgcgtaatattagtaagaagtatttatcagcttaacgtgataacaataatagtaatatgaaaatatttattaaatttttataattaatctctgctagaaaatttgattaatca

SEQ ID NO: 2884 - DNA, 661 bp, Artificial; identical to SEQ ID NO: 2786
  Mutations within GlyA3B4 introduced by GmGlyA3B4_T02TALE nuclease

SEQ ID NO: 2885 - DNA, 614 bp, Artificial
  Mutations within GlyA3B4 introduced by GmGlyA3B4_T02TALE nuclease
gttcatgtacggttgcagatataaacgaagcatagcttatgtatgaggtgtaacaaaattggaaacaatagccatgcaaggtgaagaatgtcaccaactcagaaacccttcttcattgacgtgtccctcactcactctcctctcttcactataaatcgccactcttcgtgttctccacttcaccaactccttcaaacttattaacactttccttagttcaatatggggaagcccttcttcactctctctctttcactccagcaagttcaacgagtgccaactcaacaacctcaacgcgttggaacccgaccaccgcgttgagtccgaaggtggtcttattgaaacatggaactctcaacaccctgagctgcaatgcgccggtgtcactgtttccaaacgcaccctcaaccgcaacggcctccacttgccatcttactcaccttatccccaaatgatcattgtcgttcaaggtgcgtaatattagtaagaagtatttatcagcttaacgtgataacaataatagtaatatgaaatatttattaattttttataattaatctctgctagaaaatttgattaatcatttttagtagaatttgtttttctcaactagg

SEQ ID NO: 2886 - DNA, 636 bp, Artificial
  Mutations within GlyA3B4 introduced by GmGlyA3B4_T02TALE nuclease
gttcatgtacggttgcagatataaacgaagcatagcttatgtatgaggtgtaacaaaattggaaacaatagccatgcaaggtgaagaatgtcaccaactcagaaacccttcttcattgacgtgtccctcactcactctcctctcttcactataaatcgccactcttcgtgttctccacttcaccaactccttcaaacttattaacactttccttagttcaatatggggaagcccttcttcactctctctctttcttccctttgctttgctattacctccagcaagttcaacgagtgccaactcaacaacctcaacgcgttggaacccgaccaccgcgttgagtccgaaggtggtcttattgaaacatggaactctcaacaccctgagctgcaatgcgccggtgtcactgtttccaaacgcaccctcaaccgcaacggcctccacttgccatcttactcaccttatcccccaaatgatcattgtcgttcaaggtgcgtaatattagtaagaagtatttatcagcttaacgtgataacaataatagtaatatgaaatatttattaaattttttataaattaatctctgctagaaaatttgattaatcatttttagtagaatttgttttttctcaacta

SEQ ID NO: 2887 - DNA, 635 bp, Artificial; identical to SEQ ID NO: 2434
  Mutations within GlyA3B4 introduced by GmGlyA3B4_T02TALE nuclease

SEQ ID NO: 2888 - DNA, 651 bp, Artificial
  Mutations within GlyA3B4 introduced by GmGlyA3B4_T02TALE nuclease
gttcatgtacggttgcagatataaacgaagcatagcttatgtatgaggtgtaacaaaattggaaacaatagccatgcaaggtgaagaatgtcaccaactcagaaacccttcttcattgacgtgtccctcactcactctcctctcttcactataaatcgccactcttcgtgttctccacttcaccaactccttcaaacttattaacactttccttagttcaatatggggaagcccttcttcactctctctctttcttccctttgcttgctactcttgtcgagtgcatctattacctccagcaagttcaacgagtgccaactcaacaacctcaacgcgttggaacccgaccaccgcgttgagtccgaaggtggtcttattgaaacatggaactctcaacaccctgagctgcaatgcgccggtgtcactgtttccaaacgcacccctcaaccgcaacggcctccacttgccatcttactcaccttatccccaaatgatcattgtcgttcaaggtgcgtaatattagtaagaagtatttatcagcttaacgtgataacaataatagtaatatgaaatatttattaaatttttataattaatctctgctagaaaatttgattaatcattttagtagaatttgttttctcaactagg

SEQ ID NO: 2889 - DNA, 662 bp, Artificial; identical to SEQ ID NO: 2376
  Mutations within GlyA3B4 introduced by GmGlyA3B4_T02TALE nuclease

SEQ ID NO: 2890 - DNA, 634 bp, Artificial; identical to SEQ ID NO: 2328
  Mutations within GlyA3B4 introduced by GmGlyA3B4_T02TALE nuclease

SEQ ID NO: 2891 - DNA, 658 bp, Artificial
  Mutations within GlyA3B4 introduced by GmGlyA3B4_T02TALE nuclease
gttcatgtacggttgcagatataaacgaagcatagcttatgtatgaggtgtaacaaaattggaaacaatagccatgcaaggtgaagaatgtcaccaactcagaaacccttcttcattgacgtgtccctcactcactctcctctcttcactataaatcgccactcttcgtgttctccacttcaccaactccttcaaacttattaacactttccttagttcaatatggggaagcccttcttcactctctctctttcttccctttgcttgctactcttgtcgagtgcattgctattacctccagcaagttcaacgagtgccaactcaacaacctcaacgcgttggaacccgaccaccgcgttgagtccgaaggtggtcttattgaaacatggaactctcaacaccctgagctgcaatgcgccggtgtcactgtttccaaacgcaccctcaaccgcaacggcctccacttgccatcttactcaccttatccccaaatgatcattgtcgttcaaggtgcgtaatattagtaagagtatttatcagcttaacgtgataacaatatagtaatatgaaatatttattaaatttttataattaatctctgctagaaaatttgattaatcattttagtagaatttgttttctcaactaggtttttaaa

SEQ ID NO: 2892 - DNA, 633 bp, Artificial; identical to SEQ ID NO: 2030
  Mutations within GlyA3B4 introduced by GmGlyA3B4_T02TALE nuclease

SEQ ID NO: 2893 - DNA, 645 bp, Artificial
  Mutations within GlyA3B4 introduced by GmGlyA3B4_T02TALE nuclease
gttcatgtacggttgcagatataaacgaagcatagcttatgtatgaggtgtaacaaaattggaaacaatagccatgcaaggtgaagaatgtcaccaactcagaaacccttcttcattgacgtgtccctcactcactctcctctcttcactataaatcgccactcttcgtgttctccacttcaccaactccttcaaacttattaacactttccttagttcaatatggggaagcccttcttcactctctctctttcttccctttgcttgctactcttgtcgagttacctccagcaagttcaacgagtgccaactcaacaacctcaacgcgttggaacccgaccaccgcgttgagtccgaaggtggtcttattgaaacatggaactctcaacaccctgagctgcaatgcgccggtgtcactgtttccaaacgcaccctcaaccgcaacggcctccacttgccatcttactcaccttatccccaaatgatcattgtcgttcaaggtgcgtaaatattagtaagaagtatttatcagcttaacgtgataacaataatagtaatatgaaatatttattaaattttttataattaatctctgctagaaaatttgattaatctttttagtagaattgttttttctcaactagg

SEQ ID NO: 2894 - DNA, 657 bp, Artificial
  Mutations within GlyA3B4 introduced by GmGlyA3B4_T02TALE nuclease
gttcatgtacggttgcagatataaacgaagcatagcttatgtatgaggtgtaacaaaattggaaacaatagccatgcaaggtgaagaatgtcaccaactcagaaaccccttcttcattgacgtgtccctcactcactctcctctcttcactataaatcgccactcttcgtgttctccacttcaccaactccttcaaacttattaacactttccttagttcaatatggggaagcccttcttcactctctctctttcttccctttgcttgctactcttgtcgagtgcatattacctccagcaagttcaacgagtgccaactcaacaacctcaacgcgttggaacccgaccaccgcgttgagtccgaaggtggtcttattgaaacatggaactctcaacaccctgagctgcaatgcgccggtgtcactgtttccaaacgcaccctcaaccgcaacggcctccacttgccatcttactcaccttatccccaaatgatcattgtcgttcaaggtgcgtaatattagtaagaagtatttatcagcttaacgtgataacaataatagtaatatgaaatatttattaaatttttataattaatctctgctagaaaatttgattaatcattttagtagaatttgttttctcaactaggttttaaaa

SEQ ID NO: 2895 - DNA, 663 bp, Artificial; identical to SEQ ID NO: 2559
  Mutations within GlyA3B4 introduced by GmGlyA3B4_T02TALE nuclease

SEQ ID NO: 2896 - DNA, 658 bp, Artificial
  Mutations within GlyA3B4 introduced by GmGlyA3B4_T02TALE nuclease
gttcatgtacggttgcagatataaacgaagcatagcttatgtatgaggtgtaacaaaattggaaacaatagccatgcaaggtgaagaatgtcaccaactcagaaacccttcttcattgacgtgtccctcactcactctcctctcttcactataaatcgccactcttcgtgttctccacttcaccaactccttcaaacttattaacactttccttagttcaatatggggaagcccttcttcactctctctctttcttccctttgcttgctactcttgtcgagtgcatgctattacctccagcaagttcaacgagtgccaactcaacaacctcaacgcgttggaacccgaccaccgcgttgagtccgaaggtggtcttattgaaacatggaactctcaacaccctgagctgcaatgcgccggtgtcactgtttccaaacgcaccctcaaccgcaacggcctccacttgccatcttactcaccttatccccaaatgatcattgtcgttcaaggtgcgtaatattagtaagagtatttatcagcttaacgtgatacaataatagtaatatgaaatatttattaaatttttataattaatctctgctagaaaatttgattaatcattttagtagaatttgttttctcaactaggtttttaaaa

SEQ ID NO: 2897 - DNA, 640 bp, Artificial
  Mutations within GlyA3B4 introduced by GmGlyA3B4_T02TALE nuclease
gttcatgtacggttgcagatataaacgaagcatagcttatgtatgaggtgtaacaaaattggaaacaatagccatgcaaggtgaagaatgtcaccaactcagaaacccttcttcattgacgtgtccctcactcactctcctctcttcactataaatcgccactcttcgtgttctccacttcaccaactccttcaaacttattaacactttccttagttcaatatggggaagcccttcttcactctctctctttcttccctttgcttgctactcttgtcgagtgcttacctccagcaagttcaacgagtgccaactcaacaacctcaacgcgttggaacccgaccaccgcgttgagtccgaaggtggtcttattgaaacatggaactctcaacaccctgagctgcaatgcgccggtgtcactgtttccaaacgcaccctcaaccgcaacggcctccacttgccatcttactcaccttatccccaaatgatcattgtcgttcaaggtgcgtaatattagtaagaagtatttatcagcttaacgtgataacaatatagtaatatgaaatatttattaaatttttataattaatctctgctagaaaatttgattaatcattttagtagaatttgttttctcaac

SEQ ID NO: 2898 - DNA, 664 bp, Artificial
  Mutations within GlyA3B4 introduced by GmGlyA3B4_T02TALE nuclease
gttcatgtacggttgcagatataaacgaagcatagcttatgtatgaggtgtaacaaaattggaaacaatagccatgcaaggtgaagaatgtcaccaactcagaaacccttcttcattgacgtgtccctcactcactctcctctcttcactataaatcgccactcttcgtgttctccacttcaccaactccttcaaacttattaacactttccttagttcaatatggggaagcccttcttcactctctctctttcttccctttgcttgctactcttgtcgagtgcatgctattacctccagcaagttcaacgagtgccaactcaacaacctcaacgcgttggaacccgaccaccgcgttgagtccgaaggtggtcttattgaaacatggaactctcaacaccctgagctgcaatgcgccggtgtcactgtttccaaacgcaccctcaaccgcaacggcctccacttgccatcttactcaccttatccccaaatgatcattgtcgttcaaggtgcgtaatattagtaagagtatttatcagcttaacgtgataacaatatagtaatatgaaatatttattaaatttttataattaatctctgctagaaaatttgattaatcattttagtagaatttgtttttctcaactggttttaaaacaccaca

SEQ ID NO: 2899 - DNA, 663 bp, Artificial
  Mutations within GlyA3B4 introduced by GmGlyA3B4_T02TALE nuclease
gttcatgtacggttgcagatataaacgaagcatagcttatgtatgaggtgtaacaaaattggaaacaatagccatgcaaggtgaagaatgtcaccaactcagaaacccttcttcattgacgtgtccctcactcactctcctctcttcactataaatcgccactcttcgtgttctccacttcaccaactccttcaaacttattaacactttccttagttcaatatggggaagcccttcttcactctctctctttcttccctttgcttgctactcttgtcgagtgcatgctattacctccagcaagttcaacgagtgccaactcaacaacctcaacgcgttggaacccgaccaccgcgttgagtccgaaggtggtcttattgaaacatggaactctcaacaccctgagctgcaatgcgccggtgtcactgtttccaaacgcaccctcaaccgcaacggcctccacttgccatcttactcaccttatccccaaatgatcattgtcgttcaaggtgcgtaatattagtaagagtatttatcagcttaacgtgataacaatatagtaatatgaaatatttattaaatttttcataattaatctctgctagaaaatttgattaatcattttagtagaatttgtttttctcaactaggttttaaacacca

SEQ ID NO: 2900 - DNA, 661 bp, Artificial
  Mutations within GlyA3B4 introduced by GmGlyA3B4_T02TALE nuclease
gttcatgtacggttgcagatataaacgaagcatagcttatgtatgaggtgtaacaaaattggaaacaatagccatgcaaggtgaagaatgtcaccaactcagaaacccttcttcattgacgtgtccctcactcactctcctctcttcactataaatcgccactcttcgtgttctccacttcaccaactccttcaaacttattaacactttccttagttcaatatggggaagcccttcttcactctctctctttcttccctttgcttgctactcttgtcgagtgctattacctccagcaagttcaacgagtgccaactcaacaacctcaacgcgttggaacccgaccaccgcgttgagtccgaaggtggtcttattgaaacatggaactctcaacaccctgagctgcaatgcgccggtgtcactgtttccaaacgcaccctcaaccgcaacggcctccacttgccatcttactcaccttatcccccaaatgatcattgtcgttcaaggtgcgtaatattagtaagaagtatttatcagcttaacgtgataacaataatagtaatatgaaatatttattaaatttttataattaatctctgctagaaaatttgattaatcattttagtagaatttgttttctcaactaggttttaaaacacca

SEQ ID NO: 2901 - DNA, 594 bp, Artificial
  Mutations within GlyA3B4 introduced by GmGlyA3B4_T02TALE nuclease
gttcatgtacggttgcagatataaacgaagcatagcttatgtatgaggtgtaacaaaattggaaacaatagccatgcaaggtgaagaatgtcaccaactcagaaacccttcttcattgacgtgtccctcactcactctcctctcttcactataaatcgccactcttcgtgttctccacttcaccaactccttcaaacttattaacactttccttagttcaatatggggaagcccgactcaacaacctcaacaccctcaacgcgttggaacccgaccaccgcgttgagtccgaaggtggtcttattgaaacatggaactctcaacaccctgagctgcaatgcgccggtgtcactgtttccaaacgcaccctcaaccgcaacggcctccacttgccatcttactcaccttatccccaaatgatcattgtcgttcaaggtgcgtaatattagtaagaagtatttatcagcttaacgtgataacaataatagtaatatgaaatatttattaaatttttttataattaatctctgctagaaaattttgattaatcatttttagtagaatttgtttttctcaactaggttttaaacacca

SEQ ID NO: 2902 - DNA, 707 bp, Artificial
  Mutations within GlyA3B4 introduced by GmGlyA3B4_T02TALE nuclease
gttcatgtacggttgcagatataaacgaagcatagcttatgtatgaggtgtaacaaaattggaaacaatagccatgcaaggtgaagaatgtcaccaactcagaaacccttcttcattgacgtgtccctcactcactctcctctcttcactataaatcgccactcttcgtgttctccacttcaccaactccttcaaacttattaacactttccttagttcaatatggggaagcccttcttcactctctctctttcttccctttgcttgctactcttgtcgagtgcatggtggcaagcaggcgctggagacggtccagcggctgttgccggtgctgtgccaggcccacggcttgaccccccagcaggtggtggccatcgccagcaataatggtggcattgctattacctccagcaagttcaacgagtgccaactcaacaacctcaacgcgttggaacccgaccaccgcgttgagtccgaaggtggtcttattgaaacatggaactctcaacacctgagctgcaatgcgccggtgtcactgtttccaaacgcaccctcaaccgcaacggcctccacttgccatcttactcaccttatccccaaatgatcattgtcgtcaaggtgcgtaatattagtaagaagtatttatcagcttaacgtgataacaataatagtaatatgaaaatatttattaaaattttttataaatt

SEQ ID NO: 2903 - DNA, 640 bp, Artificial; identical to SEQ ID NO: 2042
  Mutations within GlyA3B4 introduced by GmGlyA3B4_T02TALE nuclease

SEQ ID NO: 2904 - DNA, 704 bp, Artificial
  Mutations within GlyA3B4 introduced by GmGlyA3B4_T02TALE nuclease
gttcatgtacggttgcagatataaacgaagcatagcttatgtatgaggtgtaacaaaattggaaacaatagccatgcaaggtgaagaatgtcaccaactcagaaacccttcttcattgacgtgtccctcactcactctcctctcttcactataaatcgccactcttcgtgttctccacttcaccaactccttcaaacttattaacactttccttagttcaatatggggaagcccttcttcactctctctctttcttccctttgcttgctactcttgtcgagtgcatgcgcctgcttgccaccattattgctggcgatggccaccacctgctgctattacctccagcaagttcaacgagtgccaactcaacaacctcaacgcgttggaaccccgaccaccgcgttgagtccgaaggtggtcttattgaaacatggaactctcaacaccctgagctgcaatgcgccggtgtcactgtttccaaacgcaccctcaaccgcaacggcctccacttgccatcttactcaccttatccccaaatgatcattgtcgttcaaggtgcgtaatattagtaagaagtatttatcagcttaacgtgataacaataatagtaatatgaaatatttattaaatttttataattaatctctgctagaaaatttgattaatcatttttagtagaatttgttttttctcaactaggtttt

SEQ ID NO: 2905 - DNA, 634 bp, Artificial
  Mutations within GlyA3B4 introduced by GmGlyA3B4_T02TALE nuclease
gttcatgtacggttgcagatataaacgaagcatagcttatgtatgaggtgtaacaaaattggaaacaatagccatgcaaggtgaagaatgtcaccaactcagaaacccttcttcattgacgtgtccctcactcactctcctctcttcactataaatcgccactcttcgtgttctccacttcaccaactccttcaaacttattaacactttccttagttcaatatggggaagcccttcttcactctctctctttcttccctttgcttgctactcttgtcgagtgcatgctattacctccagcaagttcaacgagtgccaactcaacaacctcaacgcgttggaacccgaccaccgcgttgagtccgaaggtggtcttattgaaacatggaactctcaacaccctgagctgcaatgcgccggtgtcactgtttccaaacgcaccctcaaccgcaacggcctccacttgccatcttactcaccttatccccaaatgatcattgtcgttcaaggtgcgtaatattagtaagagtatttatcagcttaacgtgatacaatatagtaatatgaaatatttattaaatttttataattaatctctgctagaaaatttgattaatcattttagtagaatttg

SEQ ID NO: 2906 - DNA, 665 bp, Artificial
  Mutations within GlyA3B4 introduced by GmGlyA3B4_T02TALE nuclease
gttcatgtacggttgcagatataaacgaagcatagcttatgtatgaggtgtaacaaaattggaaacaatagccatgcaaggtgaagaatgtcaccaactcagaaaccccttcttcattgacgtgtccctcactcactctcctctcttcactataaatcgccactcttcgtgttctccacttcaccaactccttcaaacttattaacactttccttagttcaatatggggaagcccttcttcactctctctctttcttccctttgcttgctactcttgtcgagtgcatgcttacctccagcaagttcaacgagtgccaactcaacaacctcaacgcgttggaacccgaccaccgcgttgagtccgaaggtggtcttattgaaacatggaactctcaacaccctgagctgcaatgcgccggtgtcactgtttccaaacgcaccctcaaccgcaacggcctccacttgccatcttactcaccttatccccaaatgatcattgtcgttcaaggtgcgtaatattagtaagaagtatttatcagcttaacgtgataacaataatagtaatatgaaatatttattaaatttttataattaatctctgctagaaaatttgattaatcattttagtagaatttgtttttctcaactaggtttttaaaacacca

SEQ ID NO: 2907 - DNA, 663 bp, Artificial
  Mutations within GlyA3B4 introduced by GmGlyA3B4_T02TALE nuclease
gttcatgtacggttgcagatataaacgaagcatagcttatgtatgaggtgtaacaaaattggaaacaatagccatgcaaggtgaagaatgtcaccaactcagaaacccttcttcattgacgtgtccctcactcactctcctctcttcactataaatcgccactcttcgtgttctccacttcaccaactccttcaaacttattaacactttccttagttcaatatggggaagcccttcttcactctctctctttcttccctttgcttgctactcttgtcgagtgcattattacctccagcaagttcaacgagtgccaactcaacaacctcaacgcgttggaacccgaccaccgcgttgagtccgaaggtggtcttattgaaacatggaactctcaacaccctgagctgcaatgcgccggtgtcactgtttccaaacgcaccctcaaccgcaacggcctccacttgccatcttactcaccttatcccccaaatgatcattgtcgttcaaggtgcgtaatattagtaagaagtatttatcagcttaacgtgataacaataatagtaatatgaaatatttattaaatttttataattaatctctgctagaaaatttgattaatcattttagtagaatttgttttctcaactaggttttaaaacacca

SEQ ID NO: 2908 - DNA, 660 bp, Artificial; identical to SEQ ID NO: 1796
  Mutations within GlyA3B4 introduced by GmGlyA3B4_T02TALE nuclease

SEQ ID NO: 2909 - DNA, 659 bp, Artificial
  Mutations within GlyA3B4 introduced by GmGlyA3B4_T02TALE nuclease
gttcatgtacggttgcagatataaacgaagcatagcttatgtatgaggtgtaacaaaattggaaacaatagccatgcaaggtgaagaatgtcaccaactcagaaacccttcttcattgacgtgtccctcactcactctcctctcttcactataaatcgccactcttcgtgttctccacttcaccaactccttcaaacttattaacactttccttagttcaatatggggaagcccttcttcactctctctctttcttccctttgcttgctactcttgtcgagtgcatacctccagcaagttcaacgagtgccaactcaacaacctcaacgcgttggaacccgaccaccgcgttgagtccgaaggtggtcttattgaaacatggaactctcaacaccctgagctgcaatgcgccggtgtcactgtttccaaacgcaccctcaaccgcaacggcctccacttgccatcttactcaccttatccccaaatgatcattgtcgttcaaggtgcgtaatattagtaagaagtatttatcagcttaacgtgataacaatatagtaatatgaaatatttattaaatttttataattaatctctgctagaaaatttgattaatcattttagtagaatttgtttttctcaactaggtttttaaaacacca

SEQ ID NO: 2910 - DNA, 594 bp, Artificial
  Mutations within GlyA3B4 introduced by GmGlyA3B4_T02TALE nuclease
gttcatgtacggttgcagatataaacgaagcatagcttatgtatgaggtgtaacaaaattggaaacaatagccatgcaaggtgaagaatgtcaccaactcagaaacccttcttcattgacgtgtccctcactcactctcctctcttcactataaatcgccactcttcgtgttctccacttcaccaactccttcaaacttattaacactttccttagttcaatatggggaagcccttcttcactctctctctttcttcaacgagtgccaactcaacaacctcaacgcgttggaacccgaccaccgcgttgagtccgaaggtggtcttattgaaacatggaactctcaacaccctgagctgcaatgcgccggtgtcactgtttccaaacgcaccctcaaccgcaacggcctccacttgccatcttactcaccttatccccaaatgatcattgtcgttcaaggtgcgtaatattagtaagaagtatttatcagcttaacgtgataacaataatagtaatatgaaatatttattaattttttataattaatctctgctagaaaatttgattaatcatttttagtagaatttgtttttc

SEQ ID NO: 2911 - DNA, 720 bp, Artificial
  Mutations within GlyA3B4 introduced by GmGlyA3B4_T02TALE nuclease
  misc_feature (552): n is a or c or t or g
gttcatgtacggttgcagatataaacgaagcatagcttatgtatgaggtgtaacaaaattggaaacaatagccatgcaaggtgaagaatgtcaccaactcagaaacccttcttcattgacgtgtccctcactcactctcctctcttcactataaatcgccactcttcgtgttctccacttcaccaactccttcaaacttattaacactttccttagttcaatatgggggaagcccttcttcactctctctctttcttccctttgcttgctactcttgtcgagtgcatacttgcacatctaccatagtaatcaacatgaaactaatatgcacgtctccagcgcctgcttgccgccatcgtggctggcgatggccaccacctgctccggggtcaagccgtgggcctggcacagcaccggcaacagccgctggaccgtctccagcgctttgctattacctccagcaagttcaacgagtgccaactcaacaacctcaacgcgttggaacccgaccaccgcgttgagtccgaaggtggtcttattgaaacaggaacnctcaacaccctggagctgcaatgcgccgggtgtcactgtttccaaacgcaccctcaaccgcaacggcctccacttgccatcttactcaccttatccccaaaatgatcattgtcgttcaaggtgcgtaatattagtaagaagtatttatcagcttaacgtgataacaat

SEQ ID NO: 2912 - DNA, 667 bp, Artificial
  Mutations within GlyA3B4 introduced by GmGlyA3B4_T02TALE nuclease
  misc_feature (534): n is a or c or t or g
gttcatgtacggttgcagatataaacgaagcatagcttatgtatgaggtgtaacaaaattggaaacaatagccatgcaaggtgaagaatgtcaccaactcagaaaccccttcttcattgacgtgtccctcactcactctcctctcttcactataaatcgccactcttcgtgttctccacttcaccaactccttcaaacttattaacactttccttagttcaatatgggggaagcccttcttcactctctctctttcttccctttgcttgctactcttgtcgagtgcattgctattacctccagcaagttcaacgagtgccaactcaacaacctcaacgcgttggaacccgaccaccgcgttgagtccgaaggtggtcttattgaaacatggaactctcaacaccctgagctgcaatgcgccggtgtcactgtttccaaacgcaccctcaaccgcaacggcctccacttgccatcttactcaccttatccccaaatgatcatttcgttcaagggtgcgtaatattagtaagaagnatttatcagcttaacgtgatacaatatagtaatatgaaatatttattaaatttttataattaatctctgctagaaaatttgattaatcattttagtagaatttgtttttctcaactaggtttttaaaacacca

SEQ ID NO: 2913 - DNA, 654 bp, Artificial; identical to SEQ ID NO: 2225
  Mutations within GlyA3B4 introduced by GmGlyA3B4_T02TALE nuclease

SEQ ID NO: 2914 - DNA, 660 bp, Artificial; identical to SEQ ID NO: 1717
  Mutations within GlyA3B4 introduced by GmGlyA3B4_T02TALE nuclease

SEQ ID NO: 2915 - DNA, 658 bp, Artificial
  Mutations within GlyA3B4 introduced by GmGlyA3B4_T02TALE nuclease
gttcatgtacggttgcagatataaacgaagcatagcttatgtatgaggtgtaacaaaattggaaacaatagccatgcaaggtgaagaatgtcaccaactcagaaacccttcttcattgacgtgtccctcactcactctcctctcttcactataaatcgccactcttcgtgttctccacttcaccaactccttcaaacttattaacactttccttagttcaatatggggaagcccttcttcactctctctctttcttccctttgcttgctactcttgtcgagtgcatgcttggcgctggagacggtccagcggctgttgctattacctccagcaagttcaacgagtgccaactcaacaacctcaacgcgttggaacccgaccaccgcgttgagtccgaaggtggtcttattgaaacatggaactctcaacaccctgagctgcaatgcgccggtgtcactgtttccaaacgcaccctcaaccgcaacggcctccacttgccatcttactcaccttatccccaaatgatcattgtcgttcaaggtgcgtaatattagtaagaagtatttatcagcttaacgtgataacaataatagtaatatgaaatatttattaaatttttataattaatctctgctagaaaatttgattaatcattttt

SEQ ID NO: 2916 - DNA, 664 bp, Artificial
  Mutations within GlyA3B4 introduced by GmGlyA3B4_T02TALE nuclease
gttcatgtacggttgcagatataaacgaagcatagcttatgtatgaggtgtaacaaaattggaaacaatagccatgcaaggtgaagaatgtcaccaactcagaaacccttcttcattgacgtgtccctcactcactctcctctcttcactataaatcgccactcttcgtgttctccacttcaccaactccttcaaacttattaacactttccttagttcaatatggggaagcccttcttcactctctctctttcttccctttgcttgctactcttgtcgagtgctattacctccagcaagttcaacgagtgccaactcaacaacctcaacgcgttggaacccgaccaccgcgttgagtccgaaggtggtcttattgaaacatggaactctcaacaccctgagctgcaatgcgccggtgtcactgtttccaaacgcaccctcaaccgcaacggcctccacttgccatcttactcaccttatccccaaatgatcattgtcgttcaaggtgcgtaatattagtaagaagtatttatcagcttaacgtgataacaataatagtaatatgaaaatatttattaaatttttataattaatctctgctagaaaatttgattaatcatttttagtagaatttgtttttctcaactaggtttttaaaacacca

SEQ ID NO: 2917 - DNA, 663 bp, Artificial; identical to SEQ ID NO: 2045
  Mutations within GlyA3B4 introduced by GmGlyA3B4_T02TALE nuclease

SEQ ID NO: 2918 - DNA, 598 bp, Artificial
  Mutations within GlyA3B4 introduced by GmGlyA3B4_T02TALE nuclease
gttcatgtacggttgcagatataaacgaagcatagcttatgtatgaggtgtaacaaaattggaaacaatagccatgcaaggtgaagaatgtcaccaactcagaaacccttcttcattgacgtgtccctcactcactctcctctcttcactataaatcgccactcttcgtgttctccacttcaccaactccttcaaacttattaacactttccttagttcaatatggggaagcccttcttcactccagcaagttcaacgagtgccaactcaacaacctcaacgcgttggaacccgaccaccgcgttgagtccgaaggtggtcttattgaaacatggaactctcaacaccctgagctgcaatgcgccggtgtcactgtttccaaacgcaccctcaaccgcaacggcctccacttgccatcttactcaccttatccccaaaatgatcattgtcgttcaaggtgcgtaatattagtaagaagtatttatcagcttaacgtgataacaataatagtaatatgaaatatttattaaattttttataattaatctctgctagaaaatttgattaaatcatttttagtagaatttgtttttctcaa

SEQ ID NO: 2919 - DNA, 640 bp, Artificial
  Mutations within GlyA3B4 introduced by GmGlyA3B4_T02TALE nuclease
gttcatgtacggttgcagatataaacgaagcatagcttatgtatgaggtgtaacaaaattggaaacaatagccatgcaaggtgaagaatgtcaccaactcagaaacccttcttcattgacgtgtccctcactcactctcctctcttcactataaatcgccactcttcgtgttctccacttcaccaactccttcaaacttattaacactttccttagttcaatatggggaagcccttcttcactctctctctttcttccctttgcttgctactcttgtcgagtgcatttgctattacctccagcaagttcaacgagtgccaactcaacaacctcaacgcgttggaacccgaccaccgcgttgagtccgaaggtggtcttattgaaacatggaactctcaacaccctgagctgcaatgcgccggtgtcactgtttccaaacgcaccctcaaccgcaacggcctccacttgccaatcttactcaccttatccccaaatgatcattgtcgttcaaggtgcgtaatattagtaagaagtatttatcagcttaacgtgataacaataatagtaatatgaaatatttattaaatttttataattaatctctgctagaaaatttgattaatcattttagtagaatttg

SEQ ID NO: 2920 - DNA, 721 bp, Artificial
  Mutations within GlyA3B4 introduced by GmGlyA3B4_T02TALE nuclease
gttcatgtacggttgcagatataaacgaagcatagcttatgtatgaggtgtaacaaaattggaaacaatagccatgcaaggtgaagaatgtcaccaactcagaaacccttcttcattgacgtgtccctcactcactctcctctcttcactataaatcgccactcttcgtgttctccacttcaccaactccttcaaacttattaacactttccttagttcaatatggggaagcccttcttcactctctctctttcttccctttgcttgctactcttgtcgagtgcatgcttgaccccggagcaggtggtggccatcgccagccacgatggcggcaagcaggcgctggagacggtccagctttgctattacctccagcaagttcaacgagtgccaactcaacaacctcaacgcgttggaacccgaccaccgcgttgagtccgaaggtggtcttattgaaacatggaactctcaacaccctgagctgcaatgcgccggtgtcactgtttccaaacgcacctcaaccgcaacggcctccacttgccatcttactcaccttatccccaaatgatcattgtcgttcaaggtgcgtaatattagtaagaagtatttatcagcttaacgtgataacaataatagtaatatgaaatatttattaaattttttataattaatctctgctagaaaatttgattaatcatttttagtagaatttgtttttctc

SEQ ID NO: 2921 - DNA, 735 bp, Artificial
  Mutations within GlyA3B4 introduced by GmGlyA3B4_T02TALE nuclease
gttcatgtacggttgcagatataaacgaagcatagcttatgtatgaggtgtaacaaaattggaaacaatagccatgcaaggtgaagaatgtcaccaactcagaaacccttcttcattgacgtgtccctcactcactctcctctcttcactataaatcgccactcttcgtgttctccacttcaccaactccttcaaacttattaacactttccttagttcaatatggggaagcccttcttcactctctctctttcttccctttgcttgctactcttgtcgagtgcatgccagccccgacacccgccaacacccgctgacgcgccctgacgggcttgtctgctcccggcatccgcttacagacaagctgtggcgatggccaccacctgctggggggtcaagccgtgggcctggcacagcaccggcaacagccgctgctattacctccagcaagttcaacgagtgccaactcaacaacctcaacgcgttggaacccgaccaccgcgttgagtccgaaggtggtcttattgaaacatggaactctcaacaccctgagctgcaatgcgccggtgtcactgtttccaaacgcaccctcaaccgcaacggcctccacttgccatcttactcaccttatccccaaatgatcattgtcgttcaaggtgcgtaatattagtaagaagtatttatcagcttaacgtgataacaataatagtaatatgaaatatttattaaattttt

SEQ ID NO: 2922 - DNA, 563 bp, Artificial
  Mutations within GlyA3B4 introduced by GmGlyA3B4_T02TALE nuclease
gttcatgtacggttgcagatataaacgaagcatagcttatgtatgaggtgtaacaaaattggaaacaatagccatgcaaggtgaagaatgtcaccaactcagaaacccttcttcattgacgtgtccctcactcactctcctctcttcactataaatcgccactcttcgtgttctccacttcaccaactccttcaaacttattaacactttacctccagcaagttcaacgagtgccaactcaacaacctcaacgcgttggaacccgaccaccgcgttgagtccgaaggtggtcttattgaaacatggaactctcaacaccctgagctgcaatgcgccggtgtcactgtttccaaacgcaccctcaaccgcaacggcctccacttgccatcttactcaccttatccccaaaatgatcattgtcgttcaaggtgcgtaatattagtaagaagtatttatcagcttaacgtgataacaataatagtaatatgaaatatttattaaattttttaatattaatctctgctagaaaattgataatcattttagtagaatttgtttttctc

SEQ ID NO: 2923 - DNA, 658 bp, Artificial
  Mutations within GlyA3B4 introduced by GmGlyA3B4_T02TALE nuclease
gttcatgtacggttgcagatataaacgaagcatagcttatgtatgaggtgtaacaaaattggaaacaatagccatgcaaggtgaagaatgtcaccaactcagaaacccttcttcattgacgtgtccctcactcactctcctctcttcactataaatcgccactcttcgtgttctccacttcaccaactccttcaaacttattaacactttccttagttcaatatggggaagcccttcttcactctctctctttcttccctttgcttgctactcttgtcgagctattacctccagcaagttcaacgagtgccaactcaacaacctcaacgcgttggaacccgaccaccgcgttgagtccgaaggtggtcttattgaaacatggaactctcaacaccctgagctgcaatgcgccggtgtcactgtttccaaacgcaccctcaaccgcaacggcctccacttgccatcttactcaccttatccccaaatgatcattgtcgttcaaggtgcgtaatattagtaagaagtatttatcagcttaacgtgatacaataatagtaatatgaaatatttattaaatttttataattaatctctgctagaaaatttgattaatcattttagtagaatttgttttctcaactaggtttttaaaacacca

SEQ ID NO: 2924 - DNA, 652 bp, Artificial; identical to SEQ ID NO: 2383
  Mutations within GlyA3B4 introduced by GmGlyA3B4_T02TALE nuclease

SEQ ID NO: 2925 - DNA, 668 bp, Artificial
  Mutations within GlyA3B4 introduced by GmGlyA3B4_T02TALE nuclease
  misc_feature (531): n is a or c or t or g
gttcatgtacggttgcagatataaacgaagcatagcttatgtatgaggtgtaacaaaattggaaacaatagccatgcaaggtgaagaatgtcaccaactcagaaaccccttcttcattgacgtgtccctcactcactctcctctcttcactataaatcgccactcttcgtgttctccacttcaccaactccttcaaacttattaacactttccttagttcaatatggggaagcccttcttcactctctctctttcttccctttgcttgctactcttgtcgagtgcatgttattacctccagcaagttcaacgagtgccaactcaacaacctcaacgcgttggaacccgaccaccgcgttgagtccgaaggtggtcttattgaaacatggaactctcaacaccctgagctgcaatgcgccggtgtcactgtttccaaacgcaccctcaaccgcaacggcctccacttgccatcttactcaccttatccccaaatgatcattgtcgttcaaggtgcgtaatattagtaagagnatttatcagcttaacgtgataacaataatagtaatatgaaaatatttattaaaatttttataattaatctctgctagaaaatttgattaatcatttttagtagaatttgtttttctcaactaggtttttaaaacacc

SEQ ID NO: 2926 - DNA, 666 bp, Artificial; identical to SEQ ID NO: 2655
  Mutations within GlyA3B4 introduced by GmGlyA3B4_T02TALE nuclease

SEQ ID NO: 2927 - DNA, 584 bp, Artificial
  Mutations within GlyA3B4 introduced by GmGlyA3B4_T02TALE nuclease
gttcatgtacggttgcagatataaacgaagcatagcttatgtatgaggtgtaacaaaattggaaacaatagccatgcaaggtgaagaatgtcaccaactcagaaacccttcttcattgacgtgtccctcactcactctcctctcttcactataaatcgccactcttcgtgttctccacttcaccaactccttcaaacttattaacactttccttagttcaatatggggaagcccttcttcaacgagtgccaactcaacaacctcaacgcgttggaacccgaccaccgcgttgagtccgaaggtggtcttattgaaacatggaactctcaacaccctgagctgcaatgcgccggtgtcactgtttccaaacgcaccctcaaccgcaacggcctccacttgccatcttactcaccttatcccccaaatgatcattgtcgttcaaggtgcgtaatattagtaagaagtatttatcagcttaacgtgataacaataatagtaatatgaaatatttattaaattttttataattaatctctgctagaaatttgattaatcatttttagtagaatttgtttttctcaatc

SEQ ID NO: 2928 - DNA, 773 bp, Artificial
  Mutations within GlyA3B4 introduced by GmGlyA3B4_T02TALE nuclease
gttcatgtacggttgcagatataaacgaagcatagcttatgtatgaggtgtaacaaaattggaaacaatagccatgcaaggtgaagaatgtcaccaactcagaaacccttcttcattgacgtgtccctcactcactctcctctcttcactataaatcgccactcttcgtgttctccacttcaccaactccttcaaacttattaacactttccttagttcaatatggggaagcccttcttcactctctctctttcttccctttgcttgctactcttgtcgagtgcattggccaccacctgctccggggtcaagccgtgggcctggcacagcaccggcaacagcgcctgcaccgtctccagcgcctgcttgccaccaatattgctggcgatggccaccacctgctccggggtcaagccgtgggcctggcacaacgagtgccaactcaacaacctcaacgcgttggaacccgaccaccgcgttgagtccgaaggtggtcttattgaaacatggaactctcaacaccctgagctgcaatgcgccggtgtcactgtttccaaacgcaccctcaaccgcaacggcctccatcttgccatcttactcaccttatcccaaatgatcattgtcgttcaaggtgcgtaatcattagtaagaagtatttatcagcttaacgtgataacaagtaatagtaatatgaaaatatttattaaattttttataattaatctctgctagaaaatttgattaatcattttagtagaatttgtttttctcaa

SEQ ID NO: 2929 - DNA, 596 bp, Artificial
  Mutations within GlyA3B4 introduced by GmGlyA3B4_T02TALE nuclease
gttcatgtacggttgcagatataaacgaagcatagcttatgtatgaggtgtaacaaaattggaaacaatagccatgcaaggtgaagaatgtcaccaactcagaaacccttcttcattgacgtgtccctcactcactctcctctcttcactataaatcgccactcttcgtgttctccacttcaccaactccttcaaacttattaacactttccttagttcaatatggggaagcccttcttcactctctctctttcttccctttgcttgctactcaacgcgttggaacccgaccaccgcgttgagtccgaaggtggtcttattgaaacatggaactctcaacaccctgagctgcaatgcgccggtgtcactgtttccaaacgcaccctcaaccgcaacggcctccacttgccatcttactcaccttatccccaaatgatcattgtcgttcaaggtgcgtaatattagtaagaagtatttatcagcttaacgtgataacaataatagtaatatgaaatatttattaaattttttataattaatctctgctagaaaatttgattaatcatttttagtagaatttgtttttctcaactagg

SEQ ID NO: 2930 - DNA, 591 bp, Artificial
  Mutations within GlyA3B4 introduced by GmGlyA3B4_T02TALE nuclease
gttcatgtacggttgcagatataaacgaagcatagcttatgtatgaggtgtaacaaaaattggaaacaatagccatgcaaggtgaagaatgtcaccaactcagaaacccttcttcattgacgtgtccctcactcactctcctctcttcactataaatcgccactcttcgtgttctccacttcaccaactccttcaaacttattaacactttccttagttcaatatggggaagcccttcttcactctctctctttcttccctttgcttgctactcttgtcgagtgccaactcaacaacctcaacgcgttggaacccgaccaccgcgttgagtccgaaggtggtcttattgaaacatggaactctcaacaccctgagctgcaatgcgccggtgtcactgtttccaaacgcaccctcaaccgcaacggcctccacttgccatcttactcaccttatccccaaatgatcattgtcgttcaaggtgcgtaatattagtaagaagtatttatcagcttaacgtgataacaataatagtaatatgaaatatttattaaattttttataattaatctctgctagaaaatttgattaatc

SEQ ID NO: 2931 - DNA, 508 bp, Artificial
  Mutations within GlyA3B4 introduced by GmGlyA3B4_T02TALE nuclease
gttcatgtacggttgcagatataaacgaagcatagcttatgtatgaggtgtaacaaaattggaaacaatagccatgcaaggtgaagaatgtcaccaactcagaaacccttcttcattgacgtgtccctcactcactctcctctcttcactataaatcgccactcttcgtgttctccacttcaccaactccttcaaacttattaacactttccttagttcaacaacctcaacgcgttggaacccgaccaccgcgttgagtccgaaggtggtcttattgaaacatggaactctcaacaccctgagctgcaatgcgccggtgtcactgtttccaaacgcaccctcaaccgcaacggcctccacttgccatcttactcaccttatccccaaatgatcattgtcgttcaaggtgcgtaatattagtaagaagtatttatcagcttaacgtgataacaataatagtaatatgaaatatttattaaattttttataattaatctctgctagaaaa

SEQ ID NO: 2932 - DNA, 651 bp, Artificial
  Mutations within GlyA3B4 introduced by GmGlyA3B4_T02TALE nuclease
gttcatgtacggttgcagatataaacgaagcatagcttatgtatgaggtgtaacaaaattggaaacaatagccatgcaaggtgaagaatgtcaccaactcagaaacccttcttcattgacgtgtccctcactcactctcctctcttcactataaatcgccactcttcgtgttctccacttcaccaactccttcaaacttattaacactttccttagttcaatatggggaagcccttcttcactctctctctttcttccctttgcttgctactcttgtcgagtgcattacctccagcaagttcaacgagtgccaactcaacaacctcaacgcgttggaacccgaccaccgcgttgagtccgaaggtggtcttattgaaacatggaactctcaacaccctgagctgcaatgcgccggtgtcactgtttccaaacgcaccctcaaccgcaacggcctccacttgccatcttactcaccttatccccaaatgatcattgtcgttcaaggtgcgtaatattagtaagaagtatttatcagcttaacgtgataacaataatagtaatatgaaatatttattaaatttttataattaatctctgctagaaaatttgattaatcattttagtagaatttgtttttctcaactaggtttt

SEQ ID NO: 2933 - DNA, 590 bp, Artificial
  Mutations within GlyA3B4 introduced by GmGlyA3B4_T02TALE nuclease
gttcatgtacggttgcagatataaacgaagcatagcttatgtatgaggtgtaacaaaattggaaacaatagccatgcaaggtgaagaatgtcaccaactcagaaacccttcttcattgacgtgtccctcactcactctcctctcttcactataaatcgccactcttcgtgttctccacttcaccaactccttcaaacttattaacactttccttagttcaatatggggaagcccttcttcactctctctctttcttccctttgcttgctactcttgtcgagtgcatccgaaggtggtcttattgaaacatggaactctcaacaccctgagctgcaatgcgccggtgtcactgtttccaaacgcaccctcaaccgcaacggcctccacttgccatcttactcaccttatccccaaatgatcattgtcgttcaaggtgcgtaatattagtaagaagtattttatcagcttaacgtgataacaataatagtaatatgaaatatttattaaattttttataattaatctctgctagaaaatttgattaatcatttttagtagaatttgtttttctcaactaggttttaaacacc

SEQ ID NO: 2934 - DNA, 652 bp, Artificial
  Mutations within GlyA3B4 introduced by GmGlyA3B4_T02TALE nuclease
gttcatgtacggttgcagatataaacgaagcatagcttatgtatgaggtgtaacaaaattggaaacaatagccatgcaaggtgaagaatgtcaccaactcagaaacccttcttcattgacgtgtccctcactcactctcctctcttcactataaatcgccactcttcgtgttctccacttcaccaactccttcaaacttattaacactttccttagttcaatatggggaagcccttcttcactctctctctttcttccctttgcttgctattacctccagcaagttcaacgagtgccaactcaacaacctcaacgcgttggaacccgaccaccgcgttgagtccgaaggtggtcttattgaaacatggaactctcaacaccctgagctgcaatgcgccggtgtcactgttttccaaacgcaccctcaaccgcaacggcctccacttgccatcttactcaccttatcccccaaatgatcattgtcgttcaaggtgcgtaatattagtaagaagtatttatcagcttaacgtgataacaataatagtaatatgaaatattttattaaattttttataattaatctctgctagaaaatttgattaatcatttttagtagaatttgttttttctcaactaggttttaaacaccaca

SEQ ID NO: 2935 - DNA, 546 bp, Artificial
  Mutations within GlyA3B4 introduced by GmGlyA3B4_T02TALE nuclease
gttcatgtacggttgcagatataaacgaagcatagcttatgtatgaggtgtaacaaaattggaaacaatagccatgcaaggtgaagaatgtcaccaactcagaaacccttcttcattgacgtgtccctcactcactctcctctcttcactataaatcgccactcttcgtgttctccacttcaccaactccttcaaacttattaacactttccttagttcaatatggggaacccgaccaccgcgttgagtccgaaggtggtcttattgaaacatggaactctcaacaccctgagctgcaatgcgccggtgtcactgtttccaaacgcaccctcaaccgcaacggcctccacttgccatcttactcaccttatccccaaatgatcattgtcgttcaaggtgcgtaatattagtaagaagtatttatcagcttaacgtgataacaataatagtaatatgaaatatttattaaattttttataattaatctctgctagaaaatttgattaatcatttttagtagaatttgttttttctcaactaggtttt

SEQ ID NO: 2936 - DNA, 668 bp, Artificial
  Mutations within GlyA3B4 introduced by GmGlyA3B4_T02TALE nuclease
gttcatgtacggttgcagatataaacgaagcatagcttatgtatgaggtgtaacaaaattggaaacaatagccatgcaaggtgaagaatgtcaccaactcagaaaccccttcttcattgacgtgtccctcactcactctcctctcttcactataaatcgccactcttcgtgttctccacttcaccaactccttcaaacttattaacactttccttagttcaatatggggaagcccttcttcactctctctctttcttccctttgcttgctactcttgtcgagtgcatttgctattacctccagcaagttcaacgagtgccaactcaacaacctcaacgcgttggaacccgaccaccgcgttgagtccgaaggtggtcttattgaaacatggaactctcaacaccctgagctgcaatgcgccggtgtcactgtttccaaacgcaccctcaaccgcaacggcctccacttgccatcttactcaccttatccccaaatgatcattgtcgttcaaggtgcgtaatattagtaagagtatttatcagcttaacgtgataacaatatagtaatatgaaaatatttattaaatttttataattaatctctgctagaaaatttgattaatcattttagtagaatttgtttttctcaactaggtttttaaaacacca

SEQ ID NO: 2937 - DNA, 665 bp, Artificial
  Mutations within GlyA3B4 introduced by GmGlyA3B4_T02TALE nuclease
gttcatgtacggttgcagatataaacgaagcatagcttatgtatgaggtgtaacaaaattggaaacaatagccatgcaaggtgaagaatgtcaccaactcagaaacccttcttcattgacgtgtccctcactcactctcctctcttcactataaatcgccactcttcgtgttctccacttcaccaactccttcaaacttattaacactttccttagttcaatatggggaagcccttcttcactctctctctttcttccctttgcttgctactcttgtcgagttgctcttacttacctcagcaagttcaacgagtgccaactcaacaacctcaacgcgttggaacccgaccaccgcgttgagtccgaaggtggtcttattgaaacatggaactctcaacaccctgagctgcaatgcgccggtgtcactgtttccaaacgcaccctcaaccgcaacggcctccacttgccatcttactcaccttatccccaaatgatcattgtcgttcaaggtgcgtaatattagtaagaagtatttatcagcttaacgtgataacaataatagtaatatgaaatatttattaaatttttataattaatctctgctagaaaatttgattaatcattttagtagaatttgtttttctcaactaggttttaaaacacca

SEQ ID NO: 2938 - DNA, 659 bp, Artificial
  Mutations within GlyA3B4 introduced by GmGlyA3B4_T02TALE nuclease
gttcatgtacggttgcagatataaacgaagcatagcttatgtatgaggtgtaacaaaattggaaacaatagccatgcaaggtgaagaatgtcaccaactcagaaacccttcttcattgacgtgtccctcactcactctcctctcttcactataaatcgccactcttcgtgttctccacttcaccaactccttcaaacttattaacactttccttagttcaatatggggaagcccttcttcactctctctctttcttccctttgcttgctactcttgtcgagtgcatattacctccagcaagttcaacgagtgccaactcaacaacctcaacgcgttggaacccgaccaccgcgttgagtccgaaggtggtcttattgaaacatggaactctcaacaccctgagctgcaatgcgccggtgtcactgtttccaaacgcaccctcaaccgcaacggcctccacttgccatcttactcaccttatccccaaatgatcattgtcgttcaaggtgcgtaatattagtaagaagtatttatcagcttaacgtgataacaataatagtaatatgaaaatatttattaaatttttataattaatctctgctagaaaatttgattaatcatttttagtagaatttgtttttctcaactaggttttaaaa

SEQ ID NO: 2939 - DNA, 636 bp, Artificial
  Mutations within GlyA3B4 introduced by GmGlyA3B4_T02TALE nuclease
gttcatgtacggttgcagatataaacgaagcatagcttatgtatgaggtgtaacaaaattggaaacaatagccatgcaaggtgaagaatgtcaccaactcagaaacccttcttcattgacgtgtccctcactcactctcctctcttcactataaatcgccactcttcgtgttctccacttcaccaactccttcaaacttattaacactttccttagttcaatatggggaagcccttcttcactctctctctttcttccctttgcttgctactcttgtcgagtgcatgctattacctccagcaagttcaacgaatgccaactcaacaacctcaacgcgttggaacccgaccaccgcgttgagtccgaaggtggtcttattgaaacatggaactctcaacaccctgagctgcaatgcgccggtgtcactgtttccaaacgcaccctcaaccgcaacggcctccacttgccatcttactcaccttatccccaaatgatcattgtcgttcaaggtgcgtaatattagtaagagtatttatcagcttaacgtgataacaataatagtaatatgaaatatttattaaatttttataattaatctctgctagaaaatttgattaatcattttagtagaatttg

SEQ ID NO: 2940 - DNA, 656 bp, Artificial
  Mutations within GlyA3B4 introduced by GmGlyA3B4_T02TALE nuclease
gttcatgtacggttgcagatataaacgaagcatagcttatgtatgaggtgtaacaaaattggaaacaatagccatgcaaggtgaagaatgtcaccaactcagaaacccttcttcattgacgtgtccctcactcactctcctctcttcactataaatcgccactcttcgtgttctccacttcaccaactccttcaaacttattaacactttccttagttcaatatggggaagcccttcttcactctctctctttcttccctttgcttgctactcttgtcgagtgcattgctattacctccagcaagttcaacgagtgccaactcaacaacctcaacgcgttggaacccgaccaccgcgttgagtccgaaggtggtcttattgaaacatggaactctcaacaccctgagctgcaatgcgccggtgtcactgtttccaaacgcaccctcaaccgcaacggcctccacttgccatcttactcaccttatccccaaatgatcattgtcgttcaaggtgcgtaatattagtaagagtatttatcagcttaacgtgataacaataatagtaatatgaaatatttattaaatttttataattaatctctgctagaaaatttgattaatcattttagtagaatttgtttttctcaactaggtttt

SEQ ID NO: 2941 - DNA, 665 bp, Artificial
  Mutations within GlyA3B4 introduced by GmGlyA3B4_T02TALE nuclease
gttcatgtacggttgcagatataaacgaagcatagcttatgtatgaggtgtaacaaaattggaaacaatagccatgcaaggtgaagaatgtcaccaactcagaaacccttcttcattgacgtgtccctcactcactctcctctcttcactataaatcgccactcttcgtgttctccacttcaccaactccttcaaacttattaacactttccttagttcaatatggggaagcccttcttcactctctctctttcttccctttgcttgctactcttgtcgagtgcatctattacctccagcaagttcaacgagtgccaactcaacaacctcaacgcgttggaacccgaccaccgcgttgagtccgaaggtggtcttattgaaacatggaactctcaacaccctgagctgcaatgcgccggtgtcactgtttccaaacgcaccctcaaccgcaacggcctccacttgccatcttactcaccttatccccaaatgatcattgtcgttcaaggtgcgtaatattagtaagaagtatttatcagcttaacgtgataacaataatagtaatatgaaatatttattaaatttttataattaatctctgctagaaaatttgattaatcatttttagtagaatttgtttttctcaactaggttttaaaacacca

SEQ ID NO: 2942 - DNA, 662 bp, Artificial
  Mutations within GlyA3B4 introduced by GmGlyA3B4_T02TALE nuclease
gttcatgtacggttgcagatataaacgaagcatagcttatgtatgaggtgtaacaaaattggaaacaatagccatgcaaggtgaagaatgtcaccaactcagaaacccttcttcattgacgtgtccctcactcactctcctctcttcactataaatcgccactcttcgtgttctccacttcaccaactccttcaaacttattaacactttccttagttcaatatggggaagcccttcttcactctctctctttcttccctttgcttgctactcttgtcgagtgcctattacctccagcaagttcaacgagtgccaactcaacaacctcaacgcgttggaacccgaccaccgcgttgagtccgaaggtggtcttattgaaacatggaactctcaacaccctgagctgcaatgcgccggtgtcactgtttccaaacgcaccctcaaccgcaacggcctccacttgccatcttactcaccttatccccaaatgatcattgtcgttcaaggtgcgtaatattagtaagaagtatttatcagcttaacgtgataacaataatagtaatatgaaatatttattaaatttttataattaatctctgctagaaaatttgattaatcattttagtagaatttgttttctcaactaggtttttaaaacacca

SEQ ID NO: 2943 - DNA, 660 bp, Artificial; identical to SEQ ID NO: 2553
  Mutations within GlyA3B4 introduced by GmGlyA3B4_T02TALE nuclease

SEQ ID NO: 2944 - DNA, 600 bp, Artificial
  Mutations within GlyA3B4 introduced by GmGlyA3B4_T02TALE nuclease
  misc_feature (506): n is a or c or t or g
gttcatgtacggttgcagatataaacgaagcatagcttatgtatgaggtgtaacaaaattggaaacaatagccatgcaaggtgaagaatgtcaccaactcagaaacccttcttcattgacgtgtccctcactcactctcctctcttcactataaatcgccactcttcgtgttctccacttcaccaactccttcaaacttattaacactttccttagttacaatatgggggaagcccttcttcactctctctctttcttccctttgcttgctactcttgtcgagtgcattagcaagttcaacgagtgccaactcaacaacctcaacgcgttggaacccgaccaccgcgttgagtccgaaggtggtcttattgaaacatggaactctcaacaccctgagctgcaatgcgccggtgtcactgtttccaaacgcaccctcaaccgcaacggcctccacttgccatcttactcaccttatcccccaaatgatcattgtcgttcaaggtgcntaaatattagtaagaagtatttatcagcttaacgtgataacaataatagtaatatgaaatatttattaaattttttataattaatctctgctag

SEQ ID NO: 2945 - DNA, 661 bp, Artificial
  Mutations within GlyA3B4 introduced by GmGlyA3B4_T02TALE nuclease
gttcatgtacggttgcagatataaacgaagcatagcttatgtatgaggtgtaacaaaattggaaacaatagccatgcaaggtgaagaatgtcaccaactcagaaacccttcttcattgacgtgtccctcactcactctcctctcttcactataaatcgccactcttcgtgttctccacttcaccaactccttcaaacttattaacactttccttagttcaatatggggaagcccttcttcactctctctctttcttccctttgcttgctactcttgtcgagtgcattacctccagcaagttcaacgagtgccaactcaacaacctcaacgcgttggaacccgaccaccgcgttgagtccgaaggtggtcttattgaaacatggaactctcaacaccctgagctgcaatgcgccggtgtcactgtttccaaacgcaccctcaaccgcaacggcctccacttgccatcttactcaccttatccccaaatgatcattgtcgttcaaggtgcgtaatattagtaagaagtatttatcagcttaatgtgataacaataatagtaatatgaaatatttattaaatttttataattaatctctgctagaaaatttgattaatcattttagtagaatttgtttttctcaactaggtttttaaaacacca

SEQ ID NO: 2946 - DNA, 631 bp, Artificial; identical to SEQ ID NO: 2232
  Mutations within GlyA3B4 introduced by GmGlyA3B4_T02TALE nuclease

SEQ ID NO: 2947 - DNA, 656 bp, Artificial; identical to SEQ ID NO: 2371
  Mutations within GlyA3B4 introduced by GmGlyA3B4_T02TALE nuclease

SEQ ID NO: 2948 - DNA, 632 bp, Artificial; identical to SEQ ID NO: 1756
  Mutations within GlyA3B4 introduced by GmGlyA3B4_T02TALE nuclease

SEQ ID NO: 2949 - DNA, 619 bp, Artificial
  Mutations within GlyA3B4 introduced by GmGlyA3B4_T02TALE nuclease
gttcatgtacggttgcagatataaacgaagcatagcttatgtatgaggtgtaacaaaattggaaacaatagccatgcaaggtgaagaatgtcaccaactcagaaacccttcttcattgacgtgtccctcactcactctcctctcttcactataaatcgccactcttcgtgttctccacttcaccaactccttcaaacttattaacactttccttagttcaatatggggaagcccttcttcactctctctctttcttccctttgcttgctactcttgtcgagtgccaactcaacaacctcaacgcgttggaacccgaccaccgcgttgagtccgaaggtggtcttattgaaacatggaactctcaacaccctgagctgcaatgcgccggtgtcactgttttccaaaacgcaccctcaaccgcaacggcctccacttgccatcttactcaccttatccccaaatgatcattgtcgttcaaggtgcgtaatattagtaagaagtatttatcagcttaacgtgataacaataatagtaatatgaaatatttattaattttttataattaatctctgctagaaaatttgattaatcatttttagtagaatttgtttttctcaac

SEQ ID NO: 2950 - DNA, 662 bp, Artificial
  Mutations within GlyA3B4 introduced by GmGlyA3B4_T02TALE nuclease
gttcatgtacggttgcagatataaacgaagcatagcttatgtatgaggtgtaacaaaattggaaacaatagccatgcaaggtgaagaatgtcaccaactcagaaacccttcttcattgacgtgtccctcactcactctcctctcttcactataaatcgccactcttcgtgttctccacttcaccaactccttcaaacttattaacactttccttagttcaatatggggaagcccttcttcactctctctctttcttccctttgcttgctactcttgtcgagtgcatattacctccagcaagttcaacgagtgccaactcaacaacctcaacgcgttggaacccgaccaccgcgttgagtccgaaggtggtcttattgaaacatggaactctcaacaccctgagctgcaatgcgccggtgtcactgtttccaaacgcaccctcaaccgcaacggcctccacttgccatcttactcaccttatccccaaatgatcattgtcgttcaaggtgcgtaatattagtaagaagtatttatcagcttaacgtgataacaataatagtaatatgaaatatttattaaatttttataattaatctctgctagaaaatttgattaatcattttagtagaatttgttttctcaactaggtttttaaaacacca

SEQ ID NO: 2951 - DNA, 402 bp, Artificial
  Mutations within GlyA3B4 introduced by GmGlyA3B4_T02TALE nuclease
gttcatgtacggttgcagataactattacctccagcaagttcaacgagtgccaactcaacaacctcaacgcgttggaacccgaccaccgcgttgagtccgaaggtggtcttattgaaacatggaactctcaacaccctgagctgcaatgcgccggtgtcactgtttccaaacgcaccctcaaccgcaacggcctccacttgccatcttactcaccttatccccaaatgatcattgtcgttcaaggtgcgtaatattagtaagaagtatttatcagcttaacgtgataacaataatagtaatatgaaatatttattaaattttttataattaatctctgctagaaaatttgattaatcattttttagtagaatttgtttttctcaactaggttttaaacacca

SEQ ID NO: 2952 - DNA, 656 bp, Artificial
  Mutations within GlyA3B4 introduced by GmGlyA3B4_T02TALE nuclease
gttcatgtacggttgcagatataaacgaagcatagcttatgtatgaggtgtaacaaaattggaaacaatagccatgcaaggtgaagaatgtcaccaactcagaaacccttcttcattgacgtgtccctcactcactctcctctcttcactataaatcgccactcttcgtgttctccacttcaccaactccttcaaacttattaacactttccttagttcaatatggggaagcccttcttcactctctctctttcttccctttgcttgctactcttgtcgagtgcatgctttacctccagcaagttcaacgagtgccaactcaacaacctcaacgcgttggaacccgaccaccgcgttgagtccgaaggtggtcttattgaaacatggaactctcaacaccctgagctgcaatgcgccggtgtcactgtttccaaacgcacccctcaaccgcaacggcctccacttgccatcttactcaccttatccccaaatgatcattgtcgttcaaggtgcgtaatattagtaagaagtatttatcagcttaacgtgataacaataatagtaatatgaaatatttattaaatttttataattaatctctgctagaaaatttgattaatcattttagtagaatttgttttctcaactaggttttt

SEQ ID NO: 2953 - DNA, 653 bp, Artificial; identical to SEQ ID NO: 2284
  Mutations within GlyA3B4 introduced by GmGlyA3B4_T02TALE nuclease

SEQ ID NO: 2954 - DNA, 596 bp, Artificial
  Mutations within GlyA3B4 introduced by GmGlyA3B4_T02TALE nuclease
gttcatgtacggttgcagatataaacgaagcatagcttatgtatgaggtgtaacaaaattggaaacaatagccatgcaaggtgaagaatgtcaccaactcagaaacccttcttcattgacgtgtccctcactcactctcctctcttcactataaatcgccactcttcgtgttctccacttcaccaactccttcaaacttattaacactttccttagttcaatatggggaagcccttcttcactctctctctttcttccctttgcttgctactcttgttattacctccagcaagttcaacgagtgccaactcaacaacctcaacgcgttggaacccgaccaccgcgttgagtccgaaggtggtcttattgaaacatggaactctcaacaccctgagctgcaatgcgccggtgtcactgtttccaaacgcaccctcaaccgcaacggcctccacttgccatcttactcaccttatccccaaatgatcattgtcgttcaaggtgcgtaatattagtaagaagtatttatcagcttaacgtgataacaataatagtaatatgaaatatttattaaattttttataattaatctctgctag

SEQ ID NO: 2955 - DNA, 581 bp, Artificial; identical to SEQ ID NO: 2193
  Mutations within GlyA3B4 introduced by GmGlyA3B4_T02TALE nuclease

SEQ ID NO: 2956 - DNA, 633 bp, Artificial
  Mutations within GlyA3B4 introduced by GmGlyA3B4_T02TALE nuclease
gttcatgtacggttgcagatataaacgaagcatagcttatgtatgaggtgtaacaaaattggaaacaatagccatgcaaggtgaagaatgtcaccaactcagaaacccttcttcattgacgtgtccctcactcactctcctctcttcactataaatcgccactcttcgtgttctccacttcaccaactccttcaaacttattaacactttccttagttcaatatggggaagcccttcttcactctctctctttcttccctttgcttgctactcttgtcgagtgcgctattacctccagcaagttcaacgagtgccaactcaacaacctcaacgcgttggaacccgaccaccgcgttgagtccgaaggtggtcttattgaaacatggaactctcaacaccctgagctgcaatgcgccggtgtcactgtttccaaacgcaccctcaaccgcaacggcctccacttgccatcttactcaccttatccccaaatgatcattgtcgttcaaggtgcgtaatattagtaagagtatttatcagcttaacgtgataacaatatagtaatatgaaatatttattaaatttttataattaatctctgctagaaaatttgattaatcattttagtagaatttg

SEQ ID NO: 2957 - DNA, 640 bp, Artificial
  Mutations within GlyA3B4 introduced by GmGlyA3B4_T02TALE nuclease
gttcatgtacggttgcagatataaacgaagcatagcttatgtatgaggtgtaacaaaattggaaacaatagccatgcaaggtgaagaatgtcaccaactcagaaacccttcttcattgacgtgtccctcactcactctcctctcttcactataaatcgccactcttcgtgttctccacttcaccaactccttcaaacttattaacactttccttagttcaatatggggaagcccttcttcactctctctctttcttccctttgcttgctattacctccagcaagttcaacgagtgccaactcaacaacctcaacgcgttggaacccgaccaccgcgttgagtccgaaggtggtcttattgaaacatggaactctcaacaccctgagctgcaatgcgccggtgtcactgtttccaaacgcaccctcaaccgcaacggcctccacttgccatcttactcaccttatccccaaatgatcattgtcgttcaaggtgcgtaatattagtaagaagtatttatcagcttaacgtgataacaataatagtaatatgaaatattttattaaattttttataattaatctctgctagaaaatttgattaatcatttttagtagaatttgttttttctcaactaggtttt

SEQ ID NO: 2958 - DNA, 663 bp, Artificial
  Mutations within GlyA3B4 introduced by GmGlyA3B4_T02TALE nuclease
gttcatgtacggttgcagatataaacgaagcatagcttatgtatgaggtgtaacaaaattggaaacaatagccatgcaaggtgaagaatgtcaccaactcagaaacccttcttcattgacgtgtccctcactcactctcctctcttcactataaatcgccactcttcgtgttctccacttcaccaaactccttcaaacttattaacactttccttagttcaatatggggaagcccttctcactctctctctttcttccctttgcttgctactcttgtcgagtgcatattacctccagcaagttcaacgagtgccaactcaacaacctcaacgcgttggaacccgaccaccgcgttgagtccgaaggtggtcttattgaaacatggaactctcaacaccctgagctgcaatgcgccggtgtcactgtttccaaacgcaccctcaaccgcaacggcctccacttgccatcttactcaccttatccccaaatgatcattgtcgttcaaggtgcgtaatattagtaagaagtatttatcagcttaacgtgataaccaataatagtaatatgaaatatttattaaatttttataattaactctgctagaaaatttgattaatcattttagtagaatttgtttttctcaactaggtttttaaaacacca

SEQ ID NO: 2959 - DNA, 520 bp, Artificial
  Mutations within GlyA3B4 introduced by GmGlyA3B4_T02TALE nuclease
gttcatgtacggttgcagatataaacgaagcatagcttatgtatgaggtgtaacaaaattggaaacaatagccatgcaaggtgaagaatgtcaccaactcagaaacccttcttcattgacgtgtccctcactcactctcctctcttcactataaatcgccactcttcgtgttctccacttcaccaactccttcaaacttattaacactttccttagttcaacgagtgccaactcaacaacctcaacgcgttggaacccgaccaccgcgttgagtccgaaggtggtcttattgaaacatggaactctcaacaccctgagctgcaatgcgccggtgtcactgtttccaaacgcaccctcaaccgcaacggcctccacttgccatcttactcaccttatccccaaaatgatcattgtcgttcaaggtgcgtaatattagtaagaagtatttatcagcttaacgtgataacaataatagtaatatgaaatatttattaaattttttataattaatctctgctag

SEQ ID NO: 2960 - DNA, 651 bp, Artificial
  Mutations within GlyA3B4 introduced by GmGlyA3B4_T02TALE nuclease
gttcatgtacggttgcagatataaacgaagcatagcttatgtatgaggtgtaacaaaattggaaacaatagccatgcaaggtgaagaatgtcaccaactcagaaaccccttcttcattgacgtgtccctcactcactctcctctcttcactataaatcgccactcttcgtgttctccacttcaccaactccttcaaacttattaacactttccttagttcaatatggggaagcccttcttcactctctctctttcttccctttgcttgctactcttgtcgagtgcatctattacctccagcaagttcaacgagtgccaactcaacaacctcaacgcgttggaacccgaccaccgcgttgagtccgaaggtggtcttattgaaacatggaactctcaacaccctgagctgcaatgcgccggtgtcactgtttccaaacgcaccctcaaccgcaacggcctccacttgccatcttactcaccttatccccaaatgatcattgtcgttcaaggtgcgtaatattagtaagaagtatttatcagcttaacgtgataacaataatagtaatatgaaatatttattaaatttttataattaatctctgctagaaaatttgattaatcattttagtagaatttgttttctcaactagg

SEQ ID NO: 2961 - DNA, 633 bp, Artificial
  Mutations within GlyA3B4 introduced by GmGlyA3B4_T02TALE nuclease
gttcatgtacggttgcagatataaacgaagcatagcttatgtatgaggtgtaacaaaattggaaacaatagccatgcaaggtgaagaatgtcaccaactcagaaaccccttcttcattgacgtgtccctcactcactctcctctcttcactataaatcgccactcttcgtgttctccacttcaccaactccttcaaacttattaacactttccttagttcaatatggggaagcccttcttcactctctctctttcttccctttgcttgctactcttgtcgagtgctattacctccagcaagttcaacgagtgccaactcaacaacctcaacgcgttggaacccgaccaccgcgttgagtccgaaggtggtcttattgaaacatggaactctcaacaccctgagctgcaatgcgccggtgtcactgtttccaaacgcaccctcaaccgcaacggcctccacttgccatcttactcaccttatccccaaatgatcattgtcgttcaaggtgcgtaatattagtaagaagtatttatcagcttaacgtgataacaatatagtaatatgaaatatttattaaatttttataattaatctctgctagaaaatttgattaatcattttagtagaatttg

SEQ ID NO: 2962 - DNA, 664 bp, Artificial
  Mutations within GlyA3B4 introduced by GmGlyA3B4_T02TALE nuclease
gttcatgtacggttgcagatataaacgaagcatagcttatgtatgaggtgtaacaaaattggaaacaatagccatgcaaggtgaagaatgtcaccaactcagaaaccccttcttcattgacgtgtccctcactcactctcctctcttcactataaatcgccactcttcgtgttctccacttcaccaactccttcaaacttattaacactttccttagttcaatatggggaagcccttcttcactctctctctttcttccctttgcttgctactcttgtcgagtgcatgctattacctccagcaagttcaacgagtgccaactcaacaacctcaacgcgttggaacccgaccaccgcgttgagtccgaaggtggtcttattgaaacatggaactctcaacaccctgagctgcaatgcgccggtgtcactgtttccaaacgcaccctcaaccgcaacggcctccacttgccatcttactcaccttatccccaaatgatcattgtcgttcaaggtgcgtaatattagtaagagtatttatcagcttaacgtgataacaatatagtaatatgaaatatttattaaatttttataattaatctctgctagaaaatttgattaatcattttagtagaatttgtttttctcaactaggtttttaaacacca

SEQ ID NO: 2963 - DNA, 618 bp, Artificial
  Mutations within GlyA3B4 introduced by GmGlyA3B4_T02TALE nuclease
gttcatgtacggttgcagatataaacgaagcatagcttatgtatgaggtgtaacaaaattggaaacaatagccatgcaaggtgaagaatgtcaccaactcagaaacccttcttcattgacgtgtccctcactcactctcctctcttcactataaatcgccactcttcgtgttctccacttcaccaactccttcaaacttattaacactttccttagttcaatatggggaagcccttcttcactctctctctttcttccctttgcttgctactcttgtcgagtgccaactcaacaacctcaacgcgttggaacccgaccaccgcgttgagtccgaaggtggtcttattgaaacatggaactctcaacaccctgagctgcaatgcgccggtgtcactgtttccaaacgcaccctcaaccgcaacggcctccacttgccatcttactcaccttatccccaaatgatcattgtcgttcaaggtgcgtaatattagtaagaagtatttatcagcttaacgtgataacaataatagtaatatgaaatatttattaaattttttataattaatctctgctagaaaatttgattaatcatttttagtagaatttgtttttctcaac

SEQ ID NO: 2964 - DNA, 635 bp, Artificial; identical to SEQ ID NO: 2434
  Mutations within GlyA3B4 introduced by GmGlyA3B4_T02TALE nuclease

SEQ ID NO: 2965 - DNA, 663 bp, Artificial; identical to SEQ ID NO: 2045
  Mutations within GlyA3B4 introduced by GmGlyA3B4_T02TALE nuclease

SEQ ID NO: 2966 - DNA, 660 bp, Artificial; identical to SEQ ID NO: 1717
  Mutations within GlyA3B4 introduced by GmGlyA3B4_T02TALE nuclease

SEQ ID NO: 2967 - DNA, 637 bp, Artificial
  Mutations within GlyA3B4 introduced by GmGlyA3B4_T02TALE nuclease
gttcatgtacggttgcagatataaacgaagcatagcttatgtatgaggtgtaacaaaattggaaacaatagccatgcaaggtgaagaatgtcaccaactcagaaaccccttcttcattgacgtgtccctcactcactctcctctcttcactataaatcgccactcttcgtgttctccacttcaccaactccttcaaacttattaacactttccttagttcaatatggggaagcccttcttcactctctctctttcttccctttgcttgctactcttgtcgagtgcatgctattacctccagcaagttcaacgagtgccaactcaacaacttcaacgcgttggaacccgaccaccgcgttgagtccgaaggtggtcttattgaaacatggaactctcaacaccctgagctgcaatgcgccggtgtcactgtttccaaacgcaccctcaaccgcaacggcctccacttgccatcttactcaccttatccccaaatgatcattgtcgttcaaggtgcgtaatattagtaagagtatttatcagcttaacgtgataacaataatagtaatatgaaatatttattaaatttttataattaatctctgctagaaaatttgattaatcattttagtagaatttg

SEQ ID NO: 2968 - DNA, 655 bp, Artificial
  Mutations within GlyA3B4 introduced by GmGlyA3B4_T02TALE nuclease
gttcatgtacggttgcagatataaacgaagcatagcttatgtatgaggtgtaacaaaattggaaacaatagccatgcaaggtgaagaatgtcaccaactcagaaacccttcttcattgacgtgtccctcactcactctcctctcttcactataaatcgccactcttcgtgttctccacttcaccaactccttcaaacttattaacactttccttagttcaatatggggaagcccttcttcactctctctctttcttccctttgcttgctactcttgtcgagtgcatctattacctccagcaagttcaacgagtgccaactcaacaacctcaacgcgttggaacccgaccaccgcgttgagtccgaaggtggtcttattgaaacatggaactctcaacaccctgagctgcaatgcgccggtgtcactgtttccaaacgcaccctcaaccgcaacggcctccacttgccatcttactcaccttatccccaaatgatcattgtcgttcaaggtgcgtaatattagtaagaagtatttatcagcttaacgtgataacaataatagtaatatgaaatatttattaaatttttataattaatctctgctagaaaatttgattaatcattttagtagaatttgtttttctcaactaggtttt

SEQ ID NO: 2969 - DNA, 633 bp, Artificial; identical to SEQ ID NO: 1895
  Mutations within GlyA3B4 introduced by GmGlyA3B4_T02TALE nuclease

SEQ ID NO: 2970 - DNA, 526 bp, Artificial; identical to SEQ ID NO: 1861
  Mutations within GlyA3B4 introduced by GmGlyA3B4_T02TALE nuclease

SEQ ID NO: 2971 - DNA, 635 bp, Artificial
  Mutations within GlyA3B4 introduced by GmGlyA3B4_T02TALE nuclease
gttcatgtacggttgcagatataaacgaagcatagcttatgtatgaggtgtaacaaaattggaaacaatagccatgcaaggtgaagaatgtcaccaactcagaaacccttcttcattgacgtgtccctcactcactctcctctcttcactataaatcgccactcttcgtgttctccacttcaccaactccttcaaacttattaacactttccttagttcaatatggggaagcccttcttcactctctctctttcttccctttgcttgctattacctccagcaagttcaacgagtgccaactcaacaacctcaacgcgttggaacccgaccaccgcgttgagtccgaaggtggtcttattgaaacatggaactctcaacaccctgagctgcaatgcgccggtgtcactgtttccaaacgcaccctcaaccgcaacggcctccacttgccatcttactcaccttatccccaaatgatcattgtcgttcaaggtgcgtaatattagtaagaagtatttatcagcttaacgtgataacaataatagtaatatgaaatatttattaaattttttataattaatctctgctagaaaatttgattaatcatttttagtagaatttgttttttctcaactagg

SEQ ID NO: 2972 - DNA, 647 bp, Artificial
  Mutations within GlyA3B4 introduced by GmGlyA3B4_T02TALE nuclease
gttcatgtacggttgcagatataaacgaagcatagcttatgtatgaggtgtaacaaaattggaaacaatagccatgcaaggtgaagaatgtcaccaactcagaaacccttcttcattgacgtgtccctcactcactctcctctcttcactataaatcgccactcttcgtgttctccacttcaccaactccttcaaacttattaacactttccttagttcaatatggggaagcccttcttcactctctctctttcttccctttgcctattacctccagcaagttcaacgagtgccaactcaacaacctcaacgcgttggaacccgaccaccgcgttgagtccgaaggtggtcttattgaaacatggaactctcaacacccctgagctgcaatgcgccggtgtcactgtttccaaacgcaccctcaaccgcaacggcctccacttgccatcttactcaccttatccccaaatgatcattgtcgttcaaggtgcgtaatattagtaagaagtatttatcagcttaacgtgataacaataatagtaatatgaaatatttattaaattttttataattaatctctgctagaaaatttgattaatcatttttagtagaatttgttttttctcaactaggttttaaacaccaca

SEQ ID NO: 2973 - DNA, 665 bp, Artificial
  Mutations within GlyA3B4 introduced by GmGlyA3B4_T02TALE nuclease
gttcatgtacggttgcagatataaacgaagcatagcttatgtatgaggtgtaacaaaattggaaacaatagccatgcaaggtgaagaatgtcaccaactcagaaacccttcttcattgacgtgtccctcactcactctcctctcttcactataaatcgccactcttcgtgttctccacttcaccaactccttcaaacttattaacactttccttagttcaatatggggaagcccttcttcactctctctctttcttccctttgcttgctactcttgtcgagtgcatgctattacctccagcaagttcaacgagtgccaactcaacaacctcaacgcgttggaacccgaccaccgcgttgagtccgaaggtggtcttattgaaacatggaactctcaacaccctgagctgcaatgcgccggtgtcactgtttccaaacgcaccctcaaccgcaacggcctccacttgccatcttactcaccttatccccaaatgatcattgtcgttcaaggtgcgtaatattagtaagaagtatttatcagcttaacgtgataacaataatagtaatatgaaatatttattaaatttttataattaatctctgctagaaaatttgattaatcattttagtagaatttgttttctcaactaggtttttaaaacacca

SEQ ID NO: 2974 - DNA, 574 bp, Artificial; identical to SEQ ID NO: 1971
  Mutations within GlyA3B4 introduced by GmGlyA3B4_T02TALE nuclease

SEQ ID NO: 2975 - DNA, 660 bp, Artificial; identical to SEQ ID NO: 1717
  Mutations within GlyA3B4 introduced by GmGlyA3B4_T02TALE nuclease

SEQ ID NO: 2976 - DNA, 614 bp, Artificial
  Mutations within GlyA3B4 introduced by GmGlyA3B4_T02TALE nuclease
gttcatgtacggttgcagatataaacgaagcatagcttatgtatgaggtgtaacaaaattggaaacaatagccatgcaaggtgaagaatgtcaccaactcagaaacccttcttcattgacgtgtccctcactcactctcctctcttcactataaatcgccactcttcgtgttctccacttcaccaactccttcaaacttattaacactttccttagttcaatatggggaagcccttcttcactctctctctttcttccctttgcttgctactcttgtcgagtttacctccagcaagttcaacgagtgccaactcaacaacctcaacgcgttggaacccgaccaccgcgttgagtccgaaggtggtcttattgaaacatggaactctcaacaccctgagctgcaatgcgccggtgtcactgtttccaaacgcaccctcaaccgcaacggcctccacttgccatcttactcaccttatccccaaatgatcattgtcgttcaaggtgcgtaatattagtaagaagtatttatcagcttaacgtgataacaataatagtaatatgaaatatttattaaattttttataattaatctctgctagaaaatttgattaatc

SEQ ID NO: 2977 - DNA, 687 bp, Artificial
  Mutations within GlyA3B4 introduced by GmGlyA3B4_T02TALE nuclease
gttcatgtacggttgcagatataaacgaagcatagcttatgtatgaaggtggataacaaaaaatttggaaaccaatagccatgcaaggtgaaagaatgtcaccaactcagaaaccccttcttcattgacgtgtcccctcactcactctcctctcttcactataaatcgccactcttcgtgttctccacttcaccaactccttcaaacttattaacactttccttagttcaatatggggaagcccttcttcactctctctctttcttccctttgcttgctactcttgtcgagtgctttacctccagcaagttcaacgagtgccaactcaacaacctcaacgacgttggaacccagaccacctggcagttgcagtcccgaaacggtggttcttatttgcaaaacgatgggaactcttcaaacagaccctgagcctgcaatgcgccaggtgtcacctgtttccaaacgcaccctcaaccgcaacgcctccacttgccatcttactcaccttatccccaaatgatccattgtcgttcaaggtgcgtaatattagtaagaagtatttatcagcttaacgtgataacaataatagtaatatgaaatatttattaaatttttataattaatctctgctagaaaatttgattaatcattttagtagaatttgtttttctcaactaggttttaaaa

SEQ ID NO: 2978 - DNA, 648 bp, Artificial
  Mutations within GlyA3B4 introduced by GmGlyA3B4_T02TALE nuclease
gttcatgtacggttgcagatataaacgaagcatagcttatgtatgaggtgtaacaaaattggaaacaatagccatgcaaggtgaagaatgtcaccaactcagaaaccccttcttcattgacgtgtccctcactcactctcctctcttcactataaatcgccactcttcgtgttctccacttcaccaactccttcaaacttattaacactttccttagttcaatatggggaagcccttcttcactctctctctttcttccctttgcttgctactcttgtcgagtgcatgctattacctccagcaagttcaacgagtgccaactcaacaacctcaacgcgttggaacccgaccaccgcgttgagtccgaaggtggtcttattgaaacatggaactctcaacaccctgagctgcaatgcgccggtgtcactgtttccaaacgcaccctcaaccgcaacggcctccacttgccatcttactcaccttatccccaaatgatcattgtcgttcaaggtgcgtaatattagtaagagtatttatcagcttaacgtgataacaataatagtaatatgaaatatttattaaatttttataattaatctctgctagaaaatttgattaatcattttagtagaatttgttttctcaact

SEQ ID NO: 2979 - DNA, 663 bp, Artificial; identical to SEQ ID NO: 2045
  Mutations within GlyA3B4 introduced by GmGlyA3B4_T02TALE nuclease

SEQ ID NO: 2980 - DNA, 662 bp, Artificial
  Mutations within GlyA3B4 introduced by GmGlyA3B4_T02TALE nuclease
gttcatgtacggttgcagatataaacgaagcatagcttatgtatgaggtgtaacaaaattggaaacaatagccatgcaaggtgaagaatgtcaccaactcagaaacccttcttcattgacgtgtccctcactcactctcctctcttcactataaatcgccactcttcgtgttctccacttcaccaactccttcaaacttattaacactttccttagttcaatatggggaagcccttcttcactctctctctttcttccctttgcttgctactcttgtcgagtgtgctattacctccagcaagttcaacgagtgccaactcaacaacctcaacgcgttggaacccgaccaccgcgttgagtccgaaggtggtcttattgaaacatggaactctcaacaccctgagctgcaatgcgccggtgtcactgtttccaaacgcaccctcaaccgcaacggcctccacttgccatcttactcaccttatccccaaatgatcattgtcgttcaaggtgcgtaatattagtaagagtatttatcagcttaacgtgataacaatatagtaatatgaaatatttattaaatttttataattaatctctgctagaaaatttgattaatcattttagtagaatttgttttctcaactaggttttaaaacaccaca

SEQ ID NO: 2981 - DNA, 660 bp, Artificial; identical to SEQ ID NO: 1783
  Mutations within GlyA3B4 introduced by GmGlyA3B4_T02TALE nuclease

SEQ ID NO: 2982 - DNA, 643 bp, Artificial
  Mutations within GlyA3B4 introduced by GmGlyA3B4_T02TALE nuclease
gttcatgtacggttgcagatataaacgaagcatagcttatgtatgaggtgtaacaaaattggaaacaatagccatgcaaggtgaagaatgtcaccaactcagaaacccttcttcattgacgtgtccctcactcactctcctctcttcactataaatcgccactcttcgtgttctccacttcaccaactccttcaaacttattaacactttccttagttcaatatggggaagcccttcttcactctctctctttcttccctttgcttgctactcttgtcgagtgcatattacctccagcaagttcaacgagtgccaactcaacaacctcaacgcgttggaacccgaccaccgcgttgagtccgaaggtggtcttattgaaacatggaactctcaacaccctgagctgcaatgcgccggtgtcactgtttccaaacgcaccctcaaccgcaacggcctccacttgccatcttactcaccttatccccaaatgatcattgtcgttcaaggtgcgtaatattagtaagaagtatttatcagcttaacgtgataacaatatagtaatatgaaatatttattaaatttttataattaatctctgctagaaaatttgattaatcattttagtagaatttgttttctcaac

SEQ ID NO: 2983 - DNA, 660 bp, Artificial
  Mutations within GlyA3B4 introduced by GmGlyA3B4_T02TALE nuclease
gttcatgtacggttgcagatataaacgaagcatagcttatgtatgaggtgtaacaaaattggaaacaatagccatgcaaggtgaagaatgtcaccaactcagaaacccttcttcattgacgtgtccctcactcactctcctctcttcactataaatcgccactcttcgtgttctccacttcaccaactccttcaaacttattaacactttccttagttcaatatggggaagcccttcttcactctctctctttcttccctttgcttgctactcttgtcgagtgctttacctccagcaagttcaacgagtgccaactcaacaacctcaacgcgttggaacccgaccaccgcgttgagtccgaaggtggtcttattgaaacatggaactctcaacaccctgagctgcaatgcgccggtgtcactgtttccaaacgcaccctcaaccgcaacggcctccacttgccatcttactcaccttatcccccaaatgatcattgtcgttcaaggtgcgtaatattagtaagaagtatttatcagcttaacgtgataacaataatagtaatatgaaatatttattaaatttttataattaatctctgctagaaaatttgattaatcattttagtagaatttgttttctcaactaggttttaaaacacca

SEQ ID NO: 2984 - DNA, 694 bp, Artificial
  Mutations within GlyA3B4 introduced by GmGlyA3B4_T02TALE nuclease
gttcatgtacggttgcagatataaacgaagcatagcttatgtatgaggtgtaacaaaattggaaacaatagccatgcaaggtgaagaatgtcaccaactcagaaacccttcttcattgacgtgtccctcactcactctcctctcttcactataaatcgccactcttcgtgttctccacttcaccaactccttcaaacttattaacactttccttagttcaatatggggaagcccttcttcactctctctctttcttccctttgcttgctactcttgtcgagtgcatgcttgaccccccagcaggtggtggccatcgccagcaataatggtggcaagcaggcgctggagagctattacctccagcaagttcaacgagtgccaactcaacaacctcaacgcgttggaacccgaccaccgcgttgagtccgaaggtggtcttattgaaacatggaactctcaacaccctgagctgcaatgcgccggtgtcactgtttccaaacgcaccctcaaccgcaacggcctccacttgccatcttactcacctttatccccaaatgatcattgtcgttcaaggtgcgtaatattagtaagaagtatttatcagcttaacgtgataacaataatagtaatatgaaatatttattaaattttttataattaattctctgctagaaaaatttgattaatcattttt

SEQ ID NO: 2985 - DNA, 654 bp, Artificial; identical to SEQ ID NO: 2585
  Mutations within GlyA3B4 introduced by GmGlyA3B4_T02TALE nuclease

SEQ ID NO: 2986 - DNA, 648 bp, Artificial
  Mutations within GlyA3B4 introduced by GmGlyA3B4_T02TALE nuclease
gttcatgtacggttgcagatataaacgaagcatagcttatgtatgaggtgtaacaaaattggaaacaatagccatgcaaggtgaagaatgtcaccaactcagaaacccttcttcattgacgtgtccctcactcactctcctctcttcactataaatcgccactcttcgtgttctccacttcaccaactccttcaaacttattaacactttccttagttcaatatggggaagcccttcttcactctctctctttcttccctttgcttgctactcttgtcgagtgctattacctccagcaagttcaacgagtgccaactcaacaacctcaacgcgttggaacccgaccaccgcgttgagtccgaaggtggtcttattgaaacatggaactctcaacaccctgagctgcaatgcgccggtgtcactgtttccaaacgcaccctcaaccgcaacggcctccacttgccatcttactcaccttatccccaaatgatcattgtcgttcaaggtgcgtaatattagtaagaagtatttatcagcttaacgtgataacaataatagtaatatgaaatatttattaaatttttataattaatctctgctagaaaatttgattaatcattttagtagaatttgtttttctcaactagg

SEQ ID NO: 2987 - DNA, 645 bp, Artificial
  Mutations within GlyA3B4 introduced by GmGlyA3B4_T02TALE nuclease
gttcatgtacggttgcagatataaacgaagcatagcttatgtatgaggtgtaacaaaattggaaacaatagccatgcaaggtgaagaatgtcaccaactcagaaacccttcttcattgacgtgtccctcactcactctcctctcttcactataaatcgccactcttcgtgttctccacttcaccaactccttcaaacttattaacactttccttagttcaatatggggaagcccttcttcactctctctctttcttccctttgcctattacctccagcaagttcaacgagtgccaactcaacaacctcaacgcgttggaacccgaccaccgcgttgagtccgaaggtggtcttattgaaacatggaactctcaacaccctgagctgcaatgcgccggtgtcactgtttccaaacgcaccctcaaccgcaacggcctccacttgccatcttactcaccttatccccaaatgatcattgtcgttcaaggtgcgtaatattagtaagaagtatttatcagctttaacgtgataacaataatagtaatatgaaatatttattaaattttttataattaatctctgctagaaaatttgattaatcatttttagtagaatttgttttttctcaactaggttttaaacacca

SEQ ID NO: 2988 - DNA, 663 bp, Artificial
  Mutations within GlyA3B4 introduced by GmGlyA3B4_T02TALE nuclease
gttcatgtacggttgcagatataaacgaagcatagcttatgtatgaggtgtaacaaaattggaaacaatagccatgcaaggtgaagaatgtcaccaactcagaaacccttcttcattgacgtgtccctcactcactctcctctcttcactataaatcgccactcttcgtgttctccacttcaccaactccttcaaacttattaacactttccttagttcaatatggggaagcccttcttcactctctctctttcttccctttgcttgctactcttgtcgagtgcatgctattacctccagcaagttcaacgagtgccaactcaacaacctcaacgcgttggaacccgaccaccgcgttgagtccgaaggtggtcttattgaaacatggaactctcaacaccctgagctgcaatgcgccggtgtcactgtttccaaacgcaccctcaaccgcaacggcctccacttgccatcttactcaccttatccccgaaatgatcattgtcgttcaaggtgcgtaatattagtaagagtatttatcagcttaacgtgatacaatatagtaatatgaaatatttattaaatttttcataattaatctctgctagaaaatttgattaatcattttagtagaatttgtttttctcaactaggttttaaacacca

SEQ ID NO: 2989 - DNA, 658 bp, Artificial
  Mutations within GlyA3B4 introduced by GmGlyA3B4_T02TALE nuclease
  misc_feature (529): n is a or c or t or g
gttcatgtacggttgcagatataaacgaagcatagcttatgtatgaggtgtaacaaaattggaaacaatagccatgcaaggtgaagaatgtcaccaactcagaaacccttcttcattgacgtgtccctcactcactctcctctcttcactataaatcgccactcttcgtgttctccacttcaccaactccttcaaacttattaacactttccttagttcaatatggggaagcccttcttcactctctctctttcttccctttgcttgctactcttgtcgagtgctgctattacctccagcaagttcaacgagtgccaactcaacaacctcaacgcgttggaacccgaccaccgcgttgagtccgaaggtggtcttattgaaacatggaactctcaacaccctgagctgcaatgcgccggtgtcactgtttccaaacgcaccctcaaccgcaacggcctccacttgccatcttactcaccttatccccaaatgatcattgtcgttcaaggtgcgtaatattagtaagagnatttatcagcttaacgtgataacaataatagtaatatgaaatatttattaaatttttataattaatctctgctagaaaatttgattaatcattttagtagaatttgttttctcaactaggtttttaaaa

SEQ ID NO: 2990 - DNA, 663 bp, Artificial
  Mutations within GlyA3B4 introduced by GmGlyA3B4_T02TALE nuclease
gttcatgtacggttgcagatataaacgaagcatagcttatgtatgaggtgtaacaaaattggaaacaatagccatgcaaggtgaagaatgtcaccaactcagaaacccttcttcattgacgtgtccctcactcactctcctctcttcactataaatcgccactcttcgtgttctccacttcaccaactccttcaaacttattaacactttccttagttcaatatggggaagcccttcttcactctctctctttcttccctttgcttgctactcttgtcgagtgcatctattacctccagcaagttcaacgagtgccaactcaacaacctcaacgcgttggaacccgaccaccgcgttgagtccgaaggtggtcttattgaaacatggaactctcaacaccctgagctgcaatgcgccggtgtcactgtttccaaacgcacccctcaaccgcaacggcctccacttgccatcttactcaccttatccccaaatgatcattgtcgttcaaggtgcgtaatattagtaagaagtatttatcagcttaacgtgataacaatatagtaatatgaaatatttattaaatttttataattaatctctgctagaaaatttgattaatcattttagtagaatttgttttctcaactaggttttaaaacacca

SEQ ID NO: 2991 - DNA, 779 bp, Artificial
  Mutations within GlyA3B4 introduced by GmGlyA3B4_T02TALE nuclease
  misc_feature (481): n is a or c or t or g
gttcatgtacggttgcagatataaacgaagcatagcttatgtatgaggtgtaacaaaattggaaacaatagccatgcaaggtgaagaatgtcaccaactcagaaaccccttcttcattgacgtgtccctcactcactctcctctcttcactataaaatcgccactcttcgtgttctccacttcaccaactccttcaaacttattaacactttccttagttcaatatgggggaagcccttcttcactctctctctttcttccctttgcttgctactcttgtcgagtgcatgtgggcctggcacagcaccggcaacagccgctggaccgtctccagcgcctgcttgccaccattattgctggcgatggccaccacctgctggggggtcaagccgtgggcctggcacagcttgctattacctccagcaagttcaacgagtgccaactcaacaacctcaacgcgttggaaccgaccaccgcgtgngtccgaaggtggtcttattgaaacatggaactctcaacaccctgagctgcaatgcgccggtgtcactgtttccaaacgcaccctcaaccgcaacggcctccacttgccatcttactcaccttatccccaaatgatcattgtcgtcaaggtgcgtaatattagtaagaagtatttatcagcttaacgtgataacaataatagtaatatgaaaatatttattaaattttttataattaatctctgctagaaaatttgattaatcatttttagtagaatttgtttttctcaactaggtttt

SEQ ID NO: 2992 - DNA, 745 bp, Artificial
  Mutations within GlyA3B4 introduced by GmGlyA3B4_T02TALE nuclease
gttcatgtacggttgcagatataaacgaagcatagcttatgtatgaggtgtaacaaaattggaaacaatagccatgcaaggtgaagaatgtcaccaactcagaaacccttcttcattgacgtgtccctcactcactctcctctcttcactataaatcgccactcttcgtgttctccacttcaccaactccttcaaacttattaacactttccttagttcaatatggggaagcccttcttcactctctctctttcttccctttgcttgctactcttgtcgagtgcatgcttacattattatgctaagtactttgcttatttatcttgtgttcttaaattttcagtcttggatatttttgtggttgttgacatttttatgatctttgaatttttggtttgattatttcttgattatgagctttgctattacctccagcaagttcaacgagtgccaactcaacaacctcaacgcgttggaacccgaccaccgcgttgagtccgaaggtggtcttattgaaacatggaactctcaacaccctgagctgcaatgcgccggtgtcactgtttccaaacgcaccctcaaccgcaacggcctccacttgccatcttactcaccttatccccaaaatgatcattgtcgttcaaggtgcgtaatcattagtaagaagtatttatcagcttaacgtgataacaataatagtaatatgaaatatttattaaaattttttataaattaatctctgcta

SEQ ID NO: 2993 - DNA, 447 bp, Artificial
  Mutations within GlyA3B4 introduced by GmGlyA3B4_T02TALE nuclease
gttcatgtacggttgcagatataaacgaagcatagcttatgtatgaggtgtaacaaaattggaaacaatagccatgcaaggtgaagaatgtcaccaactcagaaacccttcttcattgacgtgtccctcactcactctcctctcttcactataaatcgccactcttcgtgttctccacttcaccaactccttcaaacttattaacactttccttagttcaatatggggaagcccttcttcactctctctctttcttccctttgcttgctactctctattacctccagcaagttcaacgagtgccaactcaacaacctcaacgcgttggaacccgaccaccgcgttgagtccgaaggtggtcttattgaaacatggaactctcaacacccctgagcatgcaatcgcgccggtgtcacttgtttccaaacgcaccctcaaccgcaacgg

SEQ ID NO: 2994 - DNA, 560 bp, Artificial
  Mutations within GlyA3B4 introduced by GmGlyA3B4_T02TALE nuclease
gttcatgtacggttgcagatataaacgaagcatagcttatgtatgaggtgtaacaaaattggaaacaatagccatgcaaggtgaagaatgtcaccaactcagaaacccttcttcattgacgtgtccctcactcactctcctctcttcactataaatcgccactcttcgtgttctccacttcaccaactccttcaaacttattaacactttccttagttcaatatggggaagcccttcttcactctctctctttcttccctttgcttgctactcttgtcgagtgcatgcccgaccaccgcgttgagtccgaaggtggtcttattgaaacatggaactctcaacaccctgagctgcaatgcgccggtgtcactgtttccaaacgcaccctcaaccgcaacggcctccacttgccatcttactcaccttatccccaaaatgatcattgtcgttcaaggtgcgtaatattagtaagaagtatttatcagcttaacgtgataacaataatagtaatatgaatatttattaaattttttataattaatctctgctagaaaatttga

SEQ ID NO: 2995 - DNA, 635 bp, Artificial; identical to SEQ ID NO: 1775
  Mutations within GlyA3B4 introduced by GmGlyA3B4_T02TALE nuclease

SEQ ID NO: 2996 - DNA, 635 bp, Artificial
  Mutations within GlyA3B4 introduced by GmGlyA3B4_T02TALE nuclease
gttcatgtacggttgcagatataaacgaagcatagcttatgtatgaggtgtaacaaaattggaaacaatagccatgcaaggtgaagaatgtcaccaactcagaaacccttcttcattgacgtgtccctcactcactctcctctcttcactataaatcgccactcttcgtgttctccacttcaccaactccttcaaacttattaacactttccttagttcaatatggggaagcccttcttcactctctctctttcttccctttgcttgctactcttgtcgagtgcatattacctccagcaagttcaacgagtgccaactcaacaacctcaacgcgttggaaacccgaccaccgcattgagtccgaaggtggtcttattgaaacatggaactctcaacaccctgagctgcaatgcgccggtgtcactgtttccaaacgcaccctcaaccgcaacggcctccacttgccatcttactcaccttatccccaaatgatcattgtcgttcaaggtgcgtaatattagtaagaagtatttatcagcttaacgtgataacaataatagtaatatgaaatatttattaaatttttataattaatctctgctagaaaatttgattaatcattttagtagaatttg

SEQ ID NO: 2997 - DNA, 658 bp, Artificial
  Mutations within GlyA3B4 introduced by GmGlyA3B4_T02TALE nuclease
gttcatgtacggttgcagatataaacgaagcatagcttatgtatgaggtgtaacaaaattggaaacaatagccatgcaaggtgaagaatgtcaccaactcagaaacccttcttcattgacgtgtccctcactcactctcctctcttcactataaatcgccactcttcgtgttctccacttcaccaactccttcaaacttattaacactttccttagttcaatatggggaagcccttcttcactctctctctttcttccctttgcttgctactcttgttgtgctattacctccagcaagttcaacgagtgccaactcaacaacctcaacgcgttggaacccgaccaccgcgttgagtccgaaggtggtcttattgaaacatggaactctcaacaccctgagctgcaatgcgccggtgtcactgtttccaaacgcaccctcaaccgcaacggcctccacttgccatcttactcaccttatccccaaatgatcattgtcgttcaaggtgcgtaatattagtaagaagtatttatcagcttaacgtgataacaataatagtaatatgaaatatttattaaatttttataattaatctctgctagaaaatttgattaatcattttagtagaatttgttttctcaactaggttttaaaacacca

SEQ ID NO: 2998 - DNA, 619 bp, Artificial
  Mutations within GlyA3B4 introduced by GmGlyA3B4_T02TALE nuclease
gttcatgtacggttgcagatataaacgaagcatagcttatgtatgaggtgtaacaaaattggaaacaatagccatgcaaggtgaagaatgtcaccaactcagaaacccttcttcattgacgtgtccctcactcactctcctctcttcactataaatcgccactcttcgtgttctccacttcaccaactccttcaaacttattaacactttccttagttcaatatggggaagcccttcttcactctctctctttcttccctttgcttgctactcttgtcgagtgcatattacctccagcaagttcaacgagtgccaactcaacaacctcaacgcgttggaacccgaccaccgcgttgagtccgaaggtggtcttattgaaacatggaactctcaacaccctgagctgcaatgcgccggtgtcactgtttccaaacgcaccctcaaccgcaacggcctccacttgccatcttactcaccttatccccaaatgatcattgtcgttcaaggtgcgtaatattagtaagaagtatttatcagcttaacgtgataacaataatagtaatatgaaatatttattaaatttttataattaatctctgctagaaaatttgattaatca

SEQ ID NO: 2999 - DNA, 661 bp, Artificial; identical to SEQ ID NO: 2035
  Mutations within GlyA3B4 introduced by GmGlyA3B4_T02TALE nuclease

SEQ ID NO: 3000 - DNA, 637 bp, Artificial
  Mutations within GlyA3B4 introduced by GmGlyA3B4_T02TALE nuclease
gttcatgtacggttgcagatataaacgaagcatagcttatgtatgaggtgtaacaaaattggaaacaatagccatgcaaggtgaagaatgtcaccaactcagaaacccttcttcattgacgtgtccctcactcactctcctctcttcactataaatcgccactcttcgtgttctccacttcaccaactccttcaaacttattaacactttccttagttcaatatggggaagcccttcttcactctctctctttcttccctttgcttgctactcttgtcgagtgcatctattacctccagcaagttcaacgagtgccaactcaacaacctcaacgcgttggaacccgaccaccgcgttgagtccgaaggtggtcttattgaaacatggaactctcaacaccctgagctgcaatgcgccggtgtcactgtttccaaacgcaccctcaaccgcaacggcctccacttgccatcttactcaccttatcccccaaatgatcattgtcgttcaaggtgcgtaatattagtaagaagtatttatcagcttaacgtgataacaataatagtaatatgaaatatttattaaatttttataattaatctctgctagaaaatttgattaatcattttagtagaatttg

SEQ ID NO: 3001 - DNA, 622 bp, Artificial
  Mutations within GlyA3B4 introduced by GmGlyA3B4_T02TALE nuclease
gttcatgtacggttgcagatataaacgaagcatagcttatgtatgaggtgtaacaaaattggaaacaatagccatgcaaggtgaagaatgtcaccaactcagaaacccttcttcattgacgtgtccctcactcactctcctctcttcactataaatcgccactcttcgtgttctccacttcaccaactccttcaaacttattaacactttccttagttcaatatggggaagcccttcttcactctctctctttcttccctttgcttgctactcttgtcgagtgccaactcaacaacctcaacgcgttggaacccgaccaccgcgtttgagtccgaaggtggtctttattgaaacatggaactctcaacaccctgagctgcaatgcgccggtgtcactgtttccaaacgcaccctcaaccgcaacggcctccacttgccatcttactcaccttatccccaaatgatcattgtcgttcaaggtgcgtaatattagtaagaagtatttatcagcttaacgtgataacaataatagtaatatgaaatatttattaaattttttataattaatctctgctagaaaatttgattaatcatttttagtagaatttgtttttctcaacta

SEQ ID NO: 3002 - DNA, 654 bp, Artificial; identical to SEQ ID NO: 2225
  Mutations within GlyA3B4 introduced by GmGlyA3B4_T02TALE nuclease

SEQ ID NO: 3003 - DNA, 662 bp, Artificial; identical to SEQ ID NO: 2192
  Mutations within GlyA3B4 introduced by GmGlyA3B4_T02TALE nuclease

SEQ ID NO: 3004 - DNA, 547 bp, Artificial
  Mutations within GlyA3B4 introduced by GmGlyA3B4_T02TALE nuclease
gttcatgtacggttgcagatataaacgaagcatagcttatgtatgaggtgtaacaaaattggaaacaatagccatgcaaggtgaagaatgtcaccaactcagaaacccttcttcattgacgtgtccctcactcactctcctctcttcactataaatcgccactcttcgtgttctccacttcaccaactccttcaaacttattaacaacctcaacgcgttggaacccgaccaccgcgttgagtccgaaggtggtcttattgaaacatggaactctcaacaccctgagctgcaatgcgccggtgtcactgtttccaaacgcaccctcaaccgcaacggcctccacttgccatcttactcaccttatccccaaatgatcattgtcgttcaaggtgcgtaatattagtaagaagtatttatcagcttaacgtgataacaataatagtaatatgaaatatttattaaattttttataattaatctctgctagaaaatttgattaatcatttttagtagaatttgttttttctcaactaggttttaaacacca

SEQ ID NO: 3005 - DNA, 640 bp, Artificial
  Mutations within GlyA3B4 introduced by GmGlyA3B4_T02TALE nuclease
gttcatgtacggttgcagatataaacgaagcatagcttatgtatgaggtgtaacaaaattggaaacaatagccatgcaaggtgaagaatgtcaccaactcagaaacccttcttcattgacgtgtccctcactcactctcctctcttcactataaatcgccactcttcgtgttctccacttcaccaactccttcaaacttattaacactttccttagttcaatatggggaagcccttcttcactctctctctttcttccctttgcttgctattacctccagcaagttcaacgagtgccaactcaacaacctcaacgcgttggaacccgaccaccgcgttgagtccgaaggtggtcttattgaaacatggaactctcaacaccctgagctgcaatgcgccggtgtcactgttttccaaacgcaccctcaaccgcaacggcctccacttgccatcttactcaccttatccccaaatgatcattgtcgttcaaggtgcgtaatattagtaagaagtatttatcagcttaacgtgataacaataatagtaatatgaaatatttattaaattttttataattaatctctgctagaaaatttgattaatcatttttagtagaatttgttttttctcaactaggtttt

SEQ ID NO: 3006 - DNA, 660 bp, Artificial
  Mutations within GlyA3B4 introduced by GmGlyA3B4_T02TALE nuclease
gttcatgtacggttgcagatataaacgaagcatagcttatgtatgaggtgtaacaaaattggaaacaatagccatgcaaggtgaagaatgtcaccaactcagaaacccttcttcattgacgtgtccctcactcactctcctctcttcactataaatcgccactcttcgtgttctccacttcaccaactccttcaaacttattaacactttccttagttcaatatggggaagcccttcttcactctctctctttcttccctttgcttgctactcttgtcgagtgcattacctccagcaagttcaacgagtgccaactcaacaacctcaacgcgttggaacccgaccaccgcgttgagtccgaaggtggtcttattgaaacatggaactctcaacaccctgagctgcaatgcgccggtgtcactgtttccaaacgcaccctcaaccgcaacggcctccacttgccatcttactcaccttatccccaaatgatcattgtcgttcaaggtgcgtaatattagtaagaagtatttatcagcttaacgtgataacaataatagtaatatgaaatatttattaaatttttataattaatctctgctagaaaatttgattaatcattttagtagaatttgttttctcaactaggtttttaaaacacca

SEQ ID NO: 3007 - DNA, 660 bp, Artificial; identical to SEQ ID NO: 2553
  Mutations within GlyA3B4 introduced by GmGlyA3B4_T02TALE nuclease

SEQ ID NO: 3008 - DNA, 598 bp, Artificial
  Mutations within GlyA3B4 introduced by GmGlyA3B4_T02TALE nuclease
gttcatgtacggttgcagatataaacgaagcatagcttatgtatgaggtgtaacaaaattggaaacaatagccatgcaaggtgaagaatgtcaccaactcagaaaccccttcttcattgacgtgtccctcactcactctcctctcttcactataaatcgccactcttcgtgttctccacttcaccaactccttcaaacttattaacactttccttagttcaatatggggaagcccttcttcactctctctctttcttccctttgcttgctactcttgtcgagtgcatccagcaagttcaacgagtgccaactcaacaacctcaacgcgttggaacccgaccaccgcgttgagtccgaaggtggtcttattgaaacatggaactctcaacaccctgagctgcaatgcgccggtgtcactgtttccaaacgcaccctcaaccgcaacggcctccacttgccatcttactcaccttatcccccaaatgatcattgtcgttcaaggtgcgtaatattagtaagaagtatttatcagcttaacgtgataacaataatagtaatatgaaatatttattaaatttttataattaatctctgctag

SEQ ID NO: 3009 - DNA, 731 bp, Artificial
  Mutations within GlyA3B4 introduced by GmGlyA3B4_T02TALE nuclease
gttcatgtacggttgcagatataaacgaagcatagcttatgtatgaggtgtaacaaaattggaaacaatagccatgcaaggtgaagaatgtcaccaactcagaaacccttcttcattgacgtgtccctcactcactctcctctcttcactataaatcgccactcttcgtgttctccacttcaccaactccttcaaacttattaacactttccttagttcaatatggggaagcccttcttcactctctctctttcttccctttgcttgctactcttgtcgagtgcatgcgcctgcttgccaccaatattgctggcgatggccaccacctgctggggggtcaagccgtgggcctttgctattacctccagcaagttcaacgagtgccaactcaacaacctcaacgcgttggaacccgaccaccgcgttgagtccgaaggtggtcttattgaaacatggaactctcaacaccctgagctgcaatgcgccggtgtcactgtttccaaacgcaccctcaaccgcaacggcctccacttgccatcttactcacctttatccccaaatgatcattgtcgttcaaggtgcgtaatattagtaagaagtatttatcagcttaacgtgataacaataatagtaatatgaaatatttattaaattttttataattaatctctgctagaaaaatttgattaatcatttttagtagaatttgtttttctcaactaggttttaaa

SEQ ID NO: 3010 - DNA, 621 bp, Artificial
  Mutations within GlyA3B4 introduced by GmGlyA3B4_T02TALE nuclease
gttcatgtacggttgcagatataaacgaagcatagcttatgtatgaggtgtaacaaaattggaaacaatagccatgcaaggtgaagaatgtcaccaactcagaaacccttcttcattgacgtgtccctcactcactctcctctcttcactataaatcgccactcttcgtgttctccacttcaccaactccttcaaacttattaacactttccttagttcaatatggggaagcccttcttcactctctctctttcttccctttgcttgctactcttgtcgagaacctccagcaagttcaacgagtgccaactcaacaacctcaacgcgttggaacccgaccaccgcgttgagtccgaaggtggtcttattgaaacatggaactctcaacaccctgagctgcaatgcgccggtgtcactgtttccaaacgcaccctcaaccgcaacggcctccacttgccatcttactcaccttatccccaaatgatcattgtcgttcaaggtgcgtaaatattagtaagaagtatttatcagcttaacgtgataacaataatagtaatatgaaatatttattaaattttttataattaatctctgctagaaaatttgattaatctttttagt

SEQ ID NO: 3011 - DNA, 663 bp, Artificial
  Mutations within GlyA3B4 introduced by GmGlyA3B4_T02TALE nuclease
gttcatgtacggttgcagatataaacgaagcatagcttatgtatgaggtgtaacaaaattggaaacaatagccatgcaaggtgaagaatgtcaccaactcagaaacccttcttcattgacgtgtccctcactcactctcctctcttcactataaatcgccactcttcgtgttctccacttcaccaactccttcaaacttattaacactttccttagttcaatatggggaagcccttcttcactctctctctttcttccctttgcttgctactcttgtcgagtgcatgattacctccagcaagttcaacgagtgccaactcaacaacctcaacgcgttggaacccgaccaccgcgttgagtccgaaggtggtcttattgaaacatggaactctcaacaccctgagctgcaatgcgccggtgtcactgtttccaaacgcaccctcaaccgcaacggcctccacttgccatcttactcaccttatccccaaatgatcattgtcgttcaaggtgcgtaatattagtaagaagtatttatcagcttaacgtgataacaataatagtaatatgaaatatttattaaatttttataattaatctctgctagaaaatttgattaatcattttagtagaatttgttttctcaactaggtttttaaaacacca

SEQ ID NO: 3012 - DNA, 593 bp, Artificial
  Mutations within GlyA3B4 introduced by GmGlyA3B4_T02TALE nuclease
gttcatgtacggttgcagatataaacgaagcatagcttatgtatgaggtgtaacaaaattggaaacaatagccatgcaaggtgaagaatgtcaccaactcagaaacccttcttcattgacgtgtccctcactcactctcctctcttcactataaatcgccactcttcgtgttctccacttcaccaactccttcaaacttattaacactttccttagttcaatatggggaagcccttcttcactctctctctttcttccctttgcttgctactcttgtcgagtgcagcaagttcaacgagtgccaactcaacaacctcaacgcgttggaacccgaccaccgcgttgagtccgaaggtggtcttattgaaacatggaactctcaacaccctgagctgcaatgcgccggtgtcactgtttccaaacgcaccctcaaccgcaacggcctccacttgccatcttactcaccttatccccaaatgatcattgtcgttcaaggtgcgtaaatattagtaagaagtatttatcagcttaacgtgataacaataatagtaatatgaaatatttattaaatttttataattaatctctgctag

SEQ ID NO: 3013 - DNA, 594 bp, Artificial
  Mutations within GlyA3B4 introduced by GmGlyA3B4_T02TALE nuclease
gttcatgtacggttgcagatataaacgaagcatagcttatgtatgaggtgtaacaaaattggaaacaatagccatgcaaggtgaagaatgtcaccaactcagaaacccttcttcattgacgtgtccctcactcactctcctctcttcactataaatcgccactcttcgtgttctccacttcaccaactccttcaaacttattaacactttccttagttcaatatgcgctattacctccagcaagttcaacgagtgccaactcaacaacctcaacgcgttggaacccgaccaccgcgttgagtccgaaggtggtcttattgaaacatggaactctcaacaccctgagctgcaatgcgccggtgtcactgtttccaaacgcaccctcaaccgcaacggcctccacttgccatcttactcaccttatccccaaaatgatcattgtcgttcaaggtgcgtaatattagtaagaagtatttatcagcttaacgtgataacaataatagtaatatgaaatatttattaaaattttttataattaatctctgctagaaaatttgattaaatcatttttagtagaatttgtttttctcaact

SEQ ID NO: 3014 - DNA, 662 bp, Artificial
  Mutations within GlyA3B4 introduced by GmGlyA3B4_T02TALE nuclease
gttcatgtacggttgcagatataaacgaagcatagcttatgtatgaggtgtaacaaaattggaaacaatagccatgcaaggtgaagaatgtcaccaactcagaaacccttcttcattgacgtgtccctcactcactctcctctcttcactataaatcgccactcttcgtgttctccacttcaccaactccttcaaacttattaacactttccttagttcaatatggggaagcccttcttcactctctctctttcttccctttgcttgctactcttgtcgagtgcctattacctccagcaagttcaacgagtgccaactcaacaacctcaacgcgttggaacccgaccaccgcgttgagtccgaaggtggtcttattgaaacatggaactctcaacaccctgagctgcaatgcgccggtgtcactgtttccaaacgcaccctcaaccgcaacggcctccacttgccatcttactcaccttatccccaaatgatcattgtcgttcaaggtgcgtaatattagtaagaagtatttatcagcttaacgtgataacaataatagtaatatgaaatatttattaaatttttataattaatctctgctagaaaatttgattaatcattttagtagaatttgtttttctcaactaggttttaaaacacca

SEQ ID NO: 3015 - DNA, 648 bp, Artificial
  Mutations within GlyA3B4 introduced by GmGlyA3B4_T02TALE nuclease
gttcatgtacggttgcagatataaacgaagcatagcttatgtatgaggtgtaacaaaattggaaacaatagccatgcaaggtgaagaatgtcaccaactcagaaacccttcttcattgacgtgtccctcactcactctcctctcttcactataaatcgccactcttcgtgttctccacttcaccaactccttcaaacttattaacactttccttagttcaatatggggaagcccttcttcactctctctctttcttccctttgcttgctattacctccagcaagttcaacgagtgccaactcaacaacctcaacgcgttggaacccgaccaccgcgttgagtccgaaggtggtcttattgaaacatggaactctcaacacccctgagctgcaatgcgccggtgtcactgtttccaaacgcaccctcaaccgcaacggcctccacttgccatcttactcaccttatccccaaatgatcattgtcgttcaaggtgcgtaatattagtaagaagtatttatcagcttaacgtgataacaataatagtaatatgaaatatttattaaattttttataattaatctctgctagaaaatttgattaatcatttttagtagaatttgttttttctcaactaggttttaaacacca

SEQ ID NO: 3016 - DNA, 644 bp, Artificial
  Mutations within GlyA3B4 introduced by GmGlyA3B4_T02TALE nuclease
gttcatgtacggttgcagatataaacgaagcatagcttatgtatgaggtgtaacaaaattggaaacaatagccatgcaaggtgaagaatgtcaccaactcagaaacccttcttcattgacgtgtccctcactcactctcctctcttcactataaatcgccactcttcgtgttctccacttcaccaactccttcaaacttattaacactttccttagttcaatatggggaagcccttcttcactctctctctttcttccctttgcttgctactctttgctattacctccagcaagttcaacgagtgccaactcaacaacctcaacgcgttggaacccgaccaccgcgttgagtccgaaggtggtcttattgaaacatggaactctcaacaccctgagctgcaatgcgccggtgtcactgtttccaaacgcaccctcaaccgcaacggcctccacttgccatcttactcaccttatccccaaatgatcattgtcgttcaaggtgcgtaatattagtaagaagtatttatcagcttaacgtgataacaataatagtaatatgaaatatttattaaattttttataattaatctctgctagaaaatttgattaatctttttagtagaatttgttttttctcaactagg

SEQ ID NO: 3017 - DNA, 663 bp, Artificial; identical to SEQ ID NO: 2045
  Mutations within GlyA3B4 introduced by GmGlyA3B4_T02TALE nuclease

SEQ ID NO: 3018 - DNA, 661 bp, Artificial
  Mutations within GlyA3B4 introduced by GmGlyA3B4_T02TALE nuclease
gttcatgtacggttgcagatataaacgaagcatagcttatgtatgaggtgtaacaaaattggaaacaatagccatgcaaggtgaagaatgtcaccaactcagaaacccttcttcattgacgtgtccctcactcactctcctctcttcactataaatcgccactcttcgtgttctccacttcaccaactccttcaaacttattaacactttccttagttcaatatggggaagcccttcttcactctctctctttcttccctttgcttgctactcttgtcgagtgcactattacctccagcaagttcaacgagtgccaactcaacaacctcaacgcgttggaacccgaccaccgcgttgagtccgaaggtggtcttattgaaacatggaactctcaacaccctgagctgcaatgcgccggtgtcactgtttccaaacgcaccctcaaccgcaacggcctccacttgccatcttactcaccttatccccaaatgatcattgtcgttcaaggtgcgtaatattagtaagaagtatttatcagcttaacgtgataacaatatagtaatatgaaatatttattaaatttttataattaatctctgctagaaaatttgattaatcattttagtagaatttgttttctcaactaggttttaaaacacca

SEQ ID NO: 3019 - DNA, 661 bp, Artificial
  Mutations within GlyA3B4 introduced by GmGlyA3B4_T02TALE nuclease
gttcatgtacggttgcagatataaacgaagcatagcttatgtatgaggtgtaacaaaattggaaacaatagccatgcaaggtgaagaatgtcaccaactcagaaacccttcttcattgacgtgtccctcactcactctcctctcttcactataaatcgccactcttcgtgttctccacttcaccaactccttcaaacttattaacactttccttagttcaatatggggaagcccttcttcactctctctctttcttccctttgcttgctactcttgtcgagtgcactattacctccagcagttcaacgagtgccaactcaacaacctcaacgcgttggaacccgaccaccgcgttgagtccgaaggtggtcttattgaaacatggaactctcaacaccctgagctgcaatgcgccggtgtcactgtttccaaacgcaccctcaaccgcaacggcctccacttgccatcttactcaccttatccccaaatgatcattgtcgttcaaggtgcgtaatattagtaagaagtatttatcagcttaacgtgataacaataatagtaatatgaaatatttattaaatttttataattaatctctgctagaaaatttgattaatcattttagtagaatttgttttctcaactaggttttaaaacacca

SEQ ID NO: 3020 - DNA, 627 bp, Artificial
  Mutations within GlyA3B4 introduced by GmGlyA3B4_T02TALE nuclease
gttcatgtacggttgcagatataaacgaagcatagcttatgtatgaggtgtaacaaaattggaaacaatagccatgcaaggtgaagaatgtcaccaactcagaaaccccttcttcattgacgtgtccctcactcactctcctctcttcactataaatcgccactcttcgtgttctccacttcaccaactccttcaaacttattaacactttccttagttcaatatggggaagcccttcttcactctctctctttcttccctttgcttgctactcttgtcgagtgcatttgataaccgtattaccgcctttgagtgagctgataccgctcgccgcagccgaacgaccgagcgcagcgagtcagtgagcgaggaagcggaagagcgcccaatacgcaaaccgcctctccccgcgcgttggccgattcattaatgcagctgcactattacctccagcaagttcaacgagtgccaactcaacaacctcaacgcgttggaacccgaccaccgcgttgagtccgaaggtggtcttattgaaacatggaactctcaacaccctgagctgcaatgcgccggtgtcaactgtttccaaacgcaccctcaaccgcaacggcctccacttgccatctt

SEQ ID NO: 3021 - DNA, 664 bp, Artificial
  Mutations within GlyA3B4 introduced by GmGlyA3B4_T02TALE nuclease
gttcatgtacggttgcagatataaacgaagcatagcttatgtatgaggtgtaacaaaattggaaacaatagccatgcaaggtgaagaatgtcaccaactcagaaaccccttcttcattgacgtgtcccctcactcactctcctctcttcactataaatcgccactcttcgtgttctccacttcaccaactccttcaaacttattaacactttccttagttcaatatggggaagcccttcttcactctctctctttcttccctttgcttgctactcttgtcgagtgcattgctattacctccagcaagttcaacgagtgccaactcaacaacctcaacgcgttggaacccgaccaccgcgttgagtccgaaggtggtcttattgaaacatggaactctcaacaccctgagctgcaatgcgccggtgtcactgtttccaaacgcaccctcaaccgcaacggcctccacttgccatcttactcaccttatccccaaatgatcatttcgttcaaggtgcgtaatattagtaagagtatttatcagcttaacgtgataacaatatagtaatatgaaatatttattaaatttttataattaatctctgctagaaaatttgattaatcattttagtagaatttgtttttctcaactaggttttaaacacca

SEQ ID NO: 3022 - DNA, 637 bp, Artificial
  Mutations within GlyA3B4 introduced by GmGlyA3B4_T02TALE nuclease
  misc_feature (295): n is a or c or t or g
gttcatgtacggttgcagatataaacgaagcatagcttatgtatgaggtgtaacaaaattggaaacaatagccatgcaaggtgaagaatgtcaccaactcagaaaccccttcttcattgacgtgtcccctcactcactctcctctcttcactataaaatcgcccactcttcgtgttctccacttcaccaactcccttcaaacttattaacactttccttagttcaatatgggggaagcccttcttcactctctcctttcttccctttgcttgctactctgtcgagtgcgctattncctccagcaagtcacgagtgccaactcaacaacctcaacgcgttggaaccccgaccaccgcgttgagtccgaaggtggtcttattgaaacatggaactctcaacaccctgagctgcaatgcgccggtgtcactgtttccaaacgcaccctcaaccgcaacggcctccacttgccatcttactcaccttatccccaaatgatcattgtcgttcaaggtgcgtaatattagtaagagtatttatcagcttaacgtgataacaataatagtaatatgaaatatttattaaatttttataattaatctctgctagaaaatttgattaatcattttagtagaatttg

SEQ ID NO: 3023 - DNA, 656 bp, Artificial
  Mutations within GlyA3B4 introduced by GmGlyA3B4_T02TALE nuclease
  misc_feature (551): n is a or c or t or g
gttcatgtacggttgcagatataaacgaagcatagcttatgtatgaggtgtaacaaaattggaaacaatagccatgcaaggtgaagaatgtcaccaactcagaaacccttcttcattgacgtgtccctcactcactctcctctcttcactataaatcgccactcttcgtgttctccacttcaccaactccttcaaacttattaacactttccttagttcaatatggggaagcccttcttcactctctctctttcttccctttgcttgctattacctccagcaagttcaacgagtgccaactcaacaacctcaacgcgttggaacccgaccaccgcgttgagtcccgaaggtggtcttattgaaacatggaactcttaacacccctgagctgcaatgcgccggtgtcactgttttccaaacgcaccctcaaccgcaacggcctccacttgccatcttactcaccttatcccccaaatgatcattgtcgttcaaggtgcgtaatattagtaagaagtatttatcagcttaacgtgataacaataatagtaatntgaaatattttattaaatttttttataaattaatctctgctagaaaatttgattaatcatttttagtagaatttgttttttctcaactaggttttaaacaccaca

SEQ ID NO: 3024 - DNA, 631 bp, Artificial; identical to SEQ ID NO: 2232
  Mutations within GlyA3B4 introduced by GmGlyA3B4_T02TALE nuclease

SEQ ID NO: 3025 - DNA, 645 bp, Artificial
  Mutations within GlyA3B4 introduced by GmGlyA3B4_T02TALE nuclease
gttcatgtacggttgcagatataaacgaagcatagcttatgtatgaggtgtaacaaaattggaaacaatagccatgcaaggtgaagaatgtcaccaactcagaaaccccttcttcattgacgtgtccctcactcactctcctctcttcactataaatcgccactcttcgtgttctccacttcaccaactccttcaaacttattaacactttccttagttcaatatggggaagcccttcttcactctctctctttcttccctttgcttgctactcttgtcgagtgcatctattacctccagcaagttcaacgagtgccaactcaacaacctcaacgcgttggaacccgaccaccgcgttgagtccgaaggtggtcttattgaaacatggaactctcaacaccctgagctgcaatgcgccggtgtcactgtttccaaacgcaccctcaaccgcaacggcctccacttgccatcttacctcacccattatccccaaatgatcattgtcgttcaaggtgcgtaatattagtaagaatgtattatcagcttaacgatgataaactaataatagtaataatttagaaaatatttaattaaatttttcataatttactcaattgctagaaaatttttgattaatcattttat

SEQ ID NO: 3026 - DNA, 629 bp, Artificial
  Mutations within GlyA3B4 introduced by GmGlyA3B4_T02TALE nuclease
gttcatgtacggttgcagatataaacgaagcatagcttatgtatgaggtgtaacaaaattggaaacaatagccatgcaaggtgaagaatgtcaccaactcagaaacccttcttcattgacgtgtccctcactcactctcctctcttcactataaatcgccactcttcgtgttctccacttcaccaactccttcaaacttattaacactttccttagttcaatatggggaagcccttcttcactctctctctttcttccctttgcttgctactcttgtcgagtgctacctccagcaagttcaacgagtgccaactcaacaacctcaacgcgttggaacccgaccaccgcgttgagtccgaaggtggtcttattgaaacatggaactctcaacaccctgagctgcaatgcgccggtgtcactgtttccaaacgcaccctcaaccgcaacggcctccacttgccatcttactcaccttatccccaaatgatcattgtcgttcaaggtgcgtaatattagtaagaagtatttatcagcttaacgtgataacaataatagtaatatgaaatatttattaaatttttataattaatctctgctagaaaatttgattaatcattttagtagaattt

SEQ ID NO: 3027 - DNA, 608 bp, Artificial
  Mutations within GlyA3B4 introduced by GmGlyA3B4_T02TALE nuclease
  misc_feature (547): n is a or c or t or g
gttcatgtacggttgcagatataaacgaagcatagcttatgtatgaggtgtaacaaaattggaaacaatagccatgcaaggtgaagaatgtcaccaactcagaaacccttcttcattgacgtgtccctcactcactctcctctcttcactataaatcgccactcttcgtgttctccacttcaccaactccttcaaacttattaacactttccttagttcaatatggggaagcccttcttcactccagcaagttcaacgagtgccaactcaacaacctcaacgcgttggaacccgaccaccgcgttgagtccgaaggtggtcttattgaaacatggaactctcaacaccctgagctgcaatgcgccggtgtcactgtttccaaacgcaccctcaaccgcaacggcctccacttgccatcttactcaccttatccccaaatgatcattgtcgttcaaggtgcgtaatattagtaagaagtatttatcagcttaacgtgataacaatatagtaatatgaaatatttattaaattttttatattaatctcngctagaaaatttgattaatcatttttagtagaatttgtttttctcaactaggtttttaaaa

SEQ ID NO: 3028 - DNA, 644 bp, Artificial
  Mutations within GlyA3B4 introduced by GmGlyA3B4_T02TALE nuclease
gttcatgtacggttgcagatataaacgaagcatagcttatgtatgaggtgtaacaaaattggaaacaatagccatgcaaggtgaagaatgtcaccaactcagaaacccttcttcattgacgtgtccctcactcactctcctctcttcactataaatcgccactcttcgtgttctccacttcaccaactccttcaaacttattaacactttccttagttcaatatggggaagcccttcttcactctctctctttcttccctttgcttgctactcttgtcgagtgcctgcaagttcaacgagtgccaactcaacaacctcaacgcgttggaacccgaccaccgcgttgagtccgaaggtggtcttattgaaacatggaactctcaacaccctgagctgcaatgcgccggtgtcactgtttccaaacgcaccctcaaccgcaacggcctccacttgccatcttactcaccttatcccccaaatgatcattgtcgttcaaggtgcgtaatattagtaagaagtatttatcagcttaacgtgataacaataatagtaatatgaaatatttattaaattttttataattaatctctgctagaaaatttgattaatctttttagtagaattgttttttctcaactaggttt

SEQ ID NO: 3029 - DNA, 661 bp, Artificial; identical to SEQ ID NO: 1694
  Mutations within GlyA3B4 introduced by GmGlyA3B4_T02TALE nuclease

SEQ ID NO: 3030 - DNA, 662 bp, Artificial; identical to SEQ ID NO: 1931
  Mutations within GlyA3B4 introduced by GmGlyA3B4_T02TALE nuclease

SEQ ID NO: 3031 - DNA, 647 bp, Artificial
  Mutations within GlyA3B4 introduced by GmGlyA3B4_T02TALE nuclease
gttcatgtacggttgcagatataaacgaagcatagcttatgtatgaggtgtaacaaaattggaaacaatagccatgcaaggtgaagaatgtcaccaactcagaaacccttcttcattgacgtgtccctcactcactctcctctcttcactataaatcgccactcttcgtgttctccacttcaccaactccttcaaacttattaacactttccttagttcaatatggggaagcccttcttcactctctctctttcttccctttgcttgctactcttgtcgagtgcatctattacctccagcaagttcaacgagtgccaactcaacaacctcaacgcgttggaacccgaccaccgcgttgagtccgaaggtggtcttattgaaacatggaactctcaacaccctgagctgcaatgcgccggtgtcactgtttccaaacgcaccctcaaccgcaacggcctccacttgccaatcttactcaccttatcccccaaatgatcattgtcgttcaaggtgcgtaatattagtaagaagtatttatcagcttaacgtgataacaataatagtaatatgaaatatttattaaatttttataattaatctctgctagaaaatttgattaatcattttagtagaatttgttttctcaa

SEQ ID NO: 3032 - DNA, 650 bp, Artificial; identical to SEQ ID NO: 2452
  Mutations within GlyA3B4 introduced by GmGlyA3B4_T02TALE nuclease

SEQ ID NO: 3033 - DNA, 662 bp, Artificial; identical to SEQ ID NO: 2192
  Mutations within GlyA3B4 introduced by GmGlyA3B4_T02TALE nuclease

SEQ ID NO: 3034 - DNA, 653 bp, Artificial
  Mutations within GlyA3B4 introduced by GmGlyA3B4_T02TALE nuclease
  misc_feature (555): n is a or c or t or g
gttcatgtacggttgcagatataaacgaagcatagcttatgtatgaggtgtaacaaaattggaaacaatagccatgcaaggtgaagaatgtcaccaactcagaaacccttcttcattgacgtgtccctcactcactctcctctcttcactataaatcgccactcttcgtgttctccacttcaccaactccttcaaacttattaacactttccttagttcaatatggggaagcccttcttcactctctctctttcttccctttgcttgctactcttgtcgggttccagcaagttcaacgagtgccaactcaacaacctcaacgcgttggaacccgaccaccgcgttgagtccgaaggtggtcttattgaaacatggaactctcaacaccctgagctgcaatgcgccggtgtcactgtttccaaacgcaccctcaaccgcaacggcctccacttgccatcttactcaccttatccccaaatgatcattgtcgttcaaggtgcgtaaatattagtaagaagtatttatcagcttaacgtgataacaataatagtaatntgaaatatttattaaattttttataattaatctctgctagaaaatttgattaatctttttagtagaattgtttttctcaactaggtttaaacaccaca

SEQ ID NO: 3035 - DNA, 667 bp, Artificial; identical to SEQ ID NO: 2824
  Mutations within GlyA3B4 introduced by GmGlyA3B4_T02TALE nuclease
  misc_feature (530): n is a or c or t or g

SEQ ID NO: 3036 - DNA, 633 bp, Artificial; identical to SEQ ID NO: 2030
  Mutations within GlyA3B4 introduced by GmGlyA3B4_T02TALE nuclease

SEQ ID NO: 3037 - DNA, 401 bp, Artificial; identical to SEQ ID NO: 1835
  Mutations within GlyA3B4 introduced by GmGlyA3B4_T02TALE nuclease

SEQ ID NO: 3038 - DNA, 622 bp, Artificial
  Mutations within GlyA3B4 introduced by GmGlyA3B4_T02TALE nuclease
  misc_feature (554): n is a or c or t or g
gttcatgtacggttgcagatataaacgaagcatagcttatgtatgaggtgtaacaaaattggaaacaatagccatgcaaggtgaagaatgtcaccaactcagaaacccttcttcattgacgtgtccctcactcactctcctctcttcactataaatcgccactcttcgtgttctccacttcaccaactccttcaaacttattaacactttccttagttcaatatggggaagcccttcttcactctctctctttcttccctttgcttgctactctattacctccagcaagttcaacgagtgccaactcaacaacctcaacgcgttggaacccgaccaccgcgttgagtccgaaggtggtcttattgaaacatggaactctcaacaccctgagctgcaatgcgccggtgtcactgtttccaaacgcaccctcaaccgcaacggcctccacttgccatcttactcaccttatcccccaaatgatcattgtcgttcaaggtgcgtaaatattagtaagaagtatttatcagcttaacgtgataacaataatagtaatntgaaatattttattaaattttttataattaatctctgctagaaaatttgattaatctttttagtagaa

SEQ ID NO: 3039 - DNA, 654 bp, Artificial
  Mutations within GlyA3B4 introduced by GmGlyA3B4_T02TALE nuclease
  misc_feature (440): n is a or c or t or g
gttcatgtacggttgcagatataaacgaagcatagcttatgtatgaggtgtaacaaaattggaaacaatagccatgcaaggtgaagaatgtcaccaactcagaaacccttcttcattgacgtgtccctcactcactctcctctcttcactataaatcgccactcttcgtgttctccacttcaccaactccttcaaacttattaacactttccttagttcaatatggggaagcccttcttcactctctctctttcttccctttgcttgctactcttgtcgagtgcatgctattacctccagcaagttcaacgagtgccaactcaacaacctcaacgcgttggaacccgaccaccgcgttgagtccgaaggtggtcttattgaaacatggaactctcaacaccctgagctgcaatgcgccggtgtcactgtttccaaacgcnccctcaaccgcaacggcctccacttgccatcttactcaccttatccccaaatgatcattgtcgttcaaggtgcgtaatattagtaagagtatttatcagcttaacgtgataacaataatagtaatatgaaatatttattaaatttttataattaatctctgctagaaaatttgattaatcattttagtagaatttgttttctcaactaggtttt

SEQ ID NO: 3040 - DNA, 671 bp, Artificial
  Mutations within GlyA3B4 introduced by GmGlyA3B4_T02TALE nuclease
gttcatgtacggttgcagatataaacgaagcatagcttatgtatgaggtgtaacaaaattggaaacaatagccatgcaaggtgaagaatgtcaccaactcagaaacccttcttcattgacgtgtccctcactcactctcctctcttcactataaatcgccactcttcgtgttctccacttcaccaactccttcaaacttattaacactttccttagttcaatatggggaagcccttcttcactctctctctttcttccctttgcttgctattacctccagcaagttcaacgagtgccaactcaacaacctcaacgcgttggaacccgaccaccgcgttgagtccgaaggtggtcttattgaaacatggaactctcaacacccctgagctgcaatgcgccggtgtcactgtttccaaacgcaccctcaaccgcaacggcctccacttgccatcttactcaccttatccccaaatgatcattgtcgttcaaggtgcgtaatattagtaagaagtatttatcagcttaacgtgataacaataatagtaatatgaaatatttattaaattttttataattaatctctgctagaaaatttgattaatcatttttagtagaatttgttttttctcaactaggttttaaaacaccacactgaactgccaaggcacaca

SEQ ID NO: 3041 - DNA, 632 bp, Artificial; identical to SEQ ID NO: 1756
  Mutations within GlyA3B4 introduced by GmGlyA3B4_T02TALE nuclease

SEQ ID NO: 3042 - DNA, 645 bp, Artificial
  Mutations within GlyA3B4 introduced by GmGlyA3B4_T02TALE nuclease
gttcatgtacggttgcagatataaacgaagcatagcttatgtatgaggtgtaacaaaattggaaacaatagccatgcaaggtgaagaatgtcaccaactcagaaacccttcttcattgacgtgtccctcactcactctcctctcttcactataaatcgccactcttcgtgttctccacttcaccaactccttcaaacttattaacactttccttagttcaatatggggaagcccttcttcactctctctctttcttccctttgctattacctccagcaagttcaacgagtgccaactcaacaacctcaacgcgttggaacccgaccaccgcgttgagtccgaaggtggtcttattgaaacatggaactctcaacaccctgagctgcaatgcgccggtgtcactgtttccaaacgcaccctcaaccgcaacggcctccacttgccatcttactcaccttatcccccaaatgatcattgtcgttcaaggtgcgtaatattagtaagaagtatttatcagcttaacgtgataacaataatagtaatatgaaatatttattaaattttttataattaattctctgctagaaaatttgattaatcatttttagtagaatttgtttttctcaactaggttttaaaacacca

SEQ ID NO: 3043 - DNA, 710 bp, Artificial
  Mutations within GlyA3B4 introduced by GmGlyA3B4_T02TALE nuclease
gttcatgtacggttgcagatataaacgaagcatagcttatgtatgaggtgtaacaaaattggaaacaatagccatgcaaggtgaagaatgtcaccaactcagaaacccttcttcattgacgtgtccctcactcactctcctctcttcactataaatcgccactcttcgtgttctccacttcaccaactccttcaaacttattaacactttccttagttcaatatggggaagcccttcttcactctctctctttcttccctttgcttgctactcttgtcgagtgcatgccgcaaaaaagggaataagggcgacacggaaatgttgaatactcatactcttccttttttcaatattattgaagcatttattacctccagcaagttcaacgagtgccaactcaacaacctcaacgcgttggaacccgaccaccgcgttgagtccgaaggtggtcttattgaaacatggaactctcaacacctgagctgcaatgcgccggtgtcactgtttccaaacgcaccctcaaccgcaacggcctccacttgccatcttactcacctttatccccaaatgatcattgtcgttcaaggtgcgtaatattagtaagaagtatttatcagcttaaccgtgataacaataatagtaatatgaaaatatttattaaattttttataattaatctctgctagaaaaatttgattaatcatttttag

SEQ ID NO: 3044 - DNA, 668 bp, Artificial
  Mutations within GlyA3B4 introduced by GmGlyA3B4_T02TALE nuclease
  misc_feature (532): n is a or c or t or g
gttcatgtacggttgcagatataaacgaagcatagcttatgtatgaggtgtaacaaaattggaaacaatagccatgcaaggtgaagaatgtcaccaactcagaaacccttcttcattgacgtgtccctcactcactctcctctcttcactataaatcgccactcttcgtgttctccacttcaccaactccttcaaacttattaacactttccttagttcaatatggggaagcccttcttcactctctctctttcttccctttgcttgctactcttgtcgagtgcatgctattacctccagcaagttcaacgagtgccaactcaacaacctcaacgcgttggaacccgaccaccgcgttgagtccgaaggtggtcttattgaaacatggaactctcaacaccctgagctgcaatgcgccggtgtcactgtttccaaacgcaccctcaaccgcaacggcctccacttgccatcttactcaccttatcccccaaatgatcattgtcgttcaaggtgcgtaatattagtaagaagnatttatcagcttaacgtgataacaatatagtaatatgaaatatttattaaatttttataattaatctctgctagaaaatttgattaatcattttagtagaatttgtttttctcaactaggtttttaaaacaccaca

SEQ ID NO: 3045 - DNA, 667 bp, Artificial; identical to SEQ ID NO: 2824
  Mutations within GlyA3B4 introduced by GmGlyA3B4_T02TALE nuclease
  misc_feature (530): n is a or c or t or g

SEQ ID NO: 3046 - DNA, 574 bp, Artificial
  Mutations within GlyA3B4 introduced by GmGlyA3B4_T02TALE nuclease
gttcatgtacggttgcagatataaacgaagcatagcttatgtatgaggtgtaacaaaattggaaacaatagccatgcaaggtgaagaatgtcaccaactcagaaacccttcttcattgacgtgtccctcactcactctcctctcttcactataaatcgccactcttcgtgttctccacttcaccaactccttcaaacttattaacactttccttagttcaatatggggaagcccttcttcagcaagttcaacgagtgccaactcaacaacctcaacgcgttggaacccgaccaccgcgttgagtccgaaggtggtcttattgaaacatggaactctcaacaccctgagctgcaatgcgccggtgtcactgtttccaaacgcaccctcaaccgcaacggcctccacttgccatcttactcaccttatccccaaatgatcattgtcgttcaaggtgcgtaatattagtaagaagtatttatcagcttaacgtgataacaataatagtaatatgaaatatttattaaattttttataattaatctctgctagaaaatttgattaatctttttagtat

SEQ ID NO: 3047 - DNA, 646 bp, Artificial; identical to SEQ ID NO: 1911
  Mutations within GlyA3B4 introduced by GmGlyA3B4_T02TALE nuclease

SEQ ID NO: 3048 - DNA, 654 bp, Artificial
  Mutations within GlyA3B4 introduced by GmGlyA3B4_T02TALE nuclease
gttcatgtacggttgcagatataaacgaagcatagcttatgtatgaggtgtaacaaaattggaaacaatagccatgcaaggtgaagaatgtcaccaactcagaaacccttcttcattgacgtgtccctcactcactctcctctcttcactataaatcgccactcttcgtgttctccacttcaccaactccttcaaacttattaacactttccttagttcaatatggggaagcccttcttcactctctctctttcttccctttgcttgctactcttgtcgagtgcattattacctccagcaagttcaacgagtgccaactcaacaacctcaacgcgttggaacccgaccaccgcgttgagtccgaaggtggtcttattgaaacatggaactctcaacaccctgagctgcaatgcgccggtgtcactgtttccaaacgcaccctcaaccgcaacggcctccacttgccatcttactcaccttatccccaaatgatcattgtcgttcaaggtgcgtaatattagtaagaagtatttatcagcttaacgtgataacaatatagtaatatgaaatatttattaaatttttataattaatctctgctagaaaatttgattaatcattttagtagaatttgtttttctcaactaggttttt

SEQ ID NO: 3049 - DNA, 651 bp, Artificial
  Mutations within GlyA3B4 introduced by GmGlyA3B4_T02TALE nuclease
gttcatgtacggttgcagatataaacgaagcatagcttatgtatgaggtgtaacaaaattggaaacaatagccatgcaaggtgaagaatgtcaccaactcagaaacccttcttcattgacgtgtccctcactcactctcctctcttcactataaatcgccactcttcgtgttctccacttcaccaactccttcaaacttattaacactttccttagttcaatatggggaagcccttcttcactctctctctttcttccctttgcttgctactcttgtcgctattacctccagcaagttcaacgagtgccaactcaacaacctcaacgcgttggaacccgaccaccgcgttgagtccgaaggtggtcttattgaaacatggaactctcaacaccctgagctgcaatgcgccggtgtcactgtttccaaacgcaccctcaaccgcaacggcctccacttgccatcttactcaccttatcccccaaatgatcattgtcgttcaaggtgcgtaatattagtaagaagtatttatcagcttaacgtgataacaatatagtaatatgaaatatttattaaatttttataattaatctctgctagaaaatttgattaatcattttagtagaatttgttttctcaactaggttttaaaa

SEQ ID NO: 3050 - DNA, 740 bp, Artificial
  Mutations within GlyA3B4 introduced by GmGlyA3B4_T02TALE nuclease
  misc_feature (727): n is a or c or t or g
gttcatgtacggttgcagatataaacgaagcatagcttatgtatgaggtgtaacaaaattggaaacaatagccatgcaaggtgaagaatgtcaccaactcagaaacccttcttcattgacgtgtccctcactcactctcctctcttcactataaatcgccactcttcgtgttctccacttcaccaactccttcaaacttattaacactttccttagttcaatatggggaagcccttcttcactctctctctttcttccctttgcttgctactcttgtcgagtgcatcgccagccacgatggcggcaagcaggcgctggagacggtccagcggctgttgccggtgctgtgccaggcccacggcttgctattacctccagcaagttcaacgagtgccaactcaacaacctcaacgcgttggaacccgaccaccgcgttgagtccgaaggtggtcttattgaaacatggaactctcaacaccctgagctgcaatgcgccggtgtcactgtttccaaacgcacctcaaccgcaacggcctccacttgccatcttactcaccttatccccaaatgatcattgtcgttcaaggtgcgtaatattagtaagaagtatttatcagcttaacgtgataacaataatagtaatatgaaatatttattaaattttttataattaatctctgctagaaaatttgatttaatcatttttagtaatgaatttgttttttcncaaactaggtttt

SEQ ID NO: 3051 - DNA, 665 bp, Artificial
  Mutations within GlyA3B4 introduced by GmGlyA3B4_T02TALE nuclease
gttcatgtacggttgcagatataaacgaagcatagcttatgtatgaggtgtaacaaaattggaaacaatagccatgcaaggtgaagaatgtcaccaactcagaaacccttcttcattgacgtgtccctcactcactctcctctcttcactataaatcgccactcttcgtgttctccacttcaccaactccttcaaacttattaacactttccttagttcaatatggggaagcccttcttcactctctctctttcttccctttgcttgctactcttgtcgagtgcattcgttggcgtcggcaaacagtggtccggcgcacgcgctctggaggccttgctcacggtggcgggagagttgagaggtccacccgttacagttggacattacctccagcaagttcaacgagtgccaactcaacaacctcaacgcgttggaacccgaccaccgcgttgagtccgaaggtggtcttattgaaacatggaactctcaacaccctgagctgcaatgcgccggtgtcactgtttccaaacgcaccctcaaccgcaacggcctcacttgccatcttactcaccttatccccaaatgatcattgtcgttcaaggtgcgtaatattagtaagaagtatttatcgcttaacgtgataacaataatagtaatatgaaaat

SEQ ID NO: 3052 - DNA, 646 bp, Artificial; identical to SEQ ID NO: 1911
  Mutations within GlyA3B4 introduced by GmGlyA3B4_T02TALE nuclease

SEQ ID NO: 3053 - DNA, 661 bp, Artificial
  Mutations within GlyA3B4 introduced by GmGlyA3B4_T02TALE nuclease
  misc_feature (527): n is a or c or t or g
gttcatgtacggttgcagatataaacgaagcatagcttatgtatgaggtgtaacaaaattggaaacaatagccatgcaaggtgaagaatgtcaccaactcagaaacccttcttcattgacgtgtccctcactcactctcctctcttcactataaatcgccactcttcgtgttctccacttcaccaactccttcaaacttattaacactttccttagttcaatatggggaagcccttcttcactctctctctttcttccctttgcttgctactcttgtcgacttgctattacctccagcaagttcaacgagtgccaactcaacaacctcaacgcgttggaacccgaccaccgcgttgagtccgaaggtggtcttattgaaacatggaactctcaacaccctgagctgcaatgcgccggtgtcactgtttccaaacgcaccctcaaccgcaacggcctccacttgccatcttactcaccttatccccaaatgatcattgtcgttcaaggtgcgtaatattagtaagagnatttatcagcttaacgtgataacaatatagtaatatgaaatatttattaaatttttataattaatctctgctagaaaatttgattaatcattttagtagaatttgtttttctcaactaggtttttaaacaccaa

SEQ ID NO: 3054 - DNA, 661 bp, Artificial; identical to SEQ ID NO: 2035
  Mutations within GlyA3B4 introduced by GmGlyA3B4_T02TALE nuclease

SEQ ID NO: 3055 - DNA, 665 bp, Artificial
  Mutations within GlyA3B4 introduced by GmGlyA3B4_T02TALE nuclease
  misc_feature (529): n is a or c or t or g
gttcatgtacggttgcagatataaacgaagcatagcttatgtatgaggtgtaacaaaattggaaacaatagccatgcaaggtgaagaatgtcaccaactcagaaacccttcttcattgacgtgtccctcactcactctcctctcttcactataaatcgccactcttcgtgttctccacttcaccaactccttcaaacttattaacactttccttagttcaatatggggaagcccttcttcactctctctctttcttccctttgcttgctactcttgtcgagtgcgctattacctccagcaagttcaacgagtgccaactcaacaacctcaacgcgttggaacccgaccaccgcgttgagtccgaaggtggtcttattgaaacatggaactctcaacaccctgagctgcaatgcgccggtgtcactgtttccaaacgcaccctcaaccgcaacggcctccacttgccatcttactcaccttatccccaaatgatcattgtcgttcaaggtgcgtaatattagtaagaagnatttatcagcttaacgtgataacaatatagtaatatgaaatatttattaaatttttataattaatctctgctagaaaatttgattaatcattttagtagaatttgtttttctcaactaggtttttaaaacaccaca

SEQ ID NO: 3056 - DNA, 656 bp, Artificial
  Mutations within GlyA3B4 introduced by GmGlyA3B4_T02TALE nuclease
gttcatgtacggttgcagatataaacgaagcatagcttatgtatgaggtgtaacaaaattggaaacaatagccatgcaaggtgaagaatgtcaccaactcagaaacccttcttcattgacgtgtccctcactcactctcctctcttcactataaatcgccactcttcgtgttctccacttcaccaactccttcaaacttattaacactttccttagttcaatatggggaagcccttcttcactctctctctttcttccctttgcttgctactcttgtcgagtgcatattacctccagcaagttcaacgagtgcaactcaacaacctcaacgcgttggaacccgaccaccgcgttgagtccgaaggtggtcttattgaaacatggaactctcaacaccctgagctgcaatgcgccggtgtcactgtttccaaacgcacccctcaaccgcaacggcctccacttgccatcttactcaccttatccccaaatgatcattgtcgttcaaggtgcgtaatattagtaagaagtatttatcagcttaacgtgataacaatatagtaatatgaaatatttattaaatttttataattaatctctgctagaaaatttgattaatcattttagtagaatttgttttctcaactaggtttttaaaa

SEQ ID NO: 3057 - DNA, 666 bp, Artificial
  Mutations within GlyA3B4 introduced by GmGlyA3B4_T02TALE nuclease
gttcatgtacggttgcagatataaacgaagcatagcttatgtatgaggtgtaacaaaaattggaaacaatagccatgcaaggtgaagaatgtcaccaactcagaaaccccttcttcattgacgtgtccctcactcactctcctctcttcactataaatcgccactcttcgtgttctccacttcaccaaactccttcaaaacttattaacactttccttagttcaatatgggggaagcccttcttcactctctctctttcttccctttgcttgctactcttgtcgagtgcatccgtgggcctggcacagcaccggcaacagccgctggaccgtctccagcgcctgcttgccaccgccattgctggcgatggccaccacctgcttgctattacctccagcaagttcaacgagtgccaactcaacaacctcaacgcgttggaacccgaccaccgcgttgagtccgaaggtggtcttattgaaacatggaactctcaacaccctgagctgcaatgcgccggtgtcactgtttccaaacgcaccctcaaccgcaacggcctccacttgccatcttactcaccttatccccaaatgatcattgtcgttcaaggtgcgtaatattagtaagaagtatttatcagcttaacgtgataacaataatagtaatatg

SEQ ID NO: 3058 - DNA, 664 bp, Artificial; identical to SEQ ID NO: 2427
  Mutations within GlyA3B4 introduced by GmGlyA3B4_T02TALE nuclease

SEQ ID NO: 3059 - DNA, 638 bp, Artificial
  Mutations within GlyA3B4 introduced by GmGlyA3B4_T02TALE nuclease
gttcatgtacggttgcagatataaacgaagcatagcttatgtatgaggtgtaacaaaattggaaacaatagccatgcaaggtgaagaatgtcaccaactcagaaaccccttcttcattgacgtgtcccctcactcactctcctctcttcactataaatcgccactcttcgtgttctccacttcaccaactccttcaaacttattaacactttccttagttcaatatggggaagcccttcttcactctctctctttcttccctttgcttgctactcttgtcgagtgcatgctattacctccagcaagttcaacgagtgccaactcaacaacctcaacgcgttggaacccgaccaccgcgttgagtccgaaggtggtcttattgaaacatggaactctcaacaccctgagctgcaatgcgccggtgtcactgtttccaaacgcaccctcaaccgcaacggcctccacttgccatcttactcaccttatccccaaatgatcattgtcgttcaaggtgcgtaatattagtaagagtatttatcagcttaacgtgataacaataatagtaatatgaaatatttattaaatttttataattaatctctgctagaaaatttgattaatcattttagtagaatttg

SEQ ID NO: 3060 - DNA, 612 bp, Artificial
  Mutations within GlyA3B4 introduced by GmGlyA3B4_T02TALE nuclease
gttcatgtacggttgcagatataaacgaagcatagcttatgtatgaggtgtaacaaaattggaaacaatagccatgcaaggtgaagaatgtcaccaactcagaaacccttcttcattgacgtgtccctcactcactctcctctcttcactataaatcgccactcttcgtgttctccacttcaccaactccttcaaacttattaacactttccttagttcaatatggggaagcccttcttcactctctctcttacctccagcaagttcaacgagtgccaactcaacaacctcaacgcgttggaacccgaccaccgcgttgagtccgaaggtggtcttattgaaacatggaactctcaacaccctgagctgcaatgcgccggtgtcactgtttccaaacgcaccctcaaccgcaacggcctccacttgccatcttactcaccttatcccaatgcaatcattgtcgttcaaggtgcgtaatattagtaagaagtatttatcagcttaacgtgataacaataatagtaatatgaaatatttattaatttttataattaatctctgctagaaaatttgattaatcatttttagtagaatttgtttttctcaactagg

SEQ ID NO: 3061 - DNA, 663 bp, Artificial
  Mutations within GlyA3B4 introduced by GmGlyA3B4_T02TALE nuclease
gttcatgtacggttgcagatataaacgaagcatagcttatgtatgaggtgtaacaaaattggaaacaatagccatgcaaggtgaagaatgtcaccaactcagaaaccccttcttcattgacgtgtccctcactcactctcctctcttcactataaatcgccactcttcgtgttctccacttcaccaactccttcaaacttattaacactttccttagttcaatatggggaagcccttcttcactctctctctttcttccctttgcttgctactcttgtcgagttgctattacctccagcaagttcaacgagtgccaactcaacaacctcaacgcgttggaacccgaccaccgcgttgagtccgaaggtggtcttattgaaacatggaactctcaacaccctgagctgcaatgcgccggtgtcactgtttccaaacgcaccctcaaccgcaacggcctccacttgccatcttactcaccttatccccaaatgatcattgtcgttcaaggtgcgtaatattagtaagaagtatttatcagcttaacgtgataacaatatagtaatatgaaatatttattaaatttttataattaatctctgctagaaaatttgattaatcattttagtagaatttgtttttctcaactaggtttttaaaacacca

SEQ ID NO: 3062 - DNA, 665 bp, Artificial
  Mutations within GlyA3B4 introduced by GmGlyA3B4_T02TALE nuclease
gttcatgtacggttgcagatataaacgaagcatagcttatgtatgaggtgtaacaaaattggaaacaatagccatgcaaggtgaagaatgtcacccaactcagaaacccttcttcattgacgtgtccctcactcactctcctctcttcactataaatcgccactcttcgtgttctccacttcaccaaactccttcaaacttattaacactttccttagttcaatatgggggaagcccttcttcactctctctctttcttccctttgcttgctactcttgtcgagtgcattacctccagcaagttcaacgagtgccaactcaacaacctcaacgcgttggaacccgaccaccgcgttgagtccgaaggtggtcttattgaaacatggaactctcaacaccctgagctgcaatgcgccggtgtcactgtttccaaacgcaccctcaaccgcaacggcctccacttgccaatcttactcaccttatccccaaatgatcattgtcgttcaaggtgcgtaatattagtaagaagttattttatcagcttaacgtgataacaataatagtaatatgaaatatttattaaatttttataattaatctctgctagaaaatttgattaatcattttagtagaatttgttttctcaactaggtttttaaaacacc

SEQ ID NO: 3063 - DNA, 636 bp, Artificial
  Mutations within GlyA3B4 introduced by GmGlyA3B4_T02TALE nuclease
gttcatgtacggttgcagatataaacgaagcatagcttatgtatgaggtgtaacaaaattggaaacaatagccatgcaaggtgaagaatgtcaccaactcagaaacccttcttcattgacgtgtccctcactcactctcctctcttcactataaatcgccactcttcgtgttctccacttcaccaactccttcaaacttattaacactttccttagttcaatatggggaagcccttcttcactctctctctttcttccctttgcttgctactcttgtcgagtgcattgctattacctccagcaagttcaacgagtgccaactcaacaacctcaacgcgttggaacccgaccaccgcgttgagtccgaaggtggtcttattgaaacatggaactctcaacaccctgagctgcaatgcgccggtgtcactgtttccaaacgcaccctcaaccgcaacggcctccacttgccatcttactcaccttatccccaaatgatcattgtcgttcaaggtgcgtaatattagtaagagtatttatcagcttaacgtgataacaatatagtaatatgaaatatttattaaatttttataattaatctctgctagaaaatttgattaatcattttagtagaatttg

SEQ ID NO: 3064 - DNA, 599 bp, Artificial; identical to SEQ ID NO: 2796
  Mutations within GlyA3B4 introduced by GmGlyA3B4_T02TALE nuclease

SEQ ID NO: 3065 - DNA, 651 bp, Artificial
  Mutations within GlyA3B4 introduced by GmGlyA3B4_T02TALE nuclease
gttcatgtacggttgcagatataaacgaagcatagcttatgtatgaggtgtaacaaaaattggaaacaatagccatgcaaggtgaagaatgtcaccaactcagaaacccttcttcattgacgtgtccctcactcactctcctctcttcactataaatcgccactcttcgtgttctccacttcaccaactccttcaaacttattaacactttccttagttcaatatggggaagcccttcttcactctctctctttcttccctttgcttgctactcttgtcgagtgcatttacctccagcaagttcaacgagtgccaactcaacaacctcaacgcgttggaacccgaccacctgcgttgcagtccgaaggtggtcttattgaaacatggaactctcaacaccctgagctgcaatgcgccggtgtcactgtttccaaacgcaccctcaaccgcaacggcctccacttgccatcttactcaccttatccccaaatgatcattgtcgttcaaggtgcgtaatattagtaagaagtatttatcagcttaacgtgataacaataatagtaatatgaaatatttattaaatttttataattaatctctgctagaaaatttgattaatcattttagtagaatttgtttttctcaactagg

SEQ ID NO: 3066 - DNA, 634 bp, Artificial
  Mutations within GlyA3B4 introduced by GmGlyA3B4_T02TALE nuclease
  misc_feature (528): n is a or c or t or g
gttcatgtacggttgcagatataaacgaagcatagcttatgtatgaggtgtaacaaaattggaaacaatagccatgcaaggtgaagaatgtcaccaactcagaaacccttcttcattgacgtgtccctcactcactctcctctcttcactataaatcgccactcttcgtgttctccacttcaccaactccttcaaacttattaacactttccttagttcaatatggggaagcccttcttcactctctctctttcttccctttgcttgctactcttgtcgagtgcgctattacctccagcaagttcaacgagtgccaactcaacaacctcaacgcgttggaacccgaccaccgcgttgagtccgaaggtggtcttattgaaacatggaactctcaacaccctgagctgcaatgcgccggtgtcactgtttccaaacgcaccctcaaccgcaacggcctccacttgccatcttactcaccttatccccaaatgatcattgtcgttcaaggtgcgtaatattagtaagagnatttatcagcttaacgtgataacaatatagtaatatgaaatatttattaaatttttcataattaatctctgctagaaaatttgattaatcattttagtagaatttg

SEQ ID NO: 3067 - DNA, 499 bp, Artificial
  Mutations within GlyA3B4 introduced by GmGlyA3B4_T02TALE nuclease
gttcatgtacggttgcagatataaacgaagcatagcttatgtatgaggtgtaacaaaattggaaacaatagccatgcaaggtgaagaatgtcaccaactcagaaacccttcttcattgacgtgtccctcactcactctcctctcttcactataaatcgccactcttcgtgttctccacttcaccaactccttcaaacttattaacactttccttagttcaatatggggaagcccttcttcacttcccttggtcttattgaaacatggaactctcaacaccctgagctgcaatgcgccggtgtcactgtttccaaacgcaccctcaaccgcaacggcctccacttgccatcttactcaccttatccccaaatgatcattgtcgttcaaggtgcgtaatattagtaagaagtatttatcagcttaacgtgataacaataatagtaatatgaaatatttattaaattttttataattaatctctgctagaaaatttgattaa

SEQ ID NO: 3068 - DNA, 655 bp, Artificial
  Mutations within GlyA3B4 introduced by GmGlyA3B4_T02TALE nuclease
  misc_feature (530): n is a or c or t or g
gttcatgtacggttgcagatataaacgaagcatagcttatgtatgaggtgtaacaaaattggaaacaatagccatgcaaggtgaagaatgtcaccaactcagaaacccttcttcattgacgtgtccctcactcactctcctctcttcactataaatcgccactcttcgtgttctccacttcaccaactccttcaaacttattaacactttccttagttcaatatggggaagcccttcttcactctctctctttcttccctttgcttgctactcttgtcgagtgcatgctattacctccagcaagttcaacgagtgccaactcaacaacctcaacgcgttggaacccgaccaccgcgttgagtccgaaggtggtcttattgaaacatggaactctcaacaccctgagctgcaatgcgccggtgtcactgtttccaaacgcaccctcaaccgcaacggcctccacttgccatcttactcaccttatccccaaatgatcattgtcgttcaaggtgcgtaatattagtaagagnatttatcagcttaacgtgataacaatatagtaatatgaaatatttattaaatttttataattaatctctgctagaaaatttgattaatcattttagtagaatttgtttttctcaactaggttttt

SEQ ID NO: 3069 - DNA, 668 bp, Artificial
  Mutations within GlyA3B4 introduced by GmGlyA3B4_T02TALE nuclease
  misc_feature (531): n is a or c or t or g
gttcatgtacggttgcagatataaacgaagcatagcttatgtatgaggtgtaacaaaattggaaacaatagccatgcaaggtgaagaatgtcaccaactcagaaacccttcttcattgacgtgtccctcactcactctcctctcttcactataaatcgccactcttcgtgttctccacttcaccaactccttcaaacttattaacactttccttagttcaatatggggaagcccttcttcactctctctctttcttccctttgcttgctactcttgtcgagtgcatgctattacctccagcaagttcaacgagtgccaactcaacaacctcaacgcgttggaacccgaccaccgcgttgagtccgaaggtggtcttattgaaacatggaactctcaacaccctgagctgcaatgcgccggtgtcactgtttccaaacgcaccctcaaccgcaacggcctccacttgccatcttactcaccttatccccaaatgatcattgtcgttcaaggtgcgtaatattagtaagaagnatttatcagcttaacgtgataacaataatagtaatatgaaatatttattaaatttttataattaatctctgctagaaaatttgattaatcattttagtagaatttgtttttctcaactaggtttttaaaacaccaca

SEQ ID NO: 3070 - DNA, 664 bp, Artificial
  Mutations within GlyA3B4 introduced by GmGlyA3B4_T02TALE nuclease
gttcatgtacggttgcagatataaacgaagcatagcttatgtatgaggtgtaacaaaattggaaacaatagccatgcaaggtgaagaatgtcaccaactcagaaacccttcttcattgacgtgtccctcactcactctcctctcttcactataaatcgccactcttcgtgttctccacttcaccaactccttcaaacttattaacactttccttagttcaatatggggaagcccttcttcactctctctctttcttccctttgcttgctactcttgtcgagtgcatgctattacctccagcaagttcaacgagtgccaactcaacaacctcaacgcgttggaacccgaccaccgcgttgagtccgaaggtggtcttattgaaacatggaactctcaacaccctgagctgcaatgcgccggtgtcactgtttccaaacgcaccctcaaccgcaacggcctccacttgccatcttactcaccttatccccaaatgatcattgtcgttcaaggtgcgtaatattagtaagagtatttatcagcttaacgtgataacaataatagtaatatgaaatatttattaaatttttataattaatctctgctagaaaatttgattaatcattttagtagaatttgtttttctcaactaggttttaaaacacca

SEQ ID NO: 3071 - DNA, 655 bp, Artificial
  Mutations within GlyA3B4 introduced by GmGlyA3B4_T02TALE nuclease
gttcatgtacggttgcagatataaacgaagcatagcttatgtatgaggtgtaacaaaattggaaacaatagccatgcaaggtgaagaatgtcaccaactcagaaacccttcttcattgacgtgtccctcactcactctcctctcttcactataaatcgccactcttcgtgttctccacttcaccaactccttcaaacttattaacactttccttagttcaatatggggaagcccttcttcactctctctctttcttccctttgcttgctactcttgtcgagtgcattacctccagcaagttcaacgagtgccaactcaacaacctcaacgcgttggaacccgaccaccgcgttgagtccgaaggtggtcttattgaaacatggaactctcaacaccctgagctgcaatgcgccggtgtcactgtttccaaacgcaccctcaaccgcaacggcctccacttgccatcttactcaccttatccccaaatgatcattgtcgttcaaggtgcgtaatattagtaagaagtatttatcagcttaacgtgataacaataatagtaatatgaaatatttattaaatttttataattaatctctgctagaaaatttgattaatcattttagtagaatttgttttctcaactaggtttttaaaa

SEQ ID NO: 3072 - DNA, 650 bp, Artificial; identical to SEQ ID NO: 2452
  Mutations within GlyA3B4 introduced by GmGlyA3B4_T02TALE nuclease

SEQ ID NO: 3073 - DNA, 614 bp, Artificial
  Mutations within GlyA3B4 introduced by GmGlyA3B4_T02TALE nuclease
gttcatgtacggttgcagatataaacgaagcatagcttatgtatgaggtgtaacaaaattggaaacaatagccatgcaaggtgaagaatgtcaccaactcagaaacccttcttcattgacgtgtccctcactcactctcctctcttcactataaatcgccactcttcgtgttctccacttcaccaactccttcaaacttattaacactttccttagttcaatatggggaagcccttcttcactctctctctttcttacctccagcaagttcaacgagtgccaactcaacaacctcaacgcgttggaacccgaccaccgcgttgagtccgaaggtggtcttattgaaacatggaactctcaacaccctgagctgcaatgcgccggtgtcactgtttccaaacgcaccctcaaccgcaacggcctccacttgccatcttactcaccttatccccaaatgatcattgtcgttcaaggtgcgtaatattagtaagaagtatttatcagcttaacgtgataacaataatagtaatatgaaatatttattaaatttttataattaatctctgctagaaaatttgattaatcatttttagtagaatttgtttttctcaact

SEQ ID NO: 3074 - DNA, 637 bp, Artificial; identical to SEQ ID NO: 2343
  Mutations within GlyA3B4 introduced by GmGlyA3B4_T02TALE nuclease

SEQ ID NO: 3075 - DNA, 649 bp, Artificial; identical to SEQ ID NO: 1920
  Mutations within GlyA3B4 introduced by GmGlyA3B4_T02TALE nuclease

SEQ ID NO: 3076 - DNA, 634 bp, Artificial
  Mutations within GlyA3B4 introduced by GmGlyA3B4_T02TALE nuclease
gttcatgtacggttgcagatataaacgaagcatagcttatgtatgaggtgtaacaaaattggaaacaatagccatgcaaggtgaagaatgtcaccaactcagaaacccttcttcattgacgtgtccctcactcactctcctctcttcactataaatcgccactcttcgtgttctccacttcaccaactccttcaaacttattaacactttccttagttcaatatggggaagcccttcttcactctctctctttcttccctttgcttgctactcttgtcgagtgcattattacctccagcaagttcaacgagtgccaactcaacaacctcaacgcgttggaacccgaccaccgcgttgagtccgaaggtggtcttattgaaacatggaactctcaacaccctgagctgcaatgcgccggtgtcactgtttccaaacgcaccctcaaccgcaacggcctccacttgccatcttactcaccttatccccaaatgatcattgtcgttcaaggtgcgtaatattagtaagaagtatttatcagcttaacgtgataacaatatagtaatatgaaatatttattaaatttttataattaatctctgctagaaaatttgattaatcattttagtagaatttg

SEQ ID NO: 3077 - DNA, 645 bp, Artificial; identical to SEQ ID NO: 2653
  Mutations within GlyA3B4 introduced by GmGlyA3B4_T02TALE nuclease

SEQ ID NO: 3078 - DNA, 660 bp, Artificial
  Mutations within GlyA3B4 introduced by GmGlyA3B4_T02TALE nuclease
gttcatgtacggttgcagatataaacgaagcatagcttatgtatgaggtgtaacaaaattggaaacaatagccatgcaaggtgaagaatgtcaccaactcagaaacccttcttcattgacgtgtccctcactcactctcctctcttcactataaatcgccactcttcgtgttctccacttcaccaactccttcaaacttattaacactttccttagttcaatatggggaagcccttcttcactctctctctttcttccctttgcttgctactcttgtcgactattacctccagcaagttcaacgagtgccaactcaacaacctcaacgcgttggaacccgaccaccgcgtctgagtccgaaggtggtcttattgaaacatggaactctcaacaccctgagctgcaatgcgccggtgtcactgtttccaaacgcaccctcaaccgcaacggcctccacttgccatcttactcaccttatccccaaatgatcattgtcgttcaaggtgcgtaatattagtaagaagtatttatcagcttaacgtgataacaataatagtaatatgaaatatttattaaatttttataattaatctctgctagaaaatttgattaatcattttagtagaatttgtttttctcaactaggtttttaaaacacca

SEQ ID NO: 3079 - DNA, 659 bp, Artificial
  Mutations within GlyA3B4 introduced by GmGlyA3B4_T02TALE nuclease
gttcatgtacggttgcagatataaacgaagcatagcttatgtatgaggtgtaacaaaattggaaacaatagccatgcaaggtgaagaatgtcaccaactcagaaacccttcttcattgacgtgtccctcactcactctcctctcttcactataaatcgccactcttcgtgttctccacttcaccaactccttcaaacttattaacactttccttagttcaatatggggaagcccttcttcactctctctctttcttccctttgcttgctactcttgtcgagtgcattctattacctccagcaagttcaacgagtgccaactcaacaacctcaacgcgttggaacccgaccaccgcgttgagtccgaaggtggtcttattgaaacatggaactctcaacaccctgagctgcaatgcgccggtgtcactgtttccaaacgcaccctcaaccgcaacggcctccacttgccatcttactcaccttatccccaaatgatcattgtcgttcaaggtgcgtaatattagtaagaagtatttatcagcttaacgtgataacaataatagtaatatgaaatatttattaaatttttataattaatctctgctagaaaatttgattaatcattttagtagaatttgttttctcaactaggttttaaaa

SEQ ID NO: 3080 - DNA, 582 bp, Artificial; identical to SEQ ID NO: 1832
  Mutations within GlyA3B4 introduced by GmGlyA3B4_T02TALE nuclease

SEQ ID NO: 3081 - DNA, 660 bp, Artificial
  Mutations within GlyA3B4 introduced by GmGlyA3B4_T02TALE nuclease
gttcatgtacggttgcagatataaacgaagcatagcttatgtatgaggtgtaacaaaattggaaacaatagccatgcaaggtgaagaatgtcaccaactcagaaacccttcttcattgacgtgtccctcactcactctcctctcttcactataaatcgccactcttcgtgttctccacttcaccaactccttcaaacttattaacactttccttagttcaatatggggaagcccttcttcactctctctctttcttccctttgcttgctactcttgtcgagtgcatttgctattacctccagcaagttcaacgagtgccaactcaacaacctcaacgcgttggaacccgaccaccgcgttgagtccgaaggtggtcttattgaaacatggaactctcaacaccctgagctgcaatgcgccggtgtcactgtttccaaacgcaccctcaaccgcaacggcctccacttgccatcttactcaccttatccccaaatgatcattgtcgttcaaggtgcgtaatattagtaagagtatttatcagcttaacgtgataacaatatagtaatatgaaatatttattaaatttttataattaatctctgctagaaaatttgattaatcattttagtagaatttgttttctcaactaggtttttaaaa

SEQ ID NO: 3082 - DNA, 492 bp, Artificial
  Mutations within GlyA3B4 introduced by GmGlyA3B4_T02TALE nuclease
gttcatgtacggttgcagatataaacgaagcatagcttatgtatgaggtgtaacaaaattggaaacaatagccatgcaaggtgaagaatgtcaccaactcagaaacccttcttcattgacgtgtccctcactcactctcctctcttcactataaatcgccactcttcgtgttctccacttcaccaactccttcaaacttattaacactttccttagttcaatatggggaagcccttcttcactctctctctttcttccctttgcttgctactcttgtcgagtgcaagttcaacgagtgccaactcaacaacctcaacgcgttggaacccgaccaccgcgttgagtccgaaggtggtcttattgaaacatggaactctcaacaccctgagctgcaatgcgccggtgtcactgtttccaaacgcaccctcaaccgcaacggcctccacttgccatcttactcaccttactccccaaatgatcattgtcgttcaa

SEQ ID NO: 3083 - DNA, 633 bp, Artificial
  Mutations within GlyA3B4 introduced by GmGlyA3B4_T02TALE nuclease
gttcatgtacggttgcagatataaacgaagcatagcttatgtatgaggtgtaacaaaattggaaacaatagccatgcaaggtgaagaatgtcaccaactcagaaacccttcttcattgacgtgtccctcactcactctcctctcttcactataaatcgccactcttcgtgttctccacttcaccaactccttcaaacttattaacactttccttagttcaatatggggaagcccttcttcactctctctctttcttccctttgcttgctactcttgtcgagtaagcaggcgctggagacggtccagcggctgttgccggtgctgtgccaggcccacggcttgaccccccagcaggtctatttacctccagcaagttcaacgagtgccaactcaacaacctcaacgcgttggaacccgaccaccgcgttgagtccgaaggtggtcttattgaaacatggaactctcaacaccctgagctgcaatgcgccggtgtcactgtttccaaacgcacctcaaccgcaacggcctccacttgccatcttactcaccttatccccaaatgatcattgtcgttcaaggtgcgtaatattagtaagaagtatttacagcttaacgtgataacaataatagtaa

SEQ ID NO: 3084 - DNA, 631 bp, Artificial; identical to SEQ ID NO: 2275
  Mutations within GlyA3B4 introduced by GmGlyA3B4_T02TALE nuclease
  misc_feature (530): n is a or c or t or g

SEQ ID NO: 3085 - DNA, 669 bp, Artificial
  Mutations within GlyA3B4 introduced by GmGlyA3B4_T02TALE nuclease
  misc_feature (533): n is a or c or t or g
gttcatgtacggttgcagatataaacgaagcatagcttatgtatgaggtgtaacaaaattggaaacaatagccatgcaaggtgaagaatgtcaccaactcagaaacccttcttcattgacgtgtccctcactcactctcctctcttcactataaaatcgccactcttcgtgttctccacttcaccaactccttcaaacttattaacactttccttagttcaatatggggaagcccttcttcactctctctctttcttccctttgcttgctactcttgtcgagtgcattgctattacctccagcaagttcaacgagtgccaactcaacaacctcaacgcgttggaacccgaccaccgcgttgagtccgaaggtggtcttattgaaacatggaactctcaacaccctgagctgcaatgcgccggtgtcactgtttccaaacgcaccctcaaccgcaacggcctccacttgccatcttactcaccttatccccaaaatgatcattgtcgttcaaggtgcgtaatattagtaagagnatttatcagcttaacgtgataacaataatagtaatatgaaatatttattaaatttttataattaatctctgctagaaaatttgattaatcattttagtagaatttgtttttctcaactaggttttaaaacaccaag

SEQ ID NO: 3086 - DNA, 696 bp, Artificial
  Mutations within GlyA3B4 introduced by GmGlyA3B4_T02TALE nuclease
gttcatgtacggttgcagatataaacgaagcatagcttatgtatgaggtgtaacaaaattggaaacaatagccatgcaaggtgaagaatgtcaccaactcagaaacccttcttcattgacgtgtccctcactcactctcctctcttcactataaatcgccactcttctcgagaattcatacatcccttatcagtatatggacagttatctctcgagcacaggtttaggtttggcctcaatggaaaaaaacggagcacctaacaacgtatcttcacagaccaagaactacgagatcgcccctttcattctggggtttgctattacctccagcaagttcaacgagtgccaactcaacaacctcaacgcgttggaacccgaccaccgcgttgagtccgaaggtggtcttattgaaacatggaactctcaacaccctgagctgcaatgcgccggtgtcactgtttccaaacgcaccctcaaccgcaacggcctccacttgccatcttactcaccttatccccaaatgatcattgtcgttcaaggtgcgtaatattagtaagaagtatttatcagcttaacgtgataacaataatagtaatatgaaaatatttattaaatttttataattaatctctgctagaaaatttgattaatcattttagtagaatttgtttttctcaactaggttttaaaacacca

SEQ ID NO: 3087 - DNA, 622 bp, Artificial
  Mutations within GlyA3B4 introduced by GmGlyA3B4_T02TALE nuclease
gttcatgtacggttgcagatataaacgaagcatagcttatgtatgaggtgtaacaaaattggaaacaatagccatgcaaggtgaagaatgtcaccaactcagaaaccccttcttcattgacgtgtcccctcactcactctcctctcttcactataaatcgccactcttcgtgttctccacttcaccaactccttcaaacttattaacactttccttagttcaatatggggaagcccttcttcactctctctctttcttccctttgcttgctactcttgtcgagtgcatctattacctccagcaagttcaacgagtgccaactcaacaacctcaacgcgttggaacccgaccaccgcgttgagtccgaaggtggtcttattgaaacatggaactctcaacaccctgagctgcaatgcgccggtgtcactgtttccaaacgcaccctcaaccgcaacggcctccacttgccatcttactcaccttatccccaaatgatcattgtcgttcaaggtgcgtaatattagtaagaagtatttatcagcttaacgtgataacaatatagtaatatgaaatatttattaaatttttataattaatctctgctagaaaatttgattaatca

SEQ ID NO: 3088 - DNA, 654 bp, Artificial
  Mutations within GlyA3B4 introduced by GmGlyA3B4_T02TALE nuclease
gttcatgtacggttgcagatataaacgaagcatagcttatgtatgaggtgtaacaaaattggaaacaatagccatgcaaggtgaagaatgtcaccaactcagaaacccttcttcattgacgtgtccctcactcactctcctctcttcactataaatcgccactcttcgtgttctccacttcaccaactccttcaaacttattaacactttccttagttcaatatggggaagcccttcttcactctctctctttcttccctttgcttgctactcttgtcgagtgcatctattacctccagcaagttcaacgagtgccaactcaacaacctcaacgcgttggaacccgaccaccgcgttgagtccgaaggtggtcttattgaaacatggaactctcaacaccctgagctgcaatgcgccggtgtcactgtttccaaacgcaccctcaaccgcaacggcctccacttgccatcttactcaccttatccccaaatgatcattgtcgttcaaggtgcgtaatattagtaagaagtatttatcagcttaacgtgataacaataatagtaatatgaaatatttattaaatttttataattaatctctgctagaaaatttgattaatcattttagtagaatttgttttctcaactaggtttt

SEQ ID NO: 3089 - DNA, 616 bp, Artificial
  Mutations within GlyA3B4 introduced by GmGlyA3B4_T02TALE nuclease
gttcatgtacggttgcagatataaacgaagcatagcttatgtatgaggtgtaacaaaattggaaacaatagccatgcaaggtgaagaatgtcaccaactcagaaacccttcttcattgacgtgtccctcactcactctcctctcttcactataaatcgccactcttcgtgttctccacttcaccaactccttcaaacttattaacactttccttagttcaatatggggaagcccttcttcactctctctctttcttccctttgcttgctactcttgttgtgctattacctccagcaagttcaacgagtgccaactcaacaacctcaacgcgttggaacccgaccaccgcgttgagtccgaaggtggtcttattgaaacatggaactctcaacaccctgagctgcaatgcgccggtgtcactgtttccaaacgcaccctcaaccgcaacggcctccacttgccatcttactcaccttatccccaaatgatcattgtcgttcaaggtgcgtaatattagtaagaagtatttatcagcttaacgtgataacaataatagtaatatgaaatatttattaaatttttataattaatctctgctagaaaatttgattaatca

SEQ ID NO: 3090 - DNA, 667 bp, Artificial
  Mutations within GlyA3B4 introduced by GmGlyA3B4_T02TALE nuclease
gttcatgtacggttgcagatataaacgaagcatagcttatgtatgaggtgtaacaaaattggaaacaatagccatgcaaggtgaagaatgtcaccaactcagaaacccttcttcattgacgtgtccctcactcactctcctctcttcactataaatcgccactcttcgtgttctccacttcaccaactccttcaaacttattaacactttccttagttcaatatggggaagcccttcttcactctctctctttcttccctttgcttgctactcttgtcgagtgcattgctattacctccagcaagttcaacgagtgccaactcaacaacctcaacgcgttggaacccgaccaccgcgttgagtccgaaggtggtcttattgaaacatggaactctcaacaccctgagctgcaatgcgccggtgtcactgtttccaaacgcaccctcaaccgcaacggcctccacttgccatcttactcaccttatccccaaatgatcattgtcgttcaaggtgcgtaatattagtaagaagtatttatcagcttaacgtgataacaatatagtaatatgaaatatttattaaatttttataattaatctctgctagaaaatttgattaatcattttagtagaatttgttttctcaactaggtttttaaaacaccaca

SEQ ID NO: 3091 - DNA, 632 bp, Artificial; identical to SEQ ID NO: 1756
  Mutations within GlyA3B4 introduced by GmGlyA3B4_T02TALE nuclease

SEQ ID NO: 3092 - DNA, 663 bp, Artificial; identical to SEQ ID NO: 2045
  Mutations within GlyA3B4 introduced by GmGlyA3B4_T02TALE nuclease

SEQ ID NO: 3093 - DNA, 639 bp, Artificial; identical to SEQ ID NO: 1826
  Mutations within GlyA3B4 introduced by GmGlyA3B4_T02TALE nuclease

SEQ ID NO: 3094 - DNA, 631 bp, Artificial; identical to SEQ ID NO: 2232
  Mutations within GlyA3B4 introduced by GmGlyA3B4_T02TALE nuclease

SEQ ID NO: 3095 - DNA, 606 bp, Artificial
  Mutations within GlyA3B4 introduced by GmGlyA3B4_T02TALE nuclease
gttcatgtacggttgcagatataaacgaagcatagcttatgtatgaggtgtaacaaaattggaaacaatagccatgcaaggtgaagaatgtcaccaactcagaaacccttcttcattgacgtgtccctcactcactctcctctcttcactataaatcgccactcttcgtgttctccacttcaccaactccttcaaacttattaacactttccttagttcaatatggggaagctttgctattacctccagcaagttcaacgagtgccaactcaacaacctcaacgcgttggaacccgaccaccgcgttgagtccgaaggtggtcttattgaacatggaactctcaacaccctgagctgcaatgcgccggtgtcactgtttccaaacgcaccctcaaccgcaacggcctccacttgccatcttactcaccttatccccaaaatgatcattgtcgttcaaggtgcgtaatattagtaagaagtatttatcagcttacgtgataacaataatagtaatatgaatatttattaaattttttatattaatctctgctagaaaatttgatttaaatctttttagtagtaaatttttgtttttcccaaaactaa

SEQ ID NO: 3096 - DNA, 391 bp, Artificial
  Mutations within GlyA3B4 introduced by GmGlyA3B4_T02TALE nuclease
gttcatgtacggttgcagatataaacgaagcatagcttatgtatgaggtgtaacaaaattggaaacaatagccatgcaaggtgaagaatgtcaccaactcagaaacccttcttcattgacgtgtccctcactcactctcctctcttcactataaatcgccactcttcgtgttctccacttcaccaactccttcaaacttattaacactttccttagttcaatatggggaagcccttcttcactctctctctttcttccctttgcttgctactcacgcgttgaggttgttgagttggcactcgttgaacttgctggaggtaacaataatagtaatatgaaatatttattaaattttttataattaatctctgctagaaaatttgattaatca

SEQ ID NO: 3097 - DNA, 663 bp, Artificial
  Mutations within GlyA3B4 introduced by GmGlyA3B4_T02TALE nuclease
gttcatgtacggttgcagatataaacgaagcatagcttatgtatgaggtgtaacaaaattggaaacaatagccatgcaaggtgaagaatgtcaccaactcagaaacccttcttcattgacgtgtccctcactcactctcctctcttcactataaatcgccactcttcgtgttctccacttcaccaactccttcaaacttattaacactttccttagttcaatatggggaagcccttcttcactctctctctttcttccctttgcttgctactcttgtcgagtgctattacctccagcaagttcaacgagtgccaactcaacaacctcaacgcgttggaacccgaccaccgcgttgagtccgaaggtggtcttattgaaacatggaactctcaacaccctgagctgcaatgcgccggtgtcactgtttccaaacgcaccctcaaccgcaacggcctccacttgccatcttactcaccttatccccaaatgatcattgtcgttcaaggtgcgtaatattagtaagaagtatttatcagcttaacgtgataacaataatagtaatatgaaatatttattaaatttttataattaatctctgctagaaaatttgattaatcatttttagtagaatttgtttttctcaactaggtttttaaaacacca

SEQ ID NO: 3098 - DNA, 693 bp, Artificial
  Mutations within GlyA3B4 introduced by GmGlyA3B4_T02TALE nuclease
gttcatgtacggttgcagatataaacgaagcatagcttatgtatgaggtgtaacaaaattggaaacaatagccatgcaaggtgaagaatgtcaccaactcagaaacccttcttcattgacgtgtccctcactcactctcctctcttcactataaatcgccactcttcgtgttctccacttcaccaactccttcaaacttattaacactttccttagttcaatatggggaagcccttcttcactctctctctttcttccctttgcttgctactcttgtcgagtgcatggtccagcggctgttgccggtgctgtgccaggcccacggcttgctattacctccagcaagttcaacgagtgccaactcaacaacctcaacgcgttggaacccgaccaccgcgttgagtccgaaggtggtcttattgaaaacatggaactctcaacaccctgagctgcaatgcgccggtgtcactgtttccaaacgcaccctcaaccgcaacggcctccacttgccatcttactcaccttatccccaaatgatcattgtcgttcaaggtgcgtaatattagtaagaagtatttatcagcttaacgtgataacaataatagtaatatgaaatatttattaaaattttttataaattaatctctgctagaaaatttgaattaatcatttttagtagaatttgtttttctc

SEQ ID NO: 3099 - DNA, 636 bp, Artificial; identical to SEQ ID NO: 1885
  Mutations within GlyA3B4 introduced by GmGlyA3B4_T02TALE nuclease

SEQ ID NO: 3100 - DNA, 634 bp, Artificial
  Mutations within GlyA3B4 introduced by GmGlyA3B4_T02TALE nuclease
gttcatgtacggttgcagatataaacgaagcatagcttatgtatgaggtgtaacaaaattggaaacaatagccatgcaaggtgaagaatgtcaccaactcagaaacccttcttcattgacgtgtccctcactcactctcctctcttcactataaatcgccactcttcgtgttctccacttcaccaactccttcaaacttattaacactttccttagttcaatatggggaagcccttcttcactctctctctttcttccctttgcttgctactcttgtcgagtgctattacctccagcaagttcaacgagtgccaactcaacaacctcaacgcgttggaacccgaccaccgcgttgagtccgaaggtggtcttattgaaacatggaactctcaacaccctgagctgcaatgcgccggtgtcactgtttccaaacgcaccctcaaccgcaacggcctccacttgccatcttactcaccttatcccccaaatgatcattgtcgttcaaggtgcgtaatattagtaagaagtatttatcagcttaacgtgataacaataatagtaatatgaaatatttattaaatttttataattaatctctgctagaaaatttgattaatcattttagtagaatttg

SEQ ID NO: 3101 - DNA, 640 bp, Artificial; identical to SEQ ID NO: 2042
  Mutations within GlyA3B4 introduced by GmGlyA3B4_T02TALE nuclease

SEQ ID NO: 3102 - DNA, 663 bp, Artificial; identical to SEQ ID NO: 1819
  Mutations within GlyA3B4 introduced by GmGlyA3B4_T02TALE nuclease

SEQ ID NO: 3103 - DNA, 646 bp, Artificial
  Mutations within GlyA3B4 introduced by GmGlyA3B4_T02TALE nuclease
gttcatgtacggttgcagatataaacgaagcatagcttatgtatgaggtgtaacaaaattggaaacaatagccatgcaaggtgaagaatgtcaccaactcagaaacccttcttcattgacgtgtccctcactcactctcctctcttcactataaatcgccactcttcgtgttctccacttcaccaactccttcaaacttattaacactttccttagttcaatatggggaagcccttcttcactctctctctttcttccctttgcttgctactcttgtcgagtgtattacctccagcaagttcaacgagtgccaactcaacaacctcaacgcgttggaacccgaccaccgcgttgagtccgaaggtggtcttattgaaacatggaactctcaacaccctgagctgcaatgcgccggtgtcactgtttccaaacgcaccctcaaccgcaacggcctccacttgccatcttactcaccttatccccaaatgatcattgtcgttcaaggtgcgtaatattagtaagaagtatttatcagcttaacgtgataacaataatagtaatatgaaatatttattaaatttttataattaatctctgctagaaaatttgattaatcattttagtagaatttgttttctcaactagg

SEQ ID NO: 3104 - DNA, 661 bp, Artificial
  Mutations within GlyA3B4 introduced by GmGlyA3B4_T02TALE nuclease
gttcatgtacggttgcagatataaacgaagcatagcttatgtatgaggtgtaacaaaattggaaacaatagccatgcaaggtgaagaatgtcaccaactcagaaacccttcttcattgacgtgtccctcactcactctcctctcttcactataaatcgccactcttcgtgttctccacttcaccaactccttcaaacttattaacactttccttagttcaatatggggaagcccttcttcactctctctctttcttccctttgcttgctactcttgtcgtgctattacctccagcaagttcaacgagtgccaactcaacaacctcaacgcgttggaacccgaccaccgcgttgagtccgaaggtggtcttattgaaacatggaactctcaacaccctgagctgcaatgcgccggtgtcactgtttccaaacgcacccctcaaccgcaacggcctccacttgccatcttactcaccttatcccccaaagatcattgtcgttcaaggtgcgtaatattagtaagaagtatttatcagcttaacgtgataacaataatagtaatatgaaatatttattaaatttttataattaatctctgctagaaaatttgattaatcatttttagtagaatttgtttttctcaactaggttttaaaacacca

SEQ ID NO: 3105 - DNA, 580 bp, Artificial
  Mutations within GlyA3B4 introduced by GmGlyA3B4_T02TALE nuclease
gttcatgtacggttgcagatataaacgaagcatagcttatgtatgaggtgtaacaaaattggaaacaatagccatgcaaggtgaagaatgtcaccaactcagaaacccttcttcattgacgtgtccctcactcactctcctctcttcactataaatcgccactcttcgtgttctccacttcaccaactccttcaaacttattaacactttccttagttcaatatggggaagcccttcttcactctctctctttcttccctttgcttgctactcttgtcgagtgcattatctttccacttttcttaaaaaaaaataattttttatttcatttattttgttcttggattctcttttgaattgtgttttgatttgaatttacgaatttatattacctccagcaagttcaacgagtgccaactcaacaacctcaacgcgttggaacccgaccaccgcgttgagtccgaaggtggtcttattgaaacatggaactctcaacaccctgagctgcaatgcgccggtgtcactgtttccaaacgcaccctcaaccgcaacggcctccacttgccatcttactcacctt

SEQ ID NO: 3106 - DNA, 649 bp, Artificial
  Mutations within GlyA3B4 introduced by GmGlyA3B4_T02TALE nuclease
gttcatgtacggttgcagatataaacgaagcatagcttatgtatgaggtgtaacaaaattggaaacaatagccatgcaaggtgaagaatgtcaccaactcagaaacccttcttcattgacgtgtccctcactcactctcctctcttcactataaatcgccactcttcgtgttctccacttcaccaactccttcaaacttattaacactttccttagttcaatatggggaagcccttcttcactctctctctttcttccctttgctattacctccagcaagttcaacgagtgccaactcaacaacctcaacgcgttggaacccgaccaccgcgttgagtccgaaggtggtcttattgaaacatggaactctcaacaccctgagctgcaatgcgccggtgtcactgtttccaaacgcaccctcaaccgcaacggcctccacttgccatcttactcaccttatccccaaatgatcattgtcgttcaaggtgcgtaatattagtaagaagtatttatcagcttaacgtgataacaataatagtaatatgaaatatttattaaattttttataattaattctctgctagaaaatttgattaatcatttttagtagaatttgttttttctcaactagggtttttaaaacaccaca

SEQ ID NO: 3107 - DNA, 632 bp, Artificial; identical to SEQ ID NO: 1756
  Mutations within GlyA3B4 introduced by GmGlyA3B4_T02TALE nuclease

SEQ ID NO: 3108 - DNA, 654 bp, Artificial; identical to SEQ ID NO: 2225
  Mutations within GlyA3B4 introduced by GmGlyA3B4_T02TALE nuclease

SEQ ID NO: 3109 - DNA, 682 bp, Artificial
  Mutations within GlyA3B4 introduced by GmGlyA3B4_T02TALE nuclease
gttcatgtacggttgcagatataaacgaagcatagcttatgtatgaggtgtaacaaaaattggaaacaatagccatgcaaggtgaagaatgtcaccaactcagaaaccccttcttcattgacgtgtccctcactcactctcctctcttcactataaatcgccactcttcgtgttctccacttcaccaactccttcaaacttattaacactttccttagttcaatatggggaagcccttcttcactctctctctttcttccctttgcttgctactcttgtcgagtgcatgattgcaaaacgtggcggcgtgaccgcagtggaggcagtgcatgcatggcgcaatgcactgacgggtgccccgcttattacctccagcaagttcaacgagtgccaactcaacaacctcaacgcgttggaacccgaccaccgcgttgagtccgaaaggtggtcttattgaaacatggaactctcaacaccctgagctgcaatgcgccggtgtcactgtttccaaacgcaccctcaaccgcaacggcctccacttgccatcttactcaccttatccccaaatgatcattgtcgttcaaggtgcgtaatattagtaagaagtattatcagcttaacgtgataacaataatagtaatatgaaatatttattaaattttttataattaatctctgctag

SEQ ID NO: 3110 - DNA, 669 bp, Artificial
  Mutations within GlyA3B4 introduced by GmGlyA3B4_T02TALE nuclease
gttcatgtacggttgcagatataaacgaagcatagcttatgtatgaggtgtaacaaaattggaaacaatagccatgcaaggtgaagaatgtcaccaactcagaaacccttcttcattgacgtgtccctcactcactctcctctcttcactataaatcgccactcttcgtgttctccacttcaccaactccttcaaacttattaacactttccttagttcaatatggggaagcccttcttcactctctctctttcttccctttgcttgctactcttgtcgagtgcatgctattacctccagcaagttcaacgagtgccaactcaacaacctcaacgcgttggaacccgaccaccgcgttgagtccgaaggtggtcttattgaaacatggaactctcaacaccctgagctgcaatgcgccggtgtcactgtttccaaacgcaccctcaaccgcaacggcctccacttgccatcttactcaccttatccccaaatgatcattgtcgttcaaggtgcgtaatattagtaagaagtatttatcagcttaacgtgataacaataatagtaatatgaaaatatttattaaatttttataattaatctctgctagaaaatttgattaatcattttagtagaatttgtttttctcaactaggtttttaaaacaccaca

SEQ ID NO: 3111 - DNA, 593 bp, Artificial
  Mutations within GlyA3B4 introduced by GmGlyA3B4_T02TALE nuclease
gttcatgtacggttgcagatataaacgaagcatagcttatgtatgaggtgtaacaaaaattggaaacaatagccatgcaaggtgaagaatgtcaccaactcagaaacccttcttcattgacgtgtccctcactcactctcctctcttcactataaatcgccactcttcgtgttctccacttcaccaactccttcaaacttattaacactttccttagttcaatatggggaagcccttcttcactctctctctttcttccctttgcttgctactcttgtcgagtgcttctccagcaagttcaacgagtgccaactcaacaacctcaacgcgttggaacccgaccaccgcgttgagtccgaaggtggtcttattgaaacatggaactctcaacaccctgagctgcaatgcgccggtgtcactgtttccaaacgcaccctcaaccgcaacggcctccacttgccatcttactcaccttatccccaaatgatcattgtcgttcaaggtgcgtaatattagtaagaagtatttatcagcttaacgtgataacaataatagtaatatgaaatatttattaaattttttataattaatct

SEQ ID NO: 3112 - DNA, 703 bp, Artificial
  Mutations within GlyA3B4 introduced by GmGlyA3B4_T02TALE nuclease
gttcatgtacggttgcagatataaacgaagcatagcttatgtatgaggtgtaacaaaattggaaacaatagccatgcaaggtgaagaatgtcaccaactcagaaacccttcttcattgacgtgtccctcactcactctcctctcttcactataaatcgccactcttcgtgttctccacttcaccaactccttcaaacttattaacactttccttagttcaatatggggaagcccttcttcactctctctctttcttccctttgcttgctactcttgtcgagtgcatccagcggctgttgccggtgctgtgccaggcccacggcttgacccccccagcaggtggtggcccatcgctttgctattacctccagcaagttcaacgagtgccaactcaacaacctcaacgcgttggaacccgaccaccgcgttgagtccgaaggtggtcttattgaaacatggaactctcaacaccctgagctgcaatgcgccggtgtcactgtttccaaacgcaccctcaaccgcaacggcctccacttgccatcttactcaccttatccccaaatgatcattgtcgttcaaggtgcgtaatattagtaagaagtatttatcagcttaacgtgataacaataatagtaatatgaaaatatttattaaattttttataattaatctctgctagaaaaatttgattaatcatttttag

SEQ ID NO: 3113 - DNA, 634 bp, Artificial; identical to SEQ ID NO: 1893
  Mutations within GlyA3B4 introduced by GmGlyA3B4_T02TALE nuclease

SEQ ID NO: 3114 - DNA, 651 bp, Artificial; identical to SEQ ID NO: 2803
  Mutations within GlyA3B4 introduced by GmGlyA3B4_T02TALE nuclease

SEQ ID NO: 3115 - DNA, 597 bp, Artificial
  Mutations within GlyA3B4 introduced by GmGlyA3B4_T02TALE nuclease
gttcatgtacggttgcagatataaacgaagcatagcttatgtatgaggtgtaacaaaattggaaacaatagccatgcaaggtgaagaatgtcaccaactcagaaacccttcttcattgacgtgtccctcactcactctcctctcttcactataaatcgccactcttcgtgttctccacttcaccaactccttcaaacttattaacactttccttagttcaatatggggaagcccttcttcactctctctcttactattacctccagcaagttcaacgagtgccaactcaacaacctcaacgcgttggaacccgaccaccgcgttgagtccgaaggtggtcttattgaaacatggaactctcaacaccctgagctgcaatgcgccggtgtcactgtttccaaacgcaccctcaaccgcaacggcctccacttgccatcttactcaccttatccccaaatgatcattgtcgttcaaggtgcgtaatattagtaagaagtatttatcagcttaacgtgataacaataatagtaatatgaaatatttattaatttttataattaatctctgctagaaaatttgattaatcatttttagtag

SEQ ID NO: 3116 - DNA, 645 bp, Artificial
  Mutations within GlyA3B4 introduced by GmGlyA3B4_T02TALE nuclease
gttcatgtacggttgcagatataaacgaagcatagcttatgtatgaggtgtaacaaaattggaaacaatagccatgcaaggtgaagaatgtcaccaactcagaaacccttcttcattgacgtgtccctcactcactctcctctcttcactataaatcgccactcttcgtgttctccacttcaccaactccttcaaacttattaacactttccttagttcaatatggggaagcccttcttcactctctctctttcttccctttgcttgctactcttgtcgagtgcatccagcaagttcaacgagtgccaactcaacaacctcaacgcgttggaacccgaccaccgcgttgagtccgaaggtggtcttattgaaacatggaactctcaacaccctgagctgcaatgcgccggtgtcactgtttccaaacgcaccctcaaccgcaacggcctccacttgccatcttactcaccttatcccccaaatgatcattgtcgttcaaggtgcgtaaatattagtaagaagtatttatcagcttaacgtgataacaataatagtaatatgaaatatttattaaattttttataattaatctctgctagaaaatttgattaatctttttagtagaattgttttttctcaactagg

SEQ ID NO: 3117 - DNA, 650 bp, Artificial; identical to SEQ ID NO: 2588
  Mutations within GlyA3B4 introduced by GmGlyA3B4_T02TALE nuclease

SEQ ID NO: 3118 - DNA, 637 bp, Artificial
  Mutations within GlyA3B4 introduced by GmGlyA3B4_T02TALE nuclease
  misc_feature (532): n is a or c or t or g
gttcatgtacggttgcagatataaacgaagcatagcttatgtatgaggtgtaacaaaattggaaacaatagccatgcaaggtgaagaatgtcaccaactcagaaacccttcttcattgacgtgtccctcactcactctcctctcttcactataaatcgccactcttcgtgttctccacttcaccaactccttcaaacttattaacactttccttagttcaatatgggggaagcccttcttcactctctctctttcttccctttgcttgctactcttgtcgagtgcatgctattacctccagcaatgttcaacgagtgccaactcaacaacctcaacgcgttggaacccgaccaccgcgttgagtccgaaggtggtcttattgaaacatggaactctcaacaccctgagctgcaatgcgccggtgtcactgtttccaaacgcaccctcaaccgcaacggcctccacttgccatcttactcaccttatccccaaatgatcattgtcgttcaaggtgcgtaatattagtaagagnatttatcagcttaacgtgataacaatatagtaatatgaaatatttattaaatttttataattaatctctgctagaaaatttgattaatcattttagtagaatttg

SEQ ID NO: 3119 - DNA, 646 bp, Artificial
  Mutations within GlyA3B4 introduced by GmGlyA3B4_T02TALE nuclease
gttcatgtacggttgcagatataaacgaagcatagcttatgtatgaggtgtaacaaaattggaaacaatagccatgcaaggtgaagaatgtcaccaactcagaaacccttcttcattgacgtgtccctcactcactctcctctcttcactataaatcgccactcttcgtgttctccacttcaccaactccttcaaacttattaacactttccttagttcaatatggggaagcccttcttcactctctctctttcttccctttgctattacctccagcaagttcaacgagtgccaactcaacaacctcaacgcgttggaacccgaccaccgcgttgagtccgaaggtggtcttattgaaacatggaactctcaacacccctgagctgcaatgcgccggtgtcactgtttccaaacgcaccctcaaccgcaacggcctccacttgccatcttactcaccttatccccaaatgatcattgtcgttcaaggtgcgtaatattagtaagaagtatttatcagcttaacgtgataacaataatagtaatatgaaatatttattaaattttttataattaatctctgctagaaaatttgattaatcatttttagtagaatttgttttttctcaactaggttttaaaacaccac

SEQ ID NO: 3120 - DNA, 661 bp, Artificial; identical to SEQ ID NO: 1694
  Mutations within GlyA3B4 introduced by GmGlyA3B4_T02TALE nuclease

SEQ ID NO: 3121 - DNA, 632 bp, Artificial; identical to SEQ ID NO: 1756
  Mutations within GlyA3B4 introduced by GmGlyA3B4_T02TALE nuclease

SEQ ID NO: 3122 - DNA, 697 bp, Artificial
  Mutations within GlyA3B4 introduced by GmGlyA3B4_T02TALE nuclease
gttcatgtacggttgcagatataaacgaagcatagcttatgtatgaggtgtaacaaaattggaaacaatagccatgcaaggtgaagaatgtcaccaactcagaaacccttcttcattgacgtgtccctcactcactctcctctcttcactataaatcgccactcttcgtgttctccacttcaccaactccttcaaacttattaacactttccttagttcaatatggggaagcccttcttcactctctctctttcttccctttgcttgctactcttgtcgagtgcatccagcggctgttgccggtgctgtgccaggcccacggcttgaccccccagcaggtggtggccatcgccagcaataatggtggcaagcaggcgctgctattacctccagcaagttcaacgagtgccaactcaacaacctcaacgcgttggaacccgaccaccgcgttgagtccgaaggtggtcttattgaaacatggaactctcaacaccctgagctgcaatgcgccggtgtcactgtttccaaacgcaccctcaaccgcaacggcctccacttgccatcttactcaccttatccccaaatgatcattgtcgttcaaggtgcgtaatattagtaagaagtatttatcagcttaacgtgatacaataatagtaatatgaaatattattaaattttttataattaatctcgctag

SEQ ID NO: 3123 - DNA, 631 bp, Artificial
  Mutations within GlyA3B4 introduced by GmGlyA3B4_T02TALE nuclease
gttcatgtacggttgcagatataaacgaagcatagcttatgtatgaggtgtaacaaaattggaaacaatagccatgcaaggtgaagaatgtcaccaactcagaaacccttcttcattgacgtgtccctcactcactctcctctcttcactataaatcgccactcttcgtgttctccacttcaccaactccttcaaacttattaacactttccttagttcaatatggggaagcccttcttcactctctctctttcttccctttgcttgctattacctccagcaagttcaacgagtgccaactcaacaacctcaacgcgttggaacccgaccaccgcgttgagtccgaaggtggtcttattgaaacatggaactctcaacaccctgagctgcaatgcgccggtgtcactgtttccaaacgcaccctcaaccgcaacggcctccacttgccatcttactcaccttatccccaaatgatcattgtcgttcaaggtgcgtaatattagtaagaagtatttatcagcttaacgtgataacaataatagtaatatgaaatatttattaaattttttataattaatctctgctagaaaatttgattaatcatttttagtagaatttgttttttctcaac

SEQ ID NO: 3124 - DNA, 657 bp, Artificial
  Mutations within GlyA3B4 introduced by GmGlyA3B4_T02TALE nuclease
gttcatgtacggttgcagatataaacgaagcatagcttatgtatgaggtgtaacaaaattggaaacaatagccatgcaaggtgaagaatgtcaccaactcagaaacccttcttcattgacgtgtccctcactcactctcctctcttcactataaatcgccactcttcgtgttctccacttcaccaactccttcaaacttattaacactttccttagttcaatatggggaagcccttcttcactctctctctttcttccctttgcttgctactcttgtcgagtgttacctccagcaagttcaacgagtgccaactcaacaacctcaacgcgttggaacccgaccaccgcgttgagtccgaaggtggtcttattgaaacatggaactctcaacaccctgagctgcaatgcgccggtgtcactgtttccaaacgcaccctcaaccgcaacggcctccacttgccatcttactcaccttatccccaaatgatcattgtcgttcaaggtgcgtaatattagtaagaagtatttatcagcttaacgtgataacaataatagtaatatgaaatatttattaaatttttataattaatctctgctagaaaatttgattaatcattttagtagaatttgttttctcaactaggttttaaaacacca

SEQ ID NO: 3125 - DNA, 616 bp, Artificial
  Mutations within GlyA3B4 introduced by GmGlyA3B4_T02TALE nuclease
gttcatgtacggttgcagatataaacgaagcatagcttatgtatgaggtgtaacaaaattggaaacaatagccatgcaaggtgaagaatgtcaccaactcagaaacccttcttcattgacgtgtccctcactcactctcctctcttcactataaatcgccactcttcgtgttctccacttcaccaactccttcaaacttattaacactttccttagttcaatatggggaagcccttcttcactctctctctttcgttcctccagcaagttcaacgagtgccaactcaacaacctcaacgcgtggaaccgaccaccgcgttgagtccgaaggtggtcttattgaaacatggaactctcaacaccctgagctgcaatgcgccggtgtcactgtttccaaacgcaccctcaaccgcaacggcctccacttgccatcttactcaccttatccccaaatgatcattgtcgttcaaggtgcgtaatattagtaagaagtatttatcagcttaacgtgataacaataatagtaatatgaaatatttattaaattttttataattaatctctgctagaaaatttgattaatcatttttagtagaatttgtttttctcaactagg

SEQ ID NO: 3126 - DNA, 648 bp, Artificial
  Mutations within GlyA3B4 introduced by GmGlyA3B4_T02TALE nuclease
gttcatgtacggttgcagatataaacgaagcatagcttatgtatgaggtgtaacaaaattggaaacaatagccatgcaaggtgaagaatgtcaccaactcagaaacccttcttcattgacgtgtccctcactcactctcctctcttcactataaatcgccactcttcgtgttctccacttcaccaactccttcaaacttattaacactttccttagttcaatatggggaagcccttcttcactctctctctttcttccctttgcttgctactcttgtcgagtgctgctattacctccagcaagttcaacgagtgccaactcaacaacctcaacgcgttggaacccgaccaccgcgttgagtccgaaggtggtcttattgaaacatggaactctcaacaccctgagctgcaatgcgccggtgtcactgtttccaaacgcaccctcaaccgcaacggcctccacttgccatcttactcaccttatccccaaatgatcattgtcgttcaaggtgcgtaatattagtaagagtatttatcagcttaacgtgataacaatatagtaatatgaaatatttattaaatttttataattaatctctgctagaaaatttgattaatcattttagtagaatttgttttctcaactagg

SEQ ID NO: 3127 - DNA, 661 bp, Artificial; identical to SEQ ID NO: 2035
  Mutations within GlyA3B4 introduced by GmGlyA3B4_T02TALE nuclease

SEQ ID NO: 3128 - DNA, 658 bp, Artificial
  Mutations within GlyA3B4 introduced by GmGlyA3B4_T02TALE nuclease
  misc_feature (530): n is a or c or t or g
gttcatgtacggttgcagatataaacgaagcatagcttatgtatgaggtgtaacaaaattggaaacaatagccatgcaaggtgaagaatgtcaccaactcagaaacccttcttcattgacgtgtccctcactcactctcctctcttcactataaatcgccactcttcgtgttctccacttcaccaactccttcaaacttattaacactttccttagttcaatatggggaagcccttcttcactctctctctttcttccctttgcttgctactcttgtcgagtgcatgctattacctccagcaagttcaacgagtgccaactcaacaacctcaacgcgttggaacccgaccaccgcgttgagtccgaaggtggtcttattgaaacatggaactctcaacaccctgagctgcaatgcgccggtgtcactgtttccaaacgcaccctcaaccgcaacggcctccacttgccatcttactcaccttatccccaaatgatcattgtcgttcaaggtgcgtaatattagtaagagnatttatcagcttaacgtgataacaataatagtaatatgaaatatttattaaatttttcataattaatctctgctagaaaatttgattaatcattttagtagaatttgttttctcaactaggttttaaa

SEQ ID NO: 3129 - DNA, 484 bp, Artificial
  Mutations within GlyA3B4 introduced by GmGlyA3B4_T02TALE nuclease
gttcatgtacggttgcagatataaacgaagcatagcttatgtatgaggtgtaacaaaattggaaacaatagccatgcaaggtgaagaatgtcaccaactcagaaacccttcttcattgacgtgtccctcactcactctcctctcttcactataaatcgccactcttcgtgttctccacttcaccaactccttcaaacttattaacactttccttagttcaatatggggaagcccttcttcactctctctctttcttccctttgcttgctactcttgtcgagtgctttgctattaccttccagcaagttcaacgagtgccaactcaacacctcaacgcgttggaaccgaccaccgcgttgagtccgaaggtggtcttattgaaacatggaactctcaacaccctgagctgcaatgcgccggtgtcactgtttccaaacgcaccctcaaccgcaacggcctccacttgccatcttactcaccttat

SEQ ID NO: 3130 - DNA, 652 bp, Artificial
  Mutations within GlyA3B4 introduced by GmGlyA3B4_T02TALE nuclease
  misc_feature (531): n is a or c or t or g
gttcatgtacggttgcagatataaacgaagcatagcttatgtatgaggtgtaacaaaattggaaacaatagccatgcaaggtgaagaatgtcaccaactcagaaaccccttcttcattgacgtgtccctcactcactctcctctcttcactataaatcgccactcttcgtgttctccacttcaccaactccttcaaacttattaacactttccttagttcaatatggggaagcccttcttcactctctctctttcttccctttgcttgctactcttgtcgagtgcatgctattacctccagcaagttcaacgagtgccaactcaacaacctcaacgcgttggaacccgaccaccgcgttgagtccgaaggtggtcttattgaaacatggaactctcaacaccctgagctgcaatgcgccggtgtcactgtttccaaacgcaccctcaaccgcaacggcctccacttgccatcttactcaccttatccccaaatgatcattgtcgttcaaggtgcgtaatattagtaagagnatttatcagcttaacgtgataacaataatagtaatatgaaatatttattaaatttttataattaatctctgctagaaaatttgattaatcattttagtagaatttgtttttctcaactagg

SEQ ID NO: 3131 - DNA, 664 bp, Artificial
  Mutations within GlyA3B4 introduced by GmGlyA3B4_T02TALE nuclease
gttcatgtacggttgcagatataaacgaagcatagcttatgtatgaggtgtaacaaaattggaaacaatagccatgcaaggtgaagaatgtcaccaactcagaaacccttcttcattgacgtgtccctcactcactctcctctcttcactataaatcgccactcttcgtgttctccacttcaccaactccttcaaacttattaacactttccttagttcaatatggggaagcccttcttcactctctctctttcttccctttgcttgctactcttgtcgacttgctattacctccagcaagttcaacgagtgccaactcaacaacctcaacgcgttggaacccgaccaccgcgttgagtccgaaggtggtcttattgaaacatggaactctcaacaccctgagctgcaatgcgccggtgtcactgtttccaaacgcaccctcaaccgcaacggcctccacttgccatcttactcaccttatccccaaatgatcattgtcgttcaaggtgcgtaatattagtaagagtatttatcagcttaacgtgataacaataatagtaatatgaaatatttattaaatttttataattaatctctgctagaaaatttgattaatcattttagtagaatttgtttttctcaactaggtttttaaaacaccaca

SEQ ID NO: 3132 - DNA, 670 bp, Artificial
  Mutations within GlyA3B4 introduced by GmGlyA3B4_T02TALE nuclease
gttcatgtacggttgcagatataaacgaagcatagcttatgtatgaggtgtaacaaaattggaaacaatagccatgcaaggtgaagaatgtcaccaactcagaaacccttcttcattgacgtgtccctcactcactctcctctcttcactataaatcgccactcttcgtgttctccacttcaccaactccttcaaacttattaacactttccttagttcaatatggggaagcccttcttcactctctctctttcttccctttgcttgctactcttgtcgagtgcaattctcactacctcagtcaagttatcgcagtgccaactacaaccaacctcaacgcgttggaacccgaccaccgcgttgagtccgaaggtggtcttattgaaacatggaactctcaacaccctgagctgcaatgcgccggtgtcactgtttccaaacgcaccctcaaccgcaacggcctccacttgccatcttactcaccttatcccccaaatgatcattgtcgttcaaggtgcgtaatattagtaagaagtatttatcagcttaacgtgataacaataatagtaatatgaaatatttattaaatttttataattaatctctgctagaaaatttgattaatcatttttagtagaatttgtttttctcaactaggttttaaacacca

SEQ ID NO: 3133 - DNA, 651 bp, Artificial
  Mutations within GlyA3B4 introduced by GmGlyA3B4_T02TALE nuclease
gttcatgtacggttgcagatataaacgaagcatagcttatgtatgaggtgtaacaaaattggaaacaatagccatgcaaggtgaagaatgtcaccaactcagaaacccttcttcattgacgtgtccctcactcactctcctctcttcactataaatcgccactcttcgtgttctccacttcaccaactccttcaaacttattaacactttccttagttcaatatggggaagcccttcttcactctctctctttcttccctttgcttgctactcttgtcgagtgcatgctattacctccagcaagttcaacgagtgccaactcaacaacctcaacgcgttggaacccgaccaccgcgttgagtccgaaggtggtcttattgaaacatggaactctcaacaccctgagctgcaatgcgccggtgtcactgtttccaaacgcaccctcaaccgcaacggcctccacttgccatcttactcaccttatccccaaatgatcattgtcgttcaaggtgcgtaatattagtaagaagtatttatcagcttaacgtgataacaatatagtaatatgaaatatttattaaatttttataattaatctctgctagaaaatttgattaatcattttagtagaatttgtttttctcaactagg

SEQ ID NO: 3134 - DNA, 641 bp, Artificial
  Mutations within GlyA3B4 introduced by GmGlyA3B4_T02TALE nuclease
gttcatgtacggttgcagatataaacgaagcatagcttatgtatgaggtgtaacaaaaattggaaacaatagccatgcaaggtgaagaatgtcaccaactcagaaaccccttcttcattgacgtgtcccctcactcactctcctctcttcactataaatcgccactcttcgtgttctccacttcaccaactccttcaaacttattaacactttccttagttcaatatggggaagcccttcttcactctctctctttcttccctttgcttgctactcttgtcgagtgcattgctattacctccagcaagttcaacgagtgccaactcaacaacctcaacgcgttggaacccgaccaccgcgttgagtccgaaggtggtcttattgaaacatggaactctcaacaccctgagctgcaatgcgccggtgtcactgtttccaaacgcaccctcaaccgcaacggcctccacttgccatcttactcaccttatccccaaatgatcattgtcgttcaaggtgcgtaatattagtaagaagtatttatcagcttaacgtgataacaataatagtaatatgaaatatttattaaatttttataattaatctctgctagaaaatttgattaatcattttagtagaatttg

SEQ ID NO: 3135 - DNA, 634 bp, Artificial
  Mutations within GlyA3B4 introduced by GmGlyA3B4_T02TALE nuclease
  misc_feature (529): n is a or c or t or g
gttcatgtacggttgcagatataaacgaagcatagcttatgtatgaggtgtaacaaaattggaaacaatagccatgcaaggtgaagaatgtcaccaactcagaaacccttcttcattgacgtgtccctcactcactctcctctcttcactataaatcgccactcttcgtgttctccacttcaccaactccttcaaacttattaacactttccttagttcaatatggggaagcccttcttcactctctctctttcttccctttgcttgctactcttgtcgagtgcagctattacctccagcaagttcaacgagtgccaactcaacaacctcaacgcgttggaacccgaccaccgcgttgagtccgaaggtggtcttattgaaacatggaactctcaacaccctgagctgcaatgcgccggtgtcactgtttccaaacgcaccctcaaccgcaacggcctccacttgccatcttactcaccttatccccaaatgatcattgtcgttcaaggtgcgtaatattagtaagagnatttatcagcttaacgtgataacaatatagtaatatgaaatatttattaaatttttataattaatctctgctagaaaatttgattaatcattttagtagaatttg

SEQ ID NO: 3136 - DNA, 656 bp, Artificial
  Mutations within GlyA3B4 introduced by GmGlyA3B4_T02TALE nuclease
  misc_feature (283): n is a or c or t or g
gttcatgtacggttgcagatataaacgaagcatagcttatgtatgaggtgtaacaaaattggaaacaatagccatgcaaggtgaagaatgtcaccaactcagaaacccttcttcattgacgtgtccctcactcactctcctctcttcactataaatcgccactcttcgtgttctccacttcaccaactccttcaaacttattaacactttccttagttcaatatggggaagcccttcttcactctctctctttcttccctttgcttgctactcttgtcgagtntacctccagcaagttcaacgagtgccaactcaacaacctcaacgcgttggaacccgaccaccgcgttgagtccgaaggtggtcttattgaaacatggaactctcaacaccctgagctgcaatgcgccggtgtcactgtttccaaacgcaccctcaaccgcaacggcctccacttgccatcttactcaccttatccccaaatgatcattgtcgttcaaggtgcgtaatattagtaagaagtatttatcagcttaacgtgataacaataatagtaatatgaaatatttattaaatttttataattaatctctgctagaaaatttgattaatcattttagtagaatttgttttctcaactaggttttaaaacacca

SEQ ID NO: 3137 - DNA, 524 bp, Artificial
  Mutations within GlyA3B4 introduced by GmGlyA3B4_T02TALE nuclease
gttcatgtacggttgcagatataaacgaagcatagcttatgtatgaggtgtaacaaaattggaaacaatagccatgcaaggtgaagaatgtcaccaactcagaaacccttcttcattgacgtgtccctcactcactctcctctcttcactataaatcgccactcttcgtgttctccacttcaccaactccttcaaacttattaacactttccttagttcaatatggggaagcccttcttcactctctctctttcttccctttgcgggtccgaaggtggtcttattgaaacatggaactctcaacaccctgagctgcaatgcgccggtgtcactgtttccaaacgcaccctcaaccgcaacggcctccacttgccatcttactcaccttatccccaaatgatcattgtcgttcaaggtgcgtaatattagtaagaagtatttatcagcttaacgtgataacaataatagtaatatgaaatatttattaaattttttataattaatctctgctagaaaatttgatt

SEQ ID NO: 3138 - DNA, 623 bp, Artificial
  Mutations within GlyA3B4 introduced by GmGlyA3B4_T02TALE nuclease
gttcatgtacggttgcagatataaacgaagcatagcttatgtatgaggtgtaacaaaattggaaacaatagccatgcaaggtgaagaatgtcaccaactcagaaacccttcttcattgacgtgtccctcactcactctcctctcttcactataaatcgccactcttcgtgttctccacttcaccaactccttcaaacttattaacactttccttagttcaatatggggaagcccttcttcactctctctctttcttccagcaagttcaacgagtgccaactcaacaacctcaacgcgttggaacccgaccaccgcgttgagtccgaaggtggtcttattgaaacatggaactctcaacaccctgagctgcaatgcgccggtgtcactgtttccaaacgcaccctcaaccgcaacggcctccacttgccatcttactcaccttatccccaaatgatcattgtcgttcaaggtgcgtaatattagtaagaagtatttatcagcttaacgtgataacaataatagtaatatgaaatatttattaattttttataattaatctctgctagaaatttgattaatcatttttagtagaatttgtttttctcaactaggtttttaaaaca

SEQ ID NO: 3139 - DNA, 655 bp, Artificial
  Mutations within GlyA3B4 introduced by GmGlyA3B4_T02TALE nuclease
gttcatgtacggttgcagatataaacgaagcatagcttatgtatgaggtgtaacaaaattggaaacaatagccatgcaaggtgaagaatgtcaccaactcagaaaccccttcttcattgacgtgtccctcactcactctcctctctcactataaatcgccactcttcgtgttctccacttcaccaactccttcaaacttattaacactttccttagttcaatatggggaagcccttcttcactctctctctttcttccctttgcttgctactcttgtcgagtgcatgcattacctccagcaagttcaacgagtgccaactcaacaacctcaacgcgttggaacccgaccaccgcgttgagtccgaaggtggtcttattgaaacatggaactctcaacaccctgagctgcaatgcgccggtgtcactgtttccaaacgcaccctcaaccgcaacggcctccacttgccatcttactcaccttatcccccaaatgatcattgtcgttcaaggtgcgtaatattagtaagaagtatttatcagcttaacgtgataacaataatagtaatatgaaatatttattaaatttttataattaatctctgctagaaaatttgattaatcattttagtagaatttgttttctcaactaggtttt

SEQ ID NO: 3140 - DNA, 653 bp, Artificial
  Mutations within GlyA3B4 introduced by GmGlyA3B4_T02TALE nuclease
gttcatgtacggttgcagatataaacgaagcatagcttatgtatgaggtgtaacaaaattggaaacaatagccatgcaaggtgaagaatgtcaccaactcagaaacccttcttcattgacgtgtccctcactcactctcctctcttcactataaatcgccactcttcgtgttctccacttcaccaactccttcaaacttattaacactttccttagttcaatatggggaagcccttcttcactctctctctttcttccctttgcttgctactcttgtcgagtgcctattacctccagcaagttcaacgagtgccaactcaacaacctcaacgcgttggaacccgaccaccgcgttgagtccgaaggtggtcttattgaaacatggaactctcaacaccctgagctgcaatgcgccggtgtcactgtttccaaacgcaccctcaaccgcaacggcctccacttgccatcttactcaccttatccccaaatgatcattgtcgttcaaggtgcgtaatattagtaagaagtatttatcagcttaacgtgataacaataatagtaatatgaaatatttattaaatttttataattaatctctgctagaaaatttgattaatcattttagtagaatttgttttctcaactaggttttt

SEQ ID NO: 3141 - DNA, 585 bp, Artificial
  Mutations within GlyA3B4 introduced by GmGlyA3B4_T02TALE nuclease
gttcatgtacggttgcagatataaacgaagcatagcttatgtatgaggtgtaacaaaattggaaacaatagccatgcaaggtgaagaatgtcaccaactcagaaacccttcttcattgacgtgtccctcactcactctcctctcttcactataaatcgccactcttcgtgttctccacttcaccaactccttcaaacttattaacactttccttagttcaatatggggaagcccttcttcactctctctctttcttccctttgctattacctccagcaagttcaacgagtgccaactcacaacctcaacgcgttggaacccgaccaccgcgttgagtccgaaggtggtcttattgaaacatggaactctcaacacccctgagctgcaatgcgccggtgtcactgtttccaaacgcaccctcaaccgcaacggcctccacttgccatcttactcaccttatcccccaaatgatcattgtcgttcaaggtgcgtaatattagtaagaagtatttatcagcttaacgtgataacaataatagtaatatgaaatatttattaaattttttataattaattctctgctag

SEQ ID NO: 3142 - DNA, 641 bp, Artificial
  Mutations within GlyA3B4 introduced by GmGlyA3B4_T02TALE nuclease
gttcatgtacggttgcagatataaacgaagcatagcttatgtatgaggtgtaacaaaattggaaacaatagccatgcaaggtgaagaatgtcaccaactcagaaacccttcttcattgacgtgtccctcactcactctcctctcttcactataaatcgccactcttcgtgttctccacttcaccaactccttcaaacttattaacactttccttagttcaatatggggaagcccttcttcactctctctctttcttccctttgcttgctactcttgtcgagtgttattacctccagcaagttcaacgagtgccaactcacaacctcacgcgttggaccgaccaccgcgttgagtccgaaggtggtcttattgaacatggaactctcaacaccctgagctgcaatgcgccggtgtcactgtttccaaacgcaccctcaaccgcaacggcctccacttgccatcttactcaccttatccccaaatgatcattgtcgttcaaggtgcgtaatattagtaagaagtatttatcagcttaacgtgataacaatatagtaatatgaaatatttattaaatttttataattaatctctgctagaaaatttgattaatcattttagtagaatttgttttctcaactagg

SEQ ID NO: 3143 - DNA, 613 bp, Artificial
  Mutations within GlyA3B4 introduced by GmGlyA3B4_T02TALE nuclease
gttcatgtacggttgcagatataaacgaagcatagcttatgtatgaggtgtaacaaaattggaaacaatagccatgcaaggtgaagaatgtcaccaactcagaaacccttcttcattgacgtgtccctcactcactctcctctcttcactataaatcgccactcttcgtgttctccacttcaccaactccttcaaacttattaacactttccttagttcaatatggggaagcccttcttcactctctctctttcttccctttgcttgctactcttagtgccaactcaacaacctcaacgcgttggaacccgaccaccgcgttgagtccgaaggtggtcttattgaaacatggaactctcaacaccctgagctgcaatgcgccggtgtcactgtttccaaacgcaccctcaaccgcaacggcctccacttgccatcttactcaccttatccccaaatgatcattgtcgttcaaggtgcgtaatattagtaagaagtatttatcagcttaacgtgataacaataatagtaatatgaaatatttattaaatttttataattaatctctgctagaaaatttgattaatcatttttagtagaatttgtttttctcaac

SEQ ID NO: 3144 - DNA, 670 bp, Artificial
  Mutations within GlyA3B4 introduced by GmGlyA3B4_T02TALE nuclease
  misc_feature (532): n is a or c or t or g
gttcatgtacggttgcagatataaacgaagcatagcttatgtatgaggtgtaacaaaattggaaacaatagccatgcaaggtgaagaatgtcaccaactcagaaacccttcttcattgacgtgtccctcactcactctcctctcttcactataaatcgccactcttcgtgttctccacttcaccaactccttcaaacttattaacactttccttagttcaatatggggaagcccttcttcactctctctctttcttccctttgcttgctactcttgtcgagtgcatttgctattacctccagcaagttcaacgagtgccaactcaacaacctcaacgcgttggaacccgaccaccgcgttgagtccgaaggtggtcttattgaaacatggaactctcaacaccctgagctgcaatgcgccggtgtcactgtttccaaacgcaccctcaaccgcaacggcctccacttgccatcttactcaccttatccccaaatgatcattgtcgttcaaggtgcgtaatattagtaagagnatttatcagcttaacgtgataacaataatagtaatatgaaaatatttattaaatttttataattaatctctgctagaaaatttgattaatcattttagtagaatttgtttttctcaactaggtttttaaaacaccaca

SEQ ID NO: 3145 - DNA, 648 bp, Artificial
  Mutations within GlyA3B4 introduced by GmGlyA3B4_T02TALE nuclease
gttcatgtacggttgcagatataaacgaagcatagcttatgtatgaggtgtaacaaaattggaaacaatagccatgcaaggtgaagaatgtcaccaactcagaaacccttcttcattgacgtgtccctcactcactctcctctcttcactataaatcgccactcttcgtgttctccacttcaccaactccctcaaacttattaacactttccttagttcaatatggggaagcccttcttcactctctctctttcttccctttgcttgctactcttgtcgagtgcatctattacctccagcaagttcaacgagtgccaactcaacaacctcaacgcgttggaacccgaccaccgcgttgagtccgaaggtggtcttattgaaacatggaactctcaacaccctgagctgcaatgcgccggtgtcactgtttccaaacgcaccctcaaccgcaacggcctccacttgccatcttactcaccttatccccaaatgatcattgtcgttcaaggtgcgtaatattagtaagaagtatttatcagcttaacgtgataacaataatagtaatatgaaatatttattaaatttttataattaatctctgctagaaaatttgattaatcattttagtagaatttgttttctcaacta

SEQ ID NO: 3146 - DNA, 652 bp, Artificial
  Mutations within GlyA3B4 introduced by GmGlyA3B4_T02TALE nuclease
gttcatgtacggttgcagatataaacgaagcatagcttatgtatgaggtgtaacaaaattggaaacaatagccatgcaaggtgaagaatgtcaccaactcagaaacccttcttcattgacgtgtccctcactcactctcctctcttcactataaatcgccactcttcgtgttctccacttcaccaactccttcaaacttattaacactttccttagttcaatatggggaagcccttcttcactctctctctttcttccctttgcttgctattacctccagcaagttcaacgagtgccaactcaacaacctcaacgcgttggaacccgaccaccgcgttgagtccgaaggtggtcttattgaaacatggaactctcaacaccctgagctgcaatgcgccggtgtcactgttttccaaacgcacccctcaaccgcaacggcctccacttgccatcttactcaccttatccccaaatgatcattgtcgttcaaggtgcgtaaatattagtaagaagtatttatcagcttaacgtgataacaataaatagtaaatatgaaatatttattaaattttttataaattaaatctctgctagaaaatttgattaaatcatttttagtagaatttgttttttctcaactaggttttaaaac

SEQ ID NO: 3147 - DNA, 590 bp, Artificial
  Mutations within GlyA3B4 introduced by GmGlyA3B4_T02TALE nuclease
gttcatgtacggttgcagatataaacgaagcatagcttatgtatgaggtgtaacaaaattggaaacaatagccatgcaaggtgaagaatgtcaccaactcagaaaccccttcttcattgacgtgtccctcactcactctcctctcttcactataaatcgccactcttcgtgttctccacttcaccaactccttcaaacttattaacactttccttagttcaatatgggggaagcccttcttcactctctctctttcttccctttgcttgctactcttgtcgagtgcatccgaaggtggtcttattgaaacatggaactctcaacaccctgagctgcaatgcgccggtgtcactgtttccaaacgcaccctcaaccgcaacggcctccacttgccatcttactcaccttatccccaaatgatcattgtcgttcaaggtgcgtaatattagtaagaagtatttatcagcttaacgtgataacaataatagtaatatgaaatatttattaaatttttttataattaatctctgctagaaaatttgattaatcatttttagtagaatttgtttttctcaactaggttttaaaca

SEQ ID NO: 3148 - DNA, 668 bp, Artificial
  Mutations within GlyA3B4 introduced by GmGlyA3B4_T02TALE nuclease
  misc_feature (530): n is a or c or t or g
gttcatgtacggttgcagatataaacgaagcatagcttatgtatgaggtgtaacaaaattggaaacaatagccatgcaaggtgaagaatgtcaccaactcagaaaccccttcttcattgacgtgtccctcactcactctcctctcttcactataaatcgccactcttcgtgttctccacttcaccaactccttcaaacttattaacactttccttagttcaatatggggaagcccttcttcactctctctctttcttccctttgcttgctactcttgtcgagtgctgctattacctccagcaagttcaacgagtgccaactcaacaacctcaacgcgttggaacccgaccaccgcgttgagtccgaaggtggtcttattgaaacatggaactctcaacaccctgagctgcaatgcgccggtgtcactgtttccaaacgcaccctcaaccgcaacggcctccacttgccatcttactcaccttatccccaaatgatcattgtcgttcaaggtgcgtaatattagtaagagnatttatcagcttaacgtgataacaataatagtaatatgaaaatatttattaaatttttataattaatctctgctagaaaatttgattaatcattttagtagaatttgtttttctcaactaggtttttaaaacaccaca

SEQ ID NO: 3149 - DNA, 666 bp, Artificial; identical to SEQ ID NO: 1812
  Mutations within GlyA3B4 introduced by GmGlyA3B4_T02TALE nuclease

SEQ ID NO: 3150 - DNA, 668 bp, Artificial
  Mutations within GlyA3B4 introduced by GmGlyA3B4_T02TALE nuclease
gttcatgtacggttgcagatataaacgaagcatagcttatgtatgaggtgtaacaaaattggaaacaatagccatgcaaggtgaagaatgtcaccaactcagaaacccttcttcattgacgtgtccctcactcactctcctctcttcactataaatcgccactcttcgtgttctccacttcaccaactccttcaaacttattaacactttccttagttcaatatggggaagcccttcttcactctctctctttcttccctttgcttgctactcttgtcgagtgcatttgctattacctccagcaagttcaacgagtgccaactcaacaacctcaacgcgttggaacccgaccaccgcgttgagtccgaaggtggtcttattgaaacatggaactctcaacaccctgagctgcaatgcgccggtgtcactgtttccaaacgcaccctcaaccgcaacggcctccacttgccatcttactcaccttatccccaaatgatcattgtcgttcaaggtgcgtaatattagtaagaagtatttatcagcttaacgtgataacaataatagtaatatgaaatatttattaaatttttataattaatctctgctagaaaatttgattaatcattttagtagaatttgtttttctcaactaggtttttaaaacacca

SEQ ID NO: 3151 - DNA, 650 bp, Artificial
  Mutations within GlyA3B4 introduced by GmGlyA3B4_T02TALE nuclease
gttcatgtacggttgcagatataaacgaagcatagcttatgtatgaggtgtaacaaaattggaaacaatagccatgcaaggtgaagaatgtcaccaactcagaaacccttcttcattgacgtgtccctcactcactctcctctcttcactataaatcgccactcttcgtgttctccacttcaccaactccttcaaacttattaacactttccttagttcaatatggggaagcccttcttcactctctctctttcttccctttgcttgctattacctccagcaagttcaacgagtgccaactcaacaacctcaacgcgttggaacccgaccaccgcgttgagtccgaaggtggtcttattgaaacatggaactctcaacaccctgagctgcaatgcgccggtgtcactgtttccaaacgcaccctcaaccgcaacggcctccacttgccatcttactcaccttatcccccaaatgatcattgtcgttcaaggtgcgtaatattagtaagaagtatttatcagcttaacgtgataacaataatagtaatatgaaatatttattaaattttttataattaatctctgctagaaaatttgattaatcatttttagtagaatttgttttttctcaactaggttttaaaacaccac

SEQ ID NO: 3152 - DNA, 657 bp, Artificial
  Mutations within GlyA3B4 introduced by GmGlyA3B4_T02TALE nuclease
gttcatgtacggttgcagatataaacgaagcatagcttatgtatgaggtgtaacaaaattggaaacaatagccatgcaaggtgaagaatgtcaccaactcagaaacccttcttcattgacgtgtccctcactcactctcctctcttcactataaatcgccactcttcgtgttctccacttcaccaactccttcaaacttattaacactttccttagttcaatatggggaagcccttcttcactctctctctttcttccctttgcttgctactcttgtcgagtgcatctattacctccagcaagttcaacgagtgccaactcaacaacctcaacgcgttggaacccgaccaccgcgttgagtccgaaggtggtcttattgaaacatggaactctcaacaccctgagctgcaatgcgccggtgtcactgtttccaaacgcaccctcaaccgcaacggcctccacttgccatcttactcaccttatccccaaatgatcattgtcgttcaaggtgcgtaatattagtaagaagtatttatcagcttaacgtgataacaatatagtaatatgaaatatttattaaatttttataattaatctctgctagaaaatttgattaatcattttagtagaatttgttttctcaactaggttttaaaa

SEQ ID NO: 3153 - DNA, 665 bp, Artificial
  Mutations within GlyA3B4 introduced by GmGlyA3B4_T02TALE nuclease
gttcatgtacggttgcagatataaacgaagcatagcttatgtatgaggtgtaacaaaattggaaacaatagccatgcaaggtgaagaatgtcaccaactcagaaaccccttcttcattgacgtgtccctcactcactctcctctcttcactataaatcgccactcttcgtgttctccacttcaccaactccttcaaacttattaacactttccttagttcaatatggggaagcccttcttcactctctctctttcttccctttgcttgctactcttgtcgagtgcatctattacctccagcaagttcaacgagtgccaactcaacaacctcaacgcgttggaacccgaccaccgcgttgagtccgaaggtggtcttattgaaacatggaactctcaacaccctgagctgcaatgcgccggtgtcactgtttccaaacgcaccctcaaccgcaacggcctccacttgccatcttactcaccttatccccaaatgatcattgtcgttcaaggtgcgtaatattagtaagaagtatttatcagcttaacgtgataacaataatagtaatatgaaatatttattaaatttttataattaatctctgctagaaaatttgattaatcattttagtagaatttgttttctcaactaggtttttaaaacacca

SEQ ID NO: 3154 - DNA, 668 bp, Artificial
  Mutations within GlyA3B4 introduced by GmGlyA3B4_T02TALE nuclease
  misc_feature (532): n is a or c or t or g
gttcatgtacggttgcagatataaacgaagcatagcttatgtatgaggtgtaacaaaattggaaacaatagccatgcaaggtgaagaatgtcaccaactcagaaacccttcttcattgacgtgtccctcactcactctcctctcttcactataaatcgccactcttcgtgttctccacttcaccaactccttcaaacttattaacactttccttagttcaatatggggaagcccttcttcactctctctctttcttccctttgcttgctactcttgtcgagtgcattgctattacctccagcaagttcaacgagtgccaactcaacaacctcaacgcgttggaacccgaccaccgcgttgagtccgaaggtggtcttattgaaacatggaactctcaacaccctgagctgcaatgcgccggtgtcactgtttccaaacgcaccctcaaccgcaacggcctccacttgccatcttactcaccttatccccaaatgatcattgtcgttcaaggtgcgtaatattagtaagaagnatttatcagcttaacgtgataacaatatagtaatatgaaatatttattaaatttttataattaatctctgctagaaaatttgattaatcattttagtagaatttgtttttctcaactaggtttttaaaacaccaca

SEQ ID NO: 3155 - DNA, 635 bp, Artificial; identical to SEQ ID NO: 1775
  Mutations within GlyA3B4 introduced by GmGlyA3B4_T02TALE nuclease

SEQ ID NO: 3156 - DNA, 662 bp, Artificial; identical to SEQ ID NO: 2192
  Mutations within GlyA3B4 introduced by GmGlyA3B4_T02TALE nuclease

SEQ ID NO: 3157 - DNA, 655 bp, Artificial
  Mutations within GlyA3B4 introduced by GmGlyA3B4_T02TALE nuclease
  misc_feature (530): n is a or c or t or g
gttcatgtacggttgcagatataaacgaagcatagcttatgtatgaggtgtaacaaaattggaaacaatagccatgcaaggtgaagaatgtcaccaactcagaaacccttcttcattgacgtgtccctcactcactctcctctcttcactataaatcgccactcttcgtgttctccacttcaccaactccttcaaacttattaacactttccttagttcaatatggggaagcccttcttcactctctctctttcttccctttgcttgctactcttgtcgagtgcatgctattacctccagcaagttcaacgagtgccaactcaacaacctcaacgcgttggaacccgaccaccgcgttgagtccgaaggtggtcttattgaaacatggaactctcaacaccctgagctgcaatgcgccggtgtcactgtttccaaacgcaccctcaaccgcaacggcctccacttgccatcttactcaccttatccccaaatgatcattgtcgttcaaggtgcgtaatattagtaagagnatttatcagcttaacgtgatacaatatagtaatatgaaatatttattaaatttttataattaatctctgctagaaaatttgattaatcattttagtagaatttgttttctcaactaggttttaaa

SEQ ID NO: 3158 - DNA, 666 bp, Artificial; identical to SEQ ID NO: 1875
  Mutations within GlyA3B4 introduced by GmGlyA3B4_T02TALE nuclease

SEQ ID NO: 3159 - DNA, 663 bp, Artificial; identical to SEQ ID NO: 1819
  Mutations within GlyA3B4 introduced by GmGlyA3B4_T02TALE nuclease

SEQ ID NO: 3160 - DNA, 665 bp, Artificial
  Mutations within GlyA3B4 introduced by GmGlyA3B4_T02TALE nuclease
  misc_feature (531): n is a or c or t or g
gttcatgtacggttgcagatataaacgaagcatagcttatgtatgaggtgtaacaaaattggaaacaatagccatgcaaggtgaagaatgtcaccaactcagaaacccttcttcattgacgtgtccctcactcactctcctctcttcactataaatcgccactcttcgtgttctccacttcaccaactccttcaaacttattaacactttccttagttcaatatggggaagcccttcttcactctctctctttcttccctttgcttgctactcttgtcgagtgctttgctattacctccagcaagttcaacgagtgccaactcaacaacctcaacgcgttggaacccgaccaccgcgttgagtccgaaggtggtcttattgaaacatggaactctcaacaccctgagctgcaatgcgccggtgtcactgtttccaaacgcaccctcaaccgcaacggcctccacttgccatcttactcaccttatccccaaatgatcattgtcgttcaaggtgcgtaatattagtaagagnatttatcagcttaacgtgataacaatatagtaatatgaaatatttattaaatttttataattaatctctgctagaaaatttgattaatcattttagtagaatttgtttttctcaactaggttttaaacaccaca

SEQ ID NO: 3161 - DNA, 648 bp, Artificial
  Mutations within GlyA3B4 introduced by GmGlyA3B4_T02TALE nuclease
gttcatgtacggttgcagatataaacgaagcatagcttatgtatgaggtgtaacaaaattggaaacaatagccatgcaaggtgaagaatgtcaccaactcagaaacccttcttcattgacgtgtccctcactcactctcctctcttcactataaatcgccactcttcgtgttctccacttcaccaactccttcaaacttattaacactttccttagttcaatatggggaagcccttcttcactctctctctttcttccctttgcttattacctccagcaagttcaacgagtgccaactcaacaacctcaacgcgttggaacccgaccaccgcgttgagtccgaaggtggtcttattgaaacatggaactctcaacaccctgagctgcaatgcgccggtgtcactgttttccaaacgcaccctcaaccgcaacggcctccacttgccatcttactcaccttatccccaaatgatcattgtcgttcaaggtgcgtaatattagtaagaagtatttatcagcttaacgtgataacaataatagtaatatgaaatatttattaaattttttataattaatctctgctagaaaatttgattaatcatttttagtagaatttgttttttctcaactaggttttaaaacaccaca

SEQ ID NO: 3162 - DNA, 652 bp, Artificial
  Mutations within GlyA3B4 introduced by GmGlyA3B4_T02TALE nuclease
gttcatgtacggttgcagatataaacgaagcatagcttatgtatgaggtgtaacaaaattggaaacaatagccatgcaaggtgaagaatgtcaccaactcagaaaaccccttcttcattgacgtgtccctcactcactctcctctcttcactataaatcgccactcttcgtgttctccacttcaccaactccttcaaacttattaacactttccttagttcaatatggggaagcccttcttcactctctctctttcttccctttgcttgctactcttgtcgagtgcatctattacctccagcaagttcaacgagtgccaactcaacaacctcaacgcgttggaacccgaccaccgcgttgagtccgaaggtggtcttattgaaacatggaactctcaacaccctgagctgcaatgcgccggtgtcactgtttccaaacgcaccctcaaccgcaacggcctccacttgccatcttactcaccttatccccaaatgatcattgtcgttcaaggtgcgtaatattagtaagaagtatttatcagcttaacgtgataacaataatagtaatatgaaatatttattaaatttttataattaatctctgctagaaaatttgattaatcattttagtagaatttgttttctcaactagg

SEQ ID NO: 3163 - DNA, 621 bp, Artificial
  Mutations within GlyA3B4 introduced by GmGlyA3B4_T02TALE nuclease
gttcatgtacggttgcagatataaacgaagcatagcttatgtatgaggtgtaacaaaattggaaacaatagccatgcaaggtgaagaatgtcaccaactcagaaacccttcttcattgacgtgtccctcactcactctcctctcttcactataaatcgccactcttcgtgttctccacttcaccaactccttcaaacttattaacactttccttagttcaatatggggaagcccttcttcactctctctctttcttccctttgcttgctactcttgtcgagtgccaactcaacaacctcaacgcgttggaacccgaccaccgcgttgagtccgaaggtggtcttattgaaacatggaactctcaacaccctgagctgcaatgcgccggtgtcactgtttccaaacgcaccctcaaccgcaacggcctccacttgccatcttactcaccttatcccccaaatgatcattgtcgttcaaggtgcgtaatattagtaagaagtatttatcagcttaacgtgataacaataatagtaatatgaaatatttattaatttttataattaatctctgctagaaaatttgattaatcatttttagtagaatttgtttttctcaactagg

SEQ ID NO: 3164 - DNA, 635 bp, Artificial
  Mutations within GlyA3B4 introduced by GmGlyA3B4_T02TALE nuclease
gttcatgtacggttgcagatataaacgaagcatagcttatgtatgaggtgtaacaaaattggaaacaatagccatgcaaggtgaagaatgtcaccaactcagaaacccttcttcattgacgtgtccctcactcactctcctctcttcactataaatcgccactcttcgtgttctccacttcaccaactccttcaaacttattaacactttccttagttcaatatggggaagcccttcttcactctctctctttcttccctttgcttgctactcttgtcgagtgcatctattacctccagcaagttcaacgagtgccaactcaacaacctcaacgcgttggaacccgaccaccgcgttgagtccgaaggtggtcttattgaaacatggaactctcaacaccctgagctgcaatgcgccggtgtcactgtttccaaacgcaccctcaaccgcaacggcctccacttgccatcttactcaccttatccccaaatgatcattgtcgttcaaggtgcgtaatattagtaagaagtatttatcagcttaacgtgataacaatatagtaatatgaaatatttattaaatttttataattaatctctgctagaaaatttgattaatcattttagtagaatttg

SEQ ID NO: 3165 - DNA, 636 bp, Artificial
  Mutations within GlyA3B4 introduced by GmGlyA3B4_T02TALE nuclease
  misc_feature (531): n is a or c or t or g
gttcatgtacggttgcagatataaacgaagcatagcttatgtatgaggtgtaacaaaattggaaacaatagccatgcaaggtgaagaatgtcaccaactcagaaacccttcttcattgacgtgtcccctcactcactctcctctcttcactataaatcgccactcttcgtgttctccacttcaccaactccttcaaacttattaacactttccttagttcaatatggggaagcccttcttcactctctctctttcttccctttgcttgctactcttgtcgagtgcatgctattacctccagcaagttcaacgagtgccaactcaacaacctcaacgcgttggaacccgaccaccgcgttgagtccgaaggtggtcttattgaaacatggaactctcaacaccctgagctgcaatgcgccggtgtcactgtttccaaacgcaccctcaaccgcaacggcctccacttgccatcttactcaccttatccccaaatgatcattgtcgttcaaggtgcgtaatattagtaagagnatttatcagcttaacgtgataacaatatagtaatatgaaatatttattaaatttttataattaatctctgctagaaaatttgattaatcattttagtagaatttg

SEQ ID NO: 3166 - DNA, 664 bp, Artificial
  Mutations within GlyA3B4 introduced by GmGlyA3B4_T02TALE nuclease
  misc_feature (529): n is a or c or t or g
gttcatgtacggttgcagatataaacgaagcatagcttatgtatgaggtgtaacaaaattggaaacaatagccatgcaaggtgaagaatgtcaccaactcagaaacccttcttcattgacgtgtccctcactcactctcctctcttcactataaatcgccactcttcgtgttctccacttcaccaactccttcaaacttattaacactttccttagttcaatatggggaagcccttcttcactctctctctttcttccctttgcttgctactcttgtcgagtgcagctattacctccagcaagttcaacgagtgccaactcaacaacctcaacgcgttggaacccgaccaccgcgttgagtccgaaggtggtcttattgaaacatggaactctcaacaccctgagctgcaatgcgccggtgtcactgtttccaaacgcaccctcaaccgcaacggcctccacttgccatcttactcaccttatccccaaatgatcattgtcgttcaaggtgcgtaatattagtaagagnatttatcagcttaacgtgataacaataatagtaatatgaaatatttattaaatttttataattaatctctgctagaaaatttgattaatcattttagtagaatttgtttttctcaactaggttttaaacaccaca

SEQ ID NO: 3167 - DNA, 665 bp, Artificial
  Mutations within GlyA3B4 introduced by GmGlyA3B4_T02TALE nuclease
  misc_feature (530): n is a or c or t or g
gttcatgtacggttgcagatataaacgaagcatagcttatgtatgaggtgtaacaaaattggaaacaatagccatgcaaggtgaagaatgtcaccaactcagaaacccttcttcattgacgtgtccctcactcactctcctctcttcactataaatcgccactcttcgtgttctccacttcaccaactccttcaaacttattaacactttccttagttcaatatggggaagcccttcttcactctctctctttcttccctttgcttgctactcttgtcgagtgcatgctattacctccagcaagttcaacgagtgccaactcaacaacctcaacgcgttggaacccgaccaccgcgttgagtccgaaggtggtcttattgaaacatggaactctcaacaccctgagctgcaatgcgccggtgtcactgtttccaaacgcaccctcaaccgcaacggcctccacttgccatcttactcaccttatccccaaatgatcattgtcgttcaaggtgcgtaatattagtaagagnatttatcagcttaacgtgataacaataatagtaatatgaaatatttattaaatttttataattaatctctgctagaaaatttgattaatcattttagtagaatttgtttttctcaactaggtttttaaaacacca

SEQ ID NO: 3168 - DNA, 666 bp, Artificial
  Mutations within GlyA3B4 introduced by GmGlyA3B4_T02TALE nuclease
  misc_feature (530): n is a or c or t or g
gttcatgtacggttgcagatataaacgaagcatagcttatgtatgaggtgtaacaaaattggaaacaatagccatgcaaggtgaagaatgtcaccaactcagaaacccttcttcattgacgtgtccctcactcactctcctctcttcactataaatcgccactcttcgtgttctccacttcaccaactccttcaaacttattaacactttccttagttcaatatggggaagcccttcttcactctctctctttcttccctttgcttgctactcttgtcgagtgcatgctattacctccagcaagttcaacgagtgccaactcaacaacctcaacgcgttggaacccgaccaccgcgttgagtccgaaggtggtcttattgaaacatggaactctcaacaccctgagctgcaatgcgccggtgtcactgtttccaaacgcaccctcaaccgcaacggcctccacttgccatcttactcaccttatccccaaatgatcattgtcgttcaaggtgcgtaatattagtaagagnatttatcagcttaacgtgataacaataatagtaatatgaaatatttattaaatttttataattaatctctgctagaaaatttgattaatcattttagtagaatttgtttttctcaactaggtttttaaacaccaca

SEQ ID NO: 3169 - DNA, 637 bp, Artificial
  Mutations within GlyA3B4 introduced by GmGlyA3B4_T02TALE nuclease
gttcatgtacggttgcagatataaacgaagcatagcttatgtatgaggtgtaacaaaattggaaacaatagccatgcaaggtgaagaatgtcaccaactcagaaacccttcttcattgacgtgtccctcactcactctcctctcttcactataaatcgccactcttcgtgttctccacttcaccaactccttcaaacttattaacactttccttagttcaatatggggaagcccttcttcactctctctctttcttccctttgcttgctactcttgtcgagtgcatctattacctccagcaagttcaacgagtgccaactcaacaacctcaacgcgttggaacccgaccaccgcgttgagtccgaaggtggtcttattgaaacatggaactctcaacaccctgagctgcaatgcgccggtgtcactgtttccaaacgcacccctcaaccgcaacggcctccacttgccatcttactcaccttatcccccaaatgatcattgtcgttcaaggtgcgtaatattagtaagaagtatttatcagcttaacgtgataacaatatagtaatatgaaatatttattaaatttttataattaatctctgctagaaaatttgattaatcattttagtagaatttg

SEQ ID NO: 3170 - DNA, 682 bp, Artificial
  Mutations within GlyA3B4 introduced by GmGlyA3B4_T02TALE nuclease
gttcatgtacggttgcagatataaacgaagcatagcttatgtatgaggtgtaacaaaattggaaacaatagccatgcaaggtgaagaatgtcaccaactcagaaacccttcttcattgacgtgtccctcactcactctcctctcttcactataaatcgccactcttcgtgttctccacttcaccaactccttcaaacttattaacactttccttagttcaatatggggaagcccttcttcactctctctctttcttccctttgcttgctactcttgtcgagtgcatgcttgaccccggagcaggtggtggccatcgccagccacgatggcggcaagcaggcgctggagacggtccagctttgctattacctccagcaagttcaacgagtgccaactcaacaacctcaacgcgttggaacccgaccaccgcgttgagtccgaaggtggtcttattgaaacatggaactctcaacaccctgagctgcaatgcgccggtgtcactgtttccaaacgcaccctcaaccgcaacggcctccacttgccatcttactcaccttatccccaaatgatcattgtcgttcaaggtgcgtaatattagtaagaagtatttatcagcttaacgtgataacaataatagtaatatgaaatatttattaaattttttataattaatctctgctag

SEQ ID NO: 3171 - DNA, 653 bp, Artificial
  Mutations within GlyA3B4 introduced by GmGlyA3B4_T02TALE nuclease
gttcatgtacggttgcagatataaacgaagcatagcttatgtatgaggtgtaacaaaattggaaacaatagccatgcaaggtgaagaatgtcaccaactcagaaacccttcttcattgacgtgtccctcactcactctcctctcttcactataaatcgccactcttcgtgttctccacttcaccaactccttcaaacttattaacactttccttagttcaatatggggaagcccttcttcactctctctctttcttccctttgcttgctactcttgtcgagtgcttacctccagcaagttcaacgagtgccaactcaacaacctcaacgcgttggaacccgaccaccgcgttgagtccgaaggtggtcttattgaaacatggaactctcaacaccctgagctgcaatgcgccggtgtcactgtttccaaacgcaccctcaaccgcaacggcctccacttgccatcttactcaccttatccccaaatgatcattgtcgttcaaggtgcgtaatattagtaagaagtatttatcagcttaacgtgataacaataatagtaatatgaaatatttattaaatttttataattaatctctgctagaaaatttgattaatcattttagtagaatttgttttctcaactaggttttaaaa

SEQ ID NO: 3172 - DNA, 599 bp, Artificial; identical to SEQ ID NO: 2164
  Mutations within GlyA3B4 introduced by GmGlyA3B4_T02TALE nuclease

SEQ ID NO: 3173 - DNA, 691 bp, Artificial
  Mutations within GlyA3B4 introduced by GmGlyA3B4_T02TALE nuclease
  misc_feature (656): n is a or c or t or g
gttcatgtacggttgcagatataaacgaagcatagcttatgtatgaggtgtaacaaaattggaaacaatagccatgcaaggtgaagaatgtcaccaactcagaaacccttcttcattgacgtgtccctcactcactctcctctcttcactataaatcgccactcttcgtgttctccacttcaccaactccttcaaacttattaacactttccttagttcaatatggggaagcccttcttcactctctctctttcttccctttgcttgctactcttgtcgagtgcatgcttctatttttcattttttagttttagtctttcttctctttctcttttattttcgttttttacaatttccagttcagacttttagttttatcaataaaattttgttctctatttgattaatggaaggctaagtcccctattacctccagcaagttcaacgagtgccaactcaacaacctcaacgcgttgaacccgaccaccgcgttgagtccgaaggtggtcttattgaaacatggaactctcaacaccctgagctgcaatgcgccggtgtcactgttttccaaacgcaccctcaaccgcaacggcctccacttgccatcttactcaccttatccccaaaatgatcattgtcgttcaaggtgcgtaatnttagtaagaagtatttatcagcttaacgtgataac

SEQ ID NO: 3174 - DNA, 624 bp, Artificial
  Mutations within GlyA3B4 introduced by GmGlyA3B4_T02TALE nuclease
gttcatgtacggttgcagatataaacgaagcatagcttatgtatgaggtgtaacaaaattggaaacaatagccatgcaaggtgaagaatgtcaccaactcagaaacccttcttcattgacgtgtccctcactcactctcctctcttcactataaatcgccactcttcgtgttctccacttcaccaactccttcaaacttattaacactttccttagttcaatatggggaagcccttcttcactctctctctttcttccctttgcttccagcaagttcaacgagtgccaactcaacaacctcaacgcgttggaacccgaccaccgcgttgagtccgaaggtggtcttattgaaacatggaactctcaacaccctgagctgcaatgcgccggtgtcactgtttccaaacgcaccctcaaccgcaacggcctccacttgccatcttactcaccttatccccaaatgatcattgtcgttcaaggtgcgtaatattagtaagaagtatttatcagcttaacgtgataacaataatagtaatatgaaatatttattaaattttttataattaatctctgctagaaaatttgattaatcatttttagtagaatttgtttttctcaactagg

SEQ ID NO: 3175 - DNA, 669 bp, Artificial
  Mutations within GlyA3B4 introduced by GmGlyA3B4_T02TALE nuclease
gttcatgtacggttgcagatataaacgaagcatagcttatgtatgaggtgtaacaaaattggaaacaatagccatgcaaggtgaagaatgtcaccaactcagaaaccccttcttcattgacgtgtccctcactcactctcctctcttcactataaatcgccactcttcgtgttctccacttcaccaactccttcaaacttattaacactttccttagttcaatatggggaagcccttcttcactctctctctttcttccctttgcttgctactcttgtcgagtgctttgctattacctccagcaagttcaacgagtgccaactcaacaacctcaacgcgttggaacccgaccaccgcgttgagtccgaaggtggtcttattgaaacatggaactctcaacaccctgagctgcaatgcgccggtgtcactgtttccaaacgcaccctcaaccgcaacggcctccacttgccatcttactcaccttatccccaaatgatcattgtcgttcaaggtgcgtaatattagtaagagtatttatcagcttaacgtgataacaataatagtaatatgaaatatttattaaatttttataattaatctctgctagaaaatttgattaatcattttagtagaatttgtttttctcaactaggtttttaaaacaccaca

SEQ ID NO: 3176 - DNA, 635 bp, Artificial; identical to SEQ ID NO: 1775
  Mutations within GlyA3B4 introduced by GmGlyA3B4_T02TALE nuclease

SEQ ID NO: 3177 - DNA, 513 bp, Artificial; identical to SEQ ID NO: 1764
  Mutations within GlyA3B4 introduced by GmGlyA3B4_T02TALE nuclease

SEQ ID NO: 3178 - DNA, 596 bp, Artificial
  Mutations within GlyA3B4 introduced by GmGlyA3B4_T02TALE nuclease
gttcatgtacggttgcagatataaacgaagcatagcttatgtatgaggtgtaacaaaattggaaacaatagccatgcaaggtgaagaatgtcaccaactcagaaacccttcttcattgacgtgtccctcactcactctcctctcttcactataaatcgccactcttcgtgttctccacttcaccaactccttcaaacttattaacactttccttagttcaatatggggaagcccttcttcactctctctctttcttccctttgcttgctactcttgtcgagtgcatccagcaagttcaacgagtgccaactcaacaacctcaacgcgttggaacccgaccaccgcgttgagtccgaaggtggtcttattgaaacatggaactctcaacaccctgagctgcaatgcgccggtgtcactgtttccaaacgcaccctcaaccgcaacggcctccacttgccatcttactcaccttatccccaaatgatcattgtcgttcaaggtgcgtaatattagtaagaagtatttatcagcttaacgtgataacaataatagtaatatgaaatatttattaaatttttataattaatctctgctag

SEQ ID NO: 3179 - DNA, 663 bp, Artificial; identical to SEQ ID NO: 2559
  Mutations within GlyA3B4 introduced by GmGlyA3B4_T02TALE nuclease

SEQ ID NO: 3180 - DNA, 668 bp, Artificial
  Mutations within GlyA3B4 introduced by GmGlyA3B4_T02TALE nuclease
gttcatgtacggttgcagatataaacgaagcatagcttatgtatgaggtgtaacaaaattggaaacaatagccatgcaaggtgaagaatgtcaccaactcagaaacccttcttcattgacgtgtccctcactcactctcctctcttcactataaatcgccactcttcgtgttctccacttcaccaactccttcaaacttattaacactttccttagttcaatatggggaagcccttcttcactctctctctttcttccctttgcttgctactcttgtcgagtgcatgctattacctccagcaagttcaacgagtgccaactcaacaacctcaacgcgttggaacccgaccaccgcgttgagtccgaaggtggtcttattgaaacatggaactctcaacaccctgagctgcaatgcgccggtgtcactgtttccaaacgcaccctcaaccgcaacggcctccacttgccatcttactcaccttatccccaaatgatcattgtcgttcaaggtgcgtaatattagtaagagtatttatcagcttaacgtgataacaataatagtaatatgaaaatatttattaaatttttataattaatctctgctagaaaatttgattaatcattttagtagaatttgtttttctcaactaggtttttaaaacaccaca

SEQ ID NO: 3181 - DNA, 654 bp, Artificial; identical to SEQ ID NO: 2585
  Mutations within GlyA3B4 introduced by GmGlyA3B4_T02TALE nuclease

SEQ ID NO: 3182 - DNA, 666 bp, Artificial
  Mutations within GlyA3B4 introduced by GmGlyA3B4_T02TALE nuclease
gttcatgtacggttgcagatataaacgaagcatagcttatgtatgaggtgtaacaaaattggaaacaatagccatgcaaggtgaagaatgtcaccaactcagaaacccttcttcattgacgtgtccctcactcactctcctctcttcactataaatcgccactcttcgtgttctccacttcaccaactccttcaaacttattaacactttccttagttcaatatggggaagcccttcttcactctctctctttcttccctttgcttgctactcttgtcgagtgcatgtattacctccagcaagttcaacgagtgccaactcaacaacctcaacgcgttggaacccgaccaccgcgttgagtccgaaggtggtcttattgaaacatggaactctcaacaccctgagctgcaatgcgccggtgtcactgtttccaaacgcaccctcaaccgcaacggcctccacttgccatcttactcaccttatccccaaatgatcattgtcgttcaaggtgcgtaatattagtaagagtatttatcagcttaacgtgataacaataatagtaatatgaaatatttattaaatttttataattaatctctgctagaaaatttgattaatcattttagtagaatttgtttttctcaactaggtttttaaaacaccaca

SEQ ID NO: 3183 - DNA, 659 bp, Artificial
  Mutations within GlyA3B4 introduced by GmGlyA3B4_T02TALE nuclease
gttcatgtacggttgcagatataaacgaagcatagcttatgtatgaggtgtaacaaaattggaaacaatagccatgcaaggtgaagaatgtcaccaactcagaaacccttcttcattgacgtgtccctcactcactctcctctcttcactataaatcgccactcttcgtgttctccacttcaccaactccttcaaacttattaacactttccttagttcaatatggggaagcccttcttcactctctctctttcttccctttgcttgctactcttgtcgagtgcatattacctccagcaagttcaacgagtgccaactcaacaacctcaacgcgttggaacccgaccaccgcgttgagtccgaaggtggtcttattgaaacatggaactctcaacaccctgagctgcaatgcgccggtgtcactgtttccaaacgcaccctcaaccgcaacggcctccacttgccatcttactcaccttatccccaaatgatcattgtcgttcaaggtgcgtaatattagtaagaagtatttatcagcttaacgtgataacaataatagtaatatgaaatatttattaaatttttataattaatctctgctagaaaatttgattaatcattttagtagaatttgttttctcaactaggttaaaacacca

SEQ ID NO: 3184 - DNA, 667 bp, Artificial
  Mutations within GlyA3B4 introduced by GmGlyA3B4_T02TALE nuclease
gttcatgtacggttgcagatataaacgaagcatagcttatgtatgaggtgtaacaaaattggaaacaatagccatgcaaggtgaagaatgtcaccaactcagaaacccttcttcattgacgtgtccctcactcactctcctctcttcactataaatcgccactcttcgtgttctccacttcaccaactccttcaaacttattaacactttccttagttcaatatggggaagcccttcttcactctctctctttcttccctttgcttgctactcttgtcgagtgcattgctattacctccagcaagttcaacgagtgccaactcaacaacctcaacgcgttggaacccgaccaccgcgttgagtccgaaggtggtcttattgaaacatggaactctcaacaccctgagctgcaatgcgccggtgtcactgtttccaaacgcaccctcaaccgcaacggcctccacttgccatcttactcaccttatccccaaatgatcattgtcgttcaaggtgcgtaatattagtaagagtatttatcagcttaacgtgataacaataatagtaatatgaaatatttattaaatttttataattaatctctgctagaaaatttgattaatcattttagtagaatttgtttttctcaactaggtttttaaacaccaca

SEQ ID NO: 3185 - DNA, 661 bp, Artificial; identical to SEQ ID NO: 2035
  Mutations within GlyA3B4 introduced by GmGlyA3B4_T02TALE nuclease

SEQ ID NO: 3186 - DNA, 619 bp, Artificial
  Mutations within GlyA3B4 introduced by GmGlyA3B4_T02TALE nuclease
gttcatgtacggttgcagatataaacgaagcatagcttatgtatgaggtgtaacaaaattggaaacaatagccatgcaaggtgaagaatgtcaccaactcagaaacccttcttcattgacgtgtccctcactcactctcctctcttcactataaatcgccactcttcgtgttctccacttcaccaactccttcaaacttattaacactttccttagttcaatatggggaagcccttcttcactctctctctttcttccctttgcttgctactcttgtcgagtgccaactcaacaacctcaacgcgttggaacccgaccaccgcgttgagtccgaaggtggtcttattgaaacatggaactctcaacaccctgagctgcaatgcgccggtgtcactgtttccaaacgcaccctcaaccgcaacggcctccacttgccatcttactcaccttatcccccaaatgatcattgtcgttcaaggtgcgtaatattagtaagaagtatttatcagcttaacgtgataacaataatagtaatatgaaatatttattaattttttataattaatctctgctagaaaatttgattaatcatttttagtagaatttgtttttctcaact

SEQ ID NO: 3187 - DNA, 650 bp, Artificial
  Mutations within GlyA3B4 introduced by GmGlyA3B4_T02TALE nuclease
gttcatgtacggttgcagatataaacgaagcatagcttatgtatgaggtgtaacaaaattggaaacaatagccatgcaaggtgaagaatgtcaccaactcagaaacccttcttcattgacgtgtccctcactcactctcctctcttcactataaatcgccactcttcgtgttctccacttcaccaactccttcaaacttattaacactttccttagttcaatatggggaagcccttcttcactctctctctttcttccctttgcttgctactcttgtcgagtgcatattacctccagcaagttcaacgagtgccaactcaacaacctcaacgcgttggaacccgaccaccgcgttgagtccgaaggtggtcttattgaaacatggaactctcaacaccctgagctgcaatgcgccggtgtcactgtttccaaacgcaccctcaaccgcaacggcctccacttgccatcttactcaccttatccccaaatgatcattgtcgttcaaggtgcgtaatattagtaagaagtatttatcagcttaacgtgataacaataatagtaatatgaaatatttattaaatttttataattaatctctgctagaaaatttgattaatcattttagtagaatttgttttctcaactaggtt

SEQ ID NO: 3188 - DNA, 665 bp, Artificial
  Mutations within GlyA3B4 introduced by GmGlyA3B4_T02TALE nuclease
  misc_feature (530): n is a or c or t or g
gttcatgtacggttgcagatataaacgaagcatagcttatgtatgaggtgtaacaaaattggaaacaatagccatgcaaggtgaagaatgtcaccaactcagaaacccttcttcattgacgtgtccctcactcactctcctctcttcactataaatcgccactcttcgtgttctccacttcaccaactccttcaaacttattaacactttccttagttcaatatggggaagcccttcttcactctctctctttcttccctttgcttgctactcttgtcgagtgcatgctattacctccagcaagttcaacgagtgccaactcaacaacctcaacgcgttggaacccgaccaccgcgttgagtccgaaggtggtcttattgaaacatggaactctcaacaccctgagctgcaatgcgccggtgtcactgtttccaaacgcaccctcaaccgcaacggcctccacttgccatcttactcaccttatccccaaatgatcattgtcgttcaaggtgcgtaatattagtaagagnatttatcagcttaacgtgataacaataatagtaatatgaaatatttattaaatttttataattaatctctgctagaaaatttgattaatcattttagtagaatttgtttttctcaactaggttttaaacaccaca

SEQ ID NO: 3189 - DNA, 667 bp, Artificial
  Mutations within GlyA3B4 introduced by GmGlyA3B4_T02TALE nuclease
gttcatgtacggttgcagatataaacgaagcatagcttatgtatgaggtgtaacaaaattggaaacaatagccatgtaaggtgaagaatgtcaccaactcagaaacccttcttcattgacgtgtccctcactcactctcctctcttcactataaatcgccactcttcgtgttctccacttcaccaactccttcaaacttattaacactttccttagttcaatatggggaagcccttcttcactctctctctttcttccctttgcttgctactcttgtcgagtgcattgctattacctccagcaagttcaacgagtgccaactcaacaacctcaacgcgttggaacccgaccaccgcgttgagtccgaaggtggtcttattgaaacatggaactctcaacaccctgagctgcaatgcgccggtgtcactgtttccaaacgcaccctcaaccgcaacggcctccacttgccatcttactcaccttatccccaaatgatcattgtcgttcaaggtgcgtaatattagtaagagtatttatcagcttaacgtgataacaataatagtaatatgaaatatttattaaatttttataattaatctctgctagaaaatttgattaatcattttagtagaatttgtttttctcaactaggttttaaaacaccaca

SEQ ID NO: 3190 - DNA, 629 bp, Artificial
  Mutations within GlyA3B4 introduced by GmGlyA3B4_T02TALE nuclease
gttcatgtacggttgcagatataaacgaagcatagcttatgtatgaggtgtaacaaaattggaaacaatagccatgcaaggtgaagaatgtcaccaactcagaaacccttcttcattgacgtgtccctcactcactctcctctcttcactataaatcgccactcttcgtgttctccacttcaccaactccttcaaacttattaacactttccttagttcaatatggggaagcccttcttcactctctctctttcttccctttgcttgctactcttgtcgagtgcatgcctccagcaagttcaacgagtgccaactcaacaacctcaacgcgttggaacccgaccaccgcgttgagtccgaaggtggtcttattgaaacatggaactctcaacaccctgagctgcaatgcgccggtgtcactgtttccaaacgcaccctcaaccgcaacggctccactgccatcttactcaccttatccccaaatgatcattgtcgttcaaggtgcgtaatattagtaagaagtatttatcagcttaacgtgataacaataatagtaatatgaaatatttattaaatttttataattaatctctgctagaaaatttgattaatcattttagtagaatttg

SEQ ID NO: 3191 - DNA, 663 bp, Artificial
  Mutations within GlyA3B4 introduced by GmGlyA3B4_T02TALE nuclease
gttcatgtacggttgcagatataaacgaagcatagcttatgtatgaggtgtaacaaaattggaaacaatagccatgcaaggtgaagaatgtcaccaactcagaaaccccttcttcattgacgtgtccctcactcactctcctctcttcactataaatcgccactcttcgtgttctccacttcaccaactccttcaaacttattaacactttccttagttcaatatggggaagcccttcttcactctctctctttcttccctttgcttgctactcttgtcgagtgcactattacctccagcaagttcaacgagtgccaactcaacaacctcaacgcgttggaacccgaccaccgcgttgagtccgaaggtggtcttattgaaacatggaactctcaacaccctgagctgcaatgcgccggtgtcactgtttccaaacgcaccctcaaccgcaacggcctccacttgccatcttactcaccttatccccaaatgatcattgtcgttcaaggtgcgtaatattagtaagaagtatttatcagcttaacgtgataacaatatagtaatatgaaatatttattaaatttttataattaatctctgctagaaaatttgattaatcattttagtagaatttgttttctcaactaggtttttaaaacacca

SEQ ID NO: 3192 - DNA, 654 bp, Artificial
  Mutations within GlyA3B4 introduced by GmGlyA3B4_T02TALE nuclease
gttcatgtacggttgcagatataaacgaagcatagcttatgtatgaggtgtaacaaaattggaaacaatagccatgcaaggtgaagaatgtcaccaactcagaaacccttcttcattgacgtgtccctcactcactctcctctcttcactataaatcgccactcttcgtgttctccacttcaccaactccttcaaacttattaacactttccttagttcaatatggggaagcccttcttcactctctctctttcttccctttgcttgctactcttgtcgagtgcatgttcaacgagtgccaactcaacaacctcaacgcgttggaacccgaccaccgcgttgagtccgaaggtggtcttattgaaacatggaactctcaacaccctgagctgcaatgcgccggtgtcactgtttccaaacgcaccctcaaccgcaacggcctccacttgccatcttactcaccttatccccaaatgatcattgtcgttcaaggtgcgtaaatattagtaagaagtatttatcagcttaacgtgataacaataatagtaatatgaaatatttattaaattttttataattaatctctgctagaaaatttgattaatcatttttagtagaatttgttttttctcaactaggttttaaaacaccaca

SEQ ID NO: 3193 - DNA, 646 bp, Artificial
  Mutations within GlyA3B4 introduced by GmGlyA3B4_T02TALE nuclease
gttcatgtacggttgcagatataaacgaagcatagcttatgtatgaggtgtaacaaaattggaaacaatagccatgcaaggtgaagaatgtcaccaactcagaaacccttcttcattgacgtgtccctcactcactctcctctcttcactataaatcgccactcttcgtgttctccacttcaccaactccttcaaacttattaacactttccttagttcaatatggggaagcccttcttcactctctctctttcttccctttgcttgctactcttgtcgagtgcattacctccagcaagttcaacgagtgccaactcaacaacctcaacgcgttggaacccgaccaccgcgttgagtccgaaggtggtcttattgaaacatggaactctcaacaccctgagctgcaatgcgccggtgtcactgtttccaaacgcaccctcaaccgcaacggcctccacttgccatcttactcaccttatccccaaatgatcattgtcgttcaaggtgcgtaatattagtaagaagtatttatcagcttaacgtgataacaatatagtaatatgaaatatttattaaatttttataattaatctctgctagaaaatttgattaatcattttagtagaatttgtttttctcaactagg

SEQ ID NO: 3194 - DNA, 634 bp, Artificial; identical to SEQ ID NO: 1893
  Mutations within GlyA3B4 introduced by GmGlyA3B4_T02TALE nuclease

SEQ ID NO: 3195 - DNA, 635 bp, Artificial; identical to SEQ ID NO: 1775
  Mutations within GlyA3B4 introduced by GmGlyA3B4_T02TALE nuclease

SEQ ID NO: 3196 - DNA, 694 bp, Artificial
  Mutations within GlyA3B4 introduced by GmGlyA3B4_T02TALE nuclease
gttcatgtacggttgcagatataaacgaagcatagcttatgtatgaggtgtaacaaaattggaaacaatagccatgcaaggtgaagaatgtcaccaactcagaaacccttcttcattgacgtgtccctcactcactctcctctcttcactataaatcgccactcttctcgagaattcatacatcccttatcagtatatggacagttatctctcgagcacaggtttaggtttggcctcaatggaaaaaaacggagcacctaacaacgtatcttcacagaccaagaactacgagatcgcccctttcattctggggtttgctattacctccagcaagttcaacgagtgccaactcaacaacctcaacgcgttggaacccgaccaccgcgttgagtccgaaggtggtcttattgaaacatggaactctcaacaccctgagctgcaatgcgccggtgtcactgtttccaaacgcaccctcaaccgcaacggcctccacttgccatcttactcaccttatccccaaatgatcattgtcgttcaaggtgcgtaatattagtaagagtatttatcagcttaacgtgataacaataatagtaatatgaaatatttattaaatttttataattaatctctgctagaaaatttgattaatcattttagtagaatttgtttttctcaactaggttttaaaacacca

SEQ ID NO: 3197 - DNA, 653 bp, Artificial
  Mutations within GlyA3B4 introduced by GmGlyA3B4_T02TALE nuclease
  misc_feature (529): n is a or c or t or g
gttcatgtacggttgcagatataaacgaagcatagcttatgtatgaggtgtaacaaaattggaaacaatagccatgcaaggtgaagaatgtcaccaactcagaaaccccttcttcattgacgtgtccctcactcactctcctctcttcactataaatcgccactcttcgtgttctccacttcaccaactccttcaaacttattaacactttccttagttcaatatggggaagcccttcttcactctctctctttcttccctttgcttgctactcttgtcgagtgcgctattacctccagcaagttcaacgagtgccaactcaacaacctcaacgcgttggaacccgaccaccgcgttgagtccgaaggtggtcttattgaaacatggaactctcaacaccctgagctgcaatgcgccggtgtcactgtttccaaacgcaccctcaaccgcaacggcctccacttgccatcttactcaccttatccccaaatgatcattgtcgttcaaggtgcgtaatattagtaagagnatttatcagcttaacgtgataacaatatagtaatatgaaatatttattaaatttttataattaatctctgctagaaaatttgattaatcattttagtagaatttgttttctcaactaggttttt

SEQ ID NO: 3198 - DNA, 657 bp, Artificial
  Mutations within GlyA3B4 introduced by GmGlyA3B4_T02TALE nuclease
gttcatgtacggttgcagatataaacgaagcatagcttatgtatgaggtgtaacaaaattggaaacaatagccatgcaaggtgaagaatgtcaccaactcagaaaccccttcttcattgacgtgtccctcactcactctcctctcttcactataaatcgccactcttcgtgttctccacttcaccaactccttcaaacttattaacactttccttagttcaatatggggaagcccttcttcactctctctctttcttccctttgcttgctactcttgtcgagtgctattacctccagcaagttcaacgagtgccaactcaacaacctcaacgcgttggaacccgaccaccgcgttgagtccgaaggtggtcttattgaaacatggaactctcaacaccctgagctgcaatgcgccggtgtcactgtttccaaacgcaccctcaaccgcaacggcctccacttgccatcttactcaccttatcccccaaatgatcattgtcgttcaaggtgcgtaatattagtaagaagtatttatcagcttaacgtgataacaataatagtaatatgaaatatttattaaatttttataattaatctctgctagaaaatttgattaatcattttagtagaatttgttttctcaactaggttttaaaa

SEQ ID NO: 3199 - DNA, 666 bp, Artificial
  Mutations within GlyA3B4 introduced by GmGlyA3B4_T02TALE nuclease
gttcatgtacggttgcagatataaacgaagcatagcttatgtatgaggtgtaacaaaattggaaacaatagccatgcaaggtgaagaatgtcaccaactcagaaacccttcttcattgacgtgtccctcactcactctcctctcttcactataaatcgccactcttcgtgttctccacttcaccaactccttcaaacttattaacactttccttagttcaatatggggaagcccttcttcactctctctctttcttccctttgcttgctactcttgtcgagtgttgctattacctccagcaagttcaacgagtgccaactcaacaacctcaacgcgttggaacccgaccaccgcgttgagtccgaaggtggtcttattgaaacatggaactctcaacaccctgagctgcaatgcgccggtgtcactgtttccaaacgcaccctcaaccgcaacggcctccacttgccatcttactcaccttatccccaaatgatcattgtcgttcaaggtgcgtaatattagtaagagtatttatcagcttaacgtgataacaataatagtaatatgaaatatttattaaatttttataattaatctctgctagaaaatttgattaatcattttagtagaatttgtttttctcaactaggtttttaaaacaccaca

SEQ ID NO: 3200 - DNA, 601 bp, Artificial
  Mutations within GlyA3B4 introduced by GmGlyA3B4_T02TALE nuclease
gttcatgtacggttgcagatataaacgaagcatagcttatgtatgaggtgtaacaaaattggaaacaatagccatgcaaggtgaagaatgtcaccaactcagaaacccttcttcattgacgtgtccctcactcactctcctctcttcactataaatcgccactcttcgtgttctccacttcaccaactccttcaaacttattaacactttccttagttcaatatgcgctattacctccagcaagttcaacgagtgccaactcaacaacctcaacgcgttggaacccgaccaccgcgttgagtccgaaggtggtcttattgaaacatggaactctcaacaccctgagctgcaatgcgccggtgtcactgtttccaaacgcaccctcaaccgcaacggcctccacttgccatcttactcaccttatccccaaaatgatcattgtcgttcaaggtgcgtaatattagtaagaagtatttatcagcttaacgtgataacaataatagtaatatgaaatatttattaaattttttataattaatctctgctagaaaatttgatttaatcatttttagtagaatttgtttttctcaactaggttttt

SEQ ID NO: 3201 - DNA, 584 bp, Artificial
  Mutations within GlyA3B4 introduced by GmGlyA3B4_T02TALE nuclease
gttcatgtacggttgcagatataaacgaagcatagcttatgtatgaggtgtaacaaaattggaaacaatagccatgcaaggtgaagaatgtcaccaactcagaaacccttcttcattgacgtgtccctcactcactctcctctcttcactataaatcgccactcttcgtgttctccacttcaccaactccttcaaacttattaacactttccttagttcaatatggggaagcccttcttcactctctctctttcttccctttgcttgctactcttgtcgagtgctttgctattacctccagcaagttcaacgagtgccaactcaacaacctcaacgcgttggaacccgaccaccgcgttgagtccgaaggtggtcttattgaaacatggaactctcaacaccctgagctgcaatgcgccggtgtcactgtttccaaacgcaccctcaaccgcaacggcctccacttgccatcttactcaccttatccccaaatgatcattgtcgttcaaggtgcgtaatattagtaagaagtatttatcagcttaacgtgataacaataatagtaatatgaaatatttattaaa

SEQ ID NO: 3202 - DNA, 655 bp, Artificial
  Mutations within GlyA3B4 introduced by GmGlyA3B4_T02TALE nuclease
gttcatgtacggttgcagatataaacgaagcatagcttatgtatgaggtgtaacaaaattggaaacaatagccatgcaaggtgaagaatgtcaccaactcagaaacccttcttcattgacgtgtccctcactcactctcctctcttcactataaatcgccactcttcgtgttctccacttcaccaactccttcaaacttattaacactttccttagttcaatatggggaagcccttcttcactctctctctttcttcttcactctctctctttcaaacttattacctccagcaagttcaacgagtgccaactcaacaacctcaacgcgttggaacccgaccaccgcgttgagtccgaaggtggtcttattgaaacatggaactctcaacaccctgagctgcaatgcgccggtgtcactgtttccaaacgcaccctcaaccgcaacggcctccacttgccatcttactcaccttatccccaaatgatcattgtcgttcaaggtgcgtaatattagtaagaagtatttatcagcttaacgtgataacaataatagtaatatgaaatatttattaaatttttataattaatctctgctagaaaatttgattaatcattttagtagaatttgttttctcaactaggttttaaaacacca

SEQ ID NO: 3203 - DNA, 646 bp, Artificial; identical to SEQ ID NO: 706
  Mutations within GlyA3B4 introduced by GmGlyA3B4_T02TALE nuclease

SEQ ID NO: 3204 - DNA, 663 bp, Artificial; identical to SEQ ID NO: 2045
  Mutations within GlyA3B4 introduced by GmGlyA3B4_T02TALE nuclease

SEQ ID NO: 3205 - DNA, 655 bp, Artificial
  Mutations within GlyA3B4 introduced by GmGlyA3B4_T02TALE nuclease
gttcatgtacggttgcagatataaacgaagcatagcttatgtatgaggtgtaacaaaattggaaacaatagccatgcaaggtgaagaatgtcaccaactcagaaaccccttcttcattgacgtgtccctcactcactctcctctcttcactataaatcgccactcttcgtgttctccacttcaccaactccttcaaacttattaacactttccttagttcaatatggggaagcccttcttcactctctctctttcttccctttgcttgctactcttgtcgagtgcatgattacctccagcaagttcaacgagtgccaactcaacaacctcaacgcgttggaacccgaccaccgcgttgagtccgaaggtggtcttattgaaacatggaactctcaacaccctgagctgcaatgcgccggtgtcactgtttccaaacgcaccctcaaccgcaacggcctccacttgccatcttactcaccttatccccaaatgatcattgtcgttcaaggtgcgtaatattagtaagaagtatttatcagcttaacgtgataacaataatagtaatatgaaatatttattaaatttttataattaatctctgctagaaaatttgattaatcattttagtagaatttgttttctcaactaggttttt

SEQ ID NO: 3206 - DNA, 656 bp, Artificial
  Mutations within GlyA3B4 introduced by GmGlyA3B4_T02TALE nuclease
gttcatgtacggttgcagatataaacgaagcatagcttatgtatgaggtgtaacaaaattggaaacaatagccatgcaaggtgaagaatgtcaccaactcagaaacccttcttcattgacgtgtccctcactcactctcctctcttcactataaatcgccactcttcgtgttctccacttcaccaactccttcaaacttattaacactttccttagttcaatatggggaagcccttcttcactctctctctttcttccctttgcttgctactcttgtcgtacctccagcaagttcaacgagtgccaactcaacaacctcaacgcgttggaacccgaccaccgcgttgagtccgaaggtggtcttattgaaacatggaactctcaacaccctgagctgcaatgcgccggtgtcactgtttccaaacgcaccctcaaccgcaacggcctccacttgccatcttactcaccttatcccccaaatgatcattgtcgttcaaggtgcgtaatattagtaagaagtatttatcagcttaacgtgataacaataatagtaatatgaaatatttattaaattttttataattaatctctgctagaaaatttgattaatctttttagtagaattgttttttctcaactaggtttaaaacaccaca

SEQ ID NO: 3207 - DNA, 663 bp, Artificial; identical to SEQ ID NO: 1819
  Mutations within GlyA3B4 introduced by GmGlyA3B4_T02TALE nuclease

SEQ ID NO: 3208 - DNA, 650 bp, Artificial
  Mutations within GlyA3B4 introduced by GmGlyA3B4_T02TALE nuclease
gttcatgtacggttgcagatataaacgaagcatagcttatgtatgaggtgtaacaaaattggaaacaatagccatgcaaggtgaagaatgtcaccaactcagaaacccttcttcattgacgtgtccctcactcactctcctctcttcactataaatcgccactcttcgtgttctccacttcaccaactccttcaaacttattaacactttccttagttcaatatggggaagcccttcttcactctctctctttcttccctttgcttgctattacctccagcaagttcaacgagtgccaactcaacaacctcaacgcgttggaacccgaccaccgcgttgagtccgaaggtggtcttattgaaacatggaactctcaacaccctgagctgcaatgcgccggtgtcactgtttccaaacgcaccctcaaccgcaacggcctccacttgccatcttactcaccttatccccaaatgatcattgtcgttcaaggtgcgtaatattagtaagaagtatttatcagctttaacgtgataacaataatagtaatatgaaatatttattaaattttttataattaattctctgctagaaaatttgattaatcatttttagtagaatttgtttttctcaactaggttttaaacaccaca

SEQ ID NO: 3209 - DNA, 653 bp, Artificial
  Mutations within GlyA3B4 introduced by GmGlyA3B4_T02TALE nuclease
gttcatgtacggttgcagatataaacgaagcatagcttatgtatgaggtgtaacaaaattggaaacaatagccatgcaaggtgaagaatgtcaccaactcagaaacccttcttcattgacgtgtccctcactcactcctcctctcttcactataaatcgccactcttcgtgttctccacttcaccaactccttcaaacttattaacactttccttagttcaatatggggaagcccttcttcactctctctctttcttccctttgcttgctactcttgtcgagtgcatattacctccagcaagttcaacgagtgccaactcaacaacctcaacgcgttggaacccgaccaccgcgttgagtccgaaggtggtcttattgaaacatggaactctcaacaccctgagctgcaatgcgccggtgtcactgtttccaaacgcaccctcaaccgcaacggcctccacttgccatcttactcaccttatccccaaatgatcattgtcgttcaaggtgcgtaatattagtaagaagtatttatcagcttaacgtgataacaataatagtaatatgaaatatttattaaatttttataattaatctctgctagaaaatttgattaatcattttagtagaatttgttttctcaactaggtttt

SEQ ID NO: 3210 - DNA, 569 bp, Artificial
  Mutations within GlyA3B4 introduced by GmGlyA3B4_T02TALE nuclease
gttcatgtacggttgcagatataaacgaagcatagcttatgtatgaggtgtaacaaaattggaaacaatagccatgcaaggtgaagaatgtcaccaactcagaaacccttcttcattgacgtgtccctcactcactctcctctcttcactataaatcgccactcttcgtgttctccacttcaccaactccttcaaacttattaacactttccttagttcaatatggggaagcccttcttcactctctctctttctttcctccagcaagttcaacgagtgccaactcaacaacctcaacgcgttggaacccgaccaccgcgttgagtccgaaggtggtcttattgaaacatggaactctcaacaccctgagctgcaatgcgccggtgtcactgtttccaaacgcaccctcaaccgcaacggcctccacttgccatcttactcaccttatccccaaatgatcattgtcgttcaaggtgcgtaatattagtaagaagtatttatcagcttaacgtgataacaataatagtaatatgaatatttattaattttttataattaatctctgctag

SEQ ID NO: 3211 - DNA, 653 bp, Artificial
  Mutations within GlyA3B4 introduced by GmGlyA3B4_T02TALE nuclease
gttcatgtacggttgcagatataaacgaagcatagcttatgtatgaggtgtaacaaaattggaaacaatagccatgcaaggtgaagaatgtcaccaactcagaaacccttcttcattgacgtgtccctcactcactctcctctcttcactaataaatcgccactcttcgtgttctccacttcaccaactccttcaaacttattaacactttccttagttcaatatggggaagcccttcttcactctctctctttcttccctttgcttgctattacctccagcaagttcaacgagtgccaactcaacaacctcaacgcgttggaacccgaccaccgcgttgagtccgaaggtggtcttattgaaacatggaactctcaacacccctgagctgcaatgcgccggtgtcactgtttccaaacgcaccctcaaccgcaacggcctccacttgccatcttactcaccttatcccccaaatgatcattgtcgttcaaggtgcgtaatattagtaagaagtatttatcagcttaacgtgataacaataatagtaatatgaaatatttattaaatttttttataattaatctctgctagaaaatttgattaatcatttttagtagaatttgttttttctcaactaggttttaaacaccaca

SEQ ID NO: 3212 - DNA, 698 bp, Artificial
  Mutations within GlyA3B4 introduced by GmGlyA3B4_T02TALE nuclease
gttcatgtacggttgcagatataaacgaagcatagcttatgtatgaggtgtaacaaaattggaaacaatagccatgcaaggtgaagaatgtcaccaactcagaaacccttcttcattgacgtgtccctcactcactctcctctcttcactataaatcgccactcttcgtgttctccacttcaccaactccttcaaacttattaacactttccttagttcaatatggggaagcccttcttcactctctctctttcttccctttgcttgctactcttgtcgagtgcagaggcctgcatgcaaagggaagcccttacgtttctttgctattacctccagcaagttcaacgagtgccaactcaacaacctcaacgcgttggaacccgaccaccgcgttgagtccgaaggtggtcttattgaaacatggaactctcaacaccctgagctgcaatgcgccggtgtcactgtttccaaacgcacctcaacgcaacggcctccacttgccatcttactcaccttatccccaaatgatcattgtcgttcaaggtgcgtaatattagtaagaagtatttatcagcttaacgtgataacaataatagtaatatgaaatatttattaaatttttataattaatctctgctagaaaatttgattaatcatttttatgtagaatttgtttttctcaactaggttttaaaaca

SEQ ID NO: 3213 - DNA, 574 bp, Artificial
  Mutations within GlyA3B4 introduced by GmGlyA3B4_T02TALE nuclease
gttcatgtacggttgcagatataaacgaagcatagcttatgtatgaggtgtaacaaaattggaaacaatagccatgcaaggtgaagaatgtcaccaactcagaaacccttcttcattgacgtgtccctcactcactctcctctcttcactataaatcgccactcttcgtgttctccacttcaccaactccttcaaacttattaacactttccttagttcaatatggggaagcccttcttcactctctctctttcttccctttgcttgctactcttgtcgagtgcatgctggcgatggccaccacctgctggggggtcaagccgtgggcctggcacagcaccggcaacagccgctggaccgtcactgtttccaaacgcacccctcaaccgcaacggcctccacttgccatcttactcaccttatccccaaatgatcattgtcgttcaaggtgcgtaatattagtaagaagtatttatcagcttaacgtgataacaataatagtaatatgaaatatttattaaattttttataattaatctctgctagaaaatttgattaatcatttttagtagaa

SEQ ID NO: 3214 - DNA, 632 bp, Artificial; identical to SEQ ID NO: 1756
  Mutations within GlyA3B4 introduced by GmGlyA3B4_T02TALE nuclease

SEQ ID NO: 3215 - DNA, 534 bp, Artificial; identical to SEQ ID NO: 2332
  Mutations within GlyA3B4 introduced by GmGlyA3B4_T02TALE nuclease

SEQ ID NO: 3216 - DNA, 658 bp, Artificial
  Mutations within GlyA3B4 introduced by GmGlyA3B4_T02TALE nuclease
gttcatgtacggttgcagatataaacgaagcatagcttatgtatgaggtgtaacaaaattggaaacaatagccatgcaaggtgaagaatgtcaccaactcagaaacccttcttcattgacgtgtccctcactcactctcctctcttcactataaatcgccactcttcgtgttctccacttcaccaactccttcaaacttattaacactttccttagttcaatatggggaagcccttcttcactctctctctttcttccctttgcttgctactcttgtcgagtgcactattacctccagcaagttcaacgagtgccaactcaacaacctcaacgcgttggaacccgaccaccgcgttgagtccgaaggtggtcttattgaaacatggaactctcaacaccctgagctgcaatgcgccggtgtcactgtttccaaacgcaccctcaaccgcaacggcctccacttgccatcttactcaccttatccccaaatgatcattgtcgttcaaggtgcgtaatattagtaagaagtatttatcagcttaacgtgataacaataatagtaatatgaaatatttattaaatttttataattaatctctgctagaaaatttgattaatcattttagtagaatttgtttttctcaactaggttttaaaa

SEQ ID NO: 3217 - DNA, 632 bp, Artificial; identical to SEQ ID NO: 1756
  Mutations within GlyA3B4 introduced by GmGlyA3B4_T02TALE nuclease

SEQ ID NO: 3218 - DNA, 622 bp, Artificial
  Mutations within GlyA3B4 introduced by GmGlyA3B4_T02TALE nuclease
gttcatgtacggttgcagatataaacgaagcatagcttatgtatgaggtgtaacaaaattggaaacaatagccatgcaaggtgaagaatgtcaccaactcagaaacccttcttcattgacgtgtccctcactcactctcctctcttcactataaatcgccactcttcgtgttctccacttcaccaactccttcaaacttattaacactttccttagttcaatatggggaagcccttcttcactctctctctttcttccctttgcttgctactcttgtcgagtgcatctattacctccagcaagttcaacgagtgccaactcaacaacctcaacgcgttggaacccgaccaccgcgttgagtccgaaggtggtcttattgaaacatggaactctcaacaccctgagctgcaatgcgccggtgtcactgtttccaaacgcacccctcaaccgcaacggcctccacttgccatcttactcaccttatcccccaaatgatcattgtcgttcaaggtgcgtaatattagtaagaagtatttatcagcttaacgtgataacaatatagtaatatgaaatatttattaaatttttataattaatctctgctagaaaatttgattaatca

SEQ ID NO: 3219 - DNA, 616 bp, Artificial
  Mutations within GlyA3B4 introduced by GmGlyA3B4_T02TALE nuclease
gttcatgtacggttgcagatataaacgaagcatagcttatgtatgaggtgtaacaaaattggaaacaatagccatgcaaggtgaagaatgtcaccaactcagaaacccttcttcattgacgtgtccctcactcactctcctctcttcactataaatcgccactcttcgtgttctccacttcaccaactccttcaaacttattaacactttccttagttcaatatggggaagcccttcttcactctctctctttcttccctttgcttgctactcttgtcgagtgccaactcaacaacctcaacgcgttggaacccgaccaccgcgttgagtccgaaggtggtcttattgaaacatggaactctcaacaccctgagctgcaatgcgccggtgtcactgtttccaaacgcaccctcaaccgcaacggcctccacttgccatcttactcaccttatccccaaatgatcattgtcgttcaaggtgcgtaatattagtaagaagtatttatcagcttaacgtgataacaataatagtaatatgaaatatttattaattttttataattaatctctgctagaaatttgattaatcatttttagtagaatttgtttttctcaac

SEQ ID NO: 3220 - DNA, 637 bp, Artificial; identical to SEQ ID NO: 1602
  Mutations within GlyA3B4 introduced by GmGlyA3B4_T02TALE nuclease

SEQ ID NO: 3221 - DNA, 630 bp, Artificial
  Mutations within GlyA3B4 introduced by GmGlyA3B4_T02TALE nuclease
gttcatgtacggttgcagatataaacgaagcatagcttatgtatgaggtgtaacaaaattggaaacaatagccatgcaaggtgaagaatgtcaccaactcagaaacccttcttcattgacgtgtccctcactcactctcctctcttcactataaatcgccactcttcgtgttctccacttcaccaactccttcaaacttattaacactttccttagttcaatatggggaagcccttcttcactctctctctttcttccctttgcttgctactcttgtcgagtattacctccagcaagttcaacgagtgccaactcaacaacctcaacgcgttggaacccgaccaccgcgttgagtccgaaggtggtcttattgaaacatggaactctcaacaccctgagctgcaatgcgccggtgtcactgtttccaaacgcaccctcaaccgcaacggcctccacttgccatcttactcaccttatccccaaatgatcattgtcgttcaaggtgcgtaatattagtaagaagtatttatcagcttaacgtgataacaataatagtaatatgaaatatttattaaatttttataattaatctctgctagaaaatttgattaatcattttagtagaatttg

SEQ ID NO: 3222 - DNA, 657 bp, Artificial
  Mutations within GlyA3B4 introduced by GmGlyA3B4_T02TALE nuclease
gttcatgtacggttgcagatataaacgaagcatagcttatgtatgaggtgtaacaaaattggaaacaatagccatgcaaggtgaagaatgtcaccaactcagaaacccttcttcattgacgtgtccctcactcactctcctctcttcactataaatcgccactcttcgtgttctccacttcaccaactccttcaaacttattaacactttccttagttcaatatggggaagcccttcttcactctctctctttcttccctttgcttgctactcttgtcgagtgcattattacctccagcaagttcaacgagtgccaactcaacaacctcaacgcgttggaacccgaccaccgcgttgagtccgaaggtggtcttattgaaacatggaactctcaacaccctgagctgcaatgcgccggtgtcactgtttccaaacgcaccctcaaccgcaacggcctccacttgccatcttactcaccttatccccaaatgatcattgtcgttcaaggtgcgtaatattagtaagaagtatttatcagcttaacgtgataacaataatagtaatatgaaatatttattaaatttttataattaatctctgctagaaaatttgattaatcattttagtagaatttgttttctcaactaggttttaaaa

SEQ ID NO: 3223 - DNA, 647 bp, Artificial
  Mutations within GlyA3B4 introduced by GmGlyA3B4_T02TALE nuclease
gttcatgtacggttgcagatataaacgaagcatagcttatgtatgaggtgtaacaaaattggaaacaatagccatgcaaggtgaagaatgtcaccaactcagaaacccttcttcattgacgtgtccctcactcactctcctctcttcactataaatcgccactcttcgtgttctccacttcaccaactccttcaaacttattaacactttccttagttcaatatggggaagcccttcttcactctctctctttcttccctttgcttgctactcttgtcgagtgcatgcttcagcaagttcaacgagtgccaactcaacaacctcaacgcgttggaacccgaccaccgcgttgagtccgaaggtggtcttattgaaacatggaactctcaacaccctgagctgcaatgcgccggtgtcactgtttccaaacgcaccctcaaccgcaacggcctccacttgccatcttactcaccttatccccaaatgatcattgtcgttcaaggtgcgtaatattagtaagaagtatttatcagcttaacgtgataacaatatagtaatatgaaatatttattaaatttttataattaatctctgctagaaaatttgattaatcattttagtagaatttgttttctcaactaggtttt

SEQ ID NO: 3224 - DNA, 652 bp, Artificial
  Mutations within GlyA3B4 introduced by GmGlyA3B4_T02TALE nuclease
gttcatgtacggttgcagatataaacgaagcatagcttatgtatgaggtgtaacaaaattggaaacaatagccatgcaaggtgaagaatgtcaccaactcagaaaccccttcttcattgacgtgtccctcactcactctcctctcttcactataaatcgccactcttcgtgttctccacttcaccaactccttcaaacttattaacactttccttagttcaatatggggaagcccttcttcactctctctctttcttccctttgcttgctactcttgtcgagtgcatgctattacctccagcaagttcaacgagtgccaactcaacaacctcaacgcgttggaacccgaccaccgcgttgagtccgaaggtggtcttattgaaacatggaactctcaacaccctgagctgcaatgcgccggtgtcactgtttccaaacgcaccctcaaccgcaacggcctccacttgccatcttactcaccttatccccaaatgatcattgtcgttcaaggtgcgtaatattagtaagagtatttatcagcttaacgtgataacaataatagtaatatgaaatatttattaaatttttataattaatctctgctagaaaatttgattaatcattttagtagaatttgtttttctcaactagg

SEQ ID NO: 3225 - DNA, 658 bp, Artificial
  Mutations within GlyA3B4 introduced by GmGlyA3B4_T02TALE nuclease
gttcatgtacggttgcagatataaacgaagcatagcttatgtatgaggtgtaacaaaattggaaacaatagccatgcaaggtgaagaatgtcaccaactcagaaacccttcttcattgacgtgtccctcactcactctcctctcttcactataaatcgccactcttcgtgttctccacttcaccaactccttcaaacttattaacactttccttagttcaatatggggaagcccttcttcactctctctctttcttccctttgcttgctactcttgtctattacctccagcaagttcaacgagtgccaactcaacaacctcaacgcgttggaacccgaccaccgcgttgagtccgaaggtggtcttattgaaacatggaactctcaacaccctgagctgcaatgcgccggtgtcactgtttccaaacgcaccctcaaccgcaacggcctccacttgccatcttactcaccttatccccaaatgatcattgtcgttcaaggtgcgtaaatattagtaagaagtatttatcagcttaacgtgataacaataatagtaatatgaaatatttattaaattttttataattaatctctgctagaaaatttgattaatctttttagtagaattgttttttctcaactaggtttaaaacaccaca

SEQ ID NO: 3226 - DNA, 682 bp, Artificial
  Mutations within GlyA3B4 introduced by GmGlyA3B4_T02TALE nuclease
gttcatgtacggttgcagatataaacgaagcatagcttatgtatgaggtgtaacaaaattggaaacaatagccatgcaaggtgaagaatgtcaccaactcagaaacccttcttcattgacgtgtccctcactcactctcctctcttcactataaatcgccactcttcgtgttctccacttcaccaactccttcaaacttattaacactttccttagttcaatatggggaagcccttcttcactctctctctttcttccctttgcttgctactcttgtcgagtgcatcatctcgtacctcaatgcaaagcgattcgatcgccaagtgccaatctacaaaccaacttcaaacgcgttggaacccgaccaccgcgttgagtccgaaggtggtcttattgaaacatggaactctcaacaccctgagctgcaatgcgccggtgtcactgtttccaaacgcaccctcaaccgcaacggcctccacttgccatcttactcaccttatccccaaatgatcattgtcgttcaaggtgcgtaatattagtaagaagtatttatcagcttaacgtgataacaataatagtaatatgaaatatttattaaatttttataattaatctctgctagaaaatttgattaatcatttttagtagaatttgtttttctcaactaggttttaaaacacca

SEQ ID NO: 3227 - DNA, 662 bp, Artificial; identical to SEQ ID NO: 1931
  Mutations within GlyA3B4 introduced by GmGlyA3B4_T02TALE nuclease

SEQ ID NO: 3228 - DNA, 657 bp, Artificial
  Mutations within GlyA3B4 introduced by GmGlyA3B4_T02TALE nuclease
gttcatgtacggttgcagatataaacgaagcatagcttatgtatgaggtgtaacaaaattggaaacaatagccatgcaaggtgaagaatgtcaccaactcagaaacccttcttcattgacgtgtccctcactcactctcctctcttcactataaatcgccactcttcgtgttctccacttcaccaactccttcaaacttattaacactttccttagttcaatatggggaagcccttcttcactctctctctttcttccctttgcttgctactcttgtcgagtgctacctccagcaagttcaacgagtgccaactcaacaacctcaacgcgttggaacccgaccaccgcgttgagtccgaaggtggtcttattgaaacatggaactctcaacaccctgagctgcaatgcgccggtgtcactgtttccaaacgcaccctcaaccgcaacggcctccacttgccatcttactcaccttatccccaaatgatcattgtcgttcaaggtgcgtaatattagtaagaagtatttatcagcttaacgtgataacaataatagtaatatgaaatatttattaaatttttataattaatctctgctagaaaatttgattaatcattttagtagaatttgttttctcaactaggttttaaaacacca

SEQ ID NO: 3229 - DNA, 670 bp, Artificial
  Mutations within GlyA3B4 introduced by GmGlyA3B4_T02TALE nuclease
gttcatgtacggttgcagatataaacgaagcatagcttatgtatgaggtgtaacaaaattggaaacaatagccatgcaaggtgaagaatgtcaccaactcagaaaccccttcttcattgacgtgtccctcactcactctcctctcttcactataaatcgccactcttcgtgttctccacttcaccaactccttcaaacttattaacactttccttagttcaatatggggaagcccttcttcactctctctctttcttccctttgcttgctactcttgtcgagtgctttgctattacctccagcaagttcaacgagtgccaactcaacaacctcaacgcgttggaacccgaccaccgcgttgagtccgaaggtggtcttattgaaacatggaactctcaacaccctgagctgcaatgcgccggtgtcactgtttccaaacgcaccctcaaccgcaacggcctccacttgccatcttactcaccttatccccaaatgatcattgtcgttcaaggtgcgtaatattagtaagagtatttatcagcttaacgtgataacaataatagtaatatgaaaatatttattaaatttttataattaatctctgctagaaaatttgattaatcattttagtagaatttgtttttctcaactaggtttttaaaacaccaca

SEQ ID NO: 3230 - DNA, 635 bp, Artificial
  Mutations within GlyA3B4 introduced by GmGlyA3B4_T02TALE nuclease
  misc_feature (531): n is a or c or t or g
gttcatgtacggttgcagatataaacgaagcatagcttatgtatgaggtgtaacaaaattggaaacaatagccatgcaaggtgaagaatgtcaccaactcagaaaccccttcttcattgacgtgtccctcactcactctcctctcttcactataaatcgccactcttcgtgttctccacttcaccaactccttcaaacttattaacactttccttagttcaatatggggaagcccttcttcactctctctctttcttccctttgcttgctactcttgtcgagtgcatgctattacctccagcaagttcaacgagtgccaactcaacaacctcaacgcgttggaacccgaccaccgcgttgagtccgaaggtggtcttattgaaacatggaactctcaacaccctgagctgcaatgcgccggtgtcactgtttccaaacgcaccctcaaccgcaacggcctccacttgccatcttactcaccttatccccaaatgatcattgtcgttcaaggtgcgtaatattagtaagagnatttatcagcttaacgtgatacaatatagtaatatgaaatatttattaaatttttataattaatctctgctagaaaatttgattaatcattttagtagaatttg

SEQ ID NO: 3231 - DNA, 651 bp, Artificial; identical to SEQ ID NO: 1918
  Mutations within GlyA3B4 introduced by GmGlyA3B4_T02TALE nuclease

SEQ ID NO: 3232 - DNA, 637 bp, Artificial
  Mutations within GlyA3B4 introduced by GmGlyA3B4_T02TALE nuclease
gttcatgtacggttgcagatataaacgaagcatagcttatgtatgaggtgtaacaaaattggaaacaatagccatgcaaggtgaagaatgtcaccaactcagaaacccttcttcattgacgtgtccctcactcactctcctctcttcactataaatcgccactcttcgtgttctccacttcaccaactccttcaaacttattaacactttccttagttcaatatggagcaatgcccttcttcactctctctctttcttccctttgcttgctactcttgtcgagtgcattattacctccagcaagttcaacgagtgccaactcaacaacctcaacgcgttggaacccgaccaccgcgttgagtccgaaggtggtcttattgaaacatggaactctcaacaccctgagctgcaatgcgccggtgtcactgtttccaaacgcaccctcaaccgcaacggcctccacttgccatcttactcaccttatccccaaatgatcattgtcgttcaaggtgcgtaatattagtaagaagtatttatcagcttaacgtgataacaataatagtaatatgaaatatttattaaatttttataattaatctctgctagaaaatttgattaatcattttagtagaatttg

SEQ ID NO: 3233 - DNA, 660 bp, Artificial
  Mutations within GlyA3B4 introduced by GmGlyA3B4_T02TALE nuclease
gttcatgtacggttgcagatataaacgaagcatagcttatgtatgaggtgtaacaaaattggaaacaatagccatgcaaggtgaagaatgtcaccaactcagaaacccttcttcattgacgtgtccctcactcactctcctctcttcactataaatcgccactcttcgtgttctccacttcaccaactccttcaaacttattaacactttccttagttcaatatggggaagcccttcttcactctctctctttcttccctttgcttgctactcttgtcgagtgcatgctacctccagcaagttcaacgagtgccaactcaacaacctcaacgcgttggaacccgaccaccgcgttgagtccgaaggtggtcttattgaaacatggaactctcaacaccctgagctgcaatgcgccggtgtcactgtttccaaacgcaccctcaaccgcaacggcctccacttgccatcttactcaccttatccccaaatgatcattgtcgttcaaggtgcgtaatattagtaagaagtatttatcagcttaacgtgataacaatatagtaatatgaaatatttattaaatttttcataattaatctctgctagaaaatttgattaatcattttagtagaatttgttttctcaactaggttttaaacacca

SEQ ID NO: 3234 - DNA, 641 bp, Artificial
  Mutations within GlyA3B4 introduced by GmGlyA3B4_T02TALE nuclease
gttcatgtacggttgcagatataaacgaagcatagcttatgtatgaggtgtaacaaaattggaaacaatagccatgcaaggtgaagaatgtcaccaactcagaaacccttcttcattgacgtgtccctcactcactctcctctcttcactataaatcgccactcttcgtgttctccacttcaccaactccttcaaacttattaacactttccttagttcaatatggggaagcccttcttcactctctctctttcttccctttgctattacctccagcaagttcaacgagtgccaactcaacaacctcaacgcgttggaacccgaccaccgcgttgagtccgaaggtggtcttattgaaacatggaactctcaacacccctgagctgcaatgcgccggtgtcactgtttccaaacgcaccctcaaccgcaacggcctccacttgccatcttactcaccttatccccaaatgatcattgtcgttcaaggtgcgtaatattagtaagaagtatttatcagcttaacgtgataacaataatagtaatatgaaatatttattaaattttttataattaatctctgctagaaaatttgattaatcatttttagtagaatttgttttttctcaactaggttttaaaac

SEQ ID NO: 3235 - DNA, 661 bp, Artificial
  Mutations within GlyA3B4 introduced by GmGlyA3B4_T02TALE nuclease
gttcatgtacggttgcagatataaacgaagcatagcttatgtatgaggtgtaacaaaattggaaacaatagccatgcaaggtgaagaatgtcaccaactcagaaacccttcttcattgacgtgtccctcactcactctcctctcttcactataaatcgccactcttcgtgttctccacttcaccaactccttcaaacttattaacactttccttagttcaatatggggaagcccttcttcactctctctctttcttccctttgcttgctactcttgtcgagtgctttacctccagcaagttcaacgagtgccaactcaacaacctcaacgcgttggaacccgaccaccgcgttgagtccgaaggtggtcttattgaaacatggaactctcaacaccctgagctgcaatgcgccggtgtcactgtttccaaacgcaccctcaaccgcaacggcctccacttgccatcttactcaccttatccccaaatgatcattgtcgttcaaggtgcgtaatattagtaagaagtatttatcagcttaacgtgataacaataatagtaatatgaaatatttattaaatttttataattaatctctgctagaaaatttgattaatcattttagtagaatttgtttttctcaactaggtttttaaaacacca

SEQ ID NO: 3236 - DNA, 650 bp, Artificial; identical to SEQ ID NO: 2169
  Mutations within GlyA3B4 introduced by GmGlyA3B4_T02TALE nuclease

SEQ ID NO: 3237 - DNA, 499 bp, Artificial
  Mutations within GlyA3B4 introduced by GmGlyA3B4_T02TALE nuclease
gttcatgtacggttgcagatataaacgaagcatagcttatgtatgaggtgtaacaaaattggaaacaatagccatgcaaggtgaagaatgtcaccaactcagaaacccttcttcattgacgtgtccctcactcactctcctctcttcactataaatcgccactcttcgtgttctccacttcaccaactccttcaaacttattaacactttccttagttcaatatggggaagcccttcttcactctctctctttcttccctttgcttgctactcttgtcgagtgcataccctgagctgcaatgcgccggtgtcactgtttccaaacgcaccctcaaccgcaacggcctccacttgccatcttactcaccttatccccaaatgatcattgtcgttcaaggtgcgtaatattagtaagaagtatttatcagcttaacgtgataacaataatagtaatatgaaatatttattaaattttttataattaatctctgctagaaaa

SEQ ID NO: 3238 - DNA, 669 bp, Artificial
  Mutations within GlyA3B4 introduced by GmGlyA3B4_T02TALE nuclease
gttcatgtacggttgcagatataaacgaagcatagcttatgtatgaggtgtaacaaaattggaaacaatagccatgcaaggtgaagaatgtcaccaactcagaaacccttcttcattgacgtgtccctcactcactctcctctcttcactataaatcgccactcttcgtgttctccacttcaccaactccttcaaacttattaacactttccttagttcaatatggggaagcccttcttcactctctctctttcttccctttgcttgctactcttgtcgagtgcatttgctattacctccagcaagttcaacgagtgccaactcaacaacctcaacgcgttggaacccgaccaccgcgttgagtccgaaggtggtcttattgaaacatggaactctcaacaccctgagctgcaatgcgccggtgtcactgtttccaaacgcaccctcaaccgcaacggcctccacttgccatcttactcaccttatccccaaatgatcattgtcgttcaaggtgcgtaatattagtaagaagtatttatcagcttaacgtgataacaataatagtaatatgaaatatttattaaatttttataattaatctctgctagaaaatttgattaatcattttagtagaatttgtttttctcaactaggttttaaaacaccaca

SEQ ID NO: 3239 - DNA, 580 bp, Artificial
  Mutations within GlyA3B4 introduced by GmGlyA3B4_T02TALE nuclease
gttcatgtacggttgcagatataaacgaagcatagcttatgtatgaggtgtaacaaaattggaaacaatagccatgcaaggtgaagaatgtcaccaactcagaaacccttcttcattgacgtgtccctcactcactctcctctcttcactataaatcgccactcttcgtgttctccacttcaccaactccttcaaacttattaacactttccttagttcaatacctccagcaagttcaacgagtgccaactcaacaacctcaacgcgttggaacccgaccaccgcgttgagtccgaaggtggtcttattgaaacatggaactctcaacaccctgagctgcaatgcgccggtgtcactgtttccaaacgcaccctcaaccgcaacggcctccacttgccatcttactcaccttatcccccaaatgatcattgtcgttcaaggtgcgtaatattagtaagaagtatttatcagcttaacgtgataacaataatagtaatatgaaatatttattaaattttttataattaatctctgctagaaaatttgattaatcatttttagtagaatttgtttttctcaa

SEQ ID NO: 3240 - DNA, 601 bp, Artificial
  Mutations within GlyA3B4 introduced by GmGlyA3B4_T02TALE nuclease
gttcatgtacggttgcagatataaacgaagcatagcttatgtatgaggtgtaacaaaattggaaacaatagccatgcaaggtgaagaatgtcaccaactcagaaacccttcttcattgacgtgtccctcactcactctcctctcttcactataaatcgccactcttcgtgttctccacttcaccaactccttcaaacttattaacactttccttagttcaatatggggaagcccttcttcactctctctctttcttccctttgcttgctactcttgtcgagtgcaacctccagcaagttcaacgagtgccaactcaacaacctcaacgcgttggaacccgaccaccgcgttgagtccgaaggtggtcttattgaaacatggaactctcaacaccctgagctgcaatgcgccggtgtcactgtttccaaacgcaccctcaaccgcaacggcctccacttgccatcttactcaccttatcccccaaatgatcattgtcgttcaaggtgcgtaatattagtaagaagtatttatcagcttaacgtgataacaataatagtaatatgaaatatttattaaattttttataattaatctctgctag

SEQ ID NO: 3241 - DNA, 635 bp, Artificial; identical to SEQ ID NO: 583
  Mutations within GlyA3B4 introduced by GmGlyA3B4_T02TALE nuclease

SEQ ID NO: 3242 - DNA, 652 bp, Artificial
  Mutations within GlyA3B4 introduced by GmGlyA3B4_T02TALE nuclease
  misc_feature (283): n is a or c or t or g
gttcatgtacggttgcagatataaacgaagcatagcttatgtatgaggtgtaacaaaattggaaacaatagccatgcaaggtgaagaatgtcaccaactcagaaacccttcttcattgacgtgtccctcactcactctcctctcttcactataaatcgccactcttcgtgttctccacttcaccaactccttcaaacttattaacactttccttagttcaatatggggaagcccttcttcactctctctctttcttccctttgcttgctactcttgtcgagtnttacctccagcaagttcaacgagtgccaactcaacaacctcaacgcgttggaacccgaccaccgcgttgagtccgaaggtggtcttattgaaacatggaactctcaacaccctgagctgcaatgcgccggtgtcactgtttccaaacgcaccctcaaccgcaacggcctccacttgccatcttactcaccttatccccaaatgatcattgtcgttcaaggtgcgtaatattagtaagaagtatttatcagcttaacgtgataacaataatagtaatatgaaatatttattaaatttttataattaatctctgctagaaaatttgattaatcattttagtagaatttgttttctcaactaggttttaaaa

SEQ ID NO: 3243 - DNA, 638 bp, Artificial
  Mutations within GlyA3B4 introduced by GmGlyA3B4_T02TALE nuclease
gttcatgtacggttgcagatataaacgaagcatagcttatgtatgaggtgtaacaaaattggaaacaatagccatgcaaggtgaagaatgtcaccaactcagaaacccttcttcattgacgtgtccctcactcactctcctctcttcactataaatcgccactcttcgtgttctccacttcaccaactccttcaaacttattaacactttccttagttcaatatggggaagcccttcttcactctctctctttcttccctttgcttgctactcttgtcgagtgcatgcttccagcaagttcaacgagtgccaactcaacaacctcaacgcgttggaacccgaccaccgcgttgagtccgaaggtggtcttattgaaacatggaactctcaacaccctgagctgcaatgcgccggtgtcactgtttccaaacgcaccctcaaccgcaacggcctccacttgccatcttactcaccttatccccaaatgatcattgtcgttcaaggtgcgtaatattagtaagaagtatttatcagcttaacgtgataacaatatagtaatatgaaatatttattaaatttttataattaatctctgctagaaaatttgattaatcattttagtagaatttgttttctca

SEQ ID NO: 3244 - DNA, 636 bp, Artificial; identical to SEQ ID NO: 1845
  Mutations within GlyA3B4 introduced by GmGlyA3B4_T02TALE nuclease

SEQ ID NO: 3245 - DNA, 658 bp, Artificial
  Mutations within GlyA3B4 introduced by GmGlyA3B4_T02TALE nuclease
gttcatgtacggttgcagatataaacgaagcatagcttatgtatgaggtgtaacaaaattggaaacaatagccatgcaaggtgaagaatgtcaccaactcagaaacccttcttcattgacgtgtccctcactcactctcctctcttcactataaatcgccactcttcgtgttctccacttcaccaactccttcaaacttattaacactttccttagttcaatatggggaagcccttcttcactctctctctttcttccctttgcttgctactcttgtcgagtgcattattacctccagcaagttcaacgagtgccaactcaacaacctcaacgcgttggaacccgaccaccgcgttgagtccgaaggtggtcttattgaaacatggaactctcaacaccctgagctgcaatgcgccggtgtcactgtttccaaacgcaccctcaaccgcaacggcctccacttgccatcttactcaccttatccccaaatgatcattgtcgttcaaggtgcgtaatattagtaagaagtatttatcagcttaacgtgataacaataatagtaatatgaaatatttattaaatttttataattaatctctgctagaaaatttgattaatcattttagtagaatttgtttttctcaactaggttttaaaa

SEQ ID NO: 3246 - DNA, 662 bp, Artificial; identical to SEQ ID NO: 2662
  Mutations within GlyA3B4 introduced by GmGlyA3B4_T02TALE nuclease

SEQ ID NO: 3247 - DNA, 514 bp, Artificial
  Mutations within GlyA3B4 introduced by GmGlyA3B4_T02TALE nuclease
gttcatgtacggttgcagatataaacgaagcatagcttatgtatgaggtgtaacaaaattggaaacaatagccatgcaaggtgaagaatgtcaccaactcagaaacccttcttcattgacgtgtccctcactcactctcctctcttcactataaatcgccactcttcgtgttctccacttcaacaacctcaacgcgttggaacccgaccaccgcgttgagtccgaaggtggtcttattgaaacatggaactctcaacaccctgagctgcaatgcgccggtgtcactgtttccaaacgcaccctcaaccgcaacggcctccacttgccatcttactcaccttatccccaaatgatcattgtcgttcaaggtgcgtaatattagtaagaagtattttatcagcttaacgtgataacaataatagtaatatgaaatatttattaaattttttataattaatctctgctagaaaatttgattaatcatttttagtagaatttgtttttctcaactagg

SEQ ID NO: 3248 - DNA, 677 bp, Artificial
  Mutations within GlyA3B4 introduced by GmGlyA3B4_T02TALE nuclease
gttcatgtacggttgcagatataaacgaagcatagcttatgtatgaggtgtaacaaaattggaaacaatagccatgcaaggtgaagaatgtcaccaactcagaaacccttcttcattgacgtgtccctcactcactctcctctcttcactataaatcgccactcttcgtgttctccacttcaccaactccttcaaacttattaacactttccttagttcaatatggggaagcccttcttcactctctctctttcttccctttgcttgctactcttgtcgagcgcagagttattctttgataaatgatgactatgagtcagactcaatagaatttgatcaatccttttttctgtcgttaaggtagaaaactgaactattacctccagtaagttcaacgagtgccaactcaacaacctcaacgcgttggaacccgaccaccgcgttgagtccgaaggtggtcttattgaaacatggaactctcaacaccctgagctgcaatgcgccggtgtcactgtttccaaacgcaccctcaaccgcaacggcctccacttgccatcttactcaccttatccccaaatgatcattgtcgttcaaggtgcgtaatattagtaagaagtatttatcagcttaacgtgataacaataatagtaatatgaaaatatttattaaatttttat

SEQ ID NO: 3249 - DNA, 666 bp, Artificial; identical to SEQ ID NO: 2860
  Mutations within GlyA3B4 introduced by GmGlyA3B4_T02TALE nuclease
  misc_feature (530): n is a or c or t or g

SEQ ID NO: 3250 - DNA, 646 bp, Artificial
  Mutations within GlyA3B4 introduced by GmGlyA3B4_T02TALE nuclease
gttcatgtacggttgcagatataaacgaagcatagcttatgtatgaggtgtaacaaaattggaaacaatagccatgcaaggtgaagaatgtcaccaactcagaaacccttcttcattgacgtgtccctcactcactctcctctcttcactataaatcgccactcttcgtgttctccacttcaccaactccttcaaacttattaacactttccttagttcaatatggggaagcccttcttcactctctctctttcttccctttgcttgctactcttgtcgagtgttgctattacctccagcaagttcaacgagtgccaactcaacaacctcaacgcgttggaacccgaccaccgcgttgagtccgaaggtggtcttattgaaacatggaactctcaacaccctgagctgcaatgcgccggtgtcactgtttccaaacgcaccctcaaccgcaacggcctccacttgccatcttactcaccttatccccaaatgatcattgtcgttcaaggtgcgtaatattagtaagaagtatttatcagcttaacgtgataacaataatagtaatatgaaatatttattaaatttttataattaatctctgctagaaaatttgattaatcattttagtagaatttgttttctcaac

SEQ ID NO: 3251 - DNA, 506 bp, Artificial
  Mutations within GlyA3B4 introduced by GmGlyA3B4_T02TALE nuclease
gttcatgtacggttgcagatataaacgaagcatagcttatgtatgaggtgtaacaaaattggaaacaatagccatgcaaggtgaagaatgtcaccaactcagaaacccttcttcattgacgtgtccctcactcactctcctctcttcactataaatcgccactcttcgtgttctccacttcaccaactccttcaaacttattaacactttccagcaagttcaacgagtgccaactcaacaacctcaacgcgttggaacccgaccaccgcgttgagtccgaaggtggtcttattgaaacatggaactctcaacaccctgagctgcaatgcgccggtgtcactgtttccaaacgcaccctcaaccgcaacggcctccacttgccatcttactcaccttatccccaaaatgatcattgtcgttcaaggtgcgtaatattagtaagaagtatttatcagcttaacgtgataacaataatagtaatatgaaatatttattaaattttttat

SEQ ID NO: 3252 - DNA, 645 bp, Artificial
  Mutations within GlyA3B4 introduced by GmGlyA3B4_T02TALE nuclease
gttcatgtacggttgcagatataaacgaagcatagcttatgtatgaggtgtaacaaaattggaaacaatagccatgcaaggtgaagaatgtcaccaactcagaaacccttcttcattgacgtgtccctcactcactctcctctcttcactataaatcgccactcttcgtgttctccacttcaccaactccttcaaacttattaacactttccttagttcaatatggggaagcccttcttcactctctctctttcttccctttgcttgctactcttgtcgagtgctacctccagcaagttcaacgagtgccaactcaacaacctcaacgcgttggaacccgaccaccgcgttgagtccgaaggtggtcttattgaaacatggaactctcaacaccctgagctgcaatgcgccggtgtcactgtttccaaacgcaccctcaaccgcaacggcctccacttgccatcttactcaccttatccccaaatgatcattgtcgttcaaggtgcgtaatattagtaagaagtatttatcagcttaacgtgataacaataatagtaatatgaaatatttattaaatttttataattaatctctgctagaaaatttgattaatcattttagtagaatttgtttttctcaactagg

SEQ ID NO: 3253 - DNA, 637 bp, Artificial
  Mutations within GlyA3B4 introduced by GmGlyA3B4_T02TALE nuclease
gttcatgtacggttgcagatataaacgaagcatagcttatgtatgaggtgtaacaaaaattggaaacaatagccatgcaaggtgaagaatgtcaccaactcagaaacccttcttcattgacgtgtccctcactcactctcctctcttcactataaatcgccactcttcgtgttctccacttcaccaactccttcaaacttattaacactttccttagttcaatatggggaagcccttcttcactctctctctttcttccctttgcttgctactcttgtcgagtgcatctattacctccagcaagttcaacgagtgccaactcaacaacctcaacgcgttggaacccgaccaccgcgttgagtccgaaggtggtcttattgaaacatggaactctcaacaccctgagctgcaatgcgccggtgtcactgtttccaaacgcaccctcaaccgcaacggcctccacttgccatcttactcaccttatccccaaatgatcattgtcgttcaaggtgcgtaatattagtaagaagtatttatcagcttaacgtgataacaataatagtaatatgaaatatttattaaatttttataattaatctctgctagaaaatttgattaatcattttagtagaatttg

SEQ ID NO: 3254 - DNA, 655 bp, Artificial; identical to SEQ ID NO: 2000
  Mutations within GlyA3B4 introduced by GmGlyA3B4_T02TALE nuclease

SEQ ID NO: 3255 - DNA, 557 bp, Artificial
  Mutations within GlyA3B4 introduced by GmGlyA3B4_T02TALE nuclease
gttcatgtacggttgcagatataaacgaagcatagcttatgtatgaggtgtaacaaaattggaaacaatagccatgcaaggtgaagaatgtcaccaactcagaaacccttcttcattgacgtgtccctcactcactctcctctcttcactataaatcgccactcttcgtgttctccacttcaccaacctccagcaagttcaacgagtgccaactcaacaacctcaacgcgttggaacccgaccaccgcgttgagtccgaaggtggtcttattgaaacatggaactctcaacaccctgagctgcaatgcgccggtgtcactgtttccaaacgcaccctcaaccgcaacggcctccacttgccatcttactcaccttatccccaaatgatcattgtcgttcaaggtgcgtaatattagtaagaagtatttatcagcttaacgtgataacaataatagtaatatgaaatatttattaaattttttataattaatctctgctagaaaatttgattaatcatttttagtagaatttgtttttctcaactaggtttttaaaca

SEQ ID NO: 3256 - DNA, 625 bp, Artificial
  Mutations within GlyA3B4 introduced by GmGlyA3B4_T02TALE nuclease
gttcatgtacggttgcagatataaacgaagcatagcttatgtatgaggtgtaacaaaattggaaacaatagccatgcaaggtgaagaatgtcaccaactcagaaacccttcttcattgacgtgtccctcactcactctcctctcttcactataaatcgccactcttcgtgttctccacttcaccaactccttcaaacttattaacactttccttagttcaatatggggaagcccttcttcactctctctctttcttccctttgcttgctactcttgtcgagtgccaactcaacaacctcaacgcgttggaacccgaccaccgcgttgagtccgaaggtggtcttattgaaacatggaactctcaacaccctgagctgcaatgcgccggtgtcactgtttccaaacgcaccctcaaccgcaacggcctccacttgccatcttactcaccttatccccaaatgatcattgtcgttcaaggtgcgtaatattagtaagaagtatttatcagcttaacgtgataacaataatagtaatatgaaatatttattaattttttataattaatctctgctagaaaatttgattaatcatttttagtagaatttgtttttctcaactaggtttt

SEQ ID NO: 3257 - DNA, 635 bp, Artificial; identical to SEQ ID NO: 2618
  Mutations within GlyA3B4 introduced by GmGlyA3B4_T02TALE nuclease
  misc_feature (530): n is a or c or t or g

SEQ ID NO: 3258 - DNA, 664 bp, Artificial
  Mutations within GlyA3B4 introduced by GmGlyA3B4_T02TALE nuclease
gttcatgtacggttgcagatataaacgaagcatagcttatgtatgaggtgtaacaaaattggaaacaatagccatgcaaggtgaagaatgtcaccaactcagaaacccttcttcattgacgtgtccctcactcactctcctctcttcactataaatcgccactcttcgtgttctccacttcaccaactccttcaaacttattaacactttccttagttcaatatggggaagcccttcttcactctctctctttcttccctttgcttgctactcttgtcgagtgcatgctattacctccagcaagttcaacgagtgccaactcaacaacctcaacgcgttggaacccgaccaccgcgttgagtccgaaggtggtcttattgaaacatggaactctcaacaccctgagctgcaatgcgccggtgtcactgtttccaaacgcaccctcaaccgcaacggcctccacttgccatcttactcaccttatccccaaatgatcattgtcgttcaaggtgcgtaatattagtaagagtatttatcagcttaacgtgatacaatatagtaatatgaaatatttattaaatttttataattaatctctgctagaaaatttgattaatcattttagtagaatttgttttctcaactaggtttttaaaacaccaca

SEQ ID NO: 3259 - DNA, 647 bp, Artificial; identical to SEQ ID NO: 2514
  Mutations within GlyA3B4 introduced by GmGlyA3B4_T02TALE nuclease

SEQ ID NO: 3260 - DNA, 662 bp, Artificial; identical to SEQ ID NO: 2662
  Mutations within GlyA3B4 introduced by GmGlyA3B4_T02TALE nuclease

SEQ ID NO: 3261 - DNA, 663 bp, Artificial; identical to SEQ ID NO: 1925
  Mutations within GlyA3B4 introduced by GmGlyA3B4_T02TALE nuclease

SEQ ID NO: 3262 - DNA, 598 bp, Artificial
  Mutations within GlyA3B4 introduced by GmGlyA3B4_T02TALE nuclease
gttcatgtacggttgcagatataaacgaagcatagcttatgtatgaggtgtaacaaaattggaaacaatagccatgcaaggtgaagaatgtcaccaactcagaaacccttcttcattgacgtgtccctcactcactctcctctcttcactataaatcgccactcttcgtgttctccacttcaccaactccttcaaacttattaacactttccttagttcaatatggggaagcccttcttcactctctctctttcttccctttgcttgctactcttgtcgagtacctccagcaagttcaacgagtgccaactcaacaacctcaacgcgttggaacccgaccaccgcgttgagtccgaaggtggtcttattgaaacatggaactctcaacaccctgagctgcaatgcgccggtgtcactgtttccaaacgcaccctcaaccgcaacggcctccacttgccatcttactcaccttatccccaaatgatcattgtcgttcaaggtgcgtaaatattagtaagaagtatttatcagcttaacgtgataacaataatagtaatatgaaatatttattaaattttttataattaatctctgctag

SEQ ID NO: 3263 - DNA, 617 bp, Artificial; identical to SEQ ID NO: 2637
  Mutations within GlyA3B4 introduced by GmGlyA3B4_T02TALE nuclease

SEQ ID NO: 3264 - DNA, 661 bp, Artificial
  Mutations within GlyA3B4 introduced by GmGlyA3B4_T02TALE nuclease
gttcatgtacggttgcagatataaacgaagcatagcttatgtatgaggtgtaacaaaattggaaacaatagccatgcaaggtgaagaatgtcaccaactcagaaacccttcttcattgacgtgtccctcactcactctcctctcttcactataaatcgccactcttcgtgttctccacttcaccaactccttcaaacttattaacactttccttagttcaatatggggaagcccttcttcactctctctctttcttccctttgcttgctactcttgtcgagtgcatattacctccagcaagttcaacgagtgccaactcaacaacctcaacgcgttggaacccgaccaccgcgttgagtccgaaggtggtcttattgaaacatggaactctcaacaccctgagctgcaatgcgccggtgtcactgtttccaaacgcaccctcaaccgcaacggcctccacttgccatcttactcaccttatccccaaatgatcattgtcgttcaaggtgcgtaatattagtaagaagtatttatcagcttaacgtgataacaatatagtaatatgaaatatttattaaatttttataattaatctctgctagaaaatttgattaatcattttagtagaatttgtttttctcaactaggttttaaaacacca

SEQ ID NO: 3265 - DNA, 578 bp, Artificial
  Mutations within GlyA3B4 introduced by GmGlyA3B4_T02TALE nuclease
gttcatgtacggttgcagatataaacgaagcatagctcatgtatgaggtgtaacaaaattggaaacaatagccatgcaaggtgaagaatgtcaccaactcagaaacccttcttcattgacgtgtccctcactcactctcctctcttcactataaatcgccactcttcgtgttctccacttcaccaactccttcaaacttattaacactttccttagttcaatatggggaagcccttcttcactctctctctttcttccctttgcttgctactcttgtcgagtgccaactcaacaacctcaacgcgttggaacccgaccaccgcgttgagtccgaaggtggtctttattgaaacatggaactctcaacaccctgagctgcaatgcgccggtgtcactgttttccaaaacgcaccctcaaccgcaacggcctccacttgccatcttactcaccttatccccaaatgatcattgtcgttcaaggtgcgtaatattagtaagaagtatttatcagcttaacgtgataacaataatagtaatatgaaatatttattaaattttttataattaatctctgctag

SEQ ID NO: 3266 - DNA, 659 bp, Artificial
  Mutations within GlyA3B4 introduced by GmGlyA3B4_T02TALE nuclease
gttcatgtacggttgcagatataaacgaagcatagcttatgtatgaggtgtaacaaaattggaaacaatagccatgcaaggtgaagaatgtcaccaactcagaaacccttcttcattgacgtgtccctcactcactctcctctcttcactataaatcgccactcttcgtgttctccacttcaccaactccttcaaacttattaacactttccttagttcaatatggggaagcccttcttcactctctctctttcttccctttgcttgctactcttgtcttgctattacctccagcaagttcaacgagtgccaactcaacaacctcaacgcgttggaacccgaccaccgcgttgagtccgaaggtggtcttattgaaacatggaactctcaacaccctgagctgcaatgcgccggtgtcactgtttccaaacgcaccctcaaccgcaacggcctccacttgccatcttactcaccttatccccaaatgatcattgtcgttcaaggtgcgtaatattagtaagaagtatttatcagcttaacgtgataacaataatagtaatatgaaatatttattaaatttttataattaatctctgctagaaaatttgattaatcattttagtagaatttgttttctcaactaggtttttaaaacacca

SEQ ID NO: 3267 - DNA, 657 bp, Artificial
  Mutations within GlyA3B4 introduced by GmGlyA3B4_T02TALE nuclease
  misc_feature (531): n is a or c or t or g
gttcatgtacggttgcagatataaacgaagcatagcttatgtatgaggtgtaacaaaattggaaacaatagccatgcaaggtgaagaatgtcaccaactcagaaaccccttcttcattgacgtgtccctcactcactctcctctcttcactataaatcgccactcttcgtgttctccacttcaccaactccttcaaacttattaacactttccttagttcaatatggggaagcccttcttcactctctctctttcttccctttgcttgctactcttgtcgagtgcatgctattacctccagcaagttcaacgagtgccaactcaacaacctcaacgcgttggaacccgaccaccgcgttgagtccgaaggtggtcttattgaaacatggaactctcaacaccctgagctgcaatgcgccggtgtcactgtttccaaacgcaccctcaaccgcaacggcctccacttgccatcttactcaccttatccccaaatgatcattgtcgttcaaggtgcgtaatattagtaagagnatttatcagcttaacgtgataacaatatagtaatatgaaatatttattaaatttttataattaatctctgctagaaaatttgattaatcattttagtagaatttgttttctcaactaggttttaaa

SEQ ID NO: 3268 - DNA, 668 bp, Artificial; identical to SEQ ID NO: 3150
  Mutations within GlyA3B4 introduced by GmGlyA3B4_T02TALE nuclease

SEQ ID NO: 3269 - DNA, 643 bp, Artificial
  Mutations within GlyA3B4 introduced by GmGlyA3B4_T02TALE nuclease
gttcatgtacggttgcagatataaacgaagcatagcttatgtatgaggtgtaacaaaattggaaacaatagccatgcaaggtgaagaatgtcaccaactcagaaacccttcttcattgacgtgtccctcactcactctcctctcttcactataaatcgccactcttcgtgttctccacttcaccaactccttcaaacttattaacactttccttagttcaatatggggaagcccttcttcactctctctctttcttccctttgcttgctactcttgtcgctattacctccagcaagttcaacgagtgccaactcaacaacctcaacgcgttggaacccgaccaccgcgttgagtccgaaggtggtcttattgaaacatggaactctcaacaccctgagctgcaatgcgccggtgtcactgtttccaaacgcaccctcaaccgcaacggcctccacttgccatcttactcaccttatccccaaatgatcattgtcgttcaaggtgcgtaatattagtaagaagtatttatcagcttaacgtgataacaataatagtaatatgaaatatttattaaatttttataattaatctctgctagaaaatttgattaatcattttagtagaatttgttttctcaactagg

SEQ ID NO: 3270 - DNA, 612 bp, Artificial
  Mutations within GlyA3B4 introduced by GmGlyA3B4_T02TALE nuclease
gttcatgtacggttgcagatataaacgaagcatagcttatgtatgaggtgtaacaaaattggaaacaatagccatgcaaggtgaagaatgtcaccaactcagaaacccttcttcattgacgtgtccctcactcactctcctctcttcactataaatcgccactcttcgtgttctccacttcaccaactccttcaaacttattaacactttccttagttcaatatggggaagcccttcttcactccagcaagttcaacgagtgccaactcaacaacctcaacgcgttggaacccgaccaccgcgttgagtccgaaggtggtcttattgaacatggaactctcaacaccctgagctgcaatgcgccggtgtcactgtttccaaacgcaccctcaaccgcaacggcctccacttgccatcttactcaccttatccccaaaatgatcattgtcgttcaaggtgcgtaatattagtaagaagtatttatcagcttaacgtgataacaataatagtaatatgaaatatttattaaattttttataattaatctctgctagaaaatttgatttaatcatttttagtagaatttgtttttctcaactaggttttaaaaca

SEQ ID NO: 3271 - DNA, 660 bp, Artificial; identical to SEQ ID NO: 1783
  Mutations within GlyA3B4 introduced by GmGlyA3B4_T02TALE nuclease

SEQ ID NO: 3272 - DNA, 699 bp, Artificial
  Mutations within GlyA3B4 introduced by GmGlyA3B4_T02TALE nuclease
gttcatgtacggttgcagatataaacgaagcatagcttatgtatgaggtgtaacaaaattggaaacaatagccatgcaaggtgaagaatgtcaccaactcagaaacccttcttcattgacgtgtccctcactcactctcctctcttcactataaatcgccactcttcgtgttctccacttcaccaactccttcaaacttattaacactttccttagttcaatatggggaagcccttcttcactctctctctttcttccctttgcttgctactcttgtcgagtgcatgcagcaccggcaacagccgctggaccgtctccagcgcctgcttgctttgctattacctccagcaagttcaacgagtgccaactcaacaacctcaacgcgttggaacccgaccaccgcgttgagtccgaaggtggtcttattgaaacatggaactctcaacaccctgagctgcaatgcgccggtgtcactgtttccaaacgcaccctcaaccgcaacggcctccacttgccatcttactcaccttatccccaaatgatcattgtcgttcaaggtgcgtaatattagtaagaagtatttatcagcttaacgtgataacaataatagtaatatgaaatatttattaaaattttttataaattaatctctgctagaaaatttgattaatcatttttagtagaatttgtttttctcaa

SEQ ID NO: 3273 - DNA, 661 bp, Artificial
  Mutations within GlyA3B4 introduced by GmGlyA3B4_T02TALE nuclease
gttcatgtacggttgcagatataaacgaagcatagcttatgtatgaggtgtaacaaaattggaaacaatagccatgcaaggtgaagaatgtcaccaactcagaaacccttcttcattgacgtgtccctcactcactctcctctcttcactataaatcgccactcttcgtgttctccacttcaccaactccttcaaacttattaacactttccttagttcaatatggggaagcccttcttcactctctctctttcttccctttgcttgctactcttgtcgagtgcattgctattacctccagcaagttcaacgagtgccaactcaacaacctcaacgcgttggaacccgaccaccgcgttgagtccgaaggtggtcttattgaaacatggaactctcaacaccctgagctgcaatgcgccggtgtcactgtttccaaacgcaccctcaaccgcaacggcctccacttgccatcttactcaccttatccccaaatgatcattgtcgttcaaggtgcgtaatattagtaagagtatttatcagcttaacgtgataacaatatagtaatatgaaaatatttattaaatttttataattaatctctgctagaaaatttgattaatcattttagtagaatttgtttttctcaactaggtttttaaaa

SEQ ID NO: 3274 - DNA, 633 bp, Artificial
  Mutations within GlyA3B4 introduced by GmGlyA3B4_T02TALE nuclease
  misc_feature (528): n is a or c or t or g
gttcatgtacggttgcagatataaacgaagcatagcttatgtatgaggtgtaacaaaattggaaacaatagccatgcaaggtgaagaatgtcaccaactcagaaacccttcttcattgacgtgtccctcactcactctcctctcttcactataaatcgccactcttcgtgttctccacttcaccaactccttcaaacttattaacactttccttagttcaatatggggaagcccttcttcactctctctctttcttccctttgcttgctactcttgtcgagtgcgctattacctccagcaagttcaacgagtgccaactcaacaacctcaacgcgttggaacccgaccaccgcgttgagtccgaaggtggtcttattgaaacatggaactctcaacaccctgagctgcaatgcgccggtgtcactgtttccaaacgcaccctcaaccgcaacggcctccacttgccatcttactcaccttatccccaaatgatcattgtcgttcaaggtgcgtaatattagtaagagnatttatcagcttaacgtgataacaatatagtaatatgaaatatttattaaatttttataattaatctctgctagaaaatttgattaatcattttagtagaatttg

SEQ ID NO: 3275 - DNA, 638 bp, Artificial
  Mutations within GlyA3B4 introduced by GmGlyA3B4_T02TALE nuclease
gttcatgtacggttgcagatataaacgaagcatagcttatgtatgaggtgtaacaaaattggaaacaatagccatgcaaggtgaagaatgtcaccaactcagaaacccttcttcattgacgtgtccctcactcactctcctctcttcactataaatcgccactcttcgtgttctccacttcaccaactccttcaaacttattaacactttccttagttcaatatggggaagcccttcttcactctctctctttcttccctttgcttgctactcttgtcgagtgcataacgagtgccaactcaacaacctcaacgcgttggaacccgaccaccgcgttgagtccgaaggtggtcttattgaaacatggaactctcaacaccctgagctgcaatgcgccggtgtcactgtttccaaacgcaccctcaaccgcaacggcctccacttgccatcttactcaccttatccccaaatgatcattgtcgttcaaggtgcgtaatattagtaagaagtatttatcagcttaacgtgataacaataatagtaatatgaaatatttattaaattttttataattaatctctgctagaaaatttgattaatcatttttagtagaatttgttttttctcaactaggtttt

SEQ ID NO: 3276 - DNA, 668 bp, Artificial
  Mutations within GlyA3B4 introduced by GmGlyA3B4_T02TALE nuclease
gttcatgtacggttgcagatataaacgaagcatagcttatgtatgaggtgtaacaaaattggaaacaatagccatgcaaggtgaagaatgtcaccaactcagaaacccttcttcattgacgtgtccctcactcactctcctctcttcactataaatcgccactcttcgtgttctccacttcaccaactccttcaaacttattaacactttccttagttcaatatggggaagcccttcttcactctctctctttcttccctttgcttgctactcttgtcgagtgcattgctattacctccagcaagttcaacgagtgccaactcaacaacctcaacgcgttggaacccgaccaccgcgttgagtccgaaggtggtcttattgaaacatggaactctcaacaccctgagctgcaatgcgccggtgtcactgtttccaaacgcaccctcaaccgcaacggcctccacttgccatcttactcaccttatccccaaatgatcattgtcgttcaaggtgcgtaatattagtaagaagtattttatcagcttaacgtgataacaataatagtaatatgaaatatttattaaatttttataattaatctctgctagaaaatttgattaatcattttagtagaatttgtttttctcaactaggtttttaaaacacca

SEQ ID NO: 3277 - DNA, 535 bp, Artificial
  Mutations within GlyA3B4 introduced by GmGlyA3B4_T02TALE nuclease
gttcatgtacggttgcagatataaacgaagcatagcttatgtatgaggtgtaacaaaattggaaacaatagccatgcaaggtgaagaatgtcaccaactcagaaacccttcttcattgacgtgtccctcactcactctcctctcttcactataaatcgccactcttcgtgttctccacttcaccaactccttcaaacttattaacactttccttagttcaatatggggaacccgaccaccgcgttgagtccgaaggtggtcttattgaaacatggaactctcaacaccctgagctgcaatgcgccggtgtcactgtttccaaacgcaccctcaaccgcaacggcctccacttgccatcttactcaccttatccccaaatgatcattgtcgttcaaggtgcgtaatattagtaagaagtatttatcagcttaacgtgataacaataatagtaatatgaaatatttattaaattttttataattaatctctgctagaaaatttgattaatcatttttagtagaatttgttttttctc

SEQ ID NO: 3278 - DNA, 604 bp, Artificial
  Mutations within GlyA3B4 introduced by GmGlyA3B4_T02TALE nuclease
gttcatgtacggttgcagatataaacgaagcatagcttatgtatgaggtgtaacaaaattggaaacaatagccatgcaaggtgaagaatgtcaccaactcagaaacccttcttcattgacgtgtccctcactcactctcctctcttcactataaatcgccactcttcgtgttctccacttcaccaactccttcaaacttattaacactttccttagttcaatatggggaagcccttcttcactctctctctttcttccctttgcttgctactcttgtcgagtgccaactcaacaacctcaacgcgttggaacccgaccaccgcgttgagtccgaaggtggtcttattgaaacatggaactctcaacaccctgagctgcaatgcgccggtgtcactgtttccaaacgcaccctcaaccgcaacggcctccacttgccatcttactcaccttatccccaaatgatcattgtcgttcaaggtgcgtaatattagtaagaagtatttatcagcttaacgtgataacaataatagtaatatgaaatatttattaaattttttataatttaatctctgctagaaaatttgattaatcatttttagtagaa

SEQ ID NO: 3279 - DNA, 666 bp, Artificial; identical to SEQ ID NO: 2272
  Mutations within GlyA3B4 introduced by GmGlyA3B4_T02TALE nuclease
  misc_feature (530): n is a or c or t or g

SEQ ID NO: 3280 - DNA, 632 bp, Artificial
  Mutations within GlyA3B4 introduced by GmGlyA3B4_T02TALE nuclease
gttcatgtacggttgcagatataaacgaagcatagcttatgtatgaggtgtaacaaaattggaaacaatagccatgcaaggtgaagaatgtcaccaactcagaaacccttcttcattgacgtgtccctcactcactctcctctcttcactataaatcgccactcttcgtgttctccacttcaccaactccttcaaacttattaacactttccttagttcaatatggggaagcccttcttcactctctctctttcttccctttgcttgctactcttgtcgagtgcatacctccagcaagttcaacgagtgccaactcaacaacctcaacgcgttggaacccgaccaccgcgttgagtccgaaggtggtcttattgaaacatggaactctcaacaccctgagctgcaatgcgccggtgtcactgtttccaaacgcaccctcaaccgcaacggcctccacttgccatcttactcaccttatccccaaatgatcattgtcgttcaaggtgcgtaatattagtaagaagtatttatcagcttaacgtgataacaataatagtaatatgaaaatatttattaaatttttataattaatctctgctagaaaatttgattaatcattttagtagaatttg

SEQ ID NO: 3281 - DNA, 432 bp, Artificial
  Mutations within GlyA3B4 introduced by GmGlyA3B4_T02TALE nuclease
gttcatgtacggttgcagatataaacgaagcatagtcttatgtatgaggtgtaacaaaattggaaacaatagccatgcaaggtgaagaatgtcaccaactcagaaacccttcttcattgacgtgtccctcactcactcttcctctcttcactataaatcgccactcttcgtgttcttccacttcaccaaactccttcaaacttattaacactttccttagttcaatatgggggaagcccttcttcactctctctctttcttccctttgcttgctactcttgtcgagtgcattgctattacctccagcaagttcaacgagtgccaactcaacaacctcaacgcgttggaacccgaccaccgcgttgagtccgaaggtggtcttattgaaacatggaactctcaacaccctgagctgcaatgcgccggtgtcac

SEQ ID NO: 3282 - DNA, 619 bp, Artificial; identical to SEQ ID NO: 2998
  Mutations within GlyA3B4 introduced by GmGlyA3B4_T02TALE nuclease

SEQ ID NO: 3283 - DNA, 622 bp, Artificial; identical to SEQ ID NO: 1968
  Mutations within GlyA3B4 introduced by GmGlyA3B4_T02TALE nuclease

SEQ ID NO: 3284 - DNA, 651 bp, Artificial
  Mutations within GlyA3B4 introduced by GmGlyA3B4_T02TALE nuclease
gttcatgtacggttgcagatataaacgaagcatagcttatgtatgaggtgtaacaaaattggaaacaatagccatgcaaggtgaagaatgtcaccaactcagaaacccttcttcattgacgtgtccctcactcactctcctctcttcactataaatcgccactcttcgtgttctccacttcaccaactccttcaaacttattaacactttccttagttcaatatggggaagcccttcttcactctctctctttcttccctttgcttgctactcttgtcgagtgcatttacctccagcaagttcaacgagtgccaactcaacaacctcaacgcgttggaacccgaccaccgcgttgagtccgaaggtggtcttattgaaacatggaactctcaacaccctgagctgcaatgcgccggtgtcactgtttccaaacgcaccctcaaccgcaacggcctccacttgccatcttactcaccttatccccaaatgatcattgtcgttcaaggtgcgtaatattagtaagaagtatttatcagcttaacgtgataacaataatagtaatatgaaatatttattaaatttttataattaatctctgctagaaaatttgattaatcattttagtagaatttgttttctcaactaggtttt

SEQ ID NO: 3285 - DNA, 651 bp, Artificial
  Mutations within GlyA3B4 introduced by GmGlyA3B4_T02TALE nuclease
gttcatgtacggttgcagatataaacgaagcatagcttatgtatgaggtgtaacaaaattggaaacaatagccatgcaaggtgaagaatgtcaccaactcagaaacccttcttcattgacgtgtccctcactcactctcctctcttcactataaatcgccactcttcgtgttctccacttcaccaactccttcaaacttattaacactttccttagttcaatatggggaagcccttcttcactctctctctttcttccctttgcttgcttcacctccagcaagttcaacgagtgccaactcaacaacctcaacgcgttggaacccgaccaccgcgttgagtccgaaggtggtcttattgaaacatggaactctcaacaccctgagctgcaatgcgccggtgtcactgtttccaaacgcaccctcaaccgcaacggcctccgacttgccatcttactcaccttatccccaaatcgatcattgtcgttcaaggtgcgtaaatattagtaagaagtatttatcagcttaacgtgataacaataatagtaatatgaaatatttattaaattttttataattaatctctgctagaaaatttgattaatcatttttagtagaatttgttttttctcaactaggttttaaacaccaca

SEQ ID NO: 3286 - DNA, 670 bp, Artificial
  Mutations within GlyA3B4 introduced by GmGlyA3B4_T02TALE nuclease
gttcatgtacggttgcagatataaacgaagcatagcttatgtatgaggtgtaacaaaaattggaaacaatagccatgcaaggtgaagaatgtcaccaactcagaaaccccttcttcattgacgtgtcccctcactcactctcctctcttcactataaatcgccactcttcgtgttctccacttcaccaactccttcaaacttattaacactttccttagttcaatatgggggaagcccttcttcactctctctctttcttccctttgcttgctactcttgtcgagtgcatgctattacctccagcaagttcaacgagtgccaactcaacaacctcaacgcgttggaacccgaccaccgcgttgagtccgaaggtggtcttattgaaacatggaactctcaacaccctgagctgcaatgcgccggtgtcactgtttccaaacgcaccctcaaccgcaacggcctccacttgccatcttactcaccttatcccccaaatgatcattgtcgttcaaggtgcgtaatattagtaagagtatttatcagcttaacgtgataacaatatagtaatatgaaatatttattaaatttttataattaatctctgctagaaaatttgattaatcattttagtagaatttgtttttctcaactaggttttaaaacaccaca

SEQ ID NO: 3287 - DNA, 435 bp, Artificial
  Mutations within GlyA3B4 introduced by GmGlyA3B4_T02TALE nuclease
gttcatgtacggttgcagatataaacgaagcatagcttatgtatgaggtgtaacaaaattggaaacaatagccatgcaaggtgaagaatgtcaccaactcagaaacccttcttcattgacgtgtccctcactcactctcctctcttcactataaatcgccactcttcgtgttctccacttcaccaactccttcaaacttattaacactttccttagttcaatatggggaagcccttcttcactctctctctttcttccctttgctattacctccagcaagttcaacgagtgccaactcaacaacctcaacgcgttggaacccgaccaccgcgttgagtccgaaggtggtcattcattgaaacatggaactctcaacaccctgagctgcaaatgcgccggtgtcactgtttccaaacgcaccctcaaccgcaacgg

SEQ ID NO: 3288 - DNA, 559 bp, Artificial
  Mutations within GlyA3B4 introduced by GmGlyA3B4_T02TALE nuclease
gttcatgtacggttgcagatataaacgaagcatagcttatgtatgaggtgtaacaaaattggaaacaatagccatgcaaggtgaagaatgtcaccaactcagaaacccttcttcattgacgtgtccctcactcactctcctctcttcactataaatcgccactcttcgtgttctccacttcaccaactccttcaaacttattaacactttccttagttcaatatggggaagcccttcttcactctctctctttcttccctttgcttgctactcttgtcgagtgcattttgctattacctccagcaagttcaacgagtgccaactcaacaacctcaacgcgttggaacccgaccaccgcgttgagtccgaaggtggtcttattgaaacatggaactctcaacacctgagctgcaatgcgccggtgtcactgtttccaaacgcaccctcaaccgcaacggcctccacttgccatcttactcaccttatccccaaatgatcattgtcgttcaaggtgcgtaatattagtaagaagtatttatcagcttaacgtgataacaat

SEQ ID NO: 3289 - DNA, 663 bp, Artificial; identical to SEQ ID NO: 1819
  Mutations within GlyA3B4 introduced by GmGlyA3B4_T02TALE nuclease

SEQ ID NO: 3290 - DNA, 561 bp, Artificial
  Mutations within GlyA3B4 introduced by GmGlyA3B4_T02TALE nuclease
gttcatgtacggttgcagatataaacgaagcatagcttatgtatgaggtgtaacaaaattggaaacaatagccatgcaaggtgaagaatgtcaccaactcagaaacccttcttcattgacgtgtccctcactcactctcctctcttcactataaatcgccactcttcgtgttctccacttcaccaactccttcaaacttattaacactttccttagttcaatatggggaagcccttcttcactctctctctttcttccctttgcttgctactcttgtcgagtgcattctcaacaccctgagctgcaatgcgccggtgtcactgttttccaaacgcaccctcaaccgcaacggcctccacttgccatcttactcaccttatcccccaaatgatcattgtcgttcaaggtgcgtaatattagtaagaagtatttatcagcttaacgtgataacaataatagtaatatgaaatatttattaaattttttataattaatctctgctagaaaatttgattaatcatttttagtagaatttgtttttctcaactaggtttttaaaca

SEQ ID NO: 3291 - DNA, 644 bp, Artificial
  Mutations within GlyA3B4 introduced by GmGlyA3B4_T02TALE nuclease
gttcatgtacggttgcagatataaacgaagcatagcttatgtatgaggtgtaacaaaattggaaacaatagccatgcaaggtgaagaatgtcaccaactcagaaacccttcttcattgacgtgtccctcactcactctcctctcttcactataaatcgccactcttcgtgttctccacttcaccaactccttcaaacttattaacactttccttagttcaatatggggaagcccttcttcactctctctctttcttccctttgcttgctactcttgtcgagtgcattacctccagcaagttcaacgagtgccaactcaacacctcaacgcgttggaacccgaccaccgcgttgagtccgaaggtggtcttattgaaacatggaactctcaacaccctgagctgcaatgcgccggtgtcactgtttccaaacgcaccctcaaccgcaacggcctccacttgccatcttactcaccttatccccaaatgatcattgtcgttcaaggtgcgtaatattagtaagaagtatttatcagcttaacgtgataacaatatagtaatatgaaatatttattaaatttttataattaatctctgctagaaaatttgattaatcattttagtagaatttgttttctcaactagg

SEQ ID NO: 3292 - DNA, 587 bp, Artificial
  Mutations within GlyA3B4 introduced by GmGlyA3B4_T02TALE nuclease
gttcatgtacggttgcagatataaacgaagcatagcttatgtatgaggtgtaacaaaattggaaacaatagccatgcaaggtgaagaatgtcaccaactcagaaacccttcttcattgacgtgtccctcactcactctcctctcttcactataaatcgccactcttcgtgttctccacttcaccaactccttcaaacttattaacactttccttagttcaatatggggaagcccttcttcactctctctctttcttccctttgcttgctactcttgtcgagtgccaactcaacaacctcaacgcgttggaacccgaccaccgcgttgagtccgaaggtggtcttattgaaacatggaactctcaacaccctgagctgcaatgcgccggtgtcactgtttccaaaacgcaccctcaaccgcaacggcctccacttgccatcttactcaccttatccccaaatgatcattgtcgttcaaggtgcgtaatattagtaagaagtatttatcagcttaacgtgataacaataatagtaatatgaaatatttattaaattttttataattaatctctgctagaaaatttgatt

SEQ ID NO: 3293 - DNA, 668 bp, Artificial
  Mutations within GlyA3B4 introduced by GmGlyA3B4_T02TALE nuclease
gttcatgtacggttgcagatataaacgaagcatagcttatgtatgaggtgtaacaaaattggaaacaatagccatgcaaggtgaagaatgtcaccaactcagaaacccttcttcattgacgtgtccctcgctcactctcctctcttcactataaatcgccactcttcgtgttctccacttcaccaactccttcaaacttattaacactttccttagttcaatatgggggaagcccttcttcactctctctctttcttccctttgcttgctactcttgtcgagtgcatgtttttacctccagcaagttcaacgagtgccaactcaacaacctcaacgcgttggaacccgaccaccgcgttgagtccgaaggtggtcttattgaaacatggaactctcaacaccctgagctgcaatgcgccggtgtcactgtttccaaacgcaccctcaaccgcaacggcctccacttgccatcttactcaccttatccccaaatgatcattgtcgttcaaggtgcgtaatattagtaagaagtatttatcagcttaacgtgataacaataatagtaatatgaaaatatttattaaatttttataattaatctctgctagaaaatttgattaatcattttagtagaatttgtttttctcaactaggtttttaaaacacca

SEQ ID NO: 3294 - DNA, 666 bp, Artificial; identical to SEQ ID NO: 1875
  Mutations within GlyA3B4 introduced by GmGlyA3B4_T02TALE nuclease

SEQ ID NO: 3295 - DNA, 654 bp, Artificial
  Mutations within GlyA3B4 introduced by GmGlyA3B4_T02TALE nuclease
gttcatgtacggttgcagatataaacgaagcatagcttatgtatgaggtgtaacaaaattggaaacaatagccatgcaaggtgaagaatgtcaccaactcagaaacccttcttcattgacgtgtccctcactcactctcctctcttcactataaatcgccactcttcgtgttctccacttcaccaactccttcaaacttattaacactttccttagttcaatatggggaagcccttcttcactctctctctttcttccctttgcttgctactcttgtcgagtgcatacctccagcaagttcaacgagtgccaactcaacaacctcaacgcgttggaacccgaccaccgcgttgagtccgaaggtggtcttattgaaacatggaactctcaacaccctgagctgcaatgcgccggtgtcactgtttccaaaacgcaccctcaaccgcaacggcctccacttgccatcttactcaccttatccccaaatgatcattgtcgttcaaggtgcgtaatattagtaagaagtatttatcagcttaacgtgataacaataatagtaatatgaaaatatttattaaaatttttataattaaatctctgctagaaaatttgattaatcattttagtagaatttgtttttctcaactaggtttt

SEQ ID NO: 3296 - DNA, 659 bp, Artificial; identical to SEQ ID NO: 1907
  Mutations within GlyA3B4 introduced by GmGlyA3B4_T02TALE nuclease

SEQ ID NO: 3297 - DNA, 585 bp, Artificial
  Mutations within GlyA3B4 introduced by GmGlyA3B4_T02TALE nuclease
gttcatgtacggttgcagatataaacgaagcatagcttatgtatgaggtgtaacaaaaattggaaacaatagccatgcaaggtgaagaatgtcaccaactcagaaaccccttcttcattgacgtgtccctcactcactctcctctcttcactataaatcgccactcttcgtgttctccacttcaccaactccttcaaacttattaacactttccttagttcaatatggggaagcccttcttcactctctctctttcttccctttgcttgctactcttgtcgaacgcggtggtcttattgaaacatggaactctcaacaccctgagctgcaatgcgccggtgtcactgtttccaaacgcaccctcaaccgcaacggcctccacttgccatcttactcaccttatccccaaatgatcattgtcgttcaaggtgcgtaatattagtaagaagtatttatcagcttaacgtgataacaataatagtaatatgaaatatttattaaattttttataattaatctctgctagaaaatttgattaatcatttttagtagaatttgtttttctcaactaggttttaaacacca

SEQ ID NO: 3298 - DNA, 661 bp, Artificial
  Mutations within GlyA3B4 introduced by GmGlyA3B4_T02TALE nuclease
gttcatgtacggttgcagatataaacgaagcatagcttatgtatgaggtgtaacaaaattggaaacaatagccatgcaaggtgaagaatgtcaccaactcagaaacccttcttcattgacgtgtccctcactcactctcctctcttcactataaatcgccactcttcgtgttctccacttcaccaactccttcaaacttattaacactttccttagttcaatatggggaagcccttcttcactctctctctttcttccctttgcttgctactcttgtcgagttgctattacctccagcaagttcaacgagtgccaactcacaacctcaacgcgttggaacccgaccaccgcgttgagtccgaaggtggtcttattgaaacatggaactctcaacaccctgagctgcaatgcgccggtgtcactgtttccaaacgcaccctcaaccgcaacggcctccacttgccatcttactcaccttatccccaaatgatcattgtcgttcaaggtgcgtaatattagtaagaagtatttatcagcttaacgtgataacaataatagtaatatgaaatatttattaaatttttataattaatctctgctagaaaatttgattaatcattttagtagaatttgttttctcaactaggtttttaaaacacca

SEQ ID NO: 3299 - DNA, 470 bp, Artificial
  Mutations within GlyA3B4 introduced by GmGlyA3B4_T02TALE nuclease
gttcatgtacggttgcagatataaacgaagcatagcttatgtatgaggtgtaacaaaattggaaacaatagccatgcaaggtgaagaatgtcaccaactcagaaacccttcttcattgacgtgtccctcactcactctcctctcttcactataaatcgccactcttcgtgttctccacttcaccaaactccttcaaacttattaacactttccttagttcaatatggggaagcccttctccactcttcgtgttctccagcaagttcaacgagtgccaactcaacaacctcaacgcgttggaacccgaccaccgcgttgagtccgaaggtggtcttattgaacatggactctcaacacctgagctgcaatgcgccggtgtcactgtttccaaacgcaccctcaaccgcaacggcctccacttgccatcttactcaccttatccccaaatgatcattgtcgttcaaggtgcg

SEQ ID NO: 3300 - DNA, 650 bp, Artificial; identical to SEQ ID NO: 2588
  Mutations within GlyA3B4 introduced by GmGlyA3B4_T02TALE nuclease

SEQ ID NO: 3301 - DNA, 533 bp, Artificial
  Mutations within GlyA3B4 introduced by GmGlyA3B4_T02TALE nuclease
gttcatgtacggttgcagatataaacgaagcatagcttatgtatgaggtgtaacaaaattggaaacaatagccatgcaaggtgaagaatgtcaccaactcagaaacccttcttcattgacgtgtccctcactcactctcctctcttcactataaatcgccactcttcgtgttctccacttcaccaactccttcaaacttattaacactttccttagttcaatatggaacccgaccaccgcgttgagtccgaaggtggtcttattgaaacatggaactctcaacaccctgagctgcaatgcgccggtgtcactgtttccaaacgcaccctcaaccgcaacggcctccacttgccatcttactcaccttatccccaaatgatcattgtcgttcaaggtgcgtaatattagtaagaagtatttatcagcttaacgtgataacaataatagtaatatgaaatatttattaaattttttataattaatctctgctagaaaatttgattaatcatttttagtagaatttgttttttctc

SEQ ID NO: 3302 - DNA, 664 bp, Artificial
  Mutations within GlyA3B4 introduced by GmGlyA3B4_T02TALE nuclease
gttcatgtacggttgcagatataaacgaagcatagcttatgtatgaggtgtaacaaaattggaaacaatagccatgcaaggtgaagaatgtcaccaactcagaaacccttcttcattgacgtgtccctcactcactctcctctcttcactataaatcgccactcttcgtgttctccacttcaccaactccttcaaacttattaacactttccttagttcaatatggggaagcccttcttcactctctctctttcttccctttgcttgctactcttgtcgagtgcatctattacctccagcaagttcaacgagtgccaactcaacaacctcaacgcgttggaacccgaccaccgcgttgagtccgaaggtggtcttattgaaacatggaactctcaacaccctgagctgcaatgcgccggtgtcactgtttccaaacgcaccctcaaccgcaacggcctccacttgccatcttactcaccttatccccaaatgatcattgtcgttcaaggtgcgtaatattagtaagaagtatttatcagcttaacgtgataacaataatagtaatatgaaatatttattaaatttttataattaatctctgctagaaaatttgattaatcattttagtagaatttgtttttctcaactaggttttaaaacacca

SEQ ID NO: 3303 - DNA, 636 bp, Artificial; identical to SEQ ID NO: 1845
  Mutations within GlyA3B4 introduced by GmGlyA3B4_T02TALE nuclease

SEQ ID NO: 3304 - DNA, 644 bp, Artificial
  Mutations within GlyA3B4 introduced by GmGlyA3B4_T02TALE nuclease
gttcatgtacggttgcagatataaacgaagcatagcttatgtatgaggtgtaacaaaattggaaacaatagccatgcaaggtgaagaatgtcaccaactcagaaacccttcttcattgacgtgtccctcactcactctcctctcttcactataaatcgccactcttcgtgttctccacttcaccaactccttcaaacttattaacactttccttagttcaatatggggaagcccttcttcactctctctctttcttccctttgcttgctactcttgtcgagttcaacgagtgccaactcaacaacctcaacgcgttggaacccgaccaccgcgttgagtccgaaggtggtcttattgaaacatggaactctcaacacccctgagctgcaatgcgccggtgtcactgtttccaaacgcaccctcaaccgcaacggcctccacttgccatcttactcaccttatccccaaatgatcattgtcgttcaaggtgcgtaatattagtaagaagtatttatcagctttaacgtgataacaataatagtaatatgaaatatttattaaattttttataattaattctctgctagaaaatttgattaatcatttttagtagaatttgttttttctcaactaggtttttaaaa

SEQ ID NO: 3305 - DNA, 562 bp, Artificial
  Mutations within GlyA3B4 introduced by GmGlyA3B4_T02TALE nuclease
gttcatgtacggttgcagatataaacgaagcatagcttatgtatgaggtgtaacaaaattggaaacaatagccatgcaaggtgaagaatgtcaccaactcagaaacccttcttcattgacgtgtccctcactcactctcctctcttcactataaatcgccactcttcgtgttctccacttcaccaactccttcaaacttattacctccagcaagttcaacgagtgccaactcaacaacctcaacgcgttgggacccgaccaccgcgttgagtccgaaggtggtcttattgaaacatggaactctcaacaccctgagctgcaatgcgccggtgtcactgtttccaaacgcaccctcaaccgcaacggcctccacttgccatcttactcaccttatccccaaatgatcattgtcgttcaaggtgcgtaatattagtaagaagtatttatcagcttaacgtgataacaataatagtaatatgaaatatttattaaattttttataattaatctctgctagaaaatttgattaatcatttttagtagaatttgtttttctcaacta

SEQ ID NO: 3306 - DNA, 652 bp, Artificial
  Mutations within GlyA3B4 introduced by GmGlyA3B4_T02TALE nuclease
gttcatgtacggttgcagatataaacgaagcatagcttatgtatgaggtgtaacaaaattggaaacaatagccatgcaaggtgaagaatgtcaccaactcagaaacccttcttcattgacgtgtccctcactcactctcctctcttcactataaatcgccactcttcgtgttctccacttcaccaactccttcaaacttattaacactttccttagttcaatatggggaagcccttcttcactctctctctttcttccctttgcttgctactcttgtcgagtgcatcgctattacctccagcaagttcaacgagtgccaactcaacaacctcaacgcgttggaacccgaccaccgcgttgagtccgaaggtggtcttattgaaacatggaactctcaacaccctgagctgcaatgcgccggtgtcactgtttccaaacgcaccctcaaccgcaacggcctccacttgccatcttactcaccttatccccaaatgatcattgtcgttcaaggtgcgtaatattagtaagagtatttatcagcttaacgtgataacaataatagtaatatgaaatatttattaaatttttataattaatctctgctagaaaatttgattaatcattttagtagaatttgtttttctcaactagg

SEQ ID NO: 3307 - DNA, 620 bp, Artificial
  Mutations within GlyA3B4 introduced by GmGlyA3B4_T02TALE nuclease
gttcatgtacggttgcagatataaacgaagcatagcttatgtatgaggtgtaacaaaattggaaacaatagccatgcaaggtgaagaatgtcaccaactcagaaacccttcttcattgacgtgtccctcactcactctcctctcttcactataaatcgccactcttcgtgttctccacttcaccaactccttcaaacttattaacactttccttagttcaatatggggaagcccttcttcactctctctctttcttccctttgcttgctactcttgtcgagtgccaactcaacaacctcaacgcgttggaacccgaccaccgcgttgagtccgaaggtggtcttattgaaacatggaactctcaacaccctgagctgcaatgcgccggtgtcactgtttccaaacgcaccctcaaccgcaacggcctccacttgccatcttactcaccttatccccaaatgatcattgtcgttcaaggtgcgtaatattagtaagaagtatttatcagcttaacgtgataacaataatagtaatatgaaatatttattaatttttataattaatctctgctagaaaatttgattaatcatttttagtagaatttgtttttctcaactagg

SEQ ID NO: 3308 - DNA, 639 bp, Artificial
  Mutations within GlyA3B4 introduced by GmGlyA3B4_T02TALE nuclease
gttcatgtacggttgcagatataaacgaagcatagcttatgtatgaggtgtaacaaaattggaaacaatagccatgcaaggtgaagaatgtcaccaacctaccatgaaacccttcttcattgacgtcgtccctcactcactctcctctcttcactataaatcgccactcttcgtgttctccacttcaccaactccttcaaacttattaacactttccttagttcaatatggggaagcccttcttcactctctctctttcttccctttgcttgctactcttgtcgagtgcatattacctccagcaagttcaacgagtgccaactcaacaacctcaacgcgttggaacccgaccaccgcgttgagtccgaaggtggtcttattgaaacatggaactctcaacaccctgagctgcaatgcgccggtgtcactgtttccaaacgcaccctcaaccgcaacggcctccacttgccatcttactcaccttatccccaaatgatcattgtcgttcaaggtgcgtaatattagtaagaagtatttatcagcttaacgtgataacaataatagtaatatgaaatatttattaaatttttataattaatctctgctagaaaatttgattaatcattttagtagaatttg

SEQ ID NO: 3309 - DNA, 656 bp, Artificial
  Mutations within GlyA3B4 introduced by GmGlyA3B4_T02TALE nuclease
gttcatgtacggttgcagatataaacgaagcatagcttatgtatgaggtgtaacaaaattggaaacaatagccatgcaaggtgaagaatgtcaccaactcagaaacccttcttcattgacgtgtccctcactcactctcctctcttcactataaatcgccactcttcgtgttctccacttcaccaactccttcaaacttattaacactttccttagttcaatatggggaagcccttcttcactctctctctttcttccctttgcttgctactcttgtcgagtgcattacctccagcaagttcaacgagtgccaactcaacaacctcaacgcgttggaacccgaccaccgcgttgagtccgaaggtggtcttattgaaacatggaactctcaacaccctgagctgcaatgcgccggtgtcactgtttccaaacgcaccctcaaccgcaacggcctccacttgccatcttactcaccttatccccaaatgatcattgtcgttcaaggtgcgtaatattagtaagaagtatttatcagcttaacgtgataacaataatagtaatatgaaatatttattaaatttttataattaatctctgctagaaaatttgattaatcattttagtagaatttgtttttctcaactaggtttttaaaa

SEQ ID NO: 3310 - DNA, 636 bp, Artificial
  Mutations within GlyA3B4 introduced by GmGlyA3B4_T02TALE nuclease
gttcatgtacggttgcagatataaacgaagcatagcttatgtatgaggtgtaacaaaattggaaacaatagccatgcaaggtgaagaatgtcaccaactcagaaacccttcttcattgacgtgtccctcactcactctcctctcttcactataaatcgccactcttcgtgttctccacttcaccaactccttcaaacttattaacactttccttagttcaatatggggaagcccttcttcactctctctctttcttccctttgcttgctactcttgtcgagtgctttgctattacctccagcaagttcaacgagtgccaactcaacaacctcaacgcgttggaacccgaccaccgcgttgagtccgaaggtggtcttattgaaacatggaactctcaacaccctgagctgcaatgcgccggtgtcactgtttccaaacgcaccctcaaccgcaacggcctccacttgccatcttactcaccttatccccaaatgatcattgtcgttcaaggtgcgtaatattagtaagagtatttatcagcttaacgtgataacaatatagtaatatgaaatatttattaaatttttataattaatctctgctagaaaatttgattaatcattttagtagaatttg

SEQ ID NO: 3311 - DNA, 486 bp, Artificial; identical to SEQ ID NO: 1919
  Mutations within GlyA3B4 introduced by GmGlyA3B4_T02TALE nuclease

SEQ ID NO: 3312 - DNA, 639 bp, Artificial; identical to SEQ ID NO: 1826
  Mutations within GlyA3B4 introduced by GmGlyA3B4_T02TALE nuclease

SEQ ID NO: 3313 - DNA, 661 bp, Artificial
  Mutations within GlyA3B4 introduced by GmGlyA3B4_T02TALE nuclease
gttcatgtacggttgcagatataaacgaagcatagcttatgtatgaggtgtaacaaaattggaaacaatagccatgcaaggtgaagaatgtcaccaactcagaaacccttcttcattgacgtgtccctcactcactctcctctcttcactataaatcgccactcttcgtgttctccacttcaccaactccttcaaacttattaacactttccttagttcaatatggggaagcccttcttcactctctctctttcttccctttgcttgctactcttgtcgagtgcatgctattacctccagcaagttcaacgagtgccaactcaacaacctcaacgcgttggaacccgaccaccgcgttgagtccgaaggtggtcttattgaaacatggaactctcaacaccctgagctgcaatgcgccggtgtcactgtttccaaacgcaccctcaaccgcaacggcctccacttgccatcttactcaccttatccccaaatgatcattgtcgttcaaggtgcgtaatattagtaagagtatttatcagcttaacgtgataacaatatagtaatatgaaatatttattaaatttttataattaatctctgctagaaaatttgattaatcattttagtagaatttgttttctcaactaggttttaaacacca

SEQ ID NO: 3314 - DNA, 523 bp, Artificial
  Mutations within GlyA3B4 introduced by GmGlyA3B4_T02TALE nuclease
gttcatgtacggttgcagatataaacgaagcatagcttatgtatgaggtgtaacaaaattggaaacaatagccatgcaaggtgaagaatgtcaccaactcagaaacccttcttcattgacgtgtccctcactcactctcctctcttcactataaatcgccactcttcgtgttctccacttcaccaactccttcaaacttattaacactttccttagttcaacgagtgccaactcaacaacctcaacgcgttggaacccgaccaccgcgttgagtccgaaggtggtcttattgaaacatggaactctcaacaccctgagctgcaatgcgccggtgtcactgtttccaaacgcaccctcaaccgcaacggcctccacttgccatcttactcaccttatccccaaaatgatcattgtcgttcaaggtgcgtaatattagtaagaagtatttatcagcttaacgtgataacaataatagtaatatgaaatatttattaaattttttataattaatctctgctagaaa

SEQ ID NO: 3315 - DNA, 667 bp, Artificial
  Mutations within GlyA3B4 introduced by GmGlyA3B4_T02TALE nuclease
  misc_feature (531): n is a or c or t or g
gttcatgtacggttgcagatataaacgaagcatagcttatgtatgaggtgtaacaaaattggaaacaatagccatgcaaggtgaagaatgtcaccaactcagaaacccttcttcattgacgtgtccctcactcactctcctctcttcactataaatcgccactcttcgtgttctccacttcaccaactccttcaaacttattaacactttccttagttcaatatggggaagcccttcttcactctctctctttcttccctttgcttgctactcttgtcgagtgcattgctattacctccagcaagttcaacgagtgccaactcaacaacctcaacgcgttggaacccgaccaccgcgttgagtccgaaggtggtcttattgaaacatggaactctcaacaccctgagctgcaatgcgccggtgtcactgtttccaaacgcaccctcaaccgcaacggcctccacttgccatcttactcaccttatccccaaatgatcattgtcgttcaaggtgcgtaatattagtaagagnatttatcagcttaacgtgataacaatatagtaatatgaaatatttattaaatttttataattaatctctgctagaaaatttgattaatcattttagtagaatttgtttttctcaactaggtttttaaaacaccaca

SEQ ID NO: 3316 - DNA, 666 bp, Artificial; identical to SEQ ID NO: 1812
  Mutations within GlyA3B4 introduced by GmGlyA3B4_T02TALE nuclease

SEQ ID NO: 3317 - DNA, 654 bp, Artificial
  Mutations within GlyA3B4 introduced by GmGlyA3B4_T02TALE nuclease
gttcatgtacggttgcagatataaacgaagcatagcttatgtatgaggtgtaacaaaattggaaacaatagccatgcaaggtgaagaatgtcaccaactcagaaacccttcttcattgacgtgtccctcactcattctcctctcttcactataaatcgccactcttcgtgttctccacttcaccaactccttcaaacttattaacactttccttagttcaatatggggaagcccttcttcactctctctctttcttccctttgcttgctactcttgtcgagtgcatctattacctccagcaagttcaacgagtgccaactcaacaacctcaacgcgttggaacccgaccaccgcgttgagtccgaaggtggtcttattgaaacatggaactctcaacaccctgagctgcaatgcgccggtgtcactgtttccaaacgcaccctcaaccgcaacggcctccacttgccatcttactcaccttatccccaaatgatcattgtcgttcaaggtgcgtaatattagtaagaagtatttatcagcttaacgtgataacaataatagtaatatgaaatatttattaaatttttataattaatctctgctagaaaatttgattaatcattttagtagaatttgttttctcaactaggtttt

SEQ ID NO: 3318 - DNA, 662 bp, Artificial
  Mutations within GlyA3B4 introduced by GmGlyA3B4_T02TALE nuclease
gttcatgtacggttgcagatataaacgaagcatagcttatgtatgaggtgtaacaaaattggaaacaatagccatgcaaggtgaagaatgtcaccaactcagaaacccttcttcattgacgtgtccctcactcactctcctctcttcactataaatcgccactcttcgtgttctccacttcaccaactccttcaaacttattaacactttccttagttcaatatggggaagcccttcttcactctctctctttcttccctttgcttgctactcttgtcgagtgcatattacctccagcaagttcaacgagtgccaactcaacaacctcaacgcgttggaacccgaccaccgcgttgagtccgaaggtggtcttattgaaacatggaactctcaacaccctgagctgcaatgcgccggtgtcactgtttccaaacgcaccctcaaccgcaacggcctccacttgccatcttactcaccttatccccaaatgatcattgtcgttcaaggtgcgtaatattagtaagaagtatttatcagcttaacgtgataacaatatagtaatatgaaatatttattaaatttttataattaatctctgctagaaaatttgattaatcattttagtagaatttgtttttctcaactaggtttttaaaacacca

SEQ ID NO: 3319 - DNA, 629 bp, Artificial; identical to SEQ ID NO: 1936
  Mutations within GlyA3B4 introduced by GmGlyA3B4_T02TALE nuclease

SEQ ID NO: 3320 - DNA, 641 bp, Artificial
  Mutations within GlyA3B4 introduced by GmGlyA3B4_T02TALE nuclease
gttcatgtacggttgcagatataaacgaagcatagcttatgtatgaggtgtaacaaaattggaaacaatagccatgcaaggtgaagaatgtcaccaactcagaaacccttcttcattgacgtgtccctcactcactctcctctcttcactataaatcgccactcttcgtgttctccacttcaccaactccttcaaacttattaacactttccttagttcaatatggggaagcccttcttcactctctctctttcttccctttgcttgctattacctccagcaagttcaacgagtgccaactcaacaacctcaacgcgttggaacccgaccaccgcgttgagtccgaaggtggtcttattgaaacatggaactctcaacaccctgagctgcaatgcgccggtgtcactgttttccaaacgcaccctcaaccgcaacggcctccacttgccatcttactcaccttatcccccaaatgatcattgtcgttcaaggtgcgtaatattagtaagaagtatttatcagcttaacgtgataacaataatagtaatatgaaatatttattaaattttttataattaatctctgctagaaaatttgattaatcatttttagtagaatttgttttttctcaactaggtttt

SEQ ID NO: 3321 - DNA, 650 bp, Artificial
  Mutations within GlyA3B4 introduced by GmGlyA3B4_T02TALE nuclease
gttcatgtacggttgcagatataaacgaagcatagcttatgtatgaggtgtaacaaaattggaaacaatagccatgcaaggtgaagaatgtcaccaactcagaaacccttcttcattgacgtgtccctcactcactctcctctcttcactataaatcgccactcttcgtgttctccacttcaccaactccttcaaacttattaacactttccttagttcaatatggggaagcccttcttcactctctctctttcttccctttgcttgctactcttgtcgagtgcatattacctccagcaagttcaacgagtgccaactcaacaacctcaacgcgttggaacccgaccaccgcgttgagtccgaaggtggtcttattgaaacatggaactctcaacaccctgagctgcaatgcgccggtgtcactgtttccaaacgcaccctcaaccgcaacggcctccacttgccatcttactcaccttatccccaaatgatcattgtcgttcaaggtgcgtaatattagtaagaagtatttatcagcttaacgtgataacaataatagtaatatgaaatatttattaaatttttataattaatctctgctagaaaatttgattaatcatttttagtagaatttgtttttctcaactagg

SEQ ID NO: 3322 - DNA, 555 bp, Artificial
  Mutations within GlyA3B4 introduced by GmGlyA3B4_T02TALE nuclease
gttcatgtacggttgcagatataaacgaagcatagcttatgtatgaggtgtaacaaaattggaaacaatagccatgcaaggtgaagaatgtcaccaactcagaaacccttcttcattgacgtgtccctcactcactctcctctcttcactataaatcgccactcttcgtgttctattacctccagcaagttcaacgagtgccaactcaacaacctcaacgcgttggaacccgaccaccgcgttgagtccgaaggtggtcttattgaaacatggaactctcaacaccctgagctgcaatgcgccggtgtcactgtttccaaacgcaccctcaaccgcaacggcctccacttgccaatcttactcaccttatccccaaatgatcattgtcgttcaaggtgcgtaatattagtaagaagtatttatcagcttaacgtgataacaataatagtaatatgaaatatttattaaattttttataattaatctctgctagaaaatttgattaatcatttttagtagaatttgttttttctcaactaggttttaaacaccaca

SEQ ID NO: 3323 - DNA, 631 bp, Artificial; identical to SEQ ID NO: 2232
  Mutations within GlyA3B4 introduced by GmGlyA3B4_T02TALE nuclease

SEQ ID NO: 3324 - DNA, 648 bp, Artificial; identical to SEQ ID NO: 2749
  Mutations within GlyA3B4 introduced by GmGlyA3B4_T02TALE nuclease

SEQ ID NO: 3325 - DNA, 656 bp, Artificial
  Mutations within GlyA3B4 introduced by GmGlyA3B4_T02TALE nuclease
gttcatgtacggttgcagatataaacgaagcatagcttatgtatgaggtgtaacaaaattggaaacaatagccatgcaaggtgaagaatgtcaccaactcagaaacccttcttcattgacgtgtccctcactcactctcctctcttcactataaaatcgccactcttcgtgttctccacttcaccaactccttcaaacttattaacactttccttagttcaatatggggaagcccttcttcactctctctctttcttccctttgcttgctactcttgtcgagtgcatctattacctccagcaagttcaacgagtgccaactcaacaacctcaacgcgttggaacccgaccaccgcgttgagtccgaaggtggtcttattgaaacatggaactctcaacaccctgagctgcaatgcgccggtgtcactgtttccaaacgcaccctcaaccgcaacggcctccacttgccatcttactcaccttatccccaaatgatcattgtcgttcaaggtgcgtaatattagtaagaagtatttatcagcttaacgtgataacaataatagtaatatgaaaatatttattaaatttttataattaatctctgctagaaaatttgattaatcattttagtagaatttgttttctcaactaggtttt

SEQ ID NO: 3326 - DNA, 656 bp, Artificial
  Mutations within GlyA3B4 introduced by GmGlyA3B4_T02TALE nuclease
gttcatgtacggttgcagatataaacgaagcatagcttatgtatgaggtgtaacaaaattggaaacaatagccatgcaaggtgaagaatgtcaccaactcagaaacccttcttcattgacgtgtccctcactcactctcctctcttcactataaatcgccactcttcgtgttctccacttcaccaactccttcaaacttattaacactttccttagttcaatatggggaagcccttcttcactctctctctttcttccctttgcttgctactcttgtcgagtgcatgtccagcaagttcaacgagtgccaactcaacaacctcaacgcgttggaacccgaccaccgcgttgagtccgaaggtggtcttattgaaacatggaactctcaacaccctgagctgcaatgcgccggtgtcactgtttccaaacgcaccctcaaccgcaacggcctccacttgccatcttactcaccttatccccaaatgatcattgtcgttcaaggtgcgtaatattagtaagaagtatttatcagcttaacgtgataacaataatagtaatatgaaatatttattaaatttttataattaatctctgctagaaaatttgattaatcattttagtagaatttgttttctcaactaggttttaaaacacca

SEQ ID NO: 3327 - DNA, 649 bp, Artificial; identical to SEQ ID NO: 2830
  Mutations within GlyA3B4 introduced by GmGlyA3B4_T02TALE nuclease

SEQ ID NO: 3328 - DNA, 573 bp, Artificial
  Mutations within GlyA3B4 introduced by GmGlyA3B4_T02TALE nuclease
gttcatgtacggttgcagatataaacgaagcatagcttatgtatgaggtgtaacaaaattggaaacaatagccatgcaaggtgaagaatgtcaccaactcagaaacccttcttcattgacgtgtccctcactcactctcctctcttcactataaatcgccactcttcgtgttctccacttcaccaactccttcaaacttattacctccagcaagttcaacgagtgccaactcaacaacctcaacgcgttggaacccgaccaccgcgttgagtccgaaggtggtcttattgaaacatggaactctcaacaccctgagctgcaatgcgccggtgtcactgtttccaaacgcaccctcaaccgcaacggcctccacttgccatcttactcaccttatccccaaatgatcattgtcgttcaaggtgcgtaatattagtaagaagtatttatcagcttaacgtgataacaataatagtaatatgaaatatttattaaattttttataattaatctctgctagaaaatttgattaatcatttttagtagaatttgtttttctcaactaggttttaaaca

SEQ ID NO: 3329 - DNA, 603 bp, Artificial
  Mutations within GlyA3B4 introduced by GmGlyA3B4_T02TALE nuclease
gttcatgtacggttgcagatataaacgaagcatagcttatgtatgaggtgtaacaaaattggaaacaatagccatgcaaggtgaagaatgtcaccaactcagaaacccttcttcattgacgtgtccctcactcactctcctctcttcactataaatcgccactcttcgtgttctccacttcaccaactccttcaaacttattaacactttccttagttcaatatggggaagcccttcttcactctctctctttcttccctttgcttgctactcttgtcgagtgcatggagacggtccagcggctgttgccggtgctgtgccaggcccacggcttgaccccggagcaggtggtggccatcgccagccacgataccctgagctgcaatgcgccggtgtcactgtttccaaacgcaccctcaaccgcaacggcctccacttgccatcttactcaccttatccccaaatgatcattgtcgttcaaggtgcgtaatattagtaagaagtatttatcagcttaacgtgataacaataatagtaatatgaaatatttattaaattttttataattaatctctgctagaaaatttgattaatcatttttag

SEQ ID NO: 3330 - DNA, 594 bp, Artificial
  Mutations within GlyA3B4 introduced by GmGlyA3B4_T02TALE nuclease
gttcatgtacggttgcagatataaacgaagcatagcttatgtatgaggtgtaacaaaattggaaacaatagccatgcaaggtgaagaatgtcaccaactcagaaacccttcttcattgacgtgtccctcactcactctcctctcttcactataaaatcgccactcttcgtgttctccacttcaccaaactccttcaaacttattaacactttccttagttcaatatggggaagcccttcttcactctctctctttcttccctttgcttgctactcttgtcgagtgcatattacctccagcaagttcaacgagtgccaactcaacaacctcaacgcgttggaacccgaccaccgcgttgagtccgaaggtggtcttattgaaaacatggaactctcaacaccctgagctgcaatgcgccggtgtcactgtttccaaaacgcaccctcaaccgcaacggcctccacttgccatcttactcaccttatccccaaatgatcattgtcgttcaaggtgcgtaatattagtaagaaagtatttatcagcttaacgtgataacaataatagtaatatgaaaatatttattaaaatttttat

SEQ ID NO: 3331 - DNA, 636 bp, Artificial; identical to SEQ ID NO: 1885
  Mutations within GlyA3B4 introduced by GmGlyA3B4_T02TALE nuclease

SEQ ID NO: 3332 - DNA, 620 bp, Artificial
  Mutations within GlyA3B4 introduced by GmGlyA3B4_T02TALE nuclease
gttcatgtacggttgcagatataaacgaagcatagcttatgtatgaggtgtaacaaaattggaaacaatagccatgcaaggtgaagaatgtcaccaactcagaaacccttcttcattgacgtgtccctcactcactctcctctcttcactataaatcgccactcttcgtgttctccacttcaccaactccttcaaacttattaacactttccttagttcaatatggggaagcccttcttcactctctctctttcttccctttgcttgctactcttgtcgagtgccaactcaacaacctcaacgcgttggaacccgaccaccgcgttgagtccgaaggtggtcttattgaaacatggaactctcaacaccctgagctgcaatgcgccggtgtcactgtttccaaacgcaccctcaaccgcaacggcctccacttgccatcttactcaccttatccccaaatgatcattgtcgttcaaggtgcgtaatattagtaagaagtatttatcagcttaacgtgataacaataatagtaatatgaaatatttattaaattttttataattaatctctgctagaaaatttgattaatcatttttagtagaatttgtttttctcaacta

SEQ ID NO: 3333 - DNA, 612 bp, Artificial
  Mutations within GlyA3B4 introduced by GmGlyA3B4_T02TALE nuclease
gttcatgtacggttgcagatataaacgaagcatagcttatgtatgaggtgtaacaaaattggaaacaatagccatgcaaggtgaagaatgtcaccaactcagaaacccttcttcattgacgtgtccctcactcactctcctctcttcactataaatcgccactcttcgtgttctccacttcaccaactccttcaaacttattaacactttccttagttcaatatggggaagcccttcttcactctctctctttcaacgagtgccaactcaacaacctcaacgcgttggaacccgaccaccgcgttgagtccgaaggtggtcttattgaaacatggaactctcaacaccctgagctgcaatgcgccggtgtcactgtttccaaacgcaccctcaaccgcaacggcctccacttgccatcttactcaccttatcccccaaatgatcattgtcgttcaaggtgcgtaatattagtaagaagtatttatcagcttaacgtgataacaataatagtaatatgaaatatttattaattttttataattaatctctgctagaaaatttgattaatcatttttagtagaatttgtttttctcaactaggtttttaaaaca

SEQ ID NO: 3334 - DNA, 654 bp, Artificial
  Mutations within GlyA3B4 introduced by GmGlyA3B4_T02TALE nuclease
gttcatgtacggttgcagatataaacgaagcatagcttatgtatgaggtgtaacaaaattggaaacaatagccatgcaaggtgaagaatgtcaccaactcagaaacccttcttcattgacgtgtccctcactcactctcctctcttcactataaatcgccactcttcgtgttctccacttcaccaactccttcaaacttattaacactttccttagttcaatatggggaagcccttcttcactctctctctttcttccctttgcttgctactcttgtcgagtgcatttgctattacctccagcaagttcaacgagtgccaactcaacaacctcaacgcgttggaacccgaccaccgcgttgagtccgaaggtggtcttattgaaacatggaactctcaacaccctgagctgcaatgcgccggtgtcactgtttccaaacgcaccctcaaccgcaacggcctccacttgccatcttactcaccttatccccaaatgatcattgtcgttcaaggtgcgtaatattagtaagaagtatttatcagcttaacgtgataacaataatagtaatatgaaatatttattaaatttttataattaatctctgctagaaaatttgattaatcattttagtagaatttgtttttctcaactagg

SEQ ID NO: 3335 - DNA, 599 bp, Artificial
  Mutations within GlyA3B4 introduced by GmGlyA3B4_T02TALE nuclease
gttcatgtacggttgcagatataaacgaagcatagcttatgtatgaggtgtaacaaaattggaaacaatagccatgcaaggtgaagaatgtcaccaactcagaaacccttcttcattgacgtgtccctcactcactctcctctcttcactataaatcgccactcttcgtgttctccacttcaccaactccttcaaacttattaacactttccttagttcaatatggggaagcccttcttcactctctctctttcttccctttgcttgctactcttgtcgagttacctccagcaagttcaacgagtgccaactcaacaacctcaacgcgttggaacccgaccaccgcgttgagtccgaaggtggtcttattgaaacatggaactctcaacaccctgagctgcaatgcgccggtgtcactgtttccaaacgcaccctcaaccgcaacggcctccacttgccatcttactcaccttatcccccaaatgatcattgtcgttcaaggtgcgtaaatattagtaagaagtatttatcagcttaacgtgataacaataatagtaatatgaaatatttattaaatttttataattaatctctgctag

SEQ ID NO: 3336 - DNA, 659 bp, Artificial
  Mutations within GlyA3B4 introduced by GmGlyA3B4_T02TALE nuclease
gttcatgtacggttgcagatataaacgaagcatagcttatgtatgaggtgtaacaaaaattggaaacaatagccatgcaaggtgaagaatgtcaccaactcagaaacccttcttcattgacgtgtccctcactcactctcctctcttcactataaatcgccactcttcgtgttctccacttcaccaactccttcaaacttattaacactttccttagttcaatatggggaagcccttcttcactctctctctttcttccctttgcttgctactcttgtcgagtgcatgctattacctccagcaagttcaacgagtgccaactcaacaacctcaacgcgttggaacccgaccaccgcgttgagtccgaaggtggtcttattgaaacatggaactctcaacaccctgagctgcaatgcgccggtgtcactgtttccaaacgcaccctcaaccgcaacggcctccacttgccatcttactcaccttatccccaaatgatcattgtcgttcaaggtgcgtaatattagtaagagtatttatcagcttaacgtgataacaataatagtaatatgaaatatttattaaatttttataattaatctctgctagaaaatttgattaatcattttagtagaatttgttttctcaactaggttttaaaa

SEQ ID NO: 3337 - DNA, 660 bp, Artificial
  Mutations within GlyA3B4 introduced by GmGlyA3B4_T02TALE nuclease
gttcatgtacggttgcagatataaacgaagcatagcttatgtatgaggtgtaacaaaattggaaacaatagccatgcaaggtgaagaatgtcaccaactcagaaacccttcttcattgacgtgtccctcactcactctcctctcttcactataaatcgccactcttcgtgttctccacttcaccaactccttcaaacttattaacactttccttagttcaatatggggaagcccttcttcactctctctctttcttccctttgcttgctactcttgtcgagtgattacctccagcaagttcaacgagtgccaactcaacaacctcaacgcgttggaacccgaccaccgcgttgagtccgaaggtggtcttattgaaacatggaactctcaacaccctgagctgcaatgcgccggtgtcactgtttccaaacgcaccctcaaccgcaacggcctccacttgccatcttactcaccttatccccaaatgatcattgtcgttcaaggtgcgtaatattagtaagaagtatttatcagcttaacgtgataacaataatagtaatatgaaatatttattaaatttttataattaatctctgctagaaaatttgattaatcattttagtagaatttgtttttctcaactaggtttttaaaacacca

SEQ ID NO: 3338 - DNA, 661 bp, Artificial
  Mutations within GlyA3B4 introduced by GmGlyA3B4_T02TALE nuclease
gttcatgtacggttgcagatataaacgaagcatagcttatgtatgaggtgtaacaaaattggaaacaatagccatgcaaggtgaagaatgtcaccaactcagaaacccttcttcattgacgtgtccctcactcactctcctctcttcactataaatcgccactcttcgtgttctccacttcaccaactccttcaaacttattaacactttccttagttcaatatggggaagcccttcttcactctctcagtgacttgaatgtatttagaaaaataaacaaataggggttccgcgcaccttcaacgagtgccaactcaacaacctcaacgcgttggaacccgaccaccgcgttgagtccgaaggtggtcttattgaaacatggaactctcaacaccctgagctgcaatgcgccggtgtcactgtttccaaacgcaccctcaaccgcaacggcctccacttgccatcttactcaccttatccccaaatgatcattgtcgttcaaggtgcgtaatattagtaagaagtatttatcagcttaacgtgataacaataatagtaatatgaaatatttattaaatttttataattaatctctgctagaaaatttgattaatcatttttagtagaatttgttttttctcaactaggttttaaaacacca

SEQ ID NO: 3339 - DNA, 669 bp, Artificial
  Mutations within GlyA3B4 introduced by GmGlyA3B4_T02TALE nuclease
  misc_feature (534): n is a or c or t or g
gttcatgtacggttgcagatataaacgaagcatagcttatgtatgaggtgtaacaaaattggaaacaatagccatgcaaggtgaagaatgtcaccaactcagaaacccttcttcattgacgtgtccctcactcactctcctctcttcactataaatcgccactcttcgtgttctccacttcaccaactccttcaaacttattaacactttccttagttcaatatggggaagcccttcttcactctctctctttcttccctttgcttgctactcttgtcgagtgcattttgctattacctccagcaagttcaacgagtgccaactcaacaacctcaacgcgttggaacccgaccaccgcgttgagtccgaaggtggtcttattgaaacatggaactctcaacaccctgagctgcaatgcgccggtgtcactgtttccaaacgcaccctcaaccgcaacggcctccacttgccatcttactcaccttatccccaaatgatcattgtcgttcaaggtgcgtaatattagtaagaagnatttatcagcttaacgtgataacaatatagtaatatgaaatatttattaaatttttataattaatctctgctagaaaatttgattaatcattttagtagaatttgttttctcaactaggtttttaaaacaccaca

SEQ ID NO: 3340 - DNA, 616 bp, Artificial
  Mutations within GlyA3B4 introduced by GmGlyA3B4_T02TALE nuclease
gttcatgtacggttgcagatataaacgaagcatagcttatgtatgaggtgtaacaaaattggaaacaatagccatgcaaggtgaagaatgtcaccaactcagaaacccttcttcattgacgtgtccctcactcactctcctctcttcactataaatcgccactcttcgtgttctccacttcaccaactccttcaaacttattaacactttccttagttcaatatggggaagcccttcttcactctctctctttcttccctttgcttgctactcttgtcgagtgccaactcaacaacctcaacgcgttggaacccgaccaccgcgttgagtccgaaggtggtcttattgaaacatggaactctcaacaccctgagctgcaatgcgccggtgtcactgtttccaaacgcaccctcaaccgcaacggcctccacttgccatcttactcaccttatccccaaatgatcattgtcgttcaaggtgcgtaatattagtaagaagtatttatcagcttaacgtgataacaataatagtaatatgaaatatttattaaatttttataattaatctctgctagaaaatttgattaatcatttttagtagaaattttgtttttctc

SEQ ID NO: 3341 - DNA, 636 bp, Artificial; identical to SEQ ID NO: 1885
  Mutations within GlyA3B4 introduced by GmGlyA3B4_T02TALE nuclease

SEQ ID NO: 3342 - DNA, 659 bp, Artificial
  Mutations within GlyA3B4 introduced by GmGlyA3B4_T02TALE nuclease
gttcatgtacggttgcagatataaacgaagcatagcttatgtatgaggtgtaacaaaattggaaacaatagccatgcaaggtgaagaatgtcaccaactcagaaacccttcttcattgacgtgtccctcactcactctcctctcttcactataaatcgccactcttcgtgttctccacttcaccaactccttcaaacttattaacactttccttagttcaatatggggaagcccttcttcactctctctctttcttccctttgcttgctactcttgtcgagtgcatattacctccagcaagttcaacgagtgccaactcaacaacctcaacgcgttggaacccgaccaccgcgttgagtccgaaggtggtcttattgaaacatggaactctcaacaccctgagctgcaatgcgccggtgtcactgtttccaaacgcaccctcaaccgcaacggcctccacttgccatcttactcaccttatccccaaatgatcattgtcgttcaaggtgcgtaatattagtaagaagtatttatcagcttaacgtgataacaatatagtaatatgaaatatttattaaatttttataattaatctctgctagaaaatttgattaatcattttagtagaatttgttttctcaactaggttttaaacacca

SEQ ID NO: 3343 - DNA, 666 bp, Artificial
  Mutations within GlyA3B4 introduced by GmGlyA3B4_T02TALE nuclease
gttcatgtacggttgcagatataaacgaagcatagcttatgtatgaggtgtaacaaaattggaaacaatagccatgcaaggtgaagaatgtcaccaactcagaaacccttcttcattgacgtgtccctcactcactctcctctcttcactataaatcgccactcttcgtgttctccacttcaccaactccttcaaacttattaacactttccttagttcaatatggggaagcccttcttcactctctctctttcttccctttgcttgctactcttgtcgagtgcatctattacctccagcaagttcaacgagtgccaactcaacaacctcaacgcgttggaacccgaccaccgcgttgagtccgaaggtggtcttattgaaacatggaactctcaacaccctgagctgcaatgcgccggtgtcactgtttccaaacgcaccctcaaccgcaacggcctccacttgccatcttactcaccttatccccaaatgatcattgtcgttcaaggtgcgtaatattagtaagaagtatttatcagcttaacgtgataacaataatagtaatatgaaatatttattaaatttttataattaatctctgctagaaaatttgattaatcatttttagtagaatttgtttttctcaactaggtttttaaaacacca

SEQ ID NO: 3344 - DNA, 671 bp, Artificial
  Mutations within GlyA3B4 introduced by GmGlyA3B4_T02TALE nuclease
gttcatgtacggttgcagatataaacgaagcatagcttatgtatgaggtgtaacaaaattggaaacaatagccatgcaaggtgaagaatgtcaccaactcagaaacccttcttcattgacgtgtccctcactcactctcctctcttcactataaatcgccactcttcgtgttctccacttcaccaactccttcaaacttattaacactttccttagttcaatatggggaagcccttcttcactctctctctttcttccctttgcttgctactcttgtcgagtgcctattaccttccagcaagttccaacgagtgccaactcaacaacctcaacgcgttggaacccgaccaccgcgttgcagtccgaacggtggttcttattgcaaacgatggaactctcaacagccctgagcactgcaatgcgccaggtgtccctgtttccaaacgcaccctcaaccgcaacgcctccacttgccatcttactcaccttatccccaaatgatcattgtcgttcaaggtgcgtaatattagtaagaagtatttatcagcttaacgtgatacaataatagtaatatgaaatatttattaaatttttataattaatctctgctagaaaatttgattaatcattttagtagaatttgtttttctcaactaggttttaaaacacca

SEQ ID NO: 3345 - DNA, 652 bp, Artificial
  Mutations within GlyA3B4 introduced by GmGlyA3B4_T02TALE nuclease
gttcatgtacggttgcagatataaacgaagcatagcttatgtatgaggtgtaacaaaattggaaacaatagccatgcaaggtgaagaatgtcaccaactcagaaacccttcttcattgacgtgtccctcactcactctcctctcttcactataaatcgccactcttcgtgttctccacttcaccaactccttcaaacttattaacactttccttagttcaatatggggaagcccttcttcactctctctctttcttccctttgctttgctattacctccagcaagttcaacgagtgccaactcaacaacctcaacgcgttggaacccgaccaccgcgttgagtccgaaggtggtcttattgaaacatggaactctcaacaccctgagctgcaatgcgccggtgtcactgttttccaaacgcaccctcaaccgcaacggcctccacttgccatcttactcaccttatccccaaatgatcattgtcgttcaaggtgcgtaatattagtaagaagtatttatcagcttaacgtgataacaataatagtaatatgaaatatttattaaattttttataattaatctctgctagaaaatttgattaatcatttttagtagaatttgttttttctcaactaggttttaaaacaccaca

SEQ ID NO: 3346 - DNA, 400 bp, Artificial
  Mutations within GlyA3B4 introduced by GmGlyA3B4_T02TALE nuclease
gttcatgtacggttgcagatataaacgaagcatagcttatgtatgaggtgtaacaaaattggaaacaatagccatgcaaggtgaagaatgtcaccaactcagaaacccttcttcaccgcgttgagtccgaaggtggtcttattgaaacatggaactctcaacaccctgagctgcaatgcgccggtgtcactgtttccaaacgcaccctcaaccgcaacggcctccacttgccatcttactcaccttatccccaaatgatcattgtcgttcaaggtgcgtaatattagtaagaagtatttatcagcttaacgtgataacaataatagtaatatgaaatattttattaaattttttataattaatctctgctagaaaatttgattaatcatttttagtagaa

SEQ ID NO: 3347 - DNA, 646 bp, Artificial; identical to SEQ ID NO: 706
  Mutations within GlyA3B4 introduced by GmGlyA3B4_T02TALE nuclease

SEQ ID NO: 3348 - DNA, 666 bp, Artificial; identical to SEQ ID NO: 1780
  Mutations within GlyA3B4 introduced by GmGlyA3B4_T02TALE nuclease

SEQ ID NO: 3349 - DNA, 523 bp, Artificial
  Mutations within GlyA3B4 introduced by GmGlyA3B4_T02TALE nuclease
gttcatgtacggttgcagatataaacgaagcatagcttatgtatgaggtgtaacaaaattggaaacaatagccatgcaaggtgaagaatgtcaccaactcagaaacccttcttcattgacgtgtccctcactcactctcctctcttcactataaatcgccactcttcgtgttctccacttcaccaactccttcaaacttattaacactttccttagttcaataagcccttcttcactcaccgcgttgagtccgaaggtggtcttattgaaacatggaactctcaacaccctgagctgcaatgcgccggtgtcactgtttccaaacgcaccctcaaccgcaacggcctccacttgccatcttactcaccttatccccaaatgatcattgtcgttcaaggtgcgtaatattagtaagaagtatttatcagcttaacgtgataacaataatagtaatatgaaatatttattaaattttttataattaatctctgctagaaaatttgattaatcatttttagtagaa

SEQ ID NO: 3350 - DNA, 641 bp, Artificial
  Mutations within GlyA3B4 introduced by GmGlyA3B4_T02TALE nuclease
gttcatgtacggttgcagatataaacgaagcatagcttatgtatgaggtgtaacaaaattggaaacaatagccatgcaaggtgaagaatgtcaccaactcagaaacccttcttcattgacgtgtccctcactcactctcctctcttcactataaatcgccactcttcgtgttctccacttcaccaactccttcaaacttattaacactttccttagttcaatatggggaagcccttcttcactctctctctttcttccctttgcttgctattacctccagcaagttcaacgagtgccaactcaacaacctcaacgcgttggaacccgaccaccgcgttgagtccgaaggtggtcttattgaaacatggaactctcaacacccctgagctgcaatgcgccggtgtcactgtttccaaacgcaccctcaaccgcaacggcctccacttgccatcttactcaccttatcccccaaatgatcattgtcgttcaaggtgcgtaatattagtaagaagtatttatcagcttaacgtgataacaataatagtaatatgaaatatttattaaattttttataattaatctctgctagaaaatttgattaatcatttttagtagaatttgttttttctcaactaggtttt

SEQ ID NO: 3351 - DNA, 730 bp, Artificial
  Mutations within GlyA3B4 introduced by GmGlyA3B4_T02TALE nuclease
gttcatgtacggttgcagatataaacgaagcatagcttatgtatgaggtgtaacaaaattggaaacaatagccatgcaaggtgaagaatgtcaccaactcagaaacccttcttcattgacgtgtccctcactcactctcctctcttcactataaatcgccactcttcgtgttctccacttcaccaactccttcaaacttattaacactttccttagttcaatatggggaagcccttcttcactctctctctttcttccctttgcttgctactcttgtcgagtgcattccagcgcctgcttgccgccatcgtggctggcgatggccaccacctgctccggggtcaagccgtgggccttgctattacctccagcaagttcaacgagtgccaactcaacaacctcaacgcgttggacccgaccaccgcgttgagtccgaaggtggtcttattgaaacatggaactctcaacaccctgagctgcaatgcgccggtgtcactgtttccaaacgcaccctcaaccgcaacggcctccacttgccatcttactcaccttatcccaaatgatcattgtcgttcaaggtgcgtaatattagtaagaagtatttatcagcttaacgtgataacaataatagtaatatgaaatatttattaaattttttataataatctctgctagaaaaatttgattaatcatttttagtagaatttgtttttctcaactaggttttaaa

SEQ ID NO: 3352 - DNA, 663 bp, Artificial
  Mutations within GlyA3B4 introduced by GmGlyA3B4_T02TALE nuclease
  misc_feature (531): n is a or c or t or g
gttcatgtacggttgcagatataaacgaagcatagcttatgtatgaggtgtaacaaaattggaaacaatagccatgcaaggtgaagaatgtcaccaactcagaaaccccttcttcattgacgtgtccctcactcactctcctctcttcactataaatcgccactcttcgtgttctccacttcaccaactccttcaaacttattaacactttccttagttcaatatggggaagcccttcttcactctctctctttcttccctttgcttgctactcttgtcgagtgcatgctattacctccagcaagttcaacgagtgccaactcaacaacctcaacgcgttggaacccgaccaccgcgttgagtccgaaggtggtcttattgaaacatggaactctcaacaccctgagctgcaatgcgccggtgtcactgtttccaaacgcaccctcaaccgcaacggcctccacttgccatcttactcaccttatccccaaatgatcattgtcgttcaaggtgcgtaatattagtaagagnatttatcagcttaacgtgataacaatatagtaatatgaaatatttattaaatttttataattaatctctgctagaaaatttgattaatcattttagtagaatttgtttttctcaactaggttttaaacacca

SEQ ID NO: 3353 - DNA, 635 bp, Artificial; identical to SEQ ID NO: 2407
  Mutations within GlyA3B4 introduced by GmGlyA3B4_T02TALE nuclease

SEQ ID NO: 3354 - DNA, 644 bp, Artificial
  Mutations within GlyA3B4 introduced by GmGlyA3B4_T02TALE nuclease
gttcatgtacggttgcagatataaacgaagcatagcttatgtatgaggtgtaacaaaattggaaacaatagccatgcaaggtgaagaatgtcaccaactcagaaacccttcttcattgacgtgtccctcactcactctcctctcttcactataaatcgccactcttcgtgttctccacttcaccaactccttcaaacttattaacactttccttagttcaatatggggaagcccttcttcactctctctctttcttccctttgcttgctactcttgtcgagattacctccagcaagttcaacgagtgccaactcaacaacctcaacgcgttggaacccgaccaccgcgttgagtccgaaggtggtcttattgaaacatggaactctcaacaccctgagctgcaatgcgccggtgtcactgtttccaaacgcaccctcaaccgcaacggcctccacttgccatcttactcaccttatccccaaatgatcattgtcgttcaaggtgcgtaatattagtaagaagtatttatcagcttaacgtgataacaataatagtaatatgaaatatttattaaatttttataattaatctctgctagaaaatttgattaatcattttagtagaatttgtttttctcaactagg

SEQ ID NO: 3355 - DNA, 637 bp, Artificial
  Mutations within GlyA3B4 introduced by GmGlyA3B4_T02TALE nuclease
gttcatgtacggttgcagatataaacgaagcatagcttatgtatgaggtgtaacaaaattggaaacaatagccatgcaaggtgaagaatgtcaccaactcagaaaccccttcttcattgacgtgtcccctcactcactctcctctcttcactataaatcgccactcttcgtgttctccacttcaccaactccttcaaacttattaacactttccttagttcaatatggggaagcccttcttcactctctctctttcttccctttgcttgctactcttgtcgagtttgctattacctccagcaagttcaacgagtgccaactcaacaacctcaacgcgttggaacccgaccaccgcgttgagtccgaaggtggtcttattgaaacatggaactctcaacaccctgagctgcaatgcgccggtgtcactgtttccaaacgcaccctcaaccgcaacggcctccacttgccatcttactcaccttatccccaaatgatcattgtcgttcaaggtgcgtaatattagtaagaagtatttatcagcttaacgtgataacaataatagtaatatgaaatatttattaaatttttataattaatctctgctagaaaatttgattaatcattttagtagaatttg

SEQ ID NO: 3356 - DNA, 648 bp, Artificial
  Mutations within GlyA3B4 introduced by GmGlyA3B4_T02TALE nuclease
gttcatgtacggttgcagatataaacgaagcatagcttatgtatgaggtgtaacaaaattggaaacaatagccatgcaaggtgaagaatgtcaccaactcagaaacccttcttcattgacgtgtccctcactcactctcctctcttcactataaatcgccactcttcgtgttctccacttcaccaactccttcaaacttattaacactttccttagttcaatatggggaagcccttcttcactctctctctttcttccctttgcttgctactcttgtcgagtgcataacgagtgccaactcaacaacctcaacgcgttggaacccgaccaccgcgttgagtccgaaggtggtcttattgaaacatggaactctcaacaccctgagctgcaatgcgccggtgtcactgtttccaaacgcaccctcaaccgcaacggcctccacttgccatcttactcaccttatccccaaatgatcattgtcgttcaaggtgcgtaatattagtaagaagtatttatcagcttaacgtgataacaataatagtaatatgaaatatttattaaattttttataattaatctctgctagaaaatttgattaatcatttttagtagaatttgttttttctcaactaggttttaaacaccaca

SEQ ID NO: 3357 - DNA, 647 bp, Artificial; identical to SEQ ID NO: 1892
  Mutations within GlyA3B4 introduced by GmGlyA3B4_T02TALE nuclease

SEQ ID NO: 3358 - DNA, 669 bp, Artificial
  Mutations within GlyA3B4 introduced by GmGlyA3B4_T02TALE nuclease
gttcatgtacggttgcagatataaacgaagcatagcttatgtatgaggtgtaacaaaattggaaacaatagccatgcaaggtgaagaatgtcaccaactcagaaacccttcttcattgacgtgtccctcactcactctcctctcttcactataaatcgccactcttcgtgttctccacttcaccaactccttcaaacttattaacactttccttagttcaatatggggaagcccttcttcactctctctctttcttccctttgcttgctactcttgtcgagtgcatgctattacctccagcaagttcaacgagtgccaactcaacaaccctcaacgcgttggaacccgaccaccgcgttgagtccgaaggtggtcttattgaaacatggaactctcaacaccctgagctgcaatgcgccggtgtcactgtttccaaacgcaccctcaaccgcaacggcctccacttgccatcttactcaccttatccccaaatgatcattgtcgttcaaggtgcgtaatattagtaagaagtatttatcagcttaacgtgataacaataatagtaatatgaaatatttattaaatttttataattaatctctgctagaaaatttgattaatcattttagtagaatttgtttttctcaactaggtttttaaaacaccaca

SEQ ID NO: 3359 - DNA, 659 bp, Artificial
  Mutations within GlyA3B4 introduced by GmGlyA3B4_T02TALE nuclease
gttcatgtacggttgcagatataaacgaagcatagcttatgtatgaggtgtaacaaaattggaaacaatagccatgcaaggtgaagaatgtcaccaactcagaaacccttcttcattgacgtgtccctcactcactctcctctcttcactataaatcgccactcttcgtgttctccacttcaccaactccttcaaacttattaacactttccttagttcaatatggggaagcccttcttcactctctctctttcttccctttgcttgctactcttgtcgagtgcatccagcaagttcaacgagtgccaactcaacaacctcaacgcgttggaacccgaccaccgcgttgagtccgaaggtggtcttattgaaacatggaactctcaacacctgagctgcaatgcgccggtgtcactgtttccaaacgcaccctcaaccgcaacggcctccacttgccatcttactcaccttatccccaaatgatcattgtcgttcaaggtgcgtaaatattagtaagaagtatttatcagcttaacgtgataacaataatagtaatatgaaatatttattaaattttttataattaatctctgctagaaaatttgattaatcatttttagtagaattgttttttctcaactaggttttaaaacaccaca

SEQ ID NO: 3360 - DNA, 579 bp, Artificial; identical to SEQ ID NO: 1874
  Mutations within GlyA3B4 introduced by GmGlyA3B4_T02TALE nuclease

SEQ ID NO: 3361 - DNA, 666 bp, Artificial
  Mutations within GlyA3B4 introduced by GmGlyA3B4_T02TALE nuclease
  misc_feature (531): n is a or c or t or g
gttcatgtacggttgcagatataaacgaagcatagcttatgtatgaggtgtaacaaaattggaaacaatagccatgcaaggtgaagaatgtcaccaactcagaaacccttcttcattgacgtgtccctcactcactctcctctcttcactataaatcgccactcttcgtgttctccacttcaccaactccttcaaacttattaacactttccttagttcaatatggggaagcccttcttcactctctctctttcttccctttgcttgctactcttgtcgagtgcatgctattacctccagcaagttcaacgagtgccaactcaacaacctcaacgcgttggaacccgaccaccgcgttgagctccgaaggtggtcttattgaaacatggaactctcaacaccctgagctgcaatgcgccggtgtcactgtttccaaacgcaccctcaaccgcaacggcctccacttgccatcttactcaccttatccccaaatgatcattgtcgttcaaggtgcgtaatattagtaagagnatttatcagcttaacgtgataacaataatagtaatatgaaatatttattaaatttttataattaatctctgctagaaaatttgattaatcattttagtagaatttgtttttctcaactaggttttaaacaccaca

SEQ ID NO: 3362 - DNA, 633 bp, Artificial
  Mutations within GlyA3B4 introduced by GmGlyA3B4_T02TALE nuclease
gttcatgtacggttgcagatataaacgaagcatagcttatgtatgaggtgtaacaaaattggaaacaatagccatgcaaggtgaagaatgtcaccaactcagaaacccttcttcattgacgtgtccctcactcactctcctctcttcactataaatcgccactcttcgtgttctccacttcaccaactccttcaaacttattaacactttccttagttcaatatggggaagcccttcttcactctctctctttcttccctttgcttgctactcttgtcgagtgcaattacctccagcaagttcaacgagtgccaactcaacaacctcaacgcgttggaacccgaccaccgcgttgagtccgaaggtggtcttattgaaacatggaactctcaacaccctgagctgcaatgcgccggtgtcactgtttccaaacgcaccctcaaccgcaacggcctccacttgccatcttactcaccttatccccaaatgatcattgtcgttcaaggtgcgtaatattagtaagaagtatttatcagcttaacgtgataacaataatagtaatatgaaatatttattaaatttttataattaatctctgctagaaaatttgattaatcattttagtagaatttg

SEQ ID NO: 3363 - DNA, 649 bp, Artificial
  Mutations within GlyA3B4 introduced by GmGlyA3B4_T02TALE nuclease
gttcatgtacggttgcagatataaacgaagcatagcttatgtatgaggtgtaacaaaattggaaacaatagccatgcaaggtgaagaatgtcaccaactcagaaacccttcttcattgacgtgtccctcactcactctcctctcttcactataaatcgccactcttcgtgttctccacttcaccaactccttcaaacttattaacactttccttagttcaatatggggaagcccttcttcactctctctctttcttccctttgcttgctactcttgtcgagttgctattacctccagcaagttcaacgagtgccaactcaacaacctcaacgcgttggaacccgaccaccgcgttgagtccgaaggtggtcttattgaaacatggaactctcaacaccctgagctgcaatgcgccggtgtcactgtttccaaacgcaccctcaaccgcaacggcctccacttgccatcttactcaccttatccccaaatgatcattgtcgttcaaggtgcgtaatattagtaagaagtatttatcagcttaacgtgataacaataatagtaatatgaaatatttattaaatttttataattaatctctgctagaaaatttgattaatcattttagtagaatttgtttttctcaactagg

SEQ ID NO: 3364 - DNA, 665 bp, Artificial
  Mutations within GlyA3B4 introduced by GmGlyA3B4_T02TALE nuclease
gttcatgtacggttgcagatataaacgaagcatagcttatgtatgaggtgtaacaaaattggaaacaatagccatgcaaggtgaagaatgtcaccaactcagaaaccccttcttcattgacgtgtccctcactcactctcctctcttcactataaatcgccactcttcgtgttctccacttcaccaactccttcaaacttattaacactttccttagttcaatatggggaagcccttcttcactctctctctttcttccctttgcttgctactcttgtcgagtgcattacctccagcaagttcaacgagtgccaactcaacaacctcaacgcgttggaacccgaccaccgcgttgagtccgaaggtggtcttattgaaacatggaactctcaacaccctgagctgcaatgcgccggtgtcactgtttccaaacgcaccctcaaccgcaacggcctccacttgccatcttactcaccttatccccaaatgatcattgtcgttcaaggtgcgtaatattagtaagaagtatttatcagcttaacgtgataacaataatagtaatatgaaaatatttattaaaatttttataattaatctctgctagaaaatttgattaatcatttttagtagaatttgtttttctcaactaggtttttaaaacacca

SEQ ID NO: 3365 - DNA, 532 bp, Artificial
  Mutations within GlyA3B4 introduced by GmGlyA3B4_T02TALE nuclease
gttcatgtacggttgcagatataaacgaagcatagcttatgtatgaggtgtaacaaaattggaaacaatagccatgcaaggtgaagaatgtcaccaactcagaaacccttcttcattgacgtgtccctcactcactctcctctcttcactataaatcgccactcttcgtgttctattacctccagcaagttcaacgagtgccaactcaacaacctcaacgcgttggaacccgaccaccgcgttgagtccgaaggtggtcttattgaaacatggaactctcaacaccctgagctgcaatgcgccggtgtcactgtttccaaacgcaccctcaaccgcaacggcctccacttgccatcttactcaccttatccccaaatgatcattgtcgttcaaggtgcgtaatattagtaagaagtatttatcagcttaacgtgataacaataatagtaatatgaaatatttattaaattttttataattaatctctgctagaaaatttgattaatcatttttagtagaatttgtttttctc

SEQ ID NO: 3366 - DNA, 658 bp, Artificial
  Mutations within GlyA3B4 introduced by GmGlyA3B4_T02TALE nuclease
gttcatgtacggttgcagatataaacgaagcatagcttatgtatgaggtgtaacaaaattggaaacaatagccatgcaaggtgaagaatgtcaccaactcagaaacccttcttcattgacgtgtccctcactcactctcctctcttcactataaatcgccactcttcgtgttctccacttcaccaactccttcaaacttattaacactttccttagttcaatatggggaagcccttcttcactctctctctttcttccctttgcttgctactcttgtcgagtgcatctattacctccagcaagttcaacgagtgccaactcaacaacctcaacgcgttggaacccgaccaccgcgttgagtccgaaggtggtcttattgaaacatggaactctcaacaccctgagctgcaatgcgccggtgtcactgtttccaaacgcaccctcaaccgcaacggcctccacttgccatcttactcaccttatccccaaatgatcattgtcgttcaaggtgcgtaatattagtaagaagtatttatcagcttaacgtgataacaataatagtaatatgaaatatttattaaatttttataattaatctctgctagaaaatttgattaatcattttagtagaatttgttttctcaactaggttttaaaa

SEQ ID NO: 3367 - DNA, 551 bp, Artificial
  Mutations within GlyA3B4 introduced by GmGlyA3B4_T02TALE nuclease
gttcatgtacggttgcagatataaacgaagcatagcttatgtatgaggtgtaacaaaattggaaacaatagccatgcaaggtgaagaatgtcaccaactcagaaacccttcttcattgacgtgtccctcactcactctcctctcttcactataaatcgccactcttcgtgttctccacttcaccaactccttcaaacttattaacactttccttagttcaatatggggaagcccttcttcactctctctctttcaacgagtgccaactcaacaacctcaacgcgttggaacccgaccaccgcgttgagtccgaaggtggtcttattgaaacatggaactctcaacaccctgagctgcaatgcgccggtgtcactgtttccaaacgcaccctcaaccgcaacggcctccacttgccatcttactcaccttatccccaaatgatcattgtcgttcaaggtgcgtaatattagtaagaagtatttatcagcttaacgtgataacaataatagtaatatgaatatttattaatttttataattaatctctgctag

SEQ ID NO: 3368 - DNA, 630 bp, Artificial
  Mutations within GlyA3B4 introduced by GmGlyA3B4_T02TALE nuclease
gttcatgtacggttgcagatataaacgaagcatagcttatgtatgaggtgtaacaaaattggaaacaatagccatgcaaggtgaagaatgtcaccaactcagaaacccttcttcattgacgtgtccctcactcactctcctctcttcactataaatcgccactcttcgtgttctccacttcaccaactccttcaaacttattaacactttccttagttcaatatggggaagcccttcttcactctctctctttcttccctttgcttgctactcttgtcgagtgccaactcaacaacctcaacgcgttggaacccgaccaccgcgttgagtccgaaggtggtcttattgaaacatggaactctcaacaccctgagctgcaatgcgccggtgtcactgtttccaaacgcaccctcaaccgcaacggcctccacttgccatcttactcaccttatccccaaatgatcattgtcgttcaaggtgcgtaatattagtaagaagtatttatcagcttaacgtgataacaataatagtaatatgaaatatttattaattttttataattaatctctgctagaaaatttgattaatcatttttagtagaatttgtttttctcaactaggttttaaaca

SEQ ID NO: 3369 - DNA, 663 bp, Artificial
  Mutations within GlyA3B4 introduced by GmGlyA3B4_T02TALE nuclease
gttcatgtacggttgcagatataaacgaagcatagcttatgtatgaggtgtaacaaaattggaaacaatagccatgcaaggtgaagaatgtcaccaactcagaaaccccttcttcattgacgtgtccctcactcactctcctctcttcactataaatcgccactcttcgtgttctccacttcaccaactccttcaaacttattaacactttccttagttcaatatggggaagcccttcttcactctctctctttcttccctttgcttgctactcttgtcgagtgcatttacctccagcaagttcaacgagtgccaactcaacaacctcaacgcgttggaacccgaccaccgcgttgagtccgaaggtggtcttattgaaacatggaactctcaacaccctgagctgcaatgcgccggtgtcactgtttccaaacgcaccctcaaccgcaacggcctccacttgccatcttactcaccttatccccaaatgagcattgtcgttcaaggtgcgtaatattagtaagaagtatttatcagcttaacgtgataacaataatagtaatatgaaatatttattaaatttttataattaatctctgctagaaaatttgattaatcattttagtagaatttgtttttctcaactaggtttttaaaacacca

SEQ ID NO: 3370 - DNA, 660 bp, Artificial
  Mutations within GlyA3B4 introduced by GmGlyA3B4_T02TALE nuclease
gttcatgtacggttgcagatataaacgaagcatagcttatgtatgaggtgtaacaaaattggaaacaatagccatgcaaggtgaagaatgtcaccaactcagaaacccttcttcattgacgtgtccctcactcactctcctctcttcactataaatcgccactcttcgtgttctccacttcaccaactccttcaaacttattaacactttccttagttcaatatggggaagcccttcttcactctctctctttcttccctttgcttgctactcttgtcgagtgcctattacctccagcaagttcaacgagtgccaactcaacaacctcaacgcgttggaacccgaccaccgcgttgagtccgaaggtggtcttattgaaacatggaactctcaacaccctgagctgcaatgcgccggtgtcactgtttccaaacgcaccctcaaccgcaacggcctccacttgccatcttactcaccttatccccaaatgatcattgtcgttcaaggtgcgtaatattagtaagaagtatttatcagcttaacgtgataacaataatagtaatatgaaatatttattaaatttttataattaatctctgctagaaaatttgattaatcattttagtagaatttgttttctcaactaggttttaaacacca

SEQ ID NO: 3371 - DNA, 637 bp, Artificial; identical to SEQ ID NO: 1913
  Mutations within GlyA3B4 introduced by GmGlyA3B4_T02TALE nuclease

SEQ ID NO: 3372 - DNA, 648 bp, Artificial
  Mutations within GlyA3B4 introduced by GmGlyA3B4_T02TALE nuclease
gttcatgtacggttgcagatataaacgaagcatagcttatgtatgaggtgtaacaaaattggaaacaatagccatgcaaggtgaagaatgtcaccaactcagaaacccttcttcattgacgtgtccctcactcactctcctctcttcactataaatcgccactcttcgtgttctccacttcaccaactccttcaaacttattaacactttccttagttcaatatggggaagcccttcttcactctctctctttcttccctttgcttgctactcttgtcgagttcaacgagtgccaactcaacaacctcaacgcgttggaacccgaccaccgcgttgagtccgaaggtggtcttattgaaacatggaactctcaacacccctgagctgcaatgcgccggtgtcactgtttccaaacgcaccctcaaccgcaacggcctccacttgccatcttactcaccttatcccccaaatgatcattgtcgttcaaggtgcgtaatattagtaagaagtatttatcagcttaacgtgataacaataatagtaatatgaaatatttattaaattttttataattaatctctgctagaaaatttgattaatcatttttagtagaatttgttttttctcaactaggttttaaacaccaca

SEQ ID NO: 3373 - DNA, 575 bp, Artificial
  Mutations within GlyA3B4 introduced by GmGlyA3B4_T02TALE nuclease
gttcatgtacggttgcagatataaacgaagcatagcttatgtatgaggtgtaacaaaattggaaacaatagccatgcaaggtgaagaatgtcaccaactcagaaacccttcttcattgacgtgtccctcactcactctcctctcttcactataaatcgccactcttcgtgttctccacttcaccaactccttcaaacttattaacactttccttagttcaacgagtgccaactcaacaacctcaacgcgttggaacccgaccaccgcgttgagtccgaaggtggtcttattgaaacatggaactctcaacaccctgagctgcaatgcgccggtgtcactgtttccaaacgcaccctcaaccgcaacggcctccacttgccatcttactcaccttatccccaaaatgatcattgtcgttcaaggtgcgtaatattagtaagaagtatttatcagcttaacgtgataacaataatagtaatatgaaatatttattaaattttttatattaatctctgctagaaaatttgattaatcatttttagtagaatttgtttttctcaactaggttttaaaca

SEQ ID NO: 3374 - DNA, 635 bp, Artificial
  Mutations within GlyA3B4 introduced by GmGlyA3B4_T02TALE nuclease
gttcatgtacggttgcagatataaacgaagcatagcttatgtatgaggtgtaacaaaattggaaacaatagccatgcaaggtgaagaatgtcaccaactcagaaacccttcttcattgacgtgtccctcactcactctcctctcttcactataaatcgccactcttcgtgttctccacttcaccaactccttcaaacttattaacactttccttagttcaatatggggaagcccttcttcactctctctctttcttccctttgctattacctccagcaagttcaacgagtgccaactcaacaacctcaacgcgttggaacccgaccaccgcgttgagtccgaaggtggtcttattgaaacatggaactctcaacacccctgagctgcaatgcgccggtgtcactgtttccaaacgcaccctcaaccgcaacggcctccacttgccatcttactcaccttatccccaaatgatcattgtcgttcaaggtgcgtaatattagtaagaagtatttatcagcttaacgtgataacaataatagtaatatgaaatatttattaaattttttataattaatctctgctagaaaatttgattaatcatttttagtagaatttgtttttctcaactaggtttt

SEQ ID NO: 3375 - DNA, 667 bp, Artificial
  Mutations within GlyA3B4 introduced by GmGlyA3B4_T02TALE nuclease
  misc_feature (530): n is a or c or t or g
gttcatgtacggttgcagatataaacgaagcatagcttatgtatgaggtgtaacaaaattggaaacaatagccatgcaaggtgaagaatgtcaccaactcagaaacccttcttcattgacgtgtccctcactcactctcctctcttcactataaatcgccactcttcgtgttctccacttcaccaactccttcaaacttattaacactttccttagttcaatatggggaagcccttcttcactctctctctttcttccctttgcttgctactcttgtcgagtgcatgctattacctccagcaagttcaacgagtgccaactcaacaacctcaacgcgttggaacccgaccaccgcgttgagtccgaaggtggtcttattgaaacatggaactctcaacaccctgagctgcaatgcgccggtgtcactgtttccaaacgcaccctcaaccgcaacggcctccacttgccatcttactcaccttatccccaaatgatcattgtcgttcaaggtgcgtaatattagtaagagnatttatcagcttaacgtgataacaataatagtaatatgaaaatatttattaaatttttataattaatctctgctagaaaatttgattaatcattttagtagaatttgtttttctcaactaggtttttaaacaccaca

SEQ ID NO: 3376 - DNA, 633 bp, Artificial; identical to SEQ ID NO: 1895
  Mutations within GlyA3B4 introduced by GmGlyA3B4_T02TALE nuclease

SEQ ID NO: 3377 - DNA, 658 bp, Artificial
  Mutations within GlyA3B4 introduced by GmGlyA3B4_T02TALE nuclease
gttcatgtacggttgcagatataaacgaagcatagcttatgtatgaggtgtaacaaaattggaaacaatagccatgcaaggtgaagaatgtcaccaactcagaaacccttcttcattgacgtgtccctcactcactctcctctcttcactataaatcgccactcttcgtgttctccacttcaccaactccttcaaacttattaacactttccttagttcaatatggggaagcccttcttcactctctctctttcttccctttgcttgctactcttgtcgagtgcttacctccagcaagttcaacgagtgccaactcaacaacctcaacgcgttggaacccgaccaccgcgttgagtccgaaggtggtcttattgaaacatggaactctcaacaccctgagctgcaatgcgccggtgtcactgtttccaaacgcaccctcaaccgcaacggcctccacttgccatcttactcaccttatccccaaatgatcattgtcgttcaaggtgcgtaatattagtaagaagtatttatcagcttaacgtgataacaatatagtaatatgaaatatttattaaatttttataattaatctctgctagaaaatttgattaatcattttagtagaatttgtttttctcaactaggttttaaaacacca

SEQ ID NO: 3378 - DNA, 660 bp, Artificial; identical to SEQ ID NO: 1763
  Mutations within GlyA3B4 introduced by GmGlyA3B4_T02TALE nuclease

SEQ ID NO: 3379 - DNA, 586 bp, Artificial
  Mutations within GlyA3B4 introduced by GmGlyA3B4_T02TALE nuclease
  misc_feature (420): n is a or c or t or g
gttcatgtacggttgcagatataaacgaagcatagcttatgtatgaggtgtaacaaaattggaaacaatagccatgcaaggtgaagaatgtcaccaactcagaaaccctcttctattgacgtgtccctcactcactctcctctcttcactataaatcgccactcttcgtgttctccacttcaccaactcctcaaacttattaacactttccttctagttcaatatggggaagcccttcttcactctctctctttcttcccttgcttgctactcttgtcgagtgcaattacctccaagccaagttcaaacgatgatgccaaagtccatctaaccaaaccacttcaaacgcgttggaaaccccgaccaccgcgttgagtcgaaggtggtcttattgaaatacatggaactccccaacacccncgcgtgcaatgcgccggtgtcactgtttccaaacgcaccctccaccgcaaccgctcacgctgccacttcatcttctaccttatcccacaattcattgtcgtaatggtgtcggtaatattagtaagaagtatttattcagctttaacgtgataacaatatagtaata

SEQ ID NO: 3380 - DNA, 575 bp, Artificial; identical to SEQ ID NO: 2657
  Mutations within GlyA3B4 introduced by GmGlyA3B4_T02TALE nuclease

SEQ ID NO: 3381 - DNA, 649 bp, Artificial; identical to SEQ ID NO: 1901
  Mutations within GlyA3B4 introduced by GmGlyA3B4_T02TALE nuclease

SEQ ID NO: 3382 - DNA, 579 bp, Artificial; identical to SEQ ID NO: 1874
  Mutations within GlyA3B4 introduced by GmGlyA3B4_T02TALE nuclease

SEQ ID NO: 3383 - DNA, 633 bp, Artificial; identical to SEQ ID NO: 1895
  Mutations within GlyA3B4 introduced by GmGlyA3B4_T02TALE nuclease

SEQ ID NO: 3384 - DNA, 633 bp, Artificial; identical to SEQ ID NO: 1895
  Mutations within GlyA3B4 introduced by GmGlyA3B4_T02TALE nuclease

SEQ ID NO: 3385 - DNA, 659 bp, Artificial; identical to SEQ ID NO: 2664
  Mutations within GlyA3B4 introduced by GmGlyA3B4_T02TALE nuclease

SEQ ID NO: 3386 - DNA, 648 bp, Artificial
  Mutations within GlyA3B4 introduced by GmGlyA3B4_T02TALE nuclease
gttcatgtacggttgcagatataaacgaagcatagcttatgtatgaggtgtaacaaaattggaaacaatagccatgcaaggtgaagaatgtcaccaactcagaaacccttcttcattgacgtgtccctcactcactctcctctcttcactataaatcgccactcttcgtgttctccacttcaccaactccttcaaacttattaacactttccttagttcaatatggggaagcccttcttcactctctctctttcttccctttgcttgctactcttgtcgagtgcattacctccagcaagttcaacgagtgccaactcaacaacctcaacgcgttggaacccgaccaccgcgttgagtccgaaggtggtcttattgaaacatggaactctcaacaccctgagctgcaatgcgccggtgtcactgtttccaaacgcaccctcaaccgcaacggcctccacttgccatcttactcaccttatccccaaatgatcattgtcgttcaaggtgcgtaatattagtaagaagtatttatcagcttaacgtgataacaataatagtaatatgaaatatttattaaaatttttataattaatctctgctagaaaatttgattaatcattttagtagaatttgtttttctcaactagg

SEQ ID NO: 3387 - DNA, 491 bp, Artificial
  Mutations within GlyA3B4 introduced by GmGlyA3B4_T02TALE nuclease
gttcatgtacggttgcagatataaacgaagcatagcttatgtatgaggtgtaacaaaattggaaacaatagccatgcaaggtgaagaatgtcaccaactcagaaacccttcttcattgacgtgtccctcactcactctcctctcttcactataaatcgccactcttcgtgttctccacttcaccaactccttcaaacttattaacactttccttagttcaatatggggaagcccttcttcactctctctctttcttccctttgcttgctaaacgcaccctcaaccgcaacggcctccacttgccatcttactcaccttatcccccaaatgatcattgtcgttcaaggtgcgtaatattagtaagaagtatttatcagcttaacgtgataacaataatagtaatatgaaatatttattaaattttttataattaatctctgctagaaaatttgattaatcatttttagtagaatttgtttttctcaactagg

SEQ ID NO: 3388 - DNA, 554 bp, Artificial
  Mutations within GlyA3B4 introduced by GmGlyA3B4_T02TALE nuclease
gttcatgtacggttgcagatataaacgaagcatagcttatgttatgaggtgtaacaaaattggaaacaatagccatgcaaggtgaagaatgtcaccaactcagaaacccttcttcattgacgtgtccctcactcactctcctctcttcactataaatcgccactcttcgtgttctccacttcaccaactccttcaaacttattaacactttccttagttcaatatggggaagcccttcttcactctctctctttcttccctttgcttgctactcttgtcgagtgctattacctccagcaagttcaacgagtgccaactcaacaacctcacgcgttggaacccgaccaccgcgttgagtccgaaggtggtcttattgaaacatggaactctcacaccctgagctgcaatgcgccggtgtcactgtttccaaacgcaccctcaaccgcaacggcctccacttgccatcttactcaccttatccccaaatgatcattgtcgttcaaggtgcgtaatattagtaagaagtatttatcagcttaacgtgataacaatat

SEQ ID NO: 3389 - DNA, 683 bp, Artificial
  Mutations within GlyA3B4 introduced by GmGlyA3B4_T02TALE nuclease
  misc_feature (549): n is a or c or t or g
gttcatgtacggttgcagatataaacgaagcatagcttatgtatgaggtgtaacaaaattggaaacaatagccatgcaaggtgaagaatgtcaccaactcagaaacccttcttcattgacgtgtccctcactcactctcctctcttcactataaatcgccactcttcgtgttctccacttcaccaactccttcaaacttattaacactttccttagttcaatatggggaagcccttcttcactctctctctttcttccctttgcttgctactcttgtcgagtgcatgcttattaacctcccatcgcaagttcaaatcagagtgccaacctacaatcaaacctcaaaccagccggtttgggaacccgaccaccgcgttgagtccgaaggtggtcttattgaaacatggaactctcaacaccctgagctgcaatgcgccggtgtcactgtttccaaacgcaccctcaaccgcaacggcctccacttgccatcttactcaccttatccccaaatgatcattgtcgttcaaggtgcgtaatattagtaagagnatttatcagcttaacgtgataacaataatagtaatatgaaatatttattaaatttttataattaatctctgctagaaaatttgattaatcattttagtagaatttgtttttctcaactaggttttaaaacacca

SEQ ID NO: 3390 - DNA, 669 bp, Artificial
  Mutations within GlyA3B4 introduced by GmGlyA3B4_T02TALE nuclease
  misc_feature (533): n is a or c or t or g
gttcatgtacggttgcagatataaacgaagcatagcttatgtatgaggtgtaacaaaattggaaacaatagccatgcaaggtgaagaatgtcaccaactcagaaacccttcttcattgacgtgtccctcactcactctcctctcttcactataaatcgccactcttcgtgttctccacttcaccaactccttcaaacttattaacactttccttagttcaatatggggaagcccttcttcactctctctctttcttccctttgcttgctactcttgtcgagtgcatttgctattacctccagcaagttcaacgagtgccaactcaacaacctcaacgcgttggaacccgaccaccgcgttgagtccgaaggtggtcttattgaaacatggaactctcaacaccctgagctgcaatgcgccggtgtcactgtttccaaacgcaccctcaaccgcaacggcctccacttgccatcttactcaccttatccccaaatgatcattgtcgttcaaggtgcgtaatattagtaagaagnatttatcagcttaacgtgataacaataatagtaatatgaaaatatttattaaatttttataattaatctctgctagaaaatttgattaatcattttagtagaatttgtttttctcaactaggtttttaaaacacca

SEQ ID NO: 3391 - DNA, 663 bp, Artificial
  Mutations within GlyA3B4 introduced by GmGlyA3B4_T02TALE nuclease
gttcatgtacggttgcagatataaacgaagcatagcttatgtatgaggtgtaacaaaattggaaacaatagccatgcaaggtgaagaatgtcaccaactcagaaacccttcttcattgacgtgtccctcactcactctcctctcttcactataaatcgccactcttcgtgttctccacttcaccaactccttcaaacttattaacactttccttagttcaatatggggaagcccttcttcactctctctctttcttccctttgcttgctactcttgtcgagtgcatgcctgcttgccaccgccattgctggcgatggccaccacctgctgggggtcaagccgtgggcctggcacagcaccggcaacagccgctggactacctccagcaagttcaacgagtgccaactcaacaacctcaacgcgttggaacccgaccaccgcgttgagtccgaaggtggtcttattgaaacatggaactctcaacaccctgagctgcaatgcgccggtgtcactgtttccaaacgcaccctcaaccgcaacggcctccacttgccatcttactcaccttatccccaaatgatcattgtcgttcaaggtgcgtaatattagtaagaagtatttatcgcttaacgtgataacaataatagtaatatgaaaatattt

SEQ ID NO: 3392 - DNA, 656 bp, Artificial
  Mutations within GlyA3B4 introduced by GmGlyA3B4_T02TALE nuclease
gttcatgtacggttgcagatataaacgaagcatagcttatgtatgaggtgtaacaaaattggaaacaatagccatgcaaggtgaagaatgtcaccaactcagaaacccttcttcattgacgtgtccctcactcactctcctctcttcactataaatcgccactcttcgtgttctccacttcaccaactccttcaaacttattaacactttccttagttcaatatggggaagcccttcttcactctctctctttcttccctttgcttgctactcttgtcgagtacctccagcaagttcaacgagtgccaactcaacaacctcaacgcgttggaacccgaccaccgcgttgagtccgaaggtggtcttattgaaacatggaactctcaacaccctgagctgcaatgcgccggtgtcactgtttccaaacgcaccctcaaccgcaacggcctccacttgccatcttactcaccttatccccaaatgatcattgtcgttcaaggtgcgtaaatattagtaagaagtatttatcagcttaacgtgataacaataatagtaatatgaaatatttattaaattttttataattaatctctgctagaaaatttgattaatctttttagtagaattgtttttctcaactaggtttaaacaccaca

SEQ ID NO: 3393 - DNA, 637 bp, Artificial
  Mutations within GlyA3B4 introduced by GmGlyA3B4_T02TALE nuclease
gttcatgtacggttgcagatataaacgaagcatagcttatgtatgaggtgtaacaaaattggaaacaatagccatgcaaggtgaagaatgtcaccaactcagaaacccttcttcattgacgtgtccctcactcactctcctctcttcactataaatcgccactcttcgtgttctccacttcaccaactccttcaaacttattaacactttccttagttcaatatggggaagcccttcttcactctctctctttcttccctttgcttattacctccagcaagttcaacgagtgccaactcaacaacctcaacgcgttggaacccgaccaccgcgttgagtccgaaggtggtcttattgaaacatggaactctcaacaccctgagctgcaatgcgccggtgtcactgtttccaaacgcaccctcaaccgcaacggcctccacttgccatcttactcaccttatccccaaatgatcattgtcgttcaaggtgcgtaaatattagtaagaagtatttatcagcttaacgtgataacaataatagtaatatgaaatatttattaaattttttataattaatctctgctagaaaatttgattaatcatttttagtagaatttgttttttctcaactaggtttt

SEQ ID NO: 3394 - DNA, 660 bp, Artificial
  Mutations within GlyA3B4 introduced by GmGlyA3B4_T02TALE nuclease
gttcatgtacggttgcagatataaacgaagcatagcttatgtatgaggtgtaacaaaattggaaacaatagccatgcaaggtgaagaatgtcaccaactcagaaacccttcttcattgacgtgtccctcactcactctcctctcttcactataaatcgccactcttcgtgttctccacttcaccaactccttcaaacttattaacactttccttagttcaatatgggggaagcccttcttcactctctctctttcttccctttgcttgctactcttgtcgagtgcatgctttacctccagcaagttcaacgagtgccaactcaacaacctcaacgcgttggaacccgaccaccgcgttgagtccgaaggtggtcttattgaaacatggaactctcaacaccctgagctgcaatgcgccggtgtcactgtttccaaacgcaccctcaaccgcaacggcctccacttgccatcttactcaccttatccccaaatgatcattgtcgttcaaggtgcgtaatattagtaagaagtatttatcagcttaacgtgataacaataatagtaatatgaaatatttattaaatttttataattaatctctgctagaaaatttgattaatcattttagtagaatttgtttttctcaactaggttttaaaa

SEQ ID NO: 3395 - DNA, 669 bp, Artificial
  Mutations within GlyA3B4 introduced by GmGlyA3B4_T02TALE nuclease
gttcatgtacggttgcagatataaacgaagcatagcttatgtatgaggtgtaacaaaattggaaacaatagccatgcaaggtggaagaatgtcaccaactcagaaacccttcttcattgacgtgtccctcactcactctcctctcttcactataaatcgccactcttcgtgttctccacttcaccaactccttcaaacttattaacactttccttagttcaatatggggaagcccttcttcactctctctctttcttccctttgcttgctactcttgtcgagtgcatgctattacctccagcaagttcaacgagtgccaactcaacaacctcaacgcgttggaacccgaccaccgcgttgagtccgaaggtggtcttattgaaacatggaactctcaacaccctgagctgcaatgcgccggtgtcactgtttccaaacgcaccctcaaccgcaacggcctccacttgccatcttactcaccttatccccaaatgatcattgtcgttcaaggtgcgtaatattagtaagaagtatttatcagcttaacgtgataacaataatagtaatatgaaaatatttattaaatttttataattaatctctgctagaaaatttgattaatcatttttagtagaatttgtttttctcaactaggtttttaaaacacca

SEQ ID NO: 3396 - DNA, 579 bp, Artificial
  Mutations within GlyA3B4 introduced by GmGlyA3B4_T02TALE nuclease
gttcatgtacggttgcagatataaacgaagcatagcttatgtatgaggtgtaacaaaattggaaacaatagccatgcaaggtgaagaatgtcaccaactcagaaacccttcttcattgacgtgtccctcactcactctcctctcttcactataaatcgccactcttcgtgttctccacttcaccaactccttcaaacttattaacactttccttagttcaatatggggaagcccttcaaaactctctctctttcaacgagtgccaactcaacaacctcaacgcgttggaacccgaccaccgcgttgagtccgaaggtggtcttattgaaacatggaactctcaacaccctgagctgcaatgcgccggtgtcactgtttccaaacgcaccctcaaccgcaacggcctccacttgccatcttactcaccttatccccaaatgatcattgtcgttcaaggtgcgtaatattagtaagaagtatttatcagcttaacgtgataacaataatagtaatatgaaatatttattaaattttttataattaatctctgctagaaaatttgattaatcatttttagta

SEQ ID NO: 3397 - DNA, 665 bp, Artificial; identical to SEQ ID NO: 1912
  Mutations within GlyA3B4 introduced by GmGlyA3B4_T02TALE nuclease

SEQ ID NO: 3398 - DNA, 566 bp, Artificial
  Mutations within GlyA3B4 introduced by GmGlyA3B4_T02TALE nuclease
gttcatgtacggttgcagatataaacgaagcatagcttatgtatgaggtgtaacaaaattggaaacaatagccatgcaaggtgaagaatgtcaccaactcagaaacccttcttcattgacgtgtccctcactcactctcctctcttcactataaatcgccactcttcgtgttctccacttcaccaactccttcaaacttattaacactttccttagttcaacgagtgccaactcaacaacctcaacgcgttggaacccgaccaccgcgttgagtccgaaggtggtcttattgaaacatggaactctcaacaccctgagctgcaatgcgccggtgtcactgtttccaaacgcaccctcaaccgcaacggcctccacttgccatcttactcaccttatccccaaaatgatcattgtcgttcaaggtgcgtaatattagtaagaagtatttatcagcttaacgtgataacaataatagtaatatgaaatatttattaaattttttatattaatctctgctagaaaatttgattaatcatttttagtagaatttgtttttctcaactagg

SEQ ID NO: 3399 - DNA, 664 bp, Artificial
  Mutations within GlyA3B4 introduced by GmGlyA3B4_T02TALE nuclease
gttcatgtacggttgcagatataaacgaagcatagcttatgtatgaggtgtaacaaaattggaaacaatagccatgcaaggtgaagaatgtcaccaactcagaaacccttcttcattgacgtgtccctcactcactctcctctcttcactataaatcgccactcttcgtgttctccacttcaccaactccttcaaacttattaacactttccttagttcaatatggggaagcccttcttcactctctctctttcttccctttgcttgctactcttgtcgagttgctattacctccagcaagttcaacgagtgccaactcaacaacctcaacgcgttggaacccgaccaccgcgttgagtccgaaggtggtcttattgaaacatggaactctcaacaccctgagctgcaatgcgccggtgtcactgtttccaaacgcacccctcaaccgcaacggcctccacttgccatcttactcaccttatcccccaaatgatcattgtcgttcaaggtggcataattattaagatagaatgatttattcatcgcagtcaattaacggtgataaaccaaataatagtaatatgaaaatatttattaaatttttataattaatctctgctagaaaatttgattaatcattttagtagaatttgtttttctcaac

SEQ ID NO: 3400 - DNA, 634 bp, Artificial; identical to SEQ ID NO: 1893
  Mutations within GlyA3B4 introduced by GmGlyA3B4_T02TALE nuclease

SEQ ID NO: 3401 - DNA, 667 bp, Artificial
  Mutations within GlyA3B4 introduced by GmGlyA3B4_T02TALE nuclease
gttcatgtacggttgcagatataaacgaagcatagcttatgtatgaggtgtaacaaaattggaaacaatagccatgcaaggtgaagaatgtcaccaactcagaaacccttcttcattgacgtgtccctcactcactctcctctcttcactataaatcgccactcttcgtgttctccacttcaccaactccttcaaacttattaacactttccttagttcaatatggggaagcccttcttcactctctctctttcttccctttgcttgctactcttgtcgagtgcattgctattacctccagcaagttcaacgagtgccaactcaacaacctcaacgcgttggaacccgaccaccgcgttgagtccgaaggtggtcttattgaaacatggaactctcaacaccctgagctgcaatgcgccggtgtcactgtttccaaacgcaccctcaaccgcaacggcctccacttgccatcttactcaccttatccccaaatgatcattgtcgttcaaggtgcgtaatattagtaagagtatttatcagcttaacgtgataacaatatagtaatatgaaatatttattaaatttttataattaatctctgctagaaaatttgattaatcattttagtagaatttgtttttctcaactaggtttttaaaacaccaca

SEQ ID NO: 3402 - DNA, 663 bp, Artificial
  Mutations within GlyA3B4 introduced by GmGlyA3B4_T02TALE nuclease
gttcatgtacggttgcagatataaacgaagcatagcttatgtatgaggtgtaacaaaattggaaacaatagccatgcaaggtgaagaatgtcaccaactcagaaaccccttcttcattgacgtgtccctcactcactctcctctcttcactataaatcgccactcttcgtgttctccacttcaccaactccttcaaacttattaacactttccttagttcaatatggggaagcccttcttcactctctctctttcttccctttgcttgctactcttgtcgagtgcatgttacctccagcaagttcaacgagtgccaactcaacaacctcaacgcgttggaacccgaccaccgcgttgagtccgaaggtggtcttattgaaacatggaactctcaacaccctgagctgcaatgcgccggtgtcactgtttccaaacgcaccctcaaccgcaacggcctccacttgccatcttactcaccttatccccaaatgatcattgtcgttcaaggtgcgtaatattagtaagaagtatttatcagcttaacgtgataacaataatagtaatatgaaatatttattaaatttttataattaatctctgctagaaaatttgattaatcattttagtagaatttgtttttctcaactaggttttaaaacacca

SEQ ID NO: 3403 - DNA, 639 bp, Artificial; identical to SEQ ID NO: 1826
  Mutations within GlyA3B4 introduced by GmGlyA3B4_T02TALE nuclease

SEQ ID NO: 3404 - DNA, 665 bp, Artificial
  Mutations within GlyA3B4 introduced by GmGlyA3B4_T02TALE nuclease
gttcatgtacggttgcagatataaacgaagcatagcttatgtatgaggtgtaacaaaattggaaacaatagccatgcaaggtgaagaatgtcaccaactcagaaacccttcttcattgacgtgtccctcactcactctcctctcttcactataaatcgccactcttcgtgttctccacttcaccaaactccttcaaacttattaacactttccttagttcaatatggggaagcccttcttcactctctctctttcttccctttgcttgctactcttgtcgagtgcatctattacctccagcaagttcaacgagtgccaactcaacaacctcaacgcgttggaacccgaccaccgcgttgagtccgaaggtggtcttattgaaacatggaactctcaacaccctgagctgcaatgcgccggtgtcactgtttccaaacgcaccctcaaccgcaacggcctccacttgccatcttactcaccttatccccaaatgatcattgtcgttcaaggtgcgtaatattagtaagaagtatttatcagcttaacgtgataacaataatagtaatatgaaatatttattaaatttttataattaatctctgctagaaaatttgattaatcattttagtagaatttgtttttctcaactaggttttaaaacacca

SEQ ID NO: 3405 - DNA, 656 bp, Artificial
  Mutations within GlyA3B4 introduced by GmGlyA3B4_T02TALE nuclease
gttcatgtacggttgcagatataaacgaagcatagcttatgtatgaggtgtaacaaaattggaaacaatagccatgcaaggtgaagaatgtcaccaactcagaaaccccttcttcattgacgtgtccctcactcactctcctctcttcactataaatcgccactcttcgtgttctccacttcaccaactccttcaaacttattaacactttccttagttcaatatggggaagcccttcttcactctctctctttcttccctttgcttgctactcttgtcgagtgcctattacctccagcaagttcaacgagtgccaactcaacaacctcaacgcgttggaacccgaccaccgcgttgagtccgaaggtggtcttattgaaacatggaactctcaacaccctgagctgcaatgcgccggtgtcactgtttccaaacgcaccctcaaccgcaacggcctccacttgccatcttactcaccttatccccaaatgatcattgtcgttcaaggtgcgtaatattagtaagaagtatttatcagcttaacgtgataacaatatagtaatatgaaatatttattaaatttttataattaatctctgctagaaaatttgattaatcattttagtagaatttgttttctcaactaggttttaaaa

SEQ ID NO: 3406 - DNA, 649 bp, Artificial
  Mutations within GlyA3B4 introduced by GmGlyA3B4_T02TALE nuclease
gttcatgtacggttgcagatataaacgaagcatagcttatgtatgaggtgtaacaaaattggaaacaatagccatgcaaggtgaagaatgtcaccaactcagaaacccttcttcattgacgtgtccctcactcactctcctctcttcactataaatcgccactcttcgtgttctccacttcaccaactccttcaaacttattaacactttccttagttcaatatggggaagcccttcttcactctctctctttcttccctttgcttgctactcttgtcgagtgcatttacctccagcaagttcaacgagtgccaactcaacaacctcaacgcgttggaaacccgaccaccgcgttgagtccgaaggtggtcttattgaaacatggaactctcaacaccctgagctgcaatgcgccggtgtcactgtttccaaacgcaccctcaaccgcaacggcctccacttgccatcttactcaccttatccccaaatgatcattgtcgttcaaggtgcgtaatattagtaagaagtatttatcagcttaacgtgataacaataatagtaatatgaaatatttattaaatttttataattaatctctgctagaaaatttgattaatcattttagtagaatttgtttttctcaactagg

SEQ ID NO: 3407 - DNA, 613 bp, Artificial
  Mutations within GlyA3B4 introduced by GmGlyA3B4_T02TALE nuclease
gttcatgtacggttgcagatataaacgaagcatagcttatgtatgaggtgtaacaaaattggaaacaatagccatgcaaggtgaagaatgtcaccaactcagaaacccttcttcattgacgtgtccctcactcactctcctctcttcactataaatcgccactcttcgtgttctccacttcaccaactccttcaaacttattaacactttccttagttcaatatggggaagcccttcttcactctctctctttcttccctttgcttgctactcttgtcgagtgcatgttcaacgagtgccaactcaacaacctcaacgcgttggaacccgaccaccgcgttgagtccgaaggtggtcttattgaaacatggaactctcaacaccctgagctgcaatgcgccggtgtcactgtttccaaacgcaccctcaaccgcaacggcctccacttgccatcttactcaccttatccccaaatgatcattgtcgttcaaggtgcgtaaatattagtaagaagtatttatcagcttaacgtgataacaataatagtaatatgaaatatttattaaattttttataattaatctctgctagaaaatttgattaatctttttag

SEQ ID NO: 3408 - DNA, 441 bp, Artificial
  Mutations within GlyA3B4 introduced by GmGlyA3B4_T02TALE nuclease
gttcatgtacggttgcagatataaacgaagcatagcttatgtatgaggtgtaacaaaattggaaacaatagccatgcaaggtgaagaatgtcaccaactcagaaacccttcttcattgacgtgtccctcactcactctcctctcttcactataaatcgccactcttcgtgttctccacttcaccaactccttcaaacttattaacactttccttagttcaatatggggaagcccttcttcactctctctctttcttccctttgcttgctactcttgtcgagtgcctattacctccagcaagttcaacgagtgccaactcaacaacctcaacgcgttggaacccgaccaccgcgttgagtccgaaggtggtcttattgaaacatggaactctcaacaccctgagctgcaatgcgccggtgtcactgtttttcaaacgcaccc

SEQ ID NO: 3409 - DNA, 577 bp, Artificial
  Mutations within GlyA3B4 introduced by GmGlyA3B4_T02TALE nuclease
gttcatgtacggttgcagatataaacgaagcatagcttatgtatgaggtgtaacaaaattggaaacaatagccatgcaaggtgaagaatgtcaccaactcagaaacccttcttcattgacgtgtccctcactcactctcctctcttcactataaatcgccactcttcgtgttctccacttcaccaactccttcaaacttattaacactttccttagttcaatatggggaagcccttcttcactctctctctttcttccctttgcttgctactcttgtcgaacgcggtggtcttattgaaacatggaactctcaacaccctgagctgcaatgcgccggtgtcactgtttccaaacgcaccctcaaccgcaacggccctccacttgccatcttactcaccttatccccaaatgatcattgtcgttcaggtgcgtaatattagtaagaagtatttatcagcttaacgtgataacaataatagtaatatgaaatatttattaaatttttttataattaatctctgctagaaaattttgattaatcatttttagtagaatttgtttttctcaactaggtttt

SEQ ID NO: 3410 - DNA, 653 bp, Artificial; identical to SEQ ID NO: 2284
  Mutations within GlyA3B4 introduced by GmGlyA3B4_T02TALE nuclease

SEQ ID NO: 3411 - DNA, 645 bp, Artificial
  Mutations within GlyA3B4 introduced by GmGlyA3B4_T02TALE nuclease
gttcatgtacggttgcagatataaacgaagcatagcttatgtatgaggtgtaacaaaattggaaacaatagccatgcaaggtgaagaatgtcaccaactcagaaacccttcttcattgacgtgtccctcactcactctcctctcttcactataaatcgccactcttcgtgttctccacttcaccaactccttcaaacttattaacactttccttagttcaatatggggaagcccttcttcactctctctctttcttcccttgctattacctccagcaagttcaacgagtgccaactcaacaacctcaacgcgttggaacccgaccaccgcgttgagtccgaaggtggtcttattgaaacatggaactctcaacacccctgagctgcaatgcgccggtgtcactgtttccaaacgcaccctcaaccgcaacggcctccacttgccatcttactcaccttatccccaaatgatcattgtcgttcaaggtgcgtaatattagtaagaagtatttatcagcttaacgtgataacaataatagtaatatgaaatatttattaaattttttataattaatctctgctagaaaatttgattaatcatttttagtagaatttgttttttctcaactaggttttaaacaccaca

SEQ ID NO: 3412 - DNA, 662 bp, Artificial
  Mutations within GlyA3B4 introduced by GmGlyA3B4_T02TALE nuclease
gttcatgtacggttgcagatataaacgaagcatagcttatgtatgaggtgtaacaaaattggaaacaatagccatgcaaggtgaagaatgtcaccaactcagaaaccccttcttcattgacgtgtccctcactcactctcctctcttcactataaatcgccactcttcgtgttctccacttcaccaactccttcaaacttattaacactttccttagttcaatatggggaagcccttcttcactctctctctttcttccctttgcttgctactcttgtcgagtgcctattacctccagcaagttcaacgagtgccaactcaacaacctcaacgcgttggaacccgaccaccgcgttgagtccgaaggtggtcttattgaaacatggaactctcaacaccctgagctgcaatgcgccggtgtcactgtttccaaacgcaccctcaaccgcaacggcctccacttgccatcttactcaccttatccccaaatgatcattgtcgttcaaggtgcgtaatattagtaagaagtatttatcagcttaacgtgataacaatatagtaatatgaaatatttattaaatttttataattaatctctgctagaaaatttgattaatcattttagtagaatttgttttctcaactaggtttttaaaacacca

SEQ ID NO: 3413 - DNA, 631 bp, Artificial
  Mutations within GlyA3B4 introduced by GmGlyA3B4_T02TALE nuclease
gttcatgtacggttgcagatataaacgaagcatagcttatgtatgaggtgtaacaaaattggaaacaatagccatgcaaggtgaagaatgtcaccaactcagaaacccttcttcattgacgtgtccctcactcactctcctctcttcactataaatcgccactcttcgtgttctccacttcaccaactccttcaaacttattaacactttccttagttcaatatggggaagcccttcttcactctctctctttcttccctttgcttgctactcttgtcgagtgcatgcctccagcaagttcaacgagtgccaactcaacaacctcaacgcgttggaacccgaccaccgcgttgagtccgaaggtggtcttattgaaacatggaactctcaacaccctgagctgcaatgcgccggtgtcactgtttccaaacgcaccctcaaccgcaacggcctccacttgccatcttactcaccttatccccaaatgatcattgtcgttcaaggtgcgtaatattagtaagaagtatttatcagcttaacgtgataacaataatagtaatatgaaatatttattaaatttttataattaatctctgctagaaaatttgattaatcattttagtagaatttg

SEQ ID NO: 3414 - DNA, 629 bp, Artificial
  Mutations within GlyA3B4 introduced by GmGlyA3B4_T02TALE nuclease
gttcatgtacggttgcagatataaacgaagcatagcttatgtatgaggtgtaacaaaattggaaacaatagccatgcaaggtgaagaatgtcaccaactcagaaacccttcttcattgacgtgtccctcactcactctcctctcttcactataaatcgccactcttcgtgttctccacttcaccaactccttcaaacttattaacactttccttagttcaatatggggaagcccttcttcactctctctctttcttccctttgcttgctactcttgtcgctattacctccagcaagttcaacgagtgccaactcaacaacctcaacgcgttggaacccgaccaccgcgttgagtccgaaggtggtcttattgaaacatggaactctcaacaccctgagctgcaatgcgccggtgtcactgtttccaaacgcaccctcaaccgcaacggcctccacttgccatcttactcaccttatccccaaatgatcattgtcgttcaaggtgcgtaatattagtaagaagtatttatcagcttaacgtgataacaataatagtaatatgaaatatttattaaatttttataattaatctctgctagaaaatttgattaatcattttagtagaatttg

SEQ ID NO: 3415 - DNA, 636 bp, Artificial; identical to SEQ ID NO: 1845
  Mutations within GlyA3B4 introduced by GmGlyA3B4_T02TALE nuclease

SEQ ID NO: 3416 - DNA, 521 bp, Artificial
  Mutations within GlyA3B4 introduced by GmGlyA3B4_T02TALE nuclease
gttcatgtacggttgcagatataaacgaagcatagcttatgtatgaggtgtaacaaaattggaaacaatagccatgcaaggtgaagaatgtcaccaactcagaaaccccttcttcattgacgtgtccctcactcactctcctctcttcactataaatcgccactcttcgtgttctccacttcaccaactccttcaaacttattaacactttccttagttcaataagcccttcttcactcaccgcgttgagtccgaaggtggtcttattgaaacatggaactctcaacaccctgagctgcaatgcgccggtgtcactgtttccaaacgcaccctcaaccgcaacggcctccacttgccatcttactcaccttatccccaaatgatcattgtcgttcaaggtgcgtaatattagtaagaagtatttatcagcttaacgtgataacaataatagtaatatgaatatttattaattttttataattaatctctgctagaaatttgattaatcatttttagtagaa

SEQ ID NO: 3417 - DNA, 654 bp, Artificial; identical to SEQ ID NO: 2225
  Mutations within GlyA3B4 introduced by GmGlyA3B4_T02TALE nuclease

SEQ ID NO: 3418 - DNA, 636 bp, Artificial
  Mutations within GlyA3B4 introduced by GmGlyA3B4_T02TALE nuclease
gttcatgtacggttgcagatataaacgaagcatagcttatgtatgaggtgtaacaaaattggaaacaatagccatgcaaggtgaagaatgtcaccaactcagaaaccccttcttcattgacgtgtccctcactcactctcctctcttcactataaatcgccactcttcgtgttctccacttcaccaactccttcaaacttattaacactttccttagttcaatatggggaagcccttcttcactctctctctttcttccctttgcttgctactcttgtcgagtgctgctattacctccagcaagttcaacgagtgccaactcaacaacctcaacgcgttggaacccgaccaccgcgttgagtccgaaggtggtcttattgaaacatggaactctcaacaccctgagctgcaatgcgccggtgtcactgtttccaaacgcaccctcaaccgcaacggcctccacttgccatcttactcaccttatccccaaatgatcattgtcgttcaaggtgcgtaatattagtaagagtatttatcagcttaacgtgataacaataatagtaatatgaaatatttattaaatttttataattaatctctgctagaaaatttgattaatcattttagtagaatttg

SEQ ID NO: 3419 - DNA, 651 bp, Artificial; identical to SEQ ID NO: 3284
  Mutations within GlyA3B4 introduced by GmGlyA3B4_T02TALE nuclease

SEQ ID NO: 3420 - DNA, 636 bp, Artificial; identical to SEQ ID NO: 1845
  Mutations within GlyA3B4 introduced by GmGlyA3B4_T02TALE nuclease

SEQ ID NO: 3421 - DNA, 790 bp, Artificial
  Mutations within GlyA3B4 introduced by GmGlyA3B4_T02TALE nuclease
gttcatgtacggttgcagatataaacgaagcatagcttatgtatgaggtgtaacaaaattggaaacaatagccatgcaaggtgaagaatgtcaccaactcagaaacccttcttcattgacgtgtccctcactcactctcctctcttcactataaatcgccactcttcgtgttctccacttcaccaactccttcaaacttattaacactttccttagttcaatatggggaagcccttcttcactctctctctttcttccctttgcttgctactcttgtcgagtgcatgcgccactgtcgaacgaaccttcggtttgatcttctcctgttgctgctggctgtagccgagcgtgcgtagatcggcgatatcgatagcgtaatctggaacatcgtatgggtaatcgatgaccttacgtttcttttttaggatcgccccatgacttgctattacctccagcaagttcaacgagtgccaactcaacaacctcaacgcgttggaacccgaccaccgcgttgagtccgaaggtggtcttattgaaacatggaactctcaacaccctgagctgcaatgcgccggtgtcactgtttccaaaacgcaccctcaaccgcaacggcctccacttgccatcttactcaccttatccccaaatgatcattgtcgttcaaggtgcgtaatattagtaagaagtatttatcagcttaacgtgataacaataatagtaatatgaaatatttattaaaattttttataattaatctctgctagaaaatttgattaatcatttttagtag

SEQ ID NO: 3422 - DNA, 647 bp, Artificial; identical to SEQ ID NO: 1412
  Mutations within GlyA3B4 introduced by GmGlyA3B4_T02TALE nuclease

SEQ ID NO: 3423 - DNA, 668 bp, Artificial
  Mutations within GlyA3B4 introduced by GmGlyA3B4_T02TALE nuclease
  misc_feature (531): n is a or c or t or g
gttcatgtacggttgcagatataaacgaagcatagcttatgtatgaggtgtaacaaaattggaaacaatagccatgcaaggtgaagaatgtcaccaactcagaaacccttcttcattgacgtgtccctcactcactctcctctcttcactataaatcgccactcttcgtgttctccacttcaccaactccttcaaacttattaacactttccttagttcaatatggggaagcccttcttcactctctctctttcttccctttgcttgctactcttgtcgagtgcatggctattacctccagcaagttcaacgagtgccaactcaacaacctcaacgcgttggaacccgaccaccgcgttgagtccgaaggtggtcttattgaaacatggaactctcaacaccctgagctgcaatgcgccggtgtcactgtttccaaacgcaccctcaaccgcaacggcctccacttgccatcttactcaccttatccccaaatgatcattgtcgttcaaggtgcgtaatattagtaagagnatttatcagcttaacgtgataacaataatagtaatatgaaatatttattaaatttttataattaatctctgctagaaaatttgattaatcattttagtagaatttgtttttctcaactaggtttttaaaacaccaca

SEQ ID NO: 3424 - DNA, 656 bp, Artificial
  Mutations within GlyA3B4 introduced by GmGlyA3B4_T02TALE nuclease
gttcatgtacggttgcagatataaacgaagcatagcttatgtatgaggtgtaacaaaattggaaacaatagccatgcaaggtgaagaatgtcaccaactcagaaaccccttcttcattgacgtgtccctcactcactctcctctcttcactataaatcgccactcttcgtgttctccacttcaccaactccttcaaacttattaacactttccttagttcaatatggggaagcccttcttcactctctctctttcttccctttgcttgctattacctccagcaagttcaacgagtgccaactcaacaacctcaacgcgttggaacccgaccaccgcgttgagtccgaaggtggtcttattgaaacatggaactctcaacacccctgagctgcaatgcgccggtgtcactgttttccaaacgcaccctcaaccgcaacggcctccacttgccatcttactcaccttatcccccaaatgatcattgtcgttcaaggtgcgtaatattagtaagaagtatttatcagcttaacgtgataacaataatagtaatatgaaatatttattaaattttttataattaatctctgctagaaaatttgattaatcattttttagtagaattttgttttttctcaactaggttttaaaacaccaca

SEQ ID NO: 3425 - DNA, 662 bp, Artificial; identical to SEQ ID NO: 1800
  Mutations within GlyA3B4 introduced by GmGlyA3B4_T02TALE nuclease

SEQ ID NO: 3426 - DNA, 485 bp, Artificial
  Mutations within GlyA3B4 introduced by GmGlyA3B4_T02TALE nuclease
gttcatgtacggttgcagatataaacgaagcatagcttatgtatgaggtgtaacaaaattggaaacaatagccatgcaaggtgaagaatgtcaccaactcagaaacccttcttcattgacgtgtccctcactcactctcctctcttcactataaatcgccactcttcgtgttctccacttcaccaactccttcaaacttattaacactttccttagttcaatatggggaagcccttcttcactctctctctttcttccctttgcttgctactcttgtcgagtgcttgctattacctccagcaagttcaacgagtgccaactcaacaacctcaacgcgttggaacccgaccaccgcgttgagtccgaaggtggtcttattgaaacatggaactctcaacaccctgagctgcaatgcgccggctgtcactgtttccaaacgcaccctcaaccgcaacggcctccacttgccatcttactcaccttat

SEQ ID NO: 3427 - DNA, 646 bp, Artificial; identical to SEQ ID NO: 1911
  Mutations within GlyA3B4 introduced by GmGlyA3B4_T02TALE nuclease

SEQ ID NO: 3428 - DNA, 636 bp, Artificial; identical to SEQ ID NO: 1885
  Mutations within GlyA3B4 introduced by GmGlyA3B4_T02TALE nuclease

SEQ ID NO: 3429 - DNA, 656 bp, Artificial
  Mutations within GlyA3B4 introduced by GmGlyA3B4_T02TALE nuclease
gttcatgtacggttgcagatataaacgaagcatagcttatgtatgaggtgtaacaaaattggaaacaatagccatgcaaggtgaagaatgtcaccaactcagaaacccttcttcattgacgtgtccctcactcactctcctctcttcactataaatcgccactcttcgtgttctccacttcaccaactccttcaaacttattaacactttccttagttcaatatggggaagcccttcttcactctctctctttcttccctttgcttgctactcttgtcgagttgctattacctccagcaagttcaacgagtgccaactcaacaacctcaacgcgttggaacccgaccaccgcgttgagtccgaaggtggtcttattgaaacatggaactctcaacaccctgagctgcaatgcgccggtgtcactgtttccaaaacgcaccctcaaccgcaacggcctccacttgccatcttactcaccttatccccaaatgatcattgtcgttcaaggtgcgtaatattagtaagaagtatttatcagcttaacgtgataacaataatagtaatatgaaaatatttattaaaatttttataattaatctctgctagaaaatttgattaatcattttagtagaatttgtttttctcaactaggtttt

SEQ ID NO: 3430 - DNA, 654 bp, Artificial; identical to SEQ ID NO: 1862
  Mutations within GlyA3B4 introduced by GmGlyA3B4_T02TALE nuclease
  misc_feature (530): n is a or c or t or g

SEQ ID NO: 3431 - DNA, 560 bp, Artificial
  Mutations within GlyA3B4 introduced by GmGlyA3B4_T02TALE nuclease
gttcatgtacggttgcagatataaacgaagcatagcttatgtatgaggtgtaacaaaattggaaacaatagccatgcaaggtgaagaatgtcaccaactcagaaacccttcttcattgacgtgtccctcactcactctcctctcttcactataaatcgccactcttcgtgttctccacttcaccaactccttcaaacttattaacactttccttagttcaatatggggaagcccttcttcactctctctctttcttccctttgcgggtccgaaggtggtcttattgaaacatggaactctcaacaccctgagctgcaatgcgccggtgtcactgtttccaaacgcaccctcaaccgcaacggcctccacttgccatcttactcaccttatccccaaatgatcattgtcgttcaaggtgcgtaatattagtaagaagtatttatcagcttaacgtgataacaataatagtaatatgaaatatttattaaattttttataattaatctctgctagaaaatttgattaatcatttttagtagaatttgtttttctcaactagg

SEQ ID NO: 3432 - DNA, 563 bp, Artificial
  Mutations within GlyA3B4 introduced by GmGlyA3B4_T02TALE nuclease
gttcatgtacggttgcagatataaacgaagcatagcttatgtatgaggtgtaacaaaattggaaacaatagccatgcaaggtgaagaatgtcaccaactcagaaacccttcttcattgacgtgtccctcactcactctcctctcttcactataaatcgccactcttcgtgttctccacttcaccaactccttcaaacttattaacactttccttagttcaatatggggaagcccttctccactcttcgtgttctccagcaagttcaacgagtgccaactcaacaacctcaacgcgttggaacccgaccaccgcgttgagtccgaaggtggtcttattgaaacatggaactctcaacaccctgagctgcaatgcgccggtgtcactgtttccaaacgcaccctcaaccgcaacggcctccacttgccatcttactcaccttatccccaaatgatcattgtcgttcaaggtgcgtaatattagtaagaagtatttatcagcttaacgtgataacaataatagtaatatgaaatatttattaatttttataattaatctctgctag

SEQ ID NO: 3433 - DNA, 659 bp, Artificial
  Mutations within GlyA3B4 introduced by GmGlyA3B4_T02TALE nuclease
gttcatgtacggttgcagatataaacgaagcatagcttatgtatgaggtgtaacaaaattggaaacaatagccatgcaaggtgaagaatgtcaccaactcagaaacccttcattctattgacgtgtcccctcactcactctcctctcttcactataaatcgccactcttcgtgttctccacttcaccaactccttcaaacttattaacactttccttagttcaatatggggaagcccttcttcactctctctctttcttccctttgcttgctactcttgtcgagtgcatgtccagcaagttcaacgagtgccaactcaacaacctcaacgcgttggaacccgaccaccgcgttgagtccgaaggtggtcttattgaaacatggaactctcaacaccctgagctgcaatgcgccggtgtcactgtttccaaacgcaccctcaaccgcaacggcctccacttgccatcttactcaccttatccccaaatgatcattgtcgttcaaggtgcgtaatattagtaagaagtatttatcagcttaacgtgataacaataatagtaatatgaaatatttattaaatttttataattaatctctgctagaaaatttgattaatcattttagtagaatttgttttctcaactaggttttaaaacacca

SEQ ID NO: 3434 - DNA, 611 bp, Artificial
  Mutations within GlyA3B4 introduced by GmGlyA3B4_T02TALE nuclease
gttcatgtacggttgcagatataaacgaagcatagcttatgtatgaggtgtaacaaaattggaaacaatagccatgcaaggtgaagaatgtcaccaactcagaaacccttcttcattgacgtgtccctcactcactctcctctcttcactataaatcgccactcttcgtgttctccacttcaccaactccttcaaacttattaacactttccttagttcaatatggggaagcccttcttcactccagcaagttcaacgagtgccaactcaacaacctcaacgcgttggaacccgaccaccgcgttgagtccgaaggtggtcttattgaaacatggaactctcaacaccctgagctgcaatgcgccggtgtcactgtttccaaacgcaccctcaaccgcaacggcctccacttgccatcttactcaccttatccccaaaatgatcattgtcgttcaaggtgcgtaatattagtaagaagtatttatcagcttaacgtgataacaataatagtaatagaaatatttattaaattttttatattaatctctgctagaaaatttgattaatcatttttagtagaatttgtttttctcaactaggtttttaaaaca

SEQ ID NO: 3435 - DNA, 673 bp, Artificial
  Mutations within GlyA3B4 introduced by GmGlyA3B4_T02TALE nuclease
  misc_feature (445); (499): n is a or c or t or g
gttcatgtacggttgcagatataaacgaagcatagcttatgtatgaggtgtaacaaaattggaaacaatagccatgcaaggtgaagaatgtcaccaactcagaaacccttcttcattgacgtgtccctcactcactctcctctcttcactataaatcgccactcttcgtgttctccacttcaccaactccttcaaacttattaacactttccttagttcaatatggggaagcccttcttcactctctctctttcttccctttgcttgctactcttgtcgagtgcattttaccctccagcaaagttcaacgagtgccaactcaacaacctcaacgcgttggaaacccgaccaccgcgttgagtccgaaggtggtcttattgaaaacatggaactctcaacaccctgagctgcaatgcgccggtgtcactgtttccaaacgcacccncaaccgcaacggcctccacttgccatcttactcaccttatcccccaaaatgatnattgtcgttcaaggtgcgtaatattagtaaagaaagtatttatcagcttaacgtgataacaataatagtaatatgaaatatttattaaatttttataattaatctctgctagaaaatttgattaaatcatttttagtagaatttgtttttctcaactaggtttttaaaatcacc

SEQ ID NO: 3436 - DNA, 658 bp, Artificial; identical to SEQ ID NO: 3366
  Mutations within GlyA3B4 introduced by GmGlyA3B4_T02TALE nuclease

SEQ ID NO: 3437 - DNA, 650 bp, Artificial
  Mutations within GlyA3B4 introduced by GmGlyA3B4_T02TALE nuclease
  misc_feature (531): n is a or c or t or g
gttcatgtacggttgcagatataaacgaagcatagcttatgtatgaggtgtaacaaaaattggaaacaatagccatgcaaggtgaagaatgtcaccaactcagaaacccttcttcattgacgtgtccctcactcactctcctctcttcactataaatcgccactcttcgtgttctccacttcaccaactccttcaaacttattaacactttccttagttcaatatggggaagcccttcttcactctctctctttcttccctttgcttgctactcttgtcgagtgcatgctattacctccagcaagttcaacgagtgccaactcaacaacctcaacgcgttggaacccgaccaccgcgttgagtccgaaggtggtcttattgaaacatggaactctcaacaccctgagctgcaatgcgccggtgtcactgtttccaaacgcaccctcaaccgcaacggcctccacttgccatcttactcaccttatccccaaatgatcattgtcgttcaaggtgcgtaatattagtaagagnatttatcagcttaacgtgataacaatatagtaatatgaaatatttattaaatttttataattaatctctgctagaaaatttgattaatcattttagtagaatttgttttctcaactagg

SEQ ID NO: 3438 - DNA, 655 bp, Artificial; identical to SEQ ID NO: 1852
  Mutations within GlyA3B4 introduced by GmGlyA3B4_T02TALE nuclease

SEQ ID NO: 3439 - DNA, 527 bp, Artificial
  Mutations within GlyA3B4 introduced by GmGlyA3B4_T02TALE nuclease
gttcatgtacggttgcagatataaacgaagcatagcttatgtatgaggtgtaacaaaattggaaacaatagccatgcaaggtgaagaatgtcaccaactcagaaacccttcttcattgacgtgtccctcactcactctcctctcttcactataaatcgccactcttcgtgttctccacttcaacaacctcaacgcgttggaacccgaccaccgcgttgagtccgaaggtggtcttattgaaacatggaactctcaacaccctgagctgcaatgcgccggtgtcactgtttccaaacgcaccctcaaccgcaacggcctccacttgccatcttactcaccttatccccaaatgatcattgtcgttcaaggtgcgtaatattagtaagaagtatttatcagcttaacgtgataacaataatagtaatatgaaatatttattaaatttttttataattaatctctgctagaaaatttgattaatcatttttagtagaatttgttttttctcaactaggttttaaacacca

SEQ ID NO: 3440 - DNA, 636 bp, Artificial; identical to SEQ ID NO: 1885
  Mutations within GlyA3B4 introduced by GmGlyA3B4_T02TALE nuclease

SEQ ID NO: 3441 - DNA, 635 bp, Artificial
  Mutations within GlyA3B4 introduced by GmGlyA3B4_T02TALE nuclease
gttcatgtacggttgcagatataaacgaagcatagcttatgtatgaggtgtaacaaaattggaaacaatagccatgcaaggtgaagaatgtcaccaactcagaaacccttcttcattgacgtgtccctcactcactctcctctcttcactataaatcgccactcttcgtgttctccacttcaccaactgcaacggcgccgtgctgtccgtggaggagctcctgatcggcggcgagatgatcattggatctagatgcattcgcgatctacacctccagcaagttcaacgagtgccaactcaacaacctcaacgcgttggaacccgaccaccgcgttgagtccgaaggtggtcttattgaaacatggaactctcaacaccctgagctgcaatgcgccggtgtcactgtttccaaacgcaccctcaaccgcaacggcctccacttgccatcttactcaccttatcccccaaatgatcattgtcgttcaaggtgcgtaaatattagtaagaagtatttatcagcttaacgtgataacaataatagtaatatgaaatatttattaaattttttataattaatctctgctagaaaatttgattaatctttttagtagaattgttttttctcaactaggttt

SEQ ID NO: 3442 - DNA, 669 bp, Artificial
  Mutations within GlyA3B4 introduced by GmGlyA3B4_T02TALE nuclease
  misc_feature (532): n is a or c or t or g
gttcatgtacggttgcagatataaacgaagcatagcttatgtatgaggtgtaacaaaattggaaacaatagccatgcaaggtgaagaatgtcaccaactcagaaaccccttcttcattgacgtgtccctcactcactctcctctcttcactataaatcgccactcttcgtgttctccacttcaccaactccttcaaacttattaacactttccttagttcaatatggggaagcccttcttcactctctctctttcttccctttgcttgctactcttgtcgagtgcatgctattacctccagcaagttcaacgagtgccaactcaacaacctcaacgcgttggaacccgaccaccgcgttgagtccgaaggtggtcttattgaaacatggaactctcaacaccctgagctgcaatgcgccggtgtcactgtttccaaacgcaccctcaaccgcaacggcctccacttgccatcttactcaccttatccccaaatgatcattgtcgttcaaggtgcgtaatattagtaagaagnatttatcagcttaacgtgataacaataatagtaatatgaaatatttattaaatttttataattaatctctgctagaaaatttgattaatcattttagtagaatttgtttttctcaactaggtttttaaaacaccaca

SEQ ID NO: 3443 - DNA, 631 bp, Artificial; identical to SEQ ID NO: 2232
  Mutations within GlyA3B4 introduced by GmGlyA3B4_T02TALE nuclease

SEQ ID NO: 3444 - DNA, 665 bp, Artificial
  Mutations within GlyA3B4 introduced by GmGlyA3B4_T02TALE nuclease
gttcatgtacggttgcagatataaacgaagcatagcttatgtatgaggtgtaacaaaattggaaacaatagccatgcaaggtgaagaatgtcaccaactcagaaacccttcttcattgacgtgtccctcactcactctcctctcttcactataaatcgccactcttcgtgttctccacttcaccaactccttcaaacttattaacactttccttagttcaatatggggaagcccttcttcactctctctctttcttccctttgcttgctactcttgtcgagtgcattctattacctccagcaagttcaacgagtgccaactcaacaacctcaacgcgttggaacccgaccaccgcgttgagtccgaaggtggtcttattgaaacatggaactctcaacaccctgagctgcaatgcgccggtgtcactgtttccaaacgcaccctcaaccgcaacggcctccacttgccatcttactcaccttatccccaaatgatcattgtcgttcaaggtgcgtaatattagtaagaagtatttatcagcttaacgtgataacaataatagtaatatgaaatatttattaaatttttataattaatctctgctagaaaatttgattaatcattttagtagaatttgtttttctcaactaggttttaaaacacca

SEQ ID NO: 3445 - DNA, 634 bp, Artificial; identical to SEQ ID NO: 2389
  Mutations within GlyA3B4 introduced by GmGlyA3B4_T02TALE nuclease

SEQ ID NO: 3446 - DNA, 668 bp, Artificial
  Mutations within GlyA3B4 introduced by GmGlyA3B4_T02TALE nuclease
  misc_feature (532): n is a or c or t or g
gttcatgtacggttgcagatataaacgaagcatagcttatgtatgaggtgtaacaaaattggaaacaatagccatgcaaggtgaagaatgtcaccaactcagaaacccttcttcattgacgtgtccctcactcactctcctctcttcactataaatcgccactcttcgtgttctccacttcaccaactccttcaaacttattaacactttccttagttcaatatggggaagcccttcttcactctctctctttcttccctttgcttgctactcttgtcgagtgcatttgctattacctccagcaagttcaacgagtgccaactcaacaacctcaacgcgttggaacccgaccaccgcgttgagtccgaaggtggtcttattgaaacatggaactctcaacaccctgagctgcaatgcgccggtgtcactgtttccaaacgcaccctcaaccgcaacggcctccacttgccatcttactcaccttatccccaaatgatcattgtcgttcaaggtgcgtaatattagtaagagnatttatcagcttaacgtgataacaataatagtaatatgaaatatttattaaatttttataattaatctctgctagaaaatttgattaatcattttagtagaatttgttttctcaactaggtttttaaaacaccaca

SEQ ID NO: 3447 - DNA, 655 bp, Artificial; identical to SEQ ID NO: 2195
  Mutations within GlyA3B4 introduced by GmGlyA3B4_T02TALE nuclease

SEQ ID NO: 3448 - DNA, 656 bp, Artificial
  Mutations within GlyA3B4 introduced by GmGlyA3B4_T02TALE nuclease
  misc_feature (532): n is a or c or t or g
gttcatgtacggttgcagatataaacgaagcatagcttatgtatgaggtgtaacaaaattggaaacaatagccatgcaaggtgaagaatgtcaccaactcagaaacccttcttcattgacgtgtccctcactcactctcctctcttcactataaatcgccactcttcgtgttctccacttcaccaactccttcaaacttattaacactttccttagttcaatatggggaagcccttcttcactctctctctttcttccctttgcttgctactcttgtcgagtgcattgctattacctccagcaagttcaacgagtgccaactcaacaacctcaacgcgttggaacccgaccaccgcgttgagtccgaaggtggtcttattgaaacatggaactctcaacaccctgagctgcaatgcgccggtgtcactgtttccaaacgcaccctcaaccgcaacggcctccacttgccatcttactcaccttatccccaaatgatcattgtcgttcaaggtgcgtaatattagtaagaagnatttatcagcttaacgtgataacaatatagtaatatgaaatatttattaaatttttcataattaatctctgctagaaaatttgattaatcattttagtagaatttgttttctcaactaggtttt

SEQ ID NO: 3449 - DNA, 665 bp, Artificial; identical to SEQ ID NO: 2115
  Mutations within GlyA3B4 introduced by GmGlyA3B4_T02TALE nuclease

SEQ ID NO: 3450 - DNA, 654 bp, Artificial; identical to SEQ ID NO: 2225
  Mutations within GlyA3B4 introduced by GmGlyA3B4_T02TALE nuclease

SEQ ID NO: 3451 - DNA, 666 bp, Artificial; identical to SEQ ID NO: 3361
  Mutations within GlyA3B4 introduced by GmGlyA3B4_T02TALE nuclease
  misc_feature (531): n is a or c or t or g

SEQ ID NO: 3452 - DNA, 655 bp, Artificial; identical to SEQ ID NO: 1943
  Mutations within GlyA3B4 introduced by GmGlyA3B4_T02TALE nuclease

SEQ ID NO: 3453 - DNA, 535 bp, Artificial; identical to SEQ ID NO: 1976
  Mutations within GlyA3B4 introduced by GmGlyA3B4_T02TALE nuclease

SEQ ID NO: 3454 - DNA, 666 bp, Artificial; identical to SEQ ID NO: 1875
  Mutations within GlyA3B4 introduced by GmGlyA3B4_T02TALE nuclease

SEQ ID NO: 3455 - DNA, 647 bp, Artificial
  Mutations within GlyA3B4 introduced by GmGlyA3B4_T02TALE nuclease
gttcatgtacggttgcagatataaacgaagcatagcttatgtatgaggtgtaacaaaattggaaacaatagccatgcaaggtgaagaatgtcaccaactcagaaacccttcttcattgacgtgtccctcactcactctcctctcttcactataaatcgccactcttcgtgttctccacttcaccaactccttcaaacttattaacactttccttagttcaatatggggaagcccttcttcactctctctctttcttccctttgcttgctactcttgtcgagtgccctccagcaagttcaacgagtgccaactcaacaacctcaacgcgttggaacccgaccaccgcgttgagtccgaaggtggtcttattgaaacatggaactctcaacaccctgagctgcaatgcgccggtgtcactgtttccaaacgcaccctcaaccgcaacggcctccacttgccatcttactcaccttatcccccaaatgatcattgtcgttcaaggtgcgtaaatattagtaagaagtatttatcagcttaacgtgataacaataatagtaatatgaaatatttattaaattttttataattaatctctgctagaaaatttgattaatcatttttagtagaattgttttttctcaactagg

SEQ ID NO: 3456 - DNA, 633 bp, Artificial; identical to SEQ ID NO: 1948
  Mutations within GlyA3B4 introduced by GmGlyA3B4_T02TALE nuclease

SEQ ID NO: 3457 - DNA, 639 bp, Artificial
  Mutations within GlyA3B4 introduced by GmGlyA3B4_T02TALE nuclease
gttcatgtacggttgcagatataaacgaagcatagcttatgtatgaggtgtaacaaaattggaaacaatagccatgcaaggtgaagaatgtcaccaactcagaaacccttcttcattgacgtgtccctcactcactctcctctcttcactataaatcgccactcttcgtgttctccacttcaccaactccttcaaacttattaacactttccttagttcaatatggggaagcccttcttcactctctctctttcttccctttgcttgctactcttgtctacctccagcaagttcaacgagtgccaactcaacaacctcaacgcgttggaacccgaccaccgcgttgagtccgaaggtggtcttattgaaacatggaactctcaacaccctgagctgcaatgcgccggtgtcactgtttccaaacgcaccctcaaccgcaacggcctccacttgccatcttactcaccttatccccaaatgatcattgtcgttcaaggtgcgtaatattagtaagaagtatttatcagcttaacgtgataacaataatagtaatatgaaatattttattaaattttttataattaatctctgctagaaaatttgattaatctttttagtagaattgttttttctcaacta

SEQ ID NO: 3458 - DNA, 543 bp, Artificial
  Mutations within GlyA3B4 introduced by GmGlyA3B4_T02TALE nuclease
gttcatgtacggttgcagatataaacgaagcatagcttatgtatgaggtgtaacaaaattggaaacaatagccatgcaaggtgaagaatgtcaccaactcagaaacccttcttcattgacgtgtccctcactcactctcctctcttcactataaatcgccactcttcgtgttctccacttcaccaactccttcaaacttattaacactttccttagttcaatatggggaacccgaccaccgcgttgagtccgaaaggtggtcttattgaaacatggaactctcaacaccctgagctgcaatgcgccggtgtcactgtttccaaacgcaccctcaaccgcaacggcctccacttgccatcttactcaccttatccccaaaatgatcattgtcgttcaaggtgcgtaatattagtaagaagtatttatcagcttaacgtgataacaataatagtaatatgaaatatttattaaattttttataattaatctctgctagaaaatttgattaatcatttttagtagaatttgttttttctcaaacta

SEQ ID NO: 3459 - DNA, 658 bp, Artificial
  Mutations within GlyA3B4 introduced by GmGlyA3B4_T02TALE nuclease
  misc_feature (530): n is a or c or t or g
gttcatgtacggttgcagatataaacgaagcatagcttatgtatgaggtgtaacaaaattggaaacaatagccatgcaaggtgaagaatgtcaccaactcagaaacccttcttcattgacgtgtccctcactcactctcctctcttcactataaatcgccactcttcgtgttctccacttcaccaactccttcaaacttattaacactttccttagttcaatatggggaagcccttcttcactctctctctttcttccctttgcttgctactcttgtcgagtgcatgctattacctccagcaagttcaacgagtgccaactcaacaacctcaacgcgttggaacccgaccaccgcgttgagtccgaaggtggtcttattgaaacatggaactctcaacaccctgagctgcaatgcgccggtgtcactgtttccaaacgcaccctcaaccgcaacggcctccacttgccatcttactcaccttatccccaaatgatcattgtcgttcaaggtgcgtaatattagtaagagnatttatcagcttaacgtgataacaatatagtaatatgaaatatttattaaatttttataattaatctctgctagaaaatttgattaatcattttagtagaatttgtttttctcaactaggtttttaaa

SEQ ID NO: 3460 - DNA, 567 bp, Artificial
  Mutations within GlyA3B4 introduced by GmGlyA3B4_T02TALE nuclease
gttcatgtacggttgcagatataaacgaagcatagcttatgtatgaggtgtaacaaaattggaaacaatagccatgcaaggtgaagaatgtcaccaactcagaaacccttcttcattgacgtgtccctcactcactctcctctcttcactataaatcgccactcttcgtgttctccacttcaccaactccttcaaacttattaacactttccttagttcaatatggggaagcccttcttcactctctctctttcttccctttgcttgctactcttgtcgaacgcggtggtcttattgaaacatggaactctcaacaccctgagctgcaatgcgccggtgtcactgtttccaaacgcaccctcaaccgcaacggcctccacttgccatcttactcaccttatccccaaatgatcattgtcgttcaaggtgcgtaatattagtaagaagtattctcagcttaacgtgataacaataatagtaatatgaaatatttattaaattttttataattaatctctgctagaaatttgattaatcatttttagtagaatttgtttttctcaacta

SEQ ID NO: 3461 - DNA, 604 bp, Artificial
  Mutations within GlyA3B4 introduced by GmGlyA3B4_T02TALE nuclease
gttcatgtacggttgcagatataaacgaagcatagcttatgtatgaggtgtaacaaaattggaaacaatagccatgcaaggtgaagaatgtcaccaactcagaaacccttcttcattgacgtgtccctcactcactctcctctcttcactataaatcgccactcttcgtgttctccacttcaccaactccttcaaacttattaacactttccttagttcaatatggggaagcccttcttcactctctctctttcttccctttgcttccagcaagttcaacgagtgccaactcaacaacctcaacgcgttggaacccgaccaccgcgttgagtccgaaggtggtcttattgaaacatggaactctcaacaccctgagctgcaatgcgccggtgtcactgtttccaaaacgcaccctcaaccgcaacggcctccacttgccatcttactcaccttatccccaaatgatcattgtcgttcaaggtgcgtaatattagtaagaagtatttatcagcttaacgtgataacaataatagtaatatgaaatatttattaaattttttataattaatctctgctagaaaatttgattaatcatttttagtag

SEQ ID NO: 3462 - DNA, 766 bp, Artificial
  Mutations within GlyA3B4 introduced by GmGlyA3B4_T02TALE nuclease
gttcatgtacggttgcagatataaacgaagcatagcttatgtatgaggtgtaacaaaattggaaacaatagccatgcaaggtgaagaatgtcaccaactcagaaacccttcttcattgacgtgtccctcactcactctcctctcttcactataaatcgccactcttcgtgttctccacttcaccaactccttcaaacttattaacactttccttagttcaatatggggaagcccttcttcactctctctctttcttccctttgcttgctactcttgtcgagtgcatgcctggcacagcaccggcaacagccgctggaccgtctccagcgcctgcttgccgccatcgtggctggcgatggccaccacctgctccggggtcaagccgtggctattacctccagcaagttcaacgagtgccaactcaacaacctcaacgcgttggaacccgaccaccgcgttgagtccgaaggtggtcttattgaaacatggaactctcaacaccctgagctgcaatgcgccggtgtcactgtttccaaacgcaccctcaaccgcaacggcctccacttgccatcttactcaccttatccccaaatgatcattgtcgttcaaggtgcgtaatattagtaagaagtatttatcgcttaacgtgatcaacaataatagtaatatgaaaatatttattaaattttttataattaatctctgctagaaaatttgattaatcatttttagtagaatttgttttctcaactaggtttaaacacca

SEQ ID NO: 3463 - DNA, 661 bp, Artificial
  Mutations within GlyA3B4 introduced by GmGlyA3B4_T02TALE nuclease
gttcatgtacggttgcagatataaacgaagcatagcttatgtatgaggtgtaacaaaattggaaacaatagccatgcaaggtgaagaatgtcaccaactcagaaacccttcttcattgacgtgtccctcactcactctcctctcttcactataaatcgccactcttcgtgttctccacttcaccaactccttcaaacttattaacactttccttagttcaatatggggaagcccttcttcactctctctctttcttccctttgcttgctactcttgtcgagttgctattacctccagcaagttcaacgagtgccaactcaacaacctcaacgcgttggaacccgaccaccgcgttgagtccgaaggtggtcttattgaaacatggaactctcaacaccctgagctgcaatgcgccggtgtcactgtttccaaacgcaccctcaaccgcaacggcctccacttgccatcttactcaccttatccccaaatgatcattgtcgttcaaggtgcgtaatattagtaagaagtatttatcagcttaacgtgataacaataatagtaatatgaaatatttattaaatttttataattaatctctgctagaaaatttgattaatcattttagtagaatttgttttctcaactaggttttaaaacacca

SEQ ID NO: 3464 - DNA, 662 bp, Artificial
  Mutations within GlyA3B4 introduced by GmGlyA3B4_T02TALE nuclease
gttcatgtacggttgcagatataaacgaagcatagcttatgtatgaggtgtaacaaaattggaaacaatagccatgcaaggtgaagaatgtcaccaactcagaaacccttcttcattgacgtgtccctcactcactctcctctcttcactataaatcgccactcttcgtgttctccacttcaccaactccttcaaacttattaacactttccttagttcaatatggggaagcccttcttcactctctctctttcttccctttgcttgctactcttgtcgagtgctattacctccagcaagttcaacgagtgccaactcaacaacctcaacgcgttggaacccgaccaccgcgttgagtccgaaggtggtcttattgaaacatggaactctcaacaccctgagctgcaatgcgccggtgtcactgtttccaaacgcaccctcaaccgcaacggcctccacttgccatcttactcaccttatcccccaaatgacattgtcgttcaaggtgcgtaatattagtaagaagtatttatcagcttaacgtgataacaatatagtaatatgaaatatttattaaatttttataattaatctctgctagaaaatttgattaatcattttagtagaatttgttttctcaactaggtttttaaaacaccaca

SEQ ID NO: 3465 - DNA, 668 bp, Artificial
  Mutations within GlyA3B4 introduced by GmGlyA3B4_T02TALE nuclease
gttcatgtacggttgcagatataaacgaagcatagcttatgtatgaggtgtaacaaaattggaaacaatagccatgcaaggtgaagaatgtcaccaactcagaaacccttcttcattgacgtgtccctcactcactctcctctcttcactataaatcgccactcttcgtgttctccacttcaccaactccttcaaacttattaacactttccttagttcaatatgggggaagcccttcttcactctctctctttcttccctttgcttgctactcttgtcgagtgcatgctattacctccagcaagttcaacgagtgccaactcaacaacctcaacgcgttggaacccgaccaccgcgttgagtccgaaggtggtcttattgaaacatggaactctcaacaccctgagctgcaatgcgccggtgtcactgtttccaaacgcaccctcaaccgcaacggcctccacttgccatcttactcaccttatccccaaatgatcattgtcgttcaaggtgcgtaatattagtaagaagtatttatcagcttaacgtgataacaatatagtaatatgaaaatatttattaaatttttataattaatctctgctagaaaatttgattaatcatttttagtagaatttgtttttctcaactaggtttttaaaacacca

SEQ ID NO: 3466 - DNA, 381 bp, Artificial
  Mutations within GlyA3B4 introduced by GmGlyA3B4_T02TALE nuclease
gttcatgtacggttgcagatataaacgaagcatagcttatgtatgaggtgtaacaaaattggaaacaatagccatgcaaggtgaagaatgtcaccaactcagaaacccttcttcaccgcgttgagtccgaaggtggtcttattgaaacatggaactctcaacaccctgagctgcaatgcgccggtgtcactgtttccaaacgcacccctcaaccgcaacggcctccacttgccatcttactcaccttatccccaaatgatcattgtcgttcaaggtgcgtaatattagtaagaagtatttatcagcttaacgtgataacaataatagtaatatgaaatatttattaaattttttataattaatctctgctagaaaatttga

SEQ ID NO: 3467 - DNA, 620 bp, Artificial
  Mutations within GlyA3B4 introduced by GmGlyA3B4_T02TALE nuclease
gttcatgtacggttgcagatataaacgaagcatagcttatgtatgaggtgtaacaaaattggaaacaatagccatgcaaggtgaagaatgtcaccaactcagaaacccttcttcattgacgtgtccctcactcactctcctctcttcactataaatcgccactcttcgtgttctccacttcaccaactccttcaaacttattaacactttccttagttcaatatggggaagcccttcttcactctctctctttcttccctttgcttgctactcttgtcgagtgcatgccggtgctgtgccaggccccacggcttgaccccccagcaggtggtggccatcgccagcaataatggtggcaagcaggcgctggagacggtccagccccagcaggtggtggccatcgccagcaataatggtggcaagcaggcgctggagacggtccagcggctgttgccggtgctgtgccaggccctttgctattacctccagctaagttcaacgagtgccactcaacaacctcaacgcgttgaaccgaccaccgcgttgagtccgaaggtggtcttattgaaacatggaactctcaacaccctgagctgcaatgcgccggtgtcactgtttcc

SEQ ID NO: 3468 - DNA, 652 bp, Artificial; identical to SEQ ID NO: 2152
  Mutations within GlyA3B4 introduced by GmGlyA3B4_T02TALE nuclease

SEQ ID NO: 3469 - DNA, 663 bp, Artificial
  Mutations within GlyA3B4 introduced by GmGlyA3B4_T02TALE nuclease
gttcatgtacggttgcagatataaacgaagcatagcttatgtatgaggtgtaacaaaattggaaacaatagccatgcaaggtgaagaatgtcaccaactcagaaacccttcttcattgacgtgtccctcactcactctcctctcttcactataaatcgccactcttcgtgttctccacttcaccaactccttcaaacttattaacactttccttagttcaatatgggggaagcccttcttcactctctctctttcttccctttgcttgctactcttgtcgagtgcatctattacctccagcaagttcaacgagtgccaactcaacaacctcaacgcgttggaaccgaccaccgcgttgagtccgaaggtggtcttattgaaacatggaactctcaacaccctgagctgcaatgcgccggtgtcactgtttccaaacgcaccctcaaccgcaacggcctccacttgccatcttactcaccttatccccaaatgatcattgtcgttcaaggtgcgtaatattagtaagaagtatttatcagcttaacgtgataacaataatagtaatatgaaatatttattaaatttttataattaatctctgctagaaaatttgattaatcattttagtagaatttgttttctcaactaggttttaaaacacca

SEQ ID NO: 3470 - DNA, 622 bp, Artificial
  Mutations within GlyA3B4 introduced by GmGlyA3B4_T02TALE nuclease
gttcatgtacggttgcagatataaacgaagcatagcttatgtatgaggtgtaacaaaattggaaacaatagccatgcaaggtgaagaatgtcaccaactcagaaacccttcttcattgacgtgtccctcactcactctcctctcttcactataaatcgccactcttcgtgttctccacttcaccaactccttcaaacttattaacactttccttagttcaatatggggaagcccttcttcactctctctctttcttccctttgcttgctactcttgtcgagtgcatgctattacctccagcaagttcaacgagtgccaactcaacaacctcaacgcgttggaacccgaccaccgcgttgagtccgaaggtggtcttattgaaacatggaactctcaacaccctgagctgcaatgcgccggtgtcactgtttccaaacgcaccctcaaccgcaacggcctccacttgccatcttactcaccttatccccaaatgatcattgtcgttcaaggtgcgtaatattagtaagaagtatttatcagcttaacgtgataacaatatagtaatatgaaatatttattaaatttttcataattaatctctgctagaaaatttgattaatca

SEQ ID NO: 3471 - DNA, 650 bp, Artificial; identical to SEQ ID NO: 2169
  Mutations within GlyA3B4 introduced by GmGlyA3B4_T02TALE nuclease

SEQ ID NO: 3472 - DNA, 505 bp, Artificial
  Mutations within GlyA3B4 introduced by GmGlyA3B4_T02TALE nuclease
gttcatgtacggttgcagatataaacgaagcatagcttatgtatgaggtgtaacaaaattggaaacaatagccatgcaaggtgaagaatgtcaccaactcagaaacccttcttcattgacgtgtccctcactcactctcctctcttcactataaatcgccactcttcgtgttctccacttcaccaactccttcaaacttattaacactttccttagttcaatatggggaagcccttcttcactctctctctttcttccctttgcttgctaaacgcaccctcaaccgcaacggcctccacttgccatcttactcaccttatccccaaatgatcattgtcgttcaaggtgcgtaatattagtaagaagtatttatcagcttaacgtgataacaataatagtaatatgaaatatttattaaatttttttataattaatctctgctagaaaatttgattaatcatttttagtagaatttgtttttctcaactaggttttaaacaccaca

SEQ ID NO: 3473 - DNA, 654 bp, Artificial
  Mutations within GlyA3B4 introduced by GmGlyA3B4_T02TALE nuclease
gttcatgtacggttgcagatataaacgaagcatagcttatgtatgaggtgtaacaaaattggaaacaatagccatgcaaggtgaagaatgtcaccaactcagaaacccttcttcattgacgtgtccctcactcactctcctctcttcactataaatcgccactcttcgtgttctccacttcaccaactccttcaaacttattaacactttccttagttcaatatggggaagcccttcttcactctctctctttcttccctttgcttgctactcttgtcacctccagcaagttcaacgagtgccaactcaacaacctcaacgcgttggaacccgaccaccgcgttgagtccgaaggtggtcttattgaaacatggaactctcaacaccctgagctgcaatgcgccggtgtcactgtttccaaacgcaccctcaaccgcaacggcctccacttgccatcttactcaccttatccccaaatgatcattgtcgttcaaggtgcgtaaatattagtaagaagtatttatcagcttaacgtgataacaataatagtaatatgaaatatttattaaattttttataattaatctctgctagaaaatttgattaatctttttagtagaattgttttttctcaactaggtttaaaacaccaca

SEQ ID NO: 3474 - DNA, 666 bp, Artificial; identical to SEQ ID NO: 1758
  Mutations within GlyA3B4 introduced by GmGlyA3B4_T02TALE nuclease

SEQ ID NO: 3475 - DNA, 667 bp, Artificial
  Mutations within GlyA3B4 introduced by GmGlyA3B4_T02TALE nuclease
  misc_feature (534): n is a or c or t or g
gttcatgtacggttgcagatataaacgaagcatagcttatgtatgaggtgtaacaaaattggaaacaatagccatgcaaggtgaagaatgtcaccaactcagaaaccccttcttcattgacgtgtccctcactcactctcctctcttcactataaatcgccactcttcgtgttctccacttcaccaactccttcaaacttattaacactttccttagttcaatatgggggaagcccttcttcactctctctctttcttccctttgcttgctactcttgtcgagtgcatcgctattacctccagcaagttcaacgagtgccaactcaacaacctcaacgcgttggaacccgaccaccgcgttgagtccgaaggtggtcttattgaaacatggaactctcaacaccctgagctgcaatgcgccggtgtcactgtttccaaacgcaccctcaaccgcaacggcctccacttgccatcttactcaccttatcccccaaatgatcattgtcgttcaaggtgcgtaatattagtaagagnatttatcagcttaacgtgataacaatatagtaatatgaaatatttattaaatttttataattaatctctgctagaaaatttgattaatcatttttagtagaatttgtttttctcaactaggttttaaacacca

SEQ ID NO: 3476 - DNA, 493 bp, Artificial
  Mutations within GlyA3B4 introduced by GmGlyA3B4_T02TALE nuclease
gttcatgtacggttgcagatataaacgaagcatagcttatgtatgaggtgtaacaaaattggaaacaatagccatgcaaggtgaagaatgtcaccaactcagaaaccccttcttcattgacgtgtccctcactcactctcctctcttcactataaatcgccactcttcgtgttctccacttcaccaactccttcaaacttattaacactttccttagttcaatatggggaagcccttcttcactctctctctttcttccctttgcttgctactcttgtcgagtgcatgctggagacggtccagcggctgttgccggtgctgtgccaggcccacggctttgaccccccagcaggtggtggccatcgccagcaataatggtggcaagcaggcgctggagacggtccagcggctgttgccggtgctgtgccaggcccacggcttgaccccttgctattacctccgcaagttcaacgagtgccaactcaacaacctc

SEQ ID NO: 3477 - DNA, 664 bp, Artificial
  Mutations within GlyA3B4 introduced by GmGlyA3B4_T02TALE nuclease
gttcatgtacggttgcagatataaacgaagcatagcttatgtatgaggtgtaacaaaattggaaacaatagccatgcaaggtgaagaatgtcaccaactcagaaacccttcttcattgacgtgtccctcactcactctcctctcttcactataaatcgccactcttcgtgttctccacttcaccaactccttcaaacttattaacactttccttagttcaatatggggaagcccttcttcactctctctctttcttccctttgcttgctactcttgtcgagtgcactattacctccagcaagttcaacgagtgccaactcaacaacctcaacgcgttggaacccgaccaccgcgttgagtccgaaggtggtcttattgaaacatggaactctcaacaccctgagctgcaatgcgccggtgtcactgtttccaaaacgcaccctcaaccgcaacggcctccacttgccatcttactcaccttatcccccaaatgatcattgtcgttcaaggtgcgtaatattagtaagaagtatttatcagcttaacgtgataacaataatagtaatatgaaatatttattaaatttttataattaatctctgctagaaaatttgattaatcattttagtagaatttgttttctcaactaggttttaaaacacca

SEQ ID NO: 3478 - DNA, 564 bp, Artificial
  Mutations within GlyA3B4 introduced by GmGlyA3B4_T02TALE nuclease
gttcatgtacggttgcagatataaacgaagcatagcttatgtatgaggtgtaacaaaattggaaacaatagccatgcaaggtgaagaatgtcaccaactcagaaacccttcttcattgacgtgtccctcactcactctcctctcttcactataaatcgccactcttcgtgttctccacttcaccaactccttcaaacttattacctccagcaagttcaacgagtgccaactcaacaacctcaacgcgttggaacccgaccaccgcgttgagtccgaaggtggtcttattgaaacatggaactctcaacaccctgagctgcaatgcgccggtgtcactgtttccaaacgcaccctcaaccgcaacggcctccacttgccatcttactcaccttatccccaaatgatcattgtcgttcaaggtgcgtaatattagtaagaagtatttatcagcttaacgtgataacaataatagtaatatgaaatatttattaaattttttataattaatctctgctagaaaatttgattaatcatttttagtagaatttgtttttctcaactagg

SEQ ID NO: 3479 - DNA, 634 bp, Artificial
  Mutations within GlyA3B4 introduced by GmGlyA3B4_T02TALE nuclease
  misc_feature (528): n is a or c or t or g
gttcatgtacggttgcagatataaacgaagcatagcttatgtatgaggtgtaacaaaattggaaacaatagccatgcaaggtgaagaatgtcaccaactcagaaacccttcttcattgacgtgtccctcactcactctcctctcttcactataaatcgccactcttcgtgttctccacttcaccaactccttcaaacttattaacactttccttagttcaatatggggaagcccttcttcactctctctctttcttccctttgcttgctactcttgtcgagtgcgctattacctccagcaagttcaacgagtgccaactcaacaacctcaacgcgttggaacccgaccaccgcgttgagtccgaaggtggtcttattgaaacatggaactctcaacaccctgagctgcaatgcgccggtgtcactgtttccaaacgcaccctcaaccgcaacggcctccacttgccatcttactcaccttatccccaaatgatcattgtcgttcaaggtgcgtaatattagtaagagnatttatcagcttaacgtgataacaataatagtaatatgaaatatttattaaatttttataattaatctctgctagaaaatttgattaatcattttagtagaatttg

SEQ ID NO: 3480 - DNA, 652 bp, Artificial
  Mutations within GlyA3B4 introduced by GmGlyA3B4_T02TALE nuclease
gttcatgtacggttgcagatataaacgaagcatagcttatgtatgaggtgtaacaaaattggaaacaatagccatgcaaggtgaagaatgtcaccaactcagaaacccttcttcattgacgtgtccctcactcactctcctctcttcactataaatcgccactcttcgtgttctccacttcaccaactccttcaaacttattaacactttccttagttcaatatggggaagcccttcttcactctctctctttcttccctttgcttgctactcttgtcgagtgtattacctccagcaagttcaacgagtgccaactcaacaacctcaacgcgttggaacccgaccaccgcgttgagtccgaaggtggtcttattgaaacatggaactctcaacaccctgagctgcaatgcgccggtgtcactgtttccaaacgcaccctcaaccgcaacggcctccacttgccatcttactcaccttatccccaaatgatcattgtcgttcaaggtgcgtaatattagtaagaagtatttatcagcttaacgtgatacaataatagtaatatgaaatatttattaaatttttataattaatctctgctagaaaatttgattaatcattttagtagaatttgttttctcaactaggttttaaa

SEQ ID NO: 3481 - DNA, 658 bp, Artificial
  Mutations within GlyA3B4 introduced by GmGlyA3B4_T02TALE nuclease
gttcatgtacggttgcagatataaacgaagcatagcttatgtatgaggtgtaacaaaattggaaacaatagccatgcaaggtgaagaatgtcaccaactcagaaaccccttcttcattgacgtgtccctcactcactctcctctcttcactataaatcgccactcttcgtgttctccacttcaccaactccttcaaacttattaacactttccttagttcaatatggggaagcccttcttcactctctctctttcttccctttgcttgctactcttgtcgagtgcattattacctccagcaagttcaacgagtgccaactcaacaacctcaacgcgttggaacccgaccaccgcgttgagtccgaaggtggtcttattgaaacatggaactctcaacaccctgagctgcaatgcgccggtgtcactgtttccaaacgcaccctcaaccgcaacggcctccacttgccatcttactcaccttatccccaaatgatcattgtcgttcaaggtgcgtaatattagtaagaagtatttatcagcttaacgtgataacaataatagtaatatgaaatatttattaaatttttataattaatctctgctagaaaatttgattaatcattttagtagaatttgttttctcaactaggttttaaaa

SEQ ID NO: 3482 - DNA, 651 bp, Artificial
  Mutations within GlyA3B4 introduced by GmGlyA3B4_T02TALE nuclease
gttcatgtacggttgcagatataaacgaagcatagcttatgtatgaggtgtaacaaaattggaaacaatagccatgcaaggtgaagaatgtcaccaactcagaaacccttcttcattgacgtgtccctcactcactctcctctcttcactataaatcgccactcttcgtgttctccacttcaccaactccttcaaacttattaacactttccttagttcaatatggggaagcccttcttcactctctctctttcttccctttgcttgctattacctccagcaagttcaacgagtgccaactcaacaacctcaacgcgttggaacccgaccaccgcgttgagtccgaaggtggtcttattgaaacatggaactctcaacaccctgagctgcaatgcgccggtgtcactgtttccaaacgcaccctcaaccgcaacggcctccacttgccatcttactcaccttatccccaaatgatcattgtcgttcaaggtgcgtaatattagtaagaagtatttatcagcttaacgtgataacaataatagtaatatgaaatatttattaaattttttataaattaatctctgctagaaaatttgattaatcatttttagtagaatttgttttttctcaactaggttttaaaacaccaca

SEQ ID NO: 3483 - DNA, 556 bp, Artificial
  Mutations within GlyA3B4 introduced by GmGlyA3B4_T02TALE nuclease
gttcatgtacggttgcagatataaacgaagcatagcttatgtatgaggtgtaacaaaattggaaacaatagccatgcaaggtgaagaatgtcaccaactcagaaacccttcttcattgacgtgtccctcactcactctcctctcttcactataaatcgccactcttcgtgttctccacttcaccaactccttcaaacttattaacactttccttagttcaatatggggaagcccttcttcactctctctctttcttccctttgcttgctactcttgtcgagtgcatgctattacctccagcaagttcaacgagtgccaactcaacaacctcaacgcgttggaacccgaccaccgcgttgagtccgaaggtggtcttattgaaacatggaactctcaacaccctgagctgcaatgcgccggtgtcactgtttccaaacgcaccctcaaccgcaacggcctccacttgccatcttactcaccttatccccaaatgatcattgtcgttcaaggtgcgtaatattagtaagagtatttatcagcttaacgtgataacaat

SEQ ID NO: 3484 - DNA, 660 bp, Artificial
  Mutations within GlyA3B4 introduced by GmGlyA3B4_T02TALE nuclease
gttcatgtacggttgcagatataaacgaagcatagcttatgtatgaggtgtaacaaaattggaaacaatagccatgcaaggtgaagaatgtcaccaactcagaaacccttcttcattgacgtgtccctcactcactctcctctcttcactataaatcgccactcttcgtgttctccacttcaccaactccttcaaacttattaacactttccttagttcaatatggggaagcccttcttcactctctctctttcttccctttgcttgctactcttgtcgagtgcatgctacctccagcaagttcaacgagtgccaactcaacaacctcaacgcgttggaacccgaccaccgcgttgagtccgaaggtggtcttattgaaacatggaactctcaacaccctgagctgcaatgcgccggtgtcactgtttccaaacgcaccctcaaccgcaacggcctccacttgccatcttactcaccttatccccaaatgatcattgtcgttcaaggtgcgtaatattagtaagaagtatttatcagcttaacgtgataacaataatagtaatatgaaatatttattaaatttttataattaatctctgctagaaaatttgattaatcattttagtagaatttgttttctcaactaggttttaaaacacc

SEQ ID NO: 3485 - DNA, 649 bp, Artificial
  Mutations within GlyA3B4 introduced by GmGlyA3B4_T02TALE nuclease
gttcatgtacggttgcagatataaacgaagcatagcttatgtatgaggtgtaacaaaattggaaacaatagccatgcaaggtgaagaatgtcaccaactcagaaacccttcttcattgacgtgtccctcactcactctcctctcttcactataaatcgccactcttcgtgttctccacttcaccaactccttcaaacttattaacactttccttagttcaatatggggaagcccttcttcactctctctctttcttccctttgcttgctactcttgtcgagtgcatgttcaacgagtgccaactcaacaacctcaacgcgttggaacccgaccaccgcgttgagtccgaaggtggtcttattgaaacatggaactctcaacaccctgagctgcaatgcgccggtgtcactgtttccaaacgcaccctcaaccgcaacggcctccacttgccatcttactcaccttatcccccaaatgatcattgtcgttcaaggtgcgtaatattagtaagaagtatttatcagcttaacgtgataacaataatagtaatatgaaatatttattaaattttttataattaatctctgctagaaaatttgattaatctttttagtagaattgtttttctcaactaggtttaaacaccaca

SEQ ID NO: 3486 - DNA, 663 bp, Artificial; identical to SEQ ID NO: 2423
  Mutations within GlyA3B4 introduced by GmGlyA3B4_T02TALE nuclease

SEQ ID NO: 3487 - DNA, 651 bp, Artificial; identical to SEQ ID NO: 3482
  Mutations within GlyA3B4 introduced by GmGlyA3B4_T02TALE nuclease

SEQ ID NO: 3488 - DNA, 510 bp, Artificial
  Mutations within GlyA3B4 introduced by GmGlyA3B4_T02TALE nuclease
gttcatgtacggttgcagatataaacgaagcatagcttatgtatgaggtgtaacaaaattggaaacaatagccatgcaaggtgaagaatgtcaccaactcagaaacccttcttcattgacgtgtccctcactcactctcctctcttcactataaatcgccactcttcgtgttctccacttcaccaactccttcaaacttattaacactttccttagttcaatatggggaagcccttcttcactctctctctttcttccctttgcttgctactcttgtcgagttgctattacctccagcaagttcaacgagtgccaactcaacaacctcaacgcgttggaacccgaccaccgcgttgagtccgaaggtggtcttattgaaacatggaactctcaacaccctgagctgcaatgcgccggtgtcactgtttccaaacgcaccctcaaccgcaacggcctccacttgccatcttactcaccttatccccaaatgatcattgtcgttcaaggtgg

SEQ ID NO: 3489 - DNA, 533 bp, Artificial
  Mutations within GlyA3B4 introduced by GmGlyA3B4_T02TALE nuclease
gttcatgtacggttgcagatataaacgaagcatagcttatgtatgaggtgtaacaaaattggaaacaatagccatgcaaggtgaagaatgtcaccaactcagaaaccccttcttcattgacgtgtccctcactcactctcctctcttcactataaatcgccactcttcgtgttctccacttcaccaactccttcaaacttattaacactttccttagttcaatatggggaagcccttcttcactctctctctttcttccctttgcttgctactcttgtcgagtgcatgctattacctccagcaagttcaacgagtgccaactcaacaacctcaacgcgttggaacccgaccaccgcgttgagtccgaaggtggtcttattgaaacatggaactctcaacaccctgagctgcaatgcgccggtgtcactgtttccaaacgcaccctcaaccgcaacggcctccacttgccatcttactcaccttatccccaaatgatcattgtcgttcaaggtgcgtaatattagtaagagtaa

SEQ ID NO: 3490 - DNA, 661 bp, Artificial; identical to SEQ ID NO: 2035
  Mutations within GlyA3B4 introduced by GmGlyA3B4_T02TALE nuclease

SEQ ID NO: 3491 - DNA, 650 bp, Artificial
  Mutations within GlyA3B4 introduced by GmGlyA3B4_T02TALE nuclease
gttcatgtacggttgcagatataaacgaagcatagcttatgtatgaggtgtaacaaaattggaaacaatagccatgcaaggtgaagaatgtcaccaactcagaaacccttcttcattgacgtgtccctcactcactctccttctcttcactataaatcgccactcttcgtgttctccacttcaccaactccttcaaacttattaacactttccttagttcaatatggggaagcccttcttcactctctctctttcctggaagtgtcactatacctccagcaagttcaacgagtgccaactcaacaacctcaacgcgttggaacccgaccaccgcgttgagtccgaaggtggtcttattgaaacatggaactctcaacacccctgagctgcaatgcgccggtgtcactgtttccaaacgcaccctcaaccgcaacggcctccacttgccatcttactcaccttatccccaaatgatcattgtcgttcaaggtgcgtaatattagtaagaagtatttatcagcttaacgtgataacaataatagtaatatgaaatatttattaaattttttataattaatctctgctagaaaatttgattaatcatttttagtagaatttgttttttctcaactaggttttaaaacaccaca

SEQ ID NO: 3492 - DNA, 660 bp, Artificial
  Mutations within GlyA3B4 introduced by GmGlyA3B4_T02TALE nuclease
  misc_feature (533): n is a or c or t or g
gttcatgtacggttgcagatataaacgaagcatagcttatgtatgaggtgtaacaaaattggaaacaatagccatgcaaggtgaagaatgtcaccaactcagaaacccttcttcattgacgtgtccctcactcactctcctctcttcactataaatcgccactcttcgtgttctccacttcaccaactccttcaaacttattaacactttccttagttcaatatgggggaagcccttcttcactctctctctttcttccctttgcttgctactcttgtcgagtgcattgctattacctccagcaagttcaacgagtgccaactcaacaacctcaacgcgttggaacccgaccaccgcgttgagtccgaaggtggtcttattgaaacatggaactctcaacaccctgagctgcaatgcgccggtgtcactgtttccaaacgcaccctcaaccgcaacggcctccacttgccatcttactcaccttatccccaaatgatcattgtcgttcaaggtgcgtaatattagtaagaagnatttatcagcttaacgtgataacaataatagtaatatgaaaatatttattaaatttttataattaatctctgctagaaaatttgattaatcattttagtagaatttgtttttctcaactaggttttt

SEQ ID NO: 3493 - DNA, 664 bp, Artificial
  Mutations within GlyA3B4 introduced by GmGlyA3B4_T02TALE nuclease
gttcatgtacggttgcagatataaacgaagcatagcttatgtatgaggtgtaacaaaattggaaacaatagccatgcaaggtgaagaatgtcaccaactcagaaacccttcttcattgacgtgtccctcactcactctcctctcttcactataaatcgccactcttcgtgttctccacttcaccaactccttcaaacttattaacactttccttagttcaatatggggaagcccttcttcactctctctctttcttccctttgcttgctactcttgtcgagtgcagctattacctccagcaagttcaacgagtgccaactcaacaacctcaacgcgttggaacccgaccaccgcgttgagtccgaaggtggtcttattgaaacatggaactctcaacaccctgagctgcaatgcgccggtgtcactgtttccaaacgcaccctcaaccgcaacggcctccacttgccatcttactcaccttatccccaaatgatcattgtcgttcaaggtgcgtaatattagtaagagtatttatcagcttaacgtgataacaatatagtaatatgaaatatttattaaatttttataattaatctctgctagaaaatttgattaatcattttagtagaatttgttttctcaactaggtttttaaaacaccaca

SEQ ID NO: 3494 - DNA, 639 bp, Artificial
  Mutations within GlyA3B4 introduced by GmGlyA3B4_T02TALE nuclease
  misc_feature (533): n is a or c or t or g
gttcatgtacggttgcagatataaacgaagcatagcttatgtatgaggtgtaacaaaattggaaacaatagccatgcaaggtgaagaatgtcaccaactcagaaacccttcttcattgacgtgtccctcactcactctcctctcttcactataaatcgccactcttcgtgttctccacttcaccaactccttcaaacttattaacactttccttagttcaatatggggaagcccttcttcactctctctctttcttccctttgcttgctactcttgtcgagtgcatgctattacctccagcaagttcaacgagtgccaactcaacaacctcaacgcgttggaacccgaccaccgcgttgagtccgaaggtggtcttattgaaacatggaactctcaacaccctgagctgcaatgcgccggtgtcactgtttccaaacgcaccctcaaccgcaacggcctccacttgccaatcttactcaccttatcccccaaaatgatcatttcgttcaagggtgcgtaatattagtaagagnatttatcagcttaacgtgataacaataatagtaatatgaaatatttattaaatttttataattaatctctgctagaaaatttgattaatcattttagtagaatttg

SEQ ID NO: 3495 - DNA, 542 bp, Artificial
  Mutations within GlyA3B4 introduced by GmGlyA3B4_T02TALE nuclease
gttcatgtacggttgcagatataaacgaagcatagcttatgtatgaggtgtaacaaaattggaaacaatagccatgcaaggtgaagaatgtcaccaactcagaaacccttcttcattgacgtgtccctcactcactctcctctcttcactataaatcgccactcttcgtgttctccacttcaccaacctccagcaagttcaacgagtgccaactcaacaacctcaacgcgttggaacccgaccaccgcgttgagtccgaaggtggtcttattgaaacatggaactctcaacaccctgagctgcaatgcgccggtgtcactgtttccaaacgcaccctcaaccgcaacggcctccacttgccatcttactcaccttatccccaaatgatcattgtcgttcaaggtgcgtaatattagtaagaagtatttatcagcttaacgtgataacaataatagtaatatgaaatatttattaaattttttataattaatctctgctagaaaatttgattaatcatttttagtagaatttgtttttctcaa

SEQ ID NO: 3496 - DNA, 633 bp, Artificial; identical to SEQ ID NO: 1895
  Mutations within GlyA3B4 introduced by GmGlyA3B4_T02TALE nuclease

SEQ ID NO: 3497 - DNA, 651 bp, Artificial
  Mutations within GlyA3B4 introduced by GmGlyA3B4_T02TALE nuclease
gttcatgtacggttgcagatataaacgaagcatagcttatgtatgaggtgtaacaaaattggaaacaatagccatgcaaggtgaagaagtcaccaactcagaaacccttcttcattgacgtgtccctcactcactctcctctcttcactataaatcgccactcttcgtgttctccacttcaccaactccttcaaacttattaacactttccttagttcaatatggggaagcccttcttcactctctctctttcttccctttgcttgctactcttgtcgagtgcatgctattacctccagcaagttcaacgagtgccaactcaacaacctcaacgcgttggaacccgaccaccgcgttgagtccgaaggtggtcttattgaaacatggaactctcaacaccctgagctgcaatgcgccggtgtcactgttttccaaacgcaccctcaaccgcaacggcctccacttgccatcttactcaccttatccccaaatgatcattgtcgttcaaggtgcgtaatattagtaagagtatttatcagcttaacgtgataacaataatagtaatatgaaatatttattaaatttttataattaatctctgctagaaaatttgattaatcattttagtagaatttgtttttctcaactagg

SEQ ID NO: 3498 - DNA, 651 bp, Artificial
  Mutations within GlyA3B4 introduced by GmGlyA3B4_T02TALE nuclease
  misc_feature (530): n is a or c or t or g
gttcatgtacggttgcagatataaacgaagcatagcttatgtatgaggtgtaacaaaattggaaacaatagccatgcaaggtgaagaatgtcaccaactcagaaaccccttcttcattgacgtgtccctcactcactctcctctcttcactataaatcgccactcttcgtgttctccacttcaccaactccttcaaacttattaacactttccttagttcaatatggggaagcccttcttcactctctctcttcttccctttgcttgctactcttgtcgagtgcatgctattacctccagcaagttcaacgagtgccaactcaacaacctcaacgcgttggaacccgaccaccgcgttgagtccgaaggtggtcttattgaaacatggaactctcaacaccctgagctgcaatgcgccggtgtcactgtttccaaacgcaccctcaaccgcaacggcctccacttgccatcttactcaccttatccccaaatgatcattgtcgttcaaggtgcgtaatattagtaagagnatttatcagcttaacgtgataacaataatagtaatatgaaatatttattaaatttttataattaatctctgctagaaaatttgattaatcattttagtagaatttgtttttctcaactagg

SEQ ID NO: 3499 - DNA, 695 bp, Artificial
  Mutations within GlyA3B4 introduced by GmGlyA3B4_T02TALE nuclease
  misc_feature (298): n is a or c or t or g
gttcatgtacggttgcagatataaacgaagcatagcttatgtatgaggtgtaacaaaattggaaacaatagccatgcaaggtgaagaatgtcaccaactcagaaacccttcttcattgacgtgtccctcactcactctcctctcttcactataaatcgccactcttcgtgttctccacttcaccaactccttcaaacttattaacactttccttagttcaatatggggaagcccttcttcactctctctctttcttccctttgcttgctactcttgtcgagtgcttgcttgtctatcncctccaagtcaagtcacgatgtcacgctacatcaacctcaacctcacggttggaacccgaccaccgcgttgagtccgaaggtggtcttattgaaacatggaactctcaacaccctgagctgcaatgcgccggtgtcactgtttccaaacgcaccctcaaccgcaacggcctccacttgccatcttactcaccttatcccccaaatgatcattgtcgttcaaggtgcgtaatattagtaagagtatttatcagcttaacgtgatacaataatagtaatatgaaatatttattaaatttttataattaatctctgctagaaaatttgataatcattttagtagaatttgtttttctcaactaggttttaaacaccagcatcagagactcaggcaagcac

SEQ ID NO: 3500 - DNA, 668 bp, Artificial
  Mutations within GlyA3B4 introduced by GmGlyA3B4_T02TALE nuclease
gttcatgtacggttgcagatataaacgaagcatagcttatgtatgaggtgtaacaaaattggaaacaatagccatgcaaggtgaagaatgtcaccaactcagaaacccttcttcattgacgtgtccctcactcactctcctctcttcactataaatcgccactcttcgtgttctccacttcaccaactccttcaaacttattaacactttccttagttcaatatggggaagcccttcttcactctctctctttcttccctttgcttgctactcttgtcgagtgcattgctattacctccagcaagttcaacgagtgccaactcaacaacctcaacgcgttggaacccgaccaccgcgttgagtccgaaggtggtcttattgaaacatggaactctcaacaccctgagctgcaatgcgccggtgtcactgtttccaaacgcaccctcaaccgcaacggcctccacttgccatcttactcaccttatccccaaatgatcattgtcgttcaaggtgcgtaatattagtaagagtatttatcagcttaacgtgataacaataatagtaatatgaaatatttattaaatttttataattaatctctgctagaaaatttgattaatcattttagtagaatttgtttttctcaactaggtttttaaaacaccaca

SEQ ID NO: 3501 - DNA, 624 bp, Artificial
  Mutations within GlyA3B4 introduced by GmGlyA3B4_T02TALE nuclease
gttcatgtacggttgcagatataaacgaagcatagcttatgtatgaggtgtaacaaaattggaaacaatagccatgcaaggtgaagaatgtcaccaactcagaaacccttcttcattgacgtgtccctcactcactctcctctcttcactataaatcgccactcttcgtgttctccacttcaccaactccttcaaacttattaacactttccttagttcaatatggggaagcccttcttcactctctctctttcttccctttgcttgctactcttgtcgagtgcatgagacggtccagcggctgttgccggtgctgtgccaggcccacggctattacctccagcaagttcaacgagtgccaactcaacaacctcaacgcgttggaaccccgaccaccgcgttgagtccgaaggtggtcttattgaaacatggaactctcaacaccctgagctgcaatgcgccggtgtcactgtttccaaacgcaccctcaaccgcaacggcctccacttgccatcttactcaccttatccccaaatgatcattgtcgttcaaggtgcgtaatattagtaagaagtatttatcagcttaacgtgataacaataatagtaatatgaaatatttatt

SEQ ID NO: 3502 - DNA, 632 bp, Artificial; identical to SEQ ID NO: 1756
  Mutations within GlyA3B4 introduced by GmGlyA3B4_T02TALE nuclease

SEQ ID NO: 3503 - DNA, 735 bp, Artificial
  Mutations within GlyA3B4 introduced by GmGlyA3B4_T02TALE nuclease
  misc_feature (646): n is a or c or t or g
gttcatgtacggttgcagatataaacgaagcatagcttatgtatgaggtgtaacaaaattggaaacaatagccatgcaaggtgaagaatgtcaccaactcagaaacccttcttcattgacgtgtccctcactcactctcctctcttcactataaatcgccactcttcgtgttctccacttcaccaactccttcaaacttattaacactttccttagttcaatatggggaagcccttcttcactctctctctttcttccctttgcttgctactcttgtcgagtgcatgcgaacgacctacaccgaactgagatacctacagcgtgagctatgagaaagcgccacgcttcccgaagggagaaaggcggacaggtatccggtaagcggcagggtcggaacaggagagcgcacgtgctattacctccagcaagttcaacgagtgccaactcaacaacctcaacgcgttggaacccgaccaccgcgttgagtccgaaggtggtcttattgaaacatggaactctcaacaccctgagctgcaatgcgccggtgtcactgtttccaaaacgcaccctcaaaccgcaacggcctccacttgccatcttactcaccttatccccaaatgatcattgtcgttcaaggtgcgtaatnttagtaagaagtatttatcagcttaacgtgataacaataatagtaatatgaaatatttattaaaattttttataattaaatctcttgct

SEQ ID NO: 3504 - DNA, 475 bp, Artificial
  Mutations within GlyA3B4 introduced by GmGlyA3B4_T02TALE nuclease
gttcatgtacggttgcagatataaacgaagcatagcttatgtatgaggtgtaacaaaattggaaacaatagccatgcaaggtgaagaatgtcaccaactcagaaacccttcttcattgacgtgtccctcactcactctcctctcttcactataaatcgccactcttcgtgttctccacttcaccaactccttcaaacttattaacactttccttagttcaacgagtgccaactcaacaacctcaacgcgttggaacccgaccaccgcgttgagtccgaaggtggtcttattgaaacatggaactctcaacaccctgagctgcaatgcgccggtgtcactgtttccaaacgcaccctcaaccgcaacggcctccacttgccatcttactcaccttatccccaaaatgatcattgtcgttcaaggtgcgtaatattagtaagaagtatttatcagcttaacgtgataacaataatag

SEQ ID NO: 3505 - DNA, 648 bp, Artificial
  Mutations within GlyA3B4 introduced by GmGlyA3B4_T02TALE nuclease
gttcatgtacggttgcagatataaacgaagcatagcttatgtatgaggtgtaacaaaattggaaacaatagccatgcaaggtgaagaatgtcaccaactcagaaacccttcttcattgacgtgtccctcactcactctcctctcttcactataaatcgccactcttcgtgttctccacttcaccaactccttcaaacttattaacactttccttagttcaatatggggaagcccttcttcactctctctctttcttccctttgctattacctccagcaagttcaacgagtgccaactcaacaacctcaacgcgttggaacccgaccaccgcgttgagtccgaaggtggtcttattgaaacatggaactctcaacacccctgagctgcaatgcgccggtgtcactgtttccaaacgcaccctcaaccgcaacggcctccacttgccatcttactcaccttatccccaaatgatcattgtcgttcaaggtgcgtaatattagtaagaagtatttatcagcttaacgtgataacaataatagtaatatgaaatatttaattaaattttttataattaaatctctgctagaaaatttgattaatcatttttagtagaatttgttttttctcaactaggttttaaaacaccac

SEQ ID NO: 3506 - DNA, 637 bp, Artificial
  Mutations within GlyA3B4 introduced by GmGlyA3B4_T02TALE nuclease
gttcatgtacggttgcagatataaacgaagcatagcttatgtatgaggtgtaacaaaattggaaacaatagccatgcaaggtgaagaatgtcaccaactcagaaacccttcttcattgacgtgtcccctcactcactctcctcctcttcactaataaatcgccactcttcgtgttctccacttcaccaactccttcaaacttattaacactttccttagttcaatatggggaagcccttcttcactctctctctttcttccctttgcttgctactcttgtcgagtgcattattacctccagcaagttcaacgagtgccaactcaacaacctcaacgcgttggaacccgaccaccgcgttgagtccgaaggtggtcttattgaaacatggaactctcaacaccctgagctgcaatgcgccggtgtcactgtttccaaacgcaccctcaaccgcaacggcctccacttgccatcttactcaccttatccccaactgaatcattgtcgttcaaggtgcgtaatattagtaagaagtatttatcagcttaacgtgataacaataatagtaatatgaaatatttattaaatttttataatttaatctctgctagaaaatttgattaatcatttttagtagaa

SEQ ID NO: 3507 - DNA, 768 bp, Artificial
  Mutations within GlyA3B4 introduced by GmGlyA3B4_T02TALE nuclease
  misc_feature (682): n is a or c or t or g
gttcatgtacggttgcagatataaacgaagcatagcttatgtatgaggtgtaacaaaattggaaacaatagccatgcaaggtgaagaatgtcaccaactcagaaacccttcttcattgacgtgtccctcactcactctcctctcttcactataaatcgccactcttcgtgttctccacttcaccaactccttcaaacttattaacactttccttagttcaatatggggaagcccttcttcactctctctctttcttccctttgcttgctactcttgtcgagtgcataaggcggataaagttgcaggaccacttctgcgctcggcccttccggctggctggtttcccagtcacgacgttgtaaaacgacggccagtgaattcgagctcggtacctcgcgaatgctttgctattacctccagcaagttcaacgagtgccaactcaacaacctcaacgcgttggaacccgaccaccgcgttgagtcccgaaggtggtcttattgaaacatggaactctcaacaccctgagctgcaatgcgccggtgtcactgtttccaaacgcaccctcaaccgcaacggcctccacttgccatcttactcaccttatccccaaaatgatcattgtcgtcaaggtgcgtaatattagtaagaagtatttatcagcttaacgtgataacaataatngtaatatgaaatattttattaaattttttataattaatctctgctagaaaatttgattaatcatttttagtagaatttgtttttct

SEQ ID NO: 3508 - DNA, 655 bp, Artificial; identical to SEQ ID NO: 3071
  Mutations within GlyA3B4 introduced by GmGlyA3B4_T02TALE nuclease

SEQ ID NO: 3509 - DNA, 682 bp, Artificial
  Mutations within GlyA3B4 introduced by GmGlyA3B4_T02TALE nuclease
gttcatgtacggttgcagatataaacgaagcatagcttatgtatgaggtgtaacaaaattggaaacaatagccatgcaaggtgaagaatgtcaccaactcagaaacccttcttcattgacgtgtccctcactcactctcctctcttcactataaatcgccactcttcgtgttctccacttcaccaactccttcaaacttattaacactttccttagttcaatatggggaagcccttcttcactctctctctttcttccctttgcttgctactcttgtcgagtgcattcatctacagtacctccaagtccaaagcgttcgaatcggccaagtgccaatctacaaccaacttcaaacgcgttgggaaacccgaccaccgcgttgagtccgaaggtggtcttattgaaacatggaactctcaacaccctgagctgcaatgcgccggtgtcactgtttccaaacgcacctcaaccgcaacggcctccacttgccatcttactcaccttatccccaaatgatcattgtcgttcaaggtgcgtaatattagtaagaagtatttatcagcttaacgtgataacaataatagtaatatgaaaatatttattaaaatttttataattaatctctgctagaaaatttgattaatcatttttagtagaatttgtttttctcaactaggttttt

SEQ ID NO: 3510 - DNA, 673 bp, Artificial
  Mutations within GlyA3B4 introduced by GmGlyA3B4_T02TALE nuclease
gttcatgtacggttgcagatataaacgaagcatagcttatgtatgaggtgtaacaaaattggaaacaatagccatgcaaggtgaagaatgtcaccaactcagaaaccccttcttcattgacgtgtccctcactcactctcctctcttcactataaatcgccactcttcgtgttctccacttcaccaactccttcaaacttattaacactttccttagttcaatatgggggaagcccttcttcactctctctctttcttccctttgcttgctactcttgtcgagtgcagctattacctccagcaagttcaacgagtgccaactcaacaacctcaacgcgttggaacccgaccaccgcgttgagtccgaaggtggtcttattgaaacatggaactctcaacaccctgagctgcaatgcgccggtgtcactgtttccaaacgcaccctcaaccgcaacggcctccacttgccatcttactcaccttatcccccaaaatgatcattgtcgttcaagggtgcgtaatattagtaagaagtatttatcagcttaacgtgataacaataatagtaatatgaaaatatttattaaatttttataattaatctctgctagaaaatttgattaatcattttagtagaatttgtttttctcaactaggtttttaaaacaccaca

SEQ ID NO: 3511 - DNA, 670 bp, Artificial
  Mutations within GlyA3B4 introduced by GmGlyA3B4_T02TALE nuclease
gttcatgtacggttgcagatataaacgaagcatagcttatgtatgaggtgtaacaaaattggaaacaatagccatgcaaggtgaagaatgtcaccaactcagaaacccttcttcattgacgtgtccctcactcactctcctctcttcactataaatcgccactcttcgtgttctccacttcaccaactccttcaaacttattaacactttccttagttcaatatggggaagcccttcttcactctctctctttcttccctttgcttgctactcttgtcgagtgcattgctattacctccagcaagttcaacgagtgccaactcaacaacctcaacgcgttggaacccgaccaccgcgttgagtccgaaggtggtcttattgaaacatggaactctcaacaccctgagctgcaatgcgccggtgtcactgtttccaaacgcacccctcaaccgcaacggcctccacttgccatcttactcaccttatccccaaatgatcattgtcgttcaagggtgcgtaatattagtaagaagtattttatcagcttaacgtgataacaatatagtaatatgaaatatttattaaatttttataattaatctctgctagaaaatttgattaatcatttttagtagaatttgtttttctcaactaggtttttaaaacacca

SEQ ID NO: 3512 - DNA, 649 bp, Artificial
  Mutations within GlyA3B4 introduced by GmGlyA3B4_T02TALE nuclease
gttcatgtacggttgcagatataaacgaagcatagcttatgtatgaggtgtaacaaaattggaaacaatagccatgcaaggtgaagaatgtcaccaactcagaaacccttcttcattgacgtgtccctcactcactctcctctcttcactataaatcgccactcttcgtgttctccacttcaccaactccttcaaacttattaacactttccttagttcaatatggggaagcccttcttcactctctctctttcttccttgcttgctattacctccagcaagttcaacgagtgccaactcaacaacctcaacgcgttggaacccgaccaccgcgttgagtccgaaggtggtcttattgaaacatggaactctcaacacccctgagctgcaatgcgccggtgtcactgtttccaaacgcaccctcaaccgcaacggcctccacttgccatcttactcaccttatcccccaaatgatcattgtcgttcaaggtgcgtaatattagtaagaagtatttatcagcttaacgtgataacaataatagtaatatgaaatatttattaaattttttataattaatctctgctagaaaatttgattaatcatttttagtagaatttgttttttctcaactaggttttaaacaccaca

SEQ ID NO: 3513 - DNA, 662 bp, Artificial; identical to SEQ ID NO: 1800
  Mutations within GlyA3B4 introduced by GmGlyA3B4_T02TALE nuclease

SEQ ID NO: 3514 - DNA, 537 bp, Artificial
  Mutations within GlyA3B4 introduced by GmGlyA3B4_T02TALE nuclease
gttcatgtacggttgcagatataaacgaagcatagcttatgtatgaggtgtaacaaaattggaaacaatagccatgcaaggtgaagaatgtcaccaactcagaaaccccttcttcattgacgtgtccctcactcactctctctcttcactataaatcgccactcttcgtgttctccacttcaccaactccttcaaacttattaacactttccttagttcaatatgggggaacccgaccaccgcgttgagtccgaaggtggtcttattgaacatgaactctcaacaccctgagctgcaatgcgccggtgtcactgtttccaaacgcaccctcaaccgcaacggcctccacttgccatcttactcaccttatccccaaatgatcattgtcgttcaaggtgcgtaatattagtaagaagtatttatcagcttaacgtgataacaataatagtaatatgaaatatttataaatttttataattaatctctgctagaaaattgattaatcatttttagtagaatttgtttttctcaactagg

SEQ ID NO: 3515 - DNA, 646 bp, Artificial; identical to SEQ ID NO: 3119
  Mutations within GlyA3B4 introduced by GmGlyA3B4_T02TALE nuclease

SEQ ID NO: 3516 - DNA, 648 bp, Artificial; identical to SEQ ID NO: 2749
  Mutations within GlyA3B4 introduced by GmGlyA3B4_T02TALE nuclease

SEQ ID NO: 3517 - DNA, 659 bp, Artificial
  Mutations within GlyA3B4 introduced by GmGlyA3B4_T02TALE nuclease
gttcatgtacggttgcagatataaacgaagcatagcttatgtatgaggtgtaacaaaattggaaacaatagccatgcaaggtgaagaatgtcaccaactcagaaacccttcttcattgacgtgtccctcactcactctcctctcttcactataaatcgccactcttcgtgttctccacttcaccaactccttcaaacttattaacactttccttagttcaatatggggaagcccttcttcactctctctctttcttccctttgcttgctactctctattacctccagcaagttcaacgagtgccaactcaacaacctcaacgcgttggaacccgaccaccgcgttgagtccgaaggtggtcttattgaaacatggaactctcaacaccctgagctgcaatgcgccggtgtcactgtttccaaacgcaccctcaaccgcaacggcctccacttgccatcttactcaccttatccccaaatgatcattgtcgttcaaggtgcgtaaatattagtaagaagtatttatcagcttaacgtgataacaataatagtaatatgaaatatttattaaattttttataattaatctctgctagaaaaatttgattaatcatttttagtagaatttgttttttctcaactaggttttaaaacaccaca

SEQ ID NO: 3518 - DNA, 674 bp, Artificial
  Mutations within GlyA3B4 introduced by GmGlyA3B4_T02TALE nuclease
gttcatgtacggttgcagatataaacgaagcatagcttatgtatgaggtgtaacaaaattggaaacaatagccatgcaaggtgaagaatgtcaccaactcagaaacccttcttcattgacgtgtccctcactcactctcctctcttcactataaatcgccactcttcgtgttctccacttcaccaactccttcaaacttattaacactttccttagttcaatatggggaagcccttcttcactctctctctttcttccctttgcttgctactcttgtcgagtgcattgcttattatcctccacgcaagttccaatcagagtgccaacctacaacaacctcaaaccagcgttggaacccgaccaccgcgttgagtccgaaggtggtcttattgaaacatggaactctcaacaccctgagctgcatgcgccggtgtcactgtttccaaacgcaccctcaaccgcaacggcctccacttgccatcttactcaccttatccccaaatgatcattgtcgttcaaggtgcgtaatattagtaagagtatttatcagcttaacgtgataacaataatagtaatatgaaatatttattaaatttttataattaatctctgctagaaaatttgattaatcattttagtagaatttgtttttctcaactaggttttaaacacca

SEQ ID NO: 3519 - DNA, 635 bp, Artificial
  Mutations within GlyA3B4 introduced by GmGlyA3B4_T02TALE nuclease
gttcatgtacggttgcagatataaacgaagcatagcttatgtatgaggtgtaacaaaattggaaacaatagccatgcaaggtgaagaatgtcaccaactcagaaaccccttcttcattgacgtgtccctcactcactctcctctcttcactataaatcgccactcttcgtgttctccacttcaccaactccttcaaacttattaacactttccttagttcaatatggggaagcccttcttcactctctctctttcttccctttgcttgctactcttgtcgagtgcctattacctccagcaagttcaacgagtgccaactcaacaacctcaacgcgttggaacccgaccaccgcgttgagtccgaaggtggtcttattgaaacatggaactctcaacaccctgagctgcaatgcgccggtgtcactgtttccaaacgcaccctcaaccgcaacggcctccacttgccatcttactcaccttatccccaaatgatcattgtcgttcaaggtgcgtaatattagtaagaagtatttatcagcttaacgtgataacaataatagtaatatgaaatatttattaaatttttataattaatctctgctagaaaatttgattaatcattttagtagaatttg

SEQ ID NO: 3520 - DNA, 634 bp, Artificial; identical to SEQ ID NO: 2532
  Mutations within GlyA3B4 introduced by GmGlyA3B4_T02TALE nuclease

SEQ ID NO: 3521 - DNA, 658 bp, Artificial
  Mutations within GlyA3B4 introduced by GmGlyA3B4_T02TALE nuclease
gttcatgtacggttgcagatataaacgaagcatagcttatgtatgaggtgtaacaaaattggaaacaatagccatgcaaggtgaagaatgtcaccaactcagaaacccttcttcattgacgtgtccctcactcactctcctctcttcactataaatcgccactcttcgtgttctccacttcaccaactccttcaaacttattaacactttccttagttcaatatggggaagcccttcttcactctctctctttcttccctttgcttgctactcttgtcgagtgcatgctattacctccagcaagttcaacgagtgccaactcaacaacctcaacgcgttggaacccgaccaccgcgttgagtccgaaggtggtcttattgaaacatggaactctcaacaccctgagctgcaatgcgccggtgtcactgtttccaaacgcaccctcaaccgcaacggcctccacttgccatcttactcaccttatccccaaatgatcattgtcgttcaaggtgcgtaatattagtaagagtatttatcagcttaacgtgataacaataatagtaatatgaaatatttattaaatttttataattaatctctgctagaaaatttgattaatcattttagtagaatttgtttttctcaactaggttttaaa

SEQ ID NO: 3522 - DNA, 650 bp, Artificial; identical to SEQ ID NO: 2452
  Mutations within GlyA3B4 introduced by GmGlyA3B4_T02TALE nuclease

SEQ ID NO: 3523 - DNA, 616 bp, Artificial
  Mutations within GlyA3B4 introduced by GmGlyA3B4_T02TALE nuclease
gttcatgtacggttgcagatataaacgaagcatagcttatgtatgaggtgtaacaaaattggaaacaatagccatgcaaggtgaagaatgtcaccaactcagaaacccttcttcattgacgtgtccctcactcactctcctctcttcactataaatcgccactcttcgtgttctccacttcaccaactccttcaaacttattaacactttccttagttcaatatggggaagcccttcttcactctctctctttcttccctttgcttgctactcttgtcgagtgcatgttcaacgagtgccaactcaacaacctcaacgcgttggaacccgaccaccgcgttgagtccgaaggtggtcttattgaaacatggaactctcaacaccctgagctgcaatgcgccggtgtcactgtttccaaacgcaccctcaaccgcaacggcctccacttgccatcttactcaccttatcccccaaatgatcattgtcgttcaaggtgcgtaatattagtaagaagtatttatcagcttaacgtgataacaataatagtaatatgaaatatttattaaattttttataattaatctctgctagaaaatttgattaatctttttagtag

SEQ ID NO: 3524 - DNA, 596 bp, Artificial
  Mutations within GlyA3B4 introduced by GmGlyA3B4_T02TALE nuclease
gttcatgtacggttgcagatataaacgaagcatagcttatgtatgaggtgtaacaaaattggaaacaatagccatgcaaggtgaagaatgtcaccaactcagaaacccttcttcattgacgtgtccctcactcactctcctctcttcactataaatcgccactcttcgtgttctccacttcaccaaactccttcaaacttattaacactttccttagttcaatatggggaaagcccttcttcactctctctctttcttccctttgctattacctccagcaagttcaacgagtgccaactcaacaacctcaacgcgttggaacccgaccaccgcgttgagtccgaaggtggtcttattgaaacatggaactctcaacaccctgagctgcaatgcgccggtgtcactgtttccaaacgcaccctcaaccgcaacggcctccgcacttgcctatccttactcaccttatccccaaattcagatcattgtcgttcaaaggtgcgtaatattagtaagaagtatttatcagctttaacgtgataacaataatagtaatatgaaatattttattaaattttttaataattaatctctgctag

SEQ ID NO: 3525 - DNA, 661 bp, Artificial; identical to SEQ ID NO: 3235
  Mutations within GlyA3B4 introduced by GmGlyA3B4_T02TALE nuclease

SEQ ID NO: 3526 - DNA, 636 bp, Artificial
  Mutations within GlyA3B4 introduced by GmGlyA3B4_T02TALE nuclease
gttcatgtacggttgcagatataaacgaagcatagcttatgtatgaggtgtaacaaaattggaaacaatagccatgcaaggtgaagaatgtcaccaactcagaaacccttcttcattgacgtgtccctcactcactctcctctcttcactataaatcgccactcttcgtgttctccacttcaccaactccttcaaacttattaacactttccttagttcaatatggggaagcccttcttcactctctctctttcttccctttgcttgctactcttgtcgagtgcatgctattacctccagcaagttcaacgagtgccaactcaacaacctcaacgcgttggaacccgaccaccgcgttgagtccgaaggtggtcttattgaaacatggaactctcaacaccctgagctgcaatgcgccggtgtcactgtttccaaacgcaccctcaaccgcaacggcctccacttgccatcttactcaccttatccccaaatgatcattgtcgttcaaggtgcgtaatattagtaagagtatttatcagcttaacgtgataacaatatagtaatatgaaatatttattaaatttttcataattaatctctgctagaaaatttgattaatcattttagtagaatttg

SEQ ID NO: 3527 - DNA, 636 bp, Artificial; identical to SEQ ID NO: 3063
  Mutations within GlyA3B4 introduced by GmGlyA3B4_T02TALE nuclease

SEQ ID NO: 3528 - DNA, 665 bp, Artificial; identical to SEQ ID NO: 2115
  Mutations within GlyA3B4 introduced by GmGlyA3B4_T02TALE nuclease

SEQ ID NO: 3529 - DNA, 485 bp, Artificial
  Mutations within GlyA3B4 introduced by GmGlyA3B4_T02TALE nuclease
gttcatgtacggttgcagatataaacgaagcatagcttatgtatgaggtgtaacaaaattggaaacaatagccatgcaaggtgaagaatgtcaccaactcagaaacccttcttcattgacgtgtccctcactcactctcctctcttcactataaatcgccactcttcgtgttctccacttcaccaactccttcagcaagttcaacgagtgccaactcaacaacctcaacgcgttggaacccgaccaccgcgttgagtccgaaggtggtcttattgaaacatggaactctcaacaccctgagctgcaatgcgccggtgtcactgttttccaaacgcaccctcaaccgcaacggcctccacttgccatcttactcaccttatcccccaaatgatcattgtcgttcaaggtgcgtaatattagtaagaagtatttatcagcttaacgtgataacaataatagtaatatgaaatatttattaaattttt

SEQ ID NO: 3530 - DNA, 596 bp, Artificial
  Mutations within GlyA3B4 introduced by GmGlyA3B4_T02TALE nuclease
gttcatgtacggttgcagatataaacgaagcatagcttatgtatgaggtgtaacaaaattggaaacaatagccatgcaaggtgaagaatgtcaccaactcagaaacccttcttcattgacgtgtccctcactcactctcctctcttcactataaatcgccactcttcgtgttctccacttcaccaactccttcaaacttattaacactttccttagttcaatatggggaagcccttcttcactctctctctttcctccctccagcaagttcaacgagtgccaactcaacaacctcaacgcgttggaaccgaccaccgcgttgagtccgaaggtggtcttattgaaacatggaactctcaacaccctgagctgcaatgcgccggtgtcactgtttccaaacgcaccctcaaccgcaacggcctccacttgccatcttactcaccttatccccaaatgatcattgtcgttcaaggtgcgtaatattagtaagaagtatttatcagcttaacgtgataacaaataatagtaatatgaaatatttattaaatttttataattaatctctgctagaaaatttgattaatcatttttagtag

SEQ ID NO: 3531 - DNA, 659 bp, Artificial
  Mutations within GlyA3B4 introduced by GmGlyA3B4_T02TALE nuclease
gttcatgtacggttgcagatataaacgaagcatagcttatgtatgaggtgtaacaaaattggaaacaatagccatgcaaggtgaagaatgtcaccaactcagaaacccttcttcattgacgtgtccctcactcactctcctctcttcactataaatcgccactcttcgtgttctccacttcaccaactccttcaaacttattaacactttccttagttcaatatggggaagcccttcttcactctctctctttcttccctttgcttgctactcttgtcgactattacctccagcaagttcaacgagtgccaactcaacaacctcaacgcgttggaacccgaccaccgcgttgagtccgaaggtggtcttattgaaacatggaactctcaacaccctgagctgcaatgcgccggtgtcactgtttccaaacgcaccctcaaccgcaacggcctccacttgccatcttactcaccttatccccaaatgatcattgtcgttcaaggtgcgtaatattagtaagaagtatttatcagcttaacgtgataacaataatagtaatatgaaatatttattaaatttttataattaatctctgctagaaaatttgattaatcattttagtagaatttgtttttctcaactaggtttttaaaacacca

SEQ ID NO: 3532 - DNA, 651 bp, Artificial
  Mutations within GlyA3B4 introduced by GmGlyA3B4_T02TALE nuclease
gttcatgtacggttgcagatataaacgaagcatagcttatgtatgaggtgtaacaaaattggaaacaatagccatgcaaggtgaagaatgtcaccaactcagaaacccttcttcattgacgtgtccctcactcactctcctctcttcactataaatcgccactcttcgtgttctccacttcaccaactccttcaaacttattaacactttccttagttcaatatggggaagcccttcttcactctctctctttcttccctttgcttgctactcttgtcgagtgttacctccagcaagttcaacgagtgccaactcaacaacctcaacgcgttggaacccgaccaccgcgttgagtccgaaggtggtcttattgaaacatggaactctcaacaccctgagctgcaatgcgccggtgtcactgtttccaaacgcaccctcaaccgcaacggcctccacttgccatcttactcaccttatcccccaaatgatcattgtcgttcaaggtgcgtaatattagtaagaagtatttatcagcttaacgtgataacaataatagtaatatgaaatatttattaaatttttataattaatctctgctagaaaatttgattaatcattttagtagaatttgtttttctcaactaggttttt

SEQ ID NO: 3533 - DNA, 432 bp, Artificial
  Mutations within GlyA3B4 introduced by GmGlyA3B4_T02TALE nuclease
gttcatgtacggttgcagatataaacgaagcatagcttatgtatgaggtgtaacaaaattggaaacaatagccatgcaaggtgaagaatgtcaccaactcagaaacccttcttcattgacgtgtccctcactcactctcctctcttcactataaatcgccactcttcgtgttctccacttcaccaaactccttcaaacttattaacactttccttagttcaatatgggggaaagcccttcttcactctctctctttcttccctttgcttgctactcttgtcgagtctccagcaagttcaacgagtgccaactcaacaacctcaacgcgttggaacccgaccaccgcgttgagtccgaaggtggtcttattgaaacatggaactctcaacaccctgagctgcaatgcgcccggtgtcactgtttccaaacgca

SEQ ID NO: 3534 - DNA, 643 bp, Artificial
  Mutations within GlyA3B4 introduced by GmGlyA3B4_T02TALE nuclease
gttcatgtacggttgcagatataaacgaagcatagcttatgtatgaggtgtaacaaaattggaaacaatagccatgcaaggtgaagaatgtcaccaactcagaaacccttcttcattgacgtgtccctcactcactctcctctcttcactataaatcgccactcttcgtgttctccacttcaccaactccttcaaacttattaacactttccttagttcaatatggggaagcccttcttcactctctctctttcttccctttgctattacctccagcaagttcaacgagtgccaactcaacaacctcaacgcgttggaacccgaccaccgcgttgagtccgaaggtggtcttattgaaacatggaactctcaacaccctgagctgcaatgcgccggtgtcactgtttccaaacgcaccctcaaccgcaacggcctccacttgccatcttactcaccttatccccaaatgatcattgtcgttcaaggtgcgtaatattagtaagaagtatttatcagcttaacgtgataacaataatagtaatatgaaatatttattaaattttttataattaatctctgctagaaaatttgattaatcatttttagtagaatttgttttttctcaactaggttttaaacacca

SEQ ID NO: 3535 - DNA, 659 bp, Artificial
  Mutations within GlyA3B4 introduced by GmGlyA3B4_T02TALE nuclease
  misc_feature (454): n is a or c or t or g
gttcatgtacggttgcagatataaacgaagcatagcttatgtatgaggtgtaacaaaattggaaacaatagccatgcaaggtgaagaatgtcaccaactcagaaacccttcttcattgacgtgtccctcactcactctcctctcttcactataaatcgccactcttcgtgttctccacttcaccaactccttcaaacttattaacactttccttagttcaatatggggaagcccttcttcactctctctctttcttccctttgcttgctactcttgtcgagtgcatctattacctccagcaagttcaacgagtgccaactcaacaacctcaacgcgttggaaacccgaccaccgcgttgagtccgaaggtggtcttattgaaacatggaactctcaacaccctgagctgcaatgcgccggtgtcactgtttccaaacgcaccctcaaccgcaanggcctccacttgccatcttactcaccttatccccaaatgatcattgtcgttcaaggtgcgtaatattagtaagaagtatttatcagcttaacgtgataacaataatagtaatatgaaatatttattaaatttttataattaatctctgctagaaaatttgattaatcattttagtagaatttgttttctcaactaggttttaaaa

SEQ ID NO: 3536 - DNA, 654 bp, Artificial; identical to SEQ ID NO: 2491
  Mutations within GlyA3B4 introduced by GmGlyA3B4_T02TALE nuclease

SEQ ID NO: 3537 - DNA, 638 bp, Artificial
  Mutations within GlyA3B4 introduced by GmGlyA3B4_T02TALE nuclease
gttcatgtacggttgcagatataaacgaagcatagcttatgtatgaggtgtaacaaaattggaaacaatagccatgcaaggtgaagaatgtcaccaactcagaaacccttcttcattgacgtgtccctcactcactctcctctcttcactataaatcgccactcttcgtgttctccacttcaccaactccttcaaacttattaacactttccttagttcaatatggggaagcccttcttcactctctctctttcttccctttgcttgctactcttgtcgagtgcatttgctattacctccagcaagttcaacgagtgccaactcaacaacctcaacgcgttggaacccgaccaccgcgttgagtccgaaggtggtcttattgaaacatggaactctcaacaccctgagctgcaatgcgccggtgtcactgtttccaaacgcaccctcaaccgcaacggcctccacttgccatcttactcaccttatccccaaatgatcattgtcgttcaaggtgcgtaatattagtaagaagtatttatcagcttaacgtgataacaatatagtaatatgaaatatttattaaatttttataattaatctctgctagaaaatttgattaatcattttagtagaatttg

SEQ ID NO: 3538 - DNA, 611 bp, Artificial
  Mutations within GlyA3B4 introduced by GmGlyA3B4_T02TALE nuclease
gttcatgtacggttgcagatataaacgaagcatagcttatgtatgaggtgtaacaaaattggaaacaatagccatgcaaggtgaagaatgtcaccaactcagaaacccttcttcattgacgtgtccctcactcactctcctctcttcactataaatcgccactcttcgtgttctccacttcaccaactccttcaaacttattaacactttccttagttcaatatggggaagcccttcttcactctctctctttcttccctccagcaagttcaacgagtgccaactcaacaacctcaacgcgttggaaccgaccaccgcgttgagtccgaaggtggtcttattgaaacatggaactctcaacaccctgagctgcaatgcgccggtgtcactgtttccaaacgcaccctcaaccgcaacggcctccacttgccatcttactcaccttatccccaaatgatcattgtcgttcaaggtgcgtaatattagtaagaagtatttatcagcttaacgtgataacaataatagtaatatgaaatatttattaatttttataattaatctctgctagaaaatttgattaatcatttttagtagaatttgtttttctcaac

SEQ ID NO: 3539 - DNA, 601 bp, Artificial; identical to SEQ ID NO: 1930
  Mutations within GlyA3B4 introduced by GmGlyA3B4_T02TALE nuclease

SEQ ID NO: 3540 - DNA, 563 bp, Artificial
  Mutations within GlyA3B4 introduced by GmGlyA3B4_T02TALE nuclease
gttcatgtacggttgcagatataaacgaagcatagcttatgtatgaggtgtaacaaaattggaaacaatagccatgcaaggtgaagaatgtcaccaactcagaaacccttcttcattgacgtgtccctcactcactctcctctcttcactataaatcgccactcttcgtgttctccacttcaccaactccttcaaacttattaacactttccttagttcaatatggggaagcccttcttcactctctctctttcaacgagtgccaactcaacaacctcaacgcgttggaacccgaccaccgcgttgagtccgaaggtggtcttattgaaacatggaactctcaacaccctgagctgcaatgcgccggtgtcactgtttccaaacgcaccctcaaccgcaacggcctccacttgccatcttactcaccttatccccaaatgatcattgtcgttcaaggtgcgtaatattagtaagaagtatttatcagcttaacgtgataacaataatagtaatatgaaatatttattaatttttataattaatctctgctagaaaatttgatt

SEQ ID NO: 3541 - DNA, 662 bp, Artificial; identical to SEQ ID NO: 2376
  Mutations within GlyA3B4 introduced by GmGlyA3B4_T02TALE nuclease

SEQ ID NO: 3542 - DNA, 628 bp, Artificial
  Mutations within GlyA3B4 introduced by GmGlyA3B4_T02TALE nuclease
gttcatgtacggttgcagatataaacgaagcatagcttatgtatgaggtgtaacaaaattggaaacaatagccatgcaaggtgaagaatgtcaccaactcagaaacccttcttcattgacgtgtccctcactcactctcctctcttcactataaatcgccactcttcgtgttctccacttcaccaactccttcaaacttattaacactttccttagttcaatatggggaagcccttcttcactctctctctttcttcccttgctattacctccagcaagttcaacgagtgccaactcaacaacctcaacgcgttggaacccgaccaccgcgttgagtccgaaggtggtcttattgaaacatggaactctcaacaccctgagctgcaatgcgccggtgtcactgtttccaaacgcaccctcaaccgcaacggcctccacttgccatcttactcaccttatccccaaatgatcattgtcgttcaaggtgcgtaatattagtaagaagtatttatcagctttaacgtgataacaataatagtaatatgaaatatttattaaattttttataattaattctctgctagaaaatttgattaatcatttttagtagaatttgttttttctcaac

SEQ ID NO: 3543 - DNA, 622 bp, Artificial
  Mutations within GlyA3B4 introduced by GmGlyA3B4_T02TALE nuclease
gttcatgtacggttgcagatataaacgaagcatagcttatgtatgaggtgtaacaaaattggaaacaatagccatgcaaggtgaagaatgtcaccaactcagaaacccttcttcattgacgtgtccctcactcactctcctctcttcactataaatcgccactcttcgtgttctccacttcaccaactccttcaaacttattaacactttccttagttcaatatggggaagcccttcttcactctctctctttcttccctttgcttgctactcttgtcgagtgcagcaagttcaacgagtgccaactcaacaacctcaacgcgttggaacccgaccaccgcgttgagtccgaaggtggtcttattgaaacatggaactctcaacaccctgagctgcaatgcgccggtgtcactgtttccaaacgcaccctcaaccgcaacggcctccacttgccatcttactcaccttatcccccaaatgatcattgtcgttcaaggtgcgtaaatattagtaagaagtatttatcagcttaacgtgataacaataatagtaatatgaaatatttattaaattttttataattaatctctgctagaaaatttgattaatctttttagtagaa

SEQ ID NO: 3544 - DNA, 665 bp, Artificial; identical to SEQ ID NO: 2115
  Mutations within GlyA3B4 introduced by GmGlyA3B4_T02TALE nuclease

SEQ ID NO: 3545 - DNA, 668 bp, Artificial
  Mutations within GlyA3B4 introduced by GmGlyA3B4_T02TALE nuclease
gttcatgtacggttgcagatataaacgaagcatagcttatgtatgaggtgtaacaaaattggaaacaatagccatgcaaggtgaagaatgtcaccaactcagaaacccttcttcattgacgtgtccctcactcactctcctctcttcactataaatcgccactcttcgtgttctccacttcaccaactccttcaaacttattaacactttccttagttcaatatggggaagcccttcttcactctctctctttcttccctttgcttgctactcttgtcgagtgcattgctattacctccagcaagttcaacgagtgccaactcaacaacctcaacgcgttggaacccgaccaccgcgttgagtccgaaggtggtcttattgaaacatggaactctcaacaccctgagctgcaatgcgccggtgtcactgtttccaaacgcaccctcaaccgcaacggcctccacttgccatcttactcaccttatccccaaatgatcattgtcgttcaaggtgcgtaatattagtaagaagtatttatcagcttaacgtgataacaataatagtaatatgaaatatttattaaatttttataattaatctctgctagaaaatttgattaatcattttagtagaatttgttttctcaactaggtttttaaaacaccaca

SEQ ID NO: 3546 - DNA, 648 bp, Artificial
  Mutations within GlyA3B4 introduced by GmGlyA3B4_T02TALE nuclease
gttcatgtacggttgcagatataaacgaagcatagcttatgtatgaggtgtaacaaaattggaaacaatagccatgcaaggtgaagaatgtcaccaactcagaaacccttcttcattgacgtgtccctcactcactctcctctcttcactataaatcgccactcttcgtgttctccacttcaccaactccttcaaacttattaacactttccttagttcaatatggggaagcccttcttcactctctctctttcttccctttgcttgctactcttgtcgagtgcaattacctccagcaagttcaacgagtgccaactcaacaacctcaacgcgttggaacccgaccaccgcgttgagtccgaaggtggtcttattgaaacatggaactctcaacaccctgagctgcaatgcgccggtgtcactgtttccaaacgcaccctcaaccgcaacggcctccacttgccatcttactcaccttatccccaaatgatcattgtcgttcaaggtgcgtaatattagtaagaagtatttatcagcttaacgtgataacaataatagtaatatgaaatatttattaaatttttataattaatctctgctagaaaatttgattaatcattttagtagaatttgtttttctcaactagg

SEQ ID NO: 3547 - DNA, 664 bp, Artificial
  Mutations within GlyA3B4 introduced by GmGlyA3B4_T02TALE nuclease
gttcatgtacggttgcagatataaacgaagcatagcttatgtatgaggtgtaacaaaattggaaacaatagccatgcaaggtgaagaatgtcaccaactcagaaaccccttcttcattgacgtgtccctcactcactctcctctcttcactataaatcgccactcttcgtgttctccacttcaccaactccttcaaacttattaacactttccttagttcaatatggggaagcccttcttcactctctctctttcttccctttgcttgctactcttgtcgagtgcttattacctccagcaagttcaacgagtgccaactcaacaacctcaacgcgttggaacccgaccaccgcgttgagtccgaaggtggtcttattgaaacatggaactctcaacaccctgagctgcaatgcgccggtgtcactgtttccaaacgcaccctcaaccgcaacggcctccacttgccatcttactcaccttatccccaaatgatcattgtcgttcaaggtgcgtaatattagtaagaagtatttatcagcttaacgtgataacaataatagtaatatgaaatatttattaaatttttataattaatctctgctagaaaatttgattaatcattttagtagaatttgtttttctcaactaggtttttaaaacacca

SEQ ID NO: 3548 - DNA, 669 bp, Artificial
  Mutations within GlyA3B4 introduced by GmGlyA3B4_T02TALE nuclease
  misc_feature (531): n is a or c or t or g
gttcatgtacggttgcagatataaacgaagcatagcttatgtatgaggtgtaacaaaattggaaacaatagccatgcaaggtgaagaatgtcaccaactcagaaaccccttcttcattgacgtgtccctcactcactctcctctcttcactataaatcgccactcttcgtgttctccacttcaccaactccttcaaacttattaacactttccttagttcaatatggggaagcccttcttcactctctctctttcttccctttgcttgctactcttgtcgagtgcttgctattacctccagcaagttcaacgagtgccaactcaacaacctcaacgcgttggaacccgaccaccgcgttgagtccgaaggtggtcttattgaaacatggaactctcaacaccctgagctgcaatgcgccggtgtcactgtttccaaacgcaccctcaaccgcaacggcctccacttgccatcttactcaccttatccccaaatgatcattgtcgttcaaggtgcgtaatattagtaagagnatttatcagcttaacgtgataacaataatagtaatatgaaaatatttattaaatttttataattaatctctgctagaaaatttgattaatcattttagtagaatttgtttttctcaactaggtttttaaaacaccaca

SEQ ID NO: 3549 - DNA, 642 bp, Artificial
  Mutations within GlyA3B4 introduced by GmGlyA3B4_T02TALE nuclease
gttcatgtacggttgcagatataaacgaagcatagcttatgtatgaggtgtaacaaaattggaaacaatagccatgcaaggtgaagaatgtcaccaactcagaaacccttcttcattgacgtgtccctcactcactctcctctcttcactataaatcgccactcttcgtgttctccacttcaccaactccttcaaacttattaacactttccttagttcaatatggggaagcccttcttcactctctctctttcttccctttgcttgctactcttgtcgagtgtacctccagcaagttcaacgagtgccaactcaacaacctcaacgcgttggaacccgaccaccgcgttgagtccgaaggtggtcttattgaaacatggaactctcaacaccctgagctgcaatgcgccggtgtcactgtttccaaacgcaccctcaaccgcaacggcctccacttgccatcttactcaccttatccccaaatgatcattgtcgttcaaggtgcgtaatattagtaagaagtatttatcagcttaacgtgataacaatatagtaatatgaaatatttattaaatttttataattaatctctgctagaaaatttgattaatcattttagtagaatttgttttctcaactagg

SEQ ID NO: 3550 - DNA, 598 bp, Artificial
  Mutations within GlyA3B4 introduced by GmGlyA3B4_T02TALE nuclease
gttcatgtacggttgcagatataaacgaagcatagcttatgtatgaggtgtaacaaaattggaaacaatagccatgcaaggtgaagaatgtcaccaactcagaaacccttcttcattgacgtgtccctcactcactctcctctcttcactataaatcgccactcttcgtgttctccacttcaccaactccttcaaacttattaacactttccttagttcaatatggggaagcccttcttcactctctctctttcttccctttgcttgctactcttgtcgagaacctccagcaagttcaacgagtgccaactcaacaacctcaacgcgttggaacccgaccaccgcgttgagtccgaaggtggtcttattgaaacatggaactctcaacaccctgagctgcaatgcgccggtatcactgtttccaaacgcaccctcaaccgcaacggcctccacttgccatcttactcaccttatcccccaaatgatcattgtcgttcaaggtgcgtaatattagtaagaagtatttatcagcttaacgtgataacaataatagtaatatgaaatatttattaaattttttataattaatctctgctag

SEQ ID NO: 3551 - DNA, 663 bp, Artificial; identical to SEQ ID NO: 2559
  Mutations within GlyA3B4 introduced by GmGlyA3B4_T02TALE nuclease

SEQ ID NO: 3552 - DNA, 661 bp, Artificial
  Mutations within GlyA3B4 introduced by GmGlyA3B4_T02TALE nuclease
  misc_feature (530): n is a or c or t or g
gttcatgtacggttgcagatataaacgaagcatagcttatgtatgaggtgtaacaaaattggaaacaatagccatgcaaggtgaagaatgtcaccaactcagaaacccttcttcattgacgtgtccctcactcactctcctctcttcactataaatcgccactcttcgtgttctccacttcaccaactccttcaaacttattaacactttccttagttcaatatggggaagcccttcttcactctctctctttcttccctttgcttgctactcttgtcgagtgcatgctattacctccagcaagttcaacgagtgccaactcaacaacctcaacgcgttggaacccgaccaccgcgttgagtccgaaggtggtcttattgaaacatggaactctcaacaccctgagctgcaatgcgccggtgtcactgtttccaaacgcaccctcaaccgcaacggcctccacttgccatcttactcaccttatccccaaatgatcattgtcgttcaaggtgcgtaatattagtaagagnatttatcagcttaacgtgataacaatatagtaatatgaaatatttattaaatttttataattaatctctgctagaaaatttgattaatcattttagtagaatttgttttctcaactaggttttaaacacca

SEQ ID NO: 3553 - DNA, 661 bp, Artificial; identical to SEQ ID NO: 1694
  Mutations within GlyA3B4 introduced by GmGlyA3B4_T02TALE nuclease

SEQ ID NO: 3554 - DNA, 556 bp, Artificial
  Mutations within GlyA3B4 introduced by GmGlyA3B4_T02TALE nuclease
gttcatgtacggttgcagatataaacgaagcatagcttatgtatgaggtgtaacaaaattggaaacaatagccatgcaaggtgaagaatgtcaccaactcagaaacccttcttcattgacgtgtccctcactcactctcctctcttcactataaatcgccactcttcgtgttctccacttcaccaacctccagcaagttcaacgagtgccaactcaacaacctcaacgcgttggaacccgaccaccgcgttgagtccgaaggtggtcttattgaaacatggaactctcaacaccctgagctgcaatgcgccggtgtcactgtttccaaacgcaccctcaaccgcaacggcctccacttgccatcttactcaccttatccccaaatgatcattgtcgttcaaggtgcgtaatattagtaagaagtatttatcagcttaacgtgataacaataatagtaatatgaaatatttattaaattttttataattaatctctgctagaaaatttgattaatcattttagtagaatttgtttttctcaactaggtttttaaaca

SEQ ID NO: 3555 - DNA, 664 bp, Artificial
  Mutations within GlyA3B4 introduced by GmGlyA3B4_T02TALE nuclease
gttcatgtacggttgcagatataaacgaagcatagcttatgtatgaggtgtaacaaaattggaaacaatagccatgcaaggtgaagaatgtcaccaactcagaaacccttcttcattgacgtgtccctcactcactctcctctcttcactataaatcgccactcttcgtgttctccacttcaccaactccttcaaacttattaacactttccttagttcaatatggggaagcccttcttcactctctctctttcttccctttgcttgctactcttgtcgagtgcattattacctccagcaagttcaacgagtgccaactcaacaacctcaacgcgttggaacccgaccaccgcgttgagtccgaaggtggtcttattgaaacatggaactctcaacaccctgagctgcaatgcgccggtgtcactgtttccaaacgcaccctcaaccgcaacggcctccacttgccatcttactcaccttatccccaaatgatcattgtcgttcaaggtgcgtaatattagtaagaagtatttatcagcttaacgtgataacaataatagtaatatgaaatatttattaaatttttataattaatctctgctagaaaatttgattaatcattttagtagaatttgtttttctcaactaggtttttaaaacacca

SEQ ID NO: 3556 - DNA, 667 bp, Artificial
  Mutations within GlyA3B4 introduced by GmGlyA3B4_T02TALE nuclease
gttcatgtacggttgcagatataaacgaagcatagcttatgtatgaggtgtaacaaaattggaaacaatagccatgcaaggtgaagaatgtcaccaactcagaaacccttcttcattgacgtgtccctcactcactctcctctcttcactataaatcgccactcttcgtgttctccacttcaccaactccttcaaacttattaacactttccttagttcaatatggggaagcccttcttcactctctctctttcttccctttgcttgctactcttgtcgagtgcatttgctattacctccagcaagttcaacgagtgccaactcaacaacctcaacgcgttggaacccgaccaccgcgttgagtccgaaggtggtcttattgaaacatggaactctcaacaccctgagctgcaatgcgccggtgtcactgtttccaaacgcaccctcaaccgcaacggcctccacttgccatcttactcaccttatccccaaatgatcattgtcgttcaaggtgcgtaatattagtaagagtatttatcagcttaacgtgataacaataatagtaatatgaaatatttattaaatttttataattaatctctgctagaaaatttgattaatcattttagtagaatttgtttttctcaactaggttttaaacaccaca

SEQ ID NO: 3557 - DNA, 596 bp, Artificial
  Mutations within GlyA3B4 introduced by GmGlyA3B4_T02TALE nuclease
gttcatgtacggttgcagatataaacgaagcatagcttatgtatgaggtgtaacaaaattggaaacaatagccatgcaaggtgaagaatgtcaccaactcagaaacccttcttcattgacgtgtccctcactcactctcctctcttcactataaatcgccactcttcgtgttctccacttcaccaactccttcaaacttattaacactttccttagttcaatatggggaagcccttcttcactctctctctttcaacgagtgccaactcaacaacctcaacgcgttggaacccgaccaccgcgttgagtccgaaggtggtcttattgaaacatggaactctcaacaccctgagctgcaatgcgccggtgtcactgtttccaaacgcaccctcaaccgcaacggcctccacttgccatcttactcaccttatccccaaatgatcattgtcgttcaaggtgcgtaatattagtaagaagtatttatcagcttaacgtgataacaataatagtaatatgaaatatttattaattttttataattaatctctgctagaaaatttgattaatcatttttagtagaatttgtttttctcaac

SEQ ID NO: 3558 - DNA, 657 bp, Artificial; identical to SEQ ID NO: 3222
  Mutations within GlyA3B4 introduced by GmGlyA3B4_T02TALE nuclease

SEQ ID NO: 3559 - DNA, 666 bp, Artificial
  Mutations within GlyA3B4 introduced by GmGlyA3B4_T02TALE nuclease
  misc_feature (533): n is a or c or t or g
gttcatgtacggttgcagatataaacgaagcatagcttatgtatgaggtgtaacaaaattggaaacaatagccatgcaaggtgaagaatgtcaccaactcagaaacccttcttcattgacgtgtccctcactcactctcctctcttcactataaatcgccactcttcgtgttctccacttcaccaactccttcaaacttattaacactttccttagttcaatatggggaagcccttcttcactctctctctttcttccctttgcttgctactcttgtcgagtgcattgctattacctccagcaagttcaacgagtgccaactcaacaacctcaacgcgttggaacccgaccaccgcgttgagtccgaaggtggtcttattgaaacatggaactctcaacaccctgagctgcaatgcgccggtgtcactgtttccaaacgcaccctcaaccgcaacggcctccacttgccatcttactcaccttatcccccaaaatgatcattgtcgttcaaggtgcgtaatattagtaagagnatttatcagcttaacgtgataacaataatagtaatatgaaatatttattaaatttttataattaatctctgctagaaaatttgattaatcattttagtagaatttgtttttctcaactaggttttaaaacacc

SEQ ID NO: 3560 - DNA, 648 bp, Artificial; identical to SEQ ID NO: 2197
  Mutations within GlyA3B4 introduced by GmGlyA3B4_T02TALE nuclease

SEQ ID NO: 3561 - DNA, 582 bp, Artificial; identical to SEQ ID NO: 2282
  Mutations within GlyA3B4 introduced by GmGlyA3B4_T02TALE nuclease

SEQ ID NO: 3562 - DNA, 527 bp, Artificial
  Mutations within GlyA3B4 introduced by GmGlyA3B4_T02TALE nuclease
gttcatgtacggttgcagatataaacgaagcatagcttatgtatgaggtgtaacaaaattggaaacaatagccatgcaaggtgaagaatgtcaccaactcagaaacccttcttcattgacgtgtccctcactcactctcctctcttcactataaatcgccactcttcgtgttctccacttcaccaactccttcaaacttattaacactttccttagttcaatatggggaagcccttcttcactctctctctttcttccctttgagtccgaaggtggtcttattgaaacatggaactctcaacaccctgagctgcaatgcgccggtgtcactgtttccaaacgcaccctcaaccgcaacggcctccacttgccatcttactcaccttatccccaaatgatcattgtcgttcaaggtgcgtaatattagtaagaagtatttatcagcttaacgtgataacaataatagtaatatgaaatatttattaaattttttataattaatctctgctagaaaatttgattaatca

SEQ ID NO: 3563 - DNA, 658 bp, Artificial; identical to SEQ ID NO: 2344
  Mutations within GlyA3B4 introduced by GmGlyA3B4_T02TALE nuclease

SEQ ID NO: 3564 - DNA, 669 bp, Artificial; identical to SEQ ID NO: 3110
  Mutations within GlyA3B4 introduced by GmGlyA3B4_T02TALE nuclease

SEQ ID NO: 3565 - DNA, 636 bp, Artificial; identical to SEQ ID NO: 1885
  Mutations within GlyA3B4 introduced by GmGlyA3B4_T02TALE nuclease

SEQ ID NO: 3566 - DNA, 426 bp, Artificial; identical to SEQ ID NO: 1684
  Mutations within GlyA3B4 introduced by GmGlyA3B4_T02TALE nuclease

SEQ ID NO: 3567 - DNA, 616 bp, Artificial
  Mutations within GlyA3B4 introduced by GmGlyA3B4_T02TALE nuclease
gttcatgtacggttgcagatataaacgaagcatagcttatgtatgaggtgtaacaaaattggaaacaatagccatgcaaggtgaagaatgtcaccaactcagaaacccttcttcattgacgtgtccctcactcactctcctctcttcactataaatcgccactcttcgtgttctccacttcaccaactccttcaaacttattaacactttccttagttcaatatggggaagcccttcttcactctctctctttcttccctttgcttgctactcttgtcgagtgcatacctccagcaagttcaacgagtgccaactcaacaacctcaacgcgttggaacccgaccaccgcgttgagtccgaaggtggtcttattgaaacatggaactctcaacaccctgagctgcaatgcgccggtgtcactgtttccaaacgcaccctcaaccgcaacggcctccacttgccatcttactcaccttatccccaaatgatcattgtcgttcaaggtgcgtaatattagtaagaagtatttatcagcttaacgtgataacaataatagtaatatgaaatatttattaaatttttataattaatctctgctagaaaatttgattaatca

SEQ ID NO: 3568 - DNA, 661 bp, Artificial
  Mutations within GlyA3B4 introduced by GmGlyA3B4_T02TALE nuclease
gttcatgtacggttgcagatataaacgaagcatagcttatgtatgaggtgtaacaaaattggaaacaatagccatgcaaggtgaagaatgtcaccaactcagaaacccttcttcattgacgtgtccctcactcactctcctctcttcactataaatcgccactcttcgtgttctccacttcaccaactccttcaaacttattaacactttccttagttcaatatggggaagcccttcttcactctctctctttcttccctttgcttgctactcttgtcgagtgctattacctccagcaagttcaacgagtgccaactcaacaacctcaacgcgttggaacccgaccaccgcgttgagtccgaaggtggtcttattgaaacatggaactctcaacaccctgagctgcaatgcgccggtgtcactgtttccaaacgcaccctcaaccgcaacggcctccacttgccatcttactcaccttatccccaaatgatcattgtcgttcaaggtgcgtaatattagtaagaagtatttatcagcttaacgtgataacaataatagtaatatgaaatatttattaaatttttataattaatctctgctagaaaatttgattaatcattttagtagaatttgttttctcaactaggtttttaaaacacca

SEQ ID NO: 3569 - DNA, 653 bp, Artificial
  Mutations within GlyA3B4 introduced by GmGlyA3B4_T02TALE nuclease
  misc_feature (551): n is a or c or t or g
gttcatgtacggttgcagatataaacgaagcatagcttatgtatgaggtgtaacaaaattggaaacaatagccatgcaaggtgaagaatgtcaccaactcagaaacccttcttcattgacgtgtccctcactcactctcctctcttcactataaatcgccactcttcgtgttctccacttcaccaactccttcaaacttattaacactttccttagttcaatatggggaagcccttcttcactctctctctttcttccctttgctttgctattacctccagcaagttcaacgagtgccaactcaacaacctcaacgcgttggaacccgaccaccgcgttgagtccgaaggtggtcttattgaaacatggaactctcaacacccctgagctgcaatgcgccggtgtcactgtttccaaacgcaccctcaaccgcaacggcctccacttgccatcttactcacccttatcccccaaatgatcattgtcgttcaaggtgcgtaatattagtaagaagtatttatcagcttaacgtgataacaataatagtaatntgaaatatttattaaattttttataattaatctctgctagaaaatttgattaatcatttttagtagaatttgttttttctcaactaggttttaaacaccaca

SEQ ID NO: 3570 - DNA, 635 bp, Artificial; identical to SEQ ID NO: 1775
  Mutations within GlyA3B4 introduced by GmGlyA3B4_T02TALE nuclease

SEQ ID NO: 3571 - DNA, 661 bp, Artificial; identical to SEQ ID NO: 1694
  Mutations within GlyA3B4 introduced by GmGlyA3B4_T02TALE nuclease

SEQ ID NO: 3572 - DNA, 603 bp, Artificial
  Mutations within GlyA3B4 introduced by GmGlyA3B4_T02TALE nuclease
gttcatgtacggttgcagatataaacgaagcatagcttatgtatgaggtgtaacaaaattggaaacaatagccatgcaaggtgaagaatgtcaccaactcagaaacccttcttcattgacgtgtccctcactcactctcctctcttcactataaatcgccactcttcgtgttctccacttcaccaactccttcaaacttattaacactttccttagttcaatatggggaagcccttcttcactctctctctttcttccctttgcttgctactcttgtcgagttacctccagcaagttcaacgagtgccaactcaacaacctcaacgcgttggaacccgaccaccgcgttgagtccgaaggtggtcttattgaaacatggaactctcaacaccctgagctgcaatgcgccggtgtcactgtttccaaacgcaccctcaaccgcaacggcctccacttgccatcttactcaccttatcccccaaatgatcattgtcgttcaaggtgcgtaatattagtaagaagtatttatcagctttaacgtgataacaataatagtaatatgaaatatttattaaatttttataattaatctctgctagaaaa

SEQ ID NO: 3573 - DNA, 666 bp, Artificial; identical to SEQ ID NO: 1758
  Mutations within GlyA3B4 introduced by GmGlyA3B4_T02TALE nuclease

SEQ ID NO: 3574 - DNA, 645 bp, Artificial
  Mutations within GlyA3B4 introduced by GmGlyA3B4_T02TALE nuclease
gttcatgtacggttgcagatataaacgaagcatagcttatgtatgaggtgtaacaaaattggaaacaatagccatgcaaggtgaagaatgtcaccaactcagaaacccttcttcattgacgtgtccctcactcactctcctctcttcactataaatcgccactcttcgtgttctccacttcaccaactccttcaaacttattaacactttccttagttcaatatggggaagcccttcttcactctctctctttcttccctttgcttgctactcttgtcgagtgcattattacctccagcaagttcaacgagtgccaactcaacaacctcaacgcgttggaacccgaccaccgcgttgagtccgaaggtggtcttattgaaacatggaactctcaacaccctgagctgcaatgcgccggtgtcactgtttccaaacgcaccctcaaccgcaacggcctccacttgccatcttactcaccttatccccaaatgatcattgtcgttcaaggtgcgtaatattagtaagaagtatttatcagcttaacgtgataacaataatagtaatatgaaaatatttattaaatttttataattaatctctgctagaaaatttgattaatcatttttagtagaatttgtttttctc

SEQ ID NO: 3575 - DNA, 660 bp, Artificial; identical to SEQ ID NO: 3006
  Mutations within GlyA3B4 introduced by GmGlyA3B4_T02TALE nuclease

SEQ ID NO: 3576 - DNA, 666 bp, Artificial
  Mutations within GlyA3B4 introduced by GmGlyA3B4_T02TALE nuclease
gttcatgtacggttgcagatataaacgaagcatagcttatgtatgaggtgtaacaaaattggaaacaatagccatgcaaggtgaagaatgtcaccaactcagaaacccttcttcattgacgtgtccctcactcactctcctctcttcactataaatcgccactcttcgtgttctccacttcaccaactccttcaaacttattaacactttccttagttcaatatggggaagcccttcttcactctctctctttcttccctttgcttgctactcttgtcgagtgcattattacctccagcaagttcaacgagtgccaactcaacaacctcaacgcgttggaacccgaccaccgcgttgagtccgaaggtggtcttattgaaacatggaactctcaacaccctgagctgcaatgcgccggtgtcactgtttccaaacgcaccctcaaccgcaacggcctccacttgccatcttactcaccttatccccaaatgatcattgtcgttcaaggtgcgtaatattagtaagaagtatttatcagcttaacgtgataacaataatagtaatatgaaatactttattaaatttttataaattaatctctgctagaaaatttgattaatcattttagtagaatttgtttttctcaactaggtttttaaaacacca

SEQ ID NO: 3577 - DNA, 666 bp, Artificial
  Mutations within GlyA3B4 introduced by GmGlyA3B4_T02TALE nuclease
gttcatgtacggttgcagatataaacgaagcatagcttatgtatgaggtgtaacaaaattggaaacaatagccatgcaaggtgaagaatgtcaccaactcagaaacccttcttcattgacgtgtccctcactcactctcctctcttcactataaatcgccactcttcgtgttctccacttcaccaactccttcaaacttattaacactttccttagttcaatatggggaagcccttcttcactctctctctttcttccctttgcttgctactcttgtcgagtgcatgcgattacctccagcaagttcaacgagtgccaactcaacaacctcaacgcgttggaacccgaccaccgcgttgagtccgaaggtggtcttattgaaacatggaactctcaacaccctgagctgcaatgcgccggtgtcactgtttccaaacgcaccctcaaccgcaacggcctccacttgccatcttactcaccttatccccaaatgatcattgtcgttcaaggtgcgtaatattagtaagaagtatttatcagcttaacgtgataacaataatagtaatatgaaatatttattaaatttttataattaatctctgctagaaaatttgattaatcatttttagtagaatttgtttttctcaactaggttttaaaacacca

SEQ ID NO: 3578 - DNA, 637 bp, Artificial; identical to SEQ ID NO: 2542
  Mutations within GlyA3B4 introduced by GmGlyA3B4_T02TALE nuclease

SEQ ID NO: 3579 - DNA, 663 bp, Artificial; identical to SEQ ID NO: 2045
  Mutations within GlyA3B4 introduced by GmGlyA3B4_T02TALE nuclease

SEQ ID NO: 3580 - DNA, 635 bp, Artificial
  Mutations within GlyA3B4 introduced by GmGlyA3B4_T02TALE nuclease
gttcatgtacggttgcagatataaacgaagcatagcttatgtatgaggtgtaacaaaattggaaacaatagccatgcaaggtgaagaatgtcaccaactcagaaacccttcttcattgacgtgtccctcactcactctcctctcttcactataaatcgccactcttcgtgttctccacttcaccaactccttcaaacttattaacactttccttagttcaatatggggaagcccttcttcactctctctctttcttccctttgcttgctactcttgtcgagtgcatattacctccagcaagttcaacgagtgccaactcaacaacctcaacgcgttggaacccgaccaccgcgttgagtccgaaggtggtcttattgaaacatggaactctcaacaccctgagctgcaatgcgccggtgtcactgtttccaaacgcaccctcaaccgcaacggcctccacttgccatcttactcaccttatccccaaatgatcattgtcgttcaaggtgcgtaatattagtaagaagtatttatcagcttaacgtgataacaataatagtaatatgaaatatttattaaatttttataattaatctctgctagaaaatttgattaatcatttttagtagaatttg

SEQ ID NO: 3581 - DNA, 652 bp, Artificial
  Mutations within GlyA3B4 introduced by GmGlyA3B4_T02TALE nuclease
gttcatgtacggttgcagatataaacgaagcatagcttatgtatgaggtgtaacaaaattggaaacaatagccatgcaaggtgaagaatgtcaccaactcagaaaccccttcttcattgacgtgtccctcactcactctcctctcttcactataaatcgccactcttcgtgttctccacttcaccaactccttcaaacttattaacactttccttagttcaatatggggaagcccttcttcactctctctctttcttccctttgcttgctactcttgtcgagtgcatttacctccagcaagttcaacgagtgccaactcaacaacctcaacgcgttggaacccgaccaccgcgttgagtccgaaggtggtcttattgaaacatggaactctcaacaccctgagctgcaatgcgccggtgtcactgtttccaaacgcaccctcaaccgcaacggcctccacttgccatcttactcaccttatccccaaatgatcattgtcgttcaaggtgcgtaatattagtaagaagtatttatcagcttaacgtgataacaataatagtaatatgaaatatttattaaatttttataattaatctctgctagaaaatttgattaatcattttagtagaatttgttttctcaactaggtttt

SEQ ID NO: 3582 - DNA, 666 bp, Artificial
  Mutations within GlyA3B4 introduced by GmGlyA3B4_T02TALE nuclease
  misc_feature (530): n is a or c or t or g
gttcatgtacggttgcagatataaacgaagcatagcttatgtatgaggtgtaacaaaattggaaacaatagccatgcaaggtgaagaatgtcaccaactcagaaacccttcttcattgacgtgtccctcactcactctcctctcttcactataaatcgccactcttcgtgttctccacttcaccaactccttcaaacttattaacactttccttagttcaatatggggaagcccttcttcactctctctctttcttccctttgcttgctactcttgtcgagtgcatgctattacctccagcaagttcaacgagtgccaactcaacaacctcaacgcgttggaacccgaccaccgcgttgagtccgaaggtggtcttattgaaacatggaactctcaacaccctgagctgcaatgcgccggtgtcactgtttccaaacgcaccctcaaccgcaacggcctccacttgccatcttactcaccttatccccaaatgatcattgtcgttcaaggtgcgtaatattagtaagagnatttatcagcttaacgtgataacaataatagtaatatgaaatatttattaaatttttataattaatctctgctagaaaatttgattaatcattttagtagaatttgtttttctcaactaagttttaaaacaccaca

SEQ ID NO: 3583 - DNA, 593 bp, Artificial
  Mutations within GlyA3B4 introduced by GmGlyA3B4_T02TALE nuclease
gttcatgtacggttgcagatataaacgaagcatagcttatgtatgaggtgtaacaaaattggaaacaatagccatgcaaggtgaagaatgtcaccaactcagaaacccttcttcattgacgtgtccctcactcactctcctctcttcactataaatcgccactcttcgtgttctccacttcaccaactccttcaaacttattaacactttccttagttcaatatggggaagcccttcttcactctctctctttcttccctttgcttgctactcttgtcgagtgcatggcaagttcaacgagtgccaactcaacaacctcaacgcgttggaacccgaccaccgcgttgagtccgaaggtggtcttattgaaacatggaactctcaacaccctgagctgcaatgcgccggtgtcactgtttccaaacgcacctcaaccgcaacggcctccacttgccatcttactcaccttatccccaaatgatcattgtcgttcaaggtgcgtaatattagtaagaagtatttatcagcttaacgtgataacaataatagtaatatgaaatatttattaaatttttataattaatctctgctag

SEQ ID NO: 3584 - DNA, 664 bp, Artificial
  Mutations within GlyA3B4 introduced by GmGlyA3B4_T02TALE nuclease
  misc_feature (531): n is a or c or t or g
gttcatgtacggttgcagatataaacgaagcatagcttatgtatgaggtgtaacaaaaattggaaacaatagccatgcaaggtgaagaatgtcaccaactcagaaacccttcttcattgacgtgtccctcactcactctcctctcttcactataaatcgccactcttcgtgttctccacttcaccaactccttcaaacttattaacactttccttagttcaatatggggaagcccttcttcactctctctctttcttccctttgcttgctactcttgtcgagtgcagctattacctccagcaagttcaacgagtgccaactcaacaacctcaacgcgttggaacccgaccaccgcgttgagtccgaaggtggtcttattgaaacatggaactctcaacaccctgagctgcaatgcgccggtgtcactgtttccaaacgcaccctcaaccgcaacggcctccacttgccatcttactcaccttatccccaaatgatcattgtcgttcaaggtgcgtaatattagtaagaagnatttatcagcttaacgtgataacaatatagtaatatgaaatatttattaaatttttataattaatctctgctagaaaatttgattaatcattttagtagaatttgtttttctcaactaggtttttaaacacca

SEQ ID NO: 3585 - DNA, 626 bp, Artificial
  Mutations within GlyA3B4 introduced by GmGlyA3B4_T02TALE nuclease
  misc_feature (42): n is a or c or t or g
gttcatgtacggttgcagatataaacgaagcatagcttatgnatgaggtgtaacaaaattggaaacaatagccatgcaaggtgaagaatgtcaccaactcagaaacccttcttcattgacgtgtccctcactcactctcctctcttcactataaatcgccactcttcgtgttctccacttcaccaactccttcaaacttattaacactttccttagttcaatatgggggaagcccttcttcactctctctctttcttccctttgcttgctactcttgtcgagtgcatgctattacctccagcaagttcaacgagtgccaactcaacaacctcaacgcgttggaacccgaccaccgcgttgagtccgaaggtggtcttattgaaacatggaactctcaacaccctgagctgcaatgcgccggtgtcactgtttccaaacgcaccctcaaccgcaacggcctccacttgccatcttactcaccttatcccccaaatgatcattgtcgttcaaggtgcgtaatattagtaagaagtatttatcagcttaacgtgataacaataatagtaatatgaaaatatttattaaaatttttataattaatctctgctagaaaatttgattaatca

SEQ ID NO: 3586 - DNA, 634 bp, Artificial; identical to SEQ ID NO: 1893
  Mutations within GlyA3B4 introduced by GmGlyA3B4_T02TALE nuclease

SEQ ID NO: 3587 - DNA, 579 bp, Artificial
  Mutations within GlyA3B4 introduced by GmGlyA3B4_T02TALE nuclease
gttcatgtacggttgcagatataaacgaagcatagcttatgtatgaggtgtaacaaaattggaaacaatagccatgcaaggtgaagaatgtcaccaactcagaaacccttcttcattgacgtgtccctcactcactctcctctcttcactataaatcgccactcttcgtgttctccacttcaccaactccttcaaacttattaacactttccttagttcaatatggggaagcccttcttcactctctctctttcttccctttgcttgctactcttgtcgagtgcaagttcaacgagtgccaactcaacaacctcaacgcgttggaacccgaccaccgcgttgagtccgaaggtggtcttattgaaacatggaactctcaacaccctgagctgcaatgcgccggtgtcactgtttccaaacgcaccctcaaccgcaacggcctccacttgccatcttactcaccttatccccaaatgatcattgtcgttcaaggtgcgtaaatattagtaagaagtatttatcagcttaacgtgataacaataatagtaatatgaaatatttattaaattttttataatt

SEQ ID NO: 3588 - DNA, 616 bp, Artificial; identical to SEQ ID NO: 3567
  Mutations within GlyA3B4 introduced by GmGlyA3B4_T02TALE nuclease

SEQ ID NO: 3589 - DNA, 663 bp, Artificial
  Mutations within GlyA3B4 introduced by GmGlyA3B4_T02TALE nuclease
gttcatgtacggttgcagatataaacgaagcatagcttatgtatgaggtgtaacaaaattggaaacaatagccatgcaaggtgaagaatgtcaccaactcagaaacccttcttcattgacgtgtccctcactcactctcctctcttcactataaatcgccactcttcgtgttctccacttcaccaactccttcaaacttattaacactttccttagttcaatatggggaagcccttcttcactctctctctttcttccctttgcttgctactcttgtcgagtgcagctattacctccagcaagttcaacgagtgccaactcaacaacctcaacgcgttggaacccgaccaccgcgttgagtccgaaggtggtcttattgaaacatggaactctcaacaccctgagctgcaatgcgccggtgtcactgtttccaaacgcaccctcaaccgcaacggcctccacttgccatcttactcaccttatccccaaatgatcattgtcgttcaaggtgcgtaatattagtaagagtatttatcagcttaacgtgataacaataatagtaatatgaaatatttattaaatttttataattaatctctgctagaaaatttgattaatcattttagtagaatttgttttctcaactaggttttaaacaccaca

SEQ ID NO: 3590 - DNA, 650 bp, Artificial
  Mutations within GlyA3B4 introduced by GmGlyA3B4_T02TALE nuclease
  misc_feature (600): n is a or c or t or g
gttcatgtacggttgcagatataaacgaagcatagcttatgtatgaggtgtaacaaaattggaaacaatagccatgcaaggtgaagaatgtcaccaactcagaaacccttcttcattgacgtgtccctcactcactctcctctcttcactataaatcgccactcttcgtgttctccacttcaccaactccttcaaacttattaacactttccttagttcaatatggggaagcccttcttcactctctctctttcttccctttgcttgctactcttgtcgagtgcatgctattacctccagcaagttcaacgagtgccaactcaacaacctcaacgcgttggaacccgaccaccgcgttgagtccgaaggtggtcttattgaaacatggaactctcaacaccctgagctgcaatgcgccggtgtcactgtttccaaacgcaccctcaaccgcaacggcctccacttgccatcttactcaccttatccccaaatgatcattgtcgttcaaggtgcgtaatattagtaagaagtatttatcagcttaacgtgataacaataatagtaatatgaaatatttattaaatttttataatttactcngctagaaaatttgattaatcattttagtagaatttgttttctcaactagg

SEQ ID NO: 3591 - DNA, 655 bp, Artificial
  Mutations within GlyA3B4 introduced by GmGlyA3B4_T02TALE nuclease
  misc_feature (532): n is a or c or t or g
gttcatgtacggttgcagatataaacgaagcatagcttatgtatgaggtgtaacaaaattggaaacaatagccatgcaaggtgaagaatgtcaccaactcagaaacccttcttcattgacgtgtccctcactcactctcctctcttcactataaatcgccactcttcgtgttctccacttcaccaactccttcaaacttattaacactttccttagttcaatatgggggaagcccttcttcactctctctctttcttccctttgcttgctactcttgtcgagtgcatgctattacctccagcaagttcaacgagtgccaactcaacaacctcaacgcgttggaacccgaccaccgcgttgagtccgaaggtggtcttattgaaacatggaactctcaacaccctgagctgcaatgcgccggtgtcactgtttccaaacgcaccctcaaccgcaacggcctccacttgccatcttactcaccttatccccaaatgatcattgtcgttcaaggtgcgtaatattagtaagaagnatttatcagcttaacgtgataacaatatagtaatatgaaatatttattaaatttttataattaatctctgctagaaaatttgattaatcattttagtagaatttgttttctcaactaggtttt

SEQ ID NO: 3592 - DNA, 696 bp, Artificial
  Mutations within GlyA3B4 introduced by GmGlyA3B4_T02TALE nuclease
gttcatgtacggttgcagatataaacgaagcatagcttatgtatgaggtgtaacaaaattggaaacaatagccatgcaaggtgaagaatgtcaccaactcagaaacccttcttcattgacgtgtccctcactcactctcctctcttcactataaatcgccactcttcgtgttctccacttcaccaactccttcaaacttattaacactttccttagttcaatatggggaagcccttcttcactctctctctttcttccctttgcttgctactcttgtcgagtgcatgcttgaccccggagcaggtggtggccatcgccagccacgatggcggcaagcaggcgctggagactattacctccagcaagttcaacgagtgccaactcaacaacctcaacgcgttggaacccgaccaccgcgttgagtccgaaggtggtcttattgaaacatggaactctcaacaccctgagctgcaatgcgccggtgtcactgtttccaaacgcaccctcaaccgcaacggcctccacttgccatcttactcacctttatccccaaatgatcattgtcgttcaaggtgcgtaatattagtaagaagtatttatcagcttaacgtgataacaataatagtaatatgaaatattttataaatttttttataattaatctctgctagaaaaatttgattaatcattttttag

SEQ ID NO: 3593 - DNA, 653 bp, Artificial
  Mutations within GlyA3B4 introduced by GmGlyA3B4_T02TALE nuclease
gttcatgtacggttgcagatataaacgaagcatagcttatgtatgaggtgtaacaaaattggaaacaatagccatgcaaggtgaagaatgtcaccaactcagaaacccttcttcattgacgtgtccctcactcactctcctctcttcactataaatcgccactcttcgtgttctccacttcaccaactccttcaaacttattaacactttccttagttcaatatggggaagcccttcttcactctctctctttcttccctttgcttgctactcttgtcgagtgcctgcaagttcaacgagtgccaactcaacaacctcaacgcgttggaacccgaccaccgcgttgagtccgaaggtggtcttattgaaacatggaactctcaacaccctgagctgcaatgcgccggtgtcactgtttccaaacgcaccctcaaccgcaacggcctccacttgccatcttactcaccttatccccaaatgatcattgtcgttcaaggtgcgtaatattagtaagaagtatttatcagcttaacgtgataacaataatagtaatatgaaatatttattaaattttttataattaatctctgctagaaaatttgattaatctttttagtagaattgttttttctcaactaggtttaaacaccaca

SEQ ID NO: 3594 - DNA, 665 bp, Artificial
  Mutations within GlyA3B4 introduced by GmGlyA3B4_T02TALE nuclease
gttcatgtacggttgcagatataaacgaagcatagcttatgtatgaggtgtaacaaaattggaaacaatagccatgcaaggtgaagaatgtcaccaactcagaaacccttcttcattgacgtgtccctcactcactctcctctcttcactataaatcgccactcttcgtgttctccacttcaccaactccttcaaacttattaacactttccttagttcaatatggggaagcccttcttcactctctctctttcttccctttgcttgctactcttgtcgagtgctttgctattacctccagcaagttcaacgagtgccaactcaacaacctcaacgcgttggaacccgaccaccgcgttgagtccgaaggtggtcttattgaaacatggaactctcaacaccctgagctgcaatgcgccggtgtcactgtttccaaacgcaccctcaaccgcaacggcctccacttgccatcttactcaccttatccccaaatgatcattgtcgttcaaggtgcgtaatattagtaagagtatttatcagcttaacgtgataacaataatagtaatatgaaatatttattaaatttttataattaatctctgctagaaaatttgattaatcattttagtagaatttgtttttctcaactaggttttaaaacacca

SEQ ID NO: 3595 - DNA, 601 bp, Artificial
  Mutations within GlyA3B4 introduced by GmGlyA3B4_T02TALE nuclease
gttcatgtacggttgcagatataaacgaagcatagcttatgtatgaggtgtaacaaaattggaaacaatagccatgcaaggtgaagaatgtcaccaactcagaaacccttcttcattgacgtgtccctcactcactctcctctcttcactataaatcgccactcttcgtgttctccacttcaccaactccttcaaacttattaacactttccttagttcaatatggggaagcccttcttcactccagcaagttcaacgagtgccaactcaacaacctcaacgcgttggaacccgaccaccgcgttgagtccgaaggtggtcttattgaaacatggaactctcaacaccctgagctgcaatgcgccggtgtcactgtttccaaacgcaccctcaaccgcaacggcctccacttgccatcttactcaccttatccccaaatgatcattgtcgttcaaggtgcgtaatattagtaagaagtatttatcagcttaacgtgataacaataatagtaatatgaaatatttattaaattttttataattaatctctgctagaaaatttgattaatcatttttagtagaatttgtttttctcaactagg

SEQ ID NO: 3596 - DNA, 593 bp, Artificial
  Mutations within GlyA3B4 introduced by GmGlyA3B4_T02TALE nuclease
gttcatgtacggttgcagatataaacgaagcatagcttatgtatgaggtgtaacaaaattggaaacaatagccatgcaaggtgaagaatgtcaccaactcagaaacccttcttcattgacgtgtccctcactcactctcctctcttcactataaatcgccactcttcgtgttctccacttcaccaactccttcaaacttattaacactttccttagttcaatatggggaagcccttcttcactctctctctttcttccctttgcttgctactcttgtcgagtagagtgagtgagaaagggggatggcaccaccaatattgctggcgatggccaccaatagttccatcacgttaagggattttgctattacctccagcaagttcaacgagtgccaactcaacaacctcaacgcgttggaacccgaccaccgcgttgagtccgaaaggtggtcttattgaaacatggaactctcaacaccctgagctgcaatgcgccggtgtcactgtttccaaacgcacctcaaccgcaacgcctccacttgccatcttactcaccttatccccaaatgatcattgtcgttcaaggtgcgtaat

SEQ ID NO: 3597 - DNA, 634 bp, Artificial
  Mutations within GlyA3B4 introduced by GmGlyA3B4_T02TALE nuclease
gttcatgtacggttgcagatataaacgaagcatagcttatgtatgaggtgtaacaaaattggaaacaatagccatgcaaggtgaagaatgtcaccaactcagaaacccttcttcattgacgtgtccctcactcactctcctctcttcactataaatcgccactcttcgtgttctccacttcaccaactccttcaaacttattaacactttccttagttcaatatggggaagcccttcttcactctctctctttcttccctttgcttgctactcttgtcgagtgctgctattacctccagcaagttcaacgagtgccaactcaacaacctcaacgcgttggaacccgaccaccgcgttgagtccgaaggtggtcttattgaaacatggaactctcaacaccctgagctgcaatgcgccggtgtcactgtttccaaacgcaccctcaaccgcaacggcctccacttgccatcttactcaccttatccccaaatgatcattgtcgttcaaggtgcgtaatattagtaagagtatttatcagcttaacgtgataacaatatagtaatatgaaatatttattaaatttttataattaatctctgctagaaaatttgattaatcattttagtagaatttg

SEQ ID NO: 3598 - DNA, 655 bp, Artificial
  Mutations within GlyA3B4 introduced by GmGlyA3B4_T02TALE nuclease
gttcatgtacggttgcagatataaacgaagcatagcttatgtatgaggtgtaacaaaattggaaacaatagccatgcaaggtgaagaatgtcaccaactcagaaacccttcttcattgacgtgtccctcactcactctcctctcttcactataaatcgccactcttcgtgttctccacttcaccaactccttcaaacttattaacactttccttagttcaatatggggaagcccttcttcactctctctctttcttccctttgcttgctactcttgtcgagtgcatctattacctccagcaagttcaacgagtgccaactcaacaacctcaacgcgttggaacccgaccaccgcgttgagtccgaaggtggtcttattgaaacatggaactctcaacaccctgagctgcaatgcgccggtgtcactgtttccaaacgcaccctcaaccgcaacggcctccacttgccatcttactcaccttatccccaaatgatcattgtcgttcaaggtgcgtaatattagtaagaagtatttatcagcttaacgtgataacaataatagtaatatgaaatatttattaaatttttataattaatctctgctagaaaatttgattaatcattttagtagaatttgttttctcaactaggttttt

SEQ ID NO: 3599 - DNA, 670 bp, Artificial
  Mutations within GlyA3B4 introduced by GmGlyA3B4_T02TALE nuclease
gttcatgtacggttgcagatataaacgaagcatagcttatgtatgaggtgtaacaaaattggaaacaatagccatgcaaggtgaagaatgtcaccaactcagaaacccttcttcattgacgtgtccctcactcactctcctctcttcactataaatcgccactcttcgtgttctccacttcaccaactccttcaaacttattaacactttccttagttcaatatgggggaagcccttcttcactctctctctttcttccctttgcttgctactcttgtcgagtgcatgctattacctccagcaagttcaacgagtgccaactcaacaacctcaacgcgttggaacccgaccaccgcgttgagtccgaaggtggtcttattgaaacatggaactctcaacaccctgagctgcaatgcgccggtgtcactgtttccaaacgcaccctcaaccgcaacggcctccacttgccatcttactcaccttatccccaaatgatcattgtcgttcaaggtgcgtaatattagtaagaagtatttatcagcttaacgtgataacaataatagtaatatgaaaatatttattaaatttttataattaatctctgctagaaaatttgattaatcattttagtagaatttgtttttctcaactaggtttttaaaacaccaca

SEQ ID NO: 3600 - DNA, 667 bp, Artificial
  Mutations within GlyA3B4 introduced by GmGlyA3B4_T02TALE nuclease
  misc_feature (532): n is a or c or t or g
gttcatgtacggttgcagatataaacgaagcatagcttatgtatgaggtgtaacaaaattggaaacaatagccatgcaaggtgaagaatgtcaccaactcagaaacccttcttcattgacgtgtccctcactcactctcctctcttcactataaatcgccactcttcgtgttctccacttcaccaactccttcaaacttattaacactttccttagttcaatatggggaagcccttcttcactctctctctttcttccctttgcttgctactcttgtcgagtgcattgctattacctccagcaagttcaacgagtgccaactcaacaacctcaacgcgttggaacccgaccaccgcgttgagtccgaaggtggtcttattgaaacatggaactctcaacaccctgagctgcaatgcgccggtgtcactgtttccaaacgcaccctcaaccgcaacggcctccacttgccatcttactcaccttatcccccaaatgatcattgtcgttcaaggtgcgtaatattagtaagagnatttatcagcttaacgtgatacaatatagtaatatgaaatatttattaaatttttataattaatctctgctagaaaatttgattaatcattttagtagaatttgtttttctcaactaggtttttaaaacaccaca

SEQ ID NO: 3601 - DNA, 619 bp, Artificial; identical to SEQ ID NO: 2998
  Mutations within GlyA3B4 introduced by GmGlyA3B4_T02TALE nuclease

SEQ ID NO: 3602 - DNA, 652 bp, Artificial
  Mutations within GlyA3B4 introduced by GmGlyA3B4_T02TALE nuclease
gttcatgtacggttgcagatataaacgaagcatagcttatgtatgaggtgtaacaaaattggaaacaatagccatgcaaggtgaagaatgtcaccaactcagaaacccttcttcattgacgtgtccctcactcactctcctctcttcactataaatcgccactcttcgtgttctccacttcaccaactccttcaaacttattaacactttccttagttcaatatggggaagcccttcttcactctctctctttcttccctttgcttgctactcttgtcgagtgcatttcaacgagtgccaactcaacaacctcaacgcgttggaacccgaccaccgcgttgagtccgaaggtggtcttattgaaacatggaactctcaacaccctgagctgcaatgcgccggtgtcactgtttccaaacgcaccctcaaccgcaacggcctccacttgccatcttactcaccttatccccaaatgatcattgtcgttcaaggtgcgtaatattagtaagaagtatttatcagcttaacgtgataacaataatagtaatatgaaatatttattaaattttttataattaatctctgctagaaaatttgattaatcatttttagtagaatttgttttttctcaactaggttttaaaacaccaca

SEQ ID NO: 3603 - DNA, 662 bp, Artificial
  Mutations within GlyA3B4 introduced by GmGlyA3B4_T02TALE nuclease
gttcatgtacggttgcagatataaacgaagcatagcttatgtatgaggtgtaacaaaattggaaacaatagccatgcaaggtgaagaatgtcaccaactcagaaacccttcttcattgacgtgtccctcactcactctcctctcttcactataaatcgccactcttcgtgttctccacttcaccaactccttcaaacttattaacactttccttagttcaatatggggaagcccttcttcactctctctctttcttccctttgcttgctactcttgtcgagtttgctattacctccagcaagttcaacgagtgccaactcaacaacctcaacgcgttggaacccgaccaccgcgttgagtccgaaggtggtcttattgaaacatggaactctcaacaccctgagctgcaatgcgccggtgtcactgtttccaaacgcaccctcaaccgcaacggcctccacttgccatcttactcaccttatccccaaatgatcattgtcgttcaaggtgcgtaatattagtaagaagtatttatcagcttaacgtgataacaatatagtaatatgaaatatttattaaatttttataattaatctctgctagaaaatttgattaatcattttagtagaatttgttttctcaactaggtttttaaaacacca

SEQ ID NO: 3604 - DNA, 658 bp, Artificial
  Mutations within GlyA3B4 introduced by GmGlyA3B4_T02TALE nuclease
gttcatgtacggttgcagatataaacgaagcatagcttatgtatgaggtgtaacaaaattggaaacaatagccatgcaaggtgaagaatgtcaccaactcagaaaccccttcttcattgacgtgtccctcactcactctcctctcttcactataaaatcgccactcttcgtgttctccacttcaccaactccttcaaacttattaacactttccttagttcaatatgggggaagcccttcttcactctctctctttcttccctttgcttgctactcttgtcgagtgcatttgctattacctccagcaagttcaacgagtgccaactcaacaacctcaacgcgttggaacccgaccaccgcgttgagtccgaaggtggtcttattgaaacatggaactctcaacaccctgagctgcaatgcgccggtgtcactgtttccaaacgcaccctcaaccgcaacggcctccacttgccatcttactcaccttatccccaaatgatcattgtcgttcaaggtgcgtaatattagtaagagtatttatcagcttaacgtgataacaatatagtaatatgaaatatttattaaatttttataattaatctctgctagaaaatttgattaatcattttagtagaatttgttttctcaactaggtttt

SEQ ID NO: 3605 - DNA, 633 bp, Artificial; identical to SEQ ID NO: 2030
  Mutations within GlyA3B4 introduced by GmGlyA3B4_T02TALE nuclease

SEQ ID NO: 3606 - DNA, 646 bp, Artificial
  Mutations within GlyA3B4 introduced by GmGlyA3B4_T02TALE nuclease
gttcatgtacggttgcagatataaacgaagcatagcttatgtatgaggtgtaacaaaattggaaacaatagccatgcaaggtgaagaatgtcaccaactcagaaacccttcttcattgacgtgtccctcactcactctcctctcttcactataaatcgccactcttcgtgttctccacttcaccaactccttcaaacttattaacactttccttagttcaatatggggaagcccttcttcactctctctctttcttccctttgcttgctactcttgtcgagtgcatgctattacctccagcaagttcaacgagtgccaactcaacaacctcaacgcgttggaacccgaccaccgcgttgagtccgaaggtggtcttattgaaacatggaactctcaacaccctgagctgcaatgcgccggtgtcactgtttccaaacgcaccctcaaccgcaacggcctccacttgccatcttactcaccttatccccaaatgatcattgtcgttcaaggtgcgtaatattagtaagagtatttatcagcttaacgtgataacaataatagtaatatgaaatatttattaaatttttataattaatctctgctagaaaatttgattaatcattttagtagaatttgttttctcaac

SEQ ID NO: 3607 - DNA, 521 bp, Artificial
  Mutations within GlyA3B4 introduced by GmGlyA3B4_T02TALE nuclease
gttcatgtacggttgcagatataaacgaagcatagcttatgtatgaggtgtaacaaaattggaaacaatagccatgcaaggtgaagaatgtcaccaactcagaaacccttcttcattgacgtgtccctcactcactctcctctcttcactataaatcgccactcttcgtgttctccacttcaccagcaagttcaacgagtgccaactcaacaacctcaacgcgttggaacccgaccaccgcgttgagtccgaaggtggtcttattgaaacatggaactctcaacaccctgagctgcaatgcgccggtgtcactgtttccaaacgcaccctcaaccgcaacggcctccacttgccatcttactcaccttatccccaaatgatcattgtcgttcaaggtgcgtaatattagtaagaagtatttatcagcttaacgtgataacaataatagtaatatgaaatatttattaaattttttataattaatctctgctagaaaatttgattaatcatttttagtagaa

SEQ ID NO: 3608 - DNA, 661 bp, Artificial
  Mutations within GlyA3B4 introduced by GmGlyA3B4_T02TALE nuclease
gttcatgtacggttgcagatataaacgaagcatagcttatgtatgaggtgtaacaaaattggaaacaatagccatgcaaggtgaagaatgtcaccaactcagaaacccttcttcattgacgtgtccctcactcactctcctctcttcactataaatcgccactcttcgtgttctccacttcaccaactccttcaaacttattaacactttccttagttcaatatggggaagcccttcttcactctctctctttcttccctttgcttgctactcttgtcgagtgctattacctccagcaagttcacgagtgccaactcaacaacctcaacgcgttgggaacccgaccaccgcgttgagtccgaaggtggtcttattgaaacatggaactctcaacaccctgagctgcaatgcgccggtgtcactgtttccaaacgcaccctcaaccgcaacggcctcccacttgccatcttactcaccttatccccaaatgatcttgtcgttcaaggtgcgtaatattagtaagaagtatttatcagcttaacgtgataacaataatagtaatatgaaatatttattaaatttttataattaatctctgctagaaaatttgattaatcattttagtagaatttgttttctcaactaggtttttaaaacacca

SEQ ID NO: 3609 - DNA, 663 bp, Artificial; identical to SEQ ID NO: 2045
  Mutations within GlyA3B4 introduced by GmGlyA3B4_T02TALE nuclease

SEQ ID NO: 3610 - DNA, 655 bp, Artificial
  Mutations within GlyA3B4 introduced by GmGlyA3B4_T02TALE nuclease
gttcatgtacggttgcagatataaacgaagcatagcttatgtatgaggtgtaacaaaattggaaacaatagccatgcaaggtgaagaatgtcaccaactcagaaaccccttcttcattgacgtgtccctcactcactctcctctcttcactataaatcgccactcttcgtgttctccacttcaccaactccttcaaacttattaacactttccttagttcaatatgggggaagcccttcttcactctctctctttcttccctttgcttgctactcttgtcgagtgcatgctattacctccagcaagttcaacgagtgccaactcaacaacctcaacgcgttggaacccgaccaccgcgttgagtccgaaggtggtcttattgaaacatggaactctcaacaccctgagctgcaatgcgccggtgtcactgtttccaaacgcaccctcaaccgcaacggcctccacttgccatcttactcaccttatccccaaatgatcattgtcgttcaaggtgcgtaatattagtaagagtatttatcagcttaacgtgataacaatatagtaatatgaaatatttattaaatttttataattaatctctgctagaaaatttgattaatcattttagtagaatttgttttctcaactaggtttt

SEQ ID NO: 3611 - DNA, 665 bp, Artificial
  Mutations within GlyA3B4 introduced by GmGlyA3B4_T02TALE nuclease
gttcatgtacggttgcagatataaacgaagcatagcttatgtatgaggtgtaacaaaattggaaacaatagccatgcaaggtgaagaatgtcaccaactcagaaaccccttcttcattgacgtgtccctcactcactctcctctcttcactataaatcgccactcttcgtgttctccacttcaccaactccttcaaacttattaacactttccttagttcaatatggggaagcccttcttcactctctctctttcttccctttgcttgctactcttgtcgagtgcatgcttttacctccagcaagttcaacgagtgccaactcaacaacctcaacgcgttggaacccgaccaccgcgttgagtccgaaggtggtcttattgaaacatggaactctcaacaccctgagctgcaatgcgccggtgtcactgtttccaaacgcaccctcaaccgcaacggcctccacttgccatcttactcaccttatccccaaatgatcattgtcgttcaaggtgcgtaatattagtaagaagtatttatcagcttaacgtgataacaataatagtaatatgaaatatttattaaatttttataattaatctctgctagaaaatttgattaatcattttagtagaatttgttttctcaactaggttttaaaacacca

SEQ ID NO: 3612 - DNA, 637 bp, Artificial; identical to SEQ ID NO: 2343
  Mutations within GlyA3B4 introduced by GmGlyA3B4_T02TALE nuclease

SEQ ID NO: 3613 - DNA, 666 bp, Artificial
  Mutations within GlyA3B4 introduced by GmGlyA3B4_T02TALE nuclease
gttcatgtacggttgcagatataaacgaagcatagcttatgtatgaggtgtaacaaaattggaaacaatagccatgcaaggtgaagaatgtcaccaactcagaaaccccttcttcattgacgtgtccctcactcactctcctctcttcactataaatcgccactcttcgtgttctccacttcaccaactccttcaaacttattaacactttccttagttcaatatgggggaagcccttcttcactctctctctttcttccctttgcttgctactcttgtcgagtgcatgctattacctccagcaagttcaacgagtgccaactcaacaacctcaacgcgttggaacccgaccaccgcgttgagtccgaaggtggtcttattgaaacatggaactctcaacaccctgagctgcaatgcgccggtgtcactgtttccaaacgcaccctcaaccgcaacggcctccacttgccatcttactcaccttatccccaaatgatcattgtcgttcaaggtgcgtaatattagtaagagtatttatcagcttaacgtgataacaatatagtaatatgaaatatttattaaatttttataattaatctctgctagaaaatttgattaatcattttagtagaatttgttttctcaactaggttttaaaacaccaca

SEQ ID NO: 3614 - DNA, 668 bp, Artificial
  Mutations within GlyA3B4 introduced by GmGlyA3B4_T02TALE nuclease
gttcatgtacggttgcagatataaacgaagcatagcttatgtatgaggtgtaacaaaattggaaacaatagccatgcaaggtgaagaatgtcaccaactcagaaacccttcttcattgacgtgtccctcactcactctcctctcttcactataaatcgccactcttcgtgttctccacttcaccaactccttcaaacttattaacactttccttagttcaatatggggaagcccttcttcactctctctctttcttccctttgcttgctactcttgtcgagtgcatttgctattacctccagcaagttcaacgagtgccaactcaacaacctcaacgcgttggaacccgaccaccgcgttgagtccgaaggtggtcttattgaaacatggaactctcaacaccctgagctgcaatgcgccggtgtcactgtttccaaacgcaccctcaaccgcaacggcctccacttgccatcttactcaccttatccccaaatgatcattgtcgttcaaggtgcgtaatattagtaagagtatttatcagcttaacgtgataacaataatagtaatatgaaatatttattaaatttttataattaatctctgctagaaaatttgattaatcattttagtagaatttgtttttctcaactaggttttaaaacaccaca

SEQ ID NO: 3615 - DNA, 631 bp, Artificial
  Mutations within GlyA3B4 introduced by GmGlyA3B4_T02TALE nuclease
gttcatgtacggttgcagatataaacgaagcatagcttatgtatgaggtgtaacaaaattggaaacaatagccatgcaaggtgaagaatgtcaccaactcagaaacccttcttcattgacgtgtccctcactcactctcctctcttcactataaatcgccactcttcgtgttctccacttcaccaactccttcaaacttattaacactttccttagttcaatatggggaagcccttcttcactctctctctttcttccctttgcttgctactcttgtcaacgagtgccaactcaacaacctcaacgcgttggaacccgaccaccgcgttgagtccgaaggtggtcttattgaaacatggaactctcaacacccctgagctgcaatgcgccggtgtcactgtttccaaacgcaccctcaaccgcaacggcctccacttgccatcttactcaccttatccccaaatgatcattgtcgttcaaggtgcgtaatattagtaagaagtatttatcagcttaacgtgataacaataatagtaatatgaaatatttattaaattttttataattaatctctgctagaaaatttgattaatcatttttagtagaatttgttttttctcaactaggtttt

SEQ ID NO: 3616 - DNA, 669 bp, Artificial
  Mutations within GlyA3B4 introduced by GmGlyA3B4_T02TALE nuclease
gttcatgtacggttgcagatataaacgaagcatagcttatgtatgaggtgtaacaaaattggaaacaatagccatgcaaggtgaagaatgtcaccaactcagaaaccccttcttcattgacgtgtccctcactcactctcctctcttcactataaatcgccactcttcgtgttctccacttcaccaactccttcaaacttattaacactttccttagttcaatatggggaagcccttcttcactctctctctttcttccctttgcttgctactcttgtcgagtgcattgctattacctccagcaagttcaacgagtgccaactcaacaacctcaacgcgttggaacccgaccaccgcgttgagtccgaaggtggtcttattgaaacatggaactctcaacaccctgagctgcaatgcgccggtgtcactgtttccaaacgcaccctcaaccgcaacggcctccacttgccatcttactcaccttatccccaaatgatcattgtcgttcaaggtgcgtaatattagtaagaagtatttatcagcttaacgtgataacaataatagtaatatgaaatatttattaaatttttataattaatctctgctagaaaatttgattaatcattttagtagaatttgttttctcaactaggtttttaaaacaccaca

SEQ ID NO: 3617 - DNA, 588 bp, Artificial
  Mutations within GlyA3B4 introduced by GmGlyA3B4_T02TALE nuclease
gttcatgtacggttgcagatataaacgaagcatagcttatgtatgaggtgtaacaaaattggaaacaatagccatgcaaggtgaagaatgtcaccaactcagaaacccttcttcattgacgtgtccctcactcactctcctctcttcactataaatcgccactcttcgtgttctccacttcaccaactccttcaaacttattaacactttccttagttcaatatggggaagcccttcttcaacgagtgccaactcaacaacctcaacgcgttggaacccgaccaccgcgttgagtccgaaggtggtcttattgaaacatggaactctcaacaccctgagctgcaatgcgccggtgtcactgtttccaaacgcaccctcaaccgcaacggcctccacttgccatcttactcacccttatcccccaaatgatcattgtcgttcaaggtgcgtaatattagtaagaagtatttatcagcttaacgtgataacaataaatagtaatatgaaatattttattaaattttttataattaatctctgctagaaaatttgattaatcatttttagtagaatttgtttttctcaatc

SEQ ID NO: 3618 - DNA, 653 bp, Artificial
  Mutations within GlyA3B4 introduced by GmGlyA3B4_T02TALE nuclease
  misc_feature (532): n is a or c or t or g
gttcatgtacggttgcagatataaacgaagcatagcttatgtatgaggtgtaacaaaattggaaacaatagccatgcaaggtgaagaatgtcaccaactcagaaacccttcttcattgacgtgtccctcactcactctcctctcttcactataaatcgccactcttcgtgttctccacttcaccaactccttcaaacttattaacactttccttagttcaatatggggaagcccttcttcactctctctctttcttccctttgcttgctactcttgtcgagtgcattgctattacctccagcaagttcaacgagtgccaactcaacaacctcaacgcgttggaacccgaccaccgcgttgagtccgaaggtggtcttattgaaacatggaactctcaacaccctgagctgcaatgcgccggtgtcactgtttccaaacgcaccctcaaccgcaacggcctccacttgccatcttactcaccttatccccaaatgatcattgtcgttcaaggtgcgtaatattagtaagaagnatttatcagcttaacgtgataacaataatagtaatatgaaatatttattaaatttttataattaatctctgctagaaaatttgattaatcattttagtagaatttgtttttctcaactagg

SEQ ID NO: 3619 - DNA, 666 bp, Artificial; identical to SEQ ID NO: 1812
  Mutations within GlyA3B4 introduced by GmGlyA3B4_T02TALE nuclease

SEQ ID NO: 3620 - DNA, 461 bp, Artificial
  Mutations within GlyA3B4 introduced by GmGlyA3B4_T02TALE nuclease
gttcatgtacggttgcagatataaacgaagcatagcttatgtatgaggtgtaacaaaattggaaacaatagccatgcaaggtgaagaatgtcaccaactcagaaacccttcttcattgacgtgtccctcactcactctcctctcttcactataaatcgccactcttcgtgttctccacttcaccaactccttcaaacttattaacactttccttagttcaatatggggaagcccttcttcactctccctcaaccgcaacggcctccacttgccatcttactcacccttatcccccaaatgatcattgtcgttcaaggtgcgtaatattagtaagaagtatttatcagcttaacgtgataacaataatagtaatatgaaatatttattaaattttttataattaatctctgctagaaaatttgattaatcatttttagtagaatttgtttttctcaactagg

SEQ ID NO: 3621 - DNA, 613 bp, Artificial
  Mutations within GlyA3B4 introduced by GmGlyA3B4_T02TALE nuclease
gttcatgtacggttgcagatataaacgaagcatagcttatgtatgaggtgtaacaaaattggaaacaatagccatgcaaggtgaagaatgtcaccaactcagaaaccccttcttcattgacgtgtccctcactcactctcctctcttcactataaatcgccactcttcgtgttctccacttcaccaactccttcaaacttattaacactttccttagttcaatatgggggaagcccttcttcactctctctctttcttccctttgcttgctactcttgtcgagttacctccagcaagttcaacgagtgccaactcaacaacctcaacgcgttggaacccgaccaccgcgttgagtccgaaggtggtcttattgaaacatggaactctcaacaccctgagctgcaatgcgccggtgtcactgtttccaaacgcaccctcaaccgcaacggcctccacttgccatctactcaccttatccccaaatgatcttgtcgttcaaggtgcgtaatattagtaagaagtatttatcagcttaacgtgataacaataatagtaatatgaaatatttattaaattttttataattaatctctgctagaaaatttgattaatc

SEQ ID NO: 3622 - DNA, 533 bp, Artificial
  Mutations within GlyA3B4 introduced by GmGlyA3B4_T02TALE nuclease
gttcatgtacggttgcagatataaacgaagcatagcttatgtatgaggtgtaacaaaattggaaacaatagccatgcaaggtgaagaatgtcaccaactcagaaacccttcttcattgacgtgtccctcactcactctcctctcttcactataaatcgccactcttcgtgttctattacctccagcaagttcaacgagtgccaactcaacaacctcaacgcgttggaacccgaccaccgcgttgagtccgaaggtggtcttattgaaacatggaactctcaacaccctgagctgcaatgcgccggtgtcactgtttccaaacgcaccctcaaccgcaacggcctccacttgccatcttactcaccttatccccaaatgatcattgtcgttcaaggtgcgtaatattagtaagaagtatttatcagcttaacgtgataacaataatagtaatatgaaatatttattaaattttttataattaatctctgctagaaaatttgattaatcatttttagtagaatttgttttttctc

SEQ ID NO: 3623 - DNA, 661 bp, Artificial; identical to SEQ ID NO: 1694
  Mutations within GlyA3B4 introduced by GmGlyA3B4_T02TALE nuclease

SEQ ID NO: 3624 - DNA, 605 bp, Artificial
  Mutations within GlyA3B4 introduced by GmGlyA3B4_T02TALE nuclease
  misc_feature (535): n is a or c or t or g
gttcatgtacggttgcagatataaacgaagcatagcttatgtatgaggtgtaacaaaattggaaacaatagccatgcaaggtgaagaatgtcaccaactcagaaaccccttcttcattgacgtgtccctcactcactctcctctcttcactataaatcgccactcttcgtgttctccacttcaccaactccttcaaacttattaacactttccttagttcaatatgggggaagcccttcttcactctctctctttcttccctttgcttgctactcttgtcgagtgcatttgctattacctccagcaagttcaacgagtgccaactcaacaacctcaacgcgttggaacccgaccaccgcgttgagtccgaaggtggtcttattgaaacatggaactctcaacaccctgagctgcaatgcgccggtgtcactgtttccaaacgcaccctcaaccgcaacggcctccacttgccatcttactcaccttatccccaaatgatcattgtcgttcaaggtgcgtaatattagtaagaagnatttatcagcttaacgtgataacaataatagtaatatgaaatatttattaaatttttataattaatcctc

SEQ ID NO: 3625 - DNA, 643 bp, Artificial
  Mutations within GlyA3B4 introduced by GmGlyA3B4_T02TALE nuclease
gttcatgtacggttgcagatataaacgaagcatagcttatgtatgaggtgtaacaaaattggaaacaatagccatgcaaggtgaagaatgtcaccaactcagaaaccccttcttcattgacgtgtccctcactcactctcctctcttcactataaatcgccactcttcgtgttctccacttcaccaactccttcaaacttattaacactttccttagttcaatatggggaagcccttcttcactctctctctttcttccctttgcttgctactcttgtcgagtctccagcaagttcaacgagtgccaactcaacaacctcaacgcgttggaacccgaccaccgcgttgagtccgaaggtggtcttattgaaacatggaactctcaacaccctgagctgcaatgcgccggtgtcactgtttccaaacgcaccctcaaccgcaacggcctccacttgccatcttactcaccttatcccccaaatgatcattgtcgttcaaggtgcgtaatattagtaagaagtatttatcagcttaacgtgataacaataatagtaatatgaaatatttattaaattttttataattaatctctgctagaaaatttgattaatctttttagtagaattgttttttctcaactagg

SEQ ID NO: 3626 - DNA, 657 bp, Artificial
  Mutations within GlyA3B4 introduced by GmGlyA3B4_T02TALE nuclease
gttcatgtacggttgcagatataaacgaagcatagcttatgtatgaggtgtaacaaaattggaaacaatagccatgcaaggtgaagaatgtcaccaactcagaaacccttcttcattgacgtgtcccctcactcactctcctctcttcactataaatcgccactcttcgtgttctccacttcaccaactccttcaaacttattaacactttccttagttcaatatgggggaagcccttcttcactctctctctttcttccctttgcttgctactcttgtcgagtgcattattacctccagcaagttcaacgagtgccaactcacaacctcaacgcgttggaacccgaccaccgcgttgagtccgaaggtggtcttattgaaacatggaactctcaacaccctgagctgcaatgcgccggtgtcactgtttccaaacgcaccctcaaccgcaacggcctccacttgccatcttactcaccttatccccaaatgatcattgtcgttcaaggtgcgtaatattagtaagaagtatttatcagcttaacgtgatacaatatagtaatatgaaatatttattaaatttttataattaatctctgctagaaaatttgattaatcattttagtagaatttgttttctcaactaggtttttaaaa

SEQ ID NO: 3627 - DNA, 674 bp, Artificial
  Mutations within GlyA3B4 introduced by GmGlyA3B4_T02TALE nuclease
gttcatgtacggttgcagatataaacgaagcatagcttatgtatgaggtgtaacaaaattggaaacaatagccatgcaaggtgaagaatgtcaccaactcagaaacccttcttcattgacgtgtccctcactcactctcctctcttcactataaatcgccactcttcgtgttctccacttcaccaactccttcaaacttattaacactttccttagttcaatatggggaagcccttcttcactctctctctttcttccctttgcttgctactcttgtcgagtgcatgattgcaaaacgtggcggcgtgaccgcagtggaggcagtgcatgcatggcgcaatgcactgacgggtgccccgcttattacctccagcaagttcaacgagtgccaactcaacaacctcaacgcgttggaacccgaccaccgcgttgagtccgaaggtggtcttattgaaacatggaactctcaacaccctgagctgcaatgcgccggtgtcactgtttccaaacgcacctcaaccgcaacggcctccacttgccatctttactcaccttatccccaaatgatcattgtcgttcaaggtgcgtaatattagtaagaagtatttatcagctaacgtgataacaataatagtaatatgaaaatatttattaaattttttataattaatctc

SEQ ID NO: 3628 - DNA, 392 bp, Artificial
  Mutations within GlyA3B4 introduced by GmGlyA3B4_T02TALE nuclease
gttcatgtacggttgcagatataaacgaagcatagcttatgtatgaggtgtaacaaaattggaaacaatagccatgcaaggtgaagaatgtcaccaactcagaaacccttcttcattgacgtgtccctcactcactctcctctcttcactataaatcgccactcttcgtgttctccacttcaccaactccttcaaacttattaacactttccttagttcaatatggggaagcccttcttcactctctctctttcttccctttgcttgctactcacgcgttgaggttgtttgagttggcactcgttgaacttgctggaggtaacaataatagtaatatgaaatatttattaaattttttataattaatctctgctagaaaatttgattaatca

SEQ ID NO: 3629 - DNA, 589 bp, Artificial
  Mutations within GlyA3B4 introduced by GmGlyA3B4_T02TALE nuclease
  misc_feature (478): n is a or c or t or g
gttcatgtacggttgcagatataaacgaagcatagcttatgtatgaggtgtaacaaaattggaaacaatagccatgcaaggtgaagaatgtcaccaactcagaaacccttcttcattgacgtgtccctcactcactctcctctcttcactataaatcgccactcttcgtgttctccacttcaccaactccttcaaacttattaacactttccttagttcaatatggggaagcccttctccagcaagttcaacgagtgccaactcaacaacctcaacgcgttggaacccgaccaccgcgttgagtccgaaggtggtcttattgaaacatggaactctcaacaccctgagctgcaatgcgccggtgtcactgtttccaaacgcaccctcaaccgcaacggcctccacttgccatcttactcaccttatccccaaatgatcattgtcgttcaaggtgcgtaatattagtaagaagtatttntcagcttaacgtgataacaataatagtaatatgaaatatttattaaattttttataattaatctctgctagaaaatttgattaatcatttttagtagaatttgtttttctc

SEQ ID NO: 3630 - DNA, 647 bp, Artificial
  Mutations within GlyA3B4 introduced by GmGlyA3B4_T02TALE nuclease
gttcatgtacggttgcagatataaacgaagcaatagcttatgtatgaggtgtaacaaaattggaaacaatagccatgcaaggtgaagaatgtcaccaactcagaaacccttcttcattgacgtgtccctcactcactctcctctcttcactataaatcgccactcttcgtgttctccacttcaccaactccttcaaacttattaacactttccttagttcaatatggggaagcccttcttcactctctctctttcttccctttgcttgctactcttgtcgagtgcatacctccagcaagttcaacgagtgccaactcaacaactcaacgcgttggaacccgaccaccgcgttgagtccgaaggtggtcttattgaaacatggaactctcaacaccctgagctgcaatgcgccggtgtcactgtttccaaacgcaccctcaaccgcaacggcctccacttgccatcttactcacctttatccccaaatgatcattgtcgttcaaggtgcgtaatattagtaagaagtatttatcagcttaacgtgataacaataatagtaatatgaaatatttattaaatttttataattaatctctgctagaaaatttgattaatcattttagtagaatttgtttttctcaactagg

SEQ ID NO: 3631 - DNA, 594 bp, Artificial
  Mutations within GlyA3B4 introduced by GmGlyA3B4_T02TALE nuclease
gttcatgtacggttgcagatataaacgaagcatagcttatgtatgaggtgtaacaaaattggaaacaatagccatgcaaggtgaagaatgtcaccaactcagaaaccccttcttcattgacgtgtcccctcactcactctcctctcttcactataaatcgccactcttcgtgttctccacttcaccaactccttcaaacttattaacactttccttagttcaatatggggaagcccttcttcactctctctctttcttccctttgcttgctactcttgtcgagtgcataagttcaacgagtgccaactcaacaacctcaacgcgttggaaccccgaccaccgcgttgagtccgaaggtggtcttattgaaacatggaactctcaacaccctgagctgcaatgcgccggtgtcactgtttccaaacgcaccctcaaccgcaacggcctccacttgccatcttactcaccttatccccaaatgatcattgtcgttcaaggtgcgtaatattagtaagaagtatttatcagcttaacgtgataacaataatagtaatatgaaatatttattaaatttttataattaatctctgctag

SEQ ID NO: 3632 - DNA, 637 bp, Artificial
  Mutations within GlyA3B4 introduced by GmGlyA3B4_T02TALE nuclease
gttcatgtacggttgcagatataaacgaagcatagcttatgtatgaggtgtaacaaaattggaaacaatagccatgcaaggtgaagaatgtcaccaactcagaaacccttcttcattgacgtgtccctcactcactctcctctcttcactataaatcgccactcttcgtgttctccacttcaccaactccttcaaacttattaacactttccttagttcaatatggggaagcccttcttcactctctctctttcttccctttgctattacctccagcaagttcaacgagtgccaactcaacaacctcaacgcgttggaacccgaccaccgcgttgagtccgaaggtggtcttattgaaacatggaactctcaacacccctgagctgcaatgcgccggtgtcactgtttccaaacgcaccctcaaccgcaacggcctccacttgccatcttactcaccttatccccaaatgatcattgtcgttcaaggtgcgtaatattagtaagaagtatttatcagcttaacgtgataacaataatagtaatatgaaatatttattaaattttttataattaattctctgctagaaaatttgattaatcatttttagtagaatttgttttttctcaactaggtttt

SEQ ID NO: 3633 - DNA, 527 bp, Artificial
  Mutations within GlyA3B4 introduced by GmGlyA3B4_T02TALE nuclease
gttcatgtacggttgcagatataaacgaagcatagcttatgtatgaggtgtaacaaaattggaaacaatagccatgcaaggtgaagaatgtcaccaactcagaaacccttcttcattgacgtgtccctcactcactctcctctcttcactataaatcgccactcttcgtgttctccacttcaccaactccttcaaacttattaacactttccagcaagttcaacgagtgccaactcaacaacctcaacgcgttggaacccgaccaccgcgttgagtccgaaggtggtcttattgaaacatggaactctcaacaccctgagctgcaatgcgccggtgtcactgtttccaaacgcaccctcaaccgcaacggcctccacttgccatcttactcaccttatccccaaaatgatcattgtcgttcaaggtgcgtaatattagtaagaagtatttatcagcttaacgtgataacaataaatagtaatatgaaatatttattaaattttttataattaatctctgctagaaaa

SEQ ID NO: 3634 - DNA, 651 bp, Artificial
  Mutations within GlyA3B4 introduced by GmGlyA3B4_T02TALE nuclease
gttcatgtacggttgcagatataaacgaagcatagcttatgtatgaggtgtaacaaaattggaaacaatagccatgcaaggtgaagaatgtcaccaactcagaaacccttcttcattgacgtgtccctcactcactctcctctcttcactataaatcgccactcttcgtgttctccacttcaccaactccttcaaacttattaacactttccttagttcaatatggggaagcccttcttcactctctctctttcttccctttgcttgctactcttgtcgagtgcactattacctccagcaagttcaacgagtgccaactcaacaacctcaacgcgttggaacccgaccaccgcgttgagtccgaaggtggtcttattgaaacatggaactctcaacaccctgagctgcaatgcgccggtgtcactgtttccaaacgcacccctcaaccgcaacggcctccacttgccatcttactcaccttatcccccaaatgatcattgtcgttcaaggtgcgtaatattagtaagaagtatttatcagcttaacgtgataacaataatagtaatatgaaatatttattaaatttttataattaatctctgctagaaaatttgattaatcattttagtagaatttgttttctcaactagg

SEQ ID NO: 3635 - DNA, 668 bp, Artificial
  Mutations within GlyA3B4 introduced by GmGlyA3B4_T02TALE nuclease
gttcatgtacggttgcagatataaacgaagcatagcttatgtatgaggtgtaacaaaattggaaacaatagccatgcaaggtgaagaatgtcaccaactcagaaacccttcttcattgacgtgtccctcactcactctcctctcttcactataaatcgccactcttcgtgttctccacttcaccaactccttcaaacttattaacactttccttagttcaatatggggaagcccttcttcactctctctctttcttccctttgcttgctactcttgtcgagtgaacgccggatcagggcgagataactgggcaacaatgctctccagcgccggcctgccgccgccattgctggcgatggccaccacctgctgaggggtcaagccgtgggcctggcacagcactccagcaagttcaacgagtgccaactcaacaacctcaacgcgttgaacccgaccaccgcgttgagtccgaaggtggtcttattgaaacatggaactctcaacaccctgagctgcaatgcgccggtgtcactgttttccaaacgcaccctcaaccgcaacggcctccacttgccatcttactcaccttatccccaaatgatcattgtcgttcaaggtgcgtaatattagtaagaagtatttcatcagcttaacgtgataacaataat

SEQ ID NO: 3636 - DNA, 603 bp, Artificial
  Mutations within GlyA3B4 introduced by GmGlyA3B4_T02TALE nuclease
gttcatgtacggttgcagatataaacgaagcatagcttatgtatgaggtgtaacaaaattggaaacaatagccatgcaaggtgaagaatgtcaccaactcagaaaccccttcttcattgacgtgtccctcactcactctcctctcttcactataaatcgccactcttcgtgttctccacttcaccaactccttcaaacttattaacactttccttagttcaatatggggaagcccttcttcactctctctctttcttccctttgcttgctactcttgtcgagtgcatgcgttggaacccgaccaccgcgttgagtccgaaggtggtcttattgaaacatggaactctcaacaccctgagctgcaatgcgccggtgtcactgtttccaaacgcaccctcaaccgcaacggcctccacttgccatcttactcaccttatccccaaatgatcattgtcgttcaaggtgcgtaatattagtaagaagtatttatcagcttaacgtgataacaataatagtaatatgaaatatttattaatttttataattaatctctgctagaaaatttgattaatcatttttagtagaatttgtttttctcaacta

SEQ ID NO: 3637 - DNA, 612 bp, Artificial
  Mutations within GlyA3B4 introduced by GmGlyA3B4_T02TALE nuclease
gttcatgtacggttgcagatataaacgaagcatagcttatgtatgaggtgtaacaaaattggaaacaatagccatgcaaggtgaagaatgtcaccaactcagaaacccttcttcattgacgtgtccctcactcactctcctctcttcactataaatcgccactcttcgtgttctccacttcaccaactccttcaaacttattaacactttccttagttcaatatggggaagcccttcttcactctctctctttcgttcctccagcaagttcaacgagtgccaactcaacaacctcaacgcgtgaccgaccaccgcgttgagtccgaaggtggtcttattgaaacatggaactctcaacaccctgagctgcaatgcgccggtgtcactgtttccaaacgcaccctcaaccgcaacggcctccacttgccatcttactcaccttatccccaaatgatcattgtcgttcaaggtgcgtaatattagtaagaagtatttatcagcttaacgtgataacaataatagtaatatgaaatatttattaattttttataattaatctctgctagaaatttgattaatcatttttagtagaatttgtttttctcaactagg

SEQ ID NO: 3638 - DNA, 795 bp, Artificial
  Mutations within GlyA3B4 introduced by GmGlyA3B4_T02TALE nuclease
gttcatgtacggttgcagatataaacgaagcatagcttatgtatgaggtgtaacaaaattggaaacaatagccatgcaaggtgaagaatgtcaccaactcagaaacccttcttcattgacgtgtccctcactcactctcctctcttcactataaatcgccactcttcgtgttctccacttcaccaactccttcaaacttattaacactttccttagttcaatatggggaagcccttcttcactctctctctttcttccctttgcttgctactcttgtcgagtgcatgccggtgctgtgccaggccccacggcttgaccccccagcaggtggtggccatcgccagcaatggcggtggcaagcaggcgctggagacggtccagcggctgttgccggtgctgtgccaggcccacggcttgaccccttacctccagcaagttcaacgagtgccaactcaacaacctcaacgcgttggaacccgaccaccgcgttgagtccgaaggtggtcttattgaaacatgggaactctcaacaccctgagctgcaatgcgccggtgtcactgtttccaaacgcaccctcaaccgcaacggcctccacttgccatcttactcaccttatccccaaatgatcattgtcgttcaaggtgcgtaatattagtaagaagtatttatcaagcttaacgtgataacaataatagtaatatgaaaatatttattaaaatttttttataaattaatctctgctagaaaatttgattaatcattttagtagaatttgtttttctcaactaggtttt

SEQ ID NO: 3639 - DNA, 524 bp, Artificial; identical to SEQ ID NO: 3137
  Mutations within GlyA3B4 introduced by GmGlyA3B4_T02TALE nuclease

SEQ ID NO: 3640 - DNA, 457 bp, Artificial
  Mutations within GlyA3B4 introduced by GmGlyA3B4_T02TALE nuclease
gttcatgtacggttgcagatataaacgaagcatagcttatgtatgaggtgtaacaaaattggaaacaatagccatgcaaggtgaagaatgtcaccaactcagaaacccttcttcattgacgtgtccctcactcactctcctctcttcactataaatcgccactcttcgtgttctccacttcaccaactccttcaaacttattaacactttccttagttcaatatggggaagcccttcttcactctctctctttcttccctttgcttgctattacctccagcaagttcaacgagtgccaactcaacaacctcaacgcgttggaacccgaccaccgcgttgagtccgaaggtggtcttattgaaacatggaactctcaacacccctgagctgcaattgcgccggtgtcactgttttccaaacgcaccctcaaccgcaacggcctccacttgccatctta

SEQ ID NO: 3641 - DNA, 668 bp, Artificial; identical to SEQ ID NO: 2325
  Mutations within GlyA3B4 introduced by GmGlyA3B4_T02TALE nuclease

SEQ ID NO: 3642 - DNA, 639 bp, Artificial
  Mutations within GlyA3B4 introduced by GmGlyA3B4_T02TALE nuclease
gttcatgtacggttgcagatataaacgaagcatagcttatgtatgaggtgtaacaaaattggaaacaatagccatgcaaggtgaagaatgtcaccaactcagaaacccttcttcattgacgtgtccctcactcactctcctctcttcactataaatcgccactcttcgtgttctccacttcaccaactccttcaaacttattaacactttccttagttcaatatggggaagcccttcttcactctctctctttcttccctttgcttgctactcttgtcgagtgcatttgacctttcctcagcaagttcaacgagtgccaactcaacaacctcaacgcgttggaacccgaccaccgcgttgagtccgaaggtggtcttattgaaacatggaactctcaacaccctgagctgcaatgcgccggtgtcactgtttccaaacgcaccctcaaccgcaacggcctccacttgccatcttactcaccttatcccccaaatgatcattgtcgttcaaggtgcgtaatattagtaagaagtatttatcagcttaacgtgataacaataatagtaatatgaaatatttattaaatttttataattaatctctgctagaaaatttgattaatcattttagtagaatttg

SEQ ID NO: 3643 - DNA, 606 bp, Artificial
  Mutations within GlyA3B4 introduced by GmGlyA3B4_T02TALE nuclease
gttcatgtacggttgcagatataaacgaagcatagcttatgtatgaggtgtaacaaaattggaaacaatagccatgcaaggtgaagaatgtcaccaactcagaaacccttcttcattgacgtgtccctcactcactctcctctcttcactataaatcgccactcttcgtgttctccacttcaccaactccttcaaacttattaacactttccttagttcaatatggggaagcccttcttcactctctctctttcttccctttgcttgctactcttgtcgagtgcatggagacggtccagcggctgttgccggtgctgtgccaggcccacggcttgaccccggagcaggtggtggccatcgccagccacgataccctgagctgcaatgcgccggtgtcactgtttccaaacgcaccctcaaccgcaacggcctccacttgccatcttactcaccttatccccaaatgatcattgtcgttcaaggtgcgtaatattagtaagaagtatttatcagcttaacgtgataacaataatagtaatatgaaatatttattaaattttttataattaatctctgctagaaaatttgattaatcatttttagtag

SEQ ID NO: 3644 - DNA, 661 bp, Artificial
  Mutations within GlyA3B4 introduced by GmGlyA3B4_T02TALE nuclease
gttcatgtacggttgcagatataaacgaagcatagcttatgtatgaggtgtaacaaaattggaaacaatagccatgcaaggtgaagaatgtcaccaactcagaaacccttcttcattgacgtgtccctcactcactctcctctcttcactataaatcgccactcttcgtgttctccacttcaccaactccttcaaacttattaacactttccttagttcaatatggggaagcccttcttcactctctctctttcttccctttgcttgctactcttgtcgagtgcatattacctccagcaagttcaacgagtgccaactcaacaacctcaacgcgttggaacccgaccaccgcgttgagtccgaaggtggtcttattgaaacatggaactctcaacaccctgagctgcaatgcgccggtgtcactgtttccaaacgcaccctcaaccgcaacggcctccacttgccatcttactcaccttatccccaaatgatcattgtcgttcaaggtgcgtaatattagtaagaagtatttatcagcttaacgtgataacaatatagtaatatgaaatatttattaaatttttataattaatctctgctagaaaatttgattaatcattttagtagaatttgttttctcaactaggtttttaaaacacca

SEQ ID NO: 3645 - DNA, 636 bp, Artificial; identical to SEQ ID NO: 1845
  Mutations within GlyA3B4 introduced by GmGlyA3B4_T02TALE nuclease

SEQ ID NO: 3646 - DNA, 668 bp, Artificial
  Mutations within GlyA3B4 introduced by GmGlyA3B4_T02TALE nuclease
  misc_feature (531): n is a or c or t or g
gttcatgtacggttgcagatataaacgaagcatagcttatgtatgaggtgtaacaaaattggaaacaatagccatgcaaggtgaagaatgtcaccaactcagaaacccttcttcattgacgtgtccctcactcactctcctctcttcactataaatcgccactcttcgtgttctccacttcaccaactccttcaaacttattaacactttccttagttcaatatgggggaagcccttcttcactctctctctttcttccctttgcttgctactcttgtcgagtgcatgctattacctccagcaagttcaacgagtgccaactcaacaacctcaacgcgttggaacccgaccaccgcgttgagtccgaaggtggtcttattgaaacatggaactctcaacaccctgagctgcaatgcgccggtgtcactgtttccaaacgcaccctcaaccgcaacggcctccacttgccatcttactcaccttatccccaaatgatcattgtcgttcaaggtgcgtaatattagtaagagnatttatcagcttaacgtgataacaataatagtaatatgaaatatttattaaatttttataattaatctctgctagaaaatttgattaatcattttagtagaatttgtttttctcaactaggtttttaaaacaccaca

SEQ ID NO: 3647 - DNA, 548 bp, Artificial
  Mutations within GlyA3B4 introduced by GmGlyA3B4_T02TALE nuclease
gttcatgtacggttgcagatataaacgaagcatagcttatgtatgaggtgtaacaaaattggaaacaatagccatgcaaggtgaagaatgtcaccaactcagaaacccttcttcattgacgtgtccctcactcactctcctctcttcactataaatcgccactcttcgtgttctccacttcaccaactccttcagcaagttcaacgagtgccaactcaacaacctcaacgcgttggaacccgaccaccgcgttgagtccgaaggtggtcttattgaaacatggaactctcaacaccctgagctgcaatgcgccggtgtcactgttttccaaacgcaccctcaaccgcaacggcctccacttgccatcttactcaccttatcccccaaatgatcattgtcgttcaaggtgcgtaatattagtaagaagtatttatcagcttaacgtgataacaataatagtaatatgaaatatttattaaattttttataattaatctctgctagaaaatttgattaatcatttttagtagaatttgtttttctcaact

SEQ ID NO: 3648 - DNA, 665 bp, Artificial
  Mutations within GlyA3B4 introduced by GmGlyA3B4_T02TALE nuclease
gttcatgtacggttgcagatataaacgaagcatagcttatgtatgaggtgtaacaaaattggaaacaatagccatgcaaggtgaagaatgtcaccaactcagaaacccttcttcattgacgtgtccctcactcactctcctctcttcactataaatcgccactcttcgtgttctccacttcaccaactccttcaaacttattaacactttccttagttcaatatggggaagcccttcttcactctctctctttcttccctttgcttgctactcttgtcgagtgcattgctattacctccagcaagttcaacgagtgccaactcaacaacctcaacgcgttggaacccgaccaccgcgttgagtccgaaggtggtcttattgaaacatggaactctcaacaccctgagctgcaatgcgccggtgtcactgtttccaaacgcaccctcaaccgcaacggcctccacttgccatcttactcaccttatccccaaatgatcattgtcgttcaaggtgcgtaatattagtaagagtatttatcagcttaacgtgataacaatatagtaatatgaaatatttattaaatttttataattaatctctgctagaaaatttgattaatcattttagtagaatttgtttttctcaactaggtttttaaaacacca

SEQ ID NO: 3649 - DNA, 642 bp, Artificial
  Mutations within GlyA3B4 introduced by GmGlyA3B4_T02TALE nuclease
gttcatgtacggttgcagatataaacgaagcatagcttatgtatgaggtgtaacaaaattggaaacaatagccatgcaaggtgaagaatgtcaccaactcagaaacccttcttcattgacgtgtccctcactcactctcctctcttcactataaatcgccactcttcgtgttctccacttcaccaactccttcaaacttattaacactttccttagttcaatatggggaagcccttcttcactctctctctttcttcccttcttcacctccagcaagttcaacgagtgccaactcaacaacctcaacgcgttggaacccgaccaccgcgttgagtccgaaggtggtcttattgaaacatggaactctcaacaccctgagctgcaatgcgccggtgtcactgtttccaaacgcaccctcaaccgcaacggcctccacttgccatcttactcaccttatccccaaatgatcattgtcgttcaaggtgcgtaatattagtaagaagtatttatcagcttaacgtgataacaataatagtaatatgaaatatttattaaattttttataattaatctctgctagaaaatttgattaatcatttttagtagaatttgttttttctcaactaggttttaaacaccaca

SEQ ID NO: 3650 - DNA, 594 bp, Artificial
  Mutations within GlyA3B4 introduced by GmGlyA3B4_T02TALE nuclease
gttcatgtacggttgcagatataaacgaagcatagcttatgtatgaggtgtaacaaaattggaaacaatagccatgcaaggtgaagaatgtcaccaactcagaaacccttcttcattgacgtgtccctcactcactctcctctcttcactataaatcgccactcttcgtgttctccacttcaccaactccttcaaacttattaacactttccttagttcaatatggggaagcccttcttcagcaagttcaacgagtgccaactcaacaacctcaacgcgttggaacccgaccaccgcgttgagtccgaaggtggtcttattgaaacatggaactctcaacaccctgagctgcaatgcgccggtgtcactgtttccaaacgcaccctcaaccgcaacggcctccacttgccatcttactcaccttatccccaaatgatcattgtcgttcaaggtgcgtaatattagtaagaagtatttatcagcttaacgtgataacaataatagtaatatgaaatatttattaaatttttttataattaatctctgctagaaaatttgatttaatcatttttagtagaatttgtttttctcaac

SEQ ID NO: 3651 - DNA, 654 bp, Artificial
  Mutations within GlyA3B4 introduced by GmGlyA3B4_T02TALE nuclease
gttcatgtacggttgcagatataaacgaagcatagcttatgtatgaggtgtaacaaaattggaaacaatagccatgcaaggtgaagaatgtcaccaactcagaaacccttcttcattgacgtgtccctcactcactctcctctcttcactataaatcgccactcttcgtgttctccacttcaccaactccttcaaacttattaacactttccttagttcaatatggggaagcccttcttcactctctctctttcttccctttgcttgctactcttgttacctccagcaagttcaacgagtgccaactcaacaacctcaacgcgttggaacccgaccaccgcgttgagtccgaaggtggtcttattgaaacatggaactctcaacaccctgagctgcaatgcgccggtgtcactgtttccaaacgcaccctcaaccgcaacggcctccacttgccatcttactcaccttatcccccaaatgatcattgtcgttcaaggtgcgtaatattagtaagaagtatttatcagcttaacgtgataacaataatagtaatatgaaatatttattaaattttttataattaatctctgctagaaaatttgattaatctttttagtagaatttgttttttctcaactaggtttaaacaccaca

SEQ ID NO: 3652 - DNA, 652 bp, Artificial
  Mutations within GlyA3B4 introduced by GmGlyA3B4_T02TALE nuclease
gttcatgtacggttgcagatataaacgaagcatagcttatgtatgaggtgtaacaaaattggaaacaatagccatgcaaggtgaagaatgtcaccaactcagaaacccttcttcattgacgtgtccctcactcactctcctctcttcactataaatcgccactcttcgtgttctccacttcaccaactccttcaaacttattaacactttccttagttcaatatggggaagcccttcttcactctctctctttcttccctttgcttgctactcttgtcgagtgcatattacctccagcaagttcaacgagtgccaactcaacaacctcaacgcgttggaaacccgaccaccgcgttgagtccgaaggtggtcttattgaaacatggaactctcaacaccctgagctgcaatgcgccggtgtcactgtttccaaaacgcaccctcaaccgcaacggcctccacttgccatcttactcaccttatccccaaatgatcattgtcgttcaaggtgcgtaatattagtaagaagtatttatcagcttaacgtgataacaataatagtaatatgaaatatttattaaaatttttataaattaatctctgctagaaaatttgattaatcattttagtagaatttgttttctcaactagg

SEQ ID NO: 3653 - DNA, 654 bp, Artificial
  Mutations within GlyA3B4 introduced by GmGlyA3B4_T02TALE nuclease
gttcatgtacggttgcagatataaacgaagcatagcttatgtatgaggtgtaacaaaattggaaacaatagccatgcaaggtgaagaatgtcaccaactcagaaacccttcttcattgacgtgtccctcactcactctcctctcttcactataaatcgccactcttcgtgttctccacttcaccaactccttcaaacttattaacactttccttagttcaatatggggaagcccttcttcactctctctctttcttccctttgcttgctactcttgtcgactattacctccagcaagttcaacgagtgccaactcaacaacctcaacgcgttggaacccgaccaccgcgttgagtccgaaggtggtcttattgaaacatggaactctcaacaccctgagctgcaatgcgccggtgtcactgtttccaaacgcacccctcaaccgcaacggcctccacttgccatcttactcaccttatcccccaaatgatcattgtcgttcaaggtgcgtaatattagtaagaagtatttatcagcttaacgtgataacaatatagtaatatgaaatatttattaaatttttataattaatctctgctagaaaatttgattaatcattttagtagaatttgttttctcaactaggtttttaaaa

SEQ ID NO: 3654 - DNA, 575 bp, Artificial
  Mutations within GlyA3B4 introduced by GmGlyA3B4_T02TALE nuclease
gttcatgtacggttgcagatataaacgaagcatagcttatgtatgaggtgtaacaaaaattggaaacaatagccatgcaaggtgaagaatgtcaccaactcagaaacccttcttcattgacgtgtccctcactcactctcctctcttcactataaatcgccactcttcgtgttctccacttcaccaactccttcaaacttattaacactttccttagttcaatatggggaagcccttcttcactctctctctttctttccttagttcaatatggaacccgaccaccgcgttgagtccgaaggtggtcttattgaaacatggaactctcaacaccctgagctgcaatgcgccggtgtcactgtttccaaacgcacccctcaaccgcaacggcctccacttgccatcttactcaccttatcccccaaatgatcattgtcgttcaaggtgcgtaatattagtaagaagtatttatcagcttaacgtgataacaataaatagtaatatgaaatatttattaaattttttataattaatctctgctagaaaatttgattaatcatttttagtagaatttg

SEQ ID NO: 3655 - DNA, 633 bp, Artificial
  Mutations within GlyA3B4 introduced by GmGlyA3B4_T02TALE nuclease
gttcatgtacggttgcagatataaacgaagcatagcttatgtatgaggtgtaacaaaattggaaacaatagccatgcaaggtgaagaatgtcaccaactcagaaacccttcttcattgacgtgtccctcactcactctcctctcttcactataaatcgccactcttcgtgttctccacttcaccaactccttcaaacttattaacactttccttagttcaatatggggaagcccttcttcactctctctctttcttccctttgctattacctccagcaagttcaacgagtgccaactcaacaacctcaacgcgttggaacccgaccaccgcgttgagtccgaaggtggtcttattgaaacatggaactctcaacacccctgagctgcaatgcgccggtgtcactgttttccaaacgcaccctcaaccgcaacggcctccacttgccatcttactcaccttatccccaaatgatcattgtcgttcaaggtgcgtaatattagtaagaagtatttatcagcttaacgtgataacaataatagtaatatgaaatatttattaaattttttataattaatctctgctagaaaatttgattaatcatttttagtagaatttgttttttctcaactagg

SEQ ID NO: 3656 - DNA, 571 bp, Artificial
  Mutations within GlyA3B4 introduced by GmGlyA3B4_T02TALE nuclease
gttcatgtacggttgcagatataaacgaagcatagcttatgtatgaggtgtaacaaaattggaaacaatagccatgcaaggtgaagaatgtcaccaactcagaaacccttcttcattgacgtgtccctcactcactctcctctcttcactataaatcgccactcttcgtgttctccacttcaccaactccttcaaacttattaccactccttagttcaatattacctccagcaagttcaacgagtgccaactcaacaacctcaacgcgttggaacccgaccaccgcgttgagtccgaaggtggtcttattgaaacatggaactctcaacaccctgagctgcaatgcgccggtgtcactgtttccaaacgcaccctcaaccgcaacggcctccacttgccatcttactcaccttatccccaaatgatcattgtcgttcaaggtgcgtaatattagtaagaagtatttatcagcttaaacgtgataacaataatagtaatatgaaatatttattaaattttttataattaatctctgctagaaaatttgattaatcatttttagtagaatttg

SEQ ID NO: 3657 - DNA, 655 bp, Artificial; identical to SEQ ID NO: 2000
  Mutations within GlyA3B4 introduced by GmGlyA3B4_T02TALE nuclease

SEQ ID NO: 3658 - DNA, 615 bp, Artificial
  Mutations within GlyA3B4 introduced by GmGlyA3B4_T02TALE nuclease
gttcatgtacggttgcagatataaacgaagcatagcttatgtatgaggtgtaacaaaaattggaaacaatagccatgcaaggtgaagaatgtcaccaactcagaaacccttcttcattgacgtgtccctcactcactctcctctcttcactataaatcgccactcttcgtgttctccacttcaccaactccttcaaacttattaacactttccttagttcaatatggggaagcccttcttcactctctctctttcttccctttgcttgctactcttgtcgagttacctccagcaagttcaacgagtgccaactcaacaacctcaacgcgttggaacccgaccaccgcgttgagtccgaaggtggtcttattgaaacatggaactctcaacaccctgagctgcaatgcgccggtgtcactgtttccaaacgcaccctcaaccgcaacggcctccacttgccatcttactcaccttatcccccaaatgatcattgtcgttcaaggtgcgtaaatattagtaagaagtatttatcagcttaacgtgataacaataatagtaatatgaaatatttattaaattttttataattaatctctgctagaaaatttgattaat

SEQ ID NO: 3659 - DNA, 634 bp, Artificial
  Mutations within GlyA3B4 introduced by GmGlyA3B4_T02TALE nuclease
gttcatgtacggttgcagatataaacgaagcatagcttatgtatgaggtgtaacaaaattggaaacaatagccatgcaaggtgaagaatgtcaccaactcagaaacccttcttcattgacgtgtccctcactcactctcctctcttcactataaatcgccactcttcgtgttctccacttcaccaactccttcaaacttattaacactttccttagttcaatatggggaagcccttcttcactctctctctttcttccctttgcttgctactcttgtcgagttgctattacctccagcaagttcaacgagtgccaactcaacaacctcaacgcgttggaacccgaccaccgcgttgagtccgaaggtggtcttattgaaacatggaactctcaacaccctgagctgcaatgcgccggtgtcactgtttccaaacgcaccctcaaccgcaacggcctccacttgccatcttactcaccttatcccccaaatgatcattgtcgttcaaggtgcgtaatattagtaagaagtatttatcagcttaacgtgataacaatatagtaatatgaaatatttattaaatttttataattaatctctgctagaaaatttgattaatcattttagtagaatttg

SEQ ID NO: 3660 - DNA, 651 bp, Artificial; identical to SEQ ID NO: 1918
  Mutations within GlyA3B4 introduced by GmGlyA3B4_T02TALE nuclease

SEQ ID NO: 3661 - DNA, 725 bp, Artificial
  Mutations within GlyA3B4 introduced by GmGlyA3B4_T02TALE nuclease
gttcatgtacggttgcagatataaacgaagcatagcttatgtatgaggtgtaacaaaattggaaacaatagccatgcaaggtgaagaatgtcaccaactcagaaacccttcttcattgacgtgtccctcactcactctcctctcttcactataaatcgccactcttcgtgttctccacttcaccaactccttcaaacttattaacactttccttagttcaatatggggaagcccttcttcactctctctctttcttccctttgcttgctactcttgtcgagtgcatgcttgaccccccagcaggtggtggccatcgccagcaataatggtggcaagcaggcgctggagagctattacctccagcaagttcaacgagtgccaactcaacaacctcaacgcgttggaacccgaccaccgcgttgagtcccgaaggtggtcttattgaaacatggaactctcaacaccctgagctgcaatgcgccggtgtcactgtttccaaacgcaccctcaaccgcaacggcctccacttgccatcttactcaccttatccccaaatgatcattgtcgttcaaggtgcgtaatattagtaagaagtatttatcagcttaacgtgataacaataatagtaatatgaaatatttattaaaattttttataattaatctctgctagaaaaatttgattaatcattttttagtagaatttgtttttctcaactaggtttt

SEQ ID NO: 3662 - DNA, 666 bp, Artificial
  Mutations within GlyA3B4 introduced by GmGlyA3B4_T02TALE nuclease
  misc_feature (530): n is a or c or t or g
gttcatgtacggttgcagatataaacgaagcatagcttatgtatgaggtgtaacaaaattggaaacaatagccatgcaaggtgaagaatgtcaccaactcagaaaccccttcttcattgacgtgtccctcactcactctcctctcttcactataaatcgccactcttcgtgttctccacttcaccaactccttcaaacttattaacactttccttagttcaatatggggaagcccttcttcactctctctctttcttccctttgcttgctactcttgtcgagtgcgctattacctccagcaagttcaacgagtgccaactcaacaacctcaacgcgttggaacccgaccaccgcgttgagtccgaaggtggtcttattgaaacatggaactctcaacaccctgagctgcaatgcgccggtgtcactgtttccaaacgcaccctcaaccgcaacggcctccacttgccatcttactcaccttatccccaaatgatcattgtcgttcaaggtgcgtaatattagtaagaagnatttatcagcttaacgtgataacaatatagtaatatgaaatatttattaaatttttataattaatctctgctagaaaatttgattaatcattttagtagaatttgtttttctcaactaggtttttaaaacaccaca

SEQ ID NO: 3663 - DNA, 653 bp, Artificial
  Mutations within GlyA3B4 introduced by GmGlyA3B4_T02TALE nuclease
gttcatgtacggttgcagatataaacgaagcatagcttatgtatgaggtgtaacaaaattggaaacaatagccatgcaaggtgaagaatgtcaccaactcagaaacccttcttcattgacgtgtccctcactcactctcctctcttcactataaatcgccactcttcgtgttctccacttcaccaactccttcaaacttattaacactttccttagttcaatatggggaagcccttcttcactctctctctttcttccctttgcttgctactcttgtcgagtgcattacctccagcaagttcaacgagtgccaactcaacaacctcaacgcgttggaacccgaccaccgcgttgagtccgaaggtggtcttattgaaacatggaactctcaacaccctgagctgcaatgcgccggtgtcactgtttccaaacgcaccctcaaccgcaacggcctccacttgccatcttactcaccttatcccccaaatgatcattgtcgttcaaggtgcgtaatattagtaagaagtatttatcagcttaacgtgataacaataatagtaatatgaaatatttattaaatttttataattaatctctgctagaaaatttgattaatcattttagtagaatttgtttttctcaactaggttttt

SEQ ID NO: 3664 - DNA, 609 bp, Artificial
  Mutations within GlyA3B4 introduced by GmGlyA3B4_T02TALE nuclease
gttcatgtacggttgcagatataaacgaagcatagcttatgtatgaggtgtaacaaaattggaaacaatagccatgcaaggtgaagaatgtcaccaactcagaaacccttcttcattgacgtgtccctcactcactctcctctcttcactataaatcgccactcttcgtgttctccacttcaccaactccttcaaacttattaacactttccttagttcaatatggggaagcccttcttcactctctctctttcttccctttgcttgctactcaacaacctcaacgcgttggaacccgaccaccgcgttgagtccgaaggtggtcttattgaaacatggaactctcaacaccctgagctgcaatgcgccggtgtcactgtttccaaacgcaccctcaaccgcaacggcctccacttgccatcttactcaccttatccccaaatgatcattgtcgttcaaggtgcgtaatattagtaagaagtatttatcagcttaacgtgataacaataatagtaatatgaaatatttattaattttttataatttaatctctgctagaaatttgattaatcatttttagtagaatttgtttttctcaactaggttttt

SEQ ID NO: 3665 - DNA, 600 bp, Artificial
  Mutations within GlyA3B4 introduced by GmGlyA3B4_T02TALE nuclease
gttcatgtacggttgcagatataaacgaagcatagcttatgtatgaggtgtaacaaaattggaaacaatagccatgcaaggtgaagaatgtcaccaactcagaaacccttcttcattgacgtgtccctcactcactctcctctcttcactataaatcgccactcttcgtgttctccacttcaccaactccttcaaacttattaacactttccttagttcaatatggggaagcccttcttcactctctctctttcttccctttgcttgctactcttgtcgagtgcattaccagcaagttcaacgagtgccaactcaacaacctcaacgcgttggaacccgaccaccgcgttgagtccgaaggtggtcttattgaaacatggaactctcaacaccctgagctgcaatgcgccggtgtcactgtttccaaacgcaccctcaaccgcaacggcctccacttgccatcttactcaccttatcccccaaatgatcattgtcgttcaaggtgcgtaatattagtaagaagtatttatcagcttaacgtgataacaataatagtaatatgaaatatttattaaattttttataattaatctctgctag

SEQ ID NO: 3666 - DNA, 667 bp, Artificial; identical to SEQ ID NO: 3401
  Mutations within GlyA3B4 introduced by GmGlyA3B4_T02TALE nuclease

SEQ ID NO: 3667 - DNA, 660 bp, Artificial
  Mutations within GlyA3B4 introduced by GmGlyA3B4_T02TALE nuclease
gttcatgtacggttgcagatataaacgaagcatagcttatgtatgaggtgtaacaaaattggaaacaatagccatgcaaggtgaagaatgtcaccaactcagaaacccttcttcattgacgtgtccctcactcactctcctctcttcactataaatcgccactcttcgtgttctccacttcaccaactccttcaaacttattaacactttccttagttcaatatggggaagcccttcttcactctctctctttcttccctttgcttgctactcttgtcgagtgcatgctattacctccagcaagttcaacgagtgccaactcaacaacctcaacgcgttggaacccgaccaccgcgttgagtccgaaggtggtcttattgaaacatggaactctcaacaccctgagctgcaatgcgccggtgtcactgtttccaaacgcaccctcaaccgcaacggcctccacttgccatcttactcaccttatccccaaatgatcattgtcgttcaaggtgcgtaatattagtaagagtatttatcagcttaacgtgataacaataatagtaatatgaaaatatttattaaatttttataattaatctctgctagaaaatttgattaatcattttagtagaatttgttttctcaactaggtttttaaaa

SEQ ID NO: 3668 - DNA, 645 bp, Artificial; identical to SEQ ID NO: 2653
  Mutations within GlyA3B4 introduced by GmGlyA3B4_T02TALE nuclease

SEQ ID NO: 3669 - DNA, 464 bp, Artificial
  Mutations within GlyA3B4 introduced by GmGlyA3B4_T02TALE nuclease
gttcatgtacggttgcagatataaacgaagcatagcttatgtatgaggtgtaacaaaattggaaacaatagccatgcaaggtgaagaatgtcaccaactcagaaacccttcttcattgacgtgtccctcactcactctcctctcttcactataaatcgccactcttcgtgttctccacttcaccaactccttcaaacttattaacactttccttagttcaatatggggaagcccttcttcactctctctctttgagttgacaccctcaacgcgttggaacccgaccaccgcgttgagtccgaaggtggtcttattgaaacatggaactctcaacaccctgagctgcaatgcgccggtgtcactgtttccaaacgcaccctcaaccgcaacggcctccacttgccatcttactcaccttatccccaaaatgatcattgtcgttcaaggtgcgtaatattagtaag

SEQ ID NO: 3670 - DNA, 635 bp, Artificial
  Mutations within GlyA3B4 introduced by GmGlyA3B4_T02TALE nuclease
gttcatgtacggttgcagatataaacgaagcatagcttatgtatgaggtgtaacaaaattggaaacaatagccatgcaaggtgaagaatgtcaccaactcagaaacccttcttcattgacgtgtccctcactcactctcctctcttcactataaatcgccactcttcgtgttctccacttcaccaactccttcaaacttattaacactttccttagttcaatatggggaagcccttcttcactctctctctttcttccctttgcttgctactcttgtcgagtgcatgttttacctccagcaagttcaacgagtgccaactcaacaacctcaacgcgttggaacccgaccaccgcgttgagtccgaaggtggtcttattgaaacatggaactctcaacaccctgagctgcaatgcgccggtgtcactgtttccaaacgcaccctcaaccgcaacggcctccacttgccatcttactcaccttatccccaaatgatcattgtcgttcaaggtgcgtaatattagtaagaagtatttatcagcttaacgtgataacaataatagtaatatgaaatatttattaaatttttataattaatctctgctagaaaatttgattaatcattttagtagaattt

SEQ ID NO: 3671 - DNA, 649 bp, Artificial; identical to SEQ ID NO: 2830
  Mutations within GlyA3B4 introduced by GmGlyA3B4_T02TALE nuclease

SEQ ID NO: 3672 - DNA, 556 bp, Artificial
  Mutations within GlyA3B4 introduced by GmGlyA3B4_T02TALE nuclease
gttcatgtacggttgcagatataaacgaagcatagcttatgtatgaggtgtaacaaaattggaaacaatagccatgcaaggtgaagaatgtcaccaactcagaaacccttcttcattgacgtgtccctcactcactctcctctcttcactataaatcgccactcttcgtgttctccacttcaccaactccttcaaacttattaacactttccttagttcaatatggggaagcccttcttcactctctctctttcttccctttgcttgctactcaacaacctcaacgcgttggaacccgaccaccgcgttgagtccgaaggtggtcttattgaaacatggaactctcaacaccctgagctgcaatgcgccggtgtcactgtttccaaacgcaccctcaaccgcaacggcctccacttgccatcttactcaccttatccccaaatgatcattgtcgttcaaggtgcgtaatattagtaagaagtatttatcagcttaacgtgataacaataatagtaatatgaaatatttattaatttttataattaatctctgctag

SEQ ID NO: 3673 - DNA, 586 bp, Artificial
  Mutations within GlyA3B4 introduced by GmGlyA3B4_T02TALE nuclease
gttcatgtacggttgcagatataaacgaagcatagcttatgtatgaggtgtaacaaaattggaaacaatagccatgcaaggtgaagaatgtcaccaactcagaaacccttcttcattgacgtgtccctcactcactctcctctcttcactataaatcgccactcttcgtgttctccacttcaccaactccttcaaacttattaacactttccttagttcaatatggggaagcccttcttcactctctctctttcttccctttgcttgctactcttgtcgagtgcaacgagtgccaactcaacaacctcaacgcgttggaacccgaccaccgcgttgagtccgaaggtggtcttattgaaacatggaactctcaacaccctgagctgcaatgcgccggtgtcactgtttccaaacgcaccctcaaccgcaacggcctccacttgccatcttactcaccttatccccaaatgatcattgtcgttcaaggtgcgtaatattagtaagaagtatttatcagctttaacgtgataacaataatagtaatatgaaatatttattaaattttttataattaattctctgctag

SEQ ID NO: 3674 - DNA, 598 bp, Artificial
  Mutations within GlyA3B4 introduced by GmGlyA3B4_T02TALE nuclease
gttcatgtacggttgcagatataaacgaagcatagcttatgtatgaggtgtaacaaaattggaaacaatagccatgcaaggtgaagaatgtcaccaactcagaaacccttcttcattgacgtgtccctcactcactctcctctcttcactataaatcgccactcttcgtgttctccacttcaccaactccttcaaacttattaacactttccttagttcaatatggggaagcccttcttcactctctctctttcttccctttgcttgctactcttgtctattacctccagcaagttcaacgagtgccaactcaacaacctcaacgcgttggaacccgaccaccgcgttgagtccgaaggtggtcttattgaaacatggaactctcaacaccctgagctgcaatgcgccggtgtcactgtttccaaacgcaccctcaaccgcaacggcctccacttgccatcttactcaccttatcccccaaatgatcattgtcgttcaaggtgcgtaatattagtaagaagtatttatcagcttaacgtgataacaataatagtaatatgaaatatttattaaattttttataattaatctctgctag

SEQ ID NO: 3675 - DNA, 671 bp, Artificial
  Mutations within GlyA3B4 introduced by GmGlyA3B4_T02TALE nuclease
gttcatgtacggttgcagatataaacgaagcatagcttatgtatgaggtgtaacaaaattggaaacaatagccatgcaaggtgaagaatgtcaccaactcagaaacccttcttcattgacgtgtccctcactcactctcctctcttcactataaatcgccactcttcgtgttctccacttcaccaactccttcaaacttattaacactttccttagttcaatatggggaagcccttcttcactctctctctttcttccctttgcttgctactcttgtcgagtgcatggtggcaagcaggcgctggagacggtgcaggcgctgttgccggtgctgtgccaggcccacggcttgaccccccagcaggtggtggccatcgccagcaatattacctccagcaagttcaacgagtgccaactcaacacctcaacgcgttggaacccgaccaccgcgttgagtccgaaggtggtcttattgaaacatggaactctcaacaccctgagctgcaatgcgccggtgtcactgtttccaaacgcacctcaaccgcaacggcctccacttgccatcttactcaccttatccccaaatgatcattgtcgttcaaggtgcgtaatattagtaagaagtatttatcgcttaacgtgataacaataatagtaatatgaaaatattt

SEQ ID NO: 3676 - DNA, 657 bp, Artificial
  Mutations within GlyA3B4 introduced by GmGlyA3B4_T02TALE nuclease
gttcatgtacggttgcagatataaacgaagcatagcttatgtatgaggtgtaacaaaattggaaacaatagccatgcaaggtgaagaatgtcaccaactcagaaacccttcttcattgacgtgtccctcactcactctcctctcttcactataaatcgccactcttcgtgttctccacttcaccaactccttcaaacttattaacactttccttagttcaatatggggaagcccttcttcactctctctctttcttccctttgcttgctactcttgtcgagtgcatgctattacctccagcaagttcaacgagtgccaactcaacaacctcaacgcgttggaacccgaccaccgcgttgagtccgaaggtggtcttattgaaacatggaactctcaacaccctgagctgcaatgcgccggtgtcactgtttccaaacgcaccctcaaccgcaacggcctccacttgccatcttactcaccttatcccccaaatgatcattgtcgttcaaggtgcgtaatattagtaagaagtatttatcagcttaacgtgataacaatatagtaatatgaaaatatttattaaatttttataattaatctctgctagaaaatttgattaatcattttagtagaatttgttttctcaactaggttttt

SEQ ID NO: 3677 - DNA, 578 bp, Artificial
  Mutations within GlyA3B4 introduced by GmGlyA3B4_T02TALE nuclease
gttcatgtacggttgcagatataaacgaagcatagcttatgtatgaggtgtaacaaaattggaaacaatagccatgcaaggtgaagaatgtcaccaactcagaaacccttcttcattgacgtgtccctcactcactctcctctcttcactataaatcgccactcttcgtgttctccacttcaccaactccttcaaacttattaacactttccttagttcaatatggggaagcccttcttcactctctctctttcttccctttgcttgctactcttgtcgagtggccaactcaacaacctcaacgcgttggaacccgaccaccgcgttgagtccgaaggtggtcttattgaaacatggaactctcaacaccctgagctgcaatgcgccggtgtcactgtttccaaacgcaccctcaaccgcaacggcctccacttgccatcttactcaccttatccccaaatgatcattgtcgttcaaggtgcgtaatattagtcaagaagtatttatcagcttaacgtgataacaataatagtaatatgaaatattattaatttttataattaatctctgctagaaaa

SEQ ID NO: 3678 - DNA, 661 bp, Artificial; identical to SEQ ID NO: 1694
  Mutations within GlyA3B4 introduced by GmGlyA3B4_T02TALE nuclease

SEQ ID NO: 3679 - DNA, 600 bp, Artificial
  Mutations within GlyA3B4 introduced by GmGlyA3B4_T02TALE nuclease
gttcatgtacggttgcagatataaacgaagcatagcttatgtatgaggtgtaacaaaattggaaacaatagccatgcaaggtgaagaatgtcaccaactcagaaaccccttcttcattgacgtgtccctcactcactctcctctcttcactataaatcgccactcttcgtgttctccacttcaccaactccttcaaacttattaacactttccttagttcaatatggggaagcccttcttcactctctctctttcttccctttgcttgctactcttgtcgagtgcatcctccagcaagttcaacgagtgccaactcaacaacctcaacgcgttggaacccgaccaccgcgttgagtccgaaggtggtcttattgaaacatggaactctcaacacctgagctgcaatgcgccggtgtcactgtttccaaacgcaccctcaaccgcaacggcctccacttgccatcttactcaccttatccccaaatgatcttgtcgttcaaggtgcgtaaatattagtaagaagtatttatcagcttaacgtgataacaataatagtaatatgaaatatttattaaattttttataattaatctctgctag

SEQ ID NO: 3680 - DNA, 683 bp, Artificial
  Mutations within GlyA3B4 introduced by GmGlyA3B4_T02TALE nuclease
gttcatgtacggttgcagatataaacgaagcatagcttatgtatgaggtgtaacaaaattggaaacaatagccatgcaaggtgaagaatgtcaccaactcagaaacccttcttcattgacgtgtccctcactcactctcctctcttcactataaatcgccactcttcgtgttctccacttcaccaactccttcaaacttattaacactttccttagttcaatatggggaagcccttcttcactctctctctttcttccctttgcttgctactcttgtcgagtgcattgggcctggcacagcaccggcaacagccgctggaccgtctccagcgcctgcttgccaccattattgctggcgatggccaccacctgctggggggtcaagccgtgggctattacctccagcaagttcaacgagtgccaactcaacaacctcaacgcgttggaacccgaccaccgcgttgagtccgaaggtggtcttattgaaacatggaactctcaacaccctgagctgcaatgcgccggtgtcactgtttccaaacgcaccctcaaccgcaacggcctccacttgccatcttactcaccttatccccaaaatgatcattgtcgttcaaggtgcgtaatattagtaagaagtatttatcgcttaacgtgataacaataatagtaatatgaaaatattt

SEQ ID NO: 3681 - DNA, 503 bp, Artificial
  Mutations within GlyA3B4 introduced by GmGlyA3B4_T02TALE nuclease
gttcatgtacggttgcagatataaacgaagcatagcttatgtatgaggtgtaacaaaattggaaacaatagccatgcaaggtgaagaatgtcaccaactcagaaacccttcttcattgacgtgtccctcactcactctcctctcttcactataaatcgccactcttcgtgttctccacttcaccaactccttcagcaagttcaacgagtgccaactcaacaacctcaacgcgttggaacccgaccaccgcgttgagtccgaaggtggtcttattgaaacatggaactctcaacaccctgagctgcaatgcgccggtgtcactgtttccaaacgcaccctcaaccgcaacggcctccacttgccatcttactcaccttatcccccaaatgatcattgtcgttcaaggtgcgtaatattagtaagaagtatttatcagcttaacgtgataacaataatagtaatatgaaatatttattaaattttttataattaatctctgctag

SEQ ID NO: 3682 - DNA, 662 bp, Artificial
  Mutations within GlyA3B4 introduced by GmGlyA3B4_T02TALE nuclease
gttcatgtacggttgcagatataaacgaagcatagcttatgtatgaggtgtaacaaaattggaaacaatagccatgcaaggtgaagaatgtcaccaactcagaaacccttcttcattgacgtgtccctcactcactctcctctcttcactataaatcgccactcttcgtgttctccacttcaccaactccttcaaacttattaacactttccttagttcaatatggggaagcccttcttcactctctctctttcttccctttgcttgctactcttgtcgagtgcattacctccagcaagttcaacgagtgccaactcaacaacctcaacgcgttggaacccgaccaccgcgttgagtccgaaggtggtcttattgaaacatggaactctcaacaccctgagctgcaatgcgccggtgtcactgtttccaaacgcaccctcaaccgcaacggcctccacttgccatcttactcaccttatccccaaatgatcattgtcgttcaaggtgcgtaatattagtaagaagtatttatcagcttaacgtgataacaataatagtaatatgaaatatttattaaatttttataattaatctctgctagaaaatttgattaatcattttagtagaatttgtttttctcaactaggtttttaaaatcacca

SEQ ID NO: 3683 - DNA, 659 bp, Artificial
  Mutations within GlyA3B4 introduced by GmGlyA3B4_T02TALE nuclease
gttcatgtacggttgcagatataaacgaagcatagcttatgtatgaggtgtaacaaaattggaaacaatagccatgcaaggtgaagaatgtcaccaactcagaaacccttcttcattgacgtgtccctcactcactctcctctcttcactataaatcgccactcttcgtgttctccacttcaccaactccttcaaacttattaacactttccttagttcaatatggggaagcccttcttcactctctctctttcttccctttgcttgctactcttgtcgagtgcatttgctattacctccagcaagttcaacgagtgccaactcaacaacctcaacgcgttggaacccgaccaccgcgttgagtccgaaggtggtcttattgaaacatggaactctcaacaccctgagctgcaatgcgccggtgtcactgtttccaaacgcaccctcaaccgcaacggcctccacttgccatcttactcaccttatccccaaatgatcattgtcgttcaaggtgcgtaatattagtaagagtatttatcagcttaacgtgataacaatatagtaatatgaaatatttattaaatttttataattaatctctgctagaaaatttgattaatcattttagtagaatttgttttctcaactaggtttttaaa

SEQ ID NO: 3684 - DNA, 651 bp, Artificial; identical to SEQ ID NO: 2077
  Mutations within GlyA3B4 introduced by GmGlyA3B4_T02TALE nuclease

SEQ ID NO: 3685 - DNA, 646 bp, Artificial
  Mutations within GlyA3B4 introduced by GmGlyA3B4_T02TALE nuclease
gttcatgtacggttgcagatataaacgaagcatagcttatgtatggaggtgtaacaaaaattggaaacaatagccatgcaaggtgaagaatgtcaccaactcagaaacccttcttcattgacgtgtccctcactcactctcctctcttcactataaatcgccactcttcgtgttctccacttcaccaactccttcaaacttattaacactttccttagttcaatatggggaagcccttcttcactctctctctttcttccctttgcttgctactcttgtcgagtgctacctccagcaagttcaacgagtgccaactcaacaacctcaacgcgttggaacccgaccaccgcgttgagtccgaaggtggtcttattgaaacatggaactctcaacaccctgagctgcaatgcgccggtgtcactgtttccaaacgcaccctcaaccgcaacggcctccacttgccatcttactcaccttatccccaaatgatcattgtcgttcaaggtgcgtaatattagtaagaagtatttatcagcttaacgtgataacaataatagtaatatgaaatatttattaaatttttataattaatctctgctagaaaatttgattaatcattttagtagaatttgttttctcaactagg

SEQ ID NO: 3686 - DNA, 632 bp, Artificial
  Mutations within GlyA3B4 introduced by GmGlyA3B4_T02TALE nuclease
gttcatgtacggttgcagatataaacgaagcatagcttatgtatgaggtgtaacaaaattggaaacaatagccatgcaaggtgaagaatgtcaccaactcagaaacccttcttcattgacgtgtccctcactcactctcctctcttcactataaatcgccactcttcgtgttctccacttcaccaactccttcaaacttattaacactttccttagttcaatatggggaagcccttcttcactctctctctttcttccctttgcttgctactcttgtcgagtgcctatactccagcaagttcaacgagtgccaactcaacaacctcaacgcgttggaacccgaccaccgcgttgagtccgaaggtggtcttattgaaacatggaactctcaacaccctgagctgcaatgcgccggtgtcactgtttccaaacgcaccctcaaccgcaacggcctccacttgccatcttactcaccttatccccaaatgatcattgtcgttcaaggtgcgtaatattagtaagaagtatttatcagcttaacgtgataacaataatagtaatatgaaatatttattaaatttttataattaatctctgctagaaaatttgattaatcattttagtagaatttg

SEQ ID NO: 3687 - DNA, 662 bp, Artificial
  Mutations within GlyA3B4 introduced by GmGlyA3B4_T02TALE nuclease
gttcatgtacggttgcagatataaacgaagcatagcttatgtatgaggtgtaacaaaattggaaacaatagccatgcaaggtgaagaatgtcaccaactcagaaaccccttcttcattgacgtgtccctcactcactctcctctcttcactataaatcgccactcttcgtgttctccacttcaccaactccttcaaacttattaacactttccttagttcaatatggggaagcccttcttcactctctctctttcttccctttgcttgctactcttgtcgagtgcattattacctccagcaagttcaacgagtgccaactcaacaacctcaacgcgttggaacccgaccaccgcgttgagtccgaaggtggtcttattgaaacatggaactctcaacaccctgagctgcaatgcgccggtgtcactgtttccaaacgcaccctcaaccgcaacggcctccacttgccatcttactcaccttatccccaaatgatcattgtcgttcaaggtgcgtaatattagtaagaagtatttatcagcttaacgtgataacaatatagtaatatgaaatatttattaaatttttataattaatctctgctagaaaatttgattaatcattttagtagaatttgttttctcaactaggttttaaaacacca

SEQ ID NO: 3688 - DNA, 656 bp, Artificial
  Mutations within GlyA3B4 introduced by GmGlyA3B4_T02TALE nuclease
gttcatgtacggttgcagatataaacgaagcatagcttatgtatgaggtgtaacaaaattggaaacaatagccatgcaaggtgaagaatgtcaccaactcagaaacccttcttcattgacgtgtccctcactcactctcctctcttcactataaatcgccactcttcgtgttctccacttcaccaactccttcaaacttattaacactttccttagttcaatatggggaagcccttcttcactctctctctttcttccctttgcttgctactcttgtcgagtgcagctattacctccagcaagttcaacgagtgccaactcaacaacctcaacgcgttggaacccgaccaccgcgttgagtccgaaggtggtcttattgaaacatggaactctcaacaccctgagctgcaatgcgccggtgtcactgtttccaaacgcaccctcaaccgcaacggcctccacttgccatcttactcaccttatccccaaatgatcattgtcgttcaaggtgcgtaatattagtaagaagtatttatcagcttaacgtgataacaataatagtaatatgaaatatttattaaatttttataattaatctctgctagaaaatttgattaatcattttagtagaatttgtttttctcaactaggttttt

SEQ ID NO: 3689 - DNA, 654 bp, Artificial
  Mutations within GlyA3B4 introduced by GmGlyA3B4_T02TALE nuclease
gttcatgtacggttgcagatataaacgaagcatagcttatgtatgaggtgtaacaaaattggaaacaatagccatgcaaggtgaagaatgtcaccaactcagaaacccttcttcattgacgtgtccctcactcactctcctctcttcactataaatcgccactcttcgtgttctccacttcaccaactccttcaaacttattaacactttccttagttcaatatggggaagcccttcttcactctctctctttcttccctttgcttgctactcttgtcgtacctccagcaagttcaacgagtgccaactcaacaacctcaacgcgttggaacccgaccaccgcgttgagtccgaaggtggtcttattgaaacatggaactctcaacaccctgagctgcaatgcgccggtgtcactgtttccaaacgcaccctcaaccgcaacggcctccacttgccatcttactcaccttatcccccaaatgatcattgtcgttcaaggtgcgtaaatattagtaagaagtatttatcagcttaacgtgataacaataatagtaatatgaaatatttattaaattttttataattaatctctgctagaaaatttgattaatctttttagtagaattgtttttctcaactaggtttaaaacacca

SEQ ID NO: 3690 - DNA, 662 bp, Artificial; identical to SEQ ID NO: 2950
  Mutations within GlyA3B4 introduced by GmGlyA3B4_T02TALE nuclease

SEQ ID NO: 3691 - DNA, 663 bp, Artificial; identical to SEQ ID NO: 2045
  Mutations within GlyA3B4 introduced by GmGlyA3B4_T02TALE nuclease

SEQ ID NO: 3692 - DNA, 662 bp, Artificial
  Mutations within GlyA3B4 introduced by GmGlyA3B4_T02TALE nuclease
gttcatgtacggttgcagatataaacgaagcatagcttatgtatgaggtgtaacaaaattggaaacaatagccatgcaaggtgaagaatgtcaccaactcagaaacccttcttcattgacgtgtccctcactcactctcctctcttcactataaatcgccactcttcgtgttctccacttcaccaactccttcaaacttattaacactttccttagttcaatatggggaagcccttcttcactctctctctttcttccctttgcttgctactcttgtcgagtgcctattacctccagcaagttcaacgagtgccaactcaacaacctcaacgcgttggaacccgaccaccgcgttgagtccgaaggtggtcttattgaaacatggaactctcaacaccctgagctgcaatgcgccggtgtcactgtttccaaacgcacccctcaaccgcaacggcctccacttgccatcttactcaccttatccccaaatgatcattgtcgttcaaggtgcgtaatattagtaagaagtatttatcagcttaacgtgataacaataatagtaatatgaaatatttattaaatttttataattaatctctgctagaaaatttgattaatcattttagtagaatttgttttctcaactaggttttaaaacacca

SEQ ID NO: 3693 - DNA, 645 bp, Artificial
  Mutations within GlyA3B4 introduced by GmGlyA3B4_T02TALE nuclease
gttcatgtacggttgcagatataaacgaagcatagcttatgtatgaggtgtaacaaaattggaaacaatagccatgcaaggtgaagaatgtcaccaactcagaaacccttcttcattgacgtgtccctcactcactctcctctcttcactataaatcgccactcttcgtgttctccacttcaccaactccttcaaacttattaacactttccttagttcaatatggggaagcccttcttcactctctctctttcttccctttgcttgctattacctccagcaagttcaacgagtgccaactcaacaacctcaacgcgttggaacccgaccaccgcgttgagtccgaaggtggtcttattgaaacatggaactctcaacaccctgagctgcaatgcgccggtgtcactgtttccaaacgcaccctcaaccgcaacggcctccacttgccatcttactcaccttatccccaaatgatcattgtcgttcaaggtgcgtaatattagtaagaagtatttatcagcttaacgtgataacaataatagtaatatgaaatatttattaaattttttataattaatctctgctagaaaatttgattaatcatttttagtagaatttgttttttctcaactaggttttaaaaca

SEQ ID NO: 3694 - DNA, 540 bp, Artificial
  Mutations within GlyA3B4 introduced by GmGlyA3B4_T02TALE nuclease
gttcatgtacggttgcagatataaacgaagcatagcttatgtatgaggtgtaacaaaattggaaacaatagccatgcaaggtgaagaatgtcaccaactcagaaacccttcttcattgacgtgtccctcactcactctcctctcttcactataaatcgccactcttcgttattacctccagcaagttcaacgagtgccaactcaacaacctcaacgcgttggaacccgaccaccgcgttgagtccgaaggtggtcttattgaaacatggaactctcaacaccctgagctgcaatgcgccggtgtcactgtttccaaacgcaccctcaaccgcaacggcctccacttgccatcttactcaccttatccccaaatgatcattgtcgttcaaggtgcgtaatattagtaagaagtattttatcagcttaacgtgataacaataatagtaatatgaaatatttattaaattttttataattaatctctgctagaaaatttgattaatcatttttagtagaatttgtttttctcaactaggtttt

SEQ ID NO: 3695 - DNA, 655 bp, Artificial; identical to SEQ ID NO: 1852
  Mutations within GlyA3B4 introduced by GmGlyA3B4_T02TALE nuclease

SEQ ID NO: 3696 - DNA, 630 bp, Artificial; identical to SEQ ID NO: 3368
  Mutations within GlyA3B4 introduced by GmGlyA3B4_T02TALE nuclease

SEQ ID NO: 3697 - DNA, 563 bp, Artificial
  Mutations within GlyA3B4 introduced by GmGlyA3B4_T02TALE nuclease
gttcatgtacggttgcagatataaacgaagcatagcttatgtatgaggtgtaacaaaattggaaacaatagccatgcaaggtgaagaatgtcaccaactcagaaacccttcttcattgacgtgtccctcactcactctcctctcttcactataaatcgccactcttcgtgttctccacttcaccaactccttcaaacttattacctccagcaagttcaacgagtgccaactcaacaacctcaacgcgttggaacccgaccaccgcgttgagtccgaaggtggtcttattgaaacatggaactctcaacaccctgagctgcaatgcgccggtgtcactgtttccaaacgcaccctcaaccgcaacggcctccacttgccatcttactcaccttatccccaaatgatcattgtcgttcaaggtgcgtaatattagtaagaagtatttatcagcttaacgtgataacaataatagtaatatgaaatatttattaaattttttatattaatctctgctagaaaatttgattaatcatttttagtagaatttgtttttctcaactagg

SEQ ID NO: 3698 - DNA, 647 bp, Artificial; identical to SEQ ID NO: 2514
  Mutations within GlyA3B4 introduced by GmGlyA3B4_T02TALE nuclease

SEQ ID NO: 3699 - DNA, 663 bp, Artificial
  Mutations within GlyA3B4 introduced by GmGlyA3B4_T02TALE nuclease
gttcatgtacggttgcagatataaacgaagcatagcttatgtatgaggtgtaacaaaattggaaacaatagccatgcaaggtgaagaatgtcaccaactcagaaaccccttcttcattgacgtgtccctcactcactctcctctcttcactataaatcgccactcttcgtgttctccacttcaccaactccttcaaacttattaacactttccttagttcaatatggggaagcccttcttcactctctctctttcttccctttgcttgctactcttgtcgagtgcactattacctccagcaagttcaacgagtgccaactcaacaacctcaacgcgttggaacccgaccaccgcgttgagtccgaaggtggtcttattgaaacatggaactctcaacaccctgagctgcaatgcgccggtgtcactgtttccaaacgcaccctcaaccgcaacggcctccacttgccatcttactcaccttatccccaaatgatcattgtcgttcaaggtgcgtaatattagtaagaagtatttatcagcttaacgtgataacaataatagtaatatgaaatatttattaaatttttataattaatctctgctagaaaatttgattaatcattttagtagaatttgttttctcaactaggttttaaaacacca

SEQ ID NO: 3700 - DNA, 663 bp, Artificial; identical to SEQ ID NO: 2045
  Mutations within GlyA3B4 introduced by GmGlyA3B4_T02TALE nuclease

SEQ ID NO: 3701 - DNA, 509 bp, Artificial
  Mutations within GlyA3B4 introduced by GmGlyA3B4_T02TALE nuclease
gttcatgtacggttgcagatataaacgaagcatagcttatgtatgaggtgtaacaaaattggaaacaatagccatgcaaggtgaagaatgtcaccaactcagaaacccttcttcattgacgtgtccctcactcactctcctctcttcactataaatcgccactcttcgtgttctccacttcaccaactccttcaaacttattaacactttccttagttcaatatggggaagcccttcttcactctctctctttcttccctttgcttgctactcttgtcgagtgcatattacctccagcaagttcaacgagtgccaactcaacaacctcaacgcgttggaacccgaccaccgcgttgagtccgaaggtggtcttattgaaaacatggaactctcaacaccctgagctgcaatgcgccggtgtcactgtttccaaaacgcaccctcaaccgcaacggcctccaacttgccatcttaactccaccttatccccaaatgaatcattgtcgttc

SEQ ID NO: 3702 - DNA, 657 bp, Artificial
  Mutations within GlyA3B4 introduced by GmGlyA3B4_T02TALE nuclease
gttcatgtacggttgcagatataaacgaagcatagcttatgtatgaggtgtaacaaaattggaaacaatagccatgcaaggtgaagaatgtcaccaactcagaaacccttcttcattgacgtgtccctcactcactctcctctcttcactataaaatcgccactcttcgtgttctccacttcaccaactccttcaaacttattaacactttccttagttcaatatggggaagcccttcttcactctctctctttcttccctttgcttgctactcttgtcgagtgctattacctccagcaagttcaacgagtgccaactcaacaacctcaacgcgttggaacccgaccaccgcgttgagtccgaaggtggtcttattgaaacatggaactctcaacaccctgagctgcaatgcgccggtgtcactgtttccaaacgcaccctcaaccgcaacggcctccacttgccatcttactcaccttatcccccaaatgatcattgtcgttcaaggtgcgtaatattagtaagaagtatttatcagcttaacgtgataacaataatagtaatatgaaatatttattaaatttttataattaatctctgctagaaaatttgattaatcattttagtagaatttgttttctcaactaggttttaaaa

SEQ ID NO: 3703 - DNA, 652 bp, Artificial
  Mutations within GlyA3B4 introduced by GmGlyA3B4_T02TALE nuclease
gttcatgtacggttgcagatataaacgaagcatagcttatgtatgaggtgtaacaaaattggaaacaatagccatgcaaggtgaagaatgtcaccaactcagaaaccccttcttcattgacgtgtccctcactcactctcctctcttcactataaatcgccactcttcgtgttctccacttcaccaactccttcaaacttattaacactttccttagttcaatatggggaagcccttcttcactctctctctttcttccctttgcttgctactcttgtcgagtgcatctattacctccagcaagttcaacgagtgccaactcaacaacctcaacgcgttggaacccgaccaccgcgttgagtccgaaggtggtcttattgaaacatggaactctcaacaccctgagctgcaatgcgccggtgtcactgtttccaaacgcaccctcaaccgcaacggcctccacttgccatcttactcaccttatcccccaaatgatcattgtcgttcaaggtgcgtaatattagtaagaagtatttatcagcttaacgtgataacaataatagtaatatgaaatatttattaaatttttataattaatctctgctagaaaatttgattaatcattttagtagaatttgttttctcaactagg

SEQ ID NO: 3704 - DNA, 660 bp, Artificial
  Mutations within GlyA3B4 introduced by GmGlyA3B4_T02TALE nuclease
gttcatgtacggttgcagatataaacgaagcatagcttatgtatgaggtgtaacaaaattggaaacaatagccatgcaaggtgaagaatgtcaccaactcagaaaccccttcttcattgacgtgtcccctcactcactctcctctcttcactataaatcgccactcttcgtgttctccacttcaccaactccttcaaacttattaacactttccttagttcaatatggggaagcccttcttcactctctctctttcttccctttgcttgctactcttgtcgagtgcattgctattacctccagcaagttcaacgagtgccaactcaacaacctcaacgcgttggaacccgaccaccgcgttgagtccgaaggtggtcttattgaaacatggaactctcaacaccctgagctgcaatgcgccggtgtcactgtttccaaacgcaccctcaaccgcaacggcctccacttgccatcttactcaccttatccccaaatgatcattgtcgttcaaggtgcgtaatattagtaagagtatttatcagcttaacgtgataacaataatagtaatatgaaatatttattaaatttttataattaatctctgctagaaaatttgattaatcattttagtagaatttgttttctcaactaggttttaaa

SEQ ID NO: 3705 - DNA, 663 bp, Artificial
  Mutations within GlyA3B4 introduced by GmGlyA3B4_T02TALE nuclease
gttcatgtacggttgcagatataaacgaagcatagcttatgtatgaggtgtaacaaaattggaaacaatagccatgcaaggtgaagaatgtcaccaactcagaaacccttcttcattgacgtgtccctcactcactctcctctcttcactataaatcgccactcttcgtgttctccacttcaccaactccttcaaacttattaacactttccttagttcaatatggggaagcccttcttcactctctctctttcttccctttgcttgctactcttgtcgagtgcatgctattacctccagcaagttcaacgagtgccaactcaacgacctcaacctcacgcgtttgggaaacccgaccaccgcgttgagtccgaaggtggtcttattgaaacatggaactctcaacaccctgagctgcaatgcgccggtgtcactgtttccaaacgcaccctcaaccgcaacggcctccacttgccatcttactcaccttatccccaaatgatcattgtcgttcaaggtgcgtaatattagtaagagtatttatcagcttaacgtgataacaataatagtaatatgaaatatttattaaatttttataattaatctctgctagaaaatttgattaatcattttagtagaatttgtttttctcaactaggtttt

SEQ ID NO: 3706 - DNA, 651 bp, Artificial
  Mutations within GlyA3B4 introduced by GmGlyA3B4_T02TALE nuclease
gttcatgtacggttgcagatataaacgaagcatagcttatgtatgaggtgtgaacaaaattggaaacaatagccatgcaaggtgaagaatgtcaccaactcagaaaccccttcttcattgacgtgtccctcactcactctcctctcttcactataaatcgccactcttcgtgttctccacttcaccaactccttcaaacttattaacactttccttagttcaatatggggaagcccttcttcactctctctctttcttccctttgcttgctactcttgtcgagtgcgctattacctccagcaagttcaacgagtgccaactcaacaacctcaacgcgttggaacccgaccaccgcgttgagtccgaaggtggtcttattgaaacatggaactctcaacaccctgagctgcaatgcgccggtgtcactgtttccaaacgcaccctcaaccgcaacggcctccacttgccatcttactcaccttatccccaaatgatcattgtcgttcaaggtgcgtaatattagtaagagtatttatcagcttaacgtgataacaataatagtaatatgaaatatttattaaatttttataattaatctctgctagaaaatttgattaatcattttagtagaatttgtttttctcaactagg

SEQ ID NO: 3707 - DNA, 659 bp, Artificial; identical to SEQ ID NO: 2812
  Mutations within GlyA3B4 introduced by GmGlyA3B4_T02TALE nuclease

SEQ ID NO: 3708 - DNA, 634 bp, Artificial
  Mutations within GlyA3B4 introduced by GmGlyA3B4_T02TALE nuclease
gttcatgtacggttgcagatataaacgaagcatagcttatgtatgaggtgtaacaaaattggaaacaatagccatgcaaggtgaagaatgtcaccaactcagaaaccccttcttcattgacgtgtccctcactcactctcctctcttcactataaatcgccactcttcgtgttctccacttcaccaactccttcaaacttattaacactttccttagttcaatatggggaagcccttcttcactctctctctttcttccctttgcttgctactcttgtcgagtgctattacctccagcaagttcaacgagtgccaactcaacaacctcaacgcgttggaacccgaccaccgcgttgagtccgaaggtggtcttattgaaacatggaactctcaacaccctgagctgcaatgcgccggtgtcactgtttccaaacgcaccctcaaccgcaacggcctccacttgccatcttactcaccttatcccccaaatgatcattgtcgttcaaggtgcgtaatattagtaagaagtatttatcagcttaacgtgataacaatatagtaatatgaaatatttattaaatttttataattaatctctgctagaaaatttgattaatcattttagtagaatttg

SEQ ID NO: 3709 - DNA, 566 bp, Artificial; identical to SEQ ID NO: 1766
  Mutations within GlyA3B4 introduced by GmGlyA3B4_T02TALE nuclease

SEQ ID NO: 3710 - DNA, 564 bp, Artificial; identical to SEQ ID NO: 3478
  Mutations within GlyA3B4 introduced by GmGlyA3B4_T02TALE nuclease

SEQ ID NO: 3711 - DNA, 666 bp, Artificial
  Mutations within GlyA3B4 introduced by GmGlyA3B4_T02TALE nuclease
  misc_feature (532): n is a or c or t or g
gttcatgtacggttgcagatataaacgaagcatagcttatgtatgaggtgtaacaaaattggaaacaatagccatgcaaggtgaagaatgtcaccaactcagaaacccttcttcattgacgtgtccctcactcactctcctctcttcactataaatcgccactcttcgtgttctccacttcaccaactccttcaaacttattaacactttccttagttcaatatggggaagcccttcttcactctctctctttcttccctttgcttgctactcttgtcgagtgcatttgctattacctccagcaagttcaacgagtgccaactcaacaacctcaacgcgttggaacccgaccaccgcgttgagtccgaaggtggtcttattgaaacatggaactctcaacaccctgagctgcaatgcgccggtgtcactgtttccaaacgcaccctcaaccgcaacggcctccacttgccatcttactcaccttatccccaaatgatcattgtcgttcaaggtgcgtaatattagtaagagnatttatcagcttaacgtgatacaatatagtaatatgaaatatttattaaatttttataattaatctctgctagaaaatttgattaatcattttagtagaatttgtttttctcaactaggtttttaaacaccaca

SEQ ID NO: 3712 - DNA, 765 bp, Artificial
  Mutations within GlyA3B4 introduced by GmGlyA3B4_T02TALE nuclease
gttcatgtacggttgcagatataaacgaagcatagcttatgtatgaggtgtaacaaaattggaaacaatagccatgcaaggtgaagaatgtcaccaactcagaaacccttcttcattgacgtgtccctcactcactctcctctcttcactataaatcgccactcttcgtgttctccacttcaccaactccttcaaacttattaacactttccttagttcaatatggggaagcccttcttcactctctctctttcttccctttgcttgctactcttgtcgagtgcatgcctggcacagcaccggcaacagccgctggaccgtctccagcgcctgcttgccgccatcgtggctggcgatggccaccacctgctccggggtcaagccgtggctattacctccagcaagttcaacgagtgccaactcaacaacctcaacgcgttggaacccgaccaccgcgttgagtccgaaggtggtcttattgaaacatggaactctcaacaccctgagctgcaatgcgccggtgtcactgtttccaaacgcaccctcaaccgcaacggcctccacttgccatcttactcaccttatccccaaaatgatcattgtcgttcaaggtgcgtaatattagtaagaagtatttatcgcttaacgtgatcaacaataatagtaatatgaaaatatttattaaattttttataattaatctctgctagaaaatttcgattaatcatttttagtagaatttgttttctcaactaggtttaaaca

SEQ ID NO: 3713 - DNA, 641 bp, Artificial
  Mutations within GlyA3B4 introduced by GmGlyA3B4_T02TALE nuclease
gttcatgtacggttgcagatataaacgaagcatagcttatgtatgaggtgtaacaaaattggaaacaatagccatgcaaggtgaagaatgtcaccaactcagaaacccttcttcattgacgtgtccctcactcactctcctctcttcactataaatcgccactcttcgtgttctccacttcaccaactccttcaaacttattaacactttccttagttcaatatggggaagcccttcttcactctctctctttcttccctttgcttgctactcttcttcaacgagtgccaactcaacaacctcaacgcgttggaacccgaccaccgcgttgagtccgaaggtggtcttattgaaacatggaactctcaacaccctgagctgcaatgcgccggtgtcactgtttccaaacgcaccctcaaccgcaacggcctccacttgccatcttactcaccttatccccaaatgatcattgtcgttcaaggtgcgtaatattagtaagaagtatttatcagcttaacgtgataacaataatagtaatatgaaatatttattaaattttttataattaatctctgctagaaaatttgattaatcatttttagtagaatttgttttttctcaactaggttttaaacaccaca

SEQ ID NO: 3714 - DNA, 534 bp, Artificial
  Mutations within GlyA3B4 introduced by GmGlyA3B4_T02TALE nuclease
gttcatgtacggttgcagatataaacgaagcatagcttatgtatgaggtgtaacaaaattggaaacaatagccatgcaaggtgaagaatgtcaccaactcagaaacccttcttcattgacgtgtccctcactcactctcctctcttcactataaatcgccactcttcgtgttctccacttcaccaactccttcaaacttattaacactttccttagttcaatatggggaagcccttcttcactctctctctttctttccttagttcaatatggaacccgaccaccgcgttgagtccgaaggtggtcttattgaaacatggaactctcaacaccctgagctgcaatgcgccggtgtcactgtttccaaacgcaccctcaaccgcaacggcctccacttgccatcttactcaccttatcccccaaatgatcattgtcgttcaaggtgcgtaatattagtaagaagtatttatcagcttaacgtgataacaataatagtaatatgaaatatttattaaattttttataattaatctc

SEQ ID NO: 3715 - DNA, 666 bp, Artificial; identical to SEQ ID NO: 1875
  Mutations within GlyA3B4 introduced by GmGlyA3B4_T02TALE nuclease

SEQ ID NO: 3716 - DNA, 632 bp, Artificial; identical to SEQ ID NO: 1756
  Mutations within GlyA3B4 introduced by GmGlyA3B4_T02TALE nuclease

SEQ ID NO: 3717 - DNA, 658 bp, Artificial; identical to SEQ ID NO: 2344
  Mutations within GlyA3B4 introduced by GmGlyA3B4_T02TALE nuclease

SEQ ID NO: 3718 - DNA, 667 bp, Artificial
  Mutations within GlyA3B4 introduced by GmGlyA3B4_T02TALE nuclease
  misc_feature (531): n is a or c or t or g
gttcatgtacggttgcagatataaacgaagcatagcttatgtatgaggtgtaacaaaattggaaacaatagccatgcaaggtgaagaatgtcaccaactcagaaacccttcttcattgacgtgtccctcactcactctcctctcttcactataaatcgccactcttcgtgttctccacttcaccaactccttcaaacttattaacactttccttagttcaatatggggaagcccttcttcactctctctctttcttccctttgcttgctactcttgtcgagtgcatgctattacctccagcaagttcaacgagtgccaactcaacaacctcaacgcgttggaacccgaccaccgcgttgagtccgaaggtggtcttattgaaacatggaactctcaacaccctgagctgcaatgcgccggtgtcactgtttccaaacgcaccctcaaccgcaacggcctccacttgccatcttactcaccttatcccccaaatgatcattgtcgttcaaggtgcgtaatattagtaagagnatttatcagcttaacgtgataacaatatagtaatatgaaatatttattaaatttttataattaatctctgctagaaaatttgattaatcattttagtagaatttgtttttctcaactaggtttttaaaacaccaca

SEQ ID NO: 3719 - DNA, 668 bp, Artificial; identical to SEQ ID NO: 2325
  Mutations within GlyA3B4 introduced by GmGlyA3B4_T02TALE nuclease

SEQ ID NO: 3720 - DNA, 417 bp, Artificial; identical to SEQ ID NO: 1677
  Mutations within GlyA3B4 introduced by GmGlyA3B4_T02TALE nuclease

SEQ ID NO: 3721 - DNA, 523 bp, Artificial
  Mutations within GlyA3B4 introduced by GmGlyA3B4_T02TALE nuclease
gttcatgtacggttgcagatataaacgaagcatagcttatgtatgaggtgtaacaaaattggaaacaatagccatgcaaggtgaagaatgtcaccaactcagaaacccttcttcattgacgtgtccctcactcactctcctctcttcactataaatcgccactcttcgtgttctccacttcaccaactccttcaaacttattaacactttccttagttcaatatggggaagcccttcttcactctctctctttcttccctttgcttgctattacctccagcaagttcaacgagtgccaactcaacaacctcaacgcgttggaacccgaccaccgcgttgagtccgaaggtggtcttattgaaacatggaactctcaacacccctgagctgcaatgcgccggtgtcactgtttccaaacgcaccctcaaccgcaacggcctccacttgccatcttactcaccttatcccccaaatgatcattgtcgttcaaggtgcgtaatattagtaagaagtatttatcagc

SEQ ID NO: 3722 - DNA, 656 bp, Artificial
  Mutations within GlyA3B4 introduced by GmGlyA3B4_T02TALE nuclease
gttcatgtacggttgcagatataaacgaagcatagcttatgtatgaggtgtaacaaaattggaaacaatagccatgcaaggtgaagaatgtcaccaactcagaaacccttcttcattgacgtgtccctcactcactctcctctcttcactataaatcgccactcttcgtgttctccacttcaccaactccttcaaacttattaacactttccttagttcaatatggggaagcccttcttcactctctctctttcttccctttgcttgctactcttgtcgggttccctattacctccagcaagttcaacgagtgccaactcaacaacctcaacgcgttggaacccgaccaccgcgttgagtccgaaggtggtcttattgaaacatggaacctctcaaccacctgagctgcaatgcgccggtgtcactgtttccaaacgcaccctcaaccgcaacggcctccacttgccatcttactcaccttatcccccaaatgatcattgtcgttcaaggtgcgtaatattagtaagaagtatttatcagcttaacgtgataacaataatagtaatatgaaatatttattaaatttttataattaatctctgctagaaaatttgattaatcattttagtagaatttgttttctcaactaggttttt

SEQ ID NO: 3723 - DNA, 641 bp, Artificial
  Mutations within GlyA3B4 introduced by GmGlyA3B4_T02TALE nuclease
gttcatgtacggttgcagatataaacgaagcatagcttatgtatgaggtgtaacaaaattggaaacaatagccatgcaaggtgaagaatgtcaccaactcagaaacccttcttcattgacgtgtccctcactcactctcctctcttcactataaatcgccactcttcgtgttctccacttcaccaactccttcaaacttattaacactttccttagttcaatatggggaagcccttcttcactctctctctttcttccctttgcttgctactcttgtcgagtgcatattacctccagcaagttcaacgagtgccaactcaacaacctcaacgcgttggaacccgaccaccgcgttgagtccgaaggtggtcttattgaaacatggaactctcaacaccctgagctgcaatgcgccggtgtcactgtttccaaacgcaccctcaaccgcaacggcctccacttgccatcttactcaccttatccccaaatgatcattgtcgttcaaggtgcgtaatattagtaagaagtatttatcagcttaacgtgataacaataatagtaatatgaaatatttattaaatttttataattaatctctgctagaaaatttgattaatcattttagtagaatttgttttctc

SEQ ID NO: 3724 - DNA, 667 bp, Artificial; identical to SEQ ID NO: 1838
  Mutations within GlyA3B4 introduced by GmGlyA3B4_T02TALE nuclease

SEQ ID NO: 3725 - DNA, 646 bp, Artificial; identical to SEQ ID NO: 2415
  Mutations within GlyA3B4 introduced by GmGlyA3B4_T02TALE nuclease

SEQ ID NO: 3726 - DNA, 586 bp, Artificial
  Mutations within GlyA3B4 introduced by GmGlyA3B4_T02TALE nuclease
gttcatgtacggttgcagatataaacgaagcatagcttatgtatgaggtgtaacaaaattggaaacaatagccatgcaaggtgaagaatgtcaccaactcagaaacccttcttcattgacgtgtccctcactcactctcctctcttcactataaatcgccactcttcgtgttctccacttcaccaactccttcaaacttattaacactttccttagttcaatatggggaagcccttcttcactctctctctttgagttgacaccctcaacgcgttggaacccgaccaccgcgttgagtccgaaggtggtcttattgaaacatggaactctcaacaccctgagctgcaatgcgccggtgtcactgtttccaaacgcaccctcaaccgcaacggcctccacttgccatcttactcaccttatccccaaatgatcattgtcgttcaaggtgcgtaatattagtaagaagtatttatcagcttaacgtgataacaataatagtaatatgaaatatttattaaatttttttataattaatctctgctagaaaatttgattaatcatttttagtagaatttgtttttctcaa

SEQ ID NO: 3727 - DNA, 654 bp, Artificial
  Mutations within GlyA3B4 introduced by GmGlyA3B4_T02TALE nuclease
gttcatgtacggttgcagatataaacgaagcatagcttatgtatgaggtgtaacaaaattggaaacaatagccatgcaaggtgaagaatgtcaccaactcagaaacccttcttcattgacgtgtccctcactcactctcctctcttcactataaatcgccactcttcgtgttctccacttcaccaactccttcaaacttattaacactttccttagttcaatatggggaagcccttcttcactctctctctttcttccctttgcttgctactcttgtcgagtgcagctattacctccagcaagttcaacgagtgccaactcaacaacctcaacgcgttggaacccgaccaccgcgttgagtccgaaggtggtcttattgaaacatggaactctcaacaccctgagctgcaatgcgccggtgtcactgtttccaaacgcaccctcaaccgcaacggcctccacttgccatcttactcaccttatccccaaatgatcattgtcgttcaaggtgcgtaatattagtaagagtatttatcagcttaacgtgataacaataatagtaatatgaaatatttattaaatttttataattaatctctgctagaaaatttgattaatcattttagtagaatttgtttttctcaactaggtttt

SEQ ID NO: 3728 - DNA, 660 bp, Artificial; identical to SEQ ID NO: 1717
  Mutations within GlyA3B4 introduced by GmGlyA3B4_T02TALE nuclease

SEQ ID NO: 3729 - DNA, 665 bp, Artificial
  Mutations within GlyA3B4 introduced by GmGlyA3B4_T02TALE nuclease
gttcatgtacggttgcagatataaacgaagcatagcttatgtatgaggtgtaacaaaattggaaacaatagccatgcaaggtgaagaatgtcaccaactcagaaacccttcttcattgacgtgtccctcactcactctcctctcttcactataaatcgccactcttcgtgttctccacttcaccaactccttcaaacttattaacactttccttagttcaatatggggaagcccttcttcactctctctctttcttccctttgcttgctactcttgtcgagtgcatgcttttacctccagcaagttcaacgagtgccaactcaacaacctcaacgcgttggaacccgaccaccgcgttgagtccgaaggtggtcttattgaaacatggaactctcaacaccctgagctgcaatgcgccggtgtcactgtttccaaacgcaccctcaaccgcaacggcctccacttgccatcttactcaccttatccccaaatgatcattgtcgttcaaggtgcgtaatattagtaagaagtatttatcagcttaacgtgataacaataatagtaatatgaaatatttattaaatttttataattaatctctgctagaaaatttgattaatcattttagtagaatttgtttttctcaactaggttttaaaacacca

SEQ ID NO: 3730 - DNA, 639 bp, Artificial
  Mutations within GlyA3B4 introduced by GmGlyA3B4_T02TALE nuclease
gttcatgtacggttgcagatataaacgaagcatagcttatgtatgaggtgtaacaaaattggaaacaatagccatgcaaggtgaagaatgtcaccaactcagaaacccttcttcattgacgtgtccctcactcactctcctctcttcactataaatcgccactcttcgtgttctccacttcaccaactccttcaaacttattaacactttccttagttcaatatggggaagcccttcttcactctctctctttcttccctttgcttgctactcttgtcgagtgcattctattacctccagcaagttcaacgagtgccaactcaacaacctcaacgcgttggaacccgaccaccgcgttgagtccgaaggtggtcttattgaaacatggaactctcaacaccctgagctgcaatgcgccggtgtcactgtttccaaacgcaccctcaaccgcaacggcctccacttgccatcttactcaccttatcccccaaaatgatcattgtcgttcaaggtgcgtaatattagtaagaagtatttatcagcttaacgtgataacaataatagtaatatgaaatatttattaaatttttataattaatctctgctagaaaatttgattaatcattttagtagaatttg

SEQ ID NO: 3731 - DNA, 646 bp, Artificial
  Mutations within GlyA3B4 introduced by GmGlyA3B4_T02TALE nuclease
gttcatgtacggttgcagatataaacgaagcatagcttatgtatgaggtgtaacaaaattggaaacaatagccatgcaaggtgaagaatgtcaccaactcagaaacccttcttcattgacgtgtccctcactcactctcctctcttcactataaatcgccactcttcgtgttctccacttcaccaactccttcaaacttattaacactttccttagttcaatatggggaagcccttcttcactctctctctttcttcccttgctattacctccagcaagttcaacgagtgccaactcaacaacctcaacgcgttggaacccgaccaccgcgttgagtccgaaggtggtcttattgaaacatggaactctcaacacccctgagctgcaatgcgccggtgtcactgtttccaaacgcaccctcaaccgcaacggcctccacttgccatcttactcaccttatcccccaaatgatcattgtcgttcaaggtgcgtaatattagtaagaagtatttatcagcttaacgtgataacaataatagtaatatgaaatatttattaaattttttataattaatctctgctagaaaatttgattaatcatttttagtagaatttgttttttctcaactaggttttaaacaccaca

SEQ ID NO: 3732 - DNA, 617 bp, Artificial
  Mutations within GlyA3B4 introduced by GmGlyA3B4_T02TALE nuclease
gttcatgtacggttgcagatataaacgaagcatagcttatgtatgaggtgtaacaaaattggaaacaatagccatgcaaggtgaagaatgtcaccaactcagaaacccttcttcattgacgtgtccctcactcactctcctctcttcactataaatcgccactcttcgtgttctccacttcaccaactccttcaaacttattaacactttccttagttcaatatggggaagcccttcttcactctctctctttctccagcaagttcaacgagtgccaactcaacaacctcaacgcgttggaacccgaccaccgcgttgagtccgaaggtggtcttattgaaacatggaactctcaacaccctgagctgcaatgcgccggtgtcactgtttccaaacgcaccctcaaccgcaacggcctccacttgccatcttactcaccttatccccaaatgatcattgtcgttcaaggtgcgtcaatattagtaagaagtatttatcagcttaacgtgataacaataatagtaatatgaaatatttattaattttttataattaatctctgctagaaaatttgattaatcatttttagtagaatttgtttttctcaactaggtttt

SEQ ID NO: 3733 - DNA, 649 bp, Artificial; identical to SEQ ID NO: 858
  Mutations within GlyA3B4 introduced by GmGlyA3B4_T02TALE nuclease

SEQ ID NO: 3734 - DNA, 655 bp, Artificial
  Mutations within GlyA3B4 introduced by GmGlyA3B4_T02TALE nuclease
gttcatgtacggttgcagatataaacgaagcatagcttatgtatgaggtgtaacaaaattggaaacaatagccatgcaaggtgaagaatgtcaccaactcagaaacccttcttcattgacgtgtccctcactcactctcctctcttcactataaatcgccactcttcgtgttctccacttcaccaactccttcaaacttattaacactttccttagttcaatatggggaagcccttcttcactctctctctttcttccctttgcttgctactcttgtcgagtgcattgctattacctccagcaagttcaacgagtgccaactcaacaacctcaacgcgttggaacccgaccaccgcgttgagtccgaaggtggtcttattgaaacatggaactctcaacaccctgagctgcaatgcgccggtgtcactgtttccaaacgcaccctcaaccgcaacggcctccacttgccatcttactcaccttatccccaaatgatcattgtcgttcaaggtgcgtaatattagtaagaagtatttatcagcttaacgtgataacaataatagtaatatgaaaatatttattaaaatttttataattaatctctgctagaaaatttgattaatcattttagtagaatttgtttttctcaactagg

SEQ ID NO: 3735 - DNA, 663 bp, Artificial; identical to SEQ ID NO: 2045
  Mutations within GlyA3B4 introduced by GmGlyA3B4_T02TALE nuclease

SEQ ID NO: 3736 - DNA, 658 bp, Artificial; identical to SEQ ID NO: 3366
  Mutations within GlyA3B4 introduced by GmGlyA3B4_T02TALE nuclease

SEQ ID NO: 3737 - DNA, 620 bp, Artificial
  Mutations within GlyA3B4 introduced by GmGlyA3B4_T02TALE nuclease
gttcatgtacggttgcagatataaacgaagcatagcttatgtatgaggtgtaacaaaattggaaacaatagccatgcaaggtgaagaatgtcaccaactcagaaacccttcttcattgacgtgtccctcactcactctcctctcttcactataaatcgccactcttcgtgttctccacttcaccaactccttcaaacttattaacactttccttagttcaatatggggaagcccttcttcactctctctctttcttccctttgcttgctactcttgtcgagtgcattattacctccagcaagttcaacgagtgccaactcaacaacctcaacgcgttggaacccgaccaccgcgttgagtccgaaggtggtcttattgaaacatggaactctcaacaccctgagctgcaatgcgccggtgtcactgtttccaaacgcaccctcaaccgcaacggcctccacttgccatcttactcaccttatccccaaatgatcattgtcgttcaaggtgcgtaatattagtaagaagtatttatcagcttaacgtgataacaataatagtaatatgaaatatttattaaatttttataattaatctctgctagaaaatttgattaatca

SEQ ID NO: 3738 - DNA, 671 bp, Artificial
  Mutations within GlyA3B4 introduced by GmGlyA3B4_T02TALE nuclease
  misc_feature (533): n is a or c or t or g
gttcatgtacggttgcagatataaacgaagcatagcttatgtatgaggtgtaacaaaattggaaacaatagccatgcaaggtgaagaatgtcaccaactcagaaaccccttcttcattgacgtgtccctcactcactctcctctcttcactataaatcgccactcttcgtgttctccacttcaccaactccttcaaacttattaacactttccttagttcaatatggggaagcccttcttcactctctctctttcttccctttgcttgctactcttgtcgagtgcatttgctattacctccagcaagttcaacgagtgccaactcaacaacctcaacgcgttggaacccgaccaccgcgttgagtccgaaggtggtcttattgaaacatggaactctcaacaccctgagctgcaatgcgccggtgtcactgtttccaaacgcaccctcaaccgcaacggcctccacttgccatcttactcaccttatccccaaatgatcattgtcgttcaaggtgcgtaatattagtaagagnatttatcagcttaacgtgataacaataatagtaatatgaaaatatttattaaatttttataattaatctctgctagaaaatttgattaatcattttagtagaatttgtttttctcaactaggtttttaaaacaccaca

SEQ ID NO: 3739 - DNA, 658 bp, Artificial
  Mutations within GlyA3B4 introduced by GmGlyA3B4_T02TALE nuclease
gttcatgtacggttgcagatataaacgaagcatagcttatgtatgaggtgtaacaaaaattggaaacaatagccatgcaaggtgaagaatgtcaccaactcagaaacccttcttcattgacgtgtccctcactcactctcctctcttcactataaatcgccactcttcgtgttctccacttcaccaactccttcaaacttattaacactttccttagttcaatatggggaagcccttcttcactctctctctttcttccctttgcttgctactcttgtcgagtgatattaccctccagcaagttcaacgagtgccaactcaacaacctcaacgcgttggaacccgaccaccgcgttgagtccgaaggtggtcttattgaaacatggaactctcaacaccctgagctgcaatgcgccggtgtcactgtttccaaacgcaccctcaaccgcaacggcctccacttgccatcttactcaccttatcccccaaatgatcattgtcgttcaaggtgcgtaatattagtaagaagtatttatcagcttaacgtgataacaataatagtaatatgaaatatttattaaatttttataattaatctctgctagaaaatttgattaatcattttagtagaatttgttttctcaactaggttttaaaa

SEQ ID NO: 3740 - DNA, 669 bp, Artificial
  Mutations within GlyA3B4 introduced by GmGlyA3B4_T02TALE nuclease
gttcatgtacggttgcagatataaacgaagcatagcttatgtatgaggtgtaacaaaattggaaacaatagccatgcaaggtgaagaatgtcaccaactcagaaacccttcttcattgacgtgtccctcactcactctcctctcttcactataaatcgccactcttcgtgttctccacttcaccaactccttcaaacttattaacactttccttagttcaatatggggaagcccttcttcactctctctctttcttccctttgcttgctactcttgtcgagtgctttttgctattacctccagcaagttcaacgagtgccaactcaacaacctcaacgcgttggaacccgaccaccgcgttgagtccgaaggtggtcttattgaaacatggaactctcaacaccctgagctgcaatgcgccggtgtcactgtttccaaacgcaccctcaaccgcaacggcctccacttgccatcttactcaccttatccccaaatgatcattgtcgttcaaggtgcgtaatattagtaagagtatttatcagcttaacgtgataacaatatagtaatatgaaatatttattaaatttttataattaatctctgctagaaaatttgattaatcattttagtagaatttgtttttctcaactaggtttttaaaacaccaca

SEQ ID NO: 3741 - DNA, 666 bp, Artificial
  Mutations within GlyA3B4 introduced by GmGlyA3B4_T02TALE nuclease
gttcatgtacggttgcagatataaacgaagcatagcttatgtatgaggtgtaacaaaattggaaacaatagccatgcaaggtgaagaatgtcaccaactcagaaaccccttcttcattgacgtgtccctcactcactctcctctcttcactataaatcgccactcttcgtgttctccacttcaccaactccttcaaacttattaacactttccttagttcaatatgggggaagcccttcttcactctctctctttcttccctttgcttgctactcttgtcgagtgcattattacctccagcaagttcaacgagtgccaactcaacaacctcaacgcgttggaacccgaccaccgcgttgagtccgaaggtggtcttattgaaacatggaactctcaacaccctgagctgcaatgcgccggtgtcactgtttccaaacgcaccctcaaccgcaacggcctccacttgccatcttactcaccttatccccaaatgatcattgtcgttcaaggtgcgtaatattagtaagaagtatttatcagcttaacgtgataacaataatagtaatatgaaatatttattaaatttttataattaatctctgctagaaaatttgattaatcattttagtagaatttgtttttctcaactaggtttttaaaacacca

SEQ ID NO: 3742 - DNA, 642 bp, Artificial
  Mutations within GlyA3B4 introduced by GmGlyA3B4_T02TALE nuclease
gttcatgtacggttgcagatataaacgaagcatagcttatgtatgaggtgtaacaaaattggaaacaatagccatgcaaggtgaagaatgtcaccaactcagaaacccttcttcattgacgtgtccctcactcactctcctctcttcactataaatcgccactcttcgtgttctccacttcaccaactccttcaaacttattaacactttccttagttcaatatggggaagcccttcttcactctctctctttcttccctttgcttgctactctctattacctccagcaagttcaacgagtgccaactcaacaacctcaacgcgttggaacccgaccaccgcgttgagtccgaaggtggtcttattgaaacatggaactctcaacaccctgagctgcaatgcgccggtgtcactgtttccaaacgcaccctcaaccgcaacggcctccacttgccatcttactcaccttatcccccaaatgatcattgtcgttcaaggtgcgtaatattagtaagaagtatttatcagcttaacgtgataacaataatagtaatatgaaatatttattaaattttttataattaatctctgctagaaaatttgattaatctttttagtagaatttgttttttctcaactagg

SEQ ID NO: 3743 - DNA, 619 bp, Artificial
  Mutations within GlyA3B4 introduced by GmGlyA3B4_T02TALE nuclease
gttcatgtacggttgcagatataaacgaagcatagcttatgtatgaggtgtaacaaaattggaaacaatagccatgcaaggtgaagaatgtcaccaactcagaaacccttcttcattgacgtgtccctcactcactctcctctcttcactataaatcgccactcttcgtgttctccacttcaccaactccttcaaacttattaacactttccttagttcaatatggggaagcccttcttcactctctctctttcttccctttgcttgctactcttgtcgagtgcaattacctccagcaagttcaacgagtgccaactcaacaacctcaacgcgttggaacccgaccaccgcgttgagtccgaaggtggtcttattgaaacatggaactctcaacaccctgagctgcaatgcgccggtgtcactgtttccaaacgcaccctcaaccgcaacggcctccacttgccatcttactcaccttatcccccaaatgatcattgtcgttcaaggtgcgtaatattagtaagaagtatttatcagcttaacgtgataacaataatagtaatatgaaatatttattaaatttttataattaatctctgctagaaaatttgattaatca

SEQ ID NO: 3744 - DNA, 601 bp, Artificial
  Mutations within GlyA3B4 introduced by GmGlyA3B4_T02TALE nuclease
gttcatgtacggttgcagatataaacgaagcatagcttatgtatgaggtgtaacaaaattggaaacaatagccatgcaaggtgaagaatgtcaccaactcagaaacccttcttcattgacgtgtccctcactcactctcctctcttcactataaatcgccactcttcgtgttctccacttcaccaactccttcaaacttattaacactttccttagttcaatatgggggaagcccttcttcactctctctctttcttccctttgcttgctactcttgtcgagtgcatgctattacctccagcaagttcaacgagtgccaactcaacaacctcaacgcgttggaacccgaccaccgcgttgagtccgaaggtggtcttattgaaacatggaactctcaacaccctgagctgcaatgcgccggtgtcactgtttccaaacgcaccctcaaccgcaacggcctccacttgccatcttactcaccttatccccaaatgatcattgtcgttcaaggtgcgtaatattagtaagaagtatttatcagcttaacgtgataacaataatagtaatatgaaatatttattaaatttttataattaatctc

SEQ ID NO: 3745 - DNA, 671 bp, Artificial
  Mutations within GlyA3B4 introduced by GmGlyA3B4_T02TALE nuclease
  misc_feature (534): n is a or c or t or g
gttcatgtacggttgcagatataaacgaagcatagcttatgtatgaggtgtaacaaaattggaaacaatagccatgcaaggtgaagaatgtcaccaactcagaaaccccttcttcattgacgtgtccctcactcactctcctctcttcactataaatcgccactcttcgtgttctccacttcaccaactccttcaaacttattaacactttccttagttcaatatgggggaagcccttcttcactctctctctttcttccctttgcttgctactcttgtcgagtgcatgctattacctccagcaagttcaacgagtgccaactcaacaacctcaacgcgttggaacccgaccaccgcgttgagtccgaaggtggtcttattgaaacatggaactctcaacaccctgagctgcaatgcgccggtgtcactgtttccaaacgcaccctcaaccgcaacggcctccacttgccatcttactcaccttatcccccaaaatgatcattgtcgttcaaggtgcgtaatattagtaagagnatttatcagcttaacgtgataacaataatagtaatatgaaatatttattaaatttttataattaatctctgctagaaaatttgattaatcattttagtagaatttgtttttctcaactaggtttttaaaacaccaca

SEQ ID NO: 3746 - DNA, 615 bp, Artificial
  Mutations within GlyA3B4 introduced by GmGlyA3B4_T02TALE nuclease
gttcatgtacggttgcagatataaacgaagcatagcttatgtatgaggtgtaacaaaattggaaacaatagccatgcaaggtgaagaatgtcaccaactcagaaacccttcttcattgacgtgtccctcactcactctcctctcttcactataaatcgccactcttcgtgttctccacttcaccaactccttcaaacttattaacactttccttagttcaatatggggaagcccttcttcactctctctctttcttccctttgcttgctactcttgtcgactattacctccagcaagttcaacgagtgccaactcaacaacctcaacgcgttggaacccgaccaccgcgtgcgagtccgaaggtggtcttattgaaacatggaactctcaacaccctgagctgcaatgcgccggtgtcactgtttccaaacgcaccctcaaccgcaacggcctccacttgccatcttactcaccttatccccaaatgatcattgtcgttcaaggtgcgtaatattagtaagaagtatttatcagcttaacgtgataacaatatagtaatatgaaatatttattaaatttttataattaatctctgctagaaaatttgattaatca

SEQ ID NO: 3747 - DNA, 650 bp, Artificial; identical to SEQ ID NO: 1234
  Mutations within GlyA3B4 introduced by GmGlyA3B4_T02TALE nuclease

SEQ ID NO: 3748 - DNA, 666 bp, Artificial
  Mutations within GlyA3B4 introduced by GmGlyA3B4_T02TALE nuclease
  misc_feature (531): n is a or c or t or g
gttcatgtacggttgcagatataaacgaagcatagcttatgtatgaggtgtaacaaaattggaaacaatagccatgcaaggtgaagaatgtcaccaactcagaaacccttcttcattgacgtgtccctcactcactctcctctcttcactataaatcgccactcttcgtgttctccacttcaccaactccttcaaacttattaacactttccttagttcaatatggggaagcccttcttcactctctctctttcttccctttgcttgctactcttgtcgagtgcatgctattacctccagcaagttcaacgagtgccaactcaacaacctcaacgcgttggaacccgaccaccgcgttgagtccgaaggtggtcttattgaaacatggaactctcaacaccctgagctgcaatgcgccggtgtcactgtttccaaacgcaccctcaaccgcaacggcctccacttgccatcttactcaccttatccccaaatgatcattgtcgttcaaggtgcgtaatattagtaagaagnatttatcagcttaacgtgataacaataatagtaatatgaaatatttattaaatttttataattaatctctgctagaaaatttgattaatcattttagtagaatttgtttttctcaactaggtttttaaaacacca

SEQ ID NO: 3749 - DNA, 665 bp, Artificial; identical to SEQ ID NO: 2083
  Mutations within GlyA3B4 introduced by GmGlyA3B4_T02TALE nuclease

SEQ ID NO: 3750 - DNA, 567 bp, Artificial
  Mutations within GlyA3B4 introduced by GmGlyA3B4_T02TALE nuclease
gttcatgtacggttgcagatataaacgaagcatagcttatgtatgaggtgtaacaaaattggaaacaatagccatgcaaggtgaagaatgtcaccaactcagaaacccttcttcattgacgtgtccctcactcactctcctctcttcactataaatcgccactcttcgtgttctccacttcaccaactccttcaaacttattaacactttccttagttcaatatggggaagccctcaaccccaactccagcaagttcaacgagtgccaactcaacaacctcaacgcgttggaacccgaccaccgcgttgagtccgaaggtggtcttattgaaacatggaactctcaacaccctgagctgcaatgcgccggtgtcactgtttccaaacgcaccctcaaccgcaacggcctccacttgccatcttactcaccttatccccaaaatgatcattgtcgttcaaggtgcgtaatattagtaagaagtatttatcagcttaacgtgataacaataatagtaatatgaaatatttattaaattttttataattaatctctgctagaaaatttga

SEQ ID NO: 3751 - DNA, 664 bp, Artificial
  Mutations within GlyA3B4 introduced by GmGlyA3B4_T02TALE nuclease
gttcatgtacggttgcagatataaacgaagcatagcttatgtatgaggtgtaacaaaattggaaacaatagccatgcaaggtgaagaatgtcaccaactcagaaacccttcttcattgacgtgtccctcactcactctcctctcttcactataaatcgccactcttcgtgttctccacttcaccaactccttcaaacttattaacactttccttagttcaatatggggaagcccttcttcactctctctctttcttccctttgcttgctactcttgtcgagtgcatgcattacctccagcaagttcaacgagtgccaactcaacaacctcaacgcgttggaacccgaccaccgcgttgagtccgaaggtggtcttattgaaacatggaactctcaacaccctgagctgcaatgcgccggtgtcactgtttccaaacgcaccctcaaccgcaacggcctccacttgccatcttactcaccttatccccaaatgatcattgtcgttcaaggtgcgtaatattagtaagaagtatttatcagcttaacgtgataacaataatagtaatatgaaatatttattaaatttttataattaatctctgctagaaaatttgattaatcattttagtagaatttgttttctcaactaggtttttaaaacacca

SEQ ID NO: 3752 - DNA, 667 bp, Artificial
  Mutations within GlyA3B4 introduced by GmGlyA3B4_T02TALE nuclease
gttcatgtacggttgcagatataaacgaagcatagcttatgtatgaggtgtaacaaaattggaaacaatagccatgcaaggtgaagaatgtcaccaactcagaaacccttcttcattgacgtgtccctcactcactctcctctcttcactataaatcgccactcttcgtgttctccacttcaccaactccttcaaacttattaacactttccttagttcaatatggggaagcccttcttcactctctctctttcttccctttgcttgctactcttgtcgagtgcatgctattacctccagcaagttcaacgagtgccaactcaacaacctcaacgcgttggaacccgaccaccgcgttgagtccgaaggtggtcttattgaaacatggaactctcaacaccctgagctgcaatgcgccggtgtcactgtttccaaacgcaccctcaaccgcaacggcctccacttgccatcttactcaccttatccccaaatgatcattgtcgttcaaggtgcgtaatattagtaagaagtatttatcagcttaacgtgataacaataatagtaatatgaaaatatttattaaatttttataattaatctctgctagaaaatttgattaatcattttagtagaatttgttttctcaactaggttttaaaacaccaca

SEQ ID NO: 3753 - DNA, 657 bp, Artificial
  Mutations within GlyA3B4 introduced by GmGlyA3B4_T02TALE nuclease
gttcatgtacggttgcagatataaacgaagcatagcttatgtatgaggtgtaacaaaaattggaaacaatagccatgcaaggtgaagaatgtcaccaactcagaaacccttcttcattgacgtgtccctcactcactctcctctcttcactataaatcgccactcttcgtgttctccacttcaccaactccttcaaacttattaacactttccttagttcaatatggggaagcccttcttcactctctctctttcttccctttgcttgctactcttgtcgagtgcatgctattacctccagcaagttcaacgagtgccaactcaacaacctcaacgcgttggaacccgaccaccgcgttgagtccgaaggtggtcttattgaaacatggaactctcaacaccctgagctgcaatgcgccggtgtcactgtttccaaacgcaccctcaaccgcaacggcctccacttgccatcttactcaccttatccccaaatgatcattgtcgttcaaggtgcgtaatattagtaagaagtatttatcagcttaacgtgataacaatatagtaatatgaaatatttattaaatttttataattaatctctgctagaaaatttgattaatcattttagtagaatttgtttttctcaactaggttttt

SEQ ID NO: 3754 - DNA, 650 bp, Artificial
  Mutations within GlyA3B4 introduced by GmGlyA3B4_T02TALE nuclease
gttcatgtacggttgcagatataaacgaagcatagcttatgtatgaggtgtaacaaaattggaaacaatagccatgcaaggtgaagaatgtcaccaactcagaaacccttcttcattgacgtgtccctcactcactctcctctcttcactataaatcgccactcttcgtgttctccacttcaccaactccttcaaacttattaacactttccttagttcaatatggggaagcccttcttcactctctctctttcttccctttgcttgctactcttgtcgagtgcattattacctccagcaagttcaacgagtgccaactcaacaacctcaacgcgttggaacccgaccaccgcgttgagtccgaaggtggtcttattgaaacatggaactctcaacaccctgagctgcaatgcgccggtgtcactgtttccaaaacgcaccctcaaccgcaacggcctccacttgccatcttactcaccttatccccaaatgatcattgtcgttcaaggtgcgtaatattagtaagaagtatttatcagcttaacgtgataacaataatagtaatatgaaatatttattaaatttttataattaatctctgctagaaaatttgattaatcattttagtagaatttgttttctcaactagg

SEQ ID NO: 3755 - DNA, 640 bp, Artificial
  Mutations within GlyA3B4 introduced by GmGlyA3B4_T02TALE nuclease
gttcatgtacggttgcagatataaacgaagcatagcttatgtatgaggtgtaacaaaattggaaacaatagccatgcaaggtgaagaatgtcaccaactcagaaacccttcttcattgacgtgtccctcactcactctcctctcttcactataaatcgccactcttcgtgttctccacttcaccaactccttcaaacttattaacactttccttagttcaatatggggaagcccttcttcactctctctctttcttccctttgcttgctactcttgtcgagtttacctccagcaagttcaacgagtgccaactcaacaacctcaacgcgttggaacccgaccaccgcgttgagtccgaaggtggtcttattgaaacatggaactctcaacaccctgagctgcaatgcgccggtgtcactgtttccaaacgcaccctcaaccgcaacggcctccacttgccatcttactcaccttatccccaaatgatcttgtcgttcaaggtgcgtaatattagtaagaagtatttatcagcttaacgtgataacaataatagtaatatgaaatatttattaaatttttataattaatctctgctagaaaatttgattaatctttttagtagaattgtttttctcaacta

SEQ ID NO: 3756 - DNA, 664 bp, Artificial
  Mutations within GlyA3B4 introduced by GmGlyA3B4_T02TALE nuclease
gttcatgtacggttgcagatataaacgaagcatagcttatgtatgaggtgtaacaaaattggaaacaatagccatgcaaggtgaagaatgtcaccaactcagaaacccttcttcattgacgtgtccctcactcactctcctctcttcactataaatcgccactcttcgtgttctccacttcaccaactccttcaaacttattaacactttccttagttcaatatggggaagcccttcttcactctctctctttcttccctttgcttgctactcttgtcgagtgctttacctccagcaagttcaacgagtgccaactcaacaacctcaacgcgttggaacccgaccaccgcgttgagtccgaaggtggtcttattgaaacatggaactctcaacaccctgagctgcaatgcgccggtgtcactgtttccaaaacgcaccctcaaccgcaacggcctccacttgccatcttactcaccttatccccaaatgatcattgtcgttcaaggtgcgtaatattagtaagaagtatttatcagcttaacgtgataacaataatagtaatatgaaaatatttattaaaatttttataattaatctctgctagaaaatttgattaatcattttagtagaatttgtttttctcaactaggtttttaaaacacca

SEQ ID NO: 3757 - DNA, 600 bp, Artificial
  Mutations within GlyA3B4 introduced by GmGlyA3B4_T02TALE nuclease
gttcatgtacggttgcagatataaacgaagcatagcttatgtatgaggtgtaacaaaaattggaaacaatagccatgcaaggtgaagaatgtcaccaactcagaaacccttcttcattgacgtgtccctcactcactctcctctcttcactataaatcgccactcttcgtgttctccacttcaccaactccttcaaacttattaacactttccttagttcaatatgggggaagcccttcttcactctctctctttcttccctttgcttgctactcttgtcgagtgcatccagcaagttcaacgagtgccaactcaacaacctcaacgcgttggaacccgaccaccgcgttgagtccgaaggtggtcttattgaaacatggaactctcaacacctgagctgcaatgcgccggtgtcactgtttccaaacgcaccctcaaccgcaacggcctccacttgccatcttactcaccttatcccccaaatgatcattgtcgttcaaggtgcgtaaatattagtaagaagtatttatcagcttaacgtgataacaataatagtaatatgaaatatttattaaattttttataattaatctctgctag

SEQ ID NO: 3758 - DNA, 633 bp, Artificial; identical to SEQ ID NO: 1895
  Mutations within GlyA3B4 introduced by GmGlyA3B4_T02TALE nuclease

SEQ ID NO: 3759 - DNA, 653 bp, Artificial; identical to SEQ ID NO: 1779
  Mutations within GlyA3B4 introduced by GmGlyA3B4_T02TALE nuclease

SEQ ID NO: 3760 - DNA, 663 bp, Artificial; identical to SEQ ID NO: 2559
  Mutations within GlyA3B4 introduced by GmGlyA3B4_T02TALE nuclease

SEQ ID NO: 3761 - DNA, 665 bp, Artificial
  Mutations within GlyA3B4 introduced by GmGlyA3B4_T02TALE nuclease
  misc_feature (530): n is a or c or t or g
gttcatgtacggttgcagatataaacgaagcatagcttatgtatgaggtgtaacaaaattggaaacaatagccatgcaaggtgaagaatgtcaccaactcagaaacccttcttcattgacgtgtccctcactcactctcctctcttcactataaatcgccactcttcgtgttctccacttcaccaactccttcaaacttattaacactttccttagttcaatatggggaagcccttcttcactctctctctttcttccctttgcttgctactcttgtcgagtgcagctattacctccagcaagttcaacgagtgccaactcaacaacctcaacgcgttggaacccgaccaccgcgttgagtccgaaggtggtcttattgaaacatggaactctcaacaccctgagctgcaatgcgccggtgtcactgtttccaaacgcaccctcaaccgcaacggcctccacttgccatcttactcaccttatccccaaatgatcattgtcgttcaaggtgcgtaatattagtaagaagnatttatcagcttaacgtgataacaataatagtaatatgaaatatttattaaatttttataattaatctctgctagaaaatttgattaatcattttagtagaatttgtttttctcaactaggtttttaaaacacca

SEQ ID NO: 3762 - DNA, 651 bp, Artificial
  Mutations within GlyA3B4 introduced by GmGlyA3B4_T02TALE nuclease
gttcatgtacggttgcagatataaacgaagcatagcttatgtatgaggtgtaacaaaattggaaacaatagccatgcaaggtgaagaatgtcaccaactcagaaaccccttcttcattgacgtgtccctcactcactctcctctcttcactataaatcgccactcttcgtgttctccacttcaccaactccttcaaacttattaacactttccttagttcaatatggggaagcccttcttcactctctctctttcttccctttgcttgctactcttgtcgagtgctattacctccagcaagttcaacgagtgccaactcaacaacctcaacgcgttggaacccgaccaccgcgttgagtccgaaggtggtcttattgaaacatggaactctcaacaccctgagctgcaatgcgccggtgtcactgtttccaaacgcaccctcaaccgcaacggcctccacttgccatcttactcaccttatccccaaatgatcattgtcgttcaaggtgcgtaatattagtaagaagtatttatcagcttaacgtgataacaatatagtaatatgaaatatttattaaatttttataattaatctctgctagaaaatttgattaatcattttagtagaatttgttttctcaactaggtttt

SEQ ID NO: 3763 - DNA, 658 bp, Artificial; identical to SEQ ID NO: 2915
  Mutations within GlyA3B4 introduced by GmGlyA3B4_T02TALE nuclease

SEQ ID NO: 3764 - DNA, 661 bp, Artificial; identical to SEQ ID NO: 2035
  Mutations within GlyA3B4 introduced by GmGlyA3B4_T02TALE nuclease

SEQ ID NO: 3765 - DNA, 652 bp, Artificial
  Mutations within GlyA3B4 introduced by GmGlyA3B4_T02TALE nuclease
gttcatgtacggttgcagatataaacgaagcatagcttatgtatgaggtgtaacaaaattggaaacaatagccatgcaaggtgaagaatgtcaccaactcagaaacccttcttcattgacgtgtccctcactcactctcctctcttcactataaatcgccactcttcgtgttctccacttcaccaactccttcaaacttattaacactttccttagttcaatatggggaagcccttcttcactctctctctttcttccctttgcttgctactcttgtcgagtgcatctattacctccagcaagttcaacgagtgccaactcaacaacctcaacgcgttggaacccgaccaccgcgttgagtccgaaggtggtcttattgaaacatggaactctcaacaccctgagctgcaatgcgccggtgtcactgtttccaaacgcacccctcaaccgcaacggcctccacttgccatcttactcaccttatcccccaaatgatcattgtcgttcaaggtgcgtaatattagtaagaagtatttatcagcttaacgtgataacaataatagtaatatgaaatatttattaaatttttataattaatctctgctagaaaatttgattaatcattttagtagaatttgttttctcaactagg

SEQ ID NO: 3766 - DNA, 667 bp, Artificial
  Mutations within GlyA3B4 introduced by GmGlyA3B4_T02TALE nuclease
gttcatgtacggttgcagatataaacgaagcatagcttatgtatgaggtgtaacaaaattggaaacaatagccatgcaaggtgaagaatgtcaccaactcagaaacccttcttcattgacgtgtccctcactcactctcctctcttcactataaaatcgccactcttcgtgttctccacttcaccaaactccttcaaacttattaacactttccttagttcaatatggggaagcccttcttcactctctctctttcttccctttgcttgctactcttgtcgagtgcatgctattacctccagcaagttcaacgagtgccaactcaacaacctcaacgcgttggaacccgaccaccgcgttgagtccgaaggtggtcttattgaaacatggaactctcaacaccctgagctgcaatgcgccggtgtcactgtttccaaacgcaccctcaaccgcaacggcctccacttgccatcttactcaccttatccccaaatgatcattgtcgttcaaggtgcgtaatattagtaagaagtatttatcagcttaacgtgataacaataatagtaatatgaaatatttattaaatttttataattaatctctgctagaaaatttgattaatcattttagtagaatttgtttttctcaactaggttttaaaacacca

SEQ ID NO: 3767 - DNA, 509 bp, Artificial
  Mutations within GlyA3B4 introduced by GmGlyA3B4_T02TALE nuclease
gttcatgtacggttgcagatataaacgaagcatagcttatgtatgaggtgtaacaaaattggaaacaatagccatgcaaggtgaagaatgtcaccaactcagaaacccttcttcattgacgtgtccctcactcactctcctctcttcactataaatcgccactcttcgtgttctccacttcaccaactccttcaaacttattaacactttccttagttcaatatggggaagcccttcttcactctctctctttcttccctttgcttgctactcttgtcgagtgcaatgcgccggtgtcactgtttccaaacgcaccctcaaccgcaacggcctccacttgccatcttactcaccttatccccaaatgatcattgtcgttcaaggtgcgtaatattagtaagaagtatttatcagcttaacgtgataacaataatagtaatatgaaatatttattaaattttttataattaatctctgctagaaaatttgattaatcatttttagtagaa

SEQ ID NO: 3768 - DNA, 601 bp, Artificial
  Mutations within GlyA3B4 introduced by GmGlyA3B4_T02TALE nuclease
gttcatgtacggttgcagatataaacgaagcatagcttatgtatgaggtgtaacaaaattggaaacaatagccatgcaaggtgaagaatgtcaccaactcagaaacccttcttcattgacgtgtccctcactcactctcctctcttcactataaatcgccactcttcgtgttctccacttcaccaactccttcaaacttattaacactttccttagttcaatatggggaagcccttcttcactctctctctttcttccctttgcttgctactcttgtcgagtgccaactcaacaacctcaacgcgttggaacccgaccaccgcgttgaggttgttagtggtcttattgaaacatggaactctcaacaccctgagctgcaatgcgccggtgtcactgtttccaaacgcaccctcaaccgcaacggcctccacttgccatcttactcaccttatccccaaatgatcattgtcgttcaaggtgcgtaatattagtaagaagtatttatcagcttaacgtgataacaataatagtaatatgaaatatttattaaattttttataattaatctctgctagaaaatttgattaatcatttttagtag

SEQ ID NO: 3769 - DNA, 630 bp, Artificial
  Mutations within GlyA3B4 introduced by GmGlyA3B4_T02TALE nuclease
gttcatgtacggttgcagatataaacgaagcatagcttatgtatgaggtgtaacaaaattggaaacaatagccatgcaaggtgaagaatgtcaccaactcagaaacccttcttcattgacgtgtccctcactcactctcctctcttcactataaatcgccactcttcgtgttctccacttcaccaactccttcaaacttattaacactttccttagttcaatatggggaagcccttcttcactctctctctttcttccctttgcttgctactcttgtcgagtgcagctattacctccagcaagttcaacgagtgccaactcaacaacctcaacgcgttggaacccgaccaccgcgttgagtccgaaggtggtcttattgaaacatggaactctcaacaccctgagctgcaatgcgccggtgtcactgtttccaaacgcaccctcaaccgcaacggcctccacttgccatcttactcaccttatccccaaatgatcattgtcgttcaaggtgcgtaatattagtaagagtatttatcagcttaacgtgataacaatatagtaatatgaaatatttattaaatttttataattaatctctgctagaaaatttgattaatcattttagtagaa

SEQ ID NO: 3770 - DNA, 582 bp, Artificial
  Mutations within GlyA3B4 introduced by GmGlyA3B4_T02TALE nuclease
gttcatgtacggttgcagatataaacgaagcatagcttatgtatgaggtgtaacaaaattggaaacaatagccatgcaaggtgaagaatgtcaccaactcagaaacccttcttcattgacgtgtccctcactcactctcctctcttcactataaatcgccactcttcgtgttctccacttcaccaactccttcaaacttattaacactttccttagttcaatatggggaagcccttcttcactctctctctttctttccttagttcaatatggaacccgaccaccgcgttgagtccgaaggtggtcttattgaaacatggaactctcaacaccctgagctgcaatgcgccggtgtcactgtttccaaacgcaccctcaaccgcaacggcctccacttgccatcttactcaccttatcccccaaatgatcattgtcgttcaaggtgcgtaatattagtaagaagtatttatcagcttaacgtgataacaataatagtaatatgaaatatttattaaattttttataattaatctctgctagaaaatttgattaatcatttttagtagaatttgtttttctcaa

SEQ ID NO: 3771 - DNA, 664 bp, Artificial
  Mutations within GlyA3B4 introduced by GmGlyA3B4_T02TALE nuclease
gttcatgtacggttgcagatataaacgaagcatagcttatgtatgaggtgtaacaaaattggaaacaatagccatgcaaggtgaagaatgtcaccaactcagaaacccttcttcattgacgtgtccctcactcactctcctctcttcactataaatcgccactcttcgtgttctccacttcaccaactccttcaaacttattaacactttccttagttcaatatggggaagcccttcttcactctctctctttcttccctttgcttgctactcttgtcgagtgcattgctattacctccagcaagttcaacgagtgccaactcaacaacctcaacgcgttggaacccgaccaccgcgttgagtccgaaggtggtcttattgaaacatggaactctcaacaccctgagctgcaatgcgccggtgtcactgtttccaaacgcaccctcaaccgcaacggcctccacttgccatcttactcaccttatccccaaatgatcattgtcgttcaaggtgcgtaatattagtaagagtatttatcagcttaacgtgataacaatatagtaatatgaaatatttattaaatttttataattaatctctgctagaaaatttgattaatcattttagtagaatttgtttttctcaactaggttttaaaacacca

SEQ ID NO: 3772 - DNA, 664 bp, Artificial
  Mutations within GlyA3B4 introduced by GmGlyA3B4_T02TALE nuclease
gttcatgtacggttgcagatataaacgaagcatagcttatgtatgaggtgtaacaaaaattggaaacaatagccatgcaaggtgaagaatgtcaccaactcagaaaccccttcttcattgacgtgtccctcactcactctcctctcttcactataaatcgccactcttcgtgttctccacttcaccaactccttcaaacttattaacactttccttagttcaatatggggaagcccttcttcactctctctctttcttccctttgcttgctactcttgtcgagtgctttgctattacctccagcaagttcaacgagtgccaactcaacaacctcaacgcgttggaacccgaccaccgcgttgagtccgaaggtggtcttattgaaacatggaactctcaacaccctgagctgcaatgcgccggtgtcactgtttccaaacgcaccctcaaccgcaacggcctccacttgccatcttactcaccttatccccaaatgatcattgtcgttcaaggtgcgtaatattagtaagagtatttatcagcttaacgtgatacaatatagtaatatgaaatatttattaaatttttataattaatctctgctagaaaatttgattaatcattttagtagaatttgttttctcaactaggtttttaaaacacc

SEQ ID NO: 3773 - DNA, 654 bp, Artificial
  Mutations within GlyA3B4 introduced by GmGlyA3B4_T02TALE nuclease
gttcatgtacggttgcagatataaacgaagcatagcttatgtatgaggtgtaacaaaattggaaacaatagccatgcaaggtgaagaatgtcaccaactcagaaacccttcttcattgacgtgtccctcactcactctcctctcttcactataaatcgccactcttcgtgttctccacttcaccaactccttcaaacttattaacactttccttagttcaatatggggaagcccttcttcactctctctctttcttccctttgcttgctactcttgtcgagtgccctggcacagcaccggcaacagcgcctgcaccgtctccagcgcctgcttgccaccaatattgctggcgatggcccaccaccttgctattacctccagcaagttcaacgagtgccactcaacaacctcaacgcgttggaacccgaccaccgcgttgagtccgaaggtggtcttattgaaacatggaactctcaacaccctgagctgcaatgcgccggtgtcactgtttccaaacgcaccctcaaccgcaacggcctccacttgccatcttactcaccttatccccaaatgatcattgtcgttcaaggtgcgtaatattagtaagaagtatttatcagcttaacgtgataacaataatagtaatatgaaaat

SEQ ID NO: 3774 - DNA, 665 bp, Artificial; identical to SEQ ID NO: 3594
  Mutations within GlyA3B4 introduced by GmGlyA3B4_T02TALE nuclease

SEQ ID NO: 3775 - DNA, 674 bp, Artificial
  Mutations within GlyA3B4 introduced by GmGlyA3B4_T02TALE nuclease
  misc_feature (545): n is a or c or t or g
gttcatgtacggttgcagatataaacgaagcatagcttatgtatgaggtgtaacaaaattggaaacaatagccatgcaaggtgaagaatgtcaccaactcagaaacccttcttcattgacgtgtccctcactcactctcctctcttcactataaatcgccactcttcgtgttctccacttcaccaactccttcaaacttattaacactttccttagttcaatatggggaagcccttcttcactctctctctttcttccctttgcttgctactcttgtcgagtgcatgcttattaatctccacgcaagttccaatcagagtgccacctacaatcaaacctcaaacctcacgtttggaaacccgaccaccgcgttgagtccgaaggtggtcttattgaaacatggaactctcaacaccctgagctgcaatgcgccggtgtcactgtttccaaacgcaccctcaacgcaacggcctccacttgccatcttactcaccttatcccccaaatgatcattgtcgttcaaggtgcgtaatattagtaagagnattttatcagcttaacgtgataacaataatagtaatatgaaatatttattaaatttttataattaatctctgctagaaaatttgattaatcattttagtagaatttgtttttctcaactaggttttaaa

SEQ ID NO: 3776 - DNA, 568 bp, Artificial
  Mutations within GlyA3B4 introduced by GmGlyA3B4_T02TALE nuclease
gttcatgtacggttgcagatataaacgaagcatagcttatgtatgaggtgtaacaaaattggaaacaatagccatgcaaggtgaagaatgtcaccaactcagaaacccttcttcattgacgtgtccctcactcactctcctctcttcactataaatcgccactcttcgtgttctccacttcaccaactccttcaaacttattaacactttccttagttcaatatggggaagcccttcttcactctctctctttcttccctttgcgggtccgaaggtggtcttattgaaacatggaactctcaacaccctgagctgcaatgcgccggtgtcactgtttccaaacgcaccctcaaccgcaacggcctccacttgccatcttactcaccttatccccaaatgatcattgtcgttcaaggtgcgtaatattagtaagaagtatttatcagcttaacgtgataacaataatagtaatatgaaatatttattaaattttttataattaatctctgctagaaaatttgattaatcattttagtagaatttgtttttctcaactaggttttaaaca

SEQ ID NO: 3777 - DNA, 653 bp, Artificial
  Mutations within GlyA3B4 introduced by GmGlyA3B4_T02TALE nuclease
gttcatgtacggttgcagatataaacgaagcatagcttatgtatgaggtgtaacaaaattggaaacaatagccatgcaaggtgaagaatgtcaccaactcagaaacccttcttcattgacgtgtccctcactcactctcctctcttcactataaatcgccactcttcgtgttctccacttcaccaactccttcaaacttattaacactttccttagttcaatatggggaagcccttcttcactctctctctttcttccctttgcttgctactcttgtcgagtgcatattacctccagcaagttcaacgagtgccaactcaacaacctcaacgcgttggaacccgaccaccgcgttgagtccgaaggtggtcttattgaaacatggaactctcaacaccctgagctgcaatgcgccggtgtcactgtttccaaacgcaccctcaaccgcaacggcctccacttgccatcttactcaccttatcccccaaatgatcattgtcgttcaaggtgcgtaatattagtaagaagtatttatcagcttaacgtgataacaataatagtaatatgaaatatttattaaatttttataattaatctctgctagaaaatttgattaatcattttagtagaatttgttttctcaactaggtttt

SEQ ID NO: 3778 - DNA, 658 bp, Artificial
  Mutations within GlyA3B4 introduced by GmGlyA3B4_T02TALE nuclease
gttcatgtacggttgcagatataaacgaagcatagcttatgtatgaggtgtaacaaaattggaaacaatagccatgcaaggtgaagaatgtcaccaactcagaaacccttcttcattgacgtgtccctcactcactctcctctcttcactataaatcgccactcttcgtgttctccacttcaccaactccttcaaacttattaacactttccttagttcaatatggggaagcccttcttcactctctctctttcttccctttgcttgctactcttgtcgagtgcatgcctccagcaagttcaacgagtgccaactcaacaacctcaacgcgttggaacccgaccaccgcgttgagtccgaaggtggtcttattgaaacatggaactctcaacaccctgagctgcaatgcgccggtgtcactgtttccaaacgcaccctcaaccgcaacggcctccacttgccatcttactcaccttatccccaaatgatcattgtcgttcaaggtgcgtaatattagtaagaagtatttatcagcttaacgtgataacaataatagtaatatgaaatatttattaaatttttataattaatctctgctagaaaatttgattaatcattttagtagaatttgttttctcaactaggttttaaaacacca

SEQ ID NO: 3779 - DNA, 660 bp, Artificial; identical to SEQ ID NO: 2553
  Mutations within GlyA3B4 introduced by GmGlyA3B4_T02TALE nuclease

SEQ ID NO: 3780 - DNA, 651 bp, Artificial; identical to SEQ ID NO: 2960
  Mutations within GlyA3B4 introduced by GmGlyA3B4_T02TALE nuclease

SEQ ID NO: 3781 - DNA, 657 bp, Artificial
  Mutations within GlyA3B4 introduced by GmGlyA3B4_T02TALE nuclease
gttcatgtacggttgcagatataaacgaagcatagcttatgtatgaggtgtaacaaaattggaaacaatagccatgcaaggtgaagaatgtcaccaactcagaaacccttcttcattgacgtgtccctcactcactctcctctcttcactataaatcgccactcttcgtgttctccacttcaccaactccttcaaacttattaacactttccttagttcaatatggggaagcccttcttcactctctctctttcttccctttgcttgctactcttgtcgagtgcatgcttcagcaagttcaacgagtgccaactcaacaacctcaacgcgttggaacccgaccaccgcgttgagtccgaaggtggtcttattgaaacatggaactctcaacaccctgagctgcaatgcgccggtgtcactgtttccaaacgcaccctcaaccgcaacggcctccacttgccatcttactcaccttatccccaaatgatcattgtcgttcaaggtgcgtaatattagtaagaagtatttatcagcttaacgtgataacaataatagtaatatgaaatatttattaaatttttataattaatctctgctagaaaatttgattaatcattttagtagaatttgttttctcaactaggttttaaaacacca

SEQ ID NO: 3782 - DNA, 627 bp, Artificial
  Mutations within GlyA3B4 introduced by GmGlyA3B4_T02TALE nuclease
gttcatgtacggttgcagatataaacgaagcatagcttatgtatgaggtgtaacaaaattggaaacaatagccatgcaaggtgaagaatgtcaccaactcagaaacccttcttcattgacgtgtccctcactcactctcctctcttcactataaatcgccactcttcgtgttctccacttcaccaactccttcaaacttattaacactttccttagttcaatatggggaagcccttcttcactctctctctttcttccctttgcaagttcaacgagtgccaactcaacaacctcaacgcgttggaacccgaccaccgcgttgagtccgaaggtggtcttattgaaacatggaactctcaacaccctgagctgcaatgcgccggtgtcactgtttccaaacgcaccctcaaccgcaacggcctccacttgccatcttactcaccttatccccaaatgatcattgtcgttcaaggtgcgtaatattagtaagaagtatttatcagcttaacgtgataacaataatagtaatatgaaatatttattaattttttataattaatctctgctagaaaatttgattaatcatttttagtagaatttgtttttctcaactaggtttttaaaaca

SEQ ID NO: 3783 - DNA, 665 bp, Artificial
  Mutations within GlyA3B4 introduced by GmGlyA3B4_T02TALE nuclease
gttcatgtacggttgcagatataaacgaagcatagcttatgtatgaggtgtaacaaaattggaaacaatagccatgcaaggtgaagaatgtcaccaactcagaaacccttcttcattgacgtgtccctcactcactctcctctcttcactataaatcgccactcttcgtgttctccacttcatcaactccttcaaacttattaacactttccttagttcaatatggggaagcccttcttcactctctctctttcttccctttgcttgctactcttgtcgagtgcatgctattacctccagcaagttcaacgagtgccaactcaacaacctcaacgcgttggaacccgaccaccgcgttgagtccgaaggtggtcttattgaaacatggaactctcaacaccctgagctgcaatgcgccggtgtcactgtttccaaacgcaccctcaaccgcaacggcctccacttgccatcttactcaccttatccccaaatgatcattgtcgttcaaggtgcgtaatattagtaagaagtatttatcagcttaacgtgataacaataatagtaatatgaaatatttattaaatttttataattaatctctgctagaaaatttgattaatcattttagtagaatttgtttttctcaactaggttttaaaacacca

SEQ ID NO: 3784 - DNA, 658 bp, Artificial
  Mutations within GlyA3B4 introduced by GmGlyA3B4_T02TALE nuclease
gttcatgtacggttgcagatataaacgaagcatagcttatgtatgaggtgtaacaaaattggaaacaatagccatgcaaggtgaagaatgtcaccaactcagaaacccttcttcattgacgtgtccctcactcactctcctctcttcactataaatcgccactcttcgtgttctccacttcaccaactccttcaaacttattaacactttccttagttcaatatggggaagcccttcttcactctctctctttcttccctttgcttgctactcttgtcgagtgcatgtccagcaagttcaacgagtgccaactcaacaacctcaacgcgttggaacccgaccaccgcgttgagtccgaaggtggtcttattgaaacatggaactctcaacaccctgagctgcaatgcgccggtgtcactgtttccaaacgcaccctcaaccgcaacggcctccacttgccatcttactcaccttatccccaaatgatcattgtcgttcaaggtgcgtaatattagtaagaagtatttatcagcttaacgtgataacaataatagtaatatgaaatatttattaaatttttataattaatctctgctagaaaatttgattaatcattttagtagaatttgtttttctcaactaggtttttaaaacacca

SEQ ID NO: 3785 - DNA, 651 bp, Artificial; identical to SEQ ID NO: 2077
  Mutations within GlyA3B4 introduced by GmGlyA3B4_T02TALE nuclease

SEQ ID NO: 3786 - DNA, 645 bp, Artificial
  Mutations within GlyA3B4 introduced by GmGlyA3B4_T02TALE nuclease
gttcatgtacggttgcagatataaacgaagcatagcttatgtatgaggtgtaacaaaattggaaacaatagccatgcaaggtgaagaatgtcaccaactcagaaaccccttcttcattgacgtgtccctcactcactctcctctcttcactataaatcgccactcttcgtgttctccacttcaccaactccttcaaacttattaacactttccttagttcaatatggggaagcccttcttcactctctctctttcttccctttgcttgctactcttgtcgagaacctccagcaagttcaacgagtgccaactcaacaacctcaacgcgttggaacccgaccaccgcgttgagtccgaaggtggtcttattgaaacatggaactctcaacaccctgagctgcaatgcgccggtgtcactgtttccaaacgcaccctcaaccgcaacggcctccacttgccatcttactcaccttatccccaaatgatcattgtcgttcaaggtgcgtaaatattagtaagaagtatttatcagcttaacgtgataacaataatagtaatatgaaatatttattaaattttttataattaatctctgctagaaaatttgattaatcatttttagtagaatttgttttttctcaacta

SEQ ID NO: 3787 - DNA, 715 bp, Artificial
  Mutations within GlyA3B4 introduced by GmGlyA3B4_T02TALE nuclease
gttcatgtacggttgcagatataaacgaagcatagcttatgtatgaggtgtaacaaaattggaaacaatagccatgcaaggtgaagaatgtcaccaactcagaaaaccccttcttcattgacgtgtcccctcactcactctcctctcttcactataaaatcgccactcttcgtgttctccacttcaccaactccttcaaacttattaacactttccttagttcaatatgggggaagcccttcttcactctctctctttcttccctttgcttgctactcttgtcgagtgcatgcttgaccccggagcaggtggtggccatcgccagccacgatggcggcaagcaggcgctggagactattacctccagcaagttcaacgagtgccaactcaacaacctcaacgcgttggaacccgaccaccgcgttgagtccgaaggtggtcttattgaaacatggaactctcaacaccctgagctgcaatgcgccggtgtcactgtttccaaacgcaccctcaaccgcaacggcctccacttgccatcttactcacctttatccccaaatgatcattgtcgttcaaggtgcgtaatattagtaagaagtatttatcagcttaacgtgataacaataatagtaatatgaaatatttattaaattttttataattaatctctgctagaaaaatttgattaatcatttttagtagaatttgtttttct

SEQ ID NO: 3788 - DNA, 637 bp, Artificial
  Mutations within GlyA3B4 introduced by GmGlyA3B4_T02TALE nuclease
gttcatgtacggttgcagatataaacgaagcatagcttatgtatgaggtgtaacaaaattggaaacaatagccatgcaaggtgaagaatgtcaccaactcagaaacccttcttcattgacgtgtccctcactcactctcctctcttcactataaatcgccactcttcgtgttctccacttcaccaactccttcaaacttattaacactttccttagttcaatatggggaagcccttcttcactctctctctttcttccctttgcttgctactcttgtcgagtgcactattacctccagcaagttcaacgagtgccaactcaacaacctcaacgcgttggaacccgaccaccgcgttgagtccgaaggtggtcttattgaaacatggaactctcaacaccctgagctgcaatgcgccggtgtcactgtttccaaacgcaccctcaaccgcaacggcctccacttgccatcttaactcaccttatccccaaatgatcattgtcgttcaaggtgcgtaatattagtaagaagtatttacagcttaacgtgatacaatatagtaatatgaaatatttattaaatttttataattaatctctgctagaaaatttgattaatcattttagtagaatttgtttt

SEQ ID NO: 3789 - DNA, 667 bp, Artificial; identical to SEQ ID NO: 1838
  Mutations within GlyA3B4 introduced by GmGlyA3B4_T02TALE nuclease

SEQ ID NO: 3790 - DNA, 618 bp, Artificial
  Mutations within GlyA3B4 introduced by GmGlyA3B4_T02TALE nuclease
gttcatgtacggttgcagatataaacgaagcatagcttatgtatgaggtgtaacaaaattggaaacaatagccatgcaaggtgaagaatgtcaccaactcagaaacccttcttcattgacgtgtccctcactcactctcctctcttcactataaatcgccactcttcgtgttctccacttcaccaaactccttcaaacttattaacactttccttagttcaatatggggaagcccttcttcactctctctctttcttccctttgcttgctactcttgtcgagtgcattattacctccagcaagttcaacgagtgccaactcaacaacctcaacgcgttggaacccgaccaccgcgttgagtccgaaggtggtcttattgaaacatggaactctcaacaccctgagctgcaatgcgccggtgtcactgtttccaaacgcaccctcaaccgcaacggcctccacttgccatcttactcaccttatcccaacgaatcattgtcgttcaaggtgcgtaatattagtaagaaagtatttatcagcttaacgtgataacaataaatagtaaatatgaaaatatttattaaaatttttataattaatctctgctagaaaatttga

SEQ ID NO: 3791 - DNA, 635 bp, Artificial
  Mutations within GlyA3B4 introduced by GmGlyA3B4_T02TALE nuclease
gttcatgtacggttgcagatataaacgaagcatagcttatgtatgaggtgtaacaaaattggaaacaatagccatgcaaggtgaagaatgtcaccaactcagaaacccttcttcattgacgtgtccctcactcactctcctctcttcactataaatcgccactcttcgtgttctccacttcaccaactccttcaaacttattaacactttccttagttcaatatggggaagcccttcttcactctctctctttcttccctttgcttgctactcttgtcgagtgcataacgagtgccaactcaacaacctcaacgcgttggaacccgaccaccgcgttgagtccgaaggtggtcttattgaaacatggaactctcaacaccctgagctgcaatgcgccggtgtcactgtttccaaacgcaccctcaaccgcaacggcctccacttgccatcttactcaccttatccccaaatgatcattgtcgttcaaggtgcgtaatattagtaagaagtatttatcagcttaacgtgataacaataatagtaatatgaaatatttattaaattttttataattaattctctgctagaaaatttgattaatcatttttagtagaatttgttttttctcaactagg

SEQ ID NO: 3792 - DNA, 620 bp, Artificial
  Mutations within GlyA3B4 introduced by GmGlyA3B4_T02TALE nuclease
gttcatgtacggttgcagatataaacgaagcatagcttatgtatgaggtgtaacaaaattggaaacaatagccatgcaaggtgaagaatgtcaccaactcagaaacccttcttcattgacgtgtccctcactcactctcctctcttcactataaatcgccactcttcgtgttctccacttcaccaactccttcaaacttattaacactttccttagttcaatatggggaagcccttcttcactctctctctttcttccctttgtttgctactcttgtcgagtgcattacctccagcaagttcaacgagtgccaactcaacaacctcaacgcgttggaacccgaccaccgcgttgagtccgaaggtggtcttattgaaacatggaactctcaacaccctgagctgcaatgcgccggtgtcactgtttccaaacgcacccctcaaccgcaacggcctcccacttgccatctttactcacctttaatcccccaaaatggatcattgtcgttcaaggtgctaatattagtaagaagtatttatcagcttaacgtgataacaatatagtaatatgaaatatttattaaatttttataattaatctctgctagaaaatttgattaa

SEQ ID NO: 3793 - DNA, 649 bp, Artificial
  Mutations within GlyA3B4 introduced by GmGlyA3B4_T02TALE nuclease
gttcatgtacggttgcagatataaacgaagcatagcttatgtatgaggtgtaacaaaattggaaacaatagccatgcaaggtgaagaatgtcaccaactcagaaacccttcttcattgacgtgtccctcactcactctcctctcttcactataaatcgccactcttcgtgttctccacttcaccaactccttcaaacttattaacactttccttagttcaatatggggaagcccttcttcactctctctctttcttccctttgcttgctactcttgtcgagtgctattacctccagcaagttcaacgagtgccaactcaacaacctcaacgcgttggaacccgaccaccgcgttgagtccgaaggtggtcttattgaaacatggaactctcaacaccctgagctgcaatgcgccggtgtcactgtttccaaacgcaccctcaaccgcaacggcctccacttgccatcttactcaccttatccccaaatgatcattgtcgttcaaggtgcgtaatattagtaagaagtatttatcagcttaacgtgataacaataatagtaatatgaaatatttattaaatttttataattaatctctgctagaaaatttgattaatcatttttagtagaatttgtttttctcaactagg

SEQ ID NO: 3794 - DNA, 624 bp, Artificial
  Mutations within GlyA3B4 introduced by GmGlyA3B4_T02TALE nuclease
gttcatgtacggttgcagatataaacgaagcatagcttatgtatgaggtgtaacaaaattggaaacaatagccatgcaaggtgaagaatgtcaccaactcagaaacccttcttcattgacgtgtccctcactcactctcctctcttcactataaatcgccactcttcgtgttctccacttcaccaactccttcaaacttattaacactttccttagttcaatatggggaagcccttcttcactctctctctttcttccctttgcttgctactctttgctattacctccagcaagttcaacgagtgccaactcaacaacctcaacgcgttggaacccgaccaccgcgttgagtccgaaggtggtcttattgaaacatggaactctcaacaccctgagctgcaatgcgccggtgtcactgtttccaaacgcaccctcaaccgcaacggcctccacttgccatcttactcaccttatccccaaatgatcattgtcgttcaaggtgcgtaatattagtaagaagtatttatcagcttaacgtgataacaataatagtaatatgaaatatttattaaattttttataattaatctctgctagaaaatttgattaatctttttagtagaa

SEQ ID NO: 3795 - DNA, 643 bp, Artificial
  Mutations within GlyA3B4 introduced by GmGlyA3B4_T02TALE nuclease
gttcatgtacggttgcagatataaacgaagcatagcttatgtatgaggtgtaacaaaattggaaacaatagccatgcaaggtgaagaatgtcaccaactcagaaacccttcttcattgacgtgtccctcactcactctcctctcttcactataaatcgccactcttcgtgttctccacttcaccaactccttcaaacttattaacactttccttagttcaatatggggaagcccttcttcactctctctctttcttccctttgcttgctactcttgtctattacctccagcaagttcaacgagtgccaactcaacaacctcaacgcgttggaacccgaccaccgcgttgagtccgaaggtggtcttattgaaacatggaactctcaacaccctgagctgcaatgcgccggtgtcactgtttccaaacgcaccctcaaccgcaacggcctccacttgccatcttactcaccttatcccccaaatgatcattgtcgttcaaggtgcgtaaatattagtaagaagtatttatcagcttaacgtgataacaataatagtaatatgaaatatttattaaattttttataattaatctctgctagaaaatttgattaatctttttagtagaattgttttttctcaacta

SEQ ID NO: 3796 - DNA, 636 bp, Artificial
  Mutations within GlyA3B4 introduced by GmGlyA3B4_T02TALE nuclease
gttcatgtacggttgcagatataaacgaagcatagcttatgtatgaggtgtaacaaaattggaaacaatagccatgcaaggtgaagaatgtcaccaactcagaaaccccttcttcattgacgtgtccctcactcactctcctctcttcactataaatcgccactcttcgtgttctccacttcaccaactccttcaaacttattaacactttccttagttcaatatggggaagcccttcttcactctctctctttcttccctttgcttgctactcttgtcgagtgcattgctattacctccagcaagttcaacgagtgccaactcaacaacctcaacgcgttggaccgaccaccgcgttgagtccgaaggtggtcttattgaaacatggaactctcaacaccctgagctgcaatgcgccggtgtcactgtttccaaacgcaccctcaaccgcaacggcctccacttgccatcttactcaccttatccccaaatgatcattgtcgttcaaggtgcgtaatattagtaagagtatttatcagcttaacgtgataacaataatagtaatatgaaatatttattaaatttttataattaatctctgctagaaaatttgattaatcattttagtagaatttg

SEQ ID NO: 3797 - DNA, 631 bp, Artificial; identical to SEQ ID NO: 2232
  Mutations within GlyA3B4 introduced by GmGlyA3B4_T02TALE nuclease

SEQ ID NO: 3798 - DNA, 663 bp, Artificial
  Mutations within GlyA3B4 introduced by GmGlyA3B4_T02TALE nuclease
gttcatgtacggttgcagatataaacgaagcatagcttatgtatgaggtgtaacaaaattggaaacaatagccatgcaaggtgaagaatgtcaccaactcagaaaccccttcttcattgacgtgtccctcactcactctcctctcttcactataaatcgccactcttcgtgttctccacttcaccaactccttcaaacttattaacactttccttagttcaatatgggggaagcccttcttcactctctctctttcttccctttgcttgctactcttgtcgagtgcatgtacctccagcaagttcaacgagtgccaactcaacaacctcaacgcgttggaacccgaccaccgcgttgagtccgaaggtggtcttattgaaacatggaactctcaacaccctgagctgcaatgcgccggtgtcactgtttccaaacgcacccctcaaccgcaacggcctcccacttgccaatcttactcaccttatcccccaaatgatcattgtcgttcaaggtgcgtaatattagtaagaagtatttatcagcttaacgtgatacaatatagtaatatgaaatatttattaaatttttataattaatctctgctagaaaatttgattaatcattttagtagaatttgttttctcaactaggttttaaacacca

SEQ ID NO: 3799 - DNA, 391 bp, Artificial
  Mutations within GlyA3B4 introduced by GmGlyA3B4_T02TALE nuclease
gttcatgtacggttgcagatataaacgaagcatagcttatgtatgaggtgtaacaaaattggaaacaatagccaatgcaaggtgaagaatgtcaccaactcagaaacccttcttcattgacgtgtccctcactcactctcctctcttcactataaatcgccactcttcgtgttctccacttcaccaaactccttcaaacttattaacactttccttagttcaacgagtgcccaactcaacaacctcaacgcgttggaacccgaccaccgcgttgagtccgaaggtggtcttattgaaacatggaactctcaacaccctgagctgcaatgcgccggtgttcactgtttccaaacgcaccctcaaccgcaacggcctccacttgccatcttac

SEQ ID NO: 3800 - DNA, 660 bp, Artificial
  Mutations within GlyA3B4 introduced by GmGlyA3B4_T02TALE nuclease
gttcatgtacggttgcagatataaacgaagcatagcttatgtatgaggtgtaacaaaattggaaacaatagccatgcaaggtgaagaatgtcaccaactcagaaacccttcttcattgacgtgtccctcactcactctcctctcttcactataaatcgccactcttcgtgttctccacttcaccaactccttcaaacttattaacactttccttagttcaatatggggaagcccttcttcactctctctctttcttccctttgcttgctactcttgtcgagtgcatacctccagcaagttcaacgagtgccaactcaacaacctcaacgcgttggaacccgaccaccgcgttgagtccgaaggtggtcttattgaaacatggaactctcaacaccctgagctgcaatgcgccggtgtcactgtttccaaacgcaccctcaaccgcaacggcctccacttgccatcttactcaccttatccccaaatgatcattgtcgttcaaggtgcgtaatattagtaagaagtatttatcagcttaacgtgataacaataatagtaatatgaaaatatttattaaatttttataattaatctctgctagaaaatttgattaatcattttagtagaatttgttttctcaactaggtttttaaaacacca

SEQ ID NO: 3801 - DNA, 639 bp, Artificial
  Mutations within GlyA3B4 introduced by GmGlyA3B4_T02TALE nuclease
gttcatgtacggttgcagatataaacgaagcatagcttatgtatgaggtgtaacaaaattggaaacaatagccatgcaaggtgaagaatgtcaccaactcagaaaccccttcttcattgacgtgtccctcactcactctcctctcttcactataaatcgccactcttcgtgttctccacttcaccaactccttcaaacttattaacactttccttagttcaatatggggaagcccttcttcactctctctctttcttccctttgcttgctattacctccagcaagttcaacgagtgccaactcaacaacctcaacgcgttggaacccgaccaccgcgttgagtccgaaggtggtcttattgaaacatggaactctcaacaccctgagctgcaatgcgccggtgtcactgtttccaaacgcaccctcaaccgcaacggcctccacttgccatcttactcaccttatcccccaaatgatcattgtcgttcaaggtgcgtaatattagtaagaagtatttatcagcttaacgtgataacaataatagtaatatgaaatatttattaaattttttataaattaattctctgctagaaaatttgattaatcattttttagtagaattttgttttttctcaacta

SEQ ID NO: 3802 - DNA, 635 bp, Artificial; identical to SEQ ID NO: 1775
  Mutations within GlyA3B4 introduced by GmGlyA3B4_T02TALE nuclease

SEQ ID NO: 3803 - DNA, 635 bp, Artificial; identical to SEQ ID NO: 1992
  Mutations within GlyA3B4 introduced by GmGlyA3B4_T02TALE nuclease

SEQ ID NO: 3804 - DNA, 661 bp, Artificial
  Mutations within GlyA3B4 introduced by GmGlyA3B4_T02TALE nuclease
gttcatgtacggttgcagatataaacgaagcatagcttatgtatgaggtgtaacaaaattggaaacaatagccatgcaaggtgaagaatgtcaccaactcagaaacccttcttcattgacgtgtccctcactcactctcctctcttcactataaatcgccactcttcgtgttctccacttcaccaactccttcaaacttattaacactttccttagttcaatatggggaagcccttcttcactctctctctttcttccctttgcttgctactcttgtcgcatctattacctccagcaagttcaacgagtgccaactcaacaacctcaacgcgttggaacccgaccaccgcgttgagtccgaaggtggtcttattgaaacatggaactctcaacaccctgagctgcaatgcgccggtgtcactgtttccaaacgcaccctcaaccgcaacggcctccacttgccatcttactcaccttatccccaaatgatcattgtcgttcaaggtgcgtaatattagtaagaagtatttatcagcttaacgtgataacaataatagtaatatgaaatatttattaaatttttataattaatctctgctagaaaatttgattaatcattttagtagaatttgtttttctcaactaggtttttaaaacacca

SEQ ID NO: 3805 - DNA, 663 bp, Artificial
  Mutations within GlyA3B4 introduced by GmGlyA3B4_T02TALE nuclease
  misc_feature (531): n is a or c or t or g
gttcatgtacggttgcagatataaacgaagcatagcttatgtatgaggtgtaacaaaattggaaacaatagccatgcaaggtgaagaatgtcaccaactcagaaacccttcttcattgacgtgtccctcactcactctcctctcttcactataaatcgccactcttcgtgttctccacttcaccaactccttcaaacttattaacactttccttagttcaatatggggaagcccttcttcactctctctctttcttccctttgcttgctactcttgtcgagtgcatgctattacctccagcaagttcaacgagtgccaactcaacaacctcaacgcgttggaacccgaccaccgcgttgagtccgaaggtggtcttattgaaacatggaactctcaacaccctgagctgcaatgcgccggtgtcactgtttccaaacgcaccctcaaccgcaacggcctccacttgccatcttactcaccttatccccaaatgatcattgtcgttcaaggtgcgtaatattagtaagaagnatttatcagcttaacgtgataacaatatagtaatatgaaatatttattaaatttttataattaatctctgctagaaaatttgattaatcattttagtagaatttgtttttctcaactaggttttaaacacca

SEQ ID NO: 3806 - DNA, 667 bp, Artificial; identical to SEQ ID NO: 3401
  Mutations within GlyA3B4 introduced by GmGlyA3B4_T02TALE nuclease

SEQ ID NO: 3807 - DNA, 636 bp, Artificial; identical to SEQ ID NO: 2411
  Mutations within GlyA3B4 introduced by GmGlyA3B4_T02TALE nuclease

SEQ ID NO: 3808 - DNA, 647 bp, Artificial
  Mutations within GlyA3B4 introduced by GmGlyA3B4_T02TALE nuclease
gttcatgtacggttgcagatataaacgaagcatagcttatgtatgaggtgtaacaaaattggaaacaatagccatgcaaggtgaagaatgtcaccaactcagaaacccttcttcattgacgtgtccctcactcactctcctctcttcactataaatcgccactcttcgtgttctccacttcaccaactccttcaaacttattaacactttccttagttcaatatggggaagcccttcttcactctctctctttcttccctttgcttgctactcttgtcgagtgcatgctattacctccagcaagttcaacgagtgccaactcaacaacctcaacgcgttggaacccgaccaccgcgttgagtccgaaggtggtcttattgaaacatggaactctcaacaccctgagctgcaatgcgccggtgtcactgtttccaaacgcaccctcaaccgcaacggcctccacttgccatcttactcaccttatccccaaatgatcattgtcgttcaaggtgcgtaatattagtaagagtatttatcagcttaacgtgataacaatatagtaatatgaaatatttattaaatttttataattaatctctgctagaaaatttgattaatcattttagtagaatttgttttctcaacta

SEQ ID NO: 3809 - DNA, 600 bp, Artificial
  Mutations within GlyA3B4 introduced by GmGlyA3B4_T02TALE nuclease
gttcatgtacggttgcagatataaacgaagcatagcttatgtatgaggtgtaacaaaattggaaacaatagccatgcaaggtgaagaatgtcaccaactcagaaaccccttcttcattgacgtgtccctcactcactctcctctcttcactataaatcgccactcttcgtgttctccacttcaccaactccttcaaacttattaacactttccttagttcaatatggggaagcccttcttcactctctctctttcttccctttgcttgctactcttgtcgagtgcctccagcaagttcaacgagtgccaactcaacaacctcaacgcgttggaacccgaccaccgcgttgagtccgaaggtggtcttattgaaacatggaactctcaacaccctgagctgcaatgcgccggtgtcactgtttccaaacgcaccctcaaccgcaacggcctccacttgccatcttactcaccttatccccaaatgatcattgtcgttcaaggtgcgtaaatattagtaagaagtatttatcagcttaacgtgataacaataatagtaatatgaaatatttattaaattttttataattaaatctctgctag

SEQ ID NO: 3810 - DNA, 724 bp, Artificial
  Mutations within GlyA3B4 introduced by GmGlyA3B4_T02TALE nuclease
gttcatgtacggttgcagatataaacgaagcatagcttatgtatgaggtgtaacaaaattggaaacaatagccatgcaaggtgaagaatgtcaccaactcagaaacccttcttcattgacgtgtccctcactcactctcctctcttcactataaatcgccactcttcgtgttctccacttcaccaactccttcaaacttattaacactttccttagttcaatatggggaagcccttcttcactctctctctttcttccctttgcttgctactcttgtcgagtgcatgcgtgggcctggcacagcaccggcaacagccgctggaccgtctccagcgcctgcttgccaccattattgctggcgatggccaccacctgctggggggtcaagccgtgggcctggcacagcaccggcaacagccgctggaccgtctttgctattacctccagcaagttcaacgagtgccaactcaacaacctcaacgcgttggaacccgaccaccgcgttgagtccgaaggtggtcttattgaaacatggaactctcaacaccctgagctgcaatgcgccggtgtcactgtttccaaacgcaccctcaaccgcaacggcctccacttgccatcttactcaccttatccccaaatgatcattgtcgttcaaggtgcgtaatattagtaagaagtatttatcagcttaacgtgataacaataatagtaatatgaaatattt

SEQ ID NO: 3811 - DNA, 469 bp, Artificial
  Mutations within GlyA3B4 introduced by GmGlyA3B4_T02TALE nuclease
gttcatgtacggttgcagatataaacgaagcatagcttatgtatgaggtgtaacaaaattggaaacaatagccatgcaaggtgaagaatgtcaccaactcagaaacccttcttcattgacgtgtccctcactcactctcctctcttcactataaatcgccactcttcgtgttctccacttcaccaactccttcaaacttattaacactttccttagttcaatatggggaagcccttcttcactctctctctttcttccctttgcttgctattacctccagcaagttcaacgagtgccaactcaacaacctcaacgcgttggaacccgaccaccgcgttgagtccgaaggtggtcttattgaaacatggaactctcaacaccctgagctgcaatgcgccggtgtcactgtttccaaacgcaccctcaaccgcaacggcctccacttgccatcttactcaccttaccctaa

SEQ ID NO: 3812 - DNA, 632 bp, Artificial; identical to SEQ ID NO: 1756
  Mutations within GlyA3B4 introduced by GmGlyA3B4_T02TALE nuclease

SEQ ID NO: 3813 - DNA, 669 bp, Artificial
  Mutations within GlyA3B4 introduced by GmGlyA3B4_T02TALE nuclease
gttcatgtacggttgcagatataaacgaagcatagcttatgtatgaggtgtaacaaaattggaaacaatagccatgcaaggtgaagaatgtcaccaactcagaaaccccttcttcattgacgtgtccctcactcactctcctctcttcactataaatcgccactcttcgtgttctccacttcaccaactccttcaaacttattaacactttccttagttcaatatgggggaagcccttcttcactctctctctttcttccctttgcttgctactcttgtcgagtgcatgctattacctccagcaagttcaacgagtgccaactcaacaacctcaacgcgttggaacccgaccaccgcgttgagtccgaaggtggtcttattgaaacatggaactctcaacaccctgagctgcaatgcgccggtgtcactgtttccaaacgcaccctcaaccgcaacggcctccacttgccatcttactcaccttatccccaaatgatcattgtcgttcaaggtgcgtaatattagtaagagtatttatcagcttaacgtgataacaataatagtaatatgaaatatttattaaatttttataattaatctctgctagaaaatttgattaatcattttagtagaatttgtttttctcaactaggtttttaaaacaccaca

SEQ ID NO: 3814 - DNA, 660 bp, Artificial
  Mutations within GlyA3B4 introduced by GmGlyA3B4_T02TALE nuclease
gttcatgtacggttgcagatataaacgaagcatagcttatgtatgaggtgtaacaaaattggaaacaatagccatgcaaggtgaagaatgtcaccaactcagaaacccttcttcattgacgtgtccctcactcactctcctctcttcactataaatcgccactcttcgtgttctccacttcaccaactccttcaaacttattaacactttccttagttcaatatggggaagcccttcttcactctctctctttcttccctttgcttgctactcttgtcgagctttgctattacctccagcaagttcaacgagtgccaactcaacaacctcaacgcgttggaacccgaccaccgcgttgagtccgaaggtggtcttattgaaacatggaactctcaacaccctgagctgcaatgcgccggtgtcactgtttccaaacgcacccctcaaccgcaacggcctccacttgccatcttactcaccttatccccaaatgatcattgtcgttcaaggtgcgtaatattagtaagagtatttatcagcttaacgtgataacaataatagtaatatgaaatatttattaaatttttataattaatctctgctagaaaatttgattaatcatttttagtagaatttgtttttctcaactaggtttttaaa

SEQ ID NO: 3815 - DNA, 582 bp, Artificial; identical to SEQ ID NO: 1832
  Mutations within GlyA3B4 introduced by GmGlyA3B4_T02TALE nuclease

SEQ ID NO: 3816 - DNA, 670 bp, Artificial
  Mutations within GlyA3B4 introduced by GmGlyA3B4_T02TALE nuclease
gttcatgtacggttgcagatataaacgaagcatagcttatgtatgaggtgtaacaaaattggaaacaatagccatgcaaggtgaagaatgtcaccaactcagaaacccttcttcattgacgtgtccctcactcactctcctctcttcactataaatcgccactcttcgtgttctccacttcaccaaactccttcaaacttattaacactttccttagttcaatatggggaaagcccttcttcactctctctctttcttccctttgcttgctactcttgtcgagtgcatctattacctccagcaagttcaacgagtgccaactcaacaacctcaacgcgttggaaacccgaccaccgcgttgagtccgaaggtggtcttattgaaacatggaactctcaacaccctgagctgcaatgcgccggtgtcactgtttccaaaacgcaccctcaaccgcaacggcctcccacttgccatcttactcaccttatcccccaaaatgatcattgtcgttcaaggtgcgtaatattagtaaagaaagtatttatcagcttaacgtgataacaataatagtaatatgaaatatttattaaaatttttataattaatctctgctagaaaatttgattaatcattttagtagaatttgtttttctcaactaggtttttaaaa

SEQ ID NO: 3817 - DNA, 639 bp, Artificial
  Mutations within GlyA3B4 introduced by GmGlyA3B4_T02TALE nuclease
  misc_feature (532): n is a or c or t or g
gttcatgtacggttgcagatataaacgaagcatagcttatgtatgaggtgtaacaaaattggaaacaatagccatgcaaggtgaagaatgtcaccaactcagaaacccttcttcattgacgtgtccctcactcactctcctctcttcactataaatcgccactcttcgtgttctccacttcaccaactccttcaaacttattaacactttccttagttcaatatggggaagcccttcttcactctctctctttcttccctttgcttgctactcttgtcgagtgcatgctattacctccagcaagttcaacgagtgccaactcaacaacctcaacgcgttggaacccgaccaccgcgttgagtccgaaggtggtcttattgaaacatggaactctcaacaccctgagctgcaatgcgccggtgtcactgtttccaaacgcaccctcaaccgcaacggcctccacttgccaatcttactcaccttatccccaaatgatcattgtcgttcaaggtgcgtaatattagtaagaagnatttatcagcttaacgtgataacaataatagtaatatgaaaatatttattaaatttttataattaatctctgctagaaaatttgattaatcattttagtagaatttg

SEQ ID NO: 3818 - DNA, 660 bp, Artificial; identical to SEQ ID NO: 1680
  Mutations within GlyA3B4 introduced by GmGlyA3B4_T02TALE nuclease

SEQ ID NO: 3819 - DNA, 662 bp, Artificial; identical to SEQ ID NO: 2209
  Mutations within GlyA3B4 introduced by GmGlyA3B4_T02TALE nuclease

SEQ ID NO: 3820 - DNA, 663 bp, Artificial; identical to SEQ ID NO: 2045
  Mutations within GlyA3B4 introduced by GmGlyA3B4_T02TALE nuclease

SEQ ID NO: 3821 - DNA, 662 bp, Artificial; identical to SEQ ID NO: 2196
  Mutations within GlyA3B4 introduced by GmGlyA3B4_T02TALE nuclease

SEQ ID NO: 3822 - DNA, 611 bp, Artificial
  Mutations within GlyA3B4 introduced by GmGlyA3B4_T02TALE nuclease
gttcatgtacggttgcagatataaacgaagcatagcttatgtatgaggtgtaacaaaattggaaacaatagccatgcaaggtgaagaatgtcaccaactcagaaacccttcttcattgacgtgtccctcactcactctcctctcttcactataaatcgccactcttcgtgttctccacttcaccaactccttcaaacttattaacactttccttagttcaatatggggaagcccttcttcactctctctctttcttccctttgcttgctactcttgttgctattacctccagcaagttcaacgagtgccaactcaacaacctcaacgcgttggaacccgaccaccgcgttgagtccgaaggtggtcttattgaaacatggaactctcaacaccctgagctgcaatgcgccggtgtcactgtttccaaacgcaccctcaaccgcaacggcctccacttgccatcttactcaccttatcccccaaatgatcattgtcgttcaaggtgcgtaaatattagtaagaagtatttatcagcttaacgtgataacaataatagtaatatgaaatatttattaaattttttaataattaatctctgctagaaaaatttg

SEQ ID NO: 3823 - DNA, 666 bp, Artificial; identical to SEQ ID NO: 1875
  Mutations within GlyA3B4 introduced by GmGlyA3B4_T02TALE nuclease

SEQ ID NO: 3824 - DNA, 678 bp, Artificial
  Mutations within GlyA3B4 introduced by GmGlyA3B4_T02TALE nuclease
gttcatgtacggttgcagatataaacgaagcatagcttatgtatgaggtgtaacaaaattggaaacaatagccatgcaaggtgaagaatgtcaccaactcagaaaccccttcttcattgacgtgtccctcactcactctcctctcttcactataaatcgccactcttcgtgttctccacttcaccaactccttcaaacttattaacactttccttagttcaatatggggaagcccttcttcactctctctctttcttccctttgcttgctactcttgtcgagtgcatgctattacctccagcaagttcaacgagtgccaactcaacaacctcaacgcgttggaacccgaccaccgcgttgagtccgaaggtggtcttattgaaacatggaactctcaacaccctgagctgcaatgcgccggtgtcactgtttccaaacgcaccctcaaccgcaacggcctccacttgccatcttactcaccttatccccaaatgatcattgtcgttcaaggtgcgtaatattagtaagagtatttatcagcttaacgtgataacaataatagtaatatgaaaatatttattaaatttttataattaatctctgctagaaaatttgattaatcattttagtagaatttgttttctcaactaggtttttaaacaccacacttgagactcc

SEQ ID NO: 3825 - DNA, 512 bp, Artificial
  Mutations within GlyA3B4 introduced by GmGlyA3B4_T02TALE nuclease
gttcatgtacggttgcagatataaacgaagcatagcttatgtatgaggtgtaacaaaattggaaacaatagccatgcaaggtgaagaatgtcaccaactcagaaaccccttcttcattgacgtgtccctcactcactctcctctcttcactataaatcgccactcttcgtgttctccacttcaccaactccttcaaacttattaacactttccttagttcaatatggggaagcccttcttcactctctctctttcttccctttgcttgctactcttgtcgagttgctattacctccagcaagttcaacgagtgccaactcaacaacctcaacgcgttggaacccgaccaccgcgttgagtccgaaggtggtcttattgaaacatggaactctcaacaccctgagctgcaatgcgccggtgtcactgtttccaaacgcaccctcaaccgcaacggcctccacttgccatcttactcaccttatcccccaaatgatcattgtcgttcaaggtgg

SEQ ID NO: 3826 - DNA, 688 bp, Artificial
  Mutations within GlyA3B4 introduced by GmGlyA3B4_T02TALE nuclease
gttcatgtacggttgcagatataaacgaagcatagcttatgtatgaggtgtaacaaaattggaaacaatagccatgcaaggtgaagaatgtcaccaactcagaaacccttcttcattgacgtgtccctcactcactctcctctcttcactataaatcgccactcttcgtgttctccacttcaccaactccttcaaacttattaacactttccttagttcaatatggggaagcccttcttcactctctctctttcttcccttcttcactctctctctttcttccctttggggataagcccttcttcactctctctctttcttccctttgcggtgtcatctactcttgctattacctccagcaagttcaacgagtgccaactcaacaacctcaacgcgttggaacccgaccaccgcgttgagtccgaaggtggtcttattgaaacatggaactctcaacaccctgagctgcaatgcgccggtgtcactgtttccaaacgcaccctcaaccgcaacggcctccacttgccatcttactcaccttatccccaaatgatcattgtcgttcaaggtgcgtaatattagtaagaagtatttatcagcttaacgtgataacaataatagtaatatgaaatattattaaattttttataattaattctctgctagaaaaatttgattaatcattttt

SEQ ID NO: 3827 - DNA, 652 bp, Artificial
  Mutations within GlyA3B4 introduced by GmGlyA3B4_T02TALE nuclease
gttcatgtacggttgcagatataaacgaagcatagcttatgtatgaggtgtaacaaaattggaaacaatagccatgcaaggtgaagaatgtcaccaactcagaaacccttcttcattgacgtgtccctcactcactctcctctcttcactataaatcgccactcttcgtgttctccacttcaccaactccttcaaacttattaacactttccttagttcaatatggggaagcccttcttcactctctctctttcttccctttgtcttgctattacctccagcaagttcaacgagtgccaactcaacaacctcaacgcgttggaacccgaccaccgcgttgagtccgaaggtggtcttattgaaacatggaactctcaacaccctgagctgcaatgcgccggtgtcactgtttccaaacgcaccctcaaccgcaacggcctccacttgccatcttactcaccttatccccaaatgatcattgtcgttcaaggtgcgtaatattagtaagaagtatttatcagctttaacgtgataacaataatagtaatatgaaatatttattaaattttttataattaatctctgctagaaaatttgattaatcatttttagtagaatttgttttttctcaactaggttttaaaacaccaca

SEQ ID NO: 3828 - DNA, 687 bp, Artificial
  Mutations within GlyA3B4 introduced by GmGlyA3B4_T02TALE nuclease
gttcatgtacggttgcagatataaacgaagcatagcttatgtatgaggtgtaacaaaattggaaacaatagccatgcaaggtgaagaatgtcaccaactcagaaacccttcttcattgacgtgtccctcactcactctcctctcttcactataaatcgccactcttcgtgttctccacttcaccaactccttcaaacttattaacactttccttagttcaatatggggaagcccttcttcactctctctctttcttccctttgcttgctactcttgtcgagtgcagaggcctgcatgcaaagggaagcccttacgtttctttgctattacctccagcaagttcaacgagtgccaactcaacaacctcaacgcgttggaacccgaccaccgcgttgagtccgaaggtggtcttattgaaacatggaactctcaacaccctgagctgcaatgcgccggtgtcactgtttccaaacgcaccctcaaccgcaacggcctccacttgccatcttactcaccttatccccaaatgatcattgtcgttcaaggtgcgtaatattagtaagaagtatttatcagcttaacgtgataacaataatagtaatatgaaatatttattaaatttttataattaattctctgctagaaaatttgattaatcatttttatgtagaatttgtttttctcaac

SEQ ID NO: 3829 - DNA, 554 bp, Artificial
  Mutations within GlyA3B4 introduced by GmGlyA3B4_T02TALE nuclease
gttcatgtacggttgcagatataaacgaagcatagcttatgtatgaggtgtaacaaaattggaaacaatagccatgcaaggtgaagaatgtcaccaactcagaaacccttcttcattgacgtgtccctcactcactctcctctcttcactataaatcgccactcttcgtgttctccacttcaccaactccttcaaacttattacctccagcaagttcaacgagtgccaactcaacaacctcaacgcgttggaacccgaccaccgcgttgagtccgaaggtggtcttattgaaacatggaactctcaacaccctgagctgcaatgcgccggtgtcactgtttccaaacgcaccctcaaccgcaacggcctccacttgccatcttactcaccttatccccaaatgatcattgtcgttcaaggtgcgtaatattagtaagaagtatttatcagcttaacgtgataacaataatagtaatatgaaatatttattaaattttttataattaatctctgctagaaaatttgattaatcatttttagtagaatttgttttt

SEQ ID NO: 3830 - DNA, 660 bp, Artificial
  Mutations within GlyA3B4 introduced by GmGlyA3B4_T02TALE nuclease
gttcatgtacggttgcagatataaacgaagcatagcttatgtatgaggtgtaacaaaattggaaacaatagccatgcaaggtgaagaatgtcaccaactcagaaacccttcttcattgacgtgtccctcactcactctcctctcttcactataaatcgccactcttcgtgttctccacttcaccaactccttcaaacttattaacactttccttagttcaatatggggaagcccttcttcactctctctctttcttccctttgcttgctactcttgtcgagtgctttacctccagcaagttcaacgagtgccaactcaacaacctcaacgcgttggaacccgaccaccgcgttgagtccgaaggtggtcttattgaaacatggaactctcaacaccctgagctgcaatgcgccggtgtcactgtttccaaacgcaccctcaaccgcaacggcctccacttgccatcttactcaccttatccccaaatgatcattgtcgttcaaggtgcgtaatattagtaagaagtatttatcagcttaacgtgataacaatatagtaatatgaaatatttattaaatttttataattaatctctgctagaaaatttgattaatcattttagtagaatttgtttttctcaactaggttttaaaacaccaa

SEQ ID NO: 3831 - DNA, 663 bp, Artificial
  Mutations within GlyA3B4 introduced by GmGlyA3B4_T02TALE nuclease
gttcatgtacggttgcagatataaacgaagcatagcttatgtatgaggtgtaacaaaattggaaacaatagccatgcaaggtgaagaatgtcaccaactcagaaacccttcttcattgacgtgtccctcactcactctcctctcttcactataaatcgccactcttcgtgttctccacttcaccaactccttcaaacttattaacactttccttagttcaatatggggaagcccttcttcactctctctctttcttccctttgcttgctactcttgtcgagtgcattttgtacctccagcaagttcaacgagtgccaactcaacaacctcaacgcgttggaacccgaccaccgcgttgagtccgaaggtggtcttattgaaacatggaactctcaacaccctgagctgcaatgcgccggtgtcactgtttccaaaacgcacccctcaaccgcaacggcctccacttgccatcttactcaccttatccccaaatgatcattgtcgttcaaggtgcgtaatattagtaagaagtatttatcagcttaacgtgataacaataatagtaatatgaaaatatttattaaatttttataattaatctctgctagaaaatttgattaatcattttagtagaatttgtttttctcaactaggtttttaaaa

SEQ ID NO: 3832 - DNA, 667 bp, Artificial
  Mutations within GlyA3B4 introduced by GmGlyA3B4_T02TALE nuclease
gttcatgtacggttgcagatataaacgaagcatagcttatgtatgaggtgtaacaaaattggaaacaatagccatgcaaggtgaagaatgtcaccaactcagaaacccttcttcattgacgtgtccctcactcactctcctctcttcactataaatcgccactcttcgtgttctccacttcaccaactccttcaaacttattaacactttccttagttcaatatgggggaagcccttcttcactctctctctttcttccctttgcttgctactcttgtcgagtgcatgcttgaccccccagcaggtggtggccatcgccagcaatggcggtggcaagcaggcgctggagacggtccagcggctgttgccggtgctgtgccaggcccactgctattacctccagcaagttcacgagtgccaactcaacaacctcaacgcgttggaacccgaccaccgcgttgagtcccgaaggtggtcttattgaaacatggaactctcaacacccctgagctgcaatgcgccggtgtcactgttttccaaacgcaccctcaaccgcaacgggcctccacttgccatcttactcaccttatccccaaatgatcattgtcgttcaaggtgcgtaatattagtaagaagtatttcatcagcttaacgtgataacaataat

SEQ ID NO: 3833 - DNA, 665 bp, Artificial
  Mutations within GlyA3B4 introduced by GmGlyA3B4_T02TALE nuclease
gttcatgtacggttgcagatataaacgaagcatagcttatgtatgaggtgtaacaaaattggaaacaatagccatgcaaggtgaagaatgtcaccaactcagaaaccccttcttcattgacgtgtccctcactcactctcctctcttcactataaatcgccactcttcgtgttctccacttcaccaactccttcaaacttattaacactttccttagttcaatatggggaagcccttcttcactctctctctttcttccctttgcttgctactcttgtcgagtgcatgctattacctccagcaagttcaacgagtgccaactcaacaacctcaacgcgttggaacccgaccaccgcgttgagtccgaaggtggtcttattgaaacatggaactctcaacaccctgagctgcaatgcgccggtgtcactgtttccaaacgcaccctcaaccgcaacggcctccacttgccatcttactcaccttatccccaaatgatcattgtcgttcaaggtgcgtaatattagtaagagtatttatcagcttaacgtgataacaatatagtaatatgaaatatttattaaatttttataattaatctctgctagaaaatttgattaatcattttagtagaatttgtttttctcaactaggtttttaaaacacca

SEQ ID NO: 3834 - DNA, 647 bp, Artificial
  Mutations within GlyA3B4 introduced by GmGlyA3B4_T02TALE nuclease
gttcatgtacggttgcagatataaacgaagcatagcttatgtatgaggtgtaacaaaattggaaacaatagccatgcaaggtgaagaatgtcaccaactcagaaacccttcttcattgacgtgtccctcactcactctcctctcttcactataaatcgccactcttcgtgttctccacttcaccaactccttcaaacttattaacactttccttagttcaatatggggaagcccttcttcactctctctctttcctggaagtgtcactatacctccagcaagttcaacgagtgccaactcaacaacctcaacgcgttggaacccgaccaccgcgttgagtccgaaggtggtcttattgaaacatggaactctcaacaccctgagctgcaatgcgccgggtgtcactgtttccaaacgcaccctcaaccgcaacggcctccacttgccatcttactcaccttatccccaaatgatcattgtcgttcaaggtgcgtaatattagtaagaagtatttatcagcttaacgtgataacaataatagtaactatgaaatatttattaaattttttataattaatctctgctagaaaatttgattaatcatttttagtagaatttgttttttctcaactaggttttaaacacca

SEQ ID NO: 3835 - DNA, 613 bp, Artificial
  Mutations within GlyA3B4 introduced by GmGlyA3B4_T02TALE nuclease
gttcatgtacggttgcagatataaacgaagcatagcttatgtatgaggtgtaacaaaattggaaacaatagccatgcaaggtgaagaatgtcaccaactcagaaaccccttcttcattgacgtgtccctcactcactctcctctcttcactataaatcgccactcttcgtgttctccacttcaccaactccttcaaacttattaacactttccttagttcaatatggggaagcccttcttcactctctctctttcttccctttgcttgctactcttgtcaactcaacaacctcaacgcgttggaacccgaccaccgcgttgagtccgaaggtggtcttattgaaacatggaactctcaacaccctgagctgcaatgcgccggtgtcactgtttccaaacgcaccctcaaccgcaacggcctccacttgccatcttactcaccttatccccaaatgatcattgtcgttcaaggtgcgtaatattagtaagaagtatttatcagcttaacgtgataacaataatagtaatatgaaatatttattaaattttttataattaatctctgctagaaaatttgattaatcatttttagtagaatttgtttttctcaact

SEQ ID NO: 3836 - DNA, 631 bp, Artificial
  Mutations within GlyA3B4 introduced by GmGlyA3B4_T02TALE nuclease
gttcatgtacggttgcagatataaacgaagcatagcttatgtatgaggtgtaacaaaattggaaacaatagccatgcaaggtgaagaatgtcaccaactcagaaacccttcttcattgacgtgtccctcactcactctcctctcttcactataaatcgccactcttcgtgttctccacttcaccaactccttcaaacttattaacactttccttagttcaatatggggaagcccttcttcactctctctctttcttccctttgcttgctactcttgtcgagtgcttacctccagcaagttcaacgagtgccaactcaacaacctcaacgcgttggaacccgaccaccgcgttgagtccgaaggtggtcttattgaaacatggaactctcaacaccctgagctgcaatgcgccggtgtcactgtttccaaacgcaccctcaaccgcaacggcctccacttgccatcttactcaccttatccccaaatgatcattgtcgttcaaggtgcgtaatattagtaagaagtatttatcagcttaacgtgataacaataatagtaatatgaaatatttattaaatttttataattaatctctgctagaaaatttgattaatcattttagtagaatttg

SEQ ID NO: 3837 - DNA, 656 bp, Artificial
  Mutations within GlyA3B4 introduced by GmGlyA3B4_T02TALE nuclease
gttcatgtacggttgcagatataaacgaagcatagcttatgtatgaggtgtaacaaaattggaaacaatagccatgcaaggtgaagaatgtcaccaactcagaaacccttcttcattgacgtgtccctcactcactctcctctcttcactataaatcgccactcttcgtgttctccacttcaccaactccttcaaacttattaacactttccttagttcaatatggggaagcccttcttcactctctctctttcttccctttgcttgctactcttgtcgttgctattacctccagcaagttcaacgagtgccaactcaacaacctcaacgcgttggaacccgaccaccgcgttgagtccgaaggtggtcttattgaaacatggaactctcaacaccctgagctgcaatgcgccggtgtcactgtttccaaacgcaccctcaaccgcaacggcctccacttgccatcttactcaccttatcccccaaatgatcattgtcgttcaaggtgcgtaatattagtaagaagtatttatcagcttaacgtgataacaataatagtaatatgaaatatttattaaatttttataattaatctctgctagaaaatttgattaatcattttagtagaatttgttttctcaactaggtttttaaaa

SEQ ID NO: 3838 - DNA, 590 bp, Artificial
  Mutations within GlyA3B4 introduced by GmGlyA3B4_T02TALE nuclease
gttcatgtacggttgcagatataaacgaagcatagcttatgtatgaggtgtaacaaaattggaaacaatagccatgcaaggtgaagaatgtcaccaactcagaaacccttcttcattgacgtgtccctcactcactctcctctcttcactataaatcgccactcttcgtgttctccacttcaccaactccttcaaacttattaacactttccttagttcaatatggggaagcccttcttcactctctctctttcaacgagtgccaactcaacaacctcaacgcgttggaacccgaccaccgcgttgagtccgaaggtggtcttattgaaacatggaactctcaacaccctgagctgcaatgcgccggtgtcactgtttccaaacgcaccctcaaccgcaacggcctccacttgccatcttactcaccttatccccaaatgatcattgtcgttcaaggtgcgtaatattagtaagaagtatttatcagcttaacgtgataacaataatagtaatatgaaatatttattaatttttataattaatctctgctagaaaatttgattaatcatttttagtagaatttgtttttc

SEQ ID NO: 3839 - DNA, 663 bp, Artificial; identical to SEQ ID NO: 2559
  Mutations within GlyA3B4 introduced by GmGlyA3B4_T02TALE nuclease

SEQ ID NO: 3840 - DNA, 617 bp, Artificial
  Mutations within GlyA3B4 introduced by GmGlyA3B4_T02TALE nuclease
gttcatgtacggttgcagatataaacgaagcatagcttatgtatgaggtgtaacaaaattggaaacaatagccatgcaaggtgaagaatgtcaccaactcagaaacccttcttcattgacgtgtccctcactcactctcctctcttcactataaatcgccactcttcgtgttctccacttcaccaactccttcaaacttattaacactttccttagttcaatatggggaagcccttcttcactctctctcttacctccagcaagttcaacgagtgccaactcaacaacctcaacgcgttggaacccgaccaccgcgttgagtccgaaggtggtcttattgaaacatggaactctcaacaccctgagctgcaatgcgccggtgtcactgtttccaaacgcaccctcaaccgcaacggcctccacttgccatcttactcaccttatccccaaatgatcattgtcgttcaaggtgcgtaatattagtaagaagtatttatcagcttaacgtgataacaataatagtaatatgaaatatttattaattttttataattaatctctgctagaaaatttgattaatcatttttagtagaatttgtttttctcaactaggtttt

SEQ ID NO: 3841 - DNA, 579 bp, Artificial; identical to SEQ ID NO: 1874
  Mutations within GlyA3B4 introduced by GmGlyA3B4_T02TALE nuclease

SEQ ID NO: 3842 - DNA, 654 bp, Artificial; identical to SEQ ID NO: 2585
  Mutations within GlyA3B4 introduced by GmGlyA3B4_T02TALE nuclease

SEQ ID NO: 3843 - DNA, 660 bp, Artificial; identical to SEQ ID NO: 1796
  Mutations within GlyA3B4 introduced by GmGlyA3B4_T02TALE nuclease

SEQ ID NO: 3844 - DNA, 666 bp, Artificial
  Mutations within GlyA3B4 introduced by GmGlyA3B4_T02TALE nuclease
  misc_feature (284): n is a or c or t or g
gttcatgtacggttgcagatataaacgaagcatagcttatgtatgaggtgtaacaaaaattggaaacaatagccatgcaaggtgaagaatgtcaccaactcagaaacccttcttcattgacgtgtccctcactcactctcctctcttcactataaatcgccactcttcgtgttctccacttcaccaactccttcaaacttattaacactttccttagttcaatatgggggaagcccttcttcactctctctctttcttccctttgcttgctactcttgtcgagnttgctattacctccagcaagttcaacgagtgccaactcaacaacctcaacgcgttggaacccgaccaccgcgttgagtccgaaggtggtcttattgaaacatggaactctcaacaccctgagctgcaatgcgccggtgtcactgtttccaaacgcaccctcaaccgcaacggcctccacttgccatcttactcaccttatcccccaaatgatcattgtcgttcaaggtgcgtaatattagtaagagtatttatcagcttaacgtgataacaataatagtaatatgaaatatttattaaatttttataattaatctctgctagaaaatttgattaatcattttagtagaatttgtttttctcaactagcttttaaacaccaca

SEQ ID NO: 3845 - DNA, 641 bp, Artificial
  Mutations within GlyA3B4 introduced by GmGlyA3B4_T02TALE nuclease
gttcatgtacggttgcagatataaacgaagcatagcttatgtatgaggtgtaacaaaattggaaacaatagccatgcaaggtgaagaatgtcaccaactcagaaacccttcttcattgacgtgtccctcactcactctcctctcttcactataaatcgccactcttcgtgttctccacttcaccaactccttcaaatcttattaacactttccttagttcaatatggggaagcccttcttcactctctctctttcttccctttgcttgctactcttgtcgagtgcctattacctccagcaagttcaacgagtgccaactcaacaacctcaacgcgttggaacccgaccaccgcgttgagtccgaaggtggtcttattgaaacatggaactctcaacaccctgagctgcaatgcgccggtgtcactgtttccaaacgcacccctcaaccgcaacggcctcccacttgccatcttactcaccttatccccaaatgatcattgtcgttcaaggtgcgtaatattagtaagaagtatttatcagcttaacgtgatacaatatagtaatatgaaatatttattaaatttttataattaatctctgctagaaaatttgattaatcatttttagtagaatttgttttt

SEQ ID NO: 3846 - DNA, 664 bp, Artificial
  Mutations within GlyA3B4 introduced by GmGlyA3B4_T02TALE nuclease
gttcatgtacggttgcagatataaacgaagcatagcttatgtatgaggtgtaacaaaaattggaaacaatagccatgcaaggtgaagaatgtcaccaactcagaaacccttcttcattgacgtgtccctcactcactctcctctcttcactataaatcgccactcttcgtgttctccacttcaccaactccttcaaacttattaacactttccttagttcaatatggggaagcccttcttcactctctctctttcttccctttgcttgctactcttgtcgagtgcatctattacctccagcaagttcaacgagtgccaactcaacaacctcaacgcgttggaacccgaccaccgcgttgagtccgaaggtggtcttattgaaacatggaactctcaacaccctgagctgcaatgcgccggtgtcactgtttccaaacgcaccctcaaccgcaacggcctccacttgccatcttactcaccttatccccaaatgatcattgtcgttcaaggtgcgtaatattagtaagaagtatttatcagcttaacgtgataacaatatagtaatatgaaatatttattaaatttttataattaatctctgctagaaaatttgattaatcattttagtagaatttgtttttctcaactaggtttttaaacacca

SEQ ID NO: 3847 - DNA, 643 bp, Artificial
  Mutations within GlyA3B4 introduced by GmGlyA3B4_T02TALE nuclease
gttcatgtacggttgcagatataaacgaagcatagcttatgtatgaggtgtaacaaaattggaaacaatagccatgcaaggtgaagaatgtcaccaactcagaaacccttcttcattgacgtgtccctcactcactctcctctcttcactataaatcgccactcttcgtgttctccacttcaccaactccttcaaacttattaacactttccttagttcaatatggggaagcccttcttcactctctctctttcttccctttgctattacctccagcaagttcaacgagtgccaactcaacaacctcaacgcgttggaacccgaccaccgcgttgagtccgaaggtggtcttattgaaacatggaactctcaacaccctgagctgcaatgcgccggtgtcactgtttccaaacgcaccctcaaccgcaacggcctccacttgccatcttactcaccttatcccccaaatgatcattgtcgttcaaggtgcgtaatattagtaagaagtatttatcagcttaacgtgataacaataatagtaatatgaaatatttattaaattttttataattaaatctctgctagaaaatttgattaaatcatttttagtagaatttgttttttctcaactaggttttaaaac

SEQ ID NO: 3848 - DNA, 668 bp, Artificial
  Mutations within GlyA3B4 introduced by GmGlyA3B4_T02TALE nuclease
gttcatgtacggttgcagatataaacgaagcatagcttatgtatgaggtgtaacaaaaattggaaacaatagccatgcaaggtgaagaatgtcaccaactcagaaacccttcttcattgacgtgtccctcactcactctcctctcttcactataaatcgccactcttcgtgttctccacttcaccaactccttcaaacttattaacactttccttagttcaatatggggaagcccttcttcactctctctctttcttccctttgcttgctactcttgtcgagtgcattgctattacctccagcaagttcaacgagtgccaactcaacaacctcaacgcgttggaacccgaccaccgcgttgagtccgaaggtggtcttattgaaacatggaactctcaacaccctgagctgcaatgcgccggtgtcactgtttccaaacgcaccctcaaccgcaacggcctccacttgccatcttactcaccttatccccaaatgatcattgtcgttcaaggtgcgtaatattagtaagagtatttatcagcttaacgtgataacaatatagtaatatgaaatatttattaaatttttataattaatctctgctagaaaatttgattaatcattttagtagaatttgtttttctcaactaggtttttaaaacaccaca

SEQ ID NO: 3849 - DNA, 667 bp, Artificial
  Mutations within GlyA3B4 introduced by GmGlyA3B4_T02TALE nuclease
  misc_feature (533): n is a or c or t or g
gttcatgtacggttgcagatataaacgaagcatagcttatgtatgaggtgtaacaaaattggaaacaatagccatgcaaggtgaagaatgtcaccaactcagaaaccccttcttcattgacgtgtccctcactcactctcctctcttcactataaatcgccactcttcgtgttctccacttcaccaactccttcaaacttattaacactttccttagttcaatatggggaagcccttcttcactctctctctttcttccctttgcttgctactcttgtcgagtgcatgctattacctccagcaagttcaacgagtgccaactcaacaacctcaacgcgttggaacccgaccaccgcgttgagtccgaaggtggtcttattgaaacatggaactctcaacaccctgagctgcaatgcgccggtgtcactgtttccaaacgcagccctcaaccgcaacggcctccacttgccatcttactcaccttatccccaaatgatcattgtcgttcaaggtgcgtaatattagtaagaagnatttatcagcttaacgtgataacaataatagtaatatgaaaatatttattaaatttttataattaatctctgctagaaaatttgattaatcattttagtagaatttgttttctcaactaggttttaaaacacca

SEQ ID NO: 3850 - DNA, 655 bp, Artificial; identical to SEQ ID NO: 2200
  Mutations within GlyA3B4 introduced by GmGlyA3B4_T02TALE nuclease

SEQ ID NO: 3851 - DNA, 650 bp, Artificial
  Mutations within GlyA3B4 introduced by GmGlyA3B4_T02TALE nuclease
gttcatgtacggttgcagatataaacgaagcatagcttatgtatgaggtgtaacaaaattggaaacaatagccatgcaaggtgaagaatgtcaccaactcagaaacccttcttcattgacgtgtccctcactcactctcctctcttcactataaatcgccactcttcgtgttctccacttcaccaactccttcaaacttattaacactttccttagttcaatatggggaagcccttcttcactctctctctttcttccctttgcttgctactcttgtcgagtgctttgctattacctccagcaagttcaacgagtgccaactcaacaacctcaacgcgttggaacccgaccaccgcgttgagtccgaaggtggtcttattgaaacatggaactctcaacaccctgagctgcaatgcgccggtgtcactgtttccaaacgcaccctcaaccgcaacggcctccacttgccatcttactcaccttatccccaaatgatcattgtcgttcaaggtgcgtaatattagtaagagtatttatcagcttaacgtgataacaatatagtaatatgaaatatttattaaatttttataattaatctctgctagaaaatttgattaatcattttagtagaatttgttttctcaactagg

SEQ ID NO: 3852 - DNA, 531 bp, Artificial
  Mutations within GlyA3B4 introduced by GmGlyA3B4_T02TALE nuclease
gttcatgtacggttgcagatataaacgaagcatagcttatgtatgaggtgtaacaaaattggaaacaatagccatgcaaggtgaagaatgtcaccaactcagaaacccttcttcattgacgtgtccctcactcactctcctctcttcactataaatcgccactcttcgtgttctccacttcaccaactccttcaaacttattaacactttccttagttcaacgagtgccaactcaacaacctcaacgcgttggaacccgaccaccgcgttgagtccgaaggtggtcttattgaaacatggaactctcaacaccctgagctgcaatgcgccggtgtcactgtttccaaacgcaccctcaaccgcaacggcctccacttgccatcttactcaccttatccccaaaatgatcattgtcgttcaaggtgcgtaatattagtaagaagtatttatcagcttaacgtgataacaataatagtaatatgaaatatttattaaattttttataattaatctctgctagaaaatttgatt

SEQ ID NO: 3853 - DNA, 651 bp, Artificial
  Mutations within GlyA3B4 introduced by GmGlyA3B4_T02TALE nuclease
  misc_feature (394): n is a or c or t or g
gttcatgtacggttgcagatataaacgaagcatagcttatgtatgaggtgtaacaaaattggaaacaatagccatgcaaggtgaagaatgtcaccaactcagaaacccttcttcattgacgtgtccctcactcactctcctctcttcactataaatcgccactcttcgtgttctccacttcaccaactccttcaaacttattaacactttccttagttcaatatggggaagcccttcttcactctctctctttcttccctttgcttgctactcttgtcgagtgcatgctattacctccagcaagttcaacgagtgccaactcaacaacctcaacgcgttggaacccgaccaccgcgttgagtccgaaggtggtcttattgaaacatggaactcncaacaccctgagctgcaatgcgccggtgtcactgtttccaaacgcaccctcaaccgcaacggcctccacttgccatcttactcaccttatccccaaatgatcattgtcgttcaaggtgcgtaatattagtaagagtatttatcagcttaacgtgataacaataatagtaatatgaaaatatttattaaatttttataattaatctctgctagaaaatttgattaatcattttagtagaatttgttttctcaactagg

SEQ ID NO: 3854 - DNA, 657 bp, Artificial
  Mutations within GlyA3B4 introduced by GmGlyA3B4_T02TALE nuclease
gttcatgtacggttgcagatataaacgaagcatagcttatgtatgaggtgtaacaaaattggaaacaatagccatgcaaggtgaagaatgtcaccaactcagaaacccttcttcattgacgtgtccctcactcactctcctctcttcactataaatcgccactcttcgtgttctccacttcaccaactccttcaaacttattaacactttccttagttcaatatggggaagcccttcttcactctctctctttcttccctttgcttgctactcttgtcgagtacctccagcaagttcaacgagtgccaactcaacaacctcaacgcgttggaacccgaccaccgcgttgagtccgaaggtggtcttattgaaacatggaactctcaacaccctgagctgcaatgcgccggtgtcactgtttccaaacgcaccctcaaccgcaacggcctccacttgccatcttactcaccttatcccccaaatgatcattgtcgttcaaggtgcgtaatattagtaagaagtatttatcagcttaacgtgataacaataatagtaatatgaaatatttattaaattttttataattaatctctgctagaaaatttgattaatctttttagtagaattgtttttctcaactaggtttaaaacaccaca

SEQ ID NO: 3855 - DNA, 649 bp, Artificial; identical to SEQ ID NO: 2830
  Mutations within GlyA3B4 introduced by GmGlyA3B4_T02TALE nuclease

SEQ ID NO: 3856 - DNA, 650 bp, Artificial; identical to SEQ ID NO: 2588
  Mutations within GlyA3B4 introduced by GmGlyA3B4_T02TALE nuclease

SEQ ID NO: 3857 - DNA, 649 bp, Artificial
  Mutations within GlyA3B4 introduced by GmGlyA3B4_T02TALE nuclease
gttcatgtacggttgcagatataaacgaagcatagcttatgtatgaggtgtaacaaaattggaaacaatagccatgcaaggtgaagaatgtcaccaactcagaaaccccttcttcattgacgtgtccctcactcactctcctctcttcactataaatcgccactcttcgtgttctccacttcaccaactccttcaaacttattaacactttccttagttcaatatggggaagcccttcttcactctctctctttcttccctttgcttgctactcttgtcgagttgctattacctccagcaagttcaacgagtgccaactcaacaacctcaacgcgttggaacccgaccaccgcgttgagtccgaaggtggtcttattgaaacatggaactctcaacaccctgagctgcaatgcgccggtgtcactgtttccaaacgcaccctcaaccgcaacggcctccacttgccatcttactcaccttatcccccaaatgatcattgtcgttcaaggtgcgtaatattagtaagaagtatttatcagcttaacgtgataacaatatagtaatatgaaatatttattaaatttttataattaatctctgctagaaaatttgattaatcattttagtagaatttgttttctcaactagg

SEQ ID NO: 3858 - DNA, 663 bp, Artificial
  Mutations within GlyA3B4 introduced by GmGlyA3B4_T02TALE nuclease
gttcatgtacggttgcagatataaacgaagcatagcttatgtatgaggtgtaacaaaattggaaacaatagccatgcaaggtgaagaatgtcaccaactcagaaacccttcttcattgacgtgtccctcactcactctcctctcttcactataaatcgccactcttcgtgttctccacttcaccaactccttcaaacttattaacactttccttagttcaatatggggaagcccttcttcactctctctctttcttccctttgcttgctactcttgtcgagtgcctattacctccagcaagttcaacgagtgccaactcaacaacctcaacgcgttggaacccgaccaccgcgttgagtccgaaggtggtcttattgaaacatggaactctcaacaccctgagctgcaatgcgccggtgtcactgtttccaaacgcaccctcaaccgcaacggcctccacttgccatcttactcaccttatccccaaatgatcattgtcgttcaaggtgcgtaatattagtaagaagtatttatcagcttaacgtgataacaataatagtaatatgaaatatttattaaatttttataattaatctctgctagaaaatttgattaatcattttagtagaatttgtttttctcaactaggtttttaaaacacca

SEQ ID NO: 3859 - DNA, 613 bp, Artificial
  Mutations within GlyA3B4 introduced by GmGlyA3B4_T02TALE nuclease
gttcatgtacggttgcagatataaacgaagcatagcttatgtatgaggtgtaacaaaattggaaacaatagccatgcaaggtgaagaatgtcaccaactcagaaacccttcttcattgacgtgtccctcactcactctcctctcttcactataaatcgccactcttcgtgttctccacttcaccaactccttcaaacttattaacactttccttagttcaatatggggaagcccttcttcactctctctctttcgttcctccagcaagttcaacgagtgccaactcaacaacctcaacgcgttggaaccgaccaccgcgttgagtccgaaggtggtcttattgaaacatggaactctcaacaccctgagctgcaatgcgccggtgtcactgtttccaaacgcaccctcaaccgcaacggcctccacttgccatcttactcaccttatccccaaatgatcattgtcgttcaaggtgcgtaatattagtaagaagtatttatcagcttaacgtgataacaataatagtaatatgaaatatttattaaatttttataattaatctctgctagaaaatttgattaatcatttttagtagaatttgtttttctcaact

SEQ ID NO: 3860 - DNA, 578 bp, Artificial
  Mutations within GlyA3B4 introduced by GmGlyA3B4_T02TALE nuclease
gttcatgtacggttgcagatataaacgaagcatagcttatgtatgaggtgtaacaaaattggaaacaatagccatgcaaggtgaagaatgtcaccaactcagaaacccttcttcattgacgtgtccctcactcactctcctctcttcactataaatcgccactcttcgtgttctccacttcaccaactccttcaaacttattaacactttccttagttcaatatggggaaagcccttcttgcactctctctctttcttccctttgcttgctactcttgtcgagtgccaactcaacaacctcaacgcgttggaacccgaccaccgcgttgagtccgaaggtggtctttattgaacatggaactctcaacaccctgaggctgcaatgcgccggtgtcactgtttccaaacgcaccctcaaccgcaacggcctccacttgccatcttactcaccttatccccaaatgatcattgtcgttcgaggtgcgtaatattagtaagaagtatttatcagcttaacgtgataacaataatagtaatatgaaatatttattaaattttttataattaatctctgctag

SEQ ID NO: 3861 - DNA, 649 bp, Artificial
  Mutations within GlyA3B4 introduced by GmGlyA3B4_T02TALE nuclease
gttcatgtacggttgcagatataaacgaagcatagcttatgtatgaggtgtaacaaaattggaaacaatagccatgcaaggtgaagaatgtcaccaactcagaaacccttcttcattgacgtgtccctcactcactctcctctcttcactataaatcgccactcttcgtgttctccacttcaccaactccttcaaacttattaacactttccttagttcaatatggggaagcccttcttcactctctctctttcttccctttgcttgctactcttgtcgagtgcatattacctccagcaagttcaacgagtgcaactcaacaacctcaacgcgttggaaacccgaccaccgcgttgagtccgaaggtggtcttattgaaacatggaactctcaacaccctgagctgcaatgcgccggtgtcactgtttccaaacgcaccctcaaccgcaacggcctccacttgccatcttactcaccttatccccaaatgatcattgtcgttcaaggtgcgtaatattagtaagaagtatttatcagcttaacgtgataacaataatagtaatatgaaatatttattaaatttttataattaatctctgctagaaaatttgattaatcattttagtagaatttgtttttctcaactagg

SEQ ID NO: 3862 - DNA, 600 bp, Artificial
  Mutations within GlyA3B4 introduced by GmGlyA3B4_T02TALE nuclease
gttcatgtacggttgcagatataaacgaagcatagcttatgtatgaggtgtaacaaaattggaaacaatagccatgcaaggtgaagaatgtcaccaactcagaaacccttcttcattgacgtgtccctcactcactctcctctcttcactataaatcgccactcttcgtgttctccacttcaccaactccttcaaacttattaacactttccttagttcaatatggggaagcccttcttcactctctctctttcttccctttgcttgctactcttgtcgagtgcattccagcaagttcaacgagtgccaactcaacaacctcaacgcgttggaacccgaccaccgcgttgagtccgaaggtggtcttattgaaacatggaactctcaacaccctgagctgcaatgcgccggtgtcactgtttccaaacgcaccctcaaccgcaacggcctccacttgccatcttactcaccttatccccaaatgatcattgtcgttcaaaggtgcgtaaatattagtaagaagtatttatcagcttaacgtgataacaataatagtaatatgaaatatttattaaattttttataattaatctctgctag

SEQ ID NO: 3863 - DNA, 659 bp, Artificial; identical to SEQ ID NO: 2761
  Mutations within GlyA3B4 introduced by GmGlyA3B4_T02TALE nuclease

SEQ ID NO: 3864 - DNA, 643 bp, Artificial
  Mutations within GlyA3B4 introduced by GmGlyA3B4_T02TALE nuclease
gttcatgtacggttgcagatataaacgaagcatagcttatgtatgaggtgtaacaaaattggaaacaatagccatgcaaggtgaagaatgtcaccaactcagaaacccttcttcattgacgtgtccctcactcactctcctctcttcactataaatcgccactcttcgtgttctccacttcaccaactccttcaaacttattaacactttccttagttcaatatggggaagcccttcttcactctctctctttcttccctttgcttgctactcttgtcgagtgcattgcttatatatctccatcgcaagttcaatcagacgtgtcacctacacaacctcaaccacgttggaacccgaccaccgcgttgagtccgaaggtggtcttattgaaacatggaactctcaacaccctgagctgcaatgcgccggtgtcactgtttccaaacgcaccctcaaccgcaacggcctccacttgccatcttactcaccttatccccaaatgatcattgtcgttcaaggtgcgtaatattagtaagaagtatttatcagcttaacgtgataacaataatagtaatatgaaaatatttattaaatttttataattaatctctgctagaaaatttgattaatcattttagtagaa

SEQ ID NO: 3865 - DNA, 647 bp, Artificial
  Mutations within GlyA3B4 introduced by GmGlyA3B4_T02TALE nuclease
gttcatgtacggttgcagatataaacgaagcatagcttatgtatgaggtgtaacaaaattggaaacaatagccatgcaaggtgaagaatgtcaccaactcagaaacccttcttcattgacgtgtccctcactcactctcctctcttcactataaatcgccactcttcgtgttctccacttcaccaactccttcaaacttattaacactttccttagttcaatatggggaagcccttcttcactctctctctttcttccctttgcttgctactcttgtcgagtgtacctccagcaagttcaacgagtgccaactcaacaacctcaacgcgttggaaacccgaccaccgcgttgagtccgaaggtggtcttattgaaacatggaactctcaacaccctgagctgcaatgcgccggtgtcactgtttccaaaacgcaccctcaaccgcaacggcctccacttgccatcttactcaccttatccccaaaatgatcattgtcgttcaaggtgcgtaatattagtaagaagtatttatcagcttaacgtgataacaataatagtaatatgaaatatttattaaatttttataattaatctctgctagaaaatttgattaatcattttagtagaatttgtttttctcaactagg

SEQ ID NO: 3866 - DNA, 649 bp, Artificial
  Mutations within GlyA3B4 introduced by GmGlyA3B4_T02TALE nuclease
gttcatgtacggttgcagatataaacgaagcatagcttatgtatgaggtgtaacaaaattggaaacaatagccatgcaaggtgaagaatgtcaccaactcagaaacccttcttcattgacgtgtccctcactcactctcctctcttcactataaatcgccactcttcgtgttctccacttcaccaactccttcaaacttattaacactttccttagttcaatatggggaagcccttcttcactctctctctttcttccctttgcttattacctccagcaagttcaacgagtgccaactcaacaacctcaacgcgttggaacccgaccaccgcgttgagtccgaaggtggtcttattgaaacatggaactctcaacaccctgagctgcaatgcgccggtgtcactgtttccaaacgcaccctcaaccgcaacggcctccacttgccatcttactcaccttatccccaaatgatcattgtcgttcaggtgcgtaatattagtaagaagtatttatcagctttaacgtgataacaataatagtaatatgaaatatttattaaatttttttataattaattctctgctagaaaatttgatttaatcatttttagtagaatttgttttttctcaactaggttttaaacaccaca

SEQ ID NO: 3867 - DNA, 652 bp, Artificial
  Mutations within GlyA3B4 introduced by GmGlyA3B4_T02TALE nuclease
gttcatgtacggttgcagatataaacgaagcatagcttatgtatgaggtgtaacaaaattggaaacaatagccatgcaaggtgaagaatgtcaccaactcagaaacccttcttcattgacgtgtccctcactcactctcctctcttcactataaatcgccactcttcgtgttctccacttcaccaactccttcaaacttattaacactttccttagttcaatatggggaagcccttcttcactctctctctttcttccctttgcttgctactcttgtcgctattacctccagcaagttcaacgagtgccaactcaacaacctcaacgcgttggaacccgaccaccgcgttgagtccgaaggtggtcttattgaaacatggaactctcaacaccctgagctgcaatgcgccggtgtcactgtttccaaacgcaccctcaaccgcaacggcctcccacttgccaatcttactcaccttatcccccaaaatgatcattgtcgttcaaggtgcgtaatattagtaagaaagtatttatcagcttaacgtgataacaataatagtaatatgaaatatttattaaatttttataattaatctctgctagaaaatttgattaatcattttagtagaatttgttttctcaactaggtttt

SEQ ID NO: 3868 - DNA, 667 bp, Artificial
  Mutations within GlyA3B4 introduced by GmGlyA3B4_T02TALE nuclease
  misc_feature (532): n is a or c or t or g
gttcatgtacggttgcagatataaacgaagcatagcttatgtatgaggtgtaacaaaattggaaacaatagccatgcaaggtgaagaatgtcaccaactcagaaaccccttcttcattgacgtgtccctcactcactctcctctcttcactataaatcgccactcttcgtgttctccacttcaccaactccttcaaacttattaacactttccttagttcaatatgggggaagcccttcttcactctctctctttcttccctttgcttgctactcttgtcgagtgcatgctattacctccagcaagttcaacgagtgccaactcaacaacctcaacgcgttggaacccgaccaccgcgttgagtccgaaggtggtcttattgaaacatggaactctcaacaccctgagctgcaatgcgccggtgtcactgtttccaaacgcaccctcaaccgcaacggcctccacttgccatcttactcaccttatccccaaatgatcattgtcgttcaaggtgcgtaatattagtaagagnatttatcagcttaacgtgataacaataatagtaatatgaaatatttattaaatttttataattaatctctgctagaaaatttgattaatcattttagtagaatttgtttttctcaactaggtttttaaaacacca

SEQ ID NO: 3869 - DNA, 656 bp, Artificial
  Mutations within GlyA3B4 introduced by GmGlyA3B4_T02TALE nuclease
gttcatgtacggttgcagatataaacgaagcatagcttatgtatgaggtgtaacaaaaattggaaacaatagccatgcaaggtgaagaatgtcaccaactcagaaacccttcttcattgacgtgtccctcactcactctcctctcttcactataaatcgccactcttcgtgttctccacttcaccaactccttcaaacttattaacactttccttagttcaatatggggaagcccttcttcactctctctctttcttccctttgcttgctactcttgtcgagtgcatgctattacctccagcaagttcaacgagtgccaactcaacaacctcaacgcgttggaacccgaccaccgcgttgagtccgaaggtggtcttattgaaacatggaactctcaacaccctgagctgcaatgcgccggtgtcactgtttccaaacgcaccctcaaccgcaacggcctccacttgccatcttactcaccttatccccaaatgatcattgtcgttcaaggtgcgtaatattagtaagaagtatttatcagcttaacgtgataacaatatagtaatatgaaatatttattaaatttttataattaatctctgctagaaaatttgattaatcattttagtagaatttgtttttctcaactaggtttt

SEQ ID NO: 3870 - DNA, 690 bp, Artificial
  Mutations within GlyA3B4 introduced by GmGlyA3B4_T02TALE nuclease
gttcatgtacggttgcagatataaacgaagcatagcttatgtatgaggtgtaacaaaattggaaacaatagccatgcaaggtgaagaatgtcaccaactcagaaacccttcttcattgacgtgtccctcactcactctcctctcttcactataaatcgccactcttcgtgttctccacttcaccaactccttcaaacttattaacactttccttagttcaatatggggaagcccttcttcactctctctctttcttccctttgcttgctactcttgtcgagtgcatgctccagcgcctgcttgccgccatcgtggccattgccggtgctgtgcccaggcccacggcttgaccccccagcaggtggtggccattacctccagcaagttcaacgagtgccaactcaacaactcacgcgttggaacccgaccaccgcgttgagtccgaaggtggtcttattgaaacatggaactctcaacaccctgagctgcaatgcgccggtgtcactgtttccaaacgcaccctcaaccgcaacggcctccacttgccatcttactcaccttatccccaaatgatcattgtcgttcaaggtgcgtaatattagtaagaagtatttatcagcttaacgtgataacaataatagtaatatgaaatatttattaaattttttataattaatctctgctagaaaa

SEQ ID NO: 3871 - DNA, 584 bp, Artificial
  Mutations within GlyA3B4 introduced by GmGlyA3B4_T02TALE nuclease
gttcatgtacggttgcagatataaacgaagcatagcttatgtatgaggtgtaacaaaattggaaacaatagccatgcaaggtgaagaatgtcaccaactcagaaacccttcttcattgacgtgtccctcactcactctcctctcttcactataaatcgccactcttcgtgttctccacttcaccaactccttcaaacttattaacactttccttagttcaatatggggaagcccttcttcactctctctctttcttccctttgcttgctactcttgtcgagtgcaacctccagcaagttcaacgagtgccaactcaacaacctcaacgcgttggaacccgaccaccgcgttgagtccgaaggtggtcttattgaaacatggaactctcaacaccctgagctgcaatgcgccggtgtcactgtttccaaacgcaccctcaaccgcaacggcctccacttgccatcttactcaccttatcccccaaatgatcattgtcgttcaaggtgcgtaaatattagtaagaagtatttatcagcttaacgtgataacaataatagtaatatgaaatatttattaaatttttt

SEQ ID NO: 3872 - DNA, 622 bp, Artificial
  Mutations within GlyA3B4 introduced by GmGlyA3B4_T02TALE nuclease
gttcatgtacggttgcagatataaacgaagcatagcttatgtatgaggtgtaacaaaattggaaacaatagccatgcaaggtgaagaatgtcaccaactcagaaacccttcttcattgacgtgtccctcactcactctcctctcttcactataaatcgccactcttcgtgttctccacttcaccaactccttcaaacttattaacactttccttagttcaatatggggaagcccttcttcactctctctctttcttccctttgcttgctactcttgtcgagtgcatcctccagcaagttcaacgagtgccaactcaacaacctcaacgcgttggaacccgaccaccgcgttgagtccgaaggtggtcttattgaaacatggaactctcaacaccctgagctgcaatgcgccggtgtcactgtttccaaacgcaccctcaaccgcaacggcctccacttgccatcttactcaccttatccccaaatgatcattgtcgttcaaggtgcgtaaatattagtaagaagtatttatcagcttaacgtgataacaataatagtaatatgaaatatttattaaatttttataattaatctctgctagaaaatttgattaatctttttag

SEQ ID NO: 3873 - DNA, 606 bp, Artificial
  Mutations within GlyA3B4 introduced by GmGlyA3B4_T02TALE nuclease
gttcatgtacggttgcagatataaacgaagcatagcttatgtatgaggtgtaacaaaattggaaacaatagccatgcaaggtgaagaatgtcaccaactcagaaacccttcttcattgacgtgtccctcactcactctcctctcttcactataaatcgccactcttcgtgttctccacttcaccaactccttcaaacttattaacactttccttagttcaatatggggaagcccttcttcactctctctccagcaagttcaacgagtgccaactcaacaacctcaacgcgttggaaccgaccaccgcgttgagtccgaaggtggtcttattgaaacatggaactctcaacaccctgagctgcaaatgcgccggtgtcactgtttccaaacgcaccctcaaccgcaacggcctccacttgccatcttactcaccttatccccaaatgatcattgtcgttcaaaggtgcgtaatattagtaagaagtatttatcagcttaacgtgataacaataatagtaatatgaaatatttattaaattttttataattaatctctgctagaaaatttgattaaatcatttttagtagaatttgtttttctcaact

SEQ ID NO: 3874 - DNA, 665 bp, Artificial
  Mutations within GlyA3B4 introduced by GmGlyA3B4_T02TALE nuclease
  misc_feature (530): n is a or c or t or g
gttcatgtacggttgcagatataaacgaagcatagcttatgtatgaggtgtaacaaaattggaaacaatagccatgcaaggtgaagaatgtcaccaactcagaaaccccttcttcattgacgtgtccctcactcactctcctctcttcactataaatcgccactcttcgtgttctccacttcaccaactccttcaaacttattaacactttccttagttcaatatggggaagcccttcttcactctctctctttcttccctttgcttgctactcttgtcgagtgtgctattacctccagcaagttcaacgagtgccaactcaacaacctcaacgcgttggaacccgaccaccgcgttgagtccgaaggtggtcttattgaaacatggaactctcaacaccctgagctgcaatgcgccggtgtcactgtttccaaacgcaccctcaaccgcaacggcctccacttgccatcttactcaccttatcccccaaatgatcattgtcgttcaaggtgcgtaatattagtaagagnatttatcagcttaacgtgataacaatatagtaatatgaaatatttattaaatttttataattaatctctgctagaaaatttgattaatcattttagtagaatttgtttttctcaactaggtttttaaacaccaca

SEQ ID NO: 3875 - DNA, 471 bp, Artificial; identical to SEQ ID NO: 1723
  Mutations within GlyA3B4 introduced by GmGlyA3B4_T02TALE nuclease

SEQ ID NO: 3876 - DNA, 758 bp, Artificial
  Mutations within GlyA3B4 introduced by GmGlyA3B4_T02TALE nuclease
gttcatgtacggttgcagatataaacgaagcatagcttatgtatgaggtgtaacaaaattggaaacaatagccatgcaaggtgaagaatgtcaccaactcagaaacccttcttcattgacgtgtccctcactcactctcctctcttcactataaatcgccactcttcgtgttctccacttcaccaactccttcaaacttattaacactttccttagttcaatatggggaagcccttcttcactctctctctttcttccctttgcttgctactcttgtcgagtgcatgcggctgttgccggtgctgtgccaggcccacggcttgacccccggagcaggtggtggcccatcgccagcaatattggtggcaagcaggcgctggagacggtgcaggttgctattacctccagcaagttcaacgagtgccaactcaacaacctcaacgcgttggaacccgaccaccgcgttgagtccgaaggtggtcttattgaaacatggaactctcaacaccctgagctgcaatgcgccggtgtcactgtttccaaacgcaccctcaaccgcaacggcctccacttgccatcttactcaccttatccccaaatgatcattgtcgttcaaggtgcgtaatattagtaagaagtatttatcgcttaacgtgatcaacaataattagtaatatgaaaatatttatttaaattttttataattaatctctgctagaaaatttgattaatcatttttagtagaatttgtttttctc

SEQ ID NO: 3877 - DNA, 660 bp, Artificial; identical to SEQ ID NO: 1717
  Mutations within GlyA3B4 introduced by GmGlyA3B4_T02TALE nuclease

SEQ ID NO: 3878 - DNA, 710 bp, Artificial
  Mutations within GlyA3B4 introduced by GmGlyA3B4_T02TALE nuclease
gttcatgtacggttgcagatataaacgaagcatagcttatgtatgaggtgtaacaaaattggaaacaatagccatgcaaggtgaagaatgtcaccaactcagaaacccttcttcattgacgtgtccctcactcactctcctctcttcactataaatcgccactcttcgtgttctccacttcaccaactccttcaaacttattaacactttccttagttcaatatggggaagcccttcttcactctctctctttcttccctttgcttgctactcttgtcgagtgcatcagaaaccattattgcgcgttcaaaagtcgcctaaggtcactttgctattacctcccagcaagttcaacgagtgccaactcaacaaccctcaacgcgttggaaccccgaccaccgcgttgagtccgaaggtggtcttattgaaacatggaactctcaacaccctgagctgcaatgcgccggtgtcactgtttccaaacgcaccctcaaccgcaacggcctccacttgccatcttactcaccttatccccaaatgatcattgtcgttcaaggtgcgtaatattagtaagaagtatttatcagcttaacgtgataacaataatagtaatatgaaatatttattaaatttttataattaatctctgctagaaaatttgattaatcatttttagtagaatttgtttttctcaactaggttttaaaaca

SEQ ID NO: 3879 - DNA, 457 bp, Artificial; identical to SEQ ID NO: 1686
  Mutations within GlyA3B4 introduced by GmGlyA3B4_T02TALE nuclease

SEQ ID NO: 3880 - DNA, 447 bp, Artificial
  Mutations within GlyA3B4 introduced by GmGlyA3B4_T02TALE nuclease
gttcatgtacggttgcagatataaacgaagcatagcttatgtatgaggtgtaacaaaattggaaacaatagccatgcaaggtgaagaatgtcaccaactcagaaacccttcttcattgacgtgtccctcactcactctcctctcttcactataaatcgccactcttcgtgttctccacttcaccaaactccttcaaacttattaacactttccttagttcaatatggggaagcccttcttcactctctctctttcttccctttgcttgctactcttgtattacctccagcaagtttcaacgagtgccaactcaacaacctcaacgcgttggaacccgaccaaccgcgttgagtccgaaggtggtcttattgaaacatggaactctcaacaccctgagctgcaatgcgccggtgtcactgtttccaaacgcaccctcaaccgcaacgg

SEQ ID NO: 3881 - DNA, 670 bp, Artificial
  Mutations within GlyA3B4 introduced by GmGlyA3B4_T02TALE nuclease
  misc_feature (534): n is a or c or t or g
gttcatgtacggttgcagatataaacgaagcatagcttatgtatgaggtgtaacaaaattggaaacaatagccatgcaaggtgaagaatgtcaccaactcagaaaccccttcttcattgacgtgtccctcactcactctcctctcttcactataaatcgccactcttcgtgttctccacttcaccaactccttcaaacttattaacactttccttagttcaatatggggaagcccttcttcactctctctctttcttccctttgcttgctactcttgtcgagtgcatgctattacctccagcaagttcaacgagtgccaactcaacaacctcaacgcgttggaacccgaccaccgcgttgagtccgaaggtggtcttattgaaacatggaactctcaacaccctgagctgcaatgcgccggtgtcactgtttccaaacgcaccctcaaccgcaacggcctccacttgccatcttactcaccttatcccccaaatgatcattgtcgttcaagggtgcgtaatattagtaagaagnatttatcagcttaacgtgataacaatatagtaatatgaaatatttattaaatttttataattaatctctgctagaaaatttgattaatcattttagtagaatttgtttttctcaactaggtttttaaaacaccaca

SEQ ID NO: 3882 - DNA, 594 bp, Artificial; identical to SEQ ID NO: 2901
  Mutations within GlyA3B4 introduced by GmGlyA3B4_T02TALE nuclease

SEQ ID NO: 3883 - DNA, 641 bp, Artificial
  Mutations within GlyA3B4 introduced by GmGlyA3B4_T02TALE nuclease
gttcatgtacggttgcagatataaacgaagcatagcttatgtatgaggtgtaacaaaattggaaacaatagccatgcaaggtgaagaatgtcaccaactcagaaaccccttcttcattgacgtgtccctcactcactctcctctcttcactataaatcgccactcttcgtgttctccacttcaccaactccttcaaacttattaacacttttccttagttcaatatgggggaagcccttcttcactctctctctttcttccctttgcttgctactcttgtcgagtgcattgctattacctccagcaagttcaacgagtgccaactcaacaacctcaacgcgttggaacccgaccaccgcgttgagtccgaaggtggtcttattgaaacatggaactctcaacaccctgagctgcaatgcgccggtgtcactgtttccaaacgcaccctcaaccgcaacggcctccacttgccatcttactcaccttatccccaaatgatcattgtcgttcaaggtgcgtaatattagtaagaagtatttatcagcttaacgtgataacaataatagtaatatgaaatatttattaaatttttataattaatctctgctagaaaatttgattaatcattttagtagaatttg

SEQ ID NO: 3884 - DNA, 663 bp, Artificial
  Mutations within GlyA3B4 introduced by GmGlyA3B4_T02TALE nuclease
gttcatgtacggttgcagatataaacgaagcatagcttatgtatgaggtgtaacaaaattggaaacaatagccatgcaaggtgaagaatgtcaccaactcagaaaccccttcttcattgacgtgtccctcactcactctcctctcttcactataaatcgccactcttcgtgttctccacttcaccaactccttcaaacttattaacactttccttagttcaatatggggaagcccttcttcactctctctctttcttccctttgcttgctactcttgtcgagtgctattacctccagcaagttcaacgagtgccaactcaacaacctcaacgcgttggaacccgaccaccgcgttgagtccgaaggtggtcttattgaaacatggaactctcaacaccctgagctgcaatgcgccggtgtcactgtttccaaacgcacccctcaaccgcaacggcctccacttgccatcttactcaccttatccccaaatgatcattgtcgttcaaggtgcgtaatattagtaagaagtatttatcagcttaacgtgataacaatatagtaatatgaaatatttattaaatttttataattaatctctgctagaaaatttgattaatcattttagtagaatttgtttttctcaactaggtttttaaaacacca

SEQ ID NO: 3885 - DNA, 658 bp, Artificial
  Mutations within GlyA3B4 introduced by GmGlyA3B4_T02TALE nuclease
gttcatgtacggttgcagatataaacgaagcatagcttatgtatgaggtgtaacaaaattggaaacaatagccatgcaaggtgaagaatgtcaccaactcagaaacccttcttcattgacgtgtccctcactcactctcctctcttcactataaatcgccactcttcgtgttctccacttcaccaactccttcaaacttattaacactttccttagttcaatatggggaagcccttcttcactctctctctttcttccctttgcttgctactcttgtcgagtacctccagcaagttcaacgagtgccaactcaacaacctcaacgcgttggaacccgaccaccgcgttgagtccgaaggtggtcttattgaaacatggaactctcaacaccctgagctgcaatgcgccggtgtcactgtttccaaacgcaccctcaaccgcaacggcctccacttgccatcttactcaccttatccccaaatgatcattgtcgttcaaggtgcgtaaatattagtaagaagtatttatcagcttaacgtgataacaataatagtaatatgaaatatttattaaattttttataattaatctctgctagaaaatttgattaatctttttagtagaattgttttttctcaactaggtttaaaacaccaca

SEQ ID NO: 3886 - DNA, 620 bp, Artificial; identical to SEQ ID NO: 3737
  Mutations within GlyA3B4 introduced by GmGlyA3B4_T02TALE nuclease

SEQ ID NO: 3887 - DNA, 505 bp, Artificial; identical to SEQ ID NO: 1850
  Mutations within GlyA3B4 introduced by GmGlyA3B4_T02TALE nuclease

SEQ ID NO: 3888 - DNA, 663 bp, Artificial
  Mutations within GlyA3B4 introduced by GmGlyA3B4_T02TALE nuclease
gttcatgtacggttgcagatataaacgaagcatagcttatgtatgaggtgtaacaaaattggaaacaatagccatgcaaggtgaagaatgtcaccaactcagaaaccccttcttcattgacgtgtccctcactcactctcctctcttcactataaatcgccactcttcgtgttctccacttcaccaactccttcaaacttattaacactttccttagttcaatatggggaagcccttcttcactctctctctttcttccctttgcttgctactcttgtcgagtgcatgcttacctccagcaagttcaacgagtgccaactcaacaacctcaacgcgttggaacccgaccaccgcgttgagtccgaaggtggtcttattgaaacatggaactctcaacaccctgagctgcaatgcgccggtgtcactgtttccaaacgcaccctcaaccgcaacggcctccacttgccatcttactcaccttatcccccaaatgatcattgtcgttcaaggtgcgtaatattagtaagaagtatttatcagcttaacgtgataacaataatagtaatatgaaatatttattaaatttttataattaatctctgctagaaaatttgattaatcattttagtagaatttgttttctcaactaggttttaaacacca

SEQ ID NO: 3889 - DNA, 661 bp, Artificial; identical to SEQ ID NO: 2035
  Mutations within GlyA3B4 introduced by GmGlyA3B4_T02TALE nuclease

SEQ ID NO: 3890 - DNA, 786 bp, Artificial
  Mutations within GlyA3B4 introduced by GmGlyA3B4_T02TALE nuclease
  misc_feature (654): n is a or c or t or g
gttcatgtacggttgcagatataaacgaagcatagcttatgtatgaggtgtaacaaaattggaaacaatagccatgcaaggtgaagaatgtcaccaactcagaaacccttcttcattgacgtgtccctcactcactctcctctcttcactataaatcgccactcttcgtgttctccacttcaccaactccttcaaacttattaacactttccttagttcaatatggggaagcccttcttcactctctctctttcttccctttgcttgctactcttgtcgagtgcatgcttccgctggaccgtctccagcgcctgcttgccaccgccattgctggcgatggccaccacctgctggggggtcaagccgtgggcctggcacagcaccggcaacagccgctggaccgtctccagcgcctgctttgctattacctccagcaagttcaacgagtgccaactcaacaacctcaacgcgttggaacccgaccaccgcgttgagtccgaaggtggtcttattgaacatggactctcaacacctgagctgcaatgcgccggtgtcactgttttccaaaacgcaccctcaaaccgcaacggcctccacttgccaatcttactcaccttatccccaaatgatcattgtcgttcaaggtgcgtaatnttagtaagaagtatttatcagcttaacgtgataacaataatagtaatatgaaatatttattaaaattttttataattaaatctcttgctagaaaatttgattaatcatttttagtagaaatttgtttttctc

SEQ ID NO: 3891 - DNA, 633 bp, Artificial; identical to SEQ ID NO: 1895
  Mutations within GlyA3B4 introduced by GmGlyA3B4_T02TALE nuclease

SEQ ID NO: 3892 - DNA, 653 bp, Artificial
  Mutations within GlyA3B4 introduced by GmGlyA3B4_T02TALE nuclease
gttcatgtacggttgcagatataaacgaagcatagcttatgtatgaggtgtaacaaaattggaaacaatagccatgcaaggtgaagaatgtcaccaactcagaaacccttcttcattgacgtgtccctcactcactctcctctcttcactataaatcgccactcttcgtgttctccacttcaccaactccttcaaacttattaacactttccttagttcaatatggggaagcccttcttcactctctctctttcttccctttactttgctattacctccagcaagttcaacgagtgccaactcaacaacctcaacgcgttggaacccgaccaccgcgttgagtccgaaggtggtcttattgaaacatggaactctcaacacccctgagctgcaatgcgccggtgtcactgttttccaaacgcaccctcaaccgcaacggcctccacttgccatcttactcaccttatccccaaatgatcattgtcgttcaaggtgcgtaatattagtaagaagtatttatcagcttaacgtgataacaataatagtaatatgaaatatttattaaattttttataattaatctctgctagaaaatttgattaatcatttttagtagaatttgttttttctcaactaggttttaaaacaccaca

SEQ ID NO: 3893 - DNA, 637 bp, Artificial
  Mutations within GlyA3B4 introduced by GmGlyA3B4_T02TALE nuclease
gttcatgtacggttgcagatataaacgaagcatagcttatgtatgaggtgtaacaaaattggaaacaatagccatgcaaggtgaagaatgtcaccaactcagaaaccccttcttcattgacgtgtccctcactcactctcctctcttcactataaatcgccactcttcgtgttctccacttcaccaactccttcaaacttattaacactttccttagttcaatatggggaagcccttcttcactctctctctttcttccctttgcttgctactcttgtcgagtgcatgctattacctccagcaagttcaacgagtgccaactcaacaacctcaacgcgttggaacccgaccaccgcgttgagtccgaaggtggtcttattgaaacatggaactctcaacaccctgagctgcaatgcgccggtgtcactgtttccaaacgcaccctcaaccgcaacggcctccacttgccatcttactcaccttatccccaaatgatcattgtcgttcaaggtgcgtaatattagtaagagtatttatcagcttaacgtgataacaataatagtaatatgaaatatttattaaatttttataattaatctctgctagaaaatttgattaatcattttagtagaatttg

SEQ ID NO: 3894 - DNA, 647 bp, Artificial
  Mutations within GlyA3B4 introduced by GmGlyA3B4_T02TALE nuclease
gttcatgtacggttgcagatataaacgaagcatagcttatgtatgaggtgtaacaaaattggaaacaatagccatgcaaggtgaagaatgtcaccaactcagaaacccttcttcattgacgtgtccctcactcactctcctctcttcactataaatcgccactcttcgtgttctccacttcaccaactccttcaaacttattaacactttccttagttcaatatggggaagcccttcttcactctctctctttcttccctttgcttgctactcttgtcgagtgatattacctccagcaagttcaacgagtgccaactcaacaacctcaacgcgttggaacccgaccaccgcgttgagtccgaaggtggtcttattgaaacatggaactctcaacaccctgagctgcaatgcgccggtgtcactgtttccaaacgcaccctcaaccgcaacggcctccacttgccatcttactcaccttatccccaaatgatcattgtcgttcaaggtgcgtaatattagtaagaagtatttatcagcttaacgtgataacaataatagtaatatgaaatatttattaaatttttataattaatctctgctagaaaatttgattaatcattttagtagaatttgttttctcaactagg

SEQ ID NO: 3895 - DNA, 647 bp, Artificial
  Mutations within GlyA3B4 introduced by GmGlyA3B4_T02TALE nuclease
gttcatgtacggttgcagatataaacgaagcatagcttatgtatgaggtgtaacaaaattggaaacaatagccatgcaaggtgaagaatgtcaccaactcagaaacccttcttcattgacgtgtccctcactcactctcctctcttcactataaatcgccactcttcgtgttctccacttcaccaactccttcaaacttattaacactttccttagttcaatatggggaagcccttcttcactctctctctttcttccctttgcttgctactcttgtcgagtgcacctccagcaagttcaacgagtgccaactcaacaacctcaacgcgttggaacccgaccaccgcgttgagtccgaaggtggtcttattgaaacatggaactctcaacaccctgagctgcaatgcgccggtgtcactgtttccaaacgcaccctcaaccgcaacggcctccacttgccatcttactcaccttatcccccaaatgatcattgtcgttcaaggtgcgtaaatattagtaagaagtatttatcagcttaacgtgataacaataatagtaatatgaaatatttattaaattttttataattaatctctgctagaaaatttgattaatctttttagtagaattgttttttctcaactagg

SEQ ID NO: 3896 - DNA, 619 bp, Artificial
  Mutations within GlyA3B4 introduced by GmGlyA3B4_T02TALE nuclease
gttcatgtacggttgcagatataaacgaagcatagcttatgtatgaggtgtaacaaaattggaaacaatagccatgcaaggtgaagaatgtcaccaactcagaaacccttcttcattgacgtgtccctcactcactctcctctcttcactataaatcgccactcttcgtgttctccacttcaccaactccttcaaacttattaacactttccttagttcaatatggggaagcccttcttcactctctctctttctccagcaagttcaacgagtgccaactcaacaacctcaacgcgttggaacccgaccaccgcgttgagtccgaaggtggtcttattgaaacatggaactctcaacaccctgagctgcaatgcgccggtgtcactgtttccaaacgcaccctcaaccgcaacggcctccacttgccatcttactcaccttatccccaaatgatcattgtcgttcaaggtgcgtaatattagtaagaagtatttatcagcttaacgtgataacaataatagtaatatgaaatatttattaatttttataattaatctctgctagaaatttgattaatcatttttagtagaatttgtttttctcaactaggtttttaaaa

SEQ ID NO: 3897 - DNA, 556 bp, Artificial
  Mutations within GlyA3B4 introduced by GmGlyA3B4_T02TALE nuclease
gttcatgtacggttgcagatataaacgaagcatagcttatgtatgaggtgtaacaaaattggaaacaatagccatgcaaggtgaagaatgtcaccaactcagaaacccttcttcattgacgtgtccctcactcactctcctctcttcactataaatcgccactcttcgtgttctccacttcaccaactccttcaaacttattaacactttccttagttcaatatggggaacccgaccaccgcgttgagtccgaaggtggtcttattgaaacatggaactctcaacaccctgagctgcaatgcgccggtgtcactgtttccaaacgcaccctcaaccgcaacggcctccacttgccatcttactcaccttatccccaaatgatcattgtcgttcaaggtgcgtaatattagtaagaagtatttatcagcttaacgtgataacaataatagtaatatgaaatatttattaaattttttataattaatctctgctagaaaatttgattaatcatttttagtagaatttgttttttctcaactaggttttaaacaccaca

SEQ ID NO: 3898 - DNA, 637 bp, Artificial
  Mutations within GlyA3B4 introduced by GmGlyA3B4_T02TALE nuclease
gttcatgtacggttgcagatataaacgaagcatagcttatgtatgaggtgtaacaaaattggaaacaatagccatgcaaggtgaagaatgtcaccaactcagaaaccccttcttcattgacgtgtccctcactcactctcctctcttcactataaatcgccactcttcgtgttctccacttcaccaactccttcaaacttattaacactttccttagttcaatatggggaagcccttcttcactctctctctttcttccctttgcttgctactcttgtcgagtgcatatattacctccagcaagttcaacgagtgccaactcaacaacctcaacgcgttggaacccgaccaccgcgttgagtccgaaggtggtcttattgaaacatggaactctcaacaccctgagctgcaatgcgccggtgtcactgtttccaaacgcaccctcaaccgcaacggcctccacttgccatcttactcaccttatccccaaatgatcattgtcgttcaaggtgcgtaatattagtaagaagtatttatcagcttaacgtgataacaataatagtaatatgaaatatttattaaatttttataattaatctctgctagaaaatttgattaatcattttagtagaatttg

SEQ ID NO: 3899 - DNA, 643 bp, Artificial
  Mutations within GlyA3B4 introduced by GmGlyA3B4_T02TALE nuclease
gttcatgtacggttgcagatataaacgaagcatagcttatgtatgaggtgtaacaaaattggaaacaatagccatgcaaggtgaagaatgtcaccaactcagaaacccttcttcattgacgtgtccctcactcactctcctctcttcactataaatcgccactcttcgtgttctccacttcaccaactccttcaaacttattaacactttccttagttcaatatggggaagcccttcttcactctctctctttcttccctttgcttgctactcttgtcgagtgcacctccagcaagttcaacgagtgccaactcaacaacctcaacgcgttggaacccgaccaccgcgttgagtccgaaggtggtcttattgaaacatggaactctcaacaccctgagctgcaatgcgccggtgtcactgtttccaaacgcaccctcaaccgcaacggcctccacttgccatcttactcaccttatccccaaatgatcattgtcgttcaaggtgcgtaatattagtaagaagtatttatcagcttaacgtgataacaataatagtaatatgaaatatttattaaattttttataattaatctctgctagaaaatttgattaatcatttttagtagaatttgttttttctcaac

SEQ ID NO: 3900 - DNA, 664 bp, Artificial; identical to SEQ ID NO: 3302
  Mutations within GlyA3B4 introduced by GmGlyA3B4_T02TALE nuclease

SEQ ID NO: 3901 - DNA, 666 bp, Artificial
  Mutations within GlyA3B4 introduced by GmGlyA3B4_T02TALE nuclease
gttcatgtacggttgcagatataaacgaagcatagcttatgtatgaggtgtaacaaaattggaaacaatagccatgcaaggtgaagaatgtcaccaactcagaaacccttcttcattgacgtgtccctcactcactctcctctcttcactataaatcgccactcttcgtgttctccacttcaccaactccttcaaacttattaacactttccttagttcaatatggggaagcccttcttcactctctctctttcttccctttgcttgctactcttgtcgagtgcattgctattacctccagcaagttcaacgagtgccaactcaacaacctcaacgcgttggaacccgaccaccgcgttgagtccgaaggtggtcttattgaaacatggaactctcaacaccctgagctgcaatgcgccggtgtcactgtttccaaacgcaccctcaaccgcaacggcctccacttgccatcttactcaccttatccccaaatgatcattgtcgttcaaggtgcgtaatattagtaagaagtatttatcagcttaacgtgataacaatatagtaatatgaaatatttattaaatttttataattaatctctgctagaaaatttgattaatcattttagtagaatttgtttttctcaactaggtttttaaaacacca

SEQ ID NO: 3902 - DNA, 658 bp, Artificial
  Mutations within GlyA3B4 introduced by GmGlyA3B4_T02TALE nuclease
gttcatgtacggttgcagatataaacgaagcatagcttatgtatgaggtgtaacaaaattggaaacaatagccatgcaaggtgaagaatgtcaccaactcagaaacccttcttcattgacgtgtccctcactcactctcctctcttcactataaatcgccactcttcgtgttctccacttcaccaactccttcaaacttattaacactttccttagttcaatatggggaagcccttcttcactctctctctttcttccctttgcttgctactcttgtcgagttgctattacctccagcaagttcaacgagtgccaactcaacaacctcaacgcgttggaacccgaccaccgcgttgagtccgaaggtggtcttattgaaacatggaactctcaacaccctgagctgcaatgcgccggtgtcactgtttccaaacgcaccctcaaccgcaacggcctccacttgccatcttactcaccttatccccaaatgatcattgtcgttcaaggtgcgtaatattagtaagaagtatttatcagcttaacgtgataacaataatagtaatatgaaaatatttattaaatttttataattaatctctgctagaaaatttgattaatcattttagtagaatttgttttctcaactaggtttttaaaa

SEQ ID NO: 3903 - DNA, 637 bp, Artificial
  Mutations within GlyA3B4 introduced by GmGlyA3B4_T02TALE nuclease
gttcatgtacggttgcagatataaacgaagcatagcttatgtatgaggtgtaacaaaattggaaacaatagccatgcaaggtgaagaatgtcaccaactcagaaacccttcttcattgacgtgtccctcactcactctcctctcttcactataaatcgccactcttcgtgttctccacttcaccaactccttcaaacttattaacactttccttagttcaatatggggaagcccttcttcactctctctctttcttccctttgcttgctactcttgtcgagtgcatgttattacctccagcaagttcaacgagtgccaactcaacaacctcaacgcgttggaacccgaccaccgcgttgagtccgaaggtggtcttattgaaacatggaactctcaacaccctgagctgcaatgcgccggtgtcactgtttccaaacgcaccctcaaccgcaacggcctccacttgccatcttactcaccttatccccaaatgatcattgtcgttcaaggtgcgtaatattagtaagaagtatttatcagcttaacgtgataacaataatagtaatatgaaatatttattaaatttttataattaatctctgctagaaaatttgattaatcattttagtagaatttg

SEQ ID NO: 3904 - DNA, 645 bp, Artificial
  Mutations within GlyA3B4 introduced by GmGlyA3B4_T02TALE nuclease
gttcatgtacggttgcagatataaacgaagcatagcttatgtatgaggtgtaacaaaattggaaacaatagccatgcaaggtgaagaatgtcaccaactcagaaacccttcttcattgacgtgtccctcactcactctcctctcttcactataaatcgccactcttcgtgttctccacttcaccaactccttcaaacttattaacactttccttagttcaatatggggaagcccttcttcactctctctctttcttccctttgtttgctactcttgtcgagtgcattacctccagcaagttcaacgagtgccaactcaacaacctcaacgcgttggaacccgaccaccgcgttgagtccgaaggtggtcttattgaaacatggaactctcaacaccctgagctgcaatgcgccggtgtcactgtttccaaacgcaccctcaaccgcaacggcctccacttgccatcttactcaccttatccccaaatgatcattgtcgttcaaggtgcgtaatattagtaagaagtatttatcagcttaacgtgataacaatatagtaatatgaaatatttattaaatttttataattaatctctgctagaaaatttgattaatcattttagtagaatttgttttctcaactagg

SEQ ID NO: 3905 - DNA, 657 bp, Artificial
  Mutations within GlyA3B4 introduced by GmGlyA3B4_T02TALE nuclease
gttcatgtacggttgcagatataaacgaagcatagcttatgtatgaggtgtaacaaaattggaaacaatagccatgcaaggtgaagaatgtcaccaactcagaaacccttcttcattgacgtgtccctcactcactctcctctcttcactataaatcgccactcttcgtgttctccacttcaccaactccttcaaacttattaacactttccttagttcaatatgggggaagcccttcttcactctctctctttcttccctttgcttgctactcttgtcgagttgctattacctccagcaagttcaacgagtgccaactcaacaacctcaacgcgttggaacccgaccaccgcgttgagtccgaaggtggtcttattgaaacatggaactctcaacaccctgagctgcaatgcgccggtgtcactgtttccaaacgcaccctcaaccgcaacggcctccacttgccatcttactcaccttatccccaaatgatcattgtcgttcaaggtgcgtaatattagtaagaagtatttatcagcttaacgtgataacaataatagtaatatgaaatatttattaaatttttataattaatctctgctagaaaatttgattaatcattttagtagaatttgttttctcaactaggttttaaaa

SEQ ID NO: 3906 - DNA, 666 bp, Artificial; identical to SEQ ID NO: 2379
  Mutations within GlyA3B4 introduced by GmGlyA3B4_T02TALE nuclease

SEQ ID NO: 3907 - DNA, 643 bp, Artificial
  Mutations within GlyA3B4 introduced by GmGlyA3B4_T02TALE nuclease
gttcatgtacggttgcagatataaacgaagcatagcttatgtatgaggtgtaacaaaattggaaacaatagccatgcaaggtgaagaatgtcaccaactcagaaacccttcttcattgacgtgtccctcactcactctcctctcttcactataaatcgccactcttcgtgttctccacttcaccaactccttcaaacttattaacactttccttagttcaatatggggaagcccttcttcactctctctctttcttccctttgcttgctactcttgtcgagtgcatattacctccagcaagttcaacgagtgccaactcaacaacctcaacgcgttggaacccgaccaccgcgttgagtccgaaggtggtcttattgaaacatggaactctcaacaccctgagctgcaatgcgccggtgtcactgtttccaaacgcaccctcaaccgcaacggcctccacttgccatcttactcaccttatccccaaatgatcattgtcgttcaaggtgcgtaatattagtaagaagtatttatcagcttaacgtgataacaataatagtaatatgaaatatttattaaatttttataattaatctctgctagaaaatttgattaatcattttagtagaatttgttttctcaa

SEQ ID NO: 3908 - DNA, 638 bp, Artificial
  Mutations within GlyA3B4 introduced by GmGlyA3B4_T02TALE nuclease
gttcatgtacggttgcagatataaacgaagcatagcttatgtatgaggtgtaacaaaattggaaacaatagccatgcaaggtgaagaatgtcaccaactcagaaaccccttcttcattgacgtgtccctcactcactctcctctcttcactataaatcgccactcttcgtgttctccacttcaccaactccttcaaacttattaacactttccttagttcaatatggggaagcccttcttcactctctctctttcttccctttgcttgctactcttgtcgagtgcatgctattacctccagcaagttcaacgagtgccaactcaacaacctcaacgcgttggaacccgaccaccgcgttgagtccgaaggtggtcttattgaaacatggaactctcaacaccctgagctgcaatgcgccggtgtcactgtttccaaacgcaccctcaaccgcaacggcctccacttgccatcttactcaccttatccccaaatgatcattgtcgttcaaggtgcgtaatattagtaagagtatttatcagcttaacgtgataacaataatagtaatatgaaatatttattaaatttttataattaattctctgctagaaaatttgattaatcattttagtagaatttg

SEQ ID NO: 3909 - DNA, 661 bp, Artificial
  Mutations within GlyA3B4 introduced by GmGlyA3B4_T02TALE nuclease
gttcatgtacggttgcagatataaacgaagcatagcttatgtatgaggtgtaacaaaattggaaacaatagccatgcaaggtgaagaatgtcaccaactcagaaaccccttcttcattgacgtgtcccctcactcactctcctctcttcactataaatcgccactcttcgtgttctccacttcaccaactccttcaaacttattaacactttccttagttcaatatggggaagcccttcttcactctctctctttcttccctttgcttgctactcttgtttgctattacctccagcaagttcaacgagtgccaactcaacaacctcaacgcgttggaacccgaccaccgcgttgagtccgaaggtggtcttattgaaacatggaactctcaacaccctgagctgcaatgcgccggtgtcactgtttccaaacgcaccctcaccgcaacggcctccacttgccatcttactcaccttatcccccaaatgatcattgtcgttcaaggtgcgtaaatattagtaagaagtatttatcagcttaacgtgataacaataatagtaatatgaaatatttattaaattttttataattaatctctgctagaaaatttgattaatctttttagtagaattgtttttctcaactaggtttaaacaccaca

SEQ ID NO: 3910 - DNA, 632 bp, Artificial
  Mutations within GlyA3B4 introduced by GmGlyA3B4_T02TALE nuclease
gttcatgtacggttgcagatataaacgaagcatagcttatgtatgaggtgtaacaaaattggaaacaatagccatgcaaggtgaagaatgtcaccaactcagaaaccccttcttcattgacgtgtccctcactcactctcctctcttcactataaatcgccactcttcgtgttctccacttcaccaactccttcaaacttattaacactttccttagttcaatatggggaagcccttcttcactctctctctttcttccctttgcttgctactcttgtcgacgagtgccaactcaacaacctcaacgcgttggaacccgaccaccgcgttgagtccgaaggtggtcttattgaaacatggaactctcaacaccctgagctgcaatgcgccggtgtcactgtttccaaacgcaccctcaaccgcaacggcctccacttgccatcttactcaccttatcccccaaatgatcattgtcgttcaaggtgcgtaatattagtaagaagtatttatcagcttaacgtgataacaataatagtaatatgaaatatttattaaattttttataattaatctctgctagaaaatttgattaatcatttttagtagaatttgttttttctcaactaggtttt

SEQ ID NO: 3911 - DNA, 550 bp, Artificial
  Mutations within GlyA3B4 introduced by GmGlyA3B4_T02TALE nuclease
gttcatgtacggttgcagatataaacgaagcatagcttatgtatgaggtgtaacaaaattggaaacaatagccatgcaaggtgaagaatgtcaccaactcagaaacccttcttcattgacgtgtccctcactcactctcctctcttcactataaatcgccactcttcgtgttctccacttcaccaactccttcaaacttattaccactttccttagttcaatatggggaacccgaccaccgcgttgagtccgaaggtggtcttattgaaacatggaactctcaacaccctgagctgcaatgcgccggtgtcactgtttccaaacgcaccctcaaccgcaacggcctccacttgccatcttactcaccttatccccaaatgatcattgtcgttcaaggtgcgtaatattagtaagaagtatttatcagcttaacgtgataacaataatagtaatatgaaatatttattaaattttttataattaatctctgctagaaaatttgattaatcatttttagtagaatttgtttttctcaaactaggttttaaac

SEQ ID NO: 3912 - DNA, 660 bp, Artificial
  Mutations within GlyA3B4 introduced by GmGlyA3B4_T02TALE nuclease
gttcatgtacggttgcagatataaacgaagcatagcttatgtatgaggtgtaacaaaattggaaacaatagccatgcaaggtgaagaatgtcaccaactcagaaacccttcttcattgacgtgtccctcactcactctcctctcttcactataaatcgccactcttcgtgttctccacttcaccaactccttcaaacttattaacactttccttagttcaatatggggaagcccttcttcactctctctctttcttccctttgcttgctactcttgtcgagtgcatattacctccagcaagttcaacgagtgccaactcaacaacctcaacgcgttggaacccgaccaccgcgttgagtccgaaggtggtcttattgaaacatggaactctcaacaccctgagctgcaatgcgccggtgtcactgtttccaaacgcaccctcaaccgcaacggcctccacttgccatcttactcaccttatccccaaatgatcattgtcgttcaaggtgcgtaatattagtaagaagtatttatcagcttaacgtgataacaatatagtaatatgaaatatttattaaatttttataattaatctctgctagaaaatttgattaatcattttagtagaatttgttttctcaactaggttttaaaacacca

SEQ ID NO: 3913 - DNA, 582 bp, Artificial
  Mutations within GlyA3B4 introduced by GmGlyA3B4_T02TALE nuclease
gttcatgtacggttgcagatataaacgaagcatagcttatgtatgaggtgtaacaaaattggaaacaatagccatgcaaggtgaagaatgtcaccaactcagaaacccttcttcattgacgtgtccctcactcactctcctctcttcactataaatcgccactcttcgtgttctccacttcaccaactccttcaaacttattaacactttccttagttcaatatggggaagcccttcttcactctctctctttcttccctttgcttgctactcttgtcgagtgcagcgttgagtccgaaggtggtcttattgaaacatggaactctcaacaccctgagctgcaatgcgccggtgtcactgtttccaaacgcaccctcaaccgcaacggcctccacttgccatcttactcaccttatcccccaaatgatcattgtcgttcaaggtgcgtaatattagtaagaagtatttatcagcttaacgtgataacaataatagtaatatgaaatatttattaaattttttataattaatctctgctagaaaatttgattaatcatttttagtagaatttgtttttctcaa

SEQ ID NO: 3914 - DNA, 654 bp, Artificial; identical to SEQ ID NO: 3088
  Mutations within GlyA3B4 introduced by GmGlyA3B4_T02TALE nuclease

SEQ ID NO: 3915 - DNA, 636 bp, Artificial
  Mutations within GlyA3B4 introduced by GmGlyA3B4_T02TALE nuclease
gttcatgtacggttgcagatataaacgaagcatagcttatgtatgaggtgtaacaaaaattggaaacaatagccatgcaaggtgaagaatgtcaccaactcagaaacccttcttcattgacgtgtccctcactcactctcctctcttcactataaatcgccactcttcgtgttctccacttcaccaactccttcaaacttattaacactttccttagttcaatatggggaagcccttcttcactctctctctttcttccctttgcttgctactcttgtcgagtgcatctattacctccagcaagttcaacgagtgccaactcaacaacctcaacgcgttggaacccgaccaccgcgttgagtccgaaggtggtcttattgaaacatggaactctcaacaccctgagctgcaatgcgccggtgtcactgtttccaaacgcaccctcaaccgcaacggcctccacttgccatcttactcaccttatccccaaatgatcattgtcgttcaaggtgcgtaatattagtaagaagtatttatcagcttaacgtgataacaataatagtaatatgaaatatttattaaatttttataattaatctctgctagaaaatttgattaatcattttagtagaattt

SEQ ID NO: 3916 - DNA, 659 bp, Artificial
  Mutations within GlyA3B4 introduced by GmGlyA3B4_T02TALE nuclease
gttcatgtacggttgcagatataaacgaagcatagcttatgtatgaggtgtaacaaaattggaaacaatagccatgcaaggtgaagaatgtcaccaactcagaaacccttcttcattgacgtgtccctcactcactctcctctcttcactataaatcgccactcttcgtgttctccacttcaccaactccttcaaacttattaacactttccttagttcaatatggggaagcccttcttcactctctctctttcttccctttgcttgctactcttgtcgagtgcatattacctccagcaagttcaacgagtgccaactcaacaacctcaacgcgttggaacccgaccaccgcgttgagtccgaaggtggtcttattgaaacatggaactctcaacaccctgagctgcaatgcgccggtgtcactgtttccaaacgcaccctcaaccgcaacggcctccacttgccatcttactcaccttatccccaaatgatcattgtcgttcaaggtgcgtaatattagtaagaagtatttatcagcttaacgtgataacaatatagtaatatgaaaatatttattaaatttttataattaatctctgctagaaaatttgattaatcatttttagtagaatttgtttttctcaactaggtttttaaaa

SEQ ID NO: 3917 - DNA, 663 bp, Artificial; identical to SEQ ID NO: 2045
  Mutations within GlyA3B4 introduced by GmGlyA3B4_T02TALE nuclease

SEQ ID NO: 3918 - DNA, 648 bp, Artificial
  Mutations within GlyA3B4 introduced by GmGlyA3B4_T02TALE nuclease
gttcatgtacggttgcagatataaacgaagcatagcttatgtatgaggtgtaacaaaattggaaacaatagccatgcaaggtgaagaatgtcaccaactcagaaacccttcttcattgacgtgtccctcactcactctcctctcttcactataaatcgccactcttcgtgttctccacttcaccaactccttcaaacttattaacactttccttagttcaatatggggaagcccttcttcactctctctctttcttccctttgctattacctccagcaagttcaacgagtgccaactcaacaacctcaacgcgttggaacccgaccaccgcgttgagtccgaaggtggtcttattgaaacatggaactctcaacacccctgagctgcaatgcgccggtgtcactgtttccaaacgcaccctcaaccgcaacggcctccacttgccatcttactcaccttatcccccaaatgatcattgtcgttcaaggtgcgtaatattagtaagaagtatttatcagcttaacgtgataacaataatagtaatatgaaatatttattaaattttttataattaatctctgctagaaaatttgattaatcatttttagtagaatttgttttttctcaactaggttttaaaacaccaca

SEQ ID NO: 3919 - DNA, 512 bp, Artificial
  Mutations within GlyA3B4 introduced by GmGlyA3B4_T02TALE nuclease
gttcatgtacggttgcagatataaacgaagcatagcttatgtatgaggtgtaacaaaaattggaaacaatagccatgcaaggtgaagaatgtcaccaactcagaaaccccttcttcattgacgtgtccctcactcactctcctctcttcactataaatcgccactcttcgtgttctccacttcaccaactccttcaaacttattaacactttccttagttcaatatggggaagcccttcttcactctctctctttcttccctttgcttgctactcttgtcgagttgctattacctccagcaagttcaacgagtgccaactcaacaacctcaacgcgttggaacccgaccaccgcgttgagtccgaaggtggtcttattgaaacatggaactctcaacaccctgagctgcaatgcgccggtgtcactgtttccaaacgcaccctcaaccgcaacggcctccacttgccatcttactcaccttatccccaaatgatcattgtcgttcaaggtgg

SEQ ID NO: 3920 - DNA, 655 bp, Artificial
  Mutations within GlyA3B4 introduced by GmGlyA3B4_T02TALE nuclease
gttcatgtacggttgcagatataaacgaagcatagcttatgtatgaggtgtaacaaaattggaaacaatagccatgcaaggtgaagaatgtcaccaactcagaaacccttcttcattgacgtgtccctcactcactctcctctcttcactataaatcgccactcttcgtgttctccacttcaccaactccttcaaacttattaacactttccttagttcaatatggggaagcccttcttcactctctctctttcttccctttgcttgctattacctccagcaagttcaacgagtgccaactcaacaacctcaacgcgttggaacccgaccaccgcgttgagtccgaaggtggtcttattgaaacatggaactctcaacacccctgagctgcaatgcgccggtgtcactgttttccaaacgcaccctcaaccgcaacggcctccacttgccatcttactcaccttatccccaaatgatcattgtcgttcaaggtgcgtaatattagtaagaagttatttatcagcttaacgtgataacaataatagtaatatgaaatattttattaaatttttttataattaatctctgctagaaaatttgattaatcatttttagtagaatttgttttttctcaactaggtttttaaacaccaca

SEQ ID NO: 3921 - DNA, 612 bp, Artificial
  Mutations within GlyA3B4 introduced by GmGlyA3B4_T02TALE nuclease
gttcatgtacggttgcagatataaacgaagcatagcttatgtatgaggtgtaacaaaattggaaacaatagccatgcaaggtgaagaatgtcaccaactcagaaacccttcttcattgacgtgtccctcactcactctcctctcttcactataaatcgccactcttcgtgttctccacttcaccaactccttcaaacttattaacactttccttagttcaatatggggaagcccttcttcactctctctctttcaacgagtgccaactcaacaacctcaacgcgttggaacccgaccaccgcgttgagtccgaaggtggtcttattgaaacatggaactctcaacaccctgagctgcaatgcgccggtgtcactgtttccaaacgcaccctcaaccgcaacggcctccacttgccatcttactcaccttatccccaaatgatcattgtcgttcaaggtgcgtaatattagtaagaagtatttatcagcttaacgtgataacaataatagtaatatgaaatatttattaaattttttataattaatctctgctagaaaatttgattaatcatttttagtagaatttgtttttctcaactaggtttttaaaaca

SEQ ID NO: 3922 - DNA, 661 bp, Artificial; identical to SEQ ID NO: 1694
  Mutations within GlyA3B4 introduced by GmGlyA3B4_T02TALE nuclease

SEQ ID NO: 3923 - DNA, 623 bp, Artificial
  Mutations within GlyA3B4 introduced by GmGlyA3B4_T02TALE nuclease
gttcatgtacggttgcagatataaacgaagcatagcttatgtatgaggtgtaacaaaattggaaacaatagccatgcaaggtgaagaatgtcaccaactcagaaacccttcttcattgacgtgtccctcactcactctcctctcttcactataaatcgccactcttcgtgttctccacttcaccaactccttcaaacttattaacactttccttagttcaatatggggaagcccttcttcactctctctctttcttccctttgcttgctactcttgtcgagtgccaactcaacaacctcaacgcgttggaacccgaccaccgcgttgagtccgaaggtggtcttattgaaacatggaactctcaacaccctgagctgcaatgcgccggtgtcactgttttccaaacgcaccctcaaccgcaacggcctccacttgccatcttactcaccttatcccccaaatgatcattgtcgttcaaggtgcgtaatattagtaagaagtatttatcagcttaacgtgataacaataatagtaatatgaaatatttattaaattttttataatttaatctctgctagaaaatttgattaatcatttttagtagaatttgtttttctcaacta

SEQ ID NO: 3924 - DNA, 665 bp, Artificial
  Mutations within GlyA3B4 introduced by GmGlyA3B4_T02TALE nuclease
gttcatgtacggttgcagatataaacgaagcatagcttatgtatgaggtgtaacaaaattggaaacaatagccatgcaaggtgaagaatgtcaccaactcagaaaccccttcttcattgacgtgtcccctcactcactctcctctcttcactataaatcgccactcttcgtgttctccacttcaccaactccttcaaacttattaacactttccttagttcaatatgggggaagcccttcttcactctctctctttcttccctttgcttgctactcttgtcgagtgcatgctttacctccagcaagttcaacgagtgccaactcaacaacctcaacgcgttggaacccgaccaccgcgttgagtccgaaggtggtcttattgaaacatggaactctcaacaccctgagctgcaatgcgccggtgtcactgtttccaaacgcaccctcaaccgcaacggcctccacttgccatcttactcaccttatccccaaatgatcattgtcgttcaaggtgcgtaatattagtaagaagtatttatcagcttaacgtgataacaataatagtaatatgaaatatttattaaatttttataattaatctctgctagaaaatttgattaatcattttagtgaatttgttttctcaactaggttttaaaacacca

SEQ ID NO: 3925 - DNA, 646 bp, Artificial; identical to SEQ ID NO: 1911
  Mutations within GlyA3B4 introduced by GmGlyA3B4_T02TALE nuclease

SEQ ID NO: 3926 - DNA, 660 bp, Artificial; identical to SEQ ID NO: 1783
  Mutations within GlyA3B4 introduced by GmGlyA3B4_T02TALE nuclease

SEQ ID NO: 3927 - DNA, 660 bp, Artificial
  Mutations within GlyA3B4 introduced by GmGlyA3B4_T02TALE nuclease
  misc_feature (507): n is a or c or t or g
gttcatgtacggttgcagatataaacgaagcatagcttatgtatgaggtgtaacaaaattggaaacaatagccatgcaaggtgaagaatgtcaccaactcagaaacccttcttcattgacgtgtcccctcactcactctcctctcttcactataaatcgccactcttcgtgttctccacttcaccaactccttcaaacttattaacactttccttagttcaatatggggaagcccttcttcactctctctctttcttccctttgcttgctactcttgtcgagtgcattccagcaagttcaacgagtgccaactcaacaacctcaacgcgttggaacccgaccaccgcgttgagtccgaaggtggtcttattgaaacatggaactctcaacaccctgagctgcaatgcgccggtgtcactgtttccaaacgcaccctcaaccgcaacggcctccacttgccatcttactcaccttatcccccaaatgatcattgtcgttcaaggtgcntaatattagtaagaagtatttatcagcttaacgtgataacaataatagtaatatgaaatatttattaaattttttataattaatctctgctagaaaatttgattaatctttttagtagaattgttttttctcaactaggtttaaaacaccaca

SEQ ID NO: 3928 - DNA, 655 bp, Artificial; identical to SEQ ID NO: 2349
  Mutations within GlyA3B4 introduced by GmGlyA3B4_T02TALE nuclease

SEQ ID NO: 3929 - DNA, 661 bp, Artificial; identical to SEQ ID NO: 1836
  Mutations within GlyA3B4 introduced by GmGlyA3B4_T02TALE nuclease

SEQ ID NO: 3930 - DNA, 659 bp, Artificial; identical to SEQ ID NO: 1853
  Mutations within GlyA3B4 introduced by GmGlyA3B4_T02TALE nuclease

SEQ ID NO: 3931 - DNA, 668 bp, Artificial
  Mutations within GlyA3B4 introduced by GmGlyA3B4_T02TALE nuclease
gttcatgtacggttgcagatataaacgaagcatagcttatgtatgaggtgtaacaaaattggaaacaatagccatgcaaggtgaagaatgtcaccaactcagaaacccttcttcattgacgtgtccctcactcactctcctctcttcactataaatcgccactcttcgtgttctccacttcaccaactccttcaaacttattaacactttccttagttcaatatggggaagcccttcttcactctctctctttcttccctttgcttgctactcttgtcgagtgcttgctattacctccagcaagttcaacgagtgccaactcaacaacctcaacgcgttggaacccgaccaccgcgttgagtccgaaggtggtcttattgaaacatggaactctcaacaccctgagctgcaatgcgccggtgtcactgtttccaaacgcaccctcaaccgcaacggcctccacttgccatcttactcaccttatccccaaatgatcattgtcgttcaaggtgcgtaatattagtaagaagtatttatcagcttaacgtgataacaataatagtaatatgaaatatttattaaatttttataattaatctctgctagaaaatttgattaatcattttagtagaatttgtttttctcaactaggtttttaaaacaccaca

SEQ ID NO: 3932 - DNA, 658 bp, Artificial; identical to SEQ ID NO: 2344
  Mutations within GlyA3B4 introduced by GmGlyA3B4_T02TALE nuclease

SEQ ID NO: 3933 - DNA, 667 bp, Artificial
  Mutations within GlyA3B4 introduced by GmGlyA3B4_T02TALE nuclease
gttcatgtacggttgcagatataaacgaagcatagcttatgtatgaggtgtaacaaaattggaaacaatagccatgcaaggtgaagaatgtcaccaactcagaaacccttcttcattgacgtgtccctcactcactctcctctcttcactataaatcgccactcttcgtgttctccacttcaccaactccttcaaacttattaacactttccttagttcaatatggggaagcccttcttcactctctctctttcttccctttgcttgctactcttgtcgagttttttgctattacctccagcaagttcaacgagtgccaactcaacaacctcaacgcgttggaacccgaccaccgcgttgagtccgaaggtggtcttattgaaacatggaactctcaacaccctgagctgcaatgcgccggtgtcactgtttccaaacgcaccctcaaccgcaacggcctccacttgccatcttactcaccttatccccaaatgatcattgtcgttcaaggtgcgtaatattagtaagaagtatttatcagcttaacgtgataacaataatagtaatatgaaatatttattaaatttttataattaatctctgctagaaaatttgattaatcattttagtagaatttgtttttctcaactaggtttttaaaacacca

SEQ ID NO: 3934 - DNA, 621 bp, Artificial
  Mutations within GlyA3B4 introduced by GmGlyA3B4_T02TALE nuclease
gttcatgtacggttgcagatataaacgaagcatagcttatgtatgaggtgtaacaaaattggaaacaatagccatgcaaggtgaagaatgtcaccaactcagaaacccttcttcattgacgtgtccctcactcactctcctctcttcactataaatcgccactcttcgtgttctccacttcaccaactccttcaaacttattaacactttccttagttcaatatggggaagcccttcttcactctctctctttcttccctttgcttgctactcttgtcgagtgcatgctattacctccagcaagttcaacgagtgccaactcaacaacctcaacgcgttggaacccgaccaccgcgttgagtccgaaggtggtcttattgaaacatggaactctcaacaccctgagctgcaatgcgccggtgtcactgtttccaaacgcaccctcaaccgcaacggcctccacttgccatcttactcaccttatccccaaatgatcattgtcgttcaaggtgcgtaatattagtaagagtatttatcagcttaacgtgataacaataatagtaatatgaaatatttattaaatttttataattaatctctgctagaaaatttgattaatca

SEQ ID NO: 3935 - DNA, 653 bp, Artificial
  Mutations within GlyA3B4 introduced by GmGlyA3B4_T02TALE nuclease
gttcatgtacggttgcagatataaacgaagcatagcttatgtatgaggtgtaacaaaattggaaacaatagccatgcaaggtgaagaatgtcaccaactcagaaacccttcttcattgacgtgtccctcactcactctcctctcttcactataaatcgccactcttcgtgttctccacttcaccaactccttcaaacttattaacactttccttagttcaatatggggaagcccttcttcactctctctctttcttccctttgcttgctactcttgtcgagtgcatctattacctccagcaagttcaacgagtgccaactcaacaacctcaacgcgttggaacccgaccaccgcgttgagtccgaaggtggtcttattgaaacatggaactctcaacaccctgagctgcaatgcgccggtgtcactgtttccaaacgcaccctcaaccgcaacggcctccacttgccatcttactcaccttatcccccaaatgatcattgtcgttcaaggtgcgtaatattagtaagaagtatttatcagcttaacgtgataacaataatagtaatatgaaatatttattaaattttttataattaatctctgctagaaaatttgattaatcattttagtagaatttgtttttctcaactagg

SEQ ID NO: 3936 - DNA, 638 bp, Artificial
  Mutations within GlyA3B4 introduced by GmGlyA3B4_T02TALE nuclease
gttcatgtacggttgcagatataaacgaagcatagcttatgtatgaggtgtaacaaaattggaaacaatagccatgcaaggtgaagaatgtcaccaactcagaaacccttcttcattgacgtgtccctcactcactctcctctcttcactataaatcgccactcttcgtgttctccacttcaccaactccttcaaacttattaacactttccttagttcaatatggggaagcccttcttcactctctctctttcttccctttactttgctattacctccagcaagttcaacgagtgccaactcaacaacctcaacgcgttggaacccgaccaccgcgttgagtccgaaggtggtcttattgaaacatggaactctcaacacccctgagctgcaatgcgccggtgtcactgtttccaaacgcaccctcaaccgcaacggcctccacttgccatcttactcaccttatccccaaatgatcattgtcgttcaaggtgcgtaatattagtaagaagtatttatcagctttaacgtgataacaataatagtaatatgaaatatttattaaattttttataattaatctctgctagaaaatttgattaatcatttttagtagaatttgttttttctcaactagg

SEQ ID NO: 3937 - DNA, 659 bp, Artificial; identical to SEQ ID NO: 1939
  Mutations within GlyA3B4 introduced by GmGlyA3B4_T02TALE nuclease

SEQ ID NO: 3938 - DNA, 663 bp, Artificial; identical to SEQ ID NO: 1819
  Mutations within GlyA3B4 introduced by GmGlyA3B4_T02TALE nuclease

SEQ ID NO: 3939 - DNA, 651 bp, Artificial
  Mutations within GlyA3B4 introduced by GmGlyA3B4_T02TALE nuclease
gttcatgtacggttgcagatataaacgaagcatagcttatgtatgaggtgtaacaaaattggaaacaatagccatgcaaggtgaagaatgtcaccaactcagaaacccttcttcattgacgtgtccctcactcactctcctctcttcactataaatcgccactcttcgtgttctccacttcaccaactccttcaaacttattaacactttccttagttcaatatggggaagcccttcttcactctctctctttcttccctttgcttgctactcttgtcgagtgcatctattacctccagcaagttcaacgagtgccaactcaacaacctcaacgcgttggaacccgaccaccgcgttgagtccgaaggtggtcttattgaaacatggaactctcaacaccctgagctgcaatgcgccggtgtcactgtttccaaacgcaccctcaaccgcaacggcctccacttgccatcttactcaccttatccccaaatgatcattgtcgttcaaggtgcgtaatattagtaagaagtatttatcagcttaacgtgataacaataatagtaatatgaaaatatttattaaatttttataattaatctctgctagaaaatttgattaatcattttagtagaatttgttttctcaactagg

SEQ ID NO: 3940 - DNA, 661 bp, Artificial
  Mutations within GlyA3B4 introduced by GmGlyA3B4_T02TALE nuclease
gttcatgtacggttgcagatataaacgaagcatagcttatgtatgaggtgtaacaaaattggaaacaatagccatgcaaggtgaagaatgtcaccaactcagaaacccttcttcattgacgtgtccctcactcactctcctctcttcactataaatcgccactcttcgtgttctccacttcaccaactccttcaaacttattaacactttccttagttcaatatggggaagcccttcttcactctctctctttcttccctttgcttgctactcttgtcctttgctattacctccagcaagttcaacgagtgccaactcaacaacctcaacgcgttggaacccgaccaccgcgttgagtccgaaggtggtcttattgaaacatggaactctcaacaccctgagctgcaatgcgccggtgtcactgtttccaaacgcaccctcaaccgcaacggcctccacttgccatcttactcaccttatcccccaaatgatcattgtcgttcaaggtgcgtaatattagtaagaagtatttatcagcttaacgtgataacaatatagtaatatgaaatatttattaaatttttataattaatctctgctagaaaatttgattaatcattttagtagaatttgttttctcaactaggtttttaaaacacca

SEQ ID NO: 3941 - DNA, 709 bp, Artificial
  Mutations within GlyA3B4 introduced by GmGlyA3B4_T02TALE nuclease
  misc_feature (620); (662): n is a or c or t or g
gttcatgtacggttgcagatataaacgaagcatagcttatgtatgaggtgtaacaaaattggaaacaatagccatgcaaggtgaagaatgtcaccaactcagaaaccccttcttcattgacgtgtccctcactcactctcctctcttcactataaatcgccactcttcgtgttctccacttcaccaactccttcaaacttattaacactttccttagttcaatatggggaagcccttcttcactctctctctttcttccctttgcttgctactcttgtcgagtgccgtgggcctggcacagcaccggcaacagccgctggaccgtctccagcgcctgcttgccaccgccattgctggcgatggccaccacctgctggggggtcaagctattacctccagcaagttcaacgagtgccaactcaacaacctcaacgcgttggaacccgaccaccgcgttgagtccgaaggtggtcttattgaaacatggaactctcaacacccctgagctgcaatgcgccggtgtcactgttttccaaacgcaccctcaaccgcaacggcctccacttgccatcttactcaccttatccccaaatgatcattgtcgttcaaggtgcgtaatnttagtaagaagtatttatcagcttaacgtgataacaataatngtaatatgaaatatttattaaattttttataattaatctctgctatg

SEQ ID NO: 3942 - DNA, 662 bp, Artificial; identical to SEQ ID NO: 2192
  Mutations within GlyA3B4 introduced by GmGlyA3B4_T02TALE nuclease

SEQ ID NO: 3943 - DNA, 653 bp, Artificial
  Mutations within GlyA3B4 introduced by GmGlyA3B4_T02TALE nuclease
gttcatgtacggttgcagatataaacgaagcatagcttatgtatgaggtgtaacaaaattggaaacaatagccatgcaaggtgaagaatgtcaccaactcagaaacccttcttcattgacgtgtccctcactcactctcctctcttcactataaatcgccactcttcgtgttctccacttcaccaactccttcaaacttattaacactttccttagttcaatatggggaagcccttcttcactctctctctttcttccctttgcttgctattacctccagcaagttcaacgagtgccaactcaacaacctcaacgcgttggaacccgaccaccgcgttgagtccgaaggtggtcttattgaaacatggaactctcaacacccctgagctgcaatgcgccggtgtcactgttttccaaaacgcacccctcaaccgcaacggcctccacttgccatcttactcaccttatcccccaaatgatcattgtcgttcaaggtgcgtaatattagtaagaagtatttatcagcttaacgtgataacaataatagtaatatgaaatatttattaaattttttataattaatctctgctagaaaatttgattaatcatttttagtagaatttgttttttctcaactaggttttaaaacacca

SEQ ID NO: 3944 - DNA, 631 bp, Artificial; identical to SEQ ID NO: 2292
  Mutations within GlyA3B4 introduced by GmGlyA3B4_T02TALE nuclease

SEQ ID NO: 3945 - DNA, 429 bp, Artificial
  Mutations within GlyA3B4 introduced by GmGlyA3B4_T02TALE nuclease
gttcatgtacggttgcagatataaacgaagcatagcttatgtatgaggtgtaacaaaattggaaacaatagccatgcaaggtgaagaatgtcaccaactcagaaacccttcttcattgacgtgtccctcactcactctcctctcttcactataaatcgccactcttcgtgttctccacttcaccaactccttcaaacttattaacactttccttagttcaatatggggaagcccttcttcactctctctctttcttccctttgcttgctactcttgttacctccagcaagttcaacgagtgccaactcaacaacctcaacgcgttggaacccgaccaccgcgttgagtccgaaggtggtcttattgaaacatggaactctcaacaccctgagctgcaatgcgccggtgtcactgtttccaaacgcaccc

SEQ ID NO: 3946 - DNA, 627 bp, Artificial
  Mutations within GlyA3B4 introduced by GmGlyA3B4_T02TALE nuclease
gttcatgtacggttgcagatataaacgaagcatagcttatgtatgaggtgtaacaaaattggaaacaatagccatgcaaggtgaagaatgtcaccaactcagaaacccttcttcattgacgtgtccctcactcactctcctctcttcactataaatcgccactcttcgtgttctccacttcaccaactccttcaaacttattaacactttccttagttcaatatggggaagcccttcttcactctctctctttcttccctttgcttgctactcttgtcgagtgcaacctccagcaagttcaacgagtgccaactcaacaacctcaacgcgttggaacccgaccaccgcgttgagtccgaaggtggtcttattgaaacatggaactctcaacacctgagctgcaatgcgccggtgtcactgtttccaaacgcaccctcaaccgcaacggcctccacttgccatcttactcaccttatcccccaaattgatcttgtcgttcaaggtgcgtaatattagtaagaagtatttatcagcttaacgtgataacaataatagtaatatgaaatatttattaaattttttataattaatctctgctagaaaatttgattaatctttttagtagaa

SEQ ID NO: 3947 - DNA, 662 bp, Artificial
  Mutations within GlyA3B4 introduced by GmGlyA3B4_T02TALE nuclease
  misc_feature (530): n is a or c or t or g
gttcatgtacggttgcagatataaacgaagcatagcttatgtatgaggtgtaacaaaattggaaacaatagccatgcaaggtgaagaatgtcaccaactcagaaacccttcttcattgacgtgtccctcactcactctcctctcttcactataaatcgccactcttcgtgttctccacttcaccaactccttcaaacttattaacactttccttagttcaatatggggaagcccttcttcactctctctctttcttccctttgcttgctactcttgtcgagtgcatgctattacctccagcaagttcaacgagtgccaactcaacaacctcaacgcgttggaacccgaccaccgcgttgagtccgaaggtggtcttattgaaacatggaactctcaacaccctgagctgcaatgcgccggtgtcactgtttccaaacgcaccctcaaccgcaacggcctccacttgccatcttactcaccttatccccaaatgatcattgtcgttcaaggtgcgtaatattagtaagagnatttatcagcttaacgtgataacaataatagtaatatgaaatatttattaaatttttataattaatctctgctagaaaatttgattaatcattttagtagaatttgttttctcaactaggttttaaacacca

SEQ ID NO: 3948 - DNA, 664 bp, Artificial
  Mutations within GlyA3B4 introduced by GmGlyA3B4_T02TALE nuclease
gttcatgtacggttgcagatataaacgaagcatagcttatgtatgaggtgtaacaaaattggaaacaatagccatgcaaggtgaagaatgtcaccaactcagaaaccccttcttcattgacgtgtccctcactcactctcctctcttcactataaatcgccactcttcgtgttctccacttcaccaactccttcaaacttattaacactttccttagttcaatatggggaagcccttcttcactctctctctttcttccctttgcttgctactcttgtcgagtgcattgctattacctccagcaagttcaacgagtgccaactcaacaacctcaacgcgttggaacccgaccaccgcgttgagtccgaaggtggtcttattgaaacatggaactctcaacaccctgagctgcaatgcgccggtgtcactgtttccaaacgcaccctcaaccgcaacggcctccacttgccatcttactcaccttatccccaaatgatcattgtcgttcaaggtgcgtaatattagtaagaagtatttatcagcttaacgtgataacaatatagtaatatgaaatatttattaaatttttataattaatctctgctagaaaatttgattaatcattttagtagaatttgttttctcaactaggttttaaacacca

SEQ ID NO: 3949 - DNA, 600 bp, Artificial
  Mutations within GlyA3B4 introduced by GmGlyA3B4_T02TALE nuclease
gttcatgtacggttgcagatataaacgaagcatagcttatgtatgaggtgtaacaaaattggaaacaatagccatgcaaggtgaagaatgtcaccaactcagaaacccttcttcattgacgtgtccctcactcactctcctctcttcactataaatcgccactcttcgtgttctccacttcaccaactccttcaaacttattaacactttccttagttcaatatggggaagcccttcttcactctctctctttcttccctttgcttgctactcttgtcgagtgcatctcaacaacctcaacgcgttggaacccgaccaccgcgttgagtccgaaggtggtcttattgaaacatggaactctcaacaccctgagctgcaatgcgccggtgtcactgtttccaaacgcaccctcaaccgcaacggcctccacttgccatcttactcaccttatccccaaatgatcattgtcgttcaaggtgcgtaatattagtaagaagtatttatcagcttaacgtgataacaataatagtaatatgaaatatttattaaattttttataattaatctctgctagaaaatttgattaatcatttttagtag

SEQ ID NO: 3950 - DNA, 653 bp, Artificial
  Mutations within GlyA3B4 introduced by GmGlyA3B4_T02TALE nuclease
gttcatgtacggttgcagatataaacgaagcatagcttatgtatgaggtgtaacaaaattggaaacaatagccatgcaaggtgaagaatgtcaccaactcagaaacccttcttcattgacgtgtccctcactcactctcctctcttcactataaatcgccactcttcgtgttctccacttcaccaaactccttcaaacttattaacactttccttagttcaatatggggaagcccttcttcactctctctctttcttccctttacttgctactcttgtcgagtgcatggcaagttcaacgagtgccaactcaacaacctcaacgcgttggaacccgaccaccgcgttgagtccgaaggtggtcttattgaaacatggaactctcaacaccctgagctgcaatgcgccggtgtcactgtttccaaaacgcaccctcaaccgcaacggcctccaacgcttgccaatcttcactcaccttatccccaaatgaatcattgtcgttcaaggtgcgtaatattagtaagaagtatttatcagcttaacgtgataacaataatagtaatatgaaatatttattaaatttttataattaatctctgctagaaaatttgattaatcatttttagtagaatttgtttttctcaactaggtttt

SEQ ID NO: 3951 - DNA, 596 bp, Artificial
  Mutations within GlyA3B4 introduced by GmGlyA3B4_T02TALE nuclease
gttcatgtacggttgcagatataaacgaagcatagcttatgtatgaggtgtaacaaaattggaaacaatagccatgcaaggtgaagaatgtcaccaactcagaaacccttcttcattgacgtgtccctcactcactctcctctcttcactataaatcgccactcttcgtgttctccacttcaccaactccttcaaacttattaacactttccttagttcaatatggggaagcccttcttcactctctctctttcaacgagtgccaactcaacaacctcaacgcgttggaacccgaccaccgcgttgagtccgaaggtggtcttattgaaacatggaactctcaacaccctgagctgcaatgcgccggtgtcactgtttccaaacgcaccctcaaccgcaacggcctccacttgccatcttactcaccttatccccaaatgatcattgtcgttcaaggtgcgtaatattagtaagaagtatttatcagcttaacgtgataacaataatagtaatatgaaatatttattaatttttataattaatctctgctagaaaatttgattaatcatttttagtagaatttgtttttctcaact

SEQ ID NO: 3952 - DNA, 488 bp, Artificial
  Mutations within GlyA3B4 introduced by GmGlyA3B4_T02TALE nuclease
gttcatgtacggttgcagatataaacgaagcatagcttatgtatgaggtgtaacaaaattggaaacaatagccatgcaaggtgaagaatgtcaccaactcagaaacccttcttcattgacgtgtccctcactcactctcctctcttcactataaatcgccactcttcgtgttctccacttcaccaactccttcaaacttattaacactttccagcaagttcaacgagtgccaactcaacaacctcaacgcgttggaacccgaccaccgcgttgagtccgaaggtggtcttattgaaacatggaactctcaacaccctgagctgcaatgcgccggtgtcactgtttccaaacgcaccctcaaccgcaacggcctccacttgccatcttactcaccttatccccaaatgatcattgtcgttcaaggtgcgtaatattagtaagaagtatttatccagcttaacgtgataacaataatagtaatatgaaat

SEQ ID NO: 3953 - DNA, 599 bp, Artificial
  Mutations within GlyA3B4 introduced by GmGlyA3B4_T02TALE nuclease
gttcatgtacggttgcagatataaacgaagcatagcttatgtatgaggtgtaacaaaattggaaacaatagccatgcaaggtgaagaatgtcaccaactcagaaacccttcttcattgacgtgtccctcactcactctcctctcttcactataaatcgccactcttcgtgttctccacttcaccaactccttcaaacttattaacactttccttagttcaatatggggaagcccttcttcactctctctctttgagttgacaccctcaacgcgttggaacccgaccaccgcgttgagtccgaaggtggtcttattgaaacatggaactctcaacaccctgagctgcaatgcgccggtgtcactgtttccaaacgcaccctcaaccgcaacggcctccacttgccatcttactcaccttatccccaaaatgatcattgtcgttcaaggtgcgtaatattagtaagaagtatttatcagcttaacgtgataacaataatagtaatatgaaatatttattaaattttttataattaatctctgctagaaatttgattaatcatttttagtagaatttgtttttctcaactaggtttttaaaa

SEQ ID NO: 3954 - DNA, 638 bp, Artificial
  Mutations within GlyA3B4 introduced by GmGlyA3B4_T02TALE nuclease
gttcatgtacggttgcagatataaacgaagcatagcttatgtatgaggtgtaacaaaattggaaacaatagccatgcaaggtgaagaatgtcaccaactcagaaacccttcttcattgacgtgtccctcactcactctcctctcttcactataaatcgccactcttcgtgttctccacttcaccaactccttcaaacttattaacactttccttagttcaatatggggaagcccttcttcactctctctctttcttccctttgcttgctactcttgtcgagtgcatacctccagcaagttcaacgagtgccaactcaacaacctcaacgcgttggaacccgaccaccgcgttgagtccgaaggtggtcttattgaaacatggaactctcaacaccctgagctgcaatgcgccggtgtcactgtttccaaacgcaccctcaaccgcaacggcctccacttgccatcttactcaccttatccccaaatgatcattgtcgttcaaggtgcgtaatattagtaagaagtatttatcagcttaacgtgataacaataatagtaatatgaaatatttattaaatttttataattaatctctgctagaaaatttgattaatcattttagtagaatttgttttctc

SEQ ID NO: 3955 - DNA, 631 bp, Artificial
  Mutations within GlyA3B4 introduced by GmGlyA3B4_T02TALE nuclease
gttcatgtacggttgcagatataaacgaagcatagcttatgtatgaggtgtaacaaaattggaaacaatagccatgcaaggtgaagaatgtcaccaactcagaaacccttcttcattgacgtgtccctcactcactctcctctcttcactataaatcgccactcttcgtgttctccacttcaccaactccttcaaacttattaacactttccttagttcaatatgggggaagcccttcttcactctctctctttcttccctttgcttgctactcttgtcgagtgcattacctccagcaagttcaacgagtgccaactcaacaacctcaacgcgttggaacccgaccaccgcgttgagtccgaaggtggtcttattgaaacatggaactctcaacaccctgagctgcaatgcgccggtgtcactgtttccaaacgcaccctcaaccgcaacggcctccacttgccatcttactcaccttatccccaaatgatcattgtcgttcaaggtgcgtaatattagtaagaaagtatttatcagcttaacgtgataacaataatagtaatatgaaaatatttattaaaatttttataattaatctctgctagaaaatttgattaatcatttttagtag

SEQ ID NO: 3956 - DNA, 657 bp, Artificial
  Mutations within GlyA3B4 introduced by GmGlyA3B4_T02TALE nuclease
gttcatgtacggttgcagatataaacgaagcatagcttatgtatgaggtgtaacaaaattggaaacaatagccatgcaaggtgaagaatgtcaccaactcagaaacccttcttcattgacgtgtccctcactcactctcctctcttcactataaatcgccactcttcgtgttctccacttcaccaactccttcaaacttattaacactttccttagttcaatatggggaagcccttcttcactctctctctttcttccctttgcttgctactcttgtcgagtgcatttgctattacctccagcaagttcaacgagtgccaactcaacaacctcaacgcgttggaacccgaccaccgcgttgagtccgaaggtggtcttattgaaacatggaactctcaacaccctgagctgcaatgcgccggtgtcactgtttccaaacgcaccctcaaccgcaacggcctccacttgccatcttactcaccttatccccaaatgatcattgtcgttcaaggtgcgtaatattagtaagaagtatttatcagcttaacgtgataacaataatagtaatatgaaatatttattaaatttttataattaatctctgctagaaaatttgattaatcattttagtagaatttgttttctcaactaggtttt

SEQ ID NO: 3957 - DNA, 653 bp, Artificial
  Mutations within GlyA3B4 introduced by GmGlyA3B4_T02TALE nuclease
gttcatgtacggttgcagatataaacgaagcatagcttatgtatgaggtgtaacaaaattggaaacaatagccatgcaaggtgaagaatgtcaccaactcagaaacccttcttcattgacgtgtccctcactcactctcctctcttcactataaatcgccactcttcgtgttctccacttcaccaactccttcaaacttattaacactttccttagttcaatatggggaagcccttcttcactctctctctttcttccctttgcttgctattacctccagcaagttcaacgagtgccaactcaacaacctcaacgcgttggaacccgaccaccgcgttgagtccgaaggtggtcttattgaaacatggaactctcaacacccctgagctgcaatgcgccggtgtcactgtttccaaacgcaccctcaaccgcaacggcctccacttgccatcttactcaccttatccccaaatgatcattgtcgttcaaggtgcgtaatattagtaagaagtatttatcagcttaacgtgataacaataatagtaatatgaaatatttattaaattttttataaattaatctctgctagaaaatttgattaaatcatttttagtagaatttgttttttctcaactaggttttaaaacaccaca

SEQ ID NO: 3958 - DNA, 664 bp, Artificial
  Mutations within GlyA3B4 introduced by GmGlyA3B4_T02TALE nuclease
gttcatgtacggttgcagatataaacgaagcatagcttatgtatgaggtgtaacaaaattggaaacaatagccatgcaaggtgaagaatgtcaccaactcagaaaccccttcttcattgacgtgtccctcactcactctcctctcttcactataaatcgccactcttcgtgttctccacttcaccaactccttcaaacttattaacactttccttagttcaatatggggaagcccttcttcactctctctctttcttccctttgcttgctactcttgtcgagtgcattattacctccagcaagttcaacgagtgccaactcaacaacctcaacgcgttggaacccgaccaccgcgttgagtccgaaggtggtcttattgaaacatggaactctcaacaccctgagctgcaatgcgccggtgtcactgtttccaaacgcaccctcaaccgcaacggcctccacttgccatcttactcaccttatccccaaatgatcattgtcgttcaaggtgcgtaatattagtaagaagtatttatcagcttaacgtgataacaataatagtaatatgaaatatttattaaatttttataattaatctctgctagaaaatttgattaatcattttagtagaatttgttttctcaactaggtttttaaaacacca

SEQ ID NO: 3959 - DNA, 660 bp, Artificial
  Mutations within GlyA3B4 introduced by GmGlyA3B4_T02TALE nuclease
gttcatgtacggttgcagatataaacgaagcatagcttatgtatgaggtgtaacaaaattggaaacaatagccatgcaaggtgaagaatgtcaccaactcagaaacccttcttcattgacgtgtccctcactcactctcctctcttcactataaatcgccactcttcgtgttctccacttcaccaactccttcaaacttattaacactttccttagttcaatatggggaagcccttcttcactctctctctttcttccctttgcttgctactcttgtcgatgctattacctccagcaagttcaacgagtgccaactcaacaacctcaacgcgttggaaacccgaccaccgcgttgagtccgaaggtggtcttattgaaacatggaactctcaacaccctgagctgcaatgcgccggtgtcactgtttccaaacgcaccctcaaccgcaacggcctccacttgccatcttactcaccttatccccaaatgatcattgtcgttcaaggtgcgtaatattagtaagaagtatttatcagcttaacgtgataacaataatagtaatatgaaatatttattaaatttttataattaatctctgctagaaaatttgattaatcattttagtagaatttgttttctcaactaggttttaaaacacca

SEQ ID NO: 3960 - DNA, 658 bp, Artificial
  Mutations within GlyA3B4 introduced by GmGlyA3B4_T02TALE nuclease
gttcatgtacggttgcagatataaacgaagcatagcttatgtatgaggtgtaacaaaattggaaacaatagccatgcaaggtgaagaatgtcaccaactcagaaacccttcttcattgacgtgtccctcactcactctcctctcttcactataaatcgccactcttcgtgttctccacttcaccaactccttcaaacttattaacactttccttagttcaatatggggaagcccttcttcactctctctctttcttccctttgcttgctactcttgtcgagtattacctccagcaagttcaacgagtgccaactcaacaacctcaacgcgttggaacccgaccaccgcgttgagtccgaaggtggtcttattgaaacatggaactctcaacaccctgagctgcaatgcgccggtgtcactgtttccaaacgcaccctcaaccgcaacggcctccacttgccatcttactcaccttatcccccaaatgatcattgtcgttcaaggtgcgtaatattagtaagaagtatttatcagcttaacgtgataacaataatagtaatatgaaatatttattaaatttttataattaatctctgctagaaaatttgattaatcattttagtagaatttgttttctcaactaggttttaaaacacca

SEQ ID NO: 3961 - DNA, 663 bp, Artificial
  Mutations within GlyA3B4 introduced by GmGlyA3B4_T02TALE nuclease
gttcatgtacggttgcagatataaacgaagcatagcttatgtatgaggtgtaacaaaattggaaacaatagccatgcaaggtgaagaatgtcaccaactcagaaacccttcttcattgacgtgtccctcactcactctcctctcttcactataaatcgccactcttcgtgttctccacttcaccaactccttcaaacttattaacactttccttagttcaatatggggaagcccttcttcactctctctctttcttccctttgcttgctactcttgtcgagtgcattacctccagcaagttcaacgagtgccaactcaacaacctcaacgcgttggaacccgaccaccgcgttgagtccgaaggtggtcttattgaaacatggaactctcaacaccctgagctgcaatgcgccggtgtcactgtttccaaacgcaccctcaaccgcaacggcctccacttgccatcttactcaccttatccccaaatgatcattgtcgttcaaggtgcgtaatattagtaagaagtatttatcagcttaacgtgataacaataatagtaatatgaaaatatttattaaatttttataattaatctctgctagaaaatttgattaatcatttttagtagaatttgtttttctcaactaggtttttaaaacacca

SEQ ID NO: 3962 - DNA, 639 bp, Artificial
  Mutations within GlyA3B4 introduced by GmGlyA3B4_T02TALE nuclease
gttcatgtacggttgcagatataaacgaagcatagcttatgtatgaggtgtaacaaaattggaaacaatagccatgcaaggtgaagaatgtcaccaactcagaaacccttcttcctattgacgtgtccctcactcactctcctctcttcactataaatcgccactcttcgtgttctccacttcaccaactccttcaaacttattaacactttccttagttcaatatggggaagcccttcttcactctctctctttcttccctttgcttgctactcttgtcgagtgcatgctattacctccagcaagttcaacgagtgccaactcaacaacctcaacgcgttggaacccgaccaccgcgttgagtccgaaggtggtcttattgaaacatggaactctcaacaccctgagctgcaatgcgccggtgtcactgtttccaaacgcaccctcaaccgcaacggcctccacttgccatcttactcaccttatccccaaatgatcattgtcgttcaaggtgcgtaatattagtaagaagtatttatcagcttaacgtgataacaataatagtaatatgaaatatttattaaatttttataattaatctctgctagaaaatttgattaatcattttagtagaatttg

SEQ ID NO: 3963 - DNA, 633 bp, Artificial
  Mutations within GlyA3B4 introduced by GmGlyA3B4_T02TALE nuclease
gttcatgtacggttgcagatataaacgaagcatagcttatgtatgaggtgtaacaaaattggaaacaatagccatgcaaggtgaagaatgtcaccaactcagaaacccttcttcattgacgtgtccctcactcactctcctctcttcactataaatcgccactcttcgtgttctccacttcaccaactccttcaaacttattaacactttccttagttcaatatggggaagcccttcttcactctctctctttcttccctttgctattacctccagcaagttcaacgagtgccaactcaacaacctcaacgcgttggaacccgaccaccgcgttgagtccgaaggtggtcttattgaaacatggaactctcaacaccctgagctgcaatgcgccggtgtcactgtttccaaacgcaccctcaaccgcaacggcctccacttgccatcttactcaccttatcccccaaatgatcattgtcgttcaaggtgcgtaatattagtaagaagtatttatcagcttaacgtgataacaataatagtaatatgaaatatttattaaattttttataattaattctctgctagaaaatttgattaatcatttttagtagaatttgttttttctcaactagg

SEQ ID NO: 3964 - DNA, 607 bp, Artificial
  Mutations within GlyA3B4 introduced by GmGlyA3B4_T02TALE nuclease
gttcatgtacggttgcagatataaacgaagcatagcttatgtatgaggtgtaacaaaattggaaacaatagccatgcaaggtgaagaatgtcaccaactcagaaacccttcttcattgacgtgtccctcactcactctcctctcttcactataaatcgccactcttcgtgttctccacttcaccaactccttcaaacttattaacactttccttagttcaatatggggaagcccttcttcactctctctctttcttccctttgcttgctactcaacgcgttggaacccgaccaccgcgttgagtccgaaggtggtcttattgaaacatggaactctcaacaccctgagctgcaatgcgccggtgtcactgtttccaaacgcaccctcaaccgcaacggcctccacttgccatcttactcaccttatccccaaaatgatcattgtcgttcaaggtgcgtaatattagtaagaagtatttatcagcttaacgtgataacaataatagtaatatgaaatatttattaaattttttataattaatctctgctagaaaatttgattaatcatttttagtagaatttgtttttctcaactaggtttttaaaac

SEQ ID NO: 3965 - DNA, 536 bp, Artificial
  Mutations within GlyA3B4 introduced by GmGlyA3B4_T02TALE nuclease
gttcatgtacggttgcagatataaacgaagcatagcttatgtatgaggtgtaacaaaattggaaacaatagccatgcaaggtgaagaatgtcaccaactcagaaacccttcttcattgacgtgtccctcactcactctcctctcttcactataaatcgccactcttcgtgttctccacttcaccaactccttcaaacttattaacactttccttagttcaatatggggaagcccttcttcactctctctctttcttccctttgcttgctactcttgtcgagtgcataccctgagctgcaatgcgccggtgtcactgtttccaaacgcaccctcaaccgcaacggcctccacttgccatcttactcaccttatccccaaatgatcattgtcgttcaaggtgcgtaatattagtaagaagtatttatcagcttaacgtgataacaataatagtaatatgaaatatttattaaattttttataattaatctctgctagaaaatttgattaatcatttttagtagaatttgttttttctc

SEQ ID NO: 3966 - DNA, 709 bp, Artificial
  Mutations within GlyA3B4 introduced by GmGlyA3B4_T02TALE nuclease
gttcatgtacggttgcagatataaacgaagcatagcttatgtatgaggtgtaacaaaattggaaacaatagccatgcaaggtgaagaatgtcaccaactcagaaacccttcttcattgacgtgtccctcactcactctcctctcttcactataaatcgccactcttcgtgttctccacttcaccaactccttcaaacttattaacactttccttagttcaatatggggaagcccttcttcactctctctctttcttccctttgcttgctactcttgtcgagtgcatgggtcaagccgtgggcctggcacagcaccggcaacagccgctggaccgtctgctttgctattacctccagcaagttcaacgagtgccaactcaacaacctcaacgcgttggaacccgaccaccgcgttgagtccgaaggtggtcttattgaacatggaactctcaacaccctgagctgcaatgcgccggtgtcactgtttccaaacgcaccctcaaccgcaacggcctccacttgccatcttactcaccttatccccaaatgatcattgtcgttcaaggtgcgtaatattagtaagaagtatttatcagcttaacgtgataacaataatagtaatatgaaatatttattaaaattttttataattaatctctgctagaaaaatttgattaatcatttttagtagaatttgtttttctcaacta

SEQ ID NO: 3967 - DNA, 637 bp, Artificial
  Mutations within GlyA3B4 introduced by GmGlyA3B4_T02TALE nuclease
gttcatgtacggttgcagatataaacgaagcatagcttatgtatgaggtgtaacaaaaattggaaacaatagccatgcaaggtgaagaatgtcaccaactcagaaacccttcttcattgacgtgtccctcactcactctcctctcttcactataaatcgccactcttcgtgttctccacttcaccaactccttcaaacttattaacactttccttagttcaatatggggaagcccttcttcactctctctctttcttccctttgcttgctactcttgtcgagtgcatgctattacctccagcaagttcaacgagtgccaactcaacaacctcaacgcgttggaacccgaccaccgcgttgagtccgaaggtggtcttattgaaacatggaactctcaacaccctgagctgcaatgcgccggtgtcactgtttccaaacgcaccctcaaccgcaacggcctccacttgccatcttactcaccttatccccaaatgatcattgtcgttcaaggtgcgtaatattagtaagagtatttatcagcttaacgtgataacaataatagtaatatgaaatatttattaaatttttataattaatctctgctagaaaatttgattaatcattttagtagaatttg

SEQ ID NO: 3968 - DNA, 657 bp, Artificial
  Mutations within GlyA3B4 introduced by GmGlyA3B4_T02TALE nuclease
gttcatgtacggttgcagatataaacgaagcatagcttatgtatgaggtgtaacaaaattggaaacaatagccatgcaaggtgaagaatgtcaccaactcagaaacccttcttcattgacgtgtccctcactcactctcctctcttcactataaatcgccactcttcgtgttctccacttcaccaactccttcaaacttattaacactttccttagttcaatatggggaagcccttcttcactctctctctttcttccctttgcttgctactcttgtcgagtgtacctccagcaagttcaacgagtgccaactcaacaacctcaacgcgttggaacccgaccaccgcgttgagtccgaaggtggtcttattgaaacatggaactctcaacaccctgagctgcaatgcgccggtgtcactgtttccaaacgcaccctcaaccgcaacggcctccacttgccatcttactcaccttatccccaaatgatcattgtcgttcaaggtgcgtaatattagtaagaagtatttatcagcttaacgtgataacaataatagtaatatgaaatatttattaaatttttataattaatctctgctagaaaatttgattaatcattttagtagaatttgttttctcaactaggtttttaaaacacca

SEQ ID NO: 3969 - DNA, 658 bp, Artificial
  Mutations within GlyA3B4 introduced by GmGlyA3B4_T02TALE nuclease
gttcatgtacggttgcagatataaacgaagcatagcttatgtatgaggtgtaacaaaattggaaacaatagccatgcaaggtgaagaatgtcaccaactcagaaaccccttcttcattgacgtgtccctcactcactctcctctcttcactataaatcgccactcttcgtgttctccacttcaccaactccttcaaacttattaacactttccttagttcaatatggggaagcccttcttcactctctctctttcttccctttgcttgctactcttgtcgagtgcatgctattacctccagcaagttcaacgagtgccaactcaacaacctcaacgcgttggaacccgaccaccgcgttgagtccgaaggtggtcttattgaaacatggaactctcaacaccctgagctgcaatgcgccggtgtcactgtttccaaacgcaccctcaaccgcaacggcctccacttgccatcttactcaccttatccccaaatgatcattgtcgttcaaggtgcgtaatattagtaagaagtatttatcagcttaacgtgataacaataatagtaatatgaaatatttattaaatttttataattaatctctgctagaaaatttgattaatcattttagtagaatttgtttttctcaactaggttttt

SEQ ID NO: 3970 - DNA, 654 bp, Artificial; identical to SEQ ID NO: 2585
  Mutations within GlyA3B4 introduced by GmGlyA3B4_T02TALE nuclease

SEQ ID NO: 3971 - DNA, 565 bp, Artificial
  Mutations within GlyA3B4 introduced by GmGlyA3B4_T02TALE nuclease
gttcatgtacggttgcagatataaacgaagcatagcttatgtatgaggtgtaacaaaattggaaacaatagccatgcaaggtgaagaatgtcaccaactcagaaacccttcttcattgacgtgtccctcactcactctcctctcttcactataaatcgccactcttcgtgttctccacttcaccaactccttcaaacttattacctccagcaagttcaacgagtgccaactcaacaacctcaacgcgttggaacccgaccaccgcgttgagtccgaaggtggtcttattgaaacatggaactctcaacaccctgagctgcaatgcgccggtgtcactgtttccaaacgcaccctcaaccgcaacggcctccacttgccatcttactcaccttatcccccaaatgatcattgtcgttcaaggtgcgtaatattagtaagaagtatttatcagcttaacgtgataacaataatagtaatatgaaatatttattaaattttttataattaatctctgctagaaaatttgattaatcatttttagtagaatttgtttttctcaactagg

SEQ ID NO: 3972 - DNA, 594 bp, Artificial
  Mutations within GlyA3B4 introduced by GmGlyA3B4_T02TALE nuclease
gttcatgtacggttgcagatataaacgaagcatagcttatgtatgaggtgtaacaaaattggaaacaatagccatgcaaggtgaagaatgtcaccaactcagaaacccttcttcattgacgtgtccctcactcactctcctctcttcactataaatcgccactcttcgtgttctccacttcaccaactccttcaaacttattaacactttccttagttcaatatggggaagcccttcttcagcaagttcaacgagtgccaactcaacaacctcaacgcgttggaacccgaccaccgcgttgagtccgaaggtggtcttattgaaacatggaactctcaacaccctgagctgcaatgcgccggtgtcactgtttccaaacgcaccctcaaccgcaacggcctccacttgccatcttactcaccttatccccaaaatgatcattgtcgttcaaggtgcgtaatattagtaagaagtatttatcagcttaacgtgataacaataatagtaatatgaaatatttattaaatttttttataattaatctctgctagaaaatttgattaatcatttttagtagaatttgtttttctcaac

SEQ ID NO: 3973 - DNA, 653 bp, Artificial
  Mutations within GlyA3B4 introduced by GmGlyA3B4_T02TALE nuclease
gttcatgtacggttgcagatataaacgaagcatagcttatgtatgaggtgtaacaaaattggaaacaatagccatgcaaggtgaagaatgtcaccaactcagaaacccttcttcattgacgtgtccctcactcactctcctctcttcactataaatcgccactcttcgtgttctccacttcaccaactccttcaaacttattaacactttccttagttcaatatggggaagcccttcttcactctctctctttcttccctttgcttgctactcttgtcgagtgcaacctccagcaagttcaacgagtgccaactcaacaacctcaacgcgttggaacccgaccaccgcgttgagtccgaaggtggtcttattgaaacatggaactctcaacaccctgagctgcaatgcgccggtgtcactgtttccaaacgcaccctcaaccgcaacggcctccacttgccatcttactcaccttatccccaaatgatcattgtcgttcaaggtgcgtaaatattagtaagaagtatttatcagcttaacgtgataacaataatagtaatatgaaatatttattaaatttttataattaatctctgctagaaaatttgattaatctttttagtagaattgtttttctcaactaggtttaaaca

SEQ ID NO: 3974 - DNA, 663 bp, Artificial; identical to SEQ ID NO: 2045
  Mutations within GlyA3B4 introduced by GmGlyA3B4_T02TALE nuclease

SEQ ID NO: 3975 - DNA, 643 bp, Artificial
  Mutations within GlyA3B4 introduced by GmGlyA3B4_T02TALE nuclease
gttcatgtacggttgcagatataaacgaagcatagcttatgtatgaggtgtaacaaaattggaaacaatagccatgcaaggtgaagaatgtcaccaactcagaaacccttcttcattgacgtgtccctcactcactctcctctcttcactataaatcgccactcttcgtgttctccacttcaccaactccttcaaacttattaacactttccttagttcaatatggggaagcccttcttcactctctctctttcttccctttgcttgctactcttgtcgagtgcatacctccagcaagttcaacgagtgccaactcaacacctcaacgcgttggaacccgaccaccgcgttgagtccgaaggtggtcttattgaaacatggaactctcaacaccctgagctgcaatgcgccggtgtcactgtttccaaacgcaccctcaaccgcaacggcctccacttgccatcttactcaccttatccccaaatgatcattgtcgttcaaggtgcgtaatattagtaagaagtatttatcagcttaacgtgataacaatatagtaatatgaaatatttattaaatttttataattaatctctgctagaaaatttgattaatcatttttagtagaatttgtttttctcaacta

SEQ ID NO: 3976 - DNA, 653 bp, Artificial
  Mutations within GlyA3B4 introduced by GmGlyA3B4_T02TALE nuclease
gttcatgtacggttgcagatataaacgaagcatagcttatgtatgaggtgtaacaaaattggaaacaatagccatgcaaggtgaagaatgtcaccaactcagaaacccttcttcattgacgtgtccctcactcactctcctctcttcactataaatcgccactcttcgtgttctccacttcaccaactccttcaaacttattaacactttccttagttcaatatggggaagcccttcttcactctctctctttcttccctttgcttgctactcttgtcgagtgcttacctccagcaagttcaacgagtgccaactcaacaacctcaacgcgttggaacccgaccaccgcgttgagtccgaaggtggtcttattgaaacatggaactctcaacaccctgagctgcaatgcgccggtgtcactgtttccaaaacgcaccctcaaccgcaacggcctccacttgccatcttactcaccttatccccaaatgatcattgtcgttcaaggtgcgtaatattagtaagaagtatttatcagcttaacgtgataacaataatagtaatatgaaaatatttattaaaatttttataattaatctctgctagaaaatttgattaatcatttttagtagaatttgttttctcaactaggtttt

SEQ ID NO: 3977 - DNA, 667 bp, Artificial
  Mutations within GlyA3B4 introduced by GmGlyA3B4_T02TALE nuclease
gttcatgtacggttgcagatataaacgaagcatagcttatgtatgaggtgtaacaaaattggaaacaatagccatgcaaggtgaagaatgtcaccaactcagaaacccttcttcattgacgtgtccctcactcactctcctctcttcactataaatcgccactcttcgtgttctccacttcaccaactccttcaaacttattaacactttccttagttcaatatggggaagcccttcttcactctctctctttcttccctttgcttgctactcttgtcgagtgcattgctattacctccagcaagttcaacgagtgccaactcaacaacctcaacgcgttggaacccgaccaccgcgttgagtccgaaggtggtcttattgaaacatggaactctcaacaccctgagctgcaatgcgccggtgtcactgtttccaaacgcaccctcaaccgcaacggcctccacttgccatcttactcaccttatccccaaatgatcattgtcgttcaaggtgcgtaatattagtaagaagtatttatcagcttaacgtgataacaataatagtaatatgaaaatatttattaaatttttataattaatctctgctagaaaatttgattaatcattttagtagaatttgtttttctcaactaggttttaaaacacca

SEQ ID NO: 3978 - DNA, 657 bp, Artificial
  Mutations within GlyA3B4 introduced by GmGlyA3B4_T02TALE nuclease
gttcatgtacggttgcagatataaacgaagcatagcttatgtatgaggtgtaacaaaattggaaacaatagccatgcaaggtgaagaatgtcaccaactcagaaacccttcttcattgacgtgtccctcactcactctcctctcttcactataaatcgccactcttcgtgttctccacttcaccaactccttcaaacttattaacactttccttagttcaatatggggaagcccttcttcactctctctctttcttccctttgcttgctactcttgtcgagtgcctattacctccagcaagttcaacgagtgccaactcaacaacctcaacgcgttggaacccgaccaccgcgttgagtccgaaggtggtcttattgaaacatggaactctcaacaccctgagctgcaatgcgccggtgtcactgtttccaaacgcaccctcaaccgcaacggcctccacttgccatcttactcaccttatccccaaatgatcattgtcgttcaaggtgcgtaatattagtaagaagtatttatcagcttaacgtgataacaataatagtaatatgaaatatttattaaatttttataattaatctctgctagaaaatttgattaatcattttagtagaatttgttttctcaactaggtttttaaaa

SEQ ID NO: 3979 - DNA, 595 bp, Artificial
  Mutations within GlyA3B4 introduced by GmGlyA3B4_T02TALE nuclease
gttcatgtacggttgcagatataaacgaagcatagcttatgtatgaggtgtaacaaaattggaaacaatagccatgcaaggtgaagaatgtcaccaactcagaaacccttcttcattgacgtgtccctcactcactctcctctcttcactataaatcgccactcttcgtgttctccacttcaccaactccttcaaacttattaacactttccttagttcaatatggggaagcccttcttcactctctctctttcttccctttgcttgctactcttgtcgagtgcatcgccagccacgatggcggcaagcaggcgctggagacggtccagcggctgttgccggtgctgtgccaggcccacggcttgctattacctccagcaagttcaacgagtgccaactcaacaacctcacgcgttggaacccgaccaccgcgttgagtccgaaggtggtcttattgaaacatggaactctcaacaccctgagctgcaatgcgccggtgtcactgtttccaaacgcaccctcaaccgcaacggcctccacttgccatctttactcaccttatccccaaatgatcattgtcgttcaaggtgcgtaa

SEQ ID NO: 3980 - DNA, 668 bp, Artificial; identical to SEQ ID NO: 2325
  Mutations within GlyA3B4 introduced by GmGlyA3B4_T02TALE nuclease

SEQ ID NO: 3981 - DNA, 575 bp, Artificial; identical to SEQ ID NO: 2129
  Mutations within GlyA3B4 introduced by GmGlyA3B4_T02TALE nuclease

SEQ ID NO: 3982 - DNA, 662 bp, Artificial
  Mutations within GlyA3B4 introduced by GmGlyA3B4_T02TALE nuclease
gttcatgtacggttgcagatataaacgaagcatagcttatgtatgaggtgtaacaaaattggaaacaatagccatgcaaggtgaagaatgtcaccaactcagaaacccttcttcattgacgtgtccctcactcactctcctctcttcactataaatcgccactcttcgtgttctccacttcaccaactccttcaaacttattaacactttccttagttcaatatggggaagcccttcttcactctctctctttcttccctttgcttgctactcttgtcgagtgcatgctttacctccagcaagttcaacgagtgccaactcaacaacctcaacgcgttggaacccgaccaccgcgttgagtccgaaggtggtcttattgaaacatggaactctcaacaccctgagctgcaatgcgccggtgtcactgtttccaaacgcaccctcaaccgcaacggcctccacttgccatcttactcaccttatccccaaatgatcattgtcgttcaaggtgcgtaatattagtaagaagtatttatcagcttaacgtgataacaatatagtaatatgaaatatttattaaatttttataattaatctctgctagaaaatttgattaatcattttagtagaatttgttttctcaactaggttttaaaacacca

SEQ ID NO: 3983 - DNA, 714 bp, Artificial
  Mutations within GlyA3B4 introduced by GmGlyA3B4_T02TALE nuclease
gttcatgtacggttgcagatataaacgaagcatagcttatgtatgaggtgtaacaaaaattggaaacaatagccatgcaaggtgaagaatgtcaccaactcagaaaccccttcttcattgacgtgtccctcactcactctcctctcttcactataaatcgccactcttcgtgttctccacttcaccaactccttcaaacttattaacactttccttagttcaatatggggaagcccttcttcactctctctctttcttccctttgcttgctactcttgtcgagtgcatccgtgggcctggcacagcaccggcaacagccgctggaccgtctccagcgcctgcttgccaccgccattgctggcgatggccaccacctgcttgctattacctccagcaagttcaacgagtgccaactcaacacctcaacgcgttggaacccgaccaccgcgttgagtccgaaggtggtcttattgaaacatggaactctcaacaccctgagctgcaatgcgccggtgtcactgtttccaaacgcaccctcaaccgcaacggcctccacttgccatcttactcaccttatcccaaatgatcattgtcgttcaaggtgcgtaatattagtaagaagtatttatcgcttaacgtgataacaataatagtaatatgaaaatatttattaaactttttataattaatctctgctagaaaatttgattaatc

SEQ ID NO: 3984 - DNA, 415 bp, Artificial
  Mutations within GlyA3B4 introduced by GmGlyA3B4_T02TALE nuclease
gttcatgtacggttgcagatataaacgaagcatagcttatgtatgaaggtgtaacaaaattggaaacaatagccatgcaaggtgaagaatgtcaccaactcagaaacccttcttcattgacgtgtccctcactcactctcctctcttcactataaatcgccactcttcgtgttctccacttcaccaactccttcaaacttattaacactttccttagttcaatatgggggaagcccttcttcactctctctctttcttccctttgcttgctactcttgtcgagtgccaactcaacaacctcaacgcgttggaacccgaccaccgcgttgagtccgaaggtggtcttattgaaacatggaactctcaacaccctgagctgcaatgcgccggtgtcactgtttccaaacgcaccctc

SEQ ID NO: 3985 - DNA, 657 bp, Artificial; identical to SEQ ID NO: 3152
  Mutations within GlyA3B4 introduced by GmGlyA3B4_T02TALE nuclease

SEQ ID NO: 3986 - DNA, 660 bp, Artificial; identical to SEQ ID NO: 1783
  Mutations within GlyA3B4 introduced by GmGlyA3B4_T02TALE nuclease

SEQ ID NO: 3987 - DNA, 666 bp, Artificial
  Mutations within GlyA3B4 introduced by GmGlyA3B4_T02TALE nuclease
gttcatgtacggttgcagatataaacgaagcatagcttatgtatgaggtgtaacaaaattggaaacaatagccatgcaaggtgaagaatgtcaccaactcagaaacccttcttcattgacgtgtccctcactcactctcctctcttcactataaatcgccactcttcgtgttctccacttcaccaactccttcaaacttattaacactttccttagttcaatatggggaagcccttcttcactctctctctttcttccctttgcttgctactcttgtcgagtgcatgctattacctccagcaagttcaacgagtgccaactcaacaacctcaacgcgttggaacccgaccaccgcgttgagtccgaaggtggtcttattgaaacatggaactctcaacaccctgagctgcaatgcgccggtgtcactgtttccaaacgcaccctcaaccgcaacggcctccacttgccatcttactcaccttatccccaaatgatcattgtcgttcaaggtgcgtaatattagtaagaagtatttatcagcttaacgtgataacaataatagtaatatgaaaatatttattaaatttttataattaatctctgctagaaaatttgattaatcattttagtagaatttgtttttctcaactaggtttttaaaacacc

SEQ ID NO: 3988 - DNA, 666 bp, Artificial
  Mutations within GlyA3B4 introduced by GmGlyA3B4_T02TALE nuclease
gttcatgtacggttgcagatataaacgaagcatagcttatgtatgaggtgtaacaaaattggaaacaatagccatgcaaggtgaagaatgtcaccaactcagaaacccttcttcattgacgtgtccctcactcactctcctctcttcactataaatcgccactcttcgtgttctccacttcaccaactccttcaaacttattaatactttccttagttcaatatggggaagcccttcttcactctctctctttcttccctttgcttgctactcttgtcgagtgcatgctattacctccagcaagttcaacgagtgccaactcaacaacctcaacgcgttggaacccgaccaccgcgttgagtccgaaggtggtcttattgaaacatggaactctcaacaccctgagctgcaatgcgccggtgtcactgtttccaaacgcaccctcaaccgcaacggcctccacttgccatcttactcaccttatcccccaaatgatcattgtcgttcaaggtgcgtaatattagtaagagtatttatcagcttaacgtgataacaatatagtaatatgaaatatttattaaatttttataattaatctctgctagaaaatttgattaatcattttagtagaatttgtttttctcaactaggtttttaaacaccaca

SEQ ID NO: 3989 - DNA, 653 bp, Artificial; identical to SEQ ID NO: 2421
  Mutations within GlyA3B4 introduced by GmGlyA3B4_T02TALE nuclease

SEQ ID NO: 3990 - DNA, 669 bp, Artificial
  Mutations within GlyA3B4 introduced by GmGlyA3B4_T02TALE nuclease
gttcatgtacggttgcagatataaacgaagcatagcttatgtatgaggtgtaacaaaattggaaacaatagccatgcaaggtgaagaatgtcaccaactcagaaacccttcttcattgacgtgtccctcactcactctcctctcttcactataaatcgccactcttcgtgttctccacttcaccaactccttcaaacttattaacactttccttagttcaatatggggaagcccttcttcactctctctctttcttccctttgcttgctactcttgtcgagtgcatggctattacctccagcaagttcaacgagtgccaactcaacaacctcaacgcgttggaacccgaccaccgcgttgagtccgaaggtggtcttattgaaacatggaactctcaacaccctgagctgcaatgcgccggtgtcactgtttccaaacgcaccctcaaccgcaacggcctccacttgccatcttactcaccttatccccaaatgatcattgtcgttcaaggtgcgtaatattagtaagaagtatttatcagcttaacgtgataacaataatagtaatatgaaatatttattaaatttttataattaatctctgctagaaaatttgattaatcattttagtagaatttgtttttctcaactaggtttttaaaacaccaca

SEQ ID NO: 3991 - DNA, 664 bp, Artificial
  Mutations within GlyA3B4 introduced by GmGlyA3B4_T02TALE nuclease
  misc_feature (533): n is a or c or t or g
gttcatgtacggttgcagatataaacgaagcatagcttatgtatgaggtgtaacaaaaattggaaacaatagccatgcaaggtgaagaatgtcaccaactcagaaacccttcttcattgacgtgtcccctcactcactctcctctcttcactataaatcgccactcttcgtgttctccacttcaccaactccttcaaacttattaacactttccttagttcaatatgggggaagcccttcttcactctctctctttcttccctttgcttgctactcttgtcgagtgcatgctattacctccagcaagttcaacgagtgccaactcaacaacctcaacgcgttggaacccgaccaccgcgttgagtccgaaggtggtcttattgaaacatggaactctcaacaccctgagctgcaatgcgccggtgtcactgtttccaaacgcaccctcaaccgcaacggcctccacttgccatcttactcaccttatccccaaatgatcattgtcgttcaaggtgcgtaatattagtaagagnatttatcagcttaacgtgatacaatatagtaatatgaaatatttattaaatttttataattaatctctgctagaaaatttgattaatcattttagtagaatttgtttttctcaactaggttttaaacacca

SEQ ID NO: 3992 - DNA, 609 bp, Artificial
  Mutations within GlyA3B4 introduced by GmGlyA3B4_T02TALE nuclease
gttcatgtacggttgcagatataaacgaagcatagcttatgtatgaggtgtaacaaaattggaaacaatagccatgcaaggtgaagaatgtcaccaactcagaaacccttcttcattgacgtgtccctcactcactctcctctcttcactataaatcgccactcttcgtgttctccacttcaccaactccttcaaacttattaacactttccttagttcaatatggggaagcccttcttcactctctctctttcttccctttgcttgctactcttgtcaactcaacaacctcaacgcgttggaacccgaccaccgcgttgagtccgaaggtggtcttattgaaacatggaactctcaacaccctgagctgcaatgcgccggtgtcactgtttccaaacgcaccctcaaccgcaacggcctccacttgccatcttactcaccttatccccaaatgatcattgtcgttcaaggtgcgtaatattagtaagaagtatttatcagcttaacgtgataacaataatagtaatatgaaatatttattaattttttataattaatctctgctagaaaatttgattaatcatttttagtagaatttgtttttctcaa

SEQ ID NO: 3993 - DNA, 561 bp, Artificial
  Mutations within GlyA3B4 introduced by GmGlyA3B4_T02TALE nuclease
gttcatgtacggttgcagatataaacgaagcatagcttatgtatgaggtgtaacaaaattggaaacaatagccatgcaaggtgaagaatgtcaccaactcagaaacccttcttcattgacgtgtccctcactcactctcctctcttcactataaatcgccactcttcgtgttctccacttcaccaactccttcaaacttatcaacgagtgccaactcaacaacctcaacgcgttggaacccgaccaccgcgttgagtccgaaggtggtcttattgaaacatggaactctcaacaccctgagctgcaatgcgccggtgtcactgtttccaaacgcaccctcaaccgcaacggcctccacttgccatcttactcaccttatccccaaatgatcattgtcgttcaaggtgcgtaatattagtaagaagtatttatcagcttaacgtgataacaataatagtaatatgaaatatttattaaaattttttataattaatctctgctagaaaatttgattaatcatttttagtagaatttgtttttctcaactaaggtttttaaaca

SEQ ID NO: 3994 - DNA, 643 bp, Artificial
  Mutations within GlyA3B4 introduced by GmGlyA3B4_T02TALE nuclease
gttcatgtacggttgcagatataaacgaagcatagcttatgtatgaggtgtaacaaaattggaaacaatagccatgcaaggtgaagaatgtcaccaactcagaaacccttcttcattgacgtgtccctcactcactctcctctcttcactataaatcgccactcttcgtgttctccacttcaccaactccttcaaacttattaacactttccttagttcaatatggggaagcccttcttcactctctctctttcttccctttgcttgctactcttgtcgagtgcattattacctccagcaagttcaacgagtgccaactcaacaacctcaacgcgttggaacccgaccaccgcgttgagtccgaaggtggtcttattgaaacatggaactctcaacaccctgagctgcaatgcgccggtgtcactgtttccaaacgcaccctcaaccgcaacggcctccacttgccatcttactcaccttatccccaaatgatcattgtcgttcaaggtgcgtaatattagtaagaagtatttatcagcttaacgtgataacaatatagtaatatgaaatatttattaaatttttataattaatctctgctagaaaatttgattaatcattttagtagaatttgttttctcaa

SEQ ID NO: 3995 - DNA, 643 bp, Artificial
  Mutations within GlyA3B4 introduced by GmGlyA3B4_T02TALE nuclease
gttcatgtacggttgcagatataaacgaagcatagcttatgtatgaggtgtaacaaaattggaaacaatagccatgcaaggtgaagaatgtcaccaactcagaaacccttctcattgacgtgtccctcactcactctcctctcttcactataaatcgccactcttcgtgttctccacttcaccaactccttcaaacttattaacactttccttagttcaatatggggaagcccttcttcactctctctctttcttccctttgcttgctactcttgtcgagctattacctccagcaagttcaacgagtgccaactcaacaacctcaacgcgttggaacccgaccaccgcgttgagtccgaaggtggtcttattgaaacatggaactctcaacaccctgagctgcaatgcgccggtgtcactgtttccaaacgcaccctcaaccgcaacggcctccacttgccatcttactcaccttatccccaaatgatcattgtcgttcaaggtgcgtaatattagtaagaagtatttatcagcttaacgtgataacaatatagtaatatgaaatatttattaaatttttataattaatctctgctagaaaatttgattaatcattttagtagaatttgttttctcaactagg

SEQ ID NO: 3996 - DNA, 636 bp, Artificial
  Mutations within GlyA3B4 introduced by GmGlyA3B4_T02TALE nuclease
  misc_feature (531): n is a or c or t or g
gttcatgtacggttgcagatataaacgaagcatagcttatgtatgaggtgtaacaaaattggaaacaatagccatgcaaggtgaagaatgtcaccaactcagaaacccttcttcattgacgtgtccctcactcactctcctctcttcactataaatcgccactcttcgtgttctccacttcaccaactccttcaaacttattaacactttccttagttcaatatgggggaagcccttcttcactctctctctttcttccctttgcttgctactcttgtcgagtgcttgctattacctccagcaagttcaacgagtgccaactcaacaacctcaacgcgttggaacccgaccaccgcgttgagtccgaaggtggtcttattgaaacatggaactctcaacaccctgagctgcaatgcgccggtgtcactgtttccaaacgcaccctcaaccgcaacggcctccacttgccatcttactcaccttatccccaaatgatcattgtcgttcaaggtgcgtaatattagtaagagnatttatcagcttaacgtgataacaatatagtaatatgaaatatttattaaatttttataattaatctctgctagaaaatttgattaatcattttagtagaatttg

SEQ ID NO: 3997 - DNA, 608 bp, Artificial
  Mutations within GlyA3B4 introduced by GmGlyA3B4_T02TALE nuclease
gttcatgtacggttgcagatataaacgaagcatagcttatgtatgaggtgtaacaaaattggaaacaatagccatgcaaggtgaagaatgtcaccaactcagaaacccttcttcattgacgtgtccctcactcactctcctctcttcactataaatcgccactcttcgtgttctccacttcaccaactccttcaaacttattaacactttccttagttcaatatggggaagcccttcttcactctctctctttcttccctttgcttgctactcttgtcgagtgcatgcccgaccaccgcgttgagtccgaaggtggtcttattgaaacatggaactctcaacaccctgagctgcaatgcgccggtgtcactgtttccaaacgcaccctcaaccgcaacggcctccacttgccatcttactcaccttatccccaaaatgatcattgtcgttcaaggtgcgtaatattagtaagaagtatttatcagcttaacgtgataacaataatagtaatatgaaatatttattaaattttttataattaatctctgctagaaaatttgattaatcatttttagtagaatttgtttttctcaactaggtttttaaaa

SEQ ID NO: 3998 - DNA, 665 bp, Artificial; identical to SEQ ID NO: 1912
  Mutations within GlyA3B4 introduced by GmGlyA3B4_T02TALE nuclease

SEQ ID NO: 3999 - DNA, 632 bp, Artificial
  Mutations within GlyA3B4 introduced by GmGlyA3B4_T02TALE nuclease
gttcatgtacggttgcagatataaacgaagcatagcttatgtatgaggtgtaacaaaattggaaacaatagccatgcaaggtgaagaatgtcaccaactcagaaacccttcttcattgacgtgtccctcactcactctcctctcttcactataaatcgccactcttcgtgttctccacttcaccaactccttcaaacttattaacactttccttagttcaatatggggaagcccttcttcactctctctctttcttccctttgcttgctactcttgtcgagtgcattacctccagcaagttcaacgagtgccaactcaacaacctcaacgcgttggaacccgaccaccgcgttgagtccgaaggtggtcttattgaaacatggaactctcaacaccctgagctgcaatgcgccggtgtcactgtttccaaacgcaccctcaaccgcaacggcctccacttgccatcttactcaccttatccccaaatgatcattgtcgttcaaggtgtgtaatattagtaagaagtatttatcagcttaacgtgataacaataatagtaatatgaaatatttattaaatttttataattaatctctgctagaaaatttgattaatcattttagtagaatttg

SEQ ID NO: 4000 - DNA, 762 bp, Artificial
  Mutations within GlyA3B4 introduced by GmGlyA3B4_T02TALE nuclease
gttcatgtacggttgcagatataaacgaagcatagcttatgtatgaggtgtaacaaaattggaaacaatagccatgcaaggtgaagaatgtcaccaactcagaaacccttcttcattgacgtgtccctcactcactctcctctcttcactataaatcgccactcttcgtgttctccacttcaccaactccttcaaacttattaacactttccttagttcaatatggggaagcccttcttcactctctctctttcttccctttgcttgctactcttgtcgagtgcatgccgctggaccgtctcctgctccggggtcaagccgtgggcctggcacagcaccggcaacagcgcctgcatcgtctccagcgcctgcttgccaccaatattgctgcctccagcaagttcaacgagtgccaactcacaacctcacgcgttggaacccgaccaccgcgttgagtccgaaggtggtcttattgaaacatggaactctcaacaccctgagctgcaatgcgccggtgtcactgtttccaaacgcaccctcaaccgcaacggcctccacttgccatcttactcaccttatccccaaatgatcattgtcgttcaaggtgcgtaatattagtaagaagtatttatcgcttaacgtgataacaataatagtaatatgaaaatatttattaaacttttttgataattaatctctgctagaaaatttcgattaatcatttttagtagaatttgttttctcaactaggtttaaacacca

SEQ ID NO: 4001 - DNA, 666 bp, Artificial
  Mutations within GlyA3B4 introduced by GmGlyA3B4_T02TALE nuclease
gttcatgtacggttgcagatataaacgaagcatagcttatgtatgaggtgtaacaaaattggaaacaatagccatgcaaggtgaagaatgtcaccaactcagaaacccttcttcattgacgtgtccctcactcactctcctctcttcactataaatcgccactcttcgtgttctccacttcaccaactccttcaaacttattaacactttccttagttcaatatggggaagcccttcttcactctctctctttcttccctttgcttgctactcttgtcgagtgcatatctccgccaagtcaagcgtcacgcagtccactacaacactcaacgcgttggaacccgaccaccgcgttgagtccgaaggtggtcttattgaaacatggaactctcaacaccctgagctgcaatgcgccggtgtcactgtttccaaacgcaccctcaaccgcaacggcctccacttgccatcttactcaccttatccccaaatgatcattgtcgttcaaggtgcgtaatattagtaaagaaagtatttatcagcttaacgtgataacaataatagtaatatgaaaatatttattaaaatttttataattaatctctgctagaaaatttgattaatcattttagtagaatttgtttttctcaactaggttttaaaacacca

SEQ ID NO: 4002 - DNA, 668 bp, Artificial; identical to SEQ ID NO: 3500
  Mutations within GlyA3B4 introduced by GmGlyA3B4_T02TALE nuclease

SEQ ID NO: 4003 - DNA, 637 bp, Artificial
  Mutations within GlyA3B4 introduced by GmGlyA3B4_T02TALE nuclease
gttcatgtacggttgcagatataaacgaagcatagcttatgtatgaggtgtaacaaaattggaaacaatagccatgcaaggtgaagaatgtcaccaactcagaaacccttcttcattgacgtgtccctcactcactctcctctcttcactataaatcgccactcttcgtgttctccacttcaccaactccttcaaacttattaacactttccttagttcaatatggggaagcccttcttcactctctctctttcttccctttgcttgctactcttgtcgagtgcatctattacctccagcaagttcaacgagtgccaactcaacaacctcaacgcgttggaacccgaccaccgcgttgagtccgaaggtggtcttattgaaacatggaactctcaacaccctgagctgcaatgcgccggtgtcactgtttccaaacgcaccctcaaccgcaacggccccccacttgccatcttactcaccttatccccaaatgatcattgtcgttcaaggtgcgtaatattagtaagaagtatttatcagcttaacgtgataacaataatagtaatatgaaatatttattaaatttttataattaatctctgctagaaaatttgattaatcattttagtagaatttg

SEQ ID NO: 4004 - DNA, 520 bp, Artificial
  Mutations within GlyA3B4 introduced by GmGlyA3B4_T02TALE nuclease
gttcatgtacggttgcagatataaacgaagcatagcttatgtatgaggtgtaacaaaattggaaacaatagccatgcaaggtgaagaatgtcaccaactcagaaacccttcttcattgacgtgtccctcactcactctttgctattacctccagcaagttcaacgagtgccaactcaacaacctcaacgcgttggaacccgaccaccgcgttgagtccgaaggtggtcttattgaaacatggaactctcaacaccctgagctgcaatgcgccggtgtcactgtttccaaacgcaccctcaaccgcaacggcctccacttgccatcttactcaccttatccccaaatgatcattgtcgttcaaggtgcgtaatattagtaagaagtatttatcagcttaacgtgataacaataatagtaatatgaaatatttattaaattttttataattaatctctgctagaaaatttgattaatcattttttagtagaatttgtttttctcaactaggttttaaacacc

SEQ ID NO: 4005 - DNA, 667 bp, Artificial
  Mutations within GlyA3B4 introduced by GmGlyA3B4_T02TALE nuclease
  misc_feature (531): n is a or c or t or g
gttcatgtacggttgcagatataaacgaagcatagcttatgtatgaggtgtaacaaaattggaaacaatagccatgcaaggtgaagaatgtcaccaactcagaaacccttcttcattgacgtgtccctcactcactctcctctcttcactataaatcgccactcttcgtgttctccacttcaccaactccttcaaacttattaacactttccttagttcaatatgggggaagcccttcttcactctctctctttcttccctttgcttgctactcttgtcgagtgcatgctattacctccagcaagttcaacgagtgccaactcaacaacctcaacgcgttggaacccgaccaccgcgttgagtccgaaggtggtcttattgaaacatggaactctcaacaccctgagctgcaatgcgccggtgtcactgtttccaaacgcaccctcaaccgcaacggcctccacttgccatcttactcaccttatccccaaatgatcattgtcgttcaaggtgcgtaatattagtaagagnatttatcagcttaacgtgataacaatatagtaatatgaaatatttattaaatttttataattaatctctgctagaaaatttgattaatcattttagtagaatttgtttttctcaactaggtttttaaaacaccaca

SEQ ID NO: 4006 - DNA, 655 bp, Artificial
  Mutations within GlyA3B4 introduced by GmGlyA3B4_T02TALE nuclease
  misc_feature (531): n is a or c or t or g
gttcatgtacggttgcagatataaacgaagcatagcttatgtatgaggtgtaacaaaattggaaacaatagccatgcaaggtgaagaatgtcaccaactcagaaacccttcttcattgacgtgtccctcactcactctcctctcttcactataaatcgccactcttcgtgttctccacttcaccaactccttcaaacttattaacactttccttagttcaatatggggaagcccttcttcactctctctctttcttccctttgcttgctactcttgtcgagtgcattgctattacctccagcaagttcaacgagtgccaactcaacaacctcaacgcgttggaacccgaccaccgcgttgagtccgaaggtggtcttattgaaacatggaactctcaacaccctgagctgcaatgcgccggtgtcactgtttccaaacgcaccctcaaccgcaacggcctccacttgccatcttactcaccttatccccaaatgatcattgtcgttcaaggtgcgtaatattagtaagagnatttatcagcttaacgtgataacaatatagtaatatgaaatatttattaaatttttataattaatctctgctagaaaatttgattaatcattttagtagaatttgttttctcaactaggttttt

SEQ ID NO: 4007 - DNA, 645 bp, Artificial; identical to SEQ ID NO: 732
  Mutations within GlyA3B4 introduced by GmGlyA3B4_T02TALE nuclease

SEQ ID NO: 4008 - DNA, 619 bp, Artificial
  Mutations within GlyA3B4 introduced by GmGlyA3B4_T02TALE nuclease
gttcatgtacggttgcagatataaacgaagcatagcttatgtatgaggtgtaacaaaattggaaacaatagccatgcaaggtgaagaatgtcaccaactcagaaacccttcttcattgacgtgtccctcactcactctcctctcttcactataaatcgccactcttcgtgttctccacttcaccaactccttcaaacttattaacactttccttagttcaatatggggaagcccttcttcactctctctctttcttccctttgcttgctactcttgtcgagtgcatattacctccagcaagttcaacgagtgccaactcaacaacctcaacgcgttggaacccgaccaccgcgttgagtccgaaggtggtcttattgaaacatggaactctcaacaccctgagctgcaatgcgccggtgtcactgtttccaaacgcaccctcaaccgcaacggcctccacttgccatcttactcaccttatcccccaaatgatcattgtcgttcaaggtgcgtaatattagtaagaagtatttatcagcttaacgtgataacaatatagtaatatgaaatatttattaaatttttataattaatctctgctagaaaatttgattaatca

SEQ ID NO: 4009 - DNA, 690 bp, Artificial
  Mutations within GlyA3B4 introduced by GmGlyA3B4_T02TALE nuclease
gttcatgtacggttgcagatataaacgaagcatagcttatgtatgaggtgtaacaaaattggaaacaatagccatgcaaggtgaagaatgtcaccaactcagaaacccttcttcattgacgtgtccctcactcactctcctctcttcactataaatcgccactcttcgtgttctccacttcaccaactccttcaaacttattaacactttccttagttcaatatggggaagcccttcttcactctctctctttcttccctttgcttgctactcttgtcgagtgcatccaacgccggatcagggcgagataactgggcaacaatgctctccagcgcctgcttgccaccattattgctggcgatggccaccacctgctggggggtcaagccgtgggcctggctttgctattacctccagcaagttcaacgagtgccaactcaacaacctcaacgcgttggaacccgaccaccgcgttgagtccgaaggtggtcttattgaaacatggaactctcaacaccctgagctgcaatgcgccggtgtcactgtttccaaacgcaccctcaaccgcaacggcctccacttgccatcttactcaccttatccccaaaatgatcattgtcgttcaaggtgcgtaatattagtaagaagtatttatcgcttaacgtgataacaataatagtaatatgaaaa

SEQ ID NO: 4010 - DNA, 667 bp, Artificial; identical to SEQ ID NO: 1838
  Mutations within GlyA3B4 introduced by GmGlyA3B4_T02TALE nuclease

SEQ ID NO: 4011 - DNA, 664 bp, Artificial
  Mutations within GlyA3B4 introduced by GmGlyA3B4_T02TALE nuclease
gttcatgtacggttgcagatataaacgaagcatagcttatgtatgaggtgtaacaaaattggaaacaatagccatgcaaggtgaagaatgtcaccaactcagaaacccttcttcattgacgtgtccctcactcactctcctctcttcactataaatcgccactcttcgtgttctccacttcaccaactccttcaaacttattaacactttccttagttcaatatggggaagcccttcttcactctctctctttcttccctttgcttgctactcttgtcgagtgcttattacctccagcaagttcaacgagtgccaactcaacaacctcaacgcgttggaacccgaccaccgcgttgagtccgaaggtggtcttattgaaacatggaactctcaacaccctgagctgcaatgcgccggtgtcactgtttccaaacgcaccctcaaccgcaacggcctccacttgccatcttactcaccttatccccaaatgatcattgtcgttcaaggtgcgtaatattagtaagaagtatttatcagcttaacgtgataacaataatagtaatatgaaatatttattaaatttttataattaatctctgctagaaaatttgattaatcattttagtagaatttgttttctcaactaggtttttaaaacaccaca

SEQ ID NO: 4012 - DNA, 665 bp, Artificial
  Mutations within GlyA3B4 introduced by GmGlyA3B4_T02TALE nuclease
gttcatgtacggttgcagatataaacgaagcatagcttatgtatgaggtgtaacaaaattggaaacaatagccatgcaaggtgaagaatgtcaccaactcagaaacccttcttcattgacgtgtccctcactcactctcctctcttcactataaatcgccactcttcgtgttctccacttcaccaactccttcaaacttattaacactttccttagttcaatatgggggaagcccttcttcactctctctctttcttccctttgcttgctactcttgtcgagtgcatgctattacctccagcaagttcaacgagtgccaactcaacaacctcaacgcgttggaacccgaccaccgcgttgagtccgaaggtggtcttattgaaacatggaactctcaacaccctgagctgcaatgcgccggtgtcactgtttccaaacgcaccctcaaccgcaacggcctccacttgccatcttactcaccttatccccaaatgatcattgtcgttcaaggtgcgtaatattagtaagagtatttatcagcttaacgtgataacaataatagtaatatgaaatatttattaaatttttataattaatctctgctagaaaatttgattaatcattttagtagaatttgtttttctcaactaggttttaaaacacca

SEQ ID NO: 4013 - DNA, 646 bp, Artificial
  Mutations within GlyA3B4 introduced by GmGlyA3B4_T02TALE nuclease
gttcatgtacggttgcagatataaacgaagcatagcttatgtatgaggtgtaacaaaattggaaacaatagccatgcaaggtgaagaatgtcaccaactcagaaacccttcttcattgacgtgtccctcactcactctcctctcttcactataaatcgccactcttcgtgttctccacttcaccaactccttcaaacttattaacactttccttagttcaatatggggaagcccttcttcactctctctctttcttccctttgcttgctactcttgtcgagtgcatattacctccagcaagttcaacgagtgccaactcaacaacctcaacgcgttggaacccgaccaccgcgttgagtccgaaggtggtcttattgaaacatggaactctcaacaccctgagctgcaatgcgccggtgtcactgtttccaaacgcaccctcaaccgcaacggcctccacttgccatcttactcaccttatccccaaatgatcattgtcgttcaaggtgcgtaatattagtaagaagtatttatcagcttaacgtgataacaataatagtaatatgaaatatttattaaatttttataattaatctctgctagaaaatttgattaatcattttagtagaatttgttttctcaacta

SEQ ID NO: 4014 - DNA, 594 bp, Artificial
  Mutations within GlyA3B4 introduced by GmGlyA3B4_T02TALE nuclease
gttcatgtacggttgcagatataaacgaagcatagcttatgtatgaggtgtaacaaaattggaaacaatagccatgcaaggtgaagaatgtcaccaactcagaaacccttcttcattgacgtgtccctcactcactctcctctcttcactataaatcgccactcttcgtgttctccacttcaccaactccttcaaacttattaacactttccttagttcaatatggggaagcccttcttcactctctctctttcttccctttgcttgctactcttgtcgagtgcaagttcaacgagtgccaactcaacaacctcaacgcgttggaacccgaccaccgcgttgagtccgaaggtggtcttattgaaacatggaactctcaacaccctgagctgcaatgcgccggtgtcactgtttccaaacgcaccctcaaccgcaacggcctccacttgccatcttactcaccttatccccaaatgatcattgtcgttcaaggtgcgtaatattagtaagaagtatttatcagcttaacgtgataacaataatagtaatatgaaatatttattaaattttttataattaatctctgctagaaaa

SEQ ID NO: 4015 - DNA, 664 bp, Artificial
  Mutations within GlyA3B4 introduced by GmGlyA3B4_T02TALE nuclease
gttcatgtacggttgcagatataaacgaagcatagcttatgtatgaggtgtaacaaaattggaaacaatagccatgcaaggtgaagaatgtcaccaactcagaaaccccttcttcattgacgtgtccctcactcactctcctctcttcactataaatcgccactcttcgtgttctccacttcaccaactccttcaaacttattaacactttccttagttcaatatggggaagcccttcttcactctctctctttcttccctttgcttgctactcttgtcgagtgcatattacctccagcaagttcaacgagtgccaactcaacaacctcaacgcgttggaacccgaccaccgcgttgagtccgaaggtggtcttattgaaacatggaactctcaacaccctgagctgcaatgcgccggtgtcactgtttccaaacgcaccctcaaccgcaacggcctccacttgccatcttactcaccttatccccaaatgatcattgtcgttcaaggtgcgtaatattagtaagaagtatttatcagcttaacgtgataacaataatagtaatatgaaatatttattaaatttttataattaatctctgctagaaaatttgattaatcattttagtagaatttgtttttctcaactaggtttttaaaacacca

SEQ ID NO: 4016 - DNA, 647 bp, Artificial
  Mutations within GlyA3B4 introduced by GmGlyA3B4_T02TALE nuclease
gttcatgtacggttgcagatataaacgaagcatagcttatgtatgaggtgtaacaaaattggaaacaatagccatgcaaggtgaagaatgtcaccaactcagaaacccttcttcattgacgtgtccctcactcactctcctctcttcactataaatcgccactcttcgtgttctccacttcaccaactccttcaaacttattaacactttccttagttcaatatggggaagcccttcttcactctctctctttcttccctttgcttgctactcttgtcgagtgcattacctccagcaagttcaacgagtgccaactcaacaacctcaacgcgttggaacccgaccaccgcgttgagtccgaaggtggtcttattgaaacatggaactctcaacaccctgagctgcaatgcgccggtgtcactgtttccaaacgcaccctcaaccgcaacggcctccacttgccatcttactcaccttatcccccaaatgatcattgtcgttcaaggtgcgtaatattagtaagaagtatttatcagcttaacgtgataacaataatagtaatatgaaatatttattaaatttttataattaatctctgctagaaaatttgattaatcattttagtagaatttgttttctcaactagg

SEQ ID NO: 4017 - DNA, 634 bp, Artificial
  Mutations within GlyA3B4 introduced by GmGlyA3B4_T02TALE nuclease
gttcatgtacggttgcagatataaacgaagcatagcttatgtatgaggtgtaacaaaattggaaacaatagccatgcaaggtgaagaatgtcaccaactcagaaacccttcttcattgacgtgtccctcactcactctcctctcttcactataaatcgccactcttcgtgttctccacttcaccaactccttcaaacttattaacactttccttagttcaatatggggaagcccttcttcactctctctctttcttccctttgcttgctactcttgtcgagtgcatgtattacctccagcaagttcaacgagtgccaactcaacaacctcaacgcgttggaacccgaccaccgcgttgagtccgaaggtggtcttattgaaacatggaactctcaacaccctgagctgcaatgcgccggtgtcactgtttccaaacgcaccctcaaccgcaacggcctccacttgccatcttactcaccttatccccaaatgatcattgtcgttcaaggtgcgtaatattagtaagagtatttatcagcttaacgtgataacaatatagtaatatgaaatatttattaaatttttataattaatctctgctagaaaatttgattaatcattttagtagaatttg

SEQ ID NO: 4018 - DNA, 576 bp, Artificial; identical to SEQ ID NO: 2624
  Mutations within GlyA3B4 introduced by GmGlyA3B4_T02TALE nuclease

SEQ ID NO: 4019 - DNA, 651 bp, Artificial; identical to SEQ ID NO: 2077
  Mutations within GlyA3B4 introduced by GmGlyA3B4_T02TALE nuclease

SEQ ID NO: 4020 - DNA, 667 bp, Artificial
  Mutations within GlyA3B4 introduced by GmGlyA3B4_T02TALE nuclease
  misc_feature (532): n is a or c or t or g
gttcatgtacggttgcagatataaacgaagcatagcttatgtatgaggtgtaacaaaattggaaacaatagccatgcaaggtgaagaatgtcaccaactcagaaacccttcttcattgacgtgtccctcactcactctcctctcttcactataaatcgccactcttcgtgttctccacttcaccaactccttcaaacttattaacactttccttagttcaatatgggggaagcccttcttcactctctctctttcttccctttgcttgctactcttgtcgagtgcattgctattacttccagcaagttcaacgagtgccaactcaacaacctcaacgcgttggaacccgaccaccgcgttgagtccgaaggtggtcttattgaaacatggaactctcaacaccctgagctgcaatgcgccggtgtcactgtttccaaacgcaccctcaaccgcaacggcctccacttgccatcttactcaccttatccccaaatgatcattgtcgttcaaggtgcgtaatattagtaagagnatttatcagcttaacgtgataacaataatagtaatatgaaaatatttattaaatttttataattaatctctgctagaaaatttgattaatcattttagtagaatttgttttctcaactaggtttttaaaacacca

SEQ ID NO: 4021 - DNA, 669 bp, Artificial
  Mutations within GlyA3B4 introduced by GmGlyA3B4_T02TALE nuclease
gttcatgtacggttgcagatataaacgaagcatagcttatgtatgaggtgtaacaaaattggaaacaatagccatgcaaggtgaagaatgtcaccaactcagaaacccttcttcattgacgtgtccctcactcactctcctctcttcactataaatcgccactcttcgtgttctccacttcaccaactccttcaaacttattaacactttccttagttcaatatgggggaagcccttcttcactctctctctttcttccctttgcttgctactcttgtcgagtgcatgctattacctccagcaagttcaacgagtgccaactcaacaacctcaacgcgttggaacccgaccaccgcgttgagtccgaaggtggtcttattgaaacatggaactctcaacaccctgagctgcaatgcgccggtgtcactgtttccaaacgcaccctcaaccgcaacggcctccacttgccatcttactcaccttatccccaaatgatcattgtcgttcaaggtgcgtaatattagtaagaagtatttatcagcttaacgtgataacaataatagtaatatgaaatatttattaaatttttataattaatctctgctagaaaatttgattaatcattttagtagaatttgtttttctcaactaggtttttaaaacaccaca

SEQ ID NO: 4022 - DNA, 677 bp, Artificial
  Mutations within GlyA3B4 introduced by GmGlyA3B4_T02TALE nuclease
gttcatgtacggttgcagatataaacgaagcatagcttatgtatgaggtgtaacaaaattggaaacaatagccatgcaaggtgaagaatgtcaccaactcagaaacccttcttcattgacgtgtccctcactcactctcctctcttcactataaatcgccactcttcgtgttctccacttcaccaactccttcaaacttattaacactttccttagttcaatatggggaagcccttcttcactctctctctttcttccctttgcttgctactcttgtcgagtgcatgctattacctccagcaagtcatcagcgtgtcacgctacatcaaacctaaacctcaaccgcgtttgggaaaccccgaccaccgcgttgagtccgaaggtggtcttattgaaacatggaactctcaacaccctgagctgcaatgcgccggtgtcactgtttccaaacgcaccctcaaccgcaacggcctccacttgccatcttactcaccttatccccaaatgatcattgtcgttcaaggtgcgtaatattagtaagagtatttatcagcttaacgtgataacaataatagtaatatgaaatatttattaaatttttataattaatctctgctagaaaatttgattaatcattttagtagaatttgtttttctcaactaggttttaaacacca

SEQ ID NO: 4023 - DNA, 631 bp, Artificial
  Mutations within GlyA3B4 introduced by GmGlyA3B4_T02TALE nuclease
gttcatgtacggttgcagatataaacgaagcatagcttatgtatgaggtgtaacaaaattggaaacaatagccatgcaaggtgaagaatgtcaccaactcagaaacccttcttcattgacgtgtccctcactcactctcctctcttcactataaatcgccactcttcgtgttctccacttcaccaactccttcaaacttattaacactttccttagttcaatatggggaagcccttcttcactctctctctttcttccctttgcttgctactcttgctattacctccagcaagttcaacgagtgccaactcaacaacctcaacgcgttggaacccgaccaccgcgttgagtccgaaggtggtcttattgaaacatggaactctcaacaccctgagctgcaatgcgccggtgtcactgtttccaaacgcaccctcaaccgcaacggcctccacttgccatcttactcaccttactccccaaatgatcattgtcgttcaaggtgcgtaatattagtaagaagtatttatcagcttaacgtgataacaataatagtaatatgaaatatttattaaatttttataattaatctctgctagaaaatttgattaatctttttagtagaattgttttt

SEQ ID NO: 4024 - DNA, 634 bp, Artificial
  Mutations within GlyA3B4 introduced by GmGlyA3B4_T02TALE nuclease
gttcatgtacggttgcagatataaacgaagcaatagcttatgtatgaggtgtaacaaaattggaaacaatagccatgcaaggtgaagaatgtcaccaactcagaaacccttcttcattgacgtgtccctcactcactctcctctcttcactataaatcgccactcttcgtgttctccacttcaccaactccttcaaacttattaacactttccttagttcaatatggggaagcccttcttcactctctctctttcttccctttgcttgctactcttgtcgtgctattaccctccagcaagttcaacgagtgccaactcaacaacctcaacgcgttggaacccgaccaccgcgttgagtccgaaggtggtcttattgaaacatggaactctcaacaccctgagctgcaatgcgccggtgtcactgtttccaaacgcaccctcaaccgcaacggcctccacttgccatcttactcaccttatccccaaatgatcattgtcgttcaaggtgcgtaatattagtaagaagtatttatcagcttaacgtgataacaataatagtaatatgaaatatttattaaatttttataattaatctctgctagaaaatttgattaatcatttttagtagaatttg

SEQ ID NO: 4025 - DNA, 658 bp, Artificial; identical to SEQ ID NO: 2997
  Mutations within GlyA3B4 introduced by GmGlyA3B4_T02TALE nuclease

SEQ ID NO: 4026 - DNA, 735 bp, Artificial
  Mutations within GlyA3B4 introduced by GmGlyA3B4_T02TALE nuclease
gttcatgtacggttgcagatataaacgaagcatagcttatgtatgaggtgtaacaaaattggaaacaatagccatgcaaggtgaagaatgtcaccaactcagaaacccttcttcattgacgtgtccctcactcactctcctctcttcactataaatcgccactcttcgtgttctccacttcaccaactccttcaaacttattaacactttccttagttcaatatggggaagcccttcttcactctctctctttcttccctttgcttgctactcttgtcgagtgcattgagacggtccagcggctgttgccggtgctgtgccaggcccacggcttgacccccccagcaggtggtggccatcgccagcaatggcggtggcaagcaggcgctggagacggtccagcggctgttgctattacctccagcaagttcaacgagtgccaactcaacaacctcaacgcgttggaacccgaccaccgcgttgagtccgaaggtggtcttattgaaacatggaactctcaacaccctgagctgcaatgcgccggtgtcactgtttccaaacgcaccctcaaccgcaacggcctccacttgccatcttactcacctttatccccaaatgatcattgtcgttcaaggtgcgtaatattagtaagaagtatttatcagcttaacgtgataacaataatagtaatatgaaaatatttattaaaatttttttataaattaatctctgcta

SEQ ID NO: 4027 - DNA, 655 bp, Artificial
  Mutations within GlyA3B4 introduced by GmGlyA3B4_T02TALE nuclease
gttcatgtacggttgcagatataaacgaagcatagcttatgtatgaggtgtaacaaaattggaaacaatagccatgcaaggtgaagaatgtcaccaactcagaaacccttcttcattgacgtgtccctcactcactctcctctcttcactataaatcgccactcttcgtgttctccacttcaccaactccttcaaacttattaacactttccttagttcaatatggggaagcccttcttcactctctctctttcttccctttgcttgctactcttgtcgagtgcatattacctccagcaagttcaacgagtgccaactcaacaacctcaacgcgttggaacccgaccaccgcgttgagtccgaaggtggtcttattgaaacatggaactctcaacaccctgagctgcaatgcgccggtgtcactgtttccaaacgcaccctcaaccgcaacggcctccacttgccatcttactcaccttatccccaaatgatcattgtcgttcaaggtgcgtaatattagtaagaagtatttatcagcttaacgtgataacaataatagtaatatgaaatatttattaaatttttataattaatctctgctagaaaatttgattaatcattttagtagaatttgttttctcaactaggttttaaa

SEQ ID NO: 4028 - DNA, 642 bp, Artificial
  Mutations within GlyA3B4 introduced by GmGlyA3B4_T02TALE nuclease
gttcatgtacggttgcagatataaacgaagcatagcttatgtatgaggtgtaacaaaattggaaacaatagccatgcaaggtgaagaatgtcaccaactcagaaacccttcttcattgacgtgtccctcactcactctcctctcttcactataaatcgccactcttcgtgttctccacttcaccaactccttcaaacttattaacactttccttagttcaatatggggaagcccttcttcactctctctctttcttccctttgcttgctactcttgtcgagtgcatgcttcagcaagttcaacgagtgccaactcaacaacctcaacgcgttggaacccgaccaccgcgttgagtccgaaggtggtcttattgaaacatggaactctcaacaccctgagctgcaatgcgccggtgtcactgtttccaaacgcaccctcaaccgcaacggcctccacttgccatcttactcaccttatccccaaatgatcattgtcgttcaaggtgcgtaatattagtaagaagtatttatcagcttaacgtgatacaatatagtaatatgaaatatttattaaatttttataattaatctctgctagaaaatttgattaatcattttagtagaatttgttttctcaactagg

SEQ ID NO: 4029 - DNA, 664 bp, Artificial
  Mutations within GlyA3B4 introduced by GmGlyA3B4_T02TALE nuclease
gttcatgtacggttgcagatataaacgaagcatagcttatgtatgaggtgtaacaaaattggaaacaatagccatgcaaggtgaagaatgtcaccaactcagaaacccttcttcattgacgtgtccctcactcactctcctctcttcactataaatcgccactcttcgtgttctccacttcaccaaactccttcaaacttattaacactttccttagttcaatatggggaagcccttcttcactctctctctttcttccctttgcttgctactcttgtcgagttttttgctattacctccagcaagttcaacgagtgccaactcaacaacctcaacgcgttggaacccgaccaccgcgttgagtccgaaggtggtcttattgaaacatggaactctcaacaccctgagctgcaatgcgccggtgtcactgtttccaaacgcaccctcaaccgcaacggcctccacttgccatcttactcaccttatcccccaaatgatcattgtcgttcaaggtgcgtaatattagtaagaagtatttatcagcttaacgtgatacaatatagtaatatgaaatatttattaaatttttataattaatctctgctagaaaatttgattaatcattttagtagaatttgttttctcaactaggttttaaacacca

SEQ ID NO: 4030 - DNA, 661 bp, Artificial
  Mutations within GlyA3B4 introduced by GmGlyA3B4_T02TALE nuclease
gttcatgtacggttgcagatataaacgaagcatagcttatgtatgaggtgtaacaaaattggaaacaatagccatgcaaggtgaagaatgtcaccaactcagaaaccccttcttcattgacgtgtccctcactcactctcctctcttcactataaatcgccactcttcgtgttctccacttcaccaactccttcaaacttattaacactttccttagttcaatatggggaagcccttcttcactctctctctttcttccctttgcttgctactcttgtcgagtgcaattacctccagcaagttcaacgagtgccaactcaacaacctcaacgcgttggaacccgaccaccgcgttgagtccgaaggtggtcttattgaaacatggaactctcaacaccctgagctgcaatgcgccggtgtcactgtttccaaacgcaccctcaaccgcaacggcctccacttgccatcttactcaccttatccccaaatgatcattgtcgttcaaggtgcgtaatattagtaagaagtatttatcagcttaacgtgataacaataatagtaatatgaaatatttattaaatttttataattaatctctgctagaaaatttgattaatcattttagtagaatttgttttctcaactaggttttaaaacacca

SEQ ID NO: 4031 - DNA, 582 bp, Artificial
  Mutations within GlyA3B4 introduced by GmGlyA3B4_T02TALE nuclease
gttcatgtacggttgcagatataaacgaagcatagcttatgtatgaggtgtaacaaaattggaaacaatagccatgcaaggtgaagaatgtcaccaactcagaaaccccttcttcattgacgtgtccctcactcactctcctctcttcactataaatcgccactcttcgtgttctccacttcaccaactccttcaaacttattaacactttccttagttcaatatggggaagcccttcttcactctctctctttcttccctttgcttgctactcttgtcgagtgcctgcaagttcaacgagtgccaactcaacaacctcaacgcgttggaacccgaccaccgcgttgagtccgaaggtggtcttattgaaacatggaactctcaacaccctgagctgcaatgcgccggtgtcactgtttccaaacgcaccctcaaccgcaacggcctccacttgccatcttactcaccttatccccaaatgatcattgtcgttcaaggtgcgtaaatattagtaagaagtatttatcagcttaacgtgataacaataatagtaatatgaaatatttattaaattttttataa

SEQ ID NO: 4032 - DNA, 668 bp, Artificial; identical to SEQ ID NO: 3500
  Mutations within GlyA3B4 introduced by GmGlyA3B4_T02TALE nuclease

SEQ ID NO: 4033 - DNA, 667 bp, Artificial
  Mutations within GlyA3B4 introduced by GmGlyA3B4_T02TALE nuclease
  misc_feature (530): n is a or c or t or g
gttcatgtacggttgcagatataaacgaagcatagcttatgtatgaggtgtaacaaaattggaaacaatagccatgcaaggtgaagaatgtcaccaactcagaaacccttcttcattgacgtgtccctcactcactctcctctcttcactataaatcgccactcttcgtgttctccacttcaccaactccttcaaacttattaacactttccttagttcaatatggggaagcccttcttcactctctctctttcttccctttgcttgctactcttgtcgagtgttgctattacctccagcaagttcaacgagtgccaactcaacaacctcaacgcgttggaacccgaccaccgcgttgagtccgaaggtggtcttattgaaacatggaactctcaacaccctgagctgcaatgcgccggtgtcactgtttccaaacgcaccctcaaccgcaacggcctccacttgccatcttactcaccttatccccaaatgatcattgtcgttcaaggtgcgtaatattagtaagaagnatttatcagcttaacgtgataacaataatagtaatatgaaatatttattaaatttttataattaatctctgctagaaaatttgattaatcattttagtagaatttgtttttctcaactaggtttttaaaacaccaca

SEQ ID NO: 4034 - DNA, 670 bp, Artificial
  Mutations within GlyA3B4 introduced by GmGlyA3B4_T02TALE nuclease
  misc_feature (534): n is a or c or t or g
gttcatgtacggttgcagatataaacgaagcatagcttatgtatgaggtgtaacaaaattggaaacaatagccatgcaaggtgaagaatgtcaccaactcagaaaccccttcttcattgacgtgtccctcactcactctcctctcttcactataaatcgccactcttcgtgttctccacttcaccaactccttcaaacttattaacactttccttagttcaatatggggaagcccttcttcactctctctctttcttccctttgcttgctactcttgtcgagtgcattgctattacctccagcaagttcaacgagtgccaactcaacaacctcaacgcgttggaacccgaccaccgcgttgagtccgaaggtggtcttattgaaacatggaactctcaacaccctgagctgcaatgcgccggtgtcactgtttccaaacgcaccctcaaccgcaacggcctccacttgccatcttactcaccttatcccccaaatgatcattgtcgttcaaggtgcgtaatattagtaagaagnatttatcagcttaacgtgataacaataatagtaatatgaaaatatttattaaatttttataattaatctctgctagaaaatttgattaatcattttagtagaatttgtttttctcaactaggtttttaaaacacca

SEQ ID NO: 4035 - DNA, 578 bp, Artificial
  Mutations within GlyA3B4 introduced by GmGlyA3B4_T02TALE nuclease
gttcatgtacggttgcagatataaacgaagcatagcttatgtatgaggtgtaacaaaattggaaacaatagccatgcaaggtgaagaatgtcaccaactcagaaaccccttcttcattgacgtgtccctcactcactctcctctcttcactataaatcgccactcttcgtgttctccacttcaccaactccttcaaacttattaacactttccttagttcaatatggggaagcccttcttcactctctctctttcttccctttgcttgctactcttgtcgaacgcggtggtcttattgaaacatggaactctcaacaccctgagctgcaatgcgccggtgtcactgtttccaaacgcaccctcaaccgcaacggcctccacttgccatcttactcaccttatccccaaatgatcattgtcgttcaaggtgcgtaatattagtaagaagtatttatcagcttaacgtgataacaataatagtaatatgaaatatttattaaatttttttataattaatctctgctagaaaattttgattaatcatttttagtagaatttgtttttctcaactaggtttt

SEQ ID NO: 4036 - DNA, 580 bp, Artificial
  Mutations within GlyA3B4 introduced by GmGlyA3B4_T02TALE nuclease
gttcatgtacggttgcagatataaacgaagcatagcttatgtatgaggtgtaacaaaattggaaacaatagccatgcaaggtgaagaatgtcaccaactcagaaacccttcttcattgacgtgtccctcactcactctcctctcttcactataaatcgccactcttcgtgttctccacttcaccaactccttcaaacttattaacactttccttagttcaatatggggaagcccttcttcactctcaacaacctcaacgcgttggaacccgaccaccgcgttgagtccgaaggtggtcttattgaaacatggaactctcaacaccctgagctgcaatgcgccggtgtcactgtttccaaacgcaccctcaaccgcaacggcctccacttgccatcttactcaccttatccccaaatgatcattgtcgttcaaggtgcgtaatattagtaagaagtatttatcagcttaacgtgataacaataatagtaatatgaaatatttattaaatttttttataattaatctctgctagaaaattttgattaatcatttttagtagaatttgtttttctcaactagg

SEQ ID NO: 4037 - DNA, 632 bp, Artificial
  Mutations within GlyA3B4 introduced by GmGlyA3B4_T02TALE nuclease
gttcatgtacggttgcagatataaacgaagcatagcttatgtatgaggtgtaacaaaattggaaacaatagccatgcaaggtgaagaatgtcaccaactcagaaacccttcttcattgacgtgtccctcactcactctcctctcttcactataaatcgccactcttcgtgttctccacttcaccaactccttcaaacttattaacactttccttagttcaatatggggaagcccttcttcactctctctctttcttccctttgcttgctactcttgtcgagtgcaattacctccagcaagttcaacgagtgccaactcaacaacctcaacgcgttggaacccgaccaccgcgttgagtccgaaggtggtcttattgaaacatggaactctcaacaccctgagctgcaatgcgccggtgtcactgtttccaaacgcaccctcaaccgcaacggcctccacttgccatcttactcaccttatccccaaatgatcattgtcgttcaaggtgcgtaatattagtaagaagtatttatcagcttaacgtgataacaatatagtaatatgaaatatttattaaatttttataattaatctctgctagaaaatttgattaatcattttagtagaatttg

SEQ ID NO: 4038 - DNA, 584 bp, Artificial
  Mutations within GlyA3B4 introduced by GmGlyA3B4_T02TALE nuclease
gttcatgtacggttgcagatataaacgaagcatagcttatgtatgaggtgtaacaaaattggaaacaatagccatgcaaggtgaagaatgtcaccaactcagaaacccttcttcattgacgtgtccctcactcactctcctctcttcactataaatcgccactcttcgtgttctccacttcaccaactccttcaaacttattaacactttccttagttcaatatggggaagcccttcttcaacgagtgccaactcaacaacctcaacgcgttggaacccgaccaccgcgttgagtccgaaggtggtcttattgaaacatggaactctcaacaccctgagctgcaatgcgccggtgtcactgtttccaaacgcaccctcaaccgcaacggcctccacttgccatcttactcacccttatcccccaaatgatcattgtcgttcaaggtgcgtaatattagtaagaagtatttatcagcttaacgtgataacaataatagtaatatgaaatatttattaaattttttataattaatctctgctagaaaatttgattaatcatttttagtagaatttgtttttctcaa

SEQ ID NO: 4039 - DNA, 636 bp, Artificial
  Mutations within GlyA3B4 introduced by GmGlyA3B4_T02TALE nuclease
gttcatgtacggttgcagatataaacgaagcatagcttatgtatgaggtgtaacaaaattggaaacaatagccatgcaaggtgaagaatgtcaccaactcagaaacccttcttcattgacgtgtccctcactcactctcctctcttcactataaatcgccactcttcgtgttctccacttcaccaactccttcaaacttattaacactttccttagttcaatatggggaagcccttcttcactctctctctttcttccctttgcttgctactcttgtcgagtgcattattacctccagcaagttcaacgagtgccaactcaacaacctcaacgcgttggaacccgaccaccgcgttgagtccgaaggtggtcttattgaaacatggaactctcaacaccctgagctgcaatgcgccggtgtcactgtttccaaacgcaccctcaaccgcaacggcctccacttgccatcttactcaccttatcccccaaatgatcattgtcgttcaaggtgcgtaatattagtaagaagtatttatcagcttaacgtgataacaataatagtaatatgaaatatttattaaatttttataattaatctctgctagaaaatttgattaatcattttagtagaatttg

SEQ ID NO: 4040 - DNA, 644 bp, Artificial
  Mutations within GlyA3B4 introduced by GmGlyA3B4_T02TALE nuclease
gttcatgtacggttgcagatataaacgaagcatagcttatgtatgaggtgtaacaaaattggaaacaatagccatgcaaggtgaagaatgtcaccaactcagaaacccttcttcattgacgtgtccctcactcactctcctctcttcactataaatcgccactcttcgtgttctccacttcaccaactccttcaaacttattaacactttccttagttcaatatggggaagcccttcttcactctctctctttcttccctttgcttgctactctttgctattacctccagcaagttcaacgagtgccaactcaacaacctcaacgcgttggaacccgaccaccgcgttgagtccgaaggtggtcttattgaaacatggaactctcaacaccctgagctgcaatgcgccggtgtcactgtttccaaacgcaccctcaaccgcaacggcctccacttgccatcttactcaccttatcccccaaatgatcattgtcgttcaaggtgcgtaaatattagtaagaagtatttatcagcttaacgtgataacaataatagtaatatgaaatatttattaaattttttataattaatctctgctagaaaatttgattaatctttttagtagaattgtttttctcaactagg

SEQ ID NO: 4041 - DNA, 634 bp, Artificial
  Mutations within GlyA3B4 introduced by GmGlyA3B4_T02TALE nuclease
gttcatgtacggttgcagatataaacgaagcatagcttatgtatgaggtgtaacaaaaattggaaacaatagccatgcaaggtgaagaatgtcaccaactcagaaacccttcttcattgacgtgtccctcactcactctcctctcttcactataaatcgccactcttcgtgttctccacttcaccaactccttcaaacttattaacactttccttagttcaatatggggaagcccttcttcactctctctctttcttccctttgcttgctactcttgtcgagtgcattgctattacctccagcaagttcaacgagtgccaactcaacaacctcaacgcgttggaacccgaccaccgcgttgagtccgaaggtggtcttattgaaacatggaactctcaacaccctgagctgcaatgcgccggtgtcactgtttccaaacgcaccctcaaccgcaacggcctccacttgccatcttactcaccttatccccaaatgatcattgtcgttcaaggtgcgtaatattagtaagagtatttatcagcttaacgtgataacaataatagtaatatgaaatatttattaaatttttataattaatctctgctagaaaatttgattaatcattttagtagaa

SEQ ID NO: 4042 - DNA, 641 bp, Artificial
  Mutations within GlyA3B4 introduced by GmGlyA3B4_T02TALE nuclease
gttcatgtacggttgcagatataaacgaagcatagcttatgtatgaggtgtaacaaaattggaaacaatagccatgcaaggtgaagaatgtcaccaactcagaaacccttcttcattgacgtgtccctcactcactctcctctcttcactataaatcgccactcttcgtgttctccacttcaccaactccttcaaacttattaacactttccttagttcaatatgggggaagcccttcttcactctctctctttcttccctttgcttgctactcttgtcgagtgcatggcaagttcaacgagtgccaactcacaacctcaacgcgttggaacccgaccaccgcgttgagtccgaaggtggtcttattgaaacatggaactctcaacaccctgagctgcaatgcgccggtgtcactgtttccaaacgcaccctcaaccgcaacggcctccacttgccatcttactcaccttatccccaaatgatcattgtcgttcaaggtgcgtaatattagtaagaagtatttatcagcttaacgtgataacaataatagtaatatgaaatatttattaaattttttataattaatctctgctagaaaatttgattaatctttttagtagaattgttttttctcaactagg

SEQ ID NO: 4043 - DNA, 523 bp, Artificial; identical to SEQ ID NO: 1860
  Mutations within GlyA3B4 introduced by GmGlyA3B4_T02TALE nuclease

SEQ ID NO: 4044 - DNA, 647 bp, Artificial
  Mutations within GlyA3B4 introduced by GmGlyA3B4_T02TALE nuclease
gttcatgtacggttgcagatataaacgaagcatagcttatgtatgaggtgtaacaaaattggaaacaatagccatgcaaggtgaagaatgtcaccaactcagaaacccttcttcattgacgtgtccctcactcactctcctctcttcactataaatcgccactcttcgtgttctccacttcaccaactccttcaaacttattaacactttccttagttcaatatggggaagcccttcttcactctctctctttcttccctttgcttgctactcttgtcgagtgcatgctattacctccagcaagttcaacgagtgccaactcaacaacctcaacgcgttggaacccgaccaccgcgttgagtccgaaggtggtcttattgaaacatggaactctcaacaccctgagctgcaatgcgccggtgtcactgtttccaaacgcaccctcaaccgcaacggcctccacttgccatcttactcaccttatccccaaatgatcattgtcgttcaaggtgcgtaatattagtaagaagtatttatcagcttaacgtgataacaataatagtaatatgaaaatatttattaaatttttataattaatctctgctagaaaatttgattaatcatttttagtagaatttgtttttctc

SEQ ID NO: 4045 - DNA, 663 bp, Artificial; identical to SEQ ID NO: 3858
  Mutations within GlyA3B4 introduced by GmGlyA3B4_T02TALE nuclease

SEQ ID NO: 4046 - DNA, 632 bp, Artificial
  Mutations within GlyA3B4 introduced by GmGlyA3B4_T02TALE nuclease
gttcatgtacggttgcagatataaacgaagcatagcttatgtatgaggtgtaacaaaattggaaacaatagccatgcaaggtgaagaatgtcaccaactcagaaacccttcttcattgacgtgtccctcactcactctcctctcttcactataaatcgccactcttcgtgttctccacttcaccaactccttcaaacttattaacactttccttagttcaatatggggaagcccttcttcactctctctctttcttccctttgcttgctactcttgtcgagtgccaactcaacaacctcaacgcgttggaacccgaccaccgcgttgagtccgaaggtggtcttattgaaacatggaactctcaacaccctgagctgcaatgcgccggtgtcactgtttccaaacgcaccctcaaccgcaacggcctccacttgccatcttactcaccttatcccccaaatgatcattgtcgttcaaggtgcgtaatattagtaagaagtatttatcagcttaacgtgataacaataatagtaatatgaaatatttattaaattttttataattaatctctgctagaaaatttgattaatcatttttagtagaatttgtttttctcaactaggttttaaaca

SEQ ID NO: 4047 - DNA, 618 bp, Artificial
  Mutations within GlyA3B4 introduced by GmGlyA3B4_T02TALE nuclease
gttcatgtacggttgcagatataaacgaagcatagcttatgtatgaggtgtaacaaaattggaaacaatagccatgcaaggtgaagaatgtcaccaactcagaaacccttcttcattgacgtgtccctcactcactctcctctcttcactataaatcgccactcttcgtattctccacttcaccaactccttcaaacttattaacactttccttagttcaatatggggaagcccttcttcactctctctctttcttccctttgcttgctactcttgtcgagtgcatattacctccagcaagttcaacgagtgccaactcaacaacctcaacgcgttggaacccgaccaccgcgttgagtccgaaggtggtcttattgaaacatggaactctcaacaccctgagctgcaatgcgccggtgtcactgtttccaaacgcaccctcaaccgcaacggcctccacttgccatcttactcaccttatccccaaatgatcattgtcgttcaaggtgcgtaatattagtaagaagtatttatcagcttaacgtgataacaatatagtaatatgaaatatttattaaatttttataattaatctctgctagaaaatttgattaatca

SEQ ID NO: 4048 - DNA, 615 bp, Artificial
  Mutations within GlyA3B4 introduced by GmGlyA3B4_T02TALE nuclease
gttcatgtacggttgcagatataaacgaagcatagcttatgtatgaggtgtaacaaaattggaaacaatagccatgcaaggtgaagaatgtcaccaactcagaaacccttcttcattgacgtgtccctcactcactctcctctcttcactataaatcgccactcttcgtgttctccacttcaccaactccttcaaacttattaacactttccttagttcaatatggggaagcccttcttcactctctctctttcactccagcaagttcaacgagtgccaactcaacaacctcaacgcgttggaacccgaccaccgcgttgagtccgaaggtggtcttattgaaacatggaactctcaacaccctgagctgcaatgcgccggtgtcactgtttccaaacgcaccctcaaccgcaacggcctccacttgccatcttactcaccttatcccccaaatgatcattgtcgttcaaggtgcgtaatattagtaagaagtatttatcagcttaacgtgataacaataatagtaatatgaaatatttattaattttttataattaatctctgctagaaaatttgattaatcatttttagtagaatttgtttttctcaactagg

SEQ ID NO: 4049 - DNA, 580 bp, Artificial
  Mutations within GlyA3B4 introduced by GmGlyA3B4_T02TALE nuclease
gttcatgtacggttgcagatataaacgaagcatagcttatgtatgaggtgtaacaaaattggaaacaatagccatgcaaggtgaagaatgtcaccaactcagaaacccttcttcattgacgtgtccctcactcactctcctctcttcactataaatcgccactcttcgtgttctccacttcaccaactccttcaaacttattaacactttccttagttcaatatggggaagcccttcttcactctctctctttcttccctttgcttgctactcttgtcgagtgcatccagcaagttcaacgagtgccaactcaacaacctcaacgcgttggaacccgaccaccgcgttgagtccgaaggtggtcttattgaaacatggaactctcaacaccctgagctgcaatgcgccggtgtcactgtttccaaacgcaccctcaaccgcaacggcctccacttgccatcttactcaccttatccccaaatgatcattgtcgttcaaggtgcgtaaatattagtaagaagtatttatcagcttaacgtgataacaataatagtaatatgaaatatttattaaatttttt

SEQ ID NO: 4050 - DNA, 650 bp, Artificial
  Mutations within GlyA3B4 introduced by GmGlyA3B4_T02TALE nuclease
  misc_feature (530): n is a or c or t or g
gttcatgtacggttgcagatataaacgaagcatagcttatgtatgaggtgtaacaaaattggaaacaatagccatgcaaggtgaagaatgtcaccaactcagaaacccttcttcattgacgtgtccctcactcactctcctctcttcactataaatcgccactcttcgtgttctccacttcaccaactccttcaaacttattaacactttccttagttcaatatggggaagcccttcttcactctctctctttcttccctttgcttgctactcttgtcgagtgcatgctattacctccagcaagttcaacgagtgccaactcaacaacctcaacgcgttggaacccgaccaccgcgttgagtccgaaggtggtcttattgaaacatggaactctcaacaccctgagctgcaatgcgccggtgtcactgtttccaaacgcaccctcaaccgcaacggcctccacttgccatcttactcaccttatccccaaatgatcattgtcgttcaaggtgcgtaatattagtaagagnatttatcagcttaacgtgataacaatatagtaatatgaaatatttattaaatttttataattaatctctgctagaaaatttgattaatcattttagtagaatttgtttttctcaactagg

SEQ ID NO: 4051 - DNA, 660 bp, Artificial; identical to SEQ ID NO: 1763
  Mutations within GlyA3B4 introduced by GmGlyA3B4_T02TALE nuclease

SEQ ID NO: 4052 - DNA, 664 bp, Artificial
  Mutations within GlyA3B4 introduced by GmGlyA3B4_T02TALE nuclease
gttcatgtacggttgcagatataaacgaagcatagcttatgtatgaggtgtaacaaaattggaaacaatagccatgcaaggtgaagaatgtcaccaactcagaaacccttcttcattgacgtgtccctcactcactctcctctcttcactataaatcgccactcttcgtgttctccacttcaccaactccttcaaacttattaacactttccttagttcaatatggggaagcccttcttcactctctctctttcttccctttgcttgctactcttgtcgagtgcatttgctattacctccagcaagttcaacgagtgccaactcaacaacctcaacgcgttggaacccgaccaccgcgttgagtccgaaggtggtcttattgaaacatggaactctcaacaccctgagctgcaatgcgccggtgtcactgtttccaaacgcaccctcaaccgcaacggcctccacttgccatcttactcaccttatccccaaatgatcattgtcgttcaaggtgcgtaatattagtaagagtatttatcagcttaacgtgatacaatatagtaatatgaaatatttattaaatttttataattaatctctgctagaaaatttgattaatcattttagtagaatttgtttttctcaactaggtttttaaacacca

SEQ ID NO: 4053 - DNA, 569 bp, Artificial
  Mutations within GlyA3B4 introduced by GmGlyA3B4_T02TALE nuclease
gttcatgtacggttgcagatataaacgaagcatagcttatgtatgaggtgtaacaaaattggaaacaatagccatgcaaggtgaagaatgtcaccaactcagaaacccttcttcattgacgtgtccctcactcactctcctctcttcactataaatcgccactcttcgtgttctccacttcaccaactccttcaaacttattaacactttccttagttcaatatggggaagcccttcttcactctctctctttcttccctttgcttgctactcttgtcgagtgcagcgttgagtccgaaggtggtcttattgaacatggaactctcaacaccctgagctgcaatgcgccggtgtcactgtttccaaacgcaccctcaaccgcaacggcctccacttgccatcttactcaccttatccccaaatgatcattgtcgttcaaggtgcgtaatattagtaagaagtatttatcagcttaacgtgataacaataatagtaatatgaatatttattaaatttttataattaatctcttgctagaaaatttgattaatcatttttagtagaatttg

SEQ ID NO: 4054 - DNA, 662 bp, Artificial
  Mutations within GlyA3B4 introduced by GmGlyA3B4_T02TALE nuclease
gttcatgtacggttgcagatataaacgaagcatagcttatgtatgaggtgtaacaaaattggaaacaatagccatgcaaggtgaagaatgtcaccaactcagaaacccttcttcattgacgtgtccctcactcactctcctctcttcactataaatcgccactcttcgtgttctccacttcaccaactccttcaaacttattaacactttccttagttcaatatggggaagcccttcttcactctctctctttcttccctttgcttgctactcttgtcgagtgcatgtacctccagcaagttcaacgagtgccaactcaacaacctcaacgcgttggaacccgaccaccgcgttgagtccgaaggtggtcttattgaaacatggaactctcaacaccctgagctgcaatgcgccggtgtcactgtttccaaacgcaccctcaaccgcaacggcctccacttgccatcttactcaccttatccccaaatgatcattgtcgttcaaggtgcgtaatattagtaagaagtatttatcagcttaacgtgataacaataatagtaatatgaaatatttattaaatttttataattaatctctgctagaaaatttgattaatcattttagtagaatttgtttttctcaactaggtttttaaaacacca

SEQ ID NO: 4055 - DNA, 650 bp, Artificial
  Mutations within GlyA3B4 introduced by GmGlyA3B4_T02TALE nuclease
gttcatgtacggttgcagatataaacgaagcatagcttatgtatgaggtgtaacaaaattggaaacaatagccatgcaaggtgaagaatgtcaccaactcagaaacccttcttcattgacgtgtccctcactcactctcctctcttcactataaatcgccactcttcgtgttctccacttcaccaactccttcaaacttattaacactttccttagttcaatatggggaagcccttcttcactctctctctttcttccctttgcttgctactcttgtcgagtgcatgctattacctccagcaagttcaacgagtgccaactcaacaacctcaacgcgttggaacccgaccaccgcgttgagtccgaaggtggtcttattgaaacatggaactctcaacaccctgagctgcaatgcgccggtgtcactgtttccaaacgcaccctcaaccgcaacggcctccacttgccatcttactcaccttatccccaaatgatcattgtcgttcaaggtgcgtaatattagtaagagtatttatcagcttaacgtgataacaataatagtaatatgaaaatatttattaaatttttataattaatctctgctagaaaatttgattaatcttttagtagaatttgttttctcaactagg

SEQ ID NO: 4056 - DNA, 661 bp, Artificial
  Mutations within GlyA3B4 introduced by GmGlyA3B4_T02TALE nuclease
gttcatgtacggttgcagatataaacgaagcatagcttatgtatgaggtgtaacaaaattggaaacaatagccatgcaaggtgaagaatgtcaccaactcagaaacccttcttcattgacgtgtccctcactcactctcctctcttcactataaatcgccactcttcgtgttctccacttcaccaactccttcaaacttattaacactttccttagttcaatatggggaagcccttcttcactctctctctttcttccctttgcttgctactcttgtcgagtgcatattacctccagcaagttcaacgagtgccaactcaacaacctcaacgcgttggaacccgaccaccgcgttgagtccgaaggtggtcttattgaaacatggaactctcaacaccctgagctgcaatgcgccggtgtcactgtttccaaacgcaccctcaaccgcaacggcctccacttgccatcttactcaccttatccccaaatgatcattgtcgttcaaggtgcgtaatattagtaagaagtatttatcagcttaacgtgataacaatatagtaatatgaaatatttattaaatttttataattaatctctgctagaaaatttgattaatcattttagtagaatttgtttttctcaactaggtttttaaacacca

SEQ ID NO: 4057 - DNA, 648 bp, Artificial
  Mutations within GlyA3B4 introduced by GmGlyA3B4_T02TALE nuclease
gttcatgtacggttgcagatataaacgaagcatagcttatgtatgaggtgtaacaaaattggaaacaatagccatgcaaggtgaagaatgtcaccaactcagaaacccttcttcattgacgtgtccctcactcactctcctctcttcactataaatcgccactcttcgtgttctccacttcaccaactccttcaaacttattaacactttccttagttcaatatggggaagcccttcttcactctctctctttcttccctttgcttgctactcttgtcgagtcagcaagttcaacgagtgccaactcaacaacctcaacgcgttggaacccgaccaccgcgttgagtccgaaggtggtcttattgaaacatggaactctcaacaccctgagctgcaatgcgccggtgtcactgtttccaaacgcaccctcaaccgcaacggcctccacttgccatcttactcaccttatccccaaatgatcattgtcgttcaaggtgcgtaaatattagtaagaagtatttatcagcttaacgtgataacaataatagtaatatgaaatatttattaaatttttataattaatctctgctagaaaatttgattaatctttttagtagaattgtttttctcaactaggtttaaacacca

SEQ ID NO: 4058 - DNA, 654 bp, Artificial
  Mutations within GlyA3B4 introduced by GmGlyA3B4_T02TALE nuclease
gttcatgtacggttgcagatataaacgaagcatagcttatgtatgaggtgtaacaaaattggaaacaatagccatgcaaggtgaagaatgtcaccaactcagaaacccttcttcattgacgtgtccctcactcactctcctctcttcactataaatcgccactcttcgtgttctccacttcaccaactccttcaaacttattaacactttccttagttcaatatggggaagcccttcttcactctctctctttcttccctttgcttgctattacctccagcaagttcaacgagtgccaactcaacaacctcaacgcgttggaacccgaccaccgcgttgagtccgaaggtggtcttattgaaacatggaactctcaacaccctgagctgcaatgcgccggtgtcactgtttccaaacgcaccctcaaccgcaacggcctccacttgccatcttactcaccttatcccccaaatgatcattgtcgttcaaggtgcgtaatattagtaagaagtatttatcagcttaacgtgataacaataatagtaatatgaaatatttattaaatttttttataattaatctctgctagaaaatttgattaatcattttttagtagaatttgttttttctcaactaggtttttaaaacaccaca

SEQ ID NO: 4059 - DNA, 652 bp, Artificial; identical to SEQ ID NO: 1761
  Mutations within GlyA3B4 introduced by GmGlyA3B4_T02TALE nuclease

SEQ ID NO: 4060 - DNA, 664 bp, Artificial
  Mutations within GlyA3B4 introduced by GmGlyA3B4_T02TALE nuclease
gttcatgtacggttgcagatataaacgaagcatagcttatgtatgaggtgtaacaaaattggaaacaatagccatgcaaggtgaagaatgtcaccaactcagaaacccttcttcattgacgtgtccctcactcactctcctctcttcactataaatcgccactcttcgtgttctccacttcaccaactccttcaaacttattaacactttccttagttcaatatggggaagcccttcttcactctctctctttcttccctttgcttgctactcttgtcgagtgctgctattacctccagcaagttcaacgagtgccaactcaacaacctcaacgcgttggaacccgaccaccgcgttgagtccgaaggtggtcttattgaaacatggaactctcaacaccctgagctgcaatgcgccggtgtcactgtttccaaacgcaccctcaaccgcaacggcctccacttgccatcttactcaccttatccccaaatgatcattgtcgttcaaggtgcgtaatattagtaagaagtatttatcagcttaacgtgataacaataatagtaatatgaaatatttattaaatttttataattaatctctgctagaaaatttgattaatcattttagtagaatttgtttttctcaactaggttttaaaacacca

SEQ ID NO: 4061 - DNA, 656 bp, Artificial
  Mutations within GlyA3B4 introduced by GmGlyA3B4_T02TALE nuclease
gttcatgtacggttgcagatataaacgaagcatagcttatgtatgaggtgtaacaaaattggaaacaatagccatgcaaggtgaagaatgtcaccaactcagaaacccttcttcattgacgtgtccctcactcactctcctctcttcactataaatcgccactcttcgtgttctccacttcaccaactccttcaaacttattaacactttccttagttcaatatggggaagcccttcttcactctctctctttcttccctttgcttgctactcttgtcgagtgcatccagcaagttcaacgagtgccaactcaacaacctcaacgcgttggaacccgaccaccgcgttgagtccgaaggtggtcttattgaaacatggaactctcaacaccctgagctgcaatgcgccggtgtcactgtttccaaacgcaccctcaaccgcaacggcctccacttgccatcttactcaccttatcccccaaatgatcattgtcgttcaaggtgcgtaatattagtaagaagtatttatcagcttaacgtgataacaataatagtaatatgaaatatttattaaatttttataattaatctctgctagaaaatttgattaatctttttagtagaattgttttttctcaactaggtttaaacaccaca

SEQ ID NO: 4062 - DNA, 660 bp, Artificial
  Mutations within GlyA3B4 introduced by GmGlyA3B4_T02TALE nuclease
gttcatgtacggttgcagatataaacgaagcatagcttatgtatgaggtgtaacaaaattggaaacaatagccatgcaaggtgaagaatgtcaccaactcagaaacccttcttcattgacgtgtccctcactcactctcctctcttcactataaatcgccactcttcgtgttctccacttcaccaactccttcaaacttattaacactttccttagttcaatatggggaagcccttcttcactctctctctttcttccctttgcttgctactcttgtcgagtgcattacctccagcaagttcaacgagtgccaactcaacaacctcaacgcgttggaacccgaccaccgcgttgagtccgaaggtggtcttattgaaacatggaactctcaacaccctgagctgcaatgcgccggtgtcactgtttccaaacgcaccctcaaccgcaacggcctccacttgccatcttactcaccttatccccaaatgatcattgtcgttcaaggtgcgtaatattagtaagaagtatttatcagcttaacgtgataacaataatagtaatatgaaatatttattaaatttttataattaatctctgctagaaaatttgattaatcattttagtagaatttgtttttctcaactaggtttttaaaacacc

SEQ ID NO: 4063 - DNA, 640 bp, Artificial; identical to SEQ ID NO: 2042
  Mutations within GlyA3B4 introduced by GmGlyA3B4_T02TALE nuclease

SEQ ID NO: 4064 - DNA, 668 bp, Artificial
  Mutations within GlyA3B4 introduced by GmGlyA3B4_T02TALE nuclease
gttcatgtacggttgcagatataaacgaagcatagcttatgtatgaggtgtaacaaaattggaaacaatagccatgcaaggtgaagaatgtcaccaactcagaaaccccttcttcattgacgtgtccctcactcactctcctctcttcactataaatcgccactcttcgtgttctccacttcaccaactccttcaaacttattaacactttccttagttcaatatgggggaagcccttcttcactctctctctttcttccctttgcttgctactcttgtcgagtgcatgctattacctccagcaagttcaacgagtgccaactcaacaacctcaacgcgttggaacccgaccaccgcgttgagtccgaaggtggtcttattgaaacatggaactctcaacaccctgagctgcaatgcgccggtgtcactgtttccaaacgcaccctcaaccgcaacggcctccacttgccatcttactcaccttatcccccaaatgatcattgtcgttcaaggtgcgtaatattagtaagagtatttatcagcttaacgtgataacaataatagtaatatgaaatatttattaaatttttataattaatctctgctagaaaatttgattaatcattttagtagaatttgttttctcaactaggttttaaaacaccaca

SEQ ID NO: 4065 - DNA, 443 bp, Artificial
  Mutations within GlyA3B4 introduced by GmGlyA3B4_T02TALE nuclease
gttcatgtacggttgcagatataaacgaagcatagcttatgtatgaggtgtaacaaaattggaaacaatagccatgcaaggtgaagaatgtcaccaactcagaaacccttcttcattgacgtgtccctcactcactctcctctcttcactataaatcgccactcttcgtgttctccacttcaccaactccttcaaacttattaacactttccttagttcaatatgggggaagcccttcttcactctctctctttcttccctttgcttgctactcttgtcgagtgccatgctattacctccagcaagttcaacgagtgccaactcaaacaacctcaacgcgttggaacccgaccaccgcgttgagtccgaaggtggtcttattgaaacatggaactctcaacaccctgagctgcaatgcgccggctgtcactgtttccaaacgc

SEQ ID NO: 4066 - DNA, 622 bp, Artificial; identical to SEQ ID NO: 1968
  Mutations within GlyA3B4 introduced by GmGlyA3B4_T02TALE nuclease

SEQ ID NO: 4067 - DNA, 664 bp, Artificial
  Mutations within GlyA3B4 introduced by GmGlyA3B4_T02TALE nuclease
gttcatgtacggttgcagatataaacgaagcatagcttatgtatgaggtgtaacaaaattggaaacaatagccatgcaaggtgaagaatgtcaccaactcagaaacccttcttcattgacgtgtccctcactcactctcctctcttcactataaatcgccactcttcgtgttctccacttcaccaactccttcaaacttattaacactttccttagttcaatatggggaagcccttcttcactctctctctttcttccctttgcttgctactcttgtcgagtgcatgtacctccagcaagttcaacgagtgccaactcaacaacctcaacgcgttggaacccgaccaccgcgttgagtccgaaggtggtcttattgaaacatggaactctcaacaccctgagctgcaatgcgccggtgtcactgtttccaaacgcacccctcaaccgcaacggcctccacttgccatcttactcaccttatcccccaaatgatcattgtcgttcaaggtgcgtaatattagtaagaagtatttatcagcttaacgtgataacaataatagtaatatgaaatatttattaaatttttataattaatctctgctagaaaatttgattaatcattttagtagaatttgtttttctcaactaggtttttaaaacacca

SEQ ID NO: 4068 - DNA, 642 bp, Artificial
  Mutations within GlyA3B4 introduced by GmGlyA3B4_T02TALE nuclease
gttcatgtacggttgcagatataaacgaagcatagcttatgtatgaggtgtaacaaaattggaaacaatagccatgcaaggtgaagaatgtcaccaactcagaaacccttcttcattgacgtgtccctcactcactctcctctcttcactataaatcgccactcttcgtgttctccacttcaccaactccttcaaacttattaacactttccttagttcaatatggggaagcccttcttcactctctctctttcttccctttgcttgctactcttgtcgagttgctattacctccagcaagttcaacgagtgccaactcaacaacctcaacgcgttggaacccgaccaccgcgttgagtccgaaggtggtcttattgaaacatggaactctcaacaccctgagctgcaatgcgccggtgtcactgtttccaaacgcaccctcaaccgcaacggcctccacttgccatcttactcaccttatcccccaaatgatcattgtcgttcaaggtgcgtaatattagtaagaagtatttatcagcttaacgtgataacaataatagtaatatgaaatatttattaaatttttataattaatctctgctagaaaatttgattaatcatttttagtagaatttgtttttc

SEQ ID NO: 4069 - DNA, 633 bp, Artificial
  Mutations within GlyA3B4 introduced by GmGlyA3B4_T02TALE nuclease
gttcatgtacggttgcagatataaacgaagcatagcttatgtatgaggtgtaacaaaattggaaacaatagccatgcaaggtgaagaatgtcaccaactcagaaacccttcttcattgacgtgtccctcactcactctcctctcttcactataaatcgccactcttcgtgttctccacttcaccaactccttcaaacttattaacactttccttagttcaatatggggaagcccttcttcactctctctctttcttccctttgcttgctactcttgtcgagtgcatcttgaaaatttgtttttatatgttcagtgtatgatcctagaagaaattctttataatgactacttgaattaattgtgtggatgatacgtatcgatgtgttttaataaatataaattatacattacctccagcaagttcaacgagtgccaactcaacaacctcaacgcgttggaacccgaccaccgcgttgagtccgaaggtggtcttattgaaacatggaactctcaacaccctgagctgcaatgcgccggtgtcactgtttccaaacgcaccctcaaccgcaacggcctccacttgccattcttactcaccttatccccaaaatgatcattgtcgttcaaggtgcg

SEQ ID NO: 4070 - DNA, 500 bp, Artificial; identical to SEQ ID NO: 1735
  Mutations within GlyA3B4 introduced by GmGlyA3B4_T02TALE nuclease

SEQ ID NO: 4071 - DNA, 666 bp, Artificial
  Mutations within GlyA3B4 introduced by GmGlyA3B4_T02TALE nuclease
gttcatgtacggttgcagatcataaacgaagcatagcttatgtatgaggtgtaacaaaattggaaacaatagccatgcaaggtgaagaatgtcaccaactcagaaacccttcttcattgacgtgtccctcactcactctcctctcttcactataaatcgccactcttcgtgttctccacttcaccaactccttcaaacttattaacactttccttagttcaatatggggaagcccttcttcactctctctctttcttccctttgcttgctactcttgtcgagtgcatgctattacctccagcaagttcaacgagtgccaactcaacaacctcaacgcgttggaacccgaccaccgcgttgagtccgaaggtggtcttattgaaacatggaactctcaacaccctgagctgcaatgcgccggtgtcactgtttccaaacgcaccctcaaccgcaacggcctccacttgccatcttactcaccttatccccaaatgatcattgtcgttcaaggtgcgtaatattagtaagaagtatttatcagcttaacgtgataacaataatagtaatatgaaatatttattaaatttttataattaatctctgctagaaaatttgattaatcattttagtagaatttgtttttctcaactaggttttaaaacacca

SEQ ID NO: 4072 - DNA, 660 bp, Artificial
  Mutations within GlyA3B4 introduced by GmGlyA3B4_T02TALE nuclease
gttcatgtacggttgcagatataaacgaagcatagcttatgtatgaggtgtaacaaaattggaaacaatagccatgcaaggtgaagaatgtcaccaactcagaaacccttcttcattgacgtgtccctcactcactctcctctcttcactataaaatcgccactcttcgtgttctccacttcaccaactccttcaaacttattaacactttccttagttcaatatggggaagcccttcttcactctctctctttcttccctttgcttgctactcttgtcgagtgcatgctattacctccagcaagttcaacgagtgccaactcaacaacctcaacgcgttggaacccgaccaccgcgttgagtccgaaggtggtcttattgaaacatggaactctcaacaccctgagctgcaatgcgccggtgtcactgtttccaaacgcaccctcaaccgcaacggcctccacttgccatcttactcaccttatccccaaatgatcattgtcgttcaaggtgcgtaatattagtaagaagtatttatcagcttaacgtgataacaatatagtaatatgaaatatttattaaatttttataattaatctctgctagaaaatttgattaatcattttagtagaatttgtttttctcaactaggtttttaaa

SEQ ID NO: 4073 - DNA, 625 bp, Artificial
  Mutations within GlyA3B4 introduced by GmGlyA3B4_T02TALE nuclease
gttcatgtacggttgcagatataaacgaagcatagcttatgtatgaggtgtaacaaaattggaaacaatagccatgcaaggtgaagaatgtcaccaactcagaaacccttcttcattgacgtgtccctcactcactctcctctcttcactataaatcgccactcttcgtgttctccacttcaccaactccttcaaacttattaacactttccttagttcaatatggggaagcccttcttcactctctctctttcttccctttgcttgctactcttgtcgagtgcatgcttttttcccccacttttttccttcttatcatcttcttatttactaccatacaaagctattacctccagcaagttcaacgagtgccaactcaacaacctcaacgcgttggaacccgaccaccgcgttgagtccgaaggtggtcttattgaaacatggaactctcaacaccctgagctgcaatgcgccggtgtcactgtttccaaacgcaccctcaaccgcaacggcctccacttgccatcttactcaccttatccccaaatgatcattgtcgttcaaggtgcgtaatattagtaagaagtatttatcagcttaacgtgataacaataatagtaatatg

SEQ ID NO: 4074 - DNA, 666 bp, Artificial
  Mutations within GlyA3B4 introduced by GmGlyA3B4_T02TALE nuclease
gttcatgtacggttgcagatataaacgaagcatagcttatgtatgaggtgtaacaaaattggaaacaatagccatgcaaggtgaagaatgtcaccaactcagaaacccttcttcattgacgtgtccctcactcactctcctctcttcactataaatcgccactcttcgtgttctccacttcaccaactccttcaaacttattaacactttccttagttcaatatggggaagcccttcttcactctctctctttcttccctttgcttgctactcttgtcgagtgcattgctattacctccagcaagttcaacgagtgccaactcaacaacctcaacgcgttggaacccgaccaccgcgttgagtccgaaggtggtcttattgaaacatggaactctcaacaccctgagctgcaatgcgccggtgtcactgtttccaaacgcaccctcaaccgcaacggcctccacttgccatcttactcaccttatccccaaatgatcattgtcgttcaaggtgcgtaatattagtaagagtatttatcagcttaacgtgataacaataatagtaatatgaaatatttattaaatttttataattaatctctgctagaaaatttgattaatcattttagtagaatttgtttttctcaactaggtttttaaaacacca

SEQ ID NO: 4075 - DNA, 655 bp, Artificial
  Mutations within GlyA3B4 introduced by GmGlyA3B4_T02TALE nuclease
gttcatgtacggttgcagatataaacgaagcatagcttatgtatgaggtgtaacaaaattggaaacaatagccatgcaaggtgaagaatgtcaccaactcagaaaccccttcttcattgacgtgtcccctcactcactctcctctcttcactataaatcgccactcttcgtgttctccacttcaccaactccttcaaacttattaacactttccttagttcaatatggggaagcccttcttcactctctctctttcttccctttgcttgctactcttgtcgagtgcatattacctccagcaagttcaacgagtgccaactcaacaacctcaacgcgttggaacccgaccaccgcgttgagtccgaaggtggtcttattgaaacatggaactctcaacaccctgagctgcaatgcgccggtgtcactgtttccaaacgcaccctcaaccgcaacggcctccacttgccatcttactcacattatcccccaaatgatcattgtcgttcaaggtgcgtaatattagtaagaagtatttatcagcttaacgtgataacaataatagtaatatgaaatatttattaaatttttataattaatctctgctagaaaatttgattaatcattttagtagaatttgttttctcaactaggtttt

SEQ ID NO: 4076 - DNA, 640 bp, Artificial
  Mutations within GlyA3B4 introduced by GmGlyA3B4_T02TALE nuclease
gttcatgtacggttgcagatataaacgaagcatagcttatgtatgaggtgtaacaaaattggaaacaatagccatgcaaggtgaagaatgtcaccaactcagaaacccttcttcattgacgtgtccctcactcactctcctctcttcactataaatcgccactcttcgtgttctccacttcaccaactccttcaaacttattaacactttccttagttcaatatgggggaagcccttcttcactctctctctttcttccctttgcttgctactctctattacctccagcaagttcaacgagtgccaactcaacaacctcaacgcgttggaacccgaccaccgcgttgagtccgaaggtggtcttattgaaacatggaactctcaacaccctgagctgcatgcgccggtgtcactgttccaaacgcaccctcaaccgcaacggcctccacttgccatcttactcaccttatccccaaatgatcattgtcgttcaaggtgcgtaatattagtaagaagtatttatcagcttaacgtgataacaataatagtaatatgaaatatttattaaattttttataattaatctctgctagaaaatttgattaatctttttagtagaatttgttttttctcaactagg

SEQ ID NO: 4077 - DNA, 659 bp, Artificial; identical to SEQ ID NO: 1853
  Mutations within GlyA3B4 introduced by GmGlyA3B4_T02TALE nuclease

SEQ ID NO: 4078 - DNA, 640 bp, Artificial; identical to SEQ ID NO: 3005
  Mutations within GlyA3B4 introduced by GmGlyA3B4_T02TALE nuclease

SEQ ID NO: 4079 - DNA, 636 bp, Artificial; identical to SEQ ID NO: 1885
  Mutations within GlyA3B4 introduced by GmGlyA3B4_T02TALE nuclease

SEQ ID NO: 4080 - DNA, 601 bp, Artificial; identical to SEQ ID NO: 1930
  Mutations within GlyA3B4 introduced by GmGlyA3B4_T02TALE nuclease

SEQ ID NO: 4081 - DNA, 404 bp, Artificial
  Mutations within GlyA3B4 introduced by GmGlyA3B4_T02TALE nuclease
  misc_feature (42): n is a or c or t or g
gttcatgtacggttgcagatataaacgaagcatagcttatgnatgaggtgtaacaaaattggaaacaatagccatgcaaggtgaagaatgtcaccaactcagaaaccccttcttcattgacgtgtccctcactcactctcctctcttcactataaatcgccactcttcgtgttctccacttcaccaactccttcaaacttattaacactttccttagttcaatatggggaagcccttcttcactctctctctttcttccctttgcttgctactcttgtcgagtgcatgctccagcgcctgcttgccgccatcgtggccattgccggtgctgtgcccaggcccacggcttgaccccccagcaggtggtggccattacctccagcaagttcaacgagtgccaactc

SEQ ID NO: 4082 - DNA, 662 bp, Artificial
  Mutations within GlyA3B4 introduced by GmGlyA3B4_T02TALE nuclease
gttcatgtacggttgcagatataaacgaagcatagcttatgtatgaggtgtaacaaaattggaaacaatagccatgcaaggtgaagaatgtcaccaactcagaaaccccttcttcattgacgtgtccctcactcactctccttctcttcactataaatcgccactcttcgtgttctccacttcaccaactccttcaaacttattaacactttccttagttcaatatgggggaagcccttcttcactctctctctttcttccctttgcttgctactcttgtcgagtgcatacctccagcaagttcaacgagtgccaactcaacaacctcaacgcgttggaacccgaccaccgcgttgagtccgaaggtggtcttattgaaacatggaactctcaacaccctgagctgcaatgcgccggtgtcactgtttccaaacgcaccctcaaccgcaacggcctccacttgccatcttactcaccttatccccaaatgatcattgtcgttcaaggtgcgtaatattagtaagaagtatttatcagcttaacgtgataacaataatagtaatatgaaatatttattaaatttttataattaatctctgctagaaaatttgattaatcattttagtagaatttgtttttctcaactaggttttaaaacacca

SEQ ID NO: 4083 - DNA, 620 bp, Artificial
  Mutations within GlyA3B4 introduced by GmGlyA3B4_T02TALE nuclease
gttcatgtacggttgcagatataaacgaagcatagcttatgtatgaggtgtaacaaaattggaaacaatagccatgcaaggtgaagaatgtcaccaactcagaaacccttcttcattgacgtgtccctcactcactctcctctcttcactataaatcgccactcttcgtgttctccacttcaccaactccttcaaacttattaacactttccttagttcaatatggggaagcccttcttcactctctctctttcttccctttgcttgctactcttgtcgagtgcatgctccagcaagttcaacgagtgccaactcaacaacctcaacgcgttggaacccgaccaccgcgttgagtccgaaggtggtcttattgaaacatggaactctcaacaccctgagctgcaatgcgccggtgtcactgtttccaaaacgcaccctcaaccgcaacggcctccacttgccatcttaactcaccttatccccaaatgatcattgtcgttcaaggtgcgtaatattagtaagaagtatttatcagcttaacgtgataacaataatagtaatatgaaaatatttattaaaatttttataattaaatctctgctagaaaatttgattaatca

SEQ ID NO: 4084 - DNA, 535 bp, Artificial
  Mutations within GlyA3B4 introduced by GmGlyA3B4_T02TALE nuclease
gttcatgtacggttgcagatataaacgaagcatagcttatgtatgaggtgtaacaaaattggaaacaatagccatgcaaggtgaagaatgtcaccaactcagaaaccccttcttcattgacgtgtccctcactcactctcctctcttcactataaaatcgccactcttcgtgttctccacttcaccaaactccttcaaacttattaacactttccttagttcaatatggggaaagcccttcttcactctctctctttcttccctttgctattacctccagcaagttcaacgagtgccaactcaacaacctcaacgcgttggaacccgaccaccgcgttgagtccgaaggtggtcttattgaaacatggaactctcaacaccctgagctgcaatgcgccggtgtcactgttttccaaaacgcaccctcaaccgcaacggcctccacttgccatcttactcaccttatccccaaatgatcattgtcgttcaaaggtgcgtaaatattagtaagaagtatttatcagcttaacgtgat

SEQ ID NO: 4085 - DNA, 658 bp, Artificial
  Mutations within GlyA3B4 introduced by GmGlyA3B4_T02TALE nuclease
gttcatgtacggttgcagatataaacgaagcatagcttatgtatgaggtgtaacaaaattggaaacaatagccatgcaaggtgaagaatgtcaccaactcagaaacccttcttcattgacgtgtccctcactcactctcctctcttcactataaatcgccactcttcgtgttctccacttcaccaactccttcaaacttattaacactttccttagttcaatatggggaagcccttcttcactctctctctttcttccctttgcttgctactcttgtcgagttattacctccagcaagttcaacgagtgccaactcaacaacctcaacgcgttggaacccgaccaccgcgttgagtccgaaggtggtcttattgaaacatggaactctcaacaccctgagctgcaatgcgccggtgtcactgtttccaaacgcaccctcaaccgcaacggcctccacttgccatcttactcaccttatccccaaatgatcattgtcgttcaaggtgcgtaatattagtaagaagtatttatcagcttaacgtgataacaataatagtaatatgaaatatttattaaatttttataattaatctctgctagaaaatttgattaatcattttagtagaatttgttttctcaactaggttttaaaacacca

SEQ ID NO: 4086 - DNA, 632 bp, Artificial
  Mutations within GlyA3B4 introduced by GmGlyA3B4_T02TALE nuclease
gttcatgtacggttgcagatataaacgaagcatagcttatgtatgaggtgtaacaaaattggaaacaatagccatgcaaggtgaagaatgtcaccaactcagaaacccttcttcattgacgtgtccctcactcactctcctctcttcactataaatcgccactcttcgtgttctccacttcaccaactccttcaaacttattaacactttccttagttcaatatggggaagcccttcttcactctctctctttcttccctttgctattacctccagcaagttcaacgagtgccaactcaacaacctcaacgcgttggaacccgaccaccgcgttgagtccgaaggtggtcttattgaaacatggaactctcaacaccctgagctgcaatgcgccggtgtcactgtttccaaacgcaccctcaaccgcaacggcctccacttgccatcttactcaccttatccccaaatgatcattgtcgttcaaggtgcgtaatattagtaagaagtatttatcagcttaacgtgataacaataatagtaatatgaaatatttattaaattttttataaattaatctctgctagaaaatttgattaatcatttttagtagaatttgttttttctcaactagg

SEQ ID NO: 4087 - DNA, 669 bp, Artificial; identical to SEQ ID NO: 3110
  Mutations within GlyA3B4 introduced by GmGlyA3B4_T02TALE nuclease

SEQ ID NO: 4088 - DNA, 635 bp, Artificial
  Mutations within GlyA3B4 introduced by GmGlyA3B4_T02TALE nuclease
gttcatgtacggttgcagatataaacgaagcatagcttatgtatgaggtgtaacaaaattggaaacaatagccatgcaaggtgaagaatgtcaccaactcagaaacccttcttcattgacgtgtccctcactcactctcctctcttcactataaatcgccactcttcgtgttctccacttcaccaactccttcaaacttattaacactttccttagttcaatatggggaagcccttcttcactctctctctttcttccctttgcttgctactcttgtcgagtgcatgtttacctccagcaagttcaacgagtgccaactcaacaacctcaacgcgttggaacccgaccaccgcgttgagtccgaaggtggtcttattgaaacatggaactctcaacaccctgagctgcaatgcgccggtgtcactgtttccaaacgcaccctcaaccgcaacggcctccacttgccatcttactcaccttatccccaaatgatcattgtcgttcaaggtgcgtaatattagtaagaagtatttatcagcttaacgtgataacaataatagtaatatgaaatatttattaaatttttataattaatctctgctagaaaatttgattaatcattttagtagaatttg

SEQ ID NO: 4089 - DNA, 702 bp, Artificial
  Mutations within GlyA3B4 introduced by GmGlyA3B4_T02TALE nuclease
gttcatgtacggttgcagatataaacgaagcatagcttatgtatgaggtgtaacaaaattggaaacaatagccatgcaaggtgaagaatgtcaccaactcagaaacccttcttcattgacgtgtccctcactcactctcctctcttcactataaatcgccactcttcgtgttctccacttcaccaactccttcaaacttattaacactttccttagttcaatatggggaagcccttcttcactctctctctttcttccctttgcttgctactcttgtcgagtgcatccagcggctgttgccggtgctgtgccaggcccacggcttgacccccccagcaggtggtggcccatcgcttttgctattacctccagcaagttcaacgagtgccactcaacaacctcaacgcgttggaacccgaccaccgcgttgagtccgaaggtggtcttattgaaacatggaactctcaacaccctgagctgcaatgcgccggtgtcactgtttccaaacgcaccctcaaccgcaacggcctccacttgccatcttactcaccttatccccaaatgatcattgtcgttcaaggtgcgtaatattagtaagaagtatttatcagcttaacgtgataacaataatagtaatatgaaatatttattaaattttttataattaatctctgctagaaaaatttgattaatcatttttag

SEQ ID NO: 4090 - DNA, 663 bp, Artificial
  Mutations within GlyA3B4 introduced by GmGlyA3B4_T02TALE nuclease
  misc_feature (528): n is a or c or t or g
gttcatgtacggttgcagatataaacgaagcatagcttatgtatgaggtgtaacaaaattggaaacaatagccatgcaaggtgaagaatgtcaccaactcagaaaccccttcttcattgacgtgtccctcactcactctcctctcttcactataaatcgccactcttcgtgttctccacttcaccaactccttcaaacttattaacactttccttagttcaatatggggaagcccttcttcactctctctctttcttccctttgcttgctactcttgtcgacttgctattacctccagcaagttcaacgagtgccaactcaacaacctcaacgcgttggaacccgaccaccgcgttgagtccgaaggtggtcttattgaaacatggaactctcaacaccctgagctgcaatgcgccggtgtcactgtttccaaacgcaccctcaaccgcaacggcctccacttgccatcttactcaccttatccccaaatgatcattgtcgttcaaggtgcgtaatattagtaagagnatttatcagcttaacgtgataacaataatagtaatatgaaatatttattaaatttttataattaatctctgctagaaaatttgattaatcattttagtagaatttgtttttctcaactaggtttttaaaacacca

SEQ ID NO: 4091 - DNA, 624 bp, Artificial
  Mutations within GlyA3B4 introduced by GmGlyA3B4_T02TALE nuclease
  misc_feature (557): n is a or c or t or g
gttcatgtacggttgcagatataaacgaagcatagcttatgtatgaggtgtaacaaaattggaaacaatagccatgcaaggtgaagaatgtcaccaactcagaaaccccttcttcattgacgtgtccctcactcactctcctctcttcactataaatcgccactcttcgtgttctccacttcaccaactccttcaaacttattaacactttccttagttcaatatggggaagcccttcttcactctctctctttcttccctttgcttgctactcttgtcgagtgcctccagcaagttcaacgagtgccaactcaacaacctcaacgcgttggaacccgaccaccgcgttgagtccgaaggtggtcttattgaaacatggaactctcaacaccctgagctgcaatgcgccggtgtcactgtttccaacgcaccctcaaccgcaacggcctccacttgccatcttactcaccttatccccaaatgatcattgtcgttcaaggtgcgtaatattagtaagaagtatttatcagcttaacgtgataacaataatagtaatntgaaatatttattaaattttttataattaatctctgctagaaaatttgattaatctttttagtagaa

SEQ ID NO: 4092 - DNA, 665 bp, Artificial
  Mutations within GlyA3B4 introduced by GmGlyA3B4_T02TALE nuclease
gttcatgtacggttgcagatataaacgaagcatagcttatgtatgaggtgtaacaaaattggaaacaatagccatgcaaggtgaagaatgtcaccaactcagaaacccttcttcattgacgtgtccctcactcactctcctctcttcactataaatcgccactcttcgtgttctccacttcaccaactccttcaaacttattaacactttccttagttcaatatggggaagcccttcttcactctctctctttcttccctttgcttgctactcttgtcgagtgcactattacctccagcaagttcaacgagtgccaactcaacaacctcaacgcgttggaacccgaccaccgcgttgagtccgaaggtggtcttattgaaacatggaactctcaacaccctgagctgcaatgcgccggtgtcactgtttccaaacgcaccctcaaccgcaacggcctccacttgccatcttactcaccttatccccaaatgatcattgtcgttcaaggtgcgtaatattagtaagaagtatttatcagcttaacgtgataacaataatagtaatatgaaaatatttattaaatttttataattaatctctgctagaaaatttgattaatcattttagtagaatttgtttttctcaactaggtttttaaaacacca

SEQ ID NO: 4093 - DNA, 668 bp, Artificial
  Mutations within GlyA3B4 introduced by GmGlyA3B4_T02TALE nuclease
  misc_feature (533): n is a or c or t or g
gttcatgtacggttgcagatataaacgaagcatagcttatgtatgaggtgtaacaaaaattggaaacaatagccatgcaaggtgaagaatgtcaccaactcagaaacccttcttcattgacgtgtccctcactcactctcctctcttcactataaatcgccactcttcgtgttctccacttcaccaaactccttcaaacttattaacactttccttagttcaatatggggaagcccttcttcactctctctctttcttccctttgcttgctactcttgtcgagtgcatgctattacctccagcaagttcaacgagtgccaactcaacaacctcaacgcgttggaacccgaccaccgcgttgagtccgaaggtggtcttattgaaacatggaactctcaacaccctgagctgcaatgcgccggtgtcactgtttccaaacgcaccctcaaccgcaacggcctccacttgccatcttactcaccttatccccaaatgatcattgtcgttcaaggtgcgtaatattagtaagaagnatttatcagcttaacgtgataacaataatagtaatatgaaatatttattaaatttttataattaatctctgctagaaaatttgattaatcattttagtagaatttgtttttctcaactaggtttttaaaacacca

SEQ ID NO: 4094 - DNA, 667 bp, Artificial; identical to SEQ ID NO: 2824
  Mutations within GlyA3B4 introduced by GmGlyA3B4_T02TALE nuclease
  misc_feature (530): n is a or c or t or g

SEQ ID NO: 4095 - DNA, 666 bp, Artificial
  Mutations within GlyA3B4 introduced by GmGlyA3B4_T02TALE nuclease
  misc_feature (530): n is a or c or t or g
gttcatgtacggttgcagatataaacgaagcatagcttatgtatgaggtgtaacaaaattggaaacaatagccatgcaaggtgaagaatgtcaccaactcagaaacccttcttcattgacgtgtcccctcactcactctcctctcttcactataaatcgccactcttcgtgttctccacttcaccaactccttcaaacttattaacactttccttagttcaatatggggaagcccttcttcactctctctctttcttccctttgcttgctactcttgtcgagtgcatgctattacctccagcaagttcaacgagtgccaactcaacaacctcaacgcgttggaacccgaccaccgcgttgagtccgaaggtggtcttattgaaacatggaactctcaacaccctgagctgcaatgcgccggtgtcactgtttccaaagcaccctcaaccgcaacggcctccacttgccatcttactcaccttatccccaaatgatcattgtcgttcaaggtgcgtaatattagtaagagnatttatcagcttaacgtgataacaatatagtaatatgaaatatttattaaatttttataattaatctctgctagaaaatttgattaatcattttagtagaatttgtttttctcaactaggtttttaaaacaccaca

SEQ ID NO: 4096 - DNA, 595 bp, Artificial
  Mutations within GlyA3B4 introduced by GmGlyA3B4_T02TALE nuclease
gttcatgtacggttgcagatataaacgaagcaatagcttatgtatgaggtgtaacaaaattggaaacaatagccatgcaaggtgaagaatgtcaccaactcagaaacccttcttcattgacgtgtccctcactcactctcctctcttcactataaatcgccactcttcgtgttctccacttcaccaactccttcaaacttattaacactttccttagttcaatatggggaagcccttcttcactctctctctttcttccctttgcttgctactcttgtctattacctccagcaagttcaacgagtgccaactcaacaacctcaacgcgttggaacccgaccaccgcgttgagtccgaaggtggtcttattgaaacatggaactctcaacaccctgagctgcaatgcgccggtgtcactgtttccaacgcacctcaaccgcaacggcctccacttgccatcttactcaccttatcccccaaatgatcattgtcgttcaaggtgcgtaatattagtaagaagtatttatcagctttaacgtgataacaataatagtaatatgaaatatttattaaattttttataattaatctctgc

SEQ ID NO: 4097 - DNA, 662 bp, Artificial; identical to SEQ ID NO: 3318
  Mutations within GlyA3B4 introduced by GmGlyA3B4_T02TALE nuclease

SEQ ID NO: 4098 - DNA, 563 bp, Artificial
  Mutations within GlyA3B4 introduced by GmGlyA3B4_T02TALE nuclease
gttcatgtacggttgcagatataaacgaagcatagcttatgtatgaggtgtaacaaaattggaaacaatagccatgcaaggtgaagaatgtcaccaactcagaaacccttcttcattgacgtgtccctcactcactctcctctcttcactataaatcgccactcttcgtgttctccacttcaccaactccttcaaacttattaacactttccttagttcaatatggggaagcccttcttcactctctctctttcttccctttgagtccgaaggtggtcttattgaaacatggaactctcaacaccctgagctgcaatgcgccggtgtcactgtttccaaacgcaccctcaaccgcaacggcctccacttgccatcttactcaccttatccccaaatgatcattgtcgttcaaggtgcgtaatattagtaagaagtatttatcagcttaacgtgataacaataatagtaatatgaaatatttattaaattttttataattaatctctgctagaaaatttgattaaatcatttttagtagaatttgtttttctcaactaggtttt

SEQ ID NO: 4099 - DNA, 655 bp, Artificial
  Mutations within GlyA3B4 introduced by GmGlyA3B4_T02TALE nuclease
  misc_feature (530): n is a or c or t or g
gttcatgtacggttgcagatataaacgaagcatagcttatgtatgaggtgtaacaaaattggaaacaatagccatgcaaggtgaagaatgtcaccaactcagaaacccttcttcattgacgtgtccctcactcactctcctctcttcactataaatcgccactcttcgtgttctccacttcaccaactccttcaaacttattaacactttccttagttcaatatggggaagcccttcttcactctctctctttcttccctttgcttgctactcttgtcgagtgcttgctattacctccagcaagttcaacgagtgccaactcaacaacctcaacgcgttggaacccgaccaccgcgttgagtccgaaggtggtcttattgaaacatggaactctcaacaccctgagctgcaatgcgccggtgtcactgtttccaaacgcaccctcaaccgcaacggcctccacttgccatcttactcaccttatccccaaatgatcattgtcgttcaaggtgcgtaatattagtaagagnatttatcagcttaacgtgataacaatatagtaatatgaaatatttattaaatttttataattaatctctgctagaaaatttgattaatcattttagtagaatttgtttttctcaactaggttttt

SEQ ID NO: 4100 - DNA, 665 bp, Artificial; identical to SEQ ID NO: 2083
  Mutations within GlyA3B4 introduced by GmGlyA3B4_T02TALE nuclease

SEQ ID NO: 4101 - DNA, 481 bp, Artificial
  Mutations within GlyA3B4 introduced by GmGlyA3B4_T02TALE nuclease
gttcatgtacggttgcagatataaacgaagcatagcttatgtatgaggtgtaacaaaattggaaacaatagccatgcaaggtgaagaatgtcaccaactcagaaacccttcttcattgacgtgtccctcactcactctcctctcttcactataaatcgccactcttcgtgttctccacttcaccaactcaacaacctcaacgcgttggaacccgaccaccgcgttgagtccgaaggtggtcttattgaaacatggaactctcaacaccctgagctgcaatgcgccggtgtcactgtttccaaacgcaccctcaaccgcaacggcctccacttgccatcttactcaccttatccccaaatgatcattgtcgttcaaggtgcgtaatattagtaagaagtattttatcagcttaacgtgataaccaataatagtaatatgaaaatatttattaaattttttataattaatctctgctagaaaa

SEQ ID NO: 4102 - DNA, 667 bp, Artificial; identical to SEQ ID NO: 4005
  Mutations within GlyA3B4 introduced by GmGlyA3B4_T02TALE nuclease
  misc_feature (531): n is a or c or t or g

SEQ ID NO: 4103 - DNA, 634 bp, Artificial
  Mutations within GlyA3B4 introduced by GmGlyA3B4_T02TALE nuclease
gttcatgtacggttgcagatataaacgaagcatagcttatgtatgaggtgtaacaaaattggaaacaatagccatgcaaggtgaagaatgtcaccaactcagaaacccttcttcattgacgtgtccctcactcactctcctctcttcactataaatcgccactcttcgtgttctccacttcaccaactccttcaaacttattaacactttccttagttcaatatggggaagcccttcttcactctctctctttcttccctttgcttgctactcttgtcgagtgctattacctccagcaagttcaacgagtgccaactcaacaacctcaacgcgttggaacccgaccaccgcgttgagtccgaaggtggtcttattgaaacatggaactctcaacaccctgagctgcaatgcgccggtgtcactgtttccaaacgcaccctcaaccgcaacggcctccacttgccatcttactcaccttatccccaaatgatcattgtcgttcaaggtgcgtaatattagtaagaagtatttatcagcttaacgtgataacaataatagtaatatgaaatatttattaaatttttataattaatctctgctagaaaatttgattaatcatttttagtagaatttg

SEQ ID NO: 4104 - DNA, 691 bp, Artificial
  Mutations within GlyA3B4 introduced by GmGlyA3B4_T02TALE nuclease
gttcatgtacggttgcagatataaacgaagcatagcttatgtatgaggtgtaacaaaattggaaacaatagccatgcaaggtgaagaatgtcaccaactcagaaacccttcttcattgacgtgtccctcactcactctcctctcttcactataaatcgccactcttcgtgttctccacttcaccaactccttcaaacttattaacactttccttagttcaatatggggaagcccttcttcactctctctctttcttccctttgcttgctactcttgtcgagtgcatgcgcctgcttgccaccattattgctggcgatggccaccacctgctgggggtcaagccgtgggcctggcacagcaccggcaacagccgctgacctccagcaagttcaacgagtgccaactcaacaacctcaacgcgttggaacccgaccaccgcgttgagtccgaaggtggtcttattgaaacatggaactctcaacaccctgagctgcaatgcgccggtgtcactgtttccaaacgcaccctcaaccgcaacggcctccacttgccatcttactcaccttatccccaaatgatcattgtcgttcaaggtgcgtaatattagtaagaagtatttatcagcttaacgtgataacaataatagtaatatgaaaatatttattaaattttttataattaatctctgcta

SEQ ID NO: 4105 - DNA, 669 bp, Artificial
  Mutations within GlyA3B4 introduced by GmGlyA3B4_T02TALE nuclease
gttcatgtacggttgcagatataaacgaagcatagcttatgtatgaggtgtaacaaaattggaaacaatagccatgcaaggtgaagaatgtcaccaactcagaaaccccttcttcattgacgtgtccctcactcactctcctctcttcactataaatcgccactcttcgtgttctccacttcaccaactccttcaaacttattaacactttccttagttcaatatggggaagcccttcttcactctctctctttcttccctttgcttgctactcttgtcgagtgctgctattacctccagcaagttcaacgagtgccaactcaacaacctcaacgcgttggaacccgaccaccgcgttgagtccgaaggtggtcttattgaaacatggaactctcaacaccctgagctgcaatgcgccggtgtcactgtttccaaacgcaccctcaaccgcaacggcctccacttgccatcttactcaccttatccccaaatgatcattgtcgttcaaggtgcgtaatattagtaagaagtatttatcagcttaacgtgataacaataatagtaatatgaaaatatttattaaatttttataattaatctctgctagaaaatttgattaatcattttagtagaatttgtttttctcaactaggtttttaaaacaccaca

SEQ ID NO: 4106 - DNA, 667 bp, Artificial
  Mutations within GlyA3B4 introduced by GmGlyA3B4_T02TALE nuclease
gttcatgtacggttgcagatataaacgaagcatagcttatgtatgaggtgtaacaaaattggaaacaatagccatgcaaggtgaagaatgtcaccaactcagaaaccccttcttcattgacgtgtccctcactcactctcctctcttcactataaatcgccactcttcgtgttctccacttcaccaactccttcaaacttattaacactttccttagttcaatatgggggaagcccttcttcactctctctctttcttccctttgcttgctactcttgtcgagtgcatctattacctccagcaagttcaacgagtgccaactcaacaacctcaacgcgttggaacccgaccaccgcgttgagtccgaaggtggtcttattgaaacatggaactctcaacaccctgagctgcaatgcgccggtgtcactgtttccaaacgcaccctcaaccgcaacggcctccacttgccatcttactcaccttatccccaaatgatcattgtcgttcaaggtgcgtaatattagtaagaagtatttatcagcttaacgtgataacaataatagtaatatgaaatatttattaaatttttataattaatctctgctagaaaatttgattaatcattttagtagaatttgtttttctcaactaggtttttaaaacacca

SEQ ID NO: 4107 - DNA, 662 bp, Artificial; identical to SEQ ID NO: 2209
  Mutations within GlyA3B4 introduced by GmGlyA3B4_T02TALE nuclease

SEQ ID NO: 4108 - DNA, 658 bp, Artificial; identical to SEQ ID NO: 2344
  Mutations within GlyA3B4 introduced by GmGlyA3B4_T02TALE nuclease

SEQ ID NO: 4109 - DNA, 654 bp, Artificial
  Mutations within GlyA3B4 introduced by GmGlyA3B4_T02TALE nuclease
  misc_feature (529): n is a or c or t or g
gttcatgtacggttgcagatataaacgaagcatagcttatgtatgaggtgtaacaaaattggaaacaatagccatgcaaggtgaagaatgtcaccaactcagaaacccttcttcattgacgtgtccctcactcactctcctctcttcactataaatcgccactcttcgtgttctccacttcaccaactccttcaaacttattaacactttccttagttcaatatgggggaagcccttcttcactctctctctttcttccctttgcttgctactcttgtcgagtgcgctattacctccagcaagttcaacgagtgccaactcaacaacctcaacgcgttggaacccgaccaccgcgttgagtccgaaggtggtcttattgaaacatggaactctcaacaccctgagctgcaatgcgccggtgtcactgtttccaaacgcaccctcaaccgcaacggcctccacttgccatcttactcaccttatccccaaatgatcattgtcgttcaaggtgcgtaatattagtaagagnatttatcagcttaacgtgataacaatatagtaatatgaaatatttattaaatttttataattaatctctgctagaaaatttgattaatcattttagtagaatttgtttttctcaactaggttttt

SEQ ID NO: 4110 - DNA, 658 bp, Artificial
  Mutations within GlyA3B4 introduced by GmGlyA3B4_T02TALE nuclease
gttcatgtacggttgcagatataaacgaagcatagcttatgtatgaggtgtaacaaaaattggaaacaatagccatgcaaggtgaagaatgtcaccaactcagaaacccttcttcattgacgtgtccctcactcactctcctctcttcactataaatcgccactcttcgtgttctccacttcaccaactccttcaaacttattaacactttccttagttcaatatggggaagcccttcttcactctctctctttcttccctttgcttgctactcttgtcgagtgcattgctattacctccagcaagttcaacgagtgccaactcaacaacctcaacgcgttggaacccgaccaccgcgttgagtccgaaggtggtcttattgaaacatggaactctcaacaccctgagctgcaatgcgccggtgtcactgtttccaaacgcaccctcaaccgcaacggcctccacttgccatcttactcaccttatccccaaatgatcattgtcgttcaaggtgcgtaatattagtaagagtatttatcagcttaacgtgataacaataatagtaatatgaaatatttattaaatttttataattaatctctgctagaaaatttgattaatcattttagtagaatttgtttttctcaactaggttttt

SEQ ID NO: 4111 - DNA, 581 bp, Artificial
  Mutations within GlyA3B4 introduced by GmGlyA3B4_T02TALE nuclease
  misc_feature (531): n is a or c or t or g
gttcatgtacggttgcagatataaacgaagcatagcttatgtatgaggtgtaacaaaattggaaacaatagccatgcaaggtgaagaatgtcaccaactcagaaacccttcttcattgacgtgtccctcactcactctcctctcttcactataaatcgccactcttcgtgttctccacttcaccaactccttcaaacttattaacactttccttagttcaatatggggaagcccttcttcactctctctctttcttccctttgcttgctactctaaagtatatatgctattacctccagcaagttcaacgagtgccaactcaacaacctcaacgcgttggaacccgaccaccgcgttgagtccgaaggtggtcttattgaaacatggaactctcaacaccctgagctgcaatgcgccggtgtcactgtttccaaacgcaccctcaaccgcaacggcctccacttgccatcttactcaccttatcccccaaatgatcattgtcgttcaaggtgcgtaatattagtaagaagnatttatcagcttaacgtgataacaataatagtaatatgaaaatatttatt

SEQ ID NO: 4112 - DNA, 723 bp, Artificial
  Mutations within GlyA3B4 introduced by GmGlyA3B4_T02TALE nuclease
gttcatgtacggttgcagatataaacgaagcatagcttatgtatgaggtgtaacaaaattggaaacaatagccatgcaaggtgaagaatgtcaccaactcagaaacccttcttcattgacgtgtccctcactcactctcctctcttcactataaatcgccactcttcgtgttctccacttcaccaactccttcaaacttattaacactttccttagttcaatatgggggaagcccttcttcactctctctctttcttccctttgcttgctactcttgtcgagtgcatggccaccacctgctggggggtcaagccgtgggcctggcacagcaccggcaacagccgctttgctattacctccagcaagttcaacgagtgccaactcaacaacctcaacgcgttggaacccgaccaccgcgttgagtccgaaggtggtcttattgaaacatggaactctcaacaccctgagctgcaatgcgccggtgtcactgtttccaaacgcaccctcaaccgcaacggcctccacttgccatcttactcacctttatccccaaatgatcattgtcgttcaaggtgcgtaatattagtaagaagtatttatcagcttaacgtgataacaataatagtaatatgaaatatttattaaaattttttataattaatctctgctagaaaaatttgattaatcatttttagtagaatttgtttttctcaactaggtttt

SEQ ID NO: 4113 - DNA, 525 bp, Artificial
  Mutations within GlyA3B4 introduced by GmGlyA3B4_T02TALE nuclease
gttcatgtacggttgcagatataaacgaagcatagcttatgtatgaggtgtaacaaaattggaaacaatagccatgcaaggtgaagaatgtcaccaactcagaaacccttcttcattgacgtgtccctcactcactctcctctcttcactataaatcgccactcttcgtgttctccacttcaccaactccttcaaacttattaacactttccttagttcaatatgggggaagcccttcttcactctctctctttcttccctttgcttgctactcttgtcgagtgcattatactttcctcagcaagttcaacgagtgccaactcaacaacctcaacgcgttggaacccgaccaccgcgttgagtccgaaggtggtcttattgaaacatggaactctcaacaccctgagctgcaatgcgccggtgtcactgtttccaaacgcacccctcaaccgcaacggcctccacttgccatcttactcaccttatccccaaatgatcattgtcgttcaaggtgcgtaatattag

SEQ ID NO: 4114 - DNA, 657 bp, Artificial
  Mutations within GlyA3B4 introduced by GmGlyA3B4_T02TALE nuclease
gttcatgtacggttgcagatataaacgaagcatagcttatgtatgaggtgtaacaaaattggaaacaatagccatgcaaggtgaagaatgtcaccaactcagaaacccttcttcattgacgtgtccctcactcactctcctctcttcactataaatcgccactcttcgtgttctccacttcaccaactccttcaaacttattaacactttccttagttcaatatggggaagcccttcttcactctctctctttcttccctttgcttgctactcttgtcgagttattacctccagcaagttcaacgagtgccaactcaacaacctcaacgcgttggaacccgaccaccgcgttgagtccgaaggtggtcttattgaaacatggaactctcaacaccctgagctgcaatgcgccggtgtcactgtttccaaacgcaccctcaaccgcaacggcctccacttgccatcttactcaccttatccccaaatgatcattgtcgttcaaggtgcgtaatattagtaagaagtatttatcagcttaacgtgataacaatatagtaatatgaaatatttattaaatttttataattaatctctgctagaaaatttgattaatcattttagtagaatttgttttctcaactaggttttaaaacacca

SEQ ID NO: 4115 - DNA, 633 bp, Artificial; identical to SEQ ID NO: 2030
  Mutations within GlyA3B4 introduced by GmGlyA3B4_T02TALE nuclease

SEQ ID NO: 4116 - DNA, 822 bp, Artificial
  Mutations within GlyA3B4 introduced by GmGlyA3B4_T02TALE nuclease
gttcatgtacggttgcagatataaacgaagcatagcttatgtatgaggtgtaacaaaattggaaacaatagccatgcaaggtgaagaatgtcaccaactcagaaacccttcttcattgacgtgtccctcactcactctcctctcttcactataaatcgccactcttcgtgttctccacttcaccaactccttcaaacttattaacactttccttagttcaatatggggaagcccttcttcactctctctctttcttccctttgcttgctactcttgtcgagtgcatatcgccaccacctgctggggggtcaagccgtgggcctggcacagcaccggcaacagcgcctgcaccgtctccagcgcctgcttgccaccaatattgctggcgatggccaccacctgctccggggtcaagccgtgggcctggcacagcaccggcaacagccgctggagatttgctattacctccagcaagttcaacgagtgccaactcaacaacctcaacgcgttgaaccgaccaccgcgttgagtccgaaggtggtcttattgaaacatggaactctcaacaccctgagctgcaatgcgccggtgtcactgttttccaaaacgcaccctcaaccgcaacggcctccacttgccatcttactcaccttatccccaaaatgatcattgtcgttcaaggtgcgtaatattagtaagaaagtatttatcagcttaacgtgataacaataatagtaatatgaaatattattaaaattttttataattaatctctgctagaaaaattgattaatcatttttagtagaatttgtttttctcaa

SEQ ID NO: 4117 - DNA, 621 bp, Artificial
  Mutations within GlyA3B4 introduced by GmGlyA3B4_T02TALE nuclease
gttcatgtacggttgcagatataaacgaagcatagcttatgtatgaggtgtaacaaaattggaaacaatagccatgcaaggtgaagaatgtcaccaactcagaaacccttcttcattgacgtgtccctcactcactctcctctcttcactataaatcgccactcttcgtgttctccacttcaccaactccttcaaacttattaacactttccttagttcaatatggggaagcccttcttcactctctctctttcttccctttgcttgctactcttgtcgagtgcatctattacctccagcaagttcaacgagtgccaactcaacaacctcaacgcgttggaacccgaccaccgcgttgagtccgaaggtggtcttattgaaacatggaactctcaacaccctgagctgcaatgcgccggtgtcactgtttccaaacgcaccctcaaccgcaacggcctccacttgccatcttactcaccttatccccaaatgatcattgtcgttcaaggtgcgtaatattagtaagaagtatttatcagcttaacgtgataacaataatagtaatatgaaatatttattaaatttttataattaatctctgctagaaaatttgattaatca

SEQ ID NO: 4118 - DNA, 444 bp, Artificial
  Mutations within GlyA3B4 introduced by GmGlyA3B4_T02TALE nuclease
  misc_feature (407): n is a or c or t or g
gttcatgtacggttgcagatataaacgaagcatagcttatgtatgaggtgtaacaaaattggaaacaatagccatgcaaggtgaagaatgtcaccaactcagaaacccttcttcattgacgtgtccctcactcactctcctctcttcactataaatcgccactcttcgtgttctccacttcaccaactccttcaaacttattaacactttccttagttcaatatgggggaaagcccttcttcactctctctctttcttccctttgcttgctactcttgtcgagtgcatctattacctccagcaagttcaacgagtgccaactcaacaacctcaacgcgttggaaccgaccaccgcagttgagtccgaaggtggtcttattgaaacatgggaactctcaaacacctcnagcctgcaatgcgccggtgtcactgtttccaaacgca

SEQ ID NO: 4119 - DNA, 636 bp, Artificial
  Mutations within GlyA3B4 introduced by GmGlyA3B4_T02TALE nuclease
  misc_feature (531): n is a or c or t or g
gttcatgtacggttgcagatataaacgaagcatagcttatgtatgaggtgtaacaaaattggaaacaatagccatgcaaggtgaagaatgtcaccaactcagaaacccttcttcattgacgtgtccctcactcactctcctctcttcactataaatcgccactcttcgtgttctccacttcaccaactccttcaaacttattaacactttccttagttcaatatgggggaagcccttcttcactctctctctttcttccctttgcttgctactcttgtcgagtgcatgctattacctccagcaagttcaacgagtgccaactcaacaacctcaacgcgttggaacccgaccaccgcgttgagtccgaaggtggtcttattgaaacatggaactctcaacaccctgagctgcaatgcgccggtgtcactgtttccaaacgcaccctcaaccgcaacggcctccacttgccatcttactcaccttatccccaaatgatcattgtcgttcaaggtgcgtaatattagtaagagnatttatcagcttaacgtgataacaatatagtaatatgaaatatttattaaatttttataattaatctctgctagaaaatttgattaatcattttagtagaatttg

SEQ ID NO: 4120 - DNA, 664 bp, Artificial
  Mutations within GlyA3B4 introduced by GmGlyA3B4_T02TALE nuclease
  misc_feature (529): n is a or c or t or g
gttcatgtacggttgcagatataaacgaagcatagcttatgtatgaggtgtaacaaaattggaaacaatagccatgcaaggtgaagaatgtcaccaactcagaaacccttcttcattgacgtgtccctcactcactctcctctcttcactataaatcgccactcttcgtgttctccacttcaccaactccttcaaacttattaacactttccttagttcaatatggggaagcccttcttcactctctctctttcttccctttgcttgctactcttgtcgagtgttgctattacctccagcaagttcaacgagtgccaactcaacaacctcaacgcgttggaacccgaccaccgcgttgagtccgaaggtggtcttattgaaacatggaactctcaacaccctgagctgcaatgcgccggtgtcactgtttccaaacgcaccctcaaccgcaacggcctccacttgccatcttactcaccttatccccaaatgatcattgtcgttcaaggtgcgtaatattagtaagagnatttatcagcttaacgtgataacaatatagtaatatgaaatatttattaaatttttataattaatctctgctagaaaatttgattaatcattttagtagaatttgttttctcaactaggtttttaaaacaccaca

SEQ ID NO: 4121 - DNA, 662 bp, Artificial
  Mutations within GlyA3B4 introduced by GmGlyA3B4_T02TALE nuclease
gttcatgtacggttgcagatataaacgaagcatagcttatgtatgaggtgtaacaaaattggaaacaatagccatgcaaggtgaagaatgtcaccaactcagaaacccttcttcattgacgtgtccctcactcactctcctctcttcactataaatcgccactcttcgtgttctccacttcaccaactccttcaaacttattaacactttccttagttcaatatggggaagcccttcttcactctctctctttcttccctttgcttgctactcttgtcgagtgcatgctattacctccagcaagttcaacgagtgccaactcaacaacctcaacgcgttggaacccgaccaccgcgttgagtccgaaggtggtcttattgaaacatggaactctcaacaccctgagctgcaatgcgccggtgtcactgtttccaaacgcaccctcaaccgcaacggcctccacttgccatcttactcaccttatccccaaatgatcattgtcgttcaaggtgcgtaatattagtaagagtatttatcagcttaacgtgataacaatatagtaatatgaaatatttattaaatttttataattaatctctgctagaaaatttgattaatcattttagtagaatttgtttttctcaactaggttttaaacacca

SEQ ID NO: 4122 - DNA, 634 bp, Artificial
  Mutations within GlyA3B4 introduced by GmGlyA3B4_T02TALE nuclease
gttcatgtacggttgcagatataaacgaagcatagcttatgtatgaggtgtaacaaaattggaaacaatagccatgcaaggtgaagaatgtcaccaactcagaaacccttcttcattgacgtgtccctcactcactctcctctcttcactataaatcgccactcttcgtgttctccacttcaccaactccttcaaacttattaacactttccttagttcaatatggggaagcccttcttcactctctctctttcttccctttgcttgctactcttgtcgagttgctattacctccagcaagttcaacgagtgccaactcaacaacctcaacgcgttggaacccgaccaccgcgttgagtccgaaggtggtcttattgaaacatggaactctcaacaccctgagctgcaatgcgccggtgtcactgtttccaaacgcaccctcaaccgcaacggcctccacttgccatcttactcaccttatccccaaatgatcattgtcgttcaaggtgcgtaatattagtaagaagtatttatcagcttaacgtgataacaataatagtaatatgaaatatttattaaatttttataattaatctctgctagaaaatttgattaatcatttttagtagaattt

SEQ ID NO: 4123 - DNA, 656 bp, Artificial
  Mutations within GlyA3B4 introduced by GmGlyA3B4_T02TALE nuclease
gttcatgtacggttgcagatataaacgaagcatagcttatgtatgaggtgtaacaaaattggaaacaatagccatgcaaggtgaagaatgtcaccaactcagaaacccttcttcattgacgtgtccctcactcactctcctctcttcactataaatcgccactcttcgtgttctccacttcaccaactccttcaaacttattaacactttccttagttcaatatggggaagcccttcttcactctctctctttcttccctttgcttgctactcttgtctacctccagcaagttcaacgagtgccaactcaacaacctcaacgcgttggaacccgaccaccgcgttgagtccgaaggtggtcttattgaaacatggaactctcaacaccctgagctgcaatgcgccggtgtcactgtttccaaacgcaccctcaaccgcaacggcctccacttgccatcttactcaccttatcccccaaatgatcattgtcgttcaaggtgcgtaaatattagtaagaagtatttatcagcttaacgtgataacaataatagtaatatgaaatatttattaaattttttataattaatctctgctagaaaatttgattaatctttttagtagaattgttttttctcaactaggtttaaaacaccaca

SEQ ID NO: 4124 - DNA, 665 bp, Artificial
  Mutations within GlyA3B4 introduced by GmGlyA3B4_T02TALE nuclease
gttcatgtacggttgcagatataaacgaagcatagcttatgtatgaggtgtaacaaaaattggaaacaatagccatgcaaggtgaagaatgtcaccaactcagaaacccttcttcattgacgtgtccctcactcactctcctctcttcactataaatcgccactcttcgtgttctccacttcaccaactccttcaaacttattaacactttccttagttcaatatggggaagcccttcttcactctctctctttcttccctttgcttgctactcttgtcgagtgcatctattacctccagcaagttcaacgagtgccaactcaacaacctcaacgcgttggaacccgaccaccgcgttgagtccgaaggtggtcttattgaaacatggaactctcaacaccctgagctgcaatgcgccggtgtcactgtttccaaacgcaccctcaaccgcaacggcctccacttgccatcttactcaccttatcccccaaatgatcattgtcgttcaaggtgcgtaatattagtaagaagtatttatcagcttaacgtgataacaataatagtaatatgaaatatttattaaatttttataattaatctctgctagaaaatttgattaatcattttagtagaatttgttttctcaactaggttttaaaacacca

SEQ ID NO: 4125 - DNA, 828 bp, Artificial
  Mutations within GlyA3B4 introduced by GmGlyA3B4_T02TALE nuclease
  misc_feature (681): n is a or c or t or g
gttcatgtacggttgcagatataaacgaagcatagcttatgtatgaggtgtaacaaaattggaaacaatagccatgcaaggtgaagaatgtcaccaactcagaaacccttcttcattgacgtgtccctcactcactctcctctcttcactataaatcgccactcttcgtgttctccacttcaccaactccttcaaacttattaacactttccttagttcaatatggggaagcccttcttcactctctctctttcttccctttgcttgctactcttgtcgagagcaggtggtggccatcgccagcaatggcggtggcaagcaggcgctggagacggtccagcggctgttgccggtgctgtgccaggcccacggcttgacccccccagcaggtggtggccatcgccagcaataatggtggcaagcaggcgctggagacggtccagcggcttgctattacctccagcaagttcaacgagtgccaactcaacaacctcaacgcgttggaacccgaccaccgcgttgagtccgaaggtggtcttattgaaacatggaactctcaacaccctgagctgcaatgcgccggtgtcactgtttccaaacgcacctcaaccgcaacggcctccacttgccatcttactcaccttatccccaaatgatcattgtcgttcaaggtgcgtaatnttagtaagaagtatttatcagcttaacgtgataacaataatagtaatatgaaatatttattaaattttttataaattaatctctgctagaaaatttgattaatcatttttagtagaatttgttttctcaactaggttttaaacacca

SEQ ID NO: 4126 - DNA, 539 bp, Artificial
  Mutations within GlyA3B4 introduced by GmGlyA3B4_T02TALE nuclease
gttcatgtacggttgcagatataaacgaagcatagcttatgtatgaggtgtaacaaaattggaaacaatagccatgcaaggtgaagaatgtcaccaactcagaaacccttcttcattgacgtgtccctcactcactctcctctcttcactataaatcgccactcttcgtgttctccacttcaccaactccttcaaacttattaacactttccttagttcaatatggggaagcccttcttcactctctctctttcttccctttgcttgctactcttcttcaacgagtgccaactcaacaacctcaacgcgttggaacccgaccaccgcgttgagtccgaaggtggtcttattgaaacatggaactctcaacaccctgagctgcaatgcgccggtgtcactgtttccaaacgcaccctcaaccgcaacggcctccacttgccatcttactcaccttatcccccaaatgatcattgtcgttcaaggtgcgtaatattagtaagaagtatttatcagcttaacgtgataacaataatagtaat

SEQ ID NO: 4127 - DNA, 595 bp, Artificial; identical to SEQ ID NO: 2800
  Mutations within GlyA3B4 introduced by GmGlyA3B4_T02TALE nuclease

SEQ ID NO: 4128 - DNA, 665 bp, Artificial
  Mutations within GlyA3B4 introduced by GmGlyA3B4_T02TALE nuclease
gttcatgtacggttgcagatataaacgaagcatagcttatgtatgaggtgtaacaaaattggaaacaatagccatgcaaggtgaagaatgtcaccaactcagaaaccccttcttcattgacgtgtccctcactcactctcctctcttcactataaatcgccactcttcgtgttctccacttcaccaactccttcaaacttattaacactttccttagttcaatatggggaagcccttcttcactctctctctttcttccctttgcttgctactcttgtcgagtgcatctattacctccagcaagttcaacgagtgccaactcaacaacctcaacgcgttggaacccgaccaccgcgttgagtccgaaggtggtcttattgaaacatggaactctcaacaccctgagctgcaatgcgccggtgtcactgtttccaaacgcaccctcaaccgcaacggcctccacttgccatcttactcaccttatcccccaaatgatcattgtcgttcaaggtgcgtaatattagtaagaagtatttatcagcttaacgtgataacaatatagtaatatgaaatatttattaaatttttataattaatctctgctagaaaatttgattaatcattttagtagaatttgttttctcaactaggtttttaaaacacca

SEQ ID NO: 4129 - DNA, 663 bp, Artificial
  Mutations within GlyA3B4 introduced by GmGlyA3B4_T02TALE nuclease
gttcatgtacggttgcagatataaacgaagcatagcttatgtatgaggtgtaacaaaattggaaacaatagccatgcaaggtgaagaatgtcaccaactcagaaacccttcttcattgacgtgtccctcactcactctcctctcttcactataaatcgccactcttcgtgttctccacttcaccaactccttcaaacttattaacactttccttagttcaatatggggaagcccttcttcactctctctctttcttccctttgcttgctactcttgtcgagtgcatcggctgttgccggtgctgtgccaggcccacggcttgaccccggagcaggtggtggccatcgccagccacgatggcggcaagcaggcgctgctattacctccagcaagttcaacgagtgccaactcaacaacctcaacgcgttggaacccgaccaccgcgttgagtccgaaggtggtcttattgaaacatggaactctcaacaccctgagctgcaatgcgccggtgtcactgtttccaaacgcaccctcaaccgcaacggcctccacttgccatcttactcaccttatccccaaatgatcattgtcgttcaaggtgcgtaatattagtaagaagtatttatcagcttaacgtgataacaataatagtaatatgaaaat

SEQ ID NO: 4130 - DNA, 617 bp, Artificial
  Mutations within GlyA3B4 introduced by GmGlyA3B4_T02TALE nuclease
gttcatgtacggttgcagatataaacgaagcatagcttatgtatgaggtgtaacaaaattggaaacaatagccatgcaaggtgaagaatgtcaccaactcagaaacccttcttcattgacgtgtccctcactcactctcctctcttcactataaatcgccactcttcgtgttctccacttcaccaactccttcaaacttattaacactttccttagttcaatatggggaagcccttcttcactctctctctttcttccctttgcttgctactcttgtcgagtgcatattacctccagcagttcaacgagtgccaactcacaacctcaacgcgttggaacccgaccaccgcgttgagtccgaaggtggtcttattgaaacatggaactctcaacaccctgagctgcaatgcgccggtgtcactgtttccaaacgcaccctcaaccgcaacggcctccacttgccatcttactcaccttatccccaaatgatcattgtcgttcaaggtgcgtaatattagtaagaagtatttatcagcttaacgtgataacaataatagtaatatgaaatatttattaaatttttataattaatctctgctagaaaatttgattaatca

SEQ ID NO: 4131 - DNA, 705 bp, Artificial
  Mutations within GlyA3B4 introduced by GmGlyA3B4_T02TALE nuclease
gttcatgtacggttgcagatataaacgaagcatagcttatgtatgaggtgtaacaaaattggaaacaatagccatgcaaggtgaagaatgtcaccaactcagaaacccttcttcattgacgtgtccctcactcactctcctctcttcactataaatcgccactcttcgtgttctccacttcaccaactccttcaaacttattaacactttccttagttcaatatggggaagcccttcttcactctctctctttcttccctttgcttgctactcttgtcgagtgcatgctttttttcccccactttttttccttcttatcatcttcttatttactaccatacaaagctattacctccagcaagttcaacgagtgccaactcaacacctcaacgcgttggaacccgaccaccgcgttgagtccgaaggtggtcttattgaaacatggaactctcaacaccctgagctgcaatgcgccggtgtcactgtttccaaacgcaccctcaaccgcaacggcctccacttgccatcttactcaccttatccccaaatgatcattgtcgttcaaggtgcgtaatattagtaagaagtatttatcagcttaacgtgataacaataatagtaatatgaaatatttattaaattttttataaattaatctctgctagaaaatttgattaatcatttttagtagaatttgtttttctc

SEQ ID NO: 4132 - DNA, 584 bp, Artificial; identical to SEQ ID NO: 1904
  Mutations within GlyA3B4 introduced by GmGlyA3B4_T02TALE nuclease

SEQ ID NO: 4133 - DNA, 672 bp, Artificial
  Mutations within GlyA3B4 introduced by GmGlyA3B4_T02TALE nuclease
  misc_feature (534): n is a or c or t or g
gttcatgtacggttgcagatataaacgaagcatagcttatgtatgaggtgtaacaaaaattggaaacaatagccatgcaaggtgaagaatgtcaccaactcagaaacccttcttcattgacgtgtccctcactcactctcctctcttcactataaatcgccactcttcgtgttctccacttcaccaactccttcaaacttattaacactttccttagttcaatatggggaagcccttcttcactctctctctttcttccctttgcttgctactcttgtcgagtgcatgctctattacctccagcaagttcaacgagtgccaactcaacaacctcaacgcgttggaacccgaccaccgcgttgagtccgaaggtggtcttattgaaacatggaactctcaacaccctgagctgcaatgcgccggtgtcactgtttccaaacgcaccctcaaccgcaacggcctccacttgccatcttactcaccttatcccccaaatgatcattgtcgttcaaggtgcgtaatattagtaagagnatttatcagcttaacgtgataacaataatagtaatatgaaaatatttattaaatttttataattaatctctgctagaaaatttgattaatcattttagtagaatttgtttttctcaactaggtttttaaaacaccaca

SEQ ID NO: 4134 - DNA, 713 bp, Artificial
  Mutations within GlyA3B4 introduced by GmGlyA3B4_T02TALE nuclease
gttcatgtacggttgcagatataaacgaagcatagcttatgtatgaggtgtaacaaaattggaaacaatagccatgcaaggtgaagaatgtcaccaactcagaaacccttcttcattgacgtgtccctcactcactctcctctcttcactataaatcgccactcttcgtgttctccacttcaccaactccttcaaacttattaacactttccttagttcaatatggggaagcccttcttcactctctctctttcttccctttgcttgctactcttgtcgagtgcatgctcccggcatccgcttacagacaagctgtgaccgtgtccgggagctgcatgtgtcagaggttttcaccgtcatcaccgaaacgcgcgacacgaaagggcctcgtgatacgcctattttttataggttaattttgctattacctccagcaagttcaacgagtgccaactcaacaacctcaacgcgttggaacccgaccaccgcgttgagtccgaaggtggtcttattgaaacatggaactctcaacaccctgagctgcaatgcgccggtgtcactgtttccaaacgcaccctcaaccgcaacggcctccacttgccatcttactcaccttatccccaaatgatcattgtcgtcaaggtgcgtaatattagtaagaagtatttatcagcttaacgtgataacaataatagtaatatgaaatatttatt

SEQ ID NO: 4135 - DNA, 657 bp, Artificial
  Mutations within GlyA3B4 introduced by GmGlyA3B4_T02TALE nuclease
gttcatgtacggttgcagatataaacgaagcatagcttatgtatgaggtgtaacaaaattggaaacaatagccatgcaaggtgaagaatgtcaccaactcagaaacccttcttcattgacgtgtcccccctcactctcctctcttcactataaatcgccactcttcgtgttctccacttcaccaactccttcaaacttattaacactttccttagttcaatatggggaagcccttcttcactctctctctttcttccctttgcttgctactcttgtcgagtgcatctattacctccagcaagttcaacgagtgccaactcaacaacctcaacgcgttggaacccgaccaccgcgttgagtccgaaggtggtcttattgaaacatggaactctcaacaccctgagctgcaatgcgccggtgtcactgtttccaaacgcaccctcaaccgcaacggcctccacttgccatcttactcaccttatccccaaatgatcattgtcgttcaaggtgcgtaatattagtaagaagtatttatcagcttaacgtgataacaataatagtaatatgaaatatttattaaatttttataattaatctctgctagaaaatttgattaatcattttagtagaatttgttttctcaactaggttttaaaa

SEQ ID NO: 4136 - DNA, 621 bp, Artificial
  Mutations within GlyA3B4 introduced by GmGlyA3B4_T02TALE nuclease
gttcatgtacggttgcagaatataaacgaagcatagcttatgtatgaaggtgtaacaaaattggaaacaatagccatgcaaggtgaagaatgtcaccaactcagaaacccttcttcattgacgtgtccctcactcactctcctctcttcactataaatcgccactcttcgtgttctccacttcaccaactccttcaaacttattaacactttccttagttcaatatggggaagcccttcttcactctctctccagcaagttcaacgagtgccaactcaacaacctcaacgcgttggaacccgaccaccgcgttgagtccgaaggtggtcttattgaaacatggaactctcaacaccctgagctgcaatgcgccggtgtcactgtttccaaacgcaccctcaaccgcaacggcctccacttgccatcttactcaccttatccccaaatgatcattgtcgttcaaggtgcgtaatattagtaagaagtatttatcagcttaacgtgataacaataatagtaatatgaaatatttattaatttttttataattaatctctgctagaaaatttgattaatcattttttagtagaatttgtttttctcaactaggtttttaaaaca

SEQ ID NO: 4137 - DNA, 662 bp, Artificial; identical to SEQ ID NO: 1958
  Mutations within GlyA3B4 introduced by GmGlyA3B4_T02TALE nuclease

SEQ ID NO: 4138 - DNA, 649 bp, Artificial
  Mutations within GlyA3B4 introduced by GmGlyA3B4_T02TALE nuclease
gttcatgtacggttgcagatataaacgaagcatagcttatgtatgaggtgtaacaaaattggaaacaatagccatgcaaggtgaagaatgtcaccaactcagaaaccccttcttcattgacgtgtccctcactcactctcctctcttcactataaatcgccactcttcgtgttctccacttcaccaactccttcaaacttattaacactttccttagttcaatatggggaagcccttcttcactctctctctttcttccctttgcttgctactcttgtcgagtgcctattacctccagcaagttcaacgagtgccaactcaacaacctcaacgcgttggaacccgaccaccgcgttgagtccgaaggtggtcttattgaaacatggaactctcaacaccctgagctgcaatgcgccggtgtcactgtttccaaacgcaccctcaaccgcaacggcctccacttgccatcttactcaccttatccccaaatgatcattgtcgttcaaggtgcgtaatattagtaagaagtatttatcagcttaacgtgataacaataatagtaatatgaaatatttattaaatttttataattaatctctgctagaaaatttgattaatcattttagtagaatttgttttctcaactagg

SEQ ID NO: 4139 - DNA, 659 bp, Artificial
  Mutations within GlyA3B4 introduced by GmGlyA3B4_T02TALE nuclease
gttcatgtacggttgcagatataaacgaagcatagcttatgtatgaggtgtaacaaaattggaaacaatagccatgcaaggtgaagaatgtcaccaactcagaaacccttcttcattgacgtgtccctcactcactctcctctcttcactataaatcgccactcttcgtgttctccacttcaccaactccttcaaacttattaacactttccttagttcaatatgggggaagcccttcttcactctctctctttcttccctttgcttgctactcttgtcgagtgccctccagcaagttcaacgagtgccaactcaacaacctcaacgcgttggaacccgaccaccgcgttgagtccgaaggtggtcttattgaaacatggaactctcaacaccctgagctgcaatgcgccggtgtcactgtttccaaacgcaccctcaaccgcaacggcctccacttgccatcttactcaccttatccccaaatgatcattgtcgttcaaggtgcgtaaatattagtaagaagtatttatcagcttaacgtgataacaataatagtaatatgaaatatttattaaattttttataattaatctctgctagaaaatttgattaatctttttagtagaattgttttttctcaactaggtttaaaacacaca

SEQ ID NO: 4140 - DNA, 660 bp, Artificial
  Mutations within GlyA3B4 introduced by GmGlyA3B4_T02TALE nuclease
gttcatgtacggttgcagatataaacgaagcatagcttatgtatgaggtgtaacaaaattggaaacaatagccatgcaaggtgaagaatgtcaccaactcagaaacccttcttcattgacgtgtccctcactcactctcctctcttcactataaatcgccactcttcgtgttctccacttcaccaactccttcaaacttattaacactttccttagttcaatatggggaagcccttcttcactctctctctttcttccctttgcttgctactcttgtcgagtgcaacctccagcaagttcaacgagtgccaactcaacaacctcaacgcgttggaacccgaccaccgcgttgagtccgaaggtggtcttattgaaacatggaactctcaacaccctgagctgcaatgcgccggtgtcactgtttccaaacgcaccctcaaccgcaacggcctccacttgccatcttactcaccttatcccccaaatgatcattgtcgttcaaggtgcgtaaatattagtaagaagtatttatcagcttaacgtgataacaataatagtaatatgaaatatttattaaattttttataattaatctctgctagaaaatttgattaatctttttagtagaattgtttttctcaactaggtttaaacaccaca

SEQ ID NO: 4141 - DNA, 665 bp, Artificial
  Mutations within GlyA3B4 introduced by GmGlyA3B4_T02TALE nuclease
gttcatgtacggttgcagatataaacgaagcatagcttatgtatgaggtgtaacaaaattggaaacaatagccatgcaaggtgaagaatgtcaccaactcagaaacccttcttcattgacgtgtccctcactcactctcctctcttcactataaatcgccactcttcgtgttctccacttcaccaactccttcaaacttattaacactttccttagttcaatatggggaagcccttcttcactctctctctttcttccctttgcttgctactcttgtcgagtgcatttctattacctccagcaagttcaacgagtgccaactcaacaacctcaacgcgttggaacccgaccaccgcgttgagtccgaaggtggtcttattgaaacatggaactctcaacaccctgagctgcaatgcgccggtgtcactgtttccaaacgcaccctcaaccgcaacggcctccacttgccatcttactcaccttatccccaaatgatcattgtcgttcaaggtgcgtaatattagtaagaagtatttatcagcttaacgtgataacaataatagtaatatgaaatatttattaaatttttataattaatctctgctagaaaatttgattaatcattttagtagaatttgttttctcaactaggttttaaaacacca

SEQ ID NO: 4142 - DNA, 579 bp, Artificial; identical to SEQ ID NO: 1874
  Mutations within GlyA3B4 introduced by GmGlyA3B4_T02TALE nuclease

SEQ ID NO: 4143 - DNA, 632 bp, Artificial; identical to SEQ ID NO: 2852
  Mutations within GlyA3B4 introduced by GmGlyA3B4_T02TALE nuclease

SEQ ID NO: 4144 - DNA, 655 bp, Artificial; identical to SEQ ID NO: 2627
  Mutations within GlyA3B4 introduced by GmGlyA3B4_T02TALE nuclease

SEQ ID NO: 4145 - DNA, 639 bp, Artificial
  Mutations within GlyA3B4 introduced by GmGlyA3B4_T02TALE nuclease
  misc_feature (534): n is a or c or t or g
gttcatgtacggttgcagatataaacgaagcatagcttatgtatgaggtgtaacaaaaattggaaacaatagccatgcaaggtgaagaatgtcaccaactcagaaaccccttcttcattgacgtgtccctcactcactctcctctcttcactataaatcgccactcttcgtgttctccacttcaccaactccttcaaacttattaacactttccttagttcaatatggggaagcccttcttcactctctctctttcttccctttgcttgctactcttgtcgagtgcattgctattacctccagcaagttcaacgagtgccaactcaacaacctcaacgcgttggaacccgaccaccgcgttgagtccgaaggtggtcttattgaaacatggaactctcaacaccctgagctgcaatgcgccggtgtcactgtttccaaacgcaccctcaaccgcaacggcctccacttgccatcttactcaccttatcccccaaatgatcattgtcgttcaaggtgcgtaatattagtaagagnatttatcagcttaacgtgataacaatatagtaatatgaaatatttattaaatttttataattaatctctgctagaaaatttgattaatcattttagtagaatttg

SEQ ID NO: 4146 - DNA, 665 bp, Artificial; identical to SEQ ID NO: 2823
  Mutations within GlyA3B4 introduced by GmGlyA3B4_T02TALE nuclease

SEQ ID NO: 4147 - DNA, 651 bp, Artificial
  Mutations within GlyA3B4 introduced by GmGlyA3B4_T02TALE nuclease
gttcatgtacggttgcagatataaacgaagcatagcttatgtatgaggtgtaacaaaattggaaacaatagccatgcaaggtgaagcaatgtcaccaactcagaaacccttcttcattgacgtgtccctcactcactctcctctcttcactataaatcgccactcttcgtgttctccacttcaccaactccttcaaacttattaacactttccttagttcaatatggggaagcccttcttcactctctctctttcttccctttgcttgctattacctccagcaagttcaacgagtgccaactcaacaacctcaacgcgttggaacccgaccaccgcgttgagtccgaaggtggtcttattgaaacatggaactctcaacacccctgagctgcaatgcgccggtgtcactgtttccaaacgcaccctcaaccgcaacggcctccacttgccatcttactcaccttatccccaaatgatcattgtcgttcaaggtgcgtaatattagtaagaagtatttatcagcttaacgtgataacaataatagtaatatgaaatatttattaaattttttataattaatctctgctagaaaatttgattaatcatttttagtagaatttgttttttctcaactaggttttaaacaccaca

SEQ ID NO: 4148 - DNA, 660 bp, Artificial
  Mutations within GlyA3B4 introduced by GmGlyA3B4_T02TALE nuclease
gttcatgtacggttgcagatataaacgaagcatagcttatgtatgaggtgtaacaaaattggaaacaatagccatgcaaggtgaagaatgtcaccaactcagaaacccttcttcattgacgtgtccctcactcactctcctctcttcactataaatcgccactcttcgtgttctccacttcaccaactccttcaaacttattaacactttccttagttcaatatggggaagcccttcttcactctctctctttcttccctttgcttgctactcttgtcgagtgcatgctattacctccagcaagttcaacgagtgccaactcaacaacctcaacgcgttggaacccgaccaccgcgttgagtccgaaggtggtcttattgaaacatggaactctcaacaccctgagctgcaatgcgccggtgtcactgtttccaaacgcaccctcaaccgcaacggcctccacttgccatcttactcaccttatccccaaatgatcattgtcgttcaaggtgcgtaatattagtaagaagtatttatcagcttaacgtgatacaatatagtaatatgaaatatttattaaatttttataattaatctctgctagaaaatttgattaatcattttagtagaatttgttttctcaactaggttttaaacacc

SEQ ID NO: 4149 - DNA, 661 bp, Artificial; identical to SEQ ID NO: 2035
  Mutations within GlyA3B4 introduced by GmGlyA3B4_T02TALE nuclease

SEQ ID NO: 4150 - DNA, 660 bp, Artificial; identical to SEQ ID NO: 3912
  Mutations within GlyA3B4 introduced by GmGlyA3B4_T02TALE nuclease

SEQ ID NO: 4151 - DNA, 662 bp, Artificial
  Mutations within GlyA3B4 introduced by GmGlyA3B4_T02TALE nuclease
  misc_feature (506): n is a or c or t or g
gttcatgtacggttgcagatataaacgaagcatagcttatgtatgaggtgtaacaaaattggaaacaatagccatgcaaggtgaagaatgtcaccaactcagaaaccccttcttcattgacgtgtccctcactcactctcctctcttcactataaatcgccactcttcgtgttctccacttcaccaactccttcaaacttattaacactttccttagttcaatatgggggaagcccttcttcactctctctctttcttccctttgcttgctactcttgtcgagtgcatccagcaagttcaacgagtgccaactcaacaacctcaacgcgttggaacccgaccaccgcgttgagtccgaaggtggtcttattgaaacatggaactctcaacaccctgagctgcaatgcgccggtgtcactgtttccaaacgcaccctcaaccgcaacggcctccacttgccatcttactcaccttatcccccaaatgatattgtcgttcaaggtgcntaaatattagtaagaagtatttatcagcttaacgtgataacaataatagtaatatgaaatatttattaaatttttataattaatctctgctagaaaatttgattaatcatttttagtagaatttgttttttctcaactaggttttaaaacaccaca

SEQ ID NO: 4152 - DNA, 641 bp, Artificial
  Mutations within GlyA3B4 introduced by GmGlyA3B4_T02TALE nuclease
gttcatgtacggttgcagatataaacgaagcatagcttatgtatgaggtgtaacaaaattggaaacaatagccatgcaaggtgaagaatgtcaccaactcagaaacccttcttcattgacgtgtccctcactcactctcctctcttcactataaatcgccactcttcgtgttctccacttcaccaactccttcaaacttattaacactttccttagttcaatatggggaagcccttcttcactctctctctttcttccctttgcttgctactcttgtcgagtgcatacctccagcaagttcaacgagtgccaactcaacaacctcaacgcgttggaacccgaccaccgcgttgagtccgaaggtggtcttattgaaacatggaactctcaacaccctgagctgcaatgcgccggtgtcactgtttccaaacgcaccctcaaccgcaacggcctccacttgccatcttactcaccttatccccaaatgatcattgtcgttcaaggtgcgtaatattagtaagaagtatttatcagcttaacgtgataacaatatagtaatatgaaatatttattaaatttttataattaatctctgctagaaaatttgattaatcatttttagtagaatttgtttttctcaa

SEQ ID NO: 4153 - DNA, 656 bp, Artificial
  Mutations within GlyA3B4 introduced by GmGlyA3B4_T02TALE nuclease
gttcatgtacggttgcagatataaacgaagcatagcttatgtatgaggtgtaacaaaattggaaacaatagccatgcaaggtgaagaatgtcaccaactcagaaacccttcttcattgacgtgtccctcactcactctcctctcttcactataaatcgccactcttcgtgttctccacttcaccaactccttcaaacttattaacactttccttagttcaatatggggaagcccttcttcactctctctctttcttccctttgcttgctactcttgtcgagtgctattacctccagcaagttcaacgagtgccaactcaacaacctcaacgcgttggaacccgaccaccgcgttgagtccgaaggtggtcttattgaaacatggaactctcaacaccctgagctgcaatgcgccggtgtcactgtttccaaacgcaccctcaaccgcaacggcctccacttgccatcttactcaccttatccccaaatgatcattgtcgttcaaggtgcgtaatattagtaagaagtatttatcagcttaacgtgataacaataatagtaatatgaaatatttattaaatttttataattaatctctgctagaaaatttgattaatcattttagtagaatttgtttttctcaactaggttttaaaa

SEQ ID NO: 4154 - DNA, 668 bp, Artificial
  Mutations within GlyA3B4 introduced by GmGlyA3B4_T02TALE nuclease
  misc_feature (533): n is a or c or t or g
gttcatgtacggttgcagatataaacgaagcatagcttatgtatgaggtgtaacaaaattggaaacaatagccatgcaaggtgaagaatgtcaccaactcagaaacccttcttcattgacgtgtccctcactcactctcctctcttcactataaatcgccactcttcgtgttctccacttcaccaactccttcaaacttattaacactttccttagttcaatatggggaagcccttcttcactctctctctttcttccctttgcttgctactcttgtcgagtgcatgctattacctccagcaagttcaacgagtgccaactcaacaacctcaacgcgttggaacccgaccaccgcgttgagtccgaaggtggtcttattgaaacatggaactctcaacaccctgagctgcaatgcgacggccgtgtcactgtttccaaacgcaccctcaaccgcaacggcctccacttgccatcttactcaccttatccccaaatgatcattgtcgttcaaggtgcgtaatattagtaagagnatttatcagcttaacgtgataacaataatagtaatatgaaatatttattaaattttataattaatctctgctagaaaatttgattaatcattttagtagaatttgtttttctcaactaggttttaaaacaccaca

SEQ ID NO: 4155 - DNA, 599 bp, Artificial
  Mutations within GlyA3B4 introduced by GmGlyA3B4_T02TALE nuclease
gttcatgtacggttgcagatataaacgaagcatagcttatgtatgaggtgtaacaaaattggaaacaatagccatgcaaggtgaagaatgtcaccaactcagaaacccttcttcattgacgtgtccctcactcactctcctctcttcactataaatcgccactcttcgtgttctccacttcaccaactccttcaaacttattaacactttccttagttcaatatggggaagcccttcttcactctctctctttcttccctttgcttgctactcttgtcgagtacctccagcaagttcaacgagtgccaactcaacaacctcaacgcgttggaacccgaccaccgcgttgagtccgaaggtggtcttattgaaacatggaactctcaacaccctgagctgcaatgcgccggtgtcactgtttccaaacgcaccctcaaccgcaacggcctccacttgccatcttactcaccttatcccccaaatgatcattgtcgttcaaggtgcgtaaatattagtaagaagtatttatcagcttaacgtgataacaataatagtaatatgaaatatttattaaattttttataattaatctctgctag

SEQ ID NO: 4156 - DNA, 667 bp, Artificial
  Mutations within GlyA3B4 introduced by GmGlyA3B4_T02TALE nuclease
gttcatgtacggttgcagatataaacgaagcatagcttatgtatgaggtgtaacaaaattggaaacaatagccatgcaaggtgaagaatgtcaccaactcagaaacccttcttcattgacgtgtccctcactcactctcctctcttcactataaatcgccactcttcgtgttctccacttcaccaactccttcaaacttattaacactttccttagttcaatatggggaagcccttcttcactctctctctttcttccctttgcttgctactcttgtcgagtgcatgctattacctccagcaagttcaacgagtgccaactcaacaacctcaacgcgttggaacccgaccaccgcgttgagtccgaaggtggtcttattgaaacatggaactctcaacaccctgagctgcaatgcgccggtgtcactgtttccaaacgcaccctcaaccgcaacggcctccacttgccatcttactcaccttatccccaaatgatcattgtcgttcaaggtgcgtaatattagtaagaagtatttatcagcttaacgtgataacaatatagtaatatgaaaatatttattaaatttttataattaatctctgctagaaaatttgattaatcattttagtagaatttgtttttctcaactaggtttttaaacaccaca

SEQ ID NO: 4157 - DNA, 649 bp, Artificial
  Mutations within GlyA3B4 introduced by GmGlyA3B4_T02TALE nuclease
gttcatgtacggttgcagatataaacgaagcatagcttatgtatgaggtgtaacaaaattggaaacaatagccatgcaaggtgaagaatgtcaccaactcagaaacccttcttcattgacgtgtccctcactcactctcctctcttcactataaatcgccactcttcgtgttctccacttcaccaactccttcaaacttattaacactttccttagttcaatatgggggaagcccttcttcactctctctctttcttccctttgcttgctactcttgtcgagtgcatctattacctccagcaagttcaacgagtgccaactcacaacctcaacgcgttggaacccgaccaccgcgttgagtccgaaggtggtcttattgaaacatggaactctcaacaccctgagctgcaatgcgccggtgtcactgtttccaaacgcaccctcaaccgcaacggcctccacttgccatcttactcaccttatccccaaatgatcattgtcgttcaaggtgcgtaatattagtaagaagtatttatcagcttaacgtgatacaatatagtaatatgaaatatttattaaatttttataattaatctctgctagaaaatttgattaatcattttagtagaatttgtttttctcaactagg

SEQ ID NO: 4158 - DNA, 642 bp, Artificial
  Mutations within GlyA3B4 introduced by GmGlyA3B4_T02TALE nuclease
gttcatgtacggttgcagatataaacgaagcatagcttatgtatgaggtgtaacaaaattggaaacaatagccatgcaaggtgaagaatgtcaccaactcagaaaccccttcttcattgacgtgtccctcactcactctcctctcttcactataaatcgccactcttcgtgttctccacttcaccaactccttcaaacttattaacactttccttagttcaatatggggaagcccttcttcactctctctctttcttccctttgcttgctactcttgtcgagtgcctgcaagttcaacgagtgccaactcaacaacctcaacgcgttggaacccgaccaccgcgttgagtccgaaggtggtcttattgaaacatggaactctcaacaccctgagctgcaatgcgccggtgtcactgtttccaaacgcacctcaaccgcaacggcctccacttgccatcttactcaccttatcccccaaatgatcattgtcgttcaaggtgcgtaatattagtaagaagtatttatcagcttaacgtgataacaataatagtaatatgaaatatttattaaattttttataattaatctctgctagaaaatttgattaatcatttttagtagaattgttttttctcaactagg

SEQ ID NO: 4159 - DNA, 647 bp, Artificial
  Mutations within GlyA3B4 introduced by GmGlyA3B4_T02TALE nuclease
gttcatgtacggttgcagatataaacgaagcatagcttatgtatgaggtgtaacaaaattggaaacaatagccatgcaaggtgaagaatgtcaccaactcagaaacccttcttcattgacgtgtccctcactcactctcctctcttcactataaatcgccactcttcgtgttctccacttcaccaactccttcaaacttattaacactttccttagttcaatatggggaagcccttcttcactctctctctttcttccctttgctattacctccagcaagttcaacgagtgccaactcaacaacctcaacgcgttggaacccgaccaccgcgttgagtccgaaggtggtcttattgaaacatggaactctcaacaccctgagctgcaatgcgccggtgtcactgttttccaaacgcaccctcaaccgcaacggcctccacttgccatcttactcaccttatccccaaatgatcattgtcgttcaaggtgcgtaatattagtaagaagtatttatcagcttaacgtgataacaataatagtaatatgaaatatttattaaattttttataattaatctctgctagaaaatttgattaatcatttttagtagaatttgttttttctcaactaggttttaaaacaccaca

SEQ ID NO: 4160 - DNA, 650 bp, Artificial
  Mutations within GlyA3B4 introduced by GmGlyA3B4_T02TALE nuclease
  misc_feature (531): n is a or c or t or g
gttcatgtacggttgcagatataaacgaagcatagcttatgtatgaggtgtaacaaaattggaaacaatagccatgcaaggtgaagaatgtcaccaactcagaaacccttcttcattgacgtgtccctcactcactctcctctcttcactataaatcgccactcttcgtgttctccacttcaccaactccttcaaacttattaacactttccttagttcaatatggggaagcccttcttcactctctctctttcttccctttgcttgctactcttgtcgagtgcattgctattacctccagcaagttcaacgagtgccaactcaacaacctcaacgcgttggaacccgaccaccgcgttgagtccgaaggtggtcttattgaaacatggaactctcaacaccctgagctgcaatgcgccggtgtcactgtttccaaacgcaccctcaaccgcaacggcctccacttgccatcttactcaccttatccccaaatgatcattgtcgttcaaggtgcgtaatattagtaagagnatttatcagcttaacgtgataacaatatagtaatatgaaatatttattaaatttttataattaatctctgctagaaaatttgattaatcattttagtagaatttgttttctcaactagg

SEQ ID NO: 4161 - DNA, 647 bp, Artificial
  Mutations within GlyA3B4 introduced by GmGlyA3B4_T02TALE nuclease
gttcatgtacggttgcagatataaacgaagcatagcttatgtatgaggtgtaacaaaattggaaacaatagccatgcaaggtgaagaatatcaccaactcagaaacccttcttcattgacgtgtccctcactcactctcctctcttcactataaatcgccactcttcgtgttctccacttcaccaactccttcaaacttattaacactttccttagttcaatatggggaagcccttcttcactctctctctttcttccctttgcttgctactcttgtcgagtgctattacctccagcaagttcaacgagtgccaactcaacaacctcaacgcgttggaacccgaccaccgcgttgagtccgaaggtggtcttattgaaacatggaactctcaacaccctgagctgcaatgcgccggtgtcactgtttccaaacgcaccctcaaccgcaacggcctccacttgccatcttactcaccttatccccaaatgatcattgtcgttcaaggtgcgtaatattagtaagaagtatttatcagcttaacgtgataacaataatagtaatatgaaatatttattaaatttttataattaatctctgctagaaaatttgattaatcattttagtagaatttgttttctcaactagg

SEQ ID NO: 4162 - DNA, 599 bp, Artificial
  Mutations within GlyA3B4 introduced by GmGlyA3B4_T02TALE nuclease
gttcatgtacggttgcagatataaacgaagcatagcttatgtatgaggtgtaacaaaattggaaacaatagccatgcaaggtgaagaatgtcaccaactcagaaacccttcttcattgacgtgtccctcactcactctcctctcttcactataaatcgccactcttcgtgttctccacttcaccaactccttcaaacttattaacactttccttagttcaatatggggaagcccttcttcactctctctctttcttccctttgcttgctactcttgtcgagtgccaactcaacaacctcaacgcgttggaacccgaccaccgcgttgagtccgaaggtggtcttattgaaacatggaactctcaacaccctgagctgcaatgcgccggtgtcactgtttccaaacgcaccctcaaccgcaacggcctccacttgccatcttactcaccttatccccaaatgatcattgtcgttcaaggtgcgtaatattagtaagaagtatttatcagcttaacgtgataacaataatagtaatatgaaatatttattaaattttttataatttaatctctgctagaaaatttgattaatcatttttag

SEQ ID NO: 4163 - DNA, 667 bp, Artificial; identical to SEQ ID NO: 4106
  Mutations within GlyA3B4 introduced by GmGlyA3B4_T02TALE nuclease

SEQ ID NO: 4164 - DNA, 668 bp, Artificial
  Mutations within GlyA3B4 introduced by GmGlyA3B4_T02TALE nuclease
  misc_feature (531): n is a or c or t or g
gttcatgtacggttgcagatataaacgaagcatagcttatgtatgaggtgtaacaaaattggaaacaatagccatgcaaggtgaagaatgtcaccaactcagaaacccttcttcattgacgtgtccctcactcactctcctctcttcactataaatcgccactcttcgtgttctccacttcaccaactccttcaaacttattaacactttccttagttcaatatggggaagcccttcttcactctctctctttcttcccttgcttgctactcttgtcgagtgctttgctattacctccagcaagttcaacgagtgccaactcaacaacctcaacgcgttggaacccgaccaccgcgttgagtccgaaggtggtcttattgaaacatggaactctcaacaccctgagctgcaatgcgccggtgtcactgtttccaaacgcaccctcaaccgcaacggcctccacttgccatcttactcaccttatccccaaatgatcattgtcgttcaaggtgcgtaatattagtaagaagnatttatcagcttaacgtgataacaataatagtaatatgaaatatttattaaatttttataattaatctctgctagaaaatttgattaatcattttagtagaatttgtttttctcaactaggtttttaaaacaccaca

SEQ ID NO: 4165 - DNA, 664 bp, Artificial
  Mutations within GlyA3B4 introduced by GmGlyA3B4_T02TALE nuclease
  misc_feature (530): n is a or c or t or g
gttcatgtacggttgcagatataaacgaagcatagcttatgtatgaggtgtaacaaaattggaaacaatagccatgcaaggtgaagaatgtcaccaactcagaaacccttcttcattgacgtgtccctcactcactctcctctcttcactataaatcgccactcttcgtgttctccacttcaccaactccttcaaacttattaacactttccttagttcaatatggggaagcccttcttcactctctctctttcttccctttgcttgctactcttgtcgagtgcatgctattacctccagcaagttcaacgagtgccaactcaacaacctcaacgcgttggaacccgaccaccgcgttgagtccgaaggtggtcttattgaaacatggaactctcaacaccctgagctgcaatgcgccggtgtcactgtttccaaacgcaccctcaaccgcaacggcctccacttgccatcttactcaccttatccccaaatgatcattgtcgttcaaggtgcgtaatattagtaagagnatttatcagcttaacgtgataacaatatagtaatatgaaatatttattaaatttttataattaatctctgctagaaaatttgattaatcattttagtagaatttgtttttctcaactaggtttttaaaacacca

SEQ ID NO: 4166 - DNA, 619 bp, Artificial
  Mutations within GlyA3B4 introduced by GmGlyA3B4_T02TALE nuclease
gttcatgtacggttgcagatataaacgaagcatagcttatgtatgaggtgtaacaaaattggaaacaatagccatgcaaggtgaagaatgtcaccaactcagaaacccttcttcattgacgtgtccctcactcactctcctctcttcactataaatcgccactcttcgtgttctccacttcaccaactccttcaaacttattaacactttccttagttcaatatggggaagcccttcttcactctctctctttcgttcctccagcaagttcaacgagtgccaactcaacaacctcaacgcgttggaaccgaccaccgcgttgagtccgaaggtggtcttattgaaacatggaactctcaacaccctgagctgcaatgcgccggtgtcactgtttccaaacgcaccctcaaccgcaacggcctccacttgccatcttactcaccttatccccaaatgatcattgtcgttcaaggtgcgtaatattagtaagaagtatttatcagcttaacgtgataacaataatagtaatatgaaatatttattaatttttataattaatctctgctagaaatttgattaatcatttttagtagaatttgtttttctcaactaggttttt

SEQ ID NO: 4167 - DNA, 523 bp, Artificial
  Mutations within GlyA3B4 introduced by GmGlyA3B4_T02TALE nuclease
gttcatgtacggttgcagatataaacgaagcatagcttatgtatgaggtgtaacaaaattggaaacaatagccatgcaaggtgaagaatgtcaccaactcagaaacccttcttcattgacgtgtccctcactcactctcctctcttcactataaatcgccactcttcgtgttctccacttcaccaactccttcaaacttattaacactttccttagttcaatatggggaagcccttcttcactctctctctttcttccctttgcttgctactcttgtcgagtgcatggaactctcaacaccctgagctgcaatgcgccggtgtcactgtttccaaacgcaccctcaaccgcaacggcctccacttgccatcttactcaccttatccccaaatgatcattgtcgttcaaggtgcgtaatattagtaagaagtatttatcagcttaacgtgataacaataatagtaatatgaaatatttattaaattttttataattaatctctgctagaaaatttgattaatca

SEQ ID NO: 4168 - DNA, 667 bp, Artificial
  Mutations within GlyA3B4 introduced by GmGlyA3B4_T02TALE nuclease
gttcatgtacggttgcagatataaacgaagcatagcttatgtatgaggtgtaacaaaattggaaacaatagccatgcaaggtgaagaatgtcaccaactcagaaacccttcttcattgacgtgtccctcactcactctcctctcttcactataaatcgccactcttcgtgttctccacttcaccaactccttcaaacttattaacactttccttagttcaatatggggaagcccttcttcactctctctctttcttccctttgcttgctactcttgtcgagtgcaggcaagcaggcgctggagacggtccagcggctgttgccggtgctgtgccaggcccacggctttgctattacctccagcaagttcaacgagtgccaactcaacaacctcaacgcgttggaacccgaccaccgcgttgagtccgaaggtggtcttattgaaacatggaactctcaacacctgagctgcaatgcgccggtgtcactgtttccaaacgcaccctcaaccgcaacggcctccacttgccatcttactcacctttatccccaaatgatcattgtcgttcaaggtgcgtaatattagtaagaagtatttatcagcttaacgtgataacaataatagtaatatgaaatatttattaaattttttcataattaatctctgc

SEQ ID NO: 4169 - DNA, 601 bp, Artificial
  Mutations within GlyA3B4 introduced by GmGlyA3B4_T02TALE nuclease
gttcatgtacggttgcagatataaacgaagcatagcttatgtatgaggtgtaacaaaattggaaacaatagccatgcaaggtgaagaatgtcaccaactcagaaacccttcttcattgacgtgtccctcactcactctcctctcttcactataaatcgccactcttcgtgttctccacttcaccaactccttcaaacttattaacactttccttagttcaatatggggaagcccttcttcactctctctctttcttccctttgcttgctactcttgtcgagtgccaactcaacaacctcaacgcgttggaacccgaccaccgcgttgagtccgaaggtggtcttattgaaacatggaactctcaacaccctgagctgcaatgcgccggtgtcactgtttccaaaacgcaccctcaaccgcaacggcctccacttgccatcttactcaccttatccccaaatgatcattgtcgttcaaggtgcgtaatattagtaagaagtatttatcagcttaacgtgataacaataatagtaatatgaaatatttattaaatttttataattaatctctgctagaaaatttgattaatcatttttagtag

SEQ ID NO: 4170 - DNA, 569 bp, Artificial
  Mutations within GlyA3B4 introduced by GmGlyA3B4_T02TALE nuclease
gttcatgtacggttgcagatataaacgaagcatagcttatgtatgaggtgtaacaaaattggaaacaatagccatgcaaggtgaagaatgtcaccaactcagaaaccccttcttcattgacgtgtccctcactcactctcctctcttcactataaatcgccactcttcgtgttctccacttcaccaactccttcaaacttattaacactttccagcaagttcaacgagtgccaactcaacaacctcaacgcgttggaacccgaccaccgcgttgagtccgaaggtggtcttattgaaacatggaactctcaacaccctgagctgcaatgcgccggtgtcactgtttccaaacgcaccctcaaccgcaacggcctccacttgccatcttactcaccttatccccaaatgatcattgtcgttcaaggtgcgtaatattagtaagaagtattttatcagcttaacgtgataacaataatagtaatatgaaatatttattaaattttttataattaatctctgctagaaaatttgattaatcattttagtagaatttgtttttctcaactagg

SEQ ID NO: 4171 - DNA, 662 bp, Artificial; identical to SEQ ID NO: 2942
  Mutations within GlyA3B4 introduced by GmGlyA3B4_T02TALE nuclease

SEQ ID NO: 4172 - DNA, 589 bp, Artificial
  Mutations within GlyA3B4 introduced by GmGlyA3B4_T02TALE nuclease
gttcatgtacggttgcagatataaacgaagcatagcttatgtatgaggtgtaacaaaattggaaacaatagccatgcaaggtgaagaatgtcaccaactcagaaacccttcttcattgacgtgtccctcactcactctcctctcttcactataaatcgccactcttcgtgttctccacttcaccaactccttcaaacttattaacactttccttagttcaatatggggaagcccttcttcactctctctctttcttccctttgcttgctactcttgtcgagtgcatggtgctgtgccaggccccacggcttgaccccccagcaggtggtggccattgctattacctccagcaagttcaacgagtgccaactcaacaacctcacgcgttggaacccgaccaccgcgttgagtccgaaggtggtcttattgaacatggaactctcaacaccctgagctgcaatgcgccggtgtcactgtttccaaacgcaccctcaaccgcaacggcctccacttgccatcttactcaccttatccccaaatgatcattgtcgttcaaggtgcgtaatattagtaagaagtatttatcagc

SEQ ID NO: 4173 - DNA, 600 bp, Artificial
  Mutations within GlyA3B4 introduced by GmGlyA3B4_T02TALE nuclease
gttcatgtacggttgcagatataaacgaagcatagcttatgtatgaggtgtaacaaaattggaaacaatagccatgcaaggtgaagaatgtcaccaactcagaaacccttcttcattgacgtgtccctcactcactctcctctcttcactataaatcgccactcttcgtgttctccacttcaccaactccttcaaacttattaacactttccttagttcaatatggggaagcccttcttcactctctctctttcttccctttgcttgctactcaactcaacaacctcaacgcgttggaacccgaccaccgcgttgagtccgaaggtggtcttattgaaacatggaactctcaacaccctgagctgcaaatgcgccggtgtcactgtttccaaacgcaccctcaaccgcaacggcctccacttgccatcttactcaccttatccccaaatgatcattgtcgttcaaggtgcgtaatattagtaagaagtatttatcagcttaacgtgataacaataatagtaatatgaaatatttattaatttttataattaatctctgctagaaaatttgattaatcatttttagtagaatttgtttttc

SEQ ID NO: 4174 - DNA, 654 bp, Artificial
  Mutations within GlyA3B4 introduced by GmGlyA3B4_T02TALE nuclease
  misc_feature (530): n is a or c or t or g
gttcatgtacggttgcagatataaacgaagcatagcttatgtatgaggtgtaacaaaattggaaacaatagccatgcaaggtgaagaatgtcaccaactcagaaacccttcttcattgacgtgtccctcactcactctcctctcttcactataaatcgccactcttcgtgttctccacttcaccaactccttcaaacttattaacactttccttagttcaatatggggaagcccttcttcactctctctctttcttccctttgcttgctactcttgtcgagtgcatgctattacctccagcaagttcaacgagtgccaactcaacaacctcaacgcgttggaacccgaccaccgcgttgagtccgaaggtggtcttattgaaacatggaactctcaacaccctgagctgcaatgcgccggtgtcactgtttccaaacgcaccctcaaccgcaacggcctccacttgccatcttactcaccttatccccaaatgatcattgtcgttcaaggtgcgtaatattagtaagagnatttatcagcttaacgtgataacaatatagtaatatgaaatatttattaaatttttataattaatctctgctagaaaatttgattaatcattttagtagaatttgttttctcaactaggttttt

SEQ ID NO: 4175 - DNA, 597 bp, Artificial
  Mutations within GlyA3B4 introduced by GmGlyA3B4_T02TALE nuclease
gttcatgtacggttgcagatataaacgaagcatagcttatgtatgaggtgtaacaaaattggaaacaatagccatgcaaggtgaagaatgtcaccaactcagaaacccttcttcattgacgtgtccctcactcactctcctctcttcactataaatcgccactcttcgtgttctccacttcaccaactccttcaaacttattaacactttccttagttcaatatggggaagcccttcttcactctctctctttcttccctttgcttgctactcttgtcgagtgcctccagcaagttcaacgagtgccaactcaacaacctcaacgcgttggaacccgaccaccgcgttgagtccgaaggtggtcttattgaaacatggaactctcaacaccctgagctgcaatgcgccggtgtcactgtttccaaacgcaccctcaaccgcaacggcctccacttgccatcttactcaccttatccccaaatgatcattgtcgttcaaggtgcgtaatattagtaagaagtatttatcagcttaacgtgataacaataatagtaatatgaaatatttattaaattttttataattaatctctgctag

SEQ ID NO: 4176 - DNA, 627 bp, Artificial
  Mutations within GlyA3B4 introduced by GmGlyA3B4_T02TALE nuclease
gttcatgtacggttgcagatataaacgaagcatagcttatgtatgaggtgtaacaaaattggaaacaatagccatgcaaggtgaagaatgtcaccaactcagaaacccttcttcattgacgtgtccctcactcactctcctctcttcactataaatcgccactcttcgtgttctccacttcaccaactccttcaaacttattaacactttccttagttcaatatggggaagcccttcttcactctctctctttcttccctttgcttgctactcttgtcaacgagtgccaactcaacaacctcaacgcgttggaacccgaccaccgcgttgagtccgaaggtggtcttattgaaacatggaactctcaacaccctgagctgcaatgcgccggtgtcactgtttccaaacgcaccctcaaccgcaacggcctccacttgccatcttactcaccttatccccaaatgatcattgtcgttcaaggtgcgtaatattagtaagaagtatttatcagctttaacgtgataacaataatagtaatatgaaatatttattaaattttttataattaatctctgctagaaaatttgattaatcatttttagtagaatttgttttttctcaactagg

SEQ ID NO: 4177 - DNA, 659 bp, Artificial
  Mutations within GlyA3B4 introduced by GmGlyA3B4_T02TALE nuclease
gttcatgtacggttgcagatataaacgaagcatagcttatgtatgaggtgtaacaaaattggaaacaatagccatgcaaggtgaagaatgtcaccaactcagaaacccttcttcattgacgtgtccctcactcactctcctctcttcactataaatcgccactcttcgtgttctccacttcaccaactccttcaaacttattaacactttccttagttcaatatggggaagcccttcttcactctctctctttcttccctttgcttgctactcttgtcgagtgcattgctattacctccagcaagttcaacgagtgccaactcaacaacctcaacgcgttggaacccgaccaccgcgttgagtccgaaggtggtcttattgaaacatggaactctcaacaccctgagctgcaatgcgccggtgtcactgtttccaaacgcaccctcaaccgcaacggcctccacttgccatcttactcaccttatccccaaatgatcattgtcgttcaaggtgcgtaatattagtaagagtatttatcagcttaacgtgataacaatatagtaatatgaaatatttattaaatttttataattaatctctgctagaaaatttgattaatcattttagtagaatttgtttttctcaactaggtttttaaa

SEQ ID NO: 4178 - DNA, 562 bp, Artificial
  Mutations within GlyA3B4 introduced by GmGlyA3B4_T02TALE nuclease
gttcatgtacggttgcagatataaacgaagcatagcttatgtatgaggtgtaacaaaattggaaacaatagccatgcaaggtgaagaatgtcaccaactcagaaacccttcttcattgacgtgtccctcactcactctcctctcttcactataaatcgccactcttcgtgttctccacttcaccaactccttcaaacttattaacactttccttagttcaatatggggaagcccttcttcactctctctctttcttccctttgcttgctactcttgtcgagtgcatacctccagcaagttcaacgagtgccaactcaacaacctcaacgcgttggaacccgaccaccgcgttgagtccgaaggtggtcttattgaaacatggaactctcaacaccctgagctgcaatgcgccggtgtcactgtttccaaacgcaccctcaaccgcaacggcctccacttgccatcttactcaccttatccccaaactgatcattgtcgttcaaggtgcgtaatattagtaagaagtatttatcagcttaacgtgataacaatatagtaatat

SEQ ID NO: 4179 - DNA, 634 bp, Artificial; identical to SEQ ID NO: 2328
  Mutations within GlyA3B4 introduced by GmGlyA3B4_T02TALE nuclease

SEQ ID NO: 4180 - DNA, 680 bp, Artificial
  Mutations within GlyA3B4 introduced by GmGlyA3B4_T02TALE nuclease
gttcatgtacggttgcagatataaacgaagcatagcttatgtatgaggtgtaacaaaattggaaacaatagccatgcaaggtgaagaatgtcaccaactcagaaacccttcttcattgacgtgtcccctcactcactctcctctcttcactataaatcgccactcttcgtgttctccacttcaccaactccttcaaacttattaacactttccttagttcaatatggggaagcccttcttcactctctctctttcttccctttgcttgctactcttgtcgagtgcatttgctattacctccagcaagttcaacgagtgccaactcaacaacctcaacgcgttggaacccgaccaccgcgttgagtccgaaggtggtcttattgaaacatggaactctcaacaccctgagctgcaatgcgccggtgtcactgtttccaaacgcaccctcaaccgcaacggcctccacttgccatcttactcaccttatccccaaatgatcattgtcgttcaaggtgcgtaatattagtaagagtatttatcagcttaacgtgataacaatatagtaatatgaaatatttattaaatttttataattaatctctgctagaaaatttgattaatcattttagtagaatttgtttttctcaactaggtttttaaaacaccacacttgagactcc

SEQ ID NO: 4181 - DNA, 666 bp, Artificial
  Mutations within GlyA3B4 introduced by GmGlyA3B4_T02TALE nuclease
gttcatgtacggttgcagatataaacgaagcatagcttatgtatgaggtgtaacaaaaattggaaacaatagccatgcaaggtgaagaatgtcaccaactcagaaaccccttcttcattgacgtgtcccctcactcactctcctctcttcactataaatcgccactcttcgtgttctccacttcaccaactccttcaaacttattaacactttccttagttcaatatggggaagcccttcttcactctctctctttcttccctttgcttgctactcttgtcgagtttacctccagcaagttcaacgagtgccaactcaacaacctcaacgcgttggaacccgaccaccgcgttgagtccgaaggtggtcttattgaaacatggaactctcaacacccctgagctgcaatgcgccggtgtcactgtttccaaacgcaccctcaaccgcaacggcctccacttgccatcttactcaccttatcccccaaaatgatcttgtcgttcaaggtgcgtaaatattagtaagaagtatttatcagcttaacgtgataacaataatagtaatatgaaatatttattaaattttttaataattaatctctgctagaaaatttgattaatctttttagtagaaattgttttttctcaactaggtttaaaacaccac

SEQ ID NO: 4182 - DNA, 596 bp, Artificial
  Mutations within GlyA3B4 introduced by GmGlyA3B4_T02TALE nuclease
  misc_feature (546): n is a or c or t or g
gttcatgtacggttgcagatataaacgaagcatagcttatgtatgaggtgtaacaaaattggaaacaatagccatgcaaggtgaagaatgtcaccaactcagaaacccttcttcattgacgtgtccctcactcactctcctctcttcactataaaatcgccactcttcgtgttctccacttcaccaactccttcaaacttattaacactttccttagttcaatatggggaagcccttcttcactctctctctttcttccctttgcttgctactcttgtcgagtgcatgcttattaacctcccacgcaagttcaaatcagagtgccaacctacaacaacctcaaacagcgttggaacccgaccaccgcgttgagtccgaaggtggtcttattgaaacatggaactctcaacaccctgagctgcaatgcgccggtgtcactgtttccaaaacgcacccctcaaccgcaacggcctccacttgccatcttactcaccttatcccccaaaatgatcattgtcgttcaaggtgcgtaatattagtaagagnatttatcagcttaacgtgataacaataatagtaatatgaaaatatttatt

SEQ ID NO: 4183 - DNA, 765 bp, Artificial
  Mutations within GlyA3B4 introduced by GmGlyA3B4_T02TALE nuclease
gttcatgtacggttgcagatataaacgaagcatagcttatgtatgaggtgtaacaaaattggaaacaatagccatgcaaggtgaagaatgtcaccaactcagaaaccccttcttcattgacgtgtccctcactcactctcctctcttcactataaatcgccactcttcgtgttctccacttcaccaactccttcaaacttattaacactttccttagttcaatatggggaagcccttcttcactctctctctttcttccctttgcttgctactcttgtcgagtgcatgctccagcggctgttgccggtgctgtgccaggcccacggcttgaccccccagcaggtggtggccatcgccatgcatgcactgcctccactgcggtcacgccgccacgttttgcaatcttgagaagttgctattacctccagcaagttcaacgagtgccaactcaacaacctcaacgcgttggaacccgaccaccgcgttgagtccgaaggtggtcttattgaaacatggaactctcaacaccctgagctgcaatgcgccggtgtcactgtttccaaacgcaccctcaaccgcaacggcctccacttgccatcttactcaccttatcccaaatgatcattgtcgtcaaggtgcgtaatattagtaagaagtatttatcaagcttaacgtgataacaataatagtaatatgaaatatttattaaattttttataattaatctctgctagaaaatttgattaatcattttagtagaatttg

SEQ ID NO: 4184 - DNA, 634 bp, Artificial
  Mutations within GlyA3B4 introduced by GmGlyA3B4_T02TALE nuclease
  misc_feature (529): n is a or c or t or g
gttcatgtacggttgcagatataaacgaagcatagcttatgtatgaggtgtaacaaaattggaaacaatagccatgcaaggtgaagaatgtcaccaactcagaaacccttcttcattgacgtgtccctcactcactctcctctcttcactataaatcgccactcttcgtgttctccacttcaccaactccttcaaacttattaacactttccttagttcaatatggggaagcccttcttcactctctctctttcttccctttgcttgctactcttgtcgagtgctgctattacctccagcaagttcaacgagtgccaactcaacaacctcaacgcgttggaacccgaccaccgcgttgagtccgaaggtggtcttattgaaacatggaactctcaacaccctgagctgcaatgcgccggtgtcactgtttccaaacgcaccctcaaccgcaacggcctccacttgccatcttactcaccttatccccaaatgatcattgtcgttcaaggtgcgtaatattagtaagagnatttatcagcttaacgtgataacaatatagtaatatgaaatatttattaaatttttataattaatctctgctagaaaatttgattaatcattttagtagaatttg

SEQ ID NO: 4185 - DNA, 661 bp, Artificial
  Mutations within GlyA3B4 introduced by GmGlyA3B4_T02TALE nuclease
gttcatgtacggttgcagatataaacgaagcatagcttatgtatgaggtgtaacaaaattggaaacaatagccatgcaaggtgaagaatgtcaccaactcagaaaccccttcttcattgacgtgtccctcactcactctcctctcttcactataaatcgccactcttcgtgttctccacttcaccaactccttcaaacttattaacactttccttagttcaatatggggaagcccttcttcactctctctctttcttccctttgcttgctactcttgtcgagtgctattacctccagcaagttcaacgagtgccaactcaacaacctcaacgcgttggaacccgaccaccgcgttgagtccgaaggtggtcttattgaaacatggaactctcaacaccctgagctgcaatgcgccggtgtcactgtttccaaacgcaccctcaaccgcaacggcctccacttgccatcttactcaccttatccccaaatgatcattgtcgttcaaggtgcgtaatattagtaagaagtatttatcagcttaacgtgataacaataatagtaatatgaaatatttattaaatttttataattaatctctgctagaaaatttgattaatcattttagtagaatttgttttctcaactaggttttaaaacacca

SEQ ID NO: 4186 - DNA, 665 bp, Artificial
  Mutations within GlyA3B4 introduced by GmGlyA3B4_T02TALE nuclease
gttcatgtacggttgcagatataaacgaagcatagcttatgtatgaggtgtaacaaaattggaaacaatagccatgcaaggtgaagaatgtcaccaactcagaaacccttcttcattgacgtgtccctcactcactctcctctcttcactataaatcgccactcttcgtgttctccacttcaccaactccttcaaacttattaacactttccttagttcaatatggggaagcccttcttcactctctctctttcttccctttgcttgctactcttgtcgagtgcattgctattacctccagcaagttcaacgagtgccaactcaacaacctcaacgcgttggaacccgaccaccgcgttgagtccgaaggtggtcttattgaaacatggaactctcaacaccctgagctgcaatgcgccggtgtcactgtttccaaacgcaccctcaaccgcaacggcctccacttgccatcttactcaccttatccccaaatgatcattgtcgttcaaggtgcgtaatattagtaagagtatttatcagcttaacgtgataacaataatagtaatatgaaatatttattaaatttttataattaatctctgctagaaaatttgattaatcattttagtagaatttgtttttctcaactaggttttaaaacacca

SEQ ID NO: 4187 - DNA, 624 bp, Artificial
  Mutations within GlyA3B4 introduced by GmGlyA3B4_T02TALE nuclease
gttcatgtacggttgcagatataaacgaagcatagcttatgtatgaggtgtaacaaaattggaaacaatagccatgcaaggtgaagaatgtcaccaactcagaaacccttcttcattgacgtgtccctcactcactctcctctcttcactataaatcgccactcttcgtgttctccacttcaccaactccttcaaacttattaacactttccttagttcaatatggggaagcccttcttcactctctctctttcttccctttgcttgctactcttgtcgagtgcatctgcttgccaccgccattgctggcgatggccaccacctgctggggggtcaagccgtgggcctggcacagcaccggcaacagccgctgctattacctccagcaagttcaacgagtgccaactcaacaacctcaacgcgttggaacccgaccaccgcgttgagtccgaaggtggtcttattgaaacatggaactctcaacaccctgagctgcaatgcgccggtgtcactgtttccaaacgcaccctcaaccgcaacggcctccacttgccatcttactcaccttatccccaaatgatcattgtcgttcaaggtgcgtaatattagtaagaagtatttatc

SEQ ID NO: 4188 - DNA, 664 bp, Artificial
  Mutations within GlyA3B4 introduced by GmGlyA3B4_T02TALE nuclease
gttcatgtacggttgcagatataaacgaagcatagcttatgtatgaggtgtaacaaaattggaaacaatagccatgcaaggtgaagaatgtcaccaactcagaaaccccttcttcattgacgtgtccctcactcactctcctctcttcactataaatcgccactcttcgtgttctccacttcaccaaactccttcaaacttattaacactttccttagttcaatatggggaagcccttcttcactctctctctttcttccctttgcttgctactcttgtcgagtgcattattacctccagcaagttcaacgagtgccaactcaacaacctcaacgcgttggaacccgaccaccgcgttgagtccgaaggtggtcttattgaaacatggaactctcaacaccctgagctgcaatgcgccggtgtcactgtttccaaacgcaccctcaaccgcaacggcctccacttgccatcttactcaccttatccccaaatgatcattgtcgttcaaggtgcgtaatattagtaagaagtatttatcagcttaacgtgataacaataatagtaatatgaaatatttattaaatttttataattaatctctgctagaaaatttgattaatcattttagtagaatttgttttctcaactaggttttaaaacacca

SEQ ID NO: 4189 - DNA, 636 bp, Artificial
  Mutations within GlyA3B4 introduced by GmGlyA3B4_T02TALE nuclease
gttcatgtacggttgcagatataaacgaagcatagcttatgtatgaggtgtaacaaaattggaaacaatagccatgcaaggtgaagaatgtcaccaactcagaaacccttcttcattgacgtgtccctcactcactctcctctcttcactataaatcgccactcttcgtgttctccacttcaccaactccttcaaacttattaacactttccttagttcaatatggggaagcccttcttcactctctctctttcttccctttgcttgctactcttgtcgagtgcactattacctccagcaagttcaacgagtgccaactcaacaacctcaacgcgttggaacccgaccaccgcgttgagtccgaaggtggtcttattgaaacatggaactctcaacaccctgagctgcaatgcgccggtgtcactgtttccaaacgcaccctcaaccgcaacggcctccacttgccatcttactcaccttatcccccaaatgatcattgtcgttcaaggtgcgtaatattagtaagaagtatttatcagcttaacgtgataacaataatagtaatatgaaatatttattaaatttttataattaatctctgctagaaaatttgattaatcattttagtagaatttg

SEQ ID NO: 4190 - DNA, 666 bp, Artificial
  Mutations within GlyA3B4 introduced by GmGlyA3B4_T02TALE nuclease
gttcatgtacggttgcagatataaacgaagcatagcttatgtatgaggtgtaacaaaattggaaacaatagccatgcaaggtgaagaatgtcaccaactcagaaacccttcttcattgacgtgtccctcactcactctcctctcttcactataaatcgccactcttcgtgttctccacttcaccaactccttcaaacttattaacacttttccttagttcaatatggggaagcccttcttcactctctctctttcttccctttgcttgctactcttgtcgagtgcatctctattacctccagcaagttcaacgagtgccaactcaacaacctcaacgcgttggaacccgaccaccgcgttgagtccgaaggtggtcttattgaaacatggaactctcaacaccctgagctgcaatgcgccggtgtcactgtttccaaacgcaccctcaaccgcaacggcctccacttgccatcttactcaccttatccccaaatgatcattgtcgttcaaggtgcgtaatattagtaagaagtatttatcagcttaacgtgataacaataatagtaatatgaaatatttattaaatttttataattaatctctgctagaaaatttgattaatcattttagtagaatttgtttttctcaactaggttttaaacacca

SEQ ID NO: 4191 - DNA, 639 bp, Artificial
  Mutations within GlyA3B4 introduced by GmGlyA3B4_T02TALE nuclease
gttcatgtacggttgcagatataaacgaagcatagcttatgtatgaggtgtaacaaaattggaaacaatagccatgcaaggtgaagaatgtcaccaactcagaaacccttcttcattgacgtgtccctcactcactctcctctcttcactataaatcgccactcttcgtgttctccacttcaccaactccttcaaacttattaacactttccttagttcaatatggggaagcccttcttcactctctctctttcttcccttcttcactattacctccagcaagttcaacgagtgccaactcaacaacctcaacgcgttggaacccgaccaccgcgttgagtccgaaggtggtcttattgaaacatggaactctcaacaccctgagctgcaatgcgccggtgtcactgtttccaaacgcaccctcaaccgcaacggcctccacttgccatcttactcaccttatcccccaaatgatcattgtcgttcaaggtgcgtaatattagtaagaagtatttatcagcttaacgtgataacaataatagtaatatgaaatatttattaaattttttataattaatctctgctagaaaatttgattaatcatttttagtagaatttgttttttctcaactaggtttt

SEQ ID NO: 4192 - DNA, 663 bp, Artificial
  Mutations within GlyA3B4 introduced by GmGlyA3B4_T02TALE nuclease
gttcatgtacggttgcagatataaacgaagcatagcttatgtatgaggtgtaacaaaaattggaaacaatagccatgcaaggtgaagaatgtcaccaactcagaaacccttcttcattgacgtgtccctcactcactctcctctcttcactataaatcgccactcttcgtgttctccacttcaccaactccttcaaacttattaacactttccttagttcaatatggggaagcccttcttcactctctctctttcttccctttgcttgctactcttgtcgagtgcatgctattacctccagcaagttcaacgagtgccaactcaacaacctcaacgcgttggaacccgaccaccgcgttgagtccgaaggtggtcttattgaaacatggaactctcaacaccctgagctgcaatgcgccggtgtcactgtttccaaacgcaccctcaaccgcaacggcctccacttgccatcttactcaccttatccccaaatgatcattgtcgttcaaggtgcgtaatattagtaagaagtatttatcagcttaacgtgataacaataatagtaatatgaaatatttattaaatttttataattaatctctgctagaaaatttgattaatcattttagtagaatttgttttctcaactaggtttttaaaaca

SEQ ID NO: 4193 - DNA, 666 bp, Artificial; identical to SEQ ID NO: 1875
  Mutations within GlyA3B4 introduced by GmGlyA3B4_T02TALE nuclease

SEQ ID NO: 4194 - DNA, 742 bp, Artificial
  Mutations within GlyA3B4 introduced by GmGlyA3B4_T02TALE nuclease
gttcatgtacggttgcagatataaacgaagcatagcttatgtatgaggtgtaacaaaattggaaacaatagccatgcaaggtgaagaatgtcaccaactcagaaacccttcttcattgacgtgtccctcactcactctcctctcttcactataaatcgccactcttcgtgttctccacttcaccaactccttcaaacttattaacactttccttagttcaatatggggaagcccttcttcactctctctctttcttccctttgcttgctactcttgtcgagtgcataccgtctccagcgcctgcttgccaccgccattgctggcgatggccaccacctgctggggggtcaagccgtgggcctggcacagcaccggcaacagccgctttgctattacctccagcaagttcaacgagtgccaactcaacaacctcaacgcgttggaacccgaccaccgcgttgagtccgaaggtggtcttattgaaacatggaactctcaacaccctgagctgcaatgcgccggtgtcactgtttccaaacgcacctcaaccgcaacggcctccacttgccatcttactcaccttatccccaaatgatcattgtcgttcaaggtgcgtaatattagtaagaagtatttatcagcttaacgtgataacaataatagtaatatgaaaatatttattaaacttttttataattaatctctgctagaaaatttgattaatcatttttagtagaatttg

SEQ ID NO: 4195 - DNA, 667 bp, Artificial
  Mutations within GlyA3B4 introduced by GmGlyA3B4_T02TALE nuclease
gttcatgtacggttgcagatataaacgaagcatagcttatgtatgaggtgtaacaaaattggaaacaatagccatgcaaggtgaagaatgtcaccaactcagaaacccttcttcattgacgtgtccctcactcactctcctctcttcactataaatcgccactcttcgtgttctccacttcaccaactccttcaaacttattaacactttccttagttcaatatggggaagcccttcttcactctctctctttcttccctttgcttgctactcttgtcgagtgcatgctattacctccagcaagttcaacgagtgccaactcaacaacctcaacgcgttggaacccgaccaccgcgttgagtccgaaggtggtcttattgaaacatggaactctcaacaccctgagctgcaatgcgccggtgtcactgtttccaaacgcaccctcaaccgcaacggcctccacttgccatcttactcaccttatccccaaatgatcattgtcgttcaaggtgcgtaatattagtaagaagtatttatcagcttaacgtgataacaatatagtaatatgaaatatttattaaatttttataattaatctctgctagaaaatttgattaatcattttagtagaatttgtttttctcaactaggtttttaaaacaccaca

SEQ ID NO: 4196 - DNA, 524 bp, Artificial
  Mutations within GlyA3B4 introduced by GmGlyA3B4_T02TALE nuclease
gttcatgtacggttgcagatataaacgaagcatagcttatgtatgaggtgtaacaaaattggaaacaatagccatgcaaggtgaagaatgtcaccaactcagaaacccttcttcattgacgtgtccctcactcactctcctctcttcactataaatcgccactcttcgtgttctccacttcaccaactccttcagcaagttcaacgagtgccaactcaacaacctcaacgcgttggaacccgaccaccgcgttgagtccgaaggtggtcttattgaaacatggaactctcaacaccctgagctgcaatgcgccggtgtcactgtttccaaacgcaccctcaaccgcaacggcctccacttgccatcttactcaccttatcccccaaatgatcattgtcgttcaaggtgcgtaatattagtaagaagtatttatcagcttaacgtgataacaataatagtaatatgaaatatttattaaattttttattaattaatctctgctagaaattgattaatcattttag

SEQ ID NO: 4197 - DNA, 632 bp, Artificial
  Mutations within GlyA3B4 introduced by GmGlyA3B4_T02TALE nuclease
gttcatgtacggttgcagatataaacgaagcatagcttatgtatgaggtgtaacaaaattggaaacaatagccatgcaaggtgaagaatgtcaccaactcagaaacccttcttcattgacgtgtccctcactcactctcctctcttcactataaatcgccactcttcgtgttctccacttcaccaactccttcaaacttattaacactttccttagttcaatatggggaagcccttcttcactctctctctttcttccctttgcttgctactcttgtcgagttgctattacctccagcaagttcaacgagtgccaactcaacaacctcaacgcgttggaacccgaccaccgcgttgagtccgaaggtggtcttattgaacatggaactctcaacaccctgagctgcaatgcgccggtgtcactgtttccaaacgcaccctcaaccgcaacggcctccacttgccatcttactcaccttatccccaaatgatcattgtcgttcaaggtgcgtaatattagtaagaagtatttatcagcttaacgtgataacaatatagtaatatgaaatatttattaaatttttataattaatctctgctagaaaatttgattaatcatttttagtagaattt

SEQ ID NO: 4198 - DNA, 666 bp, Artificial
  Mutations within GlyA3B4 introduced by GmGlyA3B4_T02TALE nuclease
gttcatgtacggttgcagatataaacgaagcatagcttatgtatgaggtgtaacaaaattggaaacaatagccatgcaaggtgaagaatgtcaccaactcagaaacccttcttcattgacgtgtccctcactcactctcctctcttcactataaatcgccactcttcgtgttctccacttcaccaactccttcaaacttattaacactttccttagttcaatatggggaagcccttcttcactctctctctttcttccctttgcttgctactcttgtcgagtgcatgctattacctccagcaagttcaacgagtgccaactcaacaacctcaacgcgttggaacccgaccaccgcgttgagtccgaaggtggtcttattgaaacatggaactctcaacaccctgagctgcaatgcgccggtgtcactgtttccaaacgcaccctcaaccgcaacggcctccacttgccatcttactcaccttatccccaaatgatcattgtcgttcaaggtgcgtaatattagtaagaagtatttatcagcttaacgtgataacaataatagtaatatgaaaatatttattaaatttttataattaatctctgctagaaaatttgattaatcattttagtagaatttgtttttctcaactaggttttaaaacacca

SEQ ID NO: 4199 - DNA, 662 bp, Artificial
  Mutations within GlyA3B4 introduced by GmGlyA3B4_T02TALE nuclease
  misc_feature (531): n is a or c or t or g
gttcatgtacggttgcagatataaacgaagcatagcttatgtatgaggtgtaacaaaattggaaacaatagccatgcaaggtgaagaatgtcaccaactcagaaacccttcttcattgacgtgtccctcactcactctcctctcttcactataaatcgccactcttcgtgttctccacttcaccaactccttcaaacttattaacactttccttagttcaatatggggaagcccttcttcactctctctctttcttccctttgcttgctactcttgtcgagtgcattgctattacctccagcaagttcaacgagtgccaactcaacaacctcaacgcgttggaacccgaccaccgcgttgagtccgaaggtggtcttattgaaacatggaactctcaacaccctgagctgcaatgcgccggtgtcactgtttccaaacgcaccctcaaccgcaacggcctccacttgccatcttactcaccttatccccaaatgatcattgtcgttcaaggtgcgtaatattagtaagagnatttatcagcttaacgtgatacaatatagtaatatgaaatatttattaaatttttataattaatctctgctagaaaatttgattaatcattttagtagaatttgtttttctcaactaggttttaaacacca

SEQ ID NO: 4200 - DNA, 628 bp, Artificial
  Mutations within GlyA3B4 introduced by GmGlyA3B4_T02TALE nuclease
  misc_feature (534): n is a or c or t or g
gttcatgtacggttgcagatataaacgaagcatagcttatgtatgaggtgtaacaaaattggaaacaatagccatgcaaggtgaagaatgtcaccaactcagaaacccttcttcattgacgtgtccctcactcactctcctctcttcactataaatcgccactcttcgtgttctccacttcaccaactccttcaaacttattaacactttccttagttcaatatggggaagcccttcttcactctctctctttcttccctttgcttgctactcttgtcgagtgcatggagacggtccagcggctgttgccggtgctgtgccaggcccacggcttgaccccggagcaggtggtggccatcgccagccacgataccctgagctgcaatgcgccggtgtcactgtttccaaacgcacccctcaaccgcaacggccctccacttgccatcttactcaccttatccccaaatgatcattgtcgttcaaggtgcgtaatattagtaagaagtatttatcagcttaacgtgataacaatanagtaatatgaaatatttattaaattttttataattaatctctgctagaaaatttgattaatcatttttagtagaatttgtttttctcaactagg

SEQ ID NO: 4201 - DNA, 475 bp, Artificial; identical to SEQ ID NO: 2175
  Mutations within GlyA3B4 introduced by GmGlyA3B4_T02TALE nuclease

SEQ ID NO: 4202 - DNA, 634 bp, Artificial
  Mutations within GlyA3B4 introduced by GmGlyA3B4_T02TALE nuclease
gttcatgtacggttgcagatataaacgaagcatagcttatgtatgaggtgtaacaaaattggaaacaatagccatgcaaggtgaagaatgtcaccaactcagaaaccccttcttcattgacgtgtccctcactcactctcctctcttcactataaatcgccactcttcgtgttctccacttcaccaactccttcaaacttattaacactttccttagttcaatatggggaagcccttcttcactctctctctttcttccctttgcttgctactcttgtcgagtgcatattacctccagcaagttcaacgagtgccaactcaacaacctcaacgcgttggaacccgaccaccgcgttgagtccgaaggtggtcttattgaaacatggaactctcaacaccctgagctgcaatgcgccggtgtcactgtttccaaacgcaccctcaaccgcaacggcctccacttgccatcttactcaccttatccccaaatgatcattgtcgttcaaggtgcgtaatattagtaagaagtatttatcagcttaacgtgataacaatatagtaatatgaaatatttattaaatttttataattaatctctgctagaaaatttgattaatcattttagtagaatttg

SEQ ID NO: 4203 - DNA, 663 bp, Artificial
  Mutations within GlyA3B4 introduced by GmGlyA3B4_T02TALE nuclease
gttcatgtacggttgcagatataaacgaagcatagcttatgtatgaggtgtaacaaaattggaaacaatagccatgcaaggtgaagaatgtcaccaactcagaaacccttcttcattgacgtgtccctcactcactctcctctcttcactataaatcgccactcttcgtgttctccacttcaccaactccttcaaacttattaacactttccttagttcaatatggggaagcccttcttcactctctctctttcttccctttgcttgctactcttgtcgagtgcagagcagacaagcccgtcagggcgcgtcagcgggtgttggcgggtgtcggggctggcttaactatgcggcatcagagcagattgtactgagagtgcaccatatgctatttacctccagcaagttcaacgagtgccaactcaacaacctcaacgcgttggaacccgacaccgcgttgagtccgaaggtggtcttattgaaacatggaactctcaacaccctgagctgcaatgcgccggtgtcactgttttccaaacgcacctcaaccgcaacggcctccacttgccatcttactcaccttatccccaaaatgatcattgtcgttcaaggtgcgtaatattagtaagaaagtatttatcagcttaacgtgataacaataat

SEQ ID NO: 4204 - DNA, 699 bp, Artificial
  Mutations within GlyA3B4 introduced by GmGlyA3B4_T02TALE nuclease
gttcatgtacggttgcagatataaacgaagcatagcttatgtatgaggtgtaacaaaattggaaacaatagccatgcaaggtgaagaatgtcaccaactcagaaacccttcttcattgacgtgtccctcactcactctcctctcttcactataaatcgccactcttcgtgttctccacttcaccaactccttcaaacttattaacactttccttagttcaatatggggaagcccttcttcactctctctctttcttccctttgcttgctactcttgtcgagtgcatgcagcaccggcaacagccgctggaccgtctccagcgcctgcttgctttgctattacctccagcaagttcaacgagtgccactcaacaacctcaacgcgttggaacccgaccaccgcgttgagtccgaaggtggtcttattgaaaacatggaactctcaacaccctgagctgcaatgcgccggtgtcactgtttccaaacgcaccctcaaccgcaacggcctccacttgccatcttactcaccctttatccccaaatgatcattgtcgttcaaggtgcgtaatattagtaagaagtatttatcagcttaacgtgataacaataatagtaatatgaaatatttattaaattttttataaattaatctctgctagaaaatttgaattaatcatttttagtagaatttgtttttctc

SEQ ID NO: 4205 - DNA, 624 bp, Artificial
  Mutations within GlyA3B4 introduced by GmGlyA3B4_T02TALE nuclease
gttcatgtacggttgcagatataaacgaagcatagcttatgtatgaggtgtaacaaaattggaaacaatagccatgcaaggtgaagaatgtcaccaactcagaaacccttcttcattgacgtgtccctcactcactctcctctcttcactataaatcgccactcttcgtgttctccacttcaccaactccttcaaacttattaacactttccttagttcaatatggggaagcccttcttcactctctctctttcttccctttgcttgctattcaaatatttcatattactattacctccagcaagttcaacgagtgccaactcaacaacctcaacgcgttggaacccgaccaccgcgttgagtccgaaggtggtcttattgaaacatggaactctcaacaccctgagctgcaatgcgccggtgtcactgtttccaaacgcaccctcaaccgcaacggcctccacttgccatcttactcaccttatcccccaaatgatcattgtcgttcaaggtgcgtaatattagtaagaagtatttatcagcttaacgtgataacaataatagtaatatgaaatatttattaaatttttataattaatctctgctagaaaatttgattaatca

SEQ ID NO: 4206 - DNA, 472 bp, Artificial
  Mutations within GlyA3B4 introduced by GmGlyA3B4_T02TALE nuclease
gttcatgtacggttgcagatataaacgaagcatagcttatgtatgaggtgtaacaaaattggaaacaatagccatgcaaggtgaagaatgtcaccaactcagaaacccttcttcattgacgtgtccctcactcactctcctctcttcactataaatcgccactcttcgtgttctccacttcaccaactccttcaaacttattaacactttccttagttcaatatggggaagcccttcttcactctcaacaccctgagctgcaatgcgccggtgtcactgtttccaaacgcaccctcaaccgcaacggcctccgacttgcctatcttactcaccttatccccaaatgatcaattgtcgttcaaggtgcgtaatattagtaagaagtatttatcagcttaacgtgataacaataatagtaatatgaaatatttattaaattttttataattaatctctgctagaaaatttgatt

SEQ ID NO: 4207 - DNA, 631 bp, Artificial; identical to SEQ ID NO: 2232
  Mutations within GlyA3B4 introduced by GmGlyA3B4_T02TALE nuclease

SEQ ID NO: 4208 - DNA, 618 bp, Artificial; identical to SEQ ID NO: 2883
  Mutations within GlyA3B4 introduced by GmGlyA3B4_T02TALE nuclease

SEQ ID NO: 4209 - DNA, 423 bp, Artificial
  Mutations within GlyA3B4 introduced by GmGlyA3B4_T02TALE nuclease
gttcatgtacggttgcagatataaacgaagcatagcttatgtatgaggtgtaacaaaattggaaacaatagccatgcaaggtgaagaatgtcaccaactcagaaacccttcttcattgacgtgtccctcactcactctcctctcttcactataaatcgccactcttcgtgttctccacttcaccaactccttcaaacttattaacactttccttagttcaatatggggaagcccttcttcactctctctctttcttccctttgcttgctactcttgtcgagtgcatgctattacctccagcaagttcaacgagtgccaactcaacaacctcaacgcgttggaacccgaccaccgcgttgagtccgaaggtggtcttattgaaacatggaactctcaacacctgagctgcaatgcgccggtgtc

SEQ ID NO: 4210 - DNA, 649 bp, Artificial
  Mutations within GlyA3B4 introduced by GmGlyA3B4_T02TALE nuclease
gttcatgtacggttgcagatataaacgaagcatagcttatgtatgaggtgtaacaaaattggaaacaatagccatgcaaggtgaagaatgtcaccaactcagaaacccttcttcattgacgtgtccctcactcactctcctctcttcactataaatcgccactcttcgtgttctccacttcaccaactccttcaaacttattaacactttccttagttcaatatggggaagcccttcttcactctctctctttcttccctttgcttgctactcttgtcgagtgcatgcctccagcaagttcaacgagtgccaactcaacaacctcaacgcgttggaacccgaccaccgcgttgagtccgaaggtggtcttattgaaacatggaactctcaacaccctgagctgcaatgcgccggtgtcactgtttccaaacgcaccctcaaccgcaacggcctccacttgccatcttactcaccttatccccaaatgatcattgtcgttcaaggtgcgtaatattagtaagaagtatttatcagcttaacgtgataacaataatagtaatatgaaatatttattaaatttttataattaatctctgctagaaaatttgattaatcattttagtagaatttgttttctcaactaggtttt

SEQ ID NO: 4211 - DNA, 667 bp, Artificial; identical to SEQ ID NO: 3401
  Mutations within GlyA3B4 introduced by GmGlyA3B4_T02TALE nuclease

SEQ ID NO: 4212 - DNA, 564 bp, Artificial
  Mutations within GlyA3B4 introduced by GmGlyA3B4_T02TALE nuclease
gttcatgtacggttgcagatataaacgaagcatagcttatgtatgaggtgtaacaaaattggaaacaatagccatgcaaggtgaagaatgtcaccaactcagaaacccttcttcattgacgtgtccctcactcactctcctctcttcactataaatcgccactcttcgtgttctccacttcaccaactccttcaaacttattaacactttccttagttcaatatggggaagcccttcttcactctctctctttcttccctttgcttgctactcttgtcgagtgcatacctccagcaagttcaacgagtgccaactcaacaacctcaacgcgttggaacccgaccaccgcgttgagtccgaaggtggtcttattgaaacatggaactctcaacaccctgagctgcaatgcgccggtgtcactgtttccaaacgcaccctcaccgcaacggcctccaacgcttgccatcttcactcaccttatccccaactaatcattgtcgttcaaggtgcgtaatattagtaagaagtatttatcagcttaacgtgataacaatatagtaatat

SEQ ID NO: 4213 - DNA, 650 bp, Artificial; identical to SEQ ID NO: 2588
  Mutations within GlyA3B4 introduced by GmGlyA3B4_T02TALE nuclease

SEQ ID NO: 4214 - DNA, 652 bp, Artificial
  Mutations within GlyA3B4 introduced by GmGlyA3B4_T02TALE nuclease
gttcatgtacggttgcagatataaacgaagcatagcttatgtatgaggtgtaacaaaattggaaacaatagccatgcaaggtgaagaatgtcaccaactcagaaacccttcttcattgacgtgtccctcactcactctcctctcttcactataaatcgccactcttcgtgttctccacttcaccaactccttcaaacttattaacactttccttagttcaatatggggaagcccttcttcactctctctctttcttccctttgcttgctactcttgtccagcaagttcaacgagtgccaactcaacaacctcaacgcgttggaacccgaccaccgcgttgagtccgaaggtggtcttattgaaacatggaactctcaacacccctgagctgcaatgcgccggtgtcactgttttccaaacgcaccctcaaccgcaacggcctccacttgccatcttactcaccttatccccaaatgatcattgtcgttcaaggtgcgtaatattagtaagaagtatttatcagcttaacgtgataacaataatagtaatatgaaatatttattaaattttttataattaatctctgctagaaaatttgattaatcatttttagtagaatttgttttttctcaactaggttttaaacaccaca

SEQ ID NO: 4215 - DNA, 568 bp, Artificial
  Mutations within GlyA3B4 introduced by GmGlyA3B4_T02TALE nuclease
gttcatgtacggttgcagatataaacgaagcatagcttatgtatgaggtgtaacaaaattggaaacaatagccatgcaaggtgaagaatgtcaccaactcagaaaccccttcttcattgacgtgtccctcactcactctcctctcttcactataaatcgccactcttcgtgttctccacttcaccaactccttcaaacttattaacactttccttagttcaatatgggggaagcccttcttcactctctctctttcttccctttgcttgctactcttgtcgagtgcatctattacctccagcaagttcaacgagtgccaactcaacaacctcaacgcgttggaacccgaccaccgcgttgagtccgaaggtggtcttattgaaacatggaactctcaacaccctgagctgcaatgcgccggtgtcactgtttccaaacgcaccctcaaccgcaacggcctccacttgccatcttactcaccttatccccaaatgatcattgtcgttcaaggtgcgtaatattagtaagaagtatttatcagcttaacgtgatacaatatagtaatatg

SEQ ID NO: 4216 - DNA, 661 bp, Artificial
  Mutations within GlyA3B4 introduced by GmGlyA3B4_T02TALE nuclease
gttcatgtacggttgcagatataaacgaagcatagcttatgtatgaggtgtaacaaaattggaaacaatagccatgcaaggtgaagaatgtcaccaactcagaaaccccttcttcattgacgtgtccctcactcactctcctctcttcactataaatcgccactcttcgtgttctccacttcaccaactccttcaaacttattaacactttccttagttcaatatggggaagcccttcttcactctctctctttcttccctttgcttgctactcttgtcgagtgcattgctattacctccagcaagttcaacgagtgccaactcaacaacctcaacgcgttggaacccgaccaccgcgttgagtccgaaggtggtcttattgaaacatggaactctcaacaccctgagctgcaatgcgccggtgtcactgtttccaaacgcaccctcaaccgcaacggcctccacttgccatcttactcaccttatccccaaatgatcattgtcgttcaaggtgcgtaatattagtaagagtatttatcagcttaacgtgataacaataatagtaatatgaaatatttattaaatttttataattaatctctgctagaaaatttgattaatcattttagtagaatttgttttctcaactaggtttttaaaa

SEQ ID NO: 4217 - DNA, 657 bp, Artificial
  Mutations within GlyA3B4 introduced by GmGlyA3B4_T02TALE nuclease
gttcatgtacggttgcagatataaacgaagcatagcttatgtatgaggtgtaacaaaattggaaacaatagccatgcaaggtgaagaatgtcaccaactcagaaacccttcttcattgacgtgtccctcactcactctcctctcttcactataaatcgccactcttcgtgttctccacttcaccaactccttcaaacttattaacactttccttagttcaatatggggaagcccttcttcactctctctctttcttccctttgcttgctactcttgtcgagtgcatttcggccacacccttgtgcctacgtccagtccccaagcaacccgcttgagagttccactatcttgtaaattccttttacggctgttgccggtgctgtgccaggcccacggcttgaccccggagcaggtggtggccatcgccagccacgatggcggcaagcaggcgctggaacgagtgccaactcaacaagttcaacgagtgccaactcaacaacctcaacgcgttggaacccgaccaccgcgttgagtccgaaggtggtcttattgaaacatggaactctcaacaccctgagctgcaatgcgccggtgtcactgtttccaaaacgcaccctcaaccgcaacggcctccacttgccatcttactcaccttat

SEQ ID NO: 4218 - DNA, 635 bp, Artificial; identical to SEQ ID NO: 2434
  Mutations within GlyA3B4 introduced by GmGlyA3B4_T02TALE nuclease

SEQ ID NO: 4219 - DNA, 587 bp, Artificial
  Mutations within GlyA3B4 introduced by GmGlyA3B4_T02TALE nuclease
gttcatgtacggttgcagatataaacgaagcatagcttatgtatgaggtgtaacaaaattggaaacaatagccatgcaaggtgaagaatgtcaccaactcagaaaccccttcttcattgacgtgtccctcactcactctcctctcttcactataaatcgccactcttcgtgttctccacttcaccaaactccttcaaacttattaacactttccttagttcaatatgggggaagcccttcttcactctctctctttcttccctttgcttgctactcttgtcgagtgcatccgaaggtggtccttattgaaacatggaactctcaacaccctgagctgcaatgcgccggtgtcactgtttccaaacgcaccctcaaccgcaacggcctccacttgccatcttactcaccttatccccaaatgatcattgtcgttcaaggtgcgtaatattagtaagaagtatttatcagcttaacgtgataacaataatagtaatatgaaatatttattaaatttttttataattaatctctgctagaaaatttgattaatcatttttagtagaatttgtttttctcaactaggtttt

SEQ ID NO: 4220 - DNA, 635 bp, Artificial; identical to SEQ ID NO: 1992
  Mutations within GlyA3B4 introduced by GmGlyA3B4_T02TALE nuclease

SEQ ID NO: 4221 - DNA, 573 bp, Artificial
  Mutations within GlyA3B4 introduced by GmGlyA3B4_T02TALE nuclease
gttcatgtacggttgcagatataaacgaagcatagcttatgtatgaggtgtaacaaaattggaaacaatagccatgcaaggtgaagaatgtcaccaactcagaaacccttcttcattgacgtgtccctcactcactctcctctcttcactataaatcgccactcttcgtgttctccacttcaccaactccttcaaacttattaacactttccttagttcaatatggggaagcccttcttcactctctctctttcttccctttgcttgctattacctccagcaagttcaacgagtgccaactcaacaacctcaacgcgttggaacccgaccaccgcgttgagtccgaaggtggtcttattgaaacatggaactctcaacacccctgagctgcaatgcgccggtgtcactgtttccaaacgcaccctcaaccgcaacggcctccacttgccatcttactcaccttatcccccaaatgatcattgtcgttcaaggtgcgtaatattagtaagaagtatttatcagcttaacgtgataacaataatagtaatatgaaatatttattaaattttttat

SEQ ID NO: 4222 - DNA, 655 bp, Artificial; identical to SEQ ID NO: 2627
  Mutations within GlyA3B4 introduced by GmGlyA3B4_T02TALE nuclease

SEQ ID NO: 4223 - DNA, 632 bp, Artificial; identical to SEQ ID NO: 1756
  Mutations within GlyA3B4 introduced by GmGlyA3B4_T02TALE nuclease

SEQ ID NO: 4224 - DNA, 635 bp, Artificial; identical to SEQ ID NO: 2407
  Mutations within GlyA3B4 introduced by GmGlyA3B4_T02TALE nuclease

SEQ ID NO: 4225 - DNA, 663 bp, Artificial
  Mutations within GlyA3B4 introduced by GmGlyA3B4_T02TALE nuclease
gttcatgtacggttgcagatataaacgaagcatagcttatgtatgaggtgtaacaaaattggaaacaatagccatgcaaggtgaagaatgtcaccaactcagaaaccccttcttcattgacgtgtccctcactcactctcctctcttcactataaatcgccactcttcgtgttctccacttcaccaactccttcaaacttattaacactttccttagttcaatatggggaagcccttcttcactctctctctttcttccctttgcttgctactcttgtcgagtgcatattactcccagcaagttcaacgagtgccaactcaacaacctcaacgcgttggaacccgaccaccgcgttgagtccgaaggtggtcttattgaaacatggaactctcaacaccctgagctgcaatgcgccggtgtcactgtttccaaacgcacccctcaaccgcaacggcctccacttgccatcttactcaccttatccccaaatgatcattgtcgttcaaggtgcgtaatattagtaagaagtatttatcagcttaacgtgataacaatatagtaatatgaaatatttattaaatttttataattaatctctgctagaaaatttgattaatcattttagtagaatttgttttctcaactaggtttttaaaacacca

SEQ ID NO: 4226 - DNA, 646 bp, Artificial
  Mutations within GlyA3B4 introduced by GmGlyA3B4_T02TALE nuclease
gttcatgtacggttgcagatataaacgaagcatagcttatgtatgaggtgtaacaaaattggaaacaatagccatgcaaggtgaagaatgtcaccaactcagaaacccttcttcattgacgtgtccctcactcactctcctctcttcactataaatcgccactcttcgtgttctccacttcaccaactccttcaaacttattaacactttccttagttcaatatggggaagcccttcttcactctctctctttcttccctttgcttgctactcttgtcgagtgcttacctccagcaagttcaacgagtgccaactcaacaacctcaacgcgttggaacccgaccaccgcgttgagtccgaaggtggtcttattgaaacatggaactctcaacaccctgagctgcaatgcgccggtgtcactgtttccaaacgcaccctcaaccgcaacggcctccacttgccatcttactcaccttatccccaaatgatcattgtcgttcaaggtgcgtaatattagtaagaagtatttatcagcttaacgtgataacaataatagtaatatgaaatatttattaaatttttataattaatctctgctagaaaatttgattaatcattttagtagaatttgtttttctcaactagg

SEQ ID NO: 4227 - DNA, 664 bp, Artificial
  Mutations within GlyA3B4 introduced by GmGlyA3B4_T02TALE nuclease
gttcatgtacggttgcagatataaacgaagcatagcttatgtatgaggtgtaacaaaattggaaacaatagccatgcaaggtgaagaatgtcaccaactcagaaacccttcttcattgacgtgtccctcactcactctcctctcttcactataaatcgccaactcttcgtgttctccacttcaccaactccttcaaacttattaacactttccttagttcaatatggggaagcccttcttcactctctctctttcttccctttgcttgctactcttgtcgagtgcatgtacctccagcaagttcaacgagtgccaactcaacaacctcaacgcgttggaacccgaccaccgcgttgagtccgaaggtggtcttattgaaacatggaactctcaacaccctgagctgcaatgcgccggtgtcactgtttccaaacgcaccctcaaccgcaacggcctccacttgccatcttactcaccttatccccaaatgatcattgtcgttcaaggtgcgtaatattagtaagaagtatttatcagcttaacgtgataacaataatagtaatatgaaatatttattaaatttttataattaatctctgctagaaaatttgattaatcatttttagtagaatttgtttttctcaactaggtttttaaaacacca

SEQ ID NO: 4228 - DNA, 635 bp, Artificial
  Mutations within GlyA3B4 introduced by GmGlyA3B4_T02TALE nuclease
  misc_feature (42): n is a or c or t or g
gttcatgtacggttgcagatataaacgaagcatagcttatgnatgaggtgtaacaaaattggaaacaatagccatgcaaggtgaagaatgtcaccaactcagaaacccttcttcattgacgtgtccctcactcactctcctctcttcactataaaatcgccactcttcgtgttctccacttcaccaactccttcaaacttattaacactttccttagttcaatatggggaagcccttcttcactctctctctttcttccctttgcttgctactcttgtcgagtgcaggcaagcaggcgctggagacggtcccagcggctgttgccggtgctgtgccaggccccacggctttgctattacctccagcaagttcaacgagtgccaactcacaacctcaacgcgttggaacccgaccaccgcgttgagtccgaaggtgtcttattgaaacatggaactctcaacaccctgagctgcaatgcgccggtgtcactgtttccaaacgcaccctcaaccgcaacggcctccactttgccatcttactcaccttatcccaaatgatcattgtcgttcaaggtgcgtaatattagtaagaagtatttatcagcttaacgtgataacaataatagtaatatgaaa

SEQ ID NO: 4229 - DNA, 621 bp, Artificial
  Mutations within GlyA3B4 introduced by GmGlyA3B4_T02TALE nuclease
gttcatgtacggttgcagatataaacgaagcatagcttatgtatgaggtgtaacaaaattggaaacaatagccatgcaaggtgaagaatgtcaccaactcagaaacccttcttcattgacgtgtccctcactcactctcctctcttcactataaatcgccactcttcgtgttctccacttcaccaactccttcaaacttattaacactttccttagttcaatatggggaagcccttcttcactctctctctttcttcccctccagcaagttcaacgagtgccaactcaacaacctcaacgcgttggaacccgaccaccgcgttgagtccgaaggtggtcttattgaaacatggaactctcaacaccctgagctgcaatgcgccggtgtcactgtttccaaacgcaccctcaaccgcaacggcctccacttgccatcttactcaccttatccccaaatgatcattgtcgttcaaggtgcgtaatattagtaagaagtatttatcagcttaacgtgataacaataatagtaatatgaaatatttattaatttttataattaatctctgctagaaaatttgattaatcatttttagtagaatttgtttttctcaactaggtttt

SEQ ID NO: 4230 - DNA, 649 bp, Artificial
  Mutations within GlyA3B4 introduced by GmGlyA3B4_T02TALE nuclease
gttcatgtacggttgcagatataaacgaagcatagcttatgtatgaggtgtaacaaaattggaaacaatagccatgcaaggtgaagaatgtcaccaactcagaaacccttcttcattgacgtgtccctcactcactctcctctcttcactataaatcgccactcttcgtgttctccacttcaccaactccttcaaacttattaacactttccttagttcaatatggggaagcccttcttcactctctctctttcttccctttgcttgctactcttgtcgagtgcatctacttacctcagcaagttcaacgagtgccaactcaacaacctcaacgcgttggaacccgaccaccgcgttgagtccgaaggtggtcttattgaaacatggaactctcaacaccctgagctgcaatgcgccggtgtcactgtttccaaacgcaccctcaaccgcaacggcctccacttgccatcttactcaccttatccccaaatgatcattgtcgttcaaggtgcgtaatattagtaagaagtatttatcagcttaacgtgataacaatatagtaatatgaaatatttattaaatttttataattaatctctgctagaaaatttgattaatcattttagtagaatttgttttctcaactagg

SEQ ID NO: 4231 - DNA, 651 bp, Artificial
  Mutations within GlyA3B4 introduced by GmGlyA3B4_T02TALE nuclease
gttcatgtacggttgcagatataaacgaagcatagcttatgtatgaggtgtaacaaaattggaaacaatagccatgcaaggtgaagaatgtcaccaactcagaaacccttcttcattgacgtgtccctcactcactctcctctcttcactataaatcgccactcttcgtgttctccacttcaccaactccttcaaacttattaacactttccttagttcaatatgggggaagcccttcttcactctctctctttcttccctttgcttgctactcttgtcgagtgcatattacctccagcaagttcaacgagtgccaactcaacaacctcaacgcgttggaacccgaccaccgcgttgagtccgaaggtggtcttattgaaacatggaactctcaacaccctgagctgcaatgcgccggtgtcactgtttccaaacgcaccctcaaccgcaacggcctccacttgccatcttactcaccttatccccaaatgatcattgtcgttcaaggtgcgtaatattagtaagaagtatttatcagcttaacgtgataacaataatagtaatatgaaatatttattaaatttttataattaatctctgctagaaaatttgattaatcatttttagtagaatttgtttttctcaactagg

SEQ ID NO: 4232 - DNA, 663 bp, Artificial
  Mutations within GlyA3B4 introduced by GmGlyA3B4_T02TALE nuclease
gttcatgtacggttgcagatataaacgaagcatagcttatgtatgaggtgtaacaaaaattggaaacaatagccatgcaaggtgaagaatgtcaccaactcagaaaccccttcttcattgacgtgtccctcactcactctcctctcttcactataaatcgccactcttcgtgttctccacttcaccaactccttcaaacttattaacactttccttagttcaatatgggggaagcccttcttcactctctctctttcttccctttgcttgctactcttgtcgagttacctccagcaagttcaacgagtgccaactcaacaacctcaacgcgttggaacccgaccaccgcgttgagtccgaaggtggtcttattgaaacatggaactctcaacaccctgagctgcaatgcgccggtgtcactgtttccaaacgcaccctcaaccgcaacggcctccacttgccatcttactcaccttatcccccaaatgatcattgtcgttcaaggtgcgtaaatattagtaagaagtatttatcagcttaacgtgataacaataatagtaatatgaaatatttattaaattttttataattaatctctgctagaaaatttgattaatctttttagtagaattgttttttctcaactaggtttaaaacaccaca

SEQ ID NO: 4233 - DNA, 610 bp, Artificial
  Mutations within GlyA3B4 introduced by GmGlyA3B4_T02TALE nuclease
gttcatgtacggttgcagatataaacgaagcatagcttatgtatgaggtgtaacaaaattggaaacaatagccatgcaaggtgaagaatgtcaccaactcagaaacccttcttcattgacgtgtccctcactcactctcctctcttcactataaatcgccactcttcgtgttctccacttcaccaactccttcaaacttattaacactttccttagttcaatatggggaagcccttcttcactctctctctttcttccctttgcttgctactcttgtcaactcaacaacctcaacgcgttggaacccgaccaccgcgttgagtccgaaggtggtcttattgaaacatggaactctcaacaccctgagctgcaatgcgccggtgtcactgtttccaaacgcaccctcaaccgcaacggcctccacttgccatcttactcaccttatccccaaatgatcattgtcgttcaaggtgcgtaatattagtaagaagtatttatcagcttaacgtgataacaataatagtaatatgaaatatttattaatttttataattaatctctgctagaaaatttgattaatcatttttagtagaatttgtttttcttcaac

SEQ ID NO: 4234 - DNA, 663 bp, Artificial
  Mutations within GlyA3B4 introduced by GmGlyA3B4_T02TALE nuclease
gttcatgtacggttgcagatataaacgaagcatagcttatgtatgaggtgtaacaaaattggaaacaatagccatgcaaggtgaagaatgtcaccaactcagaaacccttcttcattgacgtgtccctcactcactctcctctcttcactataaatcgccactcttcgtgttctccacttcaccaactccttcaaacttattaacactttccttagttcaatatggggaagcccttcttcactctctctctttcttccctttgcttgctactcttgtcgagtgctgctattacctccagcaagttcaacgagtgccaactcaacaacctcaacgcgttggaacccgaccaccgcgttgagtccgaaggtggtcttattgaaacatggaactctcaacaccctgagctgcaatgcgccggtgtcactgtttccaaacgcaccctcaaccgcaacggcctccacttgccatcttactcaccttatccccaaatgatcattgtcgttcaaggtgcgtaatattagtaagagtatttatcagcttaacgtgataacaatatagtaatatgaaatatttattaaatttttataattaatctctgctagaaaatttgattaatcattttagtagaatttgtttttctcaactaggttttaaacaccaca

SEQ ID NO: 4235 - DNA, 650 bp, Artificial; identical to SEQ ID NO: 3321
  Mutations within GlyA3B4 introduced by GmGlyA3B4_T02TALE nuclease

SEQ ID NO: 4236 - DNA, 622 bp, Artificial
  Mutations within GlyA3B4 introduced by GmGlyA3B4_T02TALE nuclease
gttcatgtacggttgcagatataaacgaagcatagcttatgtatgaggtgtaacaaaattggaaacaatagccatgcaaggtgaagaatgtcaccaactcagaaacccttcttcattgacgtgtccctcactcactctcctctcttcactataaatcgccactcttcgtgttctccacttcaccaactccttcaaacttattaacactttccttagttcaatatggggaagcccttcttcactctctctctttcttccctttgcttgctactcttgtcgagtgcatttgctattacctccagcaagttcacgagtgccaactcaacaacctcaacgcgttggaacccgaccaccgcgttgagtccgaaggtggtcttattgaaacatggaactctcaacaccctgagctgcaatgcgccggtgtcactgtttccaaacgcaccctcaaccgcaacggcctccacttgccatcttactcaccttatccccaaatgatcattgtcgttcaaggtgcgtaatattagtaagagtatttatcagcttaacgtgataacaatatagtaatatgaaatatttattaaatttttcataattaatctctgctagaaaatttgattaatca

SEQ ID NO: 4237 - DNA, 678 bp, Artificial
  Mutations within GlyA3B4 introduced by GmGlyA3B4_T02TALE nuclease
gttcatgtacggttgcagatataaacgaagcatagcttatgtatgaggtgtaacaaaattggaaacaatagccatgcaaggtgaagaatgtcaccaactcagaaacccttcttcattgacgtgtccctcactcactctcctctcttcactataaatcgccactcttcgtgttctccacttcaccaactccttcaaacttattaacactttccttagttcaatatggggaagcccttcttcactctctctctttcttccctttgcttgctactcttgtcgagttgctattacctccagcaagttcaacgagtgccaactcaacaacctcaacgcgttggaacccgaccaccgcgttgagtccgaaggtggtcttattgaaacatggaactctcaacaccctgagctgcaatgcgccggtgtcactgtttccaaacgcaccctcaaccgcaacggcctccacttgccatcttactcaccttatccccaaatgatcattgtcgttcaaggtgcgtaatattagtaagaagtatttatcagcttaacgtgataacaataatagtaatatgaaatatttattaaatttttataattaatctctgctagaaaatttgattaatcattttagtagaatttgttttctcaactaggttttaaaacaccacacttgagactccaagg

SEQ ID NO: 4238 - DNA, 621 bp, Artificial
  Mutations within GlyA3B4 introduced by GmGlyA3B4_T02TALE nuclease
gttcatgtacggttgcagatataaacgaagcatagcttatgtatgaggtgtaacaaaattggaaacaatagccatgcaaggtgaagaatgtcaccaactcagaaacccttcttcattgacgtgtccctcactcactctcctctcttcactataaatcgccactcttcgtgttctccacttcaccaactccttcaaacttattaacactttccttagttcaatatggggaagcccttcttcactctctctctttcttccctttgcttgctactcttgtcgagtgccaactcaacaacctcaacgcgttggaacccgaccaccgcgttgagtccgaaggtggtcttattgaaacatggaactctcaacaccctgagctgcaatgcgccggtgtcactgtttccaaacgcaccctcaaccgcaacggcctccacttgccatcttactcaccttatccccaaatgatcattgtcgttcaaggtgcgtaatattagtaagaagtatttatcagcttaacgtgataacaataatagtaatatgaaatatttattaattttttataattaatctctgctagaaaatttgattaatcatttttagtagaatttgtttttctcaactagg

SEQ ID NO: 4239 - DNA, 741 bp, Artificial
  Mutations within GlyA3B4 introduced by GmGlyA3B4_T02TALE nuclease
gttcatgtacggttgcagatataaacgaagcatagcttatgtatgaggtgtaacaaaattggaaacaatagccatgcaaggtgaagaatgtcaccaactcagaaacccttcttcattgacgtgtccctcactcactctcctctcttcactataaatcgccactcttcgtgttctccacttcaccaactccttcaaacttattaacactttccttagttcaatatggggaagcccttcttcactctctctctttcttccctttgcttgctactcttgtcgagtgcccaggcccacggcttgacccccggagcaggtggtggccatcgccagccacgatggcggcaagcaggcgctggcgaaagggggatgtgctgcaaggcgattaagttgggtaacgccagggttttcccagtcacgacgttgtaaaacgacggccagtgaattcgagctcggtacctcgcgaatgctattacctccagcaagttcaacgagtgccaactcaacaacctcaacgcgttggaacccgaccaccgcgttgagtccgaaggtggtctttattgaaacatggaactctcaacaccctgagctgcaatgcgccgggtgtcactgtttccaaaacgcaccctcaaccgcaacggcctccacttgccatcttactcaccttatccccaaaatgatcattgtcgttcaaggtgcgtaatattcagtaagaagtatttatcagcttaacgtgataacaat

SEQ ID NO: 4240 - DNA, 638 bp, Artificial
  Mutations within GlyA3B4 introduced by GmGlyA3B4_T02TALE nuclease
gttcatgtacggttgcagatataaacgaagcatagcttatgtatgaggtgtaacaaaaattggaaacaatagccatgcaaggtgaagaatgtcaccaactcagaaaccccttcttcattgacgtgtccctcactcactctcctctcttcactataaatcgccactcttcgtgttctccacttcaccaaactccttcaaacttattaacactttccttagttcaatatggggaagcccttcttcactctctctctttcttccctttgcttgctactcttgtcgagtgcatctattacctccagcaagttcaacgagtgccaactcaacaacctcaacgcgttggaacccgaccaccgcgttgagtccgaaggtggtcttattgaaacatggaactctcaacaccctgagctgcaatgcgccggtgtcactgtttccaaacgcaccctcaaccgcaacggcctccacttgccatcttactcaccttatccccaaatgatcattgtcgttcaaggtgcgtaatattagtaagaagtatttatcagcttaacgtgataacaatatagtaatatgaaatatttattaaatttttataattaatctctgctagaaaatttgattaatcattttagtagaatttg

SEQ ID NO: 4241 - DNA, 760 bp, Artificial
  Mutations within GlyA3B4 introduced by GmGlyA3B4_T02TALE nuclease
gttcatgtacggttgcagatataaacgaagcatagcttatgtatgaggtgtaacaaaattggaaacaatagccatgcaaggtgaagaatgtcaccaactcagaaacccttcttcattgacgtgtccctcactcactctcctctcttcactataaatcgccactcttcgtgttctccacttcaccaactccttcaaacttattaacactttccttagttcaatatggggaagcccttcttcactctctctctttcttccctttgcttgctactcttgtcgagtgcatgcttgaccccggagcaggtggtggccatcgccagccacgatggcggcaagcaggcgctggagacggtccagcggctgttgccggtgctgtgccattgctattacctccagcaagttcaacgagtgccaactcaacaacctcaacgcgttggaacccgaccaccgcgttgagtccgaaggtggtcttattgaaacatggaactctcaacaccctgagctgcaatgcgccggtgtcactgtttccaaacgcacctcaaccgcaacggcctccacttgccatcttactcaccttatcccaaatgatcattgtcgttcaaggtgcgtaatattagtaagaagtatttatcgcttaacgtgataacaataatagtaatatgaaaatatttattaaacttttttataattaatctctgctagaaaatttgattaatcatttttagtagaatttgtttttctcaactaggtttaaacacca

SEQ ID NO: 4242 - DNA, 660 bp, Artificial
  Mutations within GlyA3B4 introduced by GmGlyA3B4_T02TALE nuclease
  misc_feature (531): n is a or c or t or g
gttcatgtacggttgcagatataaacgaagcatagcttatgtatgaggtgtaacaaaattggaaacaatagccatgcaaggtgaagaatgtcaccaactcagaaaccccttcttcattgacgtgtccctcactcactctcctctcttcactataaatcgccactcttcgtgttctccacttcaccaactccttcaaacttattaacactttccttagttcaatatggggaagcccttcttcactctctctctttcttccctttgcttgctactcttgtcgagtgcatgctattacctccagcaagttcaacgagtgccaactcaacaacctcaacgcgttggaacccgaccaccgcgttgagtccgaaggtggtcttattgaaacatggaactctcaacaccctgagctgcaatgcgccggtgtcactgtttccaaacgcaccctcaaccgcaacggcctccacttgccatcttactcaccttatccccaaatgatcattgtcgttcaaggtgcgtaatattagtaagagnatttatcagcttaacgtgataacaataatagtaatatgaaatatttattaaatttttataattaatctctgctagaaaatttgattaatcattttagtagaatttgttttctcaactaggtttttaaaa

SEQ ID NO: 4243 - DNA, 637 bp, Artificial
  Mutations within GlyA3B4 introduced by GmGlyA3B4_T02TALE nuclease
  misc_feature (532): n is a or c or t or g
gttcatgtacggttgcagatataaacgaagcatagcttatgtatgaggtgtaacaaaattggaaacaatagccatgcaaggtgaagaatgtcaccaactcagaaaccccttcttcattgacgtgtccctcactcactctcctctcttcactataaatcgccactcttcgtgttctccacttcaccaactccttcaaacttattaacactttccttagttcaatatggggaagcccttcttcactctctctctttcttccctttgcttgctactcttgtcgagtgcattgctattacctccagcaagttcaacgagtgccaactcaacaacctcaacgcgttggaacccgaccaccgcgttgagtccgaaggtggtcttattgaaacatggaactctcaacaccctgagctgcaatgcgccggtgtcactgtttccaaacgcaccctcaaccgcaacggcctccacttgccatcttactcaccttatccccaaatgatcattgtcgttcaaggtgcgtaatattagtaagagnatttatcagcttaacgtgataacaatatagtaatatgaaatatttattaaatttttataattaatctctgctagaaaatttgattaatcattttagtagaatttg

SEQ ID NO: 4244 - DNA, 635 bp, Artificial; identical to SEQ ID NO: 1775
  Mutations within GlyA3B4 introduced by GmGlyA3B4_T02TALE nuclease

SEQ ID NO: 4245 - DNA, 658 bp, Artificial; identical to SEQ ID NO: 4085
  Mutations within GlyA3B4 introduced by GmGlyA3B4_T02TALE nuclease

SEQ ID NO: 4246 - DNA, 637 bp, Artificial
  Mutations within GlyA3B4 introduced by GmGlyA3B4_T02TALE nuclease
gttcatgtacggttgcagatataaacgaagcatagcttatgtatgaggtgtaacaaaaattggaaacaatagccatgcaaggtgaagaatgtcaccaactcagaaaccccttcttcattgacgtgtccctcactcactctcctctcttcactataaatcgccactcttcgtgttctccacttcaccaactccttcaaacttattaacactttccttagttcaatatggggaagcccttcttcactctctctctttcttccctttgcttgctactcttgtcgagtgcatctattacctccagcaagttcaacgagtgccaactcaacaacctcaacgcgttggaacccgaccaccgcgttgagtccgaaggtggtcttattgaaacatggaactctcaacaccctgagctgcaatgcgccggtgtcactgtttccaaacgcaccctcaaccgcaacggcctccacttgccatcttactcaccttatccccaaatgatcattgtcgttcaaggtgcgtaatattagtaagaagtatttatcagcttaacgtgataacaatatagtaatatgaaatatttattaaatttttataattaatctctgctagaaaatttgattaatcattttagtagaatttg

SEQ ID NO: 4247 - DNA, 659 bp, Artificial; identical to SEQ ID NO: 1853
  Mutations within GlyA3B4 introduced by GmGlyA3B4_T02TALE nuclease

SEQ ID NO: 4248 - DNA, 637 bp, Artificial; identical to SEQ ID NO: 2343
  Mutations within GlyA3B4 introduced by GmGlyA3B4_T02TALE nuclease

SEQ ID NO: 4249 - DNA, 605 bp, Artificial
  Mutations within GlyA3B4 introduced by GmGlyA3B4_T02TALE nuclease
gttcatgtacggttgcagatataaacgaagcatagcttatgtatgaggtgtaacaaaattggaaacaatagccatgcaaggtgaagaatgtcaccaactcagaaacccttcttcattgacgtgtccctcactcactctcctctcttcactataaatcgccactcttcgtgttctccacttcaccaactccttcaaacttattaacactttccttagttcaatatggggaagcccttcttcactctctctctttgagttgacaccctcaacgcgttggaacccgaccaccgcgttgagtccgaaggtggtcttattgaaacatggaactctcaacaccctgagctgcaatgcgccggtgtcactgtttccaaacgcaccctcaaccgcaacggcctccacttgccatcttactcaccttatccccaaaatgatcattgtcgttcaaggtgcgtaatattagtaagaagtatttatcagcttaacgtgataacaataatagtaatatgaaatatttattaaaatttttttataattaatctcctgctagaaaatttgatttaatctttttagtagaatttgtttttctcaactaggtttttaaaaca

SEQ ID NO: 4250 - DNA, 668 bp, Artificial
  Mutations within GlyA3B4 introduced by GmGlyA3B4_T02TALE nuclease
gttcatgtacggttgcagatataaacgaagcatagcttatgtatgaggtgtaacaaaattggaaacaatagccatgcaaggtgaagaatgtcaccaactcagaaacccttcttcattgacgtgtccctcactcactctcctctcttcactataaatcgccactcttcgtgttctccacttcaccaactccttcaaacttattaacactttccttagttcaatatggggaagcccttcttcactctctctctttcttccctttgcttgctactcttgtcgagtgcattgctattacctccagcaagttcaacgagtgccaactcaacaacctcaacgcgttggaacccgaccaccgcgttgagtccgaaggtggtcttattgaaacatggaactctcaacaccctgagctgcaatgcgccggtgtcactgtttccaaacgcaccctcaaccgcaacggcctccacttgccatcttactcaccttatccccaaatgatcattgtcgttcaaggtgcgtaatattagtaagaagtatttatcagcttaacgtgataacaataatagtaatatgaaatatttattaaatttttataattaatctctgctagaaaatttgattaatcattttagtagaatttgtttttctcaactaggtttttaaaacaccac

SEQ ID NO: 4251 - DNA, 632 bp, Artificial
  Mutations within GlyA3B4 introduced by GmGlyA3B4_T02TALE nuclease
gttcatgtacggttgcagatataaacgaagcatagcttatgtatgaggtgtaacaaaattggaaacaatagccatgcaaggtgaagaatgtcaccaactcagaaacccttcttcattgacgtgtccctcactcactctcctctcttcactataaatcgccactcttcgtgttctccacttcaccaactccttcaaacttattaacactttccttagttcaatatggggaagcccttcttcactctctctctttcttccctttgctattacctccagcaagttcaacgagtgccaactcaacaacctcaacgcgttggaacccgaccaccgcgttgagtccgaaggtggtcttattgaaacatggaactctcaacaccctgagctgcaatgcgccggtgtcactgtttccaaacgcaccctcaaccgcaacggcctccacttgccatcttactcaccttatccccaaatgatcattgtcgttcaaggtgcgtaatattagtaagaagtatttatcagctttaacgtgataacaataatagtaatatgaaatatttattaaattttttataattaattctctgctagaaaatttgattaatcatttttagtagaattttgttttttctcaacta

SEQ ID NO: 4252 - DNA, 634 bp, Artificial
  Mutations within GlyA3B4 introduced by GmGlyA3B4_T02TALE nuclease
gttcatgtacggttgcagatataaacgaagcatagcttatgtatgaggtgtaacaaaaattggaaacaatagccatgcaaggtgaagaatgtcaccaactcagaaacccttcttcattgacgtgtccctcactcactctcctctcttcactataaatcgccactcttcgtgttctccacttcaccaactccttcaaacttattaacactttccttagttcaatatggggaagcccttcttcactctctctctttcttccctttgcttgctactcttgtcgagtgccaactcaacaacctcaacgcgttggaacccgaccaccgcgttgagtccgaaggtggtcttattgaaacatggaactctcaacaccctgagctgcaatgcgccggtgtcactgttttccaaacgcaccctcaaccgcaacggcctccacttgccatcttactcaccttatcccccaaatgatcattgtcgttcaaggtgcgtaatattagtaagaagtatttatcagcttaacgtgataacaataatagtaatatgaaatatttattaattttttataattaatctctgctagaaaatttgattaatcatttttagtagaatttgtttttctcaactaggtttttaaaca

SEQ ID NO: 4253 - DNA, 664 bp, Artificial
  Mutations within GlyA3B4 introduced by GmGlyA3B4_T02TALE nuclease
gttcatgtacggttgcagatataaacgaagcatagcttatgtatgaggtgtaacaaaattggaaacaatagccatgcaaggtgaagaatgtcaccaactcagaaaccccttcttcattgacgtgtccctcactcactctcctctcttcactataaatcgccactcttcgtgttctccacttcaccaactccttcaaacttattaacactttccttagttcaatatgggggaagcccttcttcactctctctctttcttccctttgcttgctactcttgtcgagtgcatattacctccagcaagttcaacgagtgccaactcaacaacctcaacgcgttggaacccgaccaccgcgttgagtccgaaggtggtcttattgaaacatggaactctcaacaccctgagctgcaatgcgccggtgtcactgtttccaaacgcaccctcaaccgcaacggcctccacttgccatcttactcaccttatccccaaatgatcattgtcgttcaaggtgcgtaatattagtaagaagtatttatcagcttaacgtgataacaatatagtaatatgaaatatttattaaatttttataattaatctctgctagaaaatttgattaatcattttagtagaatttgtttttctcaactaggtttttaaaacacca

SEQ ID NO: 4254 - DNA, 640 bp, Artificial
  Mutations within GlyA3B4 introduced by GmGlyA3B4_T02TALE nuclease
  misc_feature (533): n is a or c or t or g
gttcatgtacggttgcagatataaacgaagcatagcttatgtatgaggtgtaacaaaattggaaacaatagccatgcaaggtgaagaatgtcaccaactcagaaacccttcttcattgacgtgtccctcactcactctcctctcttcactataaatcgccactcttcgtgttctccacttcaccaactccttcaaacttattaacactttccttagttcaatatggggaagcccttcttcactctctctctttcttccctttgcttgctactcttgtcgagtgcatttgctattacctccagcaagttcaacgagtgccaactcaacaacctcaacgcgttggaacccgaccaccgcgttgagtccgaaggtggtcttattgaaacatggaactctcaacaccctgagctgcaatgcgccggtgtcactgtttccaaacgcaccctcaaccgcaacggcctccacttgccatcttactcaccttatccccaaatgatcattgtcgttcaaggtgcgtaatattagtaagaagnatttatcagcttaacgtgataacaataatagtaatatgaaaatatttattaaatttttataattaatctctgctagaaaatttgattaatcattttagtagaatttg

SEQ ID NO: 4255 - DNA, 637 bp, Artificial
  Mutations within GlyA3B4 introduced by GmGlyA3B4_T02TALE nuclease
gttcatgtacggttgcagatataaacgaagcatagcttatgtatgaggtgtaacaaaaattggaaacaatagccatgcaaggtgaagaatgtcaccaactcagaaacccttcttcattgacgtgtcccctcactcactctcctctcttcactataaatcgccactcttcgtgttctccacttcaccaactccttcaaacttattaacactttccttagttcaatatggggaagcccttcttcactctctctctttcttccctttgcttgctactcttgtcgagtgcatgctattacctccagcaagttcaacgagtgccaactcaacaacctcaacgcgttggaacccgaccaccgcgttgagtccgaaggtggtcttattgaaacatggaactctcaacaccctgagctgcaatgcgccggtgtcactgtttccaaacgcaccctcaaccgcaacggcctccacttgccatcttactcaccttatccccaaatgatcattgtcgttcaaggtgcgtaatattagtaagagtatttatcagcttaacgtgataacaatatagtaatatgaaatatttattaaatttttataattaatctctgctagaaaatttgattaatcattttagtagaatttg

SEQ ID NO: 4256 - DNA, 646 bp, Artificial
  Mutations within GlyA3B4 introduced by GmGlyA3B4_T02TALE nuclease
  misc_feature (530): n is a or c or t or g
gttcatgtacggttgcagatataaacgaagcatagcttatgtatgaggtgtaacaaaattggaaacaatagccatgcaaggtgaagaatgtcaccaactcagaaacccttcttcattgacgtgtccctcactcactctcctctcttcactataaatcgccactcttcgtgttctccacttcaccaactccttcaaacttattaacactttccttagttcaatatggggaagcccttcttcactctctctctttcttccctttgcttgctactcttgtcgagtgcatgctattacctccagcaagttcaacgagtgccaactcaacaacctcaacgcgttggaacccgaccaccgcgttgagtccgaaggtggtcttattgaaacatggaactctcaacaccctgagctgcaatgcgccggtgtcactgtttccaaacgcaccctcaaccgcaacggcctccacttgccatcttactcaccttatccccaaatgatcattgtcgttcaaggtgcgtaatattagtaagagnatttatcagcttaacgtgataacaataatagtaatatgaaatatttattaaatttttataattaatctctgctagaaaatttgattaatcattttagtagaatttgttttctcaac

SEQ ID NO: 4257 - DNA, 762 bp, Artificial
  Mutations within GlyA3B4 introduced by GmGlyA3B4_T02TALE nuclease
gttcatgtacggttgcagatataaacgaagcatagcttatgtatgaggtgtaacaaaattggaaacaatagccatgcaaggtgaagaatgtcaccaactcagaaacccttcttcattgacgtgtccctcactcactctcctctcttcactataaatcgccactcttcgtgttctccacttcaccaactccttcaaacttattaacactttccttagttcaatatggggaagcccttcttcactctctctctttcttccctttgcttgctactcttgtcgagtgcatgcttgaccccggagcaggtggtggccatcgccagccacgatggcggcaagcaggcgctggagacggtccagcggctgttgccggtgctgtgccattgctattacctccagcaagttcaacgagtgccaactcaacaacctcaacgcgttggaacccgaccaccgcgttgagtccgaaggtggtcttattgaaacatggaactctcaacaccctgagctgcaatgcgccggtgtcactgtttccaaacgcaccctcaaccgcaacggcctccacttgccatcttactcaccttatccccaaaatgatcattgtcgttcaaggtgcgtaatattagtaagaagtatttatcgcttaacgtgataacaataatagtaatatgaaaatatttattaaattttttataattaatctctgctagaaaatttgattaatcaattttagtagaatttgtttttctcaactaggtttaaacacca

SEQ ID NO: 4258 - DNA, 540 bp, Artificial
  Mutations within GlyA3B4 introduced by GmGlyA3B4_T02TALE nuclease
gttcatgtacggttgcagatataaacgaagcatagcttatgtatgaggtgtaacaaaattggaaacaatagccatgcaaggtgaagaatgtcaccaactcagaaacccttcttcattgacgtgtccctcactcactctcctctcttcactataaatcgccactcttcgtgttctccacttcaccaactccttcagcaagttcaacgagtgccaactcaacaacctcaacgcgttggaacccgaccaccgcgttgagtccgaaggtggtcttattgaaacatggaactctcaacaccctgagctgcaatgcgccggtgtcactgtttccaaacgcaccctcaaccgcaacggcctccactttgccatcttactcaccttatcccccaaatgatcattgtcgttcaaggtgcgtaatattagtaagaagtatttatcagcttaacgtgataacaataatagtaatatgaaatatttattaaattttttattaattaatctctgctagaaatttgattaatcattttagtagaattgtttttc

SEQ ID NO: 4259 - DNA, 668 bp, Artificial
  Mutations within GlyA3B4 introduced by GmGlyA3B4_T02TALE nuclease
  misc_feature (531): n is a or c or t or g
gttcatgtacggttgcagatataaacgaagcatagcttatgtatgaggtgtaacaaaattggaaacaatagccatgcaaggtgaagaatgtcaccaactcagaaacccttcttcattgacgtgtccctcactcactctcctctcttcactataaatcgccactcttcgtgttctccacttcaccaactccttcaaacttattaacactttccttagttcaatatggggaagcccttcttcactctctctctttcttccctttgcttgctactcttgtcgagtgcatgctattacctccagcaagttcaacgagtgccaactcaacaacctcaacgcgttggaacccgaccaccgcgttgagtccgaaggtggtcttattgaaacatggaactctcaacaccctgagctgcaatgcgccggtgtcactgtttccaaacgcaccctcaaccgcaacggcctccacttgccatcttactcaccttatcccccaaatgatcattgtcgttcaaggtgcgtaatattagtaagagnatttatcagcttaacgtgataacaataatagtaatatgaaaatatttattaaatttttataattaatctctgctagaaaatttgattaatcattttagtagaatttgttttctcaactaggtttttaaaacaccaca

SEQ ID NO: 4260 - DNA, 751 bp, Artificial
  Mutations within GlyA3B4 introduced by GmGlyA3B4_T02TALE nuclease
gttcatgtacggttgcagatataaacgaagcatagcttatgtatgaggtgtaacaaaattggaaacaatagccatgcaaggtgaagaatgtcaccaactcagaaacccttcttcattgacgtgtccctcactcactctcctctcttcactataaatcgccactcttcgtgttctccacttcaccaactccttcaaacttattaacactttccttagttcaatatggggaagcccttcttcactctctctctttcttccctttgcttgctactcttgtcgagtgcattatctttccacttttcttaaaaaaaaataatttttatttcatttattttgttcttggattctcttttgaattgtgttttgatttgaatttacgaatttatattacctccagcaagttcaacgagtgccaactcaacaacctcaacgcgttggaacccgaccaccgcgttgagtccgaaggtggtcttattgaaacatggaactctcaacaccctgagctgcaatgcgccggtgtcactgtttccaaacgcaccctcaaccgcaacggcctccacttgccatcttactcacctttatccccaaatgatcattgtcgttcaaggtgcgtaatattagtaagaagtatttatcagcttaaccgtgataacaataatagtaatatgaaatatttattaaattttttataattaatctctgctagaaaaatttgattaatcatttttagtagaatttgtttttctcaact

SEQ ID NO: 4261 - DNA, 611 bp, Artificial
  Mutations within GlyA3B4 introduced by GmGlyA3B4_T02TALE nuclease
gttcatgtacggttgcagatataaacgaagcatagcttatgtatgaggtgtaacaaaattggaaacaatagccatgcaaggtgaagaatgtcaccaactcagaaacccttcttcattgacgtgtccctcactcactctcctctcttcactataaatcgccactcttcgtgttctccacttcaccaactccttcaaacttattaacactttccttagttcaatatggggaagcccttcttctccagcaagttcaacgagtgccaactcaacaacctcaacgcgttggaacccgaccaccgcgttgagtccgaaggtggtcttattgaaacatggaactctcaacaccctgagctgcaatgcgccggtgtcactgtttccaaacgcaccctcaaccgcaacggcctccacttgccatcttactcaccttatccccaaaatgatcattgtcgttcaaggtgcgtaatattagtaagaagtatttatcagcttaacgtgataacaataatagtaatatgaaatatttattaaattttttataattaatctctgctagaaaatttgattaatcatttttagtagaatttgtttttctcaactaggtttttaaaaca

SEQ ID NO: 4262 - DNA, 613 bp, Artificial; identical to SEQ ID NO: 2523
  Mutations within GlyA3B4 introduced by GmGlyA3B4_T02TALE nuclease

SEQ ID NO: 4263 - DNA, 657 bp, Artificial
  Mutations within GlyA3B4 introduced by GmGlyA3B4_T02TALE nuclease
gttcatgtacggttgcagatataaacgaagcatagcttatgtatgaggtgtaacaaaattggaaacaatagccatgcaaggtgaagaatgtcaccaactcagaaaccccttcttcattgacgtgtccctcactcactctcctctcttcactataaatcgccactcttcgtgttctccacttcaccaaactccttcaaacttattaacactttccttagttcaatatgggggaagcccttcttcactctctctctttcttccctttgcttgctactcttgtcgagtgcattctattacctccagcaagttcaacgagtgccaactcaacaacctcaacgcgttggaacccgaccaccgcgttgagtccgaaggtggtcttattgaaacatggaactctcaacaccctgagctgcaatgcgccggtgtcactgtttccaaacgcaccctcaaccgcaacggcctccacttgccatcttactcaccttatccccaaatgatcattgtcgttcaaggtgcgtaatattagtaagaagtatttatcagcttaacgtgataacaataatagtaatatgaaaatatttattaaaatttttataattaatctctgctagaaaatttgattaaatcatttttagtagaatttgtttttctcaacta

SEQ ID NO: 4264 - DNA, 654 bp, Artificial
  Mutations within GlyA3B4 introduced by GmGlyA3B4_T02TALE nuclease
gttcatgtacggttgcagatataaacgaagcatagcttatgtatgaggtgtaacaaaattggaaacaatagccatgcaaggtgaagaatgtcaccaactcagaaacccttcttcattgacgtgtccctcactcactctcctctcttcactataaatcgccactcttcgtgttctccacttcaccaactccttcaaacttattaacactttccttagttcaatatggggaagcccttcttcactctctctctttcttccctttgcttgctactcttgtcgagtgcatattacctccagcaagttcaacgagtgccaactcaacaacctcaacgcgttggaacccgaccaccgcgttgagtccgaaggtggtcttattgaaacatggaactctcaacaccctgagctgcaatgcgccggtgtcactgtttccaaacgcaccctcaaccgcaacggcctccacttgccatcttactcaccttatccccaaatgatcattgtcgttcaaggtgcgtaatattagtaagaagtatttatcagcttaacgtgataacaataatagtaatatgaaatatttattaaatttttataattaatctctgctagaaaatttgattaatcattttagtagaatttgtttttctcaactaggttttt

SEQ ID NO: 4265 - DNA, 649 bp, Artificial
  Mutations within GlyA3B4 introduced by GmGlyA3B4_T02TALE nuclease
gttcatgtacggttgcagatataaacgaagcatagcttatgtatgaggtgtaacaaaattggaaacaatagccatgcaaggtgaagaatgtcaccaactcagaaacccttcttcattgacgtgtccctcactcactctcctctcttcactataaatcgccactcttcgtgttctccacttcaccaactccttcaaacttattaacactttccttagttcaatatggggaagcccttcttcactctctctctttcttccctttgcttgctactcttgtcgagtgcatgattacctccagcaagttcaacgagtgccaactcaacaacctcaacgcgttggaacccgaccaccgcgttgagtccgaaggtggtcttattgaaacatggaactctcaacaccctgagctgcaatgcgccggtgtcactgtttccaaacgcaccctcaaccgcaacggcctccacttgccatcttactcaccttatccccaaatgatcattgtcgttcaaggtgcgtaatattagtaagaagtatttatcagcttaacgtgataacaataatagtaatatgaaatatttattaaatttttataattaatctctgctagaaaatttgattaatcattttagtagaatttgttttctcaactagg

SEQ ID NO: 4266 - DNA, 487 bp, Artificial
  Mutations within GlyA3B4 introduced by GmGlyA3B4_T02TALE nuclease
gttcatgtacggttgcagatataaacgaagcatagcttatgtatgaggtgtaacaaaattggaaacaatagccatgcaaggtgaagaatgtcaccaactcagaaacccttcttcattgacgtgtccctcactcactctcctctcttcactataaatcgccactcttcgtgttctccacttcaccaactccttcaaacttattaacactttccttagttcaatatggggaagcccttcttcactctcaacaccctgagctgcaatgcgccggtgtcactgtttccaaacgcaccctcaaccgcaacggcctccacttgccatcttactcaccttatccccaaatgatcattgtcgttcaaggtgcgtaatattagtaagaagtatttatcagcttaacgtgataacaataatagtaatatgaaatatttattaaaattttttataattaatctctgctagaaaatttgattaatcatttttagtagaa

SEQ ID NO: 4267 - DNA, 618 bp, Artificial
  Mutations within GlyA3B4 introduced by GmGlyA3B4_T02TALE nuclease
gttcatgtacggttgcagatataaacgaagcatagcttatgtatgaggtgtaacaaaattggaaacaatagccatgcaaggtgaagaatgtcaccaactcagaaacccttcttcattgacgtgtccctcactcactctcctctcttcactataaatcgccactcttcgtgttctccacttcaccaactccttcaaacttattaacactttccttagttcaatatggggaagcccttctccactcttcgtgttctccagcaagttcaacgagtgccaactcaacaacctcaacgcgttggaacccgaccaccgcgttgagtccgaaggtggtcttattgaaacatggaactctcaacaccctgagctgcaatgcgccggtgtcactgtttccaaacgcaccctcaaccgcaacggcctccacttgccatcttactcaccttatccccaaatgatcattgtcgttcaaggtgcgtaatattagtaagaagtatttatcagcttaacgtgataacaataatagtaatatgaaatatttattaatttttataattaatctctgctagaaaatttgattaatcatttttagtagaatttgtttttctcaactaggttttaaaa

SEQ ID NO: 4268 - DNA, 661 bp, Artificial; identical to SEQ ID NO: 3568
  Mutations within GlyA3B4 introduced by GmGlyA3B4_T02TALE nuclease

SEQ ID NO: 4269 - DNA, 655 bp, Artificial; identical to SEQ ID NO: 1786
  Mutations within GlyA3B4 introduced by GmGlyA3B4_T02TALE nuclease

SEQ ID NO: 4270 - DNA, 653 bp, Artificial
  Mutations within GlyA3B4 introduced by GmGlyA3B4_T02TALE nuclease
gttcatgtacggttgcagatataaacgaagcatagcttatgtatgaggtgtaacaaaattggaaacaatagccatgcaaggtgaagaatgtcaccaactcagaaacccttcttcattgacgtgtccctcactcactctcctctcttcactataaatcgccactcttcgtgttctccacttcaccaactccttcaaacttattaacactttccttagttcaatatggggaagcccttcttcactctctctctttcttccctttgcttgctactcttgtcgagtgcatctattacctccagcaagttcaacgagtgccaactcaacaacctcaacgcgttggaacccgaccaccgcgttgagtccgaaggtggtcttattgaaacatggaactctcaacaccctgagctgcaatgcgccggtgtcactgtttccaaacgcaccctcaaccgcaacggcctccacttgccatcttactcaccttatcccccaaatgatcattgtcgttcaaggtgcgtaatattagtaagaagtatttatcagcttaacgtgataacaataatagtaatatgaaatatttattaaatttttataattaatctctgctagaaaatttgattaatcatttttagtagaatttgtttttctcaactagg

SEQ ID NO: 4271 - DNA, 664 bp, Artificial; identical to SEQ ID NO: 3302
  Mutations within GlyA3B4 introduced by GmGlyA3B4_T02TALE nuclease

SEQ ID NO: 4272 - DNA, 666 bp, Artificial
  Mutations within GlyA3B4 introduced by GmGlyA3B4_T02TALE nuclease
gttcatgtacggttgcagatataaacgaagcatagcttatgtatgaggtgtaacaaaattggaaacaatagccatgcaaggtgaagaatgtcaccaactcagaaacccttcttcattgacgtgtccctcactcactctcctctcttcactataaatcgccactcttcgtgttctccacttcaccaactccttcaaacttattaacactttccttagttcaatatgggggaagcccttcttcactctctctctttcttccctttgcttgctactcttgtcgagtgcattgctattacctccagcaagttcaacgagtgccaactcaacaacctcaacgcgttggaacccgaccaccgcgttgagtccgaaggtggtcttattgaaacatggaactctcaacaccctgagctgcaatgcgccggtgtcactgtttccaaacgcaccctcaaccgcaacggcctccacttgccatcttactcaccttatccccaaatgatcattgtcgttcaaggtgcgtaatattagtaagagtatttatcagcttaacgtgataacaataatagtaatatgaaatatttattaaatttttataattaatctctgctagaaaatttgattaatcattttagtagaatttgtttttctcaactaggttttaaaacacca

SEQ ID NO: 4273 - DNA, 665 bp, Artificial
  Mutations within GlyA3B4 introduced by GmGlyA3B4_T02TALE nuclease
gttcatgtacggttgcagatataaacgaagcatagcttatgtatgaggtgtaacaaaaattggaaacaatagccatgcaaggtgaagaatgtcaccaactcagaaacccttcttcattgacgtgtccctcactcactctcctctcttcactataaatcgccactcttcgtgttctccacttcaccaactccttcaaacttattaacactttccttagttcaatatggggaagcccttcttcactctctctctttcttccctttgcttgctactcttgtcgagtgcattttgtacctccagcaagttcaacgagtgccaactcaacaacctcaacgcgttggaacccgaccaccgcgttgagtccgaaggtggtcttattgaaacatggaactctcaacaccctgagctgcaatgcgccggtgtcactgtttccaaacgcaccctcaaccgcaacggcctccacttgccatcttactcaccttatccccaaatgatcattgtcgttcaaggtgcgtaatattagtaagaagtatttatcagcttaacgtgataacaataatagtaatatgaaatatttattaaatttttataattaatctctgctagaaaatttgattaatcattttagtagaatttgtttttctcaactaggttttaaaacacca

SEQ ID NO: 4274 - DNA, 607 bp, Artificial
  Mutations within GlyA3B4 introduced by GmGlyA3B4_T02TALE nuclease
gttcatgtacggttgcagatataaacgaagcatagcttatgtatgaggtgtaacaaaattggaaacaatagccatgcaaggtgaagaatgtcaccaactcagaaacccttcttcattgacgtgtccctcactcactctcctctcttcactataaatcgccactcttcgtgttctccacttcaccaactccttcaaacttattaacactttccttagttcaatatggggaagcccttcttcactctctctctttcttccctttgcttgctactcttgtcgagtgcagaggcctgcatgcaaagggaagcccttacgtttctttgctattacctccagcaagttcaacgagtgccaactcaacaacctcaacgcgttggaacccgaccaccgcgttgagtccgaaggtggtcttattgaaacatggaactctcaacacccctgagctgcaatgcgccggtgtcactgtttccaaacgcaccctcaaccgcaaacggcctccacttgccatcttactcaccttatccccaaatgatcattgtcgttcaaggtgcgtaatattagtaagaagtatttatcagcttaacgtgataacaataatagtaatatg

SEQ ID NO: 4275 - DNA, 615 bp, Artificial
  Mutations within GlyA3B4 introduced by GmGlyA3B4_T02TALE nuclease
  misc_feature (170); (270): n is a or c or t or g
gttcatgtacggttgcagatataaacgaagcatagcttatgtatgaggtgtaacaaaattggaaacaatagccatgcaaggtgaagaatgtcaccaactcagaaacccttcttcattgacgtgtccctcactcactctcctctcttcactataaatcgccactcttcgtnttctccacttcaccaactccttcaaacttattaacactttccttagttcaatatggggaagcccttcttcactctctctctttcttccctttgcttgctnctcttgtcgagtgccaactcaacaacctcaacgcgttggaacccgaccaccgcgttgagtccgaaggtggtcttattgaaacatggaactctcaacaccctgagctgcaatgcgccggtgtcactgtttccaaacgcaccctcaaccgcaacggcctccacttgccatcttactcaccttatccccaaatgatcattgtcgttcaaggtgcgtaatattagtaagaagtatttatcagcttaacgtgataacaataatagtaatatgaatatttattaatttttataattaatctctgctagaaaatttgattaatcatttttagtagaatttgtttttctcaac

SEQ ID NO: 4276 - DNA, 663 bp, Artificial
  Mutations within GlyA3B4 introduced by GmGlyA3B4_T02TALE nuclease
  misc_feature (530): n is a or c or t or g
gttcatgtacggttgcagatataaacgaagcatagcttatgtatgaggtgtaacaaaattggaaacaatagccatgcaaggtgaagaatgtcaccaactcagaaacccttcttcattgacgtgtccctcactcactctcctctcttcactataaatcgccactcttcgtgttctccacttcaccaactccttcaaacttattaacactttccttagttcaatatggggaagcccttcttcactctctctctttcttccctttgcttgctactcttgtcgagtgcatgctattacctccagcaagttcaacgagtgccaactcaacaacctcaacgcgttggaacccgaccaccgcgttgagtccgaaggtggtcttattgaaacatggaactctcaacaccctgagctgcaatgcgccggtgtcactgtttccaaacgcaccctcaaccgcaacggcctccacttgccatcttactcaccttatccccaaatgatcattgtcgttcaaggtgcgtaatattagtaagagnatttatcagcttaacgtgataacaatatagtaatatgaaatatttattaaatttttcataattaatctctgctagaaaatttgattaatcattttagtagaatttgtttttctcaactaggttttaaacacca

SEQ ID NO: 4277 - DNA, 664 bp, Artificial
  Mutations within GlyA3B4 introduced by GmGlyA3B4_T02TALE nuclease
gttcatgtacggttgcagatataaacgaagcatagcttatgtatgaggtgtaacaaaattggaaacaatagccatgcaaggtgaagaatgtcaccaactcagaaacccttcttcattgacgtgtccctcactcactctcctctcttcactataaatcgccactcttcgtgttctccacttcaccaactccttcaaacttattaacactttccttagttcaatatggggaagcccttcttcactctctctctttcttccctttgcttgctactcttgtcgagtgcatacctccagcaagttcaacgagtgccaactcaacaacctcaacgcgttggaacccgaccaccgcgttgagtccgaaggtggtcttattgaaacatggaactctcaacaccctgagctgcaatgcgccggtgtcactgtttccaaacgcaccctcaaccgcaacggcctccacttgccatcttactcaccttatccccaaatgatcattgtcgttcaaggtgcgtaatattagtaagaagtatttatcagcttaacgtgataacaataatagtaatatgaaaatatttattaaaatttttataaattaatctctgctagaaaatttgattaatcatttttagtagaatttgtttttctcaactaggtttttaaaacacca

SEQ ID NO: 4278 - DNA, 649 bp, Artificial
  Mutations within GlyA3B4 introduced by GmGlyA3B4_T02TALE nuclease
gttcatgtacggttgcagatataaacgaagcatagcttatgtatgaggtgtaacaaaattggaaacaatagccatgcaaggtgaagaatgtcaccaactcagaaacccttcttcattgacgtgtccctcactcactctcctctcttcactataaatcgccactcttcgtgttctccacttcaccaactccttcaaacttattaacactttccttagttcaatatggggaagcccttcttcactctctctctttcttccctttgcttgctactcttgtccagcaagttcaacgagtgccaactcaacaacctcaacgcgttggaacccgaccaccgcgttgagtccgaaggtggtcttattgaaacatggaactctcaacacccctgagctgcaatgcgccggtgtcactgtttccaaacgcaccctcaaccgcaacggcctccacttgccatcttactcaccttatccccaaatgatcattgtcgttcaaggtgcgtaatattagtaagaagtatttatcagcttaacgtgataacaataatagtaatatgaaatatttattaaattttttataattaatctctgctagaaaatttgattaatcatttttagtagaatttgttttttctcaactaggttttaaacacca

SEQ ID NO: 4279 - DNA, 456 bp, Artificial
  Mutations within GlyA3B4 introduced by GmGlyA3B4_T02TALE nuclease
gttcatgtacggttgcagatataaacgaagcatagcttatgtatgaggtgtaacaaaattggaaacaatagccatgcaaggtgaagaatgtcaccaactcagaaaccccttcttcattgacgtgtccctcactcactctcctctcttcactataaatcgccactcttcgtgttctccacttcaccaactccttcaaacttattaacactttccttagttcaatatgggggaagcccttcttcactctctctctttcttccctttgcttgctactcttgtcgagtgcatgttattacctccagcaagttcaacgagtgccaactcaacaacctcaacgcgttggaacccgaccaccgcgttgagtccgaaggtggtcttattgaaacatggaactctcaacaccctgagctgcaatgcgccggtgtcactgtttccaaacgcaccctcaaccgcaac

SEQ ID NO: 4280 - DNA, 627 bp, Artificial
  Mutations within GlyA3B4 introduced by GmGlyA3B4_T02TALE nuclease
  misc_feature (536): n is a or c or t or g
gttcatgtacggttgcagatataaacgaagcatagctttatgtatgaaggtggataacaaaaattggaaacaatagccatgcaaggtgaagaagtcaccaactcagaaacccttcttcattgacgtgtccctcactcactctcctctcttcactataaatcgccactcttcgtgttctccacttcaccaactccttcaaacttattaacactttccttagttcaatatggggaagcccttcttcactctctctctttcttccctttgcttgctactcttgtcgagtgcatttgctattacctccagcaagttcaacgagtgccaactcaacaacctcaacgcgttggaacccgaccaccgcgttgagtccgaaggtggtcttattgaaacatggaactctcaacaccctgagctgcaatgcgccggtgtcactgtttccaaacgcaccctcaaccgcaacggcctccacttgccatcttactcaccttatccccaaatgatcattgtcgttcaaggtgcgtaatattagtaagagnatttatcagcttaacgtgataacaataatagtaatatgaaatatttattaaatttttataattaatctctgctagaaaatttgattaatca

SEQ ID NO: 4281 - DNA, 655 bp, Artificial
  Mutations within GlyA3B4 introduced by GmGlyA3B4_T02TALE nuclease
gttcatgtacggttgcagatataaacgaagcatagcttatgtatgaggtgtaacaaaattggaaacaatagccatgcaaggtgaagaatgtcaccaactcagaaacccttcttcattgacgtgtccctcactcactctcctctcttcactataaatcgccactcttcgtgttctccacttcaccaactccttcaaacttattaacactttccttagttcaatatggggaagcccttcttcactctctctctttcttccctttgcttgctactcttgtcgagtgcatttcaacgagtgccaactcaacaacctcaacgcgttggaacccgaccaccgcgttgagtccgaaggtggtcttattgaaacatggaactctcaacacccctgagctgcaatgcgccggtgtcactgtttccaaacgcaccctcaaccgcaacggcctccacttgccatcttactcaccttatcccccaaatgatcattgtcgttcaaggtgcgtaaatattagtaagaagtatttatcagcttaacgtgataacaataatagtaatatgaaatatttattaaattttttataattaatctctgctagaaaatttgattaatcatttttagtagaatttgttttttctcaactaggttttaaaacaccaca

SEQ ID NO: 4282 - DNA, 659 bp, Artificial
  Mutations within GlyA3B4 introduced by GmGlyA3B4_T02TALE nuclease
gttcatgtacggttgcagatataaacgaagcatagcttatgtatgaggtgtaacaaaattggaaacaatagccatgcaaggtgaagaatgtcaccaactcagaaacccttcttcattgacgtgtccctcactcactctcctctcttcactataaatcgccactcttcgtgttctccacttcaccaactccttcaaacttattaacactttccttagttcaatatggggaagcccttcttcactctctctctttcttccctttgcttgctactcttgtcgagtgcatctattacctccagcaagttcaacgagtgccaactcaacaacctcaacgcgttggaacccgaccaccgcgttgagtccgaaggtggtcttattgaaacatggaactctcaacaccctgagctgcaatgcgccggtgtcactgtttccaaacgcaccctcaaccgcaacggcctccacttgccatcttactcaccttatccccaaatgatcattgtcgttcaaggtgcgtaatattagtaagaagtatttatcagcttaacgtgataacaataatagtaatatgaaatatttattaaatttttataattaatctctgctagaaaatttgattaatcatttttagtagaatttgttttctcaactaggttttaaaa

SEQ ID NO: 4283 - DNA, 651 bp, Artificial
  Mutations within GlyA3B4 introduced by GmGlyA3B4_T02TALE nuclease
gttcatgtacggttgcagatataaacgaagcatagcttatgtatgaggtgtaacaaaattggaaacaatagccatgcaaggtgaagaatgtcaccaactcagaaacccttcttcattgacgtgtccctcactcactctcctctcttcactataaatcgccactcttcgtgttctccacttcaccaactccttcaaacttattaacactttccttagttcaatatggggaagcccttcttcactctctctctttcttccctttgcttgctactcttgtcgagtgccaactcaacaacctcaacgcgttggaacccgaccaccgcgttgagtccgaaggtggtcttattgaaacatggaactctcaacaccctgagctgcaatgcgccggtgtcactgtttccaaacgcaccctcaaccgcaacggcctccacttgccatcttactcaccttatccccaaatgatcattgtcgttcaaggtgcgtaatattagtaagaagtatttatcagcttaacgtgataacaataatagtaatatgaaatatttattaaattttttataattaatctctgctagaaaatttgattaatcatttttagtagaatttgtttttctcaactaggttttaaacaccacacaaggcacacagggg

SEQ ID NO: 4284 - DNA, 660 bp, Artificial; identical to SEQ ID NO: 3006
  Mutations within GlyA3B4 introduced by GmGlyA3B4_T02TALE nuclease

SEQ ID NO: 4285 - DNA, 660 bp, Artificial
  Mutations within GlyA3B4 introduced by GmGlyA3B4_T02TALE nuclease
gttcatgtacggttgcagatataaacgaagcatagcttatgtatgaggtgtaacaaaaattggaaacaatagccatgcaaggtgaagaatgtcaccaactcagaaaccccttcttcattgacgtgtcccctcactcactctcctctcttcactataaatcgccactcttcgtgttctccacttcaccaactccttcaaacttattaacactttccttagttcaatatggggaagcccttcttcactctctctctttcttccctttgcttgctactcttgtcgagtgcatgctattacctccagcaagttcaacgagtgccaactcaacaacctcaacgcgttggaacccgaccaccgcgttgagtccgaaggtggtcttattgaaacatggaactctcaacaccctgagctgcaatgcgccggtgtcactgtttccaaacgcaccctcaaccgcaacggcctccacttgccatcttactcaccttatccccaaatgatcattgtcgttcaaggtgcgtaatattagtaagagtatttatcagcttaacgtgataacaataatagtaatatgaaatatttattaaatttttataattaatctctgctagaaaatttgattaatcattttagtagaatttgttttctcaactaggttttaaa

SEQ ID NO: 4286 - DNA, 667 bp, Artificial; identical to SEQ ID NO: 1838
  Mutations within GlyA3B4 introduced by GmGlyA3B4_T02TALE nuclease

SEQ ID NO: 4287 - DNA, 629 bp, Artificial
  Mutations within GlyA3B4 introduced by GmGlyA3B4_T02TALE nuclease
gttcatgtacggttgcagatataaacgaagcatagcttatgtatgaggtgtaacaaaattggaaacaatagccatgcaaggtgaagaatgtcaccaactcagaaacccttcttcattgacgtgtccctcactcactctcctctcttcactataaatcgccactcttcgtgttctccacttcaccaactccttcaaacttattaacactttccttagttcaatatggggaagcccttcttcactctctctctttcttccctttgcttgctactcttgtcgagtgcatgctccagcaagttcaacgagtgccaactcaacaacctcaacgcgttggaacccgaccaccgcgttgagtccgaaggtggtcttattgaaacatggaactctcaacaccctgagctgcaatgcgccggtgtcactgtttccaaacgcaccctcaaccgcaacggcctccacttgccatcttactcaccttatccccaaatgatcattgtcgttcaaggtgcgtaatattagtaagaagtatttatcagcttaacgtgataacaatatagtaatatgaaatatttattaaatttttataattaatctctgctagaaaatttgattaatcattttagtagaatttg

SEQ ID NO: 4288 - DNA, 661 bp, Artificial
  Mutations within GlyA3B4 introduced by GmGlyA3B4_T02TALE nuclease
gttcatgtacggttgcagatataaacgaagcatagcttatgtatgaggtgtaacaaaattggaaacaatagccatgcaaggtgaagaatgtcaccaactcagaaacccttcttcattgacgtgtccctcactcactctcctctcttcactataaatcgccactcttcgtgttctccacttcaccaactccttcaaacttattaacactttccttagttcaatatggggaagcccttcttcactctctctctttcttccctttgcttgctactcttgtcgagtgcatgccaccacctgctccggggtcaagccgtgggcctggcacagcaccggcaacagccgctggaccgtctccagcgcctgcttgccaccattattgctggcttttgctattacctccagcaagttcaacgagtgccaactcaacaacctcaacgcgttggaacccgaccaccgcgttgagtccgaaggtggtcttattgaaacatggaactctcaacacccctgagctgcaatgcgccggtgtcactgtttccaaacgcaccctcaaccgcaacggcctccacttgccatcttactcaccttatccccaaaatgatcattgtcgttcaaggtgcgtaatattagtaagaagtatttatcagcttaacgtgataacaaa

SEQ ID NO: 4289 - DNA, 659 bp, Artificial
  Mutations within GlyA3B4 introduced by GmGlyA3B4_T02TALE nuclease
gttcatgtacggttgcagatataaacgaagcatagcttatgtatgaggtgtaacaaaaattggaaacaatagccatgcaaggtgaagaatgtcaccaactcagaaacccttcttcattgacgtgtccctcactcactctcctctcttcactataaatcgccactcttcgtgttctccacttcaccaactccttcaaacttattaacactttccttagttcaatatggggaagcccttcttcactctctctctttcttccctttgcttgctactcttgtcgagtgcattacctccagcaagttcaacgagtgccaactcaacaacctcaacgcgttggaacccgaccaccgcgttgagtccgaaggtggtcttattgaaacatggaactctcaacaccctgagctgcaatgcgccggtgtcactgtttccaaacgcaccctcaaccgcaacggcctccacttgccatcttactcaccttatccccaaatgatcattgtcgttcaaggtgcgtaatattagtaagaagtatttatcagcttaacgtgataacaatatagtaatatgaaatatttattaaatttttataattaatctctgctagaaaatttgattaatcattttagtagaatttgttttctcaactaggttttaaaacacca

SEQ ID NO: 4290 - DNA, 650 bp, Artificial
  Mutations within GlyA3B4 introduced by GmGlyA3B4_T02TALE nuclease
gttcatgtacggttgcagatataaacgaagcatagcttatgtatgaggtgtaacaaaattggaaacaatagccatgcaaggtgaagaatgtcaccaactcagaaacccttcttcattgacgtgtccctcactcactctcctctcttcactataaatcgccactcttcgtgttctccacttcaccaactccttcaaacttattaacactttccttagttcaatatggggaagcccttcttcactctctctctttcttccctttgcttgctactcttgtcgagtgcatggctattacctccagcaagttcaacgagtgccaactcaacaacctcaacgcgttggaacccgaccaccgcgttgagtccgaaggtggtcttattgaaacatggaactctcaacaccctgagctgcaatgcgccggtgtcactgtttccaaacgcaccctcaaccgcaacggcctccacttgccatcttactcaccttatccccaaatgatcattgtcgttcaaggtgcgtaatattagtaagagtatttatcagcttaacgtgataacaatatagtaatatgaaatatttattaaatttttataattaatctctgctagaaaatttgattaatcattttagtagaatttgttttctcaactagg

SEQ ID NO: 4291 - DNA, 485 bp, Artificial
  Mutations within GlyA3B4 introduced by GmGlyA3B4_T02TALE nuclease
gttcatgtacggttgcagatataaacgaagcatagcttatgtatgaggtgtaacaaaattggaaacaatagccatgcaaggtgaagaatgtcaccaactcagaaacccttcttcattgacgtgtccctcactcactctcctctcttcactataaatcgccactcttcgtgttctccacttcaccaactccttcaaacttattaacactttccttagttcaatatggggaagcccttcttcactctctctctttcttccctttgcttgctactcttgtcgagtgcatggccaccacctgctggggggtcaagccgtgggcctggcacagcaccggcaacagccgctttgctattacctccagcaagttcaacgagtgccactcaacaacctcaacgcgttggaacccgaccaccgcgttgagtccgaaggtgtcttattgaacatggaactctcaacacctgagctgcaatgcgccggtgtcactg

SEQ ID NO: 4292 - DNA, 656 bp, Artificial; identical to SEQ ID NO: 2940
  Mutations within GlyA3B4 introduced by GmGlyA3B4_T02TALE nuclease

SEQ ID NO: 4293 - DNA, 662 bp, Artificial
  Mutations within GlyA3B4 introduced by GmGlyA3B4_T02TALE nuclease
gttcatgtacggttgcagatataaacgaagcatagcttatgtatgaggtgtaacaaaattggaaacaatagccatgcaaggtgaagaatgtcaccaactcagaaaccccttcttcattgacgtgtccctcactcactctcctctcttcactataaatcgccactcttcgtgttctccacttcaccaactccttcaaacttattaacactttccttagttcaatatggggaagcccttcttcactctctctctttcttccctttgcttgctactcttgtcgagtgctattacctccagcaagttcaacgagtgccaactcaacaacctcaacgcgttggaacccgaccaccgcgttgagtccgaaggtggtcttattgaaacatggaactctcaacaccctgagctgcaatgcgccggtgtcactgtttccaaacgcaccctcaaccgcaacggcctccacttgccatcttactcaccttatcccccaaatgatcattgtcgttcaaggtgcgtaatattagtaagaagtatttatcagcttaacgtgataacaataatagtaatatgaaatatttattaaatttttataattaatctctgctagaaaatttgattaatcattttagtagaatttgttttctcaactaggttttaaaacacca

SEQ ID NO: 4294 - DNA, 568 bp, Artificial
  Mutations within GlyA3B4 introduced by GmGlyA3B4_T02TALE nuclease
gttcatgtacggttgcagatataaacgaagcatagcttatgtatgaggtgtaacaaaattggaaacaatagccatgcaaggtgaagaatgtcaccaactcagaaaccccttcttcattgacgtgtccctcactcactctcctctcttcactataaatcgccactcttcgtgttctccacttcaccaaactccttcaaacttattaacactttccttagttcaatatggggaagcccttcttcactctctctctttcttccctttgcttgctactcttgtcgagtgcatttacctccagcaagttcaacgagtgccaactcaacaacctcaacgcgttggaacccgaccaccgcgttgagtccgaaggtggtcttattgaaacatggaactctcaacaccctgagctgcaatgcgccggtgtcactgtttccaaaacgcaccctcaaccgcaacggcctccacttgccatcttactcaccttatccccaaatgatcattgtcgttcaaggtgcgtaatattagtaagaagtatttatcagcttaacgtgataacaataatagtaatatg

SEQ ID NO: 4295 - DNA, 509 bp, Artificial
  Mutations within GlyA3B4 introduced by GmGlyA3B4_T02TALE nuclease
  misc_feature (257); (462): n is a or c or t or g
gttcatgtacggttgcagatataaacgaagcatagcttatgtatgaggtgtaacaaaattggaaacaatagccatgcaaggtgaagaatgtcaccaactcagaaaccccttcttcattgacgtgtccctcactcactctcctctcttcactataaatcgccactcttcgtgttctccacttcaccaactccttcaaacttattaacactttccttagttcaatatgaacccgaccaccgcgtgagtccgaaggtggncttattgaaacatggaacctctcaacaccctgagctgcaatgcgccggtgtcactgtttccaaacgcaccctcaaccgcaacggccatccacttgcccatcttactcacccttatcccccaaatgatcattgtcgttcaaggtgcgtaatattagtaagaagtatttatcagcttaacgtgtaacaataatagtaatatgaaatntttattaaattttttataattaatctctgctagaaaatttgattaat

SEQ ID NO: 4296 - DNA, 660 bp, Artificial
  Mutations within GlyA3B4 introduced by GmGlyA3B4_T02TALE nuclease
gttcatgtacggttgcagatataaacgaagcatagcttatgtatgaggtgtaacaaaattggaaacaatagccatgcaaggtgaagaatgtcaccaactcagaaaccccttcttcattgacgtgtccctcactcactctcctctcttcactataaatcgccactcttcgtgttctccacttcaccaactccttcaaacttattaacactttccttagttcaatatggggaagcccttcttcactctctctctttcttccctttgcttgctactcttgtcgagtgcatgctattacctccagcaagttcaacgagtgccaactcaacaacctcaacgcgttggaacccgaccaccgcgttgagtccgaaggtggtcttattgaaacatggaactctcaacaccctgagctgcaatgcgccggtgtcactgtttccaaacgcaccctcaaccgcaacggcctccacttgccatcttactcaccttatccccaaatgatcattgtcgttcaaggtgcgtaatattagtaagaagtatttatcagcttaacgtgataacaataatagtaatatgaaatatttattaaatttttataattaatctctgctagaaaatttgattaatcattttagtagaatttgttttctcaactaggttttaaaa

SEQ ID NO: 4297 - DNA, 663 bp, Artificial
  Mutations within GlyA3B4 introduced by GmGlyA3B4_T02TALE nuclease
  misc_feature (535): n is a or c or t or g
gttcatgtacggttgcagatataaacgaagcatagcttatgtatgaggtgtaacaaaaaattggaaaacaatagccatgcaaggtgaagaatgtcaccaactcagaaacccttcttcattgacgtgtccctcactcactctcctctcttcactataaaatcgccactcttcgtgttctccacttcaccaactccttcaaacttattaacactttccttagttcaatatggggaagcccttcttcactctctctctttcttccctttgcttgctactcttgtcgagtgcatgctattacctccagcaagttcaacgagtgccaactcaacaacctcaacgcgttggaacccgaccaccgcgttgagtccgaaggtggtcttattgaaacatggaactctcaacaccctgagctgcaatgcgccggtgtcactgtttccaaacgcaccctcaaccgcaacggcctccacttgccatcttactcaccttatcccccaaatgatcattgtcgttcaaggtgcgtaatattagtaagagnatttatcagcttaacgtgataacaataatagtaatatgaaatatttattaaatttttataattaatctctgctagaaaatttgattaatcattttagtagaatttgttttctcaactaggtttttaaa

SEQ ID NO: 4298 - DNA, 725 bp, Artificial
  Mutations within GlyA3B4 introduced by GmGlyA3B4_T02TALE nuclease
gttcatgtacggttgcagatataaacgaagcatagcttatgtatgaggtgtaacaaaattggaaacaatagccatgcaaggtgaagaatgtcaccaactcagaaacccttcttcattgacgtgtccctcactcactctcctctcttcactataaatcgccactcttcgtgttctccacttcaccaactccttcaaacttattaacactttccttagttcaatatggggaagcccttcttcactctctctctttcttccctttgcttgctactcttgtcgagtgcatgtcagtggagcattttttgacaagaaatatttgctagctgatagtgaccttaggcgacttttgaacgcgcaataatggtttgctattacctccagcaagttcaacgagtgccaactcaacaacctcaacgcgttggaacccgaccaccgcgttgagtccgaaggtggtcttattgaaacatggaactctcaacaccctgagctgcaatgcgccggtgtcactgtttccaaacgcaccctcaaccgcaacggcctccacttgccatcttactcaccttatccccaaatgatcattgtcgttcaaggtgcgtaatattagtaagaagtatttatcgcttaacgtgataacaataatagtaatatgaaaatatttattaaattttttataattaatctctgctagaaaatttgattaatcatttttagtagaatttgttttt

SEQ ID NO: 4299 - DNA, 660 bp, Artificial; identical to SEQ ID NO: 4062
  Mutations within GlyA3B4 introduced by GmGlyA3B4_T02TALE nuclease

SEQ ID NO: 4300 - DNA, 670 bp, Artificial
  Mutations within GlyA3B4 introduced by GmGlyA3B4_T02TALE nuclease
gttcatgtacggttgcagatataaacgaagcatagcttatgtatgaggtgtaacaaaaattggaaacaatagccatgcaaggtgaagaatgtcaccaactcagaaaccccttcttcattgacgtgtccctcactcactctcctctcttcactataaatcgccactcttcgtgttctccacttcaccaactccttcaaacttattaacactttccttagttcaatatgggggaagcccttcttcactctctctctttcttccctttgcttgctactcttgtcgagtgctgctattacctccagcaagttcaacgagtgccaactcaacaacctcaacgcgttggaacccgaccaccgcgttgagtccgaaggtggtcttattgaaacatggaactctcaacaccctgagctgcaatgcgccggtgtcactgtttccaaacgcaccctcaaccgcaacggcctccacttgccatcttactcaccttatccccaaatgatcattgtcgttcaaggtgcgtaatattagtaagaagtatttatcagcttaacgtgataacaatatagtaatatgaaaatatttattaaatttttataattaatctctgctagaaaatttgattaatcattttagtagaatttgtttttctcaactaggtttttaaaacaccaca

SEQ ID NO: 4301 - DNA, 650 bp, Artificial
  Mutations within GlyA3B4 introduced by GmGlyA3B4_T02TALE nuclease
gttcatgtacggttgcagatataaacgaagcatagcttatgtatgaggtgtaacaaaattggaaacaatagccatgcaaggtgaagaatgtcaccaactcagaaacccttcttcattgacgtgtccctcactcactctcctctcttcactataaatcgccactcttcgtgttctccacttcaccaaactccttcaaacttattaacactttccttagttcaatatggggaagcccttcttcactctctctctttcttccctttgctattacctccagcaagttcaacgagtgccaactcaacaacctcaacgcgttggaacccgaccaccgcgttgagtccgaaggtggtcttattgaaacatggaactctcaacaccctgagctgcaatgcgccggtgtcactgttttccaaaacgcaccctcaaccgcaacggcctccacttgccatcttactcaccttatcccccaaatgatcattgtcgttcaaggtgcgtaatattagtaagaagtatttatcagctttaacgtgataacaataatagtaatatgaaatatttattaaattttttataaattaatctctgctagaaaatttgattaatcatttttagtagaatttgttttttctcaactaggttttaaaacacca

SEQ ID NO: 4302 - DNA, 662 bp, Artificial; identical to SEQ ID NO: 3014
  Mutations within GlyA3B4 introduced by GmGlyA3B4_T02TALE nuclease

SEQ ID NO: 4303 - DNA, 660 bp, Artificial; identical to SEQ ID NO: 3006
  Mutations within GlyA3B4 introduced by GmGlyA3B4_T02TALE nuclease

SEQ ID NO: 4304 - DNA, 668 bp, Artificial
  Mutations within GlyA3B4 introduced by GmGlyA3B4_T02TALE nuclease
gttcatgtacggttgcagatataaacgaagcatagcttatgtatgaggtgtaacaaaaattggaaacaatagccatgcaaggtgaagaatgtcaccaactcagaaaccccttcttcattgacgtgtccctcactcactctcctctcttcactataaatcgccactcttcgtgttctccacttcaccaactccttcaaacttattaacactttccttagttcaatatgggggaagcccttcttcactctctctctttcttccctttgcttgctactcttgtcgagtgcatattacctccagcaagttcaacgagtgccaactcaacaacctcaacgcgttggaacccgaccaccgcgttgagtccgaaggtggtcttattgaaacatggaactctcaacaccctgagctgcaatgcgccggtgtcactgtttccaaacgcacccctcaaccgcaacggcctccacttgccatcttactcaccttatcccccaaatgatcattgtcgttcaaggtgcgtaatattagtaagaagtatttatcagcttaacgtgataacaatatagtaatatgaaatatttattaaatttttataattaatctctgctagaaaatttgattaatcattttagtagaatttgttttctcaactaggtttttaaaacaccaca

SEQ ID NO: 4305 - DNA, 635 bp, Artificial
  Mutations within GlyA3B4 introduced by GmGlyA3B4_T02TALE nuclease
gttcatgtacggttgcagatataaacgaagcatagcttatgtatgaggtgtaacaaaattggaaacaatagccatgcaaggtgaagaatgtcaccaactcagaaacccttcttcattgacgtgtccctcactcactctcctctcttcactataaatcgccactcttcgtgttctccacttcaccaactccttcaaacttattaacactttccttagttcaatatgggggaagcccttcttcactctctctctttcttccctttgcttgctactcttgtcgagtgcatattacctccagcaagttcaacgagtgccaactcaacaacctcaacgcgttggaacccgaccaccgcgttgagtccgaaggtggtcttattgaaacatggaactctcaacaccctgagctgcaatgcgccggtgtcactgtttccaaacgcaccctcaaccgcaacggcctccacttgccatcttactcaccttatccccaaatgatcattgtcgttcaaggtgcgtaatattagtaagaagtatttatcagcttaacgtgataacaataatagtaatatgaaatatttattaaatttttataattaatctctgctagaaaatttgattaatcattttagtagaatttg

SEQ ID NO: 4306 - DNA, 663 bp, Artificial
  Mutations within GlyA3B4 introduced by GmGlyA3B4_T02TALE nuclease
gttcatgtacggttgcagatataaacgaagcatagcttatgtatgaggtgtaacaaaattggaaacaatagccatgcaaggtgaagaatgtcaccaactcagaaacccttcttcattgacgtgtccctcactcactctcctctcttcactataaatcgccactcttcgtgttctccacttcaccaactccttcaaacttattaacactttccttagttcaatatggggaagcccttcttcactctctctctttcttccctttgcttgctactcttgtcgagtgcctattacctccagcaagttcaacgagtgccaactcaacaacctcaacgcgttggaacccgaccaccgcgttgagtccgaaggtggtcttattgaaacatggaactctcaacaccctgagctgcaatgcgccggtgtcactgtttccaaacgcaccctcaaccgcaacggcctccacttgccatcttactcaccttatccccaaatgatcattgtcgttcaaggtgcgtaatattagtaagaagtatttatcagcttaacgtgataacaataatagtaatatgaaatatttattaaatttttataattaatctctgctagaaaatttgattaatcatttttagtagaatttgtttttctcaactaggttttaaaacacca

SEQ ID NO: 4307 - DNA, 656 bp, Artificial
  Mutations within GlyA3B4 introduced by GmGlyA3B4_T02TALE nuclease
gttcatgtacggttgcagatataaacgaagcatagcttatgtatgaggtgtaacaaaattggaaacaatagccatgcaaggtgaagaatgtcaccaactcagaaacccttcttcattgacgtgtccctcactcactctcctctcttcactataaatcgccactcttcgtgttctccacttcaccaaactccttcaaacttattaacactttccttagttcaatatggggaaagcccttcttcactctctctctttcttccctttgcttgctactcttgtcgagtttgctattacctccagcaagttcaacgagtgccaactcaacaacctcaacgcgttggaacccgaccaccgcgttgagtccgaaggtggtcttattgaaaacatggaactctcaacaccctgagctgcaatgcgccggtgtcactgtttccaaacgcaccctcaaccgcaacggcctccacttgccaatcttactcaccttatccccaaatgatcattgtcgttcaaggtgcgtaatattagtaagaagtattttatcagcttaacgtgataacaatatagtaatatgaaaatatttattaaaatttttataattaatctctgctagaaaatttgattaatcattttagtagaatttgtttttctcaactagg

SEQ ID NO: 4308 - DNA, 583 bp, Artificial; identical to SEQ ID NO: 2060
  Mutations within GlyA3B4 introduced by GmGlyA3B4_T02TALE nuclease

SEQ ID NO: 4309 - DNA, 664 bp, Artificial
  Mutations within GlyA3B4 introduced by GmGlyA3B4_T02TALE nuclease
gttcatgtacggttgcagatataaacgaagcatagcttatgtatgaggtgtaacaaaattggaaacaatagccatgcaaggtgaagaatgtcaccaactcagaaacccttcttcattgacgtgtccctcactcactctcctctcttcactataaatcgccactcttcgtgttctccacttcaccaactccttcaaacttattaacactttccttagttcaatatggggaagcccttcttcactctctctctttcttccctttgcttgctactcttgtcgagtgcatattacctccagcaagttcaacgagtgccaactcaacaacctcaacgcgttggaacccgaccaccgcgttgagtccgaaggtggtcttattgaaacatggaactctcaacaccctgagctgcaatgcgccggtgtcactgtttccaaacgcaccctcaaccgcaacggcctccacttgccatcttactcaccttatccccaaatggtcattgtcgttcaaggtgcgtaatattagtaagaagtatttatcagcttaacgtgataacaataatagtaatatgaaaatatttattaaatttttataattaatctctgctagaaaatttgattaatcattttagtagaatttgtttttctcaactaggtttttaaaacacca

SEQ ID NO: 4310 - DNA, 658 bp, Artificial
  Mutations within GlyA3B4 introduced by GmGlyA3B4_T02TALE nuclease
gttcatgtacggttgcagatataaacgaagcatagcttatgtatgaggtgtaacaaaattggaaacaatagccatgcaaggtgaagaatgtcaccaactcagaaacccttcttcattgacgtgtccctcactcactctcctctcttcactataaatcgccactcttcgtgttctccacttcaccaactccttcaaacttattaacactttccttagttcaatatggggaagcccttcttcactctctctctttcttccctttgcttgctactcttgtcgagtgcatacctccagcaagttcaacgagtgccaactcaacaacctcaacgcgttggaacccgaccaccgcgttgagtccgaaggtggtcttattgaaacatggaactctcaacaccctgagctgcaatgcgccggtgtcactgtttccaaacgcaccctcaaccgcaacggcctccacttgccatcttactcaccttatccccaaatgatcattgtcgttcaaggtgcgtaatattagtaagaagtatttatcagcttaacgtgataacaatatagtaatatgaaatatttattaaatttttataattaatctctgctagaaaatttgattaatcattttagtagaatttgttttctcaactaggtttttaaaacacca

SEQ ID NO: 4311 - DNA, 642 bp, Artificial
  Mutations within GlyA3B4 introduced by GmGlyA3B4_T02TALE nuclease
gttcatgtacggttgcagatataaacgaagcatagcttatgtatgaggtgtaacaaaattggaaacaatagccatgcaaggtgaagaatgtcaccaactcagaaacccttcttcattgacgtgtccctcactcactctcctctcttcactataaatcgccactcttcgtgttctccacttcaccaactccttcaaacttattaacactttccttagttcaatatggggaagcccttcttcactctctctctttcttccctttgcttgctactcttgtccagcaagttcaacgagtgccaactcaacaacctcaacgcgttggaacccgaccaccgcgttgagtccgaaggtggtcttattgaaacatggaactctcaacacccctgagctgcaatgcgccggtgtcactgtttccaaacgcaccctcaaccgcaacggcctccacttgccatcttactcaccttatcccccaaatgatcattgtcgttcaaggtgcgtaatattagtaagaagtatttatcagcttaacgtgataacaataatagtaatatgaaatatttattaaattttttataattaatctctgctagaaaatttgattaatcatttttagtagaatttgttttttctcaactaggtttt

SEQ ID NO: 4312 - DNA, 648 bp, Artificial
  Mutations within GlyA3B4 introduced by GmGlyA3B4_T02TALE nuclease
gttcatgtacggttgcagatataaacgaagcatagcttatgtatgaggtgtaacaaaattggaaacaatagccatgcaaggtgaagaatgtcaccaactcagaaacccttcttcattgacgtgtccctcactcactctcctctcttcactataaatcgccactcttcgtgttctccacttcaccaactccttcaaacttattaacactttccttagttcaatatggggaagcccttcttcactctctctctttcttccctttgcttgctactcttgtcgagtgccctccagcaagttcaacgagtgccaactcaacaacctcaacgcgttggaacccgaccaccgcgttgagtccgaaggtggtcttattgaaacatggaactctcaacaccctgagctgcaatgcgccggtgtcactgtttccaaacgcaccctcaaccgcaacggcctccacttgccatcttactcaccttatcccccaaatgatcattgtcgttcaaggtgcgtaaatattagtaagaagtatttatcagcttaacgtgataacaataatagtaatatgaaatatttattaaattttttataattaatctctgctagaaaatttgattaatcatttttagtagaatttgttttttctcaactagg

SEQ ID NO: 4313 - DNA, 670 bp, Artificial
  Mutations within GlyA3B4 introduced by GmGlyA3B4_T02TALE nuclease
  misc_feature (532): n is a or c or t or g
gttcatgtacggttgcagatataaacgaagcatagcttatgtatgaggtgtaacaaaattggaaacaatagccatgcaaggtgaagaatgtcaccaactcagaaacccttcttcattgacgtgtccctcactcactctcctctcttcactataaatcgccactcttcgtgttctccacttcaccaactccttcaaacttattaacactttccttagttcaatatggggaagcccttcttcactctctctctttcttccctttgcttgctactcttgtcgagtgcatgctattacctccagcaagttcaacgagtgccaactcaacaacctcaacgcgttggaacccgaccaccgcgttgagtccgaaggtggtcttattgaaacatggaactctcaacaccctgagctgcaatgcgccggtgtcactgtttccaaacgcaccctcaaccgcaacggcctccacttgccatcttactcaccttatcccccaaatgatcattgtcgttcaaggtgcgtaatattagtaagaagnatttatcagcttaacgtgataacaataatagtaatatgaaaatatttattaaatttttataattaatctctgctagaaaatttgattaatcattttagtagaatttgtttttctcaactaggtttttaaaacaccaca

SEQ ID NO: 4314 - DNA, 657 bp, Artificial
  Mutations within GlyA3B4 introduced by GmGlyA3B4_T02TALE nuclease
gttcatgtacggttgcagatataaacgaagcatagcttatgtatgaggtgtaacaaaattggaaacaatagccatgcaaggtgaagaatgtcaccaactcagaaacccttcttcattgacgtgtccctcactcactctcctctcttcactataaatcgccactcttcgtgttctccacttcaccaactccttcaaacttattaacactttccttagttcaatatggggaagcccttcttcactctctctctttcttccctttgcttgctactcttgtcgagtgcattgctattacctccagcaagttcaacgagtgccaactcaacaacctcaacgcgttggaacccgaccaccgcgttgagtccgaaggtggtcttattgaaacatggaactctcaacaccctgagctgcaatgcgccggtgtcactgtttccaaacgcaccctcaaccgcaacggcctccacttgccatcttactcaccttatccccaaatgatcattgtcgttcaaggtgcgtaatattagtaagaagtatttatcagcttaacgtgataacaatatagtaatatgaaatatttattaaatttttataattaatctctgctagaaaatttgattaatcattttagtagaatttgtttttctcaactaggttttt

SEQ ID NO: 4315 - DNA, 568 bp, Artificial
  Mutations within GlyA3B4 introduced by GmGlyA3B4_T02TALE nuclease
gttcatgtacggttgcagatataaacgaagcatagcttatgtatgaggtgtaacaaaattggaaacaatagccatgcaaggtgaagaatgtcaccaactcagaaacccttcttcattgacgtgtccctcactcactctcctctcttcactataaatcgccactcttcgtgttctccacttcaccaactccttcaaacttattaacactttccttagttcaatatggggaagcccttcttcactctctctctttcttccctttgcttgctactcaacaacctcaacgcgttggaacccgaccaccgcgttgagtccgaaggtggtcttattgaaacatggaactctcaacaccctgagctgcaatgcgccggtgtcactgtttccaaacgcaccctcaaccgcaacggcctccacttgccatcttactcaccttatccccaaatgcatcattgtcgttcaaggtgcgtaatattagtaagaagtatttatcagcttaacgtgatacaataatagtaatatgaaatatttattaattttttataattaatctctgctagaaaatttgatt

SEQ ID NO: 4316 - DNA, 664 bp, Artificial
  Mutations within GlyA3B4 introduced by GmGlyA3B4_T02TALE nuclease
gttcatgtacggttgcagatataaacgaagcatagcttatgtatgaggtgtaacaaaattggaaacaatagccatgcaaggtgaagaatgtcaccaactcagaaacccttcttcattgacgtgtccctcactcactctcctctcttcactataaatcgccactcttcgtgttctccacttcaccaactccttcaaacttattaacactttccttagttcaatatggggaagcccttcttcactctctctctttcttccctttgcttgctactcttgtcgagtgctattacctccagcaagttcaacgagtgccaactcaacaacctcaacgcgttggaacccgaccaccgcgttgagtccgaaggtggtcttattgaaacatggaactctcaacaccctgagctgcaatgcgccggtgtcactgtttccaaacgcaccctcaaccgcaacggcctccacttgccatcttactcaccttatccccaaatgatcattgtcgttcaaggtgcgtaatattagtaagaagtatttatcagcttaacgtgataacaataatagtaatatgaaaatatttattaaaatttttataattaatctctgctagaaaatttgattaatcattttagtagaatttgtttttctcaactaggtttttaaaacacca

SEQ ID NO: 4317 - DNA, 659 bp, Artificial; identical to SEQ ID NO: 1853
  Mutations within GlyA3B4 introduced by GmGlyA3B4_T02TALE nuclease

SEQ ID NO: 4318 - DNA, 634 bp, Artificial; identical to SEQ ID NO: 1893
  Mutations within GlyA3B4 introduced by GmGlyA3B4_T02TALE nuclease

SEQ ID NO: 4319 - DNA, 635 bp, Artificial; identical to SEQ ID NO: 2434
  Mutations within GlyA3B4 introduced by GmGlyA3B4_T02TALE nuclease

SEQ ID NO: 4320 - DNA, 667 bp, Artificial
  Mutations within GlyA3B4 introduced by GmGlyA3B4_T02TALE nuclease
gttcatgtacggttgcagatataaacgaagcatagcttatgtatgaggtgtaacaaaaattggaaacaatagccatgcaaggtgaagaatgtcaccaactcagaaaccccttcttcattgacgtgtccctcactcactctcctctcttcactataaatcgccactcttcgtgttctccacttcaccaactccttcaaacttattaacactttccttagttcaatatggggaagcccttcttcactctctctctttcttccctttgcttgctactcttgtcgagtgcactattacctccagcaagttcaacgagtgccaactcaacaacctcaacgcgttggaacccgaccaccgcgttgagtccgaaggtggtctttattgaaacatggaactctcaacaccctgagctgcaatgcgccggtgtcactgtttccaaacgcaccctcaaccgcaacggcctccacttgccatcttactcaccttatcccccaaatgatcattgtcgttcaaggtgcgtaatattagtaagaagtatttatcagcttaacgtgataacaataatagtaatatgaaatatttattaaatttttataattaatctctgctagaaaatttgattaatcattttagtagaatttgtttttctcaactaggttttaaaacacca

SEQ ID NO: 4321 - DNA, 601 bp, Artificial
  Mutations within GlyA3B4 introduced by GmGlyA3B4_T02TALE nuclease
gttcatgtacggttgcagatataaacgaagcatagcttatgtatgaggtgtaacaaaattggaaacaatagccatgcaaggtgaagaatgtcaccaactcagaaacccttcttcattgacgtgtccctcactcactctcctctcttcactataaatcgccactcttcgtgttctccacttcaccaactccttcaaacttattaacactttccttagttcaatatggggaagcccttcttcactctctctctttcttccctttgcttgctactcttgtcgagtgcatcctccagcaagttcaacgagtgccaactcaacaacctcaacgcgttggaacccgaccaccgcgttgagtccgaaggtggtcttattgaaacatggaactctcaacaccctgagctgcaatgcgccggtgtcactgtttccaaacgcaccctcaaccgcaacggcctccacttgccatcttactcaccttatccccaaatgatcattgtcgttcaaggtgcgtaaatattagtaagaagtatttatcagcttaacgtgataacaataatagtaatatgaaatatttattaaattttttataattaatctctgctag

SEQ ID NO: 4322 - DNA, 657 bp, Artificial
  Mutations within GlyA3B4 introduced by GmGlyA3B4_T02TALE nuclease
gttcatgtacggttgcagatataaacgaagcatagcttatgtatgaggtgtaacaaaattggaaacaatagccatgcaaggtgaagaatgtcaccaactcagaaacccttcttcattgacgtgtccctcactcactctcctctcttcactataaatcgccactcttcgtgttctccacttcaccaactccttcaaacttattaacactttccttagttcaatatggggaagcccttcttcactctctctctttcttccctttgcttgctactcttgtcgagtgcattattacctccagcaagttcaacgagtgccaactcaacaacctcaacgcgttggaacccgaccaccgcgttgagtccgaaggtggtcttattgaaacatggaactctcaacaccctgagctgcaatgcgccggtgtcactgtttccaaacgcaccctcaaccgcaacggcctccacttgccatcttactcaccttatccccaaatgatcattgtcgttcaaggtgcgtaatattagtaagaagtatttatcagcttaacgtgataacaatatagtaatatgaaatatttattaaatttttataattaatctctgctagaaaatttgattaatcattttagtagaatttgtttttctcaactaggttttaaaa

SEQ ID NO: 4323 - DNA, 667 bp, Artificial
  Mutations within GlyA3B4 introduced by GmGlyA3B4_T02TALE nuclease
gttcatgtacggttgcagatataaacgaagcatagcttatgtatgaggtgtaacaaaaattggaaacaatagccatgcaaggtgaagaatgtcaccaactcagaaacccttcttcattgacgtgtccctcactcactctcctctcttcactataaatcgccactcttcgtgttctccacttcaccaactccttcaaacttattaacactttccttagttcaatatggggaagcccttcttcactctctctctttcttccctttgcttgctactcttgtcgagtgcatgctattacctccagcaagttcaacgagtgccaactcaacaacctcaacgcgttggaaccgaccaccgcgttgagtccgaaggtggtcttattgaaacatggaactctcaacaccctgagctgcaatgcgccggtgtcactgtttccaaacgcaccctcaaccgcaacggcctccacttgccatcttactcaccttatccccaaatgatcattgtcgttcaaggtgcgtaatattagtaagaagtatttatcagcttaacgtgataacaatatagtaatatgaaatatttattaaatttttataattaatctctgctagaaaatttgattaatcattttagtagaatttgtttttctcaactaggtttttaaaacaccaca

SEQ ID NO: 4324 - DNA, 662 bp, Artificial; identical to SEQ ID NO: 1702
  Mutations within GlyA3B4 introduced by GmGlyA3B4_T02TALE nuclease

SEQ ID NO: 4325 - DNA, 662 bp, Artificial
  Mutations within GlyA3B4 introduced by GmGlyA3B4_T02TALE nuclease
gttcatgtacggttgcagatataaacgaagcatagcttatgtatgaggtgtaacaaaattggaaacaatagccatgcaaggtgaagaatgtcaccaactcagaaaccccttcttcattgacgtgtccctcactcactctcctctcttcactataaatcgccactcttcgtgttctccacttcaccaactccttcaaacttattaacactttccttagttcaatatggggaagcccttcttcactctctctctttcttccctttgcttgctactcttgtcgggttccctattacctccagcaagttcaacgagtgccaactcaacaacctcaacgcgttggaacccgaccaccgcgttgagtccgaaggtggtcttattgaaacatggaactctcaacaccctgagctgcaatgcgccggtgtcactgtttccaaacgcaccctcaaccgcaacggcctccacttgccatcttactcaccttatccccaaatgatcattgtcgttcaaggtgcgtaatattagtaagaagtatttatcagcttaacgtgataacaatatagtaatatgaaatatttattaaatttttcataattaatctctgctagaaaatttgattaatcattttagtagaatttgtttttctcaactaggtttttaaaaca

SEQ ID NO: 4326 - DNA, 615 bp, Artificial
  Mutations within GlyA3B4 introduced by GmGlyA3B4_T02TALE nuclease
gttcatgtacggttgcagatataaacgaagcatagcttatgtatgaggtgtaacaaaattggaaacaatagccatgcaaggtgaagaatgtcaccaactcagaaacccttcttcattgacgtgtccctcactcactctcctctcttcactataaatcgccactcttcgtgttctccacttcaccaactccttcaaacttattaacactttccttagttcaatatggggaagcccttcttcactctctctattacctccagcaagttcaacgagtgccaactcaacaacctcaacgcgttggaacccgaccaccgcgttgagtccgaaggtggtcttattgaaacatggaactctcaacaccctgagctgcaatgcgccggtgtcactgtttccaaacgcaccctcaaccgcaacggcctccacttgccatcttactcaccttatccccaaatgatcattgtcgttcaaggtgcgtaatattagtaagaagtatttatcagcttaacgtgataacaataatagtaatatgaaatatttattaatttttataattaatctctgctagaaatttgattaatcatttttagtagaatttgtttttctcaactaggtttt

SEQ ID NO: 4327 - DNA, 664 bp, Artificial
  Mutations within GlyA3B4 introduced by GmGlyA3B4_T02TALE nuclease
gttcatgtacggttgcagatataaacgaagcatagcttatgtatgaggtgtaacaaaattggaaacaatagccatgcaaggtgaagaatgtcaccaactcagaaacccttcttcattgacgtgtccctcactcactctcctctcttcactataaatcgccactcttcgtgttctccacttcaccaactccttcaaacttattaacactttccttagttcaatatggggaagcccttcttcactctctctctttcttccctttgcttgctactcttgtcgagtgcatattacctccagcaagttcaacgagtgccaactcaacaacctcaacgcgttggaacccgaccaccgcgttgagtccgaaggtggtcttattgaaacatggaactctcaacaccctgagctgcaatgcgccggtgtcactgtttccaaacgcaccctcaaccgcaacggcctccacttgccatcttactcaccttatccccaaatgatcattgtcgttcaaggtgcgtaatattagtaagaagtatttatcagcttaacgtgataacaataatagtaatatgaaatatttattaaatttttataattaatctctgctagaaaatttgattaatcatttttagtagaatttgtttttctcaactaggtttttaaaacacca

SEQ ID NO: 4328 - DNA, 663 bp, Artificial; identical to SEQ ID NO: 3858
  Mutations within GlyA3B4 introduced by GmGlyA3B4_T02TALE nuclease

SEQ ID NO: 4329 - DNA, 673 bp, Artificial
  Mutations within GlyA3B4 introduced by GmGlyA3B4_T02TALE nuclease
gttcatgtacggttgcagatataaacgaagcatagcttatgtatgaggtgtaacaaaattggaaacaatagccatgcaaggtgaagaatgtcaccaactcagaaaccccttcttcattgacgtgtccctcactcactctcctctcttcactataaatcgccactcttcgtgttctccacttcaccaaactccttcaaacttattaacactttccttagtcaatatggggaagcccttcttcactctctctctttcttccctttgcttgctactcttgtcgagtgcatgcctttttgctattacctccagcaagttcaacgagtgccaactcaacaacctcaacgcgttggaacccgaccaccgcgttgagtccgaaggtggtcttattgaaacatggaactctcaacaccctgagctgcaatgcgccggtgtcactgtttccaaacgcaccctcaaccgcaacggcctccacttgccatcttactcaccttatccccaaatgatcattgtcgttcaaggtgcgtaatattagtaagaagtatttatcagcttaacgtgataacaatatagtaatatgaaatatttattaaatttttataattaatctctgctagaaaatttgattaatcattttagtgaatttgtttttctcaactaggttttaaacaccaca

SEQ ID NO: 4330 - DNA, 650 bp, Artificial
  Mutations within GlyA3B4 introduced by GmGlyA3B4_T02TALE nuclease
gttcatgtacggttgcagatataaacgaagcatagcttatgtatgaggtgtaacaaaattggaaacaatagccatgcaaggtgaagaatgtcaccaactcagaaacccttcttcattgacgtgtccctcactcactctcctctcttcactataaatcgccactcttcgtgttctccacttcaccaaactccttcaaacttattaacactttccttagttcaatatggggaagcccttcttcactctctctctttcttccctttgcttattacctccagcaagttcaacgagtgccaactcaacaacctcaacgcgttggaacccgaccaccgcgttgagtccgaaggtggtcttattgaaacatggaactctcaacacccctgagctgcaatgcgccggtgtcactgtttccaaacgcaccctcaaccgcaacggcctccacttgccatcttactcaccttatcccccaaatgatcattgtcgttcaaggtgcgtaaatattagtaagaagtatttatcagcttaacgtgataacaataatagtaatatgaaatatttattaaattttttataattaatctctgctagaaaatttgattaatcatttttagtagaatttgttttttctcaactaggttttaaaacaccac

SEQ ID NO: 4331 - DNA, 702 bp, Artificial
  Mutations within GlyA3B4 introduced by GmGlyA3B4_T02TALE nuclease
gttcatgtacggttgcagatataaacgaagcatagcttatgtatgaggtgtaacaaaattggaaacaatagccatgcaaggtgaagaatgtcaccaactcagaaacccttcttcattgacgtgtccctcactcactctcctctcttcactataaatcgccactcttcgtgttctccacttcaccaactccttcaaacttattaacactttccttagttcaatatggggaagcccttcttcactctctctctttcttccctttgcttgctactcttgtcgagtgcatgcgcctgcttgccaccattattgctggcgatggccaccacctgctgctattacctccagcaagttcaacgagtgccaactcaacaacctcaacgcgttggaacccgaccaccgcgttgagtccgaaggtggtcttattgaaacatggaactctcaacaccctgagctgcaatgcgccggtgtcactgtttccaaacgcaccctcaaccgcaacggcctccacttgccatcttactcaccttatccccaaatgatcattgtcgttcaaggtgcgtaatattagtaagaagtatttatcagcttaacgtgataacaataatagtaatatgaaatatttattaaatttttataattaatctctgctagaaaatttgattaatcatttttagtagaatttgtttttctcaactaggtttt

SEQ ID NO: 4332 - DNA, 650 bp, Artificial
  Mutations within GlyA3B4 introduced by GmGlyA3B4_T02TALE nuclease
gttcatgtacggttgcagatataaacgaagcatagcttatgtatgaggtgtaacaaaattggaaacaatagccatgcaaggtgaagaatgtcaccaactcagaaacccttcttcattgacgtgtccctcactcactctcctctcttcactataaatcgccactcttcgtgttctccacttcaccaactccttcaaacttattaacactttccttagttcaatatggggaagcccttcttcactctctctctttcttccctttgcttgctactcttgtcgagtgcatttcaacgagtgccaactcaacaacctcaacgcgttggaacccgaccaccgcgttgagtccgaaggtggtcttattgaaacatggaactctcaacaccctgagctgcaatgcgccggtgtcactgttttccaaacgcaccctcaaccgcaacggcctccacttgccatcttactcaccttatccccaaatgatcattgtcgttcaaggtgcgtaatattagtaagaagtatttatcagcttaacgtgataacaataatagtaatatgaaatatttattaaattttttataattaatctctgctagaaaatttgattaatcatttttagtagaatttgttttttctcaactaggttttaaacacca

SEQ ID NO: 4333 - DNA, 617 bp, Artificial
  Mutations within GlyA3B4 introduced by GmGlyA3B4_T02TALE nuclease
  misc_feature (19): n is a or c or t or g
gttcatgtacggttgcagntataaacgaagcatagcttatgtatgaggtgtaacaaaattggaaacaatagccatgcaaggtgaagaatgtcaccaactcagaaacccttcttcattgacgtgtccctcactcactctcctctcttcactataaatcgccactcttcgtgttctccacttcaccaactccttcaaacttattaacactttccttagttcaatatggggaagcccttcttcactctctctctttcttccctttgcttgctactcttgtcgagtgcatttacctccagcaagttcaacgagtgccaactcaacaacctcaacgcgttggaacccgaccaccgcgttgagtccgaaggtggtcttattgaaacatggaactctcaacaccctgagctgcaatgcgccggtgtcactgtttccaaacgcaccctcaaccgcaacggcctccacttgccatcttactcaccttatccccaaatgatcattgtcgttcaaggtgcgtaatattagtaagaagtatttatcagcttaacgtgataacaatatagtaatatgaaatatttattaaatttttataattaatctctgctagaaaatttgattaatca

SEQ ID NO: 4334 - DNA, 655 bp, Artificial; identical to SEQ ID NO: 2627
  Mutations within GlyA3B4 introduced by GmGlyA3B4_T02TALE nuclease

SEQ ID NO: 4335 - DNA, 659 bp, Artificial; identical to SEQ ID NO: 1853
  Mutations within GlyA3B4 introduced by GmGlyA3B4_T02TALE nuclease

SEQ ID NO: 4336 - DNA, 733 bp, Artificial
  Mutations within GlyA3B4 introduced by GmGlyA3B4_T02TALE nuclease
  misc_feature (653): n is a or c or t or g
gttcatgtacggttgcagatataaacgaagcatagcttatgtatgaggtgtaacaaaattggaaacaatagccatgcaaggtgaagaatgtcaccaactcagaaacccttcttcattgacgtgtccctcactcactctcctctcttcactataaatcgccactcttcgtgttctccacttcaccaactccttcaaacttattaacactttccttagttcaatatggggaagcccttcttcactctctctctttcttccctttgcttgctactcttgtcgagtgcacaccggcaacagcgcctgcaccgtctccagcgcctgcttgccaccaatattgctggcgatggccaaccacctgctccggggtcaagccgtgggcctggcacagcaccggcaacagccgctggaccgtctccagcgccttgctattacctccagcaagttcaacgagtgccaactcaacaacctcaacgcgttggaacccgcaccgcgttgagtccgaaggtggtcttattgaaacatggaactctcaacaccctgagctgcaatgcgccggtgtcactgtttccaaacgcacctcaaccgcaacggcctccacttgccatcttactcaccttatccccaaatgatcattgtcgtcaaggtgcgtaatnttagtaagaagtatttatcagcttaacgtgataacaataatagtaatatgaaatatttattaaatttttataattaaatt

SEQ ID NO: 4337 - DNA, 600 bp, Artificial
  Mutations within GlyA3B4 introduced by GmGlyA3B4_T02TALE nuclease
  misc_feature (451): n is a or c or t or g
gttcatgtacggttgcagatataaacgaagcatagcttatgtatgaggtgtaacaaaattggaaacaatagccatgcaaggtgaagaatgtcaccaactcagaaaccccttcttcattgacgtgtccctcactcactctcctctcttcactataaatcgccactcttcgtgttctccacttcaccaactccttcaaacttattaacactttccttagttcaatatggggaagcccttcttcactctctctctttcttccctttgcttgctactcttgtcgagttgctattacctccagcaagttcacgagtgccaactcaacaacctcaacgcgttggaacccgaccaccgcgttgagtccgaaggtggtcttattgaaacatggaactctcaacaccctgagctgcaatgcgccgtgtcactgtttccaaacgcacccctcaaccgcaanggccctcccacttgccatcttactcaccttatcccccaaatgatcattgtcgttcaaggtgcgtaatattagtaagaagtatttatcagcttaacgtgataacaatatagtaatatgaaatatttattaaatttttataattaatctct

SEQ ID NO: 4338 - DNA, 645 bp, Artificial; identical to SEQ ID NO: 2653
  Mutations within GlyA3B4 introduced by GmGlyA3B4_T02TALE nuclease

SEQ ID NO: 4339 - DNA, 619 bp, Artificial
  Mutations within GlyA3B4 introduced by GmGlyA3B4_T02TALE nuclease
gttcatgtacggttgcagatataaacgaagcatagcttatgtatgaggtgtaacaaaattggaaacaatagccatgcaaggtgaagaatgtcaccaactcagaaacccttcttcattgacgtgtccctcactcactctcctctcttcactataaatcgccactcttcgtgttctccacttcaccaactccttcaaacttattaacactttccttagttcaatatggggaagcccttcttcactctctctctttcttccctttgcttgctactcttgtcgagtgcattattacctccagcaagttcaacgagtgccaactcaacaacctcaacgcgttggaacccgaccaccgcgttgagtccgaaggtggtcttattgaaacatggaactctcaacaccctgagctgcaatgcgccggtgtcactgtttccaaacgcaccctcaaccgcaacggcctccacttgccatcttactcaccttatccccaaatgatcattgtcgttcaaggtgcgtaatattagtaagaagtatttatcagcttaacgtgataacaatatagtaatatgaaatatttattaaatttttataattaatctctgctagaaaatttgattaatca

SEQ ID NO: 4340 - DNA, 656 bp, Artificial
  Mutations within GlyA3B4 introduced by GmGlyA3B4_T02TALE nuclease
gttcatgtacggttgcagatataaacgaagcatagcttatgtatgaggtgtaacaaaaattggaaacaatagccatgcaaggtgaagaatgtcaccaactcagaaacccttcttcattgacgtgtccctcactcactctcctctcttcactataaatcgccactcttcgtgttctccacttcaccaactccttcaaacttattaacactttccttagttcaatatggggaagcccttcttcactctctctctttcttccctttgcttgctactcttgtcgagtgctattacctccagcaagttcaacgagtgccaactcaacaacctcaacgcgttggaacccgaccaccgcgttgagtccgaaggtggtcttattgaaacatggaactctcaacaccctgagctgcaatgcgccggtgtcactgtttccaaacgcaccctcaaccgcaacggcctccacttgccatcttactcaccttatccccaaatgatcattgtcgttcaaggtgcgtaatattagtaagaagtatttatcagcttaacgtgataacaatatagtaatatgaaatatttattaaatttttataattaatctctgctagaaaatttgattaatcattttagtagaatttgtttttctcaactaggttttaaaa

SEQ ID NO: 4341 - DNA, 584 bp, Artificial
  Mutations within GlyA3B4 introduced by GmGlyA3B4_T02TALE nuclease
gttcatgtacggttgcagatataaacgaagcatagcttatgtatgaggtgtaacaaaattggaaacaatagccatgcaaggtgaagaatgtcaccaactcagaaacccttcttcattgacgtgtccctcactcactctcctctcttcactataaatcgccactcttcgtgttctccacttcaccaactccttcaaacttattaacactttccttagttcaatatggggaagcccttcttcactctctctctttcttccctttgcttgctactcttgtcgagtgcatgcagaactttaaaagtgctcatcattggaaaacgttcttcggggcgaaaaactctcaaggatcttattgaaacatggaactctcaacaccctgagctgcaatgcgccggtgtcactgtttccaaaacgcaccctcaaccgcaacggcctccacttgccatcttactcaccttatccccaaatgatcattgtcgttcaaaggtgcgtaatattagtaagaagtatttatcagcttaacgtgataacaataatagtaatatgaaatatttattaaattttttataattaatctctgctag

SEQ ID NO: 4342 - DNA, 565 bp, Artificial
  Mutations within GlyA3B4 introduced by GmGlyA3B4_T02TALE nuclease
gttcatgtacggttgcagatataaacgaagcatagcttatgtatgaggtgtaacaaaattggaaacaatagccatgcaaggtgaagaatgtcaccaactcagaaacccttcttcattgacgtgtccctcactcactctcctctcttcactataaatcgccactcttcgtgttctccacttcaccaactccttcaaacttattaacactttccttagttcaatatggggaagcccttcttcactctctctctttcttccctttgcttgctactcttgctattacctccagcaagttcaacgagtgccaactcaacaacctcaacgcgttggaacccgaccaccgcgttgagtccgaaggtggtcttattgaaacatggaactctcaacaccctgagctgcaatgcgccggtgtcactgtttccaaacgcaccctcaaccgcaacggcctccacttgccatcttactcaccttatcccccaaatgatcattgtcgttcaaggtgcgtaaatattagtaagaagtatttatcagcttaacgtgataacaataatagtaatatgaaata

SEQ ID NO: 4343 - DNA, 653 bp, Artificial
  Mutations within GlyA3B4 introduced by GmGlyA3B4_T02TALE nuclease
gttcatgtacggttgcagatataaacgaagcatagcttatgtatgaggtgtaacaaaattggaaacaatagccatgcaaggtgaagaatgtcaccaactcagaaacccttcttcattgacgtgtccctcactcactctcctctcttcactataaatcgccactcttcgtgttctccacttcaccaactccttcaaacttattaacactttccttagttcaatatggggaagcccttcttcactctctctctttcttccctttgctttgctattacctccagcaagttcaacgagtgccaactcaacaacctcaacgcgttggaacccgaccaccgcgttgagtccgaaggtggtcttattgaaacatggaactctcaacacccctgagctgcaatgcgccggtgtcactgtttccaaacgcaccctcaaccgcaacggcctccacttgccatcttactcaccttatcccccaaatgatcattgtcgttcaaggtgcgtaatattagtaagaagtatttatcagcttaacgtgataacaataatagtaatatgaaatatttattaaattttttataattaatctctgctagaaaatttgattaatcatttttagtagaatttgttttttctcaactaggttttaaaacaccaca

SEQ ID NO: 4344 - DNA, 659 bp, Artificial
  Mutations within GlyA3B4 introduced by GmGlyA3B4_T02TALE nuclease
gttcatgtacggttgcagatataaacgaagcatagcttatgtatgaggtgtaacaaaattggaaacaatagccatgcaaggtgaagaatgtcaccaactcagaaacccttcttcattgacgtgtccctcactcactctcctctcttcactataaatcgccactcttcgtgttctccacttcaccaactccttcaaacttattaacactttccttagttcaatatggggaagcccttcttcactctctctctttcttccctttgcttgctactcttgtcgagtgctacctccagcaagttcaacgagtgccaactcaacaacctcaacgcgttggaacccgaccaccgcgttgagtccgaaggtggtcttattgaaacatggaactctcaacaccctgagctgcaatgcgccggtgtcactgtttccaaacgcaccctcaaccgcaacggcctccacttgccatcttactcaccttatccccaaatgatcattgtcgttcaaggtgcgtaatattagtaagaagtatttatcagcttaacgtgataacaataatagtaatatgaaatatttattaaatttttataattaatctctgctagaaaatttgattaatcatttttagtagaatttgtttttctcaactaggttttaaaacacca

SEQ ID NO: 4345 - DNA, 662 bp, Artificial
  Mutations within GlyA3B4 introduced by GmGlyA3B4_T02TALE nuclease
gttcatgtacggttgcagatataaacgaagcatagcttatgtatgaggtgtaacaaaattggaaacaatagccatgcaaggtgaagaatgtcaccaactcagaaacccttcttcattgacgtgtccctcactcactctcctctcttcactataaatcgccactcttcgtgttctccacttcaccaactccttcaaacttattaacactttccttagttcaatatggggaagcccttcttcactctctctctttcttccctttgcttgctactcttgtcgagtgcatacctccagcaagtttcaaaccgacgtgcccaaatcatcaacaaaccctaccaaatccgaccgttggaacccctgacccagcctggcagttgcagtccgaacggtggttcttatttgcaaaacgattgggaacctccttatcaaaacagaccccttgagcactgcaatgcggccaggtgtcacctggtttccaaacgcaccctcaaccgcaacgcctccacttgccatcttatctcaccttatcccccaaatgattccaattgtcgttcaaggtgcaggtaatattagtaagaagatatttatcagcttaacgtgataacaataaatagtaatatgaaatatttattaaatttttataatttaatctctgctagaaa

SEQ ID NO: 4346 - DNA, 654 bp, Artificial; identical to SEQ ID NO: 2491
  Mutations within GlyA3B4 introduced by GmGlyA3B4_T02TALE nuclease

SEQ ID NO: 4347 - DNA, 667 bp, Artificial; identical to SEQ ID NO: 3933
  Mutations within GlyA3B4 introduced by GmGlyA3B4_T02TALE nuclease

SEQ ID NO: 4348 - DNA, 646 bp, Artificial
  Mutations within GlyA3B4 introduced by GmGlyA3B4_T02TALE nuclease
gttcatgtacggttgcagatataaacgaagcatagcttatgtatgaggtgtaacaaaattggaaacaatagccatgcaaggtgaagaatgtcaccaactcagaaacccttcttcattgacgtgtccctcactcactctcctctcttcactataaatcgccactcttcgtgttctccacttcaccaactccttcaaacttattaacactttccttagttcaatatggggaagcccttcttcactctctctctttcttccctttgcttgctactcttgtcgagtgcattacctccagcaagttcaacgagtgccaactcaacaacctcaacgcgttggaacccgaccaccgcgttgagtccgaaggtggtcttattgaaacatggaactctcaacaccctgagctgcaatgcgccggtgtcactgtttccaaacgcaccctcaaccgcaacggcctccacttgccatcttactcaccttatccccaaatgatcattgtcgttcaaggtgcgtaatattagtaagaagtatttatcagcttaacgtgataacaataatagtaatatgaaatatttattaaatttttataattaatctctgctagaaaatttgattaatcattttagtagaatttgtttttctcaactag

SEQ ID NO: 4349 - DNA, 637 bp, Artificial; identical to SEQ ID NO: 2343
  Mutations within GlyA3B4 introduced by GmGlyA3B4_T02TALE nuclease

SEQ ID NO: 4350 - DNA, 697 bp, Artificial
  Mutations within GlyA3B4 introduced by GmGlyA3B4_T02TALE nuclease
gttcatgtacggttgcagatataaacgaagcatagcttatgtatgaggtgtaacaaaattggaaacaatagccatgcaaggtgaagaatgtcaccaactcagaaacccttcttcattgacgtgtccctcactcactctcctctcttcactataaatcgccactcttcgtgttctccacttcaccaactccttcaaacttattaacactttccttagttcaatatggggaagcccttcttcactctctctctttcttccctttgcttgctactcttgtcgagtgcatggcggcaagcaggcgctggagacggtccagcggctgttgccggtgctgtgccaggcccacggcttgaccccccagcaggtggtggccatcgctattacctccagcaagttcaacgagtgccaactcaacaacctcaacgcgttggaacccgaccaccgcgttgagtccgaaggtggtcttattgaaacatggaactctcaacaccctgagctgcaatgcgccggtgtcactgtttccaaacgcacctcaaccgcaacggcctccacttgccatctttactcaccttattccccaaatgatcattgtcgttcaaggtgcgtaatattagtaagaagtatttatcagcttaacgtgataacaataatagtaatatgaaatatttattaaattttttataattaatctcgctag

SEQ ID NO: 4351 - DNA, 515 bp, Artificial
  Mutations within GlyA3B4 introduced by GmGlyA3B4_T02TALE nuclease
gttcatgtacggttgcagatataaacgaagcatagcttatgtatgaggtgtaacaaaattggaaacaatacgcatgcaaggtgaagaatgtcaccaactcagaaacccttcttcattgacgtgtccctcactcactctcctctcttcactataaatcgccactcttcgtgttctccacttcaacaacctcaacgcgttggaacccgaccaccgcgttgagtccgaaggtggtcttattgaaacatggaactctcaacaccctgagctgcaatgcgccggtgtcactgtttccaaacgcaccctcaaccgcaacggcctccacttgccatcttactcaccttatccccaaatgatcattgtcgttcaaggtgcgtaatattagtaagaagtattttatcagcttaacgtgataacaataatagtaatatgaaatatttattaaattttttataattaatctctgctagaaaatttgattaatcattttttagtagaatttgtttttctcaactagg

SEQ ID NO: 4352 - DNA, 656 bp, Artificial; identical to SEQ ID NO: 1969
  Mutations within GlyA3B4 introduced by GmGlyA3B4_T02TALE nuclease

SEQ ID NO: 4353 - DNA, 621 bp, Artificial
  Mutations within GlyA3B4 introduced by GmGlyA3B4_T02TALE nuclease
gttcatgtacggttgcagatataaacgaagcatagcttatgtatgaggtgtaacaaaattggaaacaatagccatgcaaggtgaagaatgtcaccaactcagaaacccttcttcattgacgtgtccctcactcactctcctctcttcactataaatcgccactcttcgtgttctccacttcaccaactccttcaaacttattaacactttccttagttcaatatggggaagcccttcttcactctctctctttcttccctttgcttgctactcttgtcgagtgccaactcaacaacctcaacgcgttggaacccgaccaccgcgttgagtccgaaggtggtcttattgaaacatggaactctcaacaccctgagctgcaatgcgccggtgtcactgtttccaaacgcaccctcaaccgcaacggcctccacttgccatcttactcaccttatcccccaaatgatcattgtcgttcaaggtgcgtaatattagtaagaagtatttatcagcttaacgtgataacaataatagtaatatgaaatatttattaaattttttataattaatctctgctagaaaatttgattaatcatttttagtagaatttgtttttctcaacta

SEQ ID NO: 4354 - DNA, 616 bp, Artificial
  Mutations within GlyA3B4 introduced by GmGlyA3B4_T02TALE nuclease
gttcatgtacggttgcagatataaacgaagcatagcttatgtatgaggtgtaacaaaattggaaacaatagccatgcaaggtgaagaatgtcaccaactcagaaacccttcttcattgacgtgtccctcactcactctcctctcttcactataaatcgccactcttcgtgttctccacttcaccaactccttcaaacttattaacactttccttagttcaatatggggaagcccttcttcacattacctccagcaagttcaacgagtgccaactcaacaacctcaacgcgttggaacccgaccaccgcgttgagtccgaaggtggtcttattgaaacatggaactctcaacaccctgagctgcaatgcgccggtgtcactgtttccaaacgcaccctcaaccgcaacggcctccacttgccatcttactcaccttatccccaaatgatcattgtcgttcaaggtgcgtaatattagtaagaagtatttatcagcttaacgtgataacaataatagtaatatgaaatatttattaatttttataattaatctctgctagaaaatttgattaatcatttttagtagaatttgtttttctcaactaggtttttaaaaca

SEQ ID NO: 4355 - DNA, 664 bp, Artificial
  Mutations within GlyA3B4 introduced by GmGlyA3B4_T02TALE nuclease
gttcatgtacggttgcagatataaacgaagcatagcttatgtatgaggtgtaacaaaattggaaacaatagccatgcaaggtgaagaatgtcaccaactcagaaacccttcttcattgacgtgtccctcactcactctcctctcttcactataaatcgccactcttcgtgttctccacttcaccaactccttcaaacttattaacactttccttagttcaatatggggaagcccttcttcactctctctctttcttccctttgcttgctactcttgtcgagtgcattgctattacctccagcaagttcaacgagtgccaactcaacaacctcaacgcgttggaacccgaccaccgcgttgagtccgaaggtggtcttattgaaacatggaactctcaacaccctgagctgcaatgcgccggtgtcactgtttccaaacgcaccctcaaccgcaacggcctccacttgccatcttactcaccttatccccaaatgatcattgtcgttcaaggtgcgtaatattagtaagagtatttatcagcttaacgtgataacaatatagtaatatgaaatatttattaaatttttataattaatctctgctagaaaatttgattaatcattttagtagaatttgtttttctcaactaggtttttaaacacca

SEQ ID NO: 4356 - DNA, 565 bp, Artificial
  Mutations within GlyA3B4 introduced by GmGlyA3B4_T02TALE nuclease
gttcatgtacggttgcagatataaacgaagcatagcttatgtatgaggtgtaacaaaattggaaacaatagccatgcaaggtgaagaatgtcaccaactcagaaacccttcttcattgacgtgtccctcactcactctcctctcttcactataaatcgccactcttcgtgttctccacttcaccaactccttcaaacttattaacactttccttagttcaatatggggaagcccttcttcactctctctctttcttccctttgcttgctactcccgaccaccgcgttgagtccgaaggtggtcttattgaaacatggaactctcaacaccctgagctgcaatgcgccggtgtcactgtttccaaacgcaccctcaaccgcaacggcctccacttgtcatcttactcaccttatcccccaaatgatcattgtcgttcaaggtgcgtaatattagtaagaagtatttatcagcttaacgtgataacaataatagtaatatgaaatatttattaaattttttataattaatctctgctagaaaatttgattaatcatttttagtagaa

SEQ ID NO: 4357 - DNA, 656 bp, Artificial
  Mutations within GlyA3B4 introduced by GmGlyA3B4_T02TALE nuclease
gttcatgtacggttgcagatataaacgaagcatagcttatgtatgaggtgtaacaaaattggaaacaatagccatgcaaggtgaagaatgtcaccaactcagaaacccttcttcattgacgtgtccctcactcactctcctctcttcactataaatcgccactcttcgtgttctccacttcaccaactccttcaaacttattaacactttccttagttcaatatggggaagcccttcttcactctctctctttcttccctttgcttgctactcttgtcttgctattacctccagcaagttcaacgagtgccaactcaacaacctcaacgcgttggaacccgaccaccgcgttgagtccgaaggtggtcttattgaaacatggaactctcaacaccctgagctgcaatgcgccggtgtcactgtttccaaacgcaccctcaaccgcaacggcctccacttgccatcttactcaccttatcccccaaatgatcattgtcgttcaaggtgcgtaatattagtaagaagtatttatcagcttaacgtgataacaataatagtaatatgaaatatttattaaatttttataattaatctctgctagaaaatttgattaatcattttagtagaatttgtttttctcaactaggtttttaaaa

SEQ ID NO: 4358 - DNA, 665 bp, Artificial
  Mutations within GlyA3B4 introduced by GmGlyA3B4_T02TALE nuclease
gttcatgtacggttgcagatataaacgaagcatagcttatgtatgaggtgtaacaaaattggaaacaatagccatgcaaggtgaagaatgtcaccaactcagaaacccttcttcattgacgtgtccctcactcactctcctctcttcactataaatcgccactcttcgtgttctccacttcaccaactccttcaaacttattaacactttccttagttcaatatggggaagcccttcttcactctctctctttcttccctttgcttgctactcttgtcgagtgcttgctattacctccagcaagttcaacgagtgccaactcaacaacctcaacgcgttggaacccgaccaccgcgttgagtccgaaggtggtcttattgaaacatggaactctcaacaccctgagctgcaatgcgccggtgtcactgtttccaaacgcaccctcaaccgcaacggcctccacttgccatcttactcaccttatccccaaatgatcattgtcgttcaaggtgcgtaatattagtaagaagtatttatcagcttaacgtgataacaatatagtaatatgaaatatttattaaatttttataattaatctctgctagaaaatttgattaatcattttagtagaatttgtttttctcaactaggtttttaaaacacca

SEQ ID NO: 4359 - DNA, 663 bp, Artificial
  Mutations within GlyA3B4 introduced by GmGlyA3B4_T02TALE nuclease
  misc_feature (529): n is a or c or t or g
gttcatgtacggttgcagatataaacgaagcatagcttatgtatgaggtgtaacaaaattggaaacaatagccatgcaaggtgaagaatgtcaccaactcagaaacccttcttcattgacgtgtccctcactcactctcctctcttcactataaatcgccactcttcgtgttctccacttcaccaactccttcaaacttattaacactttccttagttcaatatggggaagcccttcttcactctctctctttcttccctttgcttgctactcttgtcgagtgcgctattacctccagcaagttcaacgagtgccaactcaacaacctcaacgcgttggaacccgaccaccgcgttgagtccgaaggtggtcttattgaaacatggaactctcaacaccctgagctgcaatgcgccggtgtcactgtttccaaacgcaccctcaaccgcaacggcctccacttgccatcttactcaccttatccccaaatgatcattgtcgttcaaggtgcgtaatattagtaagaagnatttatcagcttaacgtgataacaataatagtaatatgaaatatttattaaatttttataattaatctctgctagaaaatttgattaatcattttagtagaatttgttttctcaactaggttttaaacaccaca

SEQ ID NO: 4360 - DNA, 647 bp, Artificial
  Mutations within GlyA3B4 introduced by GmGlyA3B4_T02TALE nuclease
gttcatgtacggttgcagatataaacgaagcatagcttatgtatgaggtgtaacaaaattggaaacaatagccatgcaaggtgaagaatgtcaccaactcagaaacccttcttcattgacgtgtccctcactcactctcctctcttcactataaatcgccactcttcgtgttctccacttcaccaactccttcaaacttattaacactttccttagttcaatatggggaagcccttcttcactctctctctttcttccctttgctattacctccagcaagttcaacgagtgccaactcaacaacctcaacgcgttggaacccgaccaccgcgttgagtccgaaggtggtcttattgaaacatggaactctcaacacccctgagctgcaatgcgccggtgtcactgtttccaaacgcaccctcaaccgcaacggcctccacttgccatcttactcaccttatccccaaatgatcattgtcgttcaaggtgcgtaatattagtaagaagtatttatcagcttaacgtgataacaataatagtaatatgaaatatttattaaattttttataattaatctctgctagaaaatttgattaatcattttttagtagaatttgttttttctcaactaggttttaaacaccaca

SEQ ID NO: 4361 - DNA, 650 bp, Artificial
  Mutations within GlyA3B4 introduced by GmGlyA3B4_T02TALE nuclease
  misc_feature (42); (366): n is a or c or t or g
gttcatgtacggttgcagatataaacgaagcatagcttatgnatgagggtgtaacaaaaattggaaacaatagccatgcaaggtgaagaattgtcaccaactcagaaaccccttcttcattgacgtgtccctcactcactctcctctcttcactataaatcgccactcttcgtgttctccacttcaccaaactccttcaaacttattaacactttccttagttcaatatggggaagcccttcttcactctctctctttcttccctttgcttgctactcttgtcgagtgcatgtattacctccagcaagttcaacgagtgccaactcaacaacctcaatcgcgttggaacccgaccaccgcgttgantccgaaggtggtcttattgaaacatggaactctcaacaccctgagctgcaatgcgccggtgtcactgtttccaaacgcaccctcaaccgcaacggcctccacttgccatcttactcaccttatcccccaaaatgatcattgtcgttcaaggtgcgtaatattagtaagaagtatttatcagcttaacgtgataacaataatagtaatatgaaatatttattaaatttttataattaatctctgctagaaaatttgattaatcatttttagtagaatttgttttt

SEQ ID NO: 4362 - DNA, 669 bp, Artificial
  Mutations within GlyA3B4 introduced by GmGlyA3B4_T02TALE nuclease
gttcatgtacggttgcagatataaacgaagcatagcttatgtatgaggtgtaacaaaattggaaacaatagccatgcaaggtgaagaatgtcaccaactcagaaacccttcttcattgacgtgtccctcactcactctcctctcttcactataaatcgccactcttcgtgttctccacttcaccaactccttcaaacttattaacactttccttagttcaatatggggaagcccttcttcactctctctctttcttccctttgcttgctactcttgtcgagtgcatgctattacctccagcaagttcaacgagtgccaactcaacaacctcaacgcgttggaacccgaccaccgcgttgagtccgaaggtggtcttattgaaacatggaactctcaacaccctgagctgcaatgcgccggtgtcactgtttccaaacgcaccctcaaccgcaacggcctccacttgccatcttactcaccttatcccccaaatgatcattgtcgttcaaggtgcgtaatattagtaagaagtatttatcagcttaacgtgataacaataatagtaatatgaaatatttattaaatttttataattaatctctgctagaaaatttgattaatcattttagtagaatttgtttttctcaactaggtttttaaaacaccaca

SEQ ID NO: 4363 - DNA, 667 bp, Artificial
  Mutations within GlyA3B4 introduced by GmGlyA3B4_T02TALE nuclease
  misc_feature (533): n is a or c or t or g
gttcatgtacggttgcagatataaacgaagcatagcttatgtatgaggtgtaacaaaattggaaacaatagccatgcaaggtgaagaatgtcaccaactcagaaacccttcttcattgacgtgtccctcactcactctcctctcttcactataaatcgccactcttcgtgttctccacttcaccaactccttcaaacttattaacactttccttagttcaatatgggggaagcccttcttcactctctctctttcttccctttgcttgctactcttgtcgagtgcattgctattacctccagcaagttcaacgagtgccaactcaacaacctcaacgcgttggaacccgaccaccgcgttgagtccgaaggtggtcttattgaaacatggaactctcaacaccctgagctgcaatgcgccggtgtcactgtttccaaacgcaccctcaaccgcaacggcctccacttgccatcttactcaccttatccccaaatgatcattgtcgttcaaggtgcgtaatattagtaagaagnatttatcagcttaacgtgataacaatatagtaatatgaaatatttattaaatttttataattaatctctgctagaaaatttgattaatcattttagtagaatttgtttttctcaactaggtttttaaaacacca

SEQ ID NO: 4364 - DNA, 664 bp, Artificial
  Mutations within GlyA3B4 introduced by GmGlyA3B4_T02TALE nuclease
gttcatgtacggttgcagatataaacgaagcatagcttatgtatgaggtgtaacaaaattggaaacaatagccatgcaaggtgaagaatgtcaccaactcagaaacccttcttcattgacgtgtccctcactcactctcctctcttcactataaatcgccactcttcgtgttctccacttcaccaactccttcaaacttattaacactttccttagttcaatatggggaagcccttcttcactctctctctttcttccctttgcttgctactcttgtcgagtgcatgctattacctccagcaagttcaacgagtgccaactcaacaacctcaacgcgttggaacccgaccaccgcgttgagtccgaaggtggtcttattgaaacatggaactctcaacaccctgagctgcaatgcgccggtgtcactgtttccaaacgcaccctcaaccgcaacggcctccacttgccatcttactcaccttatccccaaatgatcattgtcgttcaaggtgcgtaatattagtaagaagtatttatcagcttaacgtgataacaataatagtaatatgaaatatttattaaatttttataattaatctctgctagaaaatttgattaaatcattttagtagaatttgtttttctcaactaggtttttaaaaca

SEQ ID NO: 4365 - DNA, 583 bp, Artificial
  Mutations within GlyA3B4 introduced by GmGlyA3B4_T02TALE nuclease
gttcatgtacggttgcagatataaacgaagcatagcttatgtatgaggtgtaacaaaattggaaacaatagccatgcaaggtgaagaatgtcaccaactcagaaacccttcttcattgacgtgtccctcactcactctcctctcttcactataaatcgccactcttcgtgttctccacttcaccaactccttcaaacttattaacactttccttagttcaatatggggaagcccttcttcactctcaacaacctcaacgcgttggaacccgaccaccgcgttgagtccgaaggtggtcttattgaaacatggaactctcaacaccctgagctgcaatgcgccggtgtcactgtttccaaacgcaccctcaaccgcaacggcctccacttgccatcttactcaccttatccccaaatgatcattgtcgttcaaggtgcgtaatattagtaagaagtatttatcagcttaacgtgataacaataatagtaatatgaaatatttattaaatttttttataattaatctctgctagaaaatttgattaatcatttttagtagaatttgtttttctcaactaggtttt

SEQ ID NO: 4366 - DNA, 666 bp, Artificial; identical to SEQ ID NO: 1812
  Mutations within GlyA3B4 introduced by GmGlyA3B4_T02TALE nuclease

SEQ ID NO: 4367 - DNA, 669 bp, Artificial
  Mutations within GlyA3B4 introduced by GmGlyA3B4_T02TALE nuclease
gttcatgtacggttgcagatataaacgaagcatagcttatgtatgaggtgtaacaaaattggaaacaatagccatgcaaggtgaagaatgtcaccaactcagaaacccttcttcattgacgtgtccctcactcactctcctctcttcactataaatcgccactcttcgtgttctccacttcaccaactccttcaaacttattaacactttccttagttcaatatggggaagcccttcttcactctctctctttcttccctttgcttgctactcttgtcgagtgcatgccttttttgctattacctccagcaagttcaacgagtgccaactcaacaacctcaacgcgttggaacccgaccaccgcgttgagtccgaaggtggtcttattgaaacatggaactctcaacaccctgagctgcaatgcgccggtgtcactgtttccaaacgcaccctcaaccgcaacggcctccacttgccatcttactcaccttatccccaaatgatcattgtcgttcaaggtgcgtaatattagtaagagtatttatcagcttaacgtgataacaataatagtaatatgaaatatttattaaatttttataattaatctctgctagaaaatttgattaatcattttagtagaatttgtttttctcaactaggtttttaaaa

SEQ ID NO: 4368 - DNA, 649 bp, Artificial
  Mutations within GlyA3B4 introduced by GmGlyA3B4_T02TALE nuclease
gttcatgtacggttgcagatataaacgaagcatagcttatgtatgaggtgtaacaaaattggaaacaatagccatgcaaggtgaagaatgtcaccaactcagaaacccttcttcattgacgtgtccctcactcactctcctctcttcactataaatcgccactcttcgtgttctccacttcaccaactccttcaaacttattaacactttccttagttcaatatggggaagcccttcttcactctctctctttcttccctttgctttgctattacctccagcaagttcaacgagtgccaactcacaacctcaacgcgttggaacccgaccaccgcgttgagtccgaaggtggtcttattgaaacatggaactctcaacaccctgagctgcaatgcgccggtgtcactgtttccaaacgcaccctcaaccgcaacggcctccacttgccatcttactcaccttatccccaaatgatcattgtcgttcaaggtgcgtaatattagtaagaagtatttatcagcttaacgtgataacaataatagtaatatgaaatatttattaaattttttataattaatctctgctagaaaatttgattaatcatttttagtagaatttgttttttctcaactaggttttaaacaccaca

SEQ ID NO: 4369 - DNA, 660 bp, Artificial
  Mutations within GlyA3B4 introduced by GmGlyA3B4_T02TALE nuclease
  misc_feature (533): n is a or c or t or g
gttcatgtacggttgcagatataaacgaagcatagcttatgtatgaggtgtaacaaaattggaaacaatagccatgcaaggtgaagaatgtcaccaactcagaaaccccttcttcattgacgtgtccctcactcactctcctctcttcactataaatcgccactcttcgtgttctccacttcaccaactccttcaaacttattaacactttccttagttcaatatgggggaagcccttcttcactctctctctttcttccctttgcttgctactcttgtcgagtgcattgctattacctccagcaagttcaacgagtgccaactcaacaacctcaacgcgttggaacccgaccaccgcgttgagtccgaaggtggtcttattgaaacatggaactctcaacaccctgagctgcaatgcgccggtgtcactgtttccaaacgcaccctcaaccgcaacggcctccacttgccatcttactcaccttatccccaaatgatcattgtcgttcaaggtgcgtaatattagtaagagnatttatcagcttaacgtgataacaataatagtaatatgaaatatttattaaatttttataattaatctctgctagaaaatttgattaatcatttttagtagaatttgtttttctcaactaggttttt

SEQ ID NO: 4370 - DNA, 661 bp, Artificial
  Mutations within GlyA3B4 introduced by GmGlyA3B4_T02TALE nuclease
gttcatgtacggttgcagatataaacgaagcatagcttatgtatgaggtgtaacaaaattggaaacaatagccatgcaaggtgaagaatgtcaccaactcagaaacccttcttcattgacgtgtccctcactcactctcctctcttcactataaatcgccactcttcgtgttctccacttcaccaactccttcaaacttattaacactttccttagttcaatatggggaagcccttcttcactctctctctttcttccctttgcttgctactcttgtcgagtgctattacctccagcaagttcaacgagtgccaactcaacaacctcaacgcgttggaacccgaccaccgcgttgagtccgaaggtggtcttattgaaacatggaactctcaacaccctgagctgcaatgcgccggtgtcactgtttccaaacgcacccctcaaccgcaacggcctccacttgccatcttactcaccttatccccaaatgatcattgtcgttcaaggtgcgtaatattagtaagaagtatttatcagcttaacgtgataacaatatagtaatatgaaatatttattaaatttttataattaatctctgctagaaaatttgattaatcattttagtagaatttgtttttctcaactaggtttttaaacacca

SEQ ID NO: 4371 - DNA, 621 bp, Artificial
  Mutations within GlyA3B4 introduced by GmGlyA3B4_T02TALE nuclease
  misc_feature (531): n is a or c or t or g
gttcatgtacggttgcagatataaacgaagcatagcttatgtatgaggtgtaacaaaattggaaacaatagccatgcaaggtgaagaatgtcaccaactcagaaacccttcttcattgacgtgtccctcactcactctcctctcttcactataaatcgccactcttcgtgttctccacttcaccaactccttcaaacttattaacactttccttagttcaatatgggggaagcccttcttcactctctctctttcttccctttgcttgctactcttgtcgagtgcatgctattacctccagcaagttcaacgagtgccaactcaacaacctcaacgcgttggaacccgaccaccgcgttgagtccgaaggtggtcttattgaaacatggaactctcaacaccctgagctgcaatgcgccggtgtcactgtttccaaacgcaccctcaaccgcaacggcctccacttgccatcttactcaccttatccccaaatgatcatttcgttcaaggtgcgtaatattagtaagaagnatttatcagcttaacgtgataacaatatagtaatatgaaatatttattaaatttttataattaatctctgctagaaaatttgattaatca

SEQ ID NO: 4372 - DNA, 490 bp, Artificial
  Mutations within GlyA3B4 introduced by GmGlyA3B4_T02TALE nuclease
gttcatgtacggttgcagatataaacgaagcatagcttatgtatgaggtgtaacaaaattggaaacaatagccatgcaaggtgaagaatgtcaccaactcagaaacccttcttcattgacgtgtccctcactcactctcctctcttcactataaatcgccactcttcgtgttctccacttcaccaaactccttcaacgcgttggaaccccgaccaccgcgttgagtccgaaggtggtcttattgaaacatggaactctcaacaccctgagctgcaatgcgccggtgtcactgtttccaaacgcaccctcaaccgcaacggcctccacttgccatcttactcaccttatccccaaaatgatcattgtcgttcaaaggtgcgtaatattagtaagaagtattttatcagcttaacgtgataacaataaatagtaatatgaaaatatttattaaatttttttaataattaatctctgctagaaaaatttgatt

SEQ ID NO: 4373 - DNA, 598 bp, Artificial
  Mutations within GlyA3B4 introduced by GmGlyA3B4_T02TALE nuclease
gttcatgtacggttgcagatataaacgaagcatagcttatgtatgaggtgtaacaaaattggaaacaatagccatgcaaggtgaagaatgtcaccaactcagaaacccttcttcattgacgtgtccctcactcactctcctctcttcactataaatcgccactcttcgtgttctccacttcaccaactccttcaaacttattaacactttccttagttcaatatggggaagcccttcttcactccagcaagttcaacgagtgccaactcaacaacctcaacgcgttggaacccgaccaccgcgttgagtccgaaggtggtcttattgaaacatggaactctcaacaccctgagctgcaatgcgccggtgtcactgtttccaaacgcaccctcaaccgcaacggcctccacttgccatcttactcaccttatccccaaaatgatcattgtcgttcaaggtgcgtaatattagtaagaagtatttatcagcttaacgtgataacaataatagtaatatgaaatatttattaaattttttataattaatctctgctagaaaatttgattaatcatttttagtagaatttgtttttctcaac

SEQ ID NO: 4374 - DNA, 636 bp, Artificial
  Mutations within GlyA3B4 introduced by GmGlyA3B4_T02TALE nuclease
gttcatgtacggttgcagatataaacgaagcatagcttatgtatgaggtgtaacaaaattggaaacaatagccatgcaaggtgaagaatgtcaccaactcagaaacccttcttcattgacgtgtccctcactcactctcctctcttcactataaatcgccactcttcgtgttctccacttcaccaactccttcaaacttattaacactttccttagttcaatatgggggaagcccttcttcactctctctctttcttccctttgcttgctactcttgtcgagtgcatgctattacctccagcaagttcaacgagtgccaactcaacaacctcaacgcgttggaacccgaccaccgcgttgagtccgaaggtggtcttattgaaacatggaactctcaacaccctgagctgcaatgcgccggtgtcactgtttccaaacgcaccctcaaccgcaacggcctccacttgccatcttactcaccttatccccaaatgatcattgtcgttcaaggtgcgtaatattagtaagagtatttatcagcttaacgtgataacaatatagtaatatgaaatatttattaaatttttataattaatctctgctagaaaatttgattaatcattttagtagaatttg

SEQ ID NO: 4375 - DNA, 536 bp, Artificial
  Mutations within GlyA3B4 introduced by GmGlyA3B4_T02TALE nuclease
gttcatgtacggttgcagatataaacgaagcatagcttatgtatgaggtgtaacaaaattggaaacaatagccatgcaaggtgaagaatgtcaccaactcagaaacccttcttcattgacgtgtccctcactcactctcctctcttcactataaatcgccactcttcgtgttctccacttcaccaactccttcaaacttattaacactttccttagttcaatatggggaagcccttcttcactctctctctttcttccctttgcttgctactcttgtcgagtgcatgcgcctgcttgccaccattattgctggcgatggccaccacctgctggggggtcaagccgtgggcctggcacagcaccggcaacagccgctgacctccagcaagttcaacgagtgccaactcaacaacctcaacgcgttggaacccgaccaccgcgttgagctccgaaggtggtcttaattgaacatggaactctcaacaccctagagctgcaatgcgccggtgtcactgtttccaaacgcacctcaacca

SEQ ID NO: 4376 - DNA, 667 bp, Artificial
  Mutations within GlyA3B4 introduced by GmGlyA3B4_T02TALE nuclease
gttcatgtacggttgcagatataaacgaagcatagcttatgtatgaggtgtaacaaaattggaaacaatagccatgcaaggtgaagaatgtcaccaactcagaaaccccttcttcattgacgtgtccctcactcactctcctctcttcactataaatcgccactcttcgtgttctccacttcaccaactccttcaaacttattaacactttccttagttcaatatgggggaagcccttcttcactctctctctttcttccctttgcttgctactcttgtcgagtgcatctattacctccagcaagttcaacgagtgccaactcaacaacctcaacgcgttggaacccgaccaccgcgttgagtccgaaggtggtcttattgaaacatggaactctcaacaccctgagctgcaatgcgccggtgtcactgtttccaaacgcacccctcaaccgcaacggcctccacttgccatcttactcaccttatccccaaatgatcattgtcgttcaaggtgcgtaatattagtaagaagtatttatcagcttaacgtgataacaataatagtaatatgaaatatttattaaatttttataattaatctctgctagaaaatttgattaatcattttagtagaatttgttttctcaactaggtttttaaaacacca

SEQ ID NO: 4377 - DNA, 657 bp, Artificial
  Mutations within GlyA3B4 introduced by GmGlyA3B4_T02TALE nuclease
gttcatgtacggttgcagatataaacgaagcatagcttatgtatgaggtgtaacaaaattggaaacaatagccatgcaaggtgaagaatgtcaccaactcagaaacccttcttcattgacgtgtccctcactcactctcctctcttcactataaatcgccactcttcgtgttctccacttcaccaactccttcaaacttattaacactttccttagttcaatatggggaagcccttcttcactctctctctttcttccctttgcttgctactcttgtcgagtgcatctattacctccagcaagttcaacgagtgccaactcaacaacctcaacgcgttggaacccgaccaccgcgttgagtccgaaggtggtcttattgaaacatggaactctcaacaccctgagctgcaatgcgccggtgtcactgtttccaaacgcaccctcaaccgcaacggcctccacttgccatcttactcaccttatcccccaaatgatcattgtcgttcaaggtgcgtaatattagtaagaagtatttatcagcttaacgtgataacaatatagtaatatgaaatatttattaaatttttataattaatctctgctagaaaatttgattaatcattttagtagaatttgttttctcaactaggttttaaa

SEQ ID NO: 4378 - DNA, 657 bp, Artificial
  Mutations within GlyA3B4 introduced by GmGlyA3B4_T02TALE nuclease
gttcatgtacggttgcagatataaacgaagcatagcttatgtatgaggtgtaacaaaattggaaacaatagccatgcaaggtgaagaatgtcaccaactcagaaaccccttcttcattgacgtgtccctcactcactctcctctcttcactataaatcgccactcttcgtgttctccacttcaccaaactccttcaaacttattaacactttccttagttcaatatggggaagcccttcttcactctctctctttcttccctttgcttgctactcttgtcgagtgcatgctattacctccagcaagttcaacgagtgccaactcaacaacctcaacgcgttggaacccgaccaccgcgttgagtccgaaggtggtcttattgaaacatggaactctcaacaccctgagctgcaatgcgccggtgtcactgtttccaaaacgcaccctcaaccgcaacggcctccacttgccatcttactcaccttatccccaaatgatcattgtcgttcaaggtgcgtaatattagtaagaagtatttatcagcttaacgtgataacaataatagtaatatgaaaatatttattaaaatttttataattaatctctgctagaaaatttgattaatcattttagtagaatttgtttttctcaactagg

SEQ ID NO: 4379 - DNA, 582 bp, Artificial
  Mutations within GlyA3B4 introduced by GmGlyA3B4_T02TALE nuclease
gttcatgtacggttgcagatataaacgaagcatagcttatgtatgaggtgtaacaaaattggaaacaatagccatgcaaggtgaagaatgtcaccaactcagaaacccttcttcattgacgtgtccctcactcactctcctctcttcactataaatcgccactcttcgtgttctccacttcaccaactccttcaaacttattaacactttccttagttcaatatggggaagcccttcttcactctctctctttcttccctttgcttgctactcttgtcgagtggccaactcaacaacctcaacgcgttggaacccgaccaccgcgttgagtccgaaggtggtcttattgaaacatggaactctcaacaccctgagctgcaatgcgccggtgtcactgttttccaaaacgcaccctcaaccgcaacggcctccacttgccatcttactcaccttatccccaaatgatcattgtcgttcaaggtgcgtaatattagtaagaagtatttatcagcttaacgtgataacaataatagtaatatgaaatatttattaaattttttataattaatctctgctagaaaa

SEQ ID NO: 4380 - DNA, 662 bp, Artificial
  Mutations within GlyA3B4 introduced by GmGlyA3B4_T02TALE nuclease
gttcatgtacggttgcagatataaacgaagcatagcttatgtatgaggtgtaacaaaattggaaacaatagccatgcaaggtgaagaatgtcaccaactcagaaacccttcttcattgacgtgtccctcactcactctcctctcttcactataaatcgccactcttcgtgttctccacttcaccaactccttcaaacttattaacactttccttagttcaatatggggaagcccttcttcactctctctctttcttccctttgcttgctactcttgtcgagtgcttctccagcaagttcaacgagtgccaactcaacaacctcaacgcgttggaacccgaccaccgcgttgagtccgaaggtggtcttattgaaacatggaactctcaacaccctgagctgcaatgcgccggtgtcactgtttccaaacgcaccctcaaccgcaacggcctccacttgccatcttactcaccttatccccaaatgatcattgtcgttcaaggtgcgtaaatattagtaagaagtatttatcagcttaacgtgataacaataatagtaatatgaaatatttattaaattttttataattaatctctgctagaaaatttgattaatcatttttagtagaatttgttttttctcaactaggttttaaaacaccac

SEQ ID NO: 4381 - DNA, 635 bp, Artificial
  Mutations within GlyA3B4 introduced by GmGlyA3B4_T02TALE nuclease
gttcatgtacggttgcagatataaacgaagcatagcttatgtatgaggtgtaacaaaattggaaacaatagccatgcaaggtgaagaatgtcaccaactcagaaacccttcttcattgacgtgtccctcactcactctcctctcttcactataaatcgccactcttcgtgttctccacttcaccaactccttcaaacttattaacactttccttagttcaatatggggaagcccttcttcactctctctctttcttccctttgcttgctactcttgtcgagtgcatctattacctccagcaagttcaacgagtgccaactcaacaacctcaacgcgttggaacccgaccaccgcgttgagtccgaaggtggtcttattgaaacatggaactctcaacaccctgagctgcaatgcgccggtgtcactgtttccaaacgcaccctcaaccgcaacggcctccacttgccatcttactcaccttatccccaaatgatcattgtcgttcaaggtgcgtaatattagtaagaagtatttatcagcttaacgtgataacaataatagtaatatgaaatatttattaaatttttataattaatctctgctagaaaatttgattaatcattttagtagaattt

SEQ ID NO: 4382 - DNA, 566 bp, Artificial
  Mutations within GlyA3B4 introduced by GmGlyA3B4_T02TALE nuclease
gttcatgtacggttgcagatataaacgaagcatagcttatgtatgaggtgtaacaaaattggaaacaatagccatgcaaggtgaagaatgtcaccaactcagaaacccttcttcattgacgtgtccctcactcactctcctctcttcactataaatcgccactcttcgtgttctccacttcaccaactccttcaaacttattaacactttccagcaagttcaacgagtgccaactcaacaacctcaacgcgttggaacccgaccaccgcgttgagtccgaaggtggtcttattgaaacatggaactctcaacaccctgagctgcaatgcgccggtgtcactgtttccaaacgcaccctcaaccgcaacggcctccacttgccatcttactcaccttatccccaaaatgatcattgtcgttcaaggtgcgtaatattagtaagaagtatttatcagcttaacgtgataacaataatagtaatatgaaatatttattaaattttttatattaatctctgctagaaatttgattaatcattttagtagaatttgtttttctcaactagg

SEQ ID NO: 4383 - DNA, 664 bp, Artificial
  Mutations within GlyA3B4 introduced by GmGlyA3B4_T02TALE nuclease
gttcatgtacggttgcagatataaacgaagcatagcttatgtatgaggtgtaacaaaattggaaacaatagccatgcaaggtgaagaatgtcaccaactcagaaacccttcttcattgacgtgtccctcactcactctcctctcttcactataaatcgccactcttcgtgttctccacttcaccaactccttcaaacttattaacactttccttagttcaatatggggaagcccttcttcactctctctctttcttccctttgcttgctactcttgtcgagctttgctattacctccagcaagttcaacgagtgccaactcaacaacctcaacgcgttggaacccgaccaccgcgttgagtccgaaggtggtcttattgaaacatggaactctcaacaccctgagctgcaatgcgccggtgtcactgtttccaaacgcaccctcaaccgcaacggcctccacttgccatcttactcaccttatccccaaatgatcattgtcgttcaaggtgcgtaatattagtaagagtatttatcagcttaacgtgataacaataatagtaatatgaaatatttattaaatttttataattaatctctgctagaaaatttgattaatcattttagtagaatttgtttttctcaactaggttttaaacaccaca

SEQ ID NO: 4384 - DNA, 620 bp, Artificial
  Mutations within GlyA3B4 introduced by GmGlyA3B4_T02TALE nuclease
  misc_feature (530): n is a or c or t or g
gttcatgtacggttgcagatataaacgaagcatagcttatgtatgaggtgtaacaaaattggaaacaatagccatgcaaggtgaagaatgtcaccaactcagaaacccttcttcattgacgtgtccctcactcactctcctctcttcactataaatcgccactcttcgtgttctccacttcaccaactccttcaaacttattaacactttccttagttcaatatggggaagcccttcttcactctctctctttcttccctttgcttgctactcttgtcgagctttgctattacctccagcaagttcaacgagtgccaactcaacaacctcaacgcgttggaacccgaccaccgcgttgagtccgaaggtggtcttattgaaacatggaactctcaacaccctgagctgcaatgcgccggtgtcactgtttccaaacgcaccctcaaccgcaacggcctccacttgccatcttactcaccttatccccaaatgatcattgtcgttcaaggtgcgtaatattagtaagaagnatttatcagcttaacgtgataacaatatagtaatatgaaatatttattaaatttttataattaatctctgctagaaaatttgattaatca

SEQ ID NO: 4385 - DNA, 614 bp, Artificial
  Mutations within GlyA3B4 introduced by GmGlyA3B4_T02TALE nuclease
gttcatgtacggttgcagatataaacgaagcatagcttatgtatgaggtgtaacaaaattggaaacaatagccatgcaaggtgaagaatgtcaccaactcagaaacccttcttcattgacgtgtccctcactcactctcctctcttcactataaatcgccactcttcgtgttctccacttcaccaactccttcaaacttattaacactttccttagttcaatatggggaagcccttcttcactctctctctttcttccctttgcttgctactcaacaacctcaacgcgttggaacccgaccaccgcgttgagtccgaaggtggtcttattgaaacatggaactctcaacaccctgagctgcaatgcgccggtgtcactgtttccaaacgcaccctcaaccgcaacggcctccacttgccatcttactcaccttatccccaaatgatcattgtcgttcaaggtgcgtaatattagtaagaagtatttatcagcttaacgtgatacaataatagtaatatgaaatatttattaattttttataattaatctctgctagaaaatttgattaatcatttttagtagaatttgtttttctcaactaggtttttaaaaca

SEQ ID NO: 4386 - DNA, 661 bp, Artificial
  Mutations within GlyA3B4 introduced by GmGlyA3B4_T02TALE nuclease
gttcatgtacggttgcagatataaacgaagcatagcttatgtatgaggtgtaacaaaattggaaacaatagccatgcaaggtgaagaatgtcaccaactcagaaaccccttcttcattgacgtgtccctcactcactctcctctcttcactataaatcgccactcttcgtgttctccacttcaccaactccttcaaacttattaacactttccttagttcaatatggggaagcccttcttcactctctctctttcttccctttgcttgctactcttgtcgagtgcattctattacctccagcaagttcaacgagtgccaactcaacaacctcaacgcgttggaacccgaccaccgcgttgagtccgaaggtggtcttattgaaacatggaactctcaacaccctgagctgcaatgcgccggtgtcactgtttccaaacgcaccctcaaccgcaacggcctccacttgccatcttactcaccttatcccccaaatgatcattgtcgttcaaggtgcgtaatattagtaagaagtatttatcagcttaacgtgataacaataatagtaatatgaaatatttattaaatttttataattaatctctgctagaaaatttgattaatcattttagtagaatttgttttctcaactaggttttaaaa

SEQ ID NO: 4387 - DNA, 659 bp, Artificial; identical to SEQ ID NO: 1853
  Mutations within GlyA3B4 introduced by GmGlyA3B4_T02TALE nuclease

SEQ ID NO: 4388 - DNA, 666 bp, Artificial
  Mutations within GlyA3B4 introduced by GmGlyA3B4_T02TALE nuclease
gttcatgtacggttgcagatataaacgaagcatagcttatgtatgaggtgtaacaaaattggaaacaatagccatgcaaggtgaagaatgtcaccaactcagaaacccttcttcattgacgtgtccctcactcactctcctctcttcactataaatcgccactcttcgtgttctccacttcaccaactccttcaaacttattaacactttccttagttcaatatggggaagcccttcttcactctctctctttcttccctttgcttgctactcttgtcgagtgcatgtattacctccagcaagttcaacgagtgccaactcaacaacctcaacgcgttggaacccgaccaccgcgttgagtccgaaggtggtcttattgaaacatggaactctcaacaccctgagctgcaatgcgccggtgtcactgtttccaaacgcaccctcaaccgcaacggcctccacttgccatcttactcaccttatccccaaatgatcattgtcgttcaaggtgcgtaatattagtaagaagtatttatcagcttaacgtgataacaataatagtaatatgaaatatttattaaatttttataattaatctctgctagaaaatttgattaatcattttagtagaatttgtttttctcaactaggttttaaaacaccaca

SEQ ID NO: 4389 - DNA, 622 bp, Artificial
  Mutations within GlyA3B4 introduced by GmGlyA3B4_T02TALE nuclease
gttcatgtacggttgcagatataaacgaagcatagcttatgtatgaggtgtaacaaaattggaaacaatagccatgcaaggtgaagaatgtcaccaactcagaaaccccttcttcattgacgtgtccctcactcactctcctctcttcactataaatcgccactcttcgtgttctccacttcaccaactccttcaaacttattaacactttccttagttcaatatggggaagcccttcttcactctctctctttcttccctttgcttgctactcttgtcgagtgcatctattacctccagcaagttcaacgagtgccaactcaacaacctcaacgcgttggaacccgaccaccgcgttgagtccgaaggtggtcttattgaaacatggaactctcaacaccctgagctgcaatgcgccggtgtcactgtttccaaacgcaccctcaaccgcaacggcctccacttgccatcttactcaccttatccccaaatgatcattgtcgttcaaggtgcgtaatattagtaagaagtatttatcagcttaacgtgataacaataatagtaatatgaaatatttattaaatttttataattaatctctgctagaaaatttgattaatca

SEQ ID NO: 4390 - DNA, 780 bp, Artificial
  Mutations within GlyA3B4 introduced by GmGlyA3B4_T02TALE nuclease
  misc_feature (655); (698): n is a or c or t or g
gttcatgtacggttgcagatataaacgaagcatagcttatgtatgaggtgtaacaaaattggaaacaatagccatgcaaggtgaagaatgtcaccaactcagaaacccttcttcattgacgtgtccctcactcactctcctctcttcactataaatcgccactcttcgtgttctccacttcaccaactccttcaaacttattaacactttccttagttcaatatggggaagcccttcttcactctctctctttcttccctttgcttgctactcttgtcgagtgcatgcttctatttttcattttttagttttagtctttcttctctttctcttttattttcgttttttacaattccagttcagactttttagttttatcaataaaattttgttctctatttgattaatggaaggctaagtcccctattacctccagcaagttcaacgagtgccaactcaacaacctcaacgcgttggaacccgaccaccgcgttgagtccgaaggtggtcttattgaaacatggaactctcaacaccctgagctgcaatgcgccggtgtcactgtttccaaacgcaccctcaaccgcaacggcctccacttgccatcttactcaccttatccccaaatgatcattgtcgttcaaggtgcgtaatnttagtaagaagtatttcatcagcttaacgtgataacaataatngtaatatgaaatatttattaaattttttataattaatctctgctagaaaatttgattaatcatttttagtagaatttgtttt

SEQ ID NO: 4391 - DNA, 635 bp, Artificial; identical to SEQ ID NO: 1992
  Mutations within GlyA3B4 introduced by GmGlyA3B4_T02TALE nuclease

SEQ ID NO: 4392 - DNA, 600 bp, Artificial
  Mutations within GlyA3B4 introduced by GmGlyA3B4_T02TALE nuclease
gttcatgtacggttgcagatataaacgaagcatagcttatgtatgaggtgtaacaaaattggaaacaatagccatgcaaggtgaagaatgtcaccaactcagaaacccttcttcattgacgtgtccctcactcactctcctctcttcactataaatcgccactcttcgtgttctccacttcaccaactccttcaaacttattaacactttccttagttcaatatggggaagcccttcttcactctctctctttcttccctttgcttgctactcttgtcgagtgccaactcaacaacctcaacgcgttggaacccgaccaccgcgttgagtccgaaggtggtcttattgaaacatggaactctcaacaccctgagctgcaatgcgccggtgtcactgtttccaaacgcaccctcaaccgcaacggcctccacttgccatcttactcaccttatccccaaatgatcattgtcgttcaaggtgcgtaatattagtaagaagtatttatcagcttaacgtgataacaataatagtaatatgaaatatttattaattttttataattaatctctgctagaaaatttgattaatcatttttagtag

SEQ ID NO: 4393 - DNA, 655 bp, Artificial
  Mutations within GlyA3B4 introduced by GmGlyA3B4_T02TALE nuclease
gttcatgtacggttgcagatataaacgaagcatagcttatgtatgaggtgtaacaaaattggaaacaatagccatgcaaggtgaagaatgtcaccaactcagaaacccttcttcattgacgtgtccctcactcactctcctctcttcactataaatcgccactcttcgtgttctccacttcaccaactccttcaaacttattaacactttccttagttcaatatggggaagcccttcttcactctctctctttcttccctttgcttgctactcttgtcgagtgcattacctccagcaagttcaacgagtgccaactcaacaacctcaacgcgttggaacccgaccaccgcgttgagtccgaaggtggtcttattgaaacatggaactctcaacaccctgagctgcaatgcgccggtgtcactgtttccaaacgcaccctcaaccgcaacggcctccacttgccatcttactcaccttatccccaaatgatcattgtcgttcaaggtgcgtaatattagtaagaagtatttatcagcttaacgtgataacaatatagtaatatgaaatatttattaaatttttataattaatctctgctagaaaatttgattaatcattttagtagaatttgtttttctcaactaggtttttaaaa

SEQ ID NO: 4394 - DNA, 636 bp, Artificial
  Mutations within GlyA3B4 introduced by GmGlyA3B4_T02TALE nuclease
gttcatgtacggttgcagatataaacgaagcatagcttatgtatgaggtgtaacaaaaattggaaacaatagccatgcaaggtgaagaatgtcaccaactcagaaacccttcttcattgacgtgtccctcactcactctcctctcttcactataaatcgccactcttcgtgttctccacttcaccaactccttcaaacttattaacactttccttagttcaatatggggaagcccttcttcactctctctctttcttccctttgcttgctactcttgtcgagtgcatgctattacctccagcaagttcaacgagtgccaactcaacaacctcaacgcgttggaacccgaccaccgcgttgagtccgaaggtggtcttattgaaacatggaactctcaacaccctgagctgcaatgcgccggtgtcactgtttccaaacgcaccctcaaccgcaacggcctccacttgccatcttactcaccttatccccaaatgatcattgtcgttcaaggtgcgtaatattagtaagagtatttatcagcttaacgtgataacaatatagtaatatgaaatatttattaaatttttataattaatctctgctagaaaatttgattaatcattttagtagaatttg

SEQ ID NO: 4395 - DNA, 676 bp, Artificial
  Mutations within GlyA3B4 introduced by GmGlyA3B4_T02TALE nuclease
  misc_feature (539): n is a or c or t or g
gttcatgtacggttgcagatataaacgaagcatagcttatgtatgaggtgtaacaaaattggaaacaatagccatgcaaggtgaagaatgtcaccaactcagaaacccttcttcattgacgtgtccctcactcactctcctctcttcactataaatcgccactcttcgtgttctccacttcaccaactccttcaaacttattaacactttccttagttcaatatggggaagcccttcttcactctctctctttcttccctttgcttgctactcttgtcgagtgcatgccttttttgctattacctccagcaagttcaacgagtgccaactcaacaacctcaacgcgttggaacccgaccaccgcgttgagtccgaaggtggtcttattgaaacatggaactctcaacaccctgagctgcaatgcgccggtgtcactgtttccaaacgcaccctcaaccgcaacggcctccacttgccatcttactcaccttatccccaaatgatcattgtcgttcaaggtgcgtaatattagtaagagnatttatcagcttaacgtgataacaatatagtaatatgaaaatatttattaaatttttataattaatctctgctagaaaatttgattaatcattttagtagaatttgtttttctcaactaggtttttaaaacaccaca

SEQ ID NO: 4396 - DNA, 665 bp, Artificial; identical to SEQ ID NO: 2941
  Mutations within GlyA3B4 introduced by GmGlyA3B4_T02TALE nuclease

SEQ ID NO: 4397 - DNA, 428 bp, Artificial; identical to SEQ ID NO: 2144
  Mutations within GlyA3B4 introduced by GmGlyA3B4_T02TALE nuclease

SEQ ID NO: 4398 - DNA, 636 bp, Artificial
  Mutations within GlyA3B4 introduced by GmGlyA3B4_T02TALE nuclease
gttcatgtacggttgcagatataaacgaagcatagcttatgtatgaggtgtaacaaaattggaaacaatagccatgcaaggtgaagaatgtcaccaactcagaaacccttcttcattgacgtgtccctcactcactctcctctcttcactataaatcgccactcttcgtgttctccacttcaccaactccttcaaacttattaacactttccttagttcaatatggggaagcccttcttcactctctctctttcttccctttgcttgctactcttgtcgagtgcatgctttacctccagcaagttcaacgagtgccaactcaacaacctcaacgcgttggaacccgaccaccgcgttgagtccgaaggtggtcttattgaaacatggaactctcaacaccctgagctgcaatgcgccggtgtcactgtttccaaacgcaccctcaaccgcaacggcctccacttgccatcttactcaccttatccccaaatgatcattgtcgttcaaggtgcgtaatattagtaagaagtatttatcagcttaacgtgataacaataatagtaatatgaaatatttattaaatttttataattaatctctgctagaaaatttgattaatcattttagtagaatttg

SEQ ID NO: 4399 - DNA, 597 bp, Artificial
  Mutations within GlyA3B4 introduced by GmGlyA3B4_T02TALE nuclease
gttcatgtacggttgcagatataaacgaagcatagcttatgtatgaggtgtaacaaaattggaaacaatagccatgcaaggtgaagaatgtcaccaactcagaaacccttcttcattgacgtgtccctcactcactctcctctcttcactataaatcgccactcttcgtgttctccacttcaccaactccttcaaacttattaacactttccttagttcaatatggggaagcccttcttcactctctctctttcttccctttgcttgctactcttgctattacctccagcaagttcaacgagtgccaactcaacaacctcaacgcgttggaacccgaccaccgcgttgagtccgaaggtggtcttattgaaacatggaactctcaacaccctgagctgcaatgcgccggtgtcactgtttccaaacgcaccctcaaccgcaacggcctccacttgccatcttactcaccttatccccaaatgatcattgtcgttcaaggtgcgtaaatattagtaagaagtatttatcagcttaacgtgataacaataatagtaatatgaaatatttattaaattttttataattaatctctgctag

SEQ ID NO: 4400 - DNA, 658 bp, Artificial
  Mutations within GlyA3B4 introduced by GmGlyA3B4_T02TALE nuclease
gttcatgtacggttgcagatataaacgaagcatagcttatgtatgaggtgtaacaaaattggaaacaatagccatgcaaggtgaagaatgtcaccaactcagaaaccccttcttcattgacgtgtccctcactcactctcctctcttcactataaatcgccactcttcgtgttctccacttcaccaactccttcaaacttattaacactttccttagttcaatatggggaagcccttcttcactctctctctttcttccctttgcttgctactcttgtcgagtgcatctattacctccagcaagttcaacgagtgccaactcaacaacctcaacgcgttggaacccgaccaccgcgttgagtccgaaggtggtcttattgaaacatggaactctcaacaccctgagctgcaatgcgccggtgtcactgtttccaaacgcacccctcaaccgcaacggcctccacttgccatcttactcaccttatccccaaatgatcattgtcgttcaaggtgcgtaatattagtaagaagtatttatcagcttaacgtgatacaatatagtaatatgaaatatttattaaatttttataattaatctctgctagaaaatttgattaatcattttagtagaatttgttttctcaactaggtttttaaa

SEQ ID NO: 4401 - DNA, 601 bp, Artificial
  Mutations within GlyA3B4 introduced by GmGlyA3B4_T02TALE nuclease
gttcatgtacggttgcagatataaacgaagcatagcttatgtatgaggtgtaacaaaaattggaaacaatagccatgcaaggtgaagaatgtcaccaactcagaaacccttcttcattgacgtgtccctcactcactctcctctcttcactataaatcgccactcttcgtgttctccacttcaccaactccttcaaacttattaacactttccttagttcaatatggggaagcccttcttcactctctctctttcttccctttgcttgctactcttgtcgagtgcatgctccagcgcctgcttgccgccatcgtggccattgccggtgctgtgccaggcccacggcttgaccccccagcaggtggtggccattacctccagcaagttcaacgagtgccaactcaacaacctcacgcgttggaacccgaccaccgcgttgagtccgaaggtggtcttattgaaacatggaactctcaacaccctgagctgcaatgcgccggtgtcactgtttccaaacgcacctcaaccgcaacggcctccacttgccatcttactcaccttattccccaaatgatcattgtcgttcaaggtgcgtaatatt

SEQ ID NO: 4402 - DNA, 660 bp, Artificial; identical to SEQ ID NO: 1796
  Mutations within GlyA3B4 introduced by GmGlyA3B4_T02TALE nuclease

SEQ ID NO: 4403 - DNA, 505 bp, Artificial
  Mutations within GlyA3B4 introduced by GmGlyA3B4_T02TALE nuclease
gttcatgtacggttgcagatataaacgaagcatagcttatgtatgaggtgtaacaaaattggaaacaatagccatgcaaggtgaagaatgtcaccaactcagaaacccttcttcattgacgtgtccctcactcactctcctctcttcactataaatcgccactcttcgtgttctccacttcaccaacctccagcaagttcaacgagtgccaactcaacaacctcaacgcgttggaacccgaccaccgcgttgagtcccgaaggtggtcttattgaaacatggaactctcaacaccctgagctgcaatgcgccggtgtcactgtttccaaacgcaccctcaaccgcaacggcctccacttgccatcttactcaccttatccccaaatgatcattgtcgttcaaggtgcgtaatattagtaagaagtatttatcagcttaacgtgataacaataatagtaatatgaaatatttattaaattttttataattaatctctgctagaaaa

SEQ ID NO: 4404 - DNA, 661 bp, Artificial
  Mutations within GlyA3B4 introduced by GmGlyA3B4_T02TALE nuclease
gttcatgtacggttgcagatataaacgaagcatagcttatgtatgaggtgtaacaaaattggaaacaatagccatgcaaggtgaagaatgtcaccaactcagaaacccttcttcattgacgtgtccctcactcactctcctctcttcactataaatcgccactcttcgtgttctccacttcaccaactccttcaaacttattaacactttccttagttcaatatggggaagcccttcttcactctctctctttcttccctttgcttgctactcttgtcgagtgcatctattacctccagcaagttcaacgagtgccaactcaacaacctcaacgcgttggaacccgaccaccgcgttgagtccgaaggtggtcttattgaaacatggaactctcaacaccctgagctgcaatgcgccggtgtcactgtttccaaacgcaccctcaaccgcaacggcctccacttgccatcttactcaccttatcccccaaatgatcattgtcgttcaaggtgcgtaatattagtaagaagtatttatcagcttaacgtgataacaataatagtaatatgaaatatttattaaatttttataattaatctctgctagaaaatttgattaatcatttttagtagaatttgtttttctcaactaggttttaaaa

SEQ ID NO: 4405 - DNA, 664 bp, Artificial
  Mutations within GlyA3B4 introduced by GmGlyA3B4_T02TALE nuclease
  misc_feature (530): n is a or c or t or g
gttcatgtacggttgcagatataaacgaagcatagcttatgtatgaggtgtaacaaaattggaaacaatagccatgcaaggtgaagaatgtcaccaactcagaaacccttcttcattgacgtgtccctcactcactctcctctcttcactataaatcgccactcttcgtgttctccacttcaccaactccttcaaacttattaacactttccttagttcaatatggggaagcccttcttcactctctctctttcttccctttgcttgctactcttgtcgagtgcatgctattacctccagcaagttcaacgagtgccaactcaacaacctcaacgcgttggaacccgaccaccgcgttgagtccgaaggtggtcttattgaaacatggaactctcaacaccctgagctgcaatgcgccggtgtcactgtttccaaacgcaccctcaaccgcaacggcctccacttgccatcttactcaccttatccccaaatgatcattgtcgttcaaggtgcgtaatattagtaagagnatttatcagcttaacgtgataacaatatagtaatatgaaatatttattaaatttttataattaatctctgctagaaaatttgattaatcattttagtagaatttgttttctcaactaggtttttaaacaccaca

SEQ ID NO: 4406 - DNA, 663 bp, Artificial; identical to SEQ ID NO: 2899
  Mutations within GlyA3B4 introduced by GmGlyA3B4_T02TALE nuclease

SEQ ID NO: 4407 - DNA, 648 bp, Artificial
  Mutations within GlyA3B4 introduced by GmGlyA3B4_T02TALE nuclease
  misc_feature (270); (533): n is a or c or t or g
gttcatgtacggttgcagatataaacgaagcatagcttatgtatgaggtgtaacaaaattggaaacaatagccatgcaaggtgaagaatgtcaccaactcagaaaccccttcttcattgacgtgtccctcactcactctcctctcttcactataaatcgccactcttcgtttctccacttcaccaactccttcaaacttattaacactttccttagttcaatatggggaagcccttcttcactctctctctttcttccctttgcttgctnctcttgtcgagtgccattgctattacctccagcaagttcaacgagtgccaactcaacaacctcaacgcgttggaacccgaccaccgcgttgagtccgaaggtggtcttattgaaacatggaactctcaacaccctgagctgcaatgcgccggtgtcactgtttccaaacgcaccctcaaccgcaacggcctccacttgccatcttactcaccttatccccaaatgatcattgtcgttcaaggtgcgtaatattagtaagaagnatttatcagcttaacgtgatacaatatagtaatatgaaatatttattaaatttttataattaatctctgctagaaaatttgattaatcattttagtagaatttgtttttctcaac

SEQ ID NO: 4408 - DNA, 631 bp, Artificial; identical to SEQ ID NO: 3836
  Mutations within GlyA3B4 introduced by GmGlyA3B4_T02TALE nuclease

SEQ ID NO: 4409 - DNA, 661 bp, Artificial
  Mutations within GlyA3B4 introduced by GmGlyA3B4_T02TALE nuclease
gttcatgtacggttgcagatataaacgaagcatagcttatgtatgaggtgtaacaaaattggaaacaatagccatgcaaggtgaagaatgtcaccaactcagaaacccttcttcattgacgtgtccctcactcactctcctctcttcactataaatcgccactcttcgtgttctccacttcaccaactccttcaaacttattaacactttccttagttcaatatggggaagcccttcttcactctctctctttcttccctttgcttgctactcttgtcgagtgctacctccagcaagttcaacgagtgccaactcaacaacctcaacgcgttggaacccgaccaccgcgttgagtccgaaggtggtcttattgaaacatggaactctcaacaccctgagctgcaatgcgccggtgtcactgtttccaaacgcaccctcaaccgcaacggcctccacttgccatcttactcaccttatccccaaatgatcattgtcgttcaaggtgcgtaatattagtaagaagtatttatcagcttaacgtgataacaataatagtaatatgaaatatttattaaatttttataattaatctctgctagaaaatttgattaatcattttagtagaatttgtttttctcaactaggtttttaaaacaccaca

SEQ ID NO: 4410 - DNA, 758 bp, Artificial
  Mutations within GlyA3B4 introduced by GmGlyA3B4_T02TALE nuclease
gttcatgtacggttgcagatataaacgaagcatagcttatgtatgaggtgtaacaaaattggaaacaatagccatgcaaggtgaagaatgtcaccaactcagaaacccttcttcattgacgtgtccctcactcactctcctctcttcactataaatcgccactcttcgtgttctccacttcaccaactccttcaaacttattaacactttccttagttcaatatggggaagcccttcttcactctctctctttcttccctttgcttgctactcttgtcgagtgcatgcttgaccccggagcaggtggtggccatcgccagccacgatggcggcaagcaggcgctggagacggtccagcggctgttgccggtgctgtgccattgctattacctccagcaagttcaacgagtgccaactcaacaacctcaacgcgttgaacccgaccaccgcgttgagtccgaaggtggtcttattgaaacatggaactctcaacaccctgagctgcaatgcgccggtgtcactgtttccaaacgcaccctcaaccgcaacggcctccacttgccatcttactcaccttatccccaaatgatcattgtcgttcaaggtgcgtaatattagtaagaagtatttatcgcttaacgtgataacaataatagtaatatgaaaatatttattaaattttttataattaatctctgctagaaaatttgattaatcaatttttagtagaatttgtttttctcaactaggtttaaaca

SEQ ID NO: 4411 - DNA, 661 bp, Artificial
  Mutations within GlyA3B4 introduced by GmGlyA3B4_T02TALE nuclease
gttcatgtacggttgcagatataaacgaagcatagcttatgtatgaggtgtaacaaaattggaaacaatagccatgcaaggtgaagaatgtcaccaactcagaaacccttcttcattgacgtgtccctcactcactctcctctcttcactataaatcgccactcttcgtgttctccacttcaccaactccttcaaacttattaacactttccttagttcaatatggggaagcccttcttcactctctctctttcttccctttgcttgctactcttgtcgagtgtgctattacctccagcaagttcaacgagtgccaactcaacaacctcaacgcgttggaacccgaccaccgcgttgagtccgaaggtggtcttattgaaacatggaactctcaacaccctgagctgcaatgcgccggtgtcactgtttccaaacgcaccctcaaccgcaacggcctccacttgccatcttactcaccttatccccaaatgatcattgtcgttcaaggtgcgtaatattagtaagagtatttatcagcttaacgtgataacaatatagtaatatgaaatatttattaaatttttataattaatctctgctagaaaatttgattaatcattttagtagaatttgttttctcaactaggtttttaaaacacca

SEQ ID NO: 4412 - DNA, 631 bp, Artificial; identical to SEQ ID NO: 2292
  Mutations within GlyA3B4 introduced by GmGlyA3B4_T02TALE nuclease

SEQ ID NO: 4413 - DNA, 660 bp, Artificial; identical to SEQ ID NO: 1763
  Mutations within GlyA3B4 introduced by GmGlyA3B4_T02TALE nuclease

SEQ ID NO: 4414 - DNA, 694 bp, Artificial
  Mutations within GlyA3B4 introduced by GmGlyA3B4_T02TALE nuclease
  misc_feature (584); (608): n is a or c or t or g
gttcatgtacggttgcagatataaacgaagcatagcttatgtatgaggtgtaacaaaattggaaacaatagccatgcaaggtgaagaatgtcaccaactcagaaaccccttcttcattgacgtgtccctcactcactctcctctcttcactataaatcgccactcttcgtgttctccacttcaccaaactccttcaaacttattaacactttccttagttcaatatggggaagcccttcttcactctctctctttcttccctttgcttgctactcttgtcgagtgcatggcctggcacagcaccggcaacagccgctggaccgtctccagcgccttgctattacctccagcaagttcaacgagtgccaactcaacaacctcaacgcgttggaacccgaccaccgcgttgagtcgaaggtggtcttattgaaacatggaactctcaacaccctgagctgcaatgcgccggtgtcactgtttccaaacgcaccctcaaccgcaacggcctccacttgccatcttactcaccttatccccaaatgatcattgtcgttcaggtgcgtaatattagtaagaagtatttntcagcttaacgtgatacaataatngtaatatgaaatatttattaaatttttataattaatctctgctagaaaatttgattaatcatttttagtagaatttgttttttctc

SEQ ID NO: 4415 - DNA, 646 bp, Artificial
  Mutations within GlyA3B4 introduced by GmGlyA3B4_T02TALE nuclease
gttcatgtacggttgcagatataaacgaagcatagcttatgtatgaggtgtaacaaaattggaaacaatagccatgcaaggtgaagaatgtcaccaactcagaaacccttcttcattgacgtgtccctcactcactctcctctcttcactataaatcgccactcttcgtgttctccacttcaccaactccttcaaacttattaacactttccttagttcaatatggggaagcccttcttcactctctctctttcttccctttgcttgctactcttgtcgagtgccctccagcaagttcaacgagtgccaactcaacaacctcaacgcgttggaacccgaccaccgcgttgagtccgaaggtggtcttattgaaacatggaactctcaacaccctgagctgcaatgcgccggtgtcactgtttccaaacgcaccctcaaccgcaacggcctccacttgccatcttactcaccttatccccaaatgatcattgtcgttcaaggtgcgtaaatattagtaagaagtatttatcagcttaacgtgataacaataatagtaatatgaaatatttattaaattttttataattaatctctgctagaaaatttgattaatcatttttagtagaattgttttttctcaactagg

SEQ ID NO: 4416 - DNA, 507 bp, Artificial
  Mutations within GlyA3B4 introduced by GmGlyA3B4_T02TALE nuclease
gttcatgtacggttgcagatataaacgaagcatagcttatgtatgaggtgtaacaaaattggaaacaatagccatgcaaggtgaagaatgtcaccaactcagaaacccttcttcattgacgtgtccctcactcactctcctctcttcactataaatcgccactcttcgtgttctccacttcaccaactccttcaaacttattaacactttccttagttcaatatggggaagcccttcttcactctcaacaccctgagctgcaatgcgccggtgtcactgtttccaaacgcaccctcaaccgcaacggcctccacttgccatcttactcaccttatcccccaaatgatcattgtcgttcaaggtgcgtaatattagtaagaagtatttatcagcttaacgtgataacaataatagtaatatgaaatatttattaaaattttttataattaatctctgctagaaaatttgattaatcatttttagtagaatttgtttttctcaactagg

SEQ ID NO: 4417 - DNA, 668 bp, Artificial
  Mutations within GlyA3B4 introduced by GmGlyA3B4_T02TALE nuclease
gttcatgtacggttgcagatataaacgaagcatagcttatgtatgaggtgtaacaaaaattggaaacaatagccatgcaaggtgaagaatgtcaccaactcagaaaccccttcttcattgacgtgtccctcactcactctcctctcttcactataaatcgccactcttcgtgttctccacttcaccaactccttcaaacttattaacactttccttagttcaatatgggggaagcccttcttcactctctctctttcttccctttgcttgctactcttgtcgagtgcatgctattacctccagcaagttcaacgagtgccaactcaacaacctcaacgcgttggaacccgaccaccgcgttgagtccgaaggtggtcttattgaaacatggaactctcaacaccctgagctgcaatgcgccggtgtcactgtttccaaacgcaccctcaaccgcaacggcctccacttgccatcttacctcaccttatccccaaatgatcattgtcgttcaaggtgcgtaatattagtaagagtatttatcagcttaacgtgataacaataatagtaatatgaaatatttattaaatttttataattaatctctgctagaaaatttgattaatcattttagtagaatttgtttttctcaactaggttttaaaacacca

SEQ ID NO: 4418 - DNA, 570 bp, Artificial
  Mutations within GlyA3B4 introduced by GmGlyA3B4_T02TALE nuclease
gttcatgtacggttgcagatataaacgaagcatagcttatgtatgaggtgtaacaaaattggaaacaatagccatgcaaggtgaagaatgtcaccaactcagaaacccttcttcattgacgtgtccctcactcactctcctctcttcactataaatcgccactcttcgtgttctccacttcaccaactccttcaaacttattaacactttccttagttcaatatggggaagcccttcttcaacgagtgccaactcaacaacctcaacgcgttggaacccgaccaccgcgttgagtccgaaggtggtcttattgaaacatggaactctcaacaccctgagctgcaatgcgccggtgtcactgtttccaaacgcaccctcaaccgcaacggcctccacttgccatcttactcaccttatcccccaaatgatcattgtcgttcaaggtgcgtaatattagtaagaagtatttatcagcttaacgtgataacaataatagtaatatgaaatatttattaaattttttataattaatctcttgctagaaaatttgattaatcatttttagtagaa

SEQ ID NO: 4419 - DNA, 510 bp, Artificial
  Mutations within GlyA3B4 introduced by GmGlyA3B4_T02TALE nuclease
gttcatgtacggttgcagatataaacgaagcatagcttatgtatgaggtgtaacaaaattggaaacaatagccatgcaaggtgaagaatgtcaccaactcagaaacccttcttcattgacgtgtccctcactcactctcctctcttcactataaatcgccactcttcgtgttctccacttcaccaactccttcaaacttattaacactttccttagttcaatatggggaagcccttcttcactctctctctttgagttgacaccctcaacgcgttggaacccgaccaccgcgttgagtccgaaggtggtcttattgaaacatggaactctcaacaccctgagctgcaatgcgccggtgtcactgtttccaaacgcaccctcaaccgcaacggcctccacttgccatcttactcaccttatccccaaatgatcattgtcgttcaaggtgcgtaatattagtaagaagtatttatcagcttaacgtgataacaataatagtaatatgaaata

SEQ ID NO: 4420 - DNA, 636 bp, Artificial; identical to SEQ ID NO: 1885
  Mutations within GlyA3B4 introduced by GmGlyA3B4_T02TALE nuclease

SEQ ID NO: 4421 - DNA, 637 bp, Artificial; identical to SEQ ID NO: 2343
  Mutations within GlyA3B4 introduced by GmGlyA3B4_T02TALE nuclease

SEQ ID NO: 4422 - DNA, 731 bp, Artificial
  Mutations within GlyA3B4 introduced by GmGlyA3B4_T02TALE nuclease
gttcatgtacggttgcagatataaacgaagcatagcttatgtatgaggtgtaacaaaattggaaacaatagccatgcaaggtgaagaatgtcaccaactcagaaacccttcttcattgacgtgtccctcactcactctcctctcttcactataaatcgccactcttcgtgttctccacttcaccaactccttcaaacttattaacactttccttagttcaatatggggaagcccttcttcactctctctctttcttccctttgcttgctactcttgtcgagtgctttgccaccaatattgctggcgatggccaccacctgctggggggtcaagccgtggcctggcacagcaccggcaacaggcgctggactattacctccagcaagttcaacgagtgccaactcaacaacctcaacgcgttggaacccgaccaccgcgttgagtccgaaggtggtcttattgaaacatggaactctcaacaccctgagctgcaatgcgccggtgtcactgtttccaaacgcaccctcaaccgcaacggcctccacttgccatcttactcacctttatccccaaatgatcattgtcgttcaaggtgcgtaatattagtaagaagtatttatcagcttaacgtgatacaataatagtaatatgaaatatttattaaattttttataattaatctcgctagaaaatttgatttaatcattttagtaatgaattgtttttttctc

SEQ ID NO: 4423 - DNA, 656 bp, Artificial
  Mutations within GlyA3B4 introduced by GmGlyA3B4_T02TALE nuclease
gttcatgtacggttgcagatataaacgaagcatagcttatgtatgaggtgtaacaaaattggaaacaatagccatgcaaggtgaagaatgtcaccaactcagaaacccttcttcattgacgtgtccctcactcactctcctctcttcactataaatcgccactcttcgtgttctccacttcaccaactccttcaaacttattaacactttccttagttcaatatggggaagcccttcttcactctctctctttcttccctttgcttgctactcttgtcgagttacctccagcaagttcaacgagtgccaactcaacaacctcaacgcgttggaacccgaccaccgcgttgagtccgaaggtggtcttattgaaacatggaactctcaacaccctgagctgcaatgcgccggtgtcactgtttccaaacgcaccctcaaccgcaacggcctccacttgccatcttactcaccttatccccaaatgatcattgtcgttcaaggtgcgtaatattagtaagaagtatttatcagcttaacgtgataacaataatagtaatatgaaatatttattaaattttttataattaatctctgctagaaaatttgattaatctttttagtagaattgtttttctcaactaggtttaaacaccaca

SEQ ID NO: 4424 - DNA, 657 bp, Artificial
  Mutations within GlyA3B4 introduced by GmGlyA3B4_T02TALE nuclease
gttcatgtacggttgcagatataaacgaagcatagcttatgtatgaggtgtaacaaaattggaaacaatagccatgcaaggtgaagaatgtcaccaactcagaaaccccttcttcattgacgtgtccctcactcactctcctctcttcactataaatcgccactcttcgtgttctccacttcaccaactccttcaaacttattaacactttccttagttcaatatggggaagcccttcttcactctctctctttcttccctttgcttgctactcttgtcgagtgcaattacctccagcaagttcaacgagtgccaactcaacaacctcaacgcgttggaacccgaccaccgcgttgagtccgaaggtggtcttattgaaacatggaactctcaacaccctgagctgcaatgcgccggtgtcactgtttccaaacgcaccctcaaccgcaacggcctccacttgccatcttactcaccttatcccccaaatgatcattgtcgttcaaggtgcgtaatattagtaagaagtatttatcagcttaacgtgataacaataatagtaatatgaaatatttattaaatttttataattaatctctgctagaaaatttgattaatcattttagtagaatttgttttctcaactaggttttaaaa

SEQ ID NO: 4425 - DNA, 659 bp, Artificial
  Mutations within GlyA3B4 introduced by GmGlyA3B4_T02TALE nuclease
gttcatgtacggttgcagatataaacgaagcatagcttatgtatgaggtgtaacaaaattggaaacaatagccatgcaaggtgaagaatgtcaccaactcagaaacccttcttcattgacgtgtccctcactcactctcctctcttcactataaatcgccactcttcgtgttctccacttcaccaactccttcaaacttattaacactttccttagttcaatatggggaagcccttcttcactctctctctttcttccctttgcttgctactcttgtcgagtggctattacctccagcaagttcaacgagtgccaactcaacaacctcaacgcgttggaacccgaccaccgcgttgagtccgaaggtggtcttattgaaacatggaactctcaacaccctgagctgcaatgcgccggtgtcactgtttccaaacgcaccctcaaccgcaacggcctccacttgccatcttactcaccttatccccaaatgatcattgtcgttcaaggtgcgtaatattagtaagaagtatttatcagcttaacgtgataacaatatagtaatatgaaatatttattaaatttttataattaatctctgctagaaaatttgattaatcattttagtagaatttgttttctcaactaggttttaaacacca

SEQ ID NO: 4426 - DNA, 635 bp, Artificial; identical to SEQ ID NO: 2407
  Mutations within GlyA3B4 introduced by GmGlyA3B4_T02TALE nuclease

SEQ ID NO: 4427 - DNA, 666 bp, Artificial
  Mutations within GlyA3B4 introduced by GmGlyA3B4_T02TALE nuclease
  misc_feature (531): n is a or c or t or g
gttcatgtacggttgcagatataaacgaagcatagcttatgtatgaggtgtaacaaaattggaaacaatagccatgcaaggtgaagaatgtcaccaactcagaaacccttcttcattgacgtgtccctcactcactctcctctcttcactataaatcgccactcttcgtgttctccacttcaccaactccttcaaacttattaacactttccttagttcaatatggggaagcccttcttcactctctctctttcttccctttgcttgctactcttgtcgagtgctttgctattacctccagcaagttcaacgagtgccaactcaacaacctcaacgcgttggaacccgaccaccgcgttgagtccgaaggtggtcttattgaaacatggaactctcaacaccctgagctgcaatgcgccggtgtcactgtttccaaacgcaccctcaaccgcaacggcctccacttgccatcttactcaccttatccccaaatgatcattgtcgttcaaggtgcgtaatattagtaagagnatttatcagcttaacgtgataacaatatagtaatatgaaatatttattaaatttttataattaatctctgctagaaaatttgattaatcattttagtagaatttgtttttctcaactaggttttaaaacaccaca

SEQ ID NO: 4428 - DNA, 650 bp, Artificial
  Mutations within GlyA3B4 introduced by GmGlyA3B4_T02TALE nuclease
gttcatgtacggttgcagatataaacgaagcatagcttatgtatgaggtgtaacaaaattggaaacaatagccatgcaaggtgaagaatgtcaccaactcagaaacccttcttcattgacgtgtccctcactcactctcctctcttcactataaatcgccactcttcgtgttctccacttcaccaactccttcaaacttattaacactttccttagttcaatatggggaagcccttcttcactctctctctttcttccctttgcttgctactcttgtcgagtgcaattacctccagcaagttcaacgagtgccaactcaataacctcaacgcgttggaacccgaccaccgcgttgagtccgaaggtggtcttattgaaacatggaactctcaacaccctgagctgcaatgcgccggtgtcactgtttccaaacgcaccctcaaccgcaacggcctccacttgccatcttactcaccttatcccccaaatgatcattgtcgttcaaggtgcgtaatattagtaagaagtatttatcagcttaacgtgataacaataatagtaatatgaaatatttattaaatttttataattaatctctgctagaaaatttgattaatcatttttagtagaatttgtttttctcaactagg

SEQ ID NO: 4429 - DNA, 646 bp, Artificial; identical to SEQ ID NO: 1911
  Mutations within GlyA3B4 introduced by GmGlyA3B4_T02TALE nuclease

SEQ ID NO: 4430 - DNA, 653 bp, Artificial; identical to SEQ ID NO: 2712
  Mutations within GlyA3B4 introduced by GmGlyA3B4_T02TALE nuclease

SEQ ID NO: 4431 - DNA, 598 bp, Artificial
  Mutations within GlyA3B4 introduced by GmGlyA3B4_T02TALE nuclease
gttcatgtacggttgcagatataaacgaagcatagcttatgtatgaggtgtaacaaaattggaaacaatagccatgcaaggtgaagaatgtcaccaactcagaaacccttcttcattgacgtgtccctcactcactctcctctcttcactataaatcgccactcttcgtgttctccacttcaccaactccttcaaacttattaacactttccttagttcaatatggggaagcccttcttcactctctctctttcttccctttgcttgctactcttgtcgagtgcatacctccagcaagttcaacgagtgccaactcaacaacctcaacgcgttggaacccgaccaccgcgttgagtccgaaggtggtcttattgaacatggaactctcaacaccctgagctgcaatgcgccggtgtcactgtttccaaacgcaccctcaaccgcaacggcctccacttgccatcttactcaccttatccccaaatgatcattgtcgttcaaggtgcgtaatattagtaagaagtatttatcagcttaacgtgataacaatatagtaatatgaaatatttattaaatttttataattaatctctgctag

SEQ ID NO: 4432 - DNA, 565 bp, Artificial
  Mutations within GlyA3B4 introduced by GmGlyA3B4_T02TALE nuclease
gttcatgtacggttgcagatataaacgaagcatagcttatgtatgaggtgtaacaaaattggaaacaatagccatgcaaggtgaagaatgtcaccaactcagaaacccttcttcattgacgtgtccctcactcactctcctctcttcactataaatcgccactcttcgtgttctccacttcaccaactccttcaaacttattaacactttccttagttcaatatggggaagcccttcttcactctctctctttcaacgagtgccaactcaacaacctcaacgcgttggaacccgaccaccgcgttgagtccgaaggtggtcttattgaaacatggaactctcaacaccctgagctgcaatgcgccggtgtcactgtttccaaacgcaccctcaaccgcaacggcctccacttgccatcttactcaccttatccccaaatgatcattgtcgttcaaggtgcgtaatattagtaagaagtatttatcagcttaacgtgataacaataatagtaatatgaaatatttattaatttttataattaatctctgctagaaaatttgattaa

SEQ ID NO: 4433 - DNA, 765 bp, Artificial
  Mutations within GlyA3B4 introduced by GmGlyA3B4_T02TALE nuclease
  misc_feature (672): n is a or c or t or g
gttcatgtacggttgcagatataaacgaagcatagcttatgtatgaggtgtaacaaaattggaaacaatagccatgcaaggtgaagaatgtcaccaactcagaaacccttcttcattgacgtgtccctcactcactctcctctcttcactataaatcgccactcttcgtgttctccacttcaccaactccttcaaacttattaacactttccttagttcaatatggggaagcccttcttcactctctctctttcttccctttgcttgctactcttgtcgagtgcatgcaccatatgcggtgtgaaataccgcacagatgcgtaaaggagaaaataccgcatcaggcgccattcgccattcaggctgcgcaactgttgggaagtgtcttgtaatcgattaccagaggagatttttcagaaaataattttccaagctattacctccagcaagttcaacgagtgccaactcaacaacctcaacgcgttggaacccgaccaccgcgttgagtccgaaggtggtcttattgaaacatggaactctcaacaccctgagctgcaatgcgccggtgtcaactgttttccaaaacgcaccctcaaccgcaacggcctccactttgccaatcttactcaccttatcccccaaatgatcttgtcgttccaagggtgcgtaatntttagtaagaagtatttatcagcttaacgtgataacaataatagtaatatgaaaataatttattaaaatttttttataattaaatctcttgct

SEQ ID NO: 4434 - DNA, 636 bp, Artificial
  Mutations within GlyA3B4 introduced by GmGlyA3B4_T02TALE nuclease
gttcatgtacggttgcagatataaacgaagcatagcttatgtatgaggtgtaacaaaaattggaaacaatagccatgcaaggtgaagaatgtcaccaactcagaaacccttcttcattgacgtgtccctcactcactctcctctcttcactataaatcgccactcttcgtgttctccacttcaccaactccttcaaacttattaacactttccttagttcaatatggggaagcccttcttcactctctctctttcttccctttgcttgctactcttgtcgagtgcatgtattacctccagcaagttcaacgagtgccaactcaacaacctcaacgcgttggaacccgaccaccgcgttgagtccgaaggtggtcttattgaaacatggaactctcaacaccctgagctgcaatgcgccggtgtcactgtttccaaacgcaccctcaaccgcaacggcctccacttgccatcttactcaccttatccccaaatgatcattgtcgttcaaggtgcgtaatattagtaagaagtatttatcagcttaacgtgataacaatatagtaatatgaaatatttattaaatttttataattaatctctgctagaaaatttgattaatcattttagtagaatttg

SEQ ID NO: 4435 - DNA, 657 bp, Artificial
  Mutations within GlyA3B4 introduced by GmGlyA3B4_T02TALE nuclease
gttcatgtacggttgcagatataaacgaagcatagcttatgtatgaggtgtaacaaaattggaaacaatagccatgcaaggtgaagaatgtcaccaactcagaaacccttcttcattgacgtgtccctcactcactctcctctcttcactataaatcgccactcttcgtgttctccacttcaccaactccttcaaacttattaacactttccttagttcaatatggggaagcccttcttcactctctctctttcttccctttgcttgctactcttgtccagcaagttcaacgagtgccaactcaacaacctcaacgcgttggaacccgaccaccgcgttgagtcccgaaggtggtcttattgaaacatggaactctcaacacccctgagctgcaatgcgccggtgtcactgtttccaaacgcaccctcaaccgcaacggcctccacttgccatcttactcaccttatccccaaatgatcattgtcgttcaaggtgcgtaatattagtaagaagtatttatcagctttaacgtgataacaataatagtaatatgaaatattttattaaattttttataaattaatctcttgctagaaaatttgattaatcatttttagtagaatttgttttttctcaactaggttttaaaacaccaca

SEQ ID NO: 4436 - DNA, 657 bp, Artificial
  Mutations within GlyA3B4 introduced by GmGlyA3B4_T02TALE nuclease
gttcatgtacggttgcagatataaacgaagcatagcttatgtatgaggtgtaacaaaaattggaaacaatagccatgcaaggtgaagaatgtcaccaactcagaaacccttcttcattgacgtgtccctcactcactctcctctcttcactataaatcgccactcttcgtgttctccacttcaccaactccttcaaacttattaacactttccttagttcaatatggggaagcccttcttcactctctctctttcttccctttgcttgctactcttgtcgagtgcagctattacctccagcaagttcaacgagtgccaactcaacaacctcaacgcgttggaacccgaccaccgcgttgagtccgaaggtggtcttattgaaacatggaactctcaacaccctgagctgcaatgcgccggtgtcactgtttccaaacgcaccctcaaccgcaacggcctccacttgccatcttactcaccttatccccaaatgatcattgtcgttcaaggtgcgtaatattagtaagagtatttatcagcttaacgtgatacaataatagtaatatgaaatatttattaaatttttcataattaatctctgctagaaaatttgattaatcattttagtagaatttgttttctcaactaggttttaaa

SEQ ID NO: 4437 - DNA, 585 bp, Artificial
  Mutations within GlyA3B4 introduced by GmGlyA3B4_T02TALE nuclease
gttcatgtacggttgcagatataaacgaagcatagcttatgtatgaggtgtaacaaaattggaaacaatagccatgcaaggtgaagaatgtcaccaactcagaaacccttcttcattgacgtgtccctcactcactctcctctcttcactataaatcgccactcttcgtgttctccacttcaccaactccttcaaacttattaacactttccttagttcaatatggggaagcccttcttcactctctctctttcttccctttgcttgctactcttgtcgagtaagcaggcgctggagacggtccagcggctgttgccggtgctgtgccaggcccacggcttgaccccccagcaggtctattacctccagcaagttcacgagtgccaactcaacaacctcacgcgttggaacccgaccaccgcgttgagtccgaaggtggtcttattgaaacatggaactctcaacaccctgagctgcaatgcgccggtgtcactgtttccaaacgcaccctcaaccgcaacggcctccacttgccatcttactcaccttatccccaaatgatcattgtcgttcaaggtgcgtaat

SEQ ID NO: 4438 - DNA, 667 bp, Artificial
  Mutations within GlyA3B4 introduced by GmGlyA3B4_T02TALE nuclease
gttcatgtacggttgcagatataaacgaagcatagcttatgtatgaggtgtaacaaaattggaaacaatagccatgcaaggtgaagaatgtcaccaactcagaaacccttcttcattgacgtgtccctcactcactctcctctcttcactataaatcgccactcttcgtgttctccacttcaccaactccttcaaacttattaacactttccttagttcaatatggggaagcccttcttcactctctctctttcttccctttgcttgctactcttgtcgagtgcatctattacctccagcaagttcaacgagtgccaactcaacaacctcaacgcgttggaacccgaccaccgcgttgagtccgaaggtggtctttattgaaacatggaactctcaacaccctgagctgcaatgcgccggtgtcactgtttccaaacgcaccctcaaccgcaacggccccccacttgccatcttactcaccttatccccaaatgatcattgtcgttcaaggtgcgtaatattagtaagaagtatttatcagcttaacgtgataacaataatagtaatatgaaatatttattaaatttttataattaatctctgctagaaaatttgattaatcattttagtagaatttgtttttctcaactaggtttttaaaacacca

SEQ ID NO: 4439 - DNA, 650 bp, Artificial; identical to SEQ ID NO: 2488
  Mutations within GlyA3B4 introduced by GmGlyA3B4_T02TALE nuclease
  misc_feature (530): n is a or c or t or g

SEQ ID NO: 4440 - DNA, 650 bp, Artificial
  Mutations within GlyA3B4 introduced by GmGlyA3B4_T02TALE nuclease
gttcatgtacggttgcagatataaacgaagcatagcttatgtatgaggtgtaacaaaattggaaacaatagccatgcaaggtgaagaatgtcaccaactcagaaacccttcttcattgacgtgtccctcactcactctcctctcttcactataaatcgccactcttcgtgttctccacttcaccaactccttcaaacttattaacactttccttagttcaatatggggaagcccttcttcactctctctctttcttccctttgcttgctattacctccagcaagttcaacgagtgccaactcaacaacctcaacgcgttggaacccgaccaccgcgttgagtccgaaggtggtcttattgaaacatggaactctcaacacccctgagctgcaatgcgccggtgtcactgtttccaaacgcaccctcaaccgcaacggcctccacttgccatcttactcaccttatccccaaatgatcattgtcgttcaaggtgcgtaatattagtaagaagtatttatcagcttaacgtgataacaataatagtaatatgaaatatttattaaattttttataattaatctctgctagaaaatttgattaatcatttttagtagaatttgttttttctcaactaggttttaaacaccaca

SEQ ID NO: 4441 - DNA, 656 bp, Artificial
  Mutations within GlyA3B4 introduced by GmGlyA3B4_T02TALE nuclease
  misc_feature (530): n is a or c or t or g
gttcatgtacggttgcagatataaacgaagcatagcttatgtatgaggtgtaacaaaattggaaacaatagccatgcaaggtgaagaatgtcaccaactcagaaacccttcttcattgacgtgtccctcactcactctcctctcttcactataaatcgccactcttcgtgttctccacttcaccaactccttcaaacttattaacactttccttagttcaatatggggaagcccttcttcactctctctctttcttccctttgcttgctactcttgtcgagtgcatgctattacctccagcaagttcaacgagtgccaactcaacaacctcaacgcgttggaacccgaccaccgcgttgagtccgaaggtggtcttattgaaacatggaactctcaacaccctgagctgcaatgcgccggtgtcactgtttccaaacgcaccctcaaccgcaacggcctccacttgccatcttactcaccttatccccaaatgatcattgtcgttcaaggtgcgtaatattagtaagagnatttatcagcttaacgtgataacaataatagtaatatgaaatatttattaaatttttataattaatctctgctagaaaatttgattaatcattttagtagaatttgtttttctcaactaggttttt

SEQ ID NO: 4442 - DNA, 663 bp, Artificial; identical to SEQ ID NO: 2092
  Mutations within GlyA3B4 introduced by GmGlyA3B4_T02TALE nuclease

SEQ ID NO: 4443 - DNA, 564 bp, Artificial
  Mutations within GlyA3B4 introduced by GmGlyA3B4_T02TALE nuclease
gttcatgtacggttgcagatataaacgaagcatagcttatgtatgaggtgtaacaaaattggaaacaatagccatgcaaggtgaagaatgtcaccaactcagaaacccttcttcattgacgtgtccctcactcactctcctctcttcactataaatcgccactcttcgtgttctccacttcaccaactccttcaaacttattaacactttccttagttcaatatggggaagcccttcttcactctctctctttcttccctttgcttgctactcttgtcgagtgccaactcaacaacctcaacgcgttggaacccgaccaccgcgttgagtccgaaggtggtcttattgaaacatggaactctcaacaccctgagctgcaatgcgccggtgtcactgtttccaaacgcaccctcaaccgcaacggcctccacttgccatcttactcaccttatcccccaaatgatcattgtcgttcaaggtgcgtaatattagtaagaagtatttatcagcttaacgtgataacaataatagtaatatgaaatatttattaaattttttataatt

SEQ ID NO: 4444 - DNA, 663 bp, Artificial
  Mutations within GlyA3B4 introduced by GmGlyA3B4_T02TALE nuclease
gttcatgtacggttgcagatataaacgaagcatagcttatgtatgaggtgtaacaaaattggaaacaatagccatgcaaggtgaagaatgtcaccaactcagaaacccttcttcattgacgtgtccctcactcactctcctctcttcactataaatcgccactcttcgtgttctccacttcaccaactccttcaaacttattaacactttccttagttcaatatggggaagcccttcttcactctctctctttcttccctttgcttgctactcttgtcgagtgcattacctccagcaagttcaacgagtgccaactcaacaacctcaacgcgttggaacccgaccaccgcgttgagtccgaaggtggtcttattgaaacatggaactctcaacaccctgagctgcaatgcgccggtgtcactgtttccaaacgcaccctcaaccgcaacggcctccacttgccatcttactcacccttatcccccaaaatgatcattgtcgttcaaggtgcgtaatattagtaagaagtatttatcagcttaacgtgataacaataatagtaatatgaaaatatttattaaatttttataattaatctctgctagaaaatttgattaatcattttagtagaatttgttttctcaactaggttttaaaacacca

SEQ ID NO: 4445 - DNA, 617 bp, Artificial; identical to SEQ ID NO: 2637
  Mutations within GlyA3B4 introduced by GmGlyA3B4_T02TALE nuclease

SEQ ID NO: 4446 - DNA, 600 bp, Artificial
  Mutations within GlyA3B4 introduced by GmGlyA3B4_T02TALE nuclease
gttcatgtacggttgcagatataaacgaagcatagcttatgtatgaggtgtaacaaaattggaaacaatagccatgcaaggtgaagaatgtcaccaactcagaaacccttcttcattgacgtgtccctcactcactctcctctcttcactataaatcgccactcttcgtgttctccacttcaccaactccttcaaacttattaacactttccttagttcaatatggggaagcccttcttcacattacctccagcaagttcaacgagtgccaactcaacaacctcaacgcgttggaacccgaccaccgcgttgagtccgaaggtggtcttattgaaacatggaactctcaacaccctgagctgcaatgcgccggtgtcactgtttccaaacgcaccctcaaccgcaacggcctccacttgccatcttactcaccttatccccaaatgatcattgtcgttcaaggtgcgtaatattagtaagaagtatttatcagcttaacgtgataacaataatagtaatatgaaatatttattaatttttataatttaatctctgctagaaatttgattaatcatttttagtagaatttgtttttctcaa

SEQ ID NO: 4447 - DNA, 666 bp, Artificial; identical to SEQ ID NO: 1812
  Mutations within GlyA3B4 introduced by GmGlyA3B4_T02TALE nuclease

SEQ ID NO: 4448 - DNA, 634 bp, Artificial; identical to SEQ ID NO: 1893
  Mutations within GlyA3B4 introduced by GmGlyA3B4_T02TALE nuclease

SEQ ID NO: 4449 - DNA, 666 bp, Artificial
  Mutations within GlyA3B4 introduced by GmGlyA3B4_T02TALE nuclease
  misc_feature (454): n is a or c or t or g
gttcatgtacggttgcagatataaacgaagcatagcttatgtatgaggtgtaacaaaattggaaacaatagccatgcaaggtgaagaatgtcaccaactcagaaacccttcttcattgacgtgtccctcactcactctcctctcttcactataaatcgccactcttcgtgttctccacttcaccaactccttcaaacttattaacactttccttagttcaatatggggaagcccttcttcactctctctctttcttccctttgcttgctactcttgtcgagtgcatctattacctccagcaagttcaacgagtgccaactcaacaacctcaacgcgttggaacccgaccaccgcgttgagtccgaaggtggtcttattgaaacatggaactctcaacaccctgagctgcaatgcgccggtgtcactgtttccaaacgcacccctcaaccgcaanggcctcccacttgccatcttactcaccttatcccccaaatgatcattgtcgttcaaggtgcgtaatattagtaagaagtatttatcagcttaacgtgataacaataatagtaatatgaaatatttattaaatttttataattaatctctgctagaaaatttgattaatcattttagtagaatttgttttctcaactaggttttaaaacacca

SEQ ID NO: 4450 - DNA, 679 bp, Artificial
  Mutations within GlyA3B4 introduced by GmGlyA3B4_T02TALE nuclease
gttcatgtacggttgcagatataaacgaagcatagcttatgtatgaggtgtaacaaaattggaaacaatagccatgcaaggtgaagaatgtcaccaactcagaaaccccttcttcattgacgtgtccctcactcactctcctctcttcactataaatcgccactcttcgtgttctccacttcaccaactccttcaaacttattaacactttccttagttcaatatggggaagcccttcttcactctctctctttcttccctttgcttgctactcttgtcgagtgcatccaacaattatctcccatacccgttgcacacttgagtttgttaatggtcagctattacctccagcaagttcaacgagtgccaactcaacaacctcaacgcgttggaacccgaccaccgcgttgagtccgaaggtggtcttattgaaacatggaactctcaacaccctgagctgcaatgcgccggtgtcactgtttccaaacgcaccctcaaccgcaacggcctccacttgccatcttactcaccttatccccaaatgatcattgtcgttcaaggtgcgtaatattagtaagaagtatttatcagcttaacgtgataacaataatagtaatatgaaatatttattaaatttttataattaatctctgctagaaaatttgattaatcattttta

SEQ ID NO: 4451 - DNA, 726 bp, Artificial
  Mutations within GlyA3B4 introduced by GmGlyA3B4_T02TALE nuclease
  misc_feature (120): n is a or c or t or g
gttcatgtacggttgcagatataaacgaagcaagcttatgtatgaggtgtaacaaaattggaaaacaatagccatgcaaggtgaagaatgtcaccaactcagaaacccttcttcattgangtgtccctcactcactctccatctcttcactataaatcgccactcttcgtgttctccacttcaccaactccttcaaacttattaacactttccttagttcaatatggggaagcccttcttcactctctctctttcttccctttgcttgctactcttgtcgagtaccagctgctggggggtcaagccgtgggcctggcacagcaccggcaacaggcgctggagacggtccagcggctgctttgctatacctccagcaagttcaacgagtgccaactcacaacctcaacgcgttggacccgaccaccgcgttgagtccgaaggtggtcttattgaaacatggaactctcaacaccctgagctgcaatgcgccggtgtcactgtttccaaacgcaccctcaaccgcaacggcctccacttgccatcttactcacctttatccccaaatgatcattgtcgttcaaggtgcgtaatattcagtaagaagtatttatcagcttaacgtgataacaataatagtaatatgaaatatttattaaattttttcataattaatctctgctagaaaatttgattaatcatttttagttagaatttgtttttctcaac

SEQ ID NO: 4452 - DNA, 650 bp, Artificial
  Mutations within GlyA3B4 introduced by GmGlyA3B4_T02TALE nuclease
gttcatgtacggttgcagatataaacgaagcatagcttatgtatgaggtgtaacaaaattggaaacaatagccatgcaaggtgaagaatgtcaccaactcagaaacccttcttcattgacgtgtccctcactcactctcctctcttcactataaatcgccactcttcgtgttctccacttcaccaactccttcaaacttattaacactttccttagttcaatatggggaagcccttcttcactctctctctttcttccctttgcttgctactcttgtcgagtgcactattacctccagcaagttcaacgagtgccaactcaacaacctcaacgcgttggaacccgaccaccgcgttgagtccgaaggtggtcttattgaaacatggaactctcaacaccctgagctgcaatgcgccggtgtcactgtttccaaacgcaccctcaaccgcaacggcctccacttgccatcttactcaccttatcccccaaatgatcattgtcgttcaaggtgcgtaatattagtaagaagtatttatcagcttaacgtgataacaataatagtaatatgaaatatttattaaatttttataattaatctctgctagaaaatttgattaatcattttagtagaatttgttttctcaactagg

SEQ ID NO: 4453 - DNA, 657 bp, Artificial
  Mutations within GlyA3B4 introduced by GmGlyA3B4_T02TALE nuclease
gttcatgtacggttgcagatataaacgaagcatagcttatgtatgaggtgtaacaaaattggaaacaatagccatgcaaggtgaagaatgtcaccaactcagaaacccttcttcattgacgtgtccctcactcactctcctctcttcactataaatcgccactcttcgtgttctccacttcaccaactccttcaaacttattaacactttccttagttcaatatggggaagcccttcttcactctctctctttcttccctttgcttgctactcttgtcgagtgcatacctccagcaagttcaacgagtgccaactcaacaacctcaacgcgttggaacccgaccaccgcgttgagtccgaaggtggtcttattgaaacatggaactctcaacaccctgagctgcaatgcgccggtgtcactgtttccaaacgcaccctcaaccgcaacggcctccacttgccatcttactcaccttatccccaaatgatcattgtcgttcaaggtgcgtaatattagtaagaagtatttatcagcttaacgtgataacaatatagtaatatgaaatatttattaaatttttataattaatctctgctagaaaatttgattaatcattttagtagaatttgtttttctcaactaggttttaaacacca

SEQ ID NO: 4454 - DNA, 664 bp, Artificial; identical to SEQ ID NO: 3555
  Mutations within GlyA3B4 introduced by GmGlyA3B4_T02TALE nuclease

SEQ ID NO: 4455 - DNA, 639 bp, Artificial
  Mutations within GlyA3B4 introduced by GmGlyA3B4_T02TALE nuclease
gttcatgtacggttgcagatataaacgaagcatagcttatgtatgaggtgtaacaaaattggaaacaatagccatgcaaggtgaagaatgtcaccaactcagaaacccttcttcattgacgtgtccctcactcactctcctctcttcactataaatcgccactcttcgtgttctccacttcaccaactccttcaaacttattaacactttccttagttcaatatggggaagcccttcttcactctctctctttcttcccttcttcacctccagcaagttcaacgagtgccaactcaacaacctcaacgcgttggaacccgaccaccgcgttgagtccgaaggtggtcttattgaaacatggaactctcaacaccctgagctgcaatgcgccggtgtcactgtttccaaacgcaccctcaaccgcaacggcctccacttgccatcttactcaccttatccccaaatgatcattgtcgttcaaggtgcgtaatattagtaagaagtatttatcagcttaacgtgataacaataatagtaatatgaaatatttattaaatttttataattaattctctgctagaaaatttgattaatcatttttagtagaatttgtttttctcaactaggttttaaacacca

SEQ ID NO: 4456 - DNA, 661 bp, Artificial
  Mutations within GlyA3B4 introduced by GmGlyA3B4_T02TALE nuclease
gttcatgtacggttgcagatataaacgaagcatagcttatgtatgaggtgtaacaaaattggaaacaatagccatgcaaggtgaagaatgtcaccaactcagaaacccttcttcattgacgtgtccctcactcactctcctctcttcactataaatcgccactcttcgtgttctccacttcaccaactccttcaaacttattaacactttccttagttcaatatggggaagcccttcttcactctctctctttcttccctttgcttgctactcttgtcgagtgcatgcttgccgccatcgtggctggcgatggccaccacctgctgggggtcaagccgtgggcctggcacagcaccggcaacagcgcctgcaccgtctccagcgcctgctattacctccagcaagttcaacgagtgccaactcaacaacctcaacgcgttggaacccgaccaccgcgttgagtccgaaggtggtcttattgaaacatggaactctcaacaccctgagctgcaatgcgccggtgtcactgtttccaaacgcaccctcaaccgcaacggcctccacttgccatcttactcaccttatccccaaatgatcattgtcgttcaaggtgcgtaatattagtaagaagtatttatcagcttaacgtgataacaataat

SEQ ID NO: 4457 - DNA, 651 bp, Artificial
  Mutations within GlyA3B4 introduced by GmGlyA3B4_T02TALE nuclease
gttcatgtacggttgcagatataaacgaagcatagcttatgtatgaggtgtaacaaaattggaaacaatagccatgcaaggtgaagaatgtcaccaactcagaaacccttcttcattgacgtgtccctcactcactctcctctcttcactataaatcgccactcttcgtgttctccacttcaccaactccttcaaacttattaacactttccttagttcaatatggggaagcccttcttcactctctctctttcttccctttgcttgctactcttgtcgagtgcatacctccagcaagttcaacgagtgccaactcaacaacctcaacgcgttggaacccgaccaccgcgttgagtccgaaggtggtcttattgaaacatggaactctcaacaccctgagctgcaatgcgccggtgtcactgtttccaaacgcaccctcaaccgcaacggcctccacttgccatcttactcaccttatccccaaatgatcattgtcgttcaaggtgcgtaatattagtaagaagtatttatcagcttaacgtgataacaatatagtaatatgaaaatatttattaaatttttataattaatctctgctagaaaatttgattaatcattttagtagaatttgtttttctcaactaggttttt

SEQ ID NO: 4458 - DNA, 642 bp, Artificial
  Mutations within GlyA3B4 introduced by GmGlyA3B4_T02TALE nuclease
gttcatgtacggttgcagatataaacgaagcatagcttatgtatgaggtgtaacaaaattggaaacaatagccatgcaaggtgaagaatgtcaccaactcagaaacccttcttcattgacgtgtccctcactcactctcctctcttcactataaatcgccactcttcgtgttctccacttcaccaactccttcaaacttattaacactttccttagttcaatatggggaagcccttcttcactctctctctttcttccctttgctttgctattacctccagcaagttcaacgagtgccaactcaacaacctcaacgcgttggaacccgaccaccgcgttgagtccgaaggtggtcttattgaaacatggaactctcaacacccctgagctgcaatgcgccggtgtcactgtttccaaacgcaccctcaaccgcaacggcctccacttgccatcttactcaccttatcccccaaatgatcattgtcgttcaaggtgcgtaatattagtaagaagtatttatcagcttaacgtgataacaataatagtaatatgaaatatttattaaattttttataattaatctctgctagaaaatttgattaatcatttttagtagaatttgttttttctcaactaggtttt

SEQ ID NO: 4459 - DNA, 663 bp, Artificial; identical to SEQ ID NO: 1925
  Mutations within GlyA3B4 introduced by GmGlyA3B4_T02TALE nuclease

SEQ ID NO: 4460 - DNA, 665 bp, Artificial
  Mutations within GlyA3B4 introduced by GmGlyA3B4_T02TALE nuclease
gttcatgtacggttgcagatataaacgaagcatagcttatgtatgaggtgtaacaaaattggaaacaatagccatgcaaggtgaagaatgtcaccaactcagaaaccccttcttcattgacgtgtccctcactcactctcctctcttcactataaaatcgccactcttcgtgttctccacttcaccaactccttcaaacttattaacactttccttagttcaatatggggaagcccttcttcactctctctctttcttccctttgcttgctattacctccagcaagttcaacgagtgccaactcaacaacctcaacgcgttggaacccgaccaccgcgttgagtccgaaggtggtcttattgaaacatggaactctcaacaccctgagctgcaatgcgccggtgtcactgttttccaaaacgcaccctcaaccgcaacggcctccacttgccatcttactcaccttatcccccaaatgatcattgtcgttcaaggtgcgtaaatattagtaagaagtatttatcagctttaacgtgataacaataaatagtaaatatgaaaatattttattaaaatttttttaataaattaaatctctgctagaaaaatttgattaatcatttttagtagaatttgttttttctcaactaggttttaaaacacca

SEQ ID NO: 4461 - DNA, 647 bp, Artificial
  Mutations within GlyA3B4 introduced by GmGlyA3B4_T02TALE nuclease
gttcatgtacggttgcagatataaacgaagcatagcttatgtatgaggtgtaacaaaattggaaacaatagccatgcaaggtgaagaatgtcaccaactcagaaaccccttcttcattgacgtgtccctcactcactctcctctcttcactataaatcgccactcttcgtgttctccacttcaccaactccttcaaacttattaacactttccttagttcaatatggggaagcccttcttcactctctctctttcttccctttgcttgctactcttgtcgagtgcgctattacctccagcaagttcaacgagtgccaactcaacaacctcaacgcgttggaacccgaccaccgcgttgagtccgaaggtggtcttattgaaacatggaactctcaacaccctgagctgcaatgcgccggtgtcactgtttccaaacgcaccctcaaccgcaacggcctccacttgccatcttactcaccttatccccaaatgatcattgtcgttcaaggtgcgtaatattagtaagaagtatttatcagcttaacgtgataacaataatagtaatatgaaatatttattaaatttttataattaatctctgctagaaaatttgattaatcatttttagtagaatttgtttttctcaa

SEQ ID NO: 4462 - DNA, 558 bp, Artificial
  Mutations within GlyA3B4 introduced by GmGlyA3B4_T02TALE nuclease
gttcatgtacggttgcagatataaacgaagcatagcttatgtatgaggtgtaacaaaattggaaacaatagccatgcaaggtgaagaatgtcaccaactcagaaacccttcttcattgacgtgtccctcactcactctcctctcttcactataaatcgccactcttcgtgttctccacttcaccaactccttcaaacttattaacactttccttagttcaatatggggaagcccttcttcactctctctccagcaagttcaacgagtgccaactcaacaacctcaacgcgttggaacccgaccaccgcgttgagtccgaaggtggtcttattgaaacatggaactctcaacaccctgagctgcaatgcgccggtgtcactgtttccaaacgcaccctcaaccgcaacggcctccacttgccatcttactcaccttatccccaaatgatcattgtcgttcaaggtgcgtaatattagtaagaagtatttatcagcttaacgtgataacaataatagtaatatgaaatatttattaatttttataattaatctctgctag

SEQ ID NO: 4463 - DNA, 473 bp, Artificial
  Mutations within GlyA3B4 introduced by GmGlyA3B4_T02TALE nuclease
gttcatgtacggttgcagatataaacgaagcatagcttatgtatgaggtgtaacaaaattggaaacaatagccatgcaaggtgaagaatgtcaccaactcagaaacccttcttcattgacgtgtccctcactcactctcctctcttcactataaatcgccactcttcgtgttctccacttcaccaactccttcaaacttattaacactttccttagttcaacgagtgccaactcaacacctcaacgcgttggaacccgaccaccgcgttgagtccgaaggtggtcttattgaaacatggaactctcaacaccctgagctgcaatgcgccggtgtcactgtttccaaacgcaccctcaaccgcaacggcctccacttgccatcttactcaccttatccccaaaatgatcattgtcgttcaaaggtgcgtaatattagtaagaagtatttatcagcttaacgtgataacaataat

SEQ ID NO: 4464 - DNA, 646 bp, Artificial
  Mutations within GlyA3B4 introduced by GmGlyA3B4_T02TALE nuclease
gttcatgtacggttgcagatataaacgaagcatagcttatgtatgaggtgtaacaaaattggaaacaatagccatgcaaggtgaagaatgtcaccaactcagaaacccttcttcattgacgtgtcccctcactcactctcctctcttcactataaatcgccactcttcgtgttctccacttcaccaactccttcaaacttattaacactttccttagttcaatatggggaagcccttcttcactctctctctttcttccctttgcttgctactcttgtcgagtgtgctattacctccagcaagttcaacgagtgccaactcaacaacctcaacgcgttggaacccgaccaccgcgttgagtccgaaggtggtcttattgaaacatggaactctcaacaccctgagctgcaatgcgccggtgtcactgtttccaaacgcaccctcaaccgcaacggcctccacttgccatcttactcaccttatccccaaatgatcattgtcgttcaaggtgcgtaatattagtaagaagtatttatcagcttaacgtgataacaataatagtaatatgaaatatttattaaatttttataattaatctctgctagaaaatttgattaatcattttagtagaatttgttttctcaac

SEQ ID NO: 4465 - DNA, 639 bp, Artificial
  Mutations within GlyA3B4 introduced by GmGlyA3B4_T02TALE nuclease
gttcatgtacggttgcagatataaacgaagcatagcttatgtatgaggtgtaacaaaattggaaacaatagccatgcaaggtgaagaatgtcaccaactcagaaaccccttcttcattgacgtgtcccctcactcactctcctctcttcactataaatcgccactcttcgtgttctccacttcaccaactccttcaaacttattaacactttccttagttcaatatggggaagcccttcttcactctctctctttcttccctttgcttgctactcttgtcgagtgcatttctattacctccagcaagttcaacgagtgccaactcaacaacctcaacgcgttggaacccgaccaccgcgttgagtccgaaggtggtcttattgaaacatggaactctcaacaccctgagctgcaatgcgccggtgtcactgtttccaaacgcaccctcaaccgcaacggcctccacttgccatcttactcaccttatccccaaatgatcattgtcgttcaaggtgcgtaatattagtaagaagtatttatcagcttaacgtgataacaatatagtaatatgaaatatttattaaatttttataattaatctctgctagaaaatttgattaatcattttagtagaatttg

SEQ ID NO: 4466 - DNA, 561 bp, Artificial
  Mutations within GlyA3B4 introduced by GmGlyA3B4_T02TALE nuclease
gttcatgtacggttgcagatataaacgaagcatagcttatgtatgaggtgtaacaaaaattggaaacaatagccatgcaaggtgaagaatgtcaccaactcagaaacccttcttcattgacgtgtccctcactcactctcctctcttcactataaatcgccactcttcgtgttctccacttcaccaactccttcaaacttattaacactttccttagttcaatatgggggaagcccttcttcactctctctctttcttccctttgcttgctactcttgtcgagtgcatgcgttggaacccgaccaccgcgttgagtccgaaggtggtcttattgaaacatggaactctcaacaccctgagctgcaatgcgccggtgtcactgtttccaaacgcaccctcaaccgcaacggcctccacttgccatcttactcaccttatcccccaaatgatcattgtcgttcaaggtgcgtaatattagtaagaagtatttatcagcttaacgtgataacaataatagtaatatgaaatatttattaattttttataattaatctctgctag

SEQ ID NO: 4467 - DNA, 618 bp, Artificial
  Mutations within GlyA3B4 introduced by GmGlyA3B4_T02TALE nuclease
gttcatgtacggttgcagatataaacgaagcatagcttatgtatgaggtgtaacaaaattggaaacaatagccatgcaaggtgaagaatgtcaccaactcagaaacccttcttcattgacgtgtccctcactcactctcctctcttcactataaatcgccactcttcgtgttctccacttcaccaactccttcaaacttattaacactttccttagttcaatatggggaagcccttcttcactctctctctttcttccctttgcttgctactcttgtcgagtgccaactcaacaacctcaacgcgttggaacccgaccaccgcgttgagtccgaaggtggtcttattgaaacatggaactctcaacaccctgagctgcaatgcgccggtgtcactgtttccaaacgcaccctcaaccgcaacggcctccacttgccatcttactcaccttatcccccaaatgatcattgtcgttcaaggtgcgtaatattagtaagaagtatttatcagcttaacgtgataacaataatagtaatatgaaatatttattaatttttataattaatctctgctagaaaatttgattaatcatttttagtagaatttgtttttctcaact

SEQ ID NO: 4468 - DNA, 662 bp, Artificial
  Mutations within GlyA3B4 introduced by GmGlyA3B4_T02TALE nuclease
gttcatgtacggttgcagatataaacgaagcatagcttatgtatgaggtgtaacaaaattggaaacaatagccatgcaaggtgaagaatgtcaccaactcagaaacccttcttcattgacgtgtccctcactcactctcctctcttcactataaatcgccactcttcgtgttctccacttcaccaactccttcaaacttattaacactttccttagttcaatatggggaagcccttcttcactctctctctttcttccctttgcttgctactcttgtcgagtgcatgtacctccagcaagttcaacgagtgccaactcaacaacctcaacgcgttggaacccgaccaccgcgttgagtccgaaggtggtcttattgaaacatggaactctcaacaccctgagctgcaatgcgccggtgtcactgtttccaaacgcaccctcaaccgcaacggcctccacttgccatcttactcaccttatccccaaatgatcattgtcgttcaaggtgcgtaatattagtaagaagtatttatcagcttaacgtgataacaatatagtaatatgaaatatttattaaatttttataattaatctctgctagaaaatttgattaatcattttagtagaatttgttttctcaactaggtttttaaaacaccaca

SEQ ID NO: 4469 - DNA, 659 bp, Artificial
  Mutations within GlyA3B4 introduced by GmGlyA3B4_T02TALE nuclease
gttcatgtacggttgcagatataaacgaagcatagcttatgtatgaggtgtaacaaaattggaaacaatagccatgcaaggtgaagaatgtcaccaactcagaaacccttcttcattgacgtgtccctcactcactctcctctcttcactataaatcgccactcttcgtgttctccacttcaccaactccttcaaacttattaacactttccttagttcaatatggggaagcccttcttcactctctctctttcttccctttgcttgctactcttgtcgagtgcatctattacctccagcaagttcaacgagtgccaactcaacaacctcaacgcgttggaacccgaccaccgcgttgagtccgaaggtggtcttattgaaacatggaactctcaacaccctgagctgcaatgcgccggtgtcactgtttccaaacgcaccctcaaccgcaacggcctccacttgccatcttactcaccttatcccccaaatgatcattgtcgttcaaggtgcgtaatattagtaagaagtatttatcagcttaacgtgataacaataatagtaatatgaaatatttattaaatttttataattaatctctgctagaaaatttgattaatcattttagtagaatttgttttctcaactaggttttaaaa

SEQ ID NO: 4470 - DNA, 599 bp, Artificial
  Mutations within GlyA3B4 introduced by GmGlyA3B4_T02TALE nuclease
gttcatgtacggttgcagatataaacgaagcatagcttatgtatgaggtgtaacaaaattggaaacaatagccatgcaaggtgaagaatgtcaccaactcagaaacccttcttcattgacgtgtccctcactcactctcctctcttcactataaatcgccactcttcgtgttctccacttcaccaactccttcaaacttattaacactttccttagttcaatatggggaagcccttcttcactctctctctttcttccctttgcttgctactcttgtcgacgcgttggaacccgaccaccgcgttgagtccgaaggtggtcttattgaaacatggaactctcaacaccctgagctgcaatgcgccggtgtcactgtttccaaacgcaccctcaaccgcaacggcctccacttgccatcttactcaccttatccccaaatgatcattgtcgttcaaggtgcgtaatattagtaagaagtatttatcagcttaacgtgataacaataatagtaatatgaaatatttattaatttttataattaatctctgctagaaaatttgattaatcatttttagtagaatttgtttttctcaactagg

SEQ ID NO: 4471 - DNA, 655 bp, Artificial
  Mutations within GlyA3B4 introduced by GmGlyA3B4_T02TALE nuclease
gttcatgtacggttgcagatataaacgaagcatagcttatgtatgaggtgtaacaaaattggaaacaatagccatgcaaggtgaagaatgtcaccaactcagaaaccccttcttcattgacgtgtccctcactcactctcctctcttcactataaatcgccactcttcgtgttctccacttcaccaactccttcaaacttattaacactttccttagttcaatatgggggaagcccttcttcactctctctctttcttccctttgcttgctactcttgtcgagtgcatctattacctccagcaagttcaacgagtgccaactcaacaacctcaacgcgttggaacccgaccaccgcgttgagtccgaaggtggtcttattgaaacatggaactctcaacaccctgagctgcaatgcgccggtgtcactgtttccaaacgcaccctcaaccgcaacggcctccacttgccatcttactcaccttatccccaaatgatcattgtcgttcaaggtgcgtaatattagtaagaagtatttatcagcttaacgtgataacaatatagtaatatgaaatatttattaaatttttataattaatctctgctagaaaatttgattaatcattttagtagaatttgttttctcaactaggtttt

SEQ ID NO: 4472 - DNA, 649 bp, Artificial
  Mutations within GlyA3B4 introduced by GmGlyA3B4_T02TALE nuclease
gttcatgtacggttgcagatataaacgaagcatagcttatgtatgaggtgtaacaaaattggaaacaatagccatgcaaggtgaagaatgtcaccaactcagaaaccccttcttcattgacgtgtccctcactcactctcctctcttcactataaatcgccactcttcgtgttctccacttcaccaactccttcaaacttattaacactttccttagttcaatatggggaagcccttcttcactctctctctttcttccctttgcttgctactcttgtcgagttgctattacctccagcaagttcaacgagtgccaactcaacaacctcaacgcgttggaacccgaccaccgcgttgagtccgaaggtggtcttattgaaacatggaactctcaacaccctgagctgcaatgcgccggtgtcactgtttccaaacgcaccctcaaccgcaacggcctccacttgccatcttactcaccttatccccaaatgatcattgtcgttcaaggtgcgtaatattagtaagaagtatttatcagcttaacgtgataacaataatagtaatatgaaatatttattaaatttttataattaatctctgctagaaaatttgattaatcattttagtagaatttgttttctcaactagg

SEQ ID NO: 4473 - DNA, 657 bp, Artificial
  Mutations within GlyA3B4 introduced by GmGlyA3B4_T02TALE nuclease
  misc_feature (42): n is a or c or t or g
gttcatgtacggttgcagatataaacgaagcatagcttatgnatgaggtgtaacaaaattggaaacaatagccatgcaaggtgaagaatgtcaccaactcagaaacccttcttcattgacgtgtccctcactcactctcctctcttcactataaatcgccactcttcgtgttctccacttcaccaactccttcaaacttattaacactttccttagttcaatatggggaagcccttcttcactctctctctttcttccctttgcttgctactcttgtcgagtgcatattacctccagcaagttcaacgagtgccaactcaacaacctcaacgcgttggaacccgaccaccgcgttgagtccgaaggtggtcttattgaaacatggaactctcaacaccctgagctgcaatgcgccggtgtcactgtttccaaacgcaccctcaaccgcaacggcctccacttgccatcttactcaccttatcccccaaatgatcattgtcgttcaaggtgcgtaatattagtaagaagtatttatcagcttaacgtgataacaatatagtaatatgaaatatttattaaatttttataattaatctctgctagaaaatttgattaatcattttagtagaatttgtttttctcaactaggttttaaaa

SEQ ID NO: 4474 - DNA, 665 bp, Artificial
  Mutations within GlyA3B4 introduced by GmGlyA3B4_T02TALE nuclease
gttcatgtacggttgcagatataaacgaagcatagcttatgtatgaggtgtaacaaaattggaaacaatagccatgcaaggtgaagaatgtcaccaactcagaaacccttcttcattgacgtgtccctcactcactctcctctcttcactataaatcgccactcttcgtgttctccacttcaccaactccttcaaacttattaacactttccttagttcaatatggggaagcccttcttcactctctctctttcttccctttgcttgctactcttgtcgagtgcatgctattacctccagcaagttcaacgagtgccaactcaacaacctcaacgcgttggaacccgaccaccgcgttgagtccgaaggtggtcttattgaaacatggaactctcaacaccctgagctgcaatgcgccggtgtcactgtttccaaacgcaccctcaaccgcaacggcctccacttgccatcttactcaccttatccccaaatgatcattgtcgttcaaggtgcgtaatattagtaagagtatttatcagcttaacgtgataacaataatagtaatatgaaatatttattaaatttttataattaatctctgctagaaaatttgattaatcattttagtagaatttgtttttctcaactaggttttaaacaccaca

SEQ ID NO: 4475 - DNA, 583 bp, Artificial
  Mutations within GlyA3B4 introduced by GmGlyA3B4_T02TALE nuclease
  misc_feature (506): n is a or c or t or g
gttcatgtacggttgcagatataaacgaagcatagcttatgtatgaggtgtaacaaaattggaaacaatagccatgcaaggtgaagaatgtcaccaactcagaaacccttcttcattgacgtgtccctcactcactctcctctcttcactataaatcgccactcttcgtgttctccacttcaccaactccttcaaacttattaacactttccttagttcaatatggggaagcccttcttcactctctctctttcttccctttgcttgctactcttgtcgagttacctccagcaagttcaacgagtgccaactcaacaacctcaacgcgttggaacccgaccaccgcgttgagtccgaaggtggtcttattgaaacatggaactctcaacaccctgagctgcaatgcgccggtgtcactgtttccaaacgcaccctcaaccgcaacggcctccacttgccatcttactcaccttatcccccaaatgatcattgtcgttcaaggtgcntaatattagtaagaagtatttatcagcttaacgtgataacaataatagtaatatgaaatatttattaaattttttat

SEQ ID NO: 4476 - DNA, 533 bp, Artificial
  Mutations within GlyA3B4 introduced by GmGlyA3B4_T02TALE nuclease
gttcatgtacggttgcagatataaacgaagctagcttatgtatgaggtgtaacaaaattggaaacaatagccatgcaaggtgaagaatgtcaccaactcagaaacccttcttcattgacgtgtccctcactcactctcctctcttcactataaatcgccactcttcgtgttctccacttcaccaactccttcaaacttattaacactttccttagttcaataagcccttcttcactcaccgcgttgagtccgaaggtggtcttattgaaacatggaactctcaacaccctgagctgcaatgcgccggtgtcactgtttccaaacgcaccctcaaccgcaacggcctccacttgccatcttactcaccttatccccaaatgatcattgtcgttcaaggtgcgtaatattagtaagaagtatttatcagcttaacgtgataacaataatagtaatatgaaatatttattaaattttttataattaatctctgctagaaaatttgattaatcatttttagtagaattgtttttctc

SEQ ID NO: 4477 - DNA, 769 bp, Artificial
  Mutations within GlyA3B4 introduced by GmGlyA3B4_T02TALE nuclease
  misc_feature (682): n is a or c or t or g
gttcatgtacggttgcagatataaacgaagcatagcttatgtatgaggtgtaacaaaaattggaaacaatagccatgcaaggtgaagaatgtcaccaactcagaaacccttcttcattgacgtgtccctcactcactctcctctcttcactataaatcgccactcttcgtgttctccacttcaccaactccttcaaacttattaacactttccttagttcaatatggggaagcccttcttcactctctctctttcttccctttgcttgctactcttgtcgagtgcatgctcgctggagacggtccagcggctgttgccggtgctgtgccaggcccacggcttgaccccccagcaggtggtggccatcgccagcaatggcggtggcaagcaggcgctggagacgccagcaagttcaacgagtgccaactcaacacctcaacgcgttgaacccgaccaccgcgttgagtccgaaggtggtcttattgaaacatggaactctcaacaccctgagctgcaatgcgccggtgtcactgtttccaaacgcaccctcaaccgcaacggcctccacttgccatcttactcaccttatcccaaatgatcattgtcgttcaaggtgcgtaatattagtaagaagtatttatcgcttaacgtgataacaataatagtaatatgaaaatatttnttaaattttttataattaatctctgctagaaaatttgattaatcatttttagtagaatttgtttttctcaactaggtttaaacacca

SEQ ID NO: 4478 - DNA, 571 bp, Artificial
  Mutations within GlyA3B4 introduced by GmGlyA3B4_T02TALE nuclease
gttcatgtacggttgcagatataaacgaagcatagcttatgtatgaggtgtaacaaaattggaaacaatagccatgcaaggtgaagaatgtcaccaactcagaaaccccttcttcattgacgtgtccctcactcactctcctctcttcactataaaatcgccactcttcgtgttctccacttcaccaactccttcaaaacttattaacactttccttagttcaatatggggaagcccttcttcactctctctctttcttccctttgcttgctactcttgtcgagtgcatattacctccagcaaagttcaacgagtgccaactcaacaacctcaacgcgttggaaacccgaccaccgcgttgagtccgaaggtggtcttattgaaatacatggaactctcaaacaccctgagctgcaatgcgccggtgtcactgtttccaaaacgcaccctcaaccgcaacggcctccaaccttgccatcttcaactcaccttatccccaatgaatcattgtcgttcaaggtgcgtaatattagtaagaagtatttatcagcttaacgtgataacaataata

SEQ ID NO: 4479 - DNA, 619 bp, Artificial
  Mutations within GlyA3B4 introduced by GmGlyA3B4_T02TALE nuclease
gttcatgtacggttgcagatataaacgaagcatagcttatgtatgaggtgtaacaaaattggaaacaatagccatgcaaggtgaagaatgtcaccaactcagaaacccttcttcattgacgtgtccctcactcactctcctctcttcactataaatcgccactcttcgtgttctccacttcaccaactccttcaaacttattaacactttccttagttcaatatggggaagcccttcttcactctctctctttcttccctttgcttgctactcttgtcgagtgccaactcaacaacctcaacgcgttggaacccgaccaccgcgttgagtccgaaggtggtcttattgaaacatggaactctcaacaccctgagctgcaatgcgccggtgtcactgtttccaaacgcaccctcaaccgcaacggcctccacttgccatcttactcaccttatccccaaatgatcattgtcgttcaaggtgcgtaatattagtaagaagtatttatcagcttaacgtgataacaataatagtaatatgaaatatttattaaattttttataatttaatctctgctagaaaatttgattaatcatttttagtagaatttgtttttctcaac

SEQ ID NO: 4480 - DNA, 531 bp, Artificial
  Mutations within GlyA3B4 introduced by GmGlyA3B4_T02TALE nuclease
  misc_feature (19); (42): n is a or c or t or g
gttcatgtacggttgcagntataaacgaagcatagcttatgnatgaggtgtaacaaaattggaaacaatagccatgcaaggtgaagaatgtcaccaactcagaaacccttcttcattgacgtgtcccctcactcactctcctctcttcactataaaatcgccactcttcgtgttctccacttcaccaactccttcaaaacttattaacactttccttagttcaatatgggggaagcccttcttcactctctctctttcttccctttgcttgctactcttgtcgagtgcattgctattacctccagcaagttcaacgagtgccaactcaaacaacctcaacgcgttggaaacccgaccaacccgcgttgagtccgaaggtggtcttaattgaaacatggaactctcaacaccctgagctgcaaatgcgccggtgtcactgtttccaaacgcacccctcaaccgcaacggcctccacttgccatcttactcaccttatcccccaaaatgatcattgtcgttcaaggtgctaat

SEQ ID NO: 4481 - DNA, 651 bp, Artificial
  Mutations within GlyA3B4 introduced by GmGlyA3B4_T02TALE nuclease
gttcatgtacggttgcagatataaacgaagcatagcttatgtatgaggtgtaacaaaaattggaaacaatagccatgcaaggtgaagaatgtcaccaactcagaaacccttcttcattgacgtgtccctcactcactctcctctcttcactataaatcgccactcttcgtgttctccacttcaccaactccttcaaacttattaacactttccttagttcaatatggggaagcccttcttcactctctctctttcttccctttgcttgctactcttgtcgagtgcattattacctccagcaagttcaacgagtgccaactcaacaacctcaacgcgttggaacccgaccaccgcgttgagtccgaaggtggtcttattgaaacatggaactctcaacaccctgagctgcaatgcgccggtgtcactgtttccaaacgcaccctcaaccgcaacggcctccacttgccatcttactcaccttatccccaaatgatcattgtcgttcaaggtgcgtaatattagtaagaagtatttatcagcttaacgtgataacaataatagtaatatgaaatatttattaaatttttataattaatctctgctagaaaatttgattaatcattttagtagaatttgtttttctcaactagg

SEQ ID NO: 4482 - DNA, 635 bp, Artificial
  Mutations within GlyA3B4 introduced by GmGlyA3B4_T02TALE nuclease
  misc_feature (529): n is a or c or t or g
gttcatgtacggttgcagatataaacgaagcatagcttatgtatgaggtgtaacaaaattggaaacaatagccatgcaaggtgaagaatgtcaccaactcagaaacccttcttcattgacgtgtccctcactcactctcctctcttcactataaatcgccactcttcgtgttctccacttcaccaactccttcaaacttattaacactttccttagttcaatatggggaagcccttcttcactctctctctttcttccctttgcttgctactcttgtcgagtgtgctattacctccagcaagttcaacgagtgccaactcaacaacctcaacgcgttggaacccgaccaccgcgttgagtccgaaggtggtcttattgaaacatggaactctcaacaccctgagctgcaatgcgccggtgtcactgtttccaaacgcaccctcaaccgcaacggcctccacttgccatcttactcaccttatcccccaaatgatcattgtcgttcaaggtgcgtaatattagtaagagnatttatcagcttaacgtgataacaataatagtaatatgaaatatttattaaatttttataattaatctctgctagaaaatttgattaatcattttagtagaatttg

SEQ ID NO: 4483 - DNA, 583 bp, Artificial
  Mutations within GlyA3B4 introduced by GmGlyA3B4_T02TALE nuclease
gttcatgtacggttgcagatataaacgaagcatagcttatgtatgaggtgtaacaaaattggaaacaatagccatgcaaggtgaagaatgtcaccaactcagaaacccttcttcattgacgtgtccctcactcactctcctctcttcactataaatcgccactcttcgtgttctccacttcaccaactccttcaaacttattaacactttccttagttcaatatggggaagcccttcttcactctctctctttctttccttagttcaatatggaacccgaccaccgcgttgagtccgaaggtggtcttattgaaacatggaactctcaacaccctgagctgcaatgcgccggtgtcactgtttccaaacgcaccctcaaccgcaacggcctccacttgccatcttactcaccttatcccccaaatgatcattgtcgttcaaggtgcgtaatattagtaagaagtatttatcagcttaacgtgataacaataatagtaatatgaaatatttattaaattttttataattaatctctgctagaaaattttgattaatcatttttagtagaatttgtttttctcaa

SEQ ID NO: 4484 - DNA, 665 bp, Artificial
  Mutations within GlyA3B4 introduced by GmGlyA3B4_T02TALE nuclease
gttcatgtacggttgcagatataaacgaagcatagcttatgtatgaggtgtaacaaaattggaaacaatagccatgcaaggtgaagaatgtcaccaactcagaaacccttcttcattgacgtgtccctcactcactctcctctcttcactataaatcgccactcttcgtgttctccacttcaccaactccttcaaacttattaacactttccttagttcaatatggggaagcccttcttcactctctctctttcttccctttgcttgctactcttgtcgagtgttgctattacctccagcaagttcaacgagtgccaactcaacaacctcaacgcgttggaacccgaccaccgcgttgagtccgaaggtggtcttattgaaacatggaactctcaacaccctgagctgcaatgcgccggtgtcactgtttccaaacgcaccctcaaccgcaacggcctccacttgccatcttactcaccttatccccaaatgatcattgtcgttcaaggtgcgtaatattagtaagaagtatttatcagcttaacgtgataacaataatagtaatatgaaatatttattaaatttttataattaatctctgctagaaaatttgattaatcattttagtagaatttgtttttctcaactaggtttttaaaacacca

SEQ ID NO: 4485 - DNA, 598 bp, Artificial
  Mutations within GlyA3B4 introduced by GmGlyA3B4_T02TALE nuclease
gttcatgtacggttgcagatataaacgaagcatagcttatgtatgaggtgtaacaaaattggaaacaatagccatgcaaggtgaagaatgtcaccaactcagaaacccttcttcattgacgtgtccctcactcactctcctctcttcactataaatcgccactcttcgtgttctccacttcaccaactccttcaaacttattaacactttccttagttcaatatgggggaagcccttcttcactccagcaagttcaacgagtgccaactcaacaacctcaacgcgttggaacccgaccaccgcgttgagtccgaaggtggtcttattgaacatggaactctcaacaccctgagctgcaatgcgccggtgtcactgtttccaaacgcaccctcaaccgcaacggcctccacttgccatcttactcaccttatccccaaaatgatcattgtcgttcaaggtgcgtaatattagtaagaagtatttatcagcttaacgtgataacaataatagtaatatgaaatatttattaaattttttataattaatctctgctagaaaatttgattaaatctttttagtagaatttgtttttctcaac

SEQ ID NO: 4486 - DNA, 659 bp, Artificial
  Mutations within GlyA3B4 introduced by GmGlyA3B4_T02TALE nuclease
gttcatgtacggttgcagatataaacgaagcatagcttatgtatgaggtgtaacaaaaattggaaacaatagccatgcaaggtgaagaatgtcaccaactcagaaaccccttcttcattgacgtgtccctcactcactctcctctcttcactataaatcgccactcttcgtgttctccacttcaccaactccttcaaacttattaacactttccttagttcaatatggggaagcccttcttcactctctctctttcttccctttgcttgctactcttgtcgagtgcatttgctattacctccagcaagttcaacgagtgccaactcaacaacctcaacgcgttggaacccgaccaccgcgttgagtccgaaggtggtcttattgaaacatggaactctcaacaccctgagctgcaatgcgccggtgtcactgtttccaaacgcaccctcaaccgcaacggcctccacttgccatcttactcaccttatccccaaatgatcattgtcgttcaaggtgcgtaatattagtgagagtatttatcagcttaacgtgataacaataatagtaatatgaaatatttattaaatttttataattaatctctgctagaaaatttgattaatcattttagtagaatttgtttttctcaactaggtttt

SEQ ID NO: 4487 - DNA, 437 bp, Artificial
  Mutations within GlyA3B4 introduced by GmGlyA3B4_T02TALE nuclease
gttcatgtacggttgcagatataaacgaagcatagcttatgtatgaggtgtaacaaaattggaaacaatagccatgcaaggtgaagaatgtcaccaactcagaaacccttcttcattgacgtgtccctcactcactctcctctcttcactataaatcgccactcttcgtgttctccacttcaccaaactccttcaaacttattaacactttccttagttcaatatggggaagcccttcttattgaaacatggaaactctcaacaccctgagctgcaatgcgccggtgtcactgtttccaaacgcaccctcaaccgcaacggcctccacttgccatcttactcaccttatccccaaaatgatcattgtcgttcaaggtgcgtaatattagtaagaagtattttatcagcttaacgtgataacaataaatagtaatatg

SEQ ID NO: 4488 - DNA, 658 bp, Artificial; identical to SEQ ID NO: 3245
  Mutations within GlyA3B4 introduced by GmGlyA3B4_T02TALE nuclease

SEQ ID NO: 4489 - DNA, 663 bp, Artificial; identical to SEQ ID NO: 2045
  Mutations within GlyA3B4 introduced by GmGlyA3B4_T02TALE nuclease

SEQ ID NO: 4490 - DNA, 664 bp, Artificial
  Mutations within GlyA3B4 introduced by GmGlyA3B4_T02TALE nuclease
gttcatgtacggttgcagatataaacgaagcatagcttatgtatgaggtgtaacaaaattggaaacaatagccatgcaaggtgaagaatgtcaccaactcagaaacccttcttcattgacgtgtccctcactcactctcctctcttcactataaatcgccactcttcgtgttctccacttcaccaactccttcaaacttattaacactttccttagttcaatatggggaagcccttcttcactctctctctttcttccctttgcttgctactcttgtcgagtgcatgctattacctccagcaagttcaacgagtgccaactcaacaacctcaacgcgttggaacccgaccaccgcgttgagtccgaaggtggtcttattgaaacatggaactctcaacaccctgagctgcaatgcgccggtgtcactgtttccaaacgcaccctcaaccgcaacggcctccacttgccatcttactcaccttatccccaaatgatcattgtcgttcaaggtgcgtaatattagtaagagtatttatcagcttaacgtgataacaatatagtaatatgaaatatttattaaatttttataattaatctctgctagaaaatttgattaatcattttagtagaatttgttttctcaactaggttttaaaacaccaca

SEQ ID NO: 4491 - DNA, 666 bp, Artificial
  Mutations within GlyA3B4 introduced by GmGlyA3B4_T02TALE nuclease
  misc_feature (531): n is a or c or t or g
gttcatgtacggttgcagatataaacgaagcatagcttatgtatgaggtgtaacaaaattggaaacaatagccatgcaaggtgaagaatgtcaccaactcagaaacccttcttcattgacgtgtccctcactcactctcctctcttcactataaatcgccactcttcgtgttctccacttcaccaactccttcaaacttattaacactttccttagttcaatatggggaagcccttcttcactctctctctttcttccctttgcttgctactcttgtcgagtgcatgctattacctccagcaagttcaacgagtgccaactcaacaacctcaacgcgttggaacccgaccaccgcgttgagtccgaaggtggtcttattgaaacatggaactctcaacaccctgagctgcaatgcgccggtgtcactgtttccaaacgcaccctcaaccgcaacggcctccacttgccatcttactcaccttatcccccaaatgatcatttcgttcaaggtgcgtaatattagtaagaagnatttatcagcttaacgtgataacaatatagtaatatgaaatatttattaaatttttataattaatctctgctagaaaatttgattaatcattttagtagaatttgttttctcaactaggtttttaaaacaccaca

SEQ ID NO: 4492 - DNA, 652 bp, Artificial
  Mutations within GlyA3B4 introduced by GmGlyA3B4_T02TALE nuclease
  misc_feature (42): n is a or c or t or g
gttcatgtacggttgcagatataaacgaagcatagcttatgnatgaggtgtaacaaaattggaaacaatagccatgcaaggtgaagaatgtcaccaactcagaaacccttcttcattgacgtgtccctcactcactctcctctcttcactataaatcgccactcttcgtgttctccacttcaccaactccttcaaacttattaacactttccttagttcaatatggggaagcccttcttcactctctctctttcttccctttgcttgctactcttgtcgagtgcatgctattacctccagcaagttcaacgagtgccaactcaacaacctcaacgcgttggaacccgaccaccgcgttgagtccgaaggtggtcttattgaaacatggaactctcaacaccctgagctgcaatgcgccggtgtcactgtttccaaacgcaccctcaaccgcaacggcctccacttgccatcttactcaccttatccccaaatgatcattgtcgttcaaggtgcgtaatattagtaagaagtatttatcagcttaacgtgataacaataatagtaatatgaaatatttattaaatttttataattaatctctgctagaaaatttgattaatcattttagtagaatttgtttttctcaactagg

SEQ ID NO: 4493 - DNA, 678 bp, Artificial
  Mutations within GlyA3B4 introduced by GmGlyA3B4_T02TALE nuclease
gttcatgtacggttgcagatataaacgaagcatagcttatgtatgaggtgtaacaaaattggaaacaatagccatgcaaggtgaagaatgtcaccaactcagaaacccttcttcattgacgtgtccctcactcactctcctctcttcactataaatcgccactcttcgtgttctccacttcaccaactccttcaaacttattaacactttccttagttcaatatggggaagcccttcttcactctctctctttcttccctttgcttgctactcttgtcgagttgctattacctccagcaagttcaacgagtgccaactcaacaacctcaacgcgttggaacccgaccaccgcgttgagtccgaaggtggtcttattgaaacatggaactctcaacaccctgagctgcaatgcgccggtgtcactgtttccaaacgcaccctcaaccgcaacggcctccacttgccatcttactcaccttatccccaaatgatcattgtcgttcaaggtggcataattattaagatagatgatttattcatccagtcattaaccggtgataaaccaataatagtaatatgaaaatatttattaaaatttttataattaatctctgctagaaaatttgattaatcattttagtagaatttgtttttctcaactaggtttttaaaacacca

SEQ ID NO: 4494 - DNA, 622 bp, Artificial
  Mutations within GlyA3B4 introduced by GmGlyA3B4_T02TALE nuclease
gttcatgtacggttgcagatataaacgaagcatagcttatgtatgaggtgtaacaaaattggaaacaatagccatgcaaggtgaagaatgtcaccaactcagaaaccccttcttcattgacgtgtccctcactcactctcctctcttcactataaatcgccactcttcgtgttctccacttcaccaactccttcaaacttattaacactttccttagttcaatatggggaagcccttcttcactctctctctttcttccctttgcttgctactcttgtcgagtgccaactcaacaacctcaacgcgttggaacccgaccaccgcgttgagtccgaaggtggtcttattgaaacatggaactctcaacaccctgagctgcaatgcgccggtgtcactgtttccaaacgcaccctcaaccgcaacggcctccacttgccatcttactcaccttatcccccaaatgatcattgtcgttcaaggtgcgtaatattagtaagaagtatttatcagcttaacgtgataacaataatagtaatatgaaatatttattaaattttttataattaatctctgctagaaaatttgattaatcatttttagtagaatttgtttttctcaacta

SEQ ID NO: 4495 - DNA, 617 bp, Artificial; identical to SEQ ID NO: 2637
  Mutations within GlyA3B4 introduced by GmGlyA3B4_T02TALE nuclease

SEQ ID NO: 4496 - DNA, 659 bp, Artificial
  Mutations within GlyA3B4 introduced by GmGlyA3B4_T02TALE nuclease
gttcatgtacggttgcagatataaacgaagcatagcttatgtatgaggtgtaacaaaattggaaacaatagccatgcaaggtgaagaatgtcaccaactcagaaaccccttcttcattgacgtgtccctcactcactctcctctcttcactataaatcgccactcttcgtgttctccacttcaccaactccttcaaacttattaacactttccttagttcaatatggggaagcccttcttcactctctctctttcttccctttgcttgctactcttgtcgagtgcactattacctccagcaagttcaacgagtgccaactcaacaacctcaacgcgttggaacccgaccaccgcgttgagtccgaaggtggtcttattgaaacatggaactctcaacaccctgagctgcaatgcgccggtgtcactgtttccaaacgcaccctcaaccgcaacggcctccacttgccatcttactcaccttatccccaaatgatcattgtcgttcaaggtgcgtaatattagtaagaagtatttatcagcttaacgtgataacaataatagtaatatgaaatatttattaaatttttataattaatctctgctagaaaatttgattaatcattttagtagaatttgtttttctcaactaggttttaaaa

SEQ ID NO: 4497 - DNA, 654 bp, Artificial; identical to SEQ ID NO: 2585
  Mutations within GlyA3B4 introduced by GmGlyA3B4_T02TALE nuclease

SEQ ID NO: 4498 - DNA, 665 bp, Artificial
  Mutations within GlyA3B4 introduced by GmGlyA3B4_T02TALE nuclease
gttcatgtacggttgcagatataaacgaagcatagcttatgtatgaggtgtaacaaaattggaaacaatagccatgcaaggtgaagaatgtcaccaactcagaaaccccttcttcattgacgtgtccctcactcactctcctctcttcactataaatcgccactcttcgtgttctccacttcaccaactccttcaaacttattaacactttccttagttcaatatggggaagcccttcttcactctctctctttcttccctttgcttgctactcttgtcgagtgcatctattacctccagcaagttcaacgagtgccaactcaacaacctcaacgcgttggaacccgaccaccgcgttgagtccgaaggtggtcttattgaaacatggaactctcaacaccctgagctgcaatgcgccggtgtcactgtttccaaacgcaccctcaaccgcaacggcctccacttgccatcttactcaccttatcccccaaatgatcattgtcgttcaaggtgcgtaatattagtaagaagtatttatcagcttaacgtgataacaataatagtaatatgaaatatttattaaatttttataattaatctctgctagaaaatttgattaatcattttagtagaatttgttttctcaactaggttttaaaacacca

SEQ ID NO: 4499 - DNA, 659 bp, Artificial
  Mutations within GlyA3B4 introduced by GmGlyA3B4_T02TALE nuclease
gttcatgtacggttgcagatataaacgaagcatagcttatgtatgaggtgtaacaaaattggaaacaatagccatgcaaggtgaagaatgtcaccaactcagaaacccttcttcattgacgtgtccctcactcactctcctctcttcactataaatcgccactcttcgtgttctccacttcaccaactccttcaaacttattaacactttccttagttcaatatggggaagcccttcttcactctctctctttcttccctttgcttgctactcttgtcgagtgctggctattacctccagcaagttcaacgagtgccaattcaacaacctcaacgcgttggaacccgaccaccgcgttgagtccgaaggtggtcttattgaaacatggaactctcaacaccctgagctgcaatgcgccggtgtcactgtttccaaacgcaccctcaaccgcaacggcctccacttgccatcttactcaccttatccccaaatgatcattgtcgttcaaggtgcgtaatattagtaagaagtatttatcagcttaacgtgataacaataatagtaatatgaaatatttattaaatttttataattaatctctgctagaaaatttgattaatcattttagtagaatttgttttctcaactaggttttaaaa

SEQ ID NO: 4500 - DNA, 660 bp, Artificial; identical to SEQ ID NO: 1783
  Mutations within GlyA3B4 introduced by GmGlyA3B4_T02TALE nuclease

SEQ ID NO: 4501 - DNA, 582 bp, Artificial
  Mutations within GlyA3B4 introduced by GmGlyA3B4_T02TALE nuclease
gttcatgtacggttgcagatataaacgaagcatagcttatgtatgaggtgtaacaaaattggaaacaatagccatgcaaggtgaagaatgtcaccaactcagaaacccttcttcattgacgtgtccctcactcactctcctctcttcactataaatcgccactcttcgtgttctccacttcaccaactccttcaaacttattaacactttccttagttcaatatggggaagcccttcttcactctctctctttcttccctttgcttgctactcttgtcgagtttacctccagcaagttcaacgagtgccaactcaacaacctcaacgcgttggaacccgaccaccgcgttgagtccgaaggtggtcttattgaaacatggaactctcaacaccctgagctgcaatgcgccggtgtcactgtttccaaacgcaccctcaaccgcaacggcctccacttgccatcttactcaccttatcccccaaatgatcattgtcgttcaaggtgcgtaatattagtaagaagtatttatcagcttaacgtgataacaataatagtaatatgaaatatttattaaatttttt

SEQ ID NO: 4502 - DNA, 662 bp, Artificial
  Mutations within GlyA3B4 introduced by GmGlyA3B4_T02TALE nuclease
gttcatgtacggttgcagatataaacgaagcatagcttatgtatgaggtgtaacaaaattggaaacaatagccatgcaaggtgaagaatgtcaccaactcagaaaccccttcttcattgacgtgtcccctcactcactctcctctcttcactataaaatcgccactcttcgtgttctccacttcaccaactccttcaaacttattaacactttccttagttcaatatgggggaagcccttcttcactctctctctttcttccctttgcttgctactcttgtcgagtgcatgctattacctccagcaagttcaacgagtgccaactcaacaacctcaacgcgttggaacccgaccacccgcgttgagtccgaaggtggtcttattgaaacatggaactctcaacaccctgagctgcaatgcgccggtgtcactgtttccaaacgcaccctcaaccgcaacggcctccacttgccatcttactcaccttatccccaaatgatcattgtcgttcaaggtgcgtaatattagtaagagtatttatcagcttaacgtgataacaataatagtaatatgaaatatttattaaatttttataattaatctctgctagaaaatttgattaatcattttagtagaatttgttttctcaactaggttttaaa

SEQ ID NO: 4503 - DNA, 722 bp, Artificial
  Mutations within GlyA3B4 introduced by GmGlyA3B4_T02TALE nuclease
gttcatgtacggttgcagatataaacgaagcatagcttatgtatgaggtgtaacaaaattggaaacaatagccatgcaaggtgaagaatgtcaccaactcagaaacccttcttcattgacgtgtccctcactcactctcctctcttcactataaatcgccactcttcgtgttctccacttcaccaactccttcaaacttattaacactttccttagttcaatatggggaagcccttcttcactctctctctttcttccctttgcttgctactcttgtcgagtgcatccagcggctgttgccggtgctgtgccaggcccacggcttgaccccccagcaggtggtggcccatcgctttgctattacctccagcaagttcaacgagtgccaactcaacaacctcaacgcgttggaacccgaccaccgcgttgagtccgaaggtggtcttattgaaacatggaactctcaacacctgagctgcaatgcgccggtgtcactgtttccaaacgcaccctcaaccgcaacggcctccacttgccatcttactcaccttatcccaaatgatcattgtcgttcaaggtgcgtaatattagtaagaagtatttatcagcttaacgtgataacaataatagtaatatgaaaatatttattaaaattttttataattaatctctgctagaaaaatttgattaatcatttttagtagaatttgtttttctcaact

SEQ ID NO: 4504 - DNA, 641 bp, Artificial
  Mutations within GlyA3B4 introduced by GmGlyA3B4_T02TALE nuclease
gttcatgtacggttgcagatataaacgaagcatagcttatgtatgaggtgtaacaaaattggaaacaatagccatgcaaggtgaagaatgtcaccaactcagaaacccttcttcattgacgtgtccctcactcactctcctctcttcactataaatcgccactcttcgtgttctccacttcaccaactccttcaaacttattaacactttccttagttcaatatggggaagcccttcttcactctctctctttcttccctttgcttgctactcttgtcgagtgctattacctccagcaagttcaacgagtgccaactcaacaacctcaacgcgttggaacccgaccaccgcgttgagtccgaaggtggtcttattgaaacatggaactctcaacaccctgagctgcaatgcgccggtgtcactgtttccaaacgcacccctcaaccgcaacggcctccacttgccatcttactcaccttatccccaaatgatcattgtcgttcaaggtgcgtaatattagtaagaagtatttatcagcttaacgtgatacaatatagtaatatgaaatatttattaaatttttataattaatctctgctagaaaatttgattaatcattttagtagaatttgttttctcaa

SEQ ID NO: 4505 - DNA, 603 bp, Artificial
  Mutations within GlyA3B4 introduced by GmGlyA3B4_T02TALE nuclease
gttcatgtacggttgcagatataaacgaagcatagcttatgtatgaggtgtaacaaaattggaaacaatagccatgcaaggtgaagaatgtcaccaactcagaaacccttcttcattgacgtgtcccttactcactctcctctcttcactataaatcgccactcttcgtgttctccacttcaccaactccttcaaacttattaacactttccttagttcaatatggggaagcccttcttcactctctctctttcttccctttgcttgctactcttgtcgagtgccaactcaacaacctcaacgcgttggaacccgaccaccgcgttgagtccgaaggtggtcttattgaaacatggaactctcaacaccctgagctgcaatgcgccggtgtcactgtttccaaacgcaccctcaaccgcaacggcctccacttgccatcttactcaccttatccccaaatgatcattgtcgttcaaggtgcgtaatattagtaagaagtatttatcagcttaacgtgataacaataatagtaatatgaaatatttattaaattttttataattaatctctgctagaaaatttgattaatcatttttagtagaa

SEQ ID NO: 4506 - DNA, 609 bp, Artificial; identical to SEQ ID NO: 2517
  Mutations within GlyA3B4 introduced by GmGlyA3B4_T02TALE nuclease

SEQ ID NO: 4507 - DNA, 424 bp, Artificial
  Mutations within GlyA3B4 introduced by GmGlyA3B4_T02TALE nuclease
gttcatgtacggttgcagatataaacgaagcatagcttatgtatgaggtgtaacaaaattggaaacaatagccatgcaaggtgaagaatgtcaccaactcagaaaccccttcttcattgacgtgtccctcactcactctcctctcttcactataaatcgccactcttcgtgttctccacttcaccaactccttcaaacttattaacactttccttagttcaatatggggaagcccttcttcactctctctctttcttccctttgcttgctactcttgtcgagtgcatctattacctccagcaagttcaacgagtgccaactcacaacctcaacgcgttggaacccgaccaccgcgttgagtccgaaggtggtcttattgaacatggaactctcaacaccctgagctgcaatgcgccggtgtcac

SEQ ID NO: 4508 - DNA, 594 bp, Artificial
  Mutations within GlyA3B4 introduced by GmGlyA3B4_T02TALE nuclease
  misc_feature (554): n is a or c or t or g
gttcatgtacggttgcagatataaacgaagcatagcttatgtatgaggtgtaacaaaattggaaacaatagccatgcaaggtgaagaatgtcaccaactcagaaacccttcttcattgacgtgtccctcactcactctcctctcttcactataaatcgccactcttcgtgttctccacttcaccaactccttcaaacttattaacactttccttagttcaatatggggaagcccttcttcactctctctctttcttccctttgcttgctactcttgtcacctccagcaagttcagcgagtgccaactcaacaacctcaacgcgttggaacccgaccaccgcgttgagtccgaaggtggtcttattgaaacatggaactctcaacaccctgagctgcaatgcgccggtgtcactgtttccaaacgcaccctcaaccgcaacggcctccacttgccatcttactcaccttatccccaaatgatcattgtcgttcaaggtgcgtaaatattagtaagaagtatttatcagcttaacgtgataacaataatagtaatntgaaatatttattaaattttttataattaatctctgctag

SEQ ID NO: 4509 - DNA, 689 bp, Artificial
  Mutations within GlyA3B4 introduced by GmGlyA3B4_T02TALE nuclease
gttcatgtacggttgcagatataaacgaagcatagcttatgtatgaggtgtaacaaaattggaaacaatagccatgcaaggtgaagaatgtcaccaactcagaaacccttcttcattgacgtgtccctcactcactctcctctcttcactataaatcgccactcttcgtgttctccacttcaccaactccttcaaacttattaacactttccttagttcaatatggggaagcccttcttcactctctctctttcttccctttgcttgctactcttgtcgagtgcatggtccagcggctgttgccggtgctgtgccaggcccacggcttgctattacctccagcaagttcaacgagtgccaactcaacaacctcaacgcgttggaacccgaccacgcgttgagtccgaaggtggtcttattgaaacatggaactctcaacaccctgagctgcaatgcgccggtgtcactgtttccaaacgcacctcaaccgcaacggcctccacttgccatcttactcaccttatccccaaatgatcattgtcgttcaaggtgcgtaatattagtaagaagtatttatcagcttaacgtgataacaataatagtaatatgaaatatttattaaattttttataattaatctctgctagaaaatttgattaatcatttttagtagaatttgtttttctcaa

SEQ ID NO: 4510 - DNA, 652 bp, Artificial
  Mutations within GlyA3B4 introduced by GmGlyA3B4_T02TALE nuclease
gttcatgtacggttgcagatataaacgaagcatagcttatgtatgaggtgtaacaaaattggaaacaatagccatgcaaggtgaagaatgtcaccaactcagaaacccttcttcattgacgtgtccctcactcactctcctctcttcactataaatcgccactcttcgtgttctccacttcaccaactccttcaaacttattaacactttccttagttcaatatggggaagcccttcttcactctctctctttcttccctttgcttgctactcttgtcgagtgcatctattacctccagcaagttcaacgagtgccaactcaacaacctcaacgcgttggaacccgaccaccgcgttgagtccgaaggtggtcttattgaaacatggaactctcaacaccctgagctgcaatgcgccggtgtcactgtttccaaacgcaccctcaaccgcaacggcctccacttgccatcttactcaccttatccccaaatgatcattgtcgttcaaggtgcgtaatattagtaagaagtatttatcagcttaacgtgataacaataatagtaatatgaaatatttattaaatttttataattaatctctgctagaaaatttgattaatcatttttagtagaatttgtttttctcaactagg

SEQ ID NO: 4511 - DNA, 651 bp, Artificial; identical to SEQ ID NO: 2803
  Mutations within GlyA3B4 introduced by GmGlyA3B4_T02TALE nuclease

SEQ ID NO: 4512 - DNA, 665 bp, Artificial
  Mutations within GlyA3B4 introduced by GmGlyA3B4_T02TALE nuclease
  misc_feature (532): n is a or c or t or g
gttcatgtacggttgcagatataaacgaagcatagcttatgtatgaggtgtaacaaaattggaaacaatagccatgcaaggtgaagaatgtcaccaactcagaaacccttcttcattgacgtgtccctcactcactctcctctcttcactataaatcgccactcttcgtgttctccacttcaccaactccttcaaacttattaacactttccttagttcaatatggggaagcccttcttcactctctctctttcttccctttgcttgctactcttgtcgagtgcatttgctattacctccagcaagttcaacgagtgccaactcaacaacctcaacgcgttggaacccgaccaccgcgttgagtccgaaggtggtcttattgaaacatggaactctcaacaccctgagctgcaatgcgccggtgtcactgtttccaaacgcaccctcaaccgcaacggcctccacttgccatcttactcaccttatccccaaatgatcattgtcgttcaaggtgcgtaatattagtaagagnatttatcagcttaacgtgataacaatatagtaatatgaaaatatttattaaatttttataattaatctctgctagaaaatttgattaatcattttagtagaatttgtttttctcaactaggttttaaacacca

SEQ ID NO: 4513 - DNA, 652 bp, Artificial
  Mutations within GlyA3B4 introduced by GmGlyA3B4_T02TALE nuclease
  misc_feature (242); (533): n is a or c or t or g
gttcatgtacggttgcagatataaacgaagcatagcttatgtatgaggtgtaacaaaattggaaacaatagccatgcaaggtgaagaatgtcaccaactcagaaacccttcttcattgacgtgtccctcactcactctcctctcttcactataaatcgccactcttcgtgttctccacttcaccaactccttcaaacttattaacactttccttagttcaatatggggaagcccttcttcanctctctctctttcttccctttgcttgctactcttgtcgagtgcattgctattacctccagcaagttcaacgagtgccaactcaacaacctcaacgcgttggaacccgaccaccgcgttgagtccgaaggtggtcttattgaaacatggaactctcaacaccctgagctgcaatgcgccggtgtcactgtttccaaacgcaccctcaaccgcaacggcctccacttgccatcttactcaccttatccccaaatgatcattgtcgttcaaggtgcgtaatattagtaagaagnatttatcagcttaacgtgatacaatatagtaatatgaaatatttattaaatttttataattaatctctgctagaaaatttgattaatcattttagtagaatttgtttttctcaactagg

SEQ ID NO: 4514 - DNA, 648 bp, Artificial
  Mutations within GlyA3B4 introduced by GmGlyA3B4_T02TALE nuclease
gttcatgtacggttgcagatataaacgaagcatagcttatgtatgaggtgtaacaaaattggaaacaatagccatgcaaggtgaagaatgtcaccaactcagaaacccttcttcattgacgtgtccctcactcactctcctctcttcactataaatcgccactcttcgtgttctccacttcaccaactccttcaaacttattaacactttccttagttcaatatggggaagcccttcttcactctctctctttcttccctttgctattacctccagcaagttcaacgagtgccaactcaacaacctcaacgcgttggaacccgaccaccgcgttgagtccgaaggtggtcttattgaaacatggaactctcaacaccctgagctgcaatgcgccggtgtcactgttttccaaaacgcaccctcaaccgcaacggcctccacttgccatcttactcaccttatccccaaatgatcattgtcgttcaaggtgcgtaatattagtaagaagtatttatcagcttaacgtgataacaataatagtaatatgaaatatttattaaattttttataattaatctctgctagaaaatttgattaatcatttttagtagaatttgttttttctcaactaggttttaaaacaccaca

SEQ ID NO: 4515 - DNA, 665 bp, Artificial
  Mutations within GlyA3B4 introduced by GmGlyA3B4_T02TALE nuclease
gttcatgtacggttgcagatataaacgaagcatagcttatgtatgaggtgtaacaaaattggaaacaatagccatgcaaggtgaagaatgtcaccaactcagaaacccttcttcattgacgtgtccctcactcactctcctctcttcactataaatcgccactcttcgtgttctccacttcaccaactccttcaaacttattaacactttccttagttcaatatggggaagcccttcttcactctctctctttcttccctttgcttgctactcttgtcgagtgcatctattacctccagcaagttcaacgagtgccaactcaacaacctcaacgcgttggaacccgaccaccgcgttgagtccgaaggtggtcttattgaaacatggaactctcaacaccctgagctgcaatgcgccggtgtcactgtttccaaacgcacccctcaaccgcaacggcctccacttgccatcttactcaccttatccccaaatgatcattgtcgttcaaggtgcgtaatattagtaagaagtatttatcagcttaacgtgataacaataatagtaatatgaaatatttattaaatttttataattaatctctgctagaaaatttgattaatcattttagtagaatttgttttctcaactaggtttttaaaacacca

SEQ ID NO: 4516 - DNA, 659 bp, Artificial
  Mutations within GlyA3B4 introduced by GmGlyA3B4_T02TALE nuclease
  misc_feature (507): n is a or c or t or g
gttcatgtacggttgcagatataaacgaagcatagcttatgtatgaggtgtaacaaaattggaaacaatagccatgcaaggtgaagaatgtcaccaactcagaaacccttcttcattgacgtgtccctcactcactctcctctcttcactataaatcgccactcttcgtgttctccacttcaccaactccttcaaacttattaacactttccttagttcaatatggggaagcccttcttcactctctctctttcttccctttgcttgctactcttgtcgagtgcattaccagcaagttcaacgagtgccaactcaacaacctcaacgcgttggaacccgaccaccgcgttgagtccgaaggtggtcttattgaaacatggaactctcaacaccctgagctgcaatgcgccggtgtcactgtttccaaacgcaccctcaaccgcaacggcctccacttgccatcttactcaccttatcccccaaatgatcattgtcgttcaaggtgcntaaatattagtaagaagtatttatcagcttaacgtgataacaataatagtaatatgaaatatttattaaattttttataattaatctctgctagaaaatttgattaatctttttagtagaattgttttttctcaactaggtttaaaacacca

SEQ ID NO: 4517 - DNA, 662 bp, Artificial; identical to SEQ ID NO: 2192
  Mutations within GlyA3B4 introduced by GmGlyA3B4_T02TALE nuclease

SEQ ID NO: 4518 - DNA, 667 bp, Artificial
  Mutations within GlyA3B4 introduced by GmGlyA3B4_T02TALE nuclease
gttcatgtacggttgcagatataaacgaagcatagcttatgtatgaggtgtaacaaaattggaaacaatagccatgcaaggtgaagaatgtcaccaactcagaaacccttcttcattgacgtgtccctcactcactctcctctcttcactataaatcgccactcttcgtgttctccacttcaccaactccttcaaacttattaacactttccttagttcaatatggggaagcccttcttcactctctctctttcttccctttgcttgctactcttgtcgagtgcatgctattacctccagcaagttcaacgagtgccaactcaacaacctcaacgcgttggaacccgaccaccgcgttgagtccgaaggtggtcttattgaaacatggaactctcaacaccctgagctgcaatgcgccggtgtcactgtttccaaacgcaccctcaaccgcaacggcctccacttgccatcttactcaccttatccccaaatgatcattgtcgttcaaggtgcgtaatattagtaagaagtatttatcagcttaacgtgatacaataatagtaatatgaaatatttattaaatttttataattaatctctgctagaaaatttgattaatcattttagtagaatttgtttttctcaactaggtttttaaaacaccaca

SEQ ID NO: 4519 - DNA, 652 bp, Artificial
  Mutations within GlyA3B4 introduced by GmGlyA3B4_T02TALE nuclease
gttcatgtacggttgcagatataaacgaagcatagcttatgtatgaggtgtaacaaaattggaaacaatagccatgcaaggtgaagaatgtcaccaactcagaaaccccttcttcattgacgtgtccctcactcactctcctctcttcactataaatcgccactcttcgtgttctccacttcaccaactccttcaaacttattaacactttccttagttcaatatggggaagcccttcttcactctctctctttcttccctttgcttgctactcttgtcgagtgcattattacctccagcaagttcaacgagtgccaactcaacaacctcaacgcgttggaacccgaccaccgcgttgagtccgaaggtggtcttattgaaacatggaactctcaacaccctgagctgcaatgcgccggtgtcactgtttccaaacgcaccctcaaccgcaacggcctccacttgccatcttactcaccttatcccccaaatgatcattgtcgttcaaggtgcgtaatattagtaagaagtatttatcagcttaacgtgataacaataatagtaatatgaaatatttattaaatttttataattaatctctgctagaaaatttgattaatcattttagtagaatttgtttttctcaactagg

SEQ ID NO: 4520 - DNA, 650 bp, Artificial
  Mutations within GlyA3B4 introduced by GmGlyA3B4_T02TALE nuclease
gttcatgtacggttgcagatataaacgaagcatagcttatgtatgaggtgtaacaaaattggaaacaatagccatgcaaggtgaagaatgtcacccaactcagaaacccttcttcattgacgtgtccctcactcactctcctctcttcactataaatcgccactcttcgtgttctccacttcaccaactccttcaaacttattaacactttccttagttcaatatgggggaaagcccttcttcactctctctctttcttccctttgcttgctactcttgtcgagtgcatgagacggtccagcggctgttgccggtgctgtgccaggcccacggctattacctccagcaagttcaacgagtgccaactcaacaacctcaacgcgttggaacccgaccaccgcgttgagtccgaaggtggtcttattgaaacatggaactctcaacaccctgagctgcaatgcgccggtgtcactgtttccaaacgcacctcaaccgcaacggcctccacttgccatcttactcaccttatccccaaatgaatcattgtcgttcaaggtgcgtaatattagtaagaagtatttatctagcattaactagtgattaacaataataagtaaatatgaaaatatttattaaaatttttaataatt

SEQ ID NO: 4521 - DNA, 642 bp, Artificial
  Mutations within GlyA3B4 introduced by GmGlyA3B4_T02TALE nuclease
gttcatgtacggttgcagatataaacgaagcatagcttatgtatgaggtgtaacaaaattggaaacaatagccatgcaaggtgaagaatgtcaccaactcagaaacccttcttcattgacgtgtccctcactcactctcctctcttcactataaatcgccactcttcgtgttctccacttcaccaactccttcaaacttattaacactttccttagttcaatatggggaagcccttcttcactctctctctttcttccctttgcttgctattacctccagcaagttcaacgagtgccaactcaacaacctcaacgcgttggaacccgaccaccgcgttgagtccgaaggtggtcttattgaaacatggaactctcaacacccctgagctgcaatgcgccggtgtcactgtttccaaacgcaccctcaaccgcaacggcctccacttgccatcttactcaccttatcccccaaatgatcattgtcgttcaaggtgcgtaatattagtaagaagtatttatcagcttaacgtgataacaataatagtaatatgaaatatttattaaattttttataaattaatctctgctagaaaatttgattaatcatttttagtagaatttgttttttctcaactaggtttt

SEQ ID NO: 4522 - DNA, 637 bp, Artificial
  Mutations within GlyA3B4 introduced by GmGlyA3B4_T02TALE nuclease
gttcatgtacggttgcagatataaacgaagcatagcttatgtatgaggtgtaacaaaaattggaaacaatagccatgcaaggtgaagaatgtcaccaactcagaaaccccttcttcattgacgtgtccctcactcactctcctctcttcactataaatcgccactcttcgtgttctccacttcaccaactccttcaaacttattaacactttccttagttcaatatggggaagcccttcttcactctctctctttcttccctttgcttgctactcttgtcgagtgcattattacctccagcaagttcaacgagtgccaactcaacaacctcaacgcgttggaacccgaccaccgcgttgagtccgaaggtggtcttattgaaacatggaactctcaacaccctgagctgcaatgcgccggtgtcactgtttccaaacgcaccctcaaccgcaacggcctccacttgccatcttactcaccttatccccaaatgatcattgtcgttcaaggtgcgtaatattagtaagaagtatttatcagcttaacgtgataacaataatagtaatatgaaatatttattaaatttttataattaatctctgctagaaaatttgattaatcattttagtagaatttg

SEQ ID NO: 4523 - DNA, 645 bp, Artificial
  Mutations within GlyA3B4 introduced by GmGlyA3B4_T02TALE nuclease
gttcatgtacggttgcagatataaacgaagcatagcttatgtatgaggtgtaacaaaattggaaacaatagccatgcaaggtgaagaatgtcaccaactcagaaacccttcttcattgacgtgtccctcactcactctcctctcttcactataaatcgccactcttcgtgttctccacttcaccaactccttcaaacttattaacactttccttagttcaatatggggaagcccttcttcactctctctctttcttccctttgcttgctactcttttgctattacctccagcaagttcaacgagtgccaactcaacaacctcaacgcgttggaacccgaccaccgcgttgagtccgaaggtggtcttattgaaacatggaactctcaacaccctgagctgcaatgcgccggtgtcactgtttccaaacgcaccctcaaccgcaacggcctccacttgccatcttactcaccttatccccaaatgatcattgtcgttcaaggtgcgtaaatattagtaagaagtatttatcagcttaacgtgataacaataatagtaatatgaaatatttattaaattttttataattaatctctgctagaaaatttggattaatctttttagtagaattgtttttctcaactagg

SEQ ID NO: 4524 - DNA, 661 bp, Artificial; identical to SEQ ID NO: 2610
  Mutations within GlyA3B4 introduced by GmGlyA3B4_T02TALE nuclease

SEQ ID NO: 4525 - DNA, 632 bp, Artificial; identical to SEQ ID NO: 1756
  Mutations within GlyA3B4 introduced by GmGlyA3B4_T02TALE nuclease

SEQ ID NO: 4526 - DNA, 616 bp, Artificial
  Mutations within GlyA3B4 introduced by GmGlyA3B4_T02TALE nuclease
gttcatgtacggttgcagatataaacgaagcatagcttatgtatgaggtgtaacaaaattggaaacaatagccatgcaaggtgaagaatgtcaccaactcagaaacccttcttcattgacgtgtccctcactcactctcctctcttcactataaatcgccactcttcgtgttctccacttcaccaactccttcaaacttattaacactttccttagttcaatatggggaagcccttcttcactctctctctttcttccctttgcttgctactcttgtcgagtgcattacctccagcaagttcaacgagtgccaactcaacaacctcaacgcgttggaacccgaccaccgcgttgagtccgaaggtggtcttattgaaacatggaactctcaacaccctgagctgcaatgcgccggtgtcactgtttccaacgcaccctcaaccgcaacggcctccacttgccatcttactcaccttatccccaaatgatcattgtcgttcaaggtgcgtaatattagtaagaagtatttatcagcttaacgtgataacaataatagtaatatgaaatatttattaaatttttataattaatctctgctagaaaatttgattaatca

SEQ ID NO: 4527 - DNA, 636 bp, Artificial; identical to SEQ ID NO: 3418
  Mutations within GlyA3B4 introduced by GmGlyA3B4_T02TALE nuclease

SEQ ID NO: 4528 - DNA, 603 bp, Artificial
  Mutations within GlyA3B4 introduced by GmGlyA3B4_T02TALE nuclease
gttcatgtacggttgcagatataaacgaagcatagcttatgtatgaggtgtaacaaaattggaaacaatagccatgcaaggtgaagaatgtcaccaactcagaaacccttcttcattgacgtgtccctcactcactctcctctcttcactataaatcgccactcttcgtgttctccacttcaccaactccttcaaacttattaacactttccttagttcaatatggggaagcccttcttcactctctctctttcttccctttgcttgctactcttgtcgagtgcatctcaacaacctcaacgcgttggaacccgaccaccgcgttgagtccgaaggtggtcttattgaaacatggaactctcaacaccctgagctgcaatgcgccggtgtcactgtttccaaacgcaccctcaaccgcaacggcctccacttgccatcttactcaccttatcccccaaatgatcattgtcgttcaaggtgcgtaatattagtaagaagtatttatcagcttaacgtgataacaataatagtaatatgaaatatttattaaattttttataattaatctctgctagaaaatttgattaatcatttttagtagaa

SEQ ID NO: 4529 - DNA, 666 bp, Artificial; identical to SEQ ID NO: 4074
  Mutations within GlyA3B4 introduced by GmGlyA3B4_T02TALE nuclease

SEQ ID NO: 4530 - DNA, 634 bp, Artificial
  Mutations within GlyA3B4 introduced by GmGlyA3B4_T02TALE nuclease
gttcatgtacggttgcagatataaacgaagcatagcttatgtatgaggtgtaacaaaattggaaacaatagccatgcaaggtgaagaatgtcaccaactcagaaaccccttcttcattgacgtgtccctcactcactctcttctcttcactataaatcgccactcttcgtgttctccacttcaccaactccttcaaacttattaacactttccttagttcaatatggggaagcccttcttcactctctctctttcttccctttgcttgctactcttgtcgagtgcatattacctccagcaagttcaacgagtgccaactcaacaacctcaacgcgttggaacccgaccaccgcgttgagtccgaaggtggtcttattgaaacatggaactctcaacaccctgagctgcaatgcgccggtgtcactgtttccaaacgcaccctcaaccgcaacggcctccacttgccatcttactcaccttatccccaaatgatcattgtcgttcaaggtgcgtaatattagtaagaagtatttatcagcttaacgtgataacaatatagtaatatgaaatatttattaaatttttataattaatctctgctagaaaatttgattaatcattttagtagaatttg

SEQ ID NO: 4531 - DNA, 634 bp, Artificial; identical to SEQ ID NO: 2905
  Mutations within GlyA3B4 introduced by GmGlyA3B4_T02TALE nuclease

SEQ ID NO: 4532 - DNA, 598 bp, Artificial; identical to SEQ ID NO: 3674
  Mutations within GlyA3B4 introduced by GmGlyA3B4_T02TALE nuclease

SEQ ID NO: 4533 - DNA, 647 bp, Artificial
  Mutations within GlyA3B4 introduced by GmGlyA3B4_T02TALE nuclease
gttcatgtacggttgcagatataaacgaagcatagcttatgtatgaggtgtaacaaaattggaaacaatagccatgcaaggtgaagaatgtcaccaactcagaaacccttcttcattgacgtgtccctcactcactctcctctcttcactataaatcgccactcttcgtgttctccacttcaccaactccttcaaacttattaacactttccttagttcaatatggggaagcccttcttcactctctctctttcttccctttgcttgctactcttgtcgagtctattacctccagcaagttcaacgagtgccaactcaacaacctcaacgcgttggaacccgaccaccgcgttgagtccgaaggtggtcttattgaaacatggaactctcaacaccctgagctgcaatgcgccggtgtcactgtttccaaacgcaccctcaaccgcaacggcctccacttgccatcttactcaccttatccccaaatgatcattgtcgttcaaggtgcgtaatattagtaagaagtatttatcagcttaacgtgataacaataatagtaatatgaaatatttattaaatttttataattaatctctgctagaaaatttgattaatcattttagtagaatttgtttttctcaactagg

SEQ ID NO: 4534 - DNA, 656 bp, Artificial
  Mutations within GlyA3B4 introduced by GmGlyA3B4_T02TALE nuclease
gttcatgtacggttgcagatataaacgaagcatagcttatgtatgaggtgtaacaaaattggaaacaatagccatgcaaggtgaagaatgtcaccaactcagaaacccttcttcattgacgtgtccctcactcactctcctctcttcactataaatcgccactcttcgtgttctccacttcaccaactccttcaaacttattaacactttccttagttcaatatggggaagcccttcttcactctctctctttcttccctttgcttgctactcttgtcgagtgcatttacctccagcaagttcaacgagtgccaactcaacaacctcaacgcgttggaacccgaccaccgcgttgagtccgaaggtggtcttattgaaacatggaactctcaacaccctgagctgcaatgcgccggtgtcactgtttccaaacgcaccctcaaccgcaacggcctccacttgccatcttactcaccttatccccaaatgatcattgtcgttcaaggtgcgtaatattagtaagaagtatttatcagcttaacgtgataacaataatagtaatatgaaatatttattaaatttttataattaatctctgctagaaaatttgattaatcattttagtagaatttgtttttctcaactaggttttaaaa

SEQ ID NO: 4535 - DNA, 536 bp, Artificial; identical to SEQ ID NO: 2556
  Mutations within GlyA3B4 introduced by GmGlyA3B4_T02TALE nuclease

SEQ ID NO: 4536 - DNA, 654 bp, Artificial
  Mutations within GlyA3B4 introduced by GmGlyA3B4_T02TALE nuclease
gttcatgtacggttgcagatataaacgaagcatagcttatgtatgaggtgtaacaaaattggaaacaatagccatgcaaggtgaagaatgtcaccaactcagaaaccccttcttcattgacgtgtccctcactcactctcctctcttcactataaatcgccactcttcgtgttctccacttcaccaactccttcaaacttattaacactttccttagttcaatatggggaagcccttcttcactctctctctttcttccctttgcttgctactcttgtcgagtgcgctattacctccagcaagttcacgagtgccaactcaacaacctcaacgcgttggaacccgaccaccgcgttgagtccgaaggtggtcttattgaaacatggaactctcaacaccctgagctgcaatgcgccggtgtcactgtttccaaacgcaccctcaaccgcaacggcctccacttgccatcttactcaccttatccccaaatgatcattgtcgttcaaggtgcgtaatattagtaagagtatttatcagcttaacgtgataacaatatagtaatatgaaatatttattaaatttttataattaatctctgctagaaaatttgattaatcattttagtagaatttgttttctcaactaggttttaaa

SEQ ID NO: 4537 - DNA, 667 bp, Artificial
  Mutations within GlyA3B4 introduced by GmGlyA3B4_T02TALE nuclease
  misc_feature (531): n is a or c or t or g
gttcatgtacggttgcagatataaacgaagcatagcttatgtatgaggtgtaacaaaattggaaacaatagccatgcaaggtgaagaatgtcaccaactcagaaaccccttcttcattgacgtgtccctcactcactctcctctcttcactataaatcgccactcttcgtgttctccacttcaccaactccttcaaacttattaacactttccttagttcaatatggggaagcccttcttcactctctctctttcttccctttgcttgctactcttgtcgagtgcatgctattacctccagcaagttcaacgagtgccaactcaacaacctcaacgcgttggaacccgaccaccgcgttgagtccgaaggtggtcttattgaaacatggaactctcaacaccctgagctgcaatgcgccggtgtcactgtttccaaacgcaccctcaaccgcaacggcctccacttgccatcttactcaccttatccccaaatgatcattgtcgttcaaggtgcgtaatattagtaagagnatttatcagcttaacgtgataacaatatagtaatatgaaatatttattaaatttttataattaatctctgctagaaaatttgattaatcattttagtagaatttgtttttctcaactaggtttttaaaacaccaca

SEQ ID NO: 4538 - DNA, 613 bp, Artificial
  Mutations within GlyA3B4 introduced by GmGlyA3B4_T02TALE nuclease
  misc_feature (46): n is a or c or t or g
gttcatgtacggttgcagatataaacgaagcatagcttatgtatgnggtgtaacaaaattggaaacaatagccatgcaaggtgaagaatgtcaccaactcagaaacccttcttcattgacgtgtccctcactcactctcctctcttcactataaatcgccactcttcgtgttctccacttcaccaactccttcaaacttattaacactttccttagttcaatatggggaagcccttcttcactctctctctttcttccctttgcttgctactcttgtcgagtgcatgctattacctccagcaagttcaacgagtgccaactcaacaacctcaacgcgttggaacccgaccaccgcgttgagtccgaaggtggtcttattgaaacatggaactctcaacaccctgagctgcaatgcgccggtgtcactgtttccaaacgcaccctcaaccgcaacggcctccacttgccatcttactcacctatccccaaatgatcatttcgttcaaggtgcgtaatattagtaagagtattatcagcttaacgtgatacaatatagtaatatgaaatatttattaaatttttataattaatctctgctagaaaatttgattaa

SEQ ID NO: 4539 - DNA, 561 bp, Artificial
  Mutations within GlyA3B4 introduced by GmGlyA3B4_T02TALE nuclease
  misc_feature (216): n is a or c or t or g
gttcatgtacggttgcagatataaacgaagcatagcttatgtatgaggtgtaacaaaattggaaacaatagccatgcaaggtgaagaatgtcaccaactcagaaacccttcttcattgacgtgtccctcactcactctcctctcttcactataaatcgccactcttcgtgttcttcacttcaccaactaaaaaaaaaaaaaaaaccttcaaacttnttaacctttccttagttcaatatggggaagcccttcttcactctctctctttcttccctttgctattacctccagcaagttcaacgagtgccaactcaacaacctcaacgcgttggaacccgaccaccgcgttgagtccgaaggtggtcttattgaaacatggaactctcaacacccctgagctgcaatgcgccggtgtcactgttttccaaacgcaccctcaaccgcaacggcctccacttgccatcttactcaccttatcccccaaatgatcattgtcgttcaaggtgcgttaatattagtaagaagtatttatcagcttaacgtgataacaataatagtaat

SEQ ID NO: 4540 - DNA, 545 bp, Artificial
  Mutations within GlyA3B4 introduced by GmGlyA3B4_T02TALE nuclease
gttcatgtacggttgcagatataaacgaagcatagcttatgtatgaggtgtaacaaaattggaaacaatagccatgcaaggtgaagaatgtcaccaactcagaaaccccttcttcattgacgtgtccctcactcactctcctctcttcactataaatcgccactcttcgtgttctccacttcaccaactccttcaaacttattaacactttccttagttcaatatggggaaagcccttcttcactctctctctttcttccctttacctccagcaagttcaacgagtgccaactcaacaacctcaacgcgttggaacccgaccaccgcgttgagtccgaaggtggtcttattgaaacatggaactctcaacaccctgagctgcaatgcgccggtgtcactgtttccaaacgcaccctcaaccgcaacggcctccacttgccatcttactcaccttatcccccaaatgatcattgtcgttcaaggtgcgtaatattagtaagaagtatttatcagcttaacgtgataacaataatagtaatatgaaa

SEQ ID NO: 4541 - DNA, 638 bp, Artificial
  Mutations within GlyA3B4 introduced by GmGlyA3B4_T02TALE nuclease
  misc_feature (46); (531): n is a or c or t or g
gttcatgtacggttgcagatataaacgaagcatagcttatgtatgnggtgtaacaaaattggaaacaatagccatgcaaggtgaagaatgtcaccaactcagaaaccccttcttcattgacgtgtccctcactcactctcctctcttcactataaatcgccactcttcgtgttctccacttcaccaactccttcaaacttattaacactttccttagttcaatatggggaagcccttcttcactctctctctttcttccctttgcttgctactcttgtcgagtgcatgctattacctccagcaagttcaacgagtgccaactcaacaacctcaacgcgttggaacccgaccaccgcgttgagtccgaaggtggtcttattgaaacatggaactctcaacaccctgagctgcaatgcgccggtgtcactgtttccaaacgcaccctcaaccgcaacggcctccacttgccatcttactcaccttatccccaaatgatcattgtcgttcaaggtgcgtaatattagtaagagnatttatcagcttaacgtgataacaataatagtaatatgaaaatatttattaaatttttataattaatctctgctagaaaatttgattaatcattttagtagaatttg

SEQ ID NO: 4542 - DNA, 658 bp, Artificial
  Mutations within GlyA3B4 introduced by GmGlyA3B4_T02TALE nuclease
gttcatgtacggttgcagatataaacgaagcatagcttatgtatgaggtgtaacaaaattggaaacaatagccatgcaaggtgaagaatgtcaccaactcagaaaccccttcttcattgacgtgtccctcactcactctcctctcttcactataaatcgccactcttcgtgttctccacttcaccaactccttcaaacttattaacactttccttagttcaatatgggggaagcccttcttcactctctctctttcttccctttgcttgctactcttgtcgagtgcatacctccagcaagttcaacgagtgccaactcaacaacctcaacgcgttggaacccgaccaccgcgttgagtccgaaggtggtcttattgaaacatggaactctcaacaccctgagctgcaatgcgccggtgtcactgtttccaaacgcaccctcaaccgcaacggcctccacttgccatcttactcaccttatccccaaatgatcattgtcgttcaaggtgcgtaatattagtaagaagtatttatcagcttaacgtgataacaataatagtaatatgaaatatttattaaatttttataattaatctctgctagaaaatttgattaatcatttttagtagaatttgtttttctcaactaggtttttaaaa

SEQ ID NO: 4543 - DNA, 662 bp, Artificial
  Mutations within GlyA3B4 introduced by GmGlyA3B4_T02TALE nuclease
gttcatgtacggttgcagatataaacgaagcatagcttatgtatgaggtgtaacaaaattggaaacaatagccatgcaaggtgaagaatgtcaccaactcagaaacccttcttcattgacgtgtccctcactcactctcctctcttcactataaatcgccactcttcgtgttctccacttcaccaactccttcaaacttattaacactttccttagttcaatatggggaagcccttcttcactctctctctttcttccctttgcttgctactcttgtcgagtgcatattacctccagcaagttcaacgagtgccaactcaacaacctcaacgcgttggaacccgaccaccgcgttgagtccgaaggtggtcttattgaaacatggaactctcaacaccctgagctgcaatgcgccggtgtcactgtttccaaacgcaccctcaaccgcaacggcctccacttgccatcttactcaccttatcccccaaatgatcattgtcgttcaaggtgcgtaatattagtaagaagtatttatcagcttaacgtgataacaataatagtaatatgaaatatttattaaatttttataattaatctctgctagaaaatttgattaatcattttagtagaatttgttttctcaactaggttttaaaacacca

SEQ ID NO: 4544 - DNA, 637 bp, Artificial
  Mutations within GlyA3B4 introduced by GmGlyA3B4_T02TALE nuclease
gttcatgtacggttgcagatataaacgaagcatagcttatgtatgaggtgtaacaaaattggaaacaatagccatgcaaggtgaagaatgtcaccaactcagaaacccttcttcattgacgtgtccctcactcactctcctctcttcactataaatcgccactcttcgtgttctccacttcaccaactccttcaaacttattaacactttccttagttcaatatggggaagcccttcttcactctctctctttcttccctttgcttgctactcttgtcgagttcaacgagtgccaactcaacaacctcaacgcgttggaacccgaccaccgcgttgagtccgaaggtggtcttattgaaacatggaactctcaacacccctgagctgcaatgcgccggtgtcactgtttccaaacgcaccctcaaccgcaacggcctccacttgccatcttactcaccttatccccaaatgatcattgtcgttcaaggtgcgtaatattagtaagaagtatttatcagcttaacgtgataacaataatagtaatatgaaatatttattaaattttttataattaatctctgctagaaaatttgattaatcatttttagtagaatttgttttttctcaactaggtttt

SEQ ID NO: 4545 - DNA, 655 bp, Artificial
  Mutations within GlyA3B4 introduced by GmGlyA3B4_T02TALE nuclease
gttcatgtacggttgcagatataaacgaagcatagcttatgtatgaggtgtaacaaaattggaaacaatagccatgcaaggtgaagaatgtcaccaactcagaaacccttcttcattgacgtgtccctcactcactctcctctcttcactataaatcgccactcttcgtgttctccacttcaccaactccttcaaacttattaacactttccttagttcaatatggggaagcccttcttcactctctctctttcttccctttgcttgctactcttgtcgagtgcatggtgctgtgccaggcccacggcttgaccccccagcaggtggtggccatcgccagcaatggcggtggcaagcaggcgctggagacggtcctattacctccagcaagttcaacgagtgccaactcaacaacctcaacgcgttggaacccgaccaccgcgttgagtccgaaggtggtcttattgaaacatggaactctcaacaccctgagctgcaatgcgccggtgtcactgtttccaaacgcaccctcaaccgcaacggcctccacttgccatcttactcaccttatccccaaatgatcattgtcgttcaaggtgcgtaatattagtaagaagtatttatcgcttaacgtgataacaataatagtaatatg

SEQ ID NO: 4546 - DNA, 635 bp, Artificial
  Mutations within GlyA3B4 introduced by GmGlyA3B4_T02TALE nuclease
gttcatgtacggttgcagatataaacgaagcatagcttatgtatgaggtgtaacaaaaattggaaacaatagccatgcaaggtgaagaatgtcaccaactcagaaacccttcttcattgacgtgtccctcactcactctcctctcttcactataaatcgccactcttcgtgttctccacttcaccaactccttcaaacttattaacactttccttagttcaatatggggaagcccttcttcactctctctctttcttccctttgcttgctactcttgtcgagtgcatattacctccagcaagttcaacgagtgccaactcaacaacctcaacgcgttggaacccgaccaccgcgttgagtccgaaggtggtcttattgaaacatggaactctcaacaccctgagctgcaatgcgccggtgtcactgtttccaaacgcaccctcaaccgcaacggcctccacttgccatcttactcaccttatcccccaaatgatcattgtcgttcaaggtgcgtaatattagtaagaagtatttatcagcttaacgtgataacaatatagtaatatgaaatatttattaaatttttataattaatctctgctagaaaatttgattaatcattttagtagaatttg

SEQ ID NO: 4547 - DNA, 634 bp, Artificial
  Mutations within GlyA3B4 introduced by GmGlyA3B4_T02TALE nuclease
gttcatgtacggttgcagatataaacgaagcatagcttatgtatgaggtgtaacaaaaattggaaacaatagccatgcaaggtgaagaatgtcaccaactcagaaacccttcttcattgacgtgtccctcactcactctcctctcttcactataaatcgccactcttcgtgttctccacttcaccaactccttcaaacttattaacactttccttagttcaatatggggaagcccttcttcactctctctctttcttccctttgcttgctactcttgtcgagtgcgctattacctccagcaagttcaacgagtgccaactcaacaacctcaacgcgttggaacccgaccaccgcgttgagtccgaaggtggtcttattgaaacatggaactctcaacaccctgagctgcaatgcgccggtgtcactgtttccaaacgcaccctcaaccgcaacggcctccacttgccatcttactcaccttatccccaaatgatcattgtcgttcaaggtgcgtaatattagtaagagtatttatcagcttaacgtgataacaatatagtaatatgaaatatttattaaatttttataattaatctctgctagaaaatttgattaatcattttagtagaatttg

SEQ ID NO: 4548 - DNA, 646 bp, Artificial; identical to SEQ ID NO: 2415
  Mutations within GlyA3B4 introduced by GmGlyA3B4_T02TALE nuclease

SEQ ID NO: 4549 - DNA, 641 bp, Artificial; identical to SEQ ID NO: 3350
  Mutations within GlyA3B4 introduced by GmGlyA3B4_T02TALE nuclease

SEQ ID NO: 4550 - DNA, 641 bp, Artificial
  Mutations within GlyA3B4 introduced by GmGlyA3B4_T02TALE nuclease
gttcatgtacggttgcagatataaacgaagcatagcttatgtatgaggtgtaacaaaattggaaacaatagccatgcaaggtgaagaatgtcaccaactcagaaacccttcttcattgacgtgtccctcactcactctcctctcttcactataaatcgccactcttcgtgttctccacttcaccaactccttcaaacttattaacactttccttagttcaatatggggaagcccttcttcactctctctctttcttccctttgcttgctattacctccagcaagttcaacgagtgccaactcaacaacctcaacgcgttggaacccgaccaccgcgttgagtccgaaggtggtcttattgaacatggaactctcaacaccctgagctgcaatgcgccgggtgtcactgtttccaaacgcaccctcaaccgcaacggcctccacttgccatcttactcaccttatcccccaaatgatcattgtcgttcaaggtgcgtaatattagtaagaagtatttatcagctttaacgtgataacaataatagtaatatgaaatatttattaaattttttataattaatctctgctagaaaatttgattaatcatttttagtagaatttgttttttctcaactaggtttt

SEQ ID NO: 4551 - DNA, 710 bp, Artificial
  Mutations within GlyA3B4 introduced by GmGlyA3B4_T02TALE nuclease
gttcatgtacggttgcagatataaacgaagcatagcttatgtatgaggtgtaacaaaattggaaacaatagccatgcaaggtgaagaatgtcaccaactcagaaacccttcttcattgacgtgtccctcactcactctcctctcttcactataaatcgccactcttcgtgttctccacttcaccaactccttcaaacttattaacactttccttagttcaatatggggaagcccttcttcactctctctctttcttccctttgcttgctactcttgtcgagtgcaaccacctgctggggggtcaagccgtgggcctggcacagcaccggcaacagccgctggaccgtctccagcgcctgcttttgctattacctccagcaagttcaacgagtgccaactcaacaacctcaacgcgttggaacccgaccaccgcgttgagtccgaaggtgtcttattgaacatggaactctcaacacctgagctgcaatgcgccggtgtcactgtttccaaacgcaccctcaaccgcaacggcctccacttgccatcttactcaccttatcccaaatgatcattgtcgttcaaggtgcgtaatattagtaagaagtatttatcagcttaacgtgataacaataatagtaatatgaaatatttattaaattttttataattaatctctgctagaaaaatttgattaatcatttttagtagaa

SEQ ID NO: 4552 - DNA, 590 bp, Artificial
  Mutations within GlyA3B4 introduced by GmGlyA3B4_T02TALE nuclease
gttcatgtacggttgcagatataaacgaagcatagcttatgtatgaggtgtaacaaaattggaaacaatagccatgcaaggtgaagaatgtcaccaactcagaaacccttcttcattgacgtgtccctcactcactctcctctcttcactataaatcgccactcttcgtgttctccacttcaccaactccttcaaacttattaacactttccttagttcaatatggggaagcccttcttcactctctctctttcttccctttgcttgctactcaacgcgttggaacccgaccaccgcgttgagtccgaaggtggtcttattgaaacatggaactctcaacaccctgagctgcaatgcgccggtgtcactgtttccaaacgcaccctcaaccgcaacggcctccacttgccatcttactcaccttatccccaaatgatcattgtcgttcaaggtgcgtaatattagtaagaagtatttatcagcttaacgtgataacaatatagtaatatgaaatatttattaaattttttatattaatctctgctagaaaatttgattaatcatttttagtagaatttgtttttctcaac

SEQ ID NO: 4553 - DNA, 604 bp, Artificial
  Mutations within GlyA3B4 introduced by GmGlyA3B4_T02TALE nuclease
gttcatgtacggttgcagatataaacgaagcatagcttatgtatgaggtgtaacaaaattggaaacaatagccatgcaaggtgaagaatgtcaccaactcagaaacccttcttcattgacgtgtccctcactcactctcctctcttcactataaatcgccactcttcgtgttctccacttcaccaactccttcaaacttattaacactttccttagttcaatatggggaagcccttcttcactctctctctttcttccctttgcttgctactcttgtcgagtgcattgctattacctccagcaagttcaacgagtgccaactcaacaacctcaacgcgttggaacccgaccaccgcgttgagtccgaaggtggtcttattgaaacatggaactctcaacaccctgagctgcaatgcgccggtgtcactgtttccaaacgcaccctcaaccgcaacggcctccacttgccatcttactcaccttatccccaaaatgatcatttcgttcaaggtgcgtaatattagtaagagtatttatcagcttaacgtgatacaatatagtaatatgaaaatatttattaaatttttataataatctctgctag

SEQ ID NO: 4554 - DNA, 666 bp, Artificial; identical to SEQ ID NO: 4074
  Mutations within GlyA3B4 introduced by GmGlyA3B4_T02TALE nuclease

SEQ ID NO: 4555 - DNA, 693 bp, Artificial
  Mutations within GlyA3B4 introduced by GmGlyA3B4_T02TALE nuclease
gttcatgtacggttgcagatataaacgaagcatagcttatgtatgaggtgtaacaaaattggaaacaatagccatgcaaggtgaagaatgtcaccaactcagaaacccttcttcattgacgtgtccctcactcactctcctctcttcactataaatcgccactcttcgtgttctccacttcaccaactccttcaaacttattaacacttttccttagttcaatatggggaagcccttcttcactctctctctttcttccctttgcttgctactcttgtcgagtgcatgtggcaagcaggcgctggagacggtccagcggctgttgccggtgctgtgccaggcccacggcttgaccccggagcaggtggtgggagagttgagaggtcaagccgaggcgaaggtggtcttattgaaacatggactctcaacaccctgagctgcaatgcgccggtgtcactgtttccaaacgcaccctcaaccgcaacggcctccacttgccatcttactcaccttatccccaaatgatcattgtcgttcaaggtgcgtaatattagtaagaagtatttatcagcttaacgtgatacaataatagtaatatgaaatatttattaaatttttataattaatctctgctagaaaatttgattaatcatttttagtagaatttgtttttctcaactaggttttaaaaca

SEQ ID NO: 4556 - DNA, 607 bp, Artificial
  Mutations within GlyA3B4 introduced by GmGlyA3B4_T02TALE nuclease
gttcatgtacggttgcagatataaacgaagcatagcttatgtatgaggtgtaacaaaattggaaacaatagccatgcaaggtgaagaatgtcaccaactcagaaacccttcttcattgacgtgtccctcactcactctcctctcttcactataaatcgccactcttcgtgttctccacttcaccaactccttcaaacttattaacactttccttagttcaatatgggggaagcccttcttcactctctctctttcaacgagtgccaactcaacaacctcaacgcgttggaacccgaccaccgcgttgagtccgaaggtggtcttattgaaacatggaactctcaacaccctgagctgcaatgcgccggtgtcactgtttccaaacgcaccctcaaccgcaacggcctccacttgccatcttactcaccttatcccccaaatgatcattgtcgttcaaggtgcgtaatattagtaagaagtatttatcagcttaacgtgataacaataatagtaatatgaaatatttattaattttttataatttaatctctgctagaaaatttgattaatcatttttagtagaatttgtttttctcaactaggtttt

SEQ ID NO: 4557 - DNA, 513 bp, Artificial
  Mutations within GlyA3B4 introduced by GmGlyA3B4_T02TALE nuclease
gttcatgtacggttgcagatataaacgaagcatagcttatgtatgaggtgtaacaaaattggaaacaatagccatgcaaggtgaagaatgtcaccaactcagaaacccttcttcattgacgtgtccctcactcactctcctctcttcactataaatcgccactcttcgtgttctccacttcaccaactccttcaaacttattaacactttccttagttcaatatgggggaagcccttcttcactctctctctttcttccctttgcttgctactcttgtcgagtgcatctattacctccagcaagttcaacgagtgccaactcaacaacctcaacgcgttggaacccgaccaccgcgttgagtccgaaggtggtcttattgaaacatggaactctcaacacctgagctgcaatgcgccggtgtcactgtttccaaacgcaccctcaaccgcaacggcctccacttgccatcttactcaccttatcccccaaagatcattgtcgttcaaggtgcg

SEQ ID NO: 4558 - DNA, 634 bp, Artificial
  Mutations within GlyA3B4 introduced by GmGlyA3B4_T02TALE nuclease
gttcatgtacggttgcagatataaacgaagcatagcttatgtatgaggtgtaacaaaattggaaacaatagccatgcaaggtgaagaatgtcaccaactcagaaacccttcttcattgacgtgtccctcactcactctcctctcttcactataaatcgccactcttcgtgttctccacttcaccaactccttcaaacttattaacactttccttagttcaatatggggaagcccttcttcactctctctctttcttccctttgcttgctactctaaagtatatatgctattacctccagcaagttcaacgagtgccaactcaacaacctcaacgcgttggaacccgaccaccgcgttgagtccgaaggtggtcttattgaaacatggaactctcaacaccctgagctgcaatgcgccggtgtcactgtttccaaacgcaccctcaaccgcaacggcctccacttgccatcttactcaccttatccccaaatgatcattgtcgttcaaggtgcgtaatattagtaagagtatttatcagcttaacgtgataacaatatagtaatatgaaatatttattaaatttttataattaatctctgctagaaaatttgattaatcattttagtagaatttg

SEQ ID NO: 4559 - DNA, 667 bp, Artificial
  Mutations within GlyA3B4 introduced by GmGlyA3B4_T02TALE nuclease
gttcatgtacggttgcagatataaacgaagcatagcttatgtatgaggtgtaacaaaattggaaacaatagccatgcaaggtgaagaatgtcaccaactcagaaacccttcttcattgacgtgtccctcactcactctcctctcttcactataaaatcgccactcttcgtgttctccacttcaccaactccttcaaacttattaacactttccttagttcaatatggggaagcccttcttcactctctctctttcttccctttgcttgctactcttgtcgagtgcatctattacctccagcaagttcaacgagtgccaactcaacaacctcaacgcgttggaacccgaccaccgcgttgagtccgaaggtggtcttattgaaacatggaactctcaacaccctgagctgcaatgcgccggtgtcactgtttccaaacgcaccctcaaccgcaacggcctccacttgccatcttactcaccttatccccaaatgatcattgtcgttcaaggtgcgtaatattagtaagaagtatttatcagcttaacgtgataacaataatagtaatatgaaaatatttattaaaatttttataattaatctctgctagaaaatttgattaatcattttagtagaatttgtttttctcaactaggttttaaaacacca

SEQ ID NO: 4560 - DNA, 667 bp, Artificial
  Mutations within GlyA3B4 introduced by GmGlyA3B4_T02TALE nuclease
gttcatgtacggttgcagatataaacgaagcatagcttatgtatgaggtgtaacaaaattggaaacaatagccatgcaaggtgaagaatgtcaccaactcagaaacccttcttcattgacgtgtccctcactcactctcctctcttcactataaatcgccactcttcgtgttctccacttcaccaactccttcaaacttattaacactttccttagttcaatatggggaagcccttcttcactctctctctttcttccctttgcttgctactcttgtcgagtgcatttgctattacctccagcaagttcaacgagtgccaactcaacaacctcaacgcgttggaacccgaccaccgcgttgagtccgaaggtggtcttattgaaacatggaactctcaacaccctgagctgcaatgcgccggtgtcactgtttccaaacgcaccctcaaccgcaacggcctccacttgccatcttactcaccttatccccaaatgatcattgtcgttcaaggtgcgtaatattagtaagagtatttatcagcttaacgtgataacaataatagtaatatgaaatatttattaaatttttataattaatctctgctagaaaatttgattaatcattttagtagaatttgtttttctcaactaggtttttaaaacacca

SEQ ID NO: 4561 - DNA, 569 bp, Artificial
  Mutations within GlyA3B4 introduced by GmGlyA3B4_T02TALE nuclease
gttcatgtacggttgcagatataaacgaagcatagcttatgtatgaggtgtaacaaaattggaaacaatagccatgcaaggtgaagaatgtcaccaactcagaaacccttcttcattgacgtgtccctcactcactctcctctcttcactataaatcgccactcttcgtgttctccacttcaccaactccttcaaacttattaacactttccttagttcaatatggggaagcccttcttcactctctctctttcttccctttgctattacctccagcaagttcaacgagtgccaactcaacaacctcaacgcgttggaacccgaccaccgcgttgagtccgaaggtggtcttattgaaacatggaactctcaacacccctgagctgcaatgcgccggtgtcactgtttccaaacgcaccctcaaccgcaacggcctccacttgccatcttactcaccttatccccaaatgatcattgtcgttcaaggtgcgtaatattagtaagaagtatttatcagctttaacgtgataacaataatagtaatatgaaatatttattaaattttttat

SEQ ID NO: 4562 - DNA, 609 bp, Artificial
  Mutations within GlyA3B4 introduced by GmGlyA3B4_T02TALE nuclease
gttcatgtacggttgcagatataaacgaagcatagcttatgtatgaggtgtaacaaaattggaaacaatagccatgcaaggtgaagaatgtcaccaactcagaaacccttcttcattgacgtgtccctcactcactctcctctcttcactataaatcgccactcttcgtgttctccacttcaccaactccttcaaacttattaacactttccttagttcaatatggggaagcccttcttcactctctctctttcttccctttgcttgctactcttgtcgagtgcatgctccagcgcctgcttgccgccatcgtggccattgccggtgctgtgcccaggcccacggcttgaccccccagcaggtggtggccattacctccagcaagttcaacgagtgccaactcaacaacctcacgcgttggaacccgaccaccgcgttgagtccgaaggtggtcttattgaaacatggaactctcaacaccctgagctgcaatgcgccggtgtcactgtttccaaacgcaccctcaaccgcaacggcctccacttgccatcttactcaccttatccccaaatgatcattgtcgttcaaggtgcgtaatattagtaagaa

SEQ ID NO: 4563 - DNA, 682 bp, Artificial
  Mutations within GlyA3B4 introduced by GmGlyA3B4_T02TALE nuclease
gttcatgtacggttgcagatataaacgaagcatagcttatgtatgaggtgtaacaaaattggaaacaatagccatgcaaggtgaagaatgtcaccaactcagaaacccttcttcattgacgtgtccctcactcactctcctctcttcactataaatcgccactcttcgtgttctccacttcaccaactccttcaaacttattaacactttccttagttcaatatggggaagcccttcttcactctctctctttcttccctttgcttgctactcttgtcgagtgcatatcctccagcaagttcaaacgatgatgccaagtccatctaacaaacccacttccaaacgcgtttgggaaaccccgaccaccggcgttgagtccgaaggtggtcttattgaaacatggaactctcaacaccctgagctgcaatgcgccggtgtcactgtttccaaacgcaccctcaaccgcaacggcctccacttgccatcttactcaccttatcccccaaatgatcattgtcgttcaaggtgcgtaatattagtaagaagtatttatcagcttaacgtgatacaataatagtaatatgaaatatttattaaatttttataattaatctctgctagaaaatttgattaatcatttttagtagaatttgtttttctcaactaggtttttaaaacacca

SEQ ID NO: 4564 - DNA, 526 bp, Artificial
  Mutations within GlyA3B4 introduced by GmGlyA3B4_T02TALE nuclease
gttcatgtacggttgcagatataaacgaagcatagcttatgtatgaggtgtaacaaaattggaaacaatagccatgcaaggtgaagaatgtcaccaactcagaaacccttcttcattgacgtgtccctcactcactctcctctcttcactataaatcgccactcttcgtgttctccacttcaacaacctcaacgcgttggaacccgaccaccgcgttgagtccgaaggtggtcttattgaaacatggaactctcaacaccctgagctgcaatgcgccggtgtcactgtttccaaacgcaccctcaaccgcaacggcctccacttgccatcttactcaccttatccccaaatgatcattgtcgttcaaggtgcgtaatattagtaagaagtattttatcagcttaacgtgataacaataatagtaatatgaaatatttattaaattttttataattaatctctgctagaaaatttgattaatcattttttagtagaatttgtttttctcaactaggttttaaacacc

SEQ ID NO: 4565 - DNA, 623 bp, Artificial
  Mutations within GlyA3B4 introduced by GmGlyA3B4_T02TALE nuclease
  misc_feature (533): n is a or c or t or g
gttcatgtacggttgcagatataaacgaagcatagcttatgtatgaggtgtaacaaaaattggaaacaatagccatgcaaggtgaagaatgtcaccaactcagaaaccccttcttcattgacgtgtccctcactcactctcctctcttcactataaaatcgccactcttcgtgttctccacttcaccaactccttcaaacttattaacactttccttagttcaatatggggaagcccttcttcactctctctctttcttccctttgcttgctactcttgtcgagtgcatgctattacctccagcaagttcaacgagtgccaactcaacaacctcaacgcgttggaacccgaccaccgcgttgagtccgaaggtggtcttattgaaacatggaactctcaacaccctgagctgcaatgcgccggtgtcactgtttccaaacgcaccctcaaccgcaacggcctccacttgccatcttactcaccttatccccaaatgatcattgtcgttcaaggtgcgtaatattagtaagagnatttatcagcttaacgtgatacaataatagtaatatgaaatatttattaaatttttataattaatctctgctagaaaatttgattaatca

SEQ ID NO: 4566 - DNA, 556 bp, Artificial
  Mutations within GlyA3B4 introduced by GmGlyA3B4_T02TALE nuclease
gttcatgtacggttgcagatataaacgaagcatagcttatgtatgaggtgtaacaaaattggaaacaatagccatgcaaggtgaagaatgtcaccaactcagaaacccttcttcattgacgtgtccctcactcactctcctctcttcactataaatcgccactcttcgtgttctccacttcaccaactccttcaaacttattaacactttccttagttcaatatggggaagccgaccaccgcaacgcgttggaacccgaccaccgcgttgagtccgaaggtggtcttattgaaacatggaactctcaacaccctgagctgcaatgcgccggtgtcactgtttccaaacgcaccctcaaccgcaacggcctccacttgccatcttactcaccttatccccaaatgatcattgtcgttcaaggtgcgtaatattagtaagaagtatttatcagcttaacgtgataacaataatagtaatatgaaatatttattaaattttttataattaatctctgctagaaaattgattaatcattttagtagaatttgtttttctc

SEQ ID NO: 4567 - DNA, 641 bp, Artificial
  Mutations within GlyA3B4 introduced by GmGlyA3B4_T02TALE nuclease
gttcatgtacggttgcagatataaacgaagcatagcttatgtatgaggtgtaacaaaaattggaaacaatagccatgcaaggtgaagaatgtcaccaactcagaaacccttcttcattgacgtgtccctcactcactctcctctcttcactataaatcgccactcttcgtgttctccacttcaccaactccttcaaacttattaacactttccttagttcaatatggggaagcccttcttcactctctctctttcttccctttgcttgctactcttgtcgagtgcatgcctccagcaagttcaacgagtgccaactcaacaacctcaacgcgttggaacccgaccaccgcgttgagtccgaaggtggtcttattgaaacatggaactctcaacaccctgagctgcaatgcgccggtgtcactgtttccaaacgcaccctcaaccgcaacggcctccacttgccatcttactcaccttatccccaaatgatcattgtcgttcaaggtgcgtaatattagtaagaagtatttatcagcttaacgtgataacaatatagtaatatgaaatatttattaaatttttataattaatctctgctagaaaatttgattaatcattttagtagaatttgtttttctcaa

SEQ ID NO: 4568 - DNA, 636 bp, Artificial
  Mutations within GlyA3B4 introduced by GmGlyA3B4_T02TALE nuclease
gttcatgtacggttgcagatataaacgaagcatagcttatgtatgaggtgtaacaaaattggaaacaatagccatgcaaggtgaagaatgtcaccaactcagaaaccccttcttcattgacgtgtccctcactcactctcctctcttcactataaatcgccactcttcgtgttctccacttcaccaactccttcaaacttattaacactttccttagttcaatatggggaagcccttcttcactctctctctttcttccctttgcttgctactcttgtcgagtgcattattacctccagcaagttcaacgagtgccaactcaacaacctcaacgcgttggaacccgaccaccgcgttgagtccgaaggtggtcttattgaaacatggaactctcaacaccctgagctgcaatgcgccggtgtcactgtttccaaacgcaccctcaaccgcaacggcctccacttgccatcttactcaccttatccccaaatgatcattgtcgttcaaggtgcgtaatattagtaagaagtatttatcagcttaacgtgataacaataatagtaatatgaaatatttattaaatttttataattaatctctgctagaaaatttgattaatcattttagtagaatttg

SEQ ID NO: 4569 - DNA, 655 bp, Artificial
  Mutations within GlyA3B4 introduced by GmGlyA3B4_T02TALE nuclease
gttcatgtacggttgcagatataaacgaagcatagcttatgtatgaggtgtaacaaaattggaaacaatagccatgcaaggtgaagaatgtcaccaactcagaaacccttcttcattgacgtgtccctcactcactctcctctcttcactataaatcgccactcttcgtgttctccacttcaccaaactccttcaaacttattaacactttccttagttcaatatggggaagcccttcttcactctctctctttcttccctttgcttgctactcttgtcgagtgcattgctattacctccagcaagttcaacgagtgccaacttcaacaacctcaacgcgttggaacccgaccaccgcgttgagtccgaaggtggtcttattgaaacatggaactctcaacaccctgagctgcaatgcgccggtgtcactgtttccaaacgcaccctcaaccgcaacggcctccacttgccatcttactcaccttatccccaaatgatcattgtcgttcaaggtgcgtaatattagtaagaagtatttatcagcttaacgtgataacaataatagtaatatgaaatatttattaaatttttataattaatctctgctagaaaatttgattaatcattttagtagaatttgtttttctcaactagg

SEQ ID NO: 4570 - DNA, 641 bp, Artificial
  Mutations within GlyA3B4 introduced by GmGlyA3B4_T02TALE nuclease
gttcatgtacggttgcagatataaacgaagcatagcttatgtatgaggtgtaacaaaaattggaaacaatagccatgcaaggtgaagaatgtcaccaactcagaaacccttcttcattgacgtgtccctcactcactctcctctcttcactataaatcgccactcttcgtgttctccacttcaccaactccttcaaacttattaacactttccttagttcaatatggggaagcccttcttcactctctctctttcttccctttgcttgctactcttgttacctccagcaagttcaacgagtgccaactcaacaacctcaacgcgttggaacccgaccaccgcgttgagtccgaaggtggtcttattgaaacatggaactctcaacaccctgagctgcaatgcgccggtgtcactgtttccaaacgcaccctcaaccgcaacggcctccacttgccatcttactcaccttatcccccaaatgatcattgtcgttcaaggtgcgtaatattagtaagaagtatttatcagcttaacgtgataacaataatagtaatatgaaatatttattaaatttttataattaatctctgctagaaaatttgattaatcatttttagtagaatttgtttttctcaactagg

SEQ ID NO: 4571 - DNA, 659 bp, Artificial
  Mutations within GlyA3B4 introduced by GmGlyA3B4_T02TALE nuclease
  misc_feature (42); (142); (171); (189); (272); (274): n is a or c or t or g
gttcatgtacggttgcagatataaacgaagcatagcttatgnatgaggtgtaacaaaaattggaaacaatagccatgcaaggtgaagaatgtcaccaactcagaaacccttcttcattgacgtgtccctcactcactctccnctcttcactataaatcgccactcttcgtnttctccacttcaccaacnccttcaaacttattaacacttttcctttagttcaatatgggggaagcccttcttcactctctctctttcttccctttgcttgntnctcttgtcgagtgcatgacctccagcaagttcaacgagtgccaactcaacaacctcaacgcgttggaaacccgaccaccgcgttgagtccgaaggtggtcttattgaaacatggaactctcaacaccctgagctgcaatgcgccggtgtcactgtttccaaacgcaccctcaaccgcaacggcctccacttgccatcttactcaccttatccccaaatgatcattgtcgttcaaggtgcgtaatattagtaagaagtatttatcagcttaacgtgataacaataatagtaatatgaaatatttattaaatttttataattaatctctgctagaaaatttgattaatcattttagtagaatttgttttctcaactaggttttaaaa

SEQ ID NO: 4572 - DNA, 657 bp, Artificial
  Mutations within GlyA3B4 introduced by GmGlyA3B4_T02TALE nuclease
gttcatgtacggttgcagatataaacgaagcatagcttatgtatgaggtgtaacaaaattggaaacaatagccatgcaaggtgaagaatgtcaccaactcagaaaccccttcttcattgacgtgtccctcactcactctcctctcttcactataaatcgccactcttcgtgttctccacttcaccaactccttcaaacttattaacactttccttagttcaatatggggaagcccttcttcactctctctctttcttccctttgcttgctactcttgtcgagtgcattgctattacctccagcaagttcaacgagtgccaactcaacaacctcaacgcgttggaacccgaccaccgcgttgagtccgaaggtggtcttattgaaacatggaactctcaacaccctgagctgcaatgcgccggtgtcactgtttccaaacgcaccctcaaccgcaacggcctccacttgccatcttactcaccttatccccaaatgatcattgtcgttcaaggtgcgtaatattagtaagagtatttatcagcttaacgtgataacaataatagtaatatgaaatatttattaaatttttataattaatctctgctagaaaatttgattaatcattttagtagaatttgtttttctcaactaggtttt

SEQ ID NO: 4573 - DNA, 651 bp, Artificial
  Mutations within GlyA3B4 introduced by GmGlyA3B4_T02TALE nuclease
gttcatgtacggttgcagatataaacgaagcataagcttatgtatgaggtgtaacaaaattggaaacaatagccatgcaaggtgaagaatgtcaccaactcagaaacccttcttcattgacgtgtccctcactcactctcctctcttcactataaatcgccactcttcgtgttctccacttcaccaactccttcaaacttattaacactttccttagttcaatatggggaagcccttcttcactctctctctttcttccctttgcttgctactcttgtcgagttacctccagcaagttcaacgagtgccaactcaacaacctcaacgcgttggaaccccgaccaccgcgttgagtccgaaggtggtcttattgaaacatggaactctcaacaccctgagctgcaatgcgccggtgtcactgtttccaaacgcaccctcaaccgcaacggcctccacttgccatccttactcaccttatccccaaatgatcattgtcgttcaaggtgcgtaaatattagtaagaagtatttatcagcttaacgtgataacaataatagtaatatgaaatatttattaaatttttataattaatctctgctagaaaatttgattaatcatttttagtagaattgttttttctcaactaggttt

SEQ ID NO: 4574 - DNA, 647 bp, Artificial
  Mutations within GlyA3B4 introduced by GmGlyA3B4_T02TALE nuclease
gttcatgtacggttgcagatataaacgaagcatagcttatgtatgaggtgtaacaaaattggaaacaatagccatgcaaggtgaagaatgtcaccaactcagaaacccttcttcattgacgtgtccctcactcactctcctctcttcactataaatcgccactcttcgtgttctccacttcaccaactccttcaaacttattaacactttccttagttcaatatggggaagcccttcttcactctctctctttcttccctttgcttgctactcttgtcgagtgcatgctattacctccagcaagttcaacgagtgccaactcaacaacctcaacgcgttggaacccgaccaccgcgttgagtccgaaggtggtcttattgaaacatggaactctcaacaccctgagctgcaatgcgccggtgtcactgttttccaaacgcaccctcaaccgcaacggcctccacttgccatcttactcaccttatccccaaatgatcattgtcgttcaaggtgcgtaatattagtaagagtatttatcagcttaacgtgataacaataatagtaatatgaaatatttattaaatttttataattaatctctgctagaaaatttgattaatcattttagtagaatttgttttctcaac

SEQ ID NO: 4575 - DNA, 635 bp, Artificial; identical to SEQ ID NO: 2434
  Mutations within GlyA3B4 introduced by GmGlyA3B4_T02TALE nuclease

SEQ ID NO: 4576 - DNA, 663 bp, Artificial; identical to SEQ ID NO: 2045
  Mutations within GlyA3B4 introduced by GmGlyA3B4_T02TALE nuclease

SEQ ID NO: 4577 - DNA, 636 bp, Artificial; identical to SEQ ID NO: 2834
  Mutations within GlyA3B4 introduced by GmGlyA3B4_T02TALE nuclease
  misc_feature (530): n is a or c or t or g

SEQ ID NO: 4578 - DNA, 664 bp, Artificial
  Mutations within GlyA3B4 introduced by GmGlyA3B4_T02TALE nuclease
gttcatgtacggttgcagatataaacgaagcatagcttatgtatgaggtgtaacaaaattggaaacaatagccatgcaaggtgaagaatgtcaccaactcagaaacccttcttcattgacgtgtccctcactcactctcctctcttcactataaatcgccactcttcgtgttctccacttcaccaactccttcaaacttattaacactttccttagttcaatatggggaagcccttcttcactctctctctttcttccctttgcttgctactcttgtcgagtgcatgccaccacctgctccggggtcaagccgtgggcctggcacagcaccggcaacagccgctggaccgtctccagcgcctgcttgccaccattattgctggcttttgctattacctccagcaagttcaacgagtgccaactcaacaacctcaacgcgttggaacccgaccaccgcgttgagtccgaaggtggtcttattgaaacatggaactctcaacacccctgagctgcaatgcgccggtgtcactgttttccaaacgcaccctcaaccgcaacggcctccacttgccatcttactcaccttatccccaaatgatcattgtcgttcaaggtgcgtaatattagtaagaagtatttatcagcttaacgtgataacaataat

SEQ ID NO: 4579 - DNA, 616 bp, Artificial
  Mutations within GlyA3B4 introduced by GmGlyA3B4_T02TALE nuclease
gttcatgtacggttgcagatataaacgaagcatagcttatgtatgaggtgtaacaaaattggaaacaatagccatgcaaggtgaagaatgtcaccaactcagaaacccttcttcattgacgtgtccctcactcactctcctctcttcactataaatcgccactcttcgtgttctccacttcaccaactccttcaaacttattaacactttccttagttcaatatggggaagcccttcttcactctctctctttcttccctttgcttgctactcttgtcgagtgcattacctccagcaagttcaacgagtgccaactcaacacctcaacgcgttggaacccgaccaccgcgttgagtccgaaggtggtcttattgaaacatggaactctcaacaccctgagctgcaatgcgccggtgtcactgtttccaaacgcaccctcaaccgcaacggcctccacttgccatcttactcaccttatcccccaaatgatcattgtcgttcaaggtgcgtaatattagtaagaagtatttatcagcttaacgtgataacaatatagtaatatgaaatatttattaaatttttataattaatctctgctagaaaatttgattaatca

SEQ ID NO: 4580 - DNA, 659 bp, Artificial
  Mutations within GlyA3B4 introduced by GmGlyA3B4_T02TALE nuclease
gttcatgtacggttgcagatataaacgaagcatagcttatgtatgaggtgtaacaaaattggaaacaatagccatgcaaggtgaagaatgtcaccaactcagaaacccttcttcattgacgtgtccctcactcactctcctctcttcactataaatcgccactcttcgtgttctccacttcaccaactccttcaaacttattaacactttccttagttcaatatggggaagcccttcttcactctctctctttcttccctttgcttgctactcttgtcgagtgcatttgctattacctccagcaagttcaacgagtgccaactcaacaacctcaacgcgttggaacccgaccaccgcgttgagtccgaaggtggtcttattgaaacatggaactctcaacaccctgagctgcaatgcgccggtgtcactgtttccaaacgcaccctcaaccgcaacggcctccacttgccatcttactcaccttatccccaaatgatcattgtcgttcaaggtgcgtaatattagtaagaagtatttatcagcttaacgtgataacaataatagtaatatgaaatatttattaaatttttataattaatctctgctagaaaatttgattaatcattttagtagaatttgtttttctcaactaggttttt

SEQ ID NO: 4581 - DNA, 582 bp, Artificial
  Mutations within GlyA3B4 introduced by GmGlyA3B4_T02TALE nuclease
gttcatgtacggttgcagatataaacgaagcatagcttatgtatgaggtgtaacaaaattggaaacaatagccatgcaaggtgaagaatgtcaccaactcagaaacccttcttcattgacgtgtccctcactcactctcctctcttcactataaatcgccactcttcgtgttctccacttcaccaactccttcaaacttattaacactttccttagttcaatatggggaagcccttcttcactctctctctttcttccctttgcttgctactcttgctattacctccagcaagttcaacgagtgccaactcaacaacctcaacgcgttggaacccgaccaccgcgttgagtccgaaggtggtcttattgaaacatggaactctcaacaccctgagctgcaatgcgccggtgtcactgtttccaaacgcaccctcaaccgcaacggcctccacttgccatcttactcaccttatcccccaaatgatcattgtcgttcaaggtgcgtaaatattagtaagaagtatttatcagcttaacgtgataacaataatagtaatatgaaatatttattaaattttttat

SEQ ID NO: 4582 - DNA, 638 bp, Artificial
  Mutations within GlyA3B4 introduced by GmGlyA3B4_T02TALE nuclease
  misc_feature (531): n is a or c or t or g
gttcatgtacggttgcagatataaacgaagcatagcttatgtatgaggtgtaacaaaattggaaacaatagccatgcaaggtgaagaatgtcaccaactcagaaacccttcttcattgacgtgtccctcactcactctcctctcttcactataaatcgccactcttcgtgttctccacttcaccaactccttcaaacttattaacactttccttagttcaatatggggaagcccttcttcactctctctctttcttccctttgcttgctactcttgtcgagtgcatgctattacctccagcaagttcaacgagtgccaactcaacaacctcaacgcgttggaacccgaccaccgcgttgagtccgaaggtggtcttattgaaacatggaactctcaacaccctgagctgcaatgcgccggtgtcactgtttccaaacgcaccctcaaccgcaacggcctccacttgccatcttactcaccttatcccccaaaatgatcatttcgttcaaggtgcgtaatattagtaagagnatttatcagcttaacgtgataacaataatagtaatatgaaaatatttattaaatttttataattaatctctgctagaaaatttgattaatcattttagtagaatttg

SEQ ID NO: 4583 - DNA, 774 bp, Artificial
  Mutations within GlyA3B4 introduced by GmGlyA3B4_T02TALE nuclease
gttcatgtacggttgcagatataaacgaagcatagcttatgtatgaggtgtaacaaaattggaaacaatagccatgcaaggtgaagaatgtcaccaactcagaaacccttcttcattgacgtgtccctcactcactctcctctcttcactataaatcgccactcttcgtgttctccacttcaccaactccttcaaacttattaacactttccttagttcaatatggggaagcccttcttcactctctctctttcttccctttgcttgctactcttgtcgagtgcatggtggcaagcaggcgctggagacggtccagcggctgttgccggtgctgtgccaggcccacggcttgacccccccagcaggtggtggccatcgccagcaataatggtggcattgctattacctccagcaagttcaacgagtgccaactcaacaacctcaacgcgttggaacccgaccaccgcgttgagtccgaaggtggtcttattgaaacatggaactctcaacaccctgagctgcaatgcgccggtgtcactgtttccaaacgcaccctcaaccgcaacggcctccacttgccatcttactcacctttatccccaaatgatcattgtcgttcaaggtgcgtaatattagtaagaagtatttatcagcttaacgtgataacaataatagtaatatgaaatatttattaaaattttttataattaatctctgctagaaaatttgattaatcattttagtagaatttgtttttctcaactaggttttaaa

SEQ ID NO: 4584 - DNA, 661 bp, Artificial; identical to SEQ ID NO: 2900
  Mutations within GlyA3B4 introduced by GmGlyA3B4_T02TALE nuclease

SEQ ID NO: 4585 - DNA, 556 bp, Artificial; identical to SEQ ID NO: 3672
  Mutations within GlyA3B4 introduced by GmGlyA3B4_T02TALE nuclease

SEQ ID NO: 4586 - DNA, 657 bp, Artificial
  Mutations within GlyA3B4 introduced by GmGlyA3B4_T02TALE nuclease
gttcatgtacggttgcagatataaacgaagcatagcttatgtatgaggtgtaacaaaattggaaacaatagccatgcaaggtgaagaatgtcaccaactcagaaacccttcttcattgacgtgtccctcactcactctcctctcttcactataaatcgccactcttcgtgttctccacttcaccaactccttcaaacttattaacactttccttagttcaatatggggaagcccttcttcactctctctctttcttccttttgcttgctactcttgtcgagtgcactattacctccagcaagttcaacgagtgccaactcaacaacctcaacgcgttggaacccgaccaccgcgttgagtccgaaggtggtcttattgaaacatggaactctcaacaccctgagctgcaatgcgccggtgtcactgtttccaaacgcaccctcaaccgcaacggcctccacttgccatcttactcaccttatccccaaatgatcattgtcgttcaaggtgcgtaatattagtaagaagtatttatcagcttaacgtgataacaatatagtaatatgaaatatttattaaatttttataattaatctctgctagaaaatttgattaatcattttagtagaatttgttttctcaactaggtttttaaaa

SEQ ID NO: 4587 - DNA, 659 bp, Artificial
  Mutations within GlyA3B4 introduced by GmGlyA3B4_T02TALE nuclease
gttcatgtacggttgcagatataaacgaagcatagcttatgtatgaggtgtaacaaaattggaaacaatagccatgcaaggtgaagaatgtcaccaactcagaaacccttcttcattgacgtgtccctcactcactctcctctcttcactataaatcgccactcttcgtgttctccacttcaccaactccttcaaacttattaacactttccttagttcaatatggggaagcccttcttcactctctctctttcttccctttgcttgctactcttgtcgagtgcatgctattacctccagcaagttcaacgagtgccaactcaacaacctcaacgcgttggaacccgaccaccgcgttgagtccgaaggtggtcttattgaaacatggaactctcaacaccctgagctgcaatgcgccggtgtcactgtttccaaacgcaccctcaaccgcaacggcctccacttgccatcttactcaccttatccccaaatgatcattgtcgttcaaggtgcgtaatattagtaagagtatttatcagcttaacgtgataacaataatagtaatatgaaatatttattaaatttttataattaatctctgctagaaaatttgattaatcattttagtagaatttgttttctcaactaggtttttaaaa

SEQ ID NO: 4588 - DNA, 558 bp, Artificial
  Mutations within GlyA3B4 introduced by GmGlyA3B4_T02TALE nuclease
gttcatgtacggttgcagatataaacgaagcatagcttatgtatgaggtgtaacaaaattggaaacaatagccatgcaaggtgaagaatgtcaccaactcagaaacccttcttcattgacgtgtccctcactcactctcctctcttcactataaatcgccactcttcgtgttctccacttcaccaactccttcaaacttattaacactttccttagttcaatatggggaagcccttcttcactctctctctttcttccctttgcttgctactcttgtcgagtgcatcctccagcaagttcaacgagtgccaactcaacaacctcaacgcgttggaacccgaccaccgcgttgagtccgaaggtggtcttattgaaacatggaactctcaacaccctgagctgcaatgcgccggtgtcactgtttccaaacgcaccctcaaccgcaacggcctccacttgccatcttactcaccttatcccccaaatgatcattgtcgttcaaggtgcgtaaatattagtaagaagtatttatcagcttaacgtgataacaataatagt

SEQ ID NO: 4589 - DNA, 669 bp, Artificial
  Mutations within GlyA3B4 introduced by GmGlyA3B4_T02TALE nuclease
gttcatgtacggttgcagatataaacgaagcatagcttatgtatgaggtgtaacaaaaattggaaacaatagccatgcaaggtgaagaatgtcaccaactcagaaaccccttcttcattgacgtgtccctcactcactctcctctcttcactataaatcgccactcttcgtgttctccacttcaccaactccttcaaacttattaacactttccttagttcaatatgggggaagcccttcttcactctctctctttcttccctttgcttgctactcttgtcgagtgcatctattacctccagcaagttcaacgagtgccaactcaacaacctcaacgcgttggaacccgaccaccgcgttgagtccgaaggtggtcttattgaaacatggaactctcaacaccctgagctgcaatgcgccggtgtcactgtttccaaacgcaccctcaaccgcaacggcctccacttgccatcttactcaccttatcccccaaatgatcattgtcgttcaaggtgcgtaatattagtaagaagtatttatcagcttaacgtgataacaataatagtaatatgaaaatatttattaaatttttataattaatctctgctagaaaatttgattaatcattttagtagaatttgttttctcaactaggtttttaaaacacca

SEQ ID NO: 4590 - DNA, 600 bp, Artificial
  Mutations within GlyA3B4 introduced by GmGlyA3B4_T02TALE nuclease
gttcatgtacggttgcagatataaacgaagcatagcttatgtatgaggtgtaacaaaattggaaacaatagccatgcaaggtgaagaatgtcaccaactcagaaacccttcttcattgacgtgtccctcactcactctcctctcttcactataaatcgccactcttcgtgttctccacttcaccaactccttcaaacttattaacactttccttagttcaatatggggaagcccttcttcactctctctctttcttccctttgcttgctactcttgtcgagtgcatgctggcgatggccaccacctgctggggggtcaagccgtgggcctggcacagcaccggcaacagccgctggaccgtcactgtttccaaacgcaccctcaaccgcaacggcctccacttgccatcttactcaccttatccccaaatgatcattgtcgttcaaggtgcgtaatattagtaagaagtatttatcagcttaacgtgataacaataatagtaatatgaaatatttattaaattttttataattaatctctgctagaaaatttgattaatcatttttagtagaatttgtttttctcaactaggttttaaac

SEQ ID NO: 4591 - DNA, 564 bp, Artificial
  Mutations within GlyA3B4 introduced by GmGlyA3B4_T02TALE nuclease
gttcatgtacggttgcagatataaacgaagcatagcttatgtatgaggtgtaacaaaattggaaacaatagccatgcaaggtgaagaatgtcaccaactcagaaaccccttcttcattgacgtgtccctcactcactctcctctcttcactataaatcgccactcttcgtgttctccacttcaccaaactccttcaaacttattaacactttccttagttcaatatggggaagcccttcttcactctctctctttcttccctttgcttgctactcttgtcgagttacctccagcaagttcaacgagtgccaactcaacaacctcaacgcgttggaacccgaccaccgcgttgagtccgaaggtggtcttattgaaacatggaactctcaacaccctgagctgcaatgcgccggtgtcactgtttccaaacgcaccctcaaccgcaacggcctccacttgccatctactcaccttatccccaaatgatcattgtcgttcaaggtgcgtaatattagtaagaagtatttatcagcttaacgtgataacaataatagtaatatgaaa

SEQ ID NO: 4592 - DNA, 544 bp, Artificial
  Mutations within GlyA3B4 introduced by GmGlyA3B4_T02TALE nuclease
gttcatgtacggttgcagatataaacgaagcatagcttatgtatgaggtgtaacaaaattggaaacaatagccatgcaaggtgaagaatgtcaccaactcagaaacccttcttcattgacgtgtccctcactcactctcctctcttcactataaatcgccactcttcgtgttctccacttcaccaactccttcaaacttattaacactttccttagttcagtatggggaagcccttcttcactctctctctttcttccctttgcttgctattacctccagcaagttcaacgagtgccaactcacaacctcaacgcgttggaacccgaccaccgcgttgagtccgaaggtggtcttattgaacatggaactctcaacaccctgagctgcaatgcgccggtgtcactgtttccaaacgcaccctcaaccgcaacggcctccacttgccatcttactcaccttatccccaaatgatcattgtcgttcaaggtgcgtaatattagtaagaagtatttatcagcttaacgtgataacaataatagtaat

SEQ ID NO: 4593 - DNA, 381 bp, Artificial
  Mutations within GlyA3B4 introduced by GmGlyA3B4_T02TALE nuclease
gttcatgtacggttgcagatataaacgaagcatagcttatgtataggtgtaacaaaattggaaacaatagccatgcaaggtgaagaatgtcaccaactcagaaacccttcttcattgacgtgtccctcactcactctcctctcttcactataaatcgccactcttcgtgttctccacttcaccaactccttcaaacttattaacactttccttagttcaatatgggggaagcccttcttcactctctctctttcttccctttgcttgctactcttgtcgagtgcattgctattacctccagcaagttcaacgagtgccaactcaacaacctcaacgcattggaacccgaccaccgcgttgagtccgaaggtggtcttattg

SEQ ID NO: 4594 - DNA, 637 bp, Artificial; identical to SEQ ID NO: 1602
  Mutations within GlyA3B4 introduced by GmGlyA3B4_T02TALE nuclease

SEQ ID NO: 4595 - DNA, 643 bp, Artificial
  Mutations within GlyA3B4 introduced by GmGlyA3B4_T02TALE nuclease
gttcatgtacggttgcagatataaacgaagcatagcttatgtatgaggtgtaacaaaattggaaacaatagccatgcaaggtgaagaatgtcaccaactcagaaacccttcttcattgacgtgtccctcactcactctcctctcttcactataaatcgccactcttcgtgttctccacttcaccaactccttcaaacttattaacactttccttagttcaatatgggggaagcccttcttcactctctctctttcttccctttgcttgctactcttgtcgagtgcatgacctccagcaagttcaacgagtgccaactcaacaacctcaacgcgttggaacccgaccaccgcgttgagtccgaaggtggtcttattgaaacatggaactctcaacaccctgagctgcaatgcgccggtgtcactgtttccaaacgcaccctcaaccgcaacggcctccacttgccatcttactcaccttatccccaaatgatcattgtcgttcaaggtgcgtaatattagtaagaagtatttatcagcttaacgtgataacaatatagtaatatgaaaatatttattaaatttttataattaatctctgctagaaaatttgattaatcattttagtagaatttgttttctcaac

SEQ ID NO: 4596 - DNA, 667 bp, Artificial; identical to SEQ ID NO: 1838
  Mutations within GlyA3B4 introduced by GmGlyA3B4_T02TALE nuclease

SEQ ID NO: 4597 - DNA, 600 bp, Artificial
  Mutations within GlyA3B4 introduced by GmGlyA3B4_T02TALE nuclease
gttcatgtacggttgcagatataaacgaagcatagcttatgtatgaggtgtaacaaaattggaaacaatagccatgcaaggtgaagaatgtcaccaactcagaaacccttcttcattgacgtgttcctcactcactctcctctcttcactataaatcgccactcttcgtgttctccacttcaccaactccttcaaacttattaacactttccttagttcaatatggggaagcccttcttcactctctctctttcttccctttgcttgctactcttgtcgagtgcatgctccagcgcctgcttgccgccatcgtggccatttgccggtgctgtgcccaggcccacggcttgaccccccagcaggtggtggccattacctccagcaagttcacgagtgccaactcaacaacctcacgcgttggaacccgaccaccgcgttgagtccgaaggtggtcttattgaaacatggaactctcaacaccctgagctgcaatgcgccggtgtcactgtttccaaacgcacctcaaccgcaacggcctccacttgccatctttactcaccttattccccaaatgatcattgtcgttcaaggtgcgtaata

SEQ ID NO: 4598 - DNA, 754 bp, Artificial
  Mutations within GlyA3B4 introduced by GmGlyA3B4_T02TALE nuclease
  misc_feature (644): n is a or c or t or g
gttcatgtacggttgcagatataaacgaagcatagcttatgtatgaggtgtaacaaaattggaaacaatagccatgcaaggtgaagaatgtcaccaactcagaaacccttcttcattgacgtgtccctcactcactctcctctcttcactataaatcgccactcttcgtgttctccacttcaccaactccttcaaacttattaacactttccttagttcaatatggggaagcccttcttcactctctctctttcttccctttgcttgctactcttgtcgagtgcatgctgataaatctggagccggtgagcgtgggtctcgcggtatcattgcagcactggggccagatggtaagccctcccgtatcgtagttatctacacgacggggagtcaggcaactatggatttgctattacctccagcaagttcaacgagtgccaactcaacaacctcaacgcgttggaacccgaccaccgcgttgagtccgaaggtggtcttattgaaacatggaactctcaacaccctgagctgcaatgcgccggtgtcactgttttccaaaacgcaccctcaaaccgcaacggcctccacttgccatcttactcaccttatccccaaatgatcattgtcgttcaaggtgcgtaatnttagtaagaagtatttatcagcttaacgtgataacaataatagtaatatgaaatatttattaaattttttataattaatctcttgctagaaaatttgattaatcattttt

SEQ ID NO: 4599 - DNA, 418 bp, Artificial
  Mutations within GlyA3B4 introduced by GmGlyA3B4_T02TALE nuclease
gttcatgtacggttgcagatataaacgaagcatagcttatgtatgaggtgtaacaaaattggaaacaatagccatgcaaggtgaagaatgtcaccaactcagaaaccccttcttcattgacgtgtccctcactcactctcctctcttcactataaatcgccactcttcgtgttctccacttcaccaactccttcaaacttattaacactttccttagttcaatatgggggaagcccttcttcactctctctctttcttccctttgcttgctactcttgtcgagtgcaagttcaacgagtgccaactcaacaacctcaacgcgttggaacccgaccaccgcgttgagtccgaaggtggtcttattgaaacatggaactctcaacaccctgagctgcaatgcgccggtgtcactgtttcc

SEQ ID NO: 4600 - DNA, 576 bp, Artificial
  Mutations within GlyA3B4 introduced by GmGlyA3B4_T02TALE nuclease
gttcatgtacggttgcagatataaacgaagcatagcttatgtatgaggtgtaacaaaattggaaacaatagccatgcaaggtgaagaatgtcaccaactcagaaacccttcttcattgacgtgtccctcactcactctcctctcttcactataaatcgccactcttcgtgttctccacttcaccaactccttcaaacttattaacactttccttagttcaatatggggaagcccttcttcactctctctctttcttccctttgcttgctactcttgtcgagtgccaactcaacaacctcaacgcgttggaacccgaccaccgcgttgagtccgaaggtggtcttattgaaacatggaactctcaacaccctgagctgcaatgcgccggtgtcactgttttccaaacgcaccctcaaccgcaacggcctccacttgccatcttactcaccttatccccaaatgatcattgtcgttcaaggtgcgtaatattagtaagaagtatttatcagcttaacgtgataacaataatagtaatatgaaatatttattaaattttttataattaatctctgctag

SEQ ID NO: 4601 - DNA, 660 bp, Artificial
  Mutations within GlyA3B4 introduced by GmGlyA3B4_T02TALE nuclease
gttcatgtacggttgcagatataaacgaagcatagcttatgtatgaggtgtaacaaaattggaaacaatagccatgcaaggtgaagaatgtcaccaactcagaaacccttcttcattgacgtgtccctcactcactctcctctcttcactataaatcgccactcttcgtgttctccacttcaccaactccttcaaacttattaacactttccttagttcaatatggggaagcccttcttcactctctctctttcttccctttgcttgctactcttgtcgagtgctattacctccagcaagttcaacgagtgccaactcaacaacctcaacgcgttggaacccgaccaccgcgttgagtccgaaggtggtcttattgaaacatggaactctcaacaccctgagctgcaatgcgccggtgtcactgtttccaaacgcaccctcaaccgcaacggcctccacttgccatcttactcaccttatccccaaatgatcattgtcgttcaaggtgcgtaatattagtaagaagtatttatcagcttaacgtgataacaatatagtaatatgaaatatttattaaatttttataattaatctctgctagaaaatttgattaatcattttagtagaatttgttttctcaactaggtttttaaaacacca

SEQ ID NO: 4602 - DNA, 661 bp, Artificial; identical to SEQ ID NO: 2610
  Mutations within GlyA3B4 introduced by GmGlyA3B4_T02TALE nuclease

SEQ ID NO: 4603 - DNA, 666 bp, Artificial; identical to SEQ ID NO: 1875
  Mutations within GlyA3B4 introduced by GmGlyA3B4_T02TALE nuclease

SEQ ID NO: 4604 - DNA, 713 bp, Artificial
  Mutations within GlyA3B4 introduced by GmGlyA3B4_T02TALE nuclease
gttcatgtacggttgcagatataaacgaagcatagcttatgtatgaggtgtaacaaaattggaaacaatagccatgcaaggtgaagaatgtcaccaactcagaaacccttcttcattgacgtgtccctcactcactctcctctcttcactataaatcgccactcttcgtgttctccacttcaccaactccttcaaacttattaacactttccttagttcaatatggggaagcccttcttcactctctccttcttccttcgtcttgctactcttgtcgagtgcattccagcgcctgcttgccgccatcgtggctggcgatggccaccacctgctccggggtcaagccgtgggccttgctattacctccagcaagttcaacgagtgccaactcaacaacctcaacgcgttggaacccgaccaccgcgttgagtccgaaggtggtcttattgaaacatggaactctcaacaccctgagctgcaatgcgccggtgtcactgtttccaaacgcaccctcaaccgcaacggcctccacttgccatcttactcaccttatccccaaatgatcattgtcgttcaaggtgcgtaatattagtaagaagtatttatcagcttaacgtgataacaataatagtaatatgaaatatttattaaaattttttataattaatctctgctagaaaaatttgattaatcatttttagtagaatttgttt

SEQ ID NO: 4605 - DNA, 637 bp, Artificial
  Mutations within GlyA3B4 introduced by GmGlyA3B4_T02TALE nuclease
gttcatgtacggttgcagatataaacgaagcatagcttatgtatgaggtgtaacaaaattggaaacaatagccatgcaaggtgaagaatgtcaccaactcagaaaccccttcttcattgacgtgtccctcactcactctcctctcttcactataaatcgccactcttcgtgttctccacttcaccaactccttcaaacttattaacactttccttagttcaatatggggaagcccttcttcactctctctctttcttccctttgcttgctactcttgtcgagtgcatctattacctccagcaagttcaacgagtgccaactcaacaacctcaacgcgttggaacccgaccaccgcgttgagtccgaaggtggtcttattgaaacatggaactctcaacaccctgagctgcaatgcgccggtgtcactgtttccaaacgcaccctcaaccgcaacggcctccacttgccatcttactcaccttatccccaaatgatcattgtcgttcaaggtgcgtaatattagtaagaagtatttatcagcttaacgtgataacaataatagtaatatgaaatatttattaaatttttataattaatctctgctagaaaatttgattaatcattttagtagaatttg

SEQ ID NO: 4606 - DNA, 662 bp, Artificial
  Mutations within GlyA3B4 introduced by GmGlyA3B4_T02TALE nuclease
  misc_feature (534): n is a or c or t or g
gttcatgtacggttgcagatataaacgaagcatagcttatgtatgaggtgtaacaaaattggaaacaatagccatgcaaggtgaagaatgtcaccaactcagaaaccccttcttcattgacgtgtccctcactcactctcctctcttcactataaatcgccactcttcgtgttctccacttcacccaactccttcaaacttattaacactttccttagttcaatatgggggaagcccttcttcactctctctctttcttccctttgcttgctactcttgtcgagtgcatgctattacctccagcaagttcaacgagtgccaactcaacaacctcaacgcgttggaacccgaccaccgcgttgagtccgaaggtggtcttattgaaacatggaactctcaacaccctgagctgcaatgcgccggtgtcactgtttccaaacgcaccctcaaccgcaacggcctccacttgccatcttactcaccttatccccaaatgatcattgtcgttcaaggtgcgtaatattagtaagaagnatttatcagcttaacgtgatacaatatagtaatatgaaatatttattaaatttttataattaatctctgctagaaaatttgattaatcattttagtagaatttgtttttctcaactaggttttaaaca

SEQ ID NO: 4607 - DNA, 667 bp, Artificial; identical to SEQ ID NO: 3315
  Mutations within GlyA3B4 introduced by GmGlyA3B4_T02TALE nuclease
  misc_feature (531): n is a or c or t or g

SEQ ID NO: 4608 - DNA, 655 bp, Artificial
  Mutations within GlyA3B4 introduced by GmGlyA3B4_T02TALE nuclease
gttcatgtacggttgcagatataaacgaagcatagcttatgtatgaggtgtaacaaaattggaaacaatagccatgcaaggtgaagaatgtcaccaactcagaaacccttcttcattgacgtgtccctcactcactctcctctcttcactataaatcgccactcttcgtgttctccacttcaccaactccttcaaacttattaacactttccttagttcaatatggggaagcccttcttcactctctctctttcttccctttgcttgctactcttgtcgagtgcatacctccagcaagttcaacgagtgccaactcaacaacctcaacgcgttggaacccgaccaccgcgttgagtccgaaggtggtcttattgaaacatggaactctcaacaccctgagctgcaatgcgccggtgtcactgtttccaaacgcaccctcaaccgcaacggcctccacttgccatcttactcaccttatccccaaatgatcattgtcgttcaaggtgcgtaatattagtaagaagtatttatcagcttaacgtgataacaataatagtaatatgaaaatatttattaaatttttataattaatctctgctagaaaatttgattaatcattttagtagaatttgttttctcaactaggtttttaaaa

SEQ ID NO: 4609 - DNA, 643 bp, Artificial
  Mutations within GlyA3B4 introduced by GmGlyA3B4_T02TALE nuclease
gttcatgtacggttgcagatataaacgaagcatagcttatgtatgaggtgtaacaaaattggaaacaatagccatgcaaggtgaagaatgtcaccaactcagaaaccccttcttcattgacgtgtccctcactcactctcctctcttcactataaatcgccactcttcgtgttctccacttcaccaactccttcaaacttattaacactttccttagttcaatatggggaagcccttcttcactctctctctttcttccctttgcttgctactcttgtcgagtacctccagcaagttcacgagtgccaactcaacaacctcaacgcgttggaacccgaccaccgcgttgagtccgaaggtggtcttattgaaacatggaactctcaacaccctgagctgcaatgcgccggtgtcactgtttccaaacgcacctcaaccgcaacggcctccacttgccatcttactcaccttatcccccaaatgatcattgtcgttcaaggtgcgtaatattagtaagaagtatttatcagcttaacgtgataacaataatagtaatatgaaatatttattaaattttttataattaatctctgctagaaaatttgattaatctttttagtagaattgttttttctcaactagg

SEQ ID NO: 4610 - DNA, 655 bp, Artificial; identical to SEQ ID NO: 2253
  Mutations within GlyA3B4 introduced by GmGlyA3B4_T02TALE nuclease

SEQ ID NO: 4611 - DNA, 669 bp, Artificial
  Mutations within GlyA3B4 introduced by GmGlyA3B4_T02TALE nuclease
gttcatgtacggttgcagatataaacgaagcatagcttatgtatgaggtgtaacaaaattggaaacaatagccatgcaaggtgaagaatgtcaccaactcagaaaccccttcttcattgacgtgtccctcactcactctcctctcttcactataaatcgccactcttcgtgttctccacttcaccaactccttcaaacttattaacactttccttagttcaatatgggggaagcccttcttcactctctctctttcttccctttgcttgctactcttgtcgagtgcatctattacctccagcaagttcaacgagtgccaactcaacaacctcaacgcgttggaacccgaccaccgcgttgagtccgaaggtggtcttattgaaacatggaactctcaacaccctgagctgcaatgcgccggtgtcactgtttccaaacgcacccctcaaccgcaacggcctccacttgccatcttactcaccttatcccccaaatgatcattgtcgttcaaggtgcgtaatattagtaagaagtatttatcagcttaacgtgataacaataatagtaatatgaaatatttattaaatttttataattaatctctgctagaaaatttgattgatcatttttagtagaatttgtttttctcaactaggttttaaacaccac

SEQ ID NO: 4612 - DNA, 665 bp, Artificial
  Mutations within GlyA3B4 introduced by GmGlyA3B4_T02TALE nuclease
  misc_feature (423); (531): n is a or c or t or g
gttcatgtacggttgcagatataaacgaagcatagcttatgtatgaggtgtaacaaaaattggaaacaatagccatgcaaggtgaagaatgtcaccaactcagaaaccccttcttcattgacgtgtccctcactcactctcctctcttcactataaatcgccactcttcgtgttctccacttcaccaactccttcaaacttattaacactttccttagttcaatatggggaagcccttcttcactctctctctttcttccctttgcttgctactcttgtcgagtgcatgttattacctccagcaagttcaacgagtgccaactcaacaacctcaacgcgttggaacccgaccaccgcgttgagtccgaaggtggtctattgaaacatggaactctcaacaccctgagctgcaatgcgccggtntcactgtttccaaacgcaccctcaaccgcaacggcctccacttgccatcttactcaccttatccccaaatgatcattgtcgttcaaggtgcgtaatattagtaagagnatttatcagcttaacgtgataacaatatagtaatatgaaatatttattaaatttttcataattaatctctgctagaaaatttgattaatcattttagtagaatttgttttctcaactaggttttaaacaccaca

SEQ ID NO: 4613 - DNA, 527 bp, Artificial
  Mutations within GlyA3B4 introduced by GmGlyA3B4_T02TALE nuclease
gttcatgtacggttgcagatataaacgaagcatagcttatgtatgaggtgtaacaaaattggaaacaatagccatgcaaggtgaagaatgtcaccaactcagaaaccccttcttcattgacgtgtccctcactcactctcctctcttcactataaatcgccactcttcgtgttctccacttcaccaaactcccttcaaacttattaacactttccttagttcaatatggggaagcccttcttcacttcccttggtcttattgaaacatggaactctcaacaccctgagctgcaatgcgccggtgtcactgtttccaaacgcaccctcaaccgcaacggcctccacttgccatcttactcaccttatccccaaatgatcattgtcgttcaaggtgcgtaatattagtaagaagtatttatcagcttaacgtgatacaataatagtaatatgaaatatttattaaattttttataattaatctctgctagaaaatttgataatcatttttagtagaattgttttctcaa

SEQ ID NO: 4614 - DNA, 556 bp, Artificial
  Mutations within GlyA3B4 introduced by GmGlyA3B4_T02TALE nuclease
gttcatgtacggttgcagatataaacgaagcatagcttatgtatgaggtgtaacaaaattggaaacaatagccatgcaaggtgaagaatgtcaccaactcagaaacccttcttcattgacgtgtccctcactcactctcctctcttcactataaatcgccactcttcgtgttctccacttcaccaactccttcaaacttattaacactttccttagttcaatatggggaacccgaccaccgcgttgagtccgaaggtggtcttattgaaacatggaactctcaacaccctgagctgcaatgcgccggtgtcactgtttccaaacgcaccctcaaccgcaacggcctccacttgccatcttactcaccttatccccaaatgatcattgtcgttcaaggtgcgtaatattagtaagaagtatttatcagcttaacgtgataacaataatagtaatatgaaatatttattaaattttttataaatttaatctctgctagaaaatttgattaatcatttttagtagaatttgttttttctcaactaggttttaaacacca

SEQ ID NO: 4615 - DNA, 666 bp, Artificial
  Mutations within GlyA3B4 introduced by GmGlyA3B4_T02TALE nuclease
gttcatgtacggttgcagatataaacgaagcatagcttatgtatgaggtgtaacaaaattggaaacaatagccatgcaaggtgaagaatgtcaccaactcagaaacccttcttcattgacgtgtccctcactcactctcctctcttcactataaatcgccactcttcgtgttctccacttcaccaactccttcaaacttattaacactttccttagttcaatatggggaagcccttcttcactctctctctttcttccctttgcttgctactcttgtcgagtgcatgctattacctccagcaagttcaacgagtgccaactcaacaacctcaacgcgttggaacccgaccaccgcgttgagtccgaaggtggtcttattgaaacatggaactctcaacaccctgagctgcaatgcgccggtgtcactgtttccaaacgcaccctcaaccgcaacggcctccacttgccatcttactcaaccttatccccaaatgatcattgtcgttcaaggtgcgtaatattagtaagagtatttatcagcttaacgtgataacaataatagtaatatgaaaatatttattaaatttttataattaatctctgctagaaaatttgattaatcattttagtagaatttgttttctcaactaggttttaaacaccaca

SEQ ID NO: 4616 - DNA, 605 bp, Artificial
  Mutations within GlyA3B4 introduced by GmGlyA3B4_T02TALE nuclease
gttcatgtacggttgcagatataaacgaagcatagcttatgtatgaggtgtaacaaaattggaaacaatagccatgcaaggtgaagaatgtcaccaactcagaaacccttcttcattgacgtgtccctcactcactctcctctcttcactataaatcgccactcttcgtgttctccacttcaccaactccttcaaacttattaacactttccttagttcaatatggggaagcccttcttcactctctctctttcttccctttgcttgctactcaactcaacaacctcaacgcgttggaacccgaccaccgcgttgagtccgaaggtggtcttattgaaacatggaactctcaacaccctgagctgcaatgcgccggtgtcactgtttccaaacgcaccctcaaccgcaacggcctccacttgccatcttactcaccttatccccaaatgatcattgtcgttcaaggtgcgtaatattagtaagaagtatttatcagcttaacgtgataacaataatagtaatatgaatatttattaatttttataattaatctctgctagaaaatttgattaatcatttttagtagaatttgtttttctcaacta

SEQ ID NO: 4617 - DNA, 671 bp, Artificial
  Mutations within GlyA3B4 introduced by GmGlyA3B4_T02TALE nuclease
  misc_feature (533): n is a or c or t or g
gttcatgtacggttgcagatataaacgaagcatagcttatgtatgaggtgtaacaaaattggaaacaatagccatgcaaggtgaagaatgtcaccaactcagaaaccccttcttcattgacgtgtccctcactcactctcctctcttcactataaatcgccactcttcgtgttctccacttcaccaactccttcaaacttattaacactttccttagttcaatatgggggaagcccttcttcactctctctctttcttccctttgcttgctactcttgtcgagtgcatgctattacctccagcaagttcaacgagtgccaactcaacaacctcaacgcgttggaacccgaccaccgcgttgagtccgaaggtggtcttattgaaacatggaactctcaacaccctgagctgcaatgcgccggtgtcactgtttccaaacgcaccctcaaccgcaacggcctccacttgccatcttactcaccttatccccaaatgatcattgtcgttcaaggtgcgtaatattagtaagaagnatttatcagcttaacgtgataacaataatagtaatatgaaaatatttattaaatttttataattaatctctgctagaaaatttgattaatcattttagtagaatttgtttttctcaactaggtttttaaaacaccaca

SEQ ID NO: 4618 - DNA, 591 bp, Artificial
  Mutations within GlyA3B4 introduced by GmGlyA3B4_T02TALE nuclease
gttcatgtacggttgcagatataaacgaagcatagcttatgtatgaggtgtaacaaaattggaaacaatagccatgcaaggtgaagaatgtcaccaactcagaaacccttcttcattgacgtgtccctcactcactctcctctcttcactataaatcgccactcttcgtgttctccacttcaccaactccttcaaacttattaacactttccttagttcaatatgggggaagcccttcttcactctctctctttcttccctttgcttgctactcttgtcgagtgccaactcaacaacctcacgcgttggaacccgaccaccgcgttgagtccgaaggtggtctttaattgaacatgggaacctctcaacaccctgagctgcaatgcgccggtgtcactgtttccaaacgcacccctcaaccgcaacggcctccacttgccatcttactcaccttatccccaaatgatcattgtcgttcaaggtgcgtaatattagtaagaagtatttcatcagcttaacgtgataacaataatagtaatatgaatattattaatttttataattaatctctgctagaaaatttgattaatc

SEQ ID NO: 4619 - DNA, 651 bp, Artificial; identical to SEQ ID NO: 2862
  Mutations within GlyA3B4 introduced by GmGlyA3B4_T02TALE nuclease

SEQ ID NO: 4620 - DNA, 784 bp, Artificial
  Mutations within GlyA3B4 introduced by GmGlyA3B4_T02TALE nuclease
gttcatgtacggttgcagatataaacgaagcatagcttatgtatgaggtgtaacaaaattggaaacaatagccatgcaaggtgaagaatgtcaccaactcagaaacccttcttcattgacgtgtccctcactcactctcctctcttcactataaatcgccactcttcgtgttctccacttcaccaactccttcaaacttattaacactttccttagttcaatatggggaagcccttcttcactctctctctttcttccctttgcttgctactcttgtcgagtgcatgcgctggaccgtctccagcgcctgcttgccaccaatattgctggcgatggccaccacctgctccggggtcaagccgtgggcctggcacagcaccggcaacagccgctggaccgtctccagcgcctgctttgctattacctccagcaagttcaacgagtgccaactcaacaacctcaacgcgttggaacccgaccaccgcgttgagtccgaaggtggtcttattgaaacatggaactctcaacaccctgagctgcaatgcgccggtgtcactgttttccaaaacgcaccctcaaccgcaacggcctccacttgccatcttactcaccttatccccaaatgatcattgtcgttcaaggtgcgtaatattagtaagaagtatttatcagcttaacgtgataacaataatagtaatatgaaatatttattaaaattttttataaattaaatctcttgctagaaaatttgattaatcatttttagtagaaatttgtttttctc

SEQ ID NO: 4621 - DNA, 527 bp, Artificial
  Mutations within GlyA3B4 introduced by GmGlyA3B4_T02TALE nuclease
gttcatgtacggttgcagatataaacgaagcatagcttatgtatgaggtgtaacaaaattggaaacaatagccatgcaaggtgaagaatgtcaccaactcagaaacccttcttcattgacgtgtcccctcactcactctcctctcttcactataaatcgccactcttcgtgttctccacttcaccaactccttcaaacttattaacactttccttagttcaatatggggaagcccttcttcactctctctctttcttccctttgctttgctattacctccagcaagttcaacgagtgccaactcaacaacctcaacgcgttggaacccgaccaccgcgttgagtccgaaggtggtcttattgaaacatggaactctcaacacccctgagctgcaatgcgccggtgtcactgtttccaaacgcaccctcaaccgcaacggcctccacttgccatcttactcaccttatccccaaatgatcattgtcgttcaaggtgcgtaatacttagtaagaagtatttatcagctt

SEQ ID NO: 4622 - DNA, 606 bp, Artificial
  Mutations within GlyA3B4 introduced by GmGlyA3B4_T02TALE nuclease
gttcatgtacggttgcagatataaacgaagcatagcttatgtatgaggtgtaacaaaattggaaacaatagccatgcaaggtgaagaatgtcaccaactcagaaaccccttcttcattgacgtgtccctcactcactctcctctcttcactataaatcgccactcttcgtgttctccacttcaccaactccttcaaacttattaacactttccttagttcaatatggggaagcccttcttcactctctctctttcttccctttgcttgctactcttgtcgagtgcatgctattacctccagcaagttcaacgagtgccaactcaacaacctcaacgcgttggaacccgaccaccgcgttgagtccgaaggtggtcttattgaaacatggaactctcaacaccctgagctgcaatgcgccggtgtcactgtttccaaacgcaccctcaaccgcaacggcctccacttgccatcttactcaaccttatccccaaatgatcattgtcgttcaaggtgcgtaatattagtaagagtatttatcagcttaacgtgataacaatatagtaatatgaaatatttattaaatttttataattaatctctgctag

SEQ ID NO: 4623 - DNA, 630 bp, Artificial
  Mutations within GlyA3B4 introduced by GmGlyA3B4_T02TALE nuclease
gttcatgtacggttgcagatataaacgaagcatagcttatgtatgaggtgtaacaaaattggaaacaatagccatgcaaggtgaagaatgtcaccaactcagaaacccttcttcattgacgtgtccctcactcactctcctctcttcactataaatcgccactcttcgtgttctccacttcaccaactgcaacggcgccgtgctgtccgtggaggagctcctgatcggcggcgagatgatcattggatctagatgcattcgcgatctacacctccagcaagttcaacgagtgccaactcaacaacctcaacgcgttggaacccgaccaccgcgttgagtccgaaggtggtcttattgaaacatggaactctcaacaccctgagctgcaatgcgccggtgtcactgtttccaaacgcaccctcaaccgcaacggcctccacttgccatcttactcaccttatcccccaaatgatcattgtcgttcaaggtgcgtaaatattagtaagaagtatttatcagcttaacgtgataacaataatagtaatatgaaatatttattaaattttttataattaatctctgctagaaaatttgattaatctttttagtagaattgttttttctcaacta

SEQ ID NO: 4624 - DNA, 640 bp, Artificial; identical to SEQ ID NO: 2042
  Mutations within GlyA3B4 introduced by GmGlyA3B4_T02TALE nuclease

SEQ ID NO: 4625 - DNA, 662 bp, Artificial
  Mutations within GlyA3B4 introduced by GmGlyA3B4_T02TALE nuclease
gttcatgtacggttgcagatataaacgaagcatagcttatgtatgaggtgtaacaaaattggaaacaatagccatgcaaggtgaagaatgtcaccaactcagaaacccttcttcattgacgtgtccctcactcactctcctctcttcactataaatcgccactcttcgtgttctccacttcaccaactccttcaaacttattaacactttccttagttcaatatggggaagcccttcttcactctctctctttcttccctttgcttgctactcttgtcgagtgcatttacctccagcaagttcaacgagtgccaactcaacacctcaacgcgttggaacccgaccaccgcgttgagtccgaaggtggtcttattgaaacatggaactctcaacaccctgagctgcaatgcgccggtgtcactgtttccaaacgcaccctcaaccgcaacggcctccacttgccatcttactcaccttatcccccaaatgatcattgtcgttcaaggtgcgtaatattagtaagaagtatttatcagcttaacgtgataacaataatagtaatatgaaatatttattaaatttttataattaatctctgctagaaaatttgattaatcattttagtagaatttgtttttctcaactaggtttttaaaacacca

SEQ ID NO: 4626 - DNA, 666 bp, Artificial
  Mutations within GlyA3B4 introduced by GmGlyA3B4_T02TALE nuclease
gttcatgtacggttgcagatataaacgaagcatagcttatgtatgaggtgtaacaaaattggaaacaatagccatgcaaggtgaagaatgtcaccaactcagaaacccttcttcattgacgtgtccctcactcactctcctctcttcactataaatcgccactcttcgtgttctccacttcaccaactccttcaaacttattaacactttccttagttcaatatggggaagcccttcttcactctctctctttcttccctttgcttgctactcttgtcgagtgcattgctattacctccagcaagttcaacgagtgccaactcaacaacctcaacgcgttggaacccgaccaccgcgttgagtccgaaggtggtcttattgaaacatggaactctcaacaccctgagctgcaatgcgccggtgtcactgtttccaaacgcaccctcaaccgcaacggcctccacttgccatcttactcaccttatccccaaatgatcattgtcgttcaaggtgcgtaatattagtaagagtatttatcagcttaacgtgataacaatatagtaatatgaaatatttattaaatttttataattaatctctgctagaaaatttgattaatcattttagtagaatttgtttttctcaactaggtttttaaacaccaca

SEQ ID NO: 4627 - DNA, 670 bp, Artificial
  Mutations within GlyA3B4 introduced by GmGlyA3B4_T02TALE nuclease
  misc_feature (534): n is a or c or t or g
gttcatgtacggttgcagatataaacgaagcatagcttatgtatgaggtgtaacaaaattggaaacaatagccatgcaaggtgaagaatgtcaccaactcagaaacccttcttcattgacgtgtccctcactcactctcctctcttcactataaatcgccactcttcgtgttctccacttcaccaactccttcaaacttattaacactttccttagttcaatatggggaagcccttcttcactctctctctttcttccctttgcttgctactcttgtcgagtgcattgctattacccctccagcatcgtcaacgagtgccaactcaacaacctcaacgcgttggaacccgaccaccgcgttgagtccgaaggtggtcttattgaaacatggaactctcaacaccctgagctgcaatgcgccggtgtcactgtttccaaacgcaccctcaaccgcaacggcctccacttgccatcttactcaccttatcccccaaatgatcattgtcgttcaaggtgcgtaatattagtaagagnatttatcagcttaacgtgataacaatatagtaatatgaaatatttattaaatttttataattaatctctgctagaaaatttgattaatcattttagtagaatttgtttttctcaactaggtttttaaaacaccaca

SEQ ID NO: 4628 - DNA, 667 bp, Artificial; identical to SEQ ID NO: 4005
  Mutations within GlyA3B4 introduced by GmGlyA3B4_T02TALE nuclease
  misc_feature (531): n is a or c or t or g

SEQ ID NO: 4629 - DNA, 617 bp, Artificial
  Mutations within GlyA3B4 introduced by GmGlyA3B4_T02TALE nuclease
gttcatgtacggttgcagatataaacgaagcatagcttatgtatgaggtgtaacaaaattggaaacaatagccatgcaaggtgaagaatgtcaccaactcagaaacccttcttcattgacgtgtccctcactcactctcctctcttcactataaatcgccactcttcgtgttctccacttcaccaactccttcaaacttattaacactttccttagttcaatatggggaagcccttcttcactctctctctttcttcccctccagcaagttcaacgagtgccaactcaacaacctcaacgcgtgaccgaccaccgcgttgagtccgaaggtggtcttattgaaacatggaactctcaacaccctgagctgcaatgcgccggtgtcactgtttccaaacgcaccctcaaccgcaacggcctccacttgccatcttactcaccttatccccaaatgatcattgtcgttcaaggtgcgtaatattagtaagaagtatttatcagcttaacgtgataacaataatagtaatatgaaatatttattaatttttataattaatctctgctagaaaatttgattaatcatttttagtagaatttgtttttctcaactaggtttt

SEQ ID NO: 4630 - DNA, 646 bp, Artificial
  Mutations within GlyA3B4 introduced by GmGlyA3B4_T02TALE nuclease
gttcatgtacggttgcagatataaacgaagcatagcttatgtatgaggtgtaacaaaattggaaacaatagccatgcaaggtgaagaatgtcaccaactcagaaacccttcttcattgacgtgtccctcactcactctcctctcttcactataaatcgccactcttcgtgttctccacttcaccaactccttcaaacttattaacactttccttagttcaatatggggaagcccttcttcactctctctctttcttccctttgcttgctactcttgtcgagtgcatgctattacctccagcaagttcaacgagtgccaactcaacaacctcaacgcgttggaacccgaccaccgcgttgagtccgaaggtggtcttattgaaacatggaactctcaacaccctgagctgcaatgcgccggtgtcactgtttccaaacgcaccctcaaccgcaacggcctccacttgccatcttactcaccttatccccaaatgatcattgtcgttcaaggtgcgtaatattagtaagaagtatttatcagcttaacgtgataacaataatagtaatatgaaatatttattaaatttttataattaatctctgctagaaaatttgattaatcatttttagtagaatttgttttttcc

SEQ ID NO: 4631 - DNA, 656 bp, Artificial
  Mutations within GlyA3B4 introduced by GmGlyA3B4_T02TALE nuclease
gttcatgtacggttgcagatataaacgaagcatagcttatgtatgaggtgtaacaaaattggaaacaatagccatgcaaggtgaagaatgtcaccaactcagaaaccccttcttcattgacgtgtccctcactcactctcctctcttcactataaatcgccactcttcgtgttctccacttcaccaactccttcaaacttattaacactttccttagttcaatatggggaagcccttcttcactctctctctttcttccctttgcttgctactcttgtcgagtgcatattacctccagcaagttcaacgagtgccaactcaacaacctcaacgcgttggaacccgaccaccgcgttgagtccgaaggtggtcttattgaaacatggaactctcaacaccctgagctgcaatgcgccggtgtcactgtttccaaacgcaccctcaaccgcaacggcctccacttgccatcttactcaccttatcccccaaatgatcattgtcgttcaaggtgcgtaatattagtaagaagtatttatcagcttaacgtgataacaatatagtaatatgaaatatttattaaatttttataattaatctctgctagaaaatttgattaatcattttagtagaatttgttttctcaactaggttttaaa

SEQ ID NO: 4632 - DNA, 499 bp, Artificial
  Mutations within GlyA3B4 introduced by GmGlyA3B4_T02TALE nuclease
gttcatgtacggttgcagatataaacgaagcatagcttatgtatgaggtgtaacaaaattggaaacaatagccatgcaaggtgaagaatgtcaccaactcagaaacccttcttcattgacgtgtccctcactcactctcctctcttcactataaatcgccactcttcgtgttctccacttcaccaactccttcaaacttattaacactttccttagttcaatatggggaagcccttcttcactctctctctttcttccctttatgcttgctatctctccgtcaactcagagtgccaactcaacaacctcaacgcgttggaacccgaccaccgcgttgagtcccgaaggtggtcttattgaaacatggaactctcaacaccctgagctgcaatgcgccggtgtcactgtttccaaacgcaccctcaaccgcaacggcctccacttgccatcttactcaccttatcccccaaatgatcattgtcgttcaaggtgcgtaata

SEQ ID NO: 4633 - DNA, 656 bp, Artificial
  Mutations within GlyA3B4 introduced by GmGlyA3B4_T02TALE nuclease
gttcatgtacggttgcagatataaacgaagcatagcttatgtatgaggtgtaacaaaattggaaacaatagccatgcaaggtgaagaatgtcaccaactcagaaacccttcttcattgacgtgtccctcactcactctcctctcttcactataaatcgccactcttcgtgttctccacttcaccaactccttcaaacttattaacactttccttagttcaatatggggaagcccttcttcactctctctctttcttccctttgcttgctactcttgtcgagtgcatattacctccagcaagttcaacgagtgccaactcaacaacctcaacgcgttggaacccgaccaccgcgttgagtccgaaggtggtcttattgaaacatggaactctcaacaccctgagctgcaatgcgccggtgtcactgtttccaaacgcaccctcaaccgcaacggcctccacttgccatcttactcaccttatccccaaatgatcattgtcgttcaaggtgcgtaatattagtaagaagtatttatcagcttaacgtgataacaataatagtaatatgaaatatttattaaatttttataattaatctctgctagaaaatttgattaatcattttagtagaatttgtttttctcaactaggttttaaa

SEQ ID NO: 4634 - DNA, 639 bp, Artificial
  Mutations within GlyA3B4 introduced by GmGlyA3B4_T02TALE nuclease
gttcatgtacggttgcagatataaacgaagcatagcttatgtatgaggtgtaacaaaattggaaacaatagccatgcaaggtgaagaatgtcaccaactcagaaaccccttcttcattgacgtgtccctcactcactctcctctcttcactataaatcgccactcttcgtgttctccacttcaccaactccttcaaacttattaacactttccttagttcaatatggggaagcccttcttcactctctctctttcttccctttgcttgctactcttgtcgagtgcattgctattacctccagcaagttcaacgagtgccaactcaacaacctcaacgcgttggaacccgaccaccgcgttgagtccgaaggtggtcttattgaaacatggaactctcaacaccctgagctgcaatgcgccggtgtcactgtttccaaacgcaccctcaaccgcaacggcctccacttgccatcttactcaccttatccccaaatgatcattgtcgttcaaggtgcgtaatattagtaagaagtatttatcagcttaacgtgataacaataatagtaatatgaaatatttattaaatttttataattaatctctgctagaaaatttgattaatcattttagtagaatttg

SEQ ID NO: 4635 - DNA, 592 bp, Artificial
  Mutations within GlyA3B4 introduced by GmGlyA3B4_T02TALE nuclease
gttcatgtacggttgcagatataaacgaagcatagcttatgtatgaggtgtaacaaaattggaaacaatagccatgcaaggtgaagaatgtcaccaactcagaaaccccttcttcattgacgtgtccctcactcactctcctctcttcactataaatcgccactcttcgtgttctccacttcaccaactccttcaaacttattaacactttccttagttcaatatggggaagcccttcttcactctctctctttcttccccctgcacctccagcaagttcaacgagtgccaactcaacaacctcaacgcgttggaacccgaccaccgcgttgagtccgaaggtggtcttattgaacatggaactctcaacaccctgagctgcaatgcgccggtgtcactgtttccaaacgcaccctcaaccgcaacggcctccacttgccatcttactcaccttatccccaaatgatcattgtcgttcaaggtgcgtaatattagtaagaagtatttatcagcttaacgtgataacaataatagtaatatgaaatatttattaatttttataattaatctctgctagaaaattttattaatc

SEQ ID NO: 4636 - DNA, 654 bp, Artificial
  Mutations within GlyA3B4 introduced by GmGlyA3B4_T02TALE nuclease
gttcatgtacggttgcagatataaacgaagcatagcttatgtatgaggtgtaacaaaattggaaacaatagccatgcaaggtgaagaatgtcaccaactcagaaacccttcttcattgacgtgtccctcactcactctcctctcttcactataaatcgccactcttcgtgttctccacttcaccaactccttcaaacttattaacactttccttagttcaatatggagcatgcccttctcactctctctctttcttccctttgcttgctactcttgtcgagtgcattattacctccagcaagttcaacgagtgccaactcaacaacctcaacgcgttggaacccgaccaccgcgttgagtccgaaggtggtcttattgaaacatggaactctcaacaccctgagctgcaatgcgccggtgtcactgtttccaaacgcaccctcaaccgcaacggcctccacttgccatcttactcaccttatccccaaatgatcattgtcgttcaaggtgcgtaatattagtaagaagtatttatcagcttaacgtgataacaataatagtaatatgaaatatttattaaatttttataattaatctctgctagaaaatttgattaatcattttagtagaatttgtttttctcaactaggtttt

SEQ ID NO: 4637 - DNA, 667 bp, Artificial
  Mutations within GlyA3B4 introduced by GmGlyA3B4_T02TALE nuclease
gttcatgtacggttgcagatataaacgaagcatagcttatgtatgaggtgtaacaaaattggaaacaatagccatgcaaggtgaagaatgtcaccaactcagaaacccttcttcattgacgtgtccctcactcactctcctctcttcactataaatcgccactcttcgtgttctccacttcaccaactccttcaaacttattaacactttccttagttcaatatggggaagcccttcttcactctctctctttcttccctttgcttgctactcttgtcgagtgcatgctattacctccagcaagttcaacgagtgccaactcaacaacctcaacgcgttggaacccgaccaccgcgttgagtccgaaggtggtcttattgaaacatggaactctcaacaccctgagctgcaatgcgccggtgtcactgtttccaaacgcaccctcaaccgcaacggcctccacttgccatcttactcaccttatccccaaatgatcattgtcgttcaaggtgcgtaatattagtaagaagtatttatcagcttaacgtgataacaataatagtaatatgaaatatttattaaatttttataattaatctctgctagaaaatttgattaatcatttttagtagaatttgtttttctcaactaggtttttaaaacacca

SEQ ID NO: 4638 - DNA, 661 bp, Artificial
  Mutations within GlyA3B4 introduced by GmGlyA3B4_T02TALE nuclease
gttcatgtacggttgcagatataaacgaagcatagcttatgtatgaggtgtaacaaaattggaaacaatagccatgcaaggtgaagaatgtcaccaactcagaaacccttcttcattgacgtgtccctcactcactctcctctcttcactataaatcgccactcttcgtgttctccacttcaccaactccttcaaacttattaacactttccttagttcaatatggggaagcccttcttcactctctctctttcttccctttgcttgctactcttgtcgagtgcatacctccagcaagttcaacgagtgccaactcaacaacctcaacgcgttggaacccgaccaccgcgttgagtccgaaggtggtcttattgaaacatggaactctcaacaccctgagctgcaatgcgccggtgtcactgtttccaaacgcaccctcaaccgcaacggcctccacttgccatcttactcaccttatcccccaaatgatcattgtcgttcaaggtgcgtaatattagtaagaagtatttatcagcttaacgtgataacaataatagtaatatgaaatatttattaaatttttataattaatctctgctagaaaatttgattaatcattttagtagaatttgtttttctcaactaggtttttaaaacacca

SEQ ID NO: 4639 - DNA, 590 bp, Artificial
  Mutations within GlyA3B4 introduced by GmGlyA3B4_T02TALE nuclease
gttcatgtacggttgcagatataaacgaagcatagcttatgtatgaggtgtaacaaaattggaaacaatagccatgcaaggtgaagaatgtcacccaactcagaaaccccttcttcattgacgtgtccctcactcactctcctctcttcactataaatcgccactcttcgtgttctccacttcaccaactcccttcaaacttattaacactttccttagttcaatatgggggaagcccttcttcactctctctctttcttccctttgcttgctactcttgtcgagtgcatccagcaagttcaacgagtgccaactcaacaacctcaacgcgttggaacccgaccaccgcgttgagtccgaaggtggtcttattgaaacatggaactctcaacaccctgagctgcaatgcgcaggtgtcactgtttccaaacgccaccctcaaccgcaacggcctccacttgccatcttactcaccttatcccccgaaatgatcattgtcgttcaaaggtgcgtaaatattagtaagaagtatttatcagcttaacgtgataacaataatagtaatatgaaatatttattaaattttttat

SEQ ID NO: 4640 - DNA, 662 bp, Artificial; identical to SEQ ID NO: 2196
  Mutations within GlyA3B4 introduced by GmGlyA3B4_T02TALE nuclease

SEQ ID NO: 4641 - DNA, 632 bp, Artificial
  Mutations within GlyA3B4 introduced by GmGlyA3B4_T02TALE nuclease
gttcatgtacggttgcagatataaacgaagcatagcttatgtatgaggtgtaacaaaattggaaacaatagccatgcaaggtgaagaatgtcaccaactcagaaacccttcttcattgacgtgtccctcactcactctcctctcttcactataaatcgccactcttcgtgttctccacttcaccaactccttcaaacttattaacactttccttagttcaatatggggaagcccttcttcactctctctctttcttccctttgcttgctactcttgtcgagtgcatgtacctccagcaagttcaacgagtgccaactcaacaacctcaacgcgttggaacccgaccaccgcgttgagtccgaaggtggtcttattgaaacatggaactctcaacaccctgagctgcaatgcgccggtgtcactgtttccaaacgcaccctcaaccgcaacggcctccacttgccatcttactcaccttatccccaaatgatcattgtcgttcaaggtgcgtaatattagtaagaagtatttatcagcttaacgtgataacaatatagtaatatgaaatatttattaaatttttataattaatctctgctagaaaatttgattaatcattttagtagaatttg

SEQ ID NO: 4642 - DNA, 659 bp, Artificial
  Mutations within GlyA3B4 introduced by GmGlyA3B4_T02TALE nuclease
gttcatgtacggttgcagatataaacgaagcatagcttatgtatgaggtgtaacaaaattggaaacaatagccatgcaaggtgaagaatgtcaccaactcagaaaccccttcttcattgacgtgtccctcactcactctcctctcttcactataaatcgccactcttcgtgttctccacttcaccaactccttcaaacttattaacactttccttagttcaatatggggaagcccttcttcactctctctctttcttccctttgcttgctactcttgtatgcctattacctccagcaagttcaacgagtgccaactcaacaacctcaacgcgttggaacccgaccaccgcgttgagtccgaaggtggtcttattgaaacatggaactctcaacaccctgagctgcaatgcgccggtgtcactgtttccaaacgcaccctcaaccgcaacggcctccacttgccatcttactcaccttatccccaaatgatcattgtcgttcaaggtgcgtaatattagtaagaagtatttatcagcttaacgtgataacaatatagtaatatgaaaatatttattaaatttttataattaatctctgctagaaaatttgattaatcattttagtagaatttgttttctcaactaggttttaaaacacca

SEQ ID NO: 4643 - DNA, 612 bp, Artificial
  Mutations within GlyA3B4 introduced by GmGlyA3B4_T02TALE nuclease
gttcatgtacggttgcagatataaacgaagcatagcttatgtatgaggtgtaacaaaattggaaacaatagccatgcaaggtgaagaatgtcaccaactcagaaacccttcttcattgacgtgtccctcactcactctcctctcttcactataaatcgccactcttcgtgttctccacttcaccaactccttcaaacttattaacactttccttagttcaatatggggaagcccttcttcactctctctctttcttccctttgcttgctactcttgtcgagtgcatggctgttgccggtgctgtgccaggcccacggcttgacccccccgagcaggtggtggccatcgccaagcaatggcggtggctttgctattacctccagcaagttcaactgagtgccactcaacaacctcaacgcgttggacccgaccaccgcgttgagtccgaaggtggtcttattgaaacatgaactctcacacctgagctgcaatgcgccggtgtcactgtttccaaacgcaccctcaaccgcaacggcctccacttgccatcttactcacctttatccccaaatgatcattgtcgttcaaggtgcgtaatattagtaagaagta

SEQ ID NO: 4644 - DNA, 644 bp, Artificial
  Mutations within GlyA3B4 introduced by GmGlyA3B4_T02TALE nuclease
gttcatgtacggttgcagatataaacgaagcatagcttatgtatgaggtgtaacaaaattggaaacaatagccatgcaaggtgaagaatgtcaccaactcagaaaccccttcttcattgacgtgtccctcactcactctcctctcttcactataaatcgccactcttcgtgttctccacttcaccaactccttcaaacttattaacactttccttagttcaatatggggaagcccttcttcactctctctctttcttccctttgcttgctactcttgtcgagtgcatgattgcaaaacgtggcggcgtgaccgcagtggaggcagtgcatgcatggcgcaatgcactgacgggtgccccgcttattacctccagcaagttcaacgagtgccaactcaacaacctcaacgcgttggaacccgaccaccgcgttgagtccgaaggtggtcttattgaaacatggaactctcaacaccctgagctgcaatgcgccggtgtcactgttttccaaacgcaccctcaaccgcaacggcctccacttgccatctttactcaccttatccccaaatgatcattgtcgttcaaggtgcgtaatattagtaagaagtatttatcagctaacgtgataacaataatagtaatatg

SEQ ID NO: 4645 - DNA, 743 bp, Artificial
  Mutations within GlyA3B4 introduced by GmGlyA3B4_T02TALE nuclease
gttcatgtacggttgcagatataaacgaagcatagcttatgtatgaggtgtaacaaaattggaaacaatagccatgcaaggtgaagaatgtcaccaactcagaaacccttcttcattgacgtgtccctcactcactctcctctcttcactataaatcgccactcttcgtgttctccacttcaccaactccttcaaacttattaacactttccttagttcaatatggggaagcccttcttcactctctctctttcttccctttgcttgctactcttgtcgagtgcatctgcttgccaccgccattgctggcgatggccaccacctgctggggggtcaagccgtgggcctggcacagcaccggcaacagccgctgctattacctccagcaagttcaacgagtgccaactcaacaacctcaacgcgttggaacccgaccaccgcgttgagtccgaaggtggtcttattgaaacatggaactctcaacaccctgagctgcaatgcgccggtgtcactgtttccaaacgcaccctcaaccgcaacggcctccacttgccatcttactcaccttatccccaaatgatcattgtcgttcaaggtgcgtaatattagtaagaagtatttatcagcttaacgtgataacaataatagtaatatgaaaatatttattaaattttttataattaatctctgctagaaaatttgataatcatttttagtagaatttgtttttctcaactaggttt

SEQ ID NO: 4646 - DNA, 667 bp, Artificial
  Mutations within GlyA3B4 introduced by GmGlyA3B4_T02TALE nuclease
gttcatgtacggttgcagatataaacgaagcatagcttatgtatgaggtgtaacaaaaattggaaacaatagccatgcaaggtgaagaatgtcaccaactcagaaacccttcttcattgacgtgtccctcactcactctcctctcttcactataaatcgccactcttcgtgttctccacttcaccaactccttcaaacttattaacactttccttagttcaatatggggaagcccttcttcactctctctctttcttccctttgcttgctactcttgtcgagtgcatgctattacctccagcaagttcaacgagtgccaactcaacaacctcaacgcgttggaacccgaccaccgcgttgagtccgaaggtggtcttattgaaacatggaactctcaacaccctgagctgcaatgcgccggtgtcactgtttccaaacgcaccctcaaccgcaacggcctccacttgccatcttactcaccttatccccaaatgatcattgtcgttcaaggtgcgtaatattagtaagagtatttatcagcttaacgtgataacaatatagtaatatgaaatatttattaaatttttataattaatctctgctagaaaatttgattaatcattttagtagaatttgtttttctcaactaggtttttaaaacaccaca

SEQ ID NO: 4647 - DNA, 632 bp, Artificial
  Mutations within GlyA3B4 introduced by GmGlyA3B4_T02TALE nuclease
gttcatgtacggttgcagatataaacgaagcatagcttatgtatgaggtgtaacaaaattggaaacaatagccatgcaaggtgaagaatgtcaccaactcagaaacccttcttcattgacgtgtccctcactcactctcctctcttcactataaatcgccactcttcgtgttctccacttcaccaactccttcaaacttattaacactttccttagttcaatatggggaagcccttcttcactctctctctttcttccctttgcttgctactcttgtcgttgctattacctccagcaagttcaacgagtgccaactcaacaacctcaacgcgttggaacccgaccaccgcgttgagtccgaaggtggtcttattgaaacatggaactctcaacaccctgagctgcaatgcgccggtgtcactgtttccaaacgcaccctcaaccgcaacggcctccacttgccatcttactcaccttatcccccaaatgatcattgtcgttcaaggtgcgtaatattagtaagaagtatttatcagcttaacgtgatacaataatagtaatatgaaatatttattaaatttttataattaatctctgctagaaaatttgattaatcattttagtagaatttg

SEQ ID NO: 4648 - DNA, 436 bp, Artificial
  Mutations within GlyA3B4 introduced by GmGlyA3B4_T02TALE nuclease
gttcatgtacggttgcagatataaacgaagcatagcttatgtatgaggtgtaacaaaattggaaacaatagccatgcaaggtgaagaatgtcaccaactcagaaaccccttcttcattgacgtgtccctcactcactctcctctcttcactataaatcgccactcttcgtgttctccacttcaacaacctcaacgcgttggaaccccgaccaccgcgttgagtccgaaggtggtcttattgaaacatggaactctcaacaccctgagctgcaatgcgccggtgtcactgtttccaaacgcaccctcaaccgcaacggcctccacttgccatcttactcaccttatccccaaatgatcattgtcgttcaaggtgcgtaatattagtaagaagtattttatcagcttaacgtgataacaataatagtaatatgaaata

SEQ ID NO: 4649 - DNA, 668 bp, Artificial
  Mutations within GlyA3B4 introduced by GmGlyA3B4_T02TALE nuclease
gttcatgtacggttgcagatataaacgaagcatagcttatgtatgaggtgtaacaaaaattggaaacaatagccatgcaaggtgaagaatgtcaccaactcagaaaccccttcttcattgacgtgtccctcactcactctcctctcttcactataaatcgccactcttcgtgttctccacttcaccaactccttcaaacttattaacactttccttagttcaatatgggggaagcccttcttcactctctctctttcttccctttgcttgctactcttgtcgagtgcatgctattacctccagcaagttcaacgagtgccaactcaacaacctcaacgcgttggaacccgaccaccgcgttgagtccgaaggtggtcttattgaaacatggaactctcaacaccctgagctgcaatgcgccggtgtcactgtttccaaacgcaccctcaaccgcaacggcctccacttgccatcttactcaccttatccccaaatgatcattgtcgttcaaggtgcgtaatattagtaagagtatttatcagcttaacgtgataacaataatagtaatatgaaatatttattaaatttttataattaatctctgctagaaaatttgattaatcattttagtagaatttgttttctcaactaggttttaaaacaccaca

SEQ ID NO: 4650 - DNA, 573 bp, Artificial
  Mutations within GlyA3B4 introduced by GmGlyA3B4_T02TALE nuclease
gttcatgtacggttgcagatataaacgaagcatagcttatgtatgaggtgtaacaaaaattggaaacaatagccatgcaaggtgaagaatgtcaccaactcagaaacccttcttcattgacgtgtccctcactcactctcctctcttcactataaatcgccactcttcgtgttctccacttcaccaactccttcaaacttattaacactttccttagttcaatatggggaagcccttcttcactctctctctttcttccctttgcttgctactctttgctattacctccagcaagttcaacgagtgccaactcaacaacctcaacgcgttggaacccgaccaccgcgttgagtccgaaggtggtcttattgaaacatggaactctcaacaccctgagctgcaatgcgccggtgtcactgtttccaaacgcaccctcaaccgcaacggcctccacttgccatcttactcaccttatccccaaatgatcattgtcgttcaaaggtgcgtaaatattagtaagaagtatttatcagcttaacgtgataacaataatagtaatatgaaatatttatt

SEQ ID NO: 4651 - DNA, 639 bp, Artificial
  Mutations within GlyA3B4 introduced by GmGlyA3B4_T02TALE nuclease
gttcatgtacggttgcagatataaacgaagcatagcttatgtatgaggtgtaacaaaattggaaacaatagccatgcaaggtgaagaatgtcaccaactcagaaaccccttcttcattgacgtgtcccctcactcactctcctctcttcactataaatcgccactcttcgtgttctccacttcaccaactccttcaaacttattaacactttccttagttcaatatggggaagcccttcttcactctctctctttcttccctttgcttgctactcttgtcgagtgcattgctattacctccagcaagttcaacgagtgccaactcaacaacctcaacgcgttggaacccgaccaccgcgttgagtccgaaggtggtcttattgaaacatggaactctcaacaccctgagctgcaatgcgccggtgtcactgtttccaaacgcaccctcaaccgcaacggcctccacttgccatcttactcaccttatccccaaatgatcattgtcgttcaaggtgcgtaatattagtaagagtatttatcagcttaacgtgataacaataatagtaatatgaaatatttattaaatttttataattaatctctgctagaaaatttgattaatcattttagtagaatttg

SEQ ID NO: 4652 - DNA, 629 bp, Artificial
  Mutations within GlyA3B4 introduced by GmGlyA3B4_T02TALE nuclease
gttcatgtacggttgcagatataaacgaagcatagcttatgtatgaggtgtaacaaaattggaaacaatagccatgcaaggtgaagaatgtcaccaactcagaaacccttcttcattgacgtgtccctcactcactctcctctcttcactataaatcgccactcttcgtgttctccacttcaccaactccttcaaacttattaacactttccttagttcaatatggggaagcccttcttcactctctctctttcttccctttgcttgctactcttgtcgagtgccaactcaacaacctcaacgcgttggaacccgaccaccgcgttgagtccgaaggtggtcttattgaaacatggaactctcaacaccctgagctgcaatgcgccggtgtcactgtttccaaacgcaccctcaaccgcaacggcctccacttgccatcttactcaccttatccccaaatgatcattgtcgttcaaggtgcgtaatattagtaagaagtatttatcagcttaacgtgataacaataatagtaatatgaaatatttattaatttttataattaatctctgctagaaaatttgattaatcatttttagtagaatttgtttttctcaactaggttttaaaca

SEQ ID NO: 4653 - DNA, 646 bp, Artificial
  Mutations within GlyA3B4 introduced by GmGlyA3B4_T02TALE nuclease
gttcatgtacggttgcagatataaacgaagcatagcttatgtatgaggtgtaacaaaattggaaacaatagccatgcaaggtgaagaatgtcaccaactcagaaacccttcttcattgacgtgtccctcactcactctcctctcttcactataaatcgccactcttcgtgttctccacttcaccaactccttcaaacttattaacactttccttagttcaatatggggaagcccttcttcactctctctctttcttccctttgcttgctactcttgtcgagtgcatacctccagcaagttcaacgagtgccaactcaacaacctcaacgcgttggaacccgaccaccgcgttgagtccgaaggtggtcttattgaaacatggaactctcaacaccctgagctgcaatgcgccggtgtcactgtttccaaacgcaccctcaaccgcaacggcctccacttgccatcttactcaccttatccccaaatgatcattgtcgttcaaggtgcgtaatattagtaagaagtatttatcagcttaacgtgataacaataatagtaatatgaaatatttattaaatttttataattaatctctgctagaaaatttgattaatcattttagtagaatttgtttttctcaactagg

SEQ ID NO: 4654 - DNA, 649 bp, Artificial
  Mutations within GlyA3B4 introduced by GmGlyA3B4_T02TALE nuclease
gttcatgtacggttgcagatataaacgaagcatagcttatgtatgaggtgtaacaaaattggaaacaatagccatgcaaggtgaagaatgtcaccaactcagaaacccttcttcattgacgtgtccctcactcactctcctctctcactataaatcgccactcttcgtgttctccacttcaccaactccttcaaacttattaacactttccttagttcaatatggggaagcccttcttcactctctctctttcttccctttgcttgctactcttgtcgagtgcatgcattacctccagcaagttcaacgagtgccaactcaacaacctcaacgcgttggaacccgaccaccgcgttgagtccgaaggtggtcttattgaaacatggaactctcaacaccctgagctgcaatgcgccggtgtcactgtttccaaacgcaccctcaaccgcaacggcctccacttgccatcttactcaccttatccccaaatgatcattgtcgttcaaggtgcgtaatattagtaagaagtatttatcagcttaacgtgataacaataatagtaatatgaaatatttattaaatttttataattaatctctgctagaaaatttgattaatcattttagtagaatttgttttctcaactagg

SEQ ID NO: 4655 - DNA, 645 bp, Artificial
  Mutations within GlyA3B4 introduced by GmGlyA3B4_T02TALE nuclease
gttcatgtacggttgcagatataaacgaagcatagcttatgtatgaggtgtaacaaaattggaaacaatagccatgcaaggtgaagaatgtcaccaactcagaaacccttcttcattgacgtgtccctcactcactctcctctcttcactataaatcgccactcttcgtgttctccacttcaccaactccttcaaacttattaacactttccttagttcaatatggggaagcccttcttcactctctctctttcttccctttgcttgctactcttgtcgagtgcatcaagttcaacgagtgccaactcaacaacctcaacgcgttggaacccgaccaccgcgttgagtccgaaggtggtcttattgaaacatggaactctcaacaccctgagctgcaatgcgccggtgtcactgtttccaaacgcaccctcaaccgcaacggcctccacttgccatcttactcaccttatccccaaatgatcattgtcgttcaaggtgcgtaatattagtaagaagtatttatcagcttaacgtgataacaataatagtaatatgaaatatttattaaattttttataattaatctctgctagaaaatttgattaatcatttttagtagaatttgttttttctcaactaggtttt

SEQ ID NO: 4656 - DNA, 654 bp, Artificial
  Mutations within GlyA3B4 introduced by GmGlyA3B4_T02TALE nuclease
gttcatgtacggttgcagatataaacgaagcatagcttatgtatgaggtgtaacaaaattggaaacaatagccatgcaaggtgaagaatgtcaccaactcagaaacccttcttcattgacgtgtccctcactcactctcctctcttcactataaatcgccactcttcgtgttctccacttcaccaactccttcaaacttattaacactttccttagttcaatatggggaagcccttcttcactctctctctttcttccctttgcttgctactcttgtcgagtgcatgctattacctccagcaagttcaacgagtgccaactcaacaacctcaacgcgttggaacccgaccaccgcgttgagtccgaaggtggtcttattgaaacatggaactctcaacaccctgagctgcaatgcgccggtgtcactgtttccaaacgcaccctcaaccgcaacggcctccacttgccatcttactcaccttatccccaaatgatcattgtcgttcaaggtgcgtaatattagtaagagtatttatcagcttaacgtgatacaatatagtaatatgaaatatttattaaatttttataattaatctctgctagaaaatttgattaatcattttagtagaatttgtttttctcaactaggttttt

SEQ ID NO: 4657 - DNA, 650 bp, Artificial
  Mutations within GlyA3B4 introduced by GmGlyA3B4_T02TALE nuclease
gttcatgtacggttgcagatataaacgaagcatagcttatgtatgaggtgtaacaaaattggaaacaatagccatgcaaggtgaagaatgtcaccaactcagaaaccccttcttcattgacgtgtccctcactcactctcctctcttcactataaatcgccactcttcgtgttctccacttcaccaactccttcaaacttattaacactttccttagttcaatatggggaagcccttcttcactctctctctttcttccctttgcttgctactcttgtcgagtgcactattacctccagcaagttcaacgagtgccaactcaacaacctcaacgcgttggaacccgaccaccgcgttgagtccgaaggtggtcttattgaaacatggaactctcaacaccctgagctgcaatgcgccggtgtcactgtttccaaacgcaccctcaaccgcaacggcctccacttgccatcttactcaccttatccccaaatgatcattgtcgttcaaggtgcgtaatattagtaagaagtatttatcagcttaacgtgataacaataatagtaatatgaaatatttattaaatttttataattaatctctgctagaaaatttgattaatcattttagtagaatttgttttctcaactagg

SEQ ID NO: 4658 - DNA, 646 bp, Artificial
  Mutations within GlyA3B4 introduced by GmGlyA3B4_T02TALE nuclease
  misc_feature (531): n is a or c or t or g
gttcatgtacggttgcagatataaacgaagcatagcttatgtatgaggtgtaacaaaattggaaacaatagccatgcaaggtgaagaatgtcaccaactcagaaaccccttcttcattgacgtgtccctcactcactctcctctcttcactataaatcgccactcttcgtgttctccacttcaccaactccttcaaacttattaacactttccttagttcaatatgggggaagcccttcttcactctctctctttcttccctttgcttgctactcttgtcgagtgcatgctattacctccagcaagttcaacgagtgccaactcaacaacctcaacgcgtggaacccgaccaccgcgttgagtccgaaggtggtcttattgaaacatggaactctcaacaccctgagctgcaatgcgccggtgtcactgtttccaaacgcaccctcaaccgcaacggcctccacttgccatcttactcaccttatccccaaatgatcattgtcgttcaaggtgcgtaatattagtaagagnatttatcagcttaacgtgataacaatatagtaatatgaaatatttattaaatttttataattaatctctgctagaaaatttgattaatcattttagtagaatttgttttctcaac

SEQ ID NO: 4659 - DNA, 636 bp, Artificial; identical to SEQ ID NO: 1845
  Mutations within GlyA3B4 introduced by GmGlyA3B4_T02TALE nuclease

SEQ ID NO: 4660 - DNA, 663 bp, Artificial
  Mutations within GlyA3B4 introduced by GmGlyA3B4_T02TALE nuclease
gttcatgtacggttgcagatataaacgaagcatagcttatgtatgaggtgtaacaaaaattggaaacaatagccatgcaaggtgaagaatgtcaccaactcagaaacccttcttcattgacgtgtccctcactcactctcctctcttcactataaatcgccactcttcgtgttctccacttcaccaactccttcaaacttattaacactttccttagttcaatatggggaagcccttcttcactctctctctttcttccctttgcttgctactcttgtcgagttgctattacctccagcaagttcaacgagtgccaactcaacaacctcaacgcgttggaacccgaccaccgcgttgagtccgaaggtggtcttattgaaacatggaactctcaacaccctgagctgcaatgcgccggtgtcactgtttccaaacgcaccctcaaccgcaacggcctcccacttgccatcttactcaccttatccccaaatgatcattgtcgttcaaggtgcgtaatattagtaagaagtatttatcagcttaacgtgataacaataatagtaatatgaaatatttattaaatttttataattaatctctgctagaaaatttgattaatcattttagtagaatttgtttttctcaactaggttttaaacacca

SEQ ID NO: 4661 - DNA, 666 bp, Artificial
  Mutations within GlyA3B4 introduced by GmGlyA3B4_T02TALE nuclease
gttcatgtacggttgcagatataaacgaagcatagcttatgtatgaggtgtaacaaaattggaaacaatagccatgcaaggtgaagaatgtcaccaactcagaaacccttcttcattgacgtgtccctcactcactctcctctcttcactataaatcgccactcttcgtgttctccacttcaccaactccttcaaacttattaacactttccttagttcaatatggggaagcccttcttcactctctctctttcttccctttgcttgctactcttgtcgagtgcatttgctattacctccagcaagttcaacgagtgccaactcaacaacctcaacgcgttggaacccgaccaccgcgttgagtccgaaggtggtcttattgaaacatggaactctcaacaccctgagctgcaatgcgccggtgtcactgtttccaaacgcaccctcaaccgcaacggcctccacttgccatcttactcaccttatccccaaatgatcattgtcgttcaaggtgcgtaatattagtaagagtatttatcagcttaacgtgataacaatatagtaatatgaaatatttattaaatttttataattaatctctgctagaaaatttgattaatcattttagtagaatttgtttttctcaactaggtttttaaaacacca

SEQ ID NO: 4662 - DNA, 654 bp, Artificial
  Mutations within GlyA3B4 introduced by GmGlyA3B4_T02TALE nuclease
  misc_feature (283); (529): n is a or c or t or g
gttcatgtacggttgcagatataaacgaagcatagcttatgtatgaggtgtaacaaaaattggaaacaatagccatgcaaggtgaagaatgtcaccaactcagaaacccttcttcattgacgtgtccctcactcactctcctctcttcactataaatcgccactcttcgtgttctccacttcaccaactccttcaaacttattaacactttccttagttcaatatggggaagcccttcttcactctctctctttcttccctttgcttgctactcttgtcgagnttgctattacctccagcaagttcaacgagtgccaactcaacaacctcaacgcgttggaacccgaccaccgcgttgagtccgaaggtggtcttattgaaacatggaactctcaacaccctgagctgcaatgcgccggtgtcactgtttccaaacgcaccctcaaccgcaacggcctccacttgccatcttactcaccttatccccaaatgatcattgtcgttcaaggtgcgtaatattagtaagagnatttatcagcttaacgtgatacaatatagtaatatgaaatatttattaaatttttataattaatctctgctagaaaatttgattaatcattttagtagaatttgtttttctcaactaggttttaa

SEQ ID NO: 4663 - DNA, 664 bp, Artificial; identical to SEQ ID NO: 4327
  Mutations within GlyA3B4 introduced by GmGlyA3B4_T02TALE nuclease

SEQ ID NO: 4664 - DNA, 646 bp, Artificial
  Mutations within GlyA3B4 introduced by GmGlyA3B4_T02TALE nuclease
gttcatgtacggttgcagatataaacgaagcatagcttatgtatgaggtgtaacaaaattggaaacaatagccatgcaaggtgaagaatgtcaccaactcagaaaccccttcttcattgacgtgtccctcactcactctcctctcttcactataaatcgccactcttcgtgttctccacttcaccaactccttcaaacttattaacactttccttagttcaatatggggaagcccttcttcactctctctctttcttccctttgcttgctactcttgtcgagtgcatccagcaagttcaacgagtgccaactcaacaacctcaacgcgttggaacccgaccaccgcgttgagtccgaaggtggtcttattgaaacatggaactctcaacaccctgagctgcaatgcgccggtgtcactgtttccaaacgcaccctcaaccgcaacggcctccacttgccatcttactcaccttatccccaaatgatcattgtcgttcaaggtgcgtaaatattagtaagaagtatttatcagcttaacgtgataacaataatagtaatatgaaatatttattaaatttttataattaatctctgctagaaaatttgattaatctttttagtagaattgtttttctcaactaggttt

SEQ ID NO: 4665 - DNA, 645 bp, Artificial; identical to SEQ ID NO: 2653
  Mutations within GlyA3B4 introduced by GmGlyA3B4_T02TALE nuclease

SEQ ID NO: 4666 - DNA, 666 bp, Artificial
  Mutations within GlyA3B4 introduced by GmGlyA3B4_T02TALE nuclease
  misc_feature (537): n is a or c or t or g
gttcatgtacggttgcagatataaacgaagcatagcttatgtatgaggtgtaacaaaattggaaacaatagccatgcaaggtgaagaatgtcaccaactcagaaacccttcttcattgacgtgtccctcactcactctcctctcttcactataaatcgccactcttcgtgttctccacttcaccaactccttcaaacttattaacactttccttagttcaatatgggggaagcccttcttcactctctctctttcttccctttgcttgctactcttgtcgagtgcatgctattacctccagcaagttcaacgagtgccaactcaacaacctcaacgcgttggaacccgaccaccgcgttgagtccgaaggtggtcttattgaaacatggaactctcaacaccctgagctgcaatgcgccggtgtcactgtttccaaaacgcaccctcaaccgcaacggcctccacttgccatcttactcaccttatcccccaaaatgatcattgtcgttcaaagggtgcgtaatattagtaagaagnatttatcagcttaacgtgataacaataatagtaatatgaaaatatttattaaatttttataattaatctctgctagaaaatttgattaatcattttagtagaatttgttttctcaactaggttttaaaa

SEQ ID NO: 4667 - DNA, 610 bp, Artificial
  Mutations within GlyA3B4 introduced by GmGlyA3B4_T02TALE nuclease
gttcatgtacggttgcagatataaacgaagcatagcttatgtatgaggtgtaacaaaattggaaacaatagccatgcaaggtgaagaatgtcaccaactcagaaacccttcttcattgacgtgtccctcactcactctcctctcttcactataaatcgccactcttcgtgttctccacttcaccaactccttcaaacttattaacactttccttagttcaatatggggaagcccttcttcactctctctctttcttccctccagcaagttcaacgagtgccaactcaacaacctcaacgcgttggaaccgaccaccgcgttgagtccgaaggtggtcttattgaaacatggaactctcaacaccctgagctgcaatgcgccggtgtcactgtttccaaacgcaccctcaaccgcaacggcctccacttgccatcttactcaccttatccccaaatgatcattgtcgttcaaggtgcgtaatattagtaagaagtatttatcagcttaacgtgataacaataatagtaatatgaaatatttattaatttttataattaatctctgctagaaatttgattaatcatttttagtagaatttgtttttctcaac

SEQ ID NO: 4668 - DNA, 656 bp, Artificial
  Mutations within GlyA3B4 introduced by GmGlyA3B4_T02TALE nuclease
  misc_feature (42): n is a or c or t or g
gttcatgtacggttgcagatataaacgaagcatagcttatgnatgaggtgtaacaaaattggaaacaatagccatgcaaggtgaagaatgtcaccaactcagaaacccttcttcattgacgtgtccctcactcactctcctctcttcactataaatcgccactcttcgtgttctccacttcaccaactccttcaaacttattaacactttccttagttcaatatggggaagcccttcttcactctctctctttcttccctttgcttgctactcttgtcgagtgcatattacctccagcaagttcaacgagtgccaactcaacaacctcaacgcgttggaacccgaccaccgcgttgagtccgaaggtggtcttattgaaacatggaactctcaacaccctgagctgcaatgcgccggtgtcactgtttccaaacgcaccctcaaccgcaacggcctccacttgccatcttactcaccttatccccaaatgatcattgtcgttcaaggtgcgtaatattagtaagaagtatttatcagcttaacgtgataacaataatagtaatatgaaatatttattaaatttttataattaatctctgctagaaaatttgattaatcattttagtagaatttgttttctcaactaggttttaaaa

SEQ ID NO: 4669 - DNA, 665 bp, Artificial
  Mutations within GlyA3B4 introduced by GmGlyA3B4_T02TALE nuclease
  misc_feature (540): n is a or c or t or g
gttcatgtacggttgcagatataaacgaagcatagcttatgtatgaggtgtaacaaaattggaaacaatagccatgcaaggtgaagaatgtcaccaactcagaaacccttcttcattgacgtgtccctcactcactctcctctcttcactataaatcgccactcttcgtgttctccacttcaccaactccttcaaacttattaacactttccttagttcaatatggggaagcccttcttcactctctctctttcttccctttgcttgctactcttgtcgagtgcatgcttctttgctattacctccagcaagttcaacgagtgccaactcaacaacctcaacgcgttggaacccgaccaccgcgttgagtccgaaggtggtcttattgaaacatggaactctcaacaccctgagctgcaatgcgccggtgtcactgtttccaaacgcaccctcaaccgcaacggcctccacttgccatcttactcaccttatcccccaaaatgatcattgtcgttcaaggtgcgtaatattagtaagagnatttatcagcttaacgtgataacaataatagtaatataaaatatttattaaatttttataattaatctctgctagaaaatttgattaatcattttagtagaatttgtttttctcaactaggtttt

SEQ ID NO: 4670 - DNA, 588 bp, Artificial
  Mutations within GlyA3B4 introduced by GmGlyA3B4_T02TALE nuclease
gttcatgtacggttgcagatataaacgaagcatagcttatgtatgaggtgtaacaaaattggaaacaatagccatgcaaggtgaagaatgtcaccaactcagaaacccttcttcattgacgtgtccctcactcactctcctctcttcactataaaatcgccactcttcgtgttctccacttcaccaaactccttcaaacttattaacactttccttagttcaatatgggggaagcccttcttcactctctctctttcttccctttgcttgctactcttgtcgagtgcatcattacttacctccagcaaagttcaacgagtgccaactcaacaacctcaacgcgttggaacccgaccaccgcgttgagtccgaagtaggtcttattgaaacatggaactctcaacaccctgagctgcaatgcgccggtgtcactgtttccaaacgcaaccctcaaccgcaacggcctccacttgccaatcttactcaccttatcccccaaaatgatcattgtcgttcaaggtgcgtaatattagtaaagaaagtattttatcagcttaacgtgataacaataatagtaatatgaaaata

SEQ ID NO: 4671 - DNA, 664 bp, Artificial
  Mutations within GlyA3B4 introduced by GmGlyA3B4_T02TALE nuclease
gttcatgtacggttgcagatataaacgaagcatagcttatgtatgaggtgtaacaaaattggaaacaatagccatgcaaggtgaagaatgtcaccaactcagaaaccccttcttcattgacgtgtccctcactcactctcctctcttcactataaatcgccactcttcgtgttctccacttcaccaactccttcaaacttattaacactttccttagttcaatatggggaagcccttcttcactctctctctttcttccctttgcttgctactcttgtcgagtgcattattacctccagcaagttcaacgagtgccaactcaacaacctcaacgcgttggaacccgaccaccgcgttgagtccgaaggtggtcttattgaaacatggaactctcaacaccctgagctgcaatgcgccggtgtcactgtttccaaacgcaccctcaaccgcaacggcctccacttgccatcttactcaccttatcccccaaatgatcattgtcgttcaaggtgcgtaatattagtaagaagtatttatcagcttaacgtgataacaatatagtaatatgaaatatttattaaatttttataattaatctctgctagaaaatttgattaatcattttagtagaatttgtttttctcaactaggtttttaaacacca

SEQ ID NO: 4672 - DNA, 670 bp, Artificial
  Mutations within GlyA3B4 introduced by GmGlyA3B4_T02TALE nuclease
gttcatgtacggttgcagatataaacgaagcatagcttatgtatgaggtgtaacaaaattggaaacaatagccatgcaaggtgaagaatgtcaccaactcagaaacccttcttcattgacgtgtccctcactcactctcctctcttcactataaatcgccactcttcgtgttctccacttcaccaactccttcaaacttattaacactttccttagttcaatatggggaaagcccttcttcactctctctctttcttccctttgcttgctactcttgtcgagtgcatgctattacctccagcaagttcaacgagtgccaactcaacaacctcaacgcgttggaacccgaccaccgcgttgagtccgaaggtggtcttattgaaacatggaactctcaacaccctgagctgcaatgcgccggtgtcactgtttccaaacgcaccctcaaccgcaacggcctccacttgccatcttactcaccttatcccccaaatgatcattgtcgttcaaggtgcgtaatattagtaagagtatttatcagcttaacgtgataacaatatagtaatatgaaaatatttattaaatttttataattaatctctgctagaaaatttgattaatcatttttagtagaatttgtttttctcaactaggtttttaaaacaccaca

SEQ ID NO: 4673 - DNA, 602 bp, Artificial
  Mutations within GlyA3B4 introduced by GmGlyA3B4_T02TALE nuclease
gttcatgtacggttgcagatataaacgaagcatagcttatgtatgaggtgtaacaaaattggaaacaatagccatgcaaggtgaagaatgtcaccaactcagaaacccttcttcattgacgtgtccctcactcactctcctctcttcactataaatcgccactcttcgtgttctccacttcaccaactccttcaaacttattaacactttccttagttcaatatggggaagcccttcttcactccagcaagttcaacgagtgccaactcaacaacctcaacgcgttggaacccgaccaccgcgttgagtccgaaggtggtcttattgaacatggaactctcaacaccctgagctgcaatgcgccggtgtcactgtttccaaacgcaccctcaaccgcaacggcctccacttgccatcttactcaccttatccccaaaatgatcattgtcgttcaaggtgcgtaatattagtaagaagtatttatcagcttaacgtgataacaataatagtaatatgaaatatttattaaattttttataattaatctctgctagaaaatttgattaatcatttttagtagaatttgtttttctcaacttagg

SEQ ID NO: 4674 - DNA, 525 bp, Artificial
  Mutations within GlyA3B4 introduced by GmGlyA3B4_T02TALE nuclease
gttcatgtacggttgcagatataaacgaagcatagcttatgtatgaggtgtaacaaaattggaaacaatagccatgcaaggtgaagaatgtcaccaactcagaaacccttcttcattgacgtgtccctcactcactctcctctcttcactataaatcgccactcttcgtgttctccacttcaccaactccttcaaacttattaacactttccttagttcaatatggggaagcccttcttcactctctctctttcttccctttgcttgctactcttgtcgagtgcataccctgagctgcaatgcgccggtgtcactgtttccaaacgcaccctcaaccgcaacggcctccacttgccatcttactcacccttatccccaaatgatcattgtcgttcaaggtgcgtaatattagtaagaagtatttatcagcttaacgtgataacaataatagtaatatgaaatatttattaaattttttataattaatcctctgctaagaaatttgattaatcatttttagtagaa

SEQ ID NO: 4675 - DNA, 651 bp, Artificial
  Mutations within GlyA3B4 introduced by GmGlyA3B4_T02TALE nuclease
gttcatgtacggttgcagatataaacgaagcatagcttatgtatgaggtgtaacaaaattggaaacaatagccatgcaaggtgaagaatgtcaccaactcagaaacccttcttcattgacgtgtccctcactcactctcctctcttcactataaatcgccactcttcgtgttctccacttcaccaactccttcaaacttattaacactttccttagttcaatatggggaagcccttcttcactctctctctttcttccctttgcttgctactcttgtcgagtgcctattacctccagcaagttcaacgagtgccaactcaacaacctcaacgcgttggaacccgaccaccgcgttgagtccgaaggtggtcttattgaaacatggaactctcaacaccctgagctgcaatgcgccggtgtcactgtttccaaacgcaccctcaaccgcaacggcctccacttgccatcttactcaccttatccccaaatgatcattgtcgttcaaggtgcgtaatattagtaagaagtatttatcagcttaacgtgataacaatatagtaatatgaaatatttattaaatttttataattaatctctgctagaaaatttgattaatcattttagtagaatttgttttctcaactaggtttt

SEQ ID NO: 4676 - DNA, 619 bp, Artificial
  Mutations within GlyA3B4 introduced by GmGlyA3B4_T02TALE nuclease
  misc_feature (42); (142); (189); (452); (500): n is a or c or t or g
gttcatgtacggttgcagatataaacgaagcatagcttatgnatgaggtgtaacaaaattggaaaacaatagccatgcaaggtgaagaatgtcaccaactcagaaacccttcttcattgacgtgtccctcactcactctccnctcttcactataaatcgccactcttcgtgttctccacttcaccaacnccttcaaacttattaacacttttccttagttcaatatggggaagcccttcttcactctctctctttcttccctttgcttgctactcttgtcgagtgcatttacctccagcaagttcaacgagtgccaactcaacaacctcaacgcgttggaacccgaccaccgcgttgagtccgaaggtggtcttattgaaacatggaactctcaacaccctgagctgcaatgcgccggtgtcactgtttccaaacgcaccctcaaccgcaanggcctccacttgccatcttactcacccttatcccccaaatgatcattntcgttcaaggtgcgtaatattagtaagaagtatttatcagcttaacgtgataacaataatagtaatatgaaatatttattaaatttttataattaatctctgctagaaaatttgattaa

SEQ ID NO: 4677 - DNA, 632 bp, Artificial; identical to SEQ ID NO: 2137
  Mutations within GlyA3B4 introduced by GmGlyA3B4_T02TALE nuclease

SEQ ID NO: 4678 - DNA, 570 bp, Artificial
  Mutations within GlyA3B4 introduced by GmGlyA3B4_T02TALE nuclease
gttcatgtacggttgcagatataaacgaagcatagcttatgtatgaggtgtaacaaaattggaaacaatagccatgcaaggtgaagaatgtcaccaactcagaaacccttcttcattgacgtgtccctcactcactctcctctcttcactataaatcgccactcttcgtgttctccacttcaccaactccttcaaacttattaacactttccttagttcaatatggggaagcccttcttcactctctctctttcgttcctccagcaagttcaacgagtgccaactcaacaacctcacgcgtggaaccgaccaccgcgttgagtccgaaggtggtcttattgaaacatggaactctcaacaccctgagctgcaatgcgccggtgtcactgtttccaaacgcaccctcaaccgcaacggcctccacttgccatcttactcaccttatccccaaatgatcattgtcgttcaaggtgcgtaatattagtaagaagtatttatcagcttaacgtgataacaataatagtaatatgaaatatttattaatttttataattaatctctgctagaaaa

SEQ ID NO: 4679 - DNA, 663 bp, Artificial
  Mutations within GlyA3B4 introduced by GmGlyA3B4_T02TALE nuclease
gttcatgtacggttgcagatataaacgaagcatagcttatgtatgaggtgtaacaaaattggaaacaatagccatgcaaggtgaagaatgtcaccaactcagaaaccccttcttcattgacgtgtccctcactcactctcctctcttcactataaatcgccactcttcgtgttctccacttcaccaactccttcaaacttattaacactttccttagttcaatatggggaagcccttcttcactctctctctttcttccctttgcttgctactcttgtcgagtgcagagttattctttgataaatgatgactatgagtcagactcaatagaatttgatcaatccttttttctgtcgtaaggtagaaaactgaactattacctccagcaagttcaacgagtgccaactcaacaacctcaacgcgttggaacccgaccaccgcgttgagtccgaaggtggtcttattgaaacatggaactctcaacaccctgagctgcaatgcgccggtgtcactgtttccaaacgcaccctcaaccgcaacggcctccacttgccatcttactcaccttatccccaaatgatcattgtcgttcaaggtgcgtaatattagtaagaagtatttatcgcttaacgtgataacaataatagtaatatgaaaatattt

SEQ ID NO: 4680 - DNA, 660 bp, Artificial
  Mutations within GlyA3B4 introduced by GmGlyA3B4_T02TALE nuclease
gttcatgtacggttgcagatataaacgaagcatagcttatgtatgaggtgtaacaaaaattggaaacaatagccatgcaaggtgaagaatgtcaccaactcagaaacccttcttcattgacgtgtccctcactcactctcctctcttcactataaatcgccactcttcgtgttctccacttcaccaactccttcaaacttattaacactttccttagttcaatatggggaagcccttcttcactctctctctttcttccctttgcttgctactcttgtcgagtgcattgctattacctccagcaagttcaacgagtgccaactcaacaacctcaacgcgttggaacccgaccaccgcgttgagtccgaaggtggtcttattgaaacatggaactctcaacaccctgagctgcaatgcgccggtgtcactgtttccaaacgcaccctcaaccgcaacggcctccacttgccatcttactcaccttatccccaaatgatcattgtcgttcaaggtgcgtaatattagtaagagtatttatcagcttaacgtgataacaatatagtaatatgaaatatttattaaatttttataattaatctctgctagaaaatttgattaatcattttagtagaatttgtttttctcaactaggtttttaaa

SEQ ID NO: 4681 - DNA, 665 bp, Artificial
  Mutations within GlyA3B4 introduced by GmGlyA3B4_T02TALE nuclease
gttcatgtacggttgcagatataaacgaagcatagcttatgtatgaggtgtaacaaaattggaaacaatagccatgcaaggtgaagaatgtcaccaactcagaaacccttcttcattgacgtgtccctcactcactctcctctcttcactataaatcgccactcttcgtgttctccacttcaccaactccttcaaacttattaacactttccttagttcaatatggggaagcccttcttcactctctctctttcttccctttgcttgctactcttgtcgagtgcatgtattacctccagcaagttcaacgagtgccaactcaacaacctcaacgcgttggaacccgaccaccgcgttgagtccgaaggtggtcttattgaaacatggaactctcaacaccctgagctgcaatgcgccggtgtcactgtttccaaacgcaccctcaaccgcaacggcctccacttgccatcttactcaccttatccccaaatgatcattgtcgttcaaggtgcgtaatattagtaagaagtatttatcagcttaacgtgataacaataatagtaatatgaaatatttattaaatttttataattaatctctgctagaaaatttgattaatcattttagtagaatttgtttttctcaactaggtttttaaaacacca

SEQ ID NO: 4682 - DNA, 654 bp, Artificial
  Mutations within GlyA3B4 introduced by GmGlyA3B4_T02TALE nuclease
gttcatgtacggttgcagatataaacgaagcatagcttatgtatgaggtgtaacaaaattggaaacaatagccatgcaaggtgaagaagtcaccaactcagaaacccttcttcattgacgtgtcccctcactcactctcctctcttcactataaatcgccactcttcgtgttctccacttcaccaactccttcaaacttattaacactttccttagttcaatatggggaagcccttcttcactctctctctttcttccctttgcttgctactcttgtcgagtgcaaccacctgctggggggtcaagccgtgggcctgcacagcaccggcaacagccgctggaccgtctccagcgcctgctttgctattacctccagcaagttcaacgagtgccaactcaacaacctcaacgcgttggaacccgaccaccgcgttgagtccgaaggtggtcttattgaaacatgaactctcaacaccctgagctgcaatgcgccggtgtcactgtttccaaacgcaccctcaaccgcaacggcctccacttgccatcttactcaccttatcccaaatgatcattgtcgttcaaggtgcgtaatattagtaagaagtattttatcagcttaaccgtgataacaataatagtaatatgaaatattta

SEQ ID NO: 4683 - DNA, 571 bp, Artificial
  Mutations within GlyA3B4 introduced by GmGlyA3B4_T02TALE nuclease
  misc_feature (530): n is a or c or t or g
gttcatgtacggttgcagatataaacgaagcatagcttatgtatgaggtgtaacaaaattggaaacaatagccatgcaaggtgaagaatgtcaccaactcagaaaccccttcttcattgacgtgtccctcactcactctcctctcttcactataaatcgccactcttcgtgttctccacttcaccaactccttcaaacttattaacactttccttagttcaatatggggaagcccttctttactctctctcttcttccttcgtcttgctactcttgtcgagtgcatgctattactccagcaagttcaatcgagtgccaactcacaacctcaacgcgttggaacccgaccaccgcgttgagtccgaaggtggtcttattgaaacatggaactctcaacaccctgagctgcaatgcgccggtgtcactgtttccaaacgcaccctcaaccgcaacggcctccacttgccatcttactcaccttatcccccaaatgatcattgtcgttcaaggtgcgtaatattagtaagagnatttatcagcttaacgtgatacaatatagtaatatgaaata

SEQ ID NO: 4684 - DNA, 640 bp, Artificial
  Mutations within GlyA3B4 introduced by GmGlyA3B4_T02TALE nuclease
gttcatgtacggttgcagatataaacgaagcatagcttatgtatgaggtgtaacaaaattggaaacaatagccatgcaaggtgaagaatgtcaccaactcagaaaccccttcttcattgacgtgtcccctcactcactctcctctcttcactataaatcgccactcttcgtgttctccacttcaccaactccttcaaacttattaacactttccttagttcaatatggggaagcccttcttcactctctctctttcttccctttgcttgctactcttgtcgagtgcatttgctattacctccagcaagttcaacgagtgccaactcaacaacctcaacgcgttggaacccgaccaccgcgttgagtccgaaggtggtcttattgaaacatggaactctcaacaccctgagctgcaatgcgccggtgtcactgtttccaaacgcaccctcaaccgcaacggcctccacttgccatcttactcaccttatccccaaatgatcattgtcgttcaaggtgcgtaatattagtaagagtatttatcagcttaacgtgataacaataatagtaatatgaaatatttattaaatttttataattaatctctgctagaaaatttgattaatcattttagtagaatttg

SEQ ID NO: 4685 - DNA, 654 bp, Artificial; identical to SEQ ID NO: 2585
  Mutations within GlyA3B4 introduced by GmGlyA3B4_T02TALE nuclease

SEQ ID NO: 4686 - DNA, 672 bp, Artificial
  Mutations within GlyA3B4 introduced by GmGlyA3B4_T02TALE nuclease
gttcatgtacggttgcagatataaacgaagcatagcttatgtatgaggtgtaacaaaattggaaacaatagccatgcaaggtgaagaatgtcaccaactcagaaacccttcttcattgacgtgtccctcactcactctcctctcttcactataaatcgccactcttcgtgttctccacttcaccaactccttcaaacttattaacactttccttagttcaatatggggaagcccttcttcactctctctctttcttccctttgcttgctactcttgtcgagtgcacactgcctccactgcggtcacgccgccacgttttgcaatcttgagaagttggcctgtgtccaactgtaacggtggacctctcaactctcccgctttgctattacctccagcaagttcaacgagtgccaactcaacaacctcaacgcgttggaacccgaccaccgcgttgagtccgaaggtggtcttattgaaacatggaactctcaacaccctgagctgcaatgcgccggtgtcactgtttccaaacgcaccctcaaccgcaacggcctccacttgccatcttactcaccttatccccaaatgatcattgtcgttcaaggtgcgtaatattagtaagaagtatttatcgcttaacgtgataacaataatagtaatatgaaaatattt

SEQ ID NO: 4687 - DNA, 650 bp, Artificial
  Mutations within GlyA3B4 introduced by GmGlyA3B4_T02TALE nuclease
gttcatgtacggttgcagatataaacgaagcatagcttatgtatgaggtgtaacaaaaattggaaacaatagccatgcaaggtgaagaatgtcaccaactcagaaacccttcttcattgacgtgtccctcactcactctcctctcttcactataaatcgccactcttcgtgttctccacttcaccaactccttcaaacttattaacactttccttagttcaatatggggaagcccttcttcactctctctctttcttccctttgcttgctactcttgtcgagtgcatctattacctccagcaagttcaacgagtgccaactcaacaacctcaacgcgttggaacccgaccaccgcgttgagtccgaaggtggtcttattgaaacatggaactctcaacaccctgagctgcaatgcgccggtgtcactgtttccaaacgcaccctcaaccgcaacggcctccacttgccatcttactcaccttatccccaaatgatcattgtcgttcaaggtgcgtaatattagtaagaagtatttatcagcttaacgtgataacaatatagtaatatgaaatatttattaaatttttataattaatctctgctagaaaatttgattaatcattttagtagaatttgttttctcaactagg

SEQ ID NO: 4688 - DNA, 637 bp, Artificial; identical to SEQ ID NO: 3893
  Mutations within GlyA3B4 introduced by GmGlyA3B4_T02TALE nuclease

SEQ ID NO: 4689 - DNA, 508 bp, Artificial
  Mutations within GlyA3B4 introduced by GmGlyA3B4_T02TALE nuclease
gttcatgtacggttgcagatataaacgaagcatagcttatgtatgaggtgtaacaaaattggaaacaatagccatgcaaggtgaagaatgtcaccaactcagaaaccccttcttcattgacgtgtccctcactcactctcctctcttcactataaatcgccactcttcgtgttctccacttcaccaactccttcaaacttattaacactttccttagttcaatatggggaagcccttcttcactctctctctttcttccctttgcttgctactcttgtcgagtgcatgcttccagcaagttcaacgagtgccaactcacaacctcaacgcgttggaacccgaccaccgcgttgagtccgaaggtggtcttattgaacatggaactctcaacagccctgagcctgcatgcgccaggtgtcctgtttccaaacgcaccctcaaccgcaacgcctccacttgcctcttactcaccttatccccccaaaatggatcattgtcgttcaaggtg

SEQ ID NO: 4690 - DNA, 650 bp, Artificial
  Mutations within GlyA3B4 introduced by GmGlyA3B4_T02TALE nuclease
  misc_feature (271); (362): n is a or c or t or g
gttcatgtacggttgcagatataaacgaagcatagcttatgtatgaggtgtaacaaaattggaaacaatagccatgcaaggtgaagaatgtcaccaactcagaaacccttcttcattgacgtgtccctcactcactctcctctcttcactataaaatcgccactcttcgtgttctccacttcaccaactccttcaaacttattaacactttccttagttcaatatggggaagcccttcttcactctctctctttcttccctttgcttgctnctcttgtcgagtgcatgtctattacctccagcaagttcaacgagtgccaactcaacaacctcaacgcgttggaacccgaccaccgcgttgngtccgaaggtggtcttattgaaacatggaactctcaacaccctgagctgcaatgcgccggtgtcactgtttccaaaacgcaccctcaaccgcaacggcctccacttgccatcttactcaccttatccccaaatgatcattgtcgttcaaggtgcgtaatattagtaagaagtatttatcagcttaacgtgataacaataatagtaatatgaaatattttattaaatttttataattaatctctgctagaaaatttgattaatcattttagtagaatttgttttctcaa

SEQ ID NO: 4691 - DNA, 634 bp, Artificial
  Mutations within GlyA3B4 introduced by GmGlyA3B4_T02TALE nuclease
gttcatgtacggttgcagatataaacgaagcatagcttatgtatgaggtgtaacaaaattggaaacaatagccatgcaaggtgaagaatgtcaccaactcagaaacccttcttcattgacgtgtccctcactcactctcctctcttcactataaatcgccactcttcgtgttctccacttcaccaactccttcaaacttattaacactttccttagttcaatatggggaagcccttcttcactctctctctttcttccctttgctgctactcttgtcgagtgcatattacctccagcaagttcaacgagtgccaactcaacaacctcaacgcgttggaacccgaccaccgcgttgagtccgaaggtggtcttattgaaacatggaactctcaacaccctgagctgcaatgcgccggtgtcactgtttccaaacgcaccctcaaccgcaacggcctccacttgccatcttactcaccttatcccccaaatgatcattgtcgttcaaggtgcgtaatattagtaagaagtatttatcagcttaacgtgataacaataatagtaatatgaaatatttattaaatttttataattaatctctgctagaaaatttgattaatcattttagtagaatttg

SEQ ID NO: 4692 - DNA, 709 bp, Artificial
  Mutations within GlyA3B4 introduced by GmGlyA3B4_T02TALE nuclease
gttcatgtacggttgcagatataaacgaagcatagcttatgtatgaggtgtaacaaaattggaaacaatagccatgcaaggtgaagaatgtcaccaactcagaaacccttcttcattgacgtgtccctcactcactctcctctcttcactataaatcgccactcttcgtgttctccacttcaccaactccttcaaacttattaacactttccttagttcaatatggggaagcccttcttcactctctctctttcttccctttgcttgctactcttgtcgagtgcatgcttgaccccggagcaggtggtggccatcgccagccacgatggcggcaagcaggcgctggagactattacctccagcaagttcaacgagtgccaactcaacaacctcaacgcgttggaacccgaccaccgcgttgagtccgaaggtggtcttattgaaacatggaactctcaacaccctgagctgcaatgcgccggtgtcactgtttccaaacgcaccctcaaccgcaacggcctccacttgccatcttactcaccttatccccaaatgatcattgtcgttcaaggtgcgtaatattagtaagaagtatttatcagcttaaccgtgataacaataatagtaatatgaaatatttataaaattttttataattaatctctgctagaaaaatttgattaatcattttttagtagaatttgttttt

SEQ ID NO: 4693 - DNA, 672 bp, Artificial
  Mutations within GlyA3B4 introduced by GmGlyA3B4_T02TALE nuclease
gttcatgtacggttgcagatataaacgaagcatagcttatgtatgaggtgtaacaaaattggaaacaatagccatgcaaggtgaagaatgtcaccaactcagaaacccttcttcattgacgtgtccctcactcactctcctctcttcactataaatcgccactcttcgtgttctccacttcaccaactccttcaaacttattaacactttccttagttcaatatggggaagcccttcttcactctctctctttcttccctttgcttgctactcttgtcgagtgcatggtggcaagcaggcgctggagacggtgcaggcgctgttgccggtgctgtgccaggcccacggcttgaccccccagcaggtggtggccatcgccagcaatattacctccagcaagttcaacgagtgccaactcaacacctcaacgcgttggaacccgaccaccgcgttgagtccgaaggtggtcttattgaaacatggaactctcaacaccctgagctgcaatgcgccggtgtcactgtttccaaacgcaccctcaaccgcaacggcctccacttgccatcttactcaccttatccccaaatgatcattgtcgttcaaggtgcgtaatattagtaagaagtatttatcgcttaacgtgataacaataatagtaatatgaaaatattt

SEQ ID NO: 4694 - DNA, 652 bp, Artificial
  Mutations within GlyA3B4 introduced by GmGlyA3B4_T02TALE nuclease
  misc_feature (141); (453): n is a or c or t or g
gttcatgtacggttgcagatataaacgaagcatagcttatgtatgaggtgtaacaaaattggaaacaatagccatgcaaggtgaagaatgtcaccaactcagaaacccttcttcattgacgtgtccctcactcactctccnctcttcactataaatcgccactcttcgtgttctccacttcaccaactccttcaaacttattaacactttccttagttcaatatggggaagcccttcttcactctctctctttcttccctttgcttgctactcttgtcgagtgcatgctttacctccagcaagttcaacgagtgccaactcaacaacctcaacgcgttggaacccgaccaccgcgttgagtccgaaggtggtcttattgaaacatggaactctcaacaccctgagctgcaatgcgccggtgtcactgtttccaaacgcaccctcaaccgcaanggcctcccacttgccatcttactcaccttatcccccaaatgatcattgtcgttcaaggtgcgtaatattagtaagaagtatttatcagcttaacgtgataacaataatagtaatatgaaatatttattaaatttttataattaatctctgctagaaaatttgattaatcattttagtagaatttgttttctcaactagg

SEQ ID NO: 4695 - DNA, 558 bp, Artificial
  Mutations within GlyA3B4 introduced by GmGlyA3B4_T02TALE nuclease
gttcatgtacggttgcagatataaacgaagcatagcttatgtatgaggtgtaacaaaattggaaacaatagccatgcaaggtgaagaatgtcaccaactcagaaaccccttcttcattgacgtgtccctcactcactctcctctcttcactataaatcgccactcttcgtgttctccacttcaccaactccttcaaacttattaacactttccttagttcaatatgggggaaagcccttcttcactctctctctttcttccctttgcttgctactcttgtcgagtgctattacctccagcaagttcaacgagtgccaactcaacaacctcaacgcgttggaacccgaccaccgcgttgagtccgaaggtggtcttattgaaacatggaactctcaacaccctgagctgcaatgcgccggtgtcactgtttccaaacgcaccctcaaccgcaacggcctccacttgccaatcttactcaccttatcccccaaatgatcattgtcgttcaaggtgcgtaatattagtaagaagtatttatcagcttaacgtgataacaat

SEQ ID NO: 4696 - DNA, 657 bp, Artificial
  Mutations within GlyA3B4 introduced by GmGlyA3B4_T02TALE nuclease
gttcatgtacggttgcagatataaacgaagcatagcttgtgtatgaggtgtaacaaaattggaaacaatagccatgcaaggtgaagaatgtcaccaactcagaaaccccttcttcattgacgtgtccctcactcactctcctctcttcactataaatcgccactcttcgtgttctccacttcaccaactccttcaaacttattaacactttccttagttcaatatgggggaagcccttcttcactctctctctttcttccctttgcttgctactcttgtcgagtgcatctattacctccagcaagttcaacgagtgccaactcaacaacctcaacgcgttggaacccgaccaccgcgttgagtccgaaggtggtcttattgaaacatggaactctcaacaccctgagctgcaatgcgccggtgtcactgtttccaaacgcaccctcaaccgcaacggcctccacttgccatcttactcaccttatcccccaaatgatcattgtcgttcaaggtgcgtaatattagtaagaagtatttatcagcttaacgtgataacaataatagtaatatgaaatatttattaaatttttataattaatctctgctagaaaatttgattaatcattttagtagaatttgttttctcaactaggtttt

SEQ ID NO: 4697 - DNA, 655 bp, Artificial
  Mutations within GlyA3B4 introduced by GmGlyA3B4_T02TALE nuclease
gttcatgtacggttgcagatataaacgaagcatagcttatgtatgaggtgtaacaaaattggaaacaatagccatgcaaggtgaagaatgtcaccaactcagaaacccttcttcattgacgtgtccctcactcactctcctctcttcactataaatcgccactcttcgtgttctccacttcaccaactccttcaaacttattaacactttccttagttcaatatggggaagcccttcttcactctctctctttcttccctttgcttgctactcttgtcgagtgcatacctccagcaagttcaacgagtgccaactcaacaacctcaacgcgttggaacccgaccaccgcgttgagtccgaaggtggtcttattgaaacatggaactctcaacaccctgagctgcaatgcgccggtgtcactgtttccaaacgcaccctcaaccgcaacggcctccacttgccatcttactcaccttatccccaaatgatcattgtcgttcaaggtgcgtaatattagtaagaagtatttatcagcttaacgtgatacaatatagtaatatgaaatatttattaaatttttataattaatctctgctagaaaatttgattaatcattttagtagaatttgttttctcaactaggttttaaacacca

SEQ ID NO: 4698 - DNA, 647 bp, Artificial; identical to SEQ ID NO: 1412
  Mutations within GlyA3B4 introduced by GmGlyA3B4_T02TALE nuclease

SEQ ID NO: 4699 - DNA, 655 bp, Artificial
  Mutations within GlyA3B4 introduced by GmGlyA3B4_T02TALE nuclease
  misc_feature (534): n is a or c or t or g
gttcatgtacggttgcagatataaacgaagcatagcttatgtatgaggtgtaacaaaattggaaacaatagccatgcaaggtgaagaatgtcaccaactcagaaaccccttcttcattgacgtgtccctcactcactctcctctcttcactataaatcgccactcttcgtgttctccacttcaccaactccttcaaacttattaacactttccttagttcaatatgggggaagcccttcttcactctctctctttcttccctttgcttgctactcttgtcgagtgcattgctattacctccagcaagttcaacgagtgccaactcaacaacctcaacgcgttggaacccgaccaccgcgttgagtccgaaggtggtcttattgaaacatggaactctcaacaccctgagctgcaatgcgccggtgtcactgtttccaaacgcaccctcaaccgcaacggcctccacttgccatcttactcaccttatccccaaatgatcattgtcgttcaaggtgcgtaatattagtaagaagnatttatcagcttaacgtgataacaataatagtaatatgaaatatttattaaatttttataattaatctctgctagaaaatttgattaatcattttagtagaatttgtttttctcaactagg

SEQ ID NO: 4700 - DNA, 682 bp, Artificial
  Mutations within GlyA3B4 introduced by GmGlyA3B4_T02TALE nuclease
gttcatgtacggttgcagatataaacgaagcatagcttatgtatgaggtgtaacaaaattggaaacaatagccatgcaaggtgaagaatgtcaccaactcagaaacccttcttcattgacgtgtccctcactcactctcctctcttcactataaatcgccactcttcgtgttctccacttcaccaactccttcaaacttattaacactttccttagttcaatatggggaagcccttcttcactctctctctttcttccctttgcttgctactcttgtcgagtgcatggtgctgtgccaggccccacggcttgaccccccagcaggtggtggccatcgccagcaatggcggtggcaagcaggcgctattacctccagcaagttcaacgagtgccaactcaacaacctcaacgcgttggaaccccgaccaccgcgttgagtccgaaggtggtcttattgaaacatggaactctcaacaccctgagctgcaatgcgccggtgtcactgtttccaaacgcacctcaaccgcaacggcctccacttgccatcttactcaccttatccccaaatgatcattgtcgttcaaggtgcgtaatattagtaagaagtatttatcagcttaacgtgataacaataatagtaatatgaaaatatttattaaattttttataattaatctctgct

SEQ ID NO: 4701 - DNA, 655 bp, Artificial
  Mutations within GlyA3B4 introduced by GmGlyA3B4_T02TALE nuclease
gttcatgtacggttgcagatataaacgaagcatagcttatgtatgaggtgtaacaaaattggaaacaatagccatgcaaggtgaagaatgtcaccaactcagaaacccttcttcattgacgtgtccctcactcactctcctctcttcactataaatcgccactcttcgtgttctccacttcaccaactccttcaaacttattaacactttccttagttcaatatggggaagcccttcttcactctctctctttcttccctttgcttgctactcttgtcgagtgctttacctccagcaagttcaacgagtgccaactcaacaacctcaacgcgttggaacccgaccaccgcgttgagtccgaaggtggtcttattgaaacatggaactctcaacaccctgagctgcaatgcgccggtgtcactgtttccaaacgcaccctcaaccgcaacggcctccacttgccatcttactcaccttatccccaaatgatcattgtcgttcaaggtgcgtaatattagtaagaagtatttatcagcttaacgtgataacaataatagtaatatgaaatatttattaaatttttataattaatctctgctagaaaatttgattaatcattttagtagaatttgtttttctcaactaggttttaaaa

SEQ ID NO: 4702 - DNA, 647 bp, Artificial
  Mutations within GlyA3B4 introduced by GmGlyA3B4_T02TALE nuclease
gttcatgtacggttgcagatataaacgaagcatagcttatgtatgaggtgtaacaaaattggaaacaatagccatgcaaggtgaagaatgtcaccaactcagaaacccttcttcattgacgtgtccctcactcactctcctctcttcactataaatcgccactcttcgtgttctccacttcaccaactccttcaaacttattaacactttccttagttcaatatggggaagcccttcttcactctctctctttcttccctttgcttgctattacctccagcaagttcaacgagtgccaactcaacaacctcaacgcgttggaacccgaccaccgcgttgagtccgaaggtggtcttattgaaacatggaactctcaacaccctgagctgcaatgcgccggtgtcactgtttccaaacgcaccctcaaccgcaacggcctccacttgccatcttactcaccttatccccaaatcgatcattgtcgttcaaggtgcgtaatattagtaagaagtatttatcagcttaacgtgataacaataatagtaatatgaaatatttattaaatttttataattaatctctgctagaaaatttggattaatcatttttagtagaatttgtttttctcaactaggttttaaacacca

SEQ ID NO: 4703 - DNA, 635 bp, Artificial
  Mutations within GlyA3B4 introduced by GmGlyA3B4_T02TALE nuclease
gttcatgtacggttgcagatataaacgaagcatagcttatgtatgaggtgtaacaaaattggaaacaatagccatgcaaggtgaagaatgtcaccaactcagaaaccccttcttcattgacgtgtccctcactcactctcctctcttcactataaatcgccactcttcgtgttctccacttcaccaactccttcaaacttattaacactttccttagttcaatatgggggaagcccttcttcactctctctctttcttccctttgcttgctactcttgtcgagtgcatattacctccagcaagttcaacgagtgccaactcaacaacctcaacgcgttggaacccgaccaccgcgttgagtccgaaggtggtcttattgaaacatggaactctcaacaccctgagctgcaatgcgccggtgtcactgtttccaaacgcaccctcaaccgcaacggcctccacttgccatcttactcaccttatccccaaatgatcattgtcgttcaaggtgcgtaatattagtaagaagtatttatcagcttaacgtgataacaatatagtaatatgaaatatttattaaatttttataattaatctctgctagaaaatttgattaatcattttagtagaatttg

SEQ ID NO: 4704 - DNA, 620 bp, Artificial
  Mutations within GlyA3B4 introduced by GmGlyA3B4_T02TALE nuclease
gttcatgtacggttgcagatataaacgaagcatagcttatgtatgaggtgtaacaaaattggaaacaatagccatgcaaggtgaagaatgtcaccaactcagaaacccttcttcattgacgtgtccctcactcactctcctctcttcactataaatcgccactcttcgtgttctccacttcaccaactccttcaaacttattaacactttccttagttcaatatggggaagcccttcttcactctctctctttcttccctttgcttgctactcttgtcgagtgcctattacctccagcaagttcaacgagtgccaactcaacaacctcaacgcgttggaacccgaccaccgcgttgagtccgaaggtggtcttattgaaacatggaactctcaacaccctgagctgcaatgcgccggtgtcactgtttccaaacgcaccctcaaccgcaacggcctccacttgccatcttactcaccttatccccaaatgatcattgtcgttcaaggtgcgtaatattagtaagaagtatttatcagcttaacgtgataacaataatagtaatatgaaatatttattaaatttttattaattaatctctgctagaaaatttgattaatca

SEQ ID NO: 4705 - DNA, 659 bp, Artificial
  Mutations within GlyA3B4 introduced by GmGlyA3B4_T02TALE nuclease
gttcatgtacggttgcagatataaacgaagcatagcttatgtatgaggtgtaacaaaattggaaacaatagccatgcaaggtgaagaatgtcaccaactcagaaacccttcttcattgacgtgtccctcactcactctcctctcttcactataaatcgccactcttcgtgttctccacttcaccaactccttcaaacttattaacactttccttagttcaatatggggaagcccttcttcactctctctctttcttccctttgcttgctactcttgtcgagtgcatgtcagtggagcattttttgacaagaaatatttgctagctgatagtgaccttaggcgacttttgaacgcgcaataatggtttgctattacctccagcaagttcaacgagtgccaactcaacaacctcaacgcgttggaacccgaccaccgcgttgagtccgaaggtggtcttattgaaacatggaactctcaacaccctgagctgcaatgcgccggtgtcactgtttccaaacgcaccctcaaccgcaacggcctccacttgccatcttactcaccttatccccaaatgatcattgtcgttcaaggtgcgtaatattagtaagaagtatttatcagcttaacgcgataacaataatagtaatatgaaaatattt

SEQ ID NO: 4706 - DNA, 670 bp, Artificial
  Mutations within GlyA3B4 introduced by GmGlyA3B4_T02TALE nuclease
gttcatgtacggttgcagatataaacgaagcatagcttatgtatgaggtgtaacaaaattggaaacaatagccatgcaaggtgaagaatgtcaccaactcagaaacccttcttcattgacgtgtccctcactcactctcctctcttcactataaatcgccactcttcgtgttctccacttcaccaactccttcaaacttattaacacctttccttagttcaaatatgggggaagcccttcttcacatctctctctttcttccctttgcttgctactcttgtcgagtgctattacctccagcaagttcaacgagtgccaactcaacaacctcaacgcgttggaacccgaccaccgcgttgagtccgaaggtggtcttattgaaaacatggaactctcaacaccctgagctgcaatgcgccggtgtcactgtttccaaacgcacccctcaaccgcaacggcctcccacttgccatcttactcaccttatcccccaaatgatcattgtcgttcaaggtgctaatattagtaagaaagtatttatcagcttaacgtgataacaataatagtaatatgaaatatttattaaatttttataattaatctctgctagaaaatttgattaatcattttagtagaatttgtttttctcaactaggtttttaaaacacca

SEQ ID NO: 4707 - DNA, 724 bp, Artificial
  Mutations within GlyA3B4 introduced by GmGlyA3B4_T02TALE nuclease
  misc_feature (620); (662): n is a or c or t or g
gttcatgtacggttgcagatataaacgaagcatagcttatgtatgaggtgtaacaaaattggaaacaatagccatgcaaggtgaagaatgtcaccaactcagaaacccttcttcattgacgtgtccctcactcactctcctctcttcactataaatcgccactcttcgtgttctccacttcaccaactccttcaaacttattaacactttccttagttcaatatggggaagcccttcttcactctctctctttcttccctttgcttgctactcttgtcgagtgcatggccaccacctgctggggggtcaagccgtgggcctggcacagcaccggcaacagccgctggaccgtctccagcgcctgcttgccaccattattgctggcgatgctattacctccagcaagttcaacgagtgccaactcaacaacctcaacgcgttggaacccgaccaccgcgttgagtccgaaggtggtcttattgaaacatggaactctcaacaccctgagctgcaatgcgccggtgtcactgtttccaaacgcaccctcaaccgcaacggcctccacttgccatcttactcaccttatcccaaatgatcattgtcgttcaaggtgcgtaatnttagtaagaagtatttatcagcttaacgtgataacaataatngtaatatgaaatatttattaaattttttataattaatctctgctagaaaatttgattaatca

SEQ ID NO: 4708 - DNA, 632 bp, Artificial
  Mutations within GlyA3B4 introduced by GmGlyA3B4_T02TALE nuclease
gttcatgtacggttgcagatataaacgaagcatagcttatgtatgaggtgtaacaaaattggaaacaatagccatgcaaggtgaagaatgtccaccaactcagaaacccttcttcattgacgtgtccctcactcactctcctctcttcactataaatcgccactcttcgtgttctccacttcaccaactccttcaaacttattaacactttccttagttcaatatggggaagcccttcttcactctctctctttcttccctttgcttgctactcttgtcgagtgccaactcaacaacctcaacgcgttggaacccgaccaccgcgttgagtccgaaggtggtcttattgaaacatggaactctcaacaccctgagctgcaatgcgccggtgtcactgtttccaaacgcaccctcaaccgcaacggcctccacttgccatcttactcaccttatcccccaaatgatcattgtcgttcaaggtgcgtaatattagtaagaagtatttatcagcttaacgtgataacaataatagtaatatgaatatttattaattttttataattaatctctgctagaaaatttgattaatcatttttagtagaatttgtttttctcaactaggtttttaaaca

SEQ ID NO: 4709 - DNA, 581 bp, Artificial
  Mutations within GlyA3B4 introduced by GmGlyA3B4_T02TALE nuclease
gttcatgtacggttgcagatataaacgaagcatagcttatgtatgaggtgtaacaaaaattggaaacaatagccatgcaaggtgaagaatgtcaccaactcagaaacccttcttcattgacgtgtccctcactcactctcctctcttcactataaaatcgccactcttcgtgttctccacttcaccaactccttcaaacttattaacactttccttagttcaatatggggaaagcccttcttcactctctctctttcttcccttcttcaacgagtgccaactcaacaacctcaacgcgttggaacccgaccaccgcgttgagtccgaaggtggtcttattgaaacatggaactctcaacaccctgagctgcaaatgcgccggtgtcactgtttcccaaacgcaccctcaaccgcaacggcctccacttgccatcttactcaccttatccccaaatgatcattgtcgttcaaggtgcgtaatattagtaagaagtatttatcagcttaacgtgataacaataatagtaatatgaaatatttattaaattttttataattaatctctgctagaaaatttgatt

SEQ ID NO: 4710 - DNA, 668 bp, Artificial
  Mutations within GlyA3B4 introduced by GmGlyA3B4_T02TALE nuclease
  misc_feature (531): n is a or c or t or g
gttcatgtacggttgcagatataaacgaagcatagcttatgtatgaggtgtaacaaaattggaaacaatagccatgcaaggtgaagaatgtcaccaactcagaaacccttcttcattgacgtgtccctcactcactctcctctcttcactataaatcgccactcttcgtgttctccacttcaccaactccttcaaacttattaacactttccttagttcaatatggggaagcccttcttcactctctctctttcttccctttgcttgctactcttgtcgagtgcttgctattacctccagcaagttcaacgagtgccaactcaacaacctcaacgcgttggaacccgaccaccgcgttgagtccgaaggtggtcttattgaaacatggaactctcaacaccctgagctgcaatgcgccggtgtcactgtttccaaacgcaccctcaaccgcaacggcctccacttgccatcttactcaccttatccccaaatgatcattgtcgttcaaggtgcgtaatattagtaagaagnatttatcagcttaacgtgataacaataatagtaatatgaaaatatttattaaatttttataattaatctctgctagaaaatttgattaatcattttagtagaatttgttttctcaactaggtttttaaaacaccaca

SEQ ID NO: 4711 - DNA, 655 bp, Artificial
  Mutations within GlyA3B4 introduced by GmGlyA3B4_T02TALE nuclease
gttcatgtacggttgcagatataaacgaagcatagcttatgtatgaggtgtaacaaaattggaaacaatagccatgcaaggtgaagaatgtcaccaactcagaaacccttcttcattgacgtgtccctcactcactctcctctcttcactataaatcgccactcttcgtgttctccacttcaccaactccttcaaacttattaacactttccttagttcaatatggggaagcccttcttcactctctctctttcttccctttgcttgctactcttgtcgagtgcatacctccagcaagttcaacgagtgccaactcaacaacctcaacgcgttggaacccgaccaccgcgttgagtccgaaggtggtcttattgaaacatggaactctcaacaccctgagctgcaatgcgccggtgtcactgtttccaaacgcaccctcaaccgcaacggcctccacttgccatcttactcaccttatccccaaatgatcattgtcgttcaaggtgcgtaatattagtaagaagtatttatcagcttaacgtgataacaataatagtaatatgaaatatttattaaatttttataattaatctctgctagaaaatttgattaatcattttagtagaatttgtttttctcaactaggtttttaaaa

SEQ ID NO: 4712 - DNA, 580 bp, Artificial
  Mutations within GlyA3B4 introduced by GmGlyA3B4_T02TALE nuclease
gttcatgtacggttgcagatataaacgaagcatagcttatgtatgaggtgtaacaaaattggaaacaatagccatgcaaggtgaagaatgtcaccaactcagaaacccccttcttcattgacgtgtcccctcactcactctcctctcttcactataaatcgccactcttcgtgttctccacttcaccaactccttcaaacttattaacactttcccttagttcaatattacctcccagcaagttcaacgagtgccaactcaacaacctcaacgcgttggaacccgaccaccgcgttgagtccgaaggtggtcttattgaaacatggaactctcaacaccctgagctgcaatgcgccggtgtcactgtttccaaacgcaccctcaaccgcaacggcctccacttgccatcttacctcacccttatccccccaaatgatcattgtcgttccaaggtgcgtaatattagtaagaagtatttatcagcttaacgtgatacaataatagtaatatgaatatttattaaattttttataattaatctctgctagaaaatttgattaatcatttttagtagaatttg

SEQ ID NO: 4713 - DNA, 611 bp, Artificial
  Mutations within GlyA3B4 introduced by GmGlyA3B4_T02TALE nuclease
gttcatgtacggttgcagatataaacgaagcatagcttatgtatgaggtgtaacaaaattggaaacaatagccatgcaaggtgaagaatgtcaccaactcagaaacccttcttcattgacgtgtccctcactcactctcctctcttcactataaatcgccactcttcgtgttctccacttcaccaactccttcaaacttattaacactttccttagttcaatatggggaagcccttcttcactctctctctttcttccctttgcttgctactcttgtcaactcaacaacctcaacgcgttggaacccgaccaccgcgttgagtccgaaggtggtcttattgaaacatggaactctcaacaccctgagctgcaatgcgccggtgtcactgtttccaaacgcaccctcaaccgcaacggcctccacttgccatcttactcaccttatccccaaatgatcattgtcgttcaaggtgcgtaatattagtaagaagtatttatcagcttaacgtgataacaataatagtaatatgaaatatttattaaattttttataattaatctctgctagaaaatttgattaatcatttttagtagaatttgtttttctcaac

SEQ ID NO: 4714 - DNA, 640 bp, Artificial
  Mutations within GlyA3B4 introduced by GmGlyA3B4_T02TALE nuclease
  misc_feature (548): n is a or c or t or g
gttcatgtacggttgcagatataaacgaagcatagcttatgtatgaggtgtaacaaaattggaaacaatagccatgcaaggtgaagaatgtcaccaactcagaaacccttcttcattgacgtgtccctcactcactctcctctcttcactataaatcgccactcttcgtgttctccacttcaccaactccttcaaacttattaacactttccttagttcaatatggggaagcccttcttcactctctctctttcttccctttgcttgctactcttgtccagcaagttcaacgagtgccactcaacaacctcaacgcgttggaacccgaccaccgcgttgagtccgaaggtggtcttattgaaacatggaactctcaacacccctgagctgcaatgcgccggtgtcactgtttccaaacgcaccctcaaccgcaacggcctccacttgccatcttactcaccttatccccaaatgatcattgtcgttcaaggtgcgtaatattagtaagaagtatttatcagcttaacgtgataacaataatagtaatntgaaatatttattaaattttttataattaatctctgctagaaaatttgattaatcatttttagtagaatttgttttttctcaactaggtttt

SEQ ID NO: 4715 - DNA, 666 bp, Artificial
  Mutations within GlyA3B4 introduced by GmGlyA3B4_T02TALE nuclease
gttcatgtacggttgcagatataaacgaagcatagcttatgtatgaggtgtaacaaaaattggaaacaatagccatgcaaggtgaagaatgtcaccaactcagaaaccccttcttcattgacgtgtccctcactcactctcctctcttcactataaatcgccactcttcgtgttctccacttcaccaactccttcaaacttattaacactttccttagttcaatatggggaagcccttcttcactctctctctttcttccctttgcttgctactcttgtcgagtgcatgctattacctccagcaagttcaacgagtgccaactcaacaacctcaacgcgttggaacccgaccaccgcgttgagtccgaaggtggtcttattgaaacatggaactctcaacaccctgagctgcaatgcgccggtgtcactgtttccaaacgcaccctcaaccgcaacggcctccacttgccatcttactcaccttatccccaaatgatcattgtcgttcaaggtgcgtaatattagtaagagtatttatcagcttaacgcgataacaataatagtaatatgaaatatttattaaatttttataattaatctctgctagaaaatttgattaatcattttagtagaatttgtttttctcaactaggtttttaaaacacc

SEQ ID NO: 4716 - DNA, 642 bp, Artificial
  Mutations within GlyA3B4 introduced by GmGlyA3B4_T02TALE nuclease
gttcatgtacggttgcagatataaacgaagcatagcttatgtatgaggtgtaacaaaattggaaacaatagccatgcaaggtgaagaatgtcaccaactcagaaacccttcttcattgacgtgtccctcactcactctcctctcttcactataaatcgccactcttcgtgttctccacttcaccaactccttcaaacttattaacactttccttagttcaatatggggaagcccttcttcactctctctcttcaaacttattacctccagcaagttcaacgagtgccaactcaacaacctcaacgcgttggaacccgaccaccgcgttgagtccgaaggtggtcttattgaaacatggaactctcaacacccctgagctgcaatgcgccggtgtcactgttttccaaacgcacccctcaaccgcaacggcctccacttgccatcttactcaccttatccccaaatgatcattgtcgttcaaggtgcgtaatattagtaagaagtatttatcagcttaacgtgataacaataatagtaatatgaaatatttattaaattttttataattaatctctgctagaaaatttgattaatcatttttagtagaatttgttttttctcaactaggttttaaacaccaca

SEQ ID NO: 4717 - DNA, 659 bp, Artificial
  Mutations within GlyA3B4 introduced by GmGlyA3B4_T02TALE nuclease
  misc_feature (533): n is a or c or t or g
gttcatgtacggttgcagatataaacgaagcatagcttatgtatgaggtgtaacaaaattggaaacaatagccatgcaaggtgaagaatgtcaccaactcagaaacccttcttcattgacgtgtccctcactcactctcctctcttcactataaatcgccactcttcgtgttctccacttcaccaactccttcaaacttattaacactttccttagttcaatatggggaagcccttcttcactctctctctttcttccctttgcttgctactcttgtcgagtgctttgctattacctccagcaagttcaacgagtgccaactcaacaacctcaacgcgttggaacccgaccaccgcgttgagtccgaaggtggtcttattgaaacatggaactctcaacaccctgagctgcaatgcgccggtgtcactgtttccaaacgcaccctcaaccgcaacggcctccacttgccaatcttactcaccttatcccccaaatgatcattgtcgttcaaggtgcgtaatattagtaagagnatttatcagcttaacgtgataacaataatagtaatatgaaaatatttattaaatttttataattaatctctgctagaaaatttgattaatcattttagtagaatttgtttttctcaactaggtttt

SEQ ID NO: 4718 - DNA, 613 bp, Artificial
  Mutations within GlyA3B4 introduced by GmGlyA3B4_T02TALE nuclease
gttcatgtacggttgcagatataaacgaagcatagcttatgtatgaggtgtaacaaaattggaaacaatagccatgcaaggtgaagaatgtcaccaactcagaaacccttcttcattgacgtgtccctcactcactctcctctcttcactataaatcgccactcttcgtgttctccacttcaccaactccttcaaacttattaacactttccttagttcaatatggggaagcccttcttcactctctctctttcctccctccagcaagttcaacgagtgccaactcaacaacctcaacgcgttggaaccgaccaccgcgttgagtccgaaggtggtcttattgaaacatggaactctcaacaccctgagctgcaatgcgccggtgtcactgtttccaaacgcaccctcaaccgcaacggcctccacttgccatcttactcaccttatccccaaatgatcattgtcgttcaaggtgcgtaatattagtaagaagtatttatcagcttaacgtgataacaataatagtaatatgaaatatttattaattttttataattaatctctgctagaaatttgattaatcatttttagtagaatttgtttttctcaacta

SEQ ID NO: 4719 - DNA, 638 bp, Artificial; identical to SEQ ID NO: 3537
  Mutations within GlyA3B4 introduced by GmGlyA3B4_T02TALE nuclease

SEQ ID NO: 4720 - DNA, 656 bp, Artificial
  Mutations within GlyA3B4 introduced by GmGlyA3B4_T02TALE nuclease
gttcatgtacggttgcagatataaacgaagcatagcttatgtatgaggtgtaacaaaattggaaacaatagccatgcaaggtgaagaatgtcaccaactcagaaaccccttcttcattgacgtgtccctcactcactctcctctcttcactataaatcgccactcttcgtgttctccacttcaccaactccttcaaacttattaacactttccttagttcaatatggggaagcccttcttcactctctctctttcttccctttgcttgctactcttgtcgagtgcattattacctccagcaagttcaacgagtgccaactcaacaacctcaacgcgttggaacccgaccaccgcgttgagtccgaaggtggtcttattgaaacatggaactctcaacaccctgagctgcaatgcgccggtgtcactgtttccaaacgcaccctcaaccgcaacggcctccacttgccatcttactcaccttatcccccaaatgatcattgtcgttcaaggtgcgtaatattagtaagaagtatttatcagcttaacgtgataacaatatagtaatatgaaatatttattaaatttttcataattaatctctgctagaaaatttgattaatcattttagtagaatttgtttttctcaactaggtttt

SEQ ID NO: 4721 - DNA, 615 bp, Artificial
  Mutations within GlyA3B4 introduced by GmGlyA3B4_T02TALE nuclease
  misc_feature (25); (34); (37); (324); (327); (344): n is a or c or t or g
gttcatgtacggttgcagatataangaagcaagnttntgtatgaggtgtaacaaaattggaaacaatagccatgcaagggtgaagaatgtcaccaactcagaaaccccttcttcattgacgtgtccctcactcactctcctctcttcactataaatcgccactcttcgtgttctccacttcaccaactccttcaaacttattaacactttccttagttcaatatgggggaagctttgctattacctccagcaagttcaacgagtgccaactcaacaacctcaacgcgttggaacccgaccaccgcgttgagtccgaaggtggtnttnttgaaacatggaactcncaacaccctgagctgcaatgcgcggtgtcactgtttccaaacgcacccttcaaccgcaacggcctccacttgccatcttactcaccttaatccccaaatgatcattctcgttaaggtgcgtaatattagtaagagtatttatcagcttaatcgtgataacaaataatagtaatatgtaaatattattaaatttttttataattaatactctgctagaaattgattaatcattttagatatagaattgtttttctcaactaggttttaaaca

SEQ ID NO: 4722 - DNA, 653 bp, Artificial
  Mutations within GlyA3B4 introduced by GmGlyA3B4_T02TALE nuclease
gttcatgtacggttgcagatataaacgaagcatagcttatgtatgaggtgtaacaaaattggaaacaatagccaatgcaaggtgaagaatgtcaccaactcagaaaccccttcttcattgacgtgtccctcactcactctcctctcttcactataaatcgccactcttcgtgttctccacttcaccaactccttcaaacttattaacactttccttagttcaatatggggaagcccttcttcactctctctctttcttccctttgcttgctactcttgtcgagtgcatctattacctccagcaagttcagcgagtgccaactcaacaacctcaacgcgttggaaccctgaccaccgcgttgagtccgaaggtggtcttattgaaacatggaactctcaacaccctgagctgcaatgcgccggtgtcactgtttccaaaacgcacccctcaaccgcaacggcctcccacttgccaatcttactcaccttatcccccaaatgatcattgtcgttcaaggtgcgtaatattagtaagaagtatttatcagcttaacgtgataacaataatagtaatatgaaatatttattaaatttttataattaatctctgctagaaaatttgattaatcattttagtagaatttgttttctcaa

SEQ ID NO: 4723 - DNA, 648 bp, Artificial
  Mutations within GlyA3B4 introduced by GmGlyA3B4_T02TALE nuclease
gttcatgtacggttgcagatataaacgaagcatagcttatgtatgaggtgtaacaaaattggaaacaatagccatgcaaggtgaagaatgtcaccaactcagaaacccttcttcattgacgtgtcccctcactcactctcctctcttcactataaatcgccactcttcgtgttctccacttcaccaactccttcaaacttattaacactttccttagttcaatatggggaagcccttcttcactctctctctttcttccctttgcttgctactcttgtcgagttttttgctattacctccagcaagttcaacgagtgccaactcaacaacctcaacgcgttggaaccccgaccaccgcgttgagtccgaaggtggtcttattgaaacatggaactctcaacaccctgagctgaatgcgccgtgtcactgtttccaaacgcaccctcaaccgcaacggcctccacttgccatcttactcaccttatccccaaatgatcattgtcgttcaaggtgcgtaatattagtaagaagtatttatcagcttaacgtgataacaataatagtaatatgaaatatttattaaatttttataattaatctctgctagaaaatttgattaatcatttttagtagaatttgttttctcaa

SEQ ID NO: 4724 - DNA, 600 bp, Artificial
  Mutations within GlyA3B4 introduced by GmGlyA3B4_T02TALE nuclease
gttcatgtacggttgcagatataaacgaagcatagcttatgtatgaggtgtaacaaaattggaaacaatagccatgcaaggtgaagaatgtcaccaactcagaaaccccttcttcattgacgtgtccctcactcactctcctctcttcactataaatcgccactcttcgtgttctccacttcaccaactccttcaaacttattaacactttccttagttcaatatggggaagcccttcttcactctctctctttcttccctttgcttgctactcttgtcgagtattacctcccagcaagttcaacgagtgccaactcaacaacctcaacgcgttggaaccccgaccaccgcgttgagtccgaaggtggtcttattgaaacatggaactctcaacaccctgagctgcaatgcgccggtgtcactgtttccaacgcaccctcaaccgcaacggcctccacttgccatcttactcaccttatcccccaaatgatcattgtcgttcaaggtgcgtaatattagtaagaagtatttatcagcttaacgtgatacaatatagtaatatgaaatatttattaaatttttataattaatctctgctag

SEQ ID NO: 4725 - DNA, 658 bp, Artificial
  Mutations within GlyA3B4 introduced by GmGlyA3B4_T02TALE nuclease
  misc_feature (531): n is a or c or t or g
gttcatgtacggttgcagatataaacgaagcatagcttatgtatgaggtgtaacaaaattggaaacaatagccatgcaaggtgaagaatgtcaccaactcagaaacccttcttcattgacgtgtccctcactcactctcctctcttcactataaatcgccactcttcgtgttctccacttcaccaactccttcaaacttattaacactttccttagttcaatatggggaagcccttcttcactctctctctttcttccctttgcttgctactcttgtcgagtgcatgctattacctccagcaagttcaacgagtgccaactcaacaacctcaacgcgttggaacccgaccaccgcgttgagtccgaaggtggtcttattgaaacatggaactctcaacaccctgagctgcaatgcgccggtgtcactgtttccaaacgcaccctcaaccgcaacggcctccacttgccatcttactcaccttatccccaaatgatcattgtcgttcaaggtgcgtaatattagtaagaagnatttatcagcttaacgtgataacaatatagtaatatgaaatatttattaaatttttataattaatctctgctagaaaatttgattaatcattttagtagaatttgttttctcaactaggttttaaaa

SEQ ID NO: 4726 - DNA, 569 bp, Artificial
  Mutations within GlyA3B4 introduced by GmGlyA3B4_T02TALE nuclease
gttcatgtacggttgcagatataaacgaagcatagcttatgtatgaggtgtaacaaaattggaaacaatagccatgcaaggtgaagaatgtcaccaactcagaaacccttcttcattgacgtgtccctcactcactctcctctcttcactataaatcgccactcttcgtgttctccacttcaccaactccttcaaacttattaacactttccttagttcaatatggggaagcccttcttcaacgagtgccaactcaacaacctcaacgcgttggaacccgaccaccgcgttgagtccgaaggtggtcttattgaaacatggaactctcaacaccctgagctgcaatgcgccggtgtcactgtttccaaacgcaccctcaaccgcaacggcctccacttgccatcttactcaccttatccccaaatgatcattgtcgttcaaggtgcgtaatattagtaagaagtatttatcagcttaaacgtgataacaataatagtaatatgaaatatttattaaattttttataattaatctctgctagaaaatttgattaatcatttttagtagaa

SEQ ID NO: 4727 - DNA, 458 bp, Artificial
  Mutations within GlyA3B4 introduced by GmGlyA3B4_T02TALE nuclease
gttcatgtacggttgcagatataaacgaagcatagcttatgtatgaggtgtaacaaaattggaaacaatagccatgctattacctccagcaagttcaacgagtgccaactcaacaacctcaacgcgttggacccgaccaccgcgttgagtccgaaggtggtcttattgaaacatggaactctcaacaccctgagctgcaatgcgccggtgtcactgtttccaaacgcaccctcaaccgcaacggcctccacttgccatcttactcaccttatccccaaatgatcattgtcgttcaaggtgcgtaatattagtaagaagtatttatcagcttaacgtgataacaataatagtaatatgaaatatttattaaattttttataattaatctctgctagaaaatttgattaatcattttttagtagaatttgtttttctcaactaggtttttaaacaccaca

SEQ ID NO: 4728 - DNA, 660 bp, Artificial
  Mutations within GlyA3B4 introduced by GmGlyA3B4_T02TALE nuclease
  misc_feature (42): n is a or c or t or g
gttcatgtacggttgcagatataaacgaagcatagcttatgnatgaggtgtaacaaaattggaaacaatagccatgcaaggtgaagaatgtcaccaactcagaaacccttcttcattgacgtgtccctcactcactctcctctcttcactataaatcgccactcttcgtgttctccacttcaccaactccttcaaacttattaacactttccttagttcaatatggggaagcccttcttcactctctctctttcttccctttgcttgctactcttgtcgagtgcatattacctccagcaagttcaacgagtgccaactcaacaacctcaacgcgttggaacccgaccaccgcgttgagtccgaaggtggtcttattgaaacatggaactctcaacaccctgagctgcaatgcgccggtgtcactgtttccaaacgcaccctcaaccgcaacggcctccacttgccatcttactcaccttatcccccaaatgatcattgtcgttcaaggtgcgtaatattagtaagaagtattttatcagcttaacgtgataacaataatagtaatatgaaaatatttattaaatttttataattaatctctgctagaaaatttgattaatcattttagtagaatttgtttttctcaactaggttttaaaa

SEQ ID NO: 4729 - DNA, 667 bp, Artificial
  Mutations within GlyA3B4 introduced by GmGlyA3B4_T02TALE nuclease
gttcatgtacggttgcagatataaacgaagcatagcttatgtatgaggtgtaacaaaattggaaacaatagccatgcaaggtgaagaatgtcaccaactcagaaaccccttcttcattgacgtgtccctcactcactctcctctcttcactataaatcgccactcttcgtgttctccacttcaccaactccttcaaacttattaacactttccttagttcaatatggggaagcccttcttcactctctctctttcttccctttgcttgctactcttgtcgagtgcattattacctccagcaagttcaacgagtgccaactcaacaacctcaacgcgttggaacccgaccaccgcgttgagtccgaaggtggtcttattgaaacatggaactctcaacaccctgagctgcaatgcgccggtgtcactgtttccaaacgcacccctcaaccgcaacggcctccacttgccatcttactcaccttatcccccaaatgatcattgtcgttcaaggtgcgtaatattagtaagaagtatttatcagcttaacgtgataacaatatagtaatatgaaatatttattaaatttttataattaatctctgctagaaaatttgattaatcattttagtagaatttgttttctcaactaggtttttaaaacaccaca

SEQ ID NO: 4730 - DNA, 668 bp, Artificial
  Mutations within GlyA3B4 introduced by GmGlyA3B4_T02TALE nuclease
  misc_feature (547): n is a or c or t or g
gttcatgtacggttgcagatataaacgaagcatagcttatgtatgaggtgtaacaaaattggaaacaatagccatgcaaggtgaagaatgtcaccaactcagaaacccttcttcattgacgtgtccctcactcactctcctctcttcactataaaatcgccactcttcgtgttctccacttcaccaactccttcaaacttattaacactttccttagttcaatatggggaagcccttcttcactctctctctttcttccctttgcttgctactcttgtcgagtgcaagcttattacctcccacgcaagttcaaagtcagacgtgccaacgctacaatcaaacctcaaaccagcgttggaacccgaccaccgcgttgagtccgaaggtggtcttattgaaacatggaactctcaacaccctgagctgcaatgcgccggtgtcactgtttccaaacgcaccctcaaccgcaacggcctccacttgccatcttactcaccttatccccaaatgatcattgtcgttcaaggtgcgtaatattagtaagagnatttatcagcttaacgtgatacaatatagtaatatgaaatatttattaaattttataataatctctgctagaaaatttgattaatcattttagtagaatttgtttttctcaactaggtttt

SEQ ID NO: 4731 - DNA, 651 bp, Artificial
  Mutations within GlyA3B4 introduced by GmGlyA3B4_T02TALE nuclease
gttcatgtacggttgcagatataaacgaagcatagcttatgtatgaggtgtaacaaaattggaaacaatagccatgcaaggtgaagaatgtcaccaactcagaaacccttcttcattgacgtgtccctcactcactctcctctcttcactataaatcgccactcttcgtgttctccacttcaccaactccttcaaacttattaacactttccttagttcaatatggggaagcccttcttcactctctctctttcttccctttgcttgctactcttgtcgagtgcatattacctccagcaagttcaacgagtgccaactcaacaacctcaacgcgttggaaacccgaccaccgcgttgagtccgaaggtggtcttattgaaacatggaactctcaacaccctgagctgcaatgcgccggtgtcactgtttccaaacgcaccctcaaccgcaacggcctccacttgccatcttactcaccttatcccccaaatgatcattgtcgttcaaggtgcgtaatattagtaagaagtatttatcagcttaacgtgataacaataatagtaatatgaaatatttattaaaatttttataattaatctctgctagaaaatttgattaatcattttagtagaatttgttttctcaactagg

SEQ ID NO: 4732 - DNA, 578 bp, Artificial
  Mutations within GlyA3B4 introduced by GmGlyA3B4_T02TALE nuclease
gttcatgtacggttgcagatataaacgaagcatagcttatgtatgaggtgtaacaaaattggaaacaatagccatgcaaggtgaagaatgtcaccaactcagaaacccttcttcattgacgtgtccctcactcactctcctctcttcactataaatcgccactcttcgtgttctccacttcaccaactccttcaaacttattaacactttccttagttcaatatggggaagcccttcttcactctctctctttcttccccctgcacctccagcaagttcaacgagtgccaactcaacaacctcaacgcgttggaacccgaccaccgcgttgagtccgaaggtggtcttattgaacatggaactctcaacaccctgagctgcaatgcgccggtgtcactgtttccaaacgcaccctcaaccgcaacggcctccacttgccatcttactcaccttatcccccaaatgatcattgtcgttcaaggtgcgtaatattagtaagaagtatttatcagcttaacgtgataacaataatagtaatatgaaatatttattaattttttataattaatctctgctag

SEQ ID NO: 4733 - DNA, 634 bp, Artificial
  Mutations within GlyA3B4 introduced by GmGlyA3B4_T02TALE nuclease
  misc_feature (533): n is a or c or t or g
gttcatgtacggttgcagatataaacgaagcatagcttatgtatgaggtgtaacaaaattggaaacaatagccatgcaaggtgaagaatgtcaccaactcagaaacccttcttcattgacgtgtccctcactcactctcctctcttcactataaatcgccactcttcgtgttctccacttcaccaaactccttcaaacttattaacactttccttagttcaatatgggggaagcccttcttcactctctctctttcttccctttgcttgctactcttgtcgagtgcatgctattacctccagcaagttcaacgagtgccaactcaacaacctcaacgcgttggaacccgaccaccgcgttgagtccgaaggtggtcttattgaaacatggaactctcaacaccctgagctgcaatgcgccggtgtcactgtttccaaacgcaccctcaaccgcaacggcctccacttgccatcttactcaccttatccccaaatgatcattgtcgttcaaggtgcgtaatattagtaagaagnatttatcagcttaacgtgataacaatatagtaatatgaaatatttattaaatttttataattaatctctgctagaaaatttgattaatcattttagtagaa

SEQ ID NO: 4734 - DNA, 624 bp, Artificial
  Mutations within GlyA3B4 introduced by GmGlyA3B4_T02TALE nuclease
  misc_feature (42): n is a or c or t or g
gttcatgtacggttgcagatataaacgaagcatagcttatgnatgaggtgtaaacaaaaaattggaaacaatagccatgcaaggtgaagaatgtcaccaactcagaaacccttcttcattgacgtgtccctcactcactctcctctcttcactataaatcgccactcttcgtgttctccacttcaccaactccttcaaacttattaacactttccttagttcaatatggggaagcccttcttcactctctctctttcttccctttgcttgctactcttgtcgagtgcatgctttacctccagcaagttcaacgagtgccaactcaacaacctcaacgcgttggaacccgaccaccgcgttgagtccgaaggtggtcttattgaaacatggaactctcaacaccctgagctgcaatgcgccggtgtcactgtttccaaacgcaccctcaaccgcaacggcctccacttgccatcttactcaccttatccccaaatgatcattgtcgttcaaggtgcgtaatattagtaagaagtatttatcagcttaacgtgataacaataatagtaatatgaaatatttattaaatttttataattaatctctgctagaaaatttgattaatca

SEQ ID NO: 4735 - DNA, 661 bp, Artificial
  Mutations within GlyA3B4 introduced by GmGlyA3B4_T02TALE nuclease
gttcatgtacggttgcagatataaacgaagcatagcttatgtatgaggtgtaacaaaaattggaaacaatagccatgcaaggtgaagaatgtcacccaactcagaaacccttcttcattgacgtgtccctcactcactctcctctcttcactataaatcgccactcttcgtgttctccacttcaccaactccttcaaacttattaacactttccttagttcaatatggggaagcccttcttcactctctctctttcttccctttgcttgctactcttgtcgagtgcattattacctccagcaagttcaacgagtgccaactcaacaacctcaacgcgttggaacccgaccaccgcgttgagtccgaaggtggtcttattgaaacatggaactctcaacaccctgagctgcaatgcgccggtgtcactgtttccaaacgcaccctcaaccgcaacggcctccacttgccatcttactcaccttatcccccaaatgatcattgtcgttcaaggtgcgtaatattagtaagaagtatttatcagcttaacgtgataacaataatagtaatatgaaatatttattaaatttttataattaatctctgctagaaaatttgattaatcattttagtagaatttgtttttctcaactaggttttaaaa

SEQ ID NO: 4736 - DNA, 725 bp, Artificial
  Mutations within GlyA3B4 introduced by GmGlyA3B4_T02TALE nuclease
gttcatgtacggttgcagatataaacgaagcatagcttatgtatgaggtgtaacaaaattggaaacaatagccatgcaaggtgaagaatgtcaccaactcagaaacccttcttcattgacgtgtccctcactcactctcctctcttcactataaatcgccactcttcgtgttctccacttcaccaactccttcaaacttattaacactttccttagttcaatatggggaagcccttcttcactctctctctttcttccctttgcttgctactcttgtcgagtgcatggtgctgtgccaggccccacggcttgaccccccagcaggtggtggccatcgccagcaatggcggtggcaagcaggcgctattacctccagcaagttcaacgagtgccaactcaacaacctcaacgcgttggaacccgaccaccgcgttgagtccgaaggtggtcttattgaaacatggaactctcaacaccctgagctgcaatgcgccggtgtcactgtttccaaacgcacctcaaccgcaacggcctccacttgccatcttactcaccttatccccaaatgatcattgtcgttcaaggtgcgtaatattagtaagaagtatttatcagcttaacgtgataacaataatagtaatatgaaatatttattaaattttttataaattaatctctgctagaaaatttgattaaacaatttttagtaatgaatttgttttttc

SEQ ID NO: 4737 - DNA, 657 bp, Artificial
  Mutations within GlyA3B4 introduced by GmGlyA3B4_T02TALE nuclease
  misc_feature (461): n is a or c or t or g
gttcatgtacggttgcagatataaacgaagcatagcttatgtatgaggtgtaacaaaattggaaacaatagccatgcaaggtgaagaatgtcaccaactcagaaacccttcttcattgacgtgtccctcactcactctcctctcttcactataaatcgccactcttcgtgttctccacttcaccaactccttcaaacttattaacactttccttagttcaatatggggaagcccttcttcactctctctctttcttccctttgcttgctactcttgtcgagtgcattgccaccattattgctggcgatggccaccacctgctggggggtcaagccgtgggcctggcactatttacctccagcaagtttcaacgagtgccaactcaacaacctcaacgcgttggaacccgaccaccgcgttgagtccgaaggtggtcttattgaaaacatggaactctcaanaccctgagctgcaatgcgccggtgtcactgtttccaaacgcaccctcaaccgcaacggcctccacttgccatcttactcaccttatccccaaatgatcattgtcgttcaaggtgcgtaatattagtaagaagtatttatcagcttaacgtgataacaataattagtaatatgaaaatatttattaaaattttttat

SEQ ID NO: 4738 - DNA, 660 bp, Artificial
  Mutations within GlyA3B4 introduced by GmGlyA3B4_T02TALE nuclease
  misc_feature (532): n is a or c or t or g
gttcatgtacggttgcagatataaacgaagcatagcttatgtatgaggtgtaacaaaattggaaacaatagccatgcaaggtgaagaatgtcaccaactcagaaacccttcttcattgacgtgtccctcactcactctccctcttctactctaataacgccactcttcgtgttctccacttcaccaactccttcaaacttattaacactttccttagttcaatatggggaagcccttcttcactctctctctttcttccctttgcttgctactcttgtcgagtgcttgctattacctccagcaagttcaacgagtgccaactcaacaacctcaacgcgttggaacccgaccaccgcgttgagtccgaaggtggtcttattgaaacatggaactctcaacaccctgagctgcaatgcgccggtgtcactgtttccaaacgcaccctcaaccgcaacggcctccacttgccatcttactcaccttatccccaaatgatcattgtcgttcaaggtgcgtaatattagtaagaagnatttatcagcttaacgtgataacaatatagtaatatgaaatatttattaaatttttataattaatctctgctagaaaatttgattaatcattttagtagaatttgttttctcaactaggtttttaaaa

SEQ ID NO: 4739 - DNA, 666 bp, Artificial
  Mutations within GlyA3B4 introduced by GmGlyA3B4_T02TALE nuclease
gttcatgtacggttgcagatataaacgaagcatagcttatgtatgaggtgtaacaaaattggaaacaatagccatgcaaggtgaagaatgtcaccaactcagaaacccttcttcattgacgtgtccctcactcactctcctctcttcactataaatcgccactcttcgtgttctccacttcaccaactccttcaaacttattaacactttccttagttcaatatggggaagcccttcttcactctctctctttcttccctttgcttgctactcttgtcgagtgcatgctattacctccagcaagttcaacgagtgccaactcaacaacctcaacgcgttggaacccgaccaccgcgttgagtccgaaggtggtcttattgaaacatggaactctcaacaccctgagctgcaatgcgccggtgtcactgtttccaaacgcaccctcaaccgcaacggcctccacttgccatcttactcaccttatccccaaatgatcattgtcgttcaaggtgcgtaatattagtaagaagtatttatcagcttaacgtgataacaataatagtaatatgaaatatttattaaatttttataattaatctctgctagaaaatttgattaatcattttagtagaatttgtttttctcaactaggttttaaacaccaca

SEQ ID NO: 4740 - DNA, 664 bp, Artificial
  Mutations within GlyA3B4 introduced by GmGlyA3B4_T02TALE nuclease
gttcatgtacggttgcagatataaacgaagcatagcttatgtatgaggtgtaacaaaaattggaaacaatagccatgcaaggtgaagaatgtcaccaactcagaaaccccttcttcattgacgtgtccctcactcactctcctctcttcactataaaatcgccactcttcgtgttctccacttcaccaactccttcaaacttattaacactttccttagttcaatatggggaagcccttcttcactctctctctttcttccctttgcttgctactcttgtcgagtgcattgctattacctccagcaagttcaacgagtgccaactcaacaacctcaacgcgttggaacccgaccaccgcgttgagtccgaaggtggtcttattgaaacatggaactctcaacaccctgagctgcaatgcgccggtgtcactgtttccaaacgcaccctcaaccgcaacggcctccacttgccatcttactcaccttatcccccaaatgatcattgtcgttcaaggtgcgtaatattagtaagagtatttatcagcttaacgtgataacaataatagtaatatgaaatatttattaaatttttataattaatctctgctagaaaatttgattaatcattttagtagaatttgtttttctcaactaggtttttaaa

SEQ ID NO: 4741 - DNA, 604 bp, Artificial
  Mutations within GlyA3B4 introduced by GmGlyA3B4_T02TALE nuclease
gttcatgtacggttgcagatataaacgaagcatagcttatgtatgaggtgtaacaaaattggaaacaatagccatgcaaggtgaagaatgtcaccaactcagaaacccttcttcattgacgtgtccctcactcactctcctctcttcactataaatcgccactcttcgtggttctccacttcaccaaactccttcaaacttattaacactttccttagttcaatatgggggaaagcccttcttcactctctctctttcttccctttgcttgctactcttgtcgagtgcatccagcggctgttgccggtgctgtgccaggcccacggcttgaccccccagcaggtggtggccatcgctttgctattacctccagcaagttcaacgagtgccaactcaacaacctcaacgcgttggaacccgaccaccgcgttgagtccgaaggtggtcttattgaaacatggaactctcaacaccctgagctgcaatgcgccggtgtcactgtttccaaacgcaccctcaaccgcaacggcctccacttgccatcttactcaccttatccccaaatgatcattgtcgttcaaggtgcgtaatattagtaagaagt

SEQ ID NO: 4742 - DNA, 524 bp, Artificial
  Mutations within GlyA3B4 introduced by GmGlyA3B4_T02TALE nuclease
gttcatgtacggttgcagatataaacgaagcatagcttatgtatgaggtgtaacaaaattggaaacaatagccatgcaaggtgaagaatgtcaccaactcagaaacccttcttcattgacgtgtccctcactcactctcctctcttcactataaatcgccactcttcgtgttctccacttcaccaactccttcaaacttattaacactttccttagttcaatatggggaagcccttcttcactctctctctttcttccctttgcttgctattacctccagcaagttcaacgagtgccaactcaacaacctcaacgcgttggaacccgaccaccgcgttgagtccgaaggtggtcttattgaaacatggaactctcaacacccctgagctgcaatgcgccggtgtcactgttttccaaacgcaccctcaaccgcaacggcctccacttgccatcttactcaccttatcccccaaatgatcattgtcgttcaaggtgcgtaatattagtaagaagtatttatcagc

SEQ ID NO: 4743 - DNA, 587 bp, Artificial
  Mutations within GlyA3B4 introduced by GmGlyA3B4_T02TALE nuclease
gttcatgtacggttgcagatataaacgaagcatagcttatgtatgaggtgtaacaaaattggaaacaatagccatgcaaggtgaagaatgtcaccaactcagaaacccttcttcattgacgtgtccctcactcactctcctctcttcactataaatcgccactcttcgtgttctccacttcaccaactccttcaaacttattaacactttccttagttcaatatggggaagcccttcttcactctctctctttcttccctttgctattacctccagcaagttcaacgagtgccaactcaacaacctcaacgcgttggaacccgaccaccgcgttgagtccgaaggtggtcttattgaaacatggaactctcaacacccctgagctgcaatgcgccggtgtcactgtttccaaacgcacccctcaaccgcaacggcctccacttgccatcttactcaccttatcccccaaatgatcattgtcgttcaaggtgcgtaatattagtaagaagtatttatcagcttaacgtgataacaataatagtaatatgaaatatttattaaattttttataattaattctctgctag

SEQ ID NO: 4744 - DNA, 652 bp, Artificial
  Mutations within GlyA3B4 introduced by GmGlyA3B4_T02TALE nuclease
gttcatgtacggttgcagatataaacgaagcatagcttatgtatgaggtgtaacaaaattggaaacaatagccatgcaaggtgaagaatgtcaccaactcagaaacccttcttcattgacgtgtccctcactcactctcctctcttcactataaatcgccactcttcgtgttctccacttcaccaactccttcaaacttattaacactttccttagttcaatatggggaagcccttcttcactctctctctttcttccctttgcttgctactcttgtcgagtgcattgctattacctccagcaagttcaacgagtgccaactcaacaacctcaacgcgttggaacccgaccaccgcgttgagtccgaaggtggtcttattgaaacatggaactctcaacaccctgagctgcaatgcgccggtgtcactgtttccaaacgcaccctcaaccgcaacggcctccacttgccatcttactcaccttatccccaaatgatcattgtcgttcaaggtgcgtaatattagtaagagtatttatcagcttaacgtgataacaataatagtaatatgaaatatttattaaatttttataattaatctctgctagaaaatttgattaatcattttagtagaatttgtttttctcaactagg

SEQ ID NO: 4745 - DNA, 791 bp, Artificial
  Mutations within GlyA3B4 introduced by GmGlyA3B4_T02TALE nuclease
gttcatgtacggttgcagatataaacgaagcatagcttatgtatgaggtgtaacaaaattggaaacaatagccatgcaaggtgaagaatgtcaccaactcagaaaccccttcttcattgacgtgtccctcactcactctcctctcttcactataaatcgccactcttcgtgttctccacttcaccaactccttcaaacttattaacactttccttagttcaatatgggggaagcccttcttcactctctctctttcttccctttgcttgctactcttgtcgagtgcattgctgtgccaggcccacggcttgaccccccagcaggtggtggccatcgccagcaataatggtggcaagcaggcgctggagacggtccagcggctgttgccggtgctgtgccaggcccacggcttgacccttacctccagcaagttcaacgagtgccaactcaacaacctcaacgcgttggaacccgaccaccgcgttgagtccgaaggtggtcttattgaaacatggaactctcaacacctgagctgcaatgcgccggtgtcactgtttccaaacgcaccctcaaccgcaacggcctccacttgccatcttactcaccttatccccaaatgatcattgtcgttcaaggtgcgtaatattagtaagaagtatttatcagcttaacgtgataacaataatagtaatatgaaaatatttattaaaattttttataattaatctctgctagaaaatttgattaaatcattttagtagaatttgtttttctcaactaggtttttaaaa

SEQ ID NO: 4746 - DNA, 657 bp, Artificial
  Mutations within GlyA3B4 introduced by GmGlyA3B4_T02TALE nuclease
gttcatgtacggttgcagatataaacgaagcatagcttatgtatgaggtgtaacaaaattggaaacaatagccatgcaaggtgaagaatgtcaccaactcagaaacccttcttcattgacgtgtccctcactcactctcctctcttcactataaatcgccactcttcgtgttctccacttcaccaactccttcaaacttattaacactttccttagttcaatatggggaagcccttcttcactctctctctttcttccctttgcttgctactcttgtcgagtgcatctattacctccagcaagttcaacgagtgccaactcaacaacctcaacgcgttggaacccgaccaccgcgttgagtccgaaggtggtcttattgaaacatggaactctcaacaccctgagctgcaatgcgccggtgtcactgtttccaaacgcacccctcaaccgcaacggcctcccacttgccatcttactcaccttatcccccaaatgatcattgtcgttcaaggtgcgtaatattagtaagaagtatttatcagcttaacgtgataacaataatagtaatatgaaatatttattaaatttttataattaatctctgctagaaaatttgattaatcattttagtagaatttgttttctcaactaggtttt

SEQ ID NO: 4747 - DNA, 757 bp, Artificial
  Mutations within GlyA3B4 introduced by GmGlyA3B4_T02TALE nuclease
  misc_feature (681): n is a or c or t or g
gttcatgtacggttgcagatataaacgaagcatagcttatgtatgaggtgtaacaaaaattggaaacaatagccatgcaaggtgaagaatgtcaccaactcagaaacccttcttcattgacgtgtccctcactcactctcctctcttcactataaatcgccactcttcgtgttctccacttcaccaactccttcaaacttattaacactttccttagttcaatatggggaagcccttcttcactctctctctttcttccctttgcttgctactcttgtcgagtgcatgcacagcaccggcaacagccgctggaccgtctccagcgcctgcttgccaccattattgctggcgatggccaccacctgctggggggtcaagccgtgggctttgctattacctccagcaagttcaacgagtgccaactcaacaacctcaacgcgttggaacccgaccaccgcgttgagtccgaaggtggtcttattgaaacatggaactctcaacaccctgagctgcaatgcgccggtgtcactgtttccaaacgcaccctcaaccgcaacggcctccacttgccatcttactcaccttatccccaaatgatcattgtcgttcaaggtgcgtaatattagtaagaagtatttatcgcttaacgtgataacaataatagtaatatgaaaatatttnttaaattttttataattaatctctgctagaaaatttgattaatcatttttagtagaatttgtttttctcaactagg

SEQ ID NO: 4748 - DNA, 650 bp, Artificial; identical to SEQ ID NO: 1754
  Mutations within GlyA3B4 introduced by GmGlyA3B4_T02TALE nuclease

SEQ ID NO: 4749 - DNA, 791 bp, Artificial
  Mutations within GlyA3B4 introduced by GmGlyA3B4_T02TALE nuclease
gttcatgtacggttgcagatataaacgaagcatagcttatgtatgaggtgtaacaaaattggaaacaatagccatgcaaggtgaagaatgtcaccaactcagaaaccccttcttcattgacgtgtcccctcactcactctcctctcttcactataaatcgccactcttcgtgttctccacttcaccaactccttcaaacttattaacactttccttagttcaatatggggaagcccttcttcactctctctctttcttccctttgcttgctactcttgtcgagtgcatcaagcaggcgctggagacggtccagcggctgttgccggtgctgtgccaggccccacggcttgacccccccagcaggtggtggccatcgcccagcaatggcggtggcaagcaggcgctggagacggtccttgctattacctccagcaagttcaacgagtgccaactcaacaacctcaacgcgttggaacccgaccaccgcgttgagtccgaaggtggtcttattgaaacatggaactctcaacaccctgagctgcaatgcgccggtgtcactgtttccaaacgcaccctcaaccgcaacggcctccacttgccatcttactcaccttatccccaaatgatcattgtcgttccaaggtgcgtaatattagtaagaagtatttatcagcttaacgtgataacaataatagtaatatgaaaatatttattaaattttttataattaatctctgctagaaaatttgataatcattttagagaattgtttttccaacttaggttttaaa

SEQ ID NO: 4750 - DNA, 667 bp, Artificial
  Mutations within GlyA3B4 introduced by GmGlyA3B4_T02TALE nuclease
gttcatgtacggttgcagatataaacgaagcatagcttatgtatgaggtgtaacaaaattggaaacaatagccatgcaaggtgaagaatgtcaccaactcgagaacccttcttcattgacgtgtccctcactcactctcctctcttcactataaatcgccactcttcgtgttctccacttcaccaactccttcaaacttattaacactttccttagttcaatatggggaagcccttcttcactctctctctttcttccctttgcttgctactcttgtcgagtgcattgctattacctccagcaagttcaacgagtgccaactcaacaacctcaacgcgttggaacccgaccaccgcgttgagtccgaaggtggtcttattgaaacatggaactctcaacaccctgagctgcaatgcgccggtgtcactgtttccaaacgcaccctcaaccgcaacggcctccacttgccatcttactcaccttatccccaaatgatcattgtcgttcaaggtgcgtaatattagtaagagtatttatcagcttaacgtgataacaataatagtaatatgaaatatttattaaatttttataattaatctctgctagaaaatttgattaatcattttagtagaatttgtttttctcaactaggtttttaaacaccaca

SEQ ID NO: 4751 - DNA, 664 bp, Artificial
  Mutations within GlyA3B4 introduced by GmGlyA3B4_T02TALE nuclease
gttcatgtacggttgcagatataaacgaagcatagcttatgtatgaggtgtaacaaaattggaaacaatagccatgcaaggtgaagaatgtcaccaactcagaaacccttcttcattgacgtgtccctcactcactctcctctcttcactataaatcgccactcttcgtgttctccacttcaccaactccttcaaacttattaacactttccttagttcaatatggggaagcccttcttcactctctctctttcttccctttgcttgctactcttgtcgagttgctattacctccagcaagttcaacgagtgccaactcaacaacctcaacgcgttggaaccgaccaccgcgttgagtccgaaggtggtcttattgaaacatggaactctcaacaccctgagctgcaatgcgccggtgtcactgtttccaaacgcacccctcaaccgcaacggcctccacttgccatcttactcaccttatccccaaatgatcattgtcgttcaaggtgcgtaatattagtaagaagtatttatcagcttaacgtgataacaataatagtaatatgaaaatatttattaaatttttataattaatctctgctagaaaatttgattaatcattttagtagaatttgtttttctcaactaggtttttaaaacacca

SEQ ID NO: 4752 - DNA, 651 bp, Artificial; identical to SEQ ID NO: 2803
  Mutations within GlyA3B4 introduced by GmGlyA3B4_T02TALE nuclease

SEQ ID NO: 4753 - DNA, 649 bp, Artificial
  Mutations within GlyA3B4 introduced by GmGlyA3B4_T02TALE nuclease
gttcatgtacggttgcagatataaacgaagcatagcttatgtatgaggtgtaacaaaattggaaacaatagccatgcaaggtgaagaatgtcaccaactcagaaacccttcttcattgacgtgtccctcactcactctcctctcttcactataaatcgccactcttcgtgttctccacttcaccaactccttcaaacttattaacactttccttagttcaatatggggaagcccttcttcactctctctctttcttccctttgcttgctactcttgtcgagtggcctattacctccagcaagttcaacgagtgccaactcaacaacctcaacgcgttggaacccgaccaccgcgttgagtccgaaggtggtcttattgaaacatggaactctcaacaccctgagctgcaatgcgccggtgtcactgtttccaaacgcaccctcaaccgcaacggcctccacttgccatcttactcaccttatccccaaatgatcattgtcgttcaaggtgcgtaatattagtaagaagtatttatcagcttaacgtgataacaataatagtaatatgaaatatttattaaatttttataattaatctctgctagaaaatttgattaatcattttagtagaatttgttttctcaactagg

SEQ ID NO: 4754 - DNA, 652 bp, Artificial
  Mutations within GlyA3B4 introduced by GmGlyA3B4_T02TALE nuclease
gttcatgtacggttgcagatataaacgaagcatagcttatgtatgaggtgtaacaaaaattggaaacaatagccatgcaaggtgaagaatgtcaccaactcagaaacccttcttcattgacgtgtccctcactcactctcctctcttcactataaatcgccactcttcgtgttctccacttcaccaactccttcaaacttattaacactttccttagttcaatatggggaagcccttcttcactctctctctttcttccctttgcttgctactcttgtcgagtgcattgctattacctccagcaagttcaacgagtgccaactcaacaacctcaacgcgttggaacccgaccaccgcgttgagtccgaaggtggtcttattgaaacatggaactctcaacaccctgagctgcaatgcgccggtgtcactgtttccaaacgcaccctcaaccgcaacggcctccacttgccatcttactcaccttatccccaaatgatcattgtcgttcaaggtgcgtaatattagtaagagtatttatcagcttaacgtgataacaataatagtaatatgaaatatttattaaatttttataattaatctctgctagaaaatttgattaatcattttagtagaatttgttttctcaactagg

SEQ ID NO: 4755 - DNA, 658 bp, Artificial
  Mutations within GlyA3B4 introduced by GmGlyA3B4_T02TALE nuclease
gttcatgtacggttgcagatataaacgaagcatagcttatgtatgaggtgtaacaaaattggaaacaatagccatgcaaggtgaagaatgtcaccaactcagaaacccttcttcattgacgtgtccctcactcactctcctctcttcactataaatcgccactcttcgtgttctccacttcaccaactccttcaaacttattaacactttccttagttcaatatggggaagcccttcttcactctctctctttcttccctttgcttgctactcttgtcgagtgcatttacctccagcaagttcaacgagtgccaactcaacaacctcaacgcgttggaacccgaccaccgcgttgagtccgaaggtggtcttattgaaacatggaactctcaacaccctgagctgcaatgcgccggtgtcactgtttccaaacgcaccctcaaccgcaacggcctccacttgccatcttactcaccttatcccccaaatgatcattgtcgttcaaggtgcgtaatattagtaagaagtatttatcagcttaacgtgataacaatatagtaatatgaaatatttattaaatttttataattaatctctgctagaaatttgattaatcattttagtagaatttgtttttctcaactaggttttaaacacc

SEQ ID NO: 4756 - DNA, 624 bp, Artificial
  Mutations within GlyA3B4 introduced by GmGlyA3B4_T02TALE nuclease
gttcatgtacggttgcagatataaacgaagcatagcttatgtatgaggtgtaacaaaattggaaacaatagccatgcaaggtgaagaatgtcaccaactcagaaacccttcttcattgacgtgtccctcactcactctcctctcttcactataaatcgccactcttcgtgttctccacttcaccaactccttcaaacttattaacactttccttagttcaatatggggaagcccttcttcactctctctctttcgttcctccagcaagttcaacgagtgccaactcaacaacctcaacgcgttggaacccgaccaccgcgttgagtccgaaggtggtcttattgaaacatggaactctcaacaccctgagctgcaaatgcgccggtgtcactgtttcccaaacgcacccctcaaccgcaacggcctccacttgccatcttactcaccttatccccaaatgatcattgtcgttcaaggtgcgtaatattagtaagaagtatttatcagcttaacgtgataacaataatagtaatatgaaatatttattaattttttataattaatctctgctagaaaatttgattaatcatttttagtagaatttgtttttctcaactaggtttt

SEQ ID NO: 4757 - DNA, 632 bp, Artificial
  Mutations within GlyA3B4 introduced by GmGlyA3B4_T02TALE nuclease
gttcatgtacggttgcagatataaacgaagcatagcttatgtatgaggtgtaacaaaattggaaacaatagccatgcaaggtgaagaatgtcaccaactcagaaacccttcttcattgacgtgtccctcactcactctcctctcttcactataaatcgccactcttcgtgttctccacttcaccaactccttcaaacttattaacactttccttagttcaatatggggaagcccttcttcactctctctctttcttccctttgcttgctactcttgtcgatacctccagcaagttcaacgagtgccaactcaacaacctcaacgcgttggaacccgaccaccgcgttgagtccgaaggtggtcttattgaaacatggaactctcaacaccctgagctgcaatgcgccggtgtcactgtttccaaacgcaccctcaaccgcaacggcctccacttgccatcttactcaccttatccccaaatgatcttgtcgttcaaggtgcgtaatattagtaagaagtatttatcagcttaacgtgataacaataatagtaatatgaaatatttattaaattttttataattaatctctgctagaaaatttgattaatctttttaatagaatttgtttttc

SEQ ID NO: 4758 - DNA, 645 bp, Artificial
  Mutations within GlyA3B4 introduced by GmGlyA3B4_T02TALE nuclease
  misc_feature (450): n is a or c or t or g
gttcatgtacggttgcagatataaacgaagcatagcttatgtatgaggtgtaacaaaattggaaacaatagccatgcaaggtgaagaatgtcaccaactcagaaacccttcttcattgacgtgtccctcactcactctcctctcttcactataaatcgccactcttcgtgttctccacttcaccaactccttcaaacttattaacactttccttagttcaatatggggaagcccttcttcactctctctctttcttccctttgcttgctactcttgctattacctccagcaagttcaacgagtgccaactcaacaacctcaacgcgttggaacccgaccaccgcgttgagtccgaaggtggtcttattgaaacatggaactctcaacaccctgagctgcaatgcgccggtgtcactgtttccaaacgcaccctcaccgcaacggcctccncttgccatcttactcaccttactccccaaatgatcattgtcgttcaaggtgcgtaatattagtaagaagtatttatcagcttaacgtgataacaataatagtaatatgaaatatttattaaattttttataattaatctctgctagaaaatttgattaatcatttttagtagaattgtttttctcaactaggttt

SEQ ID NO: 4759 - DNA, 658 bp, Artificial
  Mutations within GlyA3B4 introduced by GmGlyA3B4_T02TALE nuclease
gttcatgtacggttgcagatataaacgaagcatagcttatgtatgaggtgtaacaaaattggaaacaatagccatgcaaggtgaagaatgtcaccaactcagaaacccttcttcattgacgtgtccctcactcactctcctctcttcactataaatcgccactcttcgtgttctccacttcaccaactccttcaaacttattaacactttccttagttcaatatggggaagcccttcttcactctctctctttcttccctttgcttgctactcttgtcgagtttgctattacctccagcaagttcaacgagtgccaactcaacaacctcaacgcgttggaacccgaccaccgcgttgagtccgaaggtggtcttattgaaacatggaactctcaacaccctgagctgcaatgcgccggtgtcactgtttccaaacgcaccctcaaccgcaacggcctccacttgccatcttactcaccttatccccaaatgatcattgtcgttcaaggtgcgtaatattagtaagaagtatttatcagcttaacgtgataacaataatagtaatatgaaatatttattaaatttttataattaatctctgctagaaaatttgattaatcattttagtagaatttgtttttctcaactaggttttaaaa

SEQ ID NO: 4760 - DNA, 541 bp, Artificial
  Mutations within GlyA3B4 introduced by GmGlyA3B4_T02TALE nuclease
gttcatgtacggttgcagatataacgaagcatagcttatgtatgaggtaacaaaattgaaacaatagccatgcaaggtgaagaagtcaccaactcagaaaccccttcttcattgacgtgtccctcactcactctcctctcttcactataaatcgccactcttcgtgttctccacttcaccaactccttcaaacttattaacactttccttagttcaatatggggaagcccttcttcactctctctctttcttccctttgcttgctactcttgtcgttgctattacctccagcaagttcaacgagtgccaactcaacaacctcaacgcgtggaaccccgaccaccgcgttgagtccgaaaggtggtcttattgaaacatggaactctcaacaccctgagctgcaatgcgccggtgtcactgtttccaaaacgccacccctcaacccgcaacggcctcccacttgccaatcttactcaccttatcccccaaatgaatcattgtcgttcaaggtgcgtaatattagtaagaagtatttatcagc

SEQ ID NO: 4761 - DNA, 649 bp, Artificial
  Mutations within GlyA3B4 introduced by GmGlyA3B4_T02TALE nuclease
  misc_feature (276); (277); (279): n is a or c or t or g
gttcatgtacggttgcagatataaacgaagcatagcttatgtatgaggtgtaacaaaattggaaacaatagccatgcaaggtgaagaatgtcaccaactcagaaacccttcttcattgacgtgtccctcactcactctcctctcttcactataaatcgccactcttcgtgttctccacttcaccaactccttcaaacttattaacactttccttagttcaatatggggaagcccttcttcactctctctctttcttccctttgcttgctaactctnngntattacctccagcaagttcaacgagtgccaactcacaacctcaacgcgttggaacccgaccaccgcgttgagtccgaaggtggtcttattgaaacatggaactctcaacaccctgagctgcaatgcgccggtgtcactgtttccaaacgcaccctcaaccgcaacggcctccacttgccatcttactcaccttatccccaaatgatcattgtcgttcaaggtgcgtaatattagtaagaagtatttatcagcttaacgtgataacaatatagtaatatgaaatatttattaaatttttataattaatctctgctagaaaatttgattaatcattttagtagaatttgttttctcaactaggtttttaaaa

SEQ ID NO: 4762 - DNA, 651 bp, Artificial
  Mutations within GlyA3B4 introduced by GmGlyA3B4_T02TALE nuclease
gttcatgtacggttgcagatataaacgaagcatagcttatgtatgaggtgtaacaaaattggaaacaatagccatgcaaggtgaagaatgtcaccaactcagaaaccccttcttcattgacgtgtccctcactcactctcctctcttcactataaatcgccactcttcgtgttctccacttcaccaactccttcaaacttattaacactttccttagttcaatatggggaagcccttcttcactctctctctttcttccctttgcttgctactcttgtcgagtgcatccagcaagttcaacgagtgccaactcaacaacctcaacgcgttggaacccgaccaccgcgttgagtccgaaggtggtcttattgaaacatggaactctcaacaccctgagctgcaatgcgccggtgtcactgtttccaaacgcaccctcaaccgcaacggcctccacttgccatcttactcaccttatcccccaaatgatcattgtcgttcaaggtgcgtaatattagtaagaagtatttatcagcttaacgtgataacaataatagtaatatgaaatatttattaaattttttataattaatctctgctagaaaatttgattaatcatttttagtagaatttgttttttctcaactaggtttt

SEQ ID NO: 4763 - DNA, 637 bp, Artificial
  Mutations within GlyA3B4 introduced by GmGlyA3B4_T02TALE nuclease
  misc_feature (170): n is a or c or t or g
gttcatgtacggttgcagatataaacgaagcatagcttatgtatgaggtgtaacaaaattggaaacaatagccatgcaaggtgaagaatgtcaccaactcagaaacccttcttcattgacgtgtccctcactcactctcctctcttcactataaatcgccactcttcgtnttctccacttcaccaactccttcaaacttattaacactttccttagttcaatatggggaagcccttcttcactctctctctttcttccctttgcttgctactcttgtcgagtgcatctattacctccagcaagttcaacgagtgccaactcaacaacctcaacgcgttggaacccgaccaccgcgttgagtccgaaggtggccttattgaaacatggaactctcaacaccctgagctgcaatgcgccggtgtcactgtttccaaacgcaccctcaaccgcaacggcctccacttgccatcttactcaccttatcccccaaatgatcattgtcgttcaaggtgcgtaatattagtaagaagtatttatcagcttaacgtgataacaataatagtaatatgaaatatttattaaatttttataattaatctctgctagaaaatttgattaatcattttagtagaatttg

SEQ ID NO: 4764 - DNA, 660 bp, Artificial
  Mutations within GlyA3B4 introduced by GmGlyA3B4_T02TALE nuclease
gttcatgtacggttgcagatataaacgaagcatagcttatgtatgaggtgtaacaaaattggaaacaatagccatgcaaggtgaagaatgtcaccaactcagaaacccttcttcattgacgtgtccctcactcactctcctctcttcactataaatcgccactcttcgtgttctccacttcaccaactccttcaaacttattaacactttccttagttcaatatggggaagcccttcttcactctctctctttcttccctttgcttgctactcttgtcgagtgcattacctccagcaagttcaacgagtgccaactcaacaactcaacgcgttggaacccgaccaccgcgttgagtccgaaggtggtcttattgaaacatggaactctcaacaccctgagctgcaatgcgccggtgtcactgtttccaaacgcaccctcaaccgcaacggcctccacttgccatcttactcaccttatccccaaatgatcattgtcgttcaaggtgcgtaatattagtaagaagtatttatcagcttaacgtgataacaatatagtaatatgaaatatttattaaatttttataattaatctctgctagaaaatttgattaatcatttttagtagaatttgtttttctcaactaggtttttaaaacacca

SEQ ID NO: 4765 - DNA, 636 bp, Artificial
  Mutations within GlyA3B4 introduced by GmGlyA3B4_T02TALE nuclease
gttcatgtacggttgcagatataaacgaagcatagcttatgtatgaggtgtaacaaaattggaaacaatagccatgcaaggtgaagaatgtcaccaactcagaaacccttcttcattgacgtgtccctcactcactctcctctcttcactataaatcgccactcttcgtgttctccacttcaccaactccttcaaacttattaacactttccttagttcaatatggggaagcccttcttcactctctctctttcttccctttgctattacctccagcaagttcaacgagtgccaactcaacaacctcaacgcgttggaacccgaccaccgcgttgagtccgaaggtggtcttattgaaacatggaactctcaacaccctgagctgcaatgcgccggtgtcactgttttccaaacgcaccctcaaccgcaacggcctccacttgccatcttactcaccttatccccaaatgatcattgtcgttcaaggtgcgtaatattagtaagaagtatttatcagcttaacgtgataacaataatagtaatatgaaatatttattaaattttttataattaatctctgctagaaaatttgattaatcatttttagtagaatttgttttttctcaactaggtttt

SEQ ID NO: 4766 - DNA, 565 bp, Artificial
  Mutations within GlyA3B4 introduced by GmGlyA3B4_T02TALE nuclease
gttcatgtacggttgcagatataaacgaagcatagcttatgtatgaggtgtaacaaaattggaaacaatagccatgcaaggtgaagaatgtcaccaactcagaaacccttcttcattgacgtgtccctcactcactctcctctcttcactataaatcgccactcttcgtgttctccacttcaccaactccttcaaacttattaacactttccttagttcaacgagtgccaactcaacaacctcaacgcgttggaacccgaccaccgcgttgagtccgaaggtggtcttattgaaacatggaactctcaacaccctgagctgcaatgcgccggtgtcactgtttccaaacgcaccctcaaccgcaacggcctccacttgccatcttactcaccttatccccaaaatgatcattgtcgttcaaggtgcgtaatattagtaagaagtatttatcagcttaacgtgataacaataatagtaatatgaaatatttattaaattttttatattaatctctgctagaaaatttgattaatcattttagtagaatttgtttttctcaactagg

SEQ ID NO: 4767 - DNA, 663 bp, Artificial
  Mutations within GlyA3B4 introduced by GmGlyA3B4_T02TALE nuclease
  misc_feature (530): n is a or c or t or g
gttcatgtacggttgcagatataaacgaagcatagcttatgtatgaggtgtaacaaaattggaaacaatagccatgcaaggtgaagaatgtcaccaactcagaaacccttcttcattgacgtgtccctcactcactctcctctcttcactataaatcgccactcttcgtgttctccacttcaccaactccttcaaacttattaacactttccttagttcaatatggggaagcccttcttcactctctctctttcttccctttgcttgctactcttgtcgagtgcatgctattacctccagcaagttcaacgagtgccaactcaacaacctcaacgcgttggaacccgaccaccgcgttgagtccgaaggtggtcttattgaaacatggaactctcaacaccctgagctgcaatgcgccggtgtcactgtttccaaacgcaccctcaaccgcaacggcctccacttgccatcttactcaccttatccccaaatgatcattgtcgttcaaggtgcgtaatattagtaagagnatttatcagcttaacgtgataacaatatagtaatatgaaatatttattaaatttttataattaatctctgctagaaaatttgattaatcatttttagtagaatttgtttttctcaactaggttttaaacacca

SEQ ID NO: 4768 - DNA, 504 bp, Artificial; identical to SEQ ID NO: 1778
  Mutations within GlyA3B4 introduced by GmGlyA3B4_T02TALE nuclease

SEQ ID NO: 4769 - DNA, 427 bp, Artificial
  Mutations within GlyA3B4 introduced by GmGlyA3B4_T03TALE nuclease
gttcatgtacggttgcagatataaacgaagcatagcttatgtatgaggtgtaacaaaattggaaacaatagccatgcaaggtgaagaatgtcaccaactcagaaacccttcttcattgacgtgtccctcactcactctcctctcttcactataaatcgccactcttcgtgttctccacttcaccaactccttcaaacttattaacactttccttagttcaatatggggaagcccttcttcactctctctctttcttccctttgcttgctactcttgtcgagtgcatgctttgctattacctccagcaagttcaacaataatagtaatatgaaatatttattaaattttttataattaatctctgctagaaaatttgattaatcatttttagtagaatttgtttttctcaactaggttttaaacacca

SEQ ID NO: 4770 - DNA, 406 bp, Artificial
  Mutations within GlyA3B4 introduced by GmGlyA3B4_T03TALE nuclease
gttcatgtacggttgcagatataaacgaagcatagcttatgtatgaggtgtaacaaaattggaaacaatagccatgcaactcaacaacctcaacgcgttggaacccgaccaccgcgttgagtccgaaggtggtcttattgaacatggaactctcaacaccctgagctgcaatgcgccggtgtcactgtttccaaacgcaccctcaaccgacaacggcctccacttgccatcttactcaccttatcccaatgatcattgtcgttccaaggtgcgtaatattagtaagaagtatttatcagcttaacgtgataacaataatagtaatatgaaatatttattaaattttttataattaatctctgctagaaaaatttgattaatctatttttagtagaatttgttttct

SEQ ID NO: 4771 - DNA, 426 bp, Artificial
  Mutations within GlyA3B4 introduced by GmGlyA3B4_T03TALE nuclease
gttcatgtacggttgcagatataaacgaagcatagcttatgtatgaggtgtaacaaaattggaaacaatagccatgcaaggtgaagaatgtcaccaactcagaaacccttcttcattgacgtgtccctcactcactctcctctcttcactataaatcgccactcttcgtgttctccacttcaccaactccttcaaacttattaacactttccttagttcaatatggggaagcccttcttcactctctctctttcttccctttgcttgctactcttgtcgagtgcatgctttgctattacctccagcaagttcaacaataatagtaatatgaaatatttattaaattttttataattaatctctgctagaaaatttgattaatcattttagtagaatttgtttttctcaactaggttttaaacacca

SEQ ID NO: 4772 - DNA, 442 bp, Artificial
  Mutations within GlyA3B4 introduced by GmGlyA3B4_T03TALE nuclease
gttcatgtacggttgcagatataaacgaagcatagcttatgtatgaggtgtaacaaaattggaaacaatagccatgcaaggtgaagaatgtcaccaactcagaaacccttcttcattgacgtgtccctcactcactctcctcctcttcactaataatcgccactcttcgtgttctccacttcaccaactccttcaaacttattaacactttccttagttcaatatggggaagcccttcttcactctctctctttcttccctttgcttgctactcttgtcgagtgcatgctttgctattacctccagcaagtcgtgcgtaatattagtaagaagtatttatcagcttaacgtgataacaataatagtaatatgaaatatttattaaattttttataattaatctctgctagaaaatttgattaatcatttttagtagaatttg

SEQ ID NO: 4773 - DNA, 412 bp, Artificial
  Mutations within GlyA3B4 introduced by GmGlyA3B4_T03TALE nuclease
gttcatgtacggttgcagatataaacgaagcatagcttatgtatgaggtgtaacaaaattggaaacaatagccatgcaaggtgaagaatgtcaccaactcaacaacctcaacgcgttggaacccgaccaccgcgttgagtccgaaggtggtcttattgaaacatggaactctcaacaccctgagctgcaatgcgccggtgtcactgtttccaaacgcaccctcaaccgcaacggcctccacttgccatcttactcaccttatccccaaatgatcattgtcgttcaaggtgcgtaatattagtaagaagtatttatcagcttaacgtgataacaataatagtaatatgaaatatttattaaatttttataattaatctctgctagaaaatttgattaatcatttttagtagaa

SEQ ID NO: 4774 - DNA, 424 bp, Artificial
  Mutations within GlyA3B4 introduced by GmGlyA3B4_T03TALE nuclease
gttcatgtacggttgcagatataaacgaagcatagcttatgtatgaggtgtaacaaaattggaaacaatagccatgcaaggtgaagaatgtcaccaactcagaaacccttcttcattgacgtgtccctcactcactctcctctcttcactataaatcgccactcttcgtgttctccacttcaccaactccttcaaacttattaacactttccttagttcaatatggggaagcccttcttcactctctctctttcttccctttgcttgctactcttgtcgagtgcatgctttgctattacctccagcaagttcaacaataatagtaatatgaaatattattaaatttttataattaatctctgctagaaatttgattaatcatttttagtagaatttgtttttctcaactaggttttaaacacca

SEQ ID NO: 4775 - DNA, 496 bp, Artificial
  Mutations within GlyA3B4 introduced by GmGlyA3B4_T03TALE nuclease
gttcatgtacggttgcagatataaacgaagcatagcttatgtatgaggtgtaacaaaattggaaacaatagccatgcaaggtgaagaatgtcaccaactcagaaacccttcttcattgacgtgtccctcactcactctcctctcttcactataaatcgccactcttcgtgttctccacttcaccaactccttcaaacttgccaactcaacaacctcaacgcgttggaaccgaccaccgcgttgagtccgaaggtggtcttattgaaacatggaactctcaacaccctgagctgcaatgcgccggtgtcactgtttccaaacgcaccctcaaccgcaacggcctccacttgccatcttactcaccttatcccaaactgaatcattgtcgttcaaggtgcgtaatattagtaagaagtatttatcagcttaacgtgataacaataatagtaatatgaaatatttattaaattttttataattaatctctgctagaaaa

SEQ ID NO: 4776 - DNA, 502 bp, Artificial
  Mutations within GlyA3B4 introduced by GmGlyA3B4_T03TALE nuclease
gttcatgtacggttgcagatataaacgaagcatagcttatgtatgaggtgtaacaaaattggaaacaatagccatgcaaggtgaagaatgtcaccaactcagaaacccttcttcattgacgtgtccctcactcactctcctctcttcactataaatcgccagtgccaactcaacaacctcaacgcgttggaacccgaccaccgcgttgagtccgaaggtggtcttattgaaacatggaactctcaacaccctgagctgcaatgcgccggtgtcactgtttccaaacgcaccctcaaccgcaacggcctccacttgccatcttactcaccttatccccaaatgatcattgtcgttcaaggtgcgtaatattagtaagaagtatttatcagcttaacgtgataacaataatagtaatatgaaatatttattaaatttttataattaatctctgctagaaaatttgattaatcatttttagtagaatttgtttttctcaactagg

SEQ ID NO: 4777 - DNA, 426 bp, Artificial
  Mutations within GlyA3B4 introduced by GmGlyA3B4_T03TALE nuclease
gttcatgtacggttgcagatataaacgaagcatagcttatgtatgaggtgtaacaaaattggaaacaatagccatgcaactcaacaacctcaacgcgttggaacccgaccaccgcgttgagtccgaaggtggtcttattgaaacatggaactctcaacaccctgagctgcaatgcgccggtgtcactgtttccaaacgcaccctcaaccgcaacggcctccacttgccatcttactcaccttatccccaaatgatcattgtcgttcaaggtgcgtaatattagtaagaagtatttatcagcttaacgtgataacaataatagtaatatgaaatatttattaaattttttataattaatctctgctagaaaatttgattaatcatttttagtagaatttgtttttctcaactaggttttaaacacca

SEQ ID NO: 4778 - DNA, 380 bp, Artificial
  Mutations within GlyA3B4 introduced by GmGlyA3B4_T03TALE nuclease
gttcatgtacggttgcagatataaacgaagcatagcttatgtatgaggtgtaacaaaattggaaacaatagccatgcaaggtgaagaatgtcaccaactcagaaacccttcttcattgacgtgtccctcactcactctcctctcttcactataaatcgccactcttcgtgttctccacttcaccaactccttcaaacttattaacactttccttagttcaatatggggaagcccttcttcactctctctctttcttccctttgcttgctactcttgtcgagtgcatgctttgctattacctccagcaagtaagcttaacgtgataacaataatagtaatatgaaatatttattaaattttttataattaatctctgctag

SEQ ID NO: 4779 - DNA, 428 bp, Artificial
  Mutations within GlyA3B4 introduced by GmGlyA3B4_T03TALE nuclease
gttcatgtacggttgcagatataaacgaagcatagcttatgtatgaggtgtaacaaaattggaaacaatagccatgcaaggtgaagaatgtcaccaactcaacaacctcaacgcgttggaacccgaccaccgcgttgagtccgaaggtggtcttattgaacatggaactctcaacaccctgagctgcaatgcgccggtgtcactgtttccaaacgcaccctcaaccgcaacggcctccacttgcccatcttactcaccttatccccaaatgaatcattgtcgttcaaggtgcgtaatattagtaagaagtatttatcagcttaacgtgataacaataatagtaatatgaaatatttattaatttttataattaatctctgctagaaaatttgattaatcatttttagtagaattttgtttttctcaac

SEQ ID NO: 4780 - DNA, 456 bp, Artificial
  Mutations within GlyA3B4 introduced by GmGlyA3B4_T03TALE nuclease
gttcatgtacggttgcagatataaacgaagcatagcttatgtatgaggtgtaacaaaattggaaacaatagccatgcaaggtgaagaatgtcaccaactcagaaacccttcttcattgacgtgtccctcactcactctcctctcttcactataaatcgccactcttcgtgttctccacttcaccaactccttcaaacttattaacactttccttagttcaatatggggaagcccttcttcactctctctctttcttccctttgcttgctactcttgtcgagtgcatgctttgctattacctccagcaagtcgtgcgtaatattagtaagaagtatttatcagcttaacgtgataacaataatagtaatatgaaatatttattaaattttttataattaatctctgctagaaaatttgattaatcatttttagtagaatttgtttttctcaactagg

SEQ ID NO: 4781 - DNA, 484 bp, Artificial
  Mutations within GlyA3B4 introduced by GmGlyA3B4_T03TALE nuclease
gttcatgtacggttgcagatataaacgaagcatagcttatgtatgaggtgtaacaaaattggaaacaatagccatgcaaggtgaagaatgtcaccaactcagaaacccttcttcattgacgtgtccctcactcactctcctctcttcactataaatcgccactcttcgtgttctccacttcaccaactccttcaaacttattaacactttccttagttcaatatggggaagcccttcttcactctctctctttcttccctttgcttgctctcaacaccctgagctgcaatgcgccggtgtcactgtttccaaacgcaccctcaaccgcaacggcctccacttgccatcttactcaccttatccccaaatgatcattgtcgttcaaggtgcgtaatattagtaagaagtatttatcagcttaacgtgataacaataatagtaatatgaaatatttattaaattttttataattaatctctgctag

SEQ ID NO: 4782 - DNA, 392 bp, Artificial
  Mutations within GlyA3B4 introduced by GmGlyA3B4_T03TALE nuclease
gttcatgtacggttgcagatataaacgaagcatagcttatgtatgaggtgtaacaaaattggaaacaatagccatgcaaggtgaagaatgtcaccaactcagaaacccttcttcattgacgtgtccctcactcactctcctctcttcactataaatcgccactcttcgtgttctccacttcaccaactccttcaaacttattaacactttccttagttcaatatggggaagcccttcttcactctctctctttcttccctttgcttgctactcttgtcgagtgcatgctttgctattacctccagcaagtaagcttaacgtgataacaataatagtaatatgaaatatttattaaatttttataattaatctctgctagaaaatttgattaa

SEQ ID NO: 4783 - DNA, 426 bp, Artificial; identical to SEQ ID NO: 4771
  Mutations within GlyA3B4 introduced by GmGlyA3B4_T03TALE nuclease

SEQ ID NO: 4784 - DNA, 413 bp, Artificial
  Mutations within GlyA3B4 introduced by GmGlyA3B4_T03TALE nuclease
gttcatgtacggttgcagatataaacgaagcatagcttatgtatgaggtgtaacaaaattggaaacaatagccatgcaaggtgaagaatgtcaccaactcaacaacctcaacgcgttggaacccgaccaccgcgttgagtccgaaggtggtcttattgaaacatggaactctcaacaccctgagctgcaatgcgccggtgtcactgtttccaaacgcaccctcaaccgcaacggcctccacttgccatcttactcaccttatccccaaatgatcattgtcgttcaaggtgcgtaatattagtaagaagtatttatcagcttaacgtgataacaataatagtaatatgaaatatttattaaattttttataattaatctctgctagaaaatttgattaatcatttttagtagaa

SEQ ID NO: 4785 - DNA, 408 bp, Artificial
  Mutations within GlyA3B4 introduced by GmGlyA3B4_T03TALE nuclease
gttcatgtacggttgcagatataaacgaagcatagcttatgtatgaggtgtaacaaaattggaaacaatagccatgcaaggtgaagaatgtcaccaactcagaaacccttcttcattgacgtgtccctcactcactctcctctcttcactataaatcgccactcttcgtgttctccacttcaccaactccttcaaacttattaacactttccttagttcaatatggggaagcccttcttcactctctctctttcttccctttgcttgctactcttgtcgagtgcatgctttgctattacctccagcaagtaagcttaacgtgataacaataatagtaatatgaaatatttattaaattttttataattaatctctgctagaaaatttgattaatcatttttagtagaa

SEQ ID NO: 4786 - DNA, 426 bp, Artificial; identical to SEQ ID NO: 4777
  Mutations within GlyA3B4 introduced by GmGlyA3B4_T03TALE nuclease

SEQ ID NO: 4787 - DNA, 426 bp, Artificial
  Mutations within GlyA3B4 introduced by GmGlyA3B4_T03TALE nuclease
gttcatgtacggttgcagatataaacgaagcatagcttatgtatgaggtgtaacaaaattggaaacaatagccatgcaaggtgaagaatgtcaccaactcagaaacccttcttcattgacgtgtccctcactcactctcctctcttcactataaatcgccactcttcgtgttctccacttcaccaactccttcaaacttattaacactttccttagttcaatatggggaagcccttcttcactctctctctttcttccctttgcttgctactcttgtcgagtgcatgctttgctattacctccagcaagtaagcttaacgtgataacaataatagtaatatgaaatatttattaaatttttataattaatctctgctagaaaatttgattaatcatttttagtagaatttgtttttctcaactagg

SEQ ID NO: 4788 - DNA, 541 bp, Artificial
  Mutations within GlyA3B4 introduced by GmGlyA3B4_T03TALE nuclease
gttcatgtacggttgcagatataaacgaagcatagcttatgtatgaggtgtaacaaaattggaaacaatagccatgcaaggtgaagaatgtcaccaactcagaaacccttcttcattgacgtgtccctcactcactctcctctcttcactataaatcgccactcttcgtgttctccacttcaccaactccttcaaacttattaacactttccttagttcaatatggggaagcccttcttcactctctctctttcttccctttgcttgctctcaacaccctgagctgcaatgcgccggtgtcactgtttccaaacgcaccctcaaccgcaacggcctccacttgccatcttactcaccttatccccaaatgatcattgtcgttcaaggtgcgtaatattagtaagaagtatttatcagcttaacgtgataacaataatagtaatatgaaatatttattaaattttttataattaatctctgctagaaaatttgattaatcatttttagtagaatttgtttttctcaactaggtttttaaaca

SEQ ID NO: 4789 - DNA, 516 bp, Artificial
  Mutations within GlyA3B4 introduced by GmGlyA3B4_T03TALE nuclease
gttcatgtacggttgcagatataaacgaagcatagcttatgtatgaggtgtaacaaaattggaaacaatagccatgcaaggtgaagaatgtcaccaactcagaaacccttcttcattgacgtgtccctcactcactctcctctcttcactataaatcgccactcttcgtgttctccacttcaccaactccttcaaacttattaacactgagtgccaactcaacaacctcaacgcgttggaacccgaccaccgcgttgagtccgaaggtggtcttattgaaacatggaactctcaacaccctgagctgcaatgcgccggtgtcactgtttccaaacgcaccctcaaccgcaacggcctccacttgccatcttactcaccttatccccaaatgatcattgtcgttcaaggtgcgtaatattagtaagaagtatttatcagcttaacgtgataacaataatagtaatatgaaatatttattaaattttttataattaatctctgctagaaaatttgatt

SEQ ID NO: 4790 - DNA, 480 bp, Artificial
  Mutations within GlyA3B4 introduced by GmGlyA3B4_T03TALE nuclease
gttcatgtacggttgcagatataaacgaagcatagcttatgtatgaggtgtaacaaaattggaaacaatagccatgcaaggtgaagaatgtcaccaactcagaaacccttcttcattgacgtgtccctcactcactctcctctcttcactataaatcgccactcttcgtgttctccacttcaccaactccgaaggtggtcttattgaaacatggaactctcaacaccctgagctgcaatgcgccggtgtcactgtttccaaacgcaccctcaaccgcaacggcctccacttgccatcttactcaccttatccccaaatgatcattgtcgttcaaggtgcgtaatattagtaagaagtatttatcagcttaacgtgataacaataatagtaatatgaaatatttattaaattttttataattaatctctgctagaaaatttgattaatcatttttagtagaatttgtttttctcaactagg

SEQ ID NO: 4791 - DNA, 391 bp, Artificial
  Mutations within GlyA3B4 introduced by GmGlyA3B4_T03TALE nuclease
gttcatgtacggttgcagatataaacgaagcatagcttatgtatgaggtgtaacaaaattggaaacaatagccatgcaaggtgaagaatgtcaccaactcagaaacccttcttcattgacgtgtccctcactcactctcctctcttcactataaatcgccactcttcgtgttctccacttcaccaactccttcaaacttattaacactttccttagttcaatatggggaagcccttcttcactctctctctttcttccctttgcttgctactcttgtcgagtgcatgctttgctattacctccagcaagtcgtgcgtaatattagtaagaagtatttatcagcttaacgtgataacaataatagtaatatgaaatatttattaaatttttt

SEQ ID NO: 4792 - DNA, 450 bp, Artificial
  Mutations within GlyA3B4 introduced by GmGlyA3B4_T03TALE nuclease
gttcatgtacggttgcagatataaacgaagcatagcttatgtatgaggtgtaacaaaattggaaacaatagccatgcaaggtgaagaatgtcaccaactcaacaacctcaacgcgctggaacccgaccaccgcgttgagtccgaaggtggtcttattgaaacatggaactctcaacaccctgagctgcaatgcgccggtgtcactgtttccaaacgcaccctcaaccgcaacggcctccacttgccatcttactcaccttatccccaaatgatcattgtcgttcaaggtgcgtaatattagtaagaagtatttatcagcttaacgtgataacaataatagtaatatgaaatatttattaaattttttataattaaattctctgctagaaaatttgattaaatcatttttagtagaatttgtttttctcaactaggtttttaaacaccaca

SEQ ID NO: 4793 - DNA, 438 bp, Artificial
  Mutations within GlyA3B4 introduced by GmGlyA3B4_T03TALE nuclease
gttcatgtacggttgcagatataaacgaagcatagcttatgtatgaggtgtaacaaaattggaaacaatagccatgcaaggtgaagaatgtcaccaactcagaaacccttcttcattgacgtgtccctcactcactctcctctcttcactataaatcgccactcttcgtgttctccacttcaccaactccttcaaacttattaacactttccttagttcaatatggggaagcccttcttcactctctctctttcttccctttgcttgctactcttgtcgagtgcatgctttgctattacctccagcaagtaagcttaacgtgataacaataatagtaatatgaaatatttattaaatttttataattaatctctgctagaaaatttgattaatcattttagtagaattttgtttttctcaactaggttttaaacacca

SEQ ID NO: 4794 - DNA, 480 bp, Artificial; identical to SEQ ID NO: 4790
  Mutations within GlyA3B4 introduced by GmGlyA3B4_T03TALE nuclease

SEQ ID NO: 4795 - DNA, 393 bp, Artificial
  Mutations within GlyA3B4 introduced by GmGlyA3B4_T03TALE nuclease
gttcatgtacggttgcagatataaacgaagcatagcttatgtatgaggtgtaacaaaattggaaacaatagccatgcaaggtgaagaatgtcaccaactcagaaacccttcttcattgacgtgtccctcactcactctcctctcttcactataaatcgccactcttcgtgttctccacttcaccaactccttcaaacttattaacactttccttagttcaatatggggaagcccttcttcacctctctcttcttccttccttcttgctactcttgtcgagtgcatgctttgctattacctccagcaagtaagcttaacgtgataacaataatagtaatatgaaatatttattaatttttataattaatctctgctagaaaatttgattaatca

SEQ ID NO: 4796 - DNA, 515 bp, Artificial
  Mutations within GlyA3B4 introduced by GmGlyA3B4_T03TALE nuclease
gttcatgtacggttgcagatataaacgaagcatagcttatgtatgaggtgtaacaaaattggaaacaatagccatgcaaggtgaagaatgtcaccaactcagaaacccttcttcattgacgtgtccctcactcactctcctctcttcactataaatcgccagtgccaactcaacaacctcaacgcgttggaacccgaccaccgcgttgagtccgaaggtggtcttattgaaacatggaactctcaacaccctgagctgcaatgcgccggtgtcactgtttccaaacgcaccctcaaccgcaacggcctccacttgccatcttactcaccttatccccaaatgatcattgtcgttcaaggtgcgtaatattagtaagaagtatttatcagcttaacgtgataacaataatagtaatatgaaatatttattaaattttttataattaatctctgctagaaaatttgattaatcatttttagtagaatttgtttttctcaactaggttttaaacacca

SEQ ID NO: 4797 - DNA, 426 bp, Artificial; identical to SEQ ID NO: 4771
  Mutations within GlyA3B4 introduced by GmGlyA3B4_T03TALE nuclease

SEQ ID NO: 4798 - DNA, 488 bp, Artificial
  Mutations within GlyA3B4 introduced by GmGlyA3B4_T03TALE nuclease
gttcatgtacggttgcagacataaacgaagcatagcttatgtatgaggtgtaacaaaattggaaacaatagccatgcaaggtgaagaatgtcaccaactcagaaacccttcttcattgacgtgtccctcactcactctcctctcttcactataaatcgccactcttcgtgttctccacttcaccaactccttcaaacttattaacactttccttagttcaatatggggaagcccttcttcactctctctctttcttccctttgcttgctactcttgtcgagtgcatgctttgctattacctccagcaagttactcaccttatcccaatgatcattgtcgttcaaggtgcgtaatattagtaagaagtatttatcagcttaacgtgataacaataatagtaatatgaaatatttattaaattttttataattaatctctgctagaaaatttgattaatcatttttagtagaatttgtttttctcaacta

SEQ ID NO: 4799 - DNA, 445 bp, Artificial
  Mutations within GlyA3B4 introduced by GmGlyA3B4_T03TALE nuclease
gttcatgtacggttgcagatataaacgaagcatagcttatgtatgaggtgtaacaaaattggaaacaatagccatgcaaggtgaagaatgtcaccaactcaacaacctcaacgcgttggaacccgaccaccgcgttgagtccgaaggtggtcttattgaaacatggaactctcaacaccctgagctgcaatgcgccggtgtcactgtttccaaacgcaccctcaaccgcaacggcctccacttgccatcttactcaccttatccccaaatgatcattgtcgttcaaggtgcgtaatattagtaagaagtatttatcagcttaacgtgataacaataatagtaatatgaaatatttattaaattttttataattaatctctgctagaaaatttgattaatcatttttagtagaattttgtttttctcaactaggttttaaacacca

SEQ ID NO: 4800 - DNA, 425 bp, Artificial
  Mutations within GlyA3B4 introduced by GmGlyA3B4_T03TALE nuclease
gttcatgtacggttgcagatataaacgaagcatagcttatgtatgaggtgtaacaaaattggaaacaatagccatgcaactcaacaacctcaacgcgttggaacccgaccaccgcgttgagtccgaaggtggtcttattgaaacatggaactctcaacaccctgagctgcaatgcgccggtgtcactgtttccaaacgcaccctcaaccgcaacggcctccacttgccatcttactcaccttatcccaaatgatcattgtcgttcaaggtgcgtaatattagtaagaagtatttatcagcttaacgtgataacaataatagtaatatgaaatatttattaaattttttataattaatctctgctagaaaatttgattaatcatttttagtagaatttgtttttctcaactaggttttaaacacca

SEQ ID NO: 4801 - DNA, 534 bp, Artificial
  Mutations within GlyA3B4 introduced by GmGlyA3B4_T03TALE nuclease
gttcatgtacggttgcagatataaacgaagcatagcttatgtatgaggtgtaacaaaattggaaacaatagccatgcaaggtgaagaatgtcaccaactcagaaacccttcttcattgacgtgtccctcactcactctcctctcttcactataaatcgccactcttcgtgttctccacttcaccaactccttcaaacttattaacactttccttagttcaatatggggaagcccttcttcaactcaacaacctcaacgcgttggaacccgaccaccgcgttgagtccgaaggtggtcttattgaaacatggaactctcaacaccctgagctgcaatgcgccggtgtcactgtttccaaacgcaccctcaaccgcaacggcctccacttgccatcttactcaccttatccccaaatgatcattgtcgttcaaggtgcgtaatattagtaagaagtatttatcagcttaacgtgataacaataatagtaatatgaaatatttattaaattttttataattaatctctgctagaaaa

SEQ ID NO: 4802 - DNA, 394 bp, Artificial
  Mutations within GlyA3B4 introduced by GmGlyA3B4_T03TALE nuclease
gttcatgtacggttgcagatataaacgaagcatagcagtgccaactcaacaacctcaacgcgttggaacccgaccaccgcgttgagtccgaaggtggtcttattgaaacatggaactctcaacaccctgagctgcaatgcgccggtgtcactgtttccaaacgcaccctcaaccgcaacggcctccacttgccatcttactcaccttatccccaacatgatcattgtcgttcaaggtgcgtaatattagtaagaagtatttatcagcttaacgtgataacaataatagtaatatgaaatatttattaaattttttataattaatctctgctagaaaatttgattaatcatttttagtagaatttgtttttctcaactaggttttaaacaccaca

SEQ ID NO: 4803 - DNA, 439 bp, Artificial
  Mutations within GlyA3B4 introduced by GmGlyA3B4_T03TALE nuclease
gttcatgtacggttgcagatataaacgaagcatagcttatgtatgaggtgtaacaaaattggaaacaatagccatgcaaggtgaagaatgtcaccaactcagaaacccttcttcattgacgtgtccctcactcactctcctctcttcactataaatcgccactcttcgtgttctccacttcaccaactccttcaaacttattaacactttccttagttcaatatggggaagcccttcttcactctctctctttcttccctttgcttgctactcttgtcgagtgcatgctttgctattacctccagcaagtaagcttaacgtgataacaataatagtaatatgaaatatttattaaatttttataattaatctctgctagaaaatttgattaatcatttttagtagaattttgtttttctcaactaggttttaaacacca

SEQ ID NO: 4804 - DNA, 500 bp, Artificial
  Mutations within GlyA3B4 introduced by GmGlyA3B4_T03TALE nuclease
gttcatgtacggttgcagatataaacgaagcatagcttatgtatgaggtgtaacaaaattggaaacaatagccatgcaaggttgaagaatgtcaccaactcagaaacccttcttcattgacgtgtccctcactcactctccatctcttcactataaatcgccactcttcgtgttctccacttcaccaactccttcaaacttattaacactttccttagttcaatatggggaagcccttcttcaactcaacacctcaacgcgttggaacccgaccaccgcgttgagtccgaaggtggtcttattgaaacatggaactctcaacaccctgagctgcaatgcgccggtgtcactgtttccaaacgcaccctccaacccgcaacggcctccacttgccatcttactcaccttatccccaaatgatcattgtcgttcaaggtgcgtaatattagtaagaagtatttatcagcttaacgtgataacaataatagtaatatgaaata

SEQ ID NO: 4805 - DNA, 662 bp, Artificial
  Mutations within GlyA3B4 introduced by GmGlyA3B4_T03TALE nuclease
gttcatgtacggttgcagatataaacgaagcatagcttatgtatgaggtgtaacaaaattggaaacaatagccatgcaaggtgaagaatgtcaccaactcagaaacccttcttcattgacgtgtccctcactcactctcctctcttcactataaatcgccactcttcgtgttctccacttcaccaactccttcaaacttattaacactttccttagttcaatatggggaagcccttcttcactctctctctttcttccctttgcttgctactcttgtcgagtgcatgctttgctattacctccagcaagtgtgccaactcaacaacctcaacgcgttggaacccgaccaccgcgttgagtccgaaggtggtcttattgaaacatggaactctcaacaccctgagctgcaatgcgccggtgtcactgtttccaaacgcaccctcaaccgcaacggcctccacttgccatcttactcaccttatccccaaatgatcattgtcgttcaaggtgcgtaatattagtaagaagtatttatcagcttaacgtgataacaataatagtaatatgaaatatttattaaatttttataattaatctctgctagaaaatttgattaatcattttagtagaatttgttttctcaactaggttttaaaacacca

SEQ ID NO: 4806 - DNA, 639 bp, Artificial
  Mutations within GlyA3B4 introduced by GmGlyA3B4_T03TALE nuclease
gttcatgtacggttgcagatataaacgaagcatagcttatgtatgaggtgtaacaaaattggaaacaatagccatgcaaggtgaagaatgtcaccaactcagaaacccttcttcattgacgtgtccctcactcactctcctctcttcactataaatcgccactcttcgtgttctccacttcaccaactccttcaaacttattaacactttccttagttcaatatggggaagcccttcttcactctctctctttcttccctttgcttgctactcttgtcgagtgcatgctttgccaactcaacaacctcaacgcgttggaacccgaccaccgcgttgagtccgaaggtggtcttattgaaacatggaactctcaacaccctgagctgcaatgcgccggtgtcactgtttccaaacgcaccctcaaccgcaacggcctccacttgccatcttactcaccttatccccaaatgatcattgtcgttcaaggtgcgtaatattagtaagaagtatttatcagcttaacgtgataacaataatagtaatatgaaatatttattaaatttttataattaattctctgctagaaaatttgattaatcatttttagtagaatttgtttttctcaactaggttttaaac

SEQ ID NO: 4807 - DNA, 552 bp, Artificial
  Mutations within GlyA3B4 introduced by GmGlyA3B4_T03TALE nuclease
gttcatgtacggttgcagatataaacgaagcatagcttatgtatgaggtgtaacaaaattggaaacaatagccatgcaaggtgaagaatgtcaccaactcagaaacccttcttcattgacgtgtccctcactcactctcctctcttcactataaatcgccactcttcgtgttctccacttcaccaactccttcaaacttattaacactttccttagttcaataatggaacccgaccaccgcgttgagtccgaaggtggtcttattgaaacatggaactctcaacaccctgagctgcaatgcgccggtgtcactgtttccaaacgcaccctcaaccgcaacggcctccacttgccatcttactcaccttatccccaaatgatcattgtcgttcaaggtgcgtaatattagtaagaagtatttatcagcttaacgtgataacaataatagtaatatgaaatatttattaaattttttataattaatctctgctagaaaatttgattaatcatttttagtagaatttgtttttctcaactaggttttaaacacca

SEQ ID NO: 4808 - DNA, 461 bp, Artificial
  Mutations within GlyA3B4 introduced by GmGlyA3B4_T03TALE nuclease
gttcatgtacggttgcagatataaacgaagcatagcttatgtatgaggtgtaacaaaattggaaacaatagccatgcaaggtgaagaatgtcaccaactcagaaacccttcttcattgacgtgtccctcactcactctcctctcttcactataaatcgccactcttcgtgttctccacttcaccaactccttcaaacttattaacactttccttagttcaatatggggaagcccttcttcactctctctctttcttccctcaaccgcaacggcctccacttgccatcttactcaccttatccccaaatgatcattgtcgttcaaggtgcgtaatattagtaagaagtatttatcagcttaacgtgataacaataatagtaatatgaaatatttattaaattttttataattaatctctgctagaaaatttgattaatcatttttagtagaatttgtttttc

SEQ ID NO: 4809 - DNA, 656 bp, Artificial
  Mutations within GlyA3B4 introduced by GmGlyA3B4_T03TALE nuclease
gttcatgtacggttgcagatataaacgaagcatagcttatgtatgaggtgtaacaaaattggaaacaatagccatgcaaggtgaagaatgtcaccaactcagaaacccttcttcattgacgtgtccctcactcactctcctctcttcactataaatcgccactcttcgtgttctccacttcaccaactccttcaaacttattaacactttccttagttcaatatggggaagcccttcttcactctctctctttcttccctttgcttgctactcttgtcgagtgcatgctttgctattacctccagcaagccaactcaacaacctcaacgcgttggaacccgaccaccgcgttgagtccgaaggtggtcttattgaaacatggaactctcaacaccctgagctgcaatgcgccggtgtcactgtttccaaacgcaccctcaaccgcaacggcctccacttgccatcttactcaccttatccccaaatgatcattgtcgttcaaggtgcgtaatattagtaagaagtatttatcagcttaacgtgataacaatatagtaatatgaaatatttattaaatttttataattaatctctgctagaaaatttgattaatcattttagtagaatttgttttctcaactaggttttaaacacca

SEQ ID NO: 4810 - DNA, 665 bp, Artificial
  Mutations within GlyA3B4 introduced by GmGlyA3B4_T03TALE nuclease
gttcatgtacggttgcagatataaacgaagcatagcttatgtatgaggtgtaacaaaattggaaacaatagccatgcaaggtgaagaatgtcaccaactcagaaacccttcttcattgacgtgtccctcactcactctcctctcttcactataaatcgccactcttcgtgttctccacttcaccaactccttcaaacttattaacactttccttagttcaatatggggaagcccttcttcactctctctctttcttccctttgcttgctactcttgtcgagtgcatgctttgctattacctccagcaagttcagtgccaactcaacaacctcaacgcgttggaacccgaccaccgcgttgagtccgaaggtggtcttattgaaacatggaactctcaacaccctgagctgcaatgcgccggtgtcactgtttccaaacgcaccctcaaccgcaacggcctccacttgccatcttactcaccttatccccaaatgatcattgtcgttcaaggtgcgtaatattagtaagaagtatttatcagcttaacgtgataacaataatagtaatatgaaatatttattaaatttttataattaatctctgctagaaaatttgattaatcattttagtagaatttgttttctcaactaggttttaaaacacca

SEQ ID NO: 4811 - DNA, 646 bp, Artificial
  Mutations within GlyA3B4 introduced by GmGlyA3B4_T03TALE nuclease
gttcatgtacggttgcagatataaacgaagcatagcttatgtatgaggtgtaacaaaattggaaacaatagccatgcaaggtgaagaatgtcaccaactcagaaacccttcttcattgacgtgtccctcactcactctcctctcttcactataaatcgccactcttcgtgttctccacttcaccaactccttcaaacttattaacactttccttagttcaatatggggaagcccttcttcactctctctctttcttccctttgcttgctactcttgtcgagtgcatgctttgccaactcaacaacctcaacgcgttggaacccgaccaccgcgttgagtccgaaggtggtcttattgaaacatggaactctcaacaccctgagctgcaatgcgccggtgtcactgtttccaaacgcaccctcaaccgcaacggcctccacttgccatcttactcaccttatccccaaatgatcattgtcgttcaaggtgcgtaatattagtaagaagtatttatcagcttaacgtgataacaataatagtaatatgaaatatttattaaattttttataattaatctctgctagaaaatttgattaatcatttttagtagaatttgttttttctcaactaggttttaaacaccaca

SEQ ID NO: 4812 - DNA, 550 bp, Artificial
  Mutations within GlyA3B4 introduced by GmGlyA3B4_T03TALE nuclease
gttcatgtacggttgcagatataaacgaagcatagcttatgtatgaggtgtaacaaaattggaaacaatagccatgcaaggtgaagaatgtcaccaactcagaaacccttcttcattgacgtgtccctcactcactctcctctcttcactataaatcgccactcttcgtgttctccacttcaccaactccttcaaacttgccaactcaacaacctcaacgcgttggaaccgaccaccgcgttgagtccgaaggtggtcttattgaaacatggaactctcaacaccctgagctgcaatgcgccggtgtcactgtttccaaacgcaccctcaaccgcaacggcctccacttgccatcttactcaccttatccccaaatgatcattgtcgttcaaggtgcgtaatattagtaagaagtatttatcagcttaacgtgataacaataatagtaatatgaaatatttattaaattttttataattaatctctgctagaaaatttgattaatcatttttagtagaatttgtttttctcaactaggttttaaacacca

SEQ ID NO: 4813 - DNA, 645 bp, Artificial
  Mutations within GlyA3B4 introduced by GmGlyA3B4_T03TALE nuclease
gttcatgtacggttgcagatataaacgaagcatagcttatgtatgaggtgtaacaaaattggaaacaatagccatgcaaggtgaagaatgtcaccaactcagaaacccttcttcattgacgtgtccctcactcactctcctctcttcactataaatcgccactcttcgtgttctccacttcaccaactccttcaaacttattaacactttccttagttcaatatggggaagcccttcttcactctctctctttcttccctttgcttgctactcttgtcgagtgcatgctttgctattacctccaggagtgccaactcaacaacctcaacgcgttggaacccgaccaccgcgttgagtccgaaggtggtcttattgaacatggaactctcaacaccctgagctgcaatgcgccggtgtcactgtttccaaacgcaccctcaaccgcaacggcctccacttgccatcttactcaccttatccccaaatgatcattgtcgttcaaggtgcgtaatattagtaagaagtatttatcagcttaacgtgataacaataatagtaatatgaaatatttattaaatttttataattaatctctgctagaaaatttgattaatcattttagtagaatttgttttctcaactagg

SEQ ID NO: 4814 - DNA, 440 bp, Artificial
  Mutations within GlyA3B4 introduced by GmGlyA3B4_T03TALE nuclease
gttcatgtacggttgcagatataaacgaagcatagcttatgtatgaggtgtaacaaaattggaaacaatagccatgcaaggtgaagaatgtcaccaactcaacaacctcaacgcgttggaacccgaccaccgcgttgagtccgaaggtggtcttattgaaacatggaactctcaacaccctgagctgcaatgcgccggtgtcactgtttccaaacgcaccctcaaccgcaacggcctccacttgccatcttactcaccttatccccaaatgatcattgtcgttcaaggtgcgtaatattagtaagaagtatttatcagcttaacgtgataacaataatagtaatatgaaatatttattaaattttttataattaatctctgctagaaaatttgattaatcatttttagtagaattttgtttttctcaactaggttttaaa

SEQ ID NO: 4815 - DNA, 647 bp, Artificial
  Mutations within GlyA3B4 introduced by GmGlyA3B4_T03TALE nuclease
gttcatgtacggttgcagatataaacgaagcatagcttatgtatgaggtgtaacaaaattggaaacaatagccatgcaaggtgaagaatgtcaccaactcagaaacccttcttcattgacgtgtccctcactcactctcctctcttcactataaatcgccactcttcgtgttctccacttcaccaactccttcaaacttattaacactttccttagttcaatatggggaagcccttcttcactctctctctttcttccctttgcttgctactcttgtcgagtgcatgctttgccaactcaacaacctcaacgcgttggaacccgaccaccgcgttgagtccgaaggtggtcttattgaaacatggaactctcaacaccctgagctgcaatgcgccggtgtcactgtttccaaacgcaccctcaaccgcaacggcctccacttgccatcttactcaccttatccccaaatgatcattgtcgttcaaggtgcgtaatattagtaagaagtatttatcagcttaacgtgataacaataatagtaatatgaaatatttattaaattttttataattaatctctgctagaaaatttgattaatcatttttagtagaatttgttttttctcaactaggttttaaaacaccaca

SEQ ID NO: 4816 - DNA, 482 bp, Artificial
  Mutations within GlyA3B4 introduced by GmGlyA3B4_T03TALE nuclease
gttcatgtacggttgcagatataaacgaagcatagcttatgtatgaggtgtaacaaaattggaaacaatagccatgcaaggtgaagaatgtcaccaactcagaaacccttcttcattgacgtgtccctcactcactctcctctcttcactataaatcgccactcttcgtgttctccacttcaccaactccttcaaacttattaacactttccttagttcaatatggggaagcccttcttcactctctctctttcttccctcaaccgcaacggcctccacttgccatcttactcaccttatccccaaatgatcattgtcgttcaaggtgcgtaatattagtaagaagtatttatcagcttaacgtgataacaataatagtaatatgaaattatttattaaattttttataattaatctctgctagaaaatttgattaatcatttttagtagaatttgtttttctcaactaggttttaaacacc

SEQ ID NO: 4817 - DNA, 493 bp, Artificial
  Mutations within GlyA3B4 introduced by GmGlyA3B4_T03TALE nuclease
gttcatgtacggttgcagatataaacgaagcatagcttatgtatgaggtgtaacaaaattggaaacaatagccatgcaaggtgaagaatgtcaccaactcagaaacccttcttcattgacgtgtccctcactcactctcctctcttcactataaatcgccactcttcgtgttctccacttcaccaactccgaaggtggtcttattgaaacatggaactctcaacaccctgagctgcaatgcgccggtgtcactgtttccaaacgcaccctcaaccgcaacggcctccacttgccatcttactcaccttatccccaaatgatcattgtcgttcaaggtgcgtaatattagtaagaagtatttatcagcttaacgtgataacaataatagtaatatgaaatatttattaaattttttataattaatctctgctagaaaatttgattaatcatttttagtagaatttgtttttctcaactaggttttaaacaccac

SEQ ID NO: 4818 - DNA, 660 bp, Artificial
  Mutations within GlyA3B4 introduced by GmGlyA3B4_T03TALE nuclease
gttcatgtacggttgcagatataaacgaagcatagcttatgtatgaggtgtaacaaaattggaaacaatagccatgcaaggtgaagaatgtcaccaactcagaaacccttcttcattgacgtgtccctcactcactctcctctcttcactataaatcgccactcttcgtgttctccacttcaccaactccttcaaacttattaacactttccttagttcaatatggggaagcccttcttcactctctctctttcttccctttgcttgctactcttgtcgagtgcatgctttgctattacctccagcaagttgagtgccaactcaacaacctcaacgcgttggaacccgaccaccgcgttgagtccgaaggtggtcttattgaaacatggaactctcaacaccctgagctgcaatgcgccggtgtcactgtttccaaacgcaccctcaaccgcaacggcctccacttgccatcttactcaccttatccccaaatgatcattgtcgttcaaggtgcgtaatattagtaagaagtatttatcagcttaacgtgataacaataatagtaatatgaaatatttattaaatttttataattaatctctgctagaaaatttgattaatcattttagtagaatttgttttctcaactaggttttaaaa

SEQ ID NO: 4819 - DNA, 578 bp, Artificial
  Mutations within GlyA3B4 introduced by GmGlyA3B4_T03TALE nuclease
gttcatgtacggttgcagatataaacgaagcatagcttatgtatgaggtgtaacaaaattggaaacaatagccatgcaaggtgaagaatgtcaccaactcagaaacccttcttcattgacgtgtccctcactcactctcctctcttcactataaatcgccactcttcgtgttctccacttcaccaactccttcaaacttattaacactttccttagttcaatatggggaagcccttcttcactctctctctttcttccctttgcttgctactcttgtcgagtgcatgctttgctattacctccagcaagttcaacaccctgagctgcaatgcgccggtgtcactgtttccaaacgcaccctcaaccgcaacggcctccacttgccatcttactcaccttatccccaaatgatcattgtcgttcaaggtgcgtaatattagtaagaagtatttatcagcttaacgtgataacaataatagtaatatgaaatatttattaaattttttataattaatctctgctagaaatttgattaatcattttagtagaatttgtttttctcaactaggttttaaaca

SEQ ID NO: 4820 - DNA, 468 bp, Artificial
  Mutations within GlyA3B4 introduced by GmGlyA3B4_T03TALE nuclease
gttcatgtacggttgcagatataaacgaagcatagcttatgtatgaggtgtaacaaaattggaaacaatagccatgcaaggtgaagaatgtcaccaactcagaaacccttcttcattgacgtgtccctcactcactctcctctcttcactataaatcgccactcttcgtgttctccacttcaccaactccttcaaacttattaacactttccttagttcaatatggggaagcccttcttcactctctctctttcttccctttgcttgctactcttgtcgagtgcatgctttgctattacctccagcaagtcgtgcgtaatattagtaagaagtatttatcagcttaacgtgataacaataatagtaatatgaaatatttattaattttttataattaatctctgctagaaatttgattaatcatttttagtagaatttgtttttctcaacttaggtttttaaacacca

(The sequence listing continues in the following parts.)

1. A plant, plant part, or plant cell comprising a mutation in at least one seed storage protein gene that is endogenous to the plant, plant part, or plant cell, wherein the plant, plant part, or plant cell has altered amino acid content as compared to a control plant, plant part or plant cell that lacks the mutation, wherein the mutation was introduced using a rare-cutting endonuclease, and wherein the mutation is a deletion of one or more base pairs.

2. (canceled)

3. The plant, plant part, or plant cell of claim 2, wherein the rare-cutting endonuclease is a transcription activator-like effector (TALE) nuclease, meganuclease, zinc finger nuclease (ZFN), or clustered regularly interspaced short palindromic repeat (CRISPR)/Cas reagent.

4. The plant, plant part, or plant cell of claim 1, wherein the at least one seed storage protein gene is selected from the group consisting of a glycinin gene, a beta-conglycinin gene, a glutenin gene, a gliadin gene, a zein gene, a hordein gene, a secalin gene, and a prolamine gene.

5-8. (canceled)

9. The plant, plant part or plant cell of claim 1, wherein the at least one seed storage protein gene comprises a Gy4 gene, a Gy5 gene, or a beta-conglycinin gene.

10. (canceled)

11. The plant, plant part, or plant cell of claim 9, wherein the altered amino acid content comprises an increase in methionine or cysteine content as compared to a corresponding control plant, plant part, or plant cell that lacks the mutation.

12. The plant, plant part or plant cell of claim 1, wherein the at least one seed storage protein gene comprises an alpha-gliadin gene, an omega-gliadin gene, or a gamma-gliadin gene.

13. (canceled)

14. The plant, plant part, or plant cell of claim 12, wherein the altered amino acid content comprises an increase in lysine content as compared to a corresponding control plant, plant part, or plant cell that lacks the mutation.

15. A method for making a plant having altered amino acid content, comprising:
(a) contacting plant cells or plant parts comprising functional seed storage protein genes with a rare-cutting endonuclease targeted to a sequence within one or more of the functional seed storage protein genes, or to a sequence flanking the functional seed storage protein genes;
(b) growing the contacted plant cells or plant parts into plants; and
(c) selecting, from the plants, a plant with a mutation in at least one seed storage protein gene, wherein the mutation is a deletion of one or more base pairs.

16. The method of claim 15, wherein the rare-cutting endonuclease is a TALE nuclease, meganuclease, ZFN, or CRISPR/Cas reagent.

17. The method of claim 15, wherein the at least one seed storage protein gene is selected from the group consisting of a glycinin gene, a beta-conglycinin gene, a glutenin gene, a gliadin gene, a zein gene, a hordein gene, a secalin gene, and a prolamine gene.

18-21. (canceled)

22. The method of claim 15, wherein the at least one seed storage protein gene comprises a Gy4 gene, a Gy5 gene, or a beta-conglycinin gene.

23. (canceled)

24. The method of claim 22, wherein the altered amino acid content comprises an increase in methionine or cysteine content as compared to a corresponding control plant that lacks the mutation.

25. The method of claim 15, wherein the at least one seed storage protein gene comprises an alpha-gliadin gene, an omega-gliadin gene, or a gamma-gliadin gene.

26. (canceled)

27. The method of claim 25, wherein the altered amino acid content comprises an increase in lysine content as compared to a corresponding control plant, plant part, or plant cell that lacks the mutation.

28. A method for mutagenizing a cell, comprising:
(a) treating the cell with an agent that reduces DNA methylation or interferes with histone deacetylase activity; and
(b) contacting the cell with a rare-cutting endonuclease.

29. The method of claim 28, wherein the cell is a plant cell.

30. The method of claim 28, wherein the chemical is 5-azacytidine or trichostatin A.

31. The method of claim 28, wherein the rare-cutting endonuclease is a TALE nuclease, meganuclease, ZFN, or CRISPR/Cas reagent.
